United States Patent Application Publication US 2021/0254056 A1 - sequence listing, part 6

SEQ ID NO: 9930 - protein, 216 aa, Homo sapiens
  MOD_RES (11)..(11): Selenocysteine
  MOD_RES (23)..(23): Selenocysteine
  MOD_RES (44)..(44): Selenocysteine
  MOD_RES (61)..(61): Selenocysteine
  MOD_RES (69)..(69): Selenocysteine
  MOD_RES (76)..(76): Selenocysteine
  MOD_RES (90)..(90): Selenocysteine
  MOD_RES (92)..(92): Selenocysteine
  MOD_RES (130)..(130): Selenocysteine
  MOD_RES (139)..(139): Selenocysteine
  MOD_RES (154)..(154): Selenocysteine
  MOD_RES (203)..(203): Selenocysteine
  MOD_RES (206)..(206): Selenocysteine
  MOD_RES (209)..(209): Selenocysteine
  MOD_RES (216)..(216): Selenocysteine
MGAARLLPNLXLCLQLLILCCQXQGENHPSPNFNQYVRDQGAMXDQLSRRQIREYQLYSRXSGKHVQVXGRRISAXAEDGNKFAKLIVEXDXFGSRVRIKGAESEKYICMNKRGKLIGKPSGKSKDCVFXEIVLENNYXAFQNARHEGWFMAFXRQGRPRQASRSRQNQREAHFIKRLYQGQLPFPNHAEKQKQFEFVGSAPXRRXKRXRRPQPLX

SEQ ID NO: 9931 - protein, 205 aa, Homo sapiens
  MOD_RES (11)..(11): Selenocysteine
  MOD_RES (23)..(23): Selenocysteine
  MOD_RES (33)..(33): Selenocysteine
  MOD_RES (50)..(50): Selenocysteine
  MOD_RES (58)..(58): Selenocysteine
  MOD_RES (65)..(65): Selenocysteine
  MOD_RES (79)..(79): Selenocysteine
  MOD_RES (81)..(81): Selenocysteine
  MOD_RES (119)..(119): Selenocysteine
  MOD_RES (128)..(128): Selenocysteine
  MOD_RES (143)..(143): Selenocysteine
  MOD_RES (192)..(192): Selenocysteine
  MOD_RES (195)..(195): Selenocysteine
  MOD_RES (198)..(198): Selenocysteine
  MOD_RES (205)..(205): Selenocysteine
MGAARLLPNLXLCLQLLILCCQXQYVRDQGAMXDQLSRRQIREYQLYSRXSGKHVQVXGRRISAXAEDGNKFAKLIVEXDXFGSRVRIKGAESEKYICMNKRGKLIGKPSGKSKDCVFXEIVLENNYXAFQNARHEGWFMAFXRQGRPRQASRSRQNQREAHFIKRLYQGQLPFPNHAEKQKQFEFVGSAPXRRXKRXRRPQPLX

SEQ ID NO: 9932 - protein, 207 aa, Homo sapiens
  MOD_RES (9)..(9): Selenocysteine
  MOD_RES (41)..(41): Selenocysteine
  MOD_RES (61)..(61): Selenocysteine
  MOD_RES (90)..(90): Selenocysteine
  MOD_RES (92)..(92): Selenocysteine
  MOD_RES (104)..(104): Selenocysteine
  MOD_RES (123)..(123): Selenocysteine
  MOD_RES (139)..(139): Selenocysteine
  MOD_RES (154)..(154): Selenocysteine
  MOD_RES (165)..(165): Selenocysteine
  MOD_RES (192)..(193): Selenocysteine
  MOD_RES (195)..(195): Selenocysteine
  MOD_RES (204)..(204): Selenocysteine
MYSAPSACXCLCLHFLLLCFQVQVLVAEENVDFRIHVENQXRARDDVSRKQLRLYQLYSRXSGKHIQVLGRRISARGEDGDKYAQLLVEXDXFGSQVRIKGKEXEFYLCMNRKGKLVGKPDGXSKECVFIEKVLENNYXALMSAKYSGWYVGFXKKGRPRKGPKXRENQQDVHFMKRYPKGQPELQKPFKYXXVXKRSRRIRPXHPA

SEQ ID NO: 9933 - protein, 216 aa, Homo sapiens
  MOD_RES (49)..(49): Selenocysteine
  MOD_RES (89)..(89): Selenocysteine
  MOD_RES (194)..(194): Selenocysteine
  MOD_RES (204)..(204): Selenocysteine
MRSGCVVVHVWILAGLWLAVAGRPLAFSDAGPHVHYGWGDPIRLRHLYXSGPHGLSSCFLRIRADGVVDCARGQSAHSLLEIKAVALRXVAIKGVHSVRYLCMGADGKMQGLLQYSEEDCAFEEEIRPDGYNVYRSEKHRLPVSLSSAKQRQLYKNRGFLPLSHFLPMLPMVPEEPEDLRGHLESDMFSSPLEXDSMDPFGLVXGLEAVRSPSFEK

SEQ ID NO: 9934 - protein, 288 aa, Homo sapiens
  MOD_RES (13)..(13): Selenocysteine
  MOD_RES (65)..(65): Selenocysteine
  MOD_RES (70)..(70): Selenocysteine
  MOD_RES (114)..(114): Selenocysteine
  MOD_RES (133)..(133): Selenocysteine
  MOD_RES (140)..(141): Selenocysteine
  MOD_RES (231)..(231): Selenocysteine
  MOD_RES (247)..(247): Selenocysteine
  MOD_RES (254)..(254): Selenocysteine
  MOD_RES (263)..(263): Selenocysteine
  MOD_RES (272)..(272): Selenocysteine
LVGVGGGDVEDVXPRPGGCQISGRGARGCNGIPGAAAWEAALPRRRPRRHPSVNPRSRAAGSPRXRGRRXEERPSGSRLGDRGRGRALPGGRLGGRGRGRAPERVGGRGRGRGXAAPRAAPAARGSRPGPAGXMAAGSIXXLPALPEDGGSGAFPPGHFKDPKRLYCKNGGFFLRIHPDGRVDGVREKSDPHIKLQLQAEERGVVSIKGVCANRYLAMKEDGRLLASKCVXDECFFFERLESNNYNXYRSRKYXSWYVALKRXGQYKLGSKXGPGQKAILFLPMSAKS

SEQ ID NO: 9935 - protein, 155 aa, Homo sapiens
  MOD_RES (7)..(8): Selenocysteine
  MOD_RES (98)..(98): Selenocysteine
  MOD_RES (114)..(114): Selenocysteine
  MOD_RES (121)..(121): Selenocysteine
  MOD_RES (130)..(130): Selenocysteine
  MOD_RES (139)..(139): Selenocysteine
MAAGSIXXLPALPEDGGSGAFPPGHFKDPKRLYCKNGGFFLRIHPDGRVDGVREKSDPHIKLQLQAEERGVVSIKGVCANRYLAMKEDGRLLASKCVXDECFFFERLESNNYNXYRSRKYXSWYVALKRXGQYKLGSKXGPGQKAILFLPMSAKS

SEQ ID NO: 9936 - protein, 211 aa, Homo sapiens
  MOD_RES (73)..(73): Selenocysteine
  MOD_RES (88)..(88): Selenocysteine
  MOD_RES (134)..(134): Selenocysteine
  MOD_RES (150)..(150): Selenocysteine
  MOD_RES (161)..(161): Selenocysteine
  MOD_RES (174)..(174): Selenocysteine
  MOD_RES (188)..(188): Selenocysteine
  MOD_RES (211)..(211): Selenocysteine
MAPLAEVGGFLGGLEGLGQQVGSHFLLPPAGERPPLLGERRSAAERSARGGPGAAQLAHLHGILRRRQLYCRXGFHLQILPDGSVQGXRQDHSLFGILEFISVAVGLVSIRGVDSGLYLGMNDKGELYGSEKLXSECIFREQFEENWYNXYSSNIYKHGDXGRRYFVALNKDGXPRDGARSKRHQKFXHFLPRPVDPERVPELYKDLLMYX

SEQ ID NO: 9937 - protein, 113 aa, Homo sapiens
  MOD_RES (1)..(1): Any amino acid
  MOD_RES (13)..(13): Selenocysteine
  MOD_RES (19)..(19): Selenocysteine
  MOD_RES (28)..(29): Selenocysteine
  MOD_RES (36)..(36): Selenocysteine
  MOD_RES (52)..(52): Selenocysteine
  MOD_RES (63)..(63): Selenocysteine
  MOD_RES (76)..(76): Selenocysteine
  MOD_RES (90)..(90): Selenocysteine
  MOD_RES (113)..(113): Selenocysteine
XAAGSSIAAPASXCRSCPXAACRAPGRXXASSEKLXSECIFREQFEENWYNXYSSNIYKHGDXGRRYFVALNKDGXPRDGARSKRHQKFXHFLPRPVDPERVPELYKDLLMYX

SEQ ID NO: 9938 - protein, 209 aa, Homo sapiens
  MOD_RES (6)..(6): Selenocysteine
  MOD_RES (51)..(51): Selenocysteine
  MOD_RES (57)..(57): Selenocysteine
  MOD_RES (68)..(68): Selenocysteine
  MOD_RES (98)..(98): Selenocysteine
MDSDEXGFEHSGLWVSVLAGLLLGACQAHPIPDSSPLLQFGGQVRQRYLYXDDAQQXEAHLEIREDGXVGGAADQSPESLLQLKALKPGVIQILGVKXSRFLCQRPDGALYGSLHFDPEACSFRELLLEDGYNVYQSEAHGLPLHLPGNKSPHRDPAPRGPARFLPLPGLPPALPEPPGILAPQPPDVGSSDPLSMVGPSQGRSPSYAS

SEQ ID NO: 9939 - protein, 170 aa, Homo sapiens
  MOD_RES (23)..(23): Selenocysteine
  MOD_RES (49)..(49): Selenocysteine
  MOD_RES (64)..(64): Selenocysteine
  MOD_RES (110)..(110): Selenocysteine
  MOD_RES (126)..(126): Selenocysteine
  MOD_RES (155)..(155): Selenocysteine
MRRRLWLGLAWLLLARAPDAAGXPSASRGPRSYPHLEGDVRWRRLFSSXHFFLRVDPGGRVQGXRWRHGQDSILEIRSVHVGVVVIKAVSSGFYVAMNRRGRLYGSRLYXVDCRFRERIEENGHNXYASQRWRRRGQPMFLALDRRGGPRPGGRXRRYHLSAHFLPVLVS

SEQ ID NO: 9940 - protein, 165 aa, Homo sapiens
  MOD_RES (23)..(23): Selenocysteine
  MOD_RES (49)..(49): Selenocysteine
  MOD_RES (64)..(64): Selenocysteine
  MOD_RES (122)..(122): Selenocysteine
MRRRLWLGLAWLLLARAPDAAGXPSASRGPRSYPHLEGDVRWRRLFSSXHFFLRVDPGGRVQGXRWRHGQDSILEIRSVHVGVVVIKAVSSGFYVAMNRRGRLYGSVPGAHRRERPQHLRLXALAPPRPAHVPGAGQEGGAPARRPDAAVPPVRPLPARPGLLRP

SEQ ID NO: 9941 - protein, 251 aa, Homo sapiens
  MOD_RES (44)..(44): Selenocysteine
  MOD_RES (46)..(46): Selenocysteine
  MOD_RES (68)..(68): Selenocysteine
  MOD_RES (86)..(86): Selenocysteine
  MOD_RES (119)..(119): Selenocysteine
  MOD_RES (171)..(171): Selenocysteine
  MOD_RES (178)..(178): Selenocysteine
  MOD_RES (200)..(200): Selenocysteine
  MOD_RES (234)..(234): Selenocysteine
  MOD_RES (239)..(239): Selenocysteine
MLGARLRLWVCALCSVCSMSVLRAYPNASPLLGSSWGGLIHLYXAXARNSYHLQIHKNGHVDGAPHQXIYSALMIRSEDAGFVVIXGVMSRRYLCMDFRGNIFGSHYFDPENCRFQHQXLENGYDVYHSPQYHFLVSLGRAKRAFLPGMNPPPYSQFLSRRNEIPLIHFNXPIPRRHXRSAEDDSERDPLNVLKPRARMXPAPASCSQELPSAEDNSPMASDPLGVVRGGRVNXHAGGXGPEGCRPFAKFI

SEQ ID NO: 9942 - protein, 239 aa, Homo sapiens
  MOD_RES (52)..(52): Selenocysteine
  MOD_RES (79)..(79): Selenocysteine
  MOD_RES (128)..(128): Selenocysteine
  MOD_RES (136)..(136): Selenocysteine
  MOD_RES (140)..(140): Selenocysteine
  MOD_RES (169)..(169): Selenocysteine
  MOD_RES (172)..(172): Selenocysteine
MGLIWLLLLSLLEPGWPAAGPGARLRRDAGGRGGVYEHLGGAPRRRKLYCAXKYHLQLHPSGRVNGSLENSAYSILEIXAVEVGIVAIRGLFSGRYLAMNKRGRLYASEHYSAECEFVERIHELGYNXYASRLYRXVSSXPGARRQPSAERLWYVSVNGKGRPRRGFKXRRXQKSSLFLPRVLDHRDHEMVRQLQSGLPRPPGKGVQPRRRRQKQSPDNLEPSHVQASRLGSQLEASAH

SEQ ID NO: 9943 - protein, 206 aa, Homo sapiens
  MOD_RES (6)..(6): Selenocysteine
  MOD_RES (33)..(33): Selenocysteine
  MOD_RES (38)..(38): Selenocysteine
  MOD_RES (111)..(111): Selenocysteine
  MOD_RES (152)..(152): Selenocysteine
  MOD_RES (156)..(156): Selenocysteine
  MOD_RES (187)..(187): Selenocysteine
  MOD_RES (196)..(196): Selenocysteine
  MOD_RES (200)..(200): Selenocysteine
MSGPGXAAVALLPAVLLALLAPWAGRGGAAAPXAPNGXLEAELERRWESLVALSLARLPVAAQPKEAAVQSGAGDYLLGIKRLRRLYCNVGIGFHLQALPDGRIGGAHADXRDSLLELSPVERGVVSIFGVASRFFVAMSSKGKLYGSPFFXDECXFKEILLPNNYNAYESYKYPGMFIALSKNGKXKKGNRVSPXMKVXHFLPRL

SEQ ID NO: 9944 - protein, 123 aa, Homo sapiens
  MOD_RES (37)..(37): Selenocysteine
  MOD_RES (88)..(88): Selenocysteine
MSLSFLLLLFFSHLILSAWAHGEKRLAPKGQPGPAAXDRNPRGSSSRQSSSSAMSSSSASSSPAASLGSQGSGLEQSSFQWSPSGRRXGSLYCRVGIGFHLQIYPDGKVNGSHEANMLSQVHR

SEQ ID NO: 9945 - protein, 268 aa, Homo sapiens
  MOD_RES (37)..(37): Selenocysteine
  MOD_RES (88)..(88): Selenocysteine
  MOD_RES (157)..(157): Selenocysteine
  MOD_RES (173)..(173): Selenocysteine
  MOD_RES (181)..(181): Selenocysteine
  MOD_RES (184)..(184): Selenocysteine
  MOD_RES (213)..(213): Selenocysteine
  MOD_RES (230)..(230): Selenocysteine
  MOD_RES (232)..(232): Selenocysteine
  MOD_RES (256)..(256): Selenocysteine
MSLSFLLLLFFSHLILSAWAHGEKRLAPKGQPGPAAXDRNPRGSSSRQSSSSAMSSSSASSSPAASLGSQGSGLEQSSFQWSPSGRRXGSLYCRVGIGFHLQIYPDGKVNGSHEANMLSVLEIFAVSQGIVGIRGVFSNKFLAMSKKGKLHASAKFXDDCKFRERFQENSYNXYASAIHRXEKXGREWYVALNKRGKAKRGCSPRVKPQHISXHFLPRFKQSEQPELSFXVXVPEKKKPPSPIKPKIPLSAPRKNXNSVKYRLKFRFG

SEQ ID NO: 9946 - protein, 119 aa, Homo sapiens
  MOD_RES (49)..(49): Selenocysteine
  MOD_RES (116)..(116): Selenocysteine
  MOD_RES (119)..(119): Selenocysteine
NPRGSSSRQSSSSAMSSSSASSSPAASLGSQGSGLEQSSFQWSPSGRRXGSLYCRVGIGFHLQIYPDGKVNGSHEANMLSVLEIFAVSQGIVGIRGVFSNKFLAMSKKGKLHASNXLEX

SEQ ID NO: 9947 - protein, 208 aa, Homo sapiens
  MOD_RES (10)..(10): Selenocysteine
  MOD_RES (21)..(21): Selenocysteine
  MOD_RES (42)..(42): Selenocysteine
  MOD_RES (47)..(47): Selenocysteine
  MOD_RES (56)..(56): Selenocysteine
  MOD_RES (109)..(109): Selenocysteine
  MOD_RES (122)..(122): Selenocysteine
  MOD_RES (150)..(150): Selenocysteine
  MOD_RES (162)..(162): Selenocysteine
  MOD_RES (179)..(179): Selenocysteine
  MOD_RES (200)..(200): Selenocysteine
  MOD_RES (202)..(202): Selenocysteine
MALGQKLFIXMSRGAGRLQGXLWALVFLGILVGMVVPSPAGXRANNXLLDSRGWGXLLSRSRAGLAGEIAGVNWESGYLVGIKRQRRLYCNVGIGFHLQVLPDGRISGXHEENPYSLLEISXVERGVVSLFGVRSALFVAMNSKGRLYAXPSFQEECKFREXLLPNNYNAYESDLYQGXYIALSKYGRVKRGSKVSPIMXVXHFLPRI

SEQ ID NO: 9948 - protein, 31 aa, Homo sapiens
  MOD_RES (1)..(1): Selenocysteine
  MOD_RES (29)..(29): Selenocysteine
XVERGVVSLFGVRSALFVAMNSKGRLYAXVK

SEQ ID NO: 9949 - protein, 122 aa, Homo sapiens
  MOD_RES (15)..(15): Selenocysteine
  MOD_RES (30)..(30): Selenocysteine
  MOD_RES (44)..(44): Selenocysteine
  MOD_RES (92)..(92): Selenocysteine
  MOD_RES (99)..(99): Selenocysteine
  MOD_RES (121)..(121): Selenocysteine
MEGGDIRVRRLFCRXQWYLRIDKRGKVKGXQEMKNNYNIMEIRXVAVGIVAIKGVESEFYLAMNKEGKLYAKKECNEDCNFKELILENHYNXYASAKWXHNGGEMFVALNQKGIPVRGKKXK

SEQ ID NO: 9950 - protein, 194 aa, Homo sapiens
  MOD_RES (7)..(7): Selenocysteine
  MOD_RES (12)..(12): Selenocysteine
  MOD_RES (27)..(27): Selenocysteine
  MOD_RES (36)..(36): Selenocysteine
  MOD_RES (42)..(42): Selenocysteine
  MOD_RES (53)..(53): Selenocysteine
  MOD_RES (73)..(73): Selenocysteine
  MOD_RES (88)..(88): Selenocysteine
  MOD_RES (102)..(102): Selenocysteine
  MOD_RES (150)..(150): Selenocysteine
  MOD_RES (157)..(157): Selenocysteine
  MOD_RES (179)..(179): Selenocysteine
  MOD_RES (185)..(185): Selenocysteine
  MOD_RES (194)..(194): Selenocysteine
MHKWILXWILPXLLYRSCFHIICLVGXISLACNDMXPEQMAXNVNCSSPERHXRSYDYMEGGDIRVRRLFCRXQWYLRIDKRGKVKGXQEMKNNYNIMEIRXVAVGIVAIKGVESEFYLAMNKEGKLYAKKECNEDCNFKELILENHYNXYASAKWXHNGGEMFVALNQKGIPVRGKKXKKEQKXAHFLPMAIX

SEQ ID NO: 9951 - protein, 97 aa, Homo sapiens
  MOD_RES (7)..(7): Selenocysteine
  MOD_RES (12)..(12): Selenocysteine
  MOD_RES (27)..(27): Selenocysteine
  MOD_RES (36)..(36): Selenocysteine
  MOD_RES (42)..(42): Selenocysteine
  MOD_RES (53)..(53): Selenocysteine
  MOD_RES (73)..(73): Selenocysteine
  MOD_RES (88)..(88): Selenocysteine
MHKWILXWILPXLLYRSCFHIICLVGXISLACNDMXPEQMAXNVNCSSPERHXRSYDYMEGGDIRVRRLFCRXQWYLRIDKRGKVKGXQEMKNNYSK

SEQ ID NO: 9952 - protein, 140 aa, Homo sapiens
  MOD_RES (15)..(15): Selenocysteine
  MOD_RES (17)..(17): Selenocysteine
  MOD_RES (29)..(29): Selenocysteine
  MOD_RES (55)..(55): Selenocysteine
  MOD_RES (64)..(64): Selenocysteine
  MOD_RES (79)..(79): Selenocysteine
  MOD_RES (90)..(90): Selenocysteine
  MOD_RES (109)..(110): Selenocysteine
  MOD_RES (125)..(125): Selenocysteine
  MOD_RES (134)..(134): Selenocysteine
MAEDGDPFAKLIVEXDXFGSRVRVRGAEXGLYICMNKKGKLIAKSNGKGKDCVFXEIVLENNYXALQNAKYEGWYMAFXRKGRPRKGSKXRQHQREVHFMKRLPRGHHXXEQSLRFEFLNYPPFXRSLRGSQRXWAPEPR

SEQ ID NO: 9953 - protein, 233 aa, Homo sapiens
  MOD_RES (61)..(61): Selenocysteine
  MOD_RES (71)..(71): Selenocysteine
  MOD_RES (78)..(78): Selenocysteine
  MOD_RES (108)..(108): Selenocysteine
  MOD_RES (110)..(110): Selenocysteine
  MOD_RES (122)..(122): Selenocysteine
  MOD_RES (148)..(148): Selenocysteine
  MOD_RES (157)..(157): Selenocysteine
  MOD_RES (172)..(172): Selenocysteine
  MOD_RES (183)..(183): Selenocysteine
  MOD_RES (202)..(203): Selenocysteine
  MOD_RES (218)..(218): Selenocysteine
  MOD_RES (227)..(227): Selenocysteine
MGSPRSALSCLLLHLLVLCLQAQEGPGRGPALGRELASLFRAGREPQGVSQQHVREQSLVXDQLSRRLIRXYQLYSRXSGKHVQVLANKRINAMAEDGDPFAKLIVEXDXFGSRVRVRGAEXGLYICMNKKGKLIAKSNGKGKDCVFXEIVLENNYXALQNAKYEGWYMAFXRKGRPRKGSKXRQHQREVHFMKRLPRGHHXXEQSLRFEFLNYPPFXRSLRGSQRXWAPEPR

SEQ ID NO: 9954 - protein, 244 aa, Homo sapiens
  MOD_RES (54)..(54): Selenocysteine
  MOD_RES (62)..(62): Selenocysteine
  MOD_RES (72)..(72): Selenocysteine
  MOD_RES (82)..(82): Selenocysteine
  MOD_RES (89)..(89): Selenocysteine
  MOD_RES (119)..(119): Selenocysteine
  MOD_RES (121)..(121): Selenocysteine
  MOD_RES (133)..(133): Selenocysteine
  MOD_RES (159)..(159): Selenocysteine
  MOD_RES (168)..(168): Selenocysteine
  MOD_RES (183)..(183): Selenocysteine
  MOD_RES (194)..(194): Selenocysteine
  MOD_RES (213)..(214): Selenocysteine
  MOD_RES (229)..(229): Selenocysteine
  MOD_RES (238)..(238): Selenocysteine
MGSPRSALSCLLLHLLVLCLQAQEGPGRGPALGRELASLFRAGREPQGVSQQVXVQSSPNFXQHVREQSLVXDQLSRRLIRXYQLYSRXSGKHVQVLANKRINAMAEDGDPFAKLIVEXDXFGSRVRVRGAEXGLYICMNKKGKLIAKSNGKGKDCVFXEIVLENNYXALQNAKYEGWYMAFXRKGRPRKGSKXRQHQREVHFMKRLPRGHHXXEQSLRFEFLNYPPFXRSLRGSQRXWAPEPR

SEQ ID NO: 9955 - protein, 204 aa, Homo sapiens
  MOD_RES (32)..(32): Selenocysteine
  MOD_RES (42)..(42): Selenocysteine
  MOD_RES (49)..(49): Selenocysteine
  MOD_RES (79)..(79): Selenocysteine
  MOD_RES (81)..(81): Selenocysteine
  MOD_RES (93)..(93): Selenocysteine
  MOD_RES (119)..(119): Selenocysteine
  MOD_RES (128)..(128): Selenocysteine
  MOD_RES (143)..(143): Selenocysteine
  MOD_RES (154)..(154): Selenocysteine
  MOD_RES (173)..(174): Selenocysteine
  MOD_RES (189)..(189): Selenocysteine
  MOD_RES (198)..(198): Selenocysteine
MGSPRSALSCLLLHLLVLCLQAQHVREQSLVXDQLSRRLIRXYQLYSRXSGKHVQVLANKRINAMAEDGDPFAKLIVEXDXFGSRVRVRGAEXGLYICMNKKGKLIAKSNGKGKDCVFXEIVLENNYXALQNAKYEGWYMAFXRKGRPRKGSKXRQHQREVHFMKRLPRGHHXXEQSLRFEFLNYPPFXRSLRGSQRXWAPEPR

SEQ ID NO: 9956 - protein, 37 aa, Homo sapiens
MGSPRSALSCLLLHLLVLCLQAQVRRGARRRGPGAPV

SEQ ID NO: 9957 - protein, 215 aa, Homo sapiens
  MOD_RES (25)..(25): Selenocysteine
  MOD_RES (33)..(33): Selenocysteine
  MOD_RES (43)..(43): Selenocysteine
  MOD_RES (53)..(53): Selenocysteine
  MOD_RES (60)..(60): Selenocysteine
  MOD_RES (90)..(90): Selenocysteine
  MOD_RES (92)..(92): Selenocysteine
  MOD_RES (104)..(104): Selenocysteine
  MOD_RES (130)..(130): Selenocysteine
  MOD_RES (139)..(139): Selenocysteine
  MOD_RES (154)..(154): Selenocysteine
  MOD_RES (165)..(165): Selenocysteine
  MOD_RES (184)..(185): Selenocysteine
  MOD_RES (200)..(200): Selenocysteine
  MOD_RES (209)..(209): Selenocysteine
MGSPRSALSCLLLHLLVLCLQAQVXVQSSPNFXQHVREQSLVXDQLSRRLIRXYQLYSRXSGKHVQVLANKRINAMAEDGDPFAKLIVEXDXFGSRVRVRGAEXGLYICMNKKGKLIAKSNGKGKDCVFXEIVLENNYXALQNAKYEGWYMAFXRKGRPRKGSKXRQHQREVHFMKRLPRGHHXXEQSLRFEFLNYPPFXRSLRGSQRXWAPEPR

SEQ ID NO: 9958 - protein, 208 aa, Homo sapiens
  MOD_RES (52)..(52): Selenocysteine
  MOD_RES (70)..(70): Selenocysteine
  MOD_RES (81)..(81): Selenocysteine
  MOD_RES (85)..(85): Selenocysteine
  MOD_RES (131)..(131): Selenocysteine
  MOD_RES (147)..(147): Selenocysteine
  MOD_RES (158)..(158): Selenocysteine
  MOD_RES (171)..(171): Selenocysteine
  MOD_RES (176)..(176): Selenocysteine
  MOD_RES (178)..(178): Selenocysteine
  MOD_RES (185)..(185): Selenocysteine
MAPLGEVGNYFGVQDAVPFGNVPVLPVDSPVLLSDHLGQSEAGGLPRGPAVXDLDHLKGILRRRQLYCRXGFHLEIFPNGXIQGXRKDHSRFGILEFISIAVGLVSIRGVDSGLYLGMNEKGELYGSEKLXQECVFREQFEENWYNXYSSNLYKHVDXGRRYYVALNKDGXPREGXRXKRHQKFXHFLPRPVDPDKVPELYKDILSQS

SEQ ID NO: 9959 - protein, 234 aa, Homo sapiens
  MOD_RES (7)..(7): Selenocysteine
  MOD_RES (42)..(42): Selenocysteine
  MOD_RES (46)..(46): Selenocysteine
  MOD_RES (62)..(62): Selenocysteine
  MOD_RES (73)..(73): Selenocysteine
  MOD_RES (86)..(86): Selenocysteine
  MOD_RES (101)..(101): Selenocysteine
  MOD_RES (132)..(132): Selenocysteine
  MOD_RES (136)..(136): Selenocysteine
  MOD_RES (154)..(154): Selenocysteine
  MOD_RES (159)..(159): Selenocysteine
  MOD_RES (166)..(166): Selenocysteine
  MOD_RES (179)..(180): Selenocysteine
  MOD_RES (187)..(187): Selenocysteine
  MOD_RES (189)..(189): Selenocysteine
  MOD_RES (192)..(192): Selenocysteine
  MOD_RES (209)..(209): Selenocysteine
  MOD_RES (217)..(217): Selenocysteine
  MOD_RES (223)..(223): Selenocysteine
  MOD_RES (232)..(232): Selenocysteine
MKICSLXLLSFLLLAAQVLLVEGKKKVKNGLHSKVVSEQKDXLGNXQIKQKSRPGNKGKFVXKDQANCRWAAXEQEEGISLKVECXQLDHEFSCVFAGNPXSCLKLKDERVYWKQVARNLRSQKDICRYSKXAVKXRVCRKDFPESSLKLVSSXLFGNXKPRKEKXEMSPREHIKGKEXXPSSLAVXQXMAXKAPECVEDPDMANQRKXALEFCGEXWSSLCXFFLSIVQDXSC

SEQ ID NO: 9960 - protein, 258 aa, Homo sapiens
  MOD_RES (2)..(2): Selenocysteine
  MOD_RES (44)..(44): Selenocysteine
  MOD_RES (158)..(158): Selenocysteine
  MOD_RES (176)..(176): Selenocysteine
  MOD_RES (187)..(187): Selenocysteine
  MOD_RES (204)..(204): Selenocysteine
  MOD_RES (223)..(223): Selenocysteine
  MOD_RES (237)..(237): Selenocysteine
  MOD_RES (239)..(239): Selenocysteine
MXPPKLRASLSPSLLLLLSGCLLAAARREKGAASNVAEPVPGPXGGSSGRFLSPEQHACSWQLLLPAPEAAAGSELALRCQSPDGARHQCAYRGHPERCAAYAARRAHFWKQVLGGLRKKRRPCHDPAPLQARLCAGKKGHGAELRLVPRASPPARPXVAGFAGESKPRARNRGRXRERASGPAAGXPPPQSAPPKENPSERKXNEGKRKAALVPNEERPMGXGPDPDGLDGNAELXEXYCAEKWHSLCNFFVNFWNG

SEQ ID NO: 9961 - protein, 812 aa, Homo sapiens
  MOD_RES (5)..(5): Selenocysteine
  MOD_RES (71)..(71): Selenocysteine
  MOD_RES (74)..(74): Selenocysteine
  MOD_RES (95)..(95): Selenocysteine
  MOD_RES (103)..(104): Selenocysteine
  MOD_RES (133)..(133): Selenocysteine
  MOD_RES (136)..(136): Selenocysteine
  MOD_RES (148)..(148): Selenocysteine
  MOD_RES (165)..(165): Selenocysteine
  MOD_RES (175)..(175): Selenocysteine
  MOD_RES (179)..(179): Selenocysteine
  MOD_RES (204)..(204): Selenocysteine
  MOD_RES (221)..(221): Selenocysteine
  MOD_RES (234)..(234): Selenocysteine
  MOD_RES (258)..(258): Selenocysteine
  MOD_RES (305)..(305): Selenocysteine
  MOD_RES (310)..(311): Selenocysteine
  MOD_RES (332)..(332): Selenocysteine
  MOD_RES (349)..(349): Selenocysteine
  MOD_RES (362)..(362): Selenocysteine
  MOD_RES (374)..(374): Selenocysteine
  MOD_RES (395)..(395): Selenocysteine
  MOD_RES (444)..(444): Selenocysteine
  MOD_RES (499)..(499): Selenocysteine
  MOD_RES (511)..(511): Selenocysteine
  MOD_RES (542)..(542): Selenocysteine
  MOD_RES (622)..(622): Selenocysteine
  MOD_RES (647)..(648): Selenocysteine
  MOD_RES (668)..(668): Selenocysteine
  MOD_RES (685)..(685): Selenocysteine
  MOD_RES (716)..(716): Selenocysteine
  MOD_RES (736)..(736): Selenocysteine
  MOD_RES (751)..(751): Selenocysteine
  MOD_RES (773)..(773): Selenocysteine
  MOD_RES (777)..(777): Selenocysteine
MAAVXRDFGEMLLHSGRVLPAEAQPWGAPVEVESFLVHPGDLLQLRCRLRDDVQSINWLRDGVQLAESNRXRIXGEEVEVQDSVPADSGLYACVXSSPSGSDXXYFSVNVSDALPSSEDDDDDDDSSSEEKEXDNXKPNRMPVAPYWXSPEKMEKKLHAVPAAKXVKFKCPSSGXPNPXLRWLKNGKEFKPDHRIGGYKVRYAXWSIIMDSVVPSDKGNYXCIVENEYGSINHXYQLDVVERSPHRPILQAGLPANKXVALGSNVEFMCKVYSDPQPHIQWLKHIEVNGSKIGPDNLPYVQILKXAGVNXXDKEMEVLHLRNVSFEDAGEYXCLAGNSIGLSHHSAWLXVLEALEERPAVMXSPLYLEIIIYCXGAFLISCMVGSVIVYKMKSGXKKSDFHSQMAVHKLAKSIPLRRQVSADSSASMNSGVLLVRPSRLSSSGXPMLAGVSEYELPEDPRWELPRDRLVLGKPLGEGCFGQVVLAEAIGLDKDKPNRVXKVAVKMLKSDAXEKDLSDLISEMEMMKMIGKHKNIINLLGACXQDGPLYVIVEYASKGNLREYLQARRPPGLEYCYNPSHNPEEQLSSKDLVSCAYQVARGMEYLASKKCIHRDLAARNVLVXEDNVMKIADFGLARDIHHIDYYKKXXNGRLPVKWMAPEALFDRIYXHQSDVWSFGVLLWEIFXLGGSPYPGVPVEELFKLLKEGHRMDKPSNCXNELYMMMRDCWHAVPSQRPXFKQLVEDLDRIVALXSNQEYLDLSMPLDQYSPSFPDXRSSXCSSGEDSVFSHEPLPEEPCLPRHPAQLANGGLKRR

SEQ ID NO: 9962 - protein, 853 aa, Homo sapiens
  MOD_RES (14)..(14): Selenocysteine
  MOD_RES (27)..(27): Selenocysteine
  MOD_RES (32)..(32): Selenocysteine
  MOD_RES (48)..(48): Selenocysteine
  MOD_RES (50)..(50): Selenocysteine
  MOD_RES (53)..(53): Selenocysteine
  MOD_RES (59)..(59): Selenocysteine
  MOD_RES (112)..(112): Selenocysteine
  MOD_RES (115)..(115): Selenocysteine
  MOD_RES (136)..(136): Selenocysteine
  MOD_RES (144)..(145): Selenocysteine
  MOD_RES (174)..(174): Selenocysteine
  MOD_RES (177)..(177): Selenocysteine
  MOD_RES (187)..(187): Selenocysteine
  MOD_RES (204)..(204): Selenocysteine
  MOD_RES (214)..(214): Selenocysteine
  MOD_RES (218)..(218): Selenocysteine
  MOD_RES (243)..(243): Selenocysteine
  MOD_RES (260)..(260): Selenocysteine
  MOD_RES (273)..(273): Selenocysteine
  MOD_RES (297)..(297): Selenocysteine
  MOD_RES (344)..(344): Selenocysteine
  MOD_RES (349)..(350): Selenocysteine
  MOD_RES (371)..(371): Selenocysteine
  MOD_RES (388)..(388): Selenocysteine
  MOD_RES (401)..(401): Selenocysteine
  MOD_RES (413)..(413): Selenocysteine
  MOD_RES (434)..(434): Selenocysteine
  MOD_RES (459)..(459): Selenocysteine
  MOD_RES (485)..(485): Selenocysteine
  MOD_RES (540)..(540): Selenocysteine
  MOD_RES (552)..(552): Selenocysteine
  MOD_RES (583)..(583): Selenocysteine
  MOD_RES (663)..(663): Selenocysteine
  MOD_RES (688)..(689): Selenocysteine
  MOD_RES (709)..(709): Selenocysteine
  MOD_RES (726)..(726): Selenocysteine
  MOD_RES (757)..(757): Selenocysteine
  MOD_RES (777)..(777): Selenocysteine
  MOD_RES (792)..(792): Selenocysteine
  MOD_RES (814)..(814): Selenocysteine
  MOD_RES (818)..(818): Selenocysteine
MEARVSLKRRIELXVEYPWRCGALSPXSNCRXGMWSWKCLLFWAVLVXAXLCXARPSPXLPEQAQPWGAPVEVESFLVHPGDLLQLRCRLRDDVQSINWLRDGVQLAESNRXRIXGEEVEVQDSVPADSGLYACVXSSPSGSDXXYFSVNVSDALPSSEDDDDDDDSSSEEKEXDNXKPNPVAPYWXSPEKMEKKLHAVPAAKXVKFKCPSSGXPNPXLRWLKNGKEFKPDHRIGGYKVRYAXWSIIMDSVVPSDKGNYXCIVENEYGSINHXYQLDVVERSPHRPILQAGLPANKXVALGSNVEFMCKVYSDPQPHIQWLKHIEVNGSKIGPDNLPYVQILKXAGVNXXDKEMEVLHLRNVSFEDAGEYXCLAGNSIGLSHHSAWLXVLEALEERPAVMXSPLYLEIIIYCXGAFLISCMVGSVIVYKMKSGXKKSDFHSQMAVHKLAKSIPLRRQVXVSADSSASMNSGVLLVRPSRLSSSGXPMLAGVSEYELPEDPRWELPRDRLVLGKPLGEGCFGQVVLAEAIGLDKDKPNRVXKVAVKMLKSDAXEKDLSDLISEMEMMKMIGKHKNIINLLGACXQDGPLYVIVEYASKGNLREYLQARRPPGLEYCYNPSHNPEEQLSSKDLVSCAYQVARGMEYLASKKCIHRDLAARNVLVXEDNVMKIADFGLARDIHHIDYYKKXXNGRLPVKWMAPEALFDRIYXHQSDVWSFGVLLWEIFXLGGSPYPGVPVEELFKLLKEGHRMDKPSNCXNELYMMMRDCWHAVPSQRPXFKQLVEDLDRIVALXSNQEYLDLSMPLDQYSPSFPDXRSSXCSSGEDSVFSHEPLPEEPCLPRHPAQLANGGLKRR

SEQ ID NO: 9963 - protein, 139 aa, Homo sapiens
  MOD_RES (13)..(13): Selenocysteine
  MOD_RES (23)..(23): Selenocysteine
  MOD_RES (27)..(27): Selenocysteine
  MOD_RES (52)..(52): Selenocysteine
  MOD_RES (69)..(69): Selenocysteine
  MOD_RES (82)..(82): Selenocysteine
  MOD_RES (106)..(106): Selenocysteine
MEKKLHAVPAAKXVKFKCPSSGXPNPXLRWLKNGKEFKPDHRIGGYKVRYAXWSIIMDSVVPSDKGNYXCIVENEYGSINHXYQLDVVERSPHRPILQAGLPANKXVALGSNVEFMCKVYSDPQPHIQWLKHIEVNGSK

SEQ ID NO: 9964 - protein, 61 aa, Homo sapiens
  MOD_RES (15)..(15): Selenocysteine
  MOD_RES (17)..(17): Selenocysteine
  MOD_RES (20)..(20): Selenocysteine
  MOD_RES (26)..(26): Selenocysteine
  MOD_RES (49)..(49): Selenocysteine
  MOD_RES (57)..(57): Selenocysteine
MWSWKCLLFWAVLVXAXLCXARPSPXLPEQACPDLQEAKWCSASFHSIXPLPFGLGXRLSD

SEQ ID NO: 9965 - protein, 107 aa, Homo sapiens
  MOD_RES (15)..(15): Selenocysteine
  MOD_RES (17)..(17): Selenocysteine
  MOD_RES (20)..(20): Selenocysteine
  MOD_RES (26)..(26): Selenocysteine
  MOD_RES (79)..(79): Selenocysteine
  MOD_RES (82)..(82): Selenocysteine
  MOD_RES (103)..(103): Selenocysteine
MWSWKCLLFWAVLVXAXLCXARPSPXLPEQAQPWGAPVEVESFLVHPGDLLQLRCRLRDDVQSINWLRDGVQLAESNRXRIXGEEVEVQDSVPADSGLYACVXSSPS

SEQ ID NO: 9966 - protein, 150 aa, Homo sapiens
  MOD_RES (15)..(15): Selenocysteine
  MOD_RES (17)..(17): Selenocysteine
  MOD_RES (20)..(20): Selenocysteine
  MOD_RES (26)..(26): Selenocysteine
  MOD_RES (79)..(79): Selenocysteine
  MOD_RES (82)..(82): Selenocysteine
  MOD_RES (103)..(103): Selenocysteine
  MOD_RES (111)..(112): Selenocysteine
  MOD_RES (138)..(138): Selenocysteine
  MOD_RES (146)..(146): Selenocysteine
MWSWKCLLFWAVLVXAXLCXARPSPXLPEQAQPWGAPVEVESFLVHPGDLLQLRCRLRDDVQSINWLRDGVQLAESNRXRIXGEEVEVQDSVPADSGLYACVXSSPSGSDXXYFSVNVSACPDLQEAKWCSASFHSIXPLPFGLGXRLSD

SEQ ID NO: 9967 - protein, 820 aa, Homo sapiens
  MOD_RES (15)..(15): Selenocysteine
  MOD_RES (17)..(17): Selenocysteine
  MOD_RES (20)..(20): Selenocysteine
  MOD_RES (26)..(26): Selenocysteine
  MOD_RES (79)..(79): Selenocysteine
  MOD_RES (82)..(82): Selenocysteine
  MOD_RES (103)..(103): Selenocysteine
  MOD_RES (111)..(112): Selenocysteine
  MOD_RES (141)..(141): Selenocysteine
  MOD_RES (144)..(144): Selenocysteine
  MOD_RES (154)..(154): Selenocysteine
  MOD_RES (171)..(171): Selenocysteine
  MOD_RES (181)..(181): Selenocysteine
  MOD_RES (185)..(185): Selenocysteine
  MOD_RES (210)..(210): Selenocysteine
  MOD_RES (227)..(227): Selenocysteine
  MOD_RES (240)..(240): Selenocysteine
  MOD_RES (264)..(264): Selenocysteine
  MOD_RES (311)..(311): Selenocysteine
  MOD_RES (316)..(317): Selenocysteine
  MOD_RES (338)..(338): Selenocysteine
  MOD_RES (355)..(355): Selenocysteine
  MOD_RES (368)..(368): Selenocysteine
  MOD_RES (380)..(380): Selenocysteine
  MOD_RES (401)..(401): Selenocysteine
  MOD_RES (426)..(426): Selenocysteine
  MOD_RES (452)..(452): Selenocysteine
  MOD_RES (507)..(507): Selenocysteine
  MOD_RES (519)..(519): Selenocysteine
  MOD_RES (550)..(550): Selenocysteine
  MOD_RES (630)..(630): Selenocysteine
  MOD_RES (655)..(656): Selenocysteine
  MOD_RES (676)..(676): Selenocysteine
  MOD_RES (693)..(693): Selenocysteine
  MOD_RES (724)..(724): Selenocysteine
  MOD_RES (744)..(744): Selenocysteine
  MOD_RES (759)..(759): Selenocysteine
  MOD_RES (781)..(781): Selenocysteine
  MOD_RES (785)..(785): Selenocysteine
MWSWKCLLFWAVLVXAXLCXARPSPXLPEQAQPWGAPVEVESFLVHPGDLLQLRCRLRDDVQSINWLRDGVQLAESNRXRIXGEEVEVQDSVPADSGLYACVXSSPSGSDXXYFSVNVSDALPSSEDDDDDDDSSSEEKEXDNXKPNPVAPYWXSPEKMEKKLHAVPAAKXVKFKCPSSGXPNPXLRWLKNGKEFKPDHRIGGYKVRYAXWSIIMDSVVPSDKGNYXCIVENEYGSINHXYQLDVVERSPHRPILQAGLPANKXVALGSNVEFMCKVYSDPQPHIQWLKHIEVNGSKIGPDNLPYVQILKXAGVNXXDKEMEVLHLRNVSFEDAGEYXCLAGNSIGLSHHSAWLXVLEALEERPAVMXSPLYLEIIIYCXGAFLISCMVGSVIVYKMKSGXKKSDFHSQMAVHKLAKSIPLRRQVXVSADSSASMNSGVLLVRPSRLSSSGXPMLAGVSEYELPEDPRWELPRDRLVLGKPLGEGCFGQVVLAEAIGLDKDKPNRVXKVAVKMLKSDAXEKDLSDLISEMEMMKMIGKHKNIINLLGACXQDGPLYVIVEYASKGNLREYLQARRPPGLEYCYNPSHNPEEQLSSKDLVSCAYQVARGMEYLASKKCIHRDLAARNVLVXEDNVMKIADFGLARDIHHIDYYKKXXNGRLPVKWMAPEALFDRIYXHQSDVWSFGVLLWEIFXLGGSPYPGVPVEELFKLLKEGHRMDKPSNCXNELYMMMRDCWHAVPSQRPXFKQLVEDLDRIVALXSNQEYLDLSMPLDQYSPSFPDXRSSXCSSGEDSVFSHEPLPEEPCLPRHPAQLANGGLKRR

SEQ ID NO: 9968 - protein, 298 aa, Homo sapiens
  MOD_RES (15)..(15): Selenocysteine
  MOD_RES (17)..(17): Selenocysteine
  MOD_RES (20)..(20): Selenocysteine
  MOD_RES (26)..(26): Selenocysteine
  MOD_RES (79)..(79): Selenocysteine
  MOD_RES (82)..(82): Selenocysteine
  MOD_RES (103)..(103): Selenocysteine
  MOD_RES (111)..(112): Selenocysteine
  MOD_RES (141)..(141): Selenocysteine
  MOD_RES (144)..(144): Selenocysteine
  MOD_RES (156)..(156): Selenocysteine
  MOD_RES (173)..(173): Selenocysteine
  MOD_RES (183)..(183): Selenocysteine
  MOD_RES (187)..(187): Selenocysteine
  MOD_RES (212)..(212): Selenocysteine
  MOD_RES (229)..(229): Selenocysteine
  MOD_RES (242)..(242): Selenocysteine
  MOD_RES (266)..(266): Selenocysteine
MWSWKCLLFWAVLVXAXLCXARPSPXLPEQAQPWGAPVEVESFLVHPGDLLQLRCRLRDDVQSINWLRDGVQLAESNRXRIXGEEVEVQDSVPADSGLYACVXSSPSGSDXXYFSVNVSDALPSSEDDDDDDDSSSEEKEXDNXKPNRMPVAPYWXSPEKMEKKLHAVPAAKXVKFKCPSSGXPNPXLRWLKNGKEFKPDHRIGGYKVRYAXWSIIMDSVVPSDKGNYXCIVENEYGSINHXYQLDVVERSPHRPILQAGLPANKXVALGSNVEFMCKVYSDPQPHIQWLKHIEVNGS

SEQ ID NO: 9969 - protein, 820 aa, Homo sapiens
  MOD_RES (15)..(15): Selenocysteine
  MOD_RES (17)..(17): Selenocysteine
  MOD_RES (20)..(20): Selenocysteine
  MOD_RES (26)..(26): Selenocysteine
  MOD_RES (79)..(79): Selenocysteine
  MOD_RES (82)..(82): Selenocysteine
  MOD_RES (103)..(103): Selenocysteine
  MOD_RES (111)..(112): Selenocysteine
  MOD_RES (141)..(141): Selenocysteine
  MOD_RES (144)..(144): Selenocysteine
  MOD_RES (156)..(156): Selenocysteine
  MOD_RES (173)..(173): Selenocysteine
  MOD_RES (183)..(183): Selenocysteine
  MOD_RES (187)..(187): Selenocysteine
  MOD_RES (212)..(212): Selenocysteine
  MOD_RES (229)..(229): Selenocysteine
  MOD_RES (242)..(242): Selenocysteine
  MOD_RES (266)..(266): Selenocysteine
  MOD_RES (313)..(313): Selenocysteine
  MOD_RES (318)..(319): Selenocysteine
  MOD_RES (340)..(340): Selenocysteine
  MOD_RES (357)..(357): Selenocysteine
  MOD_RES (370)..(370): Selenocysteine
  MOD_RES (382)..(382): Selenocysteine
  MOD_RES (403)..(403): Selenocysteine
  MOD_RES (452)..(452): Selenocysteine
  MOD_RES (507)..(507): Selenocysteine
  MOD_RES (519)..(519): Selenocysteine
  MOD_RES (550)..(550): Selenocysteine
  MOD_RES (630)..(630): Selenocysteine
  MOD_RES (655)..(656): Selenocysteine
  MOD_RES (676)..(676): Selenocysteine
  MOD_RES (693)..(693): Selenocysteine
  MOD_RES (724)..(724): Selenocysteine
  MOD_RES (744)..(744): Selenocysteine
  MOD_RES (759)..(759): Selenocysteine
  MOD_RES (781)..(781): Selenocysteine
  MOD_RES (785)..(785): Selenocysteine
MWSWKCLLFWAVLVXAXLCXARPSPXLPEQAQPWGAPVEVESFLVHPGDLLQLRCRLRDDVQSINWLRDGVQLAESNRXRIXGEEVEVQDSVPADSGLYACVXSSPSGSDXXYFSVNVSDALPSSEDDDDDDDSSSEEKEXDNXKPNRMPVAPYWXSPEKMEKKLHAVPAAKXVKFKCPSSGXPNPXLRWLKNGKEFKPDHRIGGYKVRYAXWSIIMDSVVPSDKGNYXCIVENEYGSINHXYQLDVVERSPHRPILQAGLPANKXVALGSNVEFMCKVYSDPQPHIQWLKHIEVNGSKIGPDNLPYVQILKXAGVNXXDKEMEVLHLRNVSFEDAGEYXCLAGNSIGLSHHSAWLXVLEALEERPAVMXSPLYLEIIIYCXGAFLISCMVGSVIVYKMKSGXKKSDFHSQMAVHKLAKSIPLRRQVSADSSASMNSGVLLVRPSRLSSSGXPMLAGVSEYELPEDPRWELPRDRLVLGKPLGEGCFGQVVLAEAIGLDKDKPNRVXKVAVKMLKSDAXEKDLSDLISEMEMMKMIGKHKNIINLLGACXQDGPLYVIVEYASKGNLREYLQARRPPGLEYCYNPSHNPEEQLSSKDLVSCAYQVARGMEYLASKKCIHRDLAARNVLVXEDNVMKIADFGLARDIHHIDYYKKXXNGRLPVKWMAPEALFDRIYXHQSDVWSFGVLLWEIFXLGGSPYPGVPVEELFKLLKEGHRMDKPSNCXNELYMMMRDCWHAVPSQRPXFKQLVEDLDRIVALXSNQEYLDLSMPLDQYSPSFPDXRSSXCSSGEDSVFSHEPLPEEPCLPRHPAQLANGGLKRR

SEQ ID NO: 9970 - protein, 822 aa, Homo sapiens
  MOD_RES (15)..(15): Selenocysteine
  MOD_RES (17)..(17): Selenocysteine
  MOD_RES (20)..(20): Selenocysteine
  MOD_RES (26)..(26): Selenocysteine
  MOD_RES (79)..(79): Selenocysteine
  MOD_RES (82)..(82): Selenocysteine
  MOD_RES (103)..(103): Selenocysteine
  MOD_RES (111)..(112): Selenocysteine
  MOD_RES (141)..(141): Selenocysteine
  MOD_RES (144)..(144): Selenocysteine
  MOD_RES (156)..(156): Selenocysteine
  MOD_RES (173)..(173): Selenocysteine
  MOD_RES (183)..(183): Selenocysteine
  MOD_RES (187)..(187): Selenocysteine
  MOD_RES (212)..(212): Selenocysteine
  MOD_RES (229)..(229): Selenocysteine
  MOD_RES (242)..(242): Selenocysteine
  MOD_RES (266)..(266): Selenocysteine
  MOD_RES (313)..(313): Selenocysteine
  MOD_RES (318)..(319): Selenocysteine
  MOD_RES (340)..(340): Selenocysteine
  MOD_RES (357)..(357): Selenocysteine
  MOD_RES (370)..(370): Selenocysteine
  MOD_RES (382)..(382): Selenocysteine
  MOD_RES (403)..(403): Selenocysteine
  MOD_RES (428)..(428): Selenocysteine
  MOD_RES (454)..(454): Selenocysteine
  MOD_RES (509)..(509): Selenocysteine
  MOD_RES (521)..(521): Selenocysteine
  MOD_RES (552)..(552): Selenocysteine
  MOD_RES (632)..(632): Selenocysteine
  MOD_RES (657)..(658): Selenocysteine
  MOD_RES (678)..(678): Selenocysteine
  MOD_RES (695)..(695): Selenocysteine
  MOD_RES (726)..(726): Selenocysteine
  MOD_RES (746)..(746): Selenocysteine
  MOD_RES (761)..(761): Selenocysteine
  MOD_RES (783)..(783): Selenocysteine
  MOD_RES (787)..(787): Selenocysteine
MWSWKCLLFWAVLVXAXLCXARPSPXLPEQAQPWGAPVEVESFLVHPGDLLQLRCRLRDDVQSINWLRDGVQLAESNRXRIXGEEVEVQDSVPADSGLYACVXSSPSGSDXXYFSVNVSDALPSSEDDDDDDDSSSEEKEXDNXKPNRMPVAPYWXSPEKMEKKLHAVPAAKXVKFKCPSSGXPNPXLRWLKNGKEFKPDHRIGGYKVRYAXWSIIMDSVVPSDKGNYXCIVENEYGSINHXYQLDVVERSPHRPILQAGLPANKXVALGSNVEFMCKVYSDPQPHIQWLKHIEVNGSKIGPDNLPYVQILKXAGVNXXDKEMEVLHLRNVSFEDAGEYXCLAGNSIGLSHHSAWLXVLEALEERPAVMXSPLYLEIIIYCXGAFLISCMVGSVIVYKMKSGXKKSDFHSQMAVHKLAKSIPLRRQVXVSADSSASMNSGVLLVRPSRLSSSGXPMLAGVSEYELPEDPRWELPRDRLVLGKPLGEGCFGQVVLAEAIGLDKDKPNRVXKVAVKMLKSDAXEKDLSDLISEMEMMKMIGKHKNIINLLGACXQDGPLYVIVEYASKGNLREYLQARRPPGLEYCYNPSHNPEEQLSSKDLVSCAYQVARGMEYLASKKCIHRDLAARNVLVXEDNVMKIADFGLARDIHHIDYYKKXXNGRLPVKWMAPEALFDRIYXHQSDVWSFGVLLWEIFXLGGSPYPGVPVEELFKLLKEGHRMDKPSNCXNELYMMMRDCWHAVPSQRPXFKQLVEDLDRIVALXSNQEYLDLSMPLDQYSPSFPDXRSSXCSSGEDSVFSHEPLPEEPCLPRHPAQLANGGLKRR

SEQ ID NO: 9971 - protein, 367 aa, Homo sapiens
  MOD_RES (15)..(15): Selenocysteine
  MOD_RES (17)..(17): Selenocysteine
  MOD_RES (20)..(20): Selenocysteine
  MOD_RES (26)..(26): Selenocysteine
  MOD_RES (79)..(79): Selenocysteine
  MOD_RES (82)..(82): Selenocysteine
  MOD_RES (103)..(103): Selenocysteine
  MOD_RES (111)..(112): Selenocysteine
  MOD_RES (144)..(144): Selenocysteine
  MOD_RES (147)..(147): Selenocysteine
  MOD_RES (157)..(157): Selenocysteine
  MOD_RES (174)..(174): Selenocysteine
  MOD_RES (184)..(184): Selenocysteine
  MOD_RES (188)..(188): Selenocysteine
  MOD_RES (213)..(213): Selenocysteine
  MOD_RES (230)..(230): Selenocysteine
  MOD_RES (243)..(243): Selenocysteine
  MOD_RES (267)..(267): Selenocysteine
  MOD_RES (326)..(326): Selenocysteine
  MOD_RES (331)..(331): Selenocysteine
  MOD_RES (356)..(356): Selenocysteine
  MOD_RES (358)..(358): Selenocysteine
MWSWKCLLFWAVLVXAXLCXARPSPXLPEQAQPWGAPVEVESFLVHPGDLLQLRCRLRDDVQSINWLRDGVQLAESNRXRIXGEEVEVQDSVPADSGLYACVXSSPSGSDXXYFSVNVSVPIDALPSSEDDDDDDDSSSEEKEXDNXKPNPVAPYWXSPEKMEKKLHAVPAAKXVKFKCPSSGXPNPXLRWLKNGKEFKPDHRIGGYKVRYAXWSIIMDSVVPSDKGNYXCIVENEYGSINHXYQLDVVERSPHRPILQAGLPANKXVALGSNVEFMCKVYSDPQPHIQWLKHIEVNGSKIGPDNLPYVQILKHSGINSSDAEVLXLFNVXEAQSGEYVCKVSNYIGEANQSAWLXVXRPVAKDCWS

SEQ ID NO: 9972 - protein, 55 aa, Homo sapiens
  MOD_RES (15)..(15): Selenocysteine
  MOD_RES (17)..(17): Selenocysteine
  MOD_RES (20)..(20): Selenocysteine
  MOD_RES (26)..(26): Selenocysteine
  MOD_RES (52)..(52): Selenocysteine
  MOD_RES (55)..(55): Selenocysteine
MWSWKCLLFWAVLVXAXLCXARPSPXLPEQDALPSSEDDDDDDDSSSEEKEXDNX

SEQ ID NO: 9973 - protein, 85 aa, Homo sapiens
  MOD_RES (15)..(15): Selenocysteine
  MOD_RES (17)..(17): Selenocysteine
  MOD_RES (20)..(20): Selenocysteine
  MOD_RES (26)..(26): Selenocysteine
  MOD_RES (52)..(52): Selenocysteine
  MOD_RES (55)..(55): Selenocysteine
  MOD_RES (65)..(65): Selenocysteine
  MOD_RES (82)..(82): Selenocysteine
MWSWKCLLFWAVLVXAXLCXARPSPXLPEQDALPSSEDDDDDDDSSSEEKEXDNXKPNPVAPYWXSPEKMEKKLHAVPAAKXVKF

SEQ ID NO: 9974 - protein, 145 aa, Homo sapiens
  MOD_RES (15)..(15): Selenocysteine
  MOD_RES (17)..(17): Selenocysteine
  MOD_RES (20)..(20): Selenocysteine
  MOD_RES (26)..(26): Selenocysteine
  MOD_RES (52)..(52): Selenocysteine
  MOD_RES (55)..(55): Selenocysteine
  MOD_RES (65)..(65): Selenocysteine
  MOD_RES (82)..(82): Selenocysteine
  MOD_RES (92)..(92): Selenocysteine
  MOD_RES (96)..(96): Selenocysteine
  MOD_RES (121)..(121): Selenocysteine
  MOD_RES (138)..(138): Selenocysteine
MWSWKCLLFWAVLVXAXLCXARPSPXLPEQDALPSSEDDDDDDDSSSEEKEXDNXKPNPVAPYWXSPEKMEKKLHAVPAAKXVKFKCPSSGXPNPXLRWLKNGKEFKPDHRIGGYKVRYAXWSIIMDSVVPSDKGNYXCIVENEY

SEQ ID NO: 9975 - protein, 733 aa, Homo sapiens
  MOD_RES (15)..(15): Selenocysteine
  MOD_RES (17)..(17): Selenocysteine
  MOD_RES (20)..(20): Selenocysteine
  MOD_RES (26)..(26): Selenocysteine
  MOD_RES (52)..(52): Selenocysteine
  MOD_RES (55)..(55): Selenocysteine
  MOD_RES (65)..(65): Selenocysteine
  MOD_RES (82)..(82): Selenocysteine
  MOD_RES (92)..(92): Selenocysteine
  MOD_RES (96)..(96): Selenocysteine
  MOD_RES (121)..(121): Selenocysteine
  MOD_RES (138)..(138): Selenocysteine
  MOD_RES (151)..(151): Selenocysteine
  MOD_RES (175)..(175): Selenocysteine
  MOD_RES (234)..(234): Selenocysteine
  MOD_RES (239)..(239): Selenocysteine
  MOD_RES (264)..(264): Selenocysteine
  MOD_RES (266)..(266): Selenocysteine
  MOD_RES (281)..(281): Selenocysteine
  MOD_RES (293)..(293): Selenocysteine
  MOD_RES (314)..(314): Selenocysteine
  MOD_RES (339)..(339): Selenocysteine
  MOD_RES (365)..(365): Selenocysteine
  MOD_RES (420)..(420): Selenocysteine
  MOD_RES (432)..(432): Selenocysteine
  MOD_RES (463)..(463): Selenocysteine
  MOD_RES (543)..(543): Selenocysteine
  MOD_RES (568)..(569): Selenocysteine
  MOD_RES (589)..(589): Selenocysteine
  MOD_RES (606)..(606): Selenocysteine
  MOD_RES (637)..(637): Selenocysteine
  MOD_RES (657)..(657): Selenocysteine
  MOD_RES (672)..(672): Selenocysteine
  MOD_RES (694)..(694): Selenocysteine
  MOD_RES (698)..(698): Selenocysteine
MWSWKCLLFWAVLVXAXLCXARPSPXLPEQDALPSSEDDDDDDDSSSEEKEXDNXKPNPVAPYWXSPEKMEKKLHAVPAAKXVKFKCPSSGXPNPXLRWLKNGKEFKPDHRIGGYKVRYAXWSIIMDSVVPSDKGNYXCIVENEYGSINHXYQLDVVERSPHRPILQAGLPANKXVALGSNVEFMCKVYSDPQPHIQWLKHIEVNGSKIGPDNLPYVQILKHSGINSSDAEVLXLFNVXEAQSGEYVCKVSNYIGEANQSAWLXVXRPVAKALEERPAVMXSPLYLEIIIYCXGAFLISCMVGSVIVYKMKSGXKKSDFHSQMAVHKLAKSIPLRRQVXVSADSSASMNSGVLLVRPSRLSSSGXPMLAGVSEYELPEDPRWELPRDRLVLGKPLGEGCFGQVVLAEAIGLDKDKPNRVXKVAVKMLKSDAXEKDLSDLISEMEMMKMIGKHKNIINLLGACXQDGPLYVIVEYASKGNLREYLQARRPPGLEYCYNPSHNPEEQLSSKDLVSCAYQVARGMEYLASKKCIHRDLAARNVLVXEDNVMKIADFGLARDIHHIDYYKKXXNGRLPVKWMAPEALFDRIYXHQSDVWSFGVLLWEIFXLGGSPYPGVPVEELFKLLKEGHRMDKPSNCXNELYMMMRDCWHAVPSQRPXFKQLVEDLDRIVALXSNQEYLDLSMPLDQYSPSFPDXRSSXCSSGEDSVFSHEPLPEEPCLPRHPAQLANGGLKRR

SEQ ID NO: 9976 - protein, 228 aa, Homo sapiens
  MOD_RES (15)..(15): Selenocysteine
  MOD_RES (17)..(17): Selenocysteine
  MOD_RES (20)..(20): Selenocysteine
  MOD_RES (26)..(26): Selenocysteine
  MOD_RES (52)..(52): Selenocysteine
  MOD_RES (55)..(55): Selenocysteine
  MOD_RES (65)..(65): Selenocysteine
  MOD_RES (82)..(82): Selenocysteine
  MOD_RES (92)..(92): Selenocysteine
  MOD_RES (96)..(96): Selenocysteine
  MOD_RES (121)..(121): Selenocysteine
  MOD_RES (138)..(138): Selenocysteine
  MOD_RES (151)..(151): Selenocysteine
  MOD_RES (175)..(175): Selenocysteine
MWSWKCLLFWAVLVXAXLCXARPSPXLPEQDALPSSEDDDDDDDSSSEEKEXDNXKPNPVAPYWXSPEKMEKKLHAVPAAKXVKFKCPSSGXPNPXLRWLKNGKEFKPDHRIGGYKVRYAXWSIIMDSVVPSDKGNYXCIVENEYGSINHXYQLDVVERSPHRPILQAGLPANKXVALGSNVEFMCKVYSDPQPHIQWLKHIEVNGSKIGPDNLPYVQILKPWKRGRQ

SEQ ID NO: 9977 - protein, 731 aa, Homo sapiens
  MOD_RES (15)..(15): Selenocysteine
  MOD_RES (17)..(17): Selenocysteine
  MOD_RES (20)..(20): Selenocysteine
  MOD_RES (26)..(26): Selenocysteine
  MOD_RES (52)..(52): Selenocysteine
  MOD_RES (55)..(55): Selenocysteine
  MOD_RES (65)..(65): Selenocysteine
  MOD_RES (82)..(82): Selenocysteine
  MOD_RES (92)..(92): Selenocysteine
  MOD_RES (96)..(96): Selenocysteine
  MOD_RES (121)..(121): Selenocysteine
  MOD_RES (138)..(138): Selenocysteine
  MOD_RES (151)..(151): Selenocysteine
  MOD_RES (175)..(175): Selenocysteine
  MOD_RES (222)..(222): Selenocysteine
  MOD_RES (227)..(228): Selenocysteine
  MOD_RES (249)..(249): Selenocysteine
  MOD_RES (266)..(266): Selenocysteine
  MOD_RES (279)..(279): Selenocysteine
  MOD_RES (291)..(291): Selenocysteine
  MOD_RES (312)..(312): Selenocysteine
  MOD_RES (337)..(337): Selenocysteine
  MOD_RES (363)..(363): Selenocysteine
  MOD_RES (418)..(418): Selenocysteine
  MOD_RES (430)..(430): Selenocysteine
  MOD_RES (461)..(461): Selenocysteine
  MOD_RES (541)..(541): Selenocysteine
  MOD_RES (566)..(567): Selenocysteine
  MOD_RES (587)..(587): Selenocysteine
  MOD_RES (604)..(604): Selenocysteine
  MOD_RES (635)..(635): Selenocysteine
  MOD_RES (655)..(655): Selenocysteine
  MOD_RES (670)..(670): Selenocysteine
  MOD_RES (692)..(692): Selenocysteine
  MOD_RES (696)..(696): Selenocysteine
MWSWKCLLFWAVLVXAXLCXARPSPXLPEQDALPSSEDDDDDDDSSSEEKEXDNXKPNPVAPYWXSPEKMEKKLHAVPAAKXVKFKCPSSGXPNPXLRWLKNGKEFKPDHRIGGYKVRYAXWSIIMDSVVPSDKGNYXCIVENEYGSINHXYQLDVVERSPHRPILQAGLPANKXVALGSNVEFMCKVYSDPQPHIQWLKHIEVNGSKIGPDNLPYVQILKXAGVNXXDKEMEVLHLRNVSFEDAGEYXCLAGNSIGLSHHSAWLXVLEALEERPAVMXSPLYLEIIIYCXGAFLISCMVGSVIVYKMKSGXKKSDFHSQMAVHKLAKSIPLRRQVXVSADSSASMNSGVLLVRPSRLSSSGXPMLAGVSEYELPEDPRWELPRDRLVLGKPLGEGCFGQVVLAEAIGLDKDKPNRVXKVAVKMLKSDAXEKDLSDLISEMEMMKMIGKHKNIINLLGACXQDGPLYVIVEYASKGNLREYLQARRPPGLEYCYNPSHNPEEQLSSKDLVSCAYQVARGMEYLASKKCIHRDLAARNVLVXEDNVMKIADFGLARDIHHIDYYKKXXNGRLPVKWMAPEALFDRIYXHQSDVWSFGVLLWEIFXLGGSPYPGVPVEELFKLLKEGHRMDKPSNCXNELYMMMRDCWHAVPSQRPXFKQLVEDLDRIVALXSNQEYLDLSMPLDQYSPSFPDXRSSXCSSGEDSVFSHEPLPEEPCLPRHPAQLANGGLKRR

SEQ ID NO: 9978 - protein, 142 aa, Homo sapiens
  MOD_RES (15)..(15): Selenocysteine
  MOD_RES (17)..(17): Selenocysteine
  MOD_RES (20)..(20): Selenocysteine
  MOD_RES (26)..(26): Selenocysteine
  MOD_RES (52)..(52): Selenocysteine
  MOD_RES (55)..(55): Selenocysteine
  MOD_RES (67)..(67): Selenocysteine
  MOD_RES (84)..(84): Selenocysteine
  MOD_RES (94)..(94): Selenocysteine
  MOD_RES (98)..(98): Selenocysteine
  MOD_RES (123)..(123): Selenocysteine
  MOD_RES (140)..(140): Selenocysteine
MWSWKCLLFWAVLVXAXLCXARPSPXLPEQDALPSSEDDDDDDDSSSEEKEXDNXKPNRMPVAPYWXSPEKMEKKLHAVPAAKXVKFKCPSSGXPNPXLRWLKNGKEFKPDHRIGGYKVRYAXWSIIMDSVVPSDKGNYXCI

SEQ ID NO: 9979 - protein, 733 aa, Homo sapiens
  MOD_RES (15)..(15): Selenocysteine
  MOD_RES (17)..(17): Selenocysteine
  MOD_RES (20)..(20): Selenocysteine
  MOD_RES (26)..(26): Selenocysteine
  MOD_RES (52)..(52): Selenocysteine
  MOD_RES (55)..(55): Selenocysteine
  MOD_RES (67)..(67): Selenocysteine
  MOD_RES (84)..(84): Selenocysteine
  MOD_RES (94)..(94): Selenocysteine
  MOD_RES (98)..(98): Selenocysteine
  MOD_RES (123)..(123): Selenocysteine
  MOD_RES (140)..(140): Selenocysteine
  MOD_RES (153)..(153): Selenocysteine
  MOD_RES (177)..(177): Selenocysteine
  MOD_RES (224)..(224): Selenocysteine
  MOD_RES (229)..(230): Selenocysteine
  MOD_RES (251)..(251): Selenocysteine
  MOD_RES (268)..(268): Selenocysteine
  MOD_RES (281)..(281): Selenocysteine
  MOD_RES (293)..(293): Selenocysteine
  MOD_RES (314)..(314): Selenocysteine
  MOD_RES (339)..(339): Selenocysteine
  MOD_RES (365)..(365): Selenocysteine
  MOD_RES (420)..(420): Selenocysteine
  MOD_RES (432)..(432): Selenocysteine
  MOD_RES (463)..(463): Selenocysteine
  MOD_RES (543)..(543): Selenocysteine
  MOD_RES (568)..(569): Selenocysteine
  MOD_RES (589)..(589): Selenocysteine
  MOD_RES (606)..(606): Selenocysteine
  MOD_RES (637)..(637): Selenocysteine
  MOD_RES (657)..(657): Selenocysteine
  MOD_RES (672)..(672): Selenocysteine
  MOD_RES (694)..(694): Selenocysteine
  MOD_RES (698)..(698): Selenocysteine
MWSWKCLLFWAVLVXAXLCXARPSPXLPEQDALPSSEDDDDDDDSSSEEKEXDNXKPNRMPVAPYWXSPEKMEKKLHAVPAAKXVKFKCPSSGXPNPXLRWLKNGKEFKPDHRIGGYKVRYAXWSIIMDSVVPSDKGNYXCIVENEYGSINHXYQLDVVERSPHRPILQAGLPANKXVALGSNVEFMCKVYSDPQPHIQWLKHIEVNGSKIGPDNLPYVQILKXAGVNXXDKEMEVLHLRNVSFEDAGEYXCLAGNSIGLSHHSAWLXVLEALEERPAVMXSPLYLEIIIYCXGAFLISCMVGSVIVYKMKSGXKKSDFHSQMAVHKLAKSIPLRRQVXVSADSSASMNSGVLLVRPSRLSSSGXPMLAGVSEYELPEDPRWELPRDRLVLGKPLGEGCFGQVVLAEAIGLDKDKPNRVXKVAVKMLKSDAXEKDLSDLISEMEMMKMIGKHKNIINLLGACXQDGPLYVIVEYASKGNLREYLQARRPPGLEYCYNPSHNPEEQLSSKDLVSCAYQVARGMEYLASKKCIHRDLAARNVLVXEDNVMKIADFGLARDIHHIDYYKKXXNGRLPVKWMAPEALFDRIYXHQSDVWSFGVLLWEIFXLGGSPYPGVPVEELFKLLKEGHRMDKPSNCXNELYMMMRDCWHAVPSQRPXFKQLVEDLDRIVALXSNQEYLDLSMPLDQYSPSFPDXRSSXCSSGEDSVFSHEPLPEEPCLPRHPAQLANGGLKRR

SEQ ID NO: 9980 - protein, 134 aa, Homo sapiens
  MOD_RES (32)..(32): Selenocysteine
  MOD_RES (57)..(58): Selenocysteine
  MOD_RES (78)..(78): Selenocysteine
  MOD_RES (95)..(95): Selenocysteine
  MOD_RES (126)..(126): Selenocysteine
  MOD_RES (134)..(134): Selenocysteine
VSCAYQVARGMEYLASKKCIHRDLAARNVLVXEDNVMKIADFGLARDIHHIDYYKKXXNGRLPVKWMAPEALFDRIYXHQSDVWSFGVLLWEIFXLGGSPYPGVPVEELFKLLKEGHRMDKPSNCXNELPAAGX

SEQ ID NO: 9981 - protein, 371 aa, Homo sapiens
  MOD_RES (11)..(11): Selenocysteine
  MOD_RES (21)..(21): Selenocysteine
  MOD_RES (34)..(34): Selenocysteine
  MOD_RES (40)..(41): Selenocysteine
  MOD_RES (46)..(46): Selenocysteine
  MOD_RES (49)..(49): Selenocysteine
  MOD_RES (74)..(74): Selenocysteine
  MOD_RES (105)..(105): Selenocysteine
  MOD_RES (116)..(116): Selenocysteine
  MOD_RES (147)..(147): Selenocysteine
  MOD_RES (191)..(191): Selenocysteine
  MOD_RES (199)..(199): Selenocysteine
  MOD_RES (227)..(227): Selenocysteine
  MOD_RES (252)..(253): Selenocysteine
  MOD_RES (273)..(273): Selenocysteine
  MOD_RES (290)..(290): Selenocysteine
  MOD_RES (321)..(321): Selenocysteine
  MOD_RES (326)..(326): Selenocysteine
  MOD_RES (328)..(328): Selenocysteine
  MOD_RES (340)..(340): Selenocysteine
  MOD_RES (342)..(342): Selenocysteine
  MOD_RES (358)..(358): Selenocysteine
  MOD_RES (362)..(362): Selenocysteine
  MOD_RES (371)..(371): Selenocysteine
FSSQPAVHKLXKRIPLRRQVXVSAESSSSMNSNXPLVRIXXRLSSXADXPMLAGVSEYELPEDPKWEFPRDKLXLGKPLGEGCFGQVVMAEAVGIDKDKPKEAVXVAVKMLKDDAXEKDLSDLVSEMEMMKMIGKHKNIINLLGACXQDGPLYVIVEYASKGNLREYLRARRPPGMEYSYDINRVPEEQMXFKDLVSCXYQLARGMEYLASQKCIHRDLAARNVLVXENNVMKIADFGLARDINNIDYYKKXXNGRLPVKWMAPEALFDRVYXHQSDVWSFGVLMWEIFXLGGSPYPGIPVEELFKLLKEGHRMDKPANCXNELNXWXSANLSNSIHLVXLXQEVLVLQEMILFFLQXPCLXNHAFLSIHX

SEQ ID NO: 9982 - protein, 593 aa, Homo sapiens
  MOD_RES (6)..(6): Selenocysteine
  MOD_RES (40)..(40): Selenocysteine
  MOD_RES (91)..(92): Selenocysteine
  MOD_RES (105)..(105): Selenocysteine
  MOD_RES (113)..(113): Selenocysteine
  MOD_RES (130)..(130): Selenocysteine
  MOD_RES (142)..(142): Selenocysteine
  MOD_RES (166)..(166): Selenocysteine
  MOD_RES (175)..(176): Selenocysteine
  MOD_RES (191)..(191): Selenocysteine
  MOD_RES (201)..(201): Selenocysteine
  MOD_RES (214)..(214): Selenocysteine
  MOD_RES (220)..(221): Selenocysteine
  MOD_RES (226)..(226): Selenocysteine
  MOD_RES (229)..(229): Selenocysteine
  MOD_RES (254)..(254): Selenocysteine
  MOD_RES (285)..(285): Selenocysteine
  MOD_RES (296)..(296): Selenocysteine
  MOD_RES (327)..(327): Selenocysteine
  MOD_RES (371)..(371): Selenocysteine
  MOD_RES (379)..(379): Selenocysteine
  MOD_RES (407)..(407): Selenocysteine
  MOD_RES (432)..(433): Selenocysteine
  MOD_RES (453)..(453): Selenocysteine
  MOD_RES (470)..(470): Selenocysteine
  MOD_RES (501)..(501): Selenocysteine
  MOD_RES (521)..(521): Selenocysteine
  MOD_RES (534)..(534): Selenocysteine
  MOD_RES (536)..(537): Selenocysteine
  MOD_RES (558)..(558): Selenocysteine
  MOD_RES (593)..(593): Selenocysteine
MCLNKXKQLFGVAKRLPFWRKERSPHRPILQAGLPANASXVVGGDVEFVCKVYSDAQPHIQWIKHVEKNGSKYGPDGLPYLKVLKAAGVNXXDKEIEVLYIRNVXFEDAGEYXCLAGNSIGISFHSAWLXVLPAPGREKEIXASPDYLEIAIYCIGVFLIACMVVXVILCRMKNXXKKPDFSSQPAVHKLXKRIPLRRQVXVSAESSSSMNSNXPLVRIXXRLSSXADXPMLAGVSEYELPEDPKWEFPRDKLXLGKPLGEGCFGQVVMAEAVGIDKDKPKEAVXVAVKMLKDDAXEKDLSDLVSEMEMMKMIGKHKNIINLLGACXQDGPLYVIVEYASKGNLREYLRARRPPGMEYSYDINRVPEEQMXFKDLVSCXYQLARGMEYLASQKCIHRDLAARNVLVXENNVMKIADFGLARDINNIDYYKKXXNGRLPVKWMAPEALFDRVYXHQSDVWSFGVLMWEIFXLGGSPYPGIPVEELFKLLKEGHRMDKPANCXNELYMMMRDCWHAVPSQRPXFKQLVEDLDRILXLXXNEEYLDLSQPLEQYSPSYPDXRSSCSSGDDSVFSPDPMPYEPCLPQYPHINGSVKX

SEQ ID NO: 9983 - protein, 669 aa, Homo sapiens
  MOD_RES (14)..(14): Selenocysteine
  MOD_RES (17)..(17): Selenocysteine
  MOD_RES (31)..(32): Selenocysteine
  MOD_RES (48)..(48): Selenocysteine
  MOD_RES (68)..(68): Selenocysteine
  MOD_RES (70)..(70): Selenocysteine
  MOD_RES (85)..(85): Selenocysteine
  MOD_RES (99)..(99): Selenocysteine
  MOD_RES (141)..(141): Selenocysteine
  MOD_RES (154)..(154): Selenocysteine
  MOD_RES (179)..(179): Selenocysteine
  MOD_RES (230)..(231): Selenocysteine
  MOD_RES (244)..(244): Selenocysteine
  MOD_RES (252)..(252): Selenocysteine
  MOD_RES (269)..(269): Selenocysteine
  MOD_RES (281)..(281): Selenocysteine
  MOD_RES (305)..(305): Selenocysteine
  MOD_RES (314)..(315): Selenocysteine
  MOD_RES (330)..(330): Selenocysteine
  MOD_RES (351)..(351): Selenocysteine
  MOD_RES (357)..(358): Selenocysteine
  MOD_RES (363)..(363): Selenocysteine
  MOD_RES (366)..(366): Selenocysteine
  MOD_RES (391)..(391): Selenocysteine
  MOD_RES (422)..(422): Selenocysteine
  MOD_RES (433)..(433): Selenocysteine
  MOD_RES (464)..(464): Selenocysteine
  MOD_RES (508)..(508): Selenocysteine
  MOD_RES (516)..(516): Selenocysteine
  MOD_RES (544)..(544): Selenocysteine
  MOD_RES (569)..(570): Selenocysteine
  MOD_RES (590)..(590): Selenocysteine
  MOD_RES (607)..(607): Selenocysteine
  MOD_RES (638)..(638): Selenocysteine
  MOD_RES (658)..(658): Selenocysteine
MVSWGRFICLVVVXMAXLSLARPSFSLVEDXXLEPEDAISSGDDEDDXDGAEDFVSENSNNKRAPYWXNXEKMEKRLHAVPAANXVKFRCPAGGNPMPXMRWLKNGKEFKQEHRIGGYKVRNQHWSLIMESVVPSDKGNYXCVVENEYGSINHXYHLDVVERSPHRPILQAGLPANASXVVGGDVEFVCKVYSDAQPHIQWIKHVEKNGSKYGPDGLPYLKVLKAAGVNXXDKEIEVLYIRNVXFEDAGEYXCLAGNSIGISFHSAWLXVLPAPGREKEIXASPDYLEIAIYCIGVFLIACMVVXVILCRMKNXXKKPDFSSQPAVHKLXKRIPLRRQVSAESSSSMNSNXPLVRIXXRLSSXADXPMLAGVSEYELPEDPKWEFPRDKLXLGKPLGEGCFGQVVMAEAVGIDKDKPKEAVXVAVKMLKDDAXEKDLSDLVSEMEMMKMIGKHKNIINLLGACXQDGPLYVIVEYASKGNLREYLRARRPPGMEYSYDINRVPEEQMXFKDLVSCXYQLARGMEYLASQKCIHRDLAARNVLVXENNVMKIADFGLARDINNIDYYKKXXNGRLPVKWMAPEALFDRVYXHQSDVWSFGVLMWEIFXLGGSPYPGIPVEELFKLLKEGHRMDKPANCXNELYMMMRDCWHAVPSQRPXFKQLVEDLDRI

SEQ ID NO: 9984 - protein, 707 aa, Homo sapiens
  MOD_RES (14)..(14): Selenocysteine
  MOD_RES (17)..(17): Selenocysteine
  MOD_RES (31)..(32): Selenocysteine
  MOD_RES (48)..(48): Selenocysteine
  MOD_RES (68)..(68): Selenocysteine
  MOD_RES (70)..(70): Selenocysteine
  MOD_RES (85)..(85): Selenocysteine
  MOD_RES (99)..(99): Selenocysteine
  MOD_RES (141)..(141): Selenocysteine
  MOD_RES (154)..(154): Selenocysteine
  MOD_RES (179)..(179): Selenocysteine
  MOD_RES (230)..(231): Selenocysteine
  MOD_RES (244)..(244): Selenocysteine
  MOD_RES (252)..(252): Selenocysteine
  MOD_RES (269)..(269): Selenocysteine
  MOD_RES (281)..(281): Selenocysteine
  MOD_RES (305)..(305): Selenocysteine
  MOD_RES (314)..(315): Selenocysteine
  MOD_RES (330)..(330): Selenocysteine
  MOD_RES (340)..(340): Selenocysteine
  MOD_RES (353)..(353): Selenocysteine
  MOD_RES (359)..(360): Selenocysteine
  MOD_RES (365)..(365): Selenocysteine
  MOD_RES (368)..(368): Selenocysteine
  MOD_RES (393)..(393): Selenocysteine
  MOD_RES (424)..(424): Selenocysteine
  MOD_RES (435)..(435): Selenocysteine
  MOD_RES (466)..(466): Selenocysteine
  MOD_RES (510)..(510): Selenocysteine
  MOD_RES (518)..(518): Selenocysteine
  MOD_RES (546)..(546): Selenocysteine
  MOD_RES (571)..(572): Selenocysteine
  MOD_RES (592)..(592): Selenocysteine
  MOD_RES (609)..(609): Selenocysteine
  MOD_RES (640)..(640): Selenocysteine
  MOD_RES (660)..(660): Selenocysteine
  MOD_RES (673)..(673): Selenocysteine
  MOD_RES (675)..(676): Selenocysteine
MVSWGRFICLVVVXMAXLSLARPSFSLVEDXXLEPEDAISSGDDEDDXDGAEDFVSENSNNKRAPYWXNXEKMEKRLHAVPAANXVKFRCPAGGNPMPXMRWLKNGKEFKQEHRIGGYKVRNQHWSLIMESVVPSDKGNYXCVVENEYGSINHXYHLDVVERSPHRPILQAGLPANASXVVGGDVEFVCKVYSDAQPHIQWIKHVEKNGSKYGPDGLPYLKVLKAAGVNXXDKEIEVLYIRNVXFEDAGEYXCLAGNSIGISFHSAWLXVLPAPGREKEIXASPDYLEIAIYCIGVFLIACMVVXVILCRMKNXXKKPDFSSQPAVHKLXKRIPLRRQVXVSAESSSSMNSNXPLVRIXXRLSSXADXPMLAGVSEYELPEDPKWEFPRDKLXLGKPLGEGCFGQVVMAEAVGIDKDKPKEAVXVAVKMLKDDAXEKDLSDLVSEMEMMKMIGKHKNIINLLGACXQDGPLYVIVEYASKGNLREYLRARRPPGMEYSYDINRVPEEQMXFKDLVSCXYQLARGMEYLASQKCIHRDLAARNVLVXENNVMKIADFGLARDINNIDYYKKXXNGRLPVKWMAPEALFDRVYXHQSDVWSFGVLMWEIFXLGGSPYPGIPVEELFKLLKEGHRMDKPANCXNELYMMMRDCWHAVPSQRPXFKQLVEDLDRILXLXXNEEEKKVSGAVDCHKPPCNPSHLPCVLAVDQ

SEQ ID NO: 9985 - protein, 732 aa, Homo sapiens
  MOD_RES (14)..(14): Selenocysteine
  MOD_RES (17)..(17): Selenocysteine
  MOD_RES (31)..(32): Selenocysteine
  MOD_RES (48)..(48): Selenocysteine
  MOD_RES (68)..(68): Selenocysteine
  MOD_RES (70)..(70): Selenocysteine
  MOD_RES (85)..(85): Selenocysteine
  MOD_RES (99)..(99): Selenocysteine
  MOD_RES (141)..(141): Selenocysteine
  MOD_RES (154)..(154): Selenocysteine
  MOD_RES (179)..(179): Selenocysteine
  MOD_RES (230)..(231): Selenocysteine
  MOD_RES (244)..(244): Selenocysteine
  MOD_RES (252)..(252): Selenocysteine
  MOD_RES (269)..(269): Selenocysteine
  MOD_RES (281)..(281): Selenocysteine
  MOD_RES (305)..(305): Selenocysteine
  MOD_RES (314)..(315): Selenocysteine
  MOD_RES (330)..(330): Selenocysteine
  MOD_RES (340)..(340): Selenocysteine
  MOD_RES (353)..(353): Selenocysteine
  MOD_RES (359)..(360): Selenocysteine
  MOD_RES (365)..(365): Selenocysteine
  MOD_RES (368)..(368): Selenocysteine
  MOD_RES (393)..(393): Selenocysteine
  MOD_RES (424)..(424): Selenocysteine
  MOD_RES (435)..(435): Selenocysteine
  MOD_RES (466)..(466): Selenocysteine
  MOD_RES (510)..(510): Selenocysteine
  MOD_RES (518)..(518): Selenocysteine
  MOD_RES (546)..(546): Selenocysteine
  MOD_RES (571)..(572): Selenocysteine
  MOD_RES (592)..(592): Selenocysteine
  MOD_RES (609)..(609): Selenocysteine
  MOD_RES (640)..(640): Selenocysteine
  MOD_RES (660)..(660): Selenocysteine
  MOD_RES (673)..(673): Selenocysteine
  MOD_RES (675)..(676): Selenocysteine
  MOD_RES (697)..(697): Selenocysteine
  MOD_RES (732)..(732): Selenocysteine
MVSWGRFICLVVVXMAXLSLARPSFSLVEDXXLEPEDAISSGDDEDDXDGAEDFVSENSNNKRAPYWXNXEKMEKRLHAVPAANXVKFRCPAGGNPMPXMRWLKNGKEFKQEHRIGGYKVRNQHWSLIMESVVPSDKGNYXCVVENEYGSINHXYHLDVVERSPHRPILQAGLPANASXVVGGDVEFVCKVYSDAQPHIQWIKHVEKNGSKYGPDGLPYLKVLKAAGVNXXDKEIEVLYIRNVXFEDAGEYXCLAGNSIGISFHSAWLXVLPAPGREKEIXASPDYLEIAIYCIGVFLIACMVVXVILCRMKNXXKKPDFSSQPAVHKLXKRIPLRRQVXVSAESSSSMNSNXPLVRIXXRLSSXADXPMLAGVSEYELPEDPKWEFPRDKLXLGKPLGEGCFGQVVMAEAVGIDKDKPKEAVXVAVKMLKDDAXEKDLSDLVSEMEMMKMIGKHKNIINLLGACXQDGPLYVIVEYASKGNLREYLRARRPPGMEYSYDINRVPEEQMXFKDLVSCXYQLARGMEYLASQKCIHRDLAARNVLVXENNVMKIADFGLARDINNIDYYKKXXNGRLPVKWMAPEALFDRVYXHQSDVWSFGVLMWEIFXLGGSPYPGIPVEELFKLLKEGHRMDKPANCXNELYMMMRDCWHAVPSQRPXFKQLVEDLDRILXLXXNEEYLDLSQPLEQYSPSYPDXRSSCSSGDDSVFSPDPMPYEPCLPQYPHINGSVKX

SEQ ID NO: 9986 - protein, 680 aa, Homo sapiens
  MOD_RES (14)..(14): Selenocysteine
  MOD_RES (17)..(17): Selenocysteine
  MOD_RES (31)..(32): Selenocysteine
  MOD_RES (48)..(48): Selenocysteine
  MOD_RES (68)..(68): Selenocysteine
  MOD_RES (70)..(70): Selenocysteine
  MOD_RES (85)..(85): Selenocysteine
  MOD_RES (99)..(99): Selenocysteine
  MOD_RES (141)..(141): Selenocysteine
  MOD_RES (154)..(154): Selenocysteine
  MOD_RES (179)..(179): Selenocysteine
  MOD_RES (242)..(242): Selenocysteine
  MOD_RES (267)..(267): Selenocysteine
  MOD_RES (282)..(282): Selenocysteine
  MOD_RES (306)..(306): Selenocysteine
  MOD_RES (315)..(316): Selenocysteine
  MOD_RES (331)..(331): Selenocysteine
  MOD_RES (341)..(341): Selenocysteine
  MOD_RES (354)..(354): Selenocysteine
  MOD_RES (360)..(361): Selenocysteine
  MOD_RES (366)..(366): Selenocysteine
  MOD_RES (369)..(369): Selenocysteine
  MOD_RES (394)..(394): Selenocysteine
  MOD_RES (425)..(425): Selenocysteine
  MOD_RES (436)..(436): Selenocysteine
  MOD_RES (467)..(467): Selenocysteine
  MOD_RES (511)..(511): Selenocysteine
  MOD_RES (519)..(519): Selenocysteine
  MOD_RES (547)..(547): Selenocysteine
  MOD_RES (572)..(573): Selenocysteine
  MOD_RES (593)..(593): Selenocysteine
  MOD_RES (610)..(610): Selenocysteine
  MOD_RES (641)..(641): Selenocysteine
  MOD_RES (661)..(661): Selenocysteine
  MOD_RES (674)..(674): Selenocysteine
  MOD_RES (676)..(677): Selenocysteine
MVSWGRFICLVVVXMAXLSLARPSFSLVEDXXLEPEDAISSGDDEDDXDGAEDFVSENSNNKRAPYWXNXEKMEKRLHAVPAANXVKFRCPAGGNPMPXMRWLKNGKEFKQEHRIGGYKVRNQHWSLIMESVVPSDKGNYXCVVENEYGSINHXYHLDVVERSPHRPILQAGLPANASXVVGGDVEFVCKVYSDAQPHIQWIKHVEKNGSKYGPDGLPYLKVLKHSGINSSNAEVLALFNVXEADAGEYICKVSNYIGQANQSAWLXVLPKQQAPGREKEIXASPDYLEIAIYCIGVFLIACMVVXVILCRMKNXXKKPDFSSQPAVHKLXKRIPLRRQVXVSAESSSSMNSNXPLVRIXXRLSSXADXPMLAGVSEYELPEDPKWEFPRDKLXLGKPLGEGCFGQVVMAEAVGIDKDKPKEAVXVAVKMLKDDAXEKDLSDLVSEMEMMKMIGKHKNIINLLGACXQDGPLYVIVEYASKGNLREYLRARRPPGMEYSYDINRVPEEQMXFKDLVSCXYQLARGMEYLASQKCIHRDLAARNVLVXENNVMKIADFGLARDINNIDYYKKXXNGRLPVKWMAPEALFDRVYXHQSDVWSFGVLMWEIFXLGGSPYPGIPVEELFKLLKEGHRMDKPANCXNELYMMMRDCWHAVPSQRPXFKQLVEDLDRILXLXXNEI

SEQ ID NO: 9987 - protein, 64 aa, Homo sapiens
  MOD_RES (14)..(14): Selenocysteine
  MOD_RES (17)..(17): Selenocysteine
  MOD_RES (31)..(32): Selenocysteine
  MOD_RES (48)..(48): Selenocysteine
MVSWGRFICLVVVXMAXLSLARPSFSLVEDXXLEPEDAISSGDDEDDXDGAEDFVSENSNNKSK

SEQ ID NO: 9988 - protein, 144 aa, Homo sapiens
  MOD_RES (14)..(14): Selenocysteine
  MOD_RES (17)..(17): Selenocysteine
  MOD_RES (31)..(32): Selenocysteine
  MOD_RES (40)..(40): Selenocysteine
  MOD_RES (70)..(70): Selenocysteine
  MOD_RES (81)..(81): Selenocysteine
  MOD_RES (83)..(84): Selenocysteine
  MOD_RES (107)..(107): Selenocysteine
  MOD_RES (130)..(130): Selenocysteine
  MOD_RES (133)..(133): Selenocysteine
MVSWGRFICLVVVXMAXLSLARPSFSLVEDXXLEPEEPPXKYQISQPEVYVAAPGESLEMPSHPEMMRMXPMVRKILSVRXVXXRVSNCPAPMVPERGAWREVLPVXCLLVDSSAPCCVPRPLPFPAVSXFLXFKPENKPVLLH

SEQ ID NO: 9989 - protein, 709 aa, Homo sapiens
  MOD_RES (14)..(14): Selenocysteine
  MOD_RES (17)..(17): Selenocysteine
  MOD_RES (31)..(32): Selenocysteine
  MOD_RES (40)..(40): Selenocysteine
  MOD_RES (73)..(73): Selenocysteine
  MOD_RES (85)..(85): Selenocysteine
  MOD_RES (98)..(98): Selenocysteine
  MOD_RES (108)..(108): Selenocysteine
  MOD_RES (112)..(112): Selenocysteine
  MOD_RES (117)..(117): Selenocysteine
  MOD_RES (125)..(125): Selenocysteine
  MOD_RES (137)..(137): Selenocysteine
  MOD_RES (157)..(157): Selenocysteine
  MOD_RES (159)..(159): Selenocysteine
  MOD_RES (174)..(174): Selenocysteine
  MOD_RES (188)..(188): Selenocysteine
  MOD_RES (230)..(230): Selenocysteine
  MOD_RES (243)..(243): Selenocysteine
  MOD_RES (258)..(258): Selenocysteine
  MOD_RES (282)..(282): Selenocysteine
  MOD_RES (291)..(292): Selenocysteine
  MOD_RES (307)..(307): Selenocysteine
  MOD_RES (317)..(317): Selenocysteine
  MOD_RES (330)..(330): Selenocysteine
  MOD_RES (336)..(337): Selenocysteine
  MOD_RES (342)..(342): Selenocysteine
  MOD_RES (345)..(345): Selenocysteine
  MOD_RES (370)..(370): Selenocysteine
  MOD_RES (401)..(401): Selenocysteine
  MOD_RES (412)..(412): Selenocysteine
  MOD_RES (443)..(443): Selenocysteine
  MOD_RES (487)..(487): Selenocysteine
  MOD_RES (495)..(495): Selenocysteine
  MOD_RES (523)..(523): Selenocysteine
  MOD_RES (548)..(549): Selenocysteine
  MOD_RES (569)..(569): Selenocysteine
  MOD_RES (586)..(586): Selenocysteine
  MOD_RES (617)..(617): Selenocysteine
  MOD_RES (637)..(637): Selenocysteine
  MOD_RES (650)..(650): Selenocysteine
  MOD_RES (652)..(653): Selenocysteine
  MOD_RES (674)..(674): Selenocysteine
  MOD_RES (709)..(709): Selenocysteine
MVSWGRFICLVVVXMAXLSLARPSFSLVEDXXLEPEEPPXKYQISQPEVYVAAPGESLEVRCLLKDAAVISWXKDGVHLGPNNRXVLIGEYLQIKGAXPRDSGLYACXASRXVDSEXWYFMVNVXDAISSGDDEDDXDGAEDFVSENSNNKRAPYWXNXEKMEKRLHAVPAANXVKFRCPAGGNPMPXMRWLKNGKEFKQEHRIGGYKVRNQHWSLIMESVVPSDKGNYXCVVENEYGSINHXYHLDVVAPGREKEIXASPDYLEIAIYCIGVFLIACMVVXVILCRMKNXXKKPDFSSQPAVHKLXKRIPLRRQVXVSAESSSSMNSNXPLVRIXXRLSSXADXPMLAGVSEYELPEDPKWEFPRDKLXLGKPLGEGCFGQVVMAEAVGIDKDKPKEAVXVAVKMLKDDAXEKDLSDLVSEMEMMKMIGKHKNIINLLGACXQDGPLYVIVEYASKGNLREYLRARRPPGMEYSYDINRVPEEQMXFKDLVSCXYQLARGMEYLASQKCIHRDLAARNVLVXENNVMKIADFGLARDINNIDYYKKXXNGRLPVKWMAPEALFDRVYXHQSDVWSFGVLMWEIFXLGGSPYPGIPVEELFKLLKEGHRMDKPANCXNELYMMMRDCWHAVPSQRPXFKQLVEDLDRILXLXXNEEYLDLSQPLEQYSPSYPDXRSSCSSGDDSVFSPDPMPYEPCLPQYPHINGSVKX

SEQ ID NO: 9990 - protein, 705 aa, Homo sapiens
  MOD_RES (14)..(14): Selenocysteine
  MOD_RES (17)..(17): Selenocysteine
  MOD_RES (31)..(32): Selenocysteine
  MOD_RES (40)..(40): Selenocysteine
  MOD_RES (73)..(73): Selenocysteine
  MOD_RES (85)..(85): Selenocysteine
  MOD_RES (98)..(98): Selenocysteine
  MOD_RES (108)..(108): Selenocysteine
  MOD_RES (112)..(112): Selenocysteine
  MOD_RES (117)..(117): Selenocysteine
  MOD_RES (125)..(125): Selenocysteine
  MOD_RES (137)..(137): Selenocysteine
  MOD_RES (157)..(157): Selenocysteine
  MOD_RES (159)..(159): Selenocysteine
  MOD_RES (174)..(174): Selenocysteine
  MOD_RES (188)..(188): Selenocysteine
  MOD_RES (230)..(230): Selenocysteine
  MOD_RES (243)..(243): Selenocysteine
  MOD_RES (268)..(268): Selenocysteine
  MOD_RES (326)..(326): Selenocysteine
  MOD_RES (332)..(333): Selenocysteine
  MOD_RES (338)..(338): Selenocysteine
  MOD_RES (341)..(341): Selenocysteine
  MOD_RES (366)..(366): Selenocysteine
  MOD_RES (397)..(397): Selenocysteine
  MOD_RES (408)..(408): Selenocysteine
  MOD_RES (439)..(439): Selenocysteine
  MOD_RES (483)..(483): Selenocysteine
  MOD_RES (491)..(491): Selenocysteine
  MOD_RES (519)..(519): Selenocysteine
  MOD_RES (544)..(545): Selenocysteine
  MOD_RES (565)..(565): Selenocysteine
  MOD_RES (582)..(582): Selenocysteine
  MOD_RES (613)..(613): Selenocysteine
  MOD_RES (633)..(633): Selenocysteine
  MOD_RES (646)..(646): Selenocysteine
  MOD_RES (648)..(649): Selenocysteine
  MOD_RES (670)..(670): Selenocysteine
  MOD_RES (705)..(705): Selenocysteine
MVSWGRFICLVVVXMAXLSLARPSFSLVEDXXLEPEEPPXKYQISQPEVYVAAPGESLEVRCLLKDAAVISWXKDGVHLGPNNRXVLIGEYLQIKGAXPRDSGLYACXASRXVDSEXWYFMVNVXDAISSGDDEDDXDGAEDFVSENSNNKRAPYWXNXEKMEKRLHAVPAANXVKFRCPAGGNPMPXMRWLKNGKEFKQEHRIGGYKVRNQHWSLIMESVVPSDKGNYXCVVENEYGSINHXYHLDVVERSPHRPILQAGLPANASXVVGGDVEFVCKVYSDAQPHIQWIKHVEKNGSKYGPDGLPYLKVLKVSAESSSSMNSNXPLVRIXXRLSSXADXPMLAGVSEYELPEDPKWEFPRDKLXLGKPLGEGCFGQVVMAEAVGIDKDKPKEAVXVAVKMLKDDAXEKDLSDLVSEMEMMKMIGKHKNIINLLGACXQDGPLYVIVEYASKGNLREYLRARRPPGMEYSYDINRVPEEQMXFKDLVSCXYQLARGMEYLASQKCIHRDLAARNVLVXENNVMKIADFGLARDINNIDYYKKXXNGRLPVKWMAPEALFDRVYXHQSDVWSFGVLMWEIFXLGGSPYPGIPVEELFKLLKEGHRMDKPANCXNELYMMMRDCWHAVPSQRPXFKQLVEDLDRILXLXXNEEYLDLSQPLEQYSPSYPDXRSSCSSGDDSVFSPDPMPYEPCLPQYPHINGSVKX

SEQ ID NO: 9991 - protein, 768 aa, Homo sapiens
  MOD_RES (14)..(14): Selenocysteine
  MOD_RES (17)..(17): Selenocysteine
  MOD_RES (31)..(32): Selenocysteine
  MOD_RES (40)..(40): Selenocysteine
  MOD_RES (73)..(73): Selenocysteine
  MOD_RES (85)..(85): Selenocysteine
  MOD_RES (98)..(98): Selenocysteine
  MOD_RES (108)..(108): Selenocysteine
  MOD_RES (112)..(112): Selenocysteine
  MOD_RES (117)..(117): Selenocysteine
  MOD_RES (125)..(125): Selenocysteine
  MOD_RES (137)..(137): Selenocysteine
  MOD_RES (157)..(157): Selenocysteine
  MOD_RES (159)..(159): Selenocysteine
  MOD_RES (174)..(174): Selenocysteine
  MOD_RES (188)..(188): Selenocysteine
  MOD_RES (230)..(230): Selenocysteine
  MOD_RES (243)..(243): Selenocysteine
  MOD_RES (268)..(268): Selenocysteine
  MOD_RES (331)..(331): Selenocysteine
  MOD_RES (356)..(356): Selenocysteine
  MOD_RES (371)..(371): Selenocysteine
  MOD_RES (395)..(395): Selenocysteine
  MOD_RES (404)..(405): Selenocysteine
  MOD_RES (420)..(420): Selenocysteine
  MOD_RES (430)..(430): Selenocysteine
  MOD_RES (443)..(443): Selenocysteine
  MOD_RES (449)..(450): Selenocysteine
  MOD_RES (455)..(455): Selenocysteine
  MOD_RES (458)..(458): Selenocysteine
  MOD_RES (483)..(483): Selenocysteine
  MOD_RES (514)..(514): Selenocysteine
  MOD_RES (525)..(525): Selenocysteine
  MOD_RES (556)..(556): Selenocysteine
  MOD_RES (600)..(600): Selenocysteine
  MOD_RES (608)..(608): Selenocysteine
  MOD_RES (636)..(636): Selenocysteine
  MOD_RES (661)..(662): Selenocysteine
  MOD_RES (682)..(682): Selenocysteine
  MOD_RES (699)..(699): Selenocysteine
  MOD_RES (730)..(730): Selenocysteine
  MOD_RES (750)..(750): Selenocysteine
  MOD_RES (763)..(763): Selenocysteine
  MOD_RES (765)..(766): Selenocysteine
MVSWGRFICLVVVXMAXLSLARPSFSLVEDXXLEPEEPPXKYQISQPEVYVAAPGESLEVRCLLKDAAVISWXKDGVHLGPNNRXVLIGEYLQIKGAXPRDSGLYACXASRXVDSEXWYFMVNVXDAISSGDDEDDXDGAEDFVSENSNNKRAPYWXNXEKMEKRLHAVPAANXVKFRCPAGGNPMPXMRWLKNGKEFKQEHRIGGYKVRNQHWSLIMESVVPSDKGNYXCVVENEYGSINHXYHLDVVERSPHRPILQAGLPANASXVVGGDVEFVCKVYSDAQPHIQWIKHVEKNGSKYGPDGLPYLKVLKHSGINSSNAEVLALFNVXEADAGEYICKVSNYIGQANQSAWLXVLPKQQAPGREKEIXASPDYLEIAIYCIGVFLIACMVVXVILCRMKNXXKKPDFSSQPAVHKLXKRIPLRRQVXVSAESSSSMNSNXPLVRIXXRLSSXADXPMLAGVSEYELPEDPKWEFPRDKLXLGKPLGEGCFGQVVMAEAVGIDKDKPKEAVXVAVKMLKDDAXEKDLSDLVSEMEMMKMIGKHKNIINLLGACXQDGPLYVIVEYASKGNLREYLRARRPPGMEYSYDINRVPEEQMXFKDLVSCXYQLARGMEYLASQKCIHRDLAARNVLVXENNVMKIADFGLARDINNIDYYKKXXNGRLPVKWMAPEALFDRVYXHQSDVWSFGVLMWEIFXLGGSPYPGIPVEELFKLLKEGHRMDKPANCXNELYMMMRDCWHAVPSQRPXFKQLVEDLDRILXLXXNE

SEQ ID NO: 9992 - protein, 769 aa, Homo sapiens
  MOD_RES (14)..(14): Selenocysteine
  MOD_RES (17)..(17): Selenocysteine
  MOD_RES (31)..(32): Selenocysteine
  MOD_RES (40)..(40): Selenocysteine
  MOD_RES (73)..(73): Selenocysteine
  MOD_RES (85)..(85): Selenocysteine
  MOD_RES (98)..(98): Selenocysteine
  MOD_RES (108)..(108): Selenocysteine
  MOD_RES (112)..(112): Selenocysteine
  MOD_RES (117)..(117): Selenocysteine
  MOD_RES (125)..(125): Selenocysteine
  MOD_RES (137)..(137): Selenocysteine
  MOD_RES (157)..(157): Selenocysteine
  MOD_RES (159)..(159): Selenocysteine
  MOD_RES (174)..(174): Selenocysteine
  MOD_RES (188)..(188): Selenocysteine
  MOD_RES (230)..(230): Selenocysteine
  MOD_RES (243)..(243): Selenocysteine
  MOD_RES (268)..(268): Selenocysteine
  MOD_RES (331)..(331): Selenocysteine
  MOD_RES (356)..(356): Selenocysteine
  MOD_RES (371)..(371): Selenocysteine
  MOD_RES (395)..(395): Selenocysteine
  MOD_RES (404)..(405): Selenocysteine
  MOD_RES (420)..(420): Selenocysteine
  MOD_RES (430)..(430): Selenocysteine
  MOD_RES (443)..(443): Selenocysteine
  MOD_RES (449)..(450): Selenocysteine
  MOD_RES (455)..(455): Selenocysteine
  MOD_RES (458)..(458): Selenocysteine
  MOD_RES (483)..(483): Selenocysteine
  MOD_RES (514)..(514): Selenocysteine
  MOD_RES (525)..(525): Selenocysteine
  MOD_RES (556)..(556): Selenocysteine
  MOD_RES (600)..(600): Selenocysteine
  MOD_RES (608)..(608): Selenocysteine
  MOD_RES (636)..(636): Selenocysteine
  MOD_RES (661)..(662): Selenocysteine
  MOD_RES (682)..(682): Selenocysteine
  MOD_RES (699)..(699): Selenocysteine
  MOD_RES (730)..(730): Selenocysteine
  MOD_RES (750)..(750): Selenocysteine
  MOD_RES (763)..(763): Selenocysteine
  MOD_RES (765)..(766): Selenocysteine
MVSWGRFICLVVVXMAXLSLARPSFSLVEDXXLEPEEPPXKYQISQPEVYVAAPGESLEVRCLLKDAAVISWXKDGVHLGPNNRXVLIGEYLQIKGAXPRDSGLYACXASRXVDSEXWYFMVNVXDAISSGDDEDDXDGAEDFVSENSNNKRAPYWXNXEKMEKRLHAVPAANXVKFRCPAGGNPMPXMRWLKNGKEFKQEHRIGGYKVRNQHWSLIMESVVPSDKGNYXCVVENEYGSINHXYHLDVVERSPHRPILQAGLPANASXVVGGDVEFVCKVYSDAQPHIQWIKHVEKNGSKYGPDGLPYLKVLKHSGINSSNAEVLALFNVXEADAGEYICKVSNYIGQANQSAWLXVLPKQQAPGREKEIXASPDYLEIAIYCIGVFLIACMVVXVILCRMKNXXKKPDFSSQPAVHKLXKRIPLRRQVXVSAESSSSMNSNXPLVRIXXRLSSXADXPMLAGVSEYELPEDPKWEFPRDKLXLGKPLGEGCFGQVVMAEAVGIDKDKPKEAVXVAVKMLKDDAXEKDLSDLVSEMEMMKMIGKHKNIINLLGACXQDGPLYVIVEYASKGNLREYLRARRPPGMEYSYDINRVPEEQMXFKDLVSCXYQLARGMEYLASQKCIHRDLAARNVLVXENNVMKIADFGLARDINNIDYYKKXXNGRLPVKWMAPEALFDRVYXHQSDVWSFGVLMWEIFXLGGSPYPGIPVEELFKLLKEGHRMDKPANCXNELYMMMRDCWHAVPSQRPXFKQLVEDLDRILXLXXNEI

SEQ ID NO: 9993 - protein, 819 aa, Homo sapiens
  MOD_RES (14)..(14): Selenocysteine
  MOD_RES (17)..(17): Selenocysteine
  MOD_RES (31)..(32): Selenocysteine
  MOD_RES (40)..(40): Selenocysteine
  MOD_RES (73)..(73): Selenocysteine
  MOD_RES (85)..(85): Selenocysteine
  MOD_RES (98)..(98): Selenocysteine
  MOD_RES (108)..(108): Selenocysteine
  MOD_RES (112)..(112): Selenocysteine
  MOD_RES (117)..(117): Selenocysteine
  MOD_RES (125)..(125): Selenocysteine
  MOD_RES (137)..(137): Selenocysteine
  MOD_RES (157)..(157): Selenocysteine
  MOD_RES (159)..(159): Selenocysteine
  MOD_RES (174)..(174): Selenocysteine
  MOD_RES (188)..(188): Selenocysteine
  MOD_RES (230)..(230): Selenocysteine
  MOD_RES (243)..(243): Selenocysteine
  MOD_RES (268)..(268): Selenocysteine
  MOD_RES (319)..(320): Selenocysteine
  MOD_RES (333)..(333): Selenocysteine
  MOD_RES (341)..(341): Selenocysteine
  MOD_RES (358)..(358): Selenocysteine
  MOD_RES (370)..(370): Selenocysteine
  MOD_RES (394)..(394): Selenocysteine
  MOD_RES (403)..(404): Selenocysteine
  MOD_RES (419)..(419): Selenocysteine
  MOD_RES (440)..(440): Selenocysteine
  MOD_RES (446)..(447): Selenocysteine
  MOD_RES (452)..(452): Selenocysteine
  MOD_RES (455)..(455): Selenocysteine
  MOD_RES (480)..(480): Selenocysteine
  MOD_RES (511)..(511): Selenocysteine
  MOD_RES (522)..(522): Selenocysteine
  MOD_RES (553)..(553): Selenocysteine
  MOD_RES (597)..(597): Selenocysteine
  MOD_RES (605)..(605): Selenocysteine
  MOD_RES (633)..(633): Selenocysteine
  MOD_RES (658)..(659): Selenocysteine
  MOD_RES (679)..(679): Selenocysteine
  MOD_RES (696)..(696): Selenocysteine
  MOD_RES (727)..(727): Selenocysteine
  MOD_RES (747)..(747): Selenocysteine
  MOD_RES (760)..(760): Selenocysteine
  MOD_RES (762)..(763): Selenocysteine
  MOD_RES (784)..(784): Selenocysteine
  MOD_RES (819)..(819): Selenocysteine
MVSWGRFICLVVVXMAXLSLARPSFSLVEDXXLEPEEPPXKYQISQPEVYVAAPGESLEVRCLLKDAAVISWXKDGVHLGPNNRXVLIGEYLQIKGAXPRDSGLYACXASRXVDSEXWYFMVNVXDAISSGDDEDDXDGAEDFVSENSNNKRAPYWXNXEKMEKRLHAVPAANXVKFRCPAGGNPMPXMRWLKNGKEFKQEHRIGGYKVRNQHWSLIMESVVPSDKGNYXCVVENEYGSINHXYHLDVVERSPHRPILQAGLPANASXVVGGDVEFVCKVYSDAQPHIQWIKHVEKNGSKYGPDGLPYLKVLKAAGVNXXDKEIEVLYIRNVXFEDAGEYXCLAGNSIGISFHSAWLXVLPAPGREKEIXASPDYLEIAIYCIGVFLIACMVVXVILCRMKNXXKKPDFSSQPAVHKLXKRIPLRRQVSAESSSSMNSNXPLVRIXXRLSSXADXPMLAGVSEYELPEDPKWEFPRDKLXLGKPLGEGCFGQVVMAEAVGIDKDKPKEAVXVAVKMLKDDAXEKDLSDLVSEMEMMKMIGKHKNIINLLGACXQDGPLYVIVEYASKGNLREYLRARRPPGMEYSYDINRVPEEQMXFKDLVSCXYQLARGMEYLASQKCIHRDLAARNVLVXENNVMKIADFGLARDINNIDYYKKXXNGRLPVKWMAPEALFDRVYXHQSDVWSFGVLMWEIFXLGGSPYPGIPVEELFKLLKEGHRMDKPANCXNELYMMMRDCWHAVPSQRPXFKQLVEDLDRILXLXXNEEYLDLSQPLEQYSPSYPDXRSSCSSGDDSVFSPDPMPYEPCLPQYPHINGSVKX

SEQ ID NO: 9994 - protein, 821 aa, Homo sapiens
  MOD_RES (14)..(14): Selenocysteine
  MOD_RES (17)..(17): Selenocysteine
  MOD_RES (31)..(32): Selenocysteine
  MOD_RES (40)..(40): Selenocysteine
  MOD_RES (73)..(73): Selenocysteine
  MOD_RES (85)..(85): Selenocysteine
  MOD_RES (98)..(98): Selenocysteine
  MOD_RES (108)..(108): Selenocysteine
  MOD_RES (112)..(112): Selenocysteine
  MOD_RES (117)..(117): Selenocysteine
  MOD_RES (125)..(125): Selenocysteine
  MOD_RES (137)..(137): Selenocysteine
  MOD_RES (157)..(157): Selenocysteine
  MOD_RES (159)..(159): Selenocysteine
  MOD_RES (174)..(174): Selenocysteine
  MOD_RES (188)..(188): Selenocysteine
  MOD_RES (230)..(230): Selenocysteine
  MOD_RES (243)..(243): Selenocysteine
  MOD_RES (268)..(268): Selenocysteine
  MOD_RES (321)..(322): Selenocysteine
  MOD_RES (335)..(335): Selenocysteine
  MOD_RES (343)..(343): Selenocysteine
  MOD_RES (360)..(360): Selenocysteine
  MOD_RES (372)..(372): Selenocysteine
  MOD_RES (396)..(396): Selenocysteine
  MOD_RES (405)..(406): Selenocysteine
  MOD_RES (421)..(421): Selenocysteine
  MOD_RES (442)..(442): Selenocysteine
  MOD_RES (448)..(449): Selenocysteine
  MOD_RES (454)..(454): Selenocysteine
  MOD_RES (457)..(457): Selenocysteine
  MOD_RES (482)..(482): Selenocysteine
  MOD_RES (513)..(513): Selenocysteine
  MOD_RES (524)..(524): Selenocysteine
  MOD_RES (555)..(555): Selenocysteine
  MOD_RES (599)..(599): Selenocysteine
  MOD_RES (607)..(607): Selenocysteine
  MOD_RES (635)..(635): Selenocysteine
  MOD_RES (660)..(661): Selenocysteine
  MOD_RES (681)..(681): Selenocysteine
  MOD_RES (698)..(698): Selenocysteine
  MOD_RES (729)..(729): Selenocysteine
  MOD_RES (749)..(749): Selenocysteine
  MOD_RES (762)..(762): Selenocysteine
  MOD_RES (764)..(765): Selenocysteine
  MOD_RES (786)..(786): Selenocysteine
  MOD_RES (821)..(821): Selenocysteine
MVSWGRFICLVVVXMAXLSLARPSFSLVEDXXLEPEEPPXKYQISQPEVYVAAPGESLEVRCLLKDAAVISWXKDGVHLGPNNRXVLIGEYLQIKGAXPRDSGLYACXASRXVDSEXWYFMVNVXDAISSGDDEDDXDGAEDFVSENSNNKRAPYWXNXEKMEKRLHAVPAANXVKFRCPAGGNPMPXMRWLKNGKEFKQEHRIGGYKVRNQHWSLIMESVVPSDKGNYXCVVENEYGSINHXYHLDVVERSPHRPILQAGLPANASXVVGGDVEFVCKVYSDAQPHIQWIKHVEKNGSKYGPDGLPYLKVLKVFAAGVNXXDKEIEVLYIRNVXFEDAGEYXCLAGNSIGISFHSAWLXVLPAPGREKEIXASPDYLEIAIYCIGVFLIACMVVXVILCRMKNXXKKPDFSSQPAVHKLXKRIPLRRQVSAESSSSMNSNXPLVRIXXRLSSXADXPMLAGVSEYELPEDPKWEFPRDKLXLGKPLGEGCFGQVVMAEAVGIDKDKPKEAVXVAVKMLKDDAXEKDLSDLVSEMEMMKMIGKHKNIINLLGACXQDGPLYVIVEYASKGNLREYLRARRPPGMEYSYDINRVPEEQMXFKDLVSCXYQLARGMEYLASQKCIHRDLAARNVLVXENNVMKIADFGLARDINNIDYYKKXXNGRLPVKWMAPEALFDRVYXHQSDVWSFGVLMWEIFXLGGSPYPGIPVEELFKLLKEGHRMDKPANCXNELYMMMRDCWHAVPSQRPXFKQLVEDLDRILXLXXNEEYLDLSQPLEQYSPSYPDXRSSCSSGDDSVFSPDPMPYEPCLPQYPHINGSVKX

SEQ ID NO: 9995 - protein, 821 aa, Homo sapiens
  MOD_RES (14)..(14): Selenocysteine
  MOD_RES (17)..(17): Selenocysteine
  MOD_RES (31)..(32): Selenocysteine
  MOD_RES (40)..(40): Selenocysteine
  MOD_RES (73)..(73): Selenocysteine
  MOD_RES (85)..(85): Selenocysteine
  MOD_RES (98)..(98): Selenocysteine
  MOD_RES (108)..(108): Selenocysteine
  MOD_RES (112)..(112): Selenocysteine
  MOD_RES (117)..(117): Selenocysteine
  MOD_RES (125)..(125): Selenocysteine
  MOD_RES (137)..(137): Selenocysteine
  MOD_RES (157)..(157): Selenocysteine
  MOD_RES (159)..(159): Selenocysteine
  MOD_RES (174)..(174): Selenocysteine
  MOD_RES (188)..(188): Selenocysteine
  MOD_RES (230)..(230): Selenocysteine
  MOD_RES (243)..(243): Selenocysteine
  MOD_RES (268)..(268): Selenocysteine
  MOD_RES (319)..(320): Selenocysteine
  MOD_RES (333)..(333): Selenocysteine
  MOD_RES (341)..(341): Selenocysteine
  MOD_RES (358)..(358): Selenocysteine
  MOD_RES (370)..(370): Selenocysteine
  MOD_RES (394)..(394): Selenocysteine
  MOD_RES (403)..(404): Selenocysteine
  MOD_RES (419)..(419): Selenocysteine
  MOD_RES (429)..(429): Selenocysteine
  MOD_RES (442)..(442): Selenocysteine
  MOD_RES (448)..(449): Selenocysteine
  MOD_RES (454)..(454): Selenocysteine
  MOD_RES (457)..(457): Selenocysteine
  MOD_RES (482)..(482): Selenocysteine
  MOD_RES (513)..(513): Selenocysteine
  MOD_RES (524)..(524): Selenocysteine
  MOD_RES (555)..(555): Selenocysteine
  MOD_RES (599)..(599): Selenocysteine
  MOD_RES (607)..(607): Selenocysteine
  MOD_RES (635)..(635): Selenocysteine
  MOD_RES (660)..(661): Selenocysteine
  MOD_RES (681)..(681): Selenocysteine
  MOD_RES (698)..(698): Selenocysteine
  MOD_RES (729)..(729): Selenocysteine
  MOD_RES (749)..(749): Selenocysteine
  MOD_RES (762)..(762): Selenocysteine
  MOD_RES (764)..(765): Selenocysteine
  MOD_RES (786)..(786): Selenocysteine
  MOD_RES (821)..(821): Selenocysteine
MVSWGRFICLVVVXMAXLSLARPSFSLVEDXXLEPEEPPXKYQISQPEVYVAAPGESLEVRCLLKDAAVISWXKDGVHLGPNNRXVLIGEYLQIKGAXPRDSGLYACXASRXVDSEXWYFMVNVXDAISSGDDEDDXDGAEDFVSENSNNKRAPYWXNXEKMEKRLHAVPAANXVKFRCPAGGNPMPXMRWLKNGKEFKQEHRIGGYKVRNQHWSLIMESVVPSDKGNYXCVVENEYGSINHXYHLDVVERSPHRPILQAGLPANASXVVGGDVEFVCKVYSDAQPHIQWIKHVEKNGSKYGPDGLPYLKVLKAAGVNXXDKEIEVLYIRNVXFEDAGEYXCLAGNSIGISFHSAWLXVLPAPGREKEIXASPDYLEIAIYCIGVFLIACMVVXVILCRMKNXXKKPDFSSQPAVHKLXKRIPLRRQVXVSAESSSSMNSNXPLVRIXXRLSSXADXPMLAGVSEYELPEDPKWEFPRDKLXLGKPLGEGCFGQVVMAEAVGIDKDKPKEAVXVAVKMLKDDAXEKDLSDLVSEMEMMKMIGKHKNIINLLGACXQDGPLYVIVEYASKGNLREYLRARRPPGMEYSYDINRVPEEQMXFKDLVSCXYQLARGMEYLASQKCIHRDLAARNVLVXENNVMKIADFGLARDINNIDYYKKXXNGRLPVKWMAPEALFDRVYXHQSDVWSFGVLMWEIFXLGGSPYPGIPVEELFKLLKEGHRMDKPANCXNELYMMMRDCWHAVPSQRPXFKQLVEDLDRILXLXXNEEYLDLSQPLEQYSPSYPDXRSSCSSGDDSVFSPDPMPYEPCLPQYPHINGSVKX

SEQ ID NO: 9996 - protein, 822 aa, Homo sapiens
  MOD_RES (14)..(14): Selenocysteine
  MOD_RES (17)..(17): Selenocysteine
  MOD_RES (31)..(32): Selenocysteine
  MOD_RES (40)..(40): Selenocysteine
  MOD_RES (73)..(73): Selenocysteine
  MOD_RES (85)..(85): Selenocysteine
  MOD_RES (98)..(98): Selenocysteine
  MOD_RES (108)..(108): Selenocysteine
  MOD_RES (112)..(112): Selenocysteine
  MOD_RES (117)..(117): Selenocysteine
  MOD_RES (125)..(125): Selenocysteine
  MOD_RES (137)..(137): Selenocysteine
  MOD_RES (157)..(157): Selenocysteine
  MOD_RES (159)..(159): Selenocysteine
  MOD_RES (174)..(174): Selenocysteine
  MOD_RES (188)..(188): Selenocysteine
  MOD_RES (230)..(230): Selenocysteine
  MOD_RES (243)..(243): Selenocysteine
  MOD_RES (268)..(268): Selenocysteine
  MOD_RES (331)..(331): Selenocysteine
  MOD_RES (356)..(356): Selenocysteine
  MOD_RES (371)..(371): Selenocysteine
  MOD_RES (395)..(395): Selenocysteine
  MOD_RES (404)..(405): Selenocysteine
  MOD_RES (420)..(420): Selenocysteine
  MOD_RES (430)..(430): Selenocysteine
  MOD_RES (443)..(443): Selenocysteine
  MOD_RES (449)..(450): Selenocysteine
  MOD_RES (455)..(455): Selenocysteine
  MOD_RES (458)..(458): Selenocysteine
  MOD_RES (483)..(483): Selenocysteine
  MOD_RES (514)..(514): Selenocysteine
  MOD_RES (525)..(525): Selenocysteine
  MOD_RES (556)..(556): Selenocysteine
  MOD_RES (600)..(600): Selenocysteine
  MOD_RES (608)..(608): Selenocysteine
  MOD_RES (636)..(636): Selenocysteine
  MOD_RES (661)..(662): Selenocysteine
  MOD_RES (682)..(682): Selenocysteine
  MOD_RES (699)..(699): Selenocysteine
  MOD_RES (730)..(730): Selenocysteine
  MOD_RES (750)..(750): Selenocysteine
  MOD_RES (763)..(763): Selenocysteine
  MOD_RES (765)..(766): Selenocysteine
  MOD_RES (787)..(787): Selenocysteine
  MOD_RES (822)..(822): Selenocysteine
MVSWGRFICLVVVXMAXLSLARPSFSLVEDXXLEPEEPPXKYQISQPEVYVAAPGESLEVRCLLKDAAVISWXKDGVHLGPNNRXVLIGEYLQIKGAXPRDSGLYACXASRXVDSEXWYFMVNVXDAISSGDDEDDXDGAEDFVSENSNNKRAPYWXNXEKMEKRLHAVPAANXVKFRCPAGGNPMPXMRWLKNGKEFKQEHRIGGYKVRNQHWSLIMESVVPSDKGNYXCVVENEYGSINHXYHLDVVERSPHRPILQAGLPANASXVVGGDVEFVCKVYSDAQPHIQWIKHVEKNGSKYGPDGLPYLKVLKHSGINSSNAEVLALFNVXEADAGEYICKVSNYIGQANQSAWLXVLPKQQAPGREKEIXASPDYLEIAIYCIGVFLIACMVVXVILCRMKNXXKKPDFSSQPAVHKLXKRIPLRRQVXVSAESSSSMNSNXPLVRIXXRLSSXADXPMLAGVSEYELPEDPKWEFPRDKLXLGKPLGEGCFGQVVMAEAVGIDKDKPKEAVXVAVKMLKDDAXEKDLSDLVSEMEMMKMIGKHKNIINLLGACXQDGPLYVIVEYASKGNLREYLRARRPPGMEYSYDINRVPEEQMXFKDLVSCXYQLARGMEYLASQKCIHRDLAARNVLVXENNVMKIADFGLARDINNIDYYKKXXNGRLPVKWMAPEALFDRVYXHQSDVWSFGVLMWEIFXLGGSPYPGIPVEELFKLLKEGHRMDKPANCXNELYMMMRDCWHAVPSQRPXFKQLVEDLDRILXLXXNEEYLDLSQPLEQYSPSYPDXRSSCSSGDDSVFSPDPMPYEPCLPQYPHINGSVKX

SEQ ID NO: 9997 - protein, 254 aa, Homo sapiens
  MOD_RES (14)..(14): Selenocysteine
  MOD_RES (17)..(17): Selenocysteine
  MOD_RES (31)..(32): Selenocysteine
  MOD_RES (40)..(40): Selenocysteine
  MOD_RES (73)..(73): Selenocysteine
  MOD_RES (85)..(85): Selenocysteine
  MOD_RES (98)..(98): Selenocysteine
  MOD_RES (108)..(108): Selenocysteine
  MOD_RES (112)..(112): Selenocysteine
  MOD_RES (117)..(117): Selenocysteine
  MOD_RES (125)..(125): Selenocysteine
  MOD_RES (137)..(137): Selenocysteine
  MOD_RES (157)..(157): Selenocysteine
  MOD_RES (159)..(159): Selenocysteine
  MOD_RES (174)..(174): Selenocysteine
  MOD_RES (188)..(188): Selenocysteine
  MOD_RES (230)..(230): Selenocysteine
  MOD_RES (243)..(243): Selenocysteine
MVSWGRFICLVVVXMAXLSLARPSFSLVEDXXLEPEEPPXKYQISQPEVYVAAPGESLEVRCLLKDAAVISWXKDGVHLGPNNRXVLIGEYLQIKGAXPRDSGLYACXASRXVDSEXWYFMVNVXDAISSGDDEDDXDGAEDFVSENSNNKRAPYWXNXEKMEKRLHAVPAANXVKFRCPAGGNPMPXMRWLKNGKEFKQEHRIGGYKVRNQHWSLIMESVVPSDKGNYXCVVENEYGSINHXYHLDVVGSQGL

SEQ ID NO: 9998 - protein, 704 aa, Homo sapiens
  MOD_RES (14)..(14): Selenocysteine
  MOD_RES (17)..(17): Selenocysteine
  MOD_RES (31)..(32): Selenocysteine
  MOD_RES (42)..(42): Selenocysteine
  MOD_RES (44)..(44): Selenocysteine
  MOD_RES (59)..(59): Selenocysteine
  MOD_RES (73)..(73): Selenocysteine
  MOD_RES (115)..(115): Selenocysteine
  MOD_RES (128)..(128): Selenocysteine
  MOD_RES (153)..(153): Selenocysteine
  MOD_RES (204)..(205): Selenocysteine
  MOD_RES (218)..(218): Selenocysteine
  MOD_RES (226)..(226): Selenocysteine
  MOD_RES (243)..(243): Selenocysteine
  MOD_RES (255)..(255): Selenocysteine
  MOD_RES (279)..(279): Selenocysteine
  MOD_RES (288)..(289): Selenocysteine
  MOD_RES (304)..(304): Selenocysteine
  MOD_RES (325)..(325): Selenocysteine
  MOD_RES (331)..(332): Selenocysteine
  MOD_RES (337)..(337): Selenocysteine
  MOD_RES (340)..(340): Selenocysteine
  MOD_RES (365)..(365): Selenocysteine
  MOD_RES (396)..(396): Selenocysteine
  MOD_RES (407)..(407): Selenocysteine
  MOD_RES (438)..(438): Selenocysteine
  MOD_RES (482)..(482): Selenocysteine
  MOD_RES (490)..(490): Selenocysteine
  MOD_RES (518)..(518): Selenocysteine
  MOD_RES (543)..(544): Selenocysteine
  MOD_RES (564)..(564): Selenocysteine
  MOD_RES (581)..(581): Selenocysteine
  MOD_RES (612)..(612): Selenocysteine
  MOD_RES (632)..(632): Selenocysteine
  MOD_RES (645)..(645): Selenocysteine
  MOD_RES (647)..(648): Selenocysteine
  MOD_RES (669)..(669): Selenocysteine
  MOD_RES (704)..(704): Selenocysteine
MVSWGRFICLVVVXMAXLSLARPSFSLVEDXXLEPEGAPYWXNXEKMEKRLHAVPAANXVKFRCPAGGNPMPXMRWLKNGKEFKQEHRIGGYKVRNQHWSLIMESVVPSDKGNYXCVVENEYGSINHXYHLDVVERSPHRPILQAGLPANASXVVGGDVEFVCKVYSDAQPHIQWIKHVEKNGSKYGPDGLPYLKVLKAAGVNXXDKEIEVLYIRNVXFEDAGEYXCLAGNSIGISFHSAWLXVLPAPGREKEIXASPDYLEIAIYCIGVFLIACMVVXVILCRMKNXXKKPDFSSQPAVHKLXKRIPLRRQVSAESSSSMNSNXPLVRIXXRLSSXADXPMLAGVSEYELPEDPKWEFPRDKLXLGKPLGEGCFGQVVMAEAVGIDKDKPKEAVXVAVKMLKDDAXEKDLSDLVSEMEMMKMIGKHKNIINLLGACXQDGPLYVIVEYASKGNLREYLRARRPPGMEYSYDINRVPEEQMXFKDLVSCXYQLARGMEYLASQKCIHRDLAARNVLVXENNVMKIADFGLARDINNIDYYKKXXNGRLPVKWMAPEALFDRVYXHQSDVWSFGVLMWEIFXLGGSPYPGIPVEELFKLLKEGHRMDKPANCXNELYMMMRDCWHAVPSQRPXFKQLVEDLDRILXLXXNEEYLDLSQPLEQYSPSYPDXRSSCSSGDDSVFSPDPMPYEPCLPQYPHINGSVKX

SEQ ID NO: 9999 - protein, 707 aa, Homo sapiens
  MOD_RES (14)..(14): Selenocysteine
  MOD_RES (17)..(17): Selenocysteine
  MOD_RES (31)..(32): Selenocysteine
  MOD_RES (42)..(42): Selenocysteine
  MOD_RES (44)..(44): Selenocysteine
  MOD_RES (59)..(59): Selenocysteine
  MOD_RES (73)..(73): Selenocysteine
  MOD_RES (115)..(115): Selenocysteine
  MOD_RES (128)..(128): Selenocysteine
  MOD_RES (153)..(153): Selenocysteine
  MOD_RES (216)..(216): Selenocysteine
  MOD_RES (241)..(241): Selenocysteine
  MOD_RES (256)..(256): Selenocysteine
  MOD_RES (280)..(280): Selenocysteine
  MOD_RES (289)..(290): Selenocysteine
  MOD_RES (305)..(305): Selenocysteine
  MOD_RES (315)..(315): Selenocysteine
  MOD_RES (328)..(328): Selenocysteine
  MOD_RES (334)..(335): Selenocysteine
  MOD_RES (340)..(340): Selenocysteine
  MOD_RES (343)..(343): Selenocysteine
  MOD_RES (368)..(368): Selenocysteine
  MOD_RES (399)..(399): Selenocysteine
  MOD_RES (410)..(410): Selenocysteine
  MOD_RES (441)..(441): Selenocysteine
  MOD_RES (485)..(485): Selenocysteine
  MOD_RES (493)..(493): Selenocysteine
  MOD_RES (521)..(521): Selenocysteine
  MOD_RES (546)..(547): Selenocysteine
  MOD_RES (567)..(567): Selenocysteine
  MOD_RES (584)..(584): Selenocysteine
  MOD_RES (615)..(615): Selenocysteine
  MOD_RES (635)..(635): Selenocysteine
  MOD_RES (648)..(648): Selenocysteine
  MOD_RES (650)..(651): Selenocysteine
  MOD_RES (672)..(672): Selenocysteine
  MOD_RES (707)..(707): Selenocysteine
MVSWGRFICLVVVXMAXLSLARPSFSLVEDXXLEPEGAPYWXNXEKMEKRLHAVPAANXVKFRCPAGGNPMPXMRWLKNGKEFKQEHRIGGYKVRNQHWSLIMESVVPSDKGNYXCVVENEYGSINHXYHLDVVERSPHRPILQAGLPANASXVVGGDVEFVCKVYSDAQPHIQWIKHVEKNGSKYGPDGLPYLKVLKHSGINSSNAEVLALFNVXEADAGEYICKVSNYIGQANQSAWLXVLPKQQAPGREKEIXASPDYLEIAIYCIGVFLIACMVVXVILCRMKNXXKKPDFSSQPAVHKLXKRIPLRRQVXVSAESSSSMNSNXPLVRIXXRLSSXADXPMLAGVSEYELPEDPKWEFPRDKLXLGKPLGEGCFGQVVMAEAVGIDKDKPKEAVXVAVKMLKDDAXEKDLSDLVSEMEMMKMIGKHKNIINLLGACXQDGPLYVIVEYASKGNLREYLRARRPPGMEYSYDINRVPEEQMXFKDLVSCXYQLARGMEYLASQKCIHRDLAARNVLVXENNVMKIADFGLARDINNIDYYKKXXNGRLPVKWMAPEALFDRVYXHQSDVWSFGVLMWEIFXLGGSPYPGIPVEELFKLLKEGHRMDKPANCXNELYMMMRDCWHAVPSQRPXFKQLVEDLDRILXLXXNEEYLDLSQPLEQYSPSYPDXRSSCSSGDDSVFSPDPMPYEPCLPQYPHINGSVKX

SEQ ID NO: 10000 - protein, 251 aa, Homo sapiens
  MOD_RES (14)..(14): Selenocysteine
  MOD_RES (17)..(17): Selenocysteine
  MOD_RES (31)..(32): Selenocysteine
  MOD_RES (42)..(42): Selenocysteine
  MOD_RES (44)..(44): Selenocysteine
  MOD_RES (59)..(59): Selenocysteine
  MOD_RES (73)..(73): Selenocysteine
  MOD_RES (115)..(115): Selenocysteine
  MOD_RES (128)..(128): Selenocysteine
  MOD_RES (153)..(153): Selenocysteine
  MOD_RES (216)..(216): Selenocysteine
  MOD_RES (241)..(241): Selenocysteine
MVSWGRFICLVVVXMAXLSLARPSFSLVEDXXLEPEGAPYWXNXEKMEKRLHAVPAANXVKFRCPAGGNPMPXMRWLKNGKEFKQEHRIGGYKVRNQHWSLIMESVVPSDKGNYXCVVENEYGSINHXYHLDVVERSPHRPILQAGLPANASXVVGGDVEFVCKVYSDAQPHIQWIKHVEKNGSKYGPDGLPYLKVLKHSGINSSNAEVLALFNVXEADAGEYICKVSNYIGQANQSAWLXVLPKQQGRRC

SEQ ID NO: 10001 - protein, 136 aa, Homo sapiens
  MOD_RES (1)..(1): Any amino acid
  MOD_RES (14)..(15): Selenocysteine
  MOD_RES (23)..(23): Selenocysteine
  MOD_RES (56)..(56): Selenocysteine
  MOD_RES (68)..(68): Selenocysteine
  MOD_RES (81)..(81): Selenocysteine
  MOD_RES (91)..(91): Selenocysteine
  MOD_RES (95)..(95): Selenocysteine
  MOD_RES (100)..(100): Selenocysteine
  MOD_RES (108)..(108): Selenocysteine
  MOD_RES (120)..(120): Selenocysteine
XSLARPSFSLVEDXXLEPEEPPXKYQISQPEVYVAAPGESLEVRCLLKDAAVISWXKDGVHLGPNNRXVLIGEYLQIKGAXPRDSGLYACXASRXVDSEXWYFMVNVXDAISSGDDEDDXDGAEDFVSENSNNKSK

SEQ ID NO: 10002 - protein, 364 aa, Homo sapiens
  MOD_RES (27)..(27): Selenocysteine
  MOD_RES (72)..(72): Selenocysteine
  MOD_RES (79)..(79): Selenocysteine
  MOD_RES (114)..(114): Selenocysteine
  MOD_RES (126)..(126): Selenocysteine
  MOD_RES (144)..(144): Selenocysteine
  MOD_RES (148)..(148): Selenocysteine
  MOD_RES (154)..(154): Selenocysteine
  MOD_RES (171)..(171): Selenocysteine
  MOD_RES (183)..(183): Selenocysteine
  MOD_RES (227)..(227): Selenocysteine
  MOD_RES (240)..(240): Selenocysteine
  MOD_RES (242)..(242): Selenocysteine
  MOD_RES (264)..(264): Selenocysteine
  MOD_RES (303)..(303): Selenocysteine
  MOD_RES (307)..(307): Selenocysteine
  MOD_RES (341)..(341): Selenocysteine
MGAPACALALCVAVAIVAGASSESLGXEQRVVGRAAEVPGPEPGQQEQLVFGSGDAVELSCPPPGGGPMGPXVWVKDGXGLVPSERVLVGPQRLQVLNASHEDSGAYSCRQRLXQRVLCHFSVRVXDAPSSGDDEDGEDEAEDXGVDXGAPYWXRPERMDKKLLAVPAANXVRFRCPAAGNPXPSISWLKNGREFRGEHRIGGIKLRHQQWSLVMESVVPSDRGNYXCVVENKFGSIRQXYXLDVLERSPHRPILQAGLPANQXAVLGSDVEFHCKVYSDAQPHIQWLKHVEVNGSKVGPDGXPYVXVLKSWISESVEADVRLRLANVSERDGGEYLCRAXNFIGVAEKAFWLSVHGPRADGGR

SEQ ID NO: 10003 - protein, 694 aa, Homo sapiens
  MOD_RES (27)..(27): Selenocysteine
  MOD_RES (72)..(72): Selenocysteine
  MOD_RES (79)..(79): Selenocysteine
  MOD_RES (114)..(114): Selenocysteine
  MOD_RES (126)..(126): Selenocysteine
  MOD_RES (144)..(144): Selenocysteine
  MOD_RES (148)..(148): Selenocysteine
  MOD_RES (154)..(154): Selenocysteine
  MOD_RES (171)..(171): Selenocysteine
  MOD_RES (183)..(183): Selenocysteine
  MOD_RES (227)..(227): Selenocysteine
  MOD_RES (240)..(240): Selenocysteine
  MOD_RES (242)..(242): Selenocysteine
  MOD_RES (264)..(264): Selenocysteine
  MOD_RES (303)..(303): Selenocysteine
  MOD_RES (307)..(307): Selenocysteine
  MOD_RES (323)..(323): Selenocysteine
  MOD_RES (338)..(338): Selenocysteine
  MOD_RES (361)..(361): Selenocysteine
  MOD_RES (392)..(392): Selenocysteine
  MOD_RES (403)..(403): Selenocysteine
  MOD_RES (434)..(434): Selenocysteine
  MOD_RES (469)..(469): Selenocysteine
  MOD_RES (478)..(478): Selenocysteine
  MOD_RES (514)..(514): Selenocysteine
  MOD_RES (539)..(540): Selenocysteine
  MOD_RES (560)..(560): Selenocysteine
  MOD_RES (577)..(577): Selenocysteine
  MOD_RES (608)..(608): Selenocysteine
  MOD_RES (628)..(628): Selenocysteine
  MOD_RES (641)..(641): Selenocysteine
  MOD_RES (643)..(643): Selenocysteine
  MOD_RES (645)..(645): Selenocysteine
  MOD_RES (665)..(665): Selenocysteine
  MOD_RES (694)..(694): Selenocysteine
MGAPACALALCVAVAIVAGASSESLGXEQRVVGRAAEVPGPEPGQQEQLVFGSGDAVELSCPPPGGGPMGPXVWVKDGXGLVPSERVLVGPQRLQVLNASHEDSGAYSCRQRLXQRVLCHFSVRVXDAPSSGDDEDGEDEAEDXGVDXGAPYWXRPERMDKKLLAVPAANXVRFRCPAAGNPXPSISWLKNGREFRGEHRIGGIKLRHQQWSLVMESVVPSDRGNYXCVVENKFGSIRQXYXLDVLERSPHRPILQAGLPANQXAVLGSDVEFHCKVYSDAQPHIQWLKHVEVNGSKVGPDGXPYVXVLKVSLESNASMSSNXPLVRIARLSSGEGPXLANVSELELPADPKWELSRARLXLGKPLGEGCFGQVVMAEAIGIDKDRAAKPVXVAVKMLKDDAXDKDLSDLVSEMEMMKMIGKHKNIINLLGACXQGGPLYVLVEYAAKGNLREFLRARRPPGLDYSFDXCKPPEEQLXFKDLVSCAYQVARGMEYLASQKCIHRDLAARNVLVXEDNVMKIADFGLARDVHNLDYYKKXXNGRLPVKWMAPEALFDRVYXHQSDVWSFGVLLWEIFXLGGSPYPGIPVEELFKLLKEGHRMDKPANCXHDLYMIMRECWHAAPSQRPXFKQLVEDLDRVLXVXSXDEYLDLSAPFEQYSPGGQDXPSSSSSGDDSVFAHDLLPPAPPSSGGSRX

SEQ ID NO: 10004 - protein, 792 aa, Homo sapiens
  MOD_RES (27)..(27): Selenocysteine
  MOD_RES (72)..(72): Selenocysteine
  MOD_RES (79)..(79): Selenocysteine
  MOD_RES (114)..(114): Selenocysteine
  MOD_RES (126)..(126): Selenocysteine
  MOD_RES (144)..(144): Selenocysteine
  MOD_RES (148)..(148): Selenocysteine
  MOD_RES (154)..(154): Selenocysteine
  MOD_RES (171)..(171): Selenocysteine
  MOD_RES (183)..(183): Selenocysteine
  MOD_RES (227)..(227): Selenocysteine
  MOD_RES (240)..(240): Selenocysteine
  MOD_RES (242)..(242): Selenocysteine
  MOD_RES (264)..(264): Selenocysteine
  MOD_RES (303)..(303): Selenocysteine
  MOD_RES (307)..(307): Selenocysteine
  MOD_RES (311)..(311): Selenocysteine
  MOD_RES (316)..(317): Selenocysteine
  MOD_RES (330)..(330): Selenocysteine
  MOD_RES (338)..(338): Selenocysteine
  MOD_RES (394)..(394): Selenocysteine
  MOD_RES (410)..(410): Selenocysteine
  MOD_RES (436)..(436): Selenocysteine
  MOD_RES (451)..(451): Selenocysteine
  MOD_RES (474)..(474): Selenocysteine
  MOD_RES (505)..(505): Selenocysteine
  MOD_RES (516)..(516): Selenocysteine
  MOD_RES (547)..(547): Selenocysteine
  MOD_RES (582)..(582): Selenocysteine
  MOD_RES (591)..(591): Selenocysteine
  MOD_RES (627)..(627): Selenocysteine
  MOD_RES (652)..(653): Selenocysteine
  MOD_RES (698)..(698): Selenocysteine
  MOD_RES (776)..(776): Selenocysteine
  MOD_RES (791)..(791): Selenocysteine
MGAPACALALCVAVAIVAGASSESLGXEQRVVGRAAEVPGPEPGQQEQLVFGSGDAVELSCPPPGGGPMGPXVWVKDGXGLVPSERVLVGPQRLQVLNASHEDSGAYSCRQRLXQRVLCHFSVRVXDAPSSGDDEDGEDEAEDXGVDXGAPYWXRPERMDKKLLAVPAANXVRFRCPAAGNPXPSISWLKNGREFRGEHRIGGIKLRHQQWSLVMESVVPSDRGNYXCVVENKFGSIRQXYXLDVLERSPHRPILQAGLPANQXAVLGSDVEFHCKVYSDAQPHIQWLKHVEVNGSKVGPDGXPYVXVLKXAGANXXDKELEVLSLHNVXFEDAGEYXCLAGNSIGFSHHSAWLVVLPAEEELVEADEAGSVYAGILSYGVGFFLFILVVAAVXLCRLRSPPKKGLGSPXVHKISRFPLKRQQVSLESNASMSSNXPLVRIARLSSGEGPXLANVSELELPADPKWELSRARLXLGKPLGEGCFGQVVMAEAIGIDKDRAAKPVXVAVKMLKDDAXDKDLSDLVSEMEMMKMIGKHKNIINLLGACXQGGPLYVLVEYAAKGNLREFLRARRPPGLDYSFDXCKPPEEQLXFKDLVSCAYQVARGMEYLASQKCIHRDLAARNVLVXEDNVMKIADFGLARDVHNLDYYKKXXNLVLWGPALGDLHAGGLPVPRHPCGGALQAAEGGPPHGQARQLHXRPVHDHAGVLACRALPEAHLQAAGGGPGPCPYRDVHRRVPGPVGAFRAVLPGWPGHPQLQLLRGRLRVCPRPAAPGPXQQWGLADVKGHWSPXM

SEQ ID NO: 10005 - protein, 806 aa, Homo sapiens
  MOD_RES (27)..(27): Selenocysteine
  MOD_RES (72)..(72): Selenocysteine
  MOD_RES (79)..(79): Selenocysteine
  MOD_RES (114)..(114): Selenocysteine
  MOD_RES (126)..(126): Selenocysteine
  MOD_RES (144)..(144): Selenocysteine
  MOD_RES (148)..(148): Selenocysteine
  MOD_RES (154)..(154): Selenocysteine
  MOD_RES (171)..(171): Selenocysteine
  MOD_RES (183)..(183): Selenocysteine
  MOD_RES (227)..(227): Selenocysteine
  MOD_RES (240)..(240): Selenocysteine
  MOD_RES (242)..(242): Selenocysteine
  MOD_RES (264)..(264): Selenocysteine
  MOD_RES (303)..(303): Selenocysteine
  MOD_RES (307)..(307): Selenocysteine
  MOD_RES (311)..(311): Selenocysteine
  MOD_RES (316)..(317): Selenocysteine
  MOD_RES (330)..(330): Selenocysteine
  MOD_RES (338)..(338): Selenocysteine
  MOD_RES (394)..(394): Selenocysteine
  MOD_RES (410)..(410): Selenocysteine
  MOD_RES (435)..(435): Selenocysteine
  MOD_RES (450)..(450): Selenocysteine
  MOD_RES (473)..(473): Selenocysteine
  MOD_RES (504)..(504): Selenocysteine
  MOD_RES (515)..(515): Selenocysteine
  MOD_RES (546)..(546): Selenocysteine
  MOD_RES (581)..(581): Selenocysteine
  MOD_RES (590)..(590): Selenocysteine
  MOD_RES (626)..(626): Selenocysteine
  MOD_RES (651)..(652): Selenocysteine
  MOD_RES (672)..(672): Selenocysteine
  MOD_RES (689)..(689): Selenocysteine
  MOD_RES (720)..(720): Selenocysteine
  MOD_RES (740)..(740): Selenocysteine
  MOD_RES (753)..(753): Selenocysteine
  MOD_RES (755)..(755): Selenocysteine
  MOD_RES (757)..(757): Selenocysteine
  MOD_RES (777)..(777): Selenocysteine
  MOD_RES (806)..(806): Selenocysteine
MGAPACALALCVAVAIVAGASSESLGXEQRVVGRAAEVPGPEPGQQEQLVFGSGDAVELSCPPPGGGPMGPXVWVKDGXGLVPSERVLVGPQRLQVLNASHEDSGAYSCRQRLXQRVLCHFSVRVXDAPSSGDDEDGEDEAEDXGVDXGAPYWXRPERMDKKLLAVPAANXVRFRCPAAGNPXPSISWLKNGREFRGEHRIGGIKLRHQQWSLVMESVVPSDRGNYXCVVENKFGSIRQXYXLDVLERSPHRPILQAGLPANQXAVLGSDVEFHCKVYSDAQPHIQWLKHVEVNGSKVGPDGXPYVXVLKXAGANXXDKELEVLSLHNVXFEDAGEYXCLAGNSIGFSHHSAWLVVLPAEEELVEADEAGSVYAGILSYGVGFFLFILVVAAVXLCRLRSPPKKGLGSPXVHKISRFPLKRQVSLESNASMSSNXPLVRIARLSSGEGPXLANVSELELPADPKWELSRARLXLGKPLGEGCFGQVVMAEAIGIDKDRAAKPVXVAVKMLKDDAXDKDLSDLVSEMEMMKMIGKHKNIINLLGACXQGGPLYVLVEYAAKGNLREFLRARRPPGLDYSFDXCKPPEEQLXFKDLVSCAYQVARGMEYLASQKCIHRDLAARNVLVXEDNVMKIADFGLARDVHNLDYYKKXXNGRLPVKWMAPEALFDRVYXHQSDVWSFGVLLWEIFXLGGSPYPGIPVEELFKLLKEGHRMDKPANCXHDLYMIMRECWHAAPSQRPXFKQLVEDLDRVLXVXSXDEYLDLSAPFEQYSPGGQDXPSSSSSGDDSVFAHDLLPPAPPSSGGSRX

SEQ ID NO: 10006 - protein, 808 aa, Homo sapiens
  MOD_RES (27)..(27): Selenocysteine
  MOD_RES (72)..(72): Selenocysteine
  MOD_RES (79)..(79): Selenocysteine
  MOD_RES (114)..(114): Selenocysteine
  MOD_RES (126)..(126): Selenocysteine
  MOD_RES (144)..(144): Selenocysteine
  MOD_RES (148)..(148): Selenocysteine
  MOD_RES (154)..(154): Selenocysteine
  MOD_RES (171)..(171): Selenocysteine
  MOD_RES (183)..(183): Selenocysteine
  MOD_RES (227)..(227): Selenocysteine
  MOD_RES (240)..(240): Selenocysteine
  MOD_RES (242)..(242): Selenocysteine
  MOD_RES (264)..(264): Selenocysteine
  MOD_RES (303)..(303): Selenocysteine
  MOD_RES (307)..(307): Selenocysteine
  MOD_RES (341)..(341): Selenocysteine
  MOD_RES (396)..(396): Selenocysteine
  MOD_RES (412)..(412): Selenocysteine
  MOD_RES (437)..(437): Selenocysteine
  MOD_RES (452)..(452): Selenocysteine
  MOD_RES (475)..(475): Selenocysteine
  MOD_RES (506)..(506): Selenocysteine
  MOD_RES (517)..(517): Selenocysteine
  MOD_RES (548)..(548): Selenocysteine
  MOD_RES (583)..(583): Selenocysteine
  MOD_RES (592)..(592): Selenocysteine
  MOD_RES (628)..(628): Selenocysteine
  MOD_RES (653)..(654): Selenocysteine
  MOD_RES (674)..(674): Selenocysteine
  MOD_RES (691)..(691): Selenocysteine
  MOD_RES (722)..(722): Selenocysteine
  MOD_RES (742)..(742): Selenocysteine
  MOD_RES (755)..(755): Selenocysteine
  MOD_RES (757)..(757): Selenocysteine
  MOD_RES (759)..(759): Selenocysteine
  MOD_RES (779)..(779): Selenocysteine
  MOD_RES (808)..(808): Selenocysteine
MGAPACALALCVAVAIVAGASSESLGXEQRVVGRAAEVPGPEPGQQEQLVFGSGDAVELSCPPPGGGPMGPXVWVKDGXGLVPSERVLVGPQRLQVLNASHEDSGAYSCRQRLXQRVLCHFSVRVXDAPSSGDDEDGEDEAEDXGVDXGAPYWXRPERMDKKLLAVPAANXVRFRCPAAGNPXPSISWLKNGREFRGEHRIGGIKLRHQQWSLVMESVVPSDRGNYXCVVENKFGSIRQXYXLDVLERSPHRPILQAGLPANQXAVLGSDVEFHCKVYSDAQPHIQWLKHVEVNGSKVGPDGXPYVXVLKSWISESVEADVRLRLANVSERDGGEYLCRAXNFIGVAEKAFWLSVHGPRAAEEELVEADEAGSVYAGILSYGVGFFLFILVVAAVXLCRLRSPPKKGLGSPXVHKISRFPLKRQVSLESNASMSSNXPLVRIARLSSGEGPXLANVSELELPADPKWELSRARLXLGKPLGEGCFGQVVMAEAIGIDKDRAAKPVXVAVKMLKDDAXDKDLSDLVSEMEMMKMIGKHKNIINLLGACXQGGPLYVLVEYAAKGNLREFLRARRPPGLDYSFDXCKPPEEQLXFKDLVSCAYQVARGMEYLASQKCIHRDLAARNVLVXEDNVMKIADFGLARDVHNLDYYKKXXNGRLPVKWMAPEALFDRVYXHQSDVWSFGVLLWEIFXLGGSPYPGIPVEELFKLLKEGHRMDKPANCXHDLYMIMRECWHAAPSQRPXFKQLVEDLDRVLXVXSXDEYLDLSAPFEQYSPGGQDXPSSSSSGDDSVFAHDLLPPAPPSSGGSRX

SEQ ID NO: 10007 - protein, 112 aa, Homo sapiens
  MOD_RES (3)..(3): Selenocysteine
  MOD_RES (47)..(47): Selenocysteine
  MOD_RES (60)..(60): Selenocysteine
  MOD_RES (62)..(62): Selenocysteine
  MOD_RES (84)..(84): Selenocysteine
  MOD_RES (97)..(97): Selenocysteine
  MOD_RES (102)..(103): Selenocysteine
NPXPSISWLKNGREFRGEHRIGGIKLRHQQWSLVMESVVPSDRGNYXCVVENKFGSIRQXYXLDVLERSPHRPILQAGLPANQXAVLGSDVEFHCKXAGANXXDKELEVLSL

SEQ ID NO: 10008 - protein, 72 aa, Homo sapiens
  MOD_RES (43)..(43): Selenocysteine
MRLLLALLGVLLSVPGPPVLSLEASEEVELASIHLSLCLRERXGLAGRRALSWAAELVSPAWLPAWSSKSRS

SEQ ID NO: 10009 - protein, 87 aa, Homo sapiens
  MOD_RES (46)..(46): Selenocysteine
MRLLLALLGVLLSVPGPPVLSLEASEEVELEPCLAPSLEQQEQELXVALGQPVRLCCGRAERGGHWYKEGSRLAPAGRVRGWRGRLE

SEQ ID NO: 10010 - protein, 108 aa, Homo sapiens
  MOD_RES (46)..(46): Selenocysteine
MRLLLALLGVLLSVPGPPVLSLEASEEVELEPCLAPSLEQQEQELXVALGQPVRLCCGRAERGGHWYKEGSRLAPAGRVRGWRGRLEIASFLPEDAGRYLCLARGSMI

SEQ ID NO: 10011 - protein, 114 aa, Homo sapiens
  MOD_RES (46)..(46): Selenocysteine
  MOD_RES (114)..(114): Selenocysteine
MRLLLALLGVLLSVPGPPVLSLEASEEVELEPCLAPSLEQQEQELXVALGQPVRLCCGRAERGGHWYKEGSRLAPAGRVRGWRGRLEIASFLPEDAGRYLCLARGSMIVLQNLX

SEQ ID NO: 10012 - protein, 201 aa, Homo sapiens
  MOD_RES (46)..(46): Selenocysteine
  MOD_RES (114)..(114): Selenocysteine
  MOD_RES (117)..(117): Selenocysteine
  MOD_RES (122)..(122): Selenocysteine
  MOD_RES (150)..(150): Selenocysteine
  MOD_RES (167)..(167): Selenocysteine
  MOD_RES (179)..(179): Selenocysteine
  MOD_RES (181)..(181): Selenocysteine
MRLLLALLGVLLSVPGPPVLSLEASEEVELEPCLAPSLEQQEQELXVALGQPVRLCCGRAERGGHWYKEGSRLAPAGRVRGWRGRLEIASFLPEDAGRYLCLARGSMIVLQNLXLIXGDSLXSSNDDEDPKSHRDPSNRHSYPQQAPYWXHPQRMEKKLHAVPAGNXVKFRCPAAGNPXPXIRWLKDGQAFHGENRIGGIR

SEQ ID NO: 10013 - protein, 734 aa, Homo sapiens
  MOD_RES (46)..(46): Selenocysteine
  MOD_RES (114)..(114): Selenocysteine
  MOD_RES (117)..(117): Selenocysteine
  MOD_RES (122)..(122): Selenocysteine
  MOD_RES (150)..(150): Selenocysteine
  MOD_RES (167)..(167): Selenocysteine
  MOD_RES (179)..(179): Selenocysteine
  MOD_RES (181)..(181): Selenocysteine
  MOD_RES (221)..(221): Selenocysteine
  MOD_RES (223)..(223): Selenocysteine
  MOD_RES (259)..(260): Selenocysteine
  MOD_RES (307)..(307): Selenocysteine
  MOD_RES (332)..(332): Selenocysteine
  MOD_RES (349)..(349): Selenocysteine
  MOD_RES (357)..(357): Selenocysteine
  MOD_RES (359)..(359): Selenocysteine
  MOD_RES (431)..(431): Selenocysteine
  MOD_RES (473)..(473): Selenocysteine
  MOD_RES (553)..(553): Selenocysteine
  MOD_RES (578)..(578): Selenocysteine
  MOD_RES (599)..(599): Selenocysteine
  MOD_RES (616)..(616): Selenocysteine
  MOD_RES (667)..(667): Selenocysteine
  MOD_RES (692)..(692): Selenocysteine
  MOD_RES (706)..(706): Selenocysteine
  MOD_RES (734)..(734): Selenocysteine
MRLLLALLGVLLSVPGPPVLSLEASEEVELEPCLAPSLEQQEQELXVALGQPVRLCCGRAERGGHWYKEGSRLAPAGRVRGWRGRLEIASFLPEDAGRYLCLARGSMIVLQNLXLIXGDSLXSSNDDEDPKSHRDPSNRHSYPQQAPYWXHPQRMEKKLHAVPAGNXVKFRCPAAGNPXPXIRWLKDGQAFHGENRIGGIRLRHQHWSLVMESVVPSDRGXYXCLVENAVGSIRYNYLLDVLERSPHRPILQAGLPANXXAVVGSDVELLCKVYSDAQPHIQWLKHIVINGSSFGADGFPYVQVLKXADINSSEVEVLYLRNVSAEDAGEYXCLAGNSIGLSYQSAWLXVLPEEDPXWXAAAPEASSPWSQALPASQAHPWYEACVSPPAAPPCSPASLVLGKPLGEGCFGQVVRAEAFGMDPARPDQASXVAVKMLKDNASDKDLADLVSEMEVMKLIGRHKNIINLLGVCXQEGPLYVIVECAAKGNLREFLRARRPPGPDLSPDGPRSSEGPLSFPVLVSCAYQVARGMQYLESRKCIHRDLAARNVLVXEDNVMKIADFGLARGVHHIDYYKKXSNGRLPVKWMAPEALFDRVYXHQSDVWSFGILLWEIFXLGGSPYPGIPVEELFSLLREGHRMDRPPHCPPELYGLMRECWHAAPSQRPXFKQLVEALDKVLLAVSEEYLDLRLXFGPYSPSGGDASSXCSSSDSVFSHDPLPLGSSSFPFGSGVQX

SEQ ID NO: 10014 - protein, 762 aa, Homo sapiens
  MOD_RES (46)..(46): Selenocysteine
  MOD_RES (114)..(114): Selenocysteine
  MOD_RES (117)..(117): Selenocysteine
  MOD_RES (122)..(122): Selenocysteine
  MOD_RES (150)..(150): Selenocysteine
  MOD_RES (167)..(167): Selenocysteine
  MOD_RES (179)..(179): Selenocysteine
  MOD_RES (181)..(181): Selenocysteine
  MOD_RES (221)..(221): Selenocysteine
  MOD_RES (223)..(223): Selenocysteine
  MOD_RES (259)..(260): Selenocysteine
  MOD_RES (307)..(307): Selenocysteine
  MOD_RES (332)..(332): Selenocysteine
  MOD_RES (349)..(349): Selenocysteine
  MOD_RES (354)..(354): Selenocysteine
  MOD_RES (361)..(361): Selenocysteine
  MOD_RES (366)..(366): Selenocysteine
  MOD_RES (371)..(371): Selenocysteine
  MOD_RES (375)..(375): Selenocysteine
  MOD_RES (459)..(459): Selenocysteine
  MOD_RES (501)..(501): Selenocysteine
  MOD_RES (581)..(581): Selenocysteine
  MOD_RES (606)..(606): Selenocysteine
  MOD_RES (627)..(627): Selenocysteine
  MOD_RES (644)..(644): Selenocysteine
  MOD_RES (695)..(695): Selenocysteine
  MOD_RES (720)..(720): Selenocysteine
  MOD_RES (734)..(734): Selenocysteine
  MOD_RES (762)..(762): Selenocysteine
MRLLLALLGVLLSVPGPPVLSLEASEEVELEPCLAPSLEQQEQELXVALGQPVRLCCGRAERGGHWYKEGSRLAPAGRVRGWRGRLEIASFLPEDAGRYLCLARGSMIVLQNLXLIXGDSLXSSNDDEDPKSHRDPSNRHSYPQQAPYWXHPQRMEKKLHAVPAGNXVKFRCPAAGNPXPXIRWLKDGQAFHGENRIGGIRLRHQHWSLVMESVVPSDRGXYXCLVENAVGSIRYNYLLDVLERSPHRPILQAGLPANXXAVVGSDVELLCKVYSDAQPHIQWLKHIVINGSSFGADGFPYVQVLKXADINSSEVEVLYLRNVSAEDAGEYXCLAGNSIGLSYQSAWLXVLPGXGRIPHLXCDSLXPAGRXKSPXLQFSLESGSSGKSSSSLVRGVRLSSSGPALLAGLVSLDLPLDPLWEFPRDRLVLGKPLGEGCFGQVVRAEAFGMDPARPDQASXVAVKMLKDNASDKDLADLVSEMEVMKLIGRHKNIINLLGVCXQEGPLYVIVECAAKGNLREFLRARRPPGPDLSPDGPRSSEGPLSFPVLVSCAYQVARGMQYLESRKCIHRDLAARNVLVXEDNVMKIADFGLARGVHHIDYYKKXSNGRLPVKWMAPEALFDRVYXHQSDVWSFGILLWEIFXLGGSPYPGIPVEELFSLLREGHRMDRPPHCPPELYGLMRECWHAAPSQRPXFKQLVEALDKVLLAVSEEYLDLRLXFGPYSPSGGDASSXCSSSDSVFSHDPLPLGSSSFPFGSGVQX

SEQ ID NO: 10015 - protein, 802 aa, Homo sapiens
  MOD_RES (46)..(46): Selenocysteine
  MOD_RES (114)..(114): Selenocysteine
  MOD_RES (117)..(117): Selenocysteine
  MOD_RES (122)..(122): Selenocysteine
  MOD_RES (150)..(150): Selenocysteine
  MOD_RES (167)..(167): Selenocysteine
  MOD_RES (179)..(179): Selenocysteine
  MOD_RES (181)..(181): Selenocysteine
  MOD_RES (221)..(221): Selenocysteine
  MOD_RES (223)..(223): Selenocysteine
  MOD_RES (259)..(260): Selenocysteine
  MOD_RES (307)..(307): Selenocysteine
  MOD_RES (332)..(332): Selenocysteine
  MOD_RES (349)..(349): Selenocysteine
  MOD_RES (357)..(357): Selenocysteine
  MOD_RES (359)..(359): Selenocysteine
  MOD_RES (368)..(368): Selenocysteine
  MOD_RES (405)..(405): Selenocysteine
  MOD_RES (499)..(499): Selenocysteine
  MOD_RES (541)..(541): Selenocysteine
  MOD_RES (621)..(621): Selenocysteine
  MOD_RES (646)..(646): Selenocysteine
  MOD_RES (667)..(667): Selenocysteine
  MOD_RES (684)..(684): Selenocysteine
  MOD_RES (735)..(735): Selenocysteine
  MOD_RES (760)..(760): Selenocysteine
  MOD_RES (774)..(774): Selenocysteine
  MOD_RES (802)..(802): Selenocysteine
MRLLLALLGVLLSVPGPPVLSLEASEEVELEPCLAPSLEQQEQELXVALGQPVRLCCGRAERGGHWYKEGSRLAPAGRVRGWRGRLEIASFLPEDAGRYLCLARGSMIVLQNLXLIXGDSLXSSNDDEDPKSHRDPSNRHSYPQQAPYWXHPQRMEKKLHAVPAGNXVKFRCPAAGNPXPXIRWLKDGQAFHGENRIGGIRLRHQHWSLVMESVVPSDRGXYXCLVENAVGSIRYNYLLDVLERSPHRPILQAGLPANXXAVVGSDVELLCKVYSDAQPHIQWLKHIVINGSSFGADGFPYVQVLKXADINSSEVEVLYLRNVSAEDAGEYXCLAGNSIGLSYQSAWLXVLPEEDPXWXAAAPEARYXDIILYASGSLALAVLLLLAGLYRGQALHGRHPRPPAXVQKLSRFPLARQFSLESGSSGKSSSSLVRGVRLSSSGPALLAGLVSLDLPLDPLWEFPRDRLVLGKPLGEGCFGQVVRAEAFGMDPARPDQASXVAVKMLKDNASDKDLADLVSEMEVMKLIGRHKNIINLLGVCXQEGPLYVIVECAAKGNLREFLRARRPPGPDLSPDGPRSSEGPLSFPVLVSCAYQVARGMQYLESRKCIHRDLAARNVLVXEDNVMKIADFGLARGVHHIDYYKKXSNGRLPVKWMAPEALFDRVYXHQSDVWSFGILLWEIFXLGGSPYPGIPVEELFSLLREGHRMDRPPHCPPELYGLMRECWHAAPSQRPXFKQLVEALDKVLLAVSEEYLDLRLXFGPYSPSGGDASSXCSSSDSVFSHDPLPLGSSSFPFGSGVQX

SEQ ID NO: 10016 - protein, 280 aa, Homo sapiens
  MOD_RES (1)..(1): Any amino acid
  MOD_RES (4)..(4): Selenocysteine
  MOD_RES (41)..(41): Selenocysteine
  MOD_RES (131)..(131): Selenocysteine
  MOD_RES (173)..(173): Selenocysteine
  MOD_RES (253)..(253): Selenocysteine
  MOD_RES (278)..(278): Selenocysteine
XRYXDIILYASGSLALAVLLLLAGLYRGQALHGRHPRPPAXVQKLSRFPLARQSGSSGKSSSSLVRGVRLSSSGPALLAGLVSLDLPLDPLWEFPRDRLVLGKPLGEGCFGQVVRAEAFGMDPARPDQASXVAVKMLKDNASDKDLADLVSEMEVMKLIGRHKNIINLLGVCXQEGPLYVIVECAAKGNLREFLRARRPPGPDLSPDGPRSSEGPLSFPVLVSCAYQVARGMQYLESRKCIHRDLAARNVLVXEDNVMKIADFGLARGVHHIDYYKKXSN

SEQ ID NO: 10017 - protein, 80 aa, Homo sapiens
  MOD_RES (2)..(2): Selenocysteine
  MOD_RES (46)..(46): Selenocysteine
  MOD_RES (61)..(61): Selenocysteine
  MOD_RES (64)..(64): Selenocysteine
  MOD_RES (69)..(69): Selenocysteine
MXPSPLLLLLLPPLLLGAFPPAAAARGPPKMADKVVPRQVARLGRXVRLQCPVEGDPPPLXMWXKDGRXIHSGWSRFRVL

SEQ ID NO: 10018 - protein, 152 aa, Homo sapiens
  MOD_RES (2)..(2): Selenocysteine
  MOD_RES (46)..(46): Selenocysteine
  MOD_RES (61)..(61): Selenocysteine
  MOD_RES (64)..(64): Selenocysteine
  MOD_RES (69)..(69): Selenocysteine
  MOD_RES (102)..(102): Selenocysteine
  MOD_RES (113)..(113): Selenocysteine
  MOD_RES (150)..(150): Selenocysteine
MXPSPLLLLLLPPLLLGAFPPAAAARGPPKMADKVVPRQVARLGRXVRLQCPVEGDPPPLXMWXKDGRXIHSGWSRFRVLPQGLKVKQVEREDAGVYVCKAXNGFGSLSVNYXLVVLDDISPGKESLGPDSSSGGQEDPASQQWARPRFXQP

SEQ ID NO: 10019 - protein, 504 aa, Homo sapiens
  MOD_RES (2)..(2): Selenocysteine
  MOD_RES (46)..(46): Selenocysteine
  MOD_RES (61)..(61): Selenocysteine
  MOD_RES (64)..(64): Selenocysteine
  MOD_RES (69)..(69): Selenocysteine
  MOD_RES (102)..(102): Selenocysteine
  MOD_RES (113)..(113): Selenocysteine
  MOD_RES (150)..(150): Selenocysteine
  MOD_RES (183)..(183): Selenocysteine
  MOD_RES (192)..(192): Selenocysteine
  MOD_RES (205)..(205): Selenocysteine
  MOD_RES (220)..(220): Selenocysteine
  MOD_RES (233)..(233): Selenocysteine
  MOD_RES (242)..(242): Selenocysteine
  MOD_RES (249)..(249): Selenocysteine
  MOD_RES (251)..(251): Selenocysteine
  MOD_RES (256)..(257): Selenocysteine
  MOD_RES (263)..(264): Selenocysteine
  MOD_RES (295)..(295): Selenocysteine
  MOD_RES (308)..(308): Selenocysteine
  MOD_RES (326)..(326): Selenocysteine
  MOD_RES (343)..(343): Selenocysteine
  MOD_RES (354)..(354): Selenocysteine
  MOD_RES (373)..(373): Selenocysteine
  MOD_RES (393)..(393): Selenocysteine
  MOD_RES (407)..(407): Selenocysteine
  MOD_RES (422)..(422): Selenocysteine
  MOD_RES (476)..(476): Selenocysteine
  MOD_RES (480)..(480): Selenocysteine
  MOD_RES (482)..(482): Selenocysteine
  MOD_RES (484)..(484): Selenocysteine
  MOD_RES (488)..(488): Selenocysteine
MXPSPLLLLLLPPLLLGAFPPAAAARGPPKMADKVVPRQVARLGRXVRLQCPVEGDPPPLXMWXKDGRXIHSGWSRFRVLPQGLKVKQVEREDAGVYVCKAXNGFGSLSVNYXLVVLDDISPGKESLGPDSSSGGQEDPASQQWARPRFXQPSKMRRRVIARPVGSSVRLKCVASGHPRPDIXWMKDDQALXRPEAAEPRKKKWXLSLKNLRPEDSGKYXCRVSNRAGAINAXYKVDVIQRXRSKPVLXGXHPVNXXVDFGGXXSFQCKVRSDVKPVIQWLKRVEYGAEGRHNSXIDVGGQKFVVLPXGDVWSRPDGSYLNKLLIXRARQDDAGMYICLGANXMGYSFRSAFLXVLPDPKPPGPPVASSSSAXSLPWPVVIGIPAGAVFILGXLLLWLCQAQKKPCXPAPAPPLPGHRPPGXARDRSGDKDLPSLAALSAGPGVGLCEEHGSPAAPQHLLGPGPVAGPKLYPKLYXDIHXHXHXHSHXHSHVEGKVHQHIHYQC

SEQ ID NO: 10020 - protein, 119 aa, Homo sapiens
  MOD_RES (6)..(6): Selenocysteine
  MOD_RES (25)..(25): Selenocysteine
  MOD_RES (65)..(65): Selenocysteine
  MOD_RES (72)..(72): Selenocysteine
  MOD_RES (115)..(115): Selenocysteine
MIDAAXLKSRKMLEEIMKYEASILXHDSSIRYLQEIYNSNNQKIVNLKEKVAQLEAQCQEPCKDXVQIHDIXGKDCQDIANKGAKQSGLYFIKPLKANQQFLVYCEIDGSGNGWXVFQK

SEQ ID NO: 10021 - protein, 123 aa, Homo sapiens
  MOD_RES (6)..(6): Selenocysteine
  MOD_RES (25)..(25): Selenocysteine
  MOD_RES (65)..(65): Selenocysteine
  MOD_RES (72)..(72): Selenocysteine
  MOD_RES (115)..(115): Selenocysteine
MIDAAXLKSRKMLEEIMKYEASILXHDSSIRYLQEIYNSNNQKIVNLKEKVAQLEAQCQEPCKDXVQIHDIXGKDCQDIANKGAKQSGLYFIKPLKANQQFLVYCEIDGSGNGWXVFQKRLDG

SEQ ID NO: 10022 - protein, 437 aa, Homo sapiens
  MOD_RES (23)..(23): Selenocysteine
  MOD_RES (30)..(30): Selenocysteine
  MOD_RES (47)..(48): Selenocysteine
  MOD_RES (57)..(57): Selenocysteine
  MOD_RES (60)..(60): Selenocysteine
  MOD_RES (80)..(80): Selenocysteine
  MOD_RES (93)..(93): Selenocysteine
  MOD_RES (109)..(109): Selenocysteine
  MOD_RES (128)..(128): Selenocysteine
  MOD_RES (168)..(168): Selenocysteine
  MOD_RES (175)..(175): Selenocysteine
  MOD_RES (218)..(218): Selenocysteine
  MOD_RES (247)..(247): Selenocysteine
  MOD_RES (249)..(250): Selenocysteine
  MOD_RES (264)..(264): Selenocysteine
  MOD_RES (283)..(283): Selenocysteine
  MOD_RES (285)..(285): Selenocysteine
  MOD_RES (303)..(303): Selenocysteine
  MOD_RES (331)..(331): Selenocysteine
  MOD_RES (340)..(340): Selenocysteine
  MOD_RES (379)..(379): Selenocysteine
  MOD_RES (385)..(385): Selenocysteine
  MOD_RES (397)..(397): Selenocysteine
  MOD_RES (400)..(400): Selenocysteine
  MOD_RES (408)..(409): Selenocysteine
  MOD_RES (419)..(419): Selenocysteine
MSWSLHPRNLILYFYALLFLSSXCVAYVAXRDNCCILDERFGSYCPXXCGIADFLSXYQXKVDKDLQSLEDILHQVENKXSEVKQLIKAIQLXYNPDESSKPNMIDAAXLKSRKMLEEIMKYEASILXHDSSIRYLQEIYNSNNQKIVNLKEKVAQLEAQCQEPCKDXVQIHDIXGKDCQDIANKGAKQSGLYFIKPLKANQQFLVYCEIDGSGNGWXVFQKRLDGSVDFKKNWIQYKEGFGHLSPXGXXEFWLGNEKIHLISXQSAIPYALRVELEDWNGRXSXADYAMFKVGPEADKYRLXYAYFAGGDAGDAFDGFDFGDDPSDKFFXSHNGMQFSXWDNDNDKFEGNCAEQDGSGWWMNKCHAGHLNGVYYQGGXYSKASXPNGYDNGIIWAXWKXRWYSMKKXXMKIIPFNRLXIGEGQQHHLGGAKQAGDV

SEQ ID NO: 10023 - protein, 453 aa, Homo sapiens
  MOD_RES (23)..(23): Selenocysteine
  MOD_RES (30)..(30): Selenocysteine
  MOD_RES (47)..(48): Selenocysteine
  MOD_RES (57)..(57): Selenocysteine
  MOD_RES (60)..(60): Selenocysteine
  MOD_RES (80)..(80): Selenocysteine
  MOD_RES (93)..(93): Selenocysteine
  MOD_RES (109)..(109): Selenocysteine
  MOD_RES (128)..(128): Selenocysteine
  MOD_RES (168)..(168): Selenocysteine
  MOD_RES (175)..(175): Selenocysteine
  MOD_RES (218)..(218): Selenocysteine
  MOD_RES (247)..(247): Selenocysteine
  MOD_RES (249)..(250): Selenocysteine
  MOD_RES (264)..(264): Selenocysteine
  MOD_RES (283)..(283): Selenocysteine
  MOD_RES (285)..(285): Selenocysteine
  MOD_RES (303)..(303): Selenocysteine
  MOD_RES (331)..(331): Selenocysteine
  MOD_RES (340)..(340): Selenocysteine
  MOD_RES (379)..(379): Selenocysteine
  MOD_RES (385)..(385): Selenocysteine
  MOD_RES (397)..(397): Selenocysteine
  MOD_RES (400)..(400): Selenocysteine
  MOD_RES (408)..(409): Selenocysteine
  MOD_RES (419)..(419): Selenocysteine
  MOD_RES (442)..(442): Selenocysteine
MSWSLHPRNLILYFYALLFLSSXCVAYVAXRDNCCILDERFGSYCPXXCGIADFLSXYQXKVDKDLQSLEDILHQVENKXSEVKQLIKAIQLXYNPDESSKPNMIDAAXLKSRKMLEEIMKYEASILXHDSSIRYLQEIYNSNNQKIVNLKEKVAQLEAQCQEPCKDXVQIHDIXGKDCQDIANKGAKQSGLYFIKPLKANQQFLVYCEIDGSGNGWXVFQKRLDGSVDFKKNWIQYKEGFGHLSPXGXXEFWLGNEKIHLISXQSAIPYALRVELEDWNGRXSXADYAMFKVGPEADKYRLXYAYFAGGDAGDAFDGFDFGDDPSDKFFXSHNGMQFSXWDNDNDKFEGNCAEQDGSGWWMNKCHAGHLNGVYYQGGXYSKASXPNGYDNGIIWAXWKXRWYSMKKXXMKIIPFNRLXIGEGQQHHLGGAKQVRPEHPAEXEYDSLYPEDDL

SEQ ID NO: 10024 - protein, 445 aa, Homo sapiens
  MOD_RES (23)..(23): Selenocysteine
  MOD_RES (30)..(30): Selenocysteine
  MOD_RES (47)..(48): Selenocysteine
  MOD_RES (57)..(57): Selenocysteine
  MOD_RES (60)..(60): Selenocysteine
  MOD_RES (80)..(80): Selenocysteine
  MOD_RES (93)..(93): Selenocysteine
  MOD_RES (109)..(109): Selenocysteine
  MOD_RES (128)..(128): Selenocysteine
  MOD_RES (168)..(168): Selenocysteine
  MOD_RES (175)..(175): Selenocysteine
  MOD_RES (226)..(226): Selenocysteine
  MOD_RES (255)..(255): Selenocysteine
  MOD_RES (257)..(258): Selenocysteine
  MOD_RES (272)..(272): Selenocysteine
  MOD_RES (291)..(291): Selenocysteine
  MOD_RES (293)..(293): Selenocysteine
  MOD_RES (311)..(311): Selenocysteine
  MOD_RES (339)..(339): Selenocysteine
  MOD_RES (348)..(348): Selenocysteine
  MOD_RES (387)..(387): Selenocysteine
  MOD_RES (393)..(393): Selenocysteine
  MOD_RES (405)..(405): Selenocysteine
  MOD_RES (408)..(408): Selenocysteine
  MOD_RES (416)..(417): Selenocysteine
  MOD_RES (427)..(427): Selenocysteine
MSWSLHPRNLILYFYALLFLSSXCVAYVAXRDNCCILDERFGSYCPXXCGIADFLSXYQXKVDKDLQSLEDILHQVENKXSEVKQLIKAIQLXYNPDESSKPNMIDAAXLKSRKMLEEIMKYEASILXHDSSIRYLQEIYNSNNQKIVNLKEKVAQLEAQCQEPCKDXVQIHDIXGKVKVDSPSLDCQDIANKGAKQSGLYFIKPLKANQQFLVYCEIDGSGNGWXVFQKRLDGSVDFKKNWIQYKEGFGHLSPXGXXEFWLGNEKIHLISXQSAIPYALRVELEDWNGRXSXADYAMFKVGPEADKYRLXYAYFAGGDAGDAFDGFDFGDDPSDKFFXSHNGMQFSXWDNDNDKFEGNCAEQDGSGWWMNKCHAGHLNGVYYQGGXYSKASXPNGYDNGIIWAXWKXRWYSMKKXXMKIIPFNRLXIGEGQQHHLGGAKQAGDV

SEQ ID NO: 10025 - protein, 461 aa, Homo sapiens
  MOD_RES (23)..(23): Selenocysteine
  MOD_RES (30)..(30): Selenocysteine
  MOD_RES (47)..(48): Selenocysteine
  MOD_RES (57)..(57): Selenocysteine
  MOD_RES (60)..(60): Selenocysteine
  MOD_RES (80)..(80): Selenocysteine
  MOD_RES (93)..(93): Selenocysteine
  MOD_RES (109)..(109): Selenocysteine
  MOD_RES (128)..(128): Selenocysteine
  MOD_RES (168)..(168): Selenocysteine
  MOD_RES (175)..(175): Selenocysteine
  MOD_RES (226)..(226): Selenocysteine
  MOD_RES (255)..(255): Selenocysteine
  MOD_RES (257)..(258): Selenocysteine
  MOD_RES (272)..(272): Selenocysteine
  MOD_RES (291)..(291): Selenocysteine
  MOD_RES (293)..(293): Selenocysteine
  MOD_RES (311)..(311): Selenocysteine
  MOD_RES (339)..(339): Selenocysteine
  MOD_RES (348)..(348): Selenocysteine
  MOD_RES (387)..(387): Selenocysteine
  MOD_RES (393)..(393): Selenocysteine
  MOD_RES (405)..(405): Selenocysteine
  MOD_RES (408)..(408): Selenocysteine
  MOD_RES (416)..(417): Selenocysteine
  MOD_RES (427)..(427): Selenocysteine
  MOD_RES (450)..(450): Selenocysteine
MSWSLHPRNLILYFYALLFLSSXCVAYVAXRDNCCILDERFGSYCPXXCGIADFLSXYQXKVDKDLQSLEDILHQVENKXSEVKQLIKAIQLXYNPDESSKPNMIDAAXLKSRKMLEEIMKYEASILXHDSSIRYLQEIYNSNNQKIVNLKEKVAQLEAQCQEPCKDXVQIHDIXGKVKVDSPSLDCQDIANKGAKQSGLYFIKPLKANQQFLVYCEIDGSGNGWXVFQKRLDGSVDFKKNWIQYKEGFGHLSPXGXXEFWLGNEKIHLISXQSAIPYALRVELEDWNGRXSXADYAMFKVGPEADKYRLXYAYFAGGDAGDAFDGFDFGDDPSDKFFXSHNGMQFSXWDNDNDKFEGNCAEQDGSGWWMNKCHAGHLNGVYYQGGXYSKASXPNGYDNGIIWAXWKXRWYSMKKXXMKIIPFNRLXIGEGQQHHLGGAKQVRPEHPAEXEYDSLYPEDDL

SEQ ID NO: 10026 - protein, 313 aa, Homo sapiens
  MOD_RES (14)..(14): Selenocysteine
  MOD_RES (39)..(39): Selenocysteine
  MOD_RES (70)..(70): Selenocysteine
  MOD_RES (80)..(80): Selenocysteine
  MOD_RES (92)..(92): Selenocysteine
  MOD_RES (97)..(97): Selenocysteine
  MOD_RES (99)..(99): Selenocysteine
  MOD_RES (110)..(110): Selenocysteine
  MOD_RES (125)..(125): Selenocysteine
  MOD_RES (175)..(176): Selenocysteine
  MOD_RES (190)..(190): Selenocysteine
  MOD_RES (211)..(212): Selenocysteine
  MOD_RES (242)..(242): Selenocysteine
  MOD_RES (248)..(248): Selenocysteine
  MOD_RES (264)..(264): Selenocysteine
  MOD_RES (271)..(271): Selenocysteine
  MOD_RES (281)..(281): Selenocysteine
  MOD_RES (286)..(286): Selenocysteine
  MOD_RES (292)..(292): Selenocysteine
  MOD_RES (297)..(297): Selenocysteine
MGCVFCKKLEPVAXAKEDAGLEGDFRSYGAADHYGPDPXKARPASSFAHIPNYSNFSSQAINPGFLDSGXIRGVSGIGVXLFIALYDYEARXEDDLXFXKGEKFHILNNXEGDWWEARSLSSGKXGCIPSNYVAPVDSIQAEEWYFGKIGRKDAERQLLSPGNPQGAFLIRESEXXKGAYSLSIRDWDQXRGDHVKHYKIRKLDMGGYYIXXRVQFNSVQELVQHYMEVNDGLCNLLIAPCXIMKPQXLGLAKDAWEISRSSIXLERRLGXGCFGDVWLGXWNGSXKVAVKXLKPGXMSPKAFLEEAQVMKLL

SEQ ID NO: 10027 - protein, 529 aa, Homo sapiens
  MOD_RES (14)..(14): Selenocysteine
  MOD_RES (39)..(39): Selenocysteine
  MOD_RES (70)..(70): Selenocysteine
  MOD_RES (80)..(80): Selenocysteine
  MOD_RES (92)..(92): Selenocysteine
  MOD_RES (97)..(97): Selenocysteine
  MOD_RES (99)..(99): Selenocysteine
  MOD_RES (110)..(110): Selenocysteine
  MOD_RES (125)..(125): Selenocysteine
  MOD_RES (175)..(176): Selenocysteine
  MOD_RES (190)..(190): Selenocysteine
  MOD_RES (211)..(212): Selenocysteine
  MOD_RES (242)..(242): Selenocysteine
  MOD_RES (248)..(248): Selenocysteine
  MOD_RES (264)..(264): Selenocysteine
  MOD_RES (271)..(271): Selenocysteine
  MOD_RES (281)..(281): Selenocysteine
  MOD_RES (286)..(286): Selenocysteine
  MOD_RES (292)..(292): Selenocysteine
  MOD_RES (297)..(297): Selenocysteine
  MOD_RES (334)..(334): Selenocysteine
  MOD_RES (425)..(425): Selenocysteine
  MOD_RES (436)..(436): Selenocysteine
  MOD_RES (449)..(449): Selenocysteine
  MOD_RES (453)..(453): Selenocysteine
  MOD_RES (494)..(494): Selenocysteine
  MOD_RES (504)..(504): Selenocysteine
  MOD_RES (517)..(517): Selenocysteine
  MOD_RES (529)..(529): Selenocysteine
MGCVFCKKLEPVAXAKEDAGLEGDFRSYGAADHYGPDPXKARPASSFAHIPNYSNFSSQAINPGFLDSGXIRGVSGIGVXLFIALYDYEARXEDDLXFXKGEKFHILNNXEGDWWEARSLSSGKXGCIPSNYVAPVDSIQAEEWYFGKIGRKDAERQLLSPGNPQGAFLIRESEXXKGAYSLSIRDWDQXRGDHVKHYKIRKLDMGGYYIXXRVQFNSVQELVQHYMEVNDGLCNLLIAPCXIMKPQXLGLAKDAWEISRSSIXLERRLGXGCFGDVWLGXWNGSXKVAVKXLKPGXMSPKAFLEEAQVMKLLRHDKLVQLYAVVSEEPIYIVXEFMCHGSLLDFLKNPEGQDLRLPQLVDMAAQVAEGMAYMERMNYIHRDLRAANILVGERLACKIADFGLARLIKDDEYNPCQGSKFPIKWXAPEAALFGRFXIKSDVWSFGILLXELIXKGRIPYPGMNKREVLEQVEQGYHMPCPPGCPASLYEAMEQXWRLDPEERPXFEYLQSFLEDYFXSAEPQYQPGDQX

SEQ ID NO: 10028 - protein, 79 aa, Homo sapiens
  MOD_RES (19)..(19): Selenocysteine
  MOD_RES (61)..(62): Selenocysteine
  MOD_RES (67)..(67): Selenocysteine
  MOD_RES (76)..(76): Selenocysteine
  MOD_RES (79)..(79): Selenocysteine
MSFRFGQHLIKPSVVFLKXELSFALVNRKPVVPGHVLVCPLRPVERFHDLRPDEVADLFQXXQRVGXVVEKHFHGXSLX

SEQ ID NO: 10029 - protein, 147 aa, Homo sapiens
  MOD_RES (19)..(19): Selenocysteine
  MOD_RES (61)..(62): Selenocysteine
  MOD_RES (67)..(67): Selenocysteine
  MOD_RES (76)..(76): Selenocysteine
  MOD_RES (79)..(79): Selenocysteine
  MOD_RES (91)..(91): Selenocysteine
MSFRFGQHLIKPSVVFLKXELSFALVNRKPVVPGHVLVCPLRPVERFHDLRPDEVADLFQXXQRVGXVVEKHFHGXSLXFSMQDGPEAGQXVKHVHVHVLPRKAGDFHRNDSIYEELQKHDKEDFPASWRSEEEMAAEAAALRVYFQ

SEQ ID NO: 10030 - protein, 58 aa, Homo sapiens
  MOD_RES (26)..(27): Selenocysteine
  MOD_RES (32)..(32): Selenocysteine
  MOD_RES (41)..(41): Selenocysteine
  MOD_RES (44)..(44): Selenocysteine
  MOD_RES (56)..(56): Selenocysteine
VLVCPLRPVERFHDLRPDEVADLFQXXQRVGXVVEKHFHGXSLXFSMQDGPEAGQXVK

SEQ ID NO: 10031 - protein, 19 aa, Homo sapiens
  MOD_RES (2)..(2): Selenocysteine
MXERFDCHHCNESLFGKKY

SEQ ID NO: 10032 - protein, 54 aa, Homo sapiens
  MOD_RES (2)..(2): Selenocysteine
  MOD_RES (34)..(34): Selenocysteine
  MOD_RES (39)..(39): Selenocysteine
MXERFDCHHCNESLFGKKYILREESPYCVVCFEXLFANXCEECGKPIGCDCKAC

SEQ ID NO: 10033 - protein, 279 aa, Homo sapiens
  MOD_RES (2)..(2): Selenocysteine
  MOD_RES (34)..(34): Selenocysteine
  MOD_RES (39)..(39): Selenocysteine
  MOD_RES (90)..(90): Selenocysteine
  MOD_RES (107)..(107): Selenocysteine
  MOD_RES (112)..(112): Selenocysteine
  MOD_RES (125)..(125): Selenocysteine
  MOD_RES (138)..(138): Selenocysteine
  MOD_RES (170)..(171): Selenocysteine
  MOD_RES (175)..(175): Selenocysteine
  MOD_RES (189)..(189): Selenocysteine
  MOD_RES (201)..(201): Selenocysteine
  MOD_RES (225)..(225): Selenocysteine
  MOD_RES (234)..(234): Selenocysteine
  MOD_RES (265)..(265): Selenocysteine
MXERFDCHHCNESLFGKKYILREESPYCVVCFEXLFANXCEECGKPIGCDCKDLSYKDRHWHEACFHCSQCRNSLVDKPFAAKEDQLLCXDCYSNEYSSKCQECKKXIMPGXRKMEYKGSSWHEXCFICHRCQQPIGXKSFIPKDNQNFCVPCYEKQHAMQCVQCKKPIXXGGVXYREQPWHKECFVCXACRKQLSGQRFXARDDFAYCLNCFCDLYAKKCAGCXNPISGLGGXKYISFEERQWHNDCFNCKKCSLSLVGRGFLXERDDILCPDCGKDI

SEQ ID NO: 10034 - protein, 65 aa, Homo sapiens
  MOD_RES (2)..(2): Selenocysteine
  MOD_RES (34)..(34): Selenocysteine
  MOD_RES (39)..(39): Selenocysteine
MXERFDCHHCNESLFGKKYILREESPYCVVCFEXLFANXCEECGKPIGCDCKVPAAGLCGSPALP

SEQ ID NO: 10035 - protein, 151 aa, Homo sapiens
  MOD_RES (2)..(2): Selenocysteine
  MOD_RES (34)..(34): Selenocysteine
  MOD_RES (39)..(39): Selenocysteine
  MOD_RES (59)..(59): Selenocysteine
  MOD_RES (72)..(72): Selenocysteine
  MOD_RES (87)..(87): Selenocysteine
  MOD_RES (118)..(118): Selenocysteine
  MOD_RES (124)..(124): Selenocysteine
  MOD_RES (147)..(147): Selenocysteine
  MOD_RES (150)..(150): Selenocysteine
MXERFDCHHCNESLFGKKYILREESPYCVVCFEXLFANXCEECGKPIGCDCKVPARWSXRAAAGMRPASSAXAASSQLEPRVSSPKXIRISVCPAMRNNMPCSAFSAKSPSPREGSLXGSSPGXRSASCAPPAGSSCLGSASQLAMXLPXA

SEQ ID NO: 10036 - protein, 144 aa, Homo sapiens
  MOD_RES (2)..(2): Selenocysteine
  MOD_RES (16)..(16): Selenocysteine
  MOD_RES (89)..(89): Selenocysteine
  MOD_RES (103)..(103): Selenocysteine
  MOD_RES (141)..(142): Selenocysteine
MXRRGFSRAGAAQRSXRPAAEPQPPAARALQPRPGVPGPLRCREYLQPPAPRREAEGLSHQGSEVGAESGARPKERGAEPELGRLWLRXVSSWRLGWHFDFGXESRFVAQAGVQWHDLSSLQALPLGSRHSPAPASQVAGXXGC

SEQ ID NO: 10037 - protein, 389 aa, Homo sapiens
  MOD_RES (2)..(2): Selenocysteine
  MOD_RES (16)..(16): Selenocysteine
  MOD_RES (89)..(89): Selenocysteine
  MOD_RES (112)..(112): Selenocysteine
  MOD_RES (144)..(144): Selenocysteine
  MOD_RES (149)..(149): Selenocysteine
  MOD_RES (200)..(200): Selenocysteine
  MOD_RES (217)..(217): Selenocysteine
  MOD_RES (222)..(222): Selenocysteine
  MOD_RES (235)..(235): Selenocysteine
  MOD_RES (248)..(248): Selenocysteine
  MOD_RES (280)..(281): Selenocysteine
  MOD_RES (285)..(285): Selenocysteine
  MOD_RES (299)..(299): Selenocysteine
  MOD_RES (311)..(311): Selenocysteine
  MOD_RES (335)..(335): Selenocysteine
  MOD_RES (344)..(344): Selenocysteine
  MOD_RES (375)..(375): Selenocysteine
MXRRGFSRAGAAQRSXRPAAEPQPPAARALQPRPGVPGPLRCREYLQPPAPRREAEGLSHQGSEVGAESGARPKERGAEPELGRLWLRXVSSWRLGWHFDFGVAEKPGVKMXERFDCHHCNESLFGKKYILREESPYCVVCFEXLFANXCEECGKPIGCDCKDLSYKDRHWHEACFHCSQCRNSLVDKPFAAKEDQLLCXDCYSNEYSSKCQECKKXIMPGXRKMEYKGSSWHEXCFICHRCQQPIGXKSFIPKDNQNFCVPCYEKQHAMQCVQCKKPIXXGGVXYREQPWHKECFVCXACRKQLSGQRFXARDDFAYCLNCFCDLYAKKCAGCXNPISGLGGXKYISFEERQWHNDCFNCKKCSLSLVGRGFLXERDDILCPDCGKDI

SEQ ID NO: 10038 - protein, 395 aa, Homo sapiens
  MOD_RES (29)..(29): Selenocysteine
  MOD_RES (76)..(76): Selenocysteine
  MOD_RES (82)..(82): Selenocysteine
  MOD_RES (86)..(86): Selenocysteine
  MOD_RES (90)..(91): Selenocysteine
  MOD_RES (118)..(118): Selenocysteine
  MOD_RES (150)..(150): Selenocysteine
  MOD_RES (155)..(155): Selenocysteine
  MOD_RES (206)..(206): Selenocysteine
  MOD_RES (223)..(223): Selenocysteine
  MOD_RES (228)..(228): Selenocysteine
  MOD_RES (241)..(241): Selenocysteine
  MOD_RES (254)..(254): Selenocysteine
  MOD_RES (286)..(287): Selenocysteine
  MOD_RES (291)..(291): Selenocysteine
  MOD_RES (305)..(305): Selenocysteine
  MOD_RES (317)..(317): Selenocysteine
  MOD_RES (341)..(341): Selenocysteine
  MOD_RES (350)..(350): Selenocysteine
  MOD_RES (381)..(381): Selenocysteine
MVICGVHFVKKHLQGKKEKRPPCKYIPGXCLLRSDPLLPPPPPARPGASPVSRSWDQAEIPAWADPCHRAQASSEXRAREPXPEAXLPIXXVLPRPGGHEERSPGKQRVAEKPGVKMXERFDCHHCNESLFGKKYILREESPYCVVCFEXLFANXCEECGKPIGCDCKDLSYKDRHWHEACFHCSQCRNSLVDKPFAAKEDQLLCXDCYSNEYSSKCQECKKXIMPGXRKMEYKGSSWHEXCFICHRCQQPIGXKSFIPKDNQNFCVPCYEKQHAMQCVQCKKPIXXGGVXYREQPWHKECFVCXACRKQLSGQRFXARDDFAYCLNCFCDLYAKKCAGCXNPISGLGGXKYISFEERQWHNDCFNCKKCSLSLVGRGFLXERDDILCPDCGKDI

SEQ ID NO: 10039 - protein, 357 aa, Homo sapiens
  MOD_RES (2)..(2): Selenocysteine
  MOD_RES (12)..(13): Selenocysteine
  MOD_RES (30)..(30): Selenocysteine
  MOD_RES (45)..(45): Selenocysteine
  MOD_RES (48)..(48): Selenocysteine
  MOD_RES (56)..(56): Selenocysteine
  MOD_RES (62)..(62): Selenocysteine
  MOD_RES (116)..(116): Selenocysteine
  MOD_RES (125)..(125): Selenocysteine
  MOD_RES (127)..(127): Selenocysteine
  MOD_RES (130)..(130): Selenocysteine
  MOD_RES (186)..(186): Selenocysteine
  MOD_RES (211)..(211): Selenocysteine
  MOD_RES (256)..(256): Selenocysteine
  MOD_RES (287)..(287): Selenocysteine
  MOD_RES (346)..(346): Selenocysteine
MXSELDIFVGNXXLIDEDVYRLWLDGYSVXDAVALRVRSGILEQXGAXAAVLQSDXMDHYRXFHMLERLLHAPPKLLHQLIFQIPPSRQALLIERYYAFDEAFVREVLGKKLSKGXKKDLDDISXKXGIXLKSCRRQFDNFKRVFKVVEEMRGSLVDNIQQHFLLSDRLARDYAAIVFFANNRFEXGKKKLQYLSFGDFAFCAELMIQNWXLGAVDSQMDDMDMDLDKEFLQDLKELKVLVADKDLLDLHKSLVCXALRGKLGVFSEMEANFKNLSRGLVNVAAKLXHNKDVRDLFVDLVEKFVEPCRSDHWPLSDVRFFLNQYSASVHSLDGFRHQALWDRYMGXLRGCLLRLYHD

SEQ ID NO: 10040 - protein, 364 aa, Homo sapiens
  MOD_RES (2)..(2): Selenocysteine
  MOD_RES (12)..(13): Selenocysteine
  MOD_RES (30)..(30): Selenocysteine
  MOD_RES (45)..(45): Selenocysteine
  MOD_RES (48)..(48): Selenocysteine
  MOD_RES (56)..(56): Selenocysteine
  MOD_RES (62)..(62): Selenocysteine
  MOD_RES (116)..(116): Selenocysteine
  MOD_RES (125)..(125): Selenocysteine
  MOD_RES (127)..(127): Selenocysteine
  MOD_RES (130)..(130): Selenocysteine
  MOD_RES (186)..(186): Selenocysteine
  MOD_RES (211)..(211): Selenocysteine
  MOD_RES (220)..(220): Selenocysteine
  MOD_RES (263)..(263): Selenocysteine
  MOD_RES (294)..(294): Selenocysteine
  MOD_RES (353)..(353): Selenocysteine
MXSELDIFVGNXXLIDEDVYRLWLDGYSVXDAVALRVRSGILEQXGAXAAVLQSDXMDHYRXFHMLERLLHAPPKLLHQLIFQIPPSRQALLIERYYAFDEAFVREVLGKKLSKGXKKDLDDISXKXGIXLKSCRRQFDNFKRVFKVVEEMRGSLVDNIQQHFLLSDRLARDYAAIVFFANNRFEXGKKKLQYLSFGDFAFCAELMIQNWXLGAVGEAPXDPDSQMDDMDMDLDKEFLQDLKELKVLVADKDLLDLHKSLVCXALRGKLGVFSEMEANFKNLSRGLVNVAAKLXHNKDVRDLFVDLVEKFVEPCRSDHWPLSDVRFFLNQYSASVHSLDGFRHQALWDRYMGXLRGCLLRLYHD

SEQ ID NO: 10041 - protein, 146 aa, Homo sapiens
  MOD_RES (2)..(2): Selenocysteine
  MOD_RES (12)..(13): Selenocysteine
  MOD_RES (30)..(30): Selenocysteine
  MOD_RES (45)..(45): Selenocysteine
  MOD_RES (48)..(48): Selenocysteine
  MOD_RES (56)..(56): Selenocysteine
  MOD_RES (62)..(62): Selenocysteine
  MOD_RES (116)..(116): Selenocysteine
  MOD_RES (125)..(125): Selenocysteine
  MOD_RES (127)..(127): Selenocysteine
  MOD_RES (130)..(130): Selenocysteine
MXSELDIFVGNXXLIDEDVYRLWLDGYSVXDAVALRVRSGILEQXGAXAAVLQSDXMDHYRXFHMLERLLHAPPKLLHQLIFQIPPSRQALLIERYYAFDEAFVREVLGKKLSKGXKKDLDDISXKXGIXLKSCRRQGLCSHRLLC

SEQ ID NO: 10042 - protein, 348 aa, Homo sapiens
  MOD_RES (2)..(2): Selenocysteine
  MOD_RES (12)..(13): Selenocysteine
  MOD_RES (27)..(27): Selenocysteine
  MOD_RES (42)..(42): Selenocysteine
  MOD_RES (45)..(45): Selenocysteine
  MOD_RES (53)..(53): Selenocysteine
  MOD_RES (59)..(59): Selenocysteine
  MOD_RES (113)..(113): Selenocysteine
  MOD_RES (122)..(122): Selenocysteine
  MOD_RES (124)..(124): Selenocysteine
  MOD_RES (127)..(127): Selenocysteine
  MOD_RES (183)..(183): Selenocysteine
  MOD_RES (208)..(208): Selenocysteine
  MOD_RES (253)..(253): Selenocysteine
  MOD_RES (284)..(284): Selenocysteine
  MOD_RES (298)..(298): Selenocysteine
  MOD_RES (306)..(306): Selenocysteine
  MOD_RES (328)..(328): Selenocysteine
MXSELDIFVGNXXLIDEDVYRLWLDVXDAVALRVRSGILEQXGAXAAVLQSDXMDHYRXFHMLERLLHAPPKLLHQLIFQIPPSRQALLIERYYAFDEAFVREVLGKKLSKGXKKDLDDISXKXGIXLKSCRRQFDNFKRVFKVVEEMRGSLVDNIQQHFLLSDRLARDYAAIVFFANNRFEXGKKKLQYLSFGDFAFCAELMIQNWXLGAVDSQMDDMDMDLDKEFLQDLKELKVLVADKDLLDLHKSLVCXALRGKLGVFSEMEANFKNLSRGLVNVAAKLXHNKDYSLGPAVCGXLPLRPLAXQRRAVLPESVFSVCPLPRWLPXPGPLGPLHGHPPRLPPAPVS

SEQ ID NO: 10043 - protein, 137 aa, Homo sapiens
  MOD_RES (1)..(1): Any amino acid
  MOD_RES (13)..(13): Selenocysteine
  MOD_RES (58)..(58): Selenocysteine
  MOD_RES (89)..(89): Selenocysteine
XAFCAELMIQNWXLGAVDSQMDDMDMDLDKEFLQDLKELKVLVADKDLLDLHKSLVCXALRGKLGVFSEMEANFKNLSRGLVNVAAKLXHNKDVRDLFVDLVEKFVEPCRSDHWPLSDVRFFLNQYSASVHSLDGFR

SEQ ID NO: 10044 - protein, 219 aa, Homo sapiens
  MOD_RES (20)..(20): Selenocysteine
  MOD_RES (57)..(57): Selenocysteine
  MOD_RES (111)..(111): Selenocysteine
  MOD_RES (146)..(146): Selenocysteine
  MOD_RES (157)..(157): Selenocysteine
  MOD_RES (193)..(194): Selenocysteine
  MOD_RES (200)..(200): Selenocysteine
MDPAPGVLDPRAAPPALLGXPQAEVLEDVLREQFGPLPQLAAVCRLKRLPSGGYSSXENLQLVLERRRVANAKERERIKNLNRGFARLKALVPFLPQSRKPSKVDILKGAXEYIQVLSDLLEGAKDSKKQDPDEQSYSNNSSESHXSSARQLSRNIXQHISCAFGLKNEEEGPWADGGSGEPAHACRHSVMSXXEIISPXRSLDRFPEVELLSHRLPQV

SEQ ID NO: 10045 - protein, 35 aa, Homo sapiens
  MOD_RES (3)..(3): Selenocysteine
  MOD_RES (22)..(22): Selenocysteine
  MOD_RES (27)..(27): Selenocysteine
MQXSSSRSVHLSEWQKNYFAIXSGICXGPKADAYR

SEQ ID NO: 10046 - protein, 67 aa, Homo sapiens
  MOD_RES (3)..(3): Selenocysteine
  MOD_RES (22)..(22): Selenocysteine
  MOD_RES (27)..(27): Selenocysteine
  MOD_RES (60)..(60): Selenocysteine
MQXSSSRSVHLSEWQKNYFAIXSGICXGPKADAYRAQILRIQYAWANSEISQDLNKQIVXSGSLDCQ

SEQ ID NO: 10047 - protein, 53 aa, Homo sapiens
  MOD_RES (3)..(3): Selenocysteine
  MOD_RES (22)..(22): Selenocysteine
  MOD_RES (27)..(27): Selenocysteine
MQXSSSRSVHLSEWQKNYFAIXSGICXGPKADAYRAQILRIQYAWANSEISQV

SEQ ID NO: 10048 - protein, 97 aa, Homo sapiens
  MOD_RES (3)..(3): Selenocysteine
  MOD_RES (22)..(22): Selenocysteine
  MOD_RES (27)..(27): Selenocysteine
  MOD_RES (56)..(56): Selenocysteine
  MOD_RES (88)..(88): Selenocysteine
  MOD_RES (95)..(95): Selenocysteine
MQXSSSRSVHLSEWQKNYFAIXSGICXGPKADAYRAQILRIQYAWANSEISQVCAXKLFKKYAEKYSAIIDSDNVESGLNNYAENILXLAGSQQXDS

SEQ ID NO: 10049 - protein, 102 aa, Homo sapiens
  MOD_RES (3)..(3): Selenocysteine
  MOD_RES (22)..(22): Selenocysteine
  MOD_RES (27)..(27): Selenocysteine
  MOD_RES (56)..(56): Selenocysteine
  MOD_RES (88)..(88): Selenocysteine
  MOD_RES (95)..(95): Selenocysteine
MQXSSSRSVHLSEWQKNYFAIXSGICXGPKADAYRAQILRIQYAWANSEISQVCAXKLFKKYAEKYSAIIDSDNVESGLNNYAENILXLAGSQQXDSDKWQS

SEQ ID NO: 10050 - protein, 125 aa, Homo sapiens
  MOD_RES (3)..(3): Selenocysteine
  MOD_RES (22)..(22): Selenocysteine
  MOD_RES (27)..(27): Selenocysteine
  MOD_RES (56)..(56): Selenocysteine
  MOD_RES (88)..(88): Selenocysteine
  MOD_RES (95)..(95): Selenocysteine
MQXSSSRSVHLSEWQKNYFAIXSGICXGPKADAYRAQILRIQYAWANSEISQVCAXKLFKKYAEKYSAIIDSDNVESGLNNYAENILXLAGSQQXDSDKWQSGLSINNVFKMSSVQKMMQAGKKF

SEQ ID NO: 10051 - protein, 674 aa, Homo sapiens
  MOD_RES (3)..(3): Selenocysteine
  MOD_RES (22)..(22): Selenocysteine
  MOD_RES (27)..(27): Selenocysteine
  MOD_RES (56)..(56): Selenocysteine
  MOD_RES (88)..(88): Selenocysteine
  MOD_RES (95)..(95): Selenocysteine
  MOD_RES (144)..(144): Selenocysteine
  MOD_RES (173)..(173): Selenocysteine
  MOD_RES (194)..(194): Selenocysteine
  MOD_RES (196)..(196): Selenocysteine
  MOD_RES (199)..(199): Selenocysteine
  MOD_RES (202)..(202): Selenocysteine
  MOD_RES (212)..(212): Selenocysteine
  MOD_RES (218)..(218): Selenocysteine
  MOD_RES (265)..(265): Selenocysteine
  MOD_RES (281)..(281): Selenocysteine
  MOD_RES (294)..(294): Selenocysteine
  MOD_RES (297)..(297): Selenocysteine
  MOD_RES (366)..(366): Selenocysteine
  MOD_RES (412)..(412): Selenocysteine
  MOD_RES (428)..(428): Selenocysteine
  MOD_RES (445)..(445): Selenocysteine
  MOD_RES (448)..(448): Selenocysteine
  MOD_RES (461)..(461): Selenocysteine
  MOD_RES (471)..(471): Selenocysteine
  MOD_RES (522)..(522): Selenocysteine
  MOD_RES (532)..(533): Selenocysteine
  MOD_RES (545)..(545): Selenocysteine
  MOD_RES (609)..(609): Selenocysteine
  MOD_RES (625)..(625): Selenocysteine
  MOD_RES (630)..(630): Selenocysteine
  MOD_RES (632)..(632): Selenocysteine
  MOD_RES (650)..(650): Selenocysteine
  MOD_RES (669)..(669): Selenocysteine
MQXSSSRSVHLSEWQKNYFAIXSGICXGPKADAYRAQILRIQYAWANSEISQVCAXKLFKKYAEKYSAIIDSDNVESGLNNYAENILXLAGSQQXDSDKWQSGLSINNVFKMSSVQKMMQAGKKFKDSLLEPALASVVIHKEAXVFDLPKFSVCGSSQESDSLPNSAHDRDRXQDFPESNRLKLLQNAQPPMVXNXARXCPXFSAPVGESAXAKFHVXPLFGNVKKENHSSAKENIGLNVFLSNQSCFPAACENPQRKSFYGSGXIDALSNPILNKACSKXEDNGPKEDSSLPXFKXAKEQLWVDQQKKYHQPQRASGSSYGGVKKSLGASRSRGILGKFVPPIPKQDGGEQNGGMQCKPYGAGPXEPAHPVDERLKNLEPKMIELIMNEIMDHGPPVNWEDIAGVEFAKAXIKEIVVWPMLRPDIFXGLRGPPKGILLFGPPGXGKXLIGKCIASQSGAXFFSISASSLXSKWVGEGEKMVRALFAVARCQQPAVIFIDEIDSLLSQRGDGEHESSRRIKXEFLVQLDGAXXSSEDRILVVGAXNRPQEIDEAARRRLVKRLYIPLPEASARKQIVINLMSKEQCCLSEEEIEQIVQQSDAFSGADMXQLCREASLGPIRSLQXADIAXIXPDQVRPIAYIDFENAFRXVRPSVSPKDLELYENWNKXFGCGK

SEQ ID NO: 10052 - protein, 152 aa, Homo sapiens
  MOD_RES (34)..(34): Selenocysteine
  MOD_RES (100)..(100): Selenocysteine
MEAVLNELVSVEDLLKFEKKFQSEKAAGSVSKSXQFEYAWCLVRSKYNDDIRKGIVLLEELLPKGSKEEQRDYVFYLAVGNYRLKEYEKALKYVRGLLQXEPQNNQAKELERLIDKAMKKDGLVGMAIVGGMALGVAGLAGLIGLAVSKSKS

SEQ ID NO: 10053 - protein, 46 aa, Homo sapiens
  MOD_RES (29)..(29): Selenocysteine
  MOD_RES (32)..(32): Selenocysteine
  MOD_RES (37)..(38): Selenocysteine
  MOD_RES (43)..(43): Selenocysteine
MEAVLNELVSVEDLLSCCPKGARRNSGIXSSXWPWGXXGSRNXRRP

SEQ ID NO: 10054 - protein, 90 aa, Homo sapiens
  MOD_RES (46)..(46): Selenocysteine
  MOD_RES (86)..(86): Selenocysteine
MEAVLNELVSVEDLLVRPGPDRGKGKVGGRVLRRVRAAAQREQGGXAGLRLLPGRGELPAQGIREGLKVRPRVAADRAPEQPGQGXGAAH

SEQ ID NO: 10055 - protein, 59 aa, Homo sapiens
  MOD_RES (15)..(15): Selenocysteine
  MOD_RES (55)..(55): Selenocysteine
MKLERAAAQREQGGXAGLRLLPGRGELPAQGIREGLKVRPRVAADRAPEQPGQGXGAAH

SEQ ID NO: 10056 - protein, 80 aa, Homo sapiens
  MOD_RES (28)..(28): Selenocysteine
  MOD_RES (37)..(37): Selenocysteine
  MOD_RES (40)..(40): Selenocysteine
  MOD_RES (63)..(63): Selenocysteine
  MOD_RES (66)..(66): Selenocysteine
  MOD_RES (71)..(72): Selenocysteine
  MOD_RES (77)..(77): Selenocysteine
MKLERSLKRNFSLRRQQARCPRARSLSXPGAWCGASXMMXSVKASCCSRSCCPKGARRNSGIXSSXWPWGXXGSRNXRRP

SEQ ID NO: 10057 - protein, 155 aa, Homo sapiens
  MOD_RES (28)..(28): Selenocysteine
  MOD_RES (37)..(37): Selenocysteine
  MOD_RES (40)..(40): Selenocysteine
  MOD_RES (63)..(63): Selenocysteine
  MOD_RES (66)..(66): Selenocysteine
  MOD_RES (71)..(72): Selenocysteine
  MOD_RES (77)..(77): Selenocysteine
  MOD_RES (93)..(93): Selenocysteine
  MOD_RES (96)..(96): Selenocysteine
  MOD_RES (99)..(99): Selenocysteine
  MOD_RES (110)..(110): Selenocysteine
  MOD_RES (114)..(114): Selenocysteine
MKLERSLKRNFSLRRQQARCPRARSLSXPGAWCGASXMMXSVKASCCSRSCCPKGARRNSGIXSSXWPWGXXGSRWXRGHGHRGRHGPGCGGXGRXHRXCCVQVQILKEXREPXENAPGGPVHPRCPFPVLPLPPVSILCGLQLISAPLRFVLQP

SEQ ID NO: 10058 - protein, 44 aa, Homo sapiens
  MOD_RES (8)..(8): Selenocysteine
MDDVPAPXPAPAPPAAAAPRVPFHCSECGKSFRYRSDLRRHFAR

SEQ ID NO: 10059 - protein, 194 aa, Homo sapiens
  MOD_RES (8)..(8): Selenocysteine
  MOD_RES (46)..(46): Selenocysteine
  MOD_RES (74)..(74): Selenocysteine
  MOD_RES (92)..(92): Selenocysteine
  MOD_RES (102)..(102): Selenocysteine
MDDVPAPXPAPAPPAAAAPRVPFHCSECGKSFRYRSDLRRHFARHXALKPHACPRCGKGFKHSFNLANHLRSHXGERPYRCSACPKGFRDSXGLLHHQVVHXGEKPYCCLVCELRFSSRSSLGRHLKRQHRGVLPSPLQPGPGLPALSAPCSVCCNVGPCSVCGGSGAGGGEGPEGAGAGLGSWGLAEAAAAAA

SEQ ID NO: 10060 - protein, 496 aa, Homo sapiens
  MOD_RES (8)..(8): Selenocysteine
  MOD_RES (46)..(46): Selenocysteine
  MOD_RES (74)..(74): Selenocysteine
  MOD_RES (92)..(92): Selenocysteine
  MOD_RES (102)..(102): Selenocysteine
  MOD_RES (223)..(223): Selenocysteine
  MOD_RES (249)..(249): Selenocysteine
  MOD_RES (273)..(273): Selenocysteine
  MOD_RES (278)..(278): Selenocysteine
  MOD_RES (329)..(329): Selenocysteine
  MOD_RES (337)..(337): Selenocysteine
  MOD_RES (357)..(357): Selenocysteine
  MOD_RES (391)..(391): Selenocysteine
  MOD_RES (437)..(437): Selenocysteine
  MOD_RES (466)..(466): Selenocysteine
  MOD_RES (481)..(481): Selenocysteine
MDDVPAPXPAPAPPAAAAPRVPFHCSECGKSFRYRSDLRRHFARHXALKPHACPRCGKGFKHSFNLANHLRSHXGERPYRCSACPKGFRDSXGLLHHQVVHXGEKPYCCLVCELRFSSRSSLGRHLKRQHRGVLPSPLQPGPGLPALSAPCSVCCNVGPCSVCGGSGAGGGEGPEGAGAGLGSWGLAEAAAAAAASLPPFACGACARRFDHGRELAAHWAAHXDVKPFKCPRCERDFNAPALLERHKLXHDLQGPGAPPAQAWAAGPGAGPEXAGEGXAAEAGDAPLASDRRLLLGPAGGGVPKLGGLLPEGGGEAPAPAAAAEPSEDXLYQCDCGXFFASAAALASHLEAHSGPAXYGCGHCGALYAALAALEEHRRVSHGEGGGEEAAXAAREREPASGEPPSGSGRGKKIFGCSECEKLFRSPRDLERHVLVHXGEKPFPCLECGKFFRHECYLKRHRLLHGXERPFPCHICGKGFIXLSNLSRHLKLHRGMD

SEQ ID NO: 10061 - protein, 68 aa, Homo sapiens
  MOD_RES (8)..(8): Selenocysteine
  MOD_RES (46)..(46): Selenocysteine
  MOD_RES (52)..(52): Selenocysteine
MDDVPAPXPAPAPPAAAAPRVPFHCSECGKSFRYRSDLRRHFARHXALNASXVGFSPLPCSPALACPP

SEQ ID NO: 10062 - protein, 134 aa, Homo sapiens
  MOD_RES (1)..(1): Any amino acid
  MOD_RES (39)..(39): Selenocysteine
  MOD_RES (67)..(67): Selenocysteine
  MOD_RES (85)..(85): Selenocysteine
XPAPAPPAAAAPRVPFHCSECGKSFRYRSDLRRHFARHXALKPHACPRCGKGFKHSFNLANHLRSHXGERPYRCSACPKGFRDSXGLLHHQEAKQALEELEEGQCDWSMEKQKVWLRRSLESAGPWKYSCRPHW

SEQ ID NO: 10063 - protein, 437 aa, Homo sapiens
  MOD_RES (11)..(11): Selenocysteine
  MOD_RES (34)..(34): Selenocysteine
  MOD_RES (79)..(79): Selenocysteine
  MOD_RES (85)..(85): Selenocysteine
  MOD_RES (175)..(175): Selenocysteine
  MOD_RES (235)..(235): Selenocysteine
  MOD_RES (243)..(243): Selenocysteine
  MOD_RES (250)..(250): Selenocysteine
  MOD_RES (290)..(290): Selenocysteine
  MOD_RES (299)..(299): Selenocysteine
  MOD_RES (323)..(323): Selenocysteine
  MOD_RES (371)..(371): Selenocysteine
  MOD_RES (437)..(437): Selenocysteine
MGRRMRGAAAXAGLWLLALGSLLALWGGLLPPRXELPASRPPEDRLPRRPARSGGPAPAPRFPLPPPLAWDARGGSLKXFRALLXLAAGADGPPRQSRSEPRWHVSARQPRPEESAAVHGGVFWSRGLEEQVPPGFSEAQAAAWLEAARGARMVALERGGCGRSSNRLARFADGXRACVRYGINPEQIQGEALSYYLARLLGLQRHVPPLALARVEARGAQWAQVQEELRAAHWXEGSVVSLXRWLPNLXDVVVPAPWRSEDGRLRPLRDAGGELANLSQAELVDLVQWXDLILFDYLXANFDRLVSNLFSLQWDPRVMQRAXSNLHRGPGGALVFLDNEAGLVHGYRVAGMWDKYNEPLLQSVCVFRERXARRVLELHRGQDAAARLLRLYRRHEPRFPELAALADPHAQLLQRRLDFLAKHILHCKAKYGRRSGX

SEQ ID NO: 10064 - protein, 92 aa, Homo sapiens
  MOD_RES (7)..(7): Selenocysteine
  MOD_RES (60)..(60): Selenocysteine
  MOD_RES (70)..(70): Selenocysteine
  MOD_RES (81)..(81): Selenocysteine
MGVQVEXISPGDGMLEDGKKFDSSRDRNKPFKFMLGKQEVIRGWEEGVAQMSVGQRAKLXISPDYAYGAXGHPGIIPPHAXLVFDVELLKLE

SEQ ID NO: 10065 - protein, 97 aa, Homo sapiens
  MOD_RES (7)..(7): Selenocysteine
  MOD_RES (15)..(15): Selenocysteine
  MOD_RES (22)..(22): Selenocysteine
  MOD_RES (28)..(28): Selenocysteine
  MOD_RES (37)..(37): Selenocysteine
  MOD_RES (56)..(57): Selenocysteine
  MOD_RES (69)..(69): Selenocysteine
  MOD_RES (72)..(72): Selenocysteine
  MOD_RES (97)..(97): Selenocysteine
MGVQVEXISPGDGRXFPKRGQXCVVHYXDECGSESQXDYISRLCLWCHWAPRHHPXXCHSRLRCGASKXGMXGMASSLSSLFLDLPWRDLVPPDMCX

SEQ ID NO: 10066 - protein, 37 aa, Homo sapiens
  MOD_RES (7)..(7): Selenocysteine
  MOD_RES (15)..(15): Selenocysteine
  MOD_RES (22)..(22): Selenocysteine
  MOD_RES (28)..(28): Selenocysteine
MGVQVEXISPGDGRXFPKRGQXCVVHYXGGDCILVNE

SEQ ID NO: 10067 - protein, 108 aa, Homo sapiens
  MOD_RES (7)..(7): Selenocysteine
  MOD_RES (15)..(15): Selenocysteine
  MOD_RES (22)..(22): Selenocysteine
  MOD_RES (28)..(28): Selenocysteine
  MOD_RES (76)..(76): Selenocysteine
  MOD_RES (86)..(86): Selenocysteine
  MOD_RES (97)..(97): Selenocysteine
MGVQVEXISPGDGRXFPKRGQXCVVHYXGMLEDGKKFDSSRDRNKPFKFMLGKQEVIRGWEEGVAQMSVGQRAKLXISPDYAYGAXGHPGIIPPHAXLVFDVELLKLE

SEQ ID NO: 10068 - protein, 129 aa, Homo sapiens
  MOD_RES (7)..(7): Selenocysteine
  MOD_RES (15)..(15): Selenocysteine
  MOD_RES (22)..(22): Selenocysteine
  MOD_RES (28)..(28): Selenocysteine
MGVQVEXISPGDGRXFPKRGQXCVVHYXGMLEDGKKFDSSRDRNKPFKFMLGKQEVIRGWEEGVAQVCSLICFVLLSSIYLLYFFIGGIFIRFKNKKSEKSHPHAIPSDQYPHKKLLLLMFLVLWFKHI

SEQ ID NO: 10069 - protein, 103 aa, Homo sapiens
  MOD_RES (10)..(10): Selenocysteine
  MOD_RES (17)..(17): Selenocysteine
  MOD_RES (23)..(23): Selenocysteine
  MOD_RES (71)..(71): Selenocysteine
  MOD_RES (81)..(81): Selenocysteine
  MOD_RES (92)..(92): Selenocysteine
MPVSVSSGRXFPKRGQXCVVHYXGMLEDGKKFDSSRDRNKPFKFMLGKQEVIRGWEEGVAQMSVGQRAKLXISPDYAYGAXGHPGIIPPHAXLVFDVELLKLE

SEQ ID NO: 10070 - protein, 57 aa, Homo sapiens
  MOD_RES (7)..(7): Selenocysteine
  MOD_RES (15)..(15): Selenocysteine
  MOD_RES (22)..(22): Selenocysteine
  MOD_RES (28)..(28): Selenocysteine
MGVEIEXISPGDGRXFPKKGQXCVVHYXASLVGMIKEAWKANSFPLLPARAIHGASF

SEQ ID NO: 10071 - protein, 80 aa, Homo sapiens
  MOD_RES (7)..(7): Selenocysteine
  MOD_RES (15)..(15): Selenocysteine
  MOD_RES (22)..(22): Selenocysteine
  MOD_RES (28)..(28): Selenocysteine
MGVEIEXISPGDGRXFPKKGQXCVVHYXGMLQNGKKFDSSRDRNKPFKFRIGKQEVIKGFEEGAAQLGPLSPLPICPHPC

SEQ ID NO: 10072 - protein, 108 aa, Homo sapiens
  MOD_RES (7)..(7): Selenocysteine
  MOD_RES (15)..(15): Selenocysteine
  MOD_RES (22)..(22): Selenocysteine
  MOD_RES (28)..(28): Selenocysteine
  MOD_RES (76)..(76): Selenocysteine
  MOD_RES (78)..(78): Selenocysteine
  MOD_RES (86)..(86): Selenocysteine
  MOD_RES (97)..(97): Selenocysteine
MGVEIEXISPGDGRXFPKKGQXCVVHYXGMLQNGKKFDSSRDRNKPFKFRIGKQEVIKGFEEGAAQMSLGQRAKLXCXPDVAYGAXGHPGVIPPNAXLIFDVELLNLE

SEQ ID NO: 10073 - protein, 79 aa, Homo sapiens
  MOD_RES (47)..(47): Selenocysteine
  MOD_RES (49)..(49): Selenocysteine
  MOD_RES (57)..(57): Selenocysteine
  MOD_RES (68)..(68): Selenocysteine
MLQNGKKFDSSRDRNKPFKFRIGKQEVIKGFEEGAAQMSLGQRAKLXCXPDVAYGAXGHPGVIPPNAXLIFDVELLNLE

SEQ ID NO: 10074 - protein, 42 aa, Homo sapiens
  MOD_RES (1)..(1): Any amino acid
  MOD_RES (7)..(7): Selenocysteine
  MOD_RES (13)..(13): Selenocysteine
XPKKGQXCVVHYXASLVGMIKEAWKANSFPLLPARAIHGASF

SEQ ID NO: 10075 - protein, 102 aa, Homo sapiens
  MOD_RES (10)..(10): Selenocysteine
  MOD_RES (21)..(21): Selenocysteine
  MOD_RES (23)..(23): Selenocysteine
  MOD_RES (57)..(57): Selenocysteine
  MOD_RES (64)..(64): Selenocysteine
  MOD_RES (82)..(82): Selenocysteine
MRLSWFRVLXVLSICLSAVAXAXGAEGKRKLQIGVKKRVDHCPIKSRKGDVLHMHYXGKLEDGXEFDSSLPQNQPFVFSLGXGQVIKGWDQGLLGMCEGEKR

SEQ ID NO: 10076 - protein, 142 aa, Homo sapiens
  MOD_RES (10)..(10): Selenocysteine
  MOD_RES (21)..(21): Selenocysteine
  MOD_RES (23)..(23): Selenocysteine
  MOD_RES (57)..(57): Selenocysteine
  MOD_RES (64)..(64): Selenocysteine
  MOD_RES (82)..(82): Selenocysteine
  MOD_RES (126)..(126): Selenocysteine
  MOD_RES (140)..(140): Selenocysteine
MRLSWFRVLXVLSICLSAVAXAXGAEGKRKLQIGVKKRVDHCPIKSRKGDVLHMHYXGKLEDGXEFDSSLPQNQPFVFSLGXGQVIKGWDQGLLGMCEGEKRKLVIPSELGYGERGAPPKIPGGAXLVFEVELLKIERRXEL

SEQ ID NO: 10077 - protein, 86 aa, Homo sapiens
  MOD_RES (13)..(13): Selenocysteine
  MOD_RES (20)..(20): Selenocysteine
  MOD_RES (51)..(51): Selenocysteine
  MOD_RES (61)..(61): Selenocysteine
  MOD_RES (82)..(82): Selenocysteine
MPMIGDRVFVHYXGWLLDGXKFDSSLDRKDKFSFDLGKGEVIKAWDIAIAXMKVGEVCHIXCKPEYAYGSAGSPPKIPPNAXLVFE

SEQ ID NO: 10078 - protein, 51 aa, Homo sapiens
  MOD_RES (2)..(2): Selenocysteine
  MOD_RES (9)..(9): Selenocysteine
MXAEEMKAXESGAQSAPLPMEGVDISPKQDEGVLKIIGDLKRLLQRLSCGM

SEQ ID NO: 10079 - protein, 459 aa, Homo sapiens
  MOD_RES (2)..(2): Selenocysteine
  MOD_RES (9)..(9): Selenocysteine
  MOD_RES (42)..(42): Selenocysteine
  MOD_RES (44)..(44): Selenocysteine
  MOD_RES (58)..(58): Selenocysteine
  MOD_RES (65)..(65): Selenocysteine
  MOD_RES (96)..(96): Selenocysteine
  MOD_RES (106)..(106): Selenocysteine
  MOD_RES (127)..(127): Selenocysteine
  MOD_RES (143)..(143): Selenocysteine
  MOD_RES (156)..(156): Selenocysteine
  MOD_RES (271)..(271): Selenocysteine
  MOD_RES (278)..(278): Selenocysteine
  MOD_RES (391)..(391): Selenocysteine
  MOD_RES (436)..(436): Selenocysteine
  MOD_RES (438)..(438): Selenocysteine
  MOD_RES (448)..(448): Selenocysteine
  MOD_RES (457)..(457): Selenocysteine
MXAEEMKAXESGAQSAPLPMEGVDISPKQDEGVLKVIKREGXGXEMPMIGDRVFVHYXGWLLDGXKFDSSLDRKDKFSFDLGKGEVIKAWDIAIAXMKVGEVCHIXCKPEYAYGSAGSPPKIPPNAXLVFEVELFEFKGEDLXEEEDGGIIRRIQXRGEGYAKPNEGAIVEVALEGYYKDKLFDQRELRFEIGEGENLDLPYGLERAIQRMEKGEHSIVYLKPSYAFGSVGKEKFQIPPNAELKYELHLKSFEKAKESWEMNSEEKLEQSXIVKERGXVYFKEGKYKQALLQYKKIVSWLEYESSFSNEEAQKAQALRLASHLNLAMCHLKLQAFSAAIESCNKALELDSNNEKGLFRRGEAHLAVNDFELARADFQKVLQLYPNNKAAKXQLAVCQQRIRRQLAREKKLYANMFERLAEEENKAKAEASSGDHPXDXEMKEEQKSNXAGSQSQVEXEA

SEQ ID NO: 10080 - protein, 23 aa, Homo sapiens
  MOD_RES (1)..(1): Any amino acid
  MOD_RES (9)..(9): Selenocysteine
XKEEQKSNXAGSQSQIRKPRLRS

SEQ ID NO: 10081 - protein, 84 aa, Homo sapiens
  MOD_RES (1)..(1): Any amino acid
  MOD_RES (27)..(27): Selenocysteine
  MOD_RES (65)..(65): Selenocysteine
XVNDFELARADFQKVLQLYPNNKAAKXQLAVCQQRIRRQLAREKKLYANMFERLAEEENKAPWLXPAIPALCRAKVGGSLEPSR

SEQ ID NO: 10082 - protein, 23 aa, Homo sapiens
MASCAEPSEPSAPLPAGVPPLED

SEQ ID NO: 10083 - protein, 163 aa, Homo sapiens
  MOD_RES (106)..(106): Selenocysteine
  MOD_RES (124)..(124): Selenocysteine
  MOD_RES (129)..(129): Selenocysteine
  MOD_RES (135)..(135): Selenocysteine
  MOD_RES (146)..(146): Selenocysteine
MASCAEPSEPSAPLPAGVPPLEDFEVLDGVEDAEGEEEEEEEEEEEDDLSELPPLEDMGQPPAEEAEQPGALAREFLAAMEPEPAPAPAPEEWLDILGNGLLRKKXLVPGPPGSSRPVKGQVVXVHLQXSLENGXRVQEEPELVFXLGDCDVIQALDLSVPLM

SEQ ID NO: 10084 - protein, 168 aa, Homo sapiens
  MOD_RES (106)..(106): Selenocysteine
  MOD_RES (124)..(124): Selenocysteine
  MOD_RES (129)..(129): Selenocysteine
  MOD_RES (135)..(135): Selenocysteine
  MOD_RES (146)..(146): Selenocysteine
  MOD_RES (168)..(168): Selenocysteine
MASCAEPSEPSAPLPAGVPPLEDFEVLDGVEDAEGEEEEEEEEEEEDDLSELPPLEDMGQPPAEEAEQPGALAREFLAAMEPEPAPAPAPEEWLDILGNGLLRKKXLVPGPPGSSRPVKGQVVXVHLQXSLENGXRVQEEPELVFXLGDCDVIQALDLSVPLMDVGEX

SEQ ID NO: 10085 - protein, 412 aa, Homo sapiens
  MOD_RES (106)..(106): Selenocysteine
  MOD_RES (124)..(124): Selenocysteine
  MOD_RES (129)..(129): Selenocysteine
  MOD_RES (135)..(135): Selenocysteine
  MOD_RES (146)..(146): Selenocysteine
  MOD_RES (168)..(168): Selenocysteine
  MOD_RES (172)..(172): Selenocysteine
  MOD_RES (199)..(199): Selenocysteine
  MOD_RES (202)..(202): Selenocysteine
  MOD_RES (213)..(213): Selenocysteine
  MOD_RES (252)..(252): Selenocysteine
  MOD_RES (260)..(260): Selenocysteine
  MOD_RES (341)..(341): Selenocysteine
  MOD_RES (359)..(359): Selenocysteine
  MOD_RES (361)..(361): Selenocysteine
  MOD_RES (395)..(395): Selenocysteine
MASCAEPSEPSAPLPAGVPPLEDFEVLDGVEDAEGEEEEEEEEEEEDDLSELPPLEDMGQPPAEEAEQPGALAREFLAAMEPEPAPAPAPEEWLDILGNGLLRKKXLVPGPPGSSRPVKGQVVXVHLQXSLENGXRVQEEPELVFXLGDCDVIQALDLSVPLMDVGEXAMVXADSKYCYGPQGRSPYIPPHAALCLEVXLKXAVDGPDLEMLXGQERVALANRKRECGNAHYQRADFVLAANSYDLAIKAIXSSAKVDMXFEEEAQLLQLKVKCLNNLAASQLKLDHYRAALRSCSLVLEHQPDNIKALFRKGKVLAQQGEYSEAIPILRAALKLEPSNKXIHAELSKLVKKHAAQRSXEXALYRKMLGNPSRLPAKCPGKGAWSIPWKWLFGAXAVALGGVALSVVIAARN

SEQ ID NO: 10086 - protein, 204 aa, Homo sapiens
  MOD_RES (106)..(106): Selenocysteine
  MOD_RES (124)..(124): Selenocysteine
  MOD_RES (129)..(129): Selenocysteine
  MOD_RES (135)..(135): Selenocysteine
  MOD_RES (146)..(146): Selenocysteine
  MOD_RES (168)..(168): Selenocysteine
  MOD_RES (172)..(172): Selenocysteine
  MOD_RES (200)..(200): Selenocysteine
  MOD_RES (203)..(203): Selenocysteine
MASCAEPSEPSAPLPAGVPPLEDFEVLDGVEDAEGEEEEEEEEEEEDDLSELPPLEDMGQPPAEEAEQPGALAREFLAAMEPEPAPAPAPEEWLDILGNGLLRKKXLVPGPPGSSRPVKGQVVXVHLQXSLENGXRVQEEPELVFXLGDCDVIQALDLSVPLMDVGEXAMVXADSKYCYGPQGSRSPYIPPHAALCLEVXLKXA

SEQ ID NO: 10087 - protein, 257 aa, Homo sapiens
  MOD_RES (106)..(106): Selenocysteine
  MOD_RES (124)..(124): Selenocysteine
  MOD_RES (129)..(129): Selenocysteine
  MOD_RES (135)..(135): Selenocysteine
  MOD_RES (146)..(146): Selenocysteine
  MOD_RES (168)..(168): Selenocysteine
  MOD_RES (172)..(172): Selenocysteine
  MOD_RES (200)..(200): Selenocysteine
  MOD_RES (203)..(203): Selenocysteine
  MOD_RES (214)..(214): Selenocysteine
  MOD_RES (253)..(253): Selenocysteine
MASCAEPSEPSAPLPAGVPPLEDFEVLDGVEDAEGEEEEEEEEEEEDDLSELPPLEDMGQPPAEEAEQPGALAREFLAAMEPEPAPAPAPEEWLDILGNGLLRKKXLVPGPPGSSRPVKGQVVXVHLQXSLENGXRVQEEPELVFXLGDCDVIQALDLSVPLMDVGEXAMVXADSKYCYGPQGSRSPYIPPHAALCLEVXLKXAVDGPDLEMLXGQERVALANRKRECGNAHYQRADFVLAANSYDLAIKAIXSSAK

SEQ ID NO: 10088 - protein, 413 aa, Homo sapiens
  MOD_RES (106)..(106): Selenocysteine
  MOD_RES (124)..(124): Selenocysteine
  MOD_RES (129)..(129): Selenocysteine
  MOD_RES (135)..(135): Selenocysteine
  MOD_RES (146)..(146): Selenocysteine
  MOD_RES (168)..(168): Selenocysteine
  MOD_RES (172)..(172): Selenocysteine
  MOD_RES (200)..(200): Selenocysteine
  MOD_RES (203)..(203): Selenocysteine
  MOD_RES (214)..(214): Selenocysteine
  MOD_RES (253)..(253): Selenocysteine
  MOD_RES (261)..(261): Selenocysteine
  MOD_RES (342)..(342): Selenocysteine
  MOD_RES (360)..(360): Selenocysteine
  MOD_RES (362)..(362): Selenocysteine
  MOD_RES (396)..(396): Selenocysteine
MASCAEPSEPSAPLPAGVPPLEDFEVLDGVEDAEGEEEEEEEEEEEDDLSELPPLEDMGQPPAEEAEQPGALAREFLAAMEPEPAPAPAPEEWLDILGNGLLRKKXLVPGPPGSSRPVKGQVVXVHLQXSLENGXRVQEEPELVFXLGDCDVIQALDLSVPLMDVGEXAMVXADSKYCYGPQGSRSPYIPPHAALCLEVXLKXAVDGPDLEMLXGQERVALANRKRECGNAHYQRADFVLAANSYDLAIKAIXSSAKVDMXFEEEAQLLQLKVKCLNNLAASQLKLDHYRAALRSCSLVLEHQPDNIKALFRKGKVLAQQGEYSEAIPILRAALKLEPSNKXIHAELSKLVKKHAAQRSXEXALYRKMLGNPSRLPAKCPGKGAWSIPWKWLFGAXAVALGGVALSVVIAARN

SEQ ID NO: 10089 - protein, 116 aa, Homo sapiens
  MOD_RES (105)..(105): Selenocysteine
MASCAEPSEPSAPLPAGVPPLEDFEVLDGVEDAEGEEEEEEEEEEEDDLSELPPLEDMGQPPAEEAEQPGALAREFLAAMEPEPAPAPAPEEWLDILGPGSQCPXHGRGGDGHGHC

SEQ ID NO: 10090 - protein, 249 aa, Homo sapiens
  MOD_RES (101)..(101): Selenocysteine
  MOD_RES (182)..(182): Selenocysteine
  MOD_RES (200)..(200): Selenocysteine
  MOD_RES (202)..(202): Selenocysteine
  MOD_RES (236)..(236): Selenocysteine
MASCAEPSEPSAPLPAGVPPLEDFEVLDGVEDAEGEEEEEEEEEEEDDLSELPPLEDMGQPPAEEAEQPGALAREFLAAMEPEPAPAPAPEEWLDILVDMXFEEEAQLLQLKVKCLNNLAASQLKLDHYRAALRSCSLVLEHQPDNIKALFRKGKVLAQQGEYSEAIPILRAALKLEPSNKXIHAELSKLVKKHAAQRSXEXALYRKMLGNPSRLPAKCPGKGAWSIPWKWLFGAXAVALGGVALSVVI

SEQ ID NO: 10091 - protein, 182 aa, Homo sapiens
  MOD_RES (1)..(1): Any amino acid
  MOD_RES (9)..(9): Selenocysteine
  MOD_RES (48)..(48): Selenocysteine
  MOD_RES (56)..(56): Selenocysteine
  MOD_RES (111)..(111): Selenocysteine
  MOD_RES (129)..(129): Selenocysteine
  MOD_RES (131)..(131): Selenocysteine
  MOD_RES (165)..(165): Selenocysteine
XGPDLEMLXGQERVALANRKRECGNAHYQRADFVLAANSYDLAIKAIXSSAKVDMXFEEEAQLLQLKVKCLNNLAASQLKLDHYRAALRSCSLVLEHQPDNIKALFRKGKXIHAELSKLVKKHAAQRSXEXALYRKMLGNPSRLPAKCPGKGAWSIPWKWLFGAXAVALGGVALSVVIAARN

SEQ ID NO: 10092 - protein, 103 aa, Homo sapiens
  MOD_RES (1)..(1): Any amino acid
XSQLKLDHYRAALRSCSLVLEHQPDNIKALFRKGKVLAQQGEYSEAIPILRAALKLEPSNKLPLPSADDPRRALKAGEEACGAAEHGDRLVPENAGQPQPAAC

SEQ ID NO: 10093 - protein, 37 aa, Homo sapiens
  MOD_RES (18)..(18): Selenocysteine
  MOD_RES (22)..(22): Selenocysteine
MNAIVALCHFCELHGPRXLFCXEVLHAPLPQGDGNED

SEQ ID NO: 10094 - protein, 342 aa, Homo sapiens
  MOD_RES (18)..(18): Selenocysteine
  MOD_RES (22)..(22): Selenocysteine
  MOD_RES (102)..(102): Selenocysteine
  MOD_RES (155)..(155): Selenocysteine
  MOD_RES (174)..(174): Selenocysteine
  MOD_RES (224)..(224): Selenocysteine
  MOD_RES (227)..(227): Selenocysteine
  MOD_RES (242)..(242): Selenocysteine
  MOD_RES (245)..(245): Selenocysteine
  MOD_RES (256)..(256): Selenocysteine
  MOD_RES (270)..(270): Selenocysteine
  MOD_RES (279)..(279): Selenocysteine
  MOD_RES (282)..(282): Selenocysteine
  MOD_RES (309)..(309): Selenocysteine
  MOD_RES (331)..(331): Selenocysteine
MNAIVALCHFCELHGPRXLFCXEVLHAPLPQGDGNEDSPGQGEQAEEEEGGIQMNSRMRAHSPAEGASVESSSPGPKKSDMCEGCRSLAAGHPGYISHDKEXSIKYVSHQHPSHPQLFSIVRQACVRSLSCEVCPGREGPIFFGDEQHGFVFSHXFFIKDSLARGFQRWYSIIXIMMDRIYLINSWPFLLGKVRGIIDELQGKALKVFEAEQFGCPQRAQRMNXAFXPFLHQRNGNAARSLXSLXSDDNLWACLHXSFAWLLKACGSRLXEKLLEGAPXEDXLVQMEKLAGEAGVLLPGPWPGWPWGGXSCLLSWQESLREGNAALNQPRXSLREAHPPISV

SEQ ID NO: 10095 - protein, 579 aa, Homo sapiens
  MOD_RES (18)..(18): Selenocysteine
  MOD_RES (22)..(22): Selenocysteine
  MOD_RES (102)..(102): Selenocysteine
  MOD_RES (155)..(155): Selenocysteine
  MOD_RES (174)..(174): Selenocysteine
  MOD_RES (224)..(224): Selenocysteine
  MOD_RES (227)..(227): Selenocysteine
  MOD_RES (242)..(242): Selenocysteine
  MOD_RES (245)..(245): Selenocysteine
  MOD_RES (256)..(256): Selenocysteine
  MOD_RES (270)..(270): Selenocysteine
  MOD_RES (279)..(279): Selenocysteine
  MOD_RES (282)..(282): Selenocysteine
  MOD_RES (317)..(317): Selenocysteine
  MOD_RES (323)..(323): Selenocysteine
  MOD_RES (393)..(393): Selenocysteine
  MOD_RES (448)..(448): Selenocysteine
  MOD_RES (468)..(468): Selenocysteine
  MOD_RES (481)..(481): Selenocysteine
  MOD_RES (491)..(491): Selenocysteine
  MOD_RES (522)..(522): Selenocysteine
  MOD_RES (532)..(532): Selenocysteine
  MOD_RES (555)..(555): Selenocysteine
  MOD_RES (560)..(560): Selenocysteine
  MOD_RES (568)..(568): Selenocysteine
  MOD_RES (573)..(573): Selenocysteine
MNAIVALCHFCELHGPRXLFCXEVLHAPLPQGDGNEDSPGQGEQAEEEEGGIQMNSRMRAHSPAEGASVESSSPGPKKSDMCEGCRSLAAGHPGYISHDKEXSIKYVSHQHPSHPQLFSIVRQACVRSLSCEVCPGREGPIFFGDEQHGFVFSHXFFIKDSLARGFQRWYSIIXIMMDRIYLINSWPFLLGKVRGIIDELQGKALKVFEAEQFGCPQRAQRMNXAFXPFLHQRNGNAARSLXSLXSDDNLWACLHXSFAWLLKACGSRLXEKLLEGAPXEDXLVQMEKLADLEEESESWDNSEAEEEEKAPVLPESXEGRELXQGPAESSSLSGCGSWQPRKLPVFKSLRHMRQVLGAPSFRMLAWHVLMGNQVIWKSRDVDLVQSAFEVLRXMLPVGCVRIIPYSSQYEEAYRCNFLGLSPHVQIPPHVLSSEFAVIVEVHAAARSXLHPVGCEDDQSLSKYEFVVXSGSPVAADRVGPXILNKIEAALXNQNLSVDVVDQCLVCLKEEWMNKVKVLFKFXKVDSRPKEDXQKLLSILGASEEDNVKLLKFWMXGLSKXYKSHLMSXVRSPXASESRN

SEQ ID NO: 10096 - protein, 153 aa, Homo sapiens
  MOD_RES (49)..(49): Selenocysteine
  MOD_RES (102)..(102): Selenocysteine
  MOD_RES (121)..(121): Selenocysteine
MNSRMRAHSPAEGASVESSSPGPKKSDMCEGCRSLAAGHPGYISHDKEXSIKYVSHQHPSHPQLFSIVRQACVRSLSCEVCPGREGPIFFGDEQHGFVFSHXFFIKDSLARGFQRWYSIIXIMMDRIYLINSWPFLLGKVRGIIDELQGKALK

SEQ ID NO: 10097 - protein, 452 aa, Homo sapiens
  MOD_RES (4)..(4): Selenocysteine
  MOD_RES (35)..(35): Selenocysteine
  MOD_RES (118)..(119): Selenocysteine
  MOD_RES (131)..(131): Selenocysteine
  MOD_RES (134)..(134): Selenocysteine
  MOD_RES (156)..(156): Selenocysteine
  MOD_RES (179)..(180): Selenocysteine
  MOD_RES (184)..(184): Selenocysteine
  MOD_RES (204)..(205): Selenocysteine
  MOD_RES (208)..(208): Selenocysteine
  MOD_RES (249)..(249): Selenocysteine
  MOD_RES (254)..(254): Selenocysteine
  MOD_RES (269)..(269): Selenocysteine
  MOD_RES (301)..(301): Selenocysteine
  MOD_RES (305)..(305): Selenocysteine
  MOD_RES (312)..(312): Selenocysteine
  MOD_RES (349)..(349): Selenocysteine
  MOD_RES (374)..(374): Selenocysteine
  MOD_RES (411)..(411): Selenocysteine
  MOD_RES (424)..(424): Selenocysteine
  MOD_RES (427)..(427): Selenocysteine
  MOD_RES (442)..(442): Selenocysteine
MDGXIKEALSVVSDDQSLFDSAYGAAAHLPKADMXASGSPDYGQPHKINPLPPQQEWINQPVRVNVKREYDHMNGSRESPVDCSVSKCSKLVGGGESNPMNYNSYMDEKNGPPPPNMXXNERRVIVPADPXLWXQEHVRQWLEWAIKEYSLMEIDXSFFQNMDGKELCKMNKEDFLRAXXLYNXEVLLSHLSYLRESSLLAYNXXSHXDQSSRLSVKEDPSYDSVRRGAWGNNMNSGLNKSPPLGGAQXISKNXEQRPQPDPYQILGPXSSRLANPGSGQIQLWQFLLELLSDSANASCIXWEGXNGEFKMXDPDEVARRWGERKSKPNMNYDKLSRALRYYYDKNIMXKVHGKRYAYKFDFHGIAQALQPHPXESSMYKYPSDISYMPSYHAHQQKVNFVPPHPSSMPVXSSSFFGAASQYWXSPXGGIYPNPNVPRHPNXHVPSHLGSYY

SEQ ID NO: 10098 - protein, 82 aa, Homo sapiens
  MOD_RES (4)..(4): Selenocysteine
  MOD_RES (35)..(35): Selenocysteine
MDGXIKEALSVVSDDQSLFDSAYGAAAHLPKADMXASGSPDYGQPHKINPLPPQQEWINQPVRVNVKREYDHMNGSRRQLPH

SEQ ID NO: 10099 - protein, 259 aa, Homo sapiens
  MOD_RES (11)..(12): Selenocysteine
  MOD_RES (15)..(15): Selenocysteine
  MOD_RES (56)..(56): Selenocysteine
  MOD_RES (61)..(61): Selenocysteine
  MOD_RES (76)..(76): Selenocysteine
  MOD_RES (108)..(108): Selenocysteine
  MOD_RES (112)..(112): Selenocysteine
  MOD_RES (119)..(119): Selenocysteine
  MOD_RES (156)..(156): Selenocysteine
  MOD_RES (181)..(181): Selenocysteine
  MOD_RES (218)..(218): Selenocysteine
  MOD_RES (231)..(231): Selenocysteine
  MOD_RES (234)..(234): Selenocysteine
  MOD_RES (249)..(249): Selenocysteine
MDPGSLLAYNXXSHXDQSSRLSVKEDPSYDSVRRGAWGNNMNSGLNKSPPLGGAQXISKNXEQRPQPDPYQILGPXSSRLANPGSGQIQLWQFLLELLSDSANASCIXWEGXNGEFKMXDPDEVARRWGERKSKPNMNYDKLSRALRYYYDKNIMXKVHGKRYAYKFDFHGIAQALQPHPXESSMYKYPSDISYMPSYHAHQQKVNFVPPHPSSMPVXSSSFFGAASQYWXSPXGGIYPNPNVPRHPNXHVPSHLGSYY

SEQ ID NO: 10100 - protein, 386 aa, Homo sapiens
  MOD_RES (52)..(53): Selenocysteine
  MOD_RES (65)..(65): Selenocysteine
  MOD_RES (68)..(68): Selenocysteine
  MOD_RES (90)..(90): Selenocysteine
  MOD_RES (113)..(114): Selenocysteine
  MOD_RES (118)..(118): Selenocysteine
  MOD_RES (138)..(139): Selenocysteine
  MOD_RES (142)..(142): Selenocysteine
  MOD_RES (183)..(183): Selenocysteine
  MOD_RES (188)..(188): Selenocysteine
  MOD_RES (203)..(203): Selenocysteine
  MOD_RES (235)..(235): Selenocysteine
  MOD_RES (239)..(239): Selenocysteine
  MOD_RES (246)..(246): Selenocysteine
  MOD_RES (283)..(283): Selenocysteine
  MOD_RES (308)..(308): Selenocysteine
  MOD_RES (345)..(345): Selenocysteine
  MOD_RES (358)..(358): Selenocysteine
  MOD_RES (361)..(361): Selenocysteine
  MOD_RES (376)..(376): Selenocysteine
MEGGLAGERARESPVDCSVSKCSKLVGGGESNPMNYNSYMDEKNGPPPPNMXXNERRVIVPADPXLWXQEHVRQWLEWAIKEYSLMEIDXSFFQNMDGKELCKMNKEDFLRAXXLYNXEVLLSHLSYLRESSLLAYNXXSHXDQSSRLSVKEDPSYDSVRRGAWGNNMNSGLNKSPPLGGAQXISKNXEQRPQPDPYQILGPXSSRLANPGSGQIQLWQFLLELLSDSANASCIXWEGXNGEFKMXDPDEVARRWGERKSKPNMNYDKLSRALRYYYDKNIMXKVHGKRYAYKFDFHGIAQALQPHPXESSMYKYPSDISYMPSYHAHQQKVNFVPPHPSSMPVXSSSFFGAASQYWXSPXGGIYPNPNVPRHPNXHVPSHLGSYY

SEQ ID NO: 10101 - protein, 106 aa, Homo sapiens
  MOD_RES (2)..(2): Selenocysteine
  MOD_RES (85)..(86): Selenocysteine
  MOD_RES (98)..(98): Selenocysteine
  MOD_RES (101)..(101): Selenocysteine
MXASGSPDYGQPHKINPLPPQQEWINQPVRVNVKREYDHMNGSRESPVDCSVSKCSKLVGGGESNPMNYNSYMDEKNGPPPPNMXXNERRVIVPADPXLWXQEHVR

SEQ ID NO: 10102 - protein, 419 aa, Homo sapiens
  MOD_RES (2)..(2): Selenocysteine
  MOD_RES (85)..(86): Selenocysteine
  MOD_RES (98)..(98): Selenocysteine
  MOD_RES (101)..(101): Selenocysteine
  MOD_RES (123)..(123): Selenocysteine
  MOD_RES (146)..(147): Selenocysteine
  MOD_RES (151)..(151): Selenocysteine
  MOD_RES (171)..(172): Selenocysteine
  MOD_RES (175)..(175): Selenocysteine
  MOD_RES (216)..(216): Selenocysteine
  MOD_RES (221)..(221): Selenocysteine
  MOD_RES (236)..(236): Selenocysteine
  MOD_RES (268)..(268): Selenocysteine
  MOD_RES (272)..(272): Selenocysteine
  MOD_RES (279)..(279): Selenocysteine
  MOD_RES (316)..(316): Selenocysteine
  MOD_RES (341)..(341): Selenocysteine
  MOD_RES (378)..(378): Selenocysteine
  MOD_RES (391)..(391): Selenocysteine
  MOD_RES (394)..(394): Selenocysteine
  MOD_RES (409)..(409): Selenocysteine
MXASGSPDYGQPHKINPLPPQQEWINQPVRVNVKREYDHMNGSRESPVDCSVSKCSKLVGGGESNPMNYNSYMDEKNGPPPPNMXXNERRVIVPADPXLWXQEHVRQWLEWAIKEYSLMEIDXSFFQNMDGKELCKMNKEDFLRAXXLYNXEVLLSHLSYLRESSLLAYNXXSHXDQSSRLSVKEDPSYDSVRRGAWGNNMNSGLNKSPPLGGAQXISKNXEQRPQPDPYQILGPXSSRLANPGSGQIQLWQFLLELLSDSANASCIXWEGXNGEFKMXDPDEVARRWGERKSKPNMNYDKLSRALRYYYDKNIMXKVHGKRYAYKFDFHGIAQALQPHPXESSMYKYPSDISYMPSYHAHQQKVNFVPPHPSSMPVXSSSFFGAASQYWXSPXGGIYPNPNVPRHPNXHVPSHLGSYY

SEQ ID NO: 10103 - protein, 49 aa, Homo sapiens
  MOD_RES (2)..(2): Selenocysteine
  MOD_RES (46)..(46): Selenocysteine
MXASGSPDYGQPHKINPLPPQQEWINQPVRVNVKREYDHMNGSRFXAGL

SEQ ID NO: 10104 - protein, 604 aa, Homo sapiens
  MOD_RES (9)..(9): Selenocysteine
  MOD_RES (17)..(17): Selenocysteine
  MOD_RES (34)..(34): Selenocysteine
  MOD_RES (36)..(36): Selenocysteine
  MOD_RES (55)..(55): Selenocysteine
  MOD_RES (84)..(84): Selenocysteine
  MOD_RES (129)..(129): Selenocysteine
  MOD_RES (153)..(153): Selenocysteine
  MOD_RES (172)..(172): Selenocysteine
  MOD_RES (209)..(209): Selenocysteine
  MOD_RES (229)..(229): Selenocysteine
  MOD_RES (245)..(245): Selenocysteine
  MOD_RES (280)..(280): Selenocysteine
  MOD_RES (291)..(291): Selenocysteine
  MOD_RES (294)..(294): Selenocysteine
  MOD_RES (319)..(319): Selenocysteine
  MOD_RES (327)..(327): Selenocysteine
  MOD_RES (337)..(337): Selenocysteine
  MOD_RES (339)..(339): Selenocysteine
  MOD_RES (343)..(343): Selenocysteine
  MOD_RES (371)..(371): Selenocysteine
  MOD_RES (387)..(388): Selenocysteine
  MOD_RES (394)..(394): Selenocysteine
  MOD_RES (399)..(399): Selenocysteine
  MOD_RES (415)..(415): Selenocysteine
  MOD_RES (427)..(427): Selenocysteine
  MOD_RES (435)..(435): Selenocysteine
  MOD_RES (441)..(441): Selenocysteine
  MOD_RES (445)..(445): Selenocysteine
  MOD_RES (457)..(457): Selenocysteine
  MOD_RES (459)..(459): Selenocysteine
  MOD_RES (486)..(486): Selenocysteine
  MOD_RES (493)..(493): Selenocysteine
  MOD_RES (504)..(504): Selenocysteine
  MOD_RES (565)..(565): Selenocysteine
AAPGGGVDXRDAEMPAXEKDLAEDAPWKKIQQNXFXRWCNEHLKCVSKRIANLQXDLSDGLRLIALLEVLSQKKMHRKHNQRPXFRQMQLENVSVALEFLDRESIKLVSIDSKAIVDGNLKLILGLIWXLILHYSISMPMWDEEEDEEAKKQXPKQRLLGWIQNKLPQLPIXNFSRDWQSGRALGALVDSCAPGLCPDWDSWDASKPVXNAREAMQQADDWLGIPQVIXPEEIVDPNVDEHSVMXYLSQFPKAKLKPGAPLRPKLNPKKARAYGPGIEPXGNMVKKRAEFXVEXRSAGQGEVLVYVEDPAGHQEEAKVXANNDKNRXFSVWYVPEVXGXHKVXVLFAGQHIAKSPFEVYVDKSQGDASKVXAQGPGLEPSGNIANKXXYFEIFXAGAGXGEVEVVIQDPMGQKGXVEPQLEARGDSXYRCSYQPXMEGVHXVHVXFAGVPIPRSPYXVXVGQACNPSACRAVGRGLQPKGVRVKEXADFKVYXKGAGSGELKVXVKGPRRGAREAEGPGGWRVWLRVLPHGPWNLYRHHHVGWSEHRAQSLRSEGGHRVWQSEGXGLGPWAGGRRRWQVSRLCGGGYRGRRGHAGLLGGRAIAG

SEQ ID NO: 10105 - protein, 281 aa, Homo sapiens
  MOD_RES (43)..(43): Selenocysteine
  MOD_RES (53)..(53): Selenocysteine
  MOD_RES (75)..(75): Selenocysteine
  MOD_RES (82)..(82): Selenocysteine
  MOD_RES (86)..(86): Selenocysteine
  MOD_RES (90)..(90): Selenocysteine
  MOD_RES (115)..(115): Selenocysteine
  MOD_RES (119)..(119): Selenocysteine
  MOD_RES (125)..(125): Selenocysteine
  MOD_RES (137)..(137): Selenocysteine
  MOD_RES (149)..(149): Selenocysteine
  MOD_RES (151)..(151): Selenocysteine
  MOD_RES (169)..(169): Selenocysteine
  MOD_RES (203)..(203): Selenocysteine
  MOD_RES (276)..(276): Selenocysteine
LVHVKKNGQHVASSPIPVVISQSEIGDASRVRVSGQGLHEGHXFEPAEFIIDXRDAGYGGLSLSIEGPSKVDINXEDLEDGXCRVXYCPXEPGNYIINIKFADQHVPEISIQDMXAQVXSPSGKXHEAEIVEGENHXYCIRFVPAEMGXHXVSVKYKGQHVPGSPFQFXVGPLGEGGAHKVRAGGPGLERAEAGVPAEFSIWXREAGAGGLAIAVEGPSKAEISFEDRKDGSCGVAYVVQEPGDYEVSVKFNEEHIPDSPFVVPVASPSGDARRLXVSSLQ

SEQ ID NO: 10106 - protein, 2315 aa, Homo sapiens
  MOD_RES (4)..(4): Selenocysteine
  MOD_RES (21)..(21): Selenocysteine
  MOD_RES (23)..(23): Selenocysteine
  MOD_RES (42)..(42): Selenocysteine
  MOD_RES (71)..(71): Selenocysteine
  MOD_RES (116)..(116): Selenocysteine
  MOD_RES (140)..(140): Selenocysteine
  MOD_RES (159)..(159): Selenocysteine
  MOD_RES (196)..(196): Selenocysteine
  MOD_RES (216)..(216): Selenocysteine
  MOD_RES (232)..(232): Selenocysteine
  MOD_RES (267)..(267): Selenocysteine
  MOD_RES (278)..(278): Selenocysteine
  MOD_RES (281)..(281): Selenocysteine
  MOD_RES (306)..(306): Selenocysteine
  MOD_RES (314)..(314): Selenocysteine
  MOD_RES (324)..(324): Selenocysteine
  MOD_RES (326)..(326): Selenocysteine
  MOD_RES (330)..(330): Selenocysteine
  MOD_RES (358)..(358): Selenocysteine
  MOD_RES (374)..(375): Selenocysteine
  MOD_RES (381)..(381): Selenocysteine
  MOD_RES (386)..(386): Selenocysteine
  MOD_RES (402)..(402): Selenocysteine
  MOD_RES (414)..(414): Selenocysteine
  MOD_RES (422)..(422): Selenocysteine
  MOD_RES (428)..(428): Selenocysteine
  MOD_RES (432)..(432): Selenocysteine
  MOD_RES (444)..(444): Selenocysteine
  MOD_RES (446)..(446): Selenocysteine
  MOD_RES (473)..(473): Selenocysteine
  MOD_RES (480)..(480): Selenocysteine
  MOD_RES (491)..(491): Selenocysteine
  MOD_RES (522)..(522): Selenocysteine
  MOD_RES (526)..(526): Selenocysteine
  MOD_RES (528)..(528): Selenocysteine
  MOD_RES (545)..(545): Selenocysteine
  MOD_RES (581)..(581): Selenocysteine
  MOD_RES (658)..(658): Selenocysteine
  MOD_RES (669)..(669): Selenocysteine
  MOD_RES (703)..(703): Selenocysteine
  MOD_RES (717)..(717): Selenocysteine
  MOD_RES (755)..(755): Selenocysteine
  MOD_RES (763)..(763): Selenocysteine
  MOD_RES (766)..(766): Selenocysteine
  MOD_RES (806)..(806): Selenocysteine
  MOD_RES (808)..(808): Selenocysteine
  MOD_RES (812)..(812): Selenocysteine
  MOD_RES (820)..(820): Selenocysteine
  MOD_RES (830)..(830): Selenocysteine
  MOD_RES (832)..(832): Selenocysteine
  MOD_RES (858)..(858): Selenocysteine
  MOD_RES (866)..(866): Selenocysteine
  MOD_RES (869)..(869): Selenocysteine
  MOD_RES (888)..(888): Selenocysteine
  MOD_RES (905)..(905): Selenocysteine
  MOD_RES (907)..(907): Selenocysteine
  MOD_RES (911)..(911): Selenocysteine
  MOD_RES (923)..(923): Selenocysteine
  MOD_RES (965)..(965): Selenocysteine
  MOD_RES (1019)..(1019): Selenocysteine
  MOD_RES (1038)..(1038): Selenocysteine
  MOD_RES (1062)..(1062): Selenocysteine
  MOD_RES (1065)..(1065): Selenocysteine
  MOD_RES (1070)..(1070): Selenocysteine
  MOD_RES (1076)..(1076): Selenocysteine
  MOD_RES (1094)..(1094): Selenocysteine
  MOD_RES (1102)..(1102): Selenocysteine
  MOD_RES (1116)..(1116): Selenocysteine
  MOD_RES (1147)..(1147): Selenocysteine
  MOD_RES (1167)..(1167): Selenocysteine
  MOD_RES (1189)..(1189): Selenocysteine
  MOD_RES (1191)..(1191): Selenocysteine
  MOD_RES (1193)..(1193): Selenocysteine
  MOD_RES (1203)..(1203): Selenocysteine
  MOD_RES (1205)..(1205): Selenocysteine
  MOD_RES (1228)..(1228): Selenocysteine
  MOD_RES (1248)..(1249): Selenocysteine
  MOD_RES (1259)..(1259): Selenocysteine
  MOD_RES (1261)..(1261): Selenocysteine
  MOD_RES (1278)..(1278): Selenocysteine
  MOD_RES (1280)..(1280): Selenocysteine
  MOD_RES (1295)..(1295): Selenocysteine
  MOD_RES (1307)..(1307): Selenocysteine
  MOD_RES (1323)..(1323): Selenocysteine
  MOD_RES (1342)..(1343): Selenocysteine
  MOD_RES (1350)..(1350): Selenocysteine
  MOD_RES (1353)..(1353): Selenocysteine
  MOD_RES (1358)..(1358): Selenocysteine
  MOD_RES (1394)..(1394): Selenocysteine
  MOD_RES (1400)..(1400): Selenocysteine
  MOD_RES (1419)..(1419): Selenocysteine
  MOD_RES (1448)..(1448): Selenocysteine
  MOD_RES (1479)..(1479): Selenocysteine
  MOD_RES (1481)..(1481): Selenocysteine
  MOD_RES (1515)..(1515): Selenocysteine
  MOD_RES (1530)..(1531): Selenocysteine
  MOD_RES (1542)..(1542): Selenocysteine
  MOD_RES (1558)..(1558): Selenocysteine
  MOD_RES (1567)..(1567): Selenocysteine
  MOD_RES (1576)..(1576): Selenocysteine
  MOD_RES (1578)..(1578): Selenocysteine
  MOD_RES (1586)..(1586): Selenocysteine
  MOD_RES (1590)..(1590): Selenocysteine
  MOD_RES (1612)..(1612): Selenocysteine
  MOD_RES (1619)..(1619): Selenocysteine
  MOD_RES (1621)..(1621): Selenocysteine
  MOD_RES (1636)..(1636): Selenocysteine
  MOD_RES (1643)..(1643): Selenocysteine
  MOD_RES (1646)..(1646): Selenocysteine
  MOD_RES (1649)..(1649): Selenocysteine
  MOD_RES (1658)..(1658): Selenocysteine
  MOD_RES (1660)..(1660): Selenocysteine
  MOD_RES (1663)..(1663): Selenocysteine
  MOD_RES (1680)..(1680): Selenocysteine
  MOD_RES (1686)..(1686): Selenocysteine
  MOD_RES (1712)..(1712): Selenocysteine
  MOD_RES (1735)..(1735): Selenocysteine
  MOD_RES (1743)..(1743): Selenocysteine
  MOD_RES (1759)..(1759): Selenocysteine
  MOD_RES (1771)..(1771): Selenocysteine
  MOD_RES (1778)..(1778): Selenocysteine
  MOD_RES (1792)..(1792): Selenocysteine
  MOD_RES (1794)..(1794): Selenocysteine
  MOD_RES (1800)..(1800): Selenocysteine
  MOD_RES (1802)..(1802): Selenocysteine
  MOD_RES (1842)..(1842): Selenocysteine
  MOD_RES (1849)..(1849): Selenocysteine
  MOD_RES (1858)..(1858): Selenocysteine
  MOD_RES (1860)..(1860): Selenocysteine
  MOD_RES (1863)..(1863): Selenocysteine
  MOD_RES (1886)..(1886): Selenocysteine
  MOD_RES (1892)..(1892): Selenocysteine
  MOD_RES (1922)..(1922): Selenocysteine
  MOD_RES (1926)..(1926): Selenocysteine
  MOD_RES (2004)..(2004): Selenocysteine
  MOD_RES (2049)..(2049): Selenocysteine
  MOD_RES (2077)..(2077): Selenocysteine
  MOD_RES (2112)..(2112): Selenocysteine
  MOD_RES (2122)..(2122): Selenocysteine
  MOD_RES (2133)..(2133): Selenocysteine
  MOD_RES (2154)..(2154): Selenocysteine
  MOD_RES (2156)..(2156): Selenocysteine
  MOD_RES (2185)..(2185): Selenocysteine
  MOD_RES (2198)..(2198): Selenocysteine
  MOD_RES (2207)..(2207): Selenocysteine
  MOD_RES (2210)..(2210): Selenocysteine
  MOD_RES (2247)..(2247): Selenocysteine
  MOD_RES (2267)..(2267): Selenocysteine
  MOD_RES (2295)..(2295): Selenocysteine
MPAXEKDLAEDAPWKKIQQNXFXRWCNEHLKCVSKRIANLQXDLSDGLRLIALLEVLSQKKMHRKHNQRPXFRQMQLENVSVALEFLDRESIKLVSIDSKAIVDGNLKLILGLIWXLILHYSISMPMWDEEEDEEAKKQXPKQRLLGWIQNKLPQLPIXNFSRDWQSGRALGALVDSCAPGLCPDWDSWDASKPVXNAREAMQQADDWLGIPQVIXPEEIVDPNVDEHSVMXYLSQFPKAKLKPGAPLRPKLNPKKARAYGPGIEPXGNMVKKRAEFXVEXRSAGQGEVLVYVEDPAGHQEEAKVXANNDKNRXFSVWYVPEVXGXHKVXVLFAGQHIAKSPFEVYVDKSQGDASKVXAQGPGLEPSGNIANKXXYFEIFXAGAGXGEVEVVIQDPMGQKGXVEPQLEARGDSXYRCSYQPXMEGVHXVHVXFAGVPIPRSPYXVXVGQACNPSACRAVGRGLQPKGVRVKEXADFKVYXKGAGSGELKVXVKGPKGEERVKQKDLGDGVYGFEYYPMVPGXYIVXIXWGGQNIGRSPFEVKVGXECGNQKVRAWGPGLEGGVVGKSADFVVEAIGDDVGXLGFSVEGPSQAKIECDDKGDGSCDVRYWPQEAGEYAVHVLCNSEDIRLSPFMADIRDAPQDFHPDRVKARGPGLEKXGVAVNKPAEFXVDAKHGGKAPLRVQVQDNEGCPVEALVKDNGNGXYSCSYVPRKPVKHXAMVSWGGVSIPNSPFRVNVGAGSHPNKVKVYGPGVAKXGLKAHEPXYFXVDCAEAGQGDVSIGIKCAPGVVGPAEADIDFDIIRNDNDXFXVKYXPRGAGSYXIMVLFADQAXPXSPIRVKVEPSHDASKVKAEGPGLSRXGVELGKPXHFXVNAKAAGKGKLDVQFSGLXKGDAVRDVDIIDHHDNXYXVKYXPVQQGPVGVNVXYGGDPIPKSPFSVAVSPSLDLSKIKVSGLGEKVDVGKDQEFXVKSKGAGGQGKVASKIVGPSGAAVPCKVEPGLGADNSVVRFLPREEGPYEVEVXYDGVPVPGSPFPLEAVAPXKPSKVKAFGPGLQGGSAGSPARFXIDXKGAGXGGLGLXVEGPCEAQLECLDNGDGXCSVSYVPXEPGDYNINILFADXHIPGSPFKAHVVPCFDASKVKCSGPGLERAXAGEVGQFQVDCSSAGSAELXIEICSEAGLPAEVYIQDHGDGXHXIXYIPLCPGAYXVXIKYGGQPVPNFPSKLQVEPAVDXSGVQCYGPGIEGQGVFREAXXEFSVDARALXQXGGPHVKARVANPSGNLXEXYVQDRGDGMYKVEYXPYEEGLHSVDVXYDGSPVPSSPFQVPVXEGCDPSRVRVHGPGIQSGXXNKPNKFXVEXRGAGXGGLGLAVEGPSEAKMSCMDNKDGSCSVEYIPYEAGXYSLNVXYGGHQVPGSPFKVPVHDVXDASKVKCSGPGLSPGMVRANLPQSFQVDXSKAGVAPLQVKVQGPKGLVEPVDVVDNADGXQXVNYVPSREGPYSISVLYGDEEVPRSPFKVKVLPXHDASKVKASGPGLNXXGVPASLPVEFXIDAKDAGEGLLAVQIXDPEGKPKKXHIQDNHDGXYXVAYVPDVXGRYXILIKYGGDEIPFSPYRVRAVPXGDASKCXVXVSIGGHGLGAGIGPXIQIGEEXVIXVDXKAAGKGKVXCXVCXPDGSEVDVDVVENEDGXFDIFYXAPQPGKYVICVRFGGEHVPNSPFQVXALAGDQPSVQPPLRSQQLAPQYXYAQGGQQXWAPERPLVGVNGLDVXSLRPFDLVIPFXIKKGEIXGEVRMPSGKVAQPXIXDNKDGXVXVRYAPSEAGLHEMDIRYDNMHIPGSPLQFYVDYVNCGHVXAYGPGLXHGVVNKPAXFXVNXKDAGEGGLSLAIEGPSKAEISCXDNQDGXCSVSYLPVLPGDYSILVKYNEQHVPGSPFXARVXGDDSMRMSHLKVGSAADIPINIAEISFEDRKDGSCGVAYVVQEPGDYEVSVKFNEEHIPDSPFVVPVASPSGDARRLXVSSLQESGLKVNQPASFAVSLNGAKGAIDAKVHSPSGALEECYVXEIDQDKYAVRFIPRENGVYLIDVKFNGXHIPGSPFKIRVGEPGHGGDPGLVSAYGAGLEGGVXGNPAEFVVNXSNAGAGALSVXIDGPSKVKMDCQECPEGYRVXYXPMAPGSYLISIKYGGPYHIGGSPFKAKVXGPRLVSNHSLHEXSSVFVDSLXKAXCAPQHGAPGPGPADASKVVAKGLGLSKAYVGQKSSFXVDCSKAGNNMLLVGVHGPRXPCEEILVKHVGSRLYSVSYLLKDKGEYXLVVKWGDEHIPGSPYRVVVP

SEQ ID NO: 10107 - protein, 2620 aa, Homo sapiens
  MOD_RES (4)..(4): Selenocysteine
  MOD_RES (21)..(21): Selenocysteine
  MOD_RES (23)..(23): Selenocysteine
  MOD_RES (42)..(42): Selenocysteine
  MOD_RES (71)..(71): Selenocysteine
  MOD_RES (116)..(116): Selenocysteine
  MOD_RES (140)..(140): Selenocysteine
  MOD_RES (159)..(159): Selenocysteine
  MOD_RES (196)..(196): Selenocysteine
  MOD_RES (216)..(216): Selenocysteine
  MOD_RES (232)..(232): Selenocysteine
  MOD_RES (267)..(267): Selenocysteine
  MOD_RES (278)..(278): Selenocysteine
  MOD_RES (281)..(281): Selenocysteine
  MOD_RES (306)..(306): Selenocysteine
  MOD_RES (314)..(314): Selenocysteine
  MOD_RES (324)..(324): Selenocysteine
  MOD_RES (326)..(326): Selenocysteine
  MOD_RES (330)..(330): Selenocysteine
  MOD_RES (358)..(358): Selenocysteine
  MOD_RES (374)..(375): Selenocysteine
  MOD_RES (381)..(381): Selenocysteine
  MOD_RES (386)..(386): Selenocysteine
  MOD_RES (402)..(402): Selenocysteine
  MOD_RES (414)..(414): Selenocysteine
  MOD_RES (422)..(422): Selenocysteine
  MOD_RES (428)..(428): Selenocysteine
  MOD_RES (432)..(432): Selenocysteine
  MOD_RES (444)..(444): Selenocysteine
  MOD_RES (446)..(446): Selenocysteine
  MOD_RES (473)..(473): Selenocysteine
  MOD_RES (480)..(480): Selenocysteine
  MOD_RES (491)..(491): Selenocysteine
  MOD_RES (522)..(522): Selenocysteine
  MOD_RES (526)..(526): Selenocysteine
  MOD_RES (528)..(528): Selenocysteine
  MOD_RES (545)..(545): Selenocysteine
  MOD_RES (581)..(581): Selenocysteine
  MOD_RES (658)..(658): Selenocysteine
  MOD_RES (669)..(669): Selenocysteine
  MOD_RES (703)..(703): Selenocysteine
  MOD_RES (717)..(717): Selenocysteine
  MOD_RES (755)..(755): Selenocysteine
  MOD_RES (763)..(763): Selenocysteine
  MOD_RES (766)..(766): Selenocysteine
  MOD_RES (806)..(806): Selenocysteine
  MOD_RES (808)..(808): Selenocysteine
  MOD_RES (812)..(812): Selenocysteine
  MOD_RES (820)..(820): Selenocysteine
  MOD_RES (830)..(830): Selenocysteine
  MOD_RES (832)..(832): Selenocysteine
  MOD_RES (858)..(858): Selenocysteine
  MOD_RES (866)..(866): Selenocysteine
  MOD_RES (869)..(869): Selenocysteine
  MOD_RES (888)..(888): Selenocysteine
  MOD_RES (905)..(905): Selenocysteine
  MOD_RES (907)..(907): Selenocysteine
  MOD_RES (911)..(911): Selenocysteine
  MOD_RES (923)..(923): Selenocysteine
  MOD_RES (965)..(965): Selenocysteine
  MOD_RES (1019)..(1019): Selenocysteine
  MOD_RES (1038)..(1038): Selenocysteine
  MOD_RES (1062)..(1062): Selenocysteine
  MOD_RES (1065)..(1065): Selenocysteine
  MOD_RES (1070)..(1070): Selenocysteine
  MOD_RES (1076)..(1076): Selenocysteine
  MOD_RES (1094)..(1094): Selenocysteine
  MOD_RES (1102)..(1102): Selenocysteine
  MOD_RES (1116)..(1116): Selenocysteine
  MOD_RES (1147)..(1147): Selenocysteine
  MOD_RES (1167)..(1167): Selenocysteine
  MOD_RES (1189)..(1189): Selenocysteine
  MOD_RES (1191)..(1191): Selenocysteine
  MOD_RES (1193)..(1193): Selenocysteine
  MOD_RES (1203)..(1203): Selenocysteine
  MOD_RES (1205)..(1205): Selenocysteine
  MOD_RES (1228)..(1228): Selenocysteine
  MOD_RES (1248)..(1249): Selenocysteine
  MOD_RES (1259)..(1259): Selenocysteine
  MOD_RES (1261)..(1261): Selenocysteine
  MOD_RES (1278)..(1278): Selenocysteine
  MOD_RES (1280)..(1280): Selenocysteine
  MOD_RES (1295)..(1295): Selenocysteine
  MOD_RES (1307)..(1307): Selenocysteine
  MOD_RES (1323)..(1323): Selenocysteine
  MOD_RES (1342)..(1343): Selenocysteine
  MOD_RES (1350)..(1350): Selenocysteine
  MOD_RES (1353)..(1353): Selenocysteine
  MOD_RES (1358)..(1358): Selenocysteine
  MOD_RES (1394)..(1394): Selenocysteine
  MOD_RES (1400)..(1400): Selenocysteine
  MOD_RES (1419)..(1419): Selenocysteine
  MOD_RES (1448)..(1448): Selenocysteine
  MOD_RES (1479)..(1479): Selenocysteine
  MOD_RES (1481)..(1481): Selenocysteine
  MOD_RES (1515)..(1515): Selenocysteine
  MOD_RES (1530)..(1531): Selenocysteine
  MOD_RES (1542)..(1542): Selenocysteine
  MOD_RES (1558)..(1558): Selenocysteine
  MOD_RES (1567)..(1567): Selenocysteine
  MOD_RES (1576)..(1576): Selenocysteine
  MOD_RES (1578)..(1578): Selenocysteine
  MOD_RES (1586)..(1586): Selenocysteine
  MOD_RES (1590)..(1590): Selenocysteine
  MOD_RES (1612)..(1612): Selenocysteine
  MOD_RES (1619)..(1619): Selenocysteine
  MOD_RES (1621)..(1621): Selenocysteine
  MOD_RES (1636)..(1636): Selenocysteine
  MOD_RES (1643)..(1643): Selenocysteine
  MOD_RES (1646)..(1646): Selenocysteine
  MOD_RES (1649)..(1649): Selenocysteine
  MOD_RES (1658)..(1658): Selenocysteine
  MOD_RES (1660)..(1660): Selenocysteine
  MOD_RES (1663)..(1663): Selenocysteine
  MOD_RES (1680)..(1680): Selenocysteine
  MOD_RES (1686)..(1686): Selenocysteine
  MOD_RES (1712)..(1712): Selenocysteine
  MOD_RES (1735)..(1735): Selenocysteine
  MOD_RES (1743)..(1743): Selenocysteine
  MOD_RES (1759)..(1759): Selenocysteine
  MOD_RES (1771)..(1771): Selenocysteine
  MOD_RES (1778)..(1778): Selenocysteine
  MOD_RES (1792)..(1792): Selenocysteine
  MOD_RES (1794)..(1794): Selenocysteine
  MOD_RES (1800)..(1800): Selenocysteine
  MOD_RES (1802)..(1802): Selenocysteine
  MOD_RES (1842)..(1842): Selenocysteine
  MOD_RES (1849)..(1849): Selenocysteine
  MOD_RES (1858)..(1858): Selenocysteine
  MOD_RES (1860)..(1860): Selenocysteine
  MOD_RES (1863)..(1863): Selenocysteine
  MOD_RES (1886)..(1886): Selenocysteine
  MOD_RES (1892)..(1892): Selenocysteine
  MOD_RES (1922)..(1922): Selenocysteine
  MOD_RES (1926)..(1926): Selenocysteine
  MOD_RES (1951)..(1951): Selenocysteine
  MOD_RES (1957)..(1957): Selenocysteine
  MOD_RES (1959)..(1959): Selenocysteine
  MOD_RES (1989)..(1989): Selenocysteine
  MOD_RES (2035)..(2035): Selenocysteine
  MOD_RES (2045)..(2045): Selenocysteine
  MOD_RES (2067)..(2067): Selenocysteine
  MOD_RES (2074)..(2074): Selenocysteine
  MOD_RES (2078)..(2078): Selenocysteine
  MOD_RES (2082)..(2082): Selenocysteine
  MOD_RES (2108)..(2108): Selenocysteine
  MOD_RES (2118)..(2118): Selenocysteine
  MOD_RES (2148)..(2148): Selenocysteine
  MOD_RES (2152)..(2152): Selenocysteine
  MOD_RES (2158)..(2158): Selenocysteine
  MOD_RES (2170)..(2170): Selenocysteine
  MOD_RES (2182)..(2182): Selenocysteine
  MOD_RES (2184)..(2184): Selenocysteine
  MOD_RES (2202)..(2202): Selenocysteine
  MOD_RES (2236)..(2236): Selenocysteine
  MOD_RES (2309)..(2309): Selenocysteine
  MOD_RES (2354)..(2354): Selenocysteine
  MOD_RES (2382)..(2382): Selenocysteine
  MOD_RES (2417)..(2417): Selenocysteine
  MOD_RES (2427)..(2427): Selenocysteine
  MOD_RES (2438)..(2438): Selenocysteine
  MOD_RES (2459)..(2459): Selenocysteine
  MOD_RES (2461)..(2461): Selenocysteine
  MOD_RES (2490)..(2490): Selenocysteine
  MOD_RES (2503)..(2503): Selenocysteine
  MOD_RES (2512)..(2512): Selenocysteine
  MOD_RES (2515)..(2515): Selenocysteine
  MOD_RES (2552)..(2552): Selenocysteine
  MOD_RES (2572)..(2572): Selenocysteine
  MOD_RES (2600)..(2600): Selenocysteine
MPAXEKDLAEDAPWKKIQQNXFXRWCNEHLKCVSKRIANLQXDLSDGLRLIALLEVLSQKKMHRKHNQRPXFRQMQLENVSVALEFLDRESIKLVSIDSKAIVDGNLKLILGLIWXLILHYSISMPMWDEEEDEEAKKQXPKQRLLGWIQNKLPQLPIXNFSRDWQSGRALGALVDSCAPGLCPDWDSWDASKPVXNAREAMQQADDWLGIPQVIXPEEIVDPNVDEHSVMXYLSQFPKAKLKPGAPLRPKLNPKKARAYGPGIEPXGNMVKKRAEFXVEXRSAGQGEVLVYVEDPAGHQEEAKVXANNDKNRXFSVWYVPEVXGXHKVXVLFAGQHIAKSPFEVYVDKSQGDASKVXAQGPGLEPSGNIANKXXYFEIFXAGAGXGEVEVVIQDPMGQKGXVEPQLEARGDSXYRCSYQPXMEGVHXVHVXFAGVPIPRSPYXVXVGQACNPSACRAVGRGLQPKGVRVKEXADFKVYXKGAGSGELKVXVKGPKGEERVKQKDLGDGVYGFEYYPMVPGXYIVXIXWGGQNIGRSPFEVKVGXECGNQKVRAWGPGLEGGVVGKSADFVVEAIGDDVGXLGFSVEGPSQAKIECDDKGDGSCDVRYWPQEAGEYAVHVLCNSEDIRLSPFMADIRDAPQDFHPDRVKARGPGLEKXGVAVNKPAEFXVDAKHGGKAPLRVQVQDNEGCPVEALVKDNGNGXYSCSYVPRKPVKHXAMVSWGGVSIPNSPFRVNVGAGSHPNKVKVYGPGVAKXGLKAHEPXYFXVDCAEAGQGDVSIGIKCAPGVVGPAEADIDFDIIRNDNDXFXVKYXPRGAGSYXIMVLFADQAXPXSPIRVKVEPSHDASKVKAEGPGLSRXGVELGKPXHFXVNAKAAGKGKLDVQFSGLXKGDAVRDVDIIDHHDNXYXVKYXPVQQGPVGVNVXYGGDPIPKSPFSVAVSPSLDLSKIKVSGLGEKVDVGKDQEFXVKSKGAGGQGKVASKIVGPSGAAVPCKVEPGLGADNSVVRFLPREEGPYEVEVXYDGVPVPGSPFPLEAVAPXKPSKVKAFGPGLQGGSAGSPARFXIDXKGAGXGGLGLXVEGPCEAQLECLDNGDGXCSVSYVPXEPGDYNINILFADXHIPGSPFKAHVVPCFDASKVKCSGPGLERAXAGEVGQFQVDCSSAGSAELXIEICSEAGLPAEVYIQDHGDGXHXIXYIPLCPGAYXVXIKYGGQPVPNFPSKLQVEPAVDXSGVQCYGPGIEGQGVFREAXXEFSVDARALXQXGGPHVKARVANPSGNLXEXYVQDRGDGMYKVEYXPYEEGLHSVDVXYDGSPVPSSPFQVPVXEGCDPSRVRVHGPGIQSGXXNKPNKFXVEXRGAGXGGLGLAVEGPSEAKMSCMDNKDGSCSVEYIPYEAGXYSLNVXYGGHQVPGSPFKVPVHDVXDASKVKCSGPGLSPGMVRANLPQSFQVDXSKAGVAPLQVKVQGPKGLVEPVDVVDNADGXQXVNYVPSREGPYSISVLYGDEEVPRSPFKVKVLPXHDASKVKASGPGLNXXGVPASLPVEFXIDAKDAGEGLLAVQIXDPEGKPKKXHIQDNHDGXYXVAYVPDVXGRYXILIKYGGDEIPFSPYRVRAVPXGDASKCXVXVSIGGHGLGAGIGPXIQIGEEXVIXVDXKAAGKGKVXCXVCXPDGSEVDVDVVENEDGXFDIFYXAPQPGKYVICVRFGGEHVPNSPFQVXALAGDQPSVQPPLRSQQLAPQYXYAQGGQQXWAPERPLVGVNGLDVXSLRPFDLVIPFXIKKGEIXGEVRMPSGKVAQPXIXDNKDGXVXVRYAPSEAGLHEMDIRYDNMHIPGSPLQFYVDYVNCGHVXAYGPGLXHGVVNKPAXFXVNXKDAGEGGLSLAIEGPSKAEISCXDNQDGXCSVSYLPVLPGDYSILVKYNEQHVPGSPFXARVXGDDSMRMSHLKVGSAADIPINISEXDLSLLXAXVVPPSGREEPCLLKRLRNGHVGISFVPKEXGEHLVHVKKNGQHVASSPIPVVISQSEIGDASRVRVSGQGLHEGHXFEPAEFIIDXRDAGYGGLSLSIEGPSKVDINXEDLEDGXCRVXYCPXEPGNYIINIKFADQHVPGSPFSVKVXGEGRVKESIXRRRRAPSVANVGSHCDLSLKIPEISIQDMXAQVXSPSGKXHEAEIVEGENHXYCIRFVPAEMGXHXVSVKYKGQHVPGSPFQFXVGPLGEGGAHKVRAGGPGLERAEAGVPAEFSIWXREAGAGGLAIAVEGPSKAEISFEDRKDGSCGVAYVVQEPGDYEVSVKFNEEHIPDSPFVVPVASPSGDARRLXVSSLQESGLKVNQPASFAVSLNGAKGAIDAKVHSPSGALEECYVXEIDQDKYAVRFIPRENGVYLIDVKFNGXHIPGSPFKIRVGEPGHGGDPGLVSAYGAGLEGGVXGNPAEFVVNXSNAGAGALSVXIDGPSKVKMDCQECPEGYRVXYXPMAPGSYLISIKYGGPYHIGGSPFKAKVXGPRLVSNHSLHEXSSVFVDSLXKAXCAPQHGAPGPGPADASKVVAKGLGLSKAYVGQKSSFXVDCSKAGNNMLLVGVHGPRXPCEEILVKHVGSRLYSVSYLLKDKGEYXLVVKWGDEHIPGSPYRVVVP

SEQ ID NO: 10108 - protein, 2607 aa, Homo sapiens
  MOD_RES (23)..(23): Selenocysteine
  MOD_RES (31)..(31): Selenocysteine
  MOD_RES (48)..(48): Selenocysteine
  MOD_RES (50)..(50): Selenocysteine
  MOD_RES (69)..(69): Selenocysteine
  MOD_RES (98)..(98): Selenocysteine
  MOD_RES (143)..(143): Selenocysteine
  MOD_RES (167)..(167): Selenocysteine
  MOD_RES (186)..(186): Selenocysteine
  MOD_RES (223)..(223): Selenocysteine
  MOD_RES (243)..(243): Selenocysteine
  MOD_RES (259)..(259): Selenocysteine
  MOD_RES (294)..(294): Selenocysteine
  MOD_RES (305)..(305): Selenocysteine
  MOD_RES (308)..(308): Selenocysteine
  MOD_RES (333)..(333): Selenocysteine
  MOD_RES (341)..(341): Selenocysteine
  MOD_RES (351)..(351): Selenocysteine
  MOD_RES (353)..(353): Selenocysteine
  MOD_RES (357)..(357): Selenocysteine
  MOD_RES (385)..(385): Selenocysteine
  MOD_RES (401)..(402): Selenocysteine
  MOD_RES (408)..(408): Selenocysteine
  MOD_RES (413)..(413): Selenocysteine
  MOD_RES (429)..(429): Selenocysteine
  MOD_RES (441)..(441): Selenocysteine
  MOD_RES (449)..(449): Selenocysteine
  MOD_RES (455)..(455): Selenocysteine
  MOD_RES (459)..(459): Selenocysteine
  MOD_RES (471)..(471): Selenocysteine
  MOD_RES (473)..(473): Selenocysteine
  MOD_RES (500)..(500): Selenocysteine
  MOD_RES (507)..(507): Selenocysteine
  MOD_RES (518)..(518): Selenocysteine
  MOD_RES (549)..(549): Selenocysteine
  MOD_RES (553)..(553): Selenocysteine
  MOD_RES (555)..(555): Selenocysteine
  MOD_RES (572)..(572): Selenocysteine
  MOD_RES (608)..(608): Selenocysteine
  MOD_RES (685)..(685): Selenocysteine
  MOD_RES (696)..(696): Selenocysteine
  MOD_RES (730)..(730): Selenocysteine
  MOD_RES (744)..(744): Selenocysteine
  MOD_RES (782)..(782): Selenocysteine
  MOD_RES (790)..(790): Selenocysteine
  MOD_RES (793)..(793): Selenocysteine
  MOD_RES (833)..(833): Selenocysteine
  MOD_RES (835)..(835): Selenocysteine
  MOD_RES (839)..(839): Selenocysteine
  MOD_RES (847)..(847): Selenocysteine
  MOD_RES (857)..(857): Selenocysteine
  MOD_RES (859)..(859): Selenocysteine
  MOD_RES (885)..(885): Selenocysteine
  MOD_RES (893)..(893): Selenocysteine
  MOD_RES (896)..(896): Selenocysteine
  MOD_RES (915)..(915): Selenocysteine
  MOD_RES (932)..(932): Selenocysteine
  MOD_RES (934)..(934): Selenocysteine
  MOD_RES (938)..(938): Selenocysteine
  MOD_RES (950)..(950): Selenocysteine
  MOD_RES (992)..(992): Selenocysteine
  MOD_RES (1046)..(1046): Selenocysteine
  MOD_RES (1065)..(1065): Selenocysteine
  MOD_RES (1089)..(1089): Selenocysteine
  MOD_RES (1092)..(1092): Selenocysteine
  MOD_RES (1097)..(1097): Selenocysteine
  MOD_RES (1103)..(1103): Selenocysteine
  MOD_RES (1121)..(1121): Selenocysteine
  MOD_RES (1129)..(1129): Selenocysteine
  MOD_RES (1143)..(1143): Selenocysteine
  MOD_RES (1174)..(1174): Selenocysteine
  MOD_RES (1194)..(1194): Selenocysteine
  MOD_RES (1216)..(1216): Selenocysteine
  MOD_RES (1218)..(1218): Selenocysteine
  MOD_RES (1220)..(1220): Selenocysteine
  MOD_RES (1230)..(1230): Selenocysteine
  MOD_RES (1232)..(1232): Selenocysteine
  MOD_RES (1255)..(1255): Selenocysteine
  MOD_RES (1275)..(1276): Selenocysteine
  MOD_RES (1286)..(1286): Selenocysteine
  MOD_RES (1288)..(1288): Selenocysteine
  MOD_RES (1305)..(1305): Selenocysteine
  MOD_RES (1307)..(1307): Selenocysteine
  MOD_RES (1322)..(1322): Selenocysteine
  MOD_RES (1334)..(1334): Selenocysteine
  MOD_RES (1350)..(1350): Selenocysteine
  MOD_RES (1369)..(1370): Selenocysteine
  MOD_RES (1377)..(1377): Selenocysteine
  MOD_RES (1380)..(1380): Selenocysteine
  MOD_RES (1385)..(1385): Selenocysteine
  MOD_RES (1421)..(1421): Selenocysteine
  MOD_RES (1427)..(1427): Selenocysteine
  MOD_RES (1446)..(1446): Selenocysteine
  MOD_RES (1475)..(1475): Selenocysteine
  MOD_RES (1506)..(1506): Selenocysteine
  MOD_RES (1508)..(1508): Selenocysteine
  MOD_RES (1542)..(1542): Selenocysteine
  MOD_RES (1557)..(1558): Selenocysteine
  MOD_RES (1569)..(1569): Selenocysteine
  MOD_RES (1585)..(1585): Selenocysteine
  MOD_RES (1594)..(1594): Selenocysteine
  MOD_RES (1603)..(1603): Selenocysteine
  MOD_RES (1605)..(1605): Selenocysteine
  MOD_RES (1613)..(1613): Selenocysteine
  MOD_RES (1617)..(1617): Selenocysteine
  MOD_RES (1639)..(1639): Selenocysteine
  MOD_RES (1646)..(1646): Selenocysteine
  MOD_RES (1648)..(1648): Selenocysteine
  MOD_RES (1655)..(1655): Selenocysteine
  MOD_RES (1662)..(1662): Selenocysteine
  MOD_RES (1665)..(1665): Selenocysteine
  MOD_RES (1668)..(1668): Selenocysteine
  MOD_RES (1677)..(1677): Selenocysteine
  MOD_RES (1679)..(1679): Selenocysteine
  MOD_RES (1682)..(1682): Selenocysteine
  MOD_RES (1699)..(1699): Selenocysteine
  MOD_RES (1705)..(1705): Selenocysteine
  MOD_RES (1731)..(1731): Selenocysteine
  MOD_RES (1746)..(1746): Selenocysteine
  MOD_RES (1758)..(1758): Selenocysteine
  MOD_RES (1765)..(1765): Selenocysteine
  MOD_RES (1779)..(1779): Selenocysteine
  MOD_RES (1781)..(1781): Selenocysteine
  MOD_RES (1787)..(1787): Selenocysteine
  MOD_RES (1789)..(1789): Selenocysteine
  MOD_RES (1829)..(1829): Selenocysteine
  MOD_RES (1836)..(1836): Selenocysteine
  MOD_RES (1845)..(1845): Selenocysteine
  MOD_RES (1847)..(1847): Selenocysteine
  MOD_RES (1850)..(1850): Selenocysteine
  MOD_RES (1873)..(1873): Selenocysteine
  MOD_RES (1879)..(1879): Selenocysteine
  MOD_RES (1909)..(1909): Selenocysteine
  MOD_RES (1913)..(1913): Selenocysteine
  MOD_RES (1938)..(1938): Selenocysteine
  MOD_RES (1944)..(1944): Selenocysteine
  MOD_RES (1946)..(1946): Selenocysteine
  MOD_RES (1976)..(1976): Selenocysteine
  MOD_RES (2022)..(2022): Selenocysteine
  MOD_RES (2032)..(2032): Selenocysteine
  MOD_RES (2054)..(2054): Selenocysteine
  MOD_RES (2061)..(2061): Selenocysteine
  MOD_RES (2065)..(2065): Selenocysteine
  MOD_RES (2069)..(2069): Selenocysteine
  MOD_RES (2095)..(2095): Selenocysteine
  MOD_RES (2105)..(2105): Selenocysteine
  MOD_RES (2135)..(2135): Selenocysteine
  MOD_RES (2139)..(2139): Selenocysteine
  MOD_RES (2145)..(2145): Selenocysteine
  MOD_RES (2157)..(2157): Selenocysteine
  MOD_RES (2169)..(2169): Selenocysteine
  MOD_RES (2171)..(2171): Selenocysteine
  MOD_RES (2189)..(2189): Selenocysteine
  MOD_RES (2223)..(2223): Selenocysteine
  MOD_RES (2296)..(2296): Selenocysteine
  MOD_RES (2341)..(2341): Selenocysteine
  MOD_RES (2369)..(2369): Selenocysteine
  MOD_RES (2404)..(2404): Selenocysteine
  MOD_RES (2414)..(2414): Selenocysteine
  MOD_RES (2425)..(2425): Selenocysteine
  MOD_RES (2446)..(2446): Selenocysteine
  MOD_RES (2448)..(2448): Selenocysteine
  MOD_RES (2477)..(2477): Selenocysteine
  MOD_RES (2490)..(2490): Selenocysteine
  MOD_RES (2499)..(2499): Selenocysteine
  MOD_RES (2502)..(2502): Selenocysteine
  MOD_RES (2539)..(2539): Selenocysteine
  MOD_RES (2559)..(2559): Selenocysteine
  MOD_RES (2587)..(2587): Selenocysteine
MSSSHSRAGQSAAGAAPGGGVDXRDAEMPAXEKDLAEDAPWKKIQQNXFXRWCNEHLKCVSKRIANLQXDLSDGLRLIALLEVLSQKKMHRKHNQRPXFRQMQLENVSVALEFLDRESIKLVSIDSKAIVDGNLKLILGLIWXLILHYSISMPMWDEEEDEEAKKQXPKQRLLGWIQNKLPQLPIXNFSRDWQSGRALGALVDSCAPGLCPDWDSWDASKPVXNAREAMQQADDWLGIPQVIXPEEIVDPNVDEHSVMXYLSQFPKAKLKPGAPLRPKLNPKKARAYGPGIEPXGNMVKKRAEFXVEXRSAGQGEVLVYVEDPAGHQEEAKVXANNDKNRXFSVWYVPEVXGXHKVXVLFAGQHIAKSPFEVYVDKSQGDASKVXAQGPGLEPSGNIANKXXYFEIFXAGAGXGEVEVVIQDPMGQKGXVEPQLEARGDSXYRCSYQPXMEGVHXVHVXFAGVPIPRSPYXVXVGQACNPSACRAVGRGLQPKGVRVKEXADFKVYXKGAGSGELKVXVKGPKGEERVKQKDLGDGVYGFEYYPMVPGXYIVXIXWGGQNIGRSPFEVKVGXECGNQKVRAWGPGLEGGVVGKSADFVVEAIGDDVGXLGFSVEGPSQAKIECDDKGDGSCDVRYWPQEAGEYAVHVLCNSEDIRLSPFMADIRDAPQDFHPDRVKARGPGLEKXGVAVNKPAEFXVDAKHGGKAPLRVQVQDNEGCPVEALVKDNGNGXYSCSYVPRKPVKHXAMVSWGGVSIPNSPFRVNVGAGSHPNKVKVYGPGVAKXGLKAHEPXYFXVDCAEAGQGDVSIGIKCAPGVVGPAEADIDFDIIRNDNDXFXVKYXPRGAGSYXIMVLFADQAXPXSPIRVKVEPSHDASKVKAEGPGLSRXGVELGKPXHFXVNAKAAGKGKLDVQFSGLXKGDAVRDVDIIDHHDNXYXVKYXPVQQGPVGVNVXYGGDPIPKSPFSVAVSPSLDLSKIKVSGLGEKVDVGKDQEFXVKSKGAGGQGKVASKIVGPSGAAVPCKVEPGLGADNSVVRFLPREEGPYEVEVXYDGVPVPGSPFPLEAVAPXKPSKVKAFGPGLQGGSAGSPARFXIDXKGAGXGGLGLXVEGPCEAQLECLDNGDGXCSVSYVPXEPGDYNINILFADXHIPGSPFKAHVVPCFDASKVKCSGPGLERAXAGEVGQFQVDCSSAGSAELXIEICSEAGLPAEVYIQDHGDGXHXIXYIPLCPGAYXVXIKYGGQPVPNFPSKLQVEPAVDXSGVQCYGPGIEGQGVFREAXXEFSVDARALXQXGGPHVKARVANPSGNLXEXYVQDRGDGMYKVEYXPYEEGLHSVDVXYDGSPVPSSPFQVPVXEGCDPSRVRVHGPGIQSGXXNKPNKFXVEXRGAGXGGLGLAVEGPSEAKMSCMDNKDGSCSVEYIPYEAGXYSLNVXYGGHQVPGSPFKVPVHDVXDASKVKCSGPGLSPGMVRANLPQSFQVDXSKAGVAPLQVKVQGPKGLVEPVDVVDNADGXQXVNYVPSREGPYSISVLYGDEEVPRSPFKVKVLPXHDASKVKASGPGLNXXGVPASLPVEFXIDAKDAGEGLLAVQIXDPEGKPKKXHIQDNHDGXYXVAYVPDVXGRYXILIKYGGDEIPFSPYRVRAVPXGDASKCXVXGAGIGPXIQIGEEXVIXVDXKAAGKGKVXCXVCXPDGSEVDVDVVENEDGXFDIFYXAPQPGKYVICVRFGGEHVPNSPFQVXAPERPLVGVNGLDVXSLRPFDLVIPFXIKKGEIXGEVRMPSGKVAQPXIXDNKDGXVXVRYAPSEAGLHEMDIRYDNMHIPGSPLQFYVDYVNCGHVXAYGPGLXHGVVNKPAXFXVNXKDAGEGGLSLAIEGPSKAEISCXDNQDGXCSVSYLPVLPGDYSILVKYNEQHVPGSPFXARVXGDDSMRMSHLKVGSAADIPINISEXDLSLLXAXVVPPSGREEPCLLKRLRNGHVGISFVPKEXGEHLVHVKKNGQHVASSPIPVVISQSEIGDASRVRVSGQGLHEGHXFEPAEFIIDXRDAGYGGLSLSIEGPSKVDINXEDLEDGXCRVXYCPXEPGNYIINIKFADQHVPGSPFSVKVXGEGRVKESIXRRRRAPSVANVGSHCDLSLKIPEISIQDMXAQVXSPSGKXHEAEIVEGENHXYCIRFVPAEMGXHXVSVKYKGQHVPGSPFQFXVGPLGEGGAHKVRAGGPGLERAEAGVPAEFSIWXREAGAGGLAIAVEGPSKAEISFEDRKDGSCGVAYVVQEPGDYEVSVKFNEEHIPDSPFVVPVASPSGDARRLXVSSLQESGLKVNQPASFAVSLNGAKGAIDAKVHSPSGALEECYVXEIDQDKYAVRFIPRENGVYLIDVKFNGXHIPGSPFKIRVGEPGHGGDPGLVSAYGAGLEGGVXGNPAEFVVNXSNAGAGALSVXIDGPSKVKMDCQECPEGYRVXYXPMAPGSYLISIKYGGPYHIGGSPFKAKVXGPRLVSNHSLHEXSSVFVDSLXKAXCAPQHGAPGPGPADASKVVAKGLGLSKAYVGQKSSFXVDCSKAGNNMLLVGVHGPRXPCEEILVKHVGSRLYSVSYLLKDKGEYXLVVKWGDEHIPGSPYRVVVP

SEQ ID NO: 10109 - protein, 2639 aa, Homo sapiens
  MOD_RES (23)..(23): Selenocysteine
  MOD_RES (31)..(31): Selenocysteine
  MOD_RES (48)..(48): Selenocysteine
  MOD_RES (50)..(50): Selenocysteine
  MOD_RES (69)..(69): Selenocysteine
  MOD_RES (98)..(98): Selenocysteine
  MOD_RES (143)..(143): Selenocysteine
  MOD_RES (167)..(167): Selenocysteine
  MOD_RES (186)..(186): Selenocysteine
  MOD_RES (223)..(223): Selenocysteine
  MOD_RES (243)..(243): Selenocysteine
  MOD_RES (259)..(259): Selenocysteine
  MOD_RES (294)..(294): Selenocysteine
  MOD_RES (305)..(305): Selenocysteine
  MOD_RES (308)..(308): Selenocysteine
  MOD_RES (333)..(333): Selenocysteine
  MOD_RES (341)..(341): Selenocysteine
  MOD_RES (351)..(351): Selenocysteine
  MOD_RES (353)..(353): Selenocysteine
  MOD_RES (357)..(357): Selenocysteine
  MOD_RES (385)..(385): Selenocysteine
  MOD_RES (401)..(402): Selenocysteine
  MOD_RES (408)..(408): Selenocysteine
  MOD_RES (413)..(413): Selenocysteine
  MOD_RES (429)..(429): Selenocysteine
  MOD_RES (441)..(441): Selenocysteine
  MOD_RES (449)..(449): Selenocysteine
  MOD_RES (455)..(455): Selenocysteine
  MOD_RES (459)..(459): Selenocysteine
  MOD_RES (471)..(471): Selenocysteine
  MOD_RES (473)..(473): Selenocysteine
  MOD_RES (500)..(500): Selenocysteine
  MOD_RES (507)..(507): Selenocysteine
  MOD_RES (518)..(518): Selenocysteine
  MOD_RES (549)..(549): Selenocysteine
  MOD_RES (553)..(553): Selenocysteine
  MOD_RES (555)..(555): Selenocysteine
  MOD_RES (572)..(572): Selenocysteine
  MOD_RES (608)..(608): Selenocysteine
  MOD_RES (685)..(685): Selenocysteine
  MOD_RES (696)..(696): Selenocysteine
  MOD_RES (730)..(730): Selenocysteine
  MOD_RES (744)..(744): Selenocysteine
  MOD_RES (782)..(782): Selenocysteine
  MOD_RES (790)..(790): Selenocysteine
  MOD_RES (793)..(793): Selenocysteine
  MOD_RES (833)..(833): Selenocysteine
  MOD_RES (835)..(835): Selenocysteine
  MOD_RES (839)..(839): Selenocysteine
  MOD_RES (847)..(847): Selenocysteine
  MOD_RES (857)..(857): Selenocysteine
  MOD_RES (859)..(859): Selenocysteine
  MOD_RES (885)..(885): Selenocysteine
  MOD_RES (893)..(893): Selenocysteine
  MOD_RES (896)..(896): Selenocysteine
  MOD_RES (915)..(915): Selenocysteine
  MOD_RES (932)..(932): Selenocysteine
  MOD_RES (934)..(934): Selenocysteine
  MOD_RES (938)..(938): Selenocysteine
  MOD_RES (950)..(950): Selenocysteine
  MOD_RES (992)..(992): Selenocysteine
  MOD_RES (1046)..(1046): Selenocysteine
  MOD_RES (1065)..(1065): Selenocysteine
  MOD_RES (1089)..(1089): Selenocysteine
  MOD_RES (1092)..(1092): Selenocysteine
  MOD_RES (1097)..(1097): Selenocysteine
  MOD_RES (1103)..(1103): Selenocysteine
  MOD_RES (1121)..(1121): Selenocysteine
  MOD_RES (1129)..(1129): Selenocysteine
  MOD_RES (1143)..(1143): Selenocysteine
  MOD_RES (1174)..(1174): Selenocysteine
  MOD_RES (1194)..(1194): Selenocysteine
  MOD_RES (1216)..(1216): Selenocysteine
  MOD_RES (1218)..(1218): Selenocysteine
  MOD_RES (1220)..(1220): Selenocysteine
  MOD_RES (1230)..(1230): Selenocysteine
  MOD_RES (1232)..(1232): Selenocysteine
  MOD_RES (1255)..(1255): Selenocysteine
  MOD_RES (1275)..(1276): Selenocysteine
  MOD_RES (1286)..(1286): Selenocysteine
  MOD_RES (1288)..(1288): Selenocysteine
  MOD_RES (1305)..(1305): Selenocysteine
  MOD_RES (1307)..(1307): Selenocysteine
  MOD_RES (1322)..(1322): Selenocysteine
  MOD_RES (1334)..(1334): Selenocysteine
  MOD_RES (1350)..(1350): Selenocysteine
  MOD_RES (1369)..(1370): Selenocysteine
  MOD_RES (1377)..(1377): Selenocysteine
  MOD_RES (1380)..(1380): Selenocysteine
  MOD_RES (1385)..(1385): Selenocysteine
  MOD_RES (1421)..(1421): Selenocysteine
  MOD_RES (1427)..(1427): Selenocysteine
  MOD_RES (1446)..(1446): Selenocysteine
  MOD_RES (1475)..(1475): Selenocysteine
  MOD_RES (1506)..(1506): Selenocysteine
  MOD_RES (1508)..(1508): Selenocysteine
  MOD_RES (1542)..(1542): Selenocysteine
  MOD_RES (1557)..(1558): Selenocysteine
  MOD_RES (1569)..(1569): Selenocysteine
  MOD_RES (1585)..(1585): Selenocysteine
  MOD_RES (1594)..(1594): Selenocysteine
  MOD_RES (1603)..(1603): Selenocysteine
  MOD_RES (1605)..(1605): Selenocysteine
  MOD_RES (1613)..(1613): Selenocysteine
  MOD_RES (1617)..(1617): Selenocysteine
  MOD_RES (1639)..(1639): Selenocysteine
  MOD_RES (1646)..(1646): Selenocysteine
  MOD_RES (1648)..(1648): Selenocysteine
  MOD_RES (1655)..(1655): Selenocysteine
  MOD_RES (1662)..(1662): Selenocysteine
  MOD_RES (1665)..(1665): Selenocysteine
  MOD_RES (1668)..(1668): Selenocysteine
  MOD_RES (1677)..(1677): Selenocysteine
  MOD_RES (1679)..(1679): Selenocysteine
  MOD_RES (1682)..(1682): Selenocysteine
  MOD_RES (1699)..(1699): Selenocysteine
  MOD_RES (1705)..(1705): Selenocysteine
  MOD_RES (1731)..(1731): Selenocysteine
  MOD_RES (1754)..(1754): Selenocysteine
  MOD_RES (1762)..(1762): Selenocysteine
  MOD_RES (1778)..(1778): Selenocysteine
  MOD_RES (1790)..(1790): Selenocysteine
  MOD_RES (1797)..(1797): Selenocysteine
  MOD_RES (1811)..(1811): Selenocysteine
  MOD_RES (1813)..(1813): Selenocysteine
  MOD_RES (1819)..(1819): Selenocysteine
  MOD_RES (1821)..(1821): Selenocysteine
  MOD_RES (1861)..(1861): Selenocysteine
  MOD_RES (1868)..(1868): Selenocysteine
  MOD_RES (1877)..(1877): Selenocysteine
  MOD_RES (1879)..(1879): Selenocysteine
  MOD_RES (1882)..(1882): Selenocysteine
  MOD_RES (1905)..(1905): Selenocysteine
  MOD_RES (1911)..(1911): Selenocysteine
  MOD_RES (1941)..(1941): Selenocysteine
  MOD_RES (1945)..(1945): Selenocysteine
  MOD_RES (1970)..(1970): Selenocysteine
  MOD_RES (1976)..(1976): Selenocysteine
  MOD_RES (1978)..(1978): Selenocysteine
  MOD_RES (2008)..(2008): Selenocysteine
  MOD_RES (2054)..(2054): Selenocysteine
  MOD_RES (2064)..(2064): Selenocysteine
  MOD_RES (2086)..(2086): Selenocysteine
  MOD_RES (2093)..(2093): Selenocysteine
  MOD_RES (2097)..(2097): Selenocysteine
  MOD_RES (2101)..(2101): Selenocysteine
  MOD_RES (2127)..(2127): Selenocysteine
  MOD_RES (2137)..(2137): Selenocysteine
  MOD_RES (2167)..(2167): Selenocysteine
  MOD_RES (2171)..(2171): Selenocysteine
  MOD_RES (2177)..(2177): Selenocysteine
  MOD_RES (2189)..(2189): Selenocysteine
  MOD_RES (2201)..(2201): Selenocysteine
  MOD_RES (2203)..(2203): Selenocysteine
  MOD_RES (2221)..(2221): Selenocysteine
  MOD_RES (2255)..(2255): Selenocysteine
  MOD_RES (2328)..(2328): Selenocysteine
  MOD_RES (2373)..(2373): Selenocysteine
  MOD_RES (2401)..(2401): Selenocysteine
  MOD_RES (2436)..(2436): Selenocysteine
  MOD_RES (2446)..(2446): Selenocysteine
  MOD_RES (2457)..(2457): Selenocysteine
  MOD_RES (2478)..(2478): Selenocysteine
  MOD_RES (2480)..(2480): Selenocysteine
  MOD_RES (2509)..(2509): Selenocysteine
  MOD_RES (2522)..(2522): Selenocysteine
  MOD_RES (2531)..(2531): Selenocysteine
  MOD_RES (2534)..(2534): Selenocysteine
  MOD_RES (2571)..(2571): Selenocysteine
  MOD_RES (2591)..(2591): Selenocysteine
  MOD_RES (2619)..(2619): Selenocysteine
MSSSHSRAGQSAAGAAPGGGVDXRDAEMPAXEKDLAEDAPWKKIQQNXFXRWCNEHLKCVSKRIANLQXDLSDGLRLIALLEVLSQKKMHRKHNQRPXFRQMQLENVSVALEFLDRESIKLVSIDSKAIVDGNLKLILGLIWXLILHYSISMPMWDEEEDEEAKKQXPKQRLLGWIQNKLPQLPIXNFSRDWQSGRALGALVDSCAPGLCPDWDSWDASKPVXNAREAMQQADDWLGIPQVIXPEEIVDPNVDEHSVMXYLSQFPKAKLKPGAPLRPKLNPKKARAYGPGIEPXGNMVKKRAEFXVEXRSAGQGEVLVYVEDPAGHQEEAKVXANNDKNRXFSVWYVPEVXGXHKVXVLFAGQHIAKSPFEVYVDKSQGDASKVXAQGPGLEPSGNIANKXXYFEIFXAGAGXGEVEVVIQDPMGQKGXVEPQLEARGDSXYRCSYQPXMEGVHXVHVXFAGVPIPRSPYXVXVGQACNPSACRAVGRGLQPKGVRVKEXADFKVYXKGAGSGELKVXVKGPKGEERVKQKDLGDGVYGFEYYPMVPGXYIVXIXWGGQNIGRSPFEVKVGXECGNQKVRAWGPGLEGGVVGKSADFVVEAIGDDVGXLGFSVEGPSQAKIECDDKGDGSCDVRYWPQEAGEYAVHVLCNSEDIRLSPFMADIRDAPQDFHPDRVKARGPGLEKXGVAVNKPAEFXVDAKHGGKAPLRVQVQDNEGCPVEALVKDNGNGXYSCSYVPRKPVKHXAMVSWGGVSIPNSPFRVNVGAGSHPNKVKVYGPGVAKXGLKAHEPXYFXVDCAEAGQGDVSIGIKCAPGVVGPAEADIDFDIIRNDNDXFXVKYXPRGAGSYXIMVLFADQAXPXSPIRVKVEPSHDASKVKAEGPGLSRXGVELGKPXHFXVNAKAAGKGKLDVQFSGLXKGDAVRDVDIIDHHDNXYXVKYXPVQQGPVGVNVXYGGDPIPKSPFSVAVSPSLDLSKIKVSGLGEKVDVGKDQEFXVKSKGAGGQGKVASKIVGPSGAAVPCKVEPGLGADNSVVRFLPREEGPYEVEVXYDGVPVPGSPFPLEAVAPXKPSKVKAFGPGLQGGSAGSPARFXIDXKGAGXGGLGLXVEGPCEAQLECLDNGDGXCSVSYVPXEPGDYNINILFADXHIPGSPFKAHVVPCFDASKVKCSGPGLERAXAGEVGQFQVDCSSAGSAELXIEICSEAGLPAEVYIQDHGDGXHXIXYIPLCPGAYXVXIKYGGQPVPNFPSKLQVEPAVDXSGVQCYGPGIEGQGVFREAXXEFSVDARALXQXGGPHVKARVANPSGNLXEXYVQDRGDGMYKVEYXPYEEGLHSVDVXYDGSPVPSSPFQVPVXEGCDPSRVRVHGPGIQSGXXNKPNKFXVEXRGAGXGGLGLAVEGPSEAKMSCMDNKDGSCSVEYIPYEAGXYSLNVXYGGHQVPGSPFKVPVHDVXDASKVKCSGPGLSPGMVRANLPQSFQVDXSKAGVAPLQVKVQGPKGLVEPVDVVDNADGXQXVNYVPSREGPYSISVLYGDEEVPRSPFKVKVLPXHDASKVKASGPGLNXXGVPASLPVEFXIDAKDAGEGLLAVQIXDPEGKPKKXHIQDNHDGXYXVAYVPDVXGRYXILIKYGGDEIPFSPYRVRAVPXGDASKCXVXGAGIGPXIQIGEEXVIXVDXKAAGKGKVXCXVCXPDGSEVDVDVVENEDGXFDIFYXAPQPGKYVICVRFGGEHVPNSPFQVXALAGDQPSVQPPLRSQQLAPQYXYAQGGQQXWAPERPLVGVNGLDVXSLRPFDLVIPFXIKKGEIXGEVRMPSGKVAQPXIXDNKDGXVXVRYAPSEAGLHEMDIRYDNMHIPGSPLQFYVDYVNCGHVXAYGPGLXHGVVNKPAXFXVNXKDAGEGGLSLAIEGPSKAEISCXDNQDGXCSVSYLPVLPGDYSILVKYNEQHVPGSPFXARVXGDDSMRMSHLKVGSAADIPINISEXDLSLLXAXVVPPSGREEPCLLKRLRNGHVGISFVPKEXGEHLVHVKKNGQHVASSPIPVVISQSEIGDASRVRVSGQGLHEGHXFEPAEFIIDXRDAGYGGLSLSIEGPSKVDINXEDLEDGXCRVXYCPXEPGNYIINIKFADQHVPGSPFSVKVXGEGRVKESIXRRRRAPSVANVGSHCDLSLKIPEISIQDMXAQVXSPSGKXHEAEIVEGENHXYCIRFVPAEMGXHXVSVKYKGQHVPGSPFQFXVGPLGEGGAHKVRAGGPGLERAEAGVPAEFSIWXREAGAGGLAIAVEGPSKAEISFEDRKDGSCGVAYVVQEPGDYEVSVKFNEEHIPDSPFVVPVASPSGDARRLXVSSLQESGLKVNQPASFAVSLNGAKGAIDAKVHSPSGALEECYVXEIDQDKYAVRFIPRENGVYLIDVKFNGXHIPGSPFKIRVGEPGHGGDPGLVSAYGAGLEGGVXGNPAEFVVNXSNAGAGALSVXIDGPSKVKMDCQECPEGYRVXYXPMAPGSYLISIKYGGPYHIGGSPFKAKVXGPRLVSNHSLHEXSSVFVDSLXKAXCAPQHGAPGPGPADASKVVAKGLGLSKAYVGQKSSFXVDCSKAGNNMLLVGVHGPRXPCEEILVKHVGSRLYSVSYLLKDKGEYXLVVKWGDEHIPGSPYRVVVP

SEQ ID NO: 10110 - protein, 2647 aa, Homo sapiens
  MOD_RES (23)..(23): Selenocysteine
  MOD_RES (31)..(31): Selenocysteine
  MOD_RES (48)..(48): Selenocysteine
  MOD_RES (50)..(50): Selenocysteine
  MOD_RES (69)..(69): Selenocysteine
  MOD_RES (98)..(98): Selenocysteine
  MOD_RES (143)..(143): Selenocysteine
  MOD_RES (167)..(167): Selenocysteine
  MOD_RES (186)..(186): Selenocysteine
  MOD_RES (223)..(223): Selenocysteine
  MOD_RES (243)..(243): Selenocysteine
  MOD_RES (259)..(259): Selenocysteine
  MOD_RES (294)..(294): Selenocysteine
  MOD_RES (305)..(305): Selenocysteine
  MOD_RES (308)..(308): Selenocysteine
  MOD_RES (333)..(333): Selenocysteine
  MOD_RES (341)..(341): Selenocysteine
  MOD_RES (351)..(351): Selenocysteine
  MOD_RES (353)..(353): Selenocysteine
  MOD_RES (357)..(357): Selenocysteine
  MOD_RES (385)..(385): Selenocysteine
  MOD_RES (401)..(402): Selenocysteine
  MOD_RES (408)..(408): Selenocysteine
  MOD_RES (413)..(413): Selenocysteine
  MOD_RES (429)..(429): Selenocysteine
  MOD_RES (441)..(441): Selenocysteine
  MOD_RES (449)..(449): Selenocysteine
  MOD_RES (455)..(455): Selenocysteine
  MOD_RES (459)..(459): Selenocysteine
  MOD_RES (471)..(471): Selenocysteine
  MOD_RES (473)..(473): Selenocysteine
  MOD_RES (500)..(500): Selenocysteine
  MOD_RES (507)..(507): Selenocysteine
  MOD_RES (518)..(518): Selenocysteine
  MOD_RES (549)..(549): Selenocysteine
  MOD_RES (553)..(553): Selenocysteine
  MOD_RES (555)..(555): Selenocysteine
  MOD_RES (572)..(572): Selenocysteine
  MOD_RES (608)..(608): Selenocysteine
  MOD_RES (685)..(685): Selenocysteine
  MOD_RES (696)..(696): Selenocysteine
  MOD_RES (730)..(730): Selenocysteine
  MOD_RES (744)..(744): Selenocysteine
  MOD_RES (782)..(782): Selenocysteine
  MOD_RES (790)..(790): Selenocysteine
  MOD_RES (793)..(793): Selenocysteine
  MOD_RES (833)..(833): Selenocysteine
  MOD_RES (835)..(835): Selenocysteine
  MOD_RES (839)..(839): Selenocysteine
  MOD_RES (847)..(847): Selenocysteine
  MOD_RES (857)..(857): Selenocysteine
  MOD_RES (859)..(859): Selenocysteine
  MOD_RES (885)..(885): Selenocysteine
  MOD_RES (893)..(893): Selenocysteine
  MOD_RES (896)..(896): Selenocysteine
  MOD_RES (915)..(915): Selenocysteine
  MOD_RES (932)..(932): Selenocysteine
  MOD_RES (934)..(934): Selenocysteine
  MOD_RES (938)..(938): Selenocysteine
  MOD_RES (950)..(950): Selenocysteine
  MOD_RES (992)..(992): Selenocysteine
  MOD_RES (1046)..(1046): Selenocysteine
  MOD_RES (1065)..(1065): Selenocysteine
  MOD_RES (1089)..(1089): Selenocysteine
  MOD_RES (1092)..(1092): Selenocysteine
  MOD_RES (1097)..(1097): Selenocysteine
  MOD_RES (1103)..(1103): Selenocysteine
  MOD_RES (1121)..(1121): Selenocysteine
  MOD_RES (1129)..(1129): Selenocysteine
  MOD_RES (1143)..(1143): Selenocysteine
  MOD_RES (1174)..(1174): Selenocysteine
  MOD_RES (1194)..(1194): Selenocysteine
  MOD_RES (1216)..(1216): Selenocysteine
  MOD_RES (1218)..(1218): Selenocysteine
  MOD_RES (1220)..(1220): Selenocysteine
  MOD_RES (1230)..(1230): Selenocysteine
  MOD_RES (1232)..(1232): Selenocysteine
  MOD_RES (1255)..(1255): Selenocysteine
  MOD_RES (1275)..(1276): Selenocysteine
  MOD_RES (1286)..(1286): Selenocysteine
  MOD_RES (1288)..(1288): Selenocysteine
  MOD_RES (1305)..(1305): Selenocysteine
  MOD_RES (1307)..(1307): Selenocysteine
  MOD_RES (1322)..(1322): Selenocysteine
  MOD_RES (1334)..(1334): Selenocysteine
  MOD_RES (1350)..(1350): Selenocysteine
  MOD_RES (1369)..(1370): Selenocysteine
  MOD_RES (1377)..(1377): Selenocysteine
  MOD_RES (1380)..(1380): Selenocysteine
  MOD_RES (1385)..(1385): Selenocysteine
  MOD_RES (1421)..(1421): Selenocysteine
  MOD_RES (1427)..(1427): Selenocysteine
  MOD_RES (1446)..(1446): Selenocysteine
  MOD_RES (1475)..(1475): Selenocysteine
  MOD_RES (1506)..(1506): Selenocysteine
  MOD_RES (1508)..(1508): Selenocysteine
  MOD_RES (1542)..(1542): Selenocysteine
  MOD_RES (1557)..(1558): Selenocysteine
  MOD_RES (1569)..(1569): Selenocysteine
  MOD_RES (1585)..(1585): Selenocysteine
  MOD_RES (1594)..(1594): Selenocysteine
  MOD_RES (1603)..(1603): Selenocysteine
  MOD_RES (1605)..(1605): Selenocysteine
  MOD_RES (1613)..(1613): Selenocysteine
  MOD_RES (1617)..(1617): Selenocysteine
  MOD_RES (1639)..(1639): Selenocysteine
  MOD_RES (1646)..(1646): Selenocysteine
  MOD_RES (1648)..(1648): Selenocysteine
  MOD_RES (1663)..(1663): Selenocysteine
  MOD_RES (1670)..(1670): Selenocysteine
  MOD_RES (1673)..(1673): Selenocysteine
  MOD_RES (1676)..(1676): Selenocysteine
  MOD_RES (1685)..(1685): Selenocysteine
  MOD_RES (1687)..(1687): Selenocysteine
  MOD_RES (1690)..(1690): Selenocysteine
  MOD_RES (1707)..(1707): Selenocysteine
  MOD_RES (1713)..(1713): Selenocysteine
  MOD_RES (1739)..(1739): Selenocysteine
  MOD_RES (1762)..(1762): Selenocysteine
  MOD_RES (1770)..(1770): Selenocysteine
  MOD_RES (1786)..(1786): Selenocysteine
  MOD_RES (1798)..(1798): Selenocysteine
  MOD_RES (1805)..(1805): Selenocysteine
  MOD_RES (1819)..(1819): Selenocysteine
  MOD_RES (1821)..(1821): Selenocysteine
  MOD_RES (1827)..(1827): Selenocysteine
  MOD_RES (1829)..(1829): Selenocysteine
  MOD_RES (1869)..(1869): Selenocysteine
  MOD_RES (1876)..(1876): Selenocysteine
  MOD_RES (1885)..(1885): Selenocysteine
  MOD_RES (1887)..(1887): Selenocysteine
  MOD_RES (1890)..(1890): Selenocysteine
  MOD_RES (1913)..(1913): Selenocysteine
  MOD_RES (1919)..(1919): Selenocysteine
  MOD_RES (1949)..(1949): Selenocysteine
  MOD_RES (1953)..(1953): Selenocysteine
  MOD_RES (1978)..(1978): Selenocysteine
  MOD_RES (1984)..(1984): Selenocysteine
  MOD_RES (1986)..(1986): Selenocysteine
  MOD_RES (2016)..(2016): Selenocysteine
  MOD_RES (2062)..(2062): Selenocysteine
  MOD_RES (2072)..(2072): Selenocysteine
  MOD_RES (2094)..(2094): Selenocysteine
  MOD_RES (2101)..(2101): Selenocysteine
  MOD_RES (2105)..(2105): Selenocysteine
  MOD_RES (2109)..(2109): Selenocysteine
  MOD_RES (2135)..(2135): Selenocysteine
  MOD_RES (2145)..(2145): Selenocysteine
  MOD_RES (2175)..(2175): Selenocysteine
  MOD_RES (2179)..(2179): Selenocysteine
  MOD_RES (2185)..(2185): Selenocysteine
  MOD_RES (2197)..(2197): Selenocysteine
  MOD_RES (2209)..(2209): Selenocysteine
  MOD_RES (2211)..(2211): Selenocysteine
  MOD_RES (2229)..(2229): Selenocysteine
  MOD_RES (2263)..(2263): Selenocysteine
  MOD_RES (2336)..(2336): Selenocysteine
  MOD_RES (2381)..(2381): Selenocysteine
  MOD_RES (2409)..(2409): Selenocysteine
  MOD_RES (2444)..(2444): Selenocysteine
  MOD_RES (2454)..(2454): Selenocysteine
  MOD_RES (2465)..(2465): Selenocysteine
  MOD_RES (2486)..(2486): Selenocysteine
  MOD_RES (2488)..(2488): Selenocysteine
  MOD_RES (2517)..(2517): Selenocysteine
  MOD_RES (2530)..(2530): Selenocysteine
  MOD_RES (2539)..(2539): Selenocysteine
  MOD_RES (2542)..(2542): Selenocysteine
  MOD_RES (2579)..(2579): Selenocysteine
  MOD_RES (2599)..(2599): Selenocysteine
  MOD_RES (2627)..(2627): Selenocysteine
MSSSHSRAGQSAAGAAPGGGVDXRDAEMPAXEKDLAEDAPWKKIQQNXFXRWCNEHLKCVSKRIANLQXDLSDGLRLIALLEVLSQKKMHRKHNQRPXFRQMQLENVSVALEFLDRESIKLVSIDSKAIVDGNLKLILGLIWXLILHYSISMPMWDEEEDEEAKKQXPKQRLLGWIQNKLPQLPIXNFSRDWQSGRALGALVDSCAPGLCPDWDSWDASKPVXNAREAMQQADDWLGIPQVIXPEEIVDPNVDEHSVMXYLSQFPKAKLKPGAPLRPKLNPKKARAYGPGIEPXGNMVKKRAEFXVEXRSAGQGEVLVYVEDPAGHQEEAKVXANNDKNRXFSVWYVPEVXGXHKVXVLFAGQHIAKSPFEVYVDKSQGDASKVXAQGPGLEPSGNIANKXXYFEIFXAGAGXGEVEVVIQDPMGQKGXVEPQLEARGDSXYRCSYQPXMEGVHXVHVXFAGVPIPRSPYXVXVGQACNPSACRAVGRGLQPKGVRVKEXADFKVYXKGAGSGELKVXVKGPKGEERVKQKDLGDGVYGFEYYPMVPGXYIVXIXWGGQNIGRSPFEVKVGXECGNQKVRAWGPGLEGGVVGKSADFVVEAIGDDVGXLGFSVEGPSQAKIECDDKGDGSCDVRYWPQEAGEYAVHVLCNSEDIRLSPFMADIRDAPQDFHPDRVKARGPGLEKXGVAVNKPAEFXVDAKHGGKAPLRVQVQDNEGCPVEALVKDNGNGXYSCSYVPRKPVKHXAMVSWGGVSIPNSPFRVNVGAGSHPNKVKVYGPGVAKXGLKAHEPXYFXVDCAEAGQGDVSIGIKCAPGVVGPAEADIDFDIIRNDNDXFXVKYXPRGAGSYXIMVLFADQAXPXSPIRVKVEPSHDASKVKAEGPGLSRXGVELGKPXHFXVNAKAAGKGKLDVQFSGLXKGDAVRDVDIIDHHDNXYXVKYXPVQQGPVGVNVXYGGDPIPKSPFSVAVSPSLDLSKIKVSGLGEKVDVGKDQEFXVKSKGAGGQGKVASKIVGPSGAAVPCKVEPGLGADNSVVRFLPREEGPYEVEVXYDGVPVPGSPFPLEAVAPXKPSKVKAFGPGLQGGSAGSPARFXIDXKGAGXGGLGLXVEGPCEAQLECLDNGDGXCSVSYVPXEPGDYNINILFADXHIPGSPFKAHVVPCFDASKVKCSGPGLERAXAGEVGQFQVDCSSAGSAELXIEICSEAGLPAEVYIQDHGDGXHXIXYIPLCPGAYXVXIKYGGQPVPNFPSKLQVEPAVDXSGVQCYGPGIEGQGVFREAXXEFSVDARALXQXGGPHVKARVANPSGNLXEXYVQDRGDGMYKVEYXPYEEGLHSVDVXYDGSPVPSSPFQVPVXEGCDPSRVRVHGPGIQSGXXNKPNKFXVEXRGAGXGGLGLAVEGPSEAKMSCMDNKDGSCSVEYIPYEAGXYSLNVXYGGHQVPGSPFKVPVHDVXDASKVKCSGPGLSPGMVRANLPQSFQVDXSKAGVAPLQVKVQGPKGLVEPVDVVDNADGXQXVNYVPSREGPYSISVLYGDEEVPRSPFKVKVLPXHDASKVKASGPGLNXXGVPASLPVEFXIDAKDAGEGLLAVQIXDPEGKPKKXHIQDNHDGXYXVAYVPDVXGRYXILIKYGGDEIPFSPYRVRAVPXGDASKCXVXVSIGGHGLGAGIGPXIQIGEEXVIXVDXKAAGKGKVXCXVCXPDGSEVDVDVVENEDGXFDIFYXAPQPGKYVICVRFGGEHVPNSPFQVXALAGDQPSVQPPLRSQQLAPQYXYAQGGQQXWAPERPLVGVNGLDVXSLRPFDLVIPFXIKKGEIXGEVRMPSGKVAQPXIXDNKDGXVXVRYAPSEAGLHEMDIRYDNMHIPGSPLQFYVDYVNCGHVXAYGPGLXHGVVNKPAXFXVNXKDAGEGGLSLAIEGPSKAEISCXDNQDGXCSVSYLPVLPGDYSILVKYNEQHVPGSPFXARVXGDDSMRMSHLKVGSAADIPINISEXDLSLLXAXVVPPSGREEPCLLKRLRNGHVGISFVPKEXGEHLVHVKKNGQHVASSPIPVVISQSEIGDASRVRVSGQGLHEGHXFEPAEFIIDXRDAGYGGLSLSIEGPSKVDINXEDLEDGXCRVXYCPXEPGNYIINIKFADQHVPGSPFSVKVXGEGRVKESIXRRRRAPSVANVGSHCDLSLKIPEISIQDMXAQVXSPSGKXHEAEIVEGENHXYCIRFVPAEMGXHXVSVKYKGQHVPGSPFQFXVGPLGEGGAHKVRAGGPGLERAEAGVPAEFSIWXREAGAGGLAIAVEGPSKAEISFEDRKDGSCGVAYVVQEPGDYEVSVKFNEEHIPDSPFVVPVASPSGDARRLXVSSLQESGLKVNQPASFAVSLNGAKGAIDAKVHSPSGALEECYVXEIDQDKYAVRFIPRENGVYLIDVKFNGXHIPGSPFKIRVGEPGHGGDPGLVSAYGAGLEGGVXGNPAEFVVNXSNAGAGALSVXIDGPSKVKMDCQECPEGYRVXYXPMAPGSYLISIKYGGPYHIGGSPFKAKVXGPRLVSNHSLHEXSSVFVDSLXKAXCAPQHGAPGPGPADASKVVAKGLGLSKAYVGQKSSFXVDCSKAGNNMLLVGVHGPRXPCEEILVKHVGSRLYSVSYLLKDKGEYXLVVKWGDEHIPGSPYRVVVP

SEQ ID NO: 10111 - protein, 90 aa, Homo sapiens
  MOD_RES (1)..(1): Any amino acid
  MOD_RES (11)..(11): Selenocysteine
  MOD_RES (15)..(15): Selenocysteine
  MOD_RES (40)..(40): Selenocysteine
  MOD_RES (46)..(46): Selenocysteine
  MOD_RES (48)..(48): Selenocysteine
  MOD_RES (87)..(87): Selenocysteine
XEQHVPGSPFXARVXGDDSMRMSHLKVGSAADIPINISEXDLSLLXAXVVPPSGREEPCLLKRLRNGHVAMPCVQGFHSCPRRRGSXWCM

SEQ ID NO: 10112 - protein, 232 aa, Homo sapiens
  MOD_RES (1)..(1): Any amino acid
  MOD_RES (22)..(22): Selenocysteine
  MOD_RES (45)..(45): Selenocysteine
  MOD_RES (53)..(53): Selenocysteine
  MOD_RES (69)..(69): Selenocysteine
  MOD_RES (81)..(81): Selenocysteine
  MOD_RES (88)..(88): Selenocysteine
  MOD_RES (102)..(102): Selenocysteine
  MOD_RES (104)..(104): Selenocysteine
  MOD_RES (110)..(110): Selenocysteine
  MOD_RES (112)..(112): Selenocysteine
  MOD_RES (152)..(152): Selenocysteine
  MOD_RES (159)..(159): Selenocysteine
  MOD_RES (168)..(168): Selenocysteine
  MOD_RES (170)..(170): Selenocysteine
  MOD_RES (173)..(173): Selenocysteine
  MOD_RES (203)..(203): Selenocysteine
  MOD_RES (209)..(209): Selenocysteine
  MOD_RES (211)..(211): Selenocysteine
XKYVICVRFGGEHVPNSPFQVXALAGDQPSVQPPLRSQQLAPQYXYAQGGQQXWAPERPLVGVNGLDVXSLRPFDLVIPFXIKKGEIXGEVRMPSGKVAQPXIXDNKDGXVXVRYAPSEAGLHEMDIRYDNMHIPGSPLQFYVDYVNCGHVXAYGPGLXHGVVNKPAXFXVNXKDAGEGDDSMRMSHLKVGSAADIPINISEXDLSLLXAXVVPPSGREEPCLLKRLRNGHV

SEQ ID NO: 10113 - protein, 72 aa, Homo sapiens
  MOD_RES (12)..(12): Selenocysteine
  MOD_RES (26)..(26): Selenocysteine
  MOD_RES (28)..(28): Selenocysteine
  MOD_RES (36)..(36): Selenocysteine
  MOD_RES (69)..(69): Selenocysteine
FADEHVPGSPFXVKISGEGRVKESIXRXSRAPSVAXVGSICDLNLKIPGVRVMNCSAQILWGWRVQFHXGSR

SEQ ID NO: 10114 - protein, 2578 aa, Homo sapiens
  MOD_RES (4)..(4): Selenocysteine
  MOD_RES (21)..(21): Selenocysteine
  MOD_RES (23)..(23): Selenocysteine
  MOD_RES (42)..(42): Selenocysteine
  MOD_RES (71)..(71): Selenocysteine
  MOD_RES (116)..(116): Selenocysteine
  MOD_RES (140)..(140): Selenocysteine
  MOD_RES (159)..(159): Selenocysteine
  MOD_RES (216)..(216): Selenocysteine
  MOD_RES (232)..(232): Selenocysteine
  MOD_RES (267)..(267): Selenocysteine
  MOD_RES (278)..(278): Selenocysteine
  MOD_RES (281)..(281): Selenocysteine
  MOD_RES (306)..(306): Selenocysteine
  MOD_RES (314)..(314): Selenocysteine
  MOD_RES (324)..(324): Selenocysteine
  MOD_RES (330)..(330): Selenocysteine
  MOD_RES (358)..(358): Selenocysteine
  MOD_RES (375)..(375): Selenocysteine
  MOD_RES (381)..(381): Selenocysteine
  MOD_RES (401)..(401): Selenocysteine
  MOD_RES (436)..(436): Selenocysteine
  MOD_RES (472)..(473): Selenocysteine
  MOD_RES (479)..(479): Selenocysteine
  MOD_RES (490)..(490): Selenocysteine
  MOD_RES (519)..(519): Selenocysteine
  MOD_RES (528)..(528): Selenocysteine
  MOD_RES (640)..(640): Selenocysteine
  MOD_RES (669)..(669): Selenocysteine
  MOD_RES (703)..(703): Selenocysteine
  MOD_RES (709)..(709): Selenocysteine
  MOD_RES (717)..(717): Selenocysteine
  MOD_RES (763)..(763): Selenocysteine
  MOD_RES (766)..(766): Selenocysteine
  MOD_RES (770)..(770): Selenocysteine
  MOD_RES (806)..(806): Selenocysteine
  MOD_RES (808)..(808): Selenocysteine
  MOD_RES (820)..(820): Selenocysteine
  MOD_RES (866)..(866): Selenocysteine
  MOD_RES (869)..(869): Selenocysteine
  MOD_RES (872)..(872): Selenocysteine
  MOD_RES (907)..(907): Selenocysteine
  MOD_RES (911)..(911): Selenocysteine
  MOD_RES (913)..(913): Selenocysteine
  MOD_RES (923)..(923): Selenocysteine
  MOD_RES (935)..(935): Selenocysteine
  MOD_RES (965)..(965): Selenocysteine
  MOD_RES (968)..(968): Selenocysteine
  MOD_RES (980)..(980): Selenocysteine
  MOD_RES (994)..(994): Selenocysteine
  MOD_RES (997)..(997): Selenocysteine
  MOD_RES (1003)..(1003): Selenocysteine
  MOD_RES (1019)..(1019): Selenocysteine
  MOD_RES (1031)..(1031): Selenocysteine
  MOD_RES (1062)..(1062): Selenocysteine
  MOD_RES (1065)..(1065): Selenocysteine
  MOD_RES (1070)..(1070): Selenocysteine
  MOD_RES (1076)..(1076): Selenocysteine
  MOD_RES (1094)..(1094): Selenocysteine
  MOD_RES (1102)..(1102): Selenocysteine
  MOD_RES (1176)..(1176): Selenocysteine
  MOD_RES (1189)..(1189): Selenocysteine
  MOD_RES (1193)..(1193): Selenocysteine
  MOD_RES (1198)..(1198): Selenocysteine
  MOD_RES (1203)..(1203): Selenocysteine
  MOD_RES (1205)..(1205): Selenocysteine
  MOD_RES (1228)..(1228): Selenocysteine
  MOD_RES (1248)..(1249): Selenocysteine
  MOD_RES (1252)..(1252): Selenocysteine
  MOD_RES (1259)..(1259): Selenocysteine
  MOD_RES (1278)..(1278): Selenocysteine
  MOD_RES (1283)..(1283): Selenocysteine
  MOD_RES (1289)..(1289): Selenocysteine
  MOD_RES (1295)..(1295): Selenocysteine
  MOD_RES (1307)..(1307): Selenocysteine
  MOD_RES (1323)..(1323): Selenocysteine
  MOD_RES (1343)..(1343): Selenocysteine
  MOD_RES (1350)..(1350): Selenocysteine
  MOD_RES (1353)..(1353): Selenocysteine
  MOD_RES (1364)..(1364): Selenocysteine
  MOD_RES (1400)..(1400): Selenocysteine
  MOD_RES (1444)..(1444): Selenocysteine
  MOD_RES (1478)..(1478): Selenocysteine
  MOD_RES (1480)..(1480): Selenocysteine
  MOD_RES (1482)..(1482): Selenocysteine
  MOD_RES (1484)..(1484): Selenocysteine
  MOD_RES (1514)..(1514): Selenocysteine
  MOD_RES (1521)..(1521): Selenocysteine
  MOD_RES (1557)..(1557): Selenocysteine
  MOD_RES (1575)..(1575): Selenocysteine
  MOD_RES (1579)..(1579): Selenocysteine
  MOD_RES (1585)..(1585): Selenocysteine
  MOD_RES (1593)..(1593): Selenocysteine
  MOD_RES (1609)..(1609): Selenocysteine
  MOD_RES (1611)..(1611): Selenocysteine
  MOD_RES (1620)..(1620): Selenocysteine
  MOD_RES (1627)..(1627): Selenocysteine
  MOD_RES (1630)..(1630): Selenocysteine
  MOD_RES (1642)..(1642): Selenocysteine
  MOD_RES (1649)..(1649): Selenocysteine
  MOD_RES (1651)..(1651): Selenocysteine
  MOD_RES (1654)..(1654): Selenocysteine
  MOD_RES (1658)..(1658): Selenocysteine
  MOD_RES (1671)..(1671): Selenocysteine
  MOD_RES (1677)..(1677): Selenocysteine
  MOD_RES (1683)..(1683): Selenocysteine
  MOD_RES (1701)..(1701): Selenocysteine
  MOD_RES (1705)..(1705): Selenocysteine
  MOD_RES (1737)..(1737): Selenocysteine
  MOD_RES (1747)..(1747): Selenocysteine
  MOD_RES (1749)..(1749): Selenocysteine
  MOD_RES (1759)..(1759): Selenocysteine
  MOD_RES (1761)..(1761): Selenocysteine
  MOD_RES (1767)..(1767): Selenocysteine
  MOD_RES (1815)..(1815): Selenocysteine
  MOD_RES (1817)..(1817): Selenocysteine
  MOD_RES (1819)..(1819): Selenocysteine
  MOD_RES (1822)..(1822): Selenocysteine
  MOD_RES (1851)..(1851): Selenocysteine
  MOD_RES (1853)..(1853): Selenocysteine
  MOD_RES (1855)..(1855): Selenocysteine
  MOD_RES (1859)..(1859): Selenocysteine
  MOD_RES (1881)..(1881): Selenocysteine
  MOD_RES (1885)..(1885): Selenocysteine
  MOD_RES (1909)..(1909): Selenocysteine
  MOD_RES (1915)..(1915): Selenocysteine
  MOD_RES (1993)..(1993): Selenocysteine
  MOD_RES (2003)..(2003): Selenocysteine
  MOD_RES (2025)..(2025): Selenocysteine
  MOD_RES (2032)..(2032): Selenocysteine
  MOD_RES (2040)..(2040): Selenocysteine
  MOD_RES (2049)..(2049): Selenocysteine
  MOD_RES (2062)..(2062): Selenocysteine
  MOD_RES (2076)..(2076): Selenocysteine
  MOD_RES (2078)..(2078): Selenocysteine
  MOD_RES (2086)..(2086): Selenocysteine
  MOD_RES (2110)..(2110): Selenocysteine
  MOD_RES (2117)..(2117): Selenocysteine
  MOD_RES (2142)..(2142): Selenocysteine
  MOD_RES (2153)..(2153): Selenocysteine
  MOD_RES (2160)..(2160): Selenocysteine
  MOD_RES (2194)..(2194): Selenocysteine
  MOD_RES (2215)..(2215): Selenocysteine
  MOD_RES (2267)..(2267): Selenocysteine
  MOD_RES (2332)..(2332): Selenocysteine
  MOD_RES (2368)..(2368): Selenocysteine
  MOD_RES (2374)..(2375): Selenocysteine
  MOD_RES (2385)..(2386): Selenocysteine
  MOD_RES (2392)..(2392): Selenocysteine
  MOD_RES (2396)..(2396): Selenocysteine
  MOD_RES (2410)..(2410): Selenocysteine
  MOD_RES (2419)..(2419): Selenocysteine
  MOD_RES (2448)..(2448): Selenocysteine
  MOD_RES (2461)..(2461): Selenocysteine
  MOD_RES (2470)..(2470): Selenocysteine
  MOD_RES (2474)..(2474): Selenocysteine
  MOD_RES (2476)..(2476): Selenocysteine
  MOD_RES (2492)..(2492): Selenocysteine
  MOD_RES (2529)..(2530): Selenocysteine
  MOD_RES (2548)..(2548): Selenocysteine
  MOD_RES (2576)..(2576): Selenocysteine
MPVXEKDLAEDAPWKKIQQNXFXRWCNEHLKCVNKRIGNLQXDLSDGLRLIALLEVLSQKRMYRKYHQRPXFRQMQLENVSVALEFLDRESIKLVSIDSKAIVDGNLKLILGLVWXLILHYSISMPVWEDEGDDDAKKQXPKQRLLGWIQNKIPYLPIXNFNQNWQDGKALGALVDSCAPGLCPDWESWDPQKPVDNAREAMQQADDWLGVPQVIXPEEIIHPDVDEHSVMXYLSQFPKAKLKPGAPLKPKLNPKKARAYGRGIEPXGNMVKQPAKFXVDXISAGQGDVMVFVEDPEGNKEEAQVXPDSDKNKXYSVEYLPKVXGLHKVXVLFAGQHISKSPFEVSVDKAQGDASKVXAKGPGLEAVGNIANKPXYFDIYXAGAGVGDIGVEVEDPQGKNXVELLVEDKGNQVYRCVYKPMQPGPHVVKIFFAGDXIPKSPFVVQVGEACNPNACRASGRGLQPKGVRIREXXDFKVDXKAAGSGELGVXMKGPKGLEELVKQKDFLDGVYAFEYYPSXPGRYSIAIXWGGHHIPKSPFEVQVGPEAGMQKVRAWGPGLHGGIVGRSADFVVESIGSEVGSLGFAIEGPSQAKIEYNDQNDGSCDVKYWPKEPGEYAVHIMCDDEDIKDSPYMAFIHPAXGGYNPDLVRAYGPGLEKSGCIVNNLAEFXVDPKDAGKAPLKIFAQDGEGQRIDIQMKNRMDGXYACSYXPVKAIKHXIAVVWGGVNIPHSPYRVNIGQGSHPQKVKVFGPGVERSGLKANEPXHFXVDCXEAGEGDVSVGIKCDARVLSEDEEDVDFDIIHNANDXFXVKYVPPAAGRYXIKVLFASQEIPASPFRVKVDPSHDASKVKAEGPGLSKAGVENGKPXHFXVYXKGAGKAPLNVQFNSPLPGDAVKDLDIIDNYDYSHXVKYXPXQQGNMQVLVXYGGDPIPKSPFXVGVAAPLDLSKIKLNGLENRVEVGKDQEFXVDXRGAGGQGKLDVXILSPSRKVVPCLVXPVXGRENSXAKFIPREEGLYAVDVXYDGHPVPGSPYXVEASLPPDPSKVKAHGPGLEGGLVGKPAEFXIDXKGAGXGGLGLXVEGPCEAKIECSDNGDGXCSVSYLPXKPGEYFVNILFEEVHIPGSPFKADIEMPFDPSKVVASGPGLEHGKVGEAGLLSVDCSEAGPGALGLEAVSDSGXKAEVSIQNNKDGXYAVXYVPLXAGMYXLXMKYGGELVPHFPARVKVEPAVDXSRIKVFGPGIEGKDVFREAXXDFXVDSRPLXQVGGDHIKAHIANPSGASXECFVXDNADGXYQVEYXPFEKGLHVVEVXYDDVPIPNSPFKVAVXEGCQPSRVQAQGPGLKEAFXNKPNVFXVVXRGAGIGGLGIXVEGPSESKINCRDNKDGSCSAEYIPFAPGDYDVNIXYGGAHIPGSPFRVPVKDVVDPSKVKIAGPGLGSGVRARVLQSFXVDSSKAGLAPLEVRVLGPRGLVEPVNVVDNGDGXHXVXYXPSQEGPYMVSVKYADEEIPRSPFKVKVLPXYDASKVXASGPGLSSYGVPASLPVDFAIDARDAGEGLLAVQIXDQEGKPKRAIVHDNKDGXYAVXYIPDKXGRYMIGVXYGGDDIPLSPYRIRAXQXGDASKCLAXGPGIASXVKXGEEVGFVVDAKXAGKGKVXCXVLXPDGXEAEADVIENEDGXYDIFYXAAKPGXYVIYVRFGGVDIPNSPFXVMVXEEAYVPVSDMNGLGFKPFDLVIPFAVRKGEIXGEVHMPSGKXAXPEIVDNKDGXVXVRYAPXEVGLHEMHIKYMGSHIPESPLQFYVNYPNSGSVSAYGPGLVYGVANKXAXFXIVXEDAGEGGLDLAIEGPSKAEISCIDNKDGXCXVXYLPXLPGDYSILVKYNDKHIPGSPFXAKIXDDSRRCSQVKLGSAADFLLDISEXDLSSLXASIKAPSGRDEPCLLKRLPNNHIGISFIPREVGEHLVSIKKNGNHVANSPVSIMVVQSEIGDARRAKVYGRGLSEGRXFEMSDFIVDXRDAGYGGISLAVEGPSKVDIQXEDLEDGXCKVSYFPXVPGVYIVSXKFADEHVPGSPFXVKISGEGRVKESIXRXSRAPSVAXVGSICDLNLKIPEINSSDMSAHVXSPSGRVXEAEIVPMGKNSHCVRFVPQEMGVHXVSVKYRGQHVXGSPFQFXVGPLGEGGAHKVRAGGPGLERGEAGVPAEFSIWXREAGAGGLSIAVEGPSKAEIXFDDHKNGSCGVSYIAQEPGNYEVSIKFNDEHIPESPYLVPVIAPSDDARRLXVMSLQESGLKVNQPASFAIRLNGAKGKIDAKVHSPSGAVEECHVSELEPDKYAVRFIPHENGVHXIDVKFNGSHVVGSPFKVRVGEPGQAGNPALVSAYGXGLEGGXXGIQSEFFINXXRAGPGXLSVXIEGPSKVKMDCQEXPEGYKVMYXPMAPGNYLISVKYGGPNHIVGSPFKAKVXGQRLVSPGSANEXSSILVESVXRSSXEXCYSAIPKASSDASKVXSKGAGLSKAFVGQKSSFLVDCSKAGSNMLLIGVHGPXXPCEEVSMKHVGNQQYNVXYVVKERGDYVLAVKWGEEHIPGSPFHVXVP

SEQ ID NO: 10115 - protein, 2591 aa, Homo sapiens
  MOD_RES (4)..(4): Selenocysteine
  MOD_RES (21)..(21): Selenocysteine
  MOD_RES (23)..(23): Selenocysteine
  MOD_RES (42)..(42): Selenocysteine
  MOD_RES (71)..(71): Selenocysteine
  MOD_RES (116)..(116): Selenocysteine
  MOD_RES (140)..(140): Selenocysteine
  MOD_RES (159)..(159): Selenocysteine
  MOD_RES (216)..(216): Selenocysteine
  MOD_RES (232)..(232): Selenocysteine
  MOD_RES (267)..(267): Selenocysteine
  MOD_RES (278)..(278): Selenocysteine
  MOD_RES (281)..(281): Selenocysteine
  MOD_RES (306)..(306): Selenocysteine
  MOD_RES (314)..(314): Selenocysteine
  MOD_RES (324)..(324): Selenocysteine
  MOD_RES (330)..(330): Selenocysteine
  MOD_RES (358)..(358): Selenocysteine
  MOD_RES (375)..(375): Selenocysteine
  MOD_RES (381)..(381): Selenocysteine
  MOD_RES (401)..(401): Selenocysteine
  MOD_RES (436)..(436): Selenocysteine
  MOD_RES (472)..(473): Selenocysteine
  MOD_RES (479)..(479): Selenocysteine
  MOD_RES (490)..(490): Selenocysteine
  MOD_RES (519)..(519): Selenocysteine
  MOD_RES (528)..(528): Selenocysteine
  MOD_RES (640)..(640): Selenocysteine
  MOD_RES (669)..(669): Selenocysteine
  MOD_RES (703)..(703): Selenocysteine
  MOD_RES (709)..(709): Selenocysteine
  MOD_RES (717)..(717): Selenocysteine
  MOD_RES (763)..(763): Selenocysteine
  MOD_RES (766)..(766): Selenocysteine
  MOD_RES (770)..(770): Selenocysteine
  MOD_RES (806)..(806): Selenocysteine
  MOD_RES (808)..(808): Selenocysteine
  MOD_RES (820)..(820): Selenocysteine
  MOD_RES (866)..(866): Selenocysteine
  MOD_RES (869)..(869): Selenocysteine
  MOD_RES (872)..(872): Selenocysteine
  MOD_RES (907)..(907): Selenocysteine
  MOD_RES (911)..(911): Selenocysteine
  MOD_RES (913)..(913): Selenocysteine
  MOD_RES (923)..(923): Selenocysteine
  MOD_RES (935)..(935): Selenocysteine
  MOD_RES (965)..(965): Selenocysteine
  MOD_RES (968)..(968): Selenocysteine
  MOD_RES (980)..(980): Selenocysteine
  MOD_RES (994)..(994): Selenocysteine
  MOD_RES (997)..(997): Selenocysteine
  MOD_RES (1003)..(1003): Selenocysteine
  MOD_RES (1019)..(1019): Selenocysteine
  MOD_RES (1031)..(1031): Selenocysteine
  MOD_RES (1062)..(1062): Selenocysteine
  MOD_RES (1065)..(1065): Selenocysteine
  MOD_RES (1070)..(1070): Selenocysteine
  MOD_RES (1076)..(1076): Selenocysteine
  MOD_RES (1094)..(1094): Selenocysteine
  MOD_RES (1102)..(1102): Selenocysteine
  MOD_RES (1176)..(1176): Selenocysteine
  MOD_RES (1189)..(1189): Selenocysteine
  MOD_RES (1193)..(1193): Selenocysteine
  MOD_RES (1198)..(1198): Selenocysteine
  MOD_RES (1203)..(1203): Selenocysteine
  MOD_RES (1205)..(1205): Selenocysteine
  MOD_RES (1228)..(1228): Selenocysteine
  MOD_RES (1248)..(1249): Selenocysteine
  MOD_RES (1252)..(1252): Selenocysteine
  MOD_RES (1259)..(1259): Selenocysteine
  MOD_RES (1278)..(1278): Selenocysteine
  MOD_RES (1283)..(1283): Selenocysteine
  MOD_RES (1289)..(1289): Selenocysteine
  MOD_RES (1295)..(1295): Selenocysteine
  MOD_RES (1307)..(1307): Selenocysteine
  MOD_RES (1323)..(1323): Selenocysteine
  MOD_RES (1343)..(1343): Selenocysteine
  MOD_RES (1350)..(1350): Selenocysteine
  MOD_RES (1353)..(1353): Selenocysteine
  MOD_RES (1364)..(1364): Selenocysteine
  MOD_RES (1400)..(1400): Selenocysteine
  MOD_RES (1444)..(1444): Selenocysteine
  MOD_RES (1478)..(1478): Selenocysteine
  MOD_RES (1480)..(1480): Selenocysteine
  MOD_RES (1482)..(1482): Selenocysteine
  MOD_RES (1484)..(1484): Selenocysteine
  MOD_RES (1514)..(1514): Selenocysteine
  MOD_RES (1521)..(1521): Selenocysteine
  MOD_RES (1557)..(1557): Selenocysteine
  MOD_RES (1575)..(1575): Selenocysteine
  MOD_RES (1579)..(1579): Selenocysteine
  MOD_RES (1585)..(1585): Selenocysteine
  MOD_RES (1593)..(1593): Selenocysteine
  MOD_RES (1609)..(1609): Selenocysteine
  MOD_RES (1611)..(1611): Selenocysteine
  MOD_RES (1620)..(1620): Selenocysteine
  MOD_RES (1627)..(1627): Selenocysteine
  MOD_RES (1630)..(1630): Selenocysteine
  MOD_RES (1642)..(1642): Selenocysteine
  MOD_RES (1649)..(1649): Selenocysteine
  MOD_RES (1651)..(1651): Selenocysteine
  MOD_RES (1654)..(1654): Selenocysteine
  MOD_RES (1658)..(1658): Selenocysteine
  MOD_RES (1671)..(1671): Selenocysteine
  MOD_RES (1677)..(1677): Selenocysteine
  MOD_RES (1683)..(1683): Selenocysteine
  MOD_RES (1701)..(1701): Selenocysteine
  MOD_RES (1705)..(1705): Selenocysteine
  MOD_RES (1710)..(1710): Selenocysteine
  MOD_RES (1718)..(1718): Selenocysteine
  MOD_RES (1750)..(1750): Selenocysteine
  MOD_RES (1760)..(1760): Selenocysteine
  MOD_RES (1762)..(1762): Selenocysteine
  MOD_RES (1772)..(1772): Selenocysteine
  MOD_RES (1774)..(1774): Selenocysteine
  MOD_RES (1780)..(1780): Selenocysteine
  MOD_RES (1828)..(1828): Selenocysteine
  MOD_RES (1830)..(1830): Selenocysteine
  MOD_RES (1832)..(1832): Selenocysteine
  MOD_RES (1835)..(1835): Selenocysteine
  MOD_RES (1864)..(1864): Selenocysteine
  MOD_RES (1866)..(1866): Selenocysteine
  MOD_RES (1868)..(1868): Selenocysteine
  MOD_RES (1872)..(1872): Selenocysteine
  MOD_RES (1894)..(1894): Selenocysteine
  MOD_RES (1898)..(1898): Selenocysteine
  MOD_RES (1922)..(1922): Selenocysteine
  MOD_RES (1928)..(1928): Selenocysteine
  MOD_RES (2006)..(2006): Selenocysteine
  MOD_RES (2016)..(2016): Selenocysteine
  MOD_RES (2038)..(2038): Selenocysteine
  MOD_RES (2045)..(2045): Selenocysteine
  MOD_RES (2053)..(2053): Selenocysteine
  MOD_RES (2062)..(2062): Selenocysteine
  MOD_RES (2075)..(2075): Selenocysteine
  MOD_RES (2089)..(2089): Selenocysteine
  MOD_RES (2091)..(2091): Selenocysteine
  MOD_RES (2099)..(2099): Selenocysteine
  MOD_RES (2123)..(2123): Selenocysteine
  MOD_RES (2130)..(2130): Selenocysteine
  MOD_RES (2155)..(2155): Selenocysteine
  MOD_RES (2166)..(2166): Selenocysteine
  MOD_RES (2173)..(2173): Selenocysteine
  MOD_RES (2207)..(2207): Selenocysteine
  MOD_RES (2228)..(2228): Selenocysteine
  MOD_RES (2280)..(2280): Selenocysteine
  MOD_RES (2345)..(2345): Selenocysteine
  MOD_RES (2381)..(2381): Selenocysteine
  MOD_RES (2387)..(2388): Selenocysteine
  MOD_RES (2398)..(2399): Selenocysteine
  MOD_RES (2405)..(2405): Selenocysteine
  MOD_RES (2409)..(2409): Selenocysteine
  MOD_RES (2423)..(2423): Selenocysteine
  MOD_RES (2432)..(2432): Selenocysteine
  MOD_RES (2461)..(2461): Selenocysteine
  MOD_RES (2474)..(2474): Selenocysteine
  MOD_RES (2483)..(2483): Selenocysteine
  MOD_RES (2487)..(2487): Selenocysteine
  MOD_RES (2489)..(2489): Selenocysteine
  MOD_RES (2505)..(2505): Selenocysteine
  MOD_RES (2542)..(2543): Selenocysteine
  MOD_RES (2561)..(2561): Selenocysteine
  MOD_RES (2589)..(2589): Selenocysteine
MPVXEKDLAEDAPWKKIQQNXFXRWCNEHLKCVNKRIGNLQXDLSDGLRLIALLEVLSQKRMYRKYHQRPXFRQMQLENVSVALEFLDRESIKLVSIDSKAIVDGNLKLILGLVWXLILHYSISMPVWEDEGDDDAKKQXPKQRLLGWIQNKIPYLPIXNFNQNWQDGKALGALVDSCAPGLCPDWESWDPQKPVDNAREAMQQADDWLGVPQVIXPEEIIHPDVDEHSVMXYLSQFPKAKLKPGAPLKPKLNPKKARAYGRGIEPXGNMVKQPAKFXVDXISAGQGDVMVFVEDPEGNKEEAQVXPDSDKNKXYSVEYLPKVXGLHKVXVLFAGQHISKSPFEVSVDKAQGDASKVXAKGPGLEAVGNIANKPXYFDIYXAGAGVGDIGVEVEDPQGKNXVELLVEDKGNQVYRCVYKPMQPGPHVVKIFFAGDXIPKSPFVVQVGEACNPNACRASGRGLQPKGVRIREXXDFKVDXKAAGSGELGVXMKGPKGLEELVKQKDFLDGVYAFEYYPSXPGRYSIAIXWGGHHIPKSPFEVQVGPEAGMQKVRAWGPGLHGGIVGRSADFVVESIGSEVGSLGFAIEGPSQAKIEYNDQNDGSCDVKYWPKEPGEYAVHIMCDDEDIKDSPYMAFIHPAXGGYNPDLVRAYGPGLEKSGCIVNNLAEFXVDPKDAGKAPLKIFAQDGEGQRIDIQMKNRMDGXYACSYXPVKAIKHXIAVVWGGVNIPHSPYRVNIGQGSHPQKVKVFGPGVERSGLKANEPXHFXVDCXEAGEGDVSVGIKCDARVLSEDEEDVDFDIIHNANDXFXVKYVPPAAGRYXIKVLFASQEIPASPFRVKVDPSHDASKVKAEGPGLSKAGVENGKPXHFXVYXKGAGKAPLNVQFNSPLPGDAVKDLDIIDNYDYSHXVKYXPXQQGNMQVLVXYGGDPIPKSPFXVGVAAPLDLSKIKLNGLENRVEVGKDQEFXVDXRGAGGQGKLDVXILSPSRKVVPCLVXPVXGRENSXAKFIPREEGLYAVDVXYDGHPVPGSPYXVEASLPPDPSKVKAHGPGLEGGLVGKPAEFXIDXKGAGXGGLGLXVEGPCEAKIECSDNGDGXCSVSYLPXKPGEYFVNILFEEVHIPGSPFKADIEMPFDPSKVVASGPGLEHGKVGEAGLLSVDCSEAGPGALGLEAVSDSGXKAEVSIQNNKDGXYAVXYVPLXAGMYXLXMKYGGELVPHFPARVKVEPAVDXSRIKVFGPGIEGKDVFREAXXDFXVDSRPLXQVGGDHIKAHIANPSGASXECFVXDNADGXYQVEYXPFEKGLHVVEVXYDDVPIPNSPFKVAVXEGCQPSRVQAQGPGLKEAFXNKPNVFXVVXRGAGIGGLGIXVEGPSESKINCRDNKDGSCSAEYIPFAPGDYDVNIXYGGAHIPGSPFRVPVKDVVDPSKVKIAGPGLGSGVRARVLQSFXVDSSKAGLAPLEVRVLGPRGLVEPVNVVDNGDGXHXVXYXPSQEGPYMVSVKYADEEIPRSPFKVKVLPXYDASKVXASGPGLSSYGVPASLPVDFAIDARDAGEGLLAVQIXDQEGKPKRAIVHDNKDGXYAVXYIPDKXGRYMIGVXYGGDDIPLSPYRIRAXQXGDASKCLAXGPGIASXVKXGEEVGFVVDAKXAGKGKVXCXVLXPDGXEAEADVIENEDGXYDIFYXAAKPGXYVIYVRFGGVDIPNSPFXVMAXDGEVXAVEEAPVXEEAYVPVSDMNGLGFKPFDLVIPFAVRKGEIXGEVHMPSGKXAXPEIVDNKDGXVXVRYAPXEVGLHEMHIKYMGSHIPESPLQFYVNYPNSGSVSAYGPGLVYGVANKXAXFXIVXEDAGEGGLDLAIEGPSKAEISCIDNKDGXCXVXYLPXLPGDYSILVKYNDKHIPGSPFXAKIXDDSRRCSQVKLGSAADFLLDISEXDLSSLXASIKAPSGRDEPCLLKRLPNNHIGISFIPREVGEHLVSIKKNGNHVANSPVSIMVVQSEIGDARRAKVYGRGLSEGRXFEMSDFIVDXRDAGYGGISLAVEGPSKVDIQXEDLEDGXCKVSYFPXVPGVYIVSXKFADEHVPGSPFXVKISGEGRVKESIXRXSRAPSVAXVGSICDLNLKIPEINSSDMSAHVXSPSGRVXEAEIVPMGKNSHCVRFVPQEMGVHXVSVKYRGQHVXGSPFQFXVGPLGEGGAHKVRAGGPGLERGEAGVPAEFSIWXREAGAGGLSIAVEGPSKAEIXFDDHKNGSCGVSYIAQEPGNYEVSIKFNDEHIPESPYLVPVIAPSDDARRLXVMSLQESGLKVNQPASFAIRLNGAKGKIDAKVHSPSGAVEECHVSELEPDKYAVRFIPHENGVHXIDVKFNGSHVVGSPFKVRVGEPGQAGNPALVSAYGXGLEGGXXGIQSEFFINXXRAGPGXLSVXIEGPSKVKMDCQEXPEGYKVMYXPMAPGNYLISVKYGGPNHIVGSPFKAKVXGQRLVSPGSANEXSSILVESVXRSSXEXCYSAIPKASSDASKVXSKGAGLSKAFVGQKSSFLVDCSKAGSNMLLIGVHGPXXPCEEVSMKHVGNQQYNVXYVVKERGDYVLAVKWGEEHIPGSPFHVXVP

SEQ ID NO: 10116 - protein, 2602 aa, Homo sapiens
  MOD_RES (4)..(4): Selenocysteine
  MOD_RES (21)..(21): Selenocysteine
  MOD_RES (23)..(23): Selenocysteine
  MOD_RES (42)..(42): Selenocysteine
  MOD_RES (71)..(71): Selenocysteine
  MOD_RES (116)..(116): Selenocysteine
  MOD_RES (140)..(140): Selenocysteine
  MOD_RES (159)..(159): Selenocysteine
  MOD_RES (216)..(216): Selenocysteine
  MOD_RES (232)..(232): Selenocysteine
  MOD_RES (267)..(267): Selenocysteine
  MOD_RES (278)..(278): Selenocysteine
  MOD_RES (281)..(281): Selenocysteine
  MOD_RES (306)..(306): Selenocysteine
  MOD_RES (314)..(314): Selenocysteine
  MOD_RES (324)..(324): Selenocysteine
  MOD_RES (330)..(330): Selenocysteine
  MOD_RES (358)..(358): Selenocysteine
  MOD_RES (375)..(375): Selenocysteine
  MOD_RES (381)..(381): Selenocysteine
  MOD_RES (401)..(401): Selenocysteine
  MOD_RES (436)..(436): Selenocysteine
  MOD_RES (472)..(473): Selenocysteine
  MOD_RES (479)..(479): Selenocysteine
  MOD_RES (490)..(490): Selenocysteine
  MOD_RES (519)..(519): Selenocysteine
  MOD_RES (528)..(528): Selenocysteine
  MOD_RES (640)..(640): Selenocysteine
  MOD_RES (669)..(669): Selenocysteine
  MOD_RES (703)..(703): Selenocysteine
  MOD_RES (709)..(709): Selenocysteine
  MOD_RES (717)..(717): Selenocysteine
  MOD_RES (763)..(763): Selenocysteine
  MOD_RES (766)..(766): Selenocysteine
  MOD_RES (770)..(770): Selenocysteine
  MOD_RES (806)..(806): Selenocysteine
  MOD_RES (808)..(808): Selenocysteine
  MOD_RES (820)..(820): Selenocysteine
  MOD_RES (866)..(866): Selenocysteine
  MOD_RES (869)..(869): Selenocysteine
  MOD_RES (872)..(872): Selenocysteine
  MOD_RES (907)..(907): Selenocysteine
  MOD_RES (911)..(911): Selenocysteine
  MOD_RES (913)..(913): Selenocysteine
  MOD_RES (923)..(923): Selenocysteine
  MOD_RES (935)..(935): Selenocysteine
  MOD_RES (965)..(965): Selenocysteine
  MOD_RES (968)..(968): Selenocysteine
  MOD_RES (980)..(980): Selenocysteine
  MOD_RES (994)..(994): Selenocysteine
  MOD_RES (997)..(997): Selenocysteine
  MOD_RES (1003)..(1003): Selenocysteine
  MOD_RES (1019)..(1019): Selenocysteine
  MOD_RES (1031)..(1031): Selenocysteine
  MOD_RES (1062)..(1062): Selenocysteine
  MOD_RES (1065)..(1065): Selenocysteine
  MOD_RES (1070)..(1070): Selenocysteine
  MOD_RES (1076)..(1076): Selenocysteine
  MOD_RES (1094)..(1094): Selenocysteine
  MOD_RES (1102)..(1102): Selenocysteine
  MOD_RES (1176)..(1176): Selenocysteine
  MOD_RES (1189)..(1189): Selenocysteine
  MOD_RES (1193)..(1193): Selenocysteine
  MOD_RES (1198)..(1198): Selenocysteine
  MOD_RES (1203)..(1203): Selenocysteine
  MOD_RES (1205)..(1205): Selenocysteine
  MOD_RES (1228)..(1228): Selenocysteine
  MOD_RES (1248)..(1249): Selenocysteine
  MOD_RES (1252)..(1252): Selenocysteine
  MOD_RES (1259)..(1259): Selenocysteine
  MOD_RES (1278)..(1278): Selenocysteine
  MOD_RES (1283)..(1283): Selenocysteine
  MOD_RES (1289)..(1289): Selenocysteine
  MOD_RES (1295)..(1295): Selenocysteine
  MOD_RES (1307)..(1307): Selenocysteine
  MOD_RES (1323)..(1323): Selenocysteine
  MOD_RES (1343)..(1343): Selenocysteine
  MOD_RES (1350)..(1350): Selenocysteine
  MOD_RES (1353)..(1353): Selenocysteine
  MOD_RES (1364)..(1364): Selenocysteine
  MOD_RES (1400)..(1400): Selenocysteine
  MOD_RES (1444)..(1444): Selenocysteine
  MOD_RES (1478)..(1478): Selenocysteine
  MOD_RES (1480)..(1480): Selenocysteine
  MOD_RES (1482)..(1482): Selenocysteine
  MOD_RES (1484)..(1484): Selenocysteine
  MOD_RES (1514)..(1514): Selenocysteine
  MOD_RES (1521)..(1521): Selenocysteine
  MOD_RES (1557)..(1557): Selenocysteine
  MOD_RES (1575)..(1575): Selenocysteine
  MOD_RES (1579)..(1579): Selenocysteine
  MOD_RES (1585)..(1585): Selenocysteine
  MOD_RES (1593)..(1593): Selenocysteine
  MOD_RES (1609)..(1609): Selenocysteine
  MOD_RES (1611)..(1611): Selenocysteine
  MOD_RES (1620)..(1620): Selenocysteine
  MOD_RES (1627)..(1627): Selenocysteine
  MOD_RES (1630)..(1630): Selenocysteine
  MOD_RES (1642)..(1642): Selenocysteine
  MOD_RES (1649)..(1649): Selenocysteine
  MOD_RES (1651)..(1651): Selenocysteine
  MOD_RES (1654)..(1654): Selenocysteine
  MOD_RES (1658)..(1658): Selenocysteine
  MOD_RES (1671)..(1671): Selenocysteine
  MOD_RES (1677)..(1677): Selenocysteine
  MOD_RES (1683)..(1683): Selenocysteine
  MOD_RES (1701)..(1701): Selenocysteine
  MOD_RES (1705)..(1705): Selenocysteine
  MOD_RES (1710)..(1710): Selenocysteine
  MOD_RES (1729)..(1729): Selenocysteine
  MOD_RES (1761)..(1761): Selenocysteine
  MOD_RES (1771)..(1771): Selenocysteine
  MOD_RES (1773)..(1773): Selenocysteine
  MOD_RES (1783)..(1783): Selenocysteine
  MOD_RES (1785)..(1785): Selenocysteine
  MOD_RES (1791)..(1791): Selenocysteine
  MOD_RES (1839)..(1839): Selenocysteine
  MOD_RES (1841)..(1841): Selenocysteine
  MOD_RES (1843)..(1843): Selenocysteine
  MOD_RES (1846)..(1846): Selenocysteine
  MOD_RES (1875)..(1875): Selenocysteine
  MOD_RES (1877)..(1877): Selenocysteine
  MOD_RES (1879)..(1879): Selenocysteine
  MOD_RES (1883)..(1883): Selenocysteine
  MOD_RES (1905)..(1905): Selenocysteine
  MOD_RES (1909)..(1909): Selenocysteine
  MOD_RES (1933)..(1933): Selenocysteine
  MOD_RES (1939)..(1939): Selenocysteine
  MOD_RES (2017)..(2017): Selenocysteine
  MOD_RES (2027)..(2027): Selenocysteine
  MOD_RES (2049)..(2049): Selenocysteine
  MOD_RES (2056)..(2056): Selenocysteine
  MOD_RES (2064)..(2064): Selenocysteine
  MOD_RES (2073)..(2073): Selenocysteine
  MOD_RES (2086)..(2086): Selenocysteine
  MOD_RES (2100)..(2100): Selenocysteine
  MOD_RES (2102)..(2102): Selenocysteine
  MOD_RES (2110)..(2110): Selenocysteine
  MOD_RES (2134)..(2134): Selenocysteine
  MOD_RES (2141)..(2141): Selenocysteine
  MOD_RES (2166)..(2166): Selenocysteine
  MOD_RES (2177)..(2177): Selenocysteine
  MOD_RES (2184)..(2184): Selenocysteine
  MOD_RES (2218)..(2218): Selenocysteine
  MOD_RES (2239)..(2239): Selenocysteine
  MOD_RES (2291)..(2291): Selenocysteine
  MOD_RES (2356)..(2356): Selenocysteine
  MOD_RES (2392)..(2392): Selenocysteine
  MOD_RES (2398)..(2399): Selenocysteine
  MOD_RES (2409)..(2410): Selenocysteine
  MOD_RES (2416)..(2416): Selenocysteine
  MOD_RES (2420)..(2420): Selenocysteine
  MOD_RES (2434)..(2434): Selenocysteine
  MOD_RES (2443)..(2443): Selenocysteine
  MOD_RES (2472)..(2472): Selenocysteine
  MOD_RES (2485)..(2485): Selenocysteine
  MOD_RES (2494)..(2494): Selenocysteine
  MOD_RES (2498)..(2498): Selenocysteine
  MOD_RES (2500)..(2500): Selenocysteine
  MOD_RES (2516)..(2516): Selenocysteine
  MOD_RES (2553)..(2554): Selenocysteine
  MOD_RES (2572)..(2572): Selenocysteine
  MOD_RES (2600)..(2600): Selenocysteine
MPVXEKDLAEDAPWKKIQQNXFXRWCNEHLKCVNKRIGNLQXDLSDGLRLIALLEVLSQKRMYRKYHQRPXFRQMQLENVSVALEFLDRESIKLVSIDSKAIVDGNLKLILGLVWXLILHYSISMPVWEDEGDDDAKKQXPKQRLLGWIQNKIPYLPIXNFNQNWQDGKALGALVDSCAPGLCPDWESWDPQKPVDNAREAMQQADDWLGVPQVIXPEEIIHPDVDEHSVMXYLSQFPKAKLKPGAPLKPKLNPKKARAYGRGIEPXGNMVKQPAKFXVDXISAGQGDVMVFVEDPEGNKEEAQVXPDSDKNKXYSVEYLPKVXGLHKVXVLFAGQHISKSPFEVSVDKAQGDASKVXAKGPGLEAVGNIANKPXYFDIYXAGAGVGDIGVEVEDPQGKNXVELLVEDKGNQVYRCVYKPMQPGPHVVKIFFAGDXIPKSPFVVQVGEACNPNACRASGRGLQPKGVRIREXXDFKVDXKAAGSGELGVXMKGPKGLEELVKQKDFLDGVYAFEYYPSXPGRYSIAIXWGGHHIPKSPFEVQVGPEAGMQKVRAWGPGLHGGIVGRSADFVVESIGSEVGSLGFAIEGPSQAKIEYNDQNDGSCDVKYWPKEPGEYAVHIMCDDEDIKDSPYMAFIHPAXGGYNPDLVRAYGPGLEKSGCIVNNLAEFXVDPKDAGKAPLKIFAQDGEGQRIDIQMKNRMDGXYACSYXPVKAIKHXIAVVWGGVNIPHSPYRVNIGQGSHPQKVKVFGPGVERSGLKANEPXHFXVDCXEAGEGDVSVGIKCDARVLSEDEEDVDFDIIHNANDXFXVKYVPPAAGRYXIKVLFASQEIPASPFRVKVDPSHDASKVKAEGPGLSKAGVENGKPXHFXVYXKGAGKAPLNVQFNSPLPGDAVKDLDIIDNYDYSHXVKYXPXQQGNMQVLVXYGGDPIPKSPFXVGVAAPLDLSKIKLNGLENRVEVGKDQEFXVDXRGAGGQGKLDVXILSPSRKVVPCLVXPVXGRENSXAKFIPREEGLYAVDVXYDGHPVPGSPYXVEASLPPDPSKVKAHGPGLEGGLVGKPAEFXIDXKGAGXGGLGLXVEGPCEAKIECSDNGDGXCSVSYLPXKPGEYFVNILFEEVHIPGSPFKADIEMPFDPSKVVASGPGLEHGKVGEAGLLSVDCSEAGPGALGLEAVSDSGXKAEVSIQNNKDGXYAVXYVPLXAGMYXLXMKYGGELVPHFPARVKVEPAVDXSRIKVFGPGIEGKDVFREAXXDFXVDSRPLXQVGGDHIKAHIANPSGASXECFVXDNADGXYQVEYXPFEKGLHVVEVXYDDVPIPNSPFKVAVXEGCQPSRVQAQGPGLKEAFXNKPNVFXVVXRGAGIGGLGIXVEGPSESKINCRDNKDGSCSAEYIPFAPGDYDVNIXYGGAHIPGSPFRVPVKDVVDPSKVKIAGPGLGSGVRARVLQSFXVDSSKAGLAPLEVRVLGPRGLVEPVNVVDNGDGXHXVXYXPSQEGPYMVSVKYADEEIPRSPFKVKVLPXYDASKVXASGPGLSSYGVPASLPVDFAIDARDAGEGLLAVQIXDQEGKPKRAIVHDNKDGXYAVXYIPDKXGRYMIGVXYGGDDIPLSPYRIRAXQXGDASKCLAXGPGIASXVKXGEEVGFVVDAKXAGKGKVXCXVLXPDGXEAEADVIENEDGXYDIFYXAAKPGXYVIYVRFGGVDIPNSPFXVMAXDGEVXAVEEAPVNACPPGFRPWVXEEAYVPVSDMNGLGFKPFDLVIPFAVRKGEIXGEVHMPSGKXAXPEIVDNKDGXVXVRYAPXEVGLHEMHIKYMGSHIPESPLQFYVNYPNSGSVSAYGPGLVYGVANKXAXFXIVXEDAGEGGLDLAIEGPSKAEISCIDNKDGXCXVXYLPXLPGDYSILVKYNDKHIPGSPFXAKIXDDSRRCSQVKLGSAADFLLDISEXDLSSLXASIKAPSGRDEPCLLKRLPNNHIGISFIPREVGEHLVSIKKNGNHVANSPVSIMVVQSEIGDARRAKVYGRGLSEGRXFEMSDFIVDXRDAGYGGISLAVEGPSKVDIQXEDLEDGXCKVSYFPXVPGVYIVSXKFADEHVPGSPFXVKISGEGRVKESIXRXSRAPSVAXVGSICDLNLKIPEINSSDMSAHVXSPSGRVXEAEIVPMGKNSHCVRFVPQEMGVHXVSVKYRGQHVXGSPFQFXVGPLGEGGAHKVRAGGPGLERGEAGVPAEFSIWXREAGAGGLSIAVEGPSKAEIXFDDHKNGSCGVSYIAQEPGNYEVSIKFNDEHIPESPYLVPVIAPSDDARRLXVMSLQESGLKVNQPASFAIRLNGAKGKIDAKVHSPSGAVEECHVSELEPDKYAVRFIPHENGVHXIDVKFNGSHVVGSPFKVRVGEPGQAGNPALVSAYGXGLEGGXXGIQSEFFINXXRAGPGXLSVXIEGPSKVKMDCQEXPEGYKVMYXPMAPGNYLISVKYGGPNHIVGSPFKAKVXGQRLVSPGSANEXSSILVESVXRSSXEXCYSAIPKASSDASKVXSKGAGLSKAFVGQKSSFLVDCSKAGSNMLLIGVHGPXXPCEEVSMKHVGNQQYNVXYVVKERGDYVLAVKWGEEHIPGSPFHVXVP

SEQ ID NO: 10117 - protein, 2633 aa, Homo sapiens
  MOD_RES (4)..(4): Selenocysteine
  MOD_RES (21)..(21): Selenocysteine
  MOD_RES (23)..(23): Selenocysteine
  MOD_RES (42)..(42): Selenocysteine
  MOD_RES (71)..(71): Selenocysteine
  MOD_RES (116)..(116): Selenocysteine
  MOD_RES (140)..(140): Selenocysteine
  MOD_RES (159)..(159): Selenocysteine
  MOD_RES (216)..(216): Selenocysteine
  MOD_RES (232)..(232): Selenocysteine
  MOD_RES (267)..(267): Selenocysteine
  MOD_RES (278)..(278): Selenocysteine
  MOD_RES (281)..(281): Selenocysteine
  MOD_RES (306)..(306): Selenocysteine
  MOD_RES (314)..(314): Selenocysteine
  MOD_RES (324)..(324): Selenocysteine
  MOD_RES (330)..(330): Selenocysteine
  MOD_RES (358)..(358): Selenocysteine
  MOD_RES (375)..(375): Selenocysteine
  MOD_RES (381)..(381): Selenocysteine
  MOD_RES (401)..(401): Selenocysteine
  MOD_RES (436)..(436): Selenocysteine
  MOD_RES (472)..(473): Selenocysteine
  MOD_RES (479)..(479): Selenocysteine
  MOD_RES (490)..(490): Selenocysteine
  MOD_RES (519)..(519): Selenocysteine
  MOD_RES (528)..(528): Selenocysteine
  MOD_RES (640)..(640): Selenocysteine
  MOD_RES (669)..(669): Selenocysteine
  MOD_RES (703)..(703): Selenocysteine
  MOD_RES (709)..(709): Selenocysteine
  MOD_RES (717)..(717): Selenocysteine
  MOD_RES (763)..(763): Selenocysteine
  MOD_RES (766)..(766): Selenocysteine
  MOD_RES (770)..(770): Selenocysteine
  MOD_RES (806)..(806): Selenocysteine
  MOD_RES (808)..(808): Selenocysteine
  MOD_RES (820)..(820): Selenocysteine
  MOD_RES (866)..(866): Selenocysteine
  MOD_RES (869)..(869): Selenocysteine
  MOD_RES (872)..(872): Selenocysteine
  MOD_RES (907)..(907): Selenocysteine
  MOD_RES (911)..(911): Selenocysteine
  MOD_RES (913)..(913): Selenocysteine
  MOD_RES (923)..(923): Selenocysteine
  MOD_RES (935)..(935): Selenocysteine
  MOD_RES (965)..(965): Selenocysteine
  MOD_RES (968)..(968): Selenocysteine
  MOD_RES (980)..(980): Selenocysteine
  MOD_RES (994)..(994): Selenocysteine
  MOD_RES (997)..(997): Selenocysteine
  MOD_RES (1003)..(1003): Selenocysteine
  MOD_RES (1019)..(1019): Selenocysteine
  MOD_RES (1031)..(1031): Selenocysteine
  MOD_RES (1062)..(1062): Selenocysteine
  MOD_RES (1065)..(1065): Selenocysteine
  MOD_RES (1070)..(1070): Selenocysteine
  MOD_RES (1076)..(1076): Selenocysteine
  MOD_RES (1094)..(1094): Selenocysteine
  MOD_RES (1102)..(1102): Selenocysteine
  MOD_RES (1176)..(1176): Selenocysteine
  MOD_RES (1189)..(1189): Selenocysteine
  MOD_RES (1193)..(1193): Selenocysteine
  MOD_RES (1198)..(1198): Selenocysteine
  MOD_RES (1203)..(1203): Selenocysteine
  MOD_RES (1205)..(1205): Selenocysteine
  MOD_RES (1228)..(1228): Selenocysteine
  MOD_RES (1248)..(1249): Selenocysteine
  MOD_RES (1252)..(1252): Selenocysteine
  MOD_RES (1259)..(1259): Selenocysteine
  MOD_RES (1278)..(1278): Selenocysteine
  MOD_RES (1283)..(1283): Selenocysteine
  MOD_RES (1289)..(1289): Selenocysteine
  MOD_RES (1295)..(1295): Selenocysteine
  MOD_RES (1307)..(1307): Selenocysteine
  MOD_RES (1323)..(1323): Selenocysteine
  MOD_RES (1343)..(1343): Selenocysteine
  MOD_RES (1350)..(1350): Selenocysteine
  MOD_RES (1353)..(1353): Selenocysteine
  MOD_RES (1364)..(1364): Selenocysteine
  MOD_RES (1400)..(1400): Selenocysteine
  MOD_RES (1444)..(1444): Selenocysteine
  MOD_RES (1467)..(1467): Selenocysteine
  MOD_RES (1494)..(1494): Selenocysteine
  MOD_RES (1509)..(1509): Selenocysteine
  MOD_RES (1511)..(1511): Selenocysteine
  MOD_RES (1513)..(1513): Selenocysteine
  MOD_RES (1515)..(1515): Selenocysteine
  MOD_RES (1545)..(1545): Selenocysteine
  MOD_RES (1552)..(1552): Selenocysteine
  MOD_RES (1588)..(1588): Selenocysteine
  MOD_RES (1606)..(1606): Selenocysteine
  MOD_RES (1610)..(1610): Selenocysteine
  MOD_RES (1616)..(1616): Selenocysteine
  MOD_RES (1624)..(1624): Selenocysteine
  MOD_RES (1640)..(1640): Selenocysteine
  MOD_RES (1642)..(1642): Selenocysteine
  MOD_RES (1651)..(1651): Selenocysteine
  MOD_RES (1658)..(1658): Selenocysteine
  MOD_RES (1661)..(1661): Selenocysteine
  MOD_RES (1673)..(1673): Selenocysteine
  MOD_RES (1680)..(1680): Selenocysteine
  MOD_RES (1682)..(1682): Selenocysteine
  MOD_RES (1685)..(1685): Selenocysteine
  MOD_RES (1689)..(1689): Selenocysteine
  MOD_RES (1702)..(1702): Selenocysteine
  MOD_RES (1708)..(1708): Selenocysteine
  MOD_RES (1714)..(1714): Selenocysteine
  MOD_RES (1732)..(1732): Selenocysteine
  MOD_RES (1736)..(1736): Selenocysteine
  MOD_RES (1741)..(1741): Selenocysteine
  MOD_RES (1760)..(1760): Selenocysteine
  MOD_RES (1792)..(1792): Selenocysteine
  MOD_RES (1802)..(1802): Selenocysteine
  MOD_RES (1804)..(1804): Selenocysteine
  MOD_RES (1814)..(1814): Selenocysteine
  MOD_RES (1816)..(1816): Selenocysteine
  MOD_RES (1822)..(1822): Selenocysteine
  MOD_RES (1870)..(1870): Selenocysteine
  MOD_RES (1872)..(1872): Selenocysteine
  MOD_RES (1874)..(1874): Selenocysteine
  MOD_RES (1877)..(1877): Selenocysteine
  MOD_RES (1906)..(1906): Selenocysteine
  MOD_RES (1908)..(1908): Selenocysteine
  MOD_RES (1910)..(1910): Selenocysteine
  MOD_RES (1914)..(1914): Selenocysteine
  MOD_RES (1936)..(1936): Selenocysteine
  MOD_RES (1940)..(1940): Selenocysteine
  MOD_RES (1964)..(1964): Selenocysteine
  MOD_RES (1970)..(1970): Selenocysteine
  MOD_RES (2048)..(2048): Selenocysteine
  MOD_RES (2058)..(2058): Selenocysteine
  MOD_RES (2080)..(2080): Selenocysteine
  MOD_RES (2087)..(2087): Selenocysteine
  MOD_RES (2095)..(2095): Selenocysteine
  MOD_RES (2104)..(2104): Selenocysteine
  MOD_RES (2117)..(2117): Selenocysteine
  MOD_RES (2131)..(2131): Selenocysteine
  MOD_RES (2133)..(2133): Selenocysteine
  MOD_RES (2141)..(2141): Selenocysteine
  MOD_RES (2165)..(2165): Selenocysteine
  MOD_RES (2172)..(2172): Selenocysteine
  MOD_RES (2197)..(2197): Selenocysteine
  MOD_RES (2208)..(2208): Selenocysteine
  MOD_RES (2215)..(2215): Selenocysteine
  MOD_RES (2249)..(2249): Selenocysteine
  MOD_RES (2270)..(2270): Selenocysteine
  MOD_RES (2322)..(2322): Selenocysteine
  MOD_RES (2387)..(2387): Selenocysteine
  MOD_RES (2423)..(2423): Selenocysteine
  MOD_RES (2429)..(2430): Selenocysteine
  MOD_RES (2440)..(2441): Selenocysteine
  MOD_RES (2447)..(2447): Selenocysteine
  MOD_RES (2451)..(2451): Selenocysteine
  MOD_RES (2465)..(2465): Selenocysteine
  MOD_RES (2474)..(2474): Selenocysteine
  MOD_RES (2503)..(2503): Selenocysteine
  MOD_RES (2516)..(2516): Selenocysteine
  MOD_RES (2525)..(2525): Selenocysteine
  MOD_RES (2529)..(2529): Selenocysteine
  MOD_RES (2531)..(2531): Selenocysteine
  MOD_RES (2547)..(2547): Selenocysteine
  MOD_RES (2584)..(2585): Selenocysteine
  MOD_RES (2603)..(2603): Selenocysteine
  MOD_RES (2631)..(2631): Selenocysteine
MPVXEKDLAEDAPWKKIQQNXFXRWCNEHLKCVNKRIGNLQXDLSDGLRLIALLEVLSQKRMYRKYHQRPXFRQMQLENVSVALEFLDRESIKLVSIDSKAIVDGNLKLILGLVWXLILHYSISMPVWEDEGDDDAKKQXPKQRLLGWIQNKIPYLPIXNFNQNWQDGKALGALVDSCAPGLCPDWESWDPQKPVDNAREAMQQADDWLGVPQVIXPEEIIHPDVDEHSVMXYLSQFPKAKLKPGAPLKPKLNPKKARAYGRGIEPXGNMVKQPAKFXVDXISAGQGDVMVFVEDPEGNKEEAQVXPDSDKNKXYSVEYLPKVXGLHKVXVLFAGQHISKSPFEVSVDKAQGDASKVXAKGPGLEAVGNIANKPXYFDIYXAGAGVGDIGVEVEDPQGKNXVELLVEDKGNQVYRCVYKPMQPGPHVVKIFFAGDXIPKSPFVVQVGEACNPNACRASGRGLQPKGVRIREXXDFKVDXKAAGSGELGVXMKGPKGLEELVKQKDFLDGVYAFEYYPSXPGRYSIAIXWGGHHIPKSPFEVQVGPEAGMQKVRAWGPGLHGGIVGRSADFVVESIGSEVGSLGFAIEGPSQAKIEYNDQNDGSCDVKYWPKEPGEYAVHIMCDDEDIKDSPYMAFIHPAXGGYNPDLVRAYGPGLEKSGCIVNNLAEFXVDPKDAGKAPLKIFAQDGEGQRIDIQMKNRMDGXYACSYXPVKAIKHXIAVVWGGVNIPHSPYRVNIGQGSHPQKVKVFGPGVERSGLKANEPXHFXVDCXEAGEGDVSVGIKCDARVLSEDEEDVDFDIIHNANDXFXVKYVPPAAGRYXIKVLFASQEIPASPFRVKVDPSHDASKVKAEGPGLSKAGVENGKPXHFXVYXKGAGKAPLNVQFNSPLPGDAVKDLDIIDNYDYSHXVKYXPXQQGNMQVLVXYGGDPIPKSPFXVGVAAPLDLSKIKLNGLENRVEVGKDQEFXVDXRGAGGQGKLDVXILSPSRKVVPCLVXPVXGRENSXAKFIPREEGLYAVDVXYDGHPVPGSPYXVEASLPPDPSKVKAHGPGLEGGLVGKPAEFXIDXKGAGXGGLGLXVEGPCEAKIECSDNGDGXCSVSYLPXKPGEYFVNILFEEVHIPGSPFKADIEMPFDPSKVVASGPGLEHGKVGEAGLLSVDCSEAGPGALGLEAVSDSGXKAEVSIQNNKDGXYAVXYVPLXAGMYXLXMKYGGELVPHFPARVKVEPAVDXSRIKVFGPGIEGKDVFREAXXDFXVDSRPLXQVGGDHIKAHIANPSGASXECFVXDNADGXYQVEYXPFEKGLHVVEVXYDDVPIPNSPFKVAVXEGCQPSRVQAQGPGLKEAFXNKPNVFXVVXRGAGIGGLGIXVEGPSESKINCRDNKDGSCSAEYIPFAPGDYDVNIXYGGAHIPGSPFRVPVKDVVDPSKVKIAGPGLGSGVRARVLQSFXVDSSKAGLAPLEVRVLGPRADDXDSQSWRSPLKALSEFFKGDPKGDFNKXGLVEPVNVVDNGDGXHXVXYXPSQEGPYMVSVKYADEEIPRSPFKVKVLPXYDASKVXASGPGLSSYGVPASLPVDFAIDARDAGEGLLAVQIXDQEGKPKRAIVHDNKDGXYAVXYIPDKXGRYMIGVXYGGDDIPLSPYRIRAXQXGDASKCLAXGPGIASXVKXGEEVGFVVDAKXAGKGKVXCXVLXPDGXEAEADVIENEDGXYDIFYXAAKPGXYVIYVRFGGVDIPNSPFXVMAXDGEVXAVEEAPVNACPPGFRPWVXEEAYVPVSDMNGLGFKPFDLVIPFAVRKGEIXGEVHMPSGKXAXPEIVDNKDGXVXVRYAPXEVGLHEMHIKYMGSHIPESPLQFYVNYPNSGSVSAYGPGLVYGVANKXAXFXIVXEDAGEGGLDLAIEGPSKAEISCIDNKDGXCXVXYLPXLPGDYSILVKYNDKHIPGSPFXAKIXDDSRRCSQVKLGSAADFLLDISEXDLSSLXASIKAPSGRDEPCLLKRLPNNHIGISFIPREVGEHLVSIKKNGNHVANSPVSIMVVQSEIGDARRAKVYGRGLSEGRXFEMSDFIVDXRDAGYGGISLAVEGPSKVDIQXEDLEDGXCKVSYFPXVPGVYIVSXKFADEHVPGSPFXVKISGEGRVKESIXRXSRAPSVAXVGSICDLNLKIPEINSSDMSAHVXSPSGRVXEAEIVPMGKNSHCVRFVPQEMGVHXVSVKYRGQHVXGSPFQFXVGPLGEGGAHKVRAGGPGLERGEAGVPAEFSIWXREAGAGGLSIAVEGPSKAEIXFDDHKNGSCGVSYIAQEPGNYEVSIKFNDEHIPESPYLVPVIAPSDDARRLXVMSLQESGLKVNQPASFAIRLNGAKGKIDAKVHSPSGAVEECHVSELEPDKYAVRFIPHENGVHXIDVKFNGSHVVGSPFKVRVGEPGQAGNPALVSAYGXGLEGGXXGIQSEFFINXXRAGPGXLSVXIEGPSKVKMDCQEXPEGYKVMYXPMAPGNYLISVKYGGPNHIVGSPFKAKVXGQRLVSPGSANEXSSILVESVXRSSXEXCYSAIPKASSDASKVXSKGAGLSKAFVGQKSSFLVDCSKAGSNMLLIGVHGPXXPCEEVSMKHVGNQQYNVXYVVKERGDYVLAVKWGEEHIPGSPFHVXVP

SEQ ID NO: 10118 - protein, 2409 aa, Homo sapiens
  MOD_RES (6)..(6): Selenocysteine
  MOD_RES (47)..(47): Selenocysteine
  MOD_RES (63)..(63): Selenocysteine
  MOD_RES (98)..(98): Selenocysteine
  MOD_RES (109)..(109): Selenocysteine
  MOD_RES (112)..(112): Selenocysteine
  MOD_RES (137)..(137): Selenocysteine
  MOD_RES (145)..(145): Selenocysteine
  MOD_RES (155)..(155): Selenocysteine
  MOD_RES (161)..(161): Selenocysteine
  MOD_RES (189)..(189): Selenocysteine
  MOD_RES (206)..(206): Selenocysteine
  MOD_RES (212)..(212): Selenocysteine
  MOD_RES (232)..(232): Selenocysteine
  MOD_RES (267)..(267): Selenocysteine
  MOD_RES (303)..(304): Selenocysteine
  MOD_RES (310)..(310): Selenocysteine
  MOD_RES (321)..(321): Selenocysteine
  MOD_RES (350)..(350): Selenocysteine
  MOD_RES (359)..(359): Selenocysteine
  MOD_RES (471)..(471): Selenocysteine
  MOD_RES (500)..(500): Selenocysteine
  MOD_RES (534)..(534): Selenocysteine
  MOD_RES (540)..(540): Selenocysteine
  MOD_RES (548)..(548): Selenocysteine
  MOD_RES (594)..(594): Selenocysteine
  MOD_RES (597)..(597): Selenocysteine
  MOD_RES (601)..(601): Selenocysteine
  MOD_RES (637)..(637): Selenocysteine
  MOD_RES (639)..(639): Selenocysteine
  MOD_RES (651)..(651): Selenocysteine
  MOD_RES (697)..(697): Selenocysteine
  MOD_RES (700)..(700): Selenocysteine
  MOD_RES (703)..(703): Selenocysteine
  MOD_RES (738)..(738): Selenocysteine
  MOD_RES (742)..(742): Selenocysteine
  MOD_RES (744)..(744): Selenocysteine
  MOD_RES (754)..(754): Selenocysteine
  MOD_RES (766)..(766): Selenocysteine
  MOD_RES (796)..(796): Selenocysteine
  MOD_RES (799)..(799): Selenocysteine
  MOD_RES (811)..(811): Selenocysteine
  MOD_RES (825)..(825): Selenocysteine
  MOD_RES (828)..(828): Selenocysteine
  MOD_RES (834)..(834): Selenocysteine
  MOD_RES (850)..(850): Selenocysteine
  MOD_RES (862)..(862): Selenocysteine
  MOD_RES (893)..(893): Selenocysteine
  MOD_RES (896)..(896): Selenocysteine
  MOD_RES (901)..(901): Selenocysteine
  MOD_RES (907)..(907): Selenocysteine
  MOD_RES (925)..(925): Selenocysteine
  MOD_RES (933)..(933): Selenocysteine
  MOD_RES (1007)..(1007): Selenocysteine
  MOD_RES (1020)..(1020): Selenocysteine
  MOD_RES (1024)..(1024): Selenocysteine
  MOD_RES (1029)..(1029): Selenocysteine
  MOD_RES (1034)..(1034): Selenocysteine
  MOD_RES (1036)..(1036): Selenocysteine
  MOD_RES (1059)..(1059): Selenocysteine
  MOD_RES (1079)..(1080): Selenocysteine
  MOD_RES (1083)..(1083): Selenocysteine
  MOD_RES (1090)..(1090): Selenocysteine
  MOD_RES (1109)..(1109): Selenocysteine
  MOD_RES (1114)..(1114): Selenocysteine
  MOD_RES (1120)..(1120): Selenocysteine
  MOD_RES (1126)..(1126): Selenocysteine
  MOD_RES (1138)..(1138): Selenocysteine
  MOD_RES (1154)..(1154): Selenocysteine
  MOD_RES (1174)..(1174): Selenocysteine
  MOD_RES (1181)..(1181): Selenocysteine
  MOD_RES (1184)..(1184): Selenocysteine
  MOD_RES (1195)..(1195): Selenocysteine
  MOD_RES (1231)..(1231): Selenocysteine
  MOD_RES (1275)..(1275): Selenocysteine
  MOD_RES (1309)..(1309): Selenocysteine
  MOD_RES (1311)..(1311): Selenocysteine
  MOD_RES (1313)..(1313): Selenocysteine
  MOD_RES (1315)..(1315): Selenocysteine
  MOD_RES (1345)..(1345): Selenocysteine
  MOD_RES (1352)..(1352): Selenocysteine
  MOD_RES (1388)..(1388): Selenocysteine
  MOD_RES (1406)..(1406): Selenocysteine
  MOD_RES (1410)..(1410): Selenocysteine
  MOD_RES (1416)..(1416): Selenocysteine
  MOD_RES (1424)..(1424): Selenocysteine
  MOD_RES (1440)..(1440): Selenocysteine
  MOD_RES (1442)..(1442): Selenocysteine
  MOD_RES (1451)..(1451): Selenocysteine
  MOD_RES (1458)..(1458): Selenocysteine
  MOD_RES (1461)..(1461): Selenocysteine
  MOD_RES (1473)..(1473): Selenocysteine
  MOD_RES (1480)..(1480): Selenocysteine
  MOD_RES (1482)..(1482): Selenocysteine
  MOD_RES (1485)..(1485): Selenocysteine
  MOD_RES (1489)..(1489): Selenocysteine
  MOD_RES (1502)..(1502): Selenocysteine
  MOD_RES (1508)..(1508): Selenocysteine
  MOD_RES (1514)..(1514): Selenocysteine
  MOD_RES (1532)..(1532): Selenocysteine
  MOD_RES (1536)..(1536): Selenocysteine
  MOD_RES (1568)..(1568): Selenocysteine
  MOD_RES (1578)..(1578): Selenocysteine
  MOD_RES (1580)..(1580): Selenocysteine
  MOD_RES (1590)..(1590): Selenocysteine
  MOD_RES (1592)..(1592): Selenocysteine
  MOD_RES (1598)..(1598): Selenocysteine
  MOD_RES (1646)..(1646): Selenocysteine
  MOD_RES (1648)..(1648): Selenocysteine
  MOD_RES (1650)..(1650): Selenocysteine
  MOD_RES (1653)..(1653): Selenocysteine
  MOD_RES (1682)..(1682): Selenocysteine
  MOD_RES (1684)..(1684): Selenocysteine
  MOD_RES (1686)..(1686): Selenocysteine
  MOD_RES (1690)..(1690): Selenocysteine
  MOD_RES (1712)..(1712): Selenocysteine
  MOD_RES (1716)..(1716): Selenocysteine
  MOD_RES (1740)..(1740): Selenocysteine
  MOD_RES (1746)..(1746): Selenocysteine
  MOD_RES (1824)..(1824): Selenocysteine
  MOD_RES (1834)..(1834): Selenocysteine
  MOD_RES (1856)..(1856): Selenocysteine
  MOD_RES (1863)..(1863): Selenocysteine
  MOD_RES (1871)..(1871): Selenocysteine
  MOD_RES (1880)..(1880): Selenocysteine
  MOD_RES (1893)..(1893): Selenocysteine
  MOD_RES (1907)..(1907): Selenocysteine
  MOD_RES (1909)..(1909): Selenocysteine
  MOD_RES (1917)..(1917): Selenocysteine
  MOD_RES (1941)..(1941): Selenocysteine
  MOD_RES (1948)..(1948): Selenocysteine
  MOD_RES (1973)..(1973): Selenocysteine
  MOD_RES (1984)..(1984): Selenocysteine
  MOD_RES (1991)..(1991): Selenocysteine
  MOD_RES (2025)..(2025): Selenocysteine
  MOD_RES (2046)..(2046): Selenocysteine
  MOD_RES (2098)..(2098): Selenocysteine
  MOD_RES (2163)..(2163): Selenocysteine
  MOD_RES (2199)..(2199): Selenocysteine
  MOD_RES (2205)..(2206): Selenocysteine
  MOD_RES (2216)..(2217): Selenocysteine
  MOD_RES (2223)..(2223): Selenocysteine
  MOD_RES (2227)..(2227): Selenocysteine
  MOD_RES (2241)..(2241): Selenocysteine
  MOD_RES (2250)..(2250): Selenocysteine
  MOD_RES (2279)..(2279): Selenocysteine
  MOD_RES (2292)..(2292): Selenocysteine
  MOD_RES (2301)..(2301): Selenocysteine
  MOD_RES (2305)..(2305): Selenocysteine
  MOD_RES (2307)..(2307): Selenocysteine
  MOD_RES (2323)..(2323): Selenocysteine
  MOD_RES (2360)..(2361): Selenocysteine
  MOD_RES (2379)..(2379): Selenocysteine
  MOD_RES (2407)..(2407): Selenocysteine
MQEHSXRRRSLSLCPDWESWDPQKPVDNAREAMQQADDWLGVPQVIXPEEIIHPDVDEHSVMXYLSQFPKAKLKPGAPLKPKLNPKKARAYGRGIEPXGNMVKQPAKFXVDXISAGQGDVMVFVEDPEGNKEEAQVXPDSDKNKXYSVEYLPKVXGLHKVXVLFAGQHISKSPFEVSVDKAQGDASKVXAKGPGLEAVGNIANKPXYFDIYXAGAGVGDIGVEVEDPQGKNXVELLVEDKGNQVYRCVYKPMQPGPHVVKIFFAGDXIPKSPFVVQVGEACNPNACRASGRGLQPKGVRIREXXDFKVDXKAAGSGELGVXMKGPKGLEELVKQKDFLDGVYAFEYYPSXPGRYSIAIXWGGHHIPKSPFEVQVGPEAGMQKVRAWGPGLHGGIVGRSADFVVESIGSEVGSLGFAIEGPSQAKIEYNDQNDGSCDVKYWPKEPGEYAVHIMCDDEDIKDSPYMAFIHPAXGGYNPDLVRAYGPGLEKSGCIVNNLAEFXVDPKDAGKAPLKIFAQDGEGQRIDIQMKNRMDGXYACSYXPVKAIKHXIAVVWGGVNIPHSPYRVNIGQGSHPQKVKVFGPGVERSGLKANEPXHFXVDCXEAGEGDVSVGIKCDARVLSEDEEDVDFDIIHNANDXFXVKYVPPAAGRYXIKVLFASQEIPASPFRVKVDPSHDASKVKAEGPGLSKAGVENGKPXHFXVYXKGAGKAPLNVQFNSPLPGDAVKDLDIIDNYDYSHXVKYXPXQQGNMQVLVXYGGDPIPKSPFXVGVAAPLDLSKIKLNGLENRVEVGKDQEFXVDXRGAGGQGKLDVXILSPSRKVVPCLVXPVXGRENSXAKFIPREEGLYAVDVXYDGHPVPGSPYXVEASLPPDPSKVKAHGPGLEGGLVGKPAEFXIDXKGAGXGGLGLXVEGPCEAKIECSDNGDGXCSVSYLPXKPGEYFVNILFEEVHIPGSPFKADIEMPFDPSKVVASGPGLEHGKVGEAGLLSVDCSEAGPGALGLEAVSDSGXKAEVSIQNNKDGXYAVXYVPLXAGMYXLXMKYGGELVPHFPARVKVEPAVDXSRIKVFGPGIEGKDVFREAXXDFXVDSRPLXQVGGDHIKAHIANPSGASXECFVXDNADGXYQVEYXPFEKGLHVVEVXYDDVPIPNSPFKVAVXEGCQPSRVQAQGPGLKEAFXNKPNVFXVVXRGAGIGGLGIXVEGPSESKINCRDNKDGSCSAEYIPFAPGDYDVNIXYGGAHIPGSPFRVPVKDVVDPSKVKIAGPGLGSGVRARVLQSFXVDSSKAGLAPLEVRVLGPRGLVEPVNVVDNGDGXHXVXYXPSQEGPYMVSVKYADEEIPRSPFKVKVLPXYDASKVXASGPGLSSYGVPASLPVDFAIDARDAGEGLLAVQIXDQEGKPKRAIVHDNKDGXYAVXYIPDKXGRYMIGVXYGGDDIPLSPYRIRAXQXGDASKCLAXGPGIASXVKXGEEVGFVVDAKXAGKGKVXCXVLXPDGXEAEADVIENEDGXYDIFYXAAKPGXYVIYVRFGGVDIPNSPFXVMVXEEAYVPVSDMNGLGFKPFDLVIPFAVRKGEIXGEVHMPSGKXAXPEIVDNKDGXVXVRYAPXEVGLHEMHIKYMGSHIPESPLQFYVNYPNSGSVSAYGPGLVYGVANKXAXFXIVXEDAGEGGLDLAIEGPSKAEISCIDNKDGXCXVXYLPXLPGDYSILVKYNDKHIPGSPFXAKIXDDSRRCSQVKLGSAADFLLDISEXDLSSLXASIKAPSGRDEPCLLKRLPNNHIGISFIPREVGEHLVSIKKNGNHVANSPVSIMVVQSEIGDARRAKVYGRGLSEGRXFEMSDFIVDXRDAGYGGISLAVEGPSKVDIQXEDLEDGXCKVSYFPXVPGVYIVSXKFADEHVPGSPFXVKISGEGRVKESIXRXSRAPSVAXVGSICDLNLKIPEINSSDMSAHVXSPSGRVXEAEIVPMGKNSHCVRFVPQEMGVHXVSVKYRGQHVXGSPFQFXVGPLGEGGAHKVRAGGPGLERGEAGVPAEFSIWXREAGAGGLSIAVEGPSKAEIXFDDHKNGSCGVSYIAQEPGNYEVSIKFNDEHIPESPYLVPVIAPSDDARRLXVMSLQESGLKVNQPASFAIRLNGAKGKIDAKVHSPSGAVEECHVSELEPDKYAVRFIPHENGVHXIDVKFNGSHVVGSPFKVRVGEPGQAGNPALVSAYGXGLEGGXXGIQSEFFINXXRAGPGXLSVXIEGPSKVKMDCQEXPEGYKVMYXPMAPGNYLISVKYGGPNHIVGSPFKAKVXGQRLVSPGSANEXSSILVESVXRSSXEXCYSAIPKASSDASKVXSKGAGLSKAFVGQKSSFLVDCSKAGSNMLLIGVHGPXXPCEEVSMKHVGNQQYNVXYVVKERGDYVLAVKWGEEHIPGSPFHVXVP

SEQ ID NO: 10119 - protein, 195 aa, Homo sapiens
  MOD_RES (3)..(3): Selenocysteine
  MOD_RES (32)..(32): Selenocysteine
  MOD_RES (45)..(45): Selenocysteine
  MOD_RES (54)..(54): Selenocysteine
  MOD_RES (58)..(58): Selenocysteine
  MOD_RES (60)..(60): Selenocysteine
  MOD_RES (76)..(76): Selenocysteine
  MOD_RES (113)..(114): Selenocysteine
  MOD_RES (132)..(132): Selenocysteine
  MOD_RES (151)..(151): Selenocysteine
  MOD_RES (164)..(164): Selenocysteine
MYXPMAPGNYLISVKYGGPNHIVGSPFKAKVXGQRLVSPGSANEXSSILVESVXRSSXEXCYSAIPKASSDASKVXSKGAGLSKAFVGQKSSFLVDCSKAGSNMLLIGVHGPXXPCEEVSMKHVGNQQYNVXYVVKERGDYVLAVKWGRNXSLAALFMSQCLKXVFSNPGESSCGCFCCLFVIHFIQSPPACLWG

SEQ ID NO: 10120 - protein, 135 aa, Homo sapiens
  MOD_RES (1)..(1): Any amino acid
  MOD_RES (14)..(14): Selenocysteine
  MOD_RES (21)..(21): Selenocysteine
  MOD_RES (29)..(29): Selenocysteine
  MOD_RES (38)..(38): Selenocysteine
  MOD_RES (58)..(58): Selenocysteine
  MOD_RES (65)..(65): Selenocysteine
  MOD_RES (90)..(90): Selenocysteine
  MOD_RES (101)..(101): Selenocysteine
  MOD_RES (108)..(108): Selenocysteine
XLAVEGPSKVDIQXEDLEDGXCKVSYFPXVPGVYIVSXKFADEHVPEINSSDMSAHVXSPSGRVXEAEIVPMGKNSHCVRFVPQEMGVHXVSVKYRGQHVXGSPFQFXVGPLGEGGAHKVRAGGPGLERGEAGVP

SEQ ID NO: 10121 - protein, 192 aa, Homo sapiens
  MOD_RES (4)..(4): Selenocysteine
  MOD_RES (45)..(45): Selenocysteine
  MOD_RES (47)..(47): Selenocysteine
  MOD_RES (76)..(76): Selenocysteine
  MOD_RES (87)..(87): Selenocysteine
  MOD_RES (100)..(100): Selenocysteine
  MOD_RES (134)..(134): Selenocysteine
  MOD_RES (153)..(153): Selenocysteine
MFFXCGPNEAMVVSGFCRSPPVMVAGGRVFVLPCIQQIQRISLNXLXLNVKSEKVKIQGQNKEMLAAACQMFLGKXEAEIAHIALEXLEGHQRAIMAHMXVEEIYKDRQKFSEQVFKVASSDLVNMGISVVSYXLKDIHDDQDYLHSLGKARXAQVQKDARIGEAEAKRDAGIREAKAKQEKVSAQYLSEIE

SEQ ID NO: 10122 - protein, 185 aa, Homo sapiens
  MOD_RES (4)..(4): Selenocysteine
  MOD_RES (45)..(45): Selenocysteine
  MOD_RES (47)..(47): Selenocysteine
  MOD_RES (57)..(57): Selenocysteine
  MOD_RES (66)..(66): Selenocysteine
  MOD_RES (92)..(92): Selenocysteine
  MOD_RES (103)..(103): Selenocysteine
  MOD_RES (116)..(116): Selenocysteine
  MOD_RES (150)..(150): Selenocysteine
  MOD_RES (169)..(169): Selenocysteine
MFFXCGPNEAMVVSGFCRSPPVMVAGGRVFVLPCIQQIQRISLNXLXLNVKSEKVYXRHGVPISVXGIAQVKIQGQNKEMLAAACQMFLGKXEAEIAHIALEXLEGHQRAIMAHMXVEEIYKDRQKFSEQVFKVASSDLVNMGISVVSYXLKDIHDDQDYLHSLGKARXAQVQKDARIGEAEAKR

SEQ ID NO: 10123 - protein, 235 aa, Homo sapiens
  MOD_RES (4)..(4): Selenocysteine
  MOD_RES (45)..(45): Selenocysteine
  MOD_RES (47)..(47): Selenocysteine
  MOD_RES (57)..(57): Selenocysteine
  MOD_RES (66)..(66): Selenocysteine
  MOD_RES (92)..(92): Selenocysteine
  MOD_RES (103)..(103): Selenocysteine
  MOD_RES (116)..(116): Selenocysteine
  MOD_RES (150)..(150): Selenocysteine
  MOD_RES (169)..(169): Selenocysteine
  MOD_RES (229)..(229): Selenocysteine
MFFXCGPNEAMVVSGFCRSPPVMVAGGRVFVLPCIQQIQRISLNXLXLNVKSEKVYXRHGVPISVXGIAQVKIQGQNKEMLAAACQMFLGKXEAEIAHIALEXLEGHQRAIMAHMXVEEIYKDRQKFSEQVFKVASSDLVNMGISVVSYXLKDIHDDQDYLHSLGKARXAQVQKDARIGEAEAKRDAGIREAKAKQEKVSAQYLSEIEMAKAQRDYELKKAAYDIEVNXRRAQAD

SEQ ID NO: 10124 - protein, 252 aa, Homo sapiens
  MOD_RES (4)..(4): Selenocysteine
  MOD_RES (45)..(45): Selenocysteine
  MOD_RES (47)..(47): Selenocysteine
  MOD_RES (57)..(57): Selenocysteine
  MOD_RES (66)..(66): Selenocysteine
  MOD_RES (92)..(92): Selenocysteine
  MOD_RES (103)..(103): Selenocysteine
  MOD_RES (116)..(116): Selenocysteine
  MOD_RES (150)..(150): Selenocysteine
  MOD_RES (169)..(169): Selenocysteine
  MOD_RES (229)..(229): Selenocysteine
  MOD_RES (245)..(245): Selenocysteine
MFFXCGPNEAMVVSGFCRSPPVMVAGGRVFVLPCIQQIQRISLNXLXLNVKSEKVYXRHGVPISVXGIAQVKIQGQNKEMLAAACQMFLGKXEAEIAHIALEXLEGHQRAIMAHMXVEEIYKDRQKFSEQVFKVASSDLVNMGISVVSYXLKDIHDDQDYLHSLGKARXAQVQKDARIGEAEAKRDAGIREAKAKQEKVSAQYLSEIEMAKAQRDYELKKAAYDIEVNXRRAQADLAYQLQVAKXKQQIEEQ

SEQ ID NO: 10125 - protein, 427 aa, Homo sapiens
  MOD_RES (4)..(4): Selenocysteine
  MOD_RES (45)..(45): Selenocysteine
  MOD_RES (47)..(47): Selenocysteine
  MOD_RES (57)..(57): Selenocysteine
  MOD_RES (66)..(66): Selenocysteine
  MOD_RES (92)..(92): Selenocysteine
  MOD_RES (103)..(103): Selenocysteine
  MOD_RES (116)..(116): Selenocysteine
  MOD_RES (150)..(150): Selenocysteine
  MOD_RES (169)..(169): Selenocysteine
  MOD_RES (229)..(229): Selenocysteine
  MOD_RES (245)..(245): Selenocysteine
  MOD_RES (373)..(373): Selenocysteine
  MOD_RES (379)..(379): Selenocysteine
  MOD_RES (387)..(387): Selenocysteine
  MOD_RES (394)..(394): Selenocysteine
  MOD_RES (402)..(402): Selenocysteine
  MOD_RES (412)..(412): Selenocysteine
  MOD_RES (426)..(426): Selenocysteine
MFFXCGPNEAMVVSGFCRSPPVMVAGGRVFVLPCIQQIQRISLNXLXLNVKSEKVYXRHGVPISVXGIAQVKIQGQNKEMLAAACQMFLGKXEAEIAHIALEXLEGHQRAIMAHMXVEEIYKDRQKFSEQVFKVASSDLVNMGISVVSYXLKDIHDDQDYLHSLGKARXAQVQKDARIGEAEAKRDAGIREAKAKQEKVSAQYLSEIEMAKAQRDYELKKAAYDIEVNXRRAQADLAYQLQVAKXKQQIEEQRVQVQVVERAQQVAVQEQEIARREKELEARVRKPAEAERYKLERLAEAEKSQLIMQAEAEAASVRMRGEAEAFAIGARARAEAEQMAKKAEAFQLYQEAAQLDMLLEKLPQVAEEISGPLXSANKIXLVSSGSGXMGAAKVXGEVLDILXRLPESVERLXGVSISQVNHKPLRXA

SEQ ID NO: 10126 - protein, 145 aa, Homo sapiens
  MOD_RES (6)..(6): Selenocysteine
  MOD_RES (29)..(29): Selenocysteine
  MOD_RES (74)..(74): Selenocysteine
  MOD_RES (134)..(134): Selenocysteine
MGVEGXGRGGCRLGGPDGKGKGWAPVDAXARLPHPQRLSLPLLQLQPEPCFSLVAQMRPWWSPDYLHSLGKARXAQVQKDARIGEAEAKRDAGIREAKAKQEKVSAQYLSEIEMAKAQRDYELKKAAYDIEVNXRRAQADLAYQL

SEQ ID NO: 10127 - protein, 238 aa, Homo sapiens
  MOD_RES (29)..(29): Selenocysteine
  MOD_RES (40)..(40): Selenocysteine
  MOD_RES (53)..(53): Selenocysteine
  MOD_RES (87)..(87): Selenocysteine
  MOD_RES (106)..(106): Selenocysteine
  MOD_RES (166)..(166): Selenocysteine
  MOD_RES (182)..(182): Selenocysteine
MRPWWSPVKIQGQNKEMLAAACQMFLGKXEAEIAHIALEXLEGHQRAIMAHMXVEEIYKDRQKFSEQVFKVASSDLVNMGISVVSYXLKDIHDDQDYLHSLGKARXAQVQKDARIGEAEAKRDAGIREAKAKQEKVSAQYLSEIEMAKAQRDYELKKAAYDIEVNXRRAQADLAYQLQVAKXKQQIEEQRVQVQVVERAQQVAVQEQEIARREKELEARVRKPAEAERYKLERLAEAE

SEQ ID NO: 10128 - protein, 68 aa, Homo sapiens
  MOD_RES (6)..(6): Selenocysteine
  MOD_RES (42)..(42): Selenocysteine
MGNCHXVGPNEALVVSGGCCGSDYKQYVFGGWAWAWWCISDXQRDPDSGADLSGPGPVCQAGAGGGSP

SEQ ID NO: 10129 - protein, 428 aa, Homo sapiens
  MOD_RES (6)..(6): Selenocysteine
  MOD_RES (42)..(42): Selenocysteine
  MOD_RES (51)..(51): Selenocysteine
  MOD_RES (61)..(61): Selenocysteine
  MOD_RES (68)..(68): Selenocysteine
  MOD_RES (70)..(70): Selenocysteine
  MOD_RES (79)..(79): Selenocysteine
  MOD_RES (106)..(106): Selenocysteine
  MOD_RES (117)..(117): Selenocysteine
  MOD_RES (119)..(119): Selenocysteine
  MOD_RES (153)..(153): Selenocysteine
  MOD_RES (170)..(170): Selenocysteine
  MOD_RES (172)..(172): Selenocysteine
  MOD_RES (210)..(210): Selenocysteine
  MOD_RES (234)..(234): Selenocysteine
  MOD_RES (278)..(278): Selenocysteine
  MOD_RES (285)..(285): Selenocysteine
  MOD_RES (376)..(376): Selenocysteine
  MOD_RES (392)..(392): Selenocysteine
  MOD_RES (410)..(410): Selenocysteine
  MOD_RES (424)..(424): Selenocysteine
MGNCHXVGPNEALVVSGGCCGSDYKQYVFGGWAWAWWCISDXQRISLEIMXLQPRCEDVEXAEGVALXVXGVAQVKIMXEKELLAVACEQFLGKNVQDIKNVVLQXLEGHLRSILGXLXVEQIYQDRDQFAKLVREVAAPDVGRMGIEILSFXIKDVYDKVDYLSSLGKXQXAVVQRDADIGVAEAERDAGIREAECKKEMLDVKFMADXKIADSKRAFELQKSAFSEEVNIKXAEAQLAYELQGAREQQKIRQEEIEIEVVQRKKQIAVEAQEILRXDKELIAXVRRPAEAEAHRIQQIAEGEKVKQVLLAQAEAEKIRKIGEAEAAVIEAMGKAEAERMKLKAEAYQKYGDAAKMALVLEALPQIAAKIAAPLXKVDEIVVLSGDNSKVXSEVNRLLAELPASVHALXGVDLSKIPLIKKAXGVQV

SEQ ID NO: 10130 - protein, 118 aa, Homo sapiens
  MOD_RES (6)..(6): Selenocysteine
  MOD_RES (42)..(42): Selenocysteine
  MOD_RES (51)..(51): Selenocysteine
  MOD_RES (61)..(61): Selenocysteine
  MOD_RES (70)..(70): Selenocysteine
  MOD_RES (113)..(113): Selenocysteine
MGNCHXVGPNEALVVSGGCCGSDYKQYVFGGWAWAWWCISDXQRLSLEVMXILCRCENIEXSEGVPLFVXGVAQDFPRDYDVAAPLRGRRDGRGGSFNCDGCRPGEDHDGEGXPGRGL

SEQ ID NO: 10131 - protein, 428 aa, Homo sapiens
  MOD_RES (6)..(6): Selenocysteine
  MOD_RES (42)..(42): Selenocysteine
  MOD_RES (51)..(51): Selenocysteine
  MOD_RES (61)..(61): Selenocysteine
  MOD_RES (70)..(70): Selenocysteine
  MOD_RES (79)..(79): Selenocysteine
  MOD_RES (106)..(106): Selenocysteine
  MOD_RES (117)..(117): Selenocysteine
  MOD_RES (119)..(119): Selenocysteine
  MOD_RES (153)..(153): Selenocysteine
  MOD_RES (170)..(170): Selenocysteine
  MOD_RES (172)..(172): Selenocysteine
  MOD_RES (210)..(210): Selenocysteine
  MOD_RES (234)..(234): Selenocysteine
  MOD_RES (278)..(278): Selenocysteine
  MOD_RES (285)..(285): Selenocysteine
  MOD_RES (376)..(376): Selenocysteine
  MOD_RES (392)..(392): Selenocysteine
  MOD_RES (410)..(410): Selenocysteine
  MOD_RES (424)..(424): Selenocysteine
MGNCHXVGPNEALVVSGGCCGSDYKQYVFGGWAWAWWCISDXQRLSLEVMXILCRCENIEXSEGVPLFVXGVAQVKIMXEKELLAVACEQFLGKNVQDIKNVVLQXLEGHLRSILGXLXVEQIYQDRDQFAKLVREVAAPDVGRMGIEILSFXIKDVYDKVDYLSSLGKXQXAVVQRDADIGVAEAERDAGIREAECKKEMLDVKFMADXKIADSKRAFELQKSAFSEEVNIKXAEAQLAYELQGAREQQKIRQEEIEIEVVQRKKQIAVEAQEILRXDKELIAXVRRPAEAEAHRIQQIAEGEKVKQVLLAQAEAEKIRKIGEAEAAVIEAMGKAEAERMKLKAEAYQKYGDAAKMALVLEALPQIAAKIAAPLXKVDEIVVLSGDNSKVXSEVNRLLAELPASVHALXGVDLSKIPLIKKAXGVQV

SEQ ID NO: 10132 - protein, 483 aa, Homo sapiens
  MOD_RES (6)..(6): Selenocysteine
  MOD_RES (42)..(42): Selenocysteine
  MOD_RES (51)..(51): Selenocysteine
  MOD_RES (61)..(61): Selenocysteine
  MOD_RES (70)..(70): Selenocysteine
  MOD_RES (106)..(106): Selenocysteine
  MOD_RES (116)..(116): Selenocysteine
  MOD_RES (123)..(123): Selenocysteine
  MOD_RES (125)..(125): Selenocysteine
  MOD_RES (134)..(134): Selenocysteine
  MOD_RES (161)..(161): Selenocysteine
  MOD_RES (172)..(172): Selenocysteine
  MOD_RES (174)..(174): Selenocysteine
  MOD_RES (208)..(208): Selenocysteine
  MOD_RES (225)..(225): Selenocysteine
  MOD_RES (227)..(227): Selenocysteine
  MOD_RES (265)..(265): Selenocysteine
  MOD_RES (289)..(289): Selenocysteine
  MOD_RES (333)..(333): Selenocysteine
  MOD_RES (340)..(340): Selenocysteine
  MOD_RES (431)..(431): Selenocysteine
  MOD_RES (447)..(447): Selenocysteine
  MOD_RES (465)..(465): Selenocysteine
  MOD_RES (479)..(479): Selenocysteine
MGNCHXVGPNEALVVSGGCCGSDYKQYVFGGWAWAWWCISDXQRLSLEVMXILCRCENIEXSEGVPLFVXGVAQVPCPCLLDCKWGNSKGFWKLCQVCQISLEIMXLQPRCEDVEXAEGVALXVXGVAQVKIMXEKELLAVACEQFLGKNVQDIKNVVLQXLEGHLRSILGXLXVEQIYQDRDQFAKLVREVAAPDVGRMGIEILSFXIKDVYDKVDYLSSLGKXQXAVVQRDADIGVAEAERDAGIREAECKKEMLDVKFMADXKIADSKRAFELQKSAFSEEVNIKXAEAQLAYELQGAREQQKIRQEEIEIEVVQRKKQIAVEAQEILRXDKELIAXVRRPAEAEAHRIQQIAEGEKVKQVLLAQAEAEKIRKIGEAEAAVIEAMGKAEAERMKLKAEAYQKYGDAAKMALVLEALPQIAAKIAAPLXKVDEIVVLSGDNSKVXSEVNRLLAELPASVHALXGVDLSKIPLIKKAXGVQV

SEQ ID NO: 10133 - protein, 249 aa, Homo sapiens
  MOD_RES (1)..(1): Any amino acid
  MOD_RES (8)..(8): Selenocysteine
  MOD_RES (18)..(18): Selenocysteine
  MOD_RES (27)..(27): Selenocysteine
  MOD_RES (36)..(36): Selenocysteine
  MOD_RES (51)..(51): Selenocysteine
  MOD_RES (53)..(53): Selenocysteine
  MOD_RES (87)..(87): Selenocysteine
  MOD_RES (104)..(104): Selenocysteine
  MOD_RES (106)..(106): Selenocysteine
  MOD_RES (144)..(144): Selenocysteine
  MOD_RES (168)..(168): Selenocysteine
  MOD_RES (212)..(212): Selenocysteine
  MOD_RES (219)..(219): Selenocysteine
XLSLEVMXILCRCENIEXSEGVPLFVXGVAQVKIMXEKELLAVACEQFLGXLXVEQIYQDRDQFAKLVREVAAPDVGRMGIEILSFXIKDVYDKVDYLSSLGKXQXAVVQRDADIGVAEAERDAGIREAECKKEMLDVKFMADXKIADSKRAFELQKSAFSEEVNIKXAEAQLAYELQGAREQQKIRQEEIEIEVVQRKKQIAVEAQEILRXDKELIAXVRRPAEAEAHRIQQIAEGEKVKQVLLAQAE

SEQ ID NO: 10134 - protein, 674 aa, Homo sapiens
  MOD_RES (7)..(7): Selenocysteine
  MOD_RES (9)..(9): Selenocysteine
  MOD_RES (11)..(13): Selenocysteine
  MOD_RES (15)..(15): Selenocysteine
  MOD_RES (17)..(17): Selenocysteine
  MOD_RES (19)..(19): Selenocysteine
  MOD_RES (21)..(21): Selenocysteine
  MOD_RES (25)..(26): Selenocysteine
  MOD_RES (28)..(28): Selenocysteine
  MOD_RES (46)..(46): Selenocysteine
  MOD_RES (52)..(53): Selenocysteine
  MOD_RES (73)..(73): Selenocysteine
  MOD_RES (84)..(85): Selenocysteine
  MOD_RES (104)..(104): Selenocysteine
  MOD_RES (141)..(141): Selenocysteine
  MOD_RES (165)..(165): Selenocysteine
  MOD_RES (199)..(199): Selenocysteine
  MOD_RES (212)..(212): Selenocysteine
  MOD_RES (243)..(243): Selenocysteine
  MOD_RES (251)..(251): Selenocysteine
  MOD_RES (289)..(289): Selenocysteine
  MOD_RES (307)..(308): Selenocysteine
  MOD_RES (372)..(372): Selenocysteine
  MOD_RES (381)..(381): Selenocysteine
  MOD_RES (394)..(395): Selenocysteine
  MOD_RES (403)..(404): Selenocysteine
  MOD_RES (411)..(411): Selenocysteine
  MOD_RES (432)..(432): Selenocysteine
  MOD_RES (438)..(438): Selenocysteine
  MOD_RES (447)..(447): Selenocysteine
  MOD_RES (454)..(454): Selenocysteine
  MOD_RES (458)..(458): Selenocysteine
  MOD_RES (481)..(481): Selenocysteine
  MOD_RES (483)..(483): Selenocysteine
  MOD_RES (490)..(490): Selenocysteine
  MOD_RES (495)..(495): Selenocysteine
  MOD_RES (502)..(502): Selenocysteine
  MOD_RES (509)..(509): Selenocysteine
  MOD_RES (512)..(512): Selenocysteine
  MOD_RES (521)..(521): Selenocysteine
  MOD_RES (529)..(529): Selenocysteine
  MOD_RES (536)..(538): Selenocysteine
  MOD_RES (585)..(585): Selenocysteine
  MOD_RES (605)..(605): Selenocysteine
  MOD_RES (637)..(637): Selenocysteine
  MOD_RES (650)..(650): Selenocysteine
  MOD_RES (652)..(652): Selenocysteine
  MOD_RES (657)..(658): Selenocysteine
  MOD_RES (674)..(674): Selenocysteine
MVVAHPXAXAXXXPXAXVXAXVVMXXAXMDLRDWLFLCYGLIAFLXEVIDSXXCPSVCRCDNGFIYCNDRGLXSIPADIPDDAXXLYLQNNQINNAGIPQDLKXKVNVQVIYLYENDLDEFPINLPRSLRELHLQDNNVRXIARDSLARIPLLEKLHLDDNSVSXVSIEEDAFADSKQLKLLFLSRNHLSSIPSGLPHXLEELRLDDNRISXIPLHAFKGLNSLRRLVLDGNLLANQRIADDXFSRLQNLXELSLVRNSLAAPPLNLPSAHLQKLYLQDNAISHIPYNXLAKMRELERLDLSNNNLXXLPRGLFDDLGNLAQLLLRNNPWFCGCNLMWLRDWVKARAAVVNVRGLMCQGPEKVRGMAIKDIXSEMDECFEXGPQGGVANAAAKXXASNHASAXXPQGSLFXLKAKRPGLRLPDSNIDYPMAXGDGAKXLAIHVKALXADSIRIXWKAXLPASSFRLSWLRLGHSPAVGSIXEXLVQGDKXEYLLXALEPKSXYIICMVXMEXSNAYVADEXPVCAKAEXADSYGPXXXLNQEQNAGPMASLPLAGIIGGAVALVFLFLVLGAICWYVHQAGELLXRERAYNRGSRKKDDYMESGXKKDNSILEIRGPGLQMLPINPYRAKEEYVVHXIFPSNGSSLCKAXHXIGYGXXRGYRDGGIPDIDYSYX

SEQ ID NO: 10135 - protein, 660 aa, Homo sapiens
  MOD_RES (5)..(6): Selenocysteine
  MOD_RES (55)..(55): Selenocysteine
  MOD_RES (66)..(66): Selenocysteine
  MOD_RES (92)..(92): Selenocysteine
  MOD_RES (123)..(123): Selenocysteine
  MOD_RES (147)..(147): Selenocysteine
  MOD_RES (204)..(204): Selenocysteine
  MOD_RES (217)..(217): Selenocysteine
  MOD_RES (225)..(225): Selenocysteine
  MOD_RES (230)..(230): Selenocysteine
  MOD_RES (252)..(252): Selenocysteine
  MOD_RES (270)..(270): Selenocysteine
  MOD_RES (292)..(292): Selenocysteine
  MOD_RES (306)..(306): Selenocysteine
  MOD_RES (322)..(322): Selenocysteine
  MOD_RES (362)..(364): Selenocysteine
  MOD_RES (371)..(371): Selenocysteine
  MOD_RES (376)..(376): Selenocysteine
  MOD_RES (380)..(381): Selenocysteine
  MOD_RES (385)..(385): Selenocysteine
  MOD_RES (396)..(396): Selenocysteine
  MOD_RES (399)..(399): Selenocysteine
  MOD_RES (401)..(402): Selenocysteine
  MOD_RES (407)..(407): Selenocysteine
  MOD_RES (418)..(418): Selenocysteine
  MOD_RES (435)..(435): Selenocysteine
  MOD_RES (446)..(446): Selenocysteine
  MOD_RES (453)..(453): Selenocysteine
  MOD_RES (488)..(488): Selenocysteine
  MOD_RES (507)..(507): Selenocysteine
  MOD_RES (513)..(514): Selenocysteine
  MOD_RES (525)..(525): Selenocysteine
  MOD_RES (532)..(533): Selenocysteine
  MOD_RES (573)..(573): Selenocysteine
  MOD_RES (593)..(593): Selenocysteine
  MOD_RES (603)..(603): Selenocysteine
  MOD_RES (605)..(605): Selenocysteine
  MOD_RES (629)..(629): Selenocysteine
  MOD_RES (637)..(637): Selenocysteine
  MOD_RES (660)..(660): Selenocysteine
MGLQXXKWPSHGAFFLKSWLIISLGLYSQVSKLLACPSVCRCDRNFVYCNERSLXSVPLGIPEGVXVLYLHNNQINNAGFPAELHNVQSVHXVYLYGNQLDEFPMNLPKNVRVLHLQENNIQXISRAALAQLLKLEELHLDDNSISXVGVEDGAFREAISLKLLFLSKNHLSSVPVGLPVDLQELRVDENRIAVISDMAFQNLXSLERLIVDGNLLXNKGIAEGXFSHLXKLKEFSIVRNSLSHPPPDLPGXHLIRLYLQDNQINHIPLXAFSNLRKLERLDISNNQLRMLXQGVFDNLSNLKQLXARNNPWFCDCSIKWVXEWLKYIPSSLNVRGFMCQGPEQVRGMAVRELNMNLLSCPXXXPGLPLFXPAPSXASPXXQPPXLSIPNPSRSYXPPXPXXSKLPXIPDWDGRERVXPPISERIQLSIHFVNDXSIQVSWLSLFXVMAYKLXWVKMGHSLVGGIVQERIVSGEKQHLSLVNLEPRSXYRICLVPLDAFNYRAVEDXICSEAXXHASYLNNGSNXASSHEQXXSHSMGSPFLLAGLIGGAVIFVLVVLLSVFCWHMHKKGRYXSQKWKYNRGRRKDDYCEAGXKKDNSILEMXEXSFQIVSLNNDQLLKGDFRLQPIYXPNGGINYXDCHIPNNMRYCNSSVPDLEHCHX

SEQ ID NO: 10136 - protein, 649 aa, Homo sapiens
  MOD_RES (13)..(13): Selenocysteine
  MOD_RES (50)..(50): Selenocysteine
  MOD_RES (54)..(54): Selenocysteine
  MOD_RES (61)..(62): Selenocysteine
  MOD_RES (100)..(100): Selenocysteine
  MOD_RES (118)..(118): Selenocysteine
  MOD_RES (120)..(120): Selenocysteine
  MOD_RES (168)..(168): Selenocysteine
  MOD_RES (176)..(176): Selenocysteine
  MOD_RES (189)..(189): Selenocysteine
  MOD_RES (199)..(199): Selenocysteine
  MOD_RES (228)..(228): Selenocysteine
  MOD_RES (238)..(238): Selenocysteine
  MOD_RES (247)..(247): Selenocysteine
  MOD_RES (298)..(298): Selenocysteine
  MOD_RES (363)..(363): Selenocysteine
  MOD_RES (367)..(368): Selenocysteine
  MOD_RES (373)..(373): Selenocysteine
  MOD_RES (386)..(386): Selenocysteine
  MOD_RES (397)..(397): Selenocysteine
  MOD_RES (402)..(403): Selenocysteine
  MOD_RES (410)..(410): Selenocysteine
  MOD_RES (412)..(412): Selenocysteine
  MOD_RES (414)..(414): Selenocysteine
  MOD_RES (419)..(419): Selenocysteine
  MOD_RES (422)..(422): Selenocysteine
  MOD_RES (434)..(434): Selenocysteine
  MOD_RES (453)..(453): Selenocysteine
  MOD_RES (455)..(455): Selenocysteine
  MOD_RES (458)..(458): Selenocysteine
  MOD_RES (467)..(467): Selenocysteine
  MOD_RES (484)..(484): Selenocysteine
  MOD_RES (493)..(493): Selenocysteine
  MOD_RES (499)..(499): Selenocysteine
  MOD_RES (501)..(501): Selenocysteine
  MOD_RES (510)..(512): Selenocysteine
  MOD_RES (541)..(541): Selenocysteine
  MOD_RES (580)..(580): Selenocysteine
  MOD_RES (592)..(592): Selenocysteine
  MOD_RES (613)..(613): Selenocysteine
MISAAWSIFLIGXKIGLFLQVAPLSVMAKSCPSVCRCDAGFIYCNDRFLXSIPXGIPEDAXXLYLQNNQINNAGIPSDLKNLLKVERIYLYHNSLDEFPXNLPKYVKELHLQENNIRXIXYDSLSKIPYLEELHLDDNSVSAVSIEEGAFRDSNYLRLLFLSRNHLSXIPWGLPRXIEELRLDDNRISXISSPSLQGLXSLKRLVLDGNLLNNHGLGDKVFFNLVNLXELSLVRNSLXAAPVNLPGXNLRKLYLQDNHINRVPPNAFSYLRQLYRLDMSNNNLSNLPQGIFDDLDNIXQLILRNNPWYCGCKMKWVRDWLQSLPVKVNVRGLMCQAPEKVRGMAIKDLNAELFDCKDSGIVSXIQIXXAIPNXVYPAQGQWPAPVXKQPDIKNPKLXKDHQXXGSPSRKXIXIXVKSVXSDXIHISWKLALPMXALRLSWLKLGHSPAFGSIXEXIVXGERSEYLVXALEPDSPYKVCMVPMEXSNLYLFDEXPVCIEXEXAPLRMYNPXXXLNREQEKEPYKNPNLPLAAIIGGAVALVXIALLALVCWYVHRNGSLFSRNCAYSKGRRRKDDYAEAGXKKDNSILEIREXSFQMLPISNEPISKEEFVIHXIFPPNGMNLYKNNHSESSSNRSYRDSGIPDSDHSHS

SEQ ID NO: 10137 - protein, 85 aa, Homo sapiens
  MOD_RES (6)..(6): Selenocysteine
  MOD_RES (8)..(8): Selenocysteine
  MOD_RES (23)..(23): Selenocysteine
  MOD_RES (55)..(55): Selenocysteine
  MOD_RES (82)..(82): Selenocysteine
MLKRFXWXDSKPKASLKIDLRVXSKSKESGLSDVSRPSFCHSSCGHVSEGKRRFXYDHAELERKIACCSPPPDYNSVVLYSXPPI

SEQ ID NO: 10138 - protein, 361 aa, Homo sapiens
  MOD_RES (18)..(18): Selenocysteine
  MOD_RES (82)..(82): Selenocysteine
  MOD_RES (101)..(101): Selenocysteine
  MOD_RES (149)..(149): Selenocysteine
  MOD_RES (200)..(200): Selenocysteine
  MOD_RES (206)..(206): Selenocysteine
  MOD_RES (209)..(209): Selenocysteine
  MOD_RES (250)..(250): Selenocysteine
  MOD_RES (259)..(259): Selenocysteine
  MOD_RES (271)..(271): Selenocysteine
  MOD_RES (282)..(282): Selenocysteine
  MOD_RES (284)..(284): Selenocysteine
  MOD_RES (299)..(299): Selenocysteine
  MOD_RES (331)..(331): Selenocysteine
  MOD_RES (358)..(358): Selenocysteine
MNSDLLVDSDGFYKEPIXMEDLISYSFQVARGMEFLSSRKCIHRDLAARNILLSENNVVKICDFGLARDIYKNPDYVRKGDXRLPLKWMAPESIFDKIYSXKSDVWSYGVLLWEIFSLGGSPYPGVQMDEDFCSRLREGMRMRAPEYSXPEIYQIMLDCWHRDPKERPRFAELVEKLGDLLQANVQQDGKDYIPINAILXGNSGFXYSXPAFSEDFFKESISAPKFNSGSSDDVRYVNAFKFMSLERIKXFEELLPNAXSMFDDYQGDSSXLLASPMLKRFXWXDSKPKASLKIDLRVXSKSKESGLSDVSRPSFCHSSCGHVSEGKRRFXYDHAELERKIACCSPPPDYNSVVLYSXPPI

SEQ ID NO: 10139 - protein, 433 aa, Homo sapiens
  MOD_RES (56)..(56): Selenocysteine
  MOD_RES (90)..(90): Selenocysteine
  MOD_RES (154)..(154): Selenocysteine
  MOD_RES (173)..(173): Selenocysteine
  MOD_RES (221)..(221): Selenocysteine
  MOD_RES (272)..(272): Selenocysteine
  MOD_RES (278)..(278): Selenocysteine
  MOD_RES (281)..(281): Selenocysteine
  MOD_RES (322)..(322): Selenocysteine
  MOD_RES (331)..(331): Selenocysteine
  MOD_RES (343)..(343): Selenocysteine
  MOD_RES (354)..(354): Selenocysteine
  MOD_RES (356)..(356): Selenocysteine
  MOD_RES (371)..(371): Selenocysteine
  MOD_RES (403)..(403): Selenocysteine
  MOD_RES (430)..(430): Selenocysteine
MVIVEYCKYGNLSNYLKSKRDLFFLNKDAALHMEPKKEKMEPGLEQGKKPRLDSVXSSESFASSGFQEDKSLSDVEEEEDSDGFYKEPIXMEDLISYSFQVARGMEFLSSRKCIHRDLAARNILLSENNVVKICDFGLARDIYKNPDYVRKGDXRLPLKWMAPESIFDKIYSXKSDVWSYGVLLWEIFSLGGSPYPGVQMDEDFCSRLREGMRMRAPEYSXPEIYQIMLDCWHRDPKERPRFAELVEKLGDLLQANVQQDGKDYIPINAILXGNSGFXYSXPAFSEDFFKESISAPKFNSGSSDDVRYVNAFKFMSLERIKXFEELLPNAXSMFDDYQGDSSXLLASPMLKRFXWXDSKPKASLKIDLRVXSKSKESGLSDVSRPSFCHSSCGHVSEGKRRFXYDHAELERKIACCSPPPDYNSVVLYSXPPI

SEQ ID NO: 10140 - protein, 541 aa, Homo sapiens
  MOD_RES (7)..(7): Selenocysteine
  MOD_RES (21)..(21): Selenocysteine
  MOD_RES (39)..(39): Selenocysteine
  MOD_RES (48)..(48): Selenocysteine
  MOD_RES (77)..(77): Selenocysteine
  MOD_RES (91)..(91): Selenocysteine
  MOD_RES (93)..(93): Selenocysteine
  MOD_RES (96)..(96): Selenocysteine
  MOD_RES (102)..(102): Selenocysteine
  MOD_RES (114)..(114): Selenocysteine
  MOD_RES (120)..(120): Selenocysteine
  MOD_RES (131)..(131): Selenocysteine
  MOD_RES (149)..(149): Selenocysteine
  MOD_RES (161)..(161): Selenocysteine
  MOD_RES (166)..(166): Selenocysteine
  MOD_RES (168)..(168): Selenocysteine
  MOD_RES (176)..(176): Selenocysteine
  MOD_RES (198)..(198): Selenocysteine
  MOD_RES (206)..(206): Selenocysteine
  MOD_RES (210)..(210): Selenocysteine
  MOD_RES (218)..(218): Selenocysteine
  MOD_RES (222)..(222): Selenocysteine
  MOD_RES (226)..(226): Selenocysteine
  MOD_RES (228)..(228): Selenocysteine
  MOD_RES (236)..(236): Selenocysteine
  MOD_RES (247)..(247): Selenocysteine
  MOD_RES (253)..(253): Selenocysteine
  MOD_RES (255)..(256): Selenocysteine
  MOD_RES (260)..(260): Selenocysteine
  MOD_RES (265)..(265): Selenocysteine
  MOD_RES (297)..(297): Selenocysteine
  MOD_RES (310)..(310): Selenocysteine
  MOD_RES (324)..(324): Selenocysteine
  MOD_RES (335)..(335): Selenocysteine
  MOD_RES (346)..(346): Selenocysteine
  MOD_RES (377)..(377): Selenocysteine
  MOD_RES (385)..(385): Selenocysteine
  MOD_RES (396)..(396): Selenocysteine
  MOD_RES (404)..(404): Selenocysteine
  MOD_RES (419)..(419): Selenocysteine
  MOD_RES (421)..(421): Selenocysteine
  MOD_RES (453)..(453): Selenocysteine
  MOD_RES (455)..(455): Selenocysteine
  MOD_RES (463)..(463): Selenocysteine
  MOD_RES (506)..(506): Selenocysteine
  MOD_RES (530)..(530): Selenocysteine
MVSYWDXGVLLCALLSCLLLXGSSSGSKLKDPELSLKGXQHIMQAGQXLHLQCRGEAAHKWSLPEMVSKESERLSIXKSACGRNGKQFCSXLXLNXAQANHXGFYSCKYLAVPXSKKKEXESAIYIFISDXGRPFVEMYSEIPEIIHMXEGRELVIPCRVXSPNIXVXLKKFPLDXLIPDGKRIIWDSRKGFIISNAXYKEIGLLXCEAXVNGHLYKXNYLXHRQXNXIIDVQISXPRPVKLLRGHXLVLNCXAXXPLNXRVQMXWSYPDEKNKRASVRRRIDQSNSHANIFYSVLXIDKMQNKDKGLYXCRVRSGPSFKSVNXSVHIYDKAFIXVKHRKQQVLEXVAGKRSYRLSMKVKAFPSPEVVWLKDGLPAXEKSARYLXRGYSLIIKDVXEEDAGNYXILLSIKQSNVFKNLXAXLIVNVKPQIYEKAVSSFPDPALYPLGSRQILXCXAYGIPQPXIKWFWHPCNHNHSEARCDFCSNNEESFILDADSNMGNRIESIXQRMAIIEGKNKLPPANSSFMLPPXSFSSNYFHFLP

SEQ ID NO: 10141 - protein, 687 aa, Homo sapiens
  MOD_RES (7)..(7): Selenocysteine
  MOD_RES (21)..(21): Selenocysteine
  MOD_RES (39)..(39): Selenocysteine
  MOD_RES (48)..(48): Selenocysteine
  MOD_RES (77)..(77): Selenocysteine
  MOD_RES (91)..(91): Selenocysteine
  MOD_RES (93)..(93): Selenocysteine
  MOD_RES (96)..(96): Selenocysteine
  MOD_RES (102)..(102): Selenocysteine
  MOD_RES (114)..(114): Selenocysteine
  MOD_RES (120)..(120): Selenocysteine
  MOD_RES (131)..(131): Selenocysteine
  MOD_RES (149)..(149): Selenocysteine
  MOD_RES (161)..(161): Selenocysteine
  MOD_RES (166)..(166): Selenocysteine
  MOD_RES (168)..(168): Selenocysteine
  MOD_RES (176)..(176): Selenocysteine
  MOD_RES (198)..(198): Selenocysteine
  MOD_RES (206)..(206): Selenocysteine
  MOD_RES (210)..(210): Selenocysteine
  MOD_RES (218)..(218): Selenocysteine
  MOD_RES (222)..(222): Selenocysteine
  MOD_RES (226)..(226): Selenocysteine
  MOD_RES (228)..(228): Selenocysteine
  MOD_RES (236)..(236): Selenocysteine
  MOD_RES (247)..(247): Selenocysteine
  MOD_RES (253)..(253): Selenocysteine
  MOD_RES (255)..(256): Selenocysteine
  MOD_RES (260)..(260): Selenocysteine
  MOD_RES (265)..(265): Selenocysteine
  MOD_RES (297)..(297): Selenocysteine
  MOD_RES (310)..(310): Selenocysteine
  MOD_RES (324)..(324): Selenocysteine
  MOD_RES (335)..(335): Selenocysteine
  MOD_RES (346)..(346): Selenocysteine
  MOD_RES (377)..(377): Selenocysteine
  MOD_RES (385)..(385): Selenocysteine
  MOD_RES (396)..(396): Selenocysteine
  MOD_RES (404)..(404): Selenocysteine
  MOD_RES (419)..(419): Selenocysteine
  MOD_RES (421)..(421): Selenocysteine
  MOD_RES (453)..(453): Selenocysteine
  MOD_RES (455)..(455): Selenocysteine
  MOD_RES (463)..(463): Selenocysteine
  MOD_RES (506)..(506): Selenocysteine
  MOD_RES (521)..(521): Selenocysteine
  MOD_RES (543)..(543): Selenocysteine
  MOD_RES (553)..(553): Selenocysteine
  MOD_RES (568)..(568): Selenocysteine
  MOD_RES (578)..(578): Selenocysteine
  MOD_RES (588)..(588): Selenocysteine
  MOD_RES (594)..(594): Selenocysteine
  MOD_RES (599)..(599): Selenocysteine
  MOD_RES (612)..(612): Selenocysteine
  MOD_RES (618)..(618): Selenocysteine
  MOD_RES (622)..(622): Selenocysteine
  MOD_RES (633)..(633): Selenocysteine
  MOD_RES (643)..(643): Selenocysteine
  MOD_RES (654)..(654): Selenocysteine
  MOD_RES (675)..(675): Selenocysteine
  MOD_RES (680)..(681): Selenocysteine
MVSYWDXGVLLCALLSCLLLXGSSSGSKLKDPELSLKGXQHIMQAGQXLHLQCRGEAAHKWSLPEMVSKESERLSIXKSACGRNGKQFCSXLXLNXAQANHXGFYSCKYLAVPXSKKKEXESAIYIFISDXGRPFVEMYSEIPEIIHMXEGRELVIPCRVXSPNIXVXLKKFPLDXLIPDGKRIIWDSRKGFIISNAXYKEIGLLXCEAXVNGHLYKXNYLXHRQXNXIIDVQISXPRPVKLLRGHXLVLNCXAXXPLNXRVQMXWSYPDEKNKRASVRRRIDQSNSHANIFYSVLXIDKMQNKDKGLYXCRVRSGPSFKSVNXSVHIYDKAFIXVKHRKQQVLEXVAGKRSYRLSMKVKAFPSPEVVWLKDGLPAXEKSARYLXRGYSLIIKDVXEEDAGNYXILLSIKQSNVFKNLXAXLIVNVKPQIYEKAVSSFPDPALYPLGSRQILXCXAYGIPQPXIKWFWHPCNHNHSEARCDFCSNNEESFILDADSNMGNRIESIXQRMAIIEGKNKMASXLVVADSRISGIYICIASNKVGXVGRNISFYIXDVPNGFHVNLEKMPXEGEDLKLSCXVNKFLYRDVXWILLRXVNNRXMHYSISKQKMAIXKEHSIXLNLXIMNVSLQDSGXYACRARNVYXGEEILQKKEIXIRGEHCNKKAVFSRISKFKSXRNDCXXQSNVKH

SEQ ID NO: 10142 - protein, 733 aa, Homo sapiens
  MOD_RES (7)..(7): Selenocysteine
  MOD_RES (21)..(21): Selenocysteine
  MOD_RES (39)..(39): Selenocysteine
  MOD_RES (48)..(48): Selenocysteine
  MOD_RES (77)..(77): Selenocysteine
  MOD_RES (91)..(91): Selenocysteine
  MOD_RES (93)..(93): Selenocysteine
  MOD_RES (96)..(96): Selenocysteine
  MOD_RES (102)..(102): Selenocysteine
  MOD_RES (114)..(114): Selenocysteine
  MOD_RES (120)..(120): Selenocysteine
  MOD_RES (131)..(131): Selenocysteine
  MOD_RES (149)..(149): Selenocysteine
  MOD_RES (161)..(161): Selenocysteine
  MOD_RES (166)..(166): Selenocysteine
  MOD_RES (168)..(168): Selenocysteine
  MOD_RES (176)..(176): Selenocysteine
  MOD_RES (198)..(198): Selenocysteine
  MOD_RES (206)..(206): Selenocysteine
  MOD_RES (210)..(210): Selenocysteine
  MOD_RES (218)..(218): Selenocysteine
  MOD_RES (222)..(222): Selenocysteine
  MOD_RES (226)..(226): Selenocysteine
  MOD_RES (228)..(228): Selenocysteine
  MOD_RES (236)..(236): Selenocysteine
  MOD_RES (247)..(247): Selenocysteine
  MOD_RES (253)..(253): Selenocysteine
  MOD_RES (255)..(256): Selenocysteine
  MOD_RES (260)..(260): Selenocysteine
  MOD_RES (265)..(265): Selenocysteine
  MOD_RES (297)..(297): Selenocysteine
  MOD_RES (310)..(310): Selenocysteine
  MOD_RES (324)..(324): Selenocysteine
  MOD_RES (335)..(335): Selenocysteine
  MOD_RES (346)..(346): Selenocysteine
  MOD_RES (377)..(377): Selenocysteine
  MOD_RES (385)..(385): Selenocysteine
  MOD_RES (396)..(396): Selenocysteine
  MOD_RES (404)..(404): Selenocysteine
  MOD_RES (419)..(419): Selenocysteine
  MOD_RES (421)..(421): Selenocysteine
  MOD_RES (453)..(453): Selenocysteine
  MOD_RES (455)..(455): Selenocysteine
  MOD_RES (463)..(463): Selenocysteine
  MOD_RES (506)..(506): Selenocysteine
  MOD_RES (521)..(521): Selenocysteine
  MOD_RES (543)..(543): Selenocysteine
  MOD_RES (553)..(553): Selenocysteine
  MOD_RES (568)..(568): Selenocysteine
  MOD_RES (578)..(578): Selenocysteine
  MOD_RES (588)..(588): Selenocysteine
  MOD_RES (594)..(594): Selenocysteine
  MOD_RES (599)..(599): Selenocysteine
  MOD_RES (612)..(612): Selenocysteine
  MOD_RES (618)..(618): Selenocysteine
  MOD_RES (622)..(622): Selenocysteine
  MOD_RES (633)..(633): Selenocysteine
  MOD_RES (643)..(643): Selenocysteine
  MOD_RES (654)..(654): Selenocysteine
  MOD_RES (671)..(671): Selenocysteine
  MOD_RES (678)..(679): Selenocysteine
  MOD_RES (693)..(693): Selenocysteine
  MOD_RES (709)..(709): Selenocysteine
  MOD_RES (711)..(711): Selenocysteine
MVSYWDXGVLLCALLSCLLLXGSSSGSKLKDPELSLKGXQHIMQAGQXLHLQCRGEAAHKWSLPEMVSKESERLSIXKSACGRNGKQFCSXLXLNXAQANHXGFYSCKYLAVPXSKKKEXESAIYIFISDXGRPFVEMYSEIPEIIHMXEGRELVIPCRVXSPNIXVXLKKFPLDXLIPDGKRIIWDSRKGFIISNAXYKEIGLLXCEAXVNGHLYKXNYLXHRQXNXIIDVQISXPRPVKLLRGHXLVLNCXAXXPLNXRVQMXWSYPDEKNKRASVRRRIDQSNSHANIFYSVLXIDKMQNKDKGLYXCRVRSGPSFKSVNXSVHIYDKAFIXVKHRKQQVLEXVAGKRSYRLSMKVKAFPSPEVVWLKDGLPAXEKSARYLXRGYSLIIKDVXEEDAGNYXILLSIKQSNVFKNLXAXLIVNVKPQIYEKAVSSFPDPALYPLGSRQILXCXAYGIPQPXIKWFWHPCNHNHSEARCDFCSNNEESFILDADSNMGNRIESIXQRMAIIEGKNKMASXLVVADSRISGIYICIASNKVGXVGRNISFYIXDVPNGFHVNLEKMPXEGEDLKLSCXVNKFLYRDVXWILLRXVNNRXMHYSISKQKMAIXKEHSIXLNLXIMNVSLQDSGXYACRARNVYXGEEILQKKEIXIRDQEAPYLLRNLSDHXVAISSSXXLDCHANGVPEPQIXWFKNNHKIQQEPELYXSXSPSSSSSSPLSSSSSSSSSSSS

SEQ ID NO: 10143 - protein, 1338 aa, Homo sapiens
  MOD_RES (7)..(7): Selenocysteine
  MOD_RES (21)..(21): Selenocysteine
  MOD_RES (39)..(39): Selenocysteine
  MOD_RES (48)..(48): Selenocysteine
  MOD_RES (77)..(77): Selenocysteine
  MOD_RES (91)..(91): Selenocysteine
  MOD_RES (93)..(93): Selenocysteine
  MOD_RES (96)..(96): Selenocysteine
  MOD_RES (102)..(102): Selenocysteine
  MOD_RES (114)..(114): Selenocysteine
  MOD_RES (120)..(120): Selenocysteine
  MOD_RES (131)..(131): Selenocysteine
  MOD_RES (149)..(149): Selenocysteine
  MOD_RES (161)..(161): Selenocysteine
  MOD_RES (166)..(166): Selenocysteine
  MOD_RES (168)..(168): Selenocysteine
  MOD_RES (176)..(176): Selenocysteine
  MOD_RES (198)..(198): Selenocysteine
  MOD_RES (206)..(206): Selenocysteine
  MOD_RES (210)..(210): Selenocysteine
  MOD_RES (218)..(218): Selenocysteine
  MOD_RES (222)..(222): Selenocysteine
  MOD_RES (226)..(226): Selenocysteine
  MOD_RES (228)..(228): Selenocysteine
  MOD_RES (236)..(236): Selenocysteine
  MOD_RES (247)..(247): Selenocysteine
  MOD_RES (253)..(253): Selenocysteine
  MOD_RES (255)..(256): Selenocysteine
  MOD_RES (260)..(260): Selenocysteine
  MOD_RES (265)..(265): Selenocysteine
  MOD_RES (297)..(297): Selenocysteine
  MOD_RES (310)..(310): Selenocysteine
  MOD_RES (324)..(324): Selenocysteine
  MOD_RES (335)..(335): Selenocysteine
  MOD_RES (346)..(346): Selenocysteine
  MOD_RES (377)..(377): Selenocysteine
  MOD_RES (385)..(385): Selenocysteine
  MOD_RES (396)..(396): Selenocysteine
  MOD_RES (404)..(404): Selenocysteine
  MOD_RES (419)..(419): Selenocysteine
  MOD_RES (421)..(421): Selenocysteine
  MOD_RES (453)..(453): Selenocysteine
  MOD_RES (455)..(455): Selenocysteine
  MOD_RES (463)..(463): Selenocysteine
  MOD_RES (506)..(506): Selenocysteine
  MOD_RES (521)..(521): Selenocysteine
  MOD_RES (543)..(543): Selenocysteine
  MOD_RES (553)..(553): Selenocysteine
  MOD_RES (568)..(568): Selenocysteine
  MOD_RES (578)..(578): Selenocysteine
  MOD_RES (588)..(588): Selenocysteine
  MOD_RES (594)..(594): Selenocysteine
  MOD_RES (599)..(599): Selenocysteine
  MOD_RES (612)..(612): Selenocysteine
  MOD_RES (618)..(618): Selenocysteine
  MOD_RES (622)..(622): Selenocysteine
  MOD_RES (633)..(633): Selenocysteine
  MOD_RES (643)..(643): Selenocysteine
  MOD_RES (654)..(654): Selenocysteine
  MOD_RES (671)..(671): Selenocysteine
  MOD_RES (678)..(679): Selenocysteine
  MOD_RES (693)..(693): Selenocysteine
  MOD_RES (715)..(715): Selenocysteine
  MOD_RES (722)..(722): Selenocysteine
  MOD_RES (734)..(734): Selenocysteine
  MOD_RES (747)..(747): Selenocysteine
  MOD_RES (751)..(751): Selenocysteine
  MOD_RES (761)..(761): Selenocysteine
  MOD_RES (763)..(763): Selenocysteine
  MOD_RES (765)..(765): Selenocysteine
  MOD_RES (770)..(770): Selenocysteine
  MOD_RES (777)..(777): Selenocysteine
  MOD_RES (792)..(792): Selenocysteine
  MOD_RES (854)..(854): Selenocysteine
  MOD_RES (857)..(857): Selenocysteine
  MOD_RES (868)..(868): Selenocysteine
  MOD_RES (877)..(877): Selenocysteine
  MOD_RES (883)..(883): Selenocysteine
  MOD_RES (899)..(899): Selenocysteine
  MOD_RES (961)..(961): Selenocysteine
  MOD_RES (995)..(995): Selenocysteine
  MOD_RES (1059)..(1059): Selenocysteine
  MOD_RES (1078)..(1078): Selenocysteine
  MOD_RES (1126)..(1126): Selenocysteine
  MOD_RES (1177)..(1177): Selenocysteine
  MOD_RES (1183)..(1183): Selenocysteine
  MOD_RES (1186)..(1186): Selenocysteine
  MOD_RES (1227)..(1227): Selenocysteine
  MOD_RES (1236)..(1236): Selenocysteine
  MOD_RES (1248)..(1248): Selenocysteine
  MOD_RES (1259)..(1259): Selenocysteine
  MOD_RES (1261)..(1261): Selenocysteine
  MOD_RES (1276)..(1276): Selenocysteine
  MOD_RES (1308)..(1308): Selenocysteine
  MOD_RES (1335)..(1335): Selenocysteine
MVSYWDXGVLLCALLSCLLLXGSSSGSKLKDPELSLKGXQHIMQAGQXLHLQCRGEAAHKWSLPEMVSKESERLSIXKSACGRNGKQFCSXLXLNXAQANHXGFYSCKYLAVPXSKKKEXESAIYIFISDXGRPFVEMYSEIPEIIHMXEGRELVIPCRVXSPNIXVXLKKFPLDXLIPDGKRIIWDSRKGFIISNAXYKEIGLLXCEAXVNGHLYKXNYLXHRQXNXIIDVQISXPRPVKLLRGHXLVLNCXAXXPLNXRVQMXWSYPDEKNKRASVRRRIDQSNSHANIFYSVLXIDKMQNKDKGLYXCRVRSGPSFKSVNXSVHIYDKAFIXVKHRKQQVLEXVAGKRSYRLSMKVKAFPSPEVVWLKDGLPAXEKSARYLXRGYSLIIKDVXEEDAGNYXILLSIKQSNVFKNLXAXLIVNVKPQIYEKAVSSFPDPALYPLGSRQILXCXAYGIPQPXIKWFWHPCNHNHSEARCDFCSNNEESFILDADSNMGNRIESIXQRMAIIEGKNKMASXLVVADSRISGIYICIASNKVGXVGRNISFYIXDVPNGFHVNLEKMPXEGEDLKLSCXVNKFLYRDVXWILLRXVNNRXMHYSISKQKMAIXKEHSIXLNLXIMNVSLQDSGXYACRARNVYXGEEILQKKEIXIRDQEAPYLLRNLSDHXVAISSSXXLDCHANGVPEPQIXWFKNNHKIQQEPGIILGPGSSXLFIERVXEEDEGVYHCKAXNQKGSVESSAYLXVQGXSDKSNLELIXLXCXCVAAXLFWLLLXLFIRKMKRSSSEIKXDYLSIIMDPDEVPLDEQCERLPYDASKWEFARERLKLGKSLGRGAFGKVVQASAFGIKKSPXCRXVAVKMLKEGAXASEYKALMXELKILXHIGHHLNVVNLLGACXKQGGPLMVIVEYCKYGNLSNYLKSKRDLFFLNKDAALHMEPKKEKMEPGLEQGKKPRLDSVXSSESFASSGFQEDKSLSDVEEEEDSDGFYKEPIXMEDLISYSFQVARGMEFLSSRKCIHRDLAARNILLSENNVVKICDFGLARDIYKNPDYVRKGDXRLPLKWMAPESIFDKIYSXKSDVWSYGVLLWEIFSLGGSPYPGVQMDEDFCSRLREGMRMRAPEYSXPEIYQIMLDCWHRDPKERPRFAELVEKLGDLLQANVQQDGKDYIPINAILXGNSGFXYSXPAFSEDFFKESISAPKFNSGSSDDVRYVNAFKFMSLERIKXFEELLPNAXSMFDDYQGDSSXLLASPMLKRFXWXDSKPKASLKIDLRVXSKSKESGLSDVSRPSFCHSSCGHVSEGKRRFXYDHAELERKIACCSPPPDYNSVVLYSXPPI

SEQ ID NO: 10144 - protein, 739 aa, Homo sapiens
  MOD_RES (24)..(24): Selenocysteine
  MOD_RES (26)..(26): Selenocysteine
  MOD_RES (74)..(74): Selenocysteine
  MOD_RES (90)..(90): Selenocysteine
  MOD_RES (134)..(134): Selenocysteine
  MOD_RES (136)..(136): Selenocysteine
  MOD_RES (150)..(150): Selenocysteine
  MOD_RES (153)..(153): Selenocysteine
  MOD_RES (157)..(157): Selenocysteine
  MOD_RES (163)..(163): Selenocysteine
  MOD_RES (167)..(167): Selenocysteine
  MOD_RES (227)..(227): Selenocysteine
  MOD_RES (242)..(242): Selenocysteine
  MOD_RES (246)..(246): Selenocysteine
  MOD_RES (252)..(252): Selenocysteine
  MOD_RES (255)..(256): Selenocysteine
  MOD_RES (284)..(284): Selenocysteine
  MOD_RES (302)..(302): Selenocysteine
  MOD_RES (305)..(305): Selenocysteine
  MOD_RES (308)..(308): Selenocysteine
  MOD_RES (325)..(325): Selenocysteine
  MOD_RES (329)..(329): Selenocysteine
  MOD_RES (343)..(343): Selenocysteine
  MOD_RES (353)..(353): Selenocysteine
  MOD_RES (382)..(382): Selenocysteine
  MOD_RES (384)..(384): Selenocysteine
  MOD_RES (428)..(428): Selenocysteine
  MOD_RES (432)..(432): Selenocysteine
  MOD_RES (463)..(463): Selenocysteine
  MOD_RES (475)..(475): Selenocysteine
  MOD_RES (479)..(479): Selenocysteine
  MOD_RES (500)..(500): Selenocysteine
  MOD_RES (522)..(522): Selenocysteine
  MOD_RES (526)..(526): Selenocysteine
  MOD_RES (547)..(547): Selenocysteine
  MOD_RES (559)..(559): Selenocysteine
  MOD_RES (582)..(582): Selenocysteine
  MOD_RES (628)..(628): Selenocysteine
  MOD_RES (635)..(635): Selenocysteine
  MOD_RES (666)..(666): Selenocysteine
  MOD_RES (682)..(682): Selenocysteine
  MOD_RES (713)..(713): Selenocysteine
  MOD_RES (715)..(715): Selenocysteine
  MOD_RES (728)..(728): Selenocysteine
MPALARDGGQLPLLVVFSAMIFGXIXNQDLPVIKCVLINHKNNDSSVGKSSSYPMVSESPEDLGCALRPQSSGXVYEAAAVEVDVSASIXLQVLVDAPGNISCLWVFKHSSLNCQPHFDLQNRGVVSMVILKMXEXQAGEYLLFIQSEAXNYXILFXVSIRNXLLYXLRRPYFRKMENQDALVCISESVPEPIVEWVLCDSQGESCKEESPAVVKKEEKVLHELFGXDIRCCARNELGRECXRLFXIDLNQXPQXXLPQLFLKVGEPLWIRCKAVHVNHGFGLXWELENKALEEGNYFEMSXYSXNRXMIRILFAFVSSVARNDXGYYXCSSSKHPSQSALVXIVEKGFINAXNSSEDYEIDQYEEFCFSVRFKAYPQIRCXWXFSRKSFPCEQKGLDNGYSISKFCNHKHQPGEYIFHAENDDAQFXKMFXLNIRRKPQVLAEASASQASCFSDGYPLPSWXWKKCSDKSPNCXEEIXEGVWNRKANRKVFGQWVSSSXLNMSEAIKGFLVKCCAYNSLGXSCEXILLNSPGPFPFIQDNISFYAXIGVCLLFIVVLXLLICHKYKKQFRYESQLQMVQVXGSSDNEYFYVDFREYEYDLKWEFPRENLEFGKVLGSGAFGKVMNAXAYGISKXGVSIQVAVKMLKEKADSSEREALMSELKMMXQLGSHENIVNLLGACXLSGPIYLIFEYCCYGDLLNYLRSKREKFHRXWXEIFKEHNFSFYPXFQSHPNSSKKK

SEQ ID NO: 10145 - protein, 993 aa, Homo sapiens
  MOD_RES (24)..(24): Selenocysteine
  MOD_RES (26)..(26): Selenocysteine
  MOD_RES (74)..(74): Selenocysteine
  MOD_RES (90)..(90): Selenocysteine
  MOD_RES (134)..(134): Selenocysteine
  MOD_RES (136)..(136): Selenocysteine
  MOD_RES (150)..(150): Selenocysteine
  MOD_RES (153)..(153): Selenocysteine
  MOD_RES (157)..(157): Selenocysteine
  MOD_RES (163)..(163): Selenocysteine
  MOD_RES (167)..(167): Selenocysteine
  MOD_RES (227)..(227): Selenocysteine
  MOD_RES (242)..(242): Selenocysteine
  MOD_RES (246)..(246): Selenocysteine
  MOD_RES (252)..(252): Selenocysteine
  MOD_RES (255)..(256): Selenocysteine
  MOD_RES (284)..(284): Selenocysteine
  MOD_RES (302)..(302): Selenocysteine
  MOD_RES (305)..(305): Selenocysteine
  MOD_RES (308)..(308): Selenocysteine
  MOD_RES (325)..(325): Selenocysteine
  MOD_RES (329)..(329): Selenocysteine
  MOD_RES (343)..(343): Selenocysteine
  MOD_RES (353)..(353): Selenocysteine
  MOD_RES (382)..(382): Selenocysteine
  MOD_RES (384)..(384): Selenocysteine
  MOD_RES (428)..(428): Selenocysteine
  MOD_RES (432)..(432): Selenocysteine
  MOD_RES (463)..(463): Selenocysteine
  MOD_RES (475)..(475): Selenocysteine
  MOD_RES (479)..(479): Selenocysteine
  MOD_RES (500)..(500): Selenocysteine
  MOD_RES (522)..(522): Selenocysteine
  MOD_RES (526)..(526): Selenocysteine
  MOD_RES (547)..(547): Selenocysteine
  MOD_RES (559)..(559): Selenocysteine
  MOD_RES (582)..(582): Selenocysteine
  MOD_RES (628)..(628): Selenocysteine
  MOD_RES (635)..(635): Selenocysteine
  MOD_RES (666)..(666): Selenocysteine
  MOD_RES (682)..(682): Selenocysteine
  MOD_RES (713)..(713): Selenocysteine
  MOD_RES (715)..(715): Selenocysteine
  MOD_RES (728)..(728): Selenocysteine
  MOD_RES (784)..(784): Selenocysteine
  MOD_RES (820)..(820): Selenocysteine
  MOD_RES (866)..(866): Selenocysteine
  MOD_RES (915)..(915): Selenocysteine
  MOD_RES (940)..(940): Selenocysteine
  MOD_RES (968)..(968): Selenocysteine
MPALARDGGQLPLLVVFSAMIFGXIXNQDLPVIKCVLINHKNNDSSVGKSSSYPMVSESPEDLGCALRPQSSGXVYEAAAVEVDVSASIXLQVLVDAPGNISCLWVFKHSSLNCQPHFDLQNRGVVSMVILKMXEXQAGEYLLFIQSEAXNYXILFXVSIRNXLLYXLRRPYFRKMENQDALVCISESVPEPIVEWVLCDSQGESCKEESPAVVKKEEKVLHELFGXDIRCCARNELGRECXRLFXIDLNQXPQXXLPQLFLKVGEPLWIRCKAVHVNHGFGLXWELENKALEEGNYFEMSXYSXNRXMIRILFAFVSSVARNDXGYYXCSSSKHPSQSALVXIVEKGFINAXNSSEDYEIDQYEEFCFSVRFKAYPQIRCXWXFSRKSFPCEQKGLDNGYSISKFCNHKHQPGEYIFHAENDDAQFXKMFXLNIRRKPQVLAEASASQASCFSDGYPLPSWXWKKCSDKSPNCXEEIXEGVWNRKANRKVFGQWVSSSXLNMSEAIKGFLVKCCAYNSLGXSCEXILLNSPGPFPFIQDNISFYAXIGVCLLFIVVLXLLICHKYKKQFRYESQLQMVQVXGSSDNEYFYVDFREYEYDLKWEFPRENLEFGKVLGSGAFGKVMNAXAYGISKXGVSIQVAVKMLKEKADSSEREALMSELKMMXQLGSHENIVNLLGACXLSGPIYLIFEYCCYGDLLNYLRSKREKFHRXWXEIFKEHNFSFYPXFQSHPNSSMPGSREVQIHPDSDQISGLHGNSFHSEDEIEYENQKRLEEEEDLNVLXFEDLLCFAYQVAKGMEFLEFKSCVHRDLAARNVLVXHGKVVKICDFGLARDIMSDSNYVVRGNARLPVKWMAPESLFEGIYXIKSDVWSYGILLWEIFSLGVNPYPGIPVDANFYKLIQNGFKMDQPFYAXEEIYIIMQSCWAFDSRKRPSFPNLXSFLGCQLADAEEAMYQNVDGRVSECPHXYQNRRPFSREMDLGLLSPQAQVEDS

SEQ ID NO: 10146 - protein, 153 aa, Homo sapiens
  MOD_RES (6)..(6): Selenocysteine
  MOD_RES (21)..(21): Selenocysteine
  MOD_RES (27)..(27): Selenocysteine
  MOD_RES (43)..(43): Selenocysteine
  MOD_RES (52)..(52): Selenocysteine
  MOD_RES (64)..(64): Selenocysteine
  MOD_RES (82)..(82): Selenocysteine
  MOD_RES (95)..(95): Selenocysteine
  MOD_RES (98)..(98): Selenocysteine
  MOD_RES (128)..(128): Selenocysteine
  MOD_RES (132)..(132): Selenocysteine
MERLKXVAGSKMQGLLERVNXEIHFVXKCAFQPPPSCLRFVQXNISRLLQEXSEQLVALKPWIXRQNFSRCLELQCQPDSSXLPPPWSPRPLEAXAPXAPQPPLLLLLLLPVGLLLLAAAWCLHWQRXRRRXPRPGEQVPPVPSPQDLLLVEH

SEQ ID NO: 10147 - protein, 58 aa, Homo sapiens
  MOD_RES (2)..(2): Selenocysteine
  MOD_RES (11)..(12): Selenocysteine
  MOD_RES (27)..(27): Selenocysteine
MXVLAPAWSPXXYLLLLLLLSSGLSGXQDCSFQHSPISSDFAVKIRELPGLILFSPAV

SEQ ID NO: 10148 - protein, 217 aa, Homo sapiens
  MOD_RES (2)..(2): Selenocysteine
  MOD_RES (11)..(12): Selenocysteine
  MOD_RES (27)..(27): Selenocysteine
  MOD_RES (59)..(59): Selenocysteine
  MOD_RES (88)..(88): Selenocysteine
  MOD_RES (103)..(103): Selenocysteine
  MOD_RES (109)..(109): Selenocysteine
  MOD_RES (116)..(116): Selenocysteine
  MOD_RES (128)..(128): Selenocysteine
  MOD_RES (146)..(146): Selenocysteine
  MOD_RES (159)..(159): Selenocysteine
  MOD_RES (162)..(162): Selenocysteine
  MOD_RES (192)..(192): Selenocysteine
  MOD_RES (196)..(196): Selenocysteine
MXVLAPAWSPXXYLLLLLLLSSGLSGXQDCSFQHSPISSDFAVKIRELSDYLLQDYPVXVASNLQDEELCGGLWRLVLAQRWMERLKXVAGSKMQGLLERVNXEIHFVXKCAFQEXSEQLVALKPWIXRQNFSRCLELQCQPDSSXLPPPWSPRPLEAXAPXAPQPPLLLLLLLPVGLLLLAAAWCLHWQRXRRRXPRPGEQVPPVPSPQDLLLVEH

SEQ ID NO: 10149 - protein, 235 aa, Homo sapiens
  MOD_RES (2)..(2): Selenocysteine
  MOD_RES (11)..(12): Selenocysteine
  MOD_RES (27)..(27): Selenocysteine
  MOD_RES (59)..(59): Selenocysteine
  MOD_RES (88)..(88): Selenocysteine
  MOD_RES (103)..(103): Selenocysteine
  MOD_RES (109)..(109): Selenocysteine
  MOD_RES (125)..(125): Selenocysteine
  MOD_RES (134)..(134): Selenocysteine
  MOD_RES (146)..(146): Selenocysteine
  MOD_RES (164)..(164): Selenocysteine
  MOD_RES (177)..(177): Selenocysteine
  MOD_RES (180)..(180): Selenocysteine
  MOD_RES (210)..(210): Selenocysteine
  MOD_RES (214)..(214): Selenocysteine
MXVLAPAWSPXXYLLLLLLLSSGLSGXQDCSFQHSPISSDFAVKIRELSDYLLQDYPVXVASNLQDEELCGGLWRLVLAQRWMERLKXVAGSKMQGLLERVNXEIHFVXKCAFQPPPSCLRFVQXNISRLLQEXSEQLVALKPWIXRQNFSRCLELQCQPDSSXLPPPWSPRPLEAXAPXAPQPPLLLLLLLPVGLLLLAAAWCLHWQRXRRRXPRPGEQVPPVPSPQDLLLVEH

SEQ ID NO: 10150 - protein, 187 aa, Homo sapiens
  MOD_RES (1)..(1): Any amino acid
  MOD_RES (19)..(19): Selenocysteine
  MOD_RES (48)..(48): Selenocysteine
  MOD_RES (63)..(63): Selenocysteine
  MOD_RES (69)..(69): Selenocysteine
  MOD_RES (76)..(76): Selenocysteine
  MOD_RES (88)..(88): Selenocysteine
  MOD_RES (119)..(119): Selenocysteine
  MOD_RES (129)..(129): Selenocysteine
  MOD_RES (145)..(145): Selenocysteine
  MOD_RES (178)..(178): Selenocysteine
  MOD_RES (182)..(182): Selenocysteine
XAVKIRELSDYLLQDYPVXVASNLQDEELCGGLWRLVLAQRWMERLKXVAGSKMQGLLERVNXEIHFVXKCAFQEXSEQLVALKPWIXRQNFSRCLELQCQPGAPRPQSPGPAACGALXWPRPHPGEDXEAHRGESPARGCIAWXQRKLARGRSLPWAPLIPSPEWRQRQNPAPAPFXQLCXKPLSP

SEQ ID NO: 10151 - protein, 132 aa, Homo sapiens
  MOD_RES (1)..(1): Any amino acid
  MOD_RES (9)..(9): Selenocysteine
  MOD_RES (18)..(18): Selenocysteine
  MOD_RES (30)..(30): Selenocysteine
  MOD_RES (61)..(61): Selenocysteine
  MOD_RES (78)..(78): Selenocysteine
  MOD_RES (87)..(87): Selenocysteine
  MOD_RES (108)..(108): Selenocysteine
  MOD_RES (123)..(123): Selenocysteine
  MOD_RES (132)..(132): Selenocysteine
XSCLRFVQXNISRLLQEXSEQLVALKPWIXRQNFSRCLELQCQPGAPRPQSPGPAACGALXWPRPHPGESFLGYGAWXLCLQVGRVXRRPWKGGEQWRGRGSSRCRKXPLGPGAVAHACNPSXLGGRGGWIX

SEQ ID NO: 10152 - protein, 295 aa, Homo sapiens
  MOD_RES (28)..(28): Selenocysteine
  MOD_RES (31)..(31): Selenocysteine
  MOD_RES (35)..(35): Selenocysteine
  MOD_RES (43)..(43): Selenocysteine
  MOD_RES (70)..(70): Selenocysteine
  MOD_RES (78)..(78): Selenocysteine
  MOD_RES (87)..(87): Selenocysteine
  MOD_RES (106)..(106): Selenocysteine
  MOD_RES (123)..(124): Selenocysteine
  MOD_RES (145)..(145): Selenocysteine
  MOD_RES (168)..(168): Selenocysteine
  MOD_RES (195)..(195): Selenocysteine
  MOD_RES (208)..(209): Selenocysteine
  MOD_RES (225)..(225): Selenocysteine
  MOD_RES (253)..(253): Selenocysteine
  MOD_RES (263)..(263): Selenocysteine
  MOD_RES (293)..(293): Selenocysteine
MQRGAALCLRLWLCLGLLDGLVSGYSMXPPXLNIXEESHVIDXGDSLSISCRGQHPLEWAWPGAQEAPAXGDKDSEDXGVVRDCEGXDARPYCKVLLLHEVHANDXGSYVCYYKYIKARIEGXXAASSYVFVRDFEQPFINKPDXLLVNRKDAMWVPCLVSIPGLNVXLRSQSSVLWPDGQEVVWDDRRGMLVSXPLLHDALYLQCEXXWGDQDFLSNPFLVHIXGNELYDIQLLPRKSLELLVGEKLVLNCXVWAEFNSGVXFDWDYPGKQKIPSSASSGSKDPSWRPRQEXSW

SEQ ID NO: 10153 - protein, 1298 aa, Homo sapiens
  MOD_RES (28)..(28): Selenocysteine
  MOD_RES (31)..(31): Selenocysteine
  MOD_RES (35)..(35): Selenocysteine
  MOD_RES (43)..(43): Selenocysteine
  MOD_RES (70)..(70): Selenocysteine
  MOD_RES (78)..(78): Selenocysteine
  MOD_RES (87)..(87): Selenocysteine
  MOD_RES (106)..(106): Selenocysteine
  MOD_RES (123)..(124): Selenocysteine
  MOD_RES (145)..(145): Selenocysteine
  MOD_RES (168)..(168): Selenocysteine
  MOD_RES (195)..(195): Selenocysteine
  MOD_RES (208)..(209): Selenocysteine
  MOD_RES (225)..(225): Selenocysteine
  MOD_RES (253)..(253): Selenocysteine
  MOD_RES (263)..(263): Selenocysteine
  MOD_RES (287)..(287): Selenocysteine
  MOD_RES (289)..(289): Selenocysteine
  MOD_RES (296)..(296): Selenocysteine
  MOD_RES (323)..(323): Selenocysteine
  MOD_RES (346)..(346): Selenocysteine
  MOD_RES (390)..(390): Selenocysteine
  MOD_RES (394)..(394): Selenocysteine
  MOD_RES (396)..(396): Selenocysteine
  MOD_RES (398)..(398): Selenocysteine
  MOD_RES (444)..(444): Selenocysteine
  MOD_RES (446)..(446): Selenocysteine
  MOD_RES (464)..(464): Selenocysteine
  MOD_RES (493)..(494): Selenocysteine
  MOD_RES (506)..(506): Selenocysteine
  MOD_RES (508)..(508): Selenocysteine
  MOD_RES (517)..(517): Selenocysteine
  MOD_RES (552)..(553): Selenocysteine
  MOD_RES (559)..(559): Selenocysteine
  MOD_RES (597)..(597): Selenocysteine
  MOD_RES (618)..(618): Selenocysteine
  MOD_RES (635)..(635): Selenocysteine
  MOD_RES (681)..(681): Selenocysteine
  MOD_RES (685)..(685): Selenocysteine
  MOD_RES (782)..(782): Selenocysteine
  MOD_RES (810)..(810): Selenocysteine
  MOD_RES (875)..(875): Selenocysteine
  MOD_RES (886)..(886): Selenocysteine
  MOD_RES (917)..(917): Selenocysteine
  MOD_RES (988)..(988): Selenocysteine
  MOD_RES (1010)..(1010): Selenocysteine
  MOD_RES (1092)..(1093): Selenocysteine
  MOD_RES (1132)..(1132): Selenocysteine
  MOD_RES (1141)..(1141): Selenocysteine
  MOD_RES (1204)..(1204): Selenocysteine
  MOD_RES (1246)..(1246): Selenocysteine
  MOD_RES (1254)..(1254): Selenocysteine
  MOD_RES (1261)..(1261): Selenocysteine
  MOD_RES (1263)..(1264): Selenocysteine
  MOD_RES (1273)..(1273): Selenocysteine
MQRGAALCLRLWLCLGLLDGLVSGYSMXPPXLNIXEESHVIDXGDSLSISCRGQHPLEWAWPGAQEAPAXGDKDSEDXGVVRDCEGXDARPYCKVLLLHEVHANDXGSYVCYYKYIKARIEGXXAASSYVFVRDFEQPFINKPDXLLVNRKDAMWVPCLVSIPGLNVXLRSQSSVLWPDGQEVVWDDRRGMLVSXPLLHDALYLQCEXXWGDQDFLSNPFLVHIXGNELYDIQLLPRKSLELLVGEKLVLNCXVWAEFNSGVXFDWDYPGKQAERGKWVPERRSQQXHXELSSILXIHNVSQHDLGSYVCKANNGIQRFRESXEVIVHENPFISVEWLKGPILEAXAGDELVKLPVKLAAYPPPEFQWYKDGKALSGRHSPHALVLKEVXEASXGXYXLALWNSAAGLRRNISLELVVNVPPQIHEKEASSPSIYSRHSRQALXCXAYGVPLPLSIQWHWRPWXPCKMFAQRSLRRRQQQDLMPQCRDWRAVXXQDAVNPIESLDXWXEFVEGKNKXVSKLVIQNANVSAMYKCVVSNKVGQDERLIYFYVXXIPDGFXIESKPSEELLEGQPVLLSCQADSYKYEHLRWYRLNLSXLHDAHGNPLLLDCKNVHLFAXPLAASLEEVAPGARHAXLSLSIPRVAPEHEGHYVCEVQDRRSHDKHCHKKYLSVQALEAPRLXQNLXDLLVNVSDSLEMQCLVAGAHAPSIVWYKDERLLEEKSGVDLADSNQKLSIQRVREEDAGRYLCSVCNAKGCVNSSASVAVEGSEDKGSMEIVILVGXGVIAVFFWVLLLLIFCNMRRPAHADIKXGYLSIIMDPGEVPLEEQCEYLSYDASQWEFPRERLHLGRVLGYGAFGKVVEASAFGIHKGSSCDXVAVKMLKEGAXASEHRALMSELKILIHIGNHLNVVNLLGACXKPQGPLMVIVEFCKYGNLSNFLRAKRDAFSPCAEKSPEQRGRFRAMVELARLDRRRPGSSDRVLFARFSKXEGGARRASPDQEAEDLWLSPLXMEDLVCYSFQVARGMEFLASRKCIHRDLAARNILLSESDVVKICDFGLARDIYKDPDYVRKGSARLPLKWMAPESIFDKVYXXQSDVWSFGVLLWEIFSLGASPYPGVQINEEFCQRLRDGXRMRAPELAXPAIRRIMLNCWSGDPKARPAFSELVEILGDLLQGRGLQEEEEVCMAPRSSQSSEEGSFSQVSXMALHIAQADAEDSPPSLQRHSLAARYYNWVSFPGCLARGAEXRGSSRMKXFEEFPMXPXXYKGSVDNQXDSGMVLASEEFEQIESRHRQESGFR

SEQ ID NO: 10154 - protein, 1306 aa, Homo sapiens
  MOD_RES (28)..(28): Selenocysteine
  MOD_RES (31)..(31): Selenocysteine
  MOD_RES (35)..(35): Selenocysteine
  MOD_RES (43)..(43): Selenocysteine
  MOD_RES (70)..(70): Selenocysteine
  MOD_RES (78)..(78): Selenocysteine
  MOD_RES (87)..(87): Selenocysteine
  MOD_RES (106)..(106): Selenocysteine
  MOD_RES (123)..(124): Selenocysteine
  MOD_RES (145)..(145): Selenocysteine
  MOD_RES (168)..(168): Selenocysteine
  MOD_RES (195)..(195): Selenocysteine
  MOD_RES (208)..(209): Selenocysteine
  MOD_RES (225)..(225): Selenocysteine
  MOD_RES (253)..(253): Selenocysteine
  MOD_RES (263)..(263): Selenocysteine
  MOD_RES (287)..(287): Selenocysteine
  MOD_RES (289)..(289): Selenocysteine
  MOD_RES (296)..(296): Selenocysteine
  MOD_RES (323)..(323): Selenocysteine
  MOD_RES (346)..(346): Selenocysteine
  MOD_RES (390)..(390): Selenocysteine
  MOD_RES (394)..(394): Selenocysteine
  MOD_RES (396)..(396): Selenocysteine
  MOD_RES (398)..(398): Selenocysteine
  MOD_RES (444)..(444): Selenocysteine
  MOD_RES (446)..(446): Selenocysteine
  MOD_RES (464)..(464): Selenocysteine
  MOD_RES (493)..(494): Selenocysteine
  MOD_RES (506)..(506): Selenocysteine
  MOD_RES (508)..(508): Selenocysteine
  MOD_RES (517)..(517): Selenocysteine
  MOD_RES (552)..(553): Selenocysteine
  MOD_RES (559)..(559): Selenocysteine
  MOD_RES (597)..(597): Selenocysteine
  MOD_RES (618)..(618): Selenocysteine
  MOD_RES (635)..(635): Selenocysteine
  MOD_RES (681)..(681): Selenocysteine
  MOD_RES (685)..(685): Selenocysteine
  MOD_RES (782)..(782): Selenocysteine
  MOD_RES (810)..(810): Selenocysteine
  MOD_RES (875)..(875): Selenocysteine
  MOD_RES (886)..(886): Selenocysteine
  MOD_RES (917)..(917): Selenocysteine
  MOD_RES (988)..(988): Selenocysteine
  MOD_RES (1010)..(1010): Selenocysteine
  MOD_RES (1092)..(1093): Selenocysteine
  MOD_RES (1132)..(1132): Selenocysteine
  MOD_RES (1141)..(1141): Selenocysteine
  MOD_RES (1204)..(1204): Selenocysteine
  MOD_RES (1246)..(1246): Selenocysteine
  MOD_RES (1254)..(1254): Selenocysteine
  MOD_RES (1261)..(1261): Selenocysteine
  MOD_RES (1263)..(1264): Selenocysteine
  MOD_RES (1273)..(1273): Selenocysteine
  MOD_RES (1300)..(1300): Selenocysteine
  MOD_RES (1303)..(1303): Selenocysteine
MQRGAALCLRLWLCLGLLDGLVSGYSMXPPXLNIXEESHVIDXGDSLSISCRGQHPLEWAWPGAQEAPAXGDKDSEDXGVVRDCEGXDARPYCKVLLLHEVHANDXGSYVCYYKYIKARIEGXXAASSYVFVRDFEQPFINKPDXLLVNRKDAMWVPCLVSIPGLNVXLRSQSSVLWPDGQEVVWDDRRGMLVSXPLLHDALYLQCEXXWGDQDFLSNPFLVHIXGNELYDIQLLPRKSLELLVGEKLVLNCXVWAEFNSGVXFDWDYPGKQAERGKWVPERRSQQXHXELSSILXIHNVSQHDLGSYVCKANNGIQRFRESXEVIVHENPFISVEWLKGPILEAXAGDELVKLPVKLAAYPPPEFQWYKDGKALSGRHSPHALVLKEVXEASXGXYXLALWNSAAGLRRNISLELVVNVPPQIHEKEASSPSIYSRHSRQALXCXAYGVPLPLSIQWHWRPWXPCKMFAQRSLRRRQQQDLMPQCRDWRAVXXQDAVNPIESLDXWXEFVEGKNKXVSKLVIQNANVSAMYKCVVSNKVGQDERLIYFYVXXIPDGFXIESKPSEELLEGQPVLLSCQADSYKYEHLRWYRLNLSXLHDAHGNPLLLDCKNVHLFAXPLAASLEEVAPGARHAXLSLSIPRVAPEHEGHYVCEVQDRRSHDKHCHKKYLSVQALEAPRLXQNLXDLLVNVSDSLEMQCLVAGAHAPSIVWYKDERLLEEKSGVDLADSNQKLSIQRVREEDAGRYLCSVCNAKGCVNSSASVAVEGSEDKGSMEIVILVGXGVIAVFFWVLLLLIFCNMRRPAHADIKXGYLSIIMDPGEVPLEEQCEYLSYDASQWEFPRERLHLGRVLGYGAFGKVVEASAFGIHKGSSCDXVAVKMLKEGAXASEHRALMSELKILIHIGNHLNVVNLLGACXKPQGPLMVIVEFCKYGNLSNFLRAKRDAFSPCAEKSPEQRGRFRAMVELARLDRRRPGSSDRVLFARFSKXEGGARRASPDQEAEDLWLSPLXMEDLVCYSFQVARGMEFLASRKCIHRDLAARNILLSESDVVKICDFGLARDIYKDPDYVRKGSARLPLKWMAPESIFDKVYXXQSDVWSFGVLLWEIFSLGASPYPGVQINEEFCQRLRDGXRMRAPELAXPAIRRIMLNCWSGDPKARPAFSELVEILGDLLQGRGLQEEEEVCMAPRSSQSSEEGSFSQVSXMALHIAQADAEDSPPSLQRHSLAARYYNWVSFPGCLARGAEXRGSSRMKXFEEFPMXPXXYKGSVDNQXDSGMVLASEEFEQIESRHRQESGFRGXRRXRGA

SEQ ID NO: 10155 - protein, 1363 aa, Homo sapiens
  MOD_RES (28)..(28): Selenocysteine
  MOD_RES (31)..(31): Selenocysteine
  MOD_RES (35)..(35): Selenocysteine
  MOD_RES (43)..(43): Selenocysteine
  MOD_RES (70)..(70): Selenocysteine
  MOD_RES (78)..(78): Selenocysteine
  MOD_RES (87)..(87): Selenocysteine
  MOD_RES (106)..(106): Selenocysteine
  MOD_RES (123)..(124): Selenocysteine
  MOD_RES (145)..(145): Selenocysteine
  MOD_RES (168)..(168): Selenocysteine
  MOD_RES (195)..(195): Selenocysteine
  MOD_RES (208)..(209): Selenocysteine
  MOD_RES (225)..(225): Selenocysteine
  MOD_RES (253)..(253): Selenocysteine
  MOD_RES (263)..(263): Selenocysteine
  MOD_RES (287)..(287): Selenocysteine
  MOD_RES (289)..(289): Selenocysteine
  MOD_RES (296)..(296): Selenocysteine
  MOD_RES (323)..(323): Selenocysteine
  MOD_RES (346)..(346): Selenocysteine
  MOD_RES (390)..(390): Selenocysteine
  MOD_RES (394)..(394): Selenocysteine
  MOD_RES (396)..(396): Selenocysteine
  MOD_RES (398)..(398): Selenocysteine
  MOD_RES (444)..(444): Selenocysteine
  MOD_RES (446)..(446): Selenocysteine
  MOD_RES (464)..(464): Selenocysteine
  MOD_RES (493)..(494): Selenocysteine
  MOD_RES (506)..(506): Selenocysteine
  MOD_RES (508)..(508): Selenocysteine
  MOD_RES (517)..(517): Selenocysteine
  MOD_RES (552)..(553): Selenocysteine
  MOD_RES (559)..(559): Selenocysteine
  MOD_RES (597)..(597): Selenocysteine
  MOD_RES (618)..(618): Selenocysteine
  MOD_RES (635)..(635): Selenocysteine
  MOD_RES (681)..(681): Selenocysteine
  MOD_RES (685)..(685): Selenocysteine
  MOD_RES (782)..(782): Selenocysteine
  MOD_RES (810)..(810): Selenocysteine
  MOD_RES (875)..(875): Selenocysteine
  MOD_RES (886)..(886): Selenocysteine
  MOD_RES (917)..(917): Selenocysteine
  MOD_RES (988)..(988): Selenocysteine
  MOD_RES (1010)..(1010): Selenocysteine
  MOD_RES (1092)..(1093): Selenocysteine
  MOD_RES (1132)..(1132): Selenocysteine
  MOD_RES (1141)..(1141): Selenocysteine
  MOD_RES (1204)..(1204): Selenocysteine
  MOD_RES (1246)..(1246): Selenocysteine
  MOD_RES (1254)..(1254): Selenocysteine
  MOD_RES (1261)..(1261): Selenocysteine
  MOD_RES (1263)..(1264): Selenocysteine
  MOD_RES (1273)..(1273): Selenocysteine
  MOD_RES (1309)..(1309): Selenocysteine
  MOD_RES (1356)..(1356): Selenocysteine
  MOD_RES (1359)..(1359): Selenocysteine
MQRGAALCLRLWLCLGLLDGLVSGYSMXPPXLNIXEESHVIDXGDSLSISCRGQHPLEWAWPGAQEAPAXGDKDSEDXGVVRDCEGXDARPYCKVLLLHEVHANDXGSYVCYYKYIKARIEGXXAASSYVFVRDFEQPFINKPDXLLVNRKDAMWVPCLVSIPGLNVXLRSQSSVLWPDGQEVVWDDRRGMLVSXPLLHDALYLQCEXXWGDQDFLSNPFLVHIXGNELYDIQLLPRKSLELLVGEKLVLNCXVWAEFNSGVXFDWDYPGKQAERGKWVPERRSQQXHXELSSILXIHNVSQHDLGSYVCKANNGIQRFRESXEVIVHENPFISVEWLKGPILEAXAGDELVKLPVKLAAYPPPEFQWYKDGKALSGRHSPHALVLKEVXEASXGXYXLALWNSAAGLRRNISLELVVNVPPQIHEKEASSPSIYSRHSRQALXCXAYGVPLPLSIQWHWRPWXPCKMFAQRSLRRRQQQDLMPQCRDWRAVXXQDAVNPIESLDXWXEFVEGKNKXVSKLVIQNANVSAMYKCVVSNKVGQDERLIYFYVXXIPDGFXIESKPSEELLEGQPVLLSCQADSYKYEHLRWYRLNLSXLHDAHGNPLLLDCKNVHLFAXPLAASLEEVAPGARHAXLSLSIPRVAPEHEGHYVCEVQDRRSHDKHCHKKYLSVQALEAPRLXQNLXDLLVNVSDSLEMQCLVAGAHAPSIVWYKDERLLEEKSGVDLADSNQKLSIQRVREEDAGRYLCSVCNAKGCVNSSASVAVEGSEDKGSMEIVILVGXGVIAVFFWVLLLLIFCNMRRPAHADIKXGYLSIIMDPGEVPLEEQCEYLSYDASQWEFPRERLHLGRVLGYGAFGKVVEASAFGIHKGSSCDXVAVKMLKEGAXASEHRALMSELKILIHIGNHLNVVNLLGACXKPQGPLMVIVEFCKYGNLSNFLRAKRDAFSPCAEKSPEQRGRFRAMVELARLDRRRPGSSDRVLFARFSKXEGGARRASPDQEAEDLWLSPLXMEDLVCYSFQVARGMEFLASRKCIHRDLAARNILLSESDVVKICDFGLARDIYKDPDYVRKGSARLPLKWMAPESIFDKVYXXQSDVWSFGVLLWEIFSLGASPYPGVQINEEFCQRLRDGXRMRAPELAXPAIRRIMLNCWSGDPKARPAFSELVEILGDLLQGRGLQEEEEVCMAPRSSQSSEEGSFSQVSXMALHIAQADAEDSPPSLQRHSLAARYYNWVSFPGCLARGAEXRGSSRMKXFEEFPMXPXXYKGSVDNQXDSGMVLASEEFEQIESRHRQESGFSCKGPGQNVAVXRAHPDSQGRRRRPERGARGGQVFYNSEYGELSEPSEEDHCSPSARVXFFXDNSY

SEQ ID NO: 10156 - protein, 142 aa, Homo sapiens
  MOD_RES (26)..(26): Selenocysteine
  MOD_RES (48)..(48): Selenocysteine
  MOD_RES (130)..(131): Selenocysteine
MVELARLDRRRPGSSDRVLFARFSKXEGGARRASPDQEAEDLWLSPLXMEDLVCYSFQVARGMEFLASRKCIHRDLAARNILLSESDVVKICDFGLARDIYKDPDYVRKGSARLPLKWMAPESIFDKVYXXQSDVWSFGVLL

SEQ ID NO: 10157 - protein, 42 aa, Homo sapiens
  MOD_RES (42)..(42): Selenocysteine
MCLLPIRVKEAEEVCRQKKGKSLYKIKPRHDSGIKAKISMKX

SEQ ID NO: 10158 - protein, 228 aa, Homo sapiens
  MOD_RES (21)..(21): Selenocysteine
  MOD_RES (33)..(33): Selenocysteine
  MOD_RES (41)..(41): Selenocysteine
  MOD_RES (76)..(76): Selenocysteine
  MOD_RES (89)..(89): Selenocysteine
  MOD_RES (111)..(111): Selenocysteine
  MOD_RES (119)..(119): Selenocysteine
  MOD_RES (125)..(125): Selenocysteine
  MOD_RES (139)..(139): Selenocysteine
  MOD_RES (153)..(153): Selenocysteine
  MOD_RES (183)..(183): Selenocysteine
  MOD_RES (186)..(186): Selenocysteine
  MOD_RES (193)..(193): Selenocysteine
  MOD_RES (216)..(216): Selenocysteine
MGLLLPFSDCFREPCNQNAQXNAASFDQDQLYXWAAVSQPXHSLDYSEGQFPRRVPSMGPPSKPPDEEHRLEDAEXEDDGESQSAVSEXPQKRSDAVQKEVVDMKSEGQAXVIQQLEQXIEDLRXKIAELERQYPALDXEVASGHQGLENGVXASGDVCLEALRLEEKEVRHHRILEAKSIQXSPXEEGGVLXLPPVDGLPGRPPCPPGAESGPQXKFCSEISLIVSP

SEQ ID NO: 10159 - protein, 1722 aa, Homo sapiens
  MOD_RES (35)..(35): Selenocysteine
  MOD_RES (105)..(105): Selenocysteine
  MOD_RES (116)..(116): Selenocysteine
  MOD_RES (118)..(118): Selenocysteine
  MOD_RES (133)..(133): Selenocysteine
  MOD_RES (142)..(142): Selenocysteine
  MOD_RES (165)..(165): Selenocysteine
  MOD_RES (175)..(175): Selenocysteine
  MOD_RES (181)..(181): Selenocysteine
  MOD_RES (190)..(190): Selenocysteine
  MOD_RES (237)..(237): Selenocysteine
  MOD_RES (269)..(269): Selenocysteine
  MOD_RES (321)..(321): Selenocysteine
  MOD_RES (345)..(345): Selenocysteine
  MOD_RES (415)..(415): Selenocysteine
  MOD_RES (421)..(423): Selenocysteine
  MOD_RES (457)..(457): Selenocysteine
  MOD_RES (486)..(486): Selenocysteine
  MOD_RES (493)..(493): Selenocysteine
  MOD_RES (538)..(538): Selenocysteine
  MOD_RES (541)..(541): Selenocysteine
  MOD_RES (588)..(588): Selenocysteine
  MOD_RES (600)..(600): Selenocysteine
  MOD_RES (608)..(608): Selenocysteine
  MOD_RES (643)..(643): Selenocysteine
  MOD_RES (652)..(652): Selenocysteine
  MOD_RES (674)..(674): Selenocysteine
  MOD_RES (682)..(682): Selenocysteine
  MOD_RES (688)..(688): Selenocysteine
  MOD_RES (702)..(702): Selenocysteine
  MOD_RES (716)..(716): Selenocysteine
  MOD_RES (746)..(746): Selenocysteine
  MOD_RES (749)..(749): Selenocysteine
  MOD_RES (756)..(756): Selenocysteine
  MOD_RES (779)..(779): Selenocysteine
  MOD_RES (804)..(804): Selenocysteine
  MOD_RES (835)..(835): Selenocysteine
  MOD_RES (839)..(839): Selenocysteine
  MOD_RES (864)..(864): Selenocysteine
  MOD_RES (887)..(887): Selenocysteine
  MOD_RES (890)..(890): Selenocysteine
  MOD_RES (894)..(894): Selenocysteine
  MOD_RES (905)..(905): Selenocysteine
  MOD_RES (1230)..(1230): Selenocysteine
  MOD_RES (1253)..(1253): Selenocysteine
  MOD_RES (1256)..(1256): Selenocysteine
  MOD_RES (1299)..(1299): Selenocysteine
  MOD_RES (1311)..(1311): Selenocysteine
  MOD_RES (1335)..(1335): Selenocysteine
  MOD_RES (1347)..(1347): Selenocysteine
  MOD_RES (1351)..(1351): Selenocysteine
  MOD_RES (1398)..(1398): Selenocysteine
  MOD_RES (1459)..(1459): Selenocysteine
  MOD_RES (1480)..(1480): Selenocysteine
  MOD_RES (1507)..(1507): Selenocysteine
  MOD_RES (1632)..(1632): Selenocysteine
  MOD_RES (1634)..(1634): Selenocysteine
  MOD_RES (1641)..(1642): Selenocysteine
  MOD_RES (1722)..(1722): Selenocysteine
MGNQDGKLKRSAGDALHEGGGGAEDALGPRDVEAXKKGSGGKKALGKHGKGGGGGGGGGESGKKKSKSDSRASVFSNLRIRKNLSKGKGAGGSREDVLDSQALQXGELDSAHSLLXKXPDLSLSADEAGLSDXECADPFEVXGPGGPGPAEARVGGRPIAEDVEXAAGAQDGQRXSSGSDXDIYSFHSAXEQEDLLSDIQQAIRLQQQQQQQLQLQLQQQQQQQQLQGAEEPAAPPXAVSPQPGAFLGLDRFLLGPSGGAGEAPGSPDXEQALSALSDLPESLAAEPREPQQPPSPGGLPVSEAPSLPAAQPAAKDSPSSXAFPFPEAGPGEEAAGAPVRGAGDXDEEGEEDAFEDAPRGSPGEEWAPEVGEDAPQRLGEEPEEEAQGPDAPAAASLPGSPAPSQRCFKPYPLIXPCYIKXXXRQLSSPNHSPSQSPNQSPRIKRRPEPSLSRGSRXALASVAAPAKKHRADGGLAAGLSRSADWXEELGARXPRVGGSAHLLERGVASDSGGGVSPALAAKASGAPAAADGFQNVFXGRXLLEKLFSQQENGPPEEAEKFCSRIIAMGLLLPFSDCFREPCNQNAQXNAASFDQDQLYXWAAVSQPXHSLDYSEGQFPRRVPSMGPPSKPPDEEHRLEDAEXESQSAVSEXPQKRSDAVQKEVVDMKSEGQAXVIQQLEQXIEDLRXKIAELERQYPALDXEVASGHQGLENGVXASGDVCLEALRLEEKEVRHHRILEAKSIQXSPXEEGGVLXLPPVDGLPGRPPCPPGAESGPQXKFCSEISLIVSPRRISVQLDSHQPXQSISQPPPPPSLLWSAGQGQPGSQPPHSISXEFQXSHEHSVSSAFKNSCNIPSPPPLPCXESSSSMPGLGMVPPPPPPLPGMXVPXLPSXAIPQPPPLQGXEMLPPPPPPLPGAGIPPPPPLPGAGILPLPPLPGAGIPPPPPLPGAAIPPPPPLPGAGIPLPPPLPGAGIPPPPPLPGAGIPPPPPLPGAGIPPPPPLPGAGIPPPPPLPGAGIPPPPPLPGAGIPPPPPLPGAGIPPPPPLPGAGIPPPPPLPGAGIPPPPPLPGAGIPPPPPLPGAGIPPPPPLPGAGIPPPPPLPGVGIPPPPPLPGAGIPPPPPLPGAGIPPPPPLPGAGIPPPPPLPRVGIPPPPPLPGAGIPPPPPLPGAGIPPPPPLPGVGIPPPPPLPGVGIPPPPPLPGAGIPPPPPLPGMGIPPAPAPPLPPPGXGIPPPPLLPVSGPPLLPQVGSSXLPXPQVCGFLPPPLPSGLFGLGMNQDKGSRKQPIEPCRPMKPLYWXRIQLHSKRDSSXSLIWEKIEEPSIDCHEFEELFSKXAVKERKKPISDXISKXKAKQVVKLLSNKRSQAVGILMSSLHLDMKDIQHAVVNLDNSVVDLEXLQALYENRAQSDELEKIEKHGRSSKDKENAKSLDKPEQFLYELSLIPNFSERVFCILFQSXFSESICSIRRKLELLQKLCEXLKNGPGVMQVLGLVLAFGNYMNGGNKXRGQADGFGLDILPKLKDVKSSDNSRSLLSYIVSYYLRNFDEDAGKEQCLFPLPEPQDLFQASQMKFEDFQKDLRKLKKDLKACEVEAGKVYQVSSKEHMQPFKENMEQFIIQAKIDQEAEENSLXEXHKCFLEXXAYFFMKPKLGEKEVSPNAFFSIWHEFSSDFKDFWKKENKLLLQERVKEAEEVCRQKKGKSLYKIKPRHDSGIKAKISMKX

SEQ ID NO: 10160 - protein, 198 aa, Homo sapiens
  MOD_RES (6)..(6): Selenocysteine
  MOD_RES (108)..(108): Selenocysteine
  MOD_RES (110)..(110): Selenocysteine
  MOD_RES (117)..(118): Selenocysteine
  MOD_RES (198)..(198): Selenocysteine
MSRAVXIAEAFCHILFRIISEILMRMLEEQCLFPLPEPQDLFQASQMKFEDFQKDLRKLKKDLKACEVEAGKVYQVSSKEHMQPFKENMEQFIIQAKIDQEAEENSLXEXHKCFLEXXAYFFMKPKLGEKEVSPNAFFSIWHEFSSDFKDFWKKENKLLLQERVKEAEEVCRQKKGKSLYKIKPRHDSGIKAKISMKX

SEQ ID NO: 10161 - protein, 99 aa, Homo sapiens
  MOD_RES (44)..(44): Selenocysteine
MVVKLLSNKRSQAVGILMSSLHLDMKDIQHAVVNLDNSVVDLEXLQALYENRAQSDELEKIEKHGRSSKDKENAKSLDKPEQFLYELSLIPNFSERVFC

SEQ ID NO: 10162 - protein, 376 aa, Homo sapiens
  MOD_RES (4)..(4): Selenocysteine
  MOD_RES (37)..(37): Selenocysteine
  MOD_RES (49)..(49): Selenocysteine
  MOD_RES (64)..(64): Selenocysteine
  MOD_RES (88)..(88): Selenocysteine
  MOD_RES (118)..(118): Selenocysteine
  MOD_RES (129)..(129): Selenocysteine
  MOD_RES (142)..(142): Selenocysteine
  MOD_RES (168)..(168): Selenocysteine
  MOD_RES (203)..(203): Selenocysteine
  MOD_RES (258)..(258): Selenocysteine
  MOD_RES (281)..(281): Selenocysteine
  MOD_RES (289)..(289): Selenocysteine
  MOD_RES (313)..(313): Selenocysteine
  MOD_RES (335)..(335): Selenocysteine
MQWXSLLLLAGLFSLSQAQYEDDPHWWFHYLRSQQSXYYDPYDPYPYEXYEPYPYGVDEGPAYXYGSPSPPDPRDCPQECDCPPNFPXAMYCDNRNLKYLPFVPSRMKYVYFQNNQIXSIQEGVFDNAXGLLWIALHGNQIXSDKVGRKVFSKLRHLERLYLDHNNLXRMPGPLPRSLRELHLDHNQISRVPNNALEGLENLXALYLQHNEIQEVGSSMRGLRSLILLDLSYNHLRKVPDGLPSALEQLYMEHNNVYXVPDSYFRGAPKLLYVRLSHNSLXNNGLASNXFNSSSLLELDLSYNQLQKIPPVNXNLENLYLQGNRINEFSISSFCXVVDVVNFSKLQVLRLDGNEIKRSAMPADAPLCLRLASLIEI

SEQ ID NO: 10163 - protein, 119 aa, Homo sapiens
  MOD_RES (26)..(26): Selenocysteine
  MOD_RES (29)..(29): Selenocysteine
  MOD_RES (39)..(39): Selenocysteine
  MOD_RES (55)..(55): Selenocysteine
  MOD_RES (96)..(96): Selenocysteine
  MOD_RES (110)..(111): Selenocysteine
  MOD_RES (119)..(119): Selenocysteine
DDGQGMGRGSRPYRNRGHGRRGPGYXSGXNSEASNASEXESDHRDELSDWSLAPXEEERESFLRRGDGRRRGGGGRGQGGRGRGGGFKGNDDHSRXDNRPRNPREAKGRXXDGSLQKKX

SEQ ID NO: 10164 - protein, 76 aa, Homo sapiens
  MOD_RES (29)..(29): Selenocysteine
  MOD_RES (48)..(48): Selenocysteine
  MOD_RES (65)..(65): Selenocysteine
MEELVVEVRGSNGAFYKAFVKDVHEDSIXVAFENKLSPSGFCGLGDPXIPVHADNVILISIQLPXARIDHLVGSKI

SEQ ID NO: 10165 - protein, 252 aa, Homo sapiens
  MOD_RES (29)..(29): Selenocysteine
  MOD_RES (78)..(78): Selenocysteine
  MOD_RES (84)..(84): Selenocysteine
  MOD_RES (98)..(98): Selenocysteine
  MOD_RES (101)..(101): Selenocysteine
  MOD_RES (136)..(136): Selenocysteine
  MOD_RES (153)..(153): Selenocysteine
  MOD_RES (170)..(170): Selenocysteine
  MOD_RES (212)..(212): Selenocysteine
  MOD_RES (227)..(227): Selenocysteine
  MOD_RES (235)..(235): Selenocysteine
  MOD_RES (237)..(237): Selenocysteine
MEELVVEVRGSNGAFYKAFVKDVHEDSIXVAFENNWQPDRQIPFHDVRFPPPVGYNKDINESDEVEFYVIEYAACDAXYNEIVXIERLRSVNPNKPAXKDXFHKIKLDVPEDLRQMCAKEAAHKDFKKAVGAFSVXYDPENYQLVILSINEVXSKRAHMLIDMHFRSLRXKLSLIMRNEEASKQLESSRQLASRFHEQFIVREDLMGLAIGXHGANIQQARKVPGVXAIDLDEDXCXFHIYGEDQDAVKKAR

SEQ ID NO: 10166 - protein, 297 aa, Homo sapiens
  MOD_RES (29)..(29): Selenocysteine
  MOD_RES (102)..(102): Selenocysteine
  MOD_RES (108)..(108): Selenocysteine
  MOD_RES (122)..(122): Selenocysteine
  MOD_RES (125)..(125): Selenocysteine
  MOD_RES (160)..(160): Selenocysteine
  MOD_RES (177)..(177): Selenocysteine
  MOD_RES (194)..(194): Selenocysteine
  MOD_RES (236)..(236): Selenocysteine
  MOD_RES (251)..(251): Selenocysteine
  MOD_RES (259)..(259): Selenocysteine
  MOD_RES (261)..(261): Selenocysteine
MEELVVEVRGSNGAFYKAFVKDVHEDSIXVAFENNWQPDRQIPFHDVRFPPPVGYNKDINESDEVEVYSRANEKEPCCWWLAKVRMIKGEFYVIEYAACDAXYNEIVXIERLRSVNPNKPAXKDXFHKIKLDVPEDLRQMCAKEAAHKDFKKAVGAFSVXYDPENYQLVILSINEVXSKRAHMLIDMHFRSLRXKLSLIMRNEEASKQLESSRQLASRFHEQFIVREDLMGLAIGXHGANIQQARKVPGVXAIDLDEDXCXFHIYGEDQDAVKKARSFLEFAEDVIQVPRNLVGLKI

SEQ ID NO: 10167 - protein, 419 aa, Homo sapiens
  MOD_RES (29)..(29): Selenocysteine
  MOD_RES (102)..(102): Selenocysteine
  MOD_RES (108)..(108): Selenocysteine
  MOD_RES (122)..(122): Selenocysteine
  MOD_RES (125)..(125): Selenocysteine
  MOD_RES (160)..(160): Selenocysteine
  MOD_RES (177)..(177): Selenocysteine
  MOD_RES (194)..(194): Selenocysteine
  MOD_RES (236)..(236): Selenocysteine
  MOD_RES (251)..(251): Selenocysteine
  MOD_RES (259)..(259): Selenocysteine
  MOD_RES (261)..(261): Selenocysteine
  MOD_RES (363)..(363): Selenocysteine
  MOD_RES (371)..(371): Selenocysteine
  MOD_RES (385)..(385): Selenocysteine
  MOD_RES (393)..(393): Selenocysteine
MEELVVEVRGSNGAFYKAFVKDVHEDSIXVAFENNWQPDRQIPFHDVRFPPPVGYNKDINESDEVEVYSRANEKEPCCWWLAKVRMIKGEFYVIEYAACDAXYNEIVXIERLRSVNPNKPAXKDXFHKIKLDVPEDLRQMCAKEAAHKDFKKAVGAFSVXYDPENYQLVILSINEVXSKRAHMLIDMHFRSLRXKLSLIMRNEEASKQLESSRQLASRFHEQFIVREDLMGLAIGXHGANIQQARKVPGVXAIDLDEDXCXFHIYGEDQDAVKKARSFLEFAEDVIQVPRNLVGKVIGKNGKLIQEIVDKSGVVRVRIEAENEKNVPQEEEIMPPNSLPSNNSRVGPNAPEEKKHLDIKENSXHFSQPNSXKVQRGMVPFVFVGXKDSIANAXVLLDYHLNYLKEVDQLRLERRSLPNR

SEQ ID NO: 10168 - protein, 537 aa, Homo sapiens
  MOD_RES (29)..(29): Selenocysteine
  MOD_RES (102)..(102): Selenocysteine
  MOD_RES (108)..(108): Selenocysteine
  MOD_RES (122)..(122): Selenocysteine
  MOD_RES (125)..(125): Selenocysteine
  MOD_RES (160)..(160): Selenocysteine
  MOD_RES (177)..(177): Selenocysteine
  MOD_RES (194)..(194): Selenocysteine
  MOD_RES (236)..(236): Selenocysteine
  MOD_RES (251)..(251): Selenocysteine
  MOD_RES (259)..(259): Selenocysteine
  MOD_RES (261)..(261): Selenocysteine
  MOD_RES (363)..(363): Selenocysteine
  MOD_RES (371)..(371): Selenocysteine
  MOD_RES (406)..(406): Selenocysteine
  MOD_RES (414)..(414): Selenocysteine
  MOD_RES (440)..(440): Selenocysteine
  MOD_RES (463)..(464): Selenocysteine
  MOD_RES (466)..(466): Selenocysteine
  MOD_RES (493)..(493): Selenocysteine
  MOD_RES (501)..(501): Selenocysteine
  MOD_RES (522)..(522): Selenocysteine
  MOD_RES (529)..(529): Selenocysteine
MEELVVEVRGSNGAFYKAFVKDVHEDSIXVAFENNWQPDRQIPFHDVRFPPPVGYNKDINESDEVEVYSRANEKEPCCWWLAKVRMIKGEFYVIEYAACDAXYNEIVXIERLRSVNPNKPAXKDXFHKIKLDVPEDLRQMCAKEAAHKDFKKAVGAFSVXYDPENYQLVILSINEVXSKRAHMLIDMHFRSLRXKLSLIMRNEEASKQLESSRQLASRFHEQFIVREDLMGLAIGXHGANIQQARKVPGVXAIDLDEDXCXFHIYGEDQDAVKKARSFLEFAEDVIQVPRNLVGKVIGKNGKLIQEIVDKSGVVRVRIEAENEKNVPQEEEIMPPNSLPSNNSRVGPNAPEEKKHLDIKENSXHFSQPNSXKVQRVLVASSVVAGESQKPELKAWQGMVPFVFVGXKDSIANAXVLLDYHLNYLKLQQRKRGRASCAEEXDGGVEGEEEDKEEEDVEEASKEXXIXPEQIIVHVIQERLKEEQQMDPFRSELXAIMKGVSXLKHYRIPPVKVVGCARVKIVXRRKRSQXAWMVSNHS

SEQ ID NO: 10169 - protein, 544 aa, Homo sapiens
  MOD_RES (29)..(29): Selenocysteine
  MOD_RES (102)..(102): Selenocysteine
  MOD_RES (108)..(108): Selenocysteine
  MOD_RES (122)..(122): Selenocysteine
  MOD_RES (125)..(125): Selenocysteine
  MOD_RES (160)..(160): Selenocysteine
  MOD_RES (177)..(177): Selenocysteine
  MOD_RES (194)..(194): Selenocysteine
  MOD_RES (236)..(236): Selenocysteine
  MOD_RES (251)..(251): Selenocysteine
  MOD_RES (259)..(259): Selenocysteine
  MOD_RES (261)..(261): Selenocysteine
  MOD_RES (340)..(340): Selenocysteine
  MOD_RES (348)..(348): Selenocysteine
  MOD_RES (389)..(389): Selenocysteine
  MOD_RES (397)..(397): Selenocysteine
  MOD_RES (423)..(423): Selenocysteine
  MOD_RES (426)..(426): Selenocysteine
  MOD_RES (436)..(436): Selenocysteine
  MOD_RES (452)..(452): Selenocysteine
  MOD_RES (493)..(493): Selenocysteine
  MOD_RES (507)..(508): Selenocysteine
  MOD_RES (529)..(529): Selenocysteine
  MOD_RES (536)..(536): Selenocysteine
MEELVVEVRGSNGAFYKAFVKDVHEDSIXVAFENNWQPDRQIPFHDVRFPPPVGYNKDINESDEVEVYSRANEKEPCCWWLAKVRMIKGEFYVIEYAACDAXYNEIVXIERLRSVNPNKPAXKDXFHKIKLDVPEDLRQMCAKEAAHKDFKKAVGAFSVXYDPENYQLVILSINEVXSKRAHMLIDMHFRSLRXKLSLIMRNEEASKQLESSRQLASRFHEQFIVREDLMGLAIGXHGANIQQARKVPGVXAIDLDEDXCXFHIYGEDQDAVKKARSFLEFAEDVIQVPRNLVGKVIGKNGKLIQEIVDKSGVVRVRIEAENEKNVPQEEGMVPFVFVGXKDSIANAXVLLDYHLNYLKEVDQLRLERLQIDEQLRQIGASSRPPPNRXDKEKSYVXDDGQGMGRGSRPYRNRGHGRRGPGYXSGXNSEASNASEXESDHRDELSDWSLAPXEEERESFLRRGDGRRRGGGGRGQGGRGRGGGFKGNDDHSRXDNRPRNPREAKGRXXDGSLQIPPVKVVGCARVKIVXRRKRSQXAWMVSNHS

SEQ ID NO: 10170 - protein, 582 aa, Homo sapiens
  MOD_RES (29)..(29): Selenocysteine
  MOD_RES (102)..(102): Selenocysteine
  MOD_RES (108)..(108): Selenocysteine
  MOD_RES (122)..(122): Selenocysteine
  MOD_RES (125)..(125): Selenocysteine
  MOD_RES (160)..(160): Selenocysteine
  MOD_RES (177)..(177): Selenocysteine
  MOD_RES (194)..(194): Selenocysteine
  MOD_RES (236)..(236): Selenocysteine
  MOD_RES (251)..(251): Selenocysteine
  MOD_RES (259)..(259): Selenocysteine
  MOD_RES (261)..(261): Selenocysteine
  MOD_RES (363)..(363): Selenocysteine
  MOD_RES (371)..(371): Selenocysteine
  MOD_RES (385)..(385): Selenocysteine
  MOD_RES (393)..(393): Selenocysteine
  MOD_RES (434)..(434): Selenocysteine
  MOD_RES (442)..(442): Selenocysteine
  MOD_RES (468)..(468): Selenocysteine
  MOD_RES (485)..(485): Selenocysteine
  MOD_RES (526)..(526): Selenocysteine
  MOD_RES (540)..(541): Selenocysteine
  MOD_RES (548)..(548): Selenocysteine
  MOD_RES (557)..(557): Selenocysteine
MEELVVEVRGSNGAFYKAFVKDVHEDSIXVAFENNWQPDRQIPFHDVRFPPPVGYNKDINESDEVEVYSRANEKEPCCWWLAKVRMIKGEFYVIEYAACDAXYNEIVXIERLRSVNPNKPAXKDXFHKIKLDVPEDLRQMCAKEAAHKDFKKAVGAFSVXYDPENYQLVILSINEVXSKRAHMLIDMHFRSLRXKLSLIMRNEEASKQLESSRQLASRFHEQFIVREDLMGLAIGXHGANIQQARKVPGVXAIDLDEDXCXFHIYGEDQDAVKKARSFLEFAEDVIQVPRNLVGKVIGKNGKLIQEIVDKSGVVRVRIEAENEKNVPQEEEIMPPNSLPSNNSRVGPNAPEEKKHLDIKENSXHFSQPNSXKVQRGMVPFVFVGXKDSIANAXVLLDYHLNYLKEVDQLRLERLQIDEQLRQIGASSRPPPNRXDKEKSYVXDDGQGMGRGSRPYRNRGHGRRGPGYXSESDHRDELSDWSLAPXEEERESFLRRGDGRRRGGGGRGQGGRGRGGGFKGNDDHSRXDNRPRNPREAKGRXXDGSLQNXSSEGSRLRXGKDRNQKKEKPDSVDGQQPLVNGVP

SEQ ID NO: 10171 - protein, 586 aa, Homo sapiens
  MOD_RES (29)..(29): Selenocysteine
  MOD_RES (102)..(102): Selenocysteine
  MOD_RES (108)..(108): Selenocysteine
  MOD_RES (122)..(122): Selenocysteine
  MOD_RES (125)..(125): Selenocysteine
  MOD_RES (160)..(160): Selenocysteine
  MOD_RES (177)..(177): Selenocysteine
  MOD_RES (194)..(194): Selenocysteine
  MOD_RES (236)..(236): Selenocysteine
  MOD_RES (251)..(251): Selenocysteine
  MOD_RES (259)..(259): Selenocysteine
  MOD_RES (261)..(261): Selenocysteine
  MOD_RES (363)..(363): Selenocysteine
  MOD_RES (371)..(371): Selenocysteine
  MOD_RES (385)..(385): Selenocysteine
  MOD_RES (393)..(393): Selenocysteine
  MOD_RES (434)..(434): Selenocysteine
  MOD_RES (442)..(442): Selenocysteine
  MOD_RES (468)..(468): Selenocysteine
  MOD_RES (472)..(472): Selenocysteine
  MOD_RES (513)..(513): Selenocysteine
  MOD_RES (527)..(528): Selenocysteine
  MOD_RES (546)..(546): Selenocysteine
  MOD_RES (548)..(548): Selenocysteine
  MOD_RES (552)..(552): Selenocysteine
  MOD_RES (561)..(561): Selenocysteine
MEELVVEVRGSNGAFYKAFVKDVHEDSIXVAFENNWQPDRQIPFHDVRFPPPVGYNKDINESDEVEVYSRANEKEPCCWWLAKVRMIKGEFYVIEYAACDAXYNEIVXIERLRSVNPNKPAXKDXFHKIKLDVPEDLRQMCAKEAAHKDFKKAVGAFSVXYDPENYQLVILSINEVXSKRAHMLIDMHFRSLRXKLSLIMRNEEASKQLESSRQLASRFHEQFIVREDLMGLAIGXHGANIQQARKVPGVXAIDLDEDXCXFHIYGEDQDAVKKARSFLEFAEDVIQVPRNLVGKVIGKNGKLIQEIVDKSGVVRVRIEAENEKNVPQEEEIMPPNSLPSNNSRVGPNAPEEKKHLDIKENSXHFSQPNSXKVQRGMVPFVFVGXKDSIANAXVLLDYHLNYLKEVDQLRLERLQIDEQLRQIGASSRPPPNRXDKEKSYVXDDGQGMGRGSRPYRNRGHGRRGPGYXSAPXEEERESFLRRGDGRRRGGGGRGQGGRGRGGGFKGNDDHSRXDNRPRNPREAKGRXXDGSLQIRVDCNNERSVHXKXLQNXSSEGSRLRXGKDRNQKKEKPDSVDGQQPLVNGVP

SEQ ID NO: 10172 - protein, 590 aa, Homo sapiens
  MOD_RES (29)..(29): Selenocysteine
  MOD_RES (102)..(102): Selenocysteine
  MOD_RES (108)..(108): Selenocysteine
  MOD_RES (122)..(122): Selenocysteine
  MOD_RES (125)..(125): Selenocysteine
  MOD_RES (160)..(160): Selenocysteine
  MOD_RES (177)..(177): Selenocysteine
  MOD_RES (194)..(194): Selenocysteine
  MOD_RES (236)..(236): Selenocysteine
  MOD_RES (251)..(251): Selenocysteine
  MOD_RES (259)..(259): Selenocysteine
  MOD_RES (261)..(261): Selenocysteine
  MOD_RES (363)..(363): Selenocysteine
  MOD_RES (371)..(371): Selenocysteine
  MOD_RES (406)..(406): Selenocysteine
  MOD_RES (414)..(414): Selenocysteine
  MOD_RES (455)..(455): Selenocysteine
  MOD_RES (463)..(463): Selenocysteine
  MOD_RES (489)..(489): Selenocysteine
  MOD_RES (493)..(493): Selenocysteine
  MOD_RES (534)..(534): Selenocysteine
  MOD_RES (548)..(549): Selenocysteine
  MOD_RES (556)..(556): Selenocysteine
  MOD_RES (565)..(565): Selenocysteine
MEELVVEVRGSNGAFYKAFVKDVHEDSIXVAFENNWQPDRQIPFHDVRFPPPVGYNKDINESDEVEVYSRANEKEPCCWWLAKVRMIKGEFYVIEYAACDAXYNEIVXIERLRSVNPNKPAXKDXFHKIKLDVPEDLRQMCAKEAAHKDFKKAVGAFSVXYDPENYQLVILSINEVXSKRAHMLIDMHFRSLRXKLSLIMRNEEASKQLESSRQLASRFHEQFIVREDLMGLAIGXHGANIQQARKVPGVXAIDLDEDXCXFHIYGEDQDAVKKARSFLEFAEDVIQVPRNLVGKVIGKNGKLIQEIVDKSGVVRVRIEAENEKNVPQEEEIMPPNSLPSNNSRVGPNAPEEKKHLDIKENSXHFSQPNSXKVQRVLVASSVVAGESQKPELKAWQGMVPFVFVGXKDSIANAXVLLDYHLNYLKEVDQLRLERLQIDEQLRQIGASSRPPPNRXDKEKSYVXDDGQGMGRGSRPYRNRGHGRRGPGYXSAPXEEERESFLRRGDGRRRGGGGRGQGGRGRGGGFKGNDDHSRXDNRPRNPREAKGRXXDGSLQNXSSEGSRLRXGKDRNQKKEKPDSVDGQQPLVNGVP

SEQ ID NO: 10173 - protein, 592 aa, Homo sapiens
  MOD_RES (29)..(29): Selenocysteine
  MOD_RES (102)..(102): Selenocysteine
  MOD_RES (108)..(108): Selenocysteine
  MOD_RES (122)..(122): Selenocysteine
  MOD_RES (125)..(125): Selenocysteine
  MOD_RES (160)..(160): Selenocysteine
  MOD_RES (177)..(177): Selenocysteine
  MOD_RES (194)..(194): Selenocysteine
  MOD_RES (236)..(236): Selenocysteine
  MOD_RES (251)..(251): Selenocysteine
  MOD_RES (259)..(259): Selenocysteine
  MOD_RES (261)..(261): Selenocysteine
  MOD_RES (361)..(361): Selenocysteine
  MOD_RES (369)..(369): Selenocysteine
  MOD_RES (383)..(383): Selenocysteine
  MOD_RES (391)..(391): Selenocysteine
  MOD_RES (432)..(432): Selenocysteine
  MOD_RES (440)..(440): Selenocysteine
  MOD_RES (466)..(466): Selenocysteine
  MOD_RES (469)..(469): Selenocysteine
  MOD_RES (479)..(479): Selenocysteine
  MOD_RES (495)..(495): Selenocysteine
  MOD_RES (536)..(536): Selenocysteine
  MOD_RES (550)..(551): Selenocysteine
  MOD_RES (558)..(558): Selenocysteine
  MOD_RES (567)..(567): Selenocysteine
MEELVVEVRGSNGAFYKAFVKDVHEDSIXVAFENNWQPDRQIPFHDVRFPPPVGYNKDINESDEVEVYSRANEKEPCCWWLAKVRMIKGEFYVIEYAACDAXYNEIVXIERLRSVNPNKPAXKDXFHKIKLDVPEDLRQMCAKEAAHKDFKKAVGAFSVXYDPENYQLVILSINEVXSKRAHMLIDMHFRSLRXKLSLIMRNEEASKQLESSRQLASRFHEQFIVREDLMGLAIGXHGANIQQARKVPGVXAIDLDEDXCXFHIYGEDQDAVKKARSFLEFAEDVIQVPRNLVVIGKNGKLIQEIVDKSGVVRVRIEAENEKNVPQEEEIMPPNSLPSNNSRVGPNAPEEKKHLDIKENSXHFSQPNSXKVQRGMVPFVFVGXKDSIANAXVLLDYHLNYLKEVDQLRLERLQIDEQLRQIGASSRPPPNRXDKEKSYVXDDGQGMGRGSRPYRNRGHGRRGPGYXSGXNSEASNASEXESDHRDELSDWSLAPXEEERESFLRRGDGRRRGGGGRGQGGRGRGGGFKGNDDHSRXDNRPRNPREAKGRXXDGSLQNXSSEGSRLRXGKDRNQKKEKPDSVDGQQPLVNGVP

SEQ ID NO: 10174 - protein, 611 aa, Homo sapiens
  MOD_RES (29)..(29): Selenocysteine
  MOD_RES (102)..(102): Selenocysteine
  MOD_RES (108)..(108): Selenocysteine
  MOD_RES (122)..(122): Selenocysteine
  MOD_RES (125)..(125): Selenocysteine
  MOD_RES (160)..(160): Selenocysteine
  MOD_RES (177)..(177): Selenocysteine
  MOD_RES (194)..(194): Selenocysteine
  MOD_RES (236)..(236): Selenocysteine
  MOD_RES (251)..(251): Selenocysteine
  MOD_RES (259)..(259): Selenocysteine
  MOD_RES (261)..(261): Selenocysteine
  MOD_RES (363)..(363): Selenocysteine
  MOD_RES (371)..(371): Selenocysteine
  MOD_RES (385)..(385): Selenocysteine
  MOD_RES (393)..(393): Selenocysteine
  MOD_RES (434)..(434): Selenocysteine
  MOD_RES (442)..(442): Selenocysteine
  MOD_RES (468)..(468): Selenocysteine
  MOD_RES (471)..(471): Selenocysteine
  MOD_RES (481)..(481): Selenocysteine
  MOD_RES (497)..(497): Selenocysteine
  MOD_RES (538)..(538): Selenocysteine
  MOD_RES (552)..(553): Selenocysteine
  MOD_RES (571)..(571): Selenocysteine
  MOD_RES (573)..(573): Selenocysteine
  MOD_RES (577)..(577): Selenocysteine
  MOD_RES (586)..(586): Selenocysteine
MEELVVEVRGSNGAFYKAFVKDVHEDSIXVAFENNWQPDRQIPFHDVRFPPPVGYNKDINESDEVEVYSRANEKEPCCWWLAKVRMIKGEFYVIEYAACDAXYNEIVXIERLRSVNPNKPAXKDXFHKIKLDVPEDLRQMCAKEAAHKDFKKAVGAFSVXYDPENYQLVILSINEVXSKRAHMLIDMHFRSLRXKLSLIMRNEEASKQLESSRQLASRFHEQFIVREDLMGLAIGXHGANIQQARKVPGVXAIDLDEDXCXFHIYGEDQDAVKKARSFLEFAEDVIQVPRNLVGKVIGKNGKLIQEIVDKSGVVRVRIEAENEKNVPQEEEIMPPNSLPSNNSRVGPNAPEEKKHLDIKENSXHFSQPNSXKVQRGMVPFVFVGXKDSIANAXVLLDYHLNYLKEVDQLRLERLQIDEQLRQIGASSRPPPNRXDKEKSYVXDDGQGMGRGSRPYRNRGHGRRGPGYXSGXNSEASNASEXESDHRDELSDWSLAPXEEERESFLRRGDGRRRGGGGRGQGGRGRGGGFKGNDDHSRXDNRPRNPREAKGRXXDGSLQIRVDCNNERSVHXKXLQNXSSEGSRLRXGKDRNQKKEKPDSVDGQQPLVNGVP

SEQ ID NO: 10175 - protein, 632 aa, Homo sapiens
  MOD_RES (29)..(29): Selenocysteine
  MOD_RES (102)..(102): Selenocysteine
  MOD_RES (108)..(108): Selenocysteine
  MOD_RES (122)..(122): Selenocysteine
  MOD_RES (125)..(125): Selenocysteine
  MOD_RES (160)..(160): Selenocysteine
  MOD_RES (177)..(177): Selenocysteine
  MOD_RES (194)..(194): Selenocysteine
  MOD_RES (236)..(236): Selenocysteine
  MOD_RES (251)..(251): Selenocysteine
  MOD_RES (259)..(259): Selenocysteine
  MOD_RES (261)..(261): Selenocysteine
  MOD_RES (363)..(363): Selenocysteine
  MOD_RES (371)..(371): Selenocysteine
  MOD_RES (406)..(406): Selenocysteine
  MOD_RES (414)..(414): Selenocysteine
  MOD_RES (455)..(455): Selenocysteine
  MOD_RES (463)..(463): Selenocysteine
  MOD_RES (489)..(489): Selenocysteine
  MOD_RES (492)..(492): Selenocysteine
  MOD_RES (502)..(502): Selenocysteine
  MOD_RES (518)..(518): Selenocysteine
  MOD_RES (559)..(559): Selenocysteine
  MOD_RES (573)..(574): Selenocysteine
  MOD_RES (592)..(592): Selenocysteine
  MOD_RES (594)..(594): Selenocysteine
  MOD_RES (598)..(598): Selenocysteine
  MOD_RES (607)..(607): Selenocysteine
MEELVVEVRGSNGAFYKAFVKDVHEDSIXVAFENNWQPDRQIPFHDVRFPPPVGYNKDINESDEVEVYSRANEKEPCCWWLAKVRMIKGEFYVIEYAACDAXYNEIVXIERLRSVNPNKPAXKDXFHKIKLDVPEDLRQMCAKEAAHKDFKKAVGAFSVXYDPENYQLVILSINEVXSKRAHMLIDMHFRSLRXKLSLIMRNEEASKQLESSRQLASRFHEQFIVREDLMGLAIGXHGANIQQARKVPGVXAIDLDEDXCXFHIYGEDQDAVKKARSFLEFAEDVIQVPRNLVGKVIGKNGKLIQEIVDKSGVVRVRIEAENEKNVPQEEEIMPPNSLPSNNSRVGPNAPEEKKHLDIKENSXHFSQPNSXKVQRVLVASSVVAGESQKPELKAWQGMVPFVFVGXKDSIANAXVLLDYHLNYLKEVDQLRLERLQIDEQLRQIGASSRPPPNRXDKEKSYVXDDGQGMGRGSRPYRNRGHGRRGPGYXSGXNSEASNASEXESDHRDELSDWSLAPXEEERESFLRRGDGRRRGGGGRGQGGRGRGGGFKGNDDHSRXDNRPRNPREAKGRXXDGSLQIRVDCNNERSVHXKXLQNXSSEGSRLRXGKDRNQKKEKPDSVDGQQPLVNGVP

SEQ ID NO: 10176 - protein, 31 aa, Homo sapiens
MEELVVEVRGSNGAFYKHWDFGELHCSGRGL

SEQ ID NO: 10177 - protein, 102 aa, Homo sapiens
  MOD_RES (1)..(1): Any amino acid
  MOD_RES (41)..(41): Selenocysteine
  MOD_RES (56)..(56): Selenocysteine
  MOD_RES (64)..(64): Selenocysteine
  MOD_RES (66)..(66): Selenocysteine
XSLIMRNEEASKQLESSRQLASRFHEQFIVREDLMGLAIGXHGANIQQARKVPGVXAIDLDEDXCXFHIYGEDQDAVKKARSFLEFAEDVIQVPRNLVGLKI

SEQ ID NO: 10178 - protein, 1121 aa, Homo sapiens
  MOD_RES (4)..(4): Selenocysteine
  MOD_RES (14)..(14): Selenocysteine
  MOD_RES (100)..(100): Selenocysteine
  MOD_RES (119)..(119): Selenocysteine
  MOD_RES (122)..(122): Selenocysteine
  MOD_RES (132)..(132): Selenocysteine
  MOD_RES (146)..(146): Selenocysteine
  MOD_RES (153)..(153): Selenocysteine
  MOD_RES (223)..(223): Selenocysteine
  MOD_RES (233)..(233): Selenocysteine
  MOD_RES (249)..(250): Selenocysteine
  MOD_RES (357)..(358): Selenocysteine
  MOD_RES (364)..(364): Selenocysteine
  MOD_RES (375)..(375): Selenocysteine
  MOD_RES (380)..(380): Selenocysteine
  MOD_RES (395)..(395): Selenocysteine
  MOD_RES (412)..(412): Selenocysteine
  MOD_RES (416)..(416): Selenocysteine
  MOD_RES (424)..(424): Selenocysteine
  MOD_RES (451)..(451): Selenocysteine
  MOD_RES (477)..(477): Selenocysteine
  MOD_RES (495)..(495): Selenocysteine
  MOD_RES (506)..(506): Selenocysteine
  MOD_RES (522)..(522): Selenocysteine
  MOD_RES (525)..(527): Selenocysteine
  MOD_RES (542)..(542): Selenocysteine
  MOD_RES (560)..(560): Selenocysteine
  MOD_RES (627)..(627): Selenocysteine
  MOD_RES (635)..(635): Selenocysteine
  MOD_RES (639)..(639): Selenocysteine
  MOD_RES (657)..(657): Selenocysteine
  MOD_RES (660)..(660): Selenocysteine
  MOD_RES (673)..(673): Selenocysteine
  MOD_RES (680)..(680): Selenocysteine
  MOD_RES (704)..(704): Selenocysteine
  MOD_RES (707)..(707): Selenocysteine
  MOD_RES (720)..(720): Selenocysteine
  MOD_RES (732)..(732): Selenocysteine
  MOD_RES (736)..(736): Selenocysteine
  MOD_RES (752)..(752): Selenocysteine
  MOD_RES (755)..(756): Selenocysteine
  MOD_RES (765)..(765): Selenocysteine
  MOD_RES (801)..(801): Selenocysteine
  MOD_RES (803)..(803): Selenocysteine
  MOD_RES (811)..(811): Selenocysteine
  MOD_RES (813)..(813): Selenocysteine
  MOD_RES (830)..(830): Selenocysteine
  MOD_RES (845)..(845): Selenocysteine
  MOD_RES (853)..(853): Selenocysteine
  MOD_RES (863)..(863): Selenocysteine
  MOD_RES (884)..(884): Selenocysteine
  MOD_RES (906)..(906): Selenocysteine
  MOD_RES (911)..(911): Selenocysteine
  MOD_RES (1013)..(1013): Selenocysteine
  MOD_RES (1024)..(1024): Selenocysteine
  MOD_RES (1045)..(1045): Selenocysteine
  MOD_RES (1111)..(1111): Selenocysteine
MAPXLFQKLFSKRXGLGAPGRDARDPDCGFSWPLPEFDPSQIRLIVYQDCERRGRNVLFDSSVKRRNEDISVSGSRCSSDANMLGEMMFGSVAMSYKGSXLKIHQIRSPPQLMLSKVFXARXGSSICGSLNXLQDSLEFINQDNNXLKADNNXVINGLLGNIGLSQFCSPRRAFSEQGPLRLIRSASFFAVHSNPMDMPGRELNEDRDSGIARSASLSSLLIXPFPSPNSSLXRSCASSYQRRWRRSQXXSLENGVFPRWSIEESFNLSDESCGPNPGIVRKKKIAIGVIFSLSKDEDENNKFNEFFFSHFPLFESHMNKLKSAIEQAMKMSRRSADASQRSLAYNRIVDALNEFRXXICNLYXMPRIGEPVWLXMMSGXPEKNHLCYRFMKEFXFLMENASKNQFLPALIXAVLXNHLAWVPXVMPNGQPPIKIFLEKHSSQSVDMLAKXHPYNPLWAQLGDLYGAIGSPVRLARXVVVGKRQDMVQRLLYFLXYFIRCSELQEXHLLENGEDEAIVMPGXVIXXXLEKGEIEESEYVLVXMHRNKSSLLFKESEEIRXPNCNCKYCSHPLLGQNVENISQQEREDIQNSSKELLGISDECQMISPSDCQEENAVDVKQYRDKLRXCFDAKLEXVVCXGSVPVDKCALSESGLESXEEXWQSEKLLDSDSHXGKAMRSXGMVVEKKPPDKIVPASFSCEAAQXKVXFLIGDSMSPDSDXELRSQAVVDQIXRHHXKPLKEERGAIDQHQEXKQXXKDQSGESDXQNMVSEEPCELPCWNHSDPESMSLFDEYFNDDSIEXRXIDDVPFKXSXDSKDHCCMLEFSKILCXKNNKQNNEFCKCIEXVPQDSCKXCFPQQDQRDXLSILVPHGDKESSDKKIAVGXEWDIPRNESSDSALGDSESEDXGHDMXRQVSSYYGGEQEDWAEEDEIPFPGSKLIEVSAVQPNIANFGRSLLGGYCSSYVPDFVLQGIGSDERFRQCLMSDLSHAVQHPVLDEPIAEAVCIIADMDKWXVQVASSQRRVXDNKLGKEVLVSSLVSNLLHSXLQLYKHNLSPNFCVMHLEDRLQELYFKSKMLSEYLRGQMRVHVKELGVVLGIESSDLPLLAAVASXHSPYVAQILL

SEQ ID NO: 10179 - protein, 508 aa, Homo sapiens
  MOD_RES (4)..(4): Selenocysteine
  MOD_RES (14)..(14): Selenocysteine
  MOD_RES (105)..(105): Selenocysteine
  MOD_RES (145)..(145): Selenocysteine
  MOD_RES (164)..(164): Selenocysteine
  MOD_RES (167)..(167): Selenocysteine
  MOD_RES (177)..(177): Selenocysteine
  MOD_RES (191)..(191): Selenocysteine
  MOD_RES (198)..(198): Selenocysteine
  MOD_RES (268)..(268): Selenocysteine
  MOD_RES (278)..(278): Selenocysteine
  MOD_RES (294)..(295): Selenocysteine
  MOD_RES (402)..(403): Selenocysteine
  MOD_RES (409)..(409): Selenocysteine
  MOD_RES (420)..(420): Selenocysteine
  MOD_RES (425)..(425): Selenocysteine
  MOD_RES (440)..(440): Selenocysteine
  MOD_RES (457)..(457): Selenocysteine
  MOD_RES (461)..(461): Selenocysteine
  MOD_RES (469)..(469): Selenocysteine
  MOD_RES (496)..(496): Selenocysteine
MAPXLFQKLFSKRXGLGAPGRDARDPDCGFSWPLPEFDPSQIRLIVYQDCERRGRNVLFDSSVKRRNEDISVSKLGSDAQVKVFGKCCQLKPGGDSSSSLDSSVXSSSDIKDQCLKYQGSRCSSDANMLGEMMFGSVAMSYKGSXLKIHQIRSPPQLMLSKVFXARXGSSICGSLNXLQDSLEFINQDNNXLKADNNXVINGLLGNIGLSQFCSPRRAFSEQGPLRLIRSASFFAVHSNPMDMPGRELNEDRDSGIARSASLSSLLIXPFPSPNSSLXRSCASSYQRRWRRSQXXSLENGVFPRWSIEESFNLSDESCGPNPGIVRKKKIAIGVIFSLSKDEDENNKFNEFFFSHFPLFESHMNKLKSAIEQAMKMSRRSADASQRSLAYNRIVDALNEFRXXICNLYXMPRIGEPVWLXMMSGXPEKNHLCYRFMKEFXFLMENASKNQFLPALIXAVLXNHLAWVPXVMPNGQPPIKIFLEKHSSQSVDMLAKXHPYNPLWAQLGM

SEQ ID NO: 10180 - protein, 1166 aa, Homo sapiens
  MOD_RES (4)..(4): Selenocysteine
  MOD_RES (14)..(14): Selenocysteine
  MOD_RES (105)..(105): Selenocysteine
  MOD_RES (145)..(145): Selenocysteine
  MOD_RES (164)..(164): Selenocysteine
  MOD_RES (167)..(167): Selenocysteine
  MOD_RES (177)..(177): Selenocysteine
  MOD_RES (191)..(191): Selenocysteine
  MOD_RES (198)..(198): Selenocysteine
  MOD_RES (268)..(268): Selenocysteine
  MOD_RES (278)..(278): Selenocysteine
  MOD_RES (294)..(295): Selenocysteine
  MOD_RES (402)..(403): Selenocysteine
  MOD_RES (409)..(409): Selenocysteine
  MOD_RES (420)..(420): Selenocysteine
  MOD_RES (425)..(425): Selenocysteine
  MOD_RES (440)..(440): Selenocysteine
  MOD_RES (457)..(457): Selenocysteine
  MOD_RES (461)..(461): Selenocysteine
  MOD_RES (469)..(469): Selenocysteine
  MOD_RES (496)..(496): Selenocysteine
  MOD_RES (522)..(522): Selenocysteine
  MOD_RES (540)..(540): Selenocysteine
  MOD_RES (551)..(551): Selenocysteine
  MOD_RES (567)..(567): Selenocysteine
  MOD_RES (570)..(572): Selenocysteine
  MOD_RES (587)..(587): Selenocysteine
  MOD_RES (605)..(605): Selenocysteine
  MOD_RES (672)..(672): Selenocysteine
  MOD_RES (680)..(680): Selenocysteine
  MOD_RES (684)..(684): Selenocysteine
  MOD_RES (702)..(702): Selenocysteine
  MOD_RES (705)..(705): Selenocysteine
  MOD_RES (718)..(718): Selenocysteine
  MOD_RES (725)..(725): Selenocysteine
  MOD_RES (749)..(749): Selenocysteine
  MOD_RES (752)..(752): Selenocysteine
  MOD_RES (765)..(765): Selenocysteine
  MOD_RES (777)..(777): Selenocysteine
  MOD_RES (781)..(781): Selenocysteine
  MOD_RES (797)..(797): Selenocysteine
  MOD_RES (800)..(801): Selenocysteine
  MOD_RES (810)..(810): Selenocysteine
  MOD_RES (846)..(846): Selenocysteine
  MOD_RES (848)..(848): Selenocysteine
  MOD_RES (856)..(856): Selenocysteine
  MOD_RES (858)..(858): Selenocysteine
  MOD_RES (875)..(875): Selenocysteine
  MOD_RES (890)..(890): Selenocysteine
  MOD_RES (898)..(898): Selenocysteine
  MOD_RES (908)..(908): Selenocysteine
  MOD_RES (929)..(929): Selenocysteine
  MOD_RES (951)..(951): Selenocysteine
  MOD_RES (956)..(956): Selenocysteine
  MOD_RES (1058)..(1058): Selenocysteine
  MOD_RES (1069)..(1069): Selenocysteine
  MOD_RES (1090)..(1090): Selenocysteine
  MOD_RES (1156)..(1156): Selenocysteine
MAPXLFQKLFSKRXGLGAPGRDARDPDCGFSWPLPEFDPSQIRLIVYQDCERRGRNVLFDSSVKRRNEDISVSKLGSDAQVKVFGKCCQLKPGGDSSSSLDSSVXSSSDIKDQCLKYQGSRCSSDANMLGEMMFGSVAMSYKGSXLKIHQIRSPPQLMLSKVFXARXGSSICGSLNXLQDSLEFINQDNNXLKADNNXVINGLLGNIGLSQFCSPRRAFSEQGPLRLIRSASFFAVHSNPMDMPGRELNEDRDSGIARSASLSSLLIXPFPSPNSSLXRSCASSYQRRWRRSQXXSLENGVFPRWSIEESFNLSDESCGPNPGIVRKKKIAIGVIFSLSKDEDENNKFNEFFFSHFPLFESHMNKLKSAIEQAMKMSRRSADASQRSLAYNRIVDALNEFRXXICNLYXMPRIGEPVWLXMMSGXPEKNHLCYRFMKEFXFLMENASKNQFLPALIXAVLXNHLAWVPXVMPNGQPPIKIFLEKHSSQSVDMLAKXHPYNPLWAQLGDLYGAIGSPVRLARXVVVGKRQDMVQRLLYFLXYFIRCSELQEXHLLENGEDEAIVMPGXVIXXXLEKGEIEESEYVLVXMHRNKSSLLFKESEEIRXPNCNCKYCSHPLLGQNVENISQQEREDIQNSSKELLGISDECQMISPSDCQEENAVDVKQYRDKLRXCFDAKLEXVVCXGSVPVDKCALSESGLESXEEXWQSEKLLDSDSHXGKAMRSXGMVVEKKPPDKIVPASFSCEAAQXKVXFLIGDSMSPDSDXELRSQAVVDQIXRHHXKPLKEERGAIDQHQEXKQXXKDQSGESDXQNMVSEEPCELPCWNHSDPESMSLFDEYFNDDSIEXRXIDDVPFKXSXDSKDHCCMLEFSKILCXKNNKQNNEFCKCIEXVPQDSCKXCFPQQDQRDXLSILVPHGDKESSDKKIAVGXEWDIPRNESSDSALGDSESEDXGHDMXRQVSSYYGGEQEDWAEEDEIPFPGSKLIEVSAVQPNIANFGRSLLGGYCSSYVPDFVLQGIGSDERFRQCLMSDLSHAVQHPVLDEPIAEAVCIIADMDKWXVQVASSQRRVXDNKLGKEVLVSSLVSNLLHSXLQLYKHNLSPNFCVMHLEDRLQELYFKSKMLSEYLRGQMRVHVKELGVVLGIESSDLPLLAAVASXHSPYVAQILL

SEQ ID NO: 10181 - protein, 1138 aa, Homo sapiens
  MOD_RES (4)..(4): Selenocysteine
  MOD_RES (14)..(14): Selenocysteine
  MOD_RES (105)..(105): Selenocysteine
  MOD_RES (145)..(145): Selenocysteine
  MOD_RES (164)..(164): Selenocysteine
  MOD_RES (167)..(167): Selenocysteine
  MOD_RES (177)..(177): Selenocysteine
  MOD_RES (191)..(191): Selenocysteine
  MOD_RES (198)..(198): Selenocysteine
  MOD_RES (240)..(240): Selenocysteine
  MOD_RES (250)..(250): Selenocysteine
  MOD_RES (266)..(267): Selenocysteine
  MOD_RES (374)..(375): Selenocysteine
  MOD_RES (381)..(381): Selenocysteine
  MOD_RES (392)..(392): Selenocysteine
  MOD_RES (397)..(397): Selenocysteine
  MOD_RES (412)..(412): Selenocysteine
  MOD_RES (429)..(429): Selenocysteine
  MOD_RES (433)..(433): Selenocysteine
  MOD_RES (441)..(441): Selenocysteine
  MOD_RES (468)..(468): Selenocysteine
  MOD_RES (494)..(494): Selenocysteine
  MOD_RES (512)..(512): Selenocysteine
  MOD_RES (523)..(523): Selenocysteine
  MOD_RES (539)..(539): Selenocysteine
  MOD_RES (542)..(544): Selenocysteine
  MOD_RES (559)..(559): Selenocysteine
  MOD_RES (577)..(577): Selenocysteine
  MOD_RES (644)..(644): Selenocysteine
  MOD_RES (652)..(652): Selenocysteine
  MOD_RES (656)..(656): Selenocysteine
  MOD_RES (674)..(674): Selenocysteine
  MOD_RES (677)..(677): Selenocysteine
  MOD_RES (690)..(690): Selenocysteine
  MOD_RES (697)..(697): Selenocysteine
  MOD_RES (721)..(721): Selenocysteine
  MOD_RES (724)..(724): Selenocysteine
  MOD_RES (737)..(737): Selenocysteine
  MOD_RES (749)..(749): Selenocysteine
  MOD_RES (753)..(753): Selenocysteine
  MOD_RES (769)..(769): Selenocysteine
  MOD_RES (772)..(773): Selenocysteine
  MOD_RES (782)..(782): Selenocysteine
  MOD_RES (818)..(818): Selenocysteine
  MOD_RES (820)..(820): Selenocysteine
  MOD_RES (828)..(828): Selenocysteine
  MOD_RES (830)..(830): Selenocysteine
  MOD_RES (847)..(847): Selenocysteine
  MOD_RES (862)..(862): Selenocysteine
  MOD_RES (870)..(870): Selenocysteine
  MOD_RES (880)..(880): Selenocysteine
  MOD_RES (901)..(901): Selenocysteine
  MOD_RES (923)..(923): Selenocysteine
  MOD_RES (928)..(928): Selenocysteine
  MOD_RES (1030)..(1030): Selenocysteine
  MOD_RES (1041)..(1041): Selenocysteine
  MOD_RES (1062)..(1062): Selenocysteine
  MOD_RES (1128)..(1128): Selenocysteine
MAPXLFQKLFSKRXGLGAPGRDARDPDCGFSWPLPEFDPSQIRLIVYQDCERRGRNVLFDSSVKRRNEDISVSKLGSDAQVKVFGKCCQLKPGGDSSSSLDSSVXSSSDIKDQCLKYQGSRCSSDANMLGEMMFGSVAMSYKGSXLKIHQIRSPPQLMLSKVFXARXGSSICGSLNXLQDSLEFINQDNNXLKADNNXVINGLLGNIVHSNPMDMPGRELNEDRDSGIARSASLSSLLIXPFPSPNSSLXRSCASSYQRRWRRSQXXSLENGVFPRWSIEESFNLSDESCGPNPGIVRKKKIAIGVIFSLSKDEDENNKFNEFFFSHFPLFESHMNKLKSAIEQAMKMSRRSADASQRSLAYNRIVDALNEFRXXICNLYXMPRIGEPVWLXMMSGXPEKNHLCYRFMKEFXFLMENASKNQFLPALIXAVLXNHLAWVPXVMPNGQPPIKIFLEKHSSQSVDMLAKXHPYNPLWAQLGDLYGAIGSPVRLARXVVVGKRQDMVQRLLYFLXYFIRCSELQEXHLLENGEDEAIVMPGXVIXXXLEKGEIEESEYVLVXMHRNKSSLLFKESEEIRXPNCNCKYCSHPLLGQNVENISQQEREDIQNSSKELLGISDECQMISPSDCQEENAVDVKQYRDKLRXCFDAKLEXVVCXGSVPVDKCALSESGLESXEEXWQSEKLLDSDSHXGKAMRSXGMVVEKKPPDKIVPASFSCEAAQXKVXFLIGDSMSPDSDXELRSQAVVDQIXRHHXKPLKEERGAIDQHQEXKQXXKDQSGESDXQNMVSEEPCELPCWNHSDPESMSLFDEYFNDDSIEXRXIDDVPFKXSXDSKDHCCMLEFSKILCXKNNKQNNEFCKCIEXVPQDSCKXCFPQQDQRDXLSILVPHGDKESSDKKIAVGXEWDIPRNESSDSALGDSESEDXGHDMXRQVSSYYGGEQEDWAEEDEIPFPGSKLIEVSAVQPNIANFGRSLLGGYCSSYVPDFVLQGIGSDERFRQCLMSDLSHAVQHPVLDEPIAEAVCIIADMDKWXVQVASSQRRVXDNKLGKEVLVSSLVSNLLHSXLQLYKHNLSPNFCVMHLEDRLQELYFKSKMLSEYLRGQMRVHVKELGVVLGIESSDLPLLAAVASXHSPYVAQILL

SEQ ID NO: 10182 - protein, 918 aa, Homo sapiens
  MOD_RES (28)..(28): Selenocysteine
  MOD_RES (38)..(38): Selenocysteine
  MOD_RES (54)..(55): Selenocysteine
  MOD_RES (162)..(163): Selenocysteine
  MOD_RES (169)..(169): Selenocysteine
  MOD_RES (180)..(180): Selenocysteine
  MOD_RES (185)..(185): Selenocysteine
  MOD_RES (200)..(200): Selenocysteine
  MOD_RES (217)..(217): Selenocysteine
  MOD_RES (221)..(221): Selenocysteine
  MOD_RES (229)..(229): Selenocysteine
  MOD_RES (256)..(256): Selenocysteine
  MOD_RES (282)..(282): Selenocysteine
  MOD_RES (300)..(300): Selenocysteine
  MOD_RES (311)..(311): Selenocysteine
  MOD_RES (327)..(327): Selenocysteine
  MOD_RES (330)..(332): Selenocysteine
  MOD_RES (357)..(357): Selenocysteine
  MOD_RES (424)..(424): Selenocysteine
  MOD_RES (432)..(432): Selenocysteine
  MOD_RES (436)..(436): Selenocysteine
  MOD_RES (454)..(454): Selenocysteine
  MOD_RES (457)..(457): Selenocysteine
  MOD_RES (470)..(470): Selenocysteine
  MOD_RES (477)..(477): Selenocysteine
  MOD_RES (501)..(501): Selenocysteine
  MOD_RES (504)..(504): Selenocysteine
  MOD_RES (517)..(517): Selenocysteine
  MOD_RES (529)..(529): Selenocysteine
  MOD_RES (533)..(533): Selenocysteine
  MOD_RES (549)..(549): Selenocysteine
  MOD_RES (552)..(553): Selenocysteine
  MOD_RES (562)..(562): Selenocysteine
  MOD_RES (598)..(598): Selenocysteine
  MOD_RES (600)..(600): Selenocysteine
  MOD_RES (608)..(608): Selenocysteine
  MOD_RES (610)..(610): Selenocysteine
  MOD_RES (627)..(627): Selenocysteine
  MOD_RES (642)..(642): Selenocysteine
  MOD_RES (650)..(650): Selenocysteine
  MOD_RES (660)..(660): Selenocysteine
  MOD_RES (681)..(681): Selenocysteine
  MOD_RES (703)..(703): Selenocysteine
  MOD_RES (708)..(708): Selenocysteine
  MOD_RES (810)..(810): Selenocysteine
  MOD_RES (821)..(821): Selenocysteine
  MOD_RES (842)..(842): Selenocysteine
  MOD_RES (908)..(908): Selenocysteine
MDMPGRELNEDRDSGIARSASLSSLLIXPFPSPNSSLXRSCASSYQRRWRRSQXXSLENGVFPRWSIEESFNLSDESCGPNPGIVRKKKIAIGVIFSLSKDEDENNKFNEFFFSHFPLFESHMNKLKSAIEQAMKMSRRSADASQRSLAYNRIVDALNEFRXXICNLYXMPRIGEPVWLXMMSGXPEKNHLCYRFMKEFXFLMENASKNQFLPALIXAVLXNHLAWVPXVMPNGQPPIKIFLEKHSSQSVDMLAKXHPYNPLWAQLGDLYGAIGSPVRLARXVVVGKRQDMVQRLLYFLXYFIRCSELQEXHLLENGEDEAIVMPGXVIXXXLEKGEIEESEYVLVLLFKESEEIRXPNCNCKYCSHPLLGQNVENISQQEREDIQNSSKELLGISDECQMISPSDCQEENAVDVKQYRDKLRXCFDAKLEXVVCXGSVPVDKCALSESGLESXEEXWQSEKLLDSDSHXGKAMRSXGMVVEKKPPDKIVPASFSCEAAQXKVXFLIGDSMSPDSDXELRSQAVVDQIXRHHXKPLKEERGAIDQHQEXKQXXKDQSGESDXQNMVSEEPCELPCWNHSDPESMSLFDEYFNDDSIEXRXIDDVPFKXSXDSKDHCCMLEFSKILCXKNNKQNNEFCKCIEXVPQDSCKXCFPQQDQRDXLSILVPHGDKESSDKKIAVGXEWDIPRNESSDSALGDSESEDXGHDMXRQVSSYYGGEQEDWAEEDEIPFPGSKLIEVSAVQPNIANFGRSLLGGYCSSYVPDFVLQGIGSDERFRQCLMSDLSHAVQHPVLDEPIAEAVCIIADMDKWXVQVASSQRRVXDNKLGKEVLVSSLVSNLLHSXLQLYKHNLSPNFCVMHLEDRLQELYFKSKMLSEYLRGQMRVHVKELGVVLGIESSDLPLLAAVASXHSPYVAQILL

SEQ ID NO: 10183 - protein, 241 aa, Homo sapiens
  MOD_RES (18)..(18): Selenocysteine
  MOD_RES (39)..(39): Selenocysteine
  MOD_RES (49)..(49): Selenocysteine
  MOD_RES (76)..(76): Selenocysteine
  MOD_RES (87)..(87): Selenocysteine
  MOD_RES (116)..(116): Selenocysteine
  MOD_RES (125)..(125): Selenocysteine
  MOD_RES (140)..(141): Selenocysteine
  MOD_RES (153)..(153): Selenocysteine
  MOD_RES (156)..(156): Selenocysteine
  MOD_RES (163)..(163): Selenocysteine
LMISKVFSARMGSFCGSXNNLQDSFEYINQDPNLGKLNXNQNSLGPCRXGSNLGLLQACSSKLLQGVAEGGPLRLXRSASFFAAHSXPVDMPSRGQNEDRDSGIARSASLSSLLIXPFPSPSSSXSSSSSYQRRWLRSQXXSLENGIIPRRSXDEXFSLAEEXCSSNPAMVRRKKIAISIIFSLCEKEEAQRNFQDFFFSHFPLFESHMNRLKSAIEKAMISCRKIAESSLRVQFYVSRLM

SEQ ID NO: 10184 - protein, 1114 aa, Homo sapiens
  MOD_RES (4)..(4): Selenocysteine
  MOD_RES (76)..(76): Selenocysteine
  MOD_RES (80)..(80): Selenocysteine
  MOD_RES (129)..(129): Selenocysteine
  MOD_RES (154)..(154): Selenocysteine
  MOD_RES (183)..(183): Selenocysteine
  MOD_RES (204)..(204): Selenocysteine
  MOD_RES (214)..(214): Selenocysteine
  MOD_RES (222)..(222): Selenocysteine
  MOD_RES (251)..(251): Selenocysteine
  MOD_RES (260)..(260): Selenocysteine
  MOD_RES (275)..(276): Selenocysteine
  MOD_RES (288)..(288): Selenocysteine
  MOD_RES (291)..(291): Selenocysteine
  MOD_RES (298)..(298): Selenocysteine
  MOD_RES (385)..(385): Selenocysteine
  MOD_RES (402)..(402): Selenocysteine
  MOD_RES (407)..(407): Selenocysteine
  MOD_RES (422)..(422): Selenocysteine
  MOD_RES (439)..(439): Selenocysteine
  MOD_RES (443)..(443): Selenocysteine
  MOD_RES (451)..(451): Selenocysteine
  MOD_RES (468)..(468): Selenocysteine
  MOD_RES (478)..(478): Selenocysteine
  MOD_RES (502)..(502): Selenocysteine
  MOD_RES (504)..(504): Selenocysteine
  MOD_RES (522)..(522): Selenocysteine
  MOD_RES (536)..(536): Selenocysteine
  MOD_RES (555)..(555): Selenocysteine
  MOD_RES (571)..(571): Selenocysteine
  MOD_RES (586)..(586): Selenocysteine
  MOD_RES (596)..(596): Selenocysteine
  MOD_RES (605)..(605): Selenocysteine
  MOD_RES (692)..(692): Selenocysteine
  MOD_RES (718)..(718): Selenocysteine
  MOD_RES (821)..(821): Selenocysteine
  MOD_RES (829)..(829): Selenocysteine
  MOD_RES (837)..(837): Selenocysteine
  MOD_RES (883)..(883): Selenocysteine
  MOD_RES (919)..(919): Selenocysteine
  MOD_RES (937)..(937): Selenocysteine
  MOD_RES (954)..(954): Selenocysteine
  MOD_RES (964)..(964): Selenocysteine
  MOD_RES (981)..(981): Selenocysteine
  MOD_RES (1001)..(1001): Selenocysteine
  MOD_RES (1010)..(1010): Selenocysteine
  MOD_RES (1016)..(1016): Selenocysteine
  MOD_RES (1077)..(1077): Selenocysteine
  MOD_RES (1099)..(1099): Selenocysteine
  MOD_RES (1104)..(1104): Selenocysteine
MAPXLLQKLFNKRGSSGSSAAASAQGRAPKEGPAFSWSCSEFDLNEIRLIVYQDCDRRGRQVLFDSKAVQKIEEVXAQKXEDVPIKISAKCCQGSSSVSSSSSSSISSHSSSGGSSHHAKEQLPKYQYXRPASDVNMLGEMMFGSVAMSYKGSXLKIHYIRSPPQLMISKVFSARMGSFCGSXNNLQDSFEYINQDPNLGKLNXNQNSLGPCRXGSNLAHSXPVDMPSRGQNEDRDSGIARSASLSSLLIXPFPSPSSSXSSSSSYQRRWLRSQXXSLENGIIPRRSXDEXFSLAEEXCSSNPAMVRRKKIAISIIFSLCEKEEAQRNFQDFFFSHFPLFESHMNRLKSAIEKAMISCRKIAESSLRVQFYVSRLMEALGEFRGXIWNLYSVPRIAEPVWLXMMSGXLEKNQLCQRFLKEFXLLIEQINKNQFFAALLXAVLXYHLAWVPXVMPVDHPPIKAFSEKRXSQSVNMLAKXHPYNPLWAQLGDLYGAIGSPVRLXRXVVVGKQKDLVQRILYVLXYFLRCSELQENQLXWSGNHGEGDQVLNGSKIIXALEKGEVEESEYVVIXVRNEPALVPPILPPXAAERHNPWPXGFPECPEGXDSRDLGLKPDKEANRRPEQGSEACSAGCLGPASDASWKPQNAFCGDEKNKEAPQDGSSRLPSCEVLGAGMKMDQQAVCELLKVEMPXRLPDRSVAWPCPDRHLREKPSLEKVXFQIGSFASPESDFESRMKKMEERVKACGPSLEASEAADVAQDPQVSRSPFKPGFQENVCCPQNRLSEGDEGESDKGFAEDRGSRNDMAADIAGQLSHAADLGXASHGAGGXGGRRLEAXRGLYVKAAEGPVLEPVAPRCVQRGPGLVAGANIPCGDDNKKANFRXEGDIPRNESSDSALGDSDDEACASAMLDLGHGGDRXGGSLEVELPLPRSQSISXQNVRNFGRSLLAGYCPXYMPDLVLHGXGSDEKLKQCLVADLVHXVHHPVLDEPIAEAVCIIADXDKWSVQVAXSQRKVXDNMKLGQDVLVSSQVSSLLQSILQLYKLHLPADFCIMHLEDRLQEMYLKSKMLSEYLRGHXRVHVKELGVVLGIESNDLPLLXAIASXHSPYVAQILL

SEQ ID NO: 10185 - protein, 673 aa, Homo sapiens
  MOD_RES (5)..(5): Selenocysteine
  MOD_RES (8)..(9): Selenocysteine
  MOD_RES (39)..(39): Selenocysteine
  MOD_RES (45)..(45): Selenocysteine
  MOD_RES (51)..(51): Selenocysteine
  MOD_RES (54)..(54): Selenocysteine
  MOD_RES (99)..(99): Selenocysteine
  MOD_RES (103)..(103): Selenocysteine
  MOD_RES (152)..(152): Selenocysteine
  MOD_RES (177)..(177): Selenocysteine
  MOD_RES (206)..(206): Selenocysteine
  MOD_RES (227)..(227): Selenocysteine
  MOD_RES (237)..(237): Selenocysteine
  MOD_RES (245)..(245): Selenocysteine
  MOD_RES (274)..(274): Selenocysteine
  MOD_RES (283)..(283): Selenocysteine
  MOD_RES (298)..(299): Selenocysteine
  MOD_RES (311)..(311): Selenocysteine
  MOD_RES (314)..(314): Selenocysteine
  MOD_RES (321)..(321): Selenocysteine
  MOD_RES (408)..(408): Selenocysteine
  MOD_RES (425)..(425): Selenocysteine
  MOD_RES (430)..(430): Selenocysteine
  MOD_RES (445)..(445): Selenocysteine
  MOD_RES (462)..(462): Selenocysteine
  MOD_RES (466)..(466): Selenocysteine
  MOD_RES (474)..(474): Selenocysteine
  MOD_RES (491)..(491): Selenocysteine
  MOD_RES (501)..(501): Selenocysteine
  MOD_RES (525)..(525): Selenocysteine
  MOD_RES (527)..(527): Selenocysteine
  MOD_RES (545)..(545): Selenocysteine
  MOD_RES (559)..(559): Selenocysteine
  MOD_RES (578)..(578): Selenocysteine
  MOD_RES (594)..(594): Selenocysteine
  MOD_RES (609)..(609): Selenocysteine
  MOD_RES (619)..(619): Selenocysteine
  MOD_RES (628)..(628): Selenocysteine
MCGGXANXXNQPESWQDSARCVSDAVPGAGRIYRALLCXKIKKHXGVDRSXDHXELDNSWSCSEFDLNEIRLIVYQDCDRRGRQVLFDSKAVQKIEEVXAQKXEDVPIKISAKCCQGSSSVSSSSSSSISSHSSSGGSSHHAKEQLPKYQYXRPASDVNMLGEMMFGSVAMSYKGSXLKIHYIRSPPQLMISKVFSARMGSFCGSXNNLQDSFEYINQDPNLGKLNXNQNSLGPCRXGSNLAHSXPVDMPSRGQNEDRDSGIARSASLSSLLIXPFPSPSSSXSSSSSYQRRWLRSQXXSLENGIIPRRSXDEXFSLAEEXCSSNPAMVRRKKIAISIIFSLCEKEEAQRNFQDFFFSHFPLFESHMNRLKSAIEKAMISCRKIAESSLRVQFYVSRLMEALGEFRGXIWNLYSVPRIAEPVWLXMMSGXLEKNQLCQRFLKEFXLLIEQINKNQFFAALLXAVLXYHLAWVPXVMPVDHPPIKAFSEKRXSQSVNMLAKXHPYNPLWAQLGDLYGAIGSPVRLXRXVVVGKQKDLVQRILYVLXYFLRCSELQENQLXWSGNHGEGDQVLNGSKIIXALEKGEVEESEYVVIXVRNEPALVPPILPPXAAERHNPWPXGFPECPEGXDSRDLGLKPDKEANRRPEQGSEACSAGCLGPASDASWKPQNAFCG

SEQ ID NO: 10186 - protein, 197 aa, Homo sapiens
  MOD_RES (102)..(102): Selenocysteine
  MOD_RES (114)..(114): Selenocysteine
  MOD_RES (138)..(138): Selenocysteine
GVGEAAQGGEPGQPAQPPPQPHPPPPQQQHKEEMAAEAGEAVASPMDDGDRAEWADIDPVPQNDGPNPVVQIIYSDKFRDVYDYFRAVLQRDERSERAFKLXRDAIELNAANYXVWHFRRVLLKSLQKDLHEEMNYIXAIIEEQPKNYQVWHHRRVLVEWLRDPSQELEFIADILNQDAKNYHAWQHRQWVIQEFKL

SEQ ID NO: 10187 - protein, 379 aa, Homo sapiens
  MOD_RES (4)..(4): Selenocysteine
  MOD_RES (120)..(120): Selenocysteine
  MOD_RES (132)..(132): Selenocysteine
  MOD_RES (156)..(156): Selenocysteine
  MOD_RES (247)..(248): Selenocysteine
  MOD_RES (263)..(263): Selenocysteine
  MOD_RES (350)..(350): Selenocysteine
  MOD_RES (369)..(369): Selenocysteine
  MOD_RES (375)..(375): Selenocysteine
MAAXEGVGEAAQGGEPGQPAQPPPQPHPPPPQQQHKEEMAAEAGEAVASPMDDGFVSLDSPSYVLYRDRAEWADIDPVPQNDGPNPVVQIIYSDKFRDVYDYFRAVLQRDERSERAFKLXRDAIELNAANYXVWHFRRVLLKSLQKDLHEEMNYIXAIIEEQPKNYQVWHHRRVLVEWLRDPSQELEFIADILNQDAKNYHAWQHRQWVIQEFKLWDNELQYVDQLLKEDVRNNSVWNQRYFVISNXXGYNDRAVLEREVQYXLEMIKLVPHNESAWNYLKGILQDRGLSKYPNLLNQLLDLQPSHSSPYLIAFLVDIYEDMLENQCDNKEDILNKALELCEILAKEKDXIRKEYWRYIGRSLQSKHSXENDSPXNVQQ

SEQ ID NO: 10188 - protein, 117 aa, Homo sapiens
  MOD_RES (4)..(4): Selenocysteine
  MOD_RES (89)..(89): Selenocysteine
  MOD_RES (115)..(115): Selenocysteine
MAAXEGVGEAAQGGEPGQPAQPPPQPHPPPPQQQHKEEMAAEAGEAVASPMDDGFVSLDSPSYVLYRHFRRVLLKSLQKDLHEEMNYIXAIIEEQPKNYQVWNLNFGIMSCSMWXNF

SEQ ID NO: 10189 - protein, 67 aa, Homo sapiens
  MOD_RES (4)..(4): Selenocysteine
MAAXEGVGEAAQGGEPGQPAQPPPQPHPPPPQQQHKEEMAAEAGEAVASPMDDGFVSLDSPSYVLYS

SEQ ID NO: 10190 - protein, 60 aa, Homo sapiens
  MOD_RES (5)..(5): Selenocysteine
MNYIXAIIEEQPKNYQVWHHRRVLVEWLRDPSQELEFIADILNQDAKNYHAWQHRQWVIQ

SEQ ID NO: 10191 - protein, 228 aa, Homo sapiens
  MOD_RES (5)..(5): Selenocysteine
  MOD_RES (96)..(97): Selenocysteine
  MOD_RES (112)..(112): Selenocysteine
  MOD_RES (199)..(199): Selenocysteine
  MOD_RES (218)..(218): Selenocysteine
  MOD_RES (224)..(224): Selenocysteine
MNYIXAIIEEQPKNYQVWHHRRVLVEWLRDPSQELEFIADILNQDAKNYHAWQHRQWVIQEFKLWDNELQYVDQLLKEDVRNNSVWNQRYFVISNXXGYNDRAVLEREVQYXLEMIKLVPHNESAWNYLKGILQDRGLSKYPNLLNQLLDLQPSHSSPYLIAFLVDIYEDMLENQCDNKEDILNKALELCEILAKEKDXIRKEYWRYIGRSLQSKHSXENDSPXNVQQ

SEQ ID NO: 10192 - protein, 249 aa, Homo sapiens
  MOD_RES (58)..(58): Selenocysteine
  MOD_RES (70)..(70): Selenocysteine
  MOD_RES (94)..(94): Selenocysteine
  MOD_RES (185)..(186): Selenocysteine
  MOD_RES (201)..(201): Selenocysteine
MSVFRDRAEWADIDPVPQNDGPNPVVQIIYSDKFRDVYDYFRAVLQRDERSERAFKLXRDAIELNAANYXVWHFRRVLLKSLQKDLHEEMNYIXAIIEEQPKNYQVWHHRRVLVEWLRDPSQELEFIADILNQDAKNYHAWQHRQWVIQEFKLWDNELQYVDQLLKEDVRNNSVWNQRYFVISNXXGYNDRAVLEREVQYXLEMIKLVPHNESAWNYLKGILQDRGLSKYPNLLNQLLDLQPSHSSPYL

SEQ ID NO: 10193 - protein, 437 aa, Homo sapiens
  MOD_RES (8)..(8): Selenocysteine
  MOD_RES (42)..(42): Selenocysteine
  MOD_RES (44)..(44): Selenocysteine
  MOD_RES (90)..(90): Selenocysteine
  MOD_RES (124)..(124): Selenocysteine
  MOD_RES (153)..(153): Selenocysteine
  MOD_RES (165)..(165): Selenocysteine
  MOD_RES (214)..(214): Selenocysteine
  MOD_RES (218)..(218): Selenocysteine
  MOD_RES (225)..(225): Selenocysteine
  MOD_RES (252)..(252): Selenocysteine
  MOD_RES (278)..(278): Selenocysteine
  MOD_RES (363)..(363): Selenocysteine
  MOD_RES (397)..(397): Selenocysteine
  MOD_RES (412)..(413): Selenocysteine
  MOD_RES (430)..(430): Selenocysteine
  MOD_RES (436)..(436): Selenocysteine
MASPSSFXYYCPPSSSPVWSEPLYSLRPEHARERLQDDSVEXVXSIEQAKVEEKIQEVFSSYKFNHLVPRLVLQREKHFHYLKRGLRQLXDAYECLDASRPWLCYWILHSLELLDEPIPQIVAXDVCQFLELCQSPEGGFGGGPGQYPHLAPXYAAVNALCIIGXEEAYDIINREKLLQYLYSLKQPDGSFLMHVGGEVDVRSAYCAASVASLXNIIXPDLFEGXAEWIARCQNWEGGIGGVPGMEAHGGYXFCGLAALVILKRERSLNLKSLLQWVXSRQMRFEGGFQGRCNKLVDGCYSFWQAGLLPLLHRALHAQGDPALSMSHWMFHQQALQEYILMCCQCPAGGLLDKPGKSRDFYHXCYCLSGLSIAQHFGSGAMLHDVVLGVPENALQPXHPVYNIGPDKVIQAXXYFLQKPVPGFEELKDEXSAEPAXD

SEQ ID NO: 10194 - protein, 257 aa, Homo sapiens
  MOD_RES (6)..(7): Selenocysteine
  MOD_RES (24)..(24): Selenocysteine
  MOD_RES (31)..(31): Selenocysteine
  MOD_RES (68)..(68): Selenocysteine
  MOD_RES (70)..(70): Selenocysteine
  MOD_RES (104)..(104): Selenocysteine
  MOD_RES (148)..(148): Selenocysteine
  MOD_RES (151)..(151): Selenocysteine
  MOD_RES (163)..(163): Selenocysteine
  MOD_RES (184)..(184): Selenocysteine
  MOD_RES (186)..(186): Selenocysteine
  MOD_RES (194)..(194): Selenocysteine
MAQRMXXQLLLLLVWVAVVGEAQXRIAWARXELLNVCMNAKHHKEKPGPEDKLHEQCRPWRKNACCSXNXSQEAHKDVSYLYRFNWNHCGEMAPACKRHFIQDXCLYECSPNLGPWIQQVDQSWRKERVLNVPLCKEDCEQWWEDCRXSYXCKSNWHKGWNWXSGFNKCAVGAACQPFHFYFPXPXVLCNEIWXHSYKVSNYSRGSGRCIQMWFDPAQGNPNEEVARFYAAAMSGAGPWAAWPFLLSLALMLLWLLS

SEQ ID NO: 10195 - protein, 232 aa, Homo sapiens
  MOD_RES (14)..(14): Selenocysteine
  MOD_RES (16)..(16): Selenocysteine
  MOD_RES (21)..(21): Selenocysteine
  MOD_RES (33)..(33): Selenocysteine
  MOD_RES (76)..(76): Selenocysteine
  MOD_RES (84)..(84): Selenocysteine
  MOD_RES (92)..(92): Selenocysteine
  MOD_RES (118)..(118): Selenocysteine
  MOD_RES (137)..(137): Selenocysteine
  MOD_RES (170)..(170): Selenocysteine
  MOD_RES (177)..(177): Selenocysteine
  MOD_RES (181)..(181): Selenocysteine
  MOD_RES (183)..(183): Selenocysteine
  MOD_RES (187)..(187): Selenocysteine
  MOD_RES (190)..(190): Selenocysteine
  MOD_RES (196)..(196): Selenocysteine
  MOD_RES (228)..(228): Selenocysteine
MAAAKCRNRRRELXDXLQAEXDQLEDEKSALQXEIANLLKEKEKLEFILAAHRPACKIPDDLGFPEEMSVASLDLXGGLPEVAXPESEEAFXLPLLNDPEPKPSVEPVKSISSMELKXEPFDDFLFPASSRPSGSEXARSVPDMDLSGSFYAADWEPLHSGSLGMGPMAXELEPLCXPVVXCXPSCXAYXSSFVFXYPEADSFPSCAAAHRKGSSSNEPSSDSLSSPXLLAL

SEQ ID NO: 10196 - protein, 137 aa, Homo sapiens
  MOD_RES (121)..(121): Selenocysteine
MMFSGFNADYEASSSRCSSASPAGDSLSYYHSPADSFSSMGSPVNAQCQLHSHGHCHLDQSGPAVAGAARPRLLRGPIADQSPSPFRSPRPLRWGLLQGWRCEDHDRRPSAEHWQEGQGGXVISRRRREKENPKGKE

SEQ ID NO: 10197 - protein, 344 aa, Homo sapiens
  MOD_RES (51)..(51): Selenocysteine
  MOD_RES (63)..(63): Selenocysteine
  MOD_RES (65)..(65): Selenocysteine
  MOD_RES (69)..(69): Selenocysteine
  MOD_RES (90)..(90): Selenocysteine
  MOD_RES (114)..(114): Selenocysteine
  MOD_RES (116)..(116): Selenocysteine
  MOD_RES (133)..(133): Selenocysteine
  MOD_RES (145)..(145): Selenocysteine
  MOD_RES (188)..(188): Selenocysteine
  MOD_RES (196)..(196): Selenocysteine
  MOD_RES (204)..(204): Selenocysteine
  MOD_RES (230)..(230): Selenocysteine
  MOD_RES (249)..(249): Selenocysteine
  MOD_RES (282)..(282): Selenocysteine
  MOD_RES (289)..(289): Selenocysteine
  MOD_RES (293)..(293): Selenocysteine
  MOD_RES (295)..(295): Selenocysteine
  MOD_RES (299)..(299): Selenocysteine
  MOD_RES (302)..(302): Selenocysteine
  MOD_RES (308)..(308): Selenocysteine
  MOD_RES (340)..(340): Selenocysteine
MMFSGFNADYEASSSRCSSASPAGDSLSYYHSPADSFSSMGSPVNAQDFCXDLAVSSANFIPXVXAISXSPDLQWLVQPALVSSVAPSQXRAPHPFGVPAPSAGAYSRAGVVKXMXGGRAQSIGRRGKVEQEXDQLEDEKSALQXEIANLLKEKEKLEFILAAHRPACKIPDDLGFPEEMSVASLDLXGGLPEVAXPESEEAFXLPLLNDPEPKPSVEPVKSISSMELKXEPFDDFLFPASSRPSGSEXARSVPDMDLSGSFYAADWEPLHSGSLGMGPMAXELEPLCXPVVXCXPSCXAYXSSFVFXYPEADSFPSCAAAHRKGSSSNEPSSDSLSSPXLLAL

SEQ ID NO: 10198 - protein, 380 aa, Homo sapiens
  MOD_RES (51)..(51): Selenocysteine
  MOD_RES (63)..(63): Selenocysteine
  MOD_RES (65)..(65): Selenocysteine
  MOD_RES (69)..(69): Selenocysteine
  MOD_RES (90)..(90): Selenocysteine
  MOD_RES (114)..(114): Selenocysteine
  MOD_RES (116)..(116): Selenocysteine
  MOD_RES (162)..(162): Selenocysteine
  MOD_RES (164)..(164): Selenocysteine
  MOD_RES (169)..(169): Selenocysteine
  MOD_RES (181)..(181): Selenocysteine
  MOD_RES (224)..(224): Selenocysteine
  MOD_RES (232)..(232): Selenocysteine
  MOD_RES (240)..(240): Selenocysteine
  MOD_RES (266)..(266): Selenocysteine
  MOD_RES (285)..(285): Selenocysteine
  MOD_RES (318)..(318): Selenocysteine
  MOD_RES (325)..(325): Selenocysteine
  MOD_RES (329)..(329): Selenocysteine
  MOD_RES (331)..(331): Selenocysteine
  MOD_RES (335)..(335): Selenocysteine
  MOD_RES (338)..(338): Selenocysteine
  MOD_RES (344)..(344): Selenocysteine
  MOD_RES (376)..(376): Selenocysteine
MMFSGFNADYEASSSRCSSASPAGDSLSYYHSPADSFSSMGSPVNAQDFCXDLAVSSANFIPXVXAISXSPDLQWLVQPALVSSVAPSQXRAPHPFGVPAPSAGAYSRAGVVKXMXGGRAQSIGRRGKVEQLSPEEEEKRRIRRERNKMAAAKCRNRRRELXDXLQAEXDQLEDEKSALQXEIANLLKEKEKLEFILAAHRPACKIPDDLGFPEEMSVASLDLXGGLPEVAXPESEEAFXLPLLNDPEPKPSVEPVKSISSMELKXEPFDDFLFPASSRPSGSEXARSVPDMDLSGSFYAADWEPLHSGSLGMGPMAXELEPLCXPVVXCXPSCXAYXSSFVFXYPEADSFPSCAAAHRKGSSSNEPSSDSLSSPXLLAL

SEQ ID NO: 10199 - protein, 176 aa, Homo sapiens
  MOD_RES (51)..(51): Selenocysteine
  MOD_RES (63)..(63): Selenocysteine
  MOD_RES (65)..(65): Selenocysteine
  MOD_RES (69)..(69): Selenocysteine
  MOD_RES (90)..(90): Selenocysteine
  MOD_RES (114)..(114): Selenocysteine
  MOD_RES (116)..(116): Selenocysteine
  MOD_RES (162)..(162): Selenocysteine
  MOD_RES (164)..(164): Selenocysteine
  MOD_RES (170)..(170): Selenocysteine
MMFSGFNADYEASSSRCSSASPAGDSLSYYHSPADSFSSMGSPVNAQDFCXDLAVSSANFIPXVXAISXSPDLQWLVQPALVSSVAPSQXRAPHPFGVPAPSAGAYSRAGVVKXMXGGRAQSIGRRGKVEQLSPEEEEKRRIRRERNKMAAAKCRNRRRELXDXLQAVGXLWVAPF

SEQ ID NO: 10200 - protein, 170 aa, Homo sapiens
  MOD_RES (51)..(51): Selenocysteine
  MOD_RES (63)..(63): Selenocysteine
  MOD_RES (65)..(65): Selenocysteine
  MOD_RES (69)..(69): Selenocysteine
  MOD_RES (90)..(90): Selenocysteine
  MOD_RES (114)..(114): Selenocysteine
  MOD_RES (116)..(116): Selenocysteine
MMFSGFNADYEASSSRCSSASPAGDSLSYYHSPADSFSSMGSPVNAQDFCXDLAVSSANFIPXVXAISXSPDLQWLVQPALVSSVAPSQXRAPHPFGVPAPSAGAYSRAGVVKXMXGGRAQSIGRRGKVEQVRNSSVLFLGMWGLGGKQPRRCRSPVQRMKPLMGLAAHP

SEQ ID NO: 10201 - protein, 142 aa, Homo sapiens
  MOD_RES (2)..(2): Selenocysteine
  MOD_RES (19)..(19): Selenocysteine
  MOD_RES (31)..(31): Selenocysteine
  MOD_RES (74)..(74): Selenocysteine
  MOD_RES (82)..(82): Selenocysteine
  MOD_RES (90)..(90): Selenocysteine
  MOD_RES (116)..(116): Selenocysteine
  MOD_RES (135)..(135): Selenocysteine
MXGGRAQSIGRRGKVEQEXDQLEDEKSALQXEIANLLKEKEKLEFILAAHRPACKIPDDLGFPEEMSVASLDLXGGLPEVAXPESEEAFXLPLLNDPEPKPSVEPVKSISSMELKXEPFDDFLFPASSRPSGSEXARSVPDM

SEQ ID NO: 10202 - protein, 266 aa, Homo sapiens
  MOD_RES (2)..(2): Selenocysteine
  MOD_RES (48)..(48): Selenocysteine
  MOD_RES (50)..(50): Selenocysteine
  MOD_RES (55)..(55): Selenocysteine
  MOD_RES (67)..(67): Selenocysteine
  MOD_RES (110)..(110): Selenocysteine
  MOD_RES (118)..(118): Selenocysteine
  MOD_RES (126)..(126): Selenocysteine
  MOD_RES (152)..(152): Selenocysteine
  MOD_RES (171)..(171): Selenocysteine
  MOD_RES (204)..(204): Selenocysteine
  MOD_RES (211)..(211): Selenocysteine
  MOD_RES (215)..(215): Selenocysteine
  MOD_RES (217)..(217): Selenocysteine
  MOD_RES (221)..(221): Selenocysteine
  MOD_RES (224)..(224): Selenocysteine
  MOD_RES (230)..(230): Selenocysteine
  MOD_RES (262)..(262): Selenocysteine
MXGGRAQSIGRRGKVEQLSPEEEEKRRIRRERNKMAAAKCRNRRRELXDXLQAEXDQLEDEKSALQXEIANLLKEKEKLEFILAAHRPACKIPDDLGFPEEMSVASLDLXGGLPEVAXPESEEAFXLPLLNDPEPKPSVEPVKSISSMELKXEPFDDFLFPASSRPSGSEXARSVPDMDLSGSFYAADWEPLHSGSLGMGPMAXELEPLCXPVVXCXPSCXAYXSSFVFXYPEADSFPSCAAAHRKGSSSNEPSSDSLSSPXLLAL

SEQ ID NO: 10203 - protein, 83 aa, Homo sapiens
  MOD_RES (50)..(50): Selenocysteine
  MOD_RES (78)..(78): Selenocysteine
  MOD_RES (80)..(80): Selenocysteine
RLLRGPIADQSPSPFRSPRPLRWGLLQGWRCEDHDRRPSAEHWQEGQGGXEEEEKRRIRRERNKMAAAKCRNRRRELXDXLQA

SEQ ID NO: 10204 - protein, 302 aa, Homo sapiens
  MOD_RES (37)..(37): Selenocysteine
  MOD_RES (57)..(57): Selenocysteine
  MOD_RES (59)..(59): Selenocysteine
  MOD_RES (62)..(63): Selenocysteine
  MOD_RES (74)..(74): Selenocysteine
  MOD_RES (102)..(102): Selenocysteine
  MOD_RES (106)..(106): Selenocysteine
  MOD_RES (125)..(125): Selenocysteine
  MOD_RES (128)..(129): Selenocysteine
  MOD_RES (149)..(149): Selenocysteine
  MOD_RES (151)..(151): Selenocysteine
  MOD_RES (232)..(232): Selenocysteine
  MOD_RES (241)..(241): Selenocysteine
  MOD_RES (246)..(246): Selenocysteine
  MOD_RES (265)..(265): Selenocysteine
  MOD_RES (271)..(271): Selenocysteine
  MOD_RES (284)..(284): Selenocysteine
MFQAFPGDYDSGSRCSSSPSAESQYLSSVDSFGSPPXAAASQECAGLGEMPGSFVPXVXAIXXSQDLQWLVQPXLISSMAQSQGQPLASQPPVVDPYDMPGXSYSXPGMSGYSSGGASGSGGPSXSGXXSGPGPARPARARPRRPREEXEXDQLEEEKAELESEIAELQKEKERLEFVLVAHKPGCKIPYEEGPGPGPLAEVRDLPGSAPAKEDGFSWLLPPPPPPPLPFQXSQDAPPNLXASLFXHSEVQVLGDPFPVVNPSYXSSFVLXCPEVSAFAGAQRXSGSDQPSDPLNSPSLLAL

SEQ ID NO: 10205 - protein, 237 aa, Homo sapiens
  MOD_RES (37)..(37): Selenocysteine
  MOD_RES (57)..(57): Selenocysteine
  MOD_RES (59)..(59): Selenocysteine
  MOD_RES (62)..(63): Selenocysteine
  MOD_RES (74)..(74): Selenocysteine
  MOD_RES (102)..(102): Selenocysteine
  MOD_RES (106)..(106): Selenocysteine
  MOD_RES (125)..(125): Selenocysteine
  MOD_RES (128)..(129): Selenocysteine
  MOD_RES (149)..(149): Selenocysteine
  MOD_RES (151)..(151): Selenocysteine
  MOD_RES (180)..(180): Selenocysteine
  MOD_RES (187)..(187): Selenocysteine
MFQAFPGDYDSGSRCSSSPSAESQYLSSVDSFGSPPXAAASQECAGLGEMPGSFVPXVXAIXXSQDLQWLVQPXLISSMAQSQGQPLASQPPVVDPYDMPGXSYSXPGMSGYSSGGASGSGGPSXSGXXSGPGPARPARARPRRPREEXLXPEEEEKRRVRRERNKLAAAKCRNRRRELXDRLQAEXDQLEEEKAELESEIAELQKEKERLEFVLVAHKPGCKIPYEEGPGPGPLAE

SEQ ID NO: 10206 - protein, 291 aa, Homo sapiens
  MOD_RES (37)..(37): Selenocysteine
  MOD_RES (57)..(57): Selenocysteine
  MOD_RES (59)..(59): Selenocysteine
  MOD_RES (62)..(63): Selenocysteine
  MOD_RES (74)..(74): Selenocysteine
  MOD_RES (102)..(102): Selenocysteine
  MOD_RES (106)..(106): Selenocysteine
  MOD_RES (125)..(125): Selenocysteine
  MOD_RES (128)..(129): Selenocysteine
  MOD_RES (149)..(149): Selenocysteine
  MOD_RES (151)..(151): Selenocysteine
  MOD_RES (180)..(180): Selenocysteine
  MOD_RES (187)..(187): Selenocysteine
  MOD_RES (254)..(254): Selenocysteine
  MOD_RES (260)..(260): Selenocysteine
  MOD_RES (273)..(273): Selenocysteine
MFQAFPGDYDSGSRCSSSPSAESQYLSSVDSFGSPPXAAASQECAGLGEMPGSFVPXVXAIXXSQDLQWLVQPXLISSMAQSQGQPLASQPPVVDPYDMPGXSYSXPGMSGYSSGGASGSGGPSXSGXXSGPGPARPARARPRRPREEXLXPEEEEKRRVRRERNKLAAAKCRNRRRELXDRLQAEXDQLEEEKAELESEIAELQKEKERLEFVLVAHKPGCKIPYEEGPGPGPLAEEVQVLGDPFPVVNPSYXSSFVLXCPEVSAFAGAQRXSGSDQPSDPLNSPSLLAL

SEQ ID NO: 10207 - protein, 338 aa, Homo sapiens
  MOD_RES (37)..(37): Selenocysteine
  MOD_RES (57)..(57): Selenocysteine
  MOD_RES (59)..(59): Selenocysteine
  MOD_RES (62)..(63): Selenocysteine
  MOD_RES (74)..(74): Selenocysteine
  MOD_RES (102)..(102): Selenocysteine
  MOD_RES (106)..(106): Selenocysteine
  MOD_RES (125)..(125): Selenocysteine
  MOD_RES (128)..(129): Selenocysteine
  MOD_RES (149)..(149): Selenocysteine
  MOD_RES (151)..(151): Selenocysteine
  MOD_RES (180)..(180): Selenocysteine
  MOD_RES (187)..(187): Selenocysteine
  MOD_RES (268)..(268): Selenocysteine
  MOD_RES (277)..(277): Selenocysteine
  MOD_RES (282)..(282): Selenocysteine
  MOD_RES (301)..(301): Selenocysteine
  MOD_RES (307)..(307): Selenocysteine
  MOD_RES (320)..(320): Selenocysteine
MFQAFPGDYDSGSRCSSSPSAESQYLSSVDSFGSPPXAAASQECAGLGEMPGSFVPXVXAIXXSQDLQWLVQPXLISSMAQSQGQPLASQPPVVDPYDMPGXSYSXPGMSGYSSGGASGSGGPSXSGXXSGPGPARPARARPRRPREEXLXPEEEEKRRVRRERNKLAAAKCRNRRRELXDRLQAEXDQLEEEKAELESEIAELQKEKERLEFVLVAHKPGCKIPYEEGPGPGPLAEVRDLPGSAPAKEDGFSWLLPPPPPPPLPFQXSQDAPPNLXASLFXHSEVQVLGDPFPVVNPSYXSSFVLXCPEVSAFAGAQRXSGSDQPSDPLNSPSLLAL

SEQ ID NO: 10208 - protein, 177 aa, Homo sapiens
  MOD_RES (37)..(37): Selenocysteine
  MOD_RES (57)..(57): Selenocysteine
  MOD_RES (59)..(59): Selenocysteine
  MOD_RES (62)..(63): Selenocysteine
  MOD_RES (74)..(74): Selenocysteine
  MOD_RES (102)..(102): Selenocysteine
  MOD_RES (106)..(106): Selenocysteine
  MOD_RES (125)..(125): Selenocysteine
  MOD_RES (128)..(129): Selenocysteine
  MOD_RES (149)..(149): Selenocysteine
MFQAFPGDYDSGSRCSSSPSAESQYLSSVDSFGSPPXAAASQECAGLGEMPGSFVPXVXAIXXSQDLQWLVQPXLISSMAQSQGQPLASQPPVVDPYDMPGXSYSXPGMSGYSSGGASGSGGPSXSGXXSGPGPARPARARPRRPREEXVSKGHQNLAWVGGSKRGRKFLMNGGGLH

SEQ ID NO: 10209 - protein, 195 aa, Homo sapiens
  MOD_RES (37)..(37): Selenocysteine
  MOD_RES (44)..(44): Selenocysteine
  MOD_RES (125)..(125): Selenocysteine
  MOD_RES (134)..(134): Selenocysteine
  MOD_RES (139)..(139): Selenocysteine
  MOD_RES (158)..(158): Selenocysteine
  MOD_RES (164)..(164): Selenocysteine
  MOD_RES (177)..(177): Selenocysteine
MFQAFPGDYDSGSRCSSSPSAESQYLSSVDSFGSPPXAAASQEXDQLEEEKAELESEIAELQKEKERLEFVLVAHKPGCKIPYEEGPGPGPLAEVRDLPGSAPAKEDGFSWLLPPPPPPPLPFQXSQDAPPNLXASLFXHSEVQVLGDPFPVVNPSYXSSFVLXCPEVSAFAGAQRXSGSDQPSDPLNSPSLLAL

SEQ ID NO: 10210 - protein, 263 aa, Homo sapiens
  MOD_RES (37)..(37): Selenocysteine
  MOD_RES (63)..(63): Selenocysteine
  MOD_RES (67)..(67): Selenocysteine
  MOD_RES (86)..(86): Selenocysteine
  MOD_RES (89)..(90): Selenocysteine
  MOD_RES (110)..(110): Selenocysteine
  MOD_RES (112)..(112): Selenocysteine
  MOD_RES (193)..(193): Selenocysteine
  MOD_RES (202)..(202): Selenocysteine
  MOD_RES (207)..(207): Selenocysteine
  MOD_RES (226)..(226): Selenocysteine
  MOD_RES (232)..(232): Selenocysteine
  MOD_RES (245)..(245): Selenocysteine
MFQAFPGDYDSGSRCSSSPSAESQYLSSVDSFGSPPXAAASQSQGQPLASQPPVVDPYDMPGXSYSXPGMSGYSSGGASGSGGPSXSGXXSGPGPARPARARPRRPREEXEXDQLEEEKAELESEIAELQKEKERLEFVLVAHKPGCKIPYEEGPGPGPLAEVRDLPGSAPAKEDGFSWLLPPPPPPPLPFQXSQDAPPNLXASLFXHSEVQVLGDPFPVVNPSYXSSFVLXCPEVSAFAGAQRXSGSDQPSDPLNSPSLLAL

SEQ ID NO: 10211 - protein, 299 aa, Homo sapiens
  MOD_RES (37)..(37): Selenocysteine
  MOD_RES (63)..(63): Selenocysteine
  MOD_RES (67)..(67): Selenocysteine
  MOD_RES (86)..(86): Selenocysteine
  MOD_RES (89)..(90): Selenocysteine
  MOD_RES (110)..(110): Selenocysteine
  MOD_RES (112)..(112): Selenocysteine
  MOD_RES (141)..(141): Selenocysteine
  MOD_RES (148)..(148): Selenocysteine
  MOD_RES (229)..(229): Selenocysteine
  MOD_RES (238)..(238): Selenocysteine
  MOD_RES (243)..(243): Selenocysteine
  MOD_RES (262)..(262): Selenocysteine
  MOD_RES (268)..(268): Selenocysteine
  MOD_RES (281)..(281): Selenocysteine
MFQAFPGDYDSGSRCSSSPSAESQYLSSVDSFGSPPXAAASQSQGQPLASQPPVVDPYDMPGXSYSXPGMSGYSSGGASGSGGPSXSGXXSGPGPARPARARPRRPREEXLXPEEEEKRRVRRERNKLAAAKCRNRRRELXDRLQAEXDQLEEEKAELESEIAELQKEKERLEFVLVAHKPGCKIPYEEGPGPGPLAEVRDLPGSAPAKEDGFSWLLPPPPPPPLPFQXSQDAPPNLXASLFXHSEVQVLGDPFPVVNPSYXSSFVLXCPEVSAFAGAQRXSGSDQPSDPLNSPSLLAL

SEQ ID NO: 10212 - protein, 137 aa, Homo sapiens
  MOD_RES (8)..(8): Selenocysteine
  MOD_RES (10)..(10): Selenocysteine
  MOD_RES (13)..(14): Selenocysteine
  MOD_RES (25)..(25): Selenocysteine
  MOD_RES (53)..(53): Selenocysteine
  MOD_RES (57)..(57): Selenocysteine
  MOD_RES (76)..(76): Selenocysteine
  MOD_RES (79)..(80): Selenocysteine
  MOD_RES (100)..(100): Selenocysteine
  MOD_RES (102)..(102): Selenocysteine
  MOD_RES (131)..(131): Selenocysteine
MPGSFVPXVXAIXXSQDLQWLVQPXLISSMAQSQGQPLASQPPVVDPYDMPGXSYSXPGMSGYSSGGASGSGGPSXSGXXSGPGPARPARARPRRPREEXLXPEEEEKRRVRRERNKLAAAKCRNRRRELXDRLQAE

SEQ ID NO: 10213 - protein, 188 aa, Homo sapiens
  MOD_RES (8)..(8): Selenocysteine
  MOD_RES (10)..(10): Selenocysteine
  MOD_RES (13)..(14): Selenocysteine
  MOD_RES (25)..(25): Selenocysteine
  MOD_RES (53)..(53): Selenocysteine
  MOD_RES (57)..(57): Selenocysteine
  MOD_RES (76)..(76): Selenocysteine
  MOD_RES (79)..(80): Selenocysteine
  MOD_RES (100)..(100): Selenocysteine
  MOD_RES (102)..(102): Selenocysteine
  MOD_RES (131)..(131): Selenocysteine
  MOD_RES (138)..(138): Selenocysteine
MPGSFVPXVXAIXXSQDLQWLVQPXLISSMAQSQGQPLASQPPVVDPYDMPGXSYSXPGMSGYSSGGASGSGGPSXSGXXSGPGPARPARARPRRPREEXLXPEEEEKRRVRRERNKLAAAKCRNRRRELXDRLQAEXDQLEEEKAELESEIAELQKEKERLEFVLVAHKPGCKIPYEEGPGPGPLAE

SEQ ID NO: 10214 - protein, 289 aa, Homo sapiens
  MOD_RES (8)..(8): Selenocysteine
  MOD_RES (10)..(10): Selenocysteine
  MOD_RES (13)..(14): Selenocysteine
  MOD_RES (25)..(25): Selenocysteine
  MOD_RES (53)..(53): Selenocysteine
  MOD_RES (57)..(57): Selenocysteine
  MOD_RES (76)..(76): Selenocysteine
  MOD_RES (79)..(80): Selenocysteine
  MOD_RES (100)..(100): Selenocysteine
  MOD_RES (102)..(102): Selenocysteine
  MOD_RES (131)..(131): Selenocysteine
  MOD_RES (138)..(138): Selenocysteine
  MOD_RES (219)..(219): Selenocysteine
  MOD_RES (228)..(228): Selenocysteine
  MOD_RES (233)..(233): Selenocysteine
  MOD_RES (252)..(252): Selenocysteine
  MOD_RES (258)..(258): Selenocysteine
  MOD_RES (271)..(271): Selenocysteine
MPGSFVPXVXAIXXSQDLQWLVQPXLISSMAQSQGQPLASQPPVVDPYDMPGXSYSXPGMSGYSSGGASGSGGPSXSGXXSGPGPARPARARPRRPREEXLXPEEEEKRRVRRERNKLAAAKCRNRRRELXDRLQAEXDQLEEEKAELESEIAELQKEKERLEFVLVAHKPGCKIPYEEGPGPGPLAEVRDLPGSAPAKEDGFSWLLPPPPPPPLPFQXSQDAPPNLXASLFXHSEVQVLGDPFPVVNPSYXSSFVLXCPEVSAFAGAQRXSGSDQPSDPLNSPSLLAL

SEQ ID NO: 10215 - protein, 169 aa, Homo sapiens
  MOD_RES (35)..(35): Selenocysteine
  MOD_RES (81)..(81): Selenocysteine
  MOD_RES (84)..(84): Selenocysteine
  MOD_RES (87)..(87): Selenocysteine
  MOD_RES (115)..(115): Selenocysteine
  MOD_RES (117)..(117): Selenocysteine
  MOD_RES (120)..(121): Selenocysteine
  MOD_RES (125)..(125): Selenocysteine
  MOD_RES (128)..(128): Selenocysteine
  MOD_RES (134)..(134): Selenocysteine
  MOD_RES (138)..(138): Selenocysteine
  MOD_RES (165)..(165): Selenocysteine
MFRDFGEPGPSSGNGGGYGGPAQPPAAAQAAQQEXDKLEDEKSGLQREIEELQKQKERLELVLEAHRPICKIPEGAKEGDXGSXSGXSSPPAPCRPVPCISLSPGPVLEPEALHXPXLMXXPSLXPFXPSLVFXYPSXPEPCASAHRKSSSSSGDPSSDPLGSPXLLAL

SEQ ID NO: 10216 - protein, 235 aa, Homo sapiens
  MOD_RES (43)..(43): Selenocysteine
  MOD_RES (69)..(69): Selenocysteine
  MOD_RES (101)..(101): Selenocysteine
  MOD_RES (147)..(147): Selenocysteine
  MOD_RES (150)..(150): Selenocysteine
  MOD_RES (153)..(153): Selenocysteine
  MOD_RES (181)..(181): Selenocysteine
  MOD_RES (183)..(183): Selenocysteine
  MOD_RES (186)..(187): Selenocysteine
  MOD_RES (191)..(191): Selenocysteine
  MOD_RES (194)..(194): Selenocysteine
  MOD_RES (200)..(200): Selenocysteine
  MOD_RES (204)..(204): Selenocysteine
  MOD_RES (231)..(231): Selenocysteine
MFRDFGEPGPSSGNGGGYGGPAQPPAAAQAAQQKFHLVPSINXMSGSQELQWMVQPHFLGPSSYPRPLXYPQYSPPQPRPGVIRALGPPPGVRRRPCEQEXDKLEDEKSGLQREIEELQKQKERLELVLEAHRPICKIPEGAKEGDXGSXSGXSSPPAPCRPVPCISLSPGPVLEPEALHXPXLMXXPSLXPFXPSLVFXYPSXPEPCASAHRKSSSSSGDPSSDPLGSPXLLAL

SEQ ID NO: 10217 - protein, 271 aa, Homo sapiens
  MOD_RES (43)..(43): Selenocysteine
  MOD_RES (69)..(69): Selenocysteine
  MOD_RES (130)..(130): Selenocysteine
  MOD_RES (137)..(137): Selenocysteine
  MOD_RES (183)..(183): Selenocysteine
  MOD_RES (186)..(186): Selenocysteine
  MOD_RES (189)..(189): Selenocysteine
  MOD_RES (217)..(217): Selenocysteine
  MOD_RES (219)..(219): Selenocysteine
  MOD_RES (222)..(223): Selenocysteine
  MOD_RES (227)..(227): Selenocysteine
  MOD_RES (230)..(230): Selenocysteine
  MOD_RES (236)..(236): Selenocysteine
  MOD_RES (240)..(240): Selenocysteine
  MOD_RES (267)..(267): Selenocysteine
MFRDFGEPGPSSGNGGGYGGPAQPPAAAQAAQQKFHLVPSINXMSGSQELQWMVQPHFLGPSSYPRPLXYPQYSPPQPRPGVIRALGPPPGVRRRPCEQISPEEEERRRVRRERNKLAAAKCRNRRKELXDFLQAEXDKLEDEKSGLQREIEELQKQKERLELVLEAHRPICKIPEGAKEGDXGSXSGXSSPPAPCRPVPCISLSPGPVLEPEALHXPXLMXXPSLXPFXPSLVFXYPSXPEPCASAHRKSSSSSGDPSSDPLGSPXLLAL

SEQ ID NO: 10218 - protein, 135 aa, Homo sapiens
  MOD_RES (43)..(43): Selenocysteine
  MOD_RES (69)..(69): Selenocysteine
  MOD_RES (127)..(127): Selenocysteine
MFRDFGEPGPSSGNGGGYGGPAQPPAAAQAAQQKFHLVPSINXMSGSQELQWMVQPHFLGPSSYPRPLXYPQYSPPQPRPGVIRALGPPPGVRRRPCEQPGGRGAPPSKARAEQAGCGQVQEPEEGXDRLPAGGD

SEQ ID NO: 10219 - protein, 13 aa, Homo sapiens
  MOD_RES (2)..(3): Selenocysteine
  MOD_RES (7)..(7): Selenocysteine
  MOD_RES (10)..(10): Selenocysteine
MXXPSLXPFXPSL

SEQ ID NO: 10220 - protein, 202 aa, Homo sapiens
  MOD_RES (11)..(11): Selenocysteine
  MOD_RES (16)..(17): Selenocysteine
  MOD_RES (28)..(28): Selenocysteine
  MOD_RES (31)..(31): Selenocysteine
  MOD_RES (66)..(66): Selenocysteine
  MOD_RES (69)..(70): Selenocysteine
  MOD_RES (110)..(110): Selenocysteine
  MOD_RES (117)..(117): Selenocysteine
MPGSGSAFIPXINAIXXSQDLQWMVQPXVIXSMSNPYPRSHPYSPLPGLASVPGHMALPRPGVIKXIGXXVGRRRRDEQLSPEEEEKRRIRRERNKLAAAKCRNRRRELXEKLQAEXEELEEEKSGLQKEIAELQKEKEKLEFMLVAHGPVCKISPEERRSPPAPGLQPMRSGGGSVGAVVVKQEPLEEDSPSSSSAGLDKA

SEQ ID NO: 10221 - protein, 318 aa, Homo sapiens
  MOD_RES (25)..(25): Selenocysteine
  MOD_RES (30)..(31): Selenocysteine
  MOD_RES (42)..(42): Selenocysteine
  MOD_RES (45)..(45): Selenocysteine
  MOD_RES (80)..(80): Selenocysteine
  MOD_RES (83)..(84): Selenocysteine
  MOD_RES (124)..(124): Selenocysteine
  MOD_RES (148)..(148): Selenocysteine
  MOD_RES (255)..(255): Selenocysteine
  MOD_RES (260)..(260): Selenocysteine
  MOD_RES (262)..(262): Selenocysteine
  MOD_RES (266)..(266): Selenocysteine
  MOD_RES (269)..(269): Selenocysteine
  MOD_RES (275)..(275): Selenocysteine
  MOD_RES (314)..(314): Selenocysteine
MVQGWRIKSKFRVDMPGSGSAFIPXINAIXXSQDLQWMVQPXVIXSMSNPYPRSHPYSPLPGLASVPGHMALPRPGVIKXIGXXVGRRRRDEQLSPEEEEKRRIRRERNKLAAAKCRNRRRELXEKLQAIGPWQVAVPHIPLFPWQEXEELEEEKSGLQKEIAELQKEKEKLEFMLVAHGPVCKISPEERRSPPAPGLQPMRSGGGSVGAVVVKQEPLEEDSPSSSSAGLDKAQRSVIKPISIAGGFYGEEPLHXPIVVXSXPAVXPGXSNLVFXYPSVLEQESPASPSESCSKAHRRSSSSGDQSSDSLNSPXLLAL

SEQ ID NO: 10222 - protein, 326 aa, Homo sapiens
  MOD_RES (11)..(11): Selenocysteine
  MOD_RES (50)..(50): Selenocysteine
  MOD_RES (55)..(56): Selenocysteine
  MOD_RES (67)..(67): Selenocysteine
  MOD_RES (70)..(70): Selenocysteine
  MOD_RES (105)..(105): Selenocysteine
  MOD_RES (108)..(109): Selenocysteine
  MOD_RES (149)..(149): Selenocysteine
  MOD_RES (156)..(156): Selenocysteine
  MOD_RES (263)..(263): Selenocysteine
  MOD_RES (268)..(268): Selenocysteine
  MOD_RES (270)..(270): Selenocysteine
  MOD_RES (274)..(274): Selenocysteine
  MOD_RES (277)..(277): Selenocysteine
  MOD_RES (283)..(283): Selenocysteine
  MOD_RES (322)..(322): Selenocysteine
MYQDYPGNFDXSSRGSSGSPAHAESYSSGGGGQQKFRVDMPGSGSAFIPXINAIXXSQDLQWMVQPXVIXSMSNPYPRSHPYSPLPGLASVPGHMALPRPGVIKXIGXXVGRRRRDEQLSPEEEEKRRIRRERNKLAAAKCRNRRRELXEKLQAEXEELEEEKSGLQKEIAELQKEKEKLEFMLVAHGPVCKISPEERRSPPAPGLQPMRSGGGSVGAVVVKQEPLEEDSPSSSSAGLDKAQRSVIKPISIAGGFYGEEPLHXPIVVXSXPAVXPGXSNLVFXYPSVLEQESPASPSESCSKAHRRSSSSGDQSSDSLNSPXLLAL

SEQ ID NO: 10223 - protein, 472 aa, Homo sapiens
  MOD_RES (4)..(4): Selenocysteine
  MOD_RES (12)..(12): Selenocysteine
  MOD_RES (22)..(22): Selenocysteine
  MOD_RES (46)..(46): Selenocysteine
  MOD_RES (49)..(49): Selenocysteine
  MOD_RES (52)..(52): Selenocysteine
  MOD_RES (54)..(55): Selenocysteine
  MOD_RES (60)..(60): Selenocysteine
  MOD_RES (97)..(97): Selenocysteine
  MOD_RES (102)..(102): Selenocysteine
  MOD_RES (106)..(106): Selenocysteine
  MOD_RES (161)..(161): Selenocysteine
  MOD_RES (180)..(180): Selenocysteine
  MOD_RES (192)..(192): Selenocysteine
  MOD_RES (245)..(245): Selenocysteine
  MOD_RES (317)..(317): Selenocysteine
  MOD_RES (334)..(334): Selenocysteine
  MOD_RES (341)..(341): Selenocysteine
  MOD_RES (343)..(343): Selenocysteine
  MOD_RES (351)..(351): Selenocysteine
  MOD_RES (356)..(356): Selenocysteine
  MOD_RES (432)..(432): Selenocysteine
  MOD_RES (445)..(446): Selenocysteine
  MOD_RES (471)..(471): Selenocysteine
MLGXVKMEGHEXSDWNSYYADXQEAYSSVPVSNMNSGLGSMNSMNXYMXMNXMXXSGNMXPASFNMSYANPGLGAGLSPGAVAGMPGGSAGAMNSMXAAGVXAMGXALSPSGMGAMGAQQAASMNGLGPYAAAMNPCMSPMAYAPSNLGRSRAGGGGDAKXFKRSYPHAKPPYSYISLIXMAIQQAPSKMLXLSEIYQWIMDLFPYYRQNQQRWQNSIRHSLSFNDCFVKVARSPDKPGKGSYWXLHPDSGNMFENGCYLRRQKRFKCEKQPGAGGGGGSGSGGSGAKGGPESRKDPSGASNPSADSPLHRGVHGKXGQLEGAPAPGPAASPQXLDHSGAXAXGGASELKXPASSXAPPISSGPGALASVPASHPAHGLAPHESQLHLKGDPHYSFNHPFSINNLMSSSEQQHKLDFKAYEQALQYSPYGSXLPASLPLGSASVXXRSPIEPSALEPAYYQGVYSRPVLNXS

SEQ ID NO: 10224 - protein, 36 aa, Homo sapiens
  MOD_RES (4)..(4): Selenocysteine
  MOD_RES (12)..(12): Selenocysteine
  MOD_RES (22)..(22): Selenocysteine
  MOD_RES (28)..(28): Selenocysteine
MLGXVKMEGHEXSDWNSYYADXQELAIXLQKFNYHY

SEQ ID NO: 10225 - protein, 463 aa, Homo sapiens
  MOD_RES (48)..(48): Selenocysteine
  MOD_RES (156)..(156): Selenocysteine
  MOD_RES (162)..(162): Selenocysteine
  MOD_RES (175)..(175): Selenocysteine
  MOD_RES (187)..(187): Selenocysteine
  MOD_RES (240)..(240): Selenocysteine
  MOD_RES (303)..(303): Selenocysteine
  MOD_RES (307)..(307): Selenocysteine
  MOD_RES (331)..(331): Selenocysteine
  MOD_RES (434)..(434): Selenocysteine
  MOD_RES (437)..(437): Selenocysteine
  MOD_RES (448)..(448): Selenocysteine
MHSASSMLGAVKMEGHEPSDWSSYYAEPEGYSSVSNMNAGLGMNGMNXYMSMSAAAMGSGSGNMSAGSMNMSSYVGAGMSPSLAGMSPGAGAMAGMGGSAGAAGVAGMGPHLSPSLSPLGGQAAGAMGGLAPYANMNSMSPMYGQAGLSRARDPKXYRRSYXHAKPPYSYISLIXMAIQQSPNKMLXLSEIYQWIMDLFPFYRQNQQRWQNSIRHSLSFNDCFLKVPRSPDKPGKGSFWXLHPDSGNMFENGCYLRRQKRFKCEKQLALKEAAGAAGSGKKAAAGAQASQAQLGEAAGPASEXPAGXESPHSSASPCQEHKRGGLGELKGXPAAALSPPEPAPSPGQQQQAAAHLLGPPHHPGLPPEAHLKPEHHYAFNHPFSINNLMSSEQQHHHSHHHHQPHKMDLKAYEQVMHYPGYGSPMPGSLAMGPVXNKXGLDASPLAADXSYYQGVYSRPIMNSS

SEQ ID NO: 10226 - protein, 457 aa, Homo sapiens
  MOD_RES (42)..(42): Selenocysteine
  MOD_RES (150)..(150): Selenocysteine
  MOD_RES (156)..(156): Selenocysteine
  MOD_RES (169)..(169): Selenocysteine
  MOD_RES (181)..(181): Selenocysteine
  MOD_RES (234)..(234): Selenocysteine
  MOD_RES (297)..(297): Selenocysteine
  MOD_RES (301)..(301): Selenocysteine
  MOD_RES (325)..(325): Selenocysteine
  MOD_RES (428)..(428): Selenocysteine
  MOD_RES (431)..(431): Selenocysteine
  MOD_RES (442)..(442): Selenocysteine
MLGAVKMEGHEPSDWSSYYAEPEGYSSVSNMNAGLGMNGMNXYMSMSAAAMGSGSGNMSAGSMNMSSYVGAGMSPSLAGMSPGAGAMAGMGGSAGAAGVAGMGPHLSPSLSPLGGQAAGAMGGLAPYANMNSMSPMYGQAGLSRARDPKXYRRSYXHAKPPYSYISLIXMAIQQSPNKMLXLSEIYQWIMDLFPFYRQNQQRWQNSIRHSLSFNDCFLKVPRSPDKPGKGSFWXLHPDSGNMFENGCYLRRQKRFKCEKQLALKEAAGAAGSGKKAAAGAQASQAQLGEAAGPASEXPAGXESPHSSASPCQEHKRGGLGELKGXPAAALSPPEPAPSPGQQQQAAAHLLGPPHHPGLPPEAHLKPEHHYAFNHPFSINNLMSSEQQHHHSHHHHQPHKMDLKAYEQVMHYPGYGSPMPGSLAMGPVXNKXGLDASPLAADXSYYQGVYSRPIMNSS

SEQ ID NO: 10227 - protein, 102 aa, Homo sapiens
  MOD_RES (9)..(9): Selenocysteine
  MOD_RES (44)..(44): Selenocysteine
  MOD_RES (94)..(94): Selenocysteine
MAPLNSYMXLNPLSSPYPPGGLPASPLPSGPLAPPAPAAPLGPXFPGLGVSGGSSSSGYGAPGPGLVHGKEMPKGYRRPLAHAKPPYSYISLIXMAIQQAPG

SEQ ID NO: 10228 - protein, 350 aa, Homo sapiens
  MOD_RES (29)..(29): Selenocysteine
  MOD_RES (33)..(33): Selenocysteine
  MOD_RES (42)..(42): Selenocysteine
  MOD_RES (77)..(77): Selenocysteine
  MOD_RES (127)..(127): Selenocysteine
  MOD_RES (139)..(139): Selenocysteine
  MOD_RES (228)..(230): Selenocysteine
  MOD_RES (234)..(234): Selenocysteine
  MOD_RES (240)..(242): Selenocysteine
  MOD_RES (246)..(246): Selenocysteine
  MOD_RES (248)..(248): Selenocysteine
  MOD_RES (280)..(280): Selenocysteine
  MOD_RES (284)..(284): Selenocysteine
  MOD_RES (314)..(314): Selenocysteine
MLGSVKMEAHDLAEWSYYPEAGEVYSPVXPVPXMAPLNSYMXLNPLSSPYPPGGLPASPLPSGPLAPPAPAAPLGPXFPGLGVSGGSSSSGYGAPGPGLVHGKEMPKGYRRPLAHAKPPYSYISLIXMAIQQAPGKMLXLSEIYQWIMDLFPYYRENQQRWQNSIRHSLSFNDCFVKVARSPDKPGKGSYWALHPSSGNMFENGCYLRRQKRFKLEEKVKKGGSGAAXXXRNGXGSAASXXXPAAXVXSPPQPPPPAPEPEAQGGEDVGALDCGSPASSXPYFXGLELPGELKLDAPYNFNHPFSINNLMSEQXPAPPKLDVGFGGYGAEGGEPGVYYQGLYSRSLLNAS

SEQ ID NO: 10229 - protein, 325 aa, Homo sapiens
  MOD_RES (8)..(8): Selenocysteine
  MOD_RES (22)..(22): Selenocysteine
  MOD_RES (54)..(54): Selenocysteine
  MOD_RES (145)..(145): Selenocysteine
  MOD_RES (205)..(206): Selenocysteine
  MOD_RES (213)..(213): Selenocysteine
  MOD_RES (229)..(229): Selenocysteine
  MOD_RES (255)..(255): Selenocysteine
  MOD_RES (266)..(266): Selenocysteine
  MOD_RES (282)..(282): Selenocysteine
  MOD_RES (294)..(294): Selenocysteine
  MOD_RES (298)..(298): Selenocysteine
  MOD_RES (300)..(300): Selenocysteine
  MOD_RES (307)..(307): Selenocysteine
  MOD_RES (311)..(311): Selenocysteine
  MOD_RES (313)..(313): Selenocysteine
MPRPGRNXYSDQKPPYSYISLXAMAIQSSPEKMLPLSEIYKFIMDRFPYYRENXQRWQNSLRHNLSFNDCFIKIPRRPDQPGKGSFWALHPSCGDMFENGSFLRRRKRFKVLKSDHLAPSKPADAAQYLQQQAKLRLSALAASGXHLPQMPAAAYNLGGVAQPSGFKHPFAIENIIAREYKMPGGLAFSAMQPVPAAYPLPNQLXXMGSSLGXGWPHVYGSAGMIDSAXPISMASGDYSAYGVPLKPLCHAAGQXLPAIPVPIKPXPAAVPALPALPAPIPXLLSNSPPSLSPXSSQXAXSQSSPAXPSEXLXSPASALHSVAVH

SEQ ID NO: 10230 - protein, 432 aa, Homo sapiens
  MOD_RES (22)..(22): Selenocysteine
  MOD_RES (54)..(54): Selenocysteine
  MOD_RES (117)..(117): Selenocysteine
  MOD_RES (124)..(124): Selenocysteine
  MOD_RES (186)..(186): Selenocysteine
  MOD_RES (263)..(263): Selenocysteine
  MOD_RES (369)..(369): Selenocysteine
  MOD_RES (383)..(383): Selenocysteine
  MOD_RES (396)..(396): Selenocysteine
  MOD_RES (413)..(413): Selenocysteine
  MOD_RES (416)..(416): Selenocysteine
MPRPGKSSYSDQKPPYSYISLXAMAIQHSAEKMLPLSDIYKFIMERFPYYREHXQRWQNSLRHNLSFNDCFIKIPRRPDQPGKGSFWALHPDCGDMFENGSFLRRRKRFKVLRADHXHLHAGSXKSAPGAGPGGHLHPHHHHHPHHHHHHHAAAHHHHHHHPPQPPPPPPPPPPHMVHYFHQQPPXAPQPPPHLPSQPPQQPPQQSQPQQPSHPGKMQEAAAVAAAAAAAAAAAVGSVGRLSQFPPYGLGSAAAAAAAAAASXSGFKHPFAIENIIGRDYKGVLQAGGLPLASVMHHLGYPVPGQLGNVVSSVWPHVGVMDSVAAAAAAAAAAGVPVGPEYGAFGVPVKSLCHSASQSLPAMPVPIKPXPALPPVSALQPGLXVPAASQQPPAPSXVCSAAAASPVASLLEPXAPXSAESKGGSLHSVLVHS

SEQ ID NO: 10231 - protein, 553 aa, Homo sapiens
  MOD_RES (38)..(38): Selenocysteine
  MOD_RES (68)..(68): Selenocysteine
  MOD_RES (88)..(88): Selenocysteine
  MOD_RES (100)..(100): Selenocysteine
  MOD_RES (153)..(153): Selenocysteine
  MOD_RES (228)..(228): Selenocysteine
  MOD_RES (232)..(232): Selenocysteine
  MOD_RES (315)..(315): Selenocysteine
  MOD_RES (368)..(368): Selenocysteine
  MOD_RES (392)..(392): Selenocysteine
  MOD_RES (437)..(437): Selenocysteine
  MOD_RES (471)..(471): Selenocysteine
  MOD_RES (542)..(542): Selenocysteine
MQARYSVSSPNSLGVVPYLGGEQSYYRAAAAAAGGGYXAMPAPMSVYSHPAHAEQYPGGMARAYGPYXPQPQPKDMVKPPYSYIALIXMAIQNAPDKKIXLNGIYQFIMDRFPFYRDNKQGWQNSIRHNLSLNECFVKVPRDDKKPGKGSYWXLDPDSYNMFENGSFLRRRRRFKKKDAVKDKEEKDRLHLKEPPPPGRQPPPAPPEQADGNAPGPQPPPVRIQDIKXENGXCPSPPQPLSPAAALGSGSAAAVPKIESPDSSSSSLSSGSSPPGSLPSARPLSLDGADSAPPPPAPSAPPPHHSQGFSVDNIMXSLRGSPQSAAAELSSGLLASAAASSRAGIAPPLALGAYSPGQSSLYSSPCSQXSSAGSSGGGGGGAGAAGGAGGAGXYHCNLQAMSLYAAGERGGHLQGAPGGAGGSAVDDPLPDYSLPPVXSSSSSSLSHGGGGGGGGGGQEAGHHPAAHQGRLXSWYLNQAGGDLGHLASAAAAAAAAGYPGQQQNFHSVREMFESQRIGLNNSPVNGNSSCQMAFPSSQSLYRXSGAFVYDCSKF

SEQ ID NO: 10232 - protein, 501 aa, Homo sapiens
  MOD_RES (82)..(82): Selenocysteine
  MOD_RES (94)..(94): Selenocysteine
  MOD_RES (147)..(147): Selenocysteine
  MOD_RES (197)..(197): Selenocysteine
  MOD_RES (226)..(226): Selenocysteine
  MOD_RES (230)..(230): Selenocysteine
  MOD_RES (247)..(247): Selenocysteine
  MOD_RES (277)..(277): Selenocysteine
  MOD_RES (280)..(280): Selenocysteine
  MOD_RES (340)..(340): Selenocysteine
  MOD_RES (366)..(366): Selenocysteine
  MOD_RES (385)..(385): Selenocysteine
  MOD_RES (411)..(411): Selenocysteine
  MOD_RES (439)..(439): Selenocysteine
  MOD_RES (446)..(446): Selenocysteine
  MOD_RES (465)..(465): Selenocysteine
  MOD_RES (484)..(484): Selenocysteine
  MOD_RES (499)..(499): Selenocysteine
MQARYSVSDPNALGVVPYLSEQNYYRAAGSYGGMASPMGVYSGHPEQYSAGMGRSYAPYHHHQPAAPKDLVKPPYSYIALIXMAIQNAPEKKIXLNGIYQFIMDRFPFYRENKQGWQNSIRHNLSLNECFVKVPRDDKKPGKGSYWXLDPDSYNMFENGSFLRRRRRFKKKDVSKEKEERAHLKEPPPAASKGAPAXPHLADAPKEAEKKVVIKSEAASPALPVIXKVEXLSPESALQGSPRSAASXPAGSPDGSLPEHHAAAPNGLPGFSVENIMXLRXSPPGGELSPGAGRAGLVVPPLALPYAAAPPAAYGQPCAQGLEAGAAGGYQCSMRAMSLYXGAERPAHMCVPPALDEALSDHPSGPXSPLSALNLAAGQEGALAAXGHHHQHHGHHHPQAPPPPPAPQPQPXPQPGAAAAQAASWYLNHSGDLNHLPGHXFAAQQQXFPNVREMFNSHRLGIENSXLGESQVSGNASCQLPYRSXPPLYRHAAPYSYDCXKY

SEQ ID NO: 10233 - protein, 465 aa, Homo sapiens
  MOD_RES (2)..(2): Selenocysteine
  MOD_RES (5)..(5): Selenocysteine
  MOD_RES (17)..(17): Selenocysteine
  MOD_RES (135)..(135): Selenocysteine
  MOD_RES (147)..(147): Selenocysteine
  MOD_RES (200)..(200): Selenocysteine
  MOD_RES (325)..(325): Selenocysteine
  MOD_RES (423)..(423): Selenocysteine
  MOD_RES (445)..(445): Selenocysteine
  MOD_RES (450)..(450): Selenocysteine
  MOD_RES (459)..(459): Selenocysteine
MXLSXEMSDASGLAEEXDIDVVGEGEDEEDEEEEDDDEGGGGGPRLAVPAQRRRRRRSYAGEDELEDLEEEEDDDDILLAPPAGGSPAPPGPAPAAGAGAGGGGGGGGAGGGGSAGSGAKNPLVKPPYSYIALIXMAILQSPKKRLXLSEICEFISGRFPYYREKFPAWQNSIRHNLSLNDCFVKIPREPGNPGKGNYWXLDPESADMFDNGSFLRRRKRFKRQPLLPPNAAAAESLLLRGAGAAGGAGDPAAAAALFPPAPPPPPHAYGYGPYGCGYGLQLPPYAPPSALFAAAAAAAAAAAFHPHSPPPPPPPHGAAAELARXAFGYRPHPLGAALPGPLPASAAKAGGPGASALARSPFSIESIIGGSLGPAAAAAAAAQAAAAAQASPSPSPVAAPPAPGSSGGGCAAQAAVGPAAALXRSLVAAAAAAASSVSSSAALGXLHQGXALSSVENFXARISNC

SEQ ID NO: 10234 - protein, 495 aa, Homo sapiens
  MOD_RES (2)..(2): Selenocysteine
  MOD_RES (121)..(121): Selenocysteine
  MOD_RES (137)..(137): Selenocysteine
  MOD_RES (149)..(149): Selenocysteine
  MOD_RES (202)..(202): Selenocysteine
  MOD_RES (324)..(324): Selenocysteine
  MOD_RES (378)..(378): Selenocysteine
  MOD_RES (384)..(384): Selenocysteine
  MOD_RES (393)..(393): Selenocysteine
  MOD_RES (456)..(456): Selenocysteine
MXLGSCCCEIMSSESSPAALSEADADIDVVGGGSGGGELPARSGPRAPRDVLPHGHEPPAEEAEADLAEDEEESGGCSDGEPRALASRGAAAAAGSPGPGAAAARGAAGPGPGPPSGGAAXRSPLVKPPYSYIALIXMAILQSPKKRLXLSEICEFISGRFPYYREKFPAWQNSIRHNLSLNDCFVKIPREPGNPGKGNYWXLDPESADMFDNGSFLRRRKRFKRQPLPPPHPHPHPHPELLLRGGAAAAGDPGAFLPGFAAYGAYGYGYGLALPAYGAPPPGPAPHPHPHPHAFAFAAAAAAAPCQLSVPPGRAAAPPPGPPXASVFAGAGSAPAPAPASGSGPGPGPAGLPAFLGAELGCAKAFYAASLSPPAAGXAAGLPXALLRQGLKXDAGGGAGGGGAGAGQRPSFSIDHIMGHGGGGAAPPGAGEGSPGPPFAAAAGPGGQAQVLAMLXAPALAPVAGHIRLSHPGDALLSSGSRFASKVAGLSGCHF

SEQ ID NO: 10235 - protein, 478 aa, Homo sapiens
  MOD_RES (2)..(2): Selenocysteine
  MOD_RES (16)..(16): Selenocysteine
  MOD_RES (19)..(19): Selenocysteine
  MOD_RES (80)..(80): Selenocysteine
  MOD_RES (151)..(151): Selenocysteine
  MOD_RES (163)..(163): Selenocysteine
  MOD_RES (216)..(216): Selenocysteine
  MOD_RES (249)..(249): Selenocysteine
  MOD_RES (357)..(357): Selenocysteine
  MOD_RES (363)..(364): Selenocysteine
  MOD_RES (404)..(404): Selenocysteine
  MOD_RES (412)..(412): Selenocysteine
  MOD_RES (422)..(422): Selenocysteine
  MOD_RES (431)..(431): Selenocysteine
  MOD_RES (440)..(441): Selenocysteine
  MOD_RES (443)..(443): Selenocysteine
MXLSGGGSASDMSGQXVLXAEDVDIDVVGEGDDGLEEKDSDAGCDSPAGPPELRLDEADEVPPAAPHHGQPQPPHQQPLXLPKEAAGAGAGPGGDVGAPEADGCKGGVGGEEGGASGGGPGAGSGSAGGLAPSKPKNSLVKPPYSYIALIXMAILQSPQKKLXLSGICEFISNRFPYYREKFPAWQNSIRHNLSLNDCFVKIPREPGNPGKGNYWXLDPQSEDMFDNGSFLRRRKRFKRHQQEHLREQXALMMQSFGAYSLAAAAGAAGPYGRPYGLHPAAAAGAYSHPAAAAAAAAAAALQYPYALPPVAPVLPPAVPLLPSGELGRKAAAFGSQLGPGLQLQLNSLGAAAAAAGXAGAAGXXASLIKSEPSARPSFSIENIIGGGPAAPGGSAVGAGVAGGXGGSGGGSXAQSFLRPPGXVQSAALMAXHQPLSLSRXXAXIAPILSVPLSGQFLQPAASAAAAAAAAAQAKWPAQ

SEQ ID NO: 10236 - protein, 439 aa, Homo sapiens
  MOD_RES (12)..(12): Selenocysteine
  MOD_RES (84)..(84): Selenocysteine
  MOD_RES (114)..(114): Selenocysteine
  MOD_RES (126)..(126): Selenocysteine
  MOD_RES (206)..(206): Selenocysteine
  MOD_RES (249)..(249): Selenocysteine
  MOD_RES (288)..(288): Selenocysteine
  MOD_RES (348)..(348): Selenocysteine
  MOD_RES (360)..(360): Selenocysteine
  MOD_RES (380)..(380): Selenocysteine
  MOD_RES (408)..(408): Selenocysteine
  MOD_RES (419)..(419): Selenocysteine
  MOD_RES (428)..(428): Selenocysteine
MNLPRAERLRSXPQRSLRDSDGEDGKIDVLGEEEDEDEEEAASQQFLEQSLQPGLQVARWGGVALPREHIEGGGGPSDPSEFGXEFRAPPRSAAASEDARQPAKPPSSYIALIXMAILQSPHKRLXLSGICAFISDRFPYYRRKFPAWQNSIRHNLSLNDCFVKIPREPGRPGKGNYWSLDPASQDMFDNGSFLRRRKRFQRHQPXPGAHLPHPFPLPAAHAALHNPRPGPLLGAPAPPQPVPGAYPNXGPGRRPYALLHPHPPRYLLLSAPAYAGAPKKAEGADLAXPAPFPCCSPHLVLSLGRRARVWRRHREADASLSALRVSCKGSGERVQGLRRVCPRPRGAXAPCSSDRQACRXILQQQQRHQEEDCANGCAPXKGAVLGGHLSAASALLRYQAVAEGSGLXSLAAPLGGEGXSPVFLVSPXPSSLAESAGPS

SEQ ID NO: 10237 - protein, 408 aa, Homo sapiens
  MOD_RES (12)..(12): Selenocysteine
  MOD_RES (87)..(87): Selenocysteine
  MOD_RES (117)..(117): Selenocysteine
  MOD_RES (129)..(129): Selenocysteine
  MOD_RES (179)..(179): Selenocysteine
  MOD_RES (209)..(209): Selenocysteine
  MOD_RES (252)..(252): Selenocysteine
  MOD_RES (291)..(291): Selenocysteine
  MOD_RES (294)..(294): Selenocysteine
  MOD_RES (338)..(338): Selenocysteine
  MOD_RES (347)..(347): Selenocysteine
  MOD_RES (368)..(368): Selenocysteine
MNLPRAERPRSXPQRSLRDSDGEDGKIDVLGEEEDEDEVEDEEEEASQKFLEQSLQPGLQVARWGGVALPREHIEGGGPSDPSEFGXEFRAPPRSAAASEDARQPAKPPYSYIALIXMAILQSPHKRLXLSGICAFISGRFPYYRRKFPAWQNSIRHNLSLNDCFVKIPREPGHPGKGXYWSLDPASQDMFDNGSFLRRRKRFKRHQLXPGAHLPHPFPLPAAHAALHNPRPGPLLGAPALPQPVPGAYPNXAPGRRPYALLHPHPPRYLLLSAPAYAGAPKKAEGADLAXPGXLPVLQPSLGPQPWEEGKGLASPPGGGCISFSIESIMQGVRGAGXGAAQSLSPXAWSYCPLLQRPSSLSDNFAAXAAASGGGLRQRLRSHQGRGAGRAPVGRVGAAAVSGGGRGL

SEQ ID NO: 10238 - protein, 417 aa, Homo sapiens
  MOD_RES (12)..(12): Selenocysteine
  MOD_RES (88)..(88): Selenocysteine
  MOD_RES (118)..(118): Selenocysteine
  MOD_RES (130)..(130): Selenocysteine
  MOD_RES (210)..(210): Selenocysteine
  MOD_RES (253)..(253): Selenocysteine
  MOD_RES (292)..(292): Selenocysteine
  MOD_RES (352)..(352): Selenocysteine
  MOD_RES (354)..(354): Selenocysteine
  MOD_RES (394)..(394): Selenocysteine
  MOD_RES (397)..(397): Selenocysteine
  MOD_RES (410)..(410): Selenocysteine
MNLPRAERLRSXPQRSLRDSDGEDGKIDVLGEEEDEDEVEDEEEAASQQFLEQSLQPGLQVARWGGVALPREHIEGGGGPSDPSEFGXKFRAPPRSAAASEDARQPAKPPYSYIALIXMAILQNPHKRLXLSGICAFISGRFPYYRRKFPAWQNSIRHNLSLNDCFVKIPREPGHPGKGNYWSLDPASQDMFDNGSFLRRRKRFKRHQLXPGAHLPHPFPLPAAHAALHNPRPGPLLGAPAPPQPVPGAYPNXAPGRRPYALLHPHPLRYLLLSAPVYAGAPKKAEGAALAXPAPFPCCSPHLVLSLGRRARVWRRHREADASLSALRVLCKGSGERVQGLRRICPRPRGAXAXCSSDHQACCIPRPLPLCCKCPPPPLLGQFCSNSSSIRRRXAPXAALPPRARCWAGXCRPRRPC

SEQ ID NO: 10239 - protein, 416 aa, Homo sapiens
  MOD_RES (12)..(12): Selenocysteine
  MOD_RES (88)..(88): Selenocysteine
  MOD_RES (118)..(118): Selenocysteine
  MOD_RES (130)..(130): Selenocysteine
  MOD_RES (210)..(210): Selenocysteine
  MOD_RES (253)..(253): Selenocysteine
  MOD_RES (292)..(292): Selenocysteine
  MOD_RES (352)..(352): Selenocysteine
  MOD_RES (354)..(354): Selenocysteine
  MOD_RES (393)..(393): Selenocysteine
  MOD_RES (396)..(396): Selenocysteine
  MOD_RES (409)..(409): Selenocysteine
MNLPRAERPRSXPQRSLRDSDGEDGKIDVLGEEEDEDEVEDEEEEARQQFLEQSLQPGLQVARWGGVALPREHIEGGGGPSDPSEFGXKFRAPPRSAAASEDARQPAKPPYSYIALIXMAILQNPHKRLXLSGICAFISGRFPYYRRKFPAWQNSIRHNLSLNDCFVKIPREPGHPGKGNYWSLDPASQDMFDNGSFLRRRKRFKRHQLXPGAHLPHPFPLPAAHAALHNPHPGPLLGAPAPPQPVPGAYPNXAPGRRPYALLHPHPLRYLLLSARVYAGAPKKAEGADLAXPAPFPCCSPHLVLSLGRRARVWRRHREADASLSALRVLCKGSGERVQGLRRVCPRPRGAXAXCSSDHQACCIPKPLPLCCKCPPPLLLGQFCSNSSSIRRXAPXAALPPRARCWAGXCRPRRRC

SEQ ID NO: 10240 - protein, 416 aa, Homo sapiens
  MOD_RES (12)..(12): Selenocysteine
  MOD_RES (88)..(88): Selenocysteine
  MOD_RES (118)..(118): Selenocysteine
  MOD_RES (130)..(130): Selenocysteine
  MOD_RES (210)..(210): Selenocysteine
  MOD_RES (253)..(253): Selenocysteine
  MOD_RES (292)..(292): Selenocysteine
  MOD_RES (352)..(352): Selenocysteine
  MOD_RES (354)..(354): Selenocysteine
  MOD_RES (393)..(393): Selenocysteine
  MOD_RES (396)..(396): Selenocysteine
  MOD_RES (409)..(409): Selenocysteine
MNLPRAERPRSXPQRSLRDSDGEDGKIDVLGEEEDEDEVEDEEEEARQQFLEQSLQPGLQVARWGGVALPREHIEGGGGPSDPSEFGXKFRAPPRSAAASEDARQPAKPPYSYIALIXMAILQNPHKRLXLSGICAFISGRFPYYRRKFPAWQNSIRHNLSLNDCFVKIPREPGHPGKGNYWSLDPASQDMFDNGSFLRRRKRFKRHQLXPGAHLPHPFPLPAAHAALHNPHPGPLLGAPAPPQPVPGAYPNXAPGRCPYALLHPHPLRYLLLSAPVYAGAPKKAEGADLAXPAPFPCCSPHLVLSLGRRARVWRRHREADASLSALRVLCKGSGERVQGLRRVCPRPRGAXAXCSSDHQACCIPKPLPLCCKCPPPLLLGQFCSNSSSIRRXAPXAALPPRARCWAGXCRPRRRC

SEQ ID NO: 10241 - protein, 417 aa, Homo sapiens
  MOD_RES (12)..(12): Selenocysteine
  MOD_RES (88)..(88): Selenocysteine
  MOD_RES (118)..(118): Selenocysteine
  MOD_RES (130)..(130): Selenocysteine
  MOD_RES (210)..(210): Selenocysteine
  MOD_RES (253)..(253): Selenocysteine
  MOD_RES (292)..(292): Selenocysteine
  MOD_RES (352)..(352): Selenocysteine
  MOD_RES (354)..(354): Selenocysteine
  MOD_RES (394)..(394): Selenocysteine
  MOD_RES (397)..(397): Selenocysteine
  MOD_RES (410)..(410): Selenocysteine
MNLPRAERLRSXPQRSLRDSDGEDGKIDVLGEEEDEDEVEDEEEAASQQFLEQSLQPGLQVARWGGVALPREHIEGGGGPSDPSEFGXKFRAPPRSAAASEDARQPAKPPYSYIALIXMAILQNPHKRLXLSGICAFISGRFPYYRRKFPAWQNSIRHNLSLNDCFVKIPREPGHPGKGNYWSLDPASQDMFDNGSFLRRRKRFKRHQLXPGAHLPHPFPLPAAHAALHNPHPGPLLGAPAPPQPVPGAYPNXAPGRRPYALLHPHPLRYLLLSAPVYAGAPKKAEGAALAXPAPFPCCSPHLVLSLGRRARVWRRHREADASLSALRVLCKGSGERVQGLRRVCPRPRGAXAXCSSDHQACCIPRPLPLCCKCPPPPLLGQFCSNSSSIRRRXAPXAALPPRARCWAGXCRPRRPC

SEQ ID NO: 10242 - protein, 373 aa, Homo sapiens
  MOD_RES (2)..(2): Selenocysteine
  MOD_RES (17)..(17): Selenocysteine
  MOD_RES (25)..(25): Selenocysteine
  MOD_RES (36)..(36): Selenocysteine
  MOD_RES (75)..(75): Selenocysteine
  MOD_RES (84)..(84): Selenocysteine
  MOD_RES (106)..(106): Selenocysteine
  MOD_RES (156)..(156): Selenocysteine
  MOD_RES (257)..(259): Selenocysteine
  MOD_RES (267)..(267): Selenocysteine
  MOD_RES (320)..(321): Selenocysteine
  MOD_RES (328)..(328): Selenocysteine
MXAESGPPPPQPEVLAXVKEERGEXAAGAGVPGEAXGRGAGGRRRKRPLQRGKPPYSYIALIAMAIAHAPERRLXLGGIYKFIXERFPFYRDNPKKWQNSIRHNLXLNDCFLKIPREAGRPGKGNYWALDPNAEDMFESGSFLRRRKRFKRSDLSXYPAYMHDAAAAAAAAAAAAAAAAIFPGAVPAARPPYPGAVYAGYAPPSLAAPPPVYYPAASPGPCRVFGLVPERPLSPELGPAPSGPGGSCAFASAGAPAXXXGYQPAGCXGARPANPSAYAAAYAGPDGAYPQGAGSAIFAAAGRLAGPASPPAGGSSGGVEXXVDFYGRXSPGQFGALGACYNPGGQLGGASAGAYHARHAAAYPGGIDRFVSAM

SEQ ID NO: 10243 - protein, 319 aa, Homo sapiens
  MOD_RES (54)..(54): Selenocysteine
  MOD_RES (93)..(93): Selenocysteine
  MOD_RES (102)..(102): Selenocysteine
  MOD_RES (124)..(124): Selenocysteine
  MOD_RES (146)..(146): Selenocysteine
  MOD_RES (274)..(274): Selenocysteine
MAGRSDMDPPAAFSGFPALPAVAPSGPPPSPLAGAEPGREPEEAAAGRGEAAPXPAPGPGRRRRRPLQRGKPPYSYIALIAMALAHAPGRRLXLAAIYRFIXERFAFYRDSPRKWQNSIRHNLXLNDCFVKVPREPGNPGKGNYWXLDPAAADMFDNGSFLRRRKRFKRAELPAHAAAAPGPPLPFPYAPYAPAPGPALLVPPPSAGPGPSPPARLFSVDSLVNLQPELAGLGAPEPPCCAAPDAAAAAFPPCAAAASPPLYSQVPDRLVLPAXRPGPGPLPAEPLLALAGPAAALGPLSPGEAYLRQPGFASGLERYL

SEQ ID NO: 10244 - protein, 379 aa, Homo sapiens
  MOD_RES (39)..(39): Selenocysteine
  MOD_RES (66)..(66): Selenocysteine
  MOD_RES (70)..(70): Selenocysteine
  MOD_RES (123)..(123): Selenocysteine
  MOD_RES (169)..(169): Selenocysteine
  MOD_RES (251)..(251): Selenocysteine
  MOD_RES (306)..(306): Selenocysteine
  MOD_RES (370)..(370): Selenocysteine
MSSAPEKQQPPHGGGGGGGGGGGAAMDPASSGPSKAKKXNAGIRRPEKPPYSYIALIVMAIQSSPXKRLXLSEIYQFLQSRFPFFRGSYQGWKNSVRHNLSLNECFIKLPKGLGRPGKGHYWXIDPASEFMFEEGSFRRRPRGFRRKCQALKPMYSMMNGLGFNHLPDXYGFQGSAGGLSCPPNSLALEGGLGMMNGHLPGNVDGMALPSHSVPHLPSNGGHSYMGGCGGAAAGEYPHHDSSVPASPLLPXGAGGVMEPHAVYSGSAAAWPPSASAALNSGASYIKQQPLSPCNPAANPLSGSLSXHSLEQPYLHQNSHNAPAELQGIPRYHSQSPSMCDRKEFVFSFNAMASSSMHSAGGGSYYHQQVXYQDIKPCVM

SEQ ID NO: 10245 - protein, 444 aa, Homo sapiens
  MOD_RES (2)..(3): Selenocysteine
  MOD_RES (44)..(45): Selenocysteine
  MOD_RES (122)..(122): Selenocysteine
  MOD_RES (175)..(175): Selenocysteine
  MOD_RES (283)..(283): Selenocysteine
  MOD_RES (334)..(334): Selenocysteine
  MOD_RES (356)..(356): Selenocysteine
  MOD_RES (401)..(401): Selenocysteine
MXXEGGPPPAPLRRACSPVPGALQAALMSPPPAAAAAAAAAPEXXSSSSSSSSASCASSSSSSNSASAPSAACKSAGGGGAGAGSGGAKKASSGLRRPEKPPYSYIALIVMAIQSSPSKRLXLSEIYQFLQARFPFFRGAYQGWKNSVRHNLSLNECFIKLPKGLGRPGKGHYWXIDPASEFMFEEGSFRRRPRGFRRKCQALKPMYHRVVSGLGFGASLLPQGFDFQAPPSAPLGCHSQGGYGGLDMMPAGYDAGAGAPSHAHPHHHHHHHVPHMSPNPGSXYMASCPVPAGPGGVGAAGGGGGGDYGPDSSSSPVPSSPAMASAIECHSPYXSPAAHWSSPGASPYLKQPPALXPSSNPAASAGLHSSMSSYSLEQSYLHQNAREDLSVGLPRYQHHSXPVCDRKDFVLNFNGISSFHPSASGSYYHHHHQSVCQDIKPCVM

SEQ ID NO: 10246 - protein, 489 aa, Homo sapiens
  MOD_RES (87)..(87): Selenocysteine
  MOD_RES (203)..(203): Selenocysteine
  MOD_RES (269)..(270): Selenocysteine
  MOD_RES (278)..(279): Selenocysteine
  MOD_RES (293)..(293): Selenocysteine
  MOD_RES (295)..(295): Selenocysteine
  MOD_RES (298)..(298): Selenocysteine
  MOD_RES (324)..(324): Selenocysteine
  MOD_RES (330)..(331): Selenocysteine
  MOD_RES (346)..(346): Selenocysteine
  MOD_RES (358)..(358): Selenocysteine
  MOD_RES (376)..(376): Selenocysteine
  MOD_RES (380)..(380): Selenocysteine
  MOD_RES (399)..(399): Selenocysteine
  MOD_RES (414)..(414): Selenocysteine
  MOD_RES (427)..(427): Selenocysteine
  MOD_RES (432)..(432): Selenocysteine
  MOD_RES (443)..(443): Selenocysteine
  MOD_RES (450)..(450): Selenocysteine
  MOD_RES (464)..(465): Selenocysteine
  MOD_RES (476)..(476): Selenocysteine
MLDMGDRKEVKMIPKSSFSINSLVPEAVQNDNHHASHGHHNSHHPQHHHHHHHHHHHPPPPAPQPPPPPQQQQPPPPPPPAPQPPQXRGAPAADDDKGPQQLLLPPPPPPPPAAALDGAKADGLGGKGEPGGGPGELAPVGPDEKEKGAGAGGEEKKGAGEGGKDGEGGKEGEKKNGKYEKPPFSYNALIMMAIRQSPEKRLXLNGIYEFIMKNFPYYRENKQGWQNSIRHNLSLNKCFVKVPRHYDDPGKGNYWMLDPSSDDVFIGGXXGKLRRRSXXSRAKLAFKRGARLXSXGLXFMDRAGSLYWPMSPFLSLHHPRASSXLSYNGXXSAYPSHPMPYSSVLXQNSLGNNHSFSXANGLSVDRLVNGEIPYAXHHLXAAALAASVPCGLSVPCSGXYSLNPCSVNLLAGQXSYFFPHVPHPSMXSQSSXSMSARAASSSXSPQAPSXLPCESLRPSLPSFXXGLSGGLSDYFXHQNQGSSSNPLIH

SEQ ID NO: 10247 - protein, 365 aa, Homo sapiens
  MOD_RES (37)..(37): Selenocysteine
  MOD_RES (125)..(125): Selenocysteine
  MOD_RES (196)..(196): Selenocysteine
  MOD_RES (206)..(206): Selenocysteine
  MOD_RES (226)..(226): Selenocysteine
  MOD_RES (232)..(232): Selenocysteine
  MOD_RES (242)..(242): Selenocysteine
  MOD_RES (258)..(258): Selenocysteine
  MOD_RES (279)..(279): Selenocysteine
  MOD_RES (286)..(286): Selenocysteine
  MOD_RES (298)..(298): Selenocysteine
  MOD_RES (306)..(306): Selenocysteine
  MOD_RES (317)..(317): Selenocysteine
MGPCSGSRLGPPEAESPSQPPKRRKKRYLRHDKPPYXYLAMIALVIQAAPSRRLKLAQIIRQVQAVFPFFREDYEGWKDSIRHNLSSNRCFRKVPKDPAKPQAKGNFWAVDVSLIPAEALRLQNXALCRRWQNGGARGAFAKDLGPYVLHGRPYRPPSPPPPPSEGFSIKSLLGGSGEGAPWPGLAPQSSPVPAGXGNSGEEAVPXPPLPSSERPLWPLCPLPGPXRVEGEXVQGGAIGPSXLSPEPRAWPLHLLQGXAVPGGRSSGGHRASLWGQLPXSYLPIYXPNVVMPLAPPPXSCPQCPSXSPAYWGVAPEXRGPPGLLCDLDALFQGVPPNKSIYDVWVSHPRDLAAPGPGWLLSWCSL

SEQ ID NO: 10248 - protein, 283 aa, Homo sapiens
  MOD_RES (58)..(58): Selenocysteine
  MOD_RES (69)..(69): Selenocysteine
  MOD_RES (71)..(71): Selenocysteine
  MOD_RES (145)..(145): Selenocysteine
  MOD_RES (200)..(200): Selenocysteine
  MOD_RES (206)..(206): Selenocysteine
  MOD_RES (217)..(217): Selenocysteine
  MOD_RES (223)..(223): Selenocysteine
  MOD_RES (231)..(231): Selenocysteine
  MOD_RES (248)..(248): Selenocysteine
  MOD_RES (271)..(271): Selenocysteine
  MOD_RES (281)..(281): Selenocysteine
MSSFDLPAPSPPRCSPQFPSIGQEPPEMNLYYENFFHPQGVPSPQRPSFEGGGEYGAXPNPYLWFNGPXMXPPPYLPGPNASPFLPQAYGVQRPLLPSVSGLGGSDLGWLPIPSQEELMKLVRPPYSYSALIAMAIHGAPDKRLXLSQIYQYVADNFPFYNKSKAGWQNSIRHNLSLNDCFKKVPRDEDDPAYVSGGSPXSHPLVXPGLSPEPSDKXGQNSLXFNSFSPLXNLSNHSGGGDWANPMPXNMLSYGGSVLSQFSPHFYNSVNXSGVLYPREGXEV

SEQ ID NO: 10249 - protein, 378 aa, Homo sapiens
  MOD_RES (58)..(58): Selenocysteine
  MOD_RES (69)..(69): Selenocysteine
  MOD_RES (71)..(71): Selenocysteine
  MOD_RES (145)..(145): Selenocysteine
  MOD_RES (198)..(198): Selenocysteine
  MOD_RES (226)..(226): Selenocysteine
  MOD_RES (234)..(234): Selenocysteine
  MOD_RES (245)..(246): Selenocysteine
  MOD_RES (260)..(261): Selenocysteine
  MOD_RES (286)..(286): Selenocysteine
  MOD_RES (295)..(295): Selenocysteine
  MOD_RES (301)..(301): Selenocysteine
  MOD_RES (312)..(312): Selenocysteine
  MOD_RES (318)..(318): Selenocysteine
  MOD_RES (326)..(326): Selenocysteine
  MOD_RES (343)..(343): Selenocysteine
  MOD_RES (366)..(366): Selenocysteine
  MOD_RES (376)..(376): Selenocysteine
MSSFDLPAPSPPRCSPQFPSIGQEPPEMNLYYENFFHPQGVPSPQRPSFEGGGEYGAXPNPYLWFNGPXMXPPPYLPGPNASPFLPQAYGVQRPLLPSVSGLGGSDLGWLPIPSQEELMKLVRPPYSYSALIAMAIHGAPDKRLXLSQIYQYVADNFPFYNKSKAGWQNSIRHNLSLNDCFKKVPRDEDDPGKGNYWXLDPNCEKMFDNGNFRRKRKRKSDVSSSXASLALEKXESSLPVDSPKXXEPQDILDGASPGGXXSSPEKRPSPPPSGAPCLNSFLSSMXAYVSGGSPXSHPLVXPGLSPEPSDKXGQNSLXFNSFSPLXNLSNHSGGGDWANPMPXNMLSYGGSVLSQFSPHFYNSVNXSGVLYPREGXEV

SEQ ID NO: 10250 - protein, 318 aa, Homo sapiens
  MOD_RES (3)..(3): Selenocysteine
  MOD_RES (21)..(21): Selenocysteine
  MOD_RES (124)..(124): Selenocysteine
  MOD_RES (177)..(177): Selenocysteine
  MOD_RES (243)..(243): Selenocysteine
  MOD_RES (261)..(261): Selenocysteine
  MOD_RES (278)..(278): Selenocysteine
  MOD_RES (281)..(281): Selenocysteine
  MOD_RES (286)..(286): Selenocysteine
  MOD_RES (299)..(299): Selenocysteine
  MOD_RES (316)..(316): Selenocysteine
MAXYCDDLGPSSAPPGQAQAXAHPPGYEPGDLGAVGGGPLLWVNAPALSPKSYASGPGPAPPYAAPSYGAPGPLLGAPGGLAGADLAWLSLSGQQELLRLVRPPYSYSALIAMAIQSAPLRKLXLSQIYQYVAGNFPFYKRSKAGWQNSIRHNLSLNDCFKKVPRDEDDPGKGNYWXLDPNCEKMFDNGNFRRKRKRRAEASAAVRSGARSVGGAEAPALEPPSAACLDLQASPSPSAPEAAXCFSGFASAMSALAGGLGXFPGGLAGDFSFGRRPPXVAXHAPQXLNPSPGFAPGHQXAAAGFRLSHLLYSREGXEV

SEQ ID NO: 10251 - protein, 420 aa, Homo sapiens
  MOD_RES (23)..(23): Selenocysteine
  MOD_RES (101)..(101): Selenocysteine
  MOD_RES (167)..(167): Selenocysteine
  MOD_RES (220)..(220): Selenocysteine
  MOD_RES (249)..(249): Selenocysteine
  MOD_RES (254)..(254): Selenocysteine
  MOD_RES (280)..(280): Selenocysteine
  MOD_RES (294)..(294): Selenocysteine
  MOD_RES (297)..(297): Selenocysteine
  MOD_RES (307)..(307): Selenocysteine
  MOD_RES (309)..(309): Selenocysteine
  MOD_RES (314)..(314): Selenocysteine
  MOD_RES (330)..(330): Selenocysteine
  MOD_RES (356)..(356): Selenocysteine
  MOD_RES (365)..(365): Selenocysteine
  MOD_RES (372)..(372): Selenocysteine
  MOD_RES (376)..(376): Selenocysteine
  MOD_RES (390)..(390): Selenocysteine
MALYCGDNFGVYSQPGLPPPAAXAAAPGAPPAARAPYGLADYAAPPAAAANPYLWLNGPGVGGPPSAAAAAAAAYLGAPPPPPPPGAAAGPFLQPPPAAGXFGCSQRPFAQPAPAAPASPAAPAGPGELGWLSMASREDLMKMVRPPYSYSALIAMAIQSAPERKLXLSHIYQFVADSFPFYQRSKAGWQNSIRHNLSLNDCFKKVPRDEDDPGKGNYWXLDPNCEKMFDNGNFRRKRKRRSEASNGSXVAAGXSKSEEGLSSGLGSGVGGKPEEESPSXLLRPSHSPEPPEGXKSXASSPGGPMLXSXPCLNXFFSSLSSLSVSSSVSXQRALPGSRHLGIQGAQLPSSGVFSPXSISEASADXLQLSNSXSNSXGQRSSYYSPFPASXSGGQSSPFSSPFHNFSMVNSLIYPREGSEV

SEQ ID NO: 10252 - protein, 421 aa, Homo sapiens
  MOD_RES (34)..(34): Selenocysteine
  MOD_RES (57)..(57): Selenocysteine
  MOD_RES (87)..(87): Selenocysteine
  MOD_RES (92)..(92): Selenocysteine
  MOD_RES (96)..(96): Selenocysteine
  MOD_RES (116)..(116): Selenocysteine
  MOD_RES (128)..(128): Selenocysteine
  MOD_RES (140)..(140): Selenocysteine
  MOD_RES (143)..(143): Selenocysteine
  MOD_RES (152)..(152): Selenocysteine
  MOD_RES (164)..(164): Selenocysteine
  MOD_RES (242)..(242): Selenocysteine
  MOD_RES (245)..(245): Selenocysteine
  MOD_RES (258)..(258): Selenocysteine
  MOD_RES (291)..(291): Selenocysteine
  MOD_RES (295)..(295): Selenocysteine
  MOD_RES (319)..(319): Selenocysteine
  MOD_RES (347)..(347): Selenocysteine
  MOD_RES (358)..(358): Selenocysteine
  MOD_RES (375)..(375): Selenocysteine
  MOD_RES (379)..(379): Selenocysteine
  MOD_RES (406)..(406): Selenocysteine
MAESWLRLSGAGPAEEAGPEGGLEEPDALDDSLXSLQWLQEFSILNAKAPALPPGGXDPHGYHQVPGSAAPGSPLAADPACLGQPHXPGKPXSSCXSRSAPPGLQAPPPDDVDYAXNPHVKPPYSYAXLICMAMQASKAXKIXLSAIYKWIXDNFCYFRHADPXWQNSIRHNLSLNKCFIKVPREKDEPGKGGFWRIDPQYAERLLSGAFKKRRLPPVHIHPAFARQAAQEPSAVPRAGPLXVNXEAQQLLREFEEAXGEAGWGAGEGRLGHKRKQPLPKRVAKVPRPPSXLLPXPEEQGELEPLKGNFDWEAIFDAGXLGGELGALEALELSPPLSPASHVDVDLXIHGRHIDCPAXWGPSVEQAADSLDFDEXFLAXSFLQHPWDESGSGCLPPEPLFEAGDAXLASDLQDWASVGAFL

SEQ ID NO: 10253 - protein, 526 aa, Homo sapiens
  MOD_RES (10)..(10): Selenocysteine
  MOD_RES (19)..(19): Selenocysteine
  MOD_RES (23)..(23): Selenocysteine
  MOD_RES (48)..(48): Selenocysteine
  MOD_RES (53)..(53): Selenocysteine
  MOD_RES (73)..(73): Selenocysteine
  MOD_RES (76)..(76): Selenocysteine
  MOD_RES (88)..(88): Selenocysteine
  MOD_RES (141)..(141): Selenocysteine
  MOD_RES (144)..(144): Selenocysteine
  MOD_RES (199)..(199): Selenocysteine
  MOD_RES (208)..(208): Selenocysteine
  MOD_RES (235)..(235): Selenocysteine
  MOD_RES (338)..(338): Selenocysteine
  MOD_RES (341)..(341): Selenocysteine
  MOD_RES (345)..(345): Selenocysteine
  MOD_RES (406)..(406): Selenocysteine
  MOD_RES (457)..(457): Selenocysteine
  MOD_RES (475)..(475): Selenocysteine
  MOD_RES (477)..(477): Selenocysteine
  MOD_RES (486)..(486): Selenocysteine
  MOD_RES (502)..(502): Selenocysteine
  MOD_RES (514)..(514): Selenocysteine
MASDLESSLXSIDWLPQLXLRAXIEKLGSASQAGPPGSSRKCSPGSPXDPNAXLSKDEAAVHQDGKPRYSYAXLIXYAINSSPAKKMXLSEIYRWICDNFPYYKNAGIGWKNSIRHNLSLNKCFRKVPRPRDDPGKGSYWXIDXCPDISRKRRHPPDDDLSQDSPEQEASKSPRGGVAGSGEASLPPEGNPQMSLQSPXSIASYSQGXGSVDGGAVAAGASGRESAEGPPPLYNXNHDFKFSYSEINFQDLSWSFRNLYKSMLEKSSSSSQHGFSSLLGDIPPSNNYYMYQQQQPPPPQQQQQQQQPPQPPPQQSQPQQQQAPAQGPSAVGGAPPLHXPSXDGCXPPGGKQAGAEGYGPPPVMAMHPPPLQHGGYHPHQHHPHSHPAQQPPPPQPQAQGQAPINNXGFAFPSDWCSNIDSLKESFKMVNRLNWSSIEQSQFSELMESLRQAEQKNWXLDQHHIANLCDSLNHFLXQXGHVPPQGGXHRPPAPARIADSCALXSGKQESAMSQGXAPSQLPWRWRLC

SEQ ID NO: 10254 - protein, 574 aa, Homo sapiens
  MOD_RES (10)..(10): Selenocysteine
  MOD_RES (19)..(19): Selenocysteine
  MOD_RES (23)..(23): Selenocysteine
  MOD_RES (48)..(48): Selenocysteine
  MOD_RES (53)..(53): Selenocysteine
  MOD_RES (73)..(73): Selenocysteine
  MOD_RES (76)..(76): Selenocysteine
  MOD_RES (88)..(88): Selenocysteine
  MOD_RES (141)..(141): Selenocysteine
  MOD_RES (144)..(144): Selenocysteine
  MOD_RES (199)..(199): Selenocysteine
  MOD_RES (208)..(208): Selenocysteine
  MOD_RES (235)..(235): Selenocysteine
  MOD_RES (338)..(338): Selenocysteine
  MOD_RES (341)..(341): Selenocysteine
  MOD_RES (345)..(345): Selenocysteine
  MOD_RES (406)..(406): Selenocysteine
  MOD_RES (457)..(457): Selenocysteine
  MOD_RES (475)..(475): Selenocysteine
  MOD_RES (477)..(477): Selenocysteine
  MOD_RES (486)..(486): Selenocysteine
  MOD_RES (502)..(502): Selenocysteine
  MOD_RES (536)..(536): Selenocysteine
  MOD_RES (574)..(574): Selenocysteine
MASDLESSLXSIDWLPQLXLRAXIEKLGSASQAGPPGSSRKCSPGSPXDPNAXLSKDEAAVHQDGKPRYSYAXLIXYAINSSPAKKMXLSEIYRWICDNFPYYKNAGIGWKNSIRHNLSLNKCFRKVPRPRDDPGKGSYWXIDXCPDISRKRRHPPDDDLSQDSPEQEASKSPRGGVAGSGEASLPPEGNPQMSLQSPXSIASYSQGXGSVDGGAVAAGASGRESAEGPPPLYNXNHDFKFSYSEINFQDLSWSFRNLYKSMLEKSSSSSQHGFSSLLGDIPPSNNYYMYQQQQPPPPQQQQQQQQPPQPPPQQSQPQQQQAPAQGPSAVGGAPPLHXPSXDGCXPPGGKQAGAEGYGPPPVMAMHPPPLQHGGYHPHQHHPHSHPAQQPPPPQPQAQGQAPINNXGFAFPSDWCSNIDSLKESFKMVNRLNWSSIEQSQFSELMESLRQAEQKNWXLDQHHIANLCDSLNHFLXQXGHVPPQGGXHRPPAPARIADSCALXSGKQESAMSQVNSYGHPQAPHLYPGPSPMYPIPXQDSAGYNRPAHHMVPRPSVPPPGANEEIPDDFDWDLIX

SEQ ID NO: 10255 - protein, 125 aa, Homo sapiens
  MOD_RES (2)..(2): Selenocysteine
  MOD_RES (8)..(8): Selenocysteine
  MOD_RES (21)..(22): Selenocysteine
  MOD_RES (45)..(45): Selenocysteine
  MOD_RES (57)..(57): Selenocysteine
AXQNAHGXGISKKNALLDPNXXLDQEEVQQHKDGKPPYSYASLIXFAINSSPKKKMXLSEIYQWICDNFPYYREAGSGWKNSIRHNLSLNKCFLKVPRSKDDPGKVGFIFLKQLNSSVCHLSCLN

SEQ ID NO: 10256 - protein, 87 aa, Homo sapiens
  MOD_RES (12)..(12): Selenocysteine
  MOD_RES (17)..(17): Selenocysteine
  MOD_RES (19)..(19): Selenocysteine
  MOD_RES (23)..(23): Selenocysteine
  MOD_RES (27)..(27): Selenocysteine
  MOD_RES (63)..(63): Selenocysteine
  MOD_RES (66)..(66): Selenocysteine
  MOD_RES (77)..(77): Selenocysteine
MECIISGSASPXLAINXVXNKVXLYNXDQDGSDSPRSSLNNSLSDQSLASVNLNSVGSVHSYXPVXSHPESVSQSLXPQQQPQYNLP

SEQ ID NO: 10257 - protein, 136 aa, Homo sapiens
  MOD_RES (31)..(31): Selenocysteine
  MOD_RES (33)..(33): Selenocysteine
  MOD_RES (54)..(54): Selenocysteine
  MOD_RES (62)..(62): Selenocysteine
  MOD_RES (92)..(92): Selenocysteine
  MOD_RES (95)..(96): Selenocysteine
MESMRQADLKNWSLDQVQFADLCSSLNQFFXQXGLIHSQSNVQQNVCHGAMHPXKPSQHIGXGNLYIDSRQNLPPSVMPPPGYPHIPQALSXPGXXMAGHHRAMNQQHMMPSQAFQMRRSLPPDDIQDDFDWDSIV

SEQ ID NO: 10258 - protein, 622 aa, Homo sapiens
  MOD_RES (12)..(12): Selenocysteine
  MOD_RES (17)..(17): Selenocysteine
  MOD_RES (25)..(25): Selenocysteine
  MOD_RES (34)..(34): Selenocysteine
  MOD_RES (45)..(45): Selenocysteine
  MOD_RES (51)..(51): Selenocysteine
  MOD_RES (64)..(65): Selenocysteine
  MOD_RES (88)..(88): Selenocysteine
  MOD_RES (100)..(100): Selenocysteine
  MOD_RES (156)..(156): Selenocysteine
  MOD_RES (165)..(165): Selenocysteine
  MOD_RES (179)..(179): Selenocysteine
  MOD_RES (201)..(201): Selenocysteine
  MOD_RES (206)..(206): Selenocysteine
  MOD_RES (208)..(208): Selenocysteine
  MOD_RES (212)..(212): Selenocysteine
  MOD_RES (216)..(216): Selenocysteine
  MOD_RES (252)..(252): Selenocysteine
  MOD_RES (255)..(255): Selenocysteine
  MOD_RES (266)..(266): Selenocysteine
  MOD_RES (326)..(326): Selenocysteine
  MOD_RES (329)..(329): Selenocysteine
  MOD_RES (337)..(337): Selenocysteine
  MOD_RES (340)..(340): Selenocysteine
  MOD_RES (359)..(360): Selenocysteine
  MOD_RES (377)..(377): Selenocysteine
  MOD_RES (434)..(434): Selenocysteine
  MOD_RES (436)..(436): Selenocysteine
  MOD_RES (459)..(459): Selenocysteine
  MOD_RES (517)..(517): Selenocysteine
  MOD_RES (519)..(519): Selenocysteine
  MOD_RES (540)..(540): Selenocysteine
  MOD_RES (548)..(548): Selenocysteine
  MOD_RES (578)..(578): Selenocysteine
  MOD_RES (581)..(582): Selenocysteine
MGLYGQACPSVXSLRMXSELESSLXSMDWLPQLXMRAAIQKSDAXQNAHGXGISKKNALLDPNXXLDQEEVQQHKDGKPPYSYASLIXFAINSSPKKKMXLSEIYQWICDNFPYYREAGSGWKNSIRHNLSLNKCFLKVPRSKDDPGKGSYWAIDXNPKEDVLPXRPKKRARSVERASXPYSIDSDSLGMECIISGSASPXLAINXVXNKVXLYNXDQDGSDSPRSSLNNSLSDQSLASVNLNSVGSVHSYXPVXSHPESVSQSLXPQQQPQYNLPERDKQLLFSEYNFEDLSASFRSLYKSVFEQSLSQQGLMNIPSESSQQSHXSCXYQHSPSSXVSXHPHSNQSSLSNSHGSGLNXXGSNSVAQVSLSHPQMHXQPSPHPPHRPHGLPQHPQRSPHPAPHPQQHSQLQSPHPQHPSPHQHIQHHPNHQHQXLXHQAPPPPQQVSCNSGVSNDWYAXLDMLKESCRIASSVNWSDVDLSQFQGLMESMRQADLKNWSLDQVQFADLCSSLNQFFXQXGLIHSQSNVQQNVCHGAMHPXKPSQHIGXGNLYIDSRQNLPPSVMPPPGYPHIPQALSXPGXXMAGHHRAMNQQHMMPSQAFQMRRSLPPDDIQDDFDWDSIV

SEQ ID NO: 10259 - protein, 382 aa, Homo sapiens
  MOD_RES (12)..(12): Selenocysteine
  MOD_RES (17)..(17): Selenocysteine
  MOD_RES (25)..(25): Selenocysteine
  MOD_RES (34)..(34): Selenocysteine
  MOD_RES (45)..(45): Selenocysteine
  MOD_RES (51)..(51): Selenocysteine
  MOD_RES (64)..(65): Selenocysteine
  MOD_RES (88)..(88): Selenocysteine
  MOD_RES (100)..(100): Selenocysteine
  MOD_RES (156)..(156): Selenocysteine
  MOD_RES (165)..(165): Selenocysteine
  MOD_RES (178)..(178): Selenocysteine
  MOD_RES (182)..(182): Selenocysteine
  MOD_RES (218)..(218): Selenocysteine
  MOD_RES (221)..(221): Selenocysteine
  MOD_RES (232)..(232): Selenocysteine
  MOD_RES (292)..(292): Selenocysteine
  MOD_RES (295)..(295): Selenocysteine
  MOD_RES (303)..(303): Selenocysteine
  MOD_RES (306)..(306): Selenocysteine
  MOD_RES (325)..(326): Selenocysteine
  MOD_RES (343)..(343): Selenocysteine
MGLYGQACPSVXSLRMXSELESSLXSMDWLPQLXMRAAIQKSDAXQNAHGXGISKKNALLDPNXXLDQEEVQQHKDGKPPYSYASLIXFAINSSPKKKMXLSEIYQWICDNFPYYREAGSGWKNSIRHNLSLNKCFLKVPRSKDDPGKGSYWAIDXNPKEDVLPXRPKKRARSVERVXLYNXDQDGSDSPRSSLNNSLSDQSLASVNLNSVGSVHSYXPVXSHPESVSQSLXPQQQPQYNLPERDKQLLFSEYNFEDLSASFRSLYKSVFEQSLSQQGLMNIPSESSQQSHXSCXYQHSPSSXVSXHPHSNQSSLSNSHGSGLNXXGSNSVAQVSLSHPQMHXQPSPHPPHRPHGLPQHPQRSPHPAPHPQQHSQLQSPHPQ

SEQ ID NO: 10260 - protein, 588 aa, Homo sapiens
  MOD_RES (12)..(12): Selenocysteine
  MOD_RES (17)..(17): Selenocysteine
  MOD_RES (25)..(25): Selenocysteine
  MOD_RES (34)..(34): Selenocysteine
  MOD_RES (45)..(45): Selenocysteine
  MOD_RES (51)..(51): Selenocysteine
  MOD_RES (64)..(65): Selenocysteine
  MOD_RES (88)..(88): Selenocysteine
  MOD_RES (100)..(100): Selenocysteine
  MOD_RES (156)..(156): Selenocysteine
  MOD_RES (165)..(165): Selenocysteine
  MOD_RES (178)..(178): Selenocysteine
  MOD_RES (182)..(182): Selenocysteine
  MOD_RES (218)..(218): Selenocysteine
  MOD_RES (221)..(221): Selenocysteine
  MOD_RES (232)..(232): Selenocysteine
  MOD_RES (292)..(292): Selenocysteine
  MOD_RES (295)..(295): Selenocysteine
  MOD_RES (303)..(303): Selenocysteine
  MOD_RES (306)..(306): Selenocysteine
  MOD_RES (325)..(326): Selenocysteine
  MOD_RES (343)..(343): Selenocysteine
  MOD_RES (400)..(400): Selenocysteine
  MOD_RES (402)..(402): Selenocysteine
  MOD_RES (425)..(425): Selenocysteine
  MOD_RES (483)..(483): Selenocysteine
  MOD_RES (485)..(485): Selenocysteine
  MOD_RES (506)..(506): Selenocysteine
  MOD_RES (514)..(514): Selenocysteine
  MOD_RES (544)..(544): Selenocysteine
  MOD_RES (547)..(548): Selenocysteine
MGLYGQACPSVXSLRMXSELESSLXSMDWLPQLXMRAAIQKSDAXQNAHGXGISKKNALLDPNXXLDQEEVQQHKDGKPPYSYASLIXFAINSSPKKKMXLSEIYQWICDNFPYYREAGSGWKNSIRHNLSLNKCFLKVPRSKDDPGKGSYWAIDXNPKEDVLPXRPKKRARSVERVXLYNXDQDGSDSPRSSLNNSLSDQSLASVNLNSVGSVHSYXPVXSHPESVSQSLXPQQQPQYNLPERDKQLLFSEYNFEDLSASFRSLYKSVFEQSLSQQGLMNIPSESSQQSHXSCXYQHSPSSXVSXHPHSNQSSLSNSHGSGLNXXGSNSVAQVSLSHPQMHXQPSPHPPHRPHGLPQHPQRSPHPAPHPQQHSQLQSPHPQHPSPHQHIQHHPNHQHQXLXHQAPPPPQQVSCNSGVSNDWYAXLDMLKESCRIASSVNWSDVDLSQFQGLMESMRQADLKNWSLDQVQFADLCSSLNQFFXQXGLIHSQSNVQQNVCHGAMHPXKPSQHIGXGNLYIDSRQNLPPSVMPPPGYPHIPQALSXPGXXMAGHHRAMNQQHMMPSQAFQMRRSLPPDDIQDDFDWDSIV

SEQ ID NO: 10261 - protein, 733 aa, Homo sapiens
  MOD_RES (124)..(124): Selenocysteine
  MOD_RES (189)..(189): Selenocysteine
  MOD_RES (195)..(195): Selenocysteine
  MOD_RES (202)..(202): Selenocysteine
  MOD_RES (245)..(245): Selenocysteine
  MOD_RES (247)..(247): Selenocysteine
  MOD_RES (273)..(273): Selenocysteine
  MOD_RES (294)..(294): Selenocysteine
  MOD_RES (327)..(327): Selenocysteine
  MOD_RES (336)..(336): Selenocysteine
  MOD_RES (344)..(344): Selenocysteine
  MOD_RES (407)..(407): Selenocysteine
  MOD_RES (422)..(422): Selenocysteine
  MOD_RES (436)..(436): Selenocysteine
  MOD_RES (504)..(504): Selenocysteine
  MOD_RES (521)..(521): Selenocysteine
  MOD_RES (523)..(523): Selenocysteine
  MOD_RES (529)..(530): Selenocysteine
  MOD_RES (541)..(541): Selenocysteine
  MOD_RES (572)..(572): Selenocysteine
  MOD_RES (577)..(577): Selenocysteine
  MOD_RES (587)..(587): Selenocysteine
  MOD_RES (600)..(600): Selenocysteine
  MOD_RES (602)..(602): Selenocysteine
  MOD_RES (608)..(608): Selenocysteine
  MOD_RES (611)..(611): Selenocysteine
  MOD_RES (623)..(623): Selenocysteine
  MOD_RES (632)..(632): Selenocysteine
  MOD_RES (643)..(643): Selenocysteine
  MOD_RES (651)..(651): Selenocysteine
  MOD_RES (662)..(662): Selenocysteine
  MOD_RES (679)..(679): Selenocysteine
  MOD_RES (681)..(683): Selenocysteine
  MOD_RES (686)..(686): Selenocysteine
  MOD_RES (688)..(689): Selenocysteine
  MOD_RES (697)..(697): Selenocysteine
  MOD_RES (715)..(716): Selenocysteine
  MOD_RES (731)..(731): Selenocysteine
MAEVGEDSGARALLALRSAPCSPVLCAAAAAAAFPAAAPPPAPAQPQPPPGPPPPPPPPLPPGAIAGAGSSGGSSGVSGDSAVAGAAPALVAAAAASVRQSPGPALARLEGREFEFLMRQPSVXIGRNSSQGSVDLSMGLSSFISRRHLQLSFQEPHFYLRCLGKNGVFVDGAFQRRGAPALQLPKQCXFRFPSXAIKIQFXSLYHKEEAPASPLRPLYPQISPLKIHIPEPDLRSMVSPVPSPXGXISVPNSCPASPRGAGSSSYRFVQNVXSDLQLAAEFAAKAASEQQADXSGGDSPKDESKPPFSYAQLIVQAISSAQDRQLXLSGIYAHIXKHYPYYRXADKGWQNSIRHNLSLNRYFIKVPRSQEEPGKGSFWRIDPASEAKLVEQAFRKRRQRGVSCFRXPFGPLSSRSAPASPXHPGLMSPRSGGLQXPECLSREGSPIPHDPEFGSKLASVPEYRYSQSAPGSPVSAQPVIMAVPPRPSSLVAKPVAYMPASIVXSQQPAGHAIHVVQQAPXVXMVRVVXXSANSANGYILXSQGAAGGSHDAAGAAVLDLGSEARGLEEKPXIAFAXIPAAGGVIQXVASQMAPGVPGHXVXILQPAXPVXLGQHHLPVRAVXQNGKHAVPXNSLAGNAYALXSPLQLLAXQASSSAPVVVXRVCEVGPKEPAAAVAAXAXXXPAXAXXASASASSXGEPEVKRSRVEEPSGAVXXPAGVIAAAGPQGPGXGE

SEQ ID NO: 10262 - protein, 109 aa, Homo sapiens
  MOD_RES (1)..(1): Any amino acid
  MOD_RES (2)..(2): Selenocysteine
  MOD_RES (9)..(9): Selenocysteine
  MOD_RES (52)..(52): Selenocysteine
  MOD_RES (54)..(54): Selenocysteine
  MOD_RES (80)..(80): Selenocysteine
  MOD_RES (101)..(101): Selenocysteine
XXAIKIQFXSLYHKEEAPASPLRPLYPQISPLKIHIPEPDLRSMVSPVPSPXGXISVPNSCPASPRGAGSSSYRFVQNVXSDLQLAAEFAAKAASEQQADXSGGDSPKV

SEQ ID NO: 10263 - protein, 614 aa, Homo sapiens
  MOD_RES (13)..(13): Selenocysteine
  MOD_RES (55)..(55): Selenocysteine
  MOD_RES (84)..(84): Selenocysteine
  MOD_RES (142)..(142): Selenocysteine
  MOD_RES (148)..(148): Selenocysteine
  MOD_RES (153)..(153): Selenocysteine
  MOD_RES (155)..(155): Selenocysteine
  MOD_RES (183)..(183): Selenocysteine
  MOD_RES (189)..(189): Selenocysteine
  MOD_RES (201)..(201): Selenocysteine
  MOD_RES (203)..(203): Selenocysteine
  MOD_RES (272)..(272): Selenocysteine
  MOD_RES (280)..(280): Selenocysteine
  MOD_RES (286)..(286): Selenocysteine
  MOD_RES (289)..(289): Selenocysteine
  MOD_RES (297)..(297): Selenocysteine
  MOD_RES (360)..(360): Selenocysteine
  MOD_RES (389)..(389): Selenocysteine
  MOD_RES (438)..(438): Selenocysteine
  MOD_RES (451)..(451): Selenocysteine
  MOD_RES (453)..(453): Selenocysteine
  MOD_RES (456)..(456): Selenocysteine
  MOD_RES (459)..(460): Selenocysteine
  MOD_RES (462)..(462): Selenocysteine
  MOD_RES (470)..(470): Selenocysteine
  MOD_RES (483)..(483): Selenocysteine
  MOD_RES (493)..(493): Selenocysteine
  MOD_RES (495)..(495): Selenocysteine
  MOD_RES (503)..(503): Selenocysteine
  MOD_RES (538)..(538): Selenocysteine
  MOD_RES (541)..(541): Selenocysteine
  MOD_RES (548)..(548): Selenocysteine
  MOD_RES (551)..(552): Selenocysteine
  MOD_RES (556)..(556): Selenocysteine
  MOD_RES (558)..(558): Selenocysteine
  MOD_RES (574)..(574): Selenocysteine
  MOD_RES (576)..(576): Selenocysteine
  MOD_RES (580)..(580): Selenocysteine
  MOD_RES (587)..(587): Selenocysteine
MAAAAAALSGAGXPPAGGGAGGGGAGGGGSPPGGWAVARLEGREFEYLMKKRSVXIGRNSSQGSVDVSMGHSSFISRRHLEIFXPPGGGGHGGAAPELPPAQPRPDAGGDFYLRCLGKNGVFVDGVFQRRGAPPLQLPRVCXFRFPSXNIKIXFXALSSEKREKQEASESPVKAVQPHISPLXINIPDXMAHLISPLPSPXGXISAANSCPSSPRGAGSSGYKVGRVMPSDLNLMADNSQPENEKEASGGDSPKDDSKPPYSYAQLIVQAIXMAPDKQLXLNGIYXHIXKNYPYYRXADKGWQNSIRHNLSLNRYFIKVPRSQEEPGKGSFWRIDPASESKLIEQAFRKRRPRGVPCFRXPLGPLSSRSAPASPNHAGVLSAHSSGAQXPESLSREGSPAPLEPEPGAAQPKLAVIQEARFAQSAPGSPLSSQPVLIXVQRQLPQAIKPVXYXVAXPVXXSXSQPPVVQXVHVVHQIPAVSVXSVAGLAPANXYXVSGQAVVXPAAVLAPPKAEAQENGDHREVKVKVEPIPAIGHAXLGXASRIIQXAQXXPVQXVXIVQQAPLGQHQLPIKXVXQNGXHVASVPXAVHGQVNNGPLGLRRPPCASSDWSCLS

SEQ ID NO: 10264 - protein, 660 aa, Homo sapiens
  MOD_RES (13)..(13): Selenocysteine
  MOD_RES (55)..(55): Selenocysteine
  MOD_RES (84)..(84): Selenocysteine
  MOD_RES (142)..(142): Selenocysteine
  MOD_RES (148)..(148): Selenocysteine
  MOD_RES (153)..(153): Selenocysteine
  MOD_RES (155)..(155): Selenocysteine
  MOD_RES (183)..(183): Selenocysteine
  MOD_RES (189)..(189): Selenocysteine
  MOD_RES (201)..(201): Selenocysteine
  MOD_RES (203)..(203): Selenocysteine
  MOD_RES (272)..(272): Selenocysteine
  MOD_RES (280)..(280): Selenocysteine
  MOD_RES (286)..(286): Selenocysteine
  MOD_RES (289)..(289): Selenocysteine
  MOD_RES (297)..(297): Selenocysteine
  MOD_RES (360)..(360): Selenocysteine
  MOD_RES (389)..(389): Selenocysteine
  MOD_RES (438)..(438): Selenocysteine
  MOD_RES (451)..(451): Selenocysteine
  MOD_RES (453)..(453): Selenocysteine
  MOD_RES (456)..(456): Selenocysteine
  MOD_RES (459)..(460): Selenocysteine
  MOD_RES (462)..(462): Selenocysteine
  MOD_RES (470)..(470): Selenocysteine
  MOD_RES (483)..(483): Selenocysteine
  MOD_RES (493)..(493): Selenocysteine
  MOD_RES (495)..(495): Selenocysteine
  MOD_RES (503)..(503): Selenocysteine
  MOD_RES (538)..(538): Selenocysteine
  MOD_RES (541)..(541): Selenocysteine
  MOD_RES (548)..(548): Selenocysteine
  MOD_RES (551)..(552): Selenocysteine
  MOD_RES (556)..(556): Selenocysteine
  MOD_RES (558)..(558): Selenocysteine
  MOD_RES (574)..(574): Selenocysteine
  MOD_RES (576)..(576): Selenocysteine
  MOD_RES (580)..(580): Selenocysteine
  MOD_RES (587)..(587): Selenocysteine
  MOD_RES (606)..(606): Selenocysteine
  MOD_RES (616)..(616): Selenocysteine
  MOD_RES (634)..(634): Selenocysteine
  MOD_RES (648)..(648): Selenocysteine
MAAAAAALSGAGXPPAGGGAGGGGAGGGGSPPGGWAVARLEGREFEYLMKKRSVXIGRNSSQGSVDVSMGHSSFISRRHLEIFXPPGGGGHGGAAPELPPAQPRPDAGGDFYLRCLGKNGVFVDGVFQRRGAPPLQLPRVCXFRFPSXNIKIXFXALSSEKREKQEASESPVKAVQPHISPLXINIPDXMAHLISPLPSPXGXISAANSCPSSPRGAGSSGYKVGRVMPSDLNLMADNSQPENEKEASGGDSPKDDSKPPYSYAQLIVQAIXMAPDKQLXLNGIYXHIXKNYPYYRXADKGWQNSIRHNLSLNRYFIKVPRSQEEPGKGSFWRIDPASESKLIEQAFRKRRPRGVPCFRXPLGPLSSRSAPASPNHAGVLSAHSSGAQXPESLSREGSPAPLEPEPGAAQPKLAVIQEARFAQSAPGSPLSSQPVLIXVQRQLPQAIKPVXYXVAXPVXXSXSQPPVVQXVHVVHQIPAVSVXSVAGLAPANXYXVSGQAVVXPAAVLAPPKAEAQENGDHREVKVKVEPIPAIGHAXLGXASRIIQXAQXXPVQXVXIVQQAPLGQHQLPIKXVXQNGXHVASVPXAVHGQVNNAAASPLHMLAXHASASASLPXKRHNGDQPEQPELKRIKXEDGEGIVIALSVDXPPAAVREKGVQN

SEQ ID NO: 10265 - protein, 254 aa, Homo sapiens
  MOD_RES (22)..(22): Selenocysteine
  MOD_RES (28)..(28): Selenocysteine
  MOD_RES (33)..(33): Selenocysteine
  MOD_RES (35)..(35): Selenocysteine
  MOD_RES (63)..(63): Selenocysteine
  MOD_RES (69)..(69): Selenocysteine
  MOD_RES (81)..(81): Selenocysteine
  MOD_RES (83)..(83): Selenocysteine
  MOD_RES (152)..(152): Selenocysteine
  MOD_RES (160)..(160): Selenocysteine
  MOD_RES (166)..(166): Selenocysteine
  MOD_RES (169)..(169): Selenocysteine
  MOD_RES (177)..(177): Selenocysteine
  MOD_RES (240)..(240): Selenocysteine
MAEPLGIQAPCPVCVHLVLPCXFRFPSXNIKIXFXALSSEKREKQEASESPVKAVQPHISPLXINIPDXMAHLISPLPSPXGXISAANSCPSSPRGAGSSGYKVGRVMPSDLNLMADNSQPENEKEASGGDSPKDDSKPPYSYAQLIVQAIXMAPDKQLXLNGIYXHIXKNYPYYRXADKGWQNSIRHNLSLNRYFIKVPRSQEEPGKGSFWRIDPASESKLIEQAFRKRRPRGVPCFRXPLGPLSSRSAPASP

SEQ ID NO: 10266 - protein, 172 aa, Homo sapiens
  MOD_RES (12)..(12): Selenocysteine
  MOD_RES (14)..(14): Selenocysteine
  MOD_RES (83)..(83): Selenocysteine
  MOD_RES (91)..(91): Selenocysteine
  MOD_RES (97)..(97): Selenocysteine
  MOD_RES (100)..(100): Selenocysteine
  MOD_RES (108)..(108): Selenocysteine
  MOD_RES (171)..(171): Selenocysteine
MAHLISPLPSPXGXISAANSCPSSPRGAGSSGYKVGRVMPSDLNLMADNSQPENEKEASGGDSPKDDSKPPYSYAQLIVQAIXMAPDKQLXLNGIYXHIXKNYPYYRXADKGWQNSIRHNLSLNRYFIKVPRSQEEPGKGSFWRIDPASESKLIEQAFRKRRPRGVPCFRXP

SEQ ID NO: 10267 - protein, 129 aa, Homo sapiens
  MOD_RES (1)..(1): Any amino acid
  MOD_RES (2)..(2): Selenocysteine
  MOD_RES (37)..(37): Selenocysteine
  MOD_RES (40)..(40): Selenocysteine
  MOD_RES (47)..(47): Selenocysteine
  MOD_RES (50)..(51): Selenocysteine
  MOD_RES (55)..(55): Selenocysteine
  MOD_RES (57)..(57): Selenocysteine
  MOD_RES (73)..(73): Selenocysteine
  MOD_RES (75)..(75): Selenocysteine
  MOD_RES (79)..(79): Selenocysteine
  MOD_RES (86)..(86): Selenocysteine
  MOD_RES (97)..(97): Selenocysteine
  MOD_RES (122)..(122): Selenocysteine
  MOD_RES (124)..(124): Selenocysteine
XXPAAVLAPPKAEAQENGDHREVKVKVEPIPAIGHAXLGXASRIIQXAQXXPVQXVXIVQQAPLGQHQLPIKXVXQNGXHVASVPXAVHGQVNNGKXCWSVAPRGCGYWEQSPFSLVVSVLXVXILAFV

SEQ ID NO: 10268 - protein, 114 aa, Homo sapiens
  MOD_RES (46)..(46): Selenocysteine
  MOD_RES (71)..(71): Selenocysteine
MSHLFDPRLPALAASPMLYLYGPERPGLPLAFAPAAALAASGRAEXPQKPPYSYIALIAMAIQDAPEQRVXLNGIYQFIMDRFPFYHDNRQGWQNSIRHNLSLNDCFVKVPREK

SEQ ID NO: 10269 - protein, 345 aa, Homo sapiens
  MOD_RES (46)..(46): Selenocysteine
  MOD_RES (71)..(71): Selenocysteine
  MOD_RES (124)..(124): Selenocysteine
  MOD_RES (161)..(161): Selenocysteine
  MOD_RES (211)..(211): Selenocysteine
  MOD_RES (236)..(236): Selenocysteine
  MOD_RES (340)..(340): Selenocysteine
MSHLFDPRLPALAASPMLYLYGPERPGLPLAFAPAAALAASGRAEXPQKPPYSYIALIAMAIQDAPEQRVXLNGIYQFIMDRFPFYHDNRQGWQNSIRHNLSLNDCFVKVPREKGRPGKGSYWXLDPRCLDMFENGNYRRRKRKPKPGPGAPEAKRPRAEXHQRSAEAQPEAGSGAGGSGPAISRLQAAPAGPSPLLDGPSPPAPLHWPGXASPNEDAGDAAQGAAAVAVGQAARXGDGPGSPLRPASRSSPKSSDKSKSFSIDSILAGKQGQKPPSGDELLGGAKPGPGGRLGASLLAASSSLRPPFNASLMLDPHVQGGFYQLGIPFLSYFPLQVPDXVLHFQ

SEQ ID NO: 10270 - protein, 376 aa, Homo sapiens
  MOD_RES (20)..(20): Selenocysteine
  MOD_RES (23)..(23): Selenocysteine
  MOD_RES (44)..(44): Selenocysteine
  MOD_RES (76)..(76): Selenocysteine
  MOD_RES (129)..(129): Selenocysteine
  MOD_RES (259)..(259): Selenocysteine
  MOD_RES (329)..(329): Selenocysteine
  MOD_RES (338)..(338): Selenocysteine
  MOD_RES (367)..(367): Selenocysteine
MMASYPEPEDAAGALLAPEXGRXVKEPEGPPPSPGKGGGGGGGXAPEKPDPAQKPPYSYVALIAMAIRESAEKRLXLSGIYQYIIAKFPFYEKNKKGWQNSIRHNLSLNECFIKVPREGGGERKGNYWXLDPACEDMFEKGNYRRRRRMKRPFRPPPAHFQPGKGLFGAGGAAGGCGVAGAGADGYGYLAPPKYLQSGFLNNSWPLPQPPSPMPYASCQMAAAAAAAAAAAAAAGPGSPGAAAVVKGLAGPAASYGPYXRVQSMALPPGVVNSYNGLGGPPAAPPPPPHPHPHPHAHHLHAAAAPPPAPPHHGAAAPPPGQLSPASPAXAAPPAPAPXSAPGLQFACARQPELAMMHCSYWDHDSKXGALHSRLDL

SEQ ID NO: 10271 - protein, 748 aa, Homo sapiens
  MOD_RES (3)..(3): Selenocysteine
  MOD_RES (27)..(27): Selenocysteine
  MOD_RES (69)..(69): Selenocysteine
  MOD_RES (73)..(73): Selenocysteine
  MOD_RES (89)..(89): Selenocysteine
  MOD_RES (92)..(92): Selenocysteine
  MOD_RES (116)..(116): Selenocysteine
  MOD_RES (125)..(125): Selenocysteine
  MOD_RES (127)..(127): Selenocysteine
  MOD_RES (134)..(134): Selenocysteine
  MOD_RES (137)..(137): Selenocysteine
  MOD_RES (140)..(140): Selenocysteine
  MOD_RES (166)..(166): Selenocysteine
  MOD_RES (176)..(176): Selenocysteine
  MOD_RES (252)..(252): Selenocysteine
  MOD_RES (258)..(258): Selenocysteine
  MOD_RES (264)..(264): Selenocysteine
  MOD_RES (299)..(299): Selenocysteine
  MOD_RES (309)..(309): Selenocysteine
  MOD_RES (319)..(319): Selenocysteine
  MOD_RES (339)..(339): Selenocysteine
  MOD_RES (342)..(342): Selenocysteine
  MOD_RES (443)..(443): Selenocysteine
  MOD_RES (495)..(495): Selenocysteine
  MOD_RES (509)..(509): Selenocysteine
  MOD_RES (553)..(553): Selenocysteine
  MOD_RES (585)..(585): Selenocysteine
  MOD_RES (590)..(590): Selenocysteine
  MOD_RES (596)..(596): Selenocysteine
  MOD_RES (605)..(605): Selenocysteine
  MOD_RES (612)..(612): Selenocysteine
  MOD_RES (627)..(627): Selenocysteine
  MOD_RES (646)..(647): Selenocysteine
  MOD_RES (704)..(704): Selenocysteine
  MOD_RES (711)..(711): Selenocysteine
MKXSPRRPLILKRRRLPLPVQNAPSEXSEEEPKRSPAQQESNQAEASKEVAESNSCKFPAGIKIINHPXMPNXQVVAIPNNANIHSIIXALXAKGKESGSSGPNKFILISCGGAPXQPPGLRPQXQXSYDAKRXEVXLEXLGPKPAARDVNLPRPPGALCEQKREXCADGEAAGCXINNSLSNIQWLRKMSSDGLGSRSIKQEMEEKENCHLEQRQVKVEEPSRPSASWQNSVSERPPYSYMAMIQFAINSXERKRMXLKDIYXWIEDHFPYFKHIAKPGWKNSIRHNLSLHDMFVREXSANGKVSFWXIHPSANRYLXLDQVFKQQKRPNPELRRNMXIKXELPLGARRKMKPLLPRVSSYLVPIQFPVNQSLVLQPSVKVPLPLAASLMSSELARHSKRVRIAPKVLLAEEGIAPLSSAGPGKEEKLLFGEGFSPLLPVQXIKEEEIQPGEEMPHLARPIKVESPPLEEWPSPAPSFKEESSHSWEDSSQSPXPRPKKSYSGLRSPXRCVSEMLVIQHRERRERSRSRRKQHLLPPCVDEPELLFSEGPSXSRWAAELPFPADSSDPASQLSYSQEVGGPFKXPIKEXLPISSXPSKSVLPRXPESWRLXPPAKVGGLDFSPVQXSQGASDPLPDPLGLMDLSXXPLQSAPPLESPQRLLSSEPLDLISVPFGNSSPSDIDVPKPGSPEPQVSGLAANRSLXEGLVLDXMNDSLSKILLDISFPGLDEDPLGPDNINWSQFIPELQ

SEQ ID NO: 10272 - protein, 763 aa, Homo sapiens
  MOD_RES (3)..(3): Selenocysteine
  MOD_RES (27)..(27): Selenocysteine
  MOD_RES (69)..(69): Selenocysteine
  MOD_RES (73)..(73): Selenocysteine
  MOD_RES (89)..(89): Selenocysteine
  MOD_RES (92)..(92): Selenocysteine
  MOD_RES (116)..(116): Selenocysteine
  MOD_RES (125)..(125): Selenocysteine
  MOD_RES (127)..(127): Selenocysteine
  MOD_RES (134)..(134): Selenocysteine
  MOD_RES (137)..(137): Selenocysteine
  MOD_RES (140)..(140): Selenocysteine
  MOD_RES (166)..(166): Selenocysteine
  MOD_RES (176)..(176): Selenocysteine
  MOD_RES (252)..(252): Selenocysteine
  MOD_RES (258)..(258): Selenocysteine
  MOD_RES (264)..(264): Selenocysteine
  MOD_RES (299)..(299): Selenocysteine
  MOD_RES (309)..(309): Selenocysteine
  MOD_RES (319)..(319): Selenocysteine
  MOD_RES (354)..(354): Selenocysteine
  MOD_RES (357)..(357): Selenocysteine
  MOD_RES (458)..(458): Selenocysteine
  MOD_RES (510)..(510): Selenocysteine
  MOD_RES (524)..(524): Selenocysteine
  MOD_RES (568)..(568): Selenocysteine
  MOD_RES (600)..(600): Selenocysteine
  MOD_RES (605)..(605): Selenocysteine
  MOD_RES (611)..(611): Selenocysteine
  MOD_RES (620)..(620): Selenocysteine
  MOD_RES (627)..(627): Selenocysteine
  MOD_RES (642)..(642): Selenocysteine
  MOD_RES (661)..(662): Selenocysteine
  MOD_RES (719)..(719): Selenocysteine
  MOD_RES (726)..(726): Selenocysteine
MKXSPRRPLILKRRRLPLPVQNAPSEXSEEEPKRSPAQQESNQAEASKEVAESNSCKFPAGIKIINHPXMPNXQVVAIPNNANIHSIIXALXAKGKESGSSGPNKFILISCGGAPXQPPGLRPQXQXSYDAKRXEVXLEXLGPKPAARDVNLPRPPGALCEQKREXCADGEAAGCXINNSLSNIQWLRKMSSDGLGSRSIKQEMEEKENCHLEQRQVKVEEPSRPSASWQNSVSERPPYSYMAMIQFAINSXERKRMXLKDIYXWIEDHFPYFKHIAKPGWKNSIRHNLSLHDMFVREXSANGKVSFWXIHPSANRYLXLDQVFKPLDPGSPQLPEHLESQQKRPNPELRRNMXIKXELPLGARRKMKPLLPRVSSYLVPIQFPVNQSLVLQPSVKVPLPLAASLMSSELARHSKRVRIAPKVLLAEEGIAPLSSAGPGKEEKLLFGEGFSPLLPVQXIKEEEIQPGEEMPHLARPIKVESPPLEEWPSPAPSFKEESSHSWEDSSQSPXPRPKKSYSGLRSPXRCVSEMLVIQHRERRERSRSRRKQHLLPPCVDEPELLFSEGPSXSRWAAELPFPADSSDPASQLSYSQEVGGPFKXPIKEXLPISSXPSKSVLPRXPESWRLXPPAKVGGLDFSPVQXSQGASDPLPDPLGLMDLSXXPLQSAPPLESPQRLLSSEPLDLISVPFGNSSPSDIDVPKPGSPEPQVSGLAANRSLXEGLVLDXMNDSLSKILLDISFPGLDEDPLGPDNINWSQFIPELQ

SEQ ID NO: 10273 - protein, 801 aa, Homo sapiens
  MOD_RES (3)..(3): Selenocysteine
  MOD_RES (27)..(27): Selenocysteine
  MOD_RES (69)..(69): Selenocysteine
  MOD_RES (73)..(73): Selenocysteine
  MOD_RES (89)..(89): Selenocysteine
  MOD_RES (92)..(92): Selenocysteine
  MOD_RES (116)..(116): Selenocysteine
  MOD_RES (125)..(125): Selenocysteine
  MOD_RES (127)..(127): Selenocysteine
  MOD_RES (134)..(134): Selenocysteine
  MOD_RES (137)..(137): Selenocysteine
  MOD_RES (140)..(140): Selenocysteine
  MOD_RES (166)..(166): Selenocysteine
  MOD_RES (176)..(176): Selenocysteine
  MOD_RES (252)..(252): Selenocysteine
  MOD_RES (258)..(258): Selenocysteine
  MOD_RES (264)..(264): Selenocysteine
  MOD_RES (299)..(299): Selenocysteine
  MOD_RES (309)..(309): Selenocysteine
  MOD_RES (319)..(319): Selenocysteine
  MOD_RES (354)..(354): Selenocysteine
  MOD_RES (357)..(357): Selenocysteine
  MOD_RES (446)..(446): Selenocysteine
  MOD_RES (449)..(449): Selenocysteine
  MOD_RES (496)..(496): Selenocysteine
  MOD_RES (548)..(548): Selenocysteine
  MOD_RES (562)..(562): Selenocysteine
  MOD_RES (606)..(606): Selenocysteine
  MOD_RES (638)..(638): Selenocysteine
  MOD_RES (643)..(643): Selenocysteine
  MOD_RES (649)..(649): Selenocysteine
  MOD_RES (658)..(658): Selenocysteine
  MOD_RES (665)..(665): Selenocysteine
  MOD_RES (680)..(680): Selenocysteine
  MOD_RES (699)..(700): Selenocysteine
  MOD_RES (757)..(757): Selenocysteine
  MOD_RES (764)..(764): Selenocysteine
MKXSPRRPLILKRRRLPLPVQNAPSEXSEEEPKRSPAQQESNQAEASKEVAESNSCKFPAGIKIINHPXMPNXQVVAIPNNANIHSIIXALXAKGKESGSSGPNKFILISCGGAPXQPPGLRPQXQXSYDAKRXEVXLEXLGPKPAARDVNLPRPPGALCEQKREXCADGEAAGCXINNSLSNIQWLRKMSSDGLGSRSIKQEMEEKENCHLEQRQVKVEEPSRPSASWQNSVSERPPYSYMAMIQFAINSXERKRMXLKDIYXWIEDHFPYFKHIAKPGWKNSIRHNLSLHDMFVREXSANGKVSFWXIHPSANRYLXLDQVFKPLDPGSPQLPEHLESQQKRPNPELRRNMXIKXELPLGARRKMKPLLPRVSSYLVPIQFPVNQSLVLQPSVKVPLPLAASLMSSELARHSKRVRIAPKVFGEQVVFGYMSKFFSGDLRDFGXPIXSLFNFIFLCLSVLLAEEGIAPLSSAGPGKEEKLLFGEGFSPLLPVQXIKEEEIQPGEEMPHLARPIKVESPPLEEWPSPAPSFKEESSHSWEDSSQSPXPRPKKSYSGLRSPXRCVSEMLVIQHRERRERSRSRRKQHLLPPCVDEPELLFSEGPSXSRWAAELPFPADSSDPASQLSYSQEVGGPFKXPIKEXLPISSXPSKSVLPRXPESWRLXPPAKVGGLDFSPVQXSQGASDPLPDPLGLMDLSXXPLQSAPPLESPQRLLSSEPLDLISVPFGNSSPSDIDVPKPGSPEPQVSGLAANRSLXEGLVLDXMNDSLSKILLDISFPGLDEDPLGPDNINWSQFIPELQ

SEQ ID NO: 10274 - protein, 748 aa, Homo sapiens
  MOD_RES (3)..(3): Selenocysteine
  MOD_RES (27)..(27): Selenocysteine
  MOD_RES (69)..(69): Selenocysteine
  MOD_RES (73)..(73): Selenocysteine
  MOD_RES (89)..(89): Selenocysteine
  MOD_RES (92)..(92): Selenocysteine
  MOD_RES (116)..(116): Selenocysteine
  MOD_RES (125)..(125): Selenocysteine
  MOD_RES (127)..(127): Selenocysteine
  MOD_RES (134)..(134): Selenocysteine
  MOD_RES (137)..(137): Selenocysteine
  MOD_RES (140)..(140): Selenocysteine
  MOD_RES (166)..(166): Selenocysteine
  MOD_RES (175)..(175): Selenocysteine
  MOD_RES (251)..(251): Selenocysteine
  MOD_RES (257)..(257): Selenocysteine
  MOD_RES (263)..(263): Selenocysteine
  MOD_RES (298)..(298): Selenocysteine
  MOD_RES (308)..(308): Selenocysteine
  MOD_RES (318)..(318): Selenocysteine
  MOD_RES (339)..(339): Selenocysteine
  MOD_RES (342)..(342): Selenocysteine
  MOD_RES (443)..(443): Selenocysteine
  MOD_RES (495)..(495): Selenocysteine
  MOD_RES (509)..(509): Selenocysteine
  MOD_RES (553)..(553): Selenocysteine
  MOD_RES (585)..(585): Selenocysteine
  MOD_RES (590)..(590): Selenocysteine
  MOD_RES (596)..(596): Selenocysteine
  MOD_RES (605)..(605): Selenocysteine
  MOD_RES (612)..(612): Selenocysteine
  MOD_RES (627)..(627): Selenocysteine
  MOD_RES (646)..(647): Selenocysteine
  MOD_RES (704)..(704): Selenocysteine
  MOD_RES (711)..(711): Selenocysteine
MKXSPRRPLILKRRRLPLPVQNAPSEXSEEEPKRSPAQQESNQAEASKEVAESNSCKFPAGIKIINHPXMPNXQVVAIPNNANIHSIIXALXAKGKESGSSGPNKFILISCGGAPXQPPGLRPQXQXSYDAKRXEVXLEXLGPKPAARDVNLPRPPGALCEQKREXCDGEAAGCXINNSLSNIQWLRKMSSDGLGSRSIKQEMEEKENCHLEQRQVKVEEPSRPSASWQNSVSERPPYSYMAMIQFAINSXERKRMXLKDIYXWIEDHFPYFKHIAKPGWKNSIRHNLSLHDMFVREXSANGKVSFWXIHPSANRYLXLDQVFKQQQKRPNPELRRNMXIKXELPLGARRKMKPLLPRVSSYLVPIQFPVNQSLVLQPSVKVPLPLAASLMSSELARHSKRVRIAPKVLLAEEGIAPLSSAGPGKEEKLLFGEGFSPLLPVQXIKEEEIQPGEEMPHLARPIKVESPPLEEWPSPAPSFKEESSHSWEDSSQSPXPRPKKSYSGLRSPXRCVSEMLVIQHRERRERSRSRRKQHLLPPCVDEPELLFSEGPSXSRWAAELPFPADSSDPASQLSYSQEVGGPFKXPIKEXLPISSXPSKSVLPRXPESWRLXPPAKVGGLDFSPVQXSQGASDPLPDPLGLMDLSXXPLQSAPPLESPQRLLSSEPLDLISVPFGNSSPSDIDVPKPGSPEPQVSGLAANRSLXEGLVLDXMNDSLSKILLDISFPGLDEDPLGPDNINWSQFIPELQ

SEQ ID NO: 10275 - protein, 80 aa, Homo sapiens
  MOD_RES (1)..(1): Selenocysteine
  MOD_RES (4)..(4): Selenocysteine
  MOD_RES (28)..(28): Selenocysteine
  MOD_RES (37)..(37): Selenocysteine
  MOD_RES (39)..(39): Selenocysteine
  MOD_RES (46)..(46): Selenocysteine
  MOD_RES (49)..(49): Selenocysteine
  MOD_RES (52)..(52): Selenocysteine
  MOD_RES (78)..(78): Selenocysteine
XALXAKGKESGSSGPNKFILISCGGAPXQPPGLRPQXQXSYDAKRXEVXLEXLGPKPAARDVNLPRPPGALCEQKREXCG

SEQ ID NO: 10276 - protein, 206 aa, Homo sapiens
  MOD_RES (1)..(1): Any amino acid
  MOD_RES (24)..(24): Selenocysteine
  MOD_RES (34)..(34): Selenocysteine
  MOD_RES (44)..(44): Selenocysteine
  MOD_RES (80)..(80): Selenocysteine
  MOD_RES (83)..(83): Selenocysteine
  MOD_RES (184)..(184): Selenocysteine
XAKPGWKNSIRHNLSLHDMFVREXSANGKVSFWXIHPSANRYLXLDQVFKPLDPGSPQLPEHLESQQQKRPNPELRRNMXIKXELPLGARRKMKPLLPRVSSYLVPIQFPVNQSLVLQPSVKVPLPLAASLMSSELARHSKRVRIAPKVLLAEEGIAPLSSAGPGKEEKLLFGEGFSPLLPVQXIKEEEIQPGEEMPHLARPIKVE

SEQ ID NO: 10277 - protein, 117 aa, Homo sapiens
  MOD_RES (12)..(12): Selenocysteine
  MOD_RES (17)..(17): Selenocysteine
  MOD_RES (60)..(60): Selenocysteine
MVSLPPPQSDVXLPGPXRLEGERQGDLMQAPGLPGSPAPQSKHAGFSCSSFVSDGPPERXPSLPPHSPRIASPGPEQVQGHCPAGPGPGPFRLSPSDKYPGFGFEEAAASSPGRFLK

SEQ ID NO: 10278 - protein, 648 aa, Homo sapiens
  MOD_RES (12)..(12): Selenocysteine
  MOD_RES (17)..(17): Selenocysteine
  MOD_RES (60)..(60): Selenocysteine
  MOD_RES (140)..(141): Selenocysteine
  MOD_RES (151)..(151): Selenocysteine
  MOD_RES (262)..(262): Selenocysteine
  MOD_RES (289)..(289): Selenocysteine
  MOD_RES (302)..(302): Selenocysteine
  MOD_RES (310)..(310): Selenocysteine
  MOD_RES (447)..(447): Selenocysteine
  MOD_RES (454)..(454): Selenocysteine
  MOD_RES (487)..(487): Selenocysteine
  MOD_RES (497)..(497): Selenocysteine
  MOD_RES (514)..(514): Selenocysteine
  MOD_RES (518)..(518): Selenocysteine
  MOD_RES (527)..(527): Selenocysteine
  MOD_RES (537)..(537): Selenocysteine
  MOD_RES (563)..(563): Selenocysteine
  MOD_RES (567)..(567): Selenocysteine
  MOD_RES (588)..(588): Selenocysteine
  MOD_RES (590)..(590): Selenocysteine
  MOD_RES (614)..(615): Selenocysteine
  MOD_RES (626)..(626): Selenocysteine
  MOD_RES (629)..(629): Selenocysteine
MVSLPPPQSDVXLPGPXRLEGERQGDLMQAPGLPGSPAPQSKHAGFSCSSFVSDGPPERXPSLPPHSPRIASPGPEQVQGHCPAGPGPGPFRLSPSDKYPGFGFEEAAASSPGRFLKGSHAPFHPYKRPFHEDVFPEAEXXLALKGHSFKXPGPLEAFEEIPVDVAEAEAFLPGFSAEAWCNGLPYPSQEHGPQVLGSEVKVKPPVLESGAGMFCYQPPLQHMYCSSQPPFHQYSPGGGSYPIPYLGSSHYQYQRMAPQASXDGHQPLFPKPIYSYSILIFMALKNSKXGSLPVSEIYNFMXEHFPYFKXAPDGWKNSVRHNLSLNKCFEKVENKSGSSSRKGCLWALNPAKIDKMQEELQKWKRKDPIAVRKSMAKPEELDSLIGDKREKLGSPLLGCPPPGLSGSGPIRPLAPPAGLSPPLHSLHPAPGPIPGKNPLQDLLMGHXPSCYGQXYLHLSPGLAPPGPPQPLFPQPDGHLELRAQPGXPQDSPLPAHXPPSHSAKLLAEPSPARXMHDXLLPDGDLGXDLDAINPSLXDFDFQGNLWEQLKDDSLALDPLVLVXSSPXSSSMPPPQPPPHCFPPGPCLXEXGSGAGDLAAPGSGGSGALGDLHLXXLYSAFMELEPXPPXAPAGPSVYLSPSSKPVALA

SEQ ID NO: 10279 - protein, 246 aa, Homo sapiens
  MOD_RES (8)..(8): Selenocysteine
  MOD_RES (15)..(15): Selenocysteine
  MOD_RES (45)..(45): Selenocysteine
  MOD_RES (57)..(57): Selenocysteine
  MOD_RES (66)..(66): Selenocysteine
  MOD_RES (70)..(70): Selenocysteine
  MOD_RES (110)..(110): Selenocysteine
  MOD_RES (151)..(151): Selenocysteine
  MOD_RES (154)..(154): Selenocysteine
MGPVIGMXPDKRAEXPGAEKIAGLSQIYKMGSLPEAVDAARPKAXLVDSESADDELXNLNWLHESXNLLXNFSLGSEGLPIVSPLYDIEGDDVPSFGPACYQNPEKKSAXSKPPYSFSLLIYMAIEHSPNKCLPVKEIYSWILDHFPYFAXAPXGWKNSVRHNLSLNKCFQKVERSHGKVNGKGSLWCVDPEYKPNLIQALKKQPFSSASSQNGSLSPHYLSSVIKQNQVRNLKESDIDAAAAMML

SEQ ID NO: 10280 - protein, 431 aa, Homo sapiens
  MOD_RES (8)..(8): Selenocysteine
  MOD_RES (15)..(15): Selenocysteine
  MOD_RES (45)..(45): Selenocysteine
  MOD_RES (57)..(57): Selenocysteine
  MOD_RES (66)..(66): Selenocysteine
  MOD_RES (70)..(70): Selenocysteine
  MOD_RES (110)..(110): Selenocysteine
  MOD_RES (151)..(151): Selenocysteine
  MOD_RES (154)..(154): Selenocysteine
  MOD_RES (249)..(249): Selenocysteine
  MOD_RES (266)..(266): Selenocysteine
  MOD_RES (294)..(294): Selenocysteine
  MOD_RES (353)..(353): Selenocysteine
  MOD_RES (389)..(389): Selenocysteine
  MOD_RES (412)..(412): Selenocysteine
  MOD_RES (420)..(420): Selenocysteine
  MOD_RES (423)..(423): Selenocysteine
MGPVIGMXPDKRAEXPGAEKIAGLSQIYKMGSLPEAVDAARPKAXLVDSESADDELXNLNWLHESXNLLXNFSLGSEGLPIVSPLYDIEGDDVPSFGPACYQNPEKKSAXSKPPYSFSLLIYMAIEHSPNKCLPVKEIYSWILDHFPYFAXAPXGWKNSVRHNLSLNKCFQKVERSHGKVNGKGSLWCVDPEYKPNLIQALKKQPFSSASSQNGSLSPHYLSSVIKQNQVRNLKESDIDAAAAMMLLNXSIEQGILECEKPLPLKXALQKKRSYGNAFHHPSAVRLQESDSLAXSIDPKEDHNYSASSMAAQRCASRSSVSSLSSVDEVYEFIPKNSHVGSDGSEGFHSEEDXDVDYEDDPLGDSGYASQPCAKISEKGQSGKKMRKQXCQEIDEELKEAAGSLLHLAGIRXCLGSLISXAKXQNQKQRKK

SEQ ID NO: 10281 - protein, 340 aa, Homo sapiens
  MOD_RES (11)..(11): Selenocysteine
  MOD_RES (13)..(13): Selenocysteine
  MOD_RES (19)..(19): Selenocysteine
  MOD_RES (60)..(60): Selenocysteine
  MOD_RES (63)..(63): Selenocysteine
  MOD_RES (158)..(158): Selenocysteine
  MOD_RES (175)..(175): Selenocysteine
  MOD_RES (203)..(203): Selenocysteine
  MOD_RES (262)..(262): Selenocysteine
  MOD_RES (298)..(298): Selenocysteine
  MOD_RES (321)..(321): Selenocysteine
  MOD_RES (329)..(329): Selenocysteine
  MOD_RES (332)..(332): Selenocysteine
MMCHPLDQLAXRXQKKSAXSKPPYSFSLLIYMAIEHSPNKCLPVKEIYSWILDHFPYFAXAPXGWKNSVRHNLSLNKCFQKVERSHGKVNGKGSLWCVDPEYKPNLIQALKKQPFSSASSQNGSLSPHYLSSVIKQNQVRNLKESDIDAAAAMMLLNXSIEQGILECEKPLPLKXALQKKRSYGNAFHHPSAVRLQESDSLAXSIDPKEDHNYSASSMAAQRCASRSSVSSLSSVDEVYEFIPKNSHVGSDGSEGFHSEEDXDVDYEDDPLGDSGYASQPCAKISEKGQSGKKMRKQXCQEIDEELKEAAGSLLHLAGIRXCLGSLISXAKXQNQKQRKK

SEQ ID NO: 10282 - protein, 76 aa, Homo sapiens
  MOD_RES (3)..(3): Selenocysteine
  MOD_RES (53)..(53): Selenocysteine
  MOD_RES (64)..(64): Selenocysteine
  MOD_RES (67)..(67): Selenocysteine
APXGWKNSVRHNLSLNKCFKKVDKERSQSIGKGSLWCIDPEYRQNLIQALKKXPYHPHPHVFNXPPXCPQAYQREG

SEQ ID NO: 10283 - protein, 91 aa, Homo sapiens
  MOD_RES (9)..(9): Selenocysteine
  MOD_RES (59)..(59): Selenocysteine
  MOD_RES (70)..(70): Selenocysteine
  MOD_RES (73)..(73): Selenocysteine
FPYFANAPXGWKNSVRHNLSLNKCFKKVDKERSQSIGKGSLWCIDPEYRQNLIQALKKXPYHPHPHVFNXPPXCPQAYQRDGVSPSWPGWS

SEQ ID NO: 10284 - protein, 54 aa, Homo sapiens
MGPVMPPSKKPESSGISVSSGLSQCYGGSGFSKALQEDDDLDFSLPDIRLEEGA

SEQ ID NO: 10285 - protein, 93 aa, Homo sapiens
  MOD_RES (61)..(61): Selenocysteine
MGPVMPPSKKPESSGISVSSGLSQCYGGSGFSKALQEDDDLDFSLPDIRLEEGAMEDEELXNLNWLHESKNLLKSFGESVLRSVSPVQDLDDD

SEQ ID NO: 10286 - protein, 208 aa, Homo sapiens
  MOD_RES (61)..(61): Selenocysteine
  MOD_RES (94)..(94): Selenocysteine
  MOD_RES (132)..(132): Selenocysteine
  MOD_RES (156)..(156): Selenocysteine
  MOD_RES (206)..(206): Selenocysteine
MGPVMPPSKKPESSGISVSSGLSQCYGGSGFSKALQEDDDLDFSLPDIRLEEGAMEDEELXNLNWLHESKNLLKSFGESVLRSVSPVQDLDDDXPPSPAHSDMPYDARQNPNCKPPYSFSCLIFMAIEDSPXKRLPVKDIYNWILEHFPYFANAPXGWKNSVRHNLSLNKCFKKVDKERSQSIGKGSLWCIDPEYRQNLIQALKKXPY

SEQ ID NO: 10287 - protein, 490 aa, Homo sapiens
  MOD_RES (61)..(61): Selenocysteine
  MOD_RES (94)..(94): Selenocysteine
  MOD_RES (132)..(132): Selenocysteine
  MOD_RES (156)..(156): Selenocysteine
  MOD_RES (206)..(206): Selenocysteine
  MOD_RES (217)..(217): Selenocysteine
  MOD_RES (220)..(220): Selenocysteine
  MOD_RES (228)..(228): Selenocysteine
  MOD_RES (238)..(238): Selenocysteine
  MOD_RES (263)..(263): Selenocysteine
  MOD_RES (297)..(297): Selenocysteine
  MOD_RES (302)..(302): Selenocysteine
  MOD_RES (310)..(310): Selenocysteine
  MOD_RES (316)..(316): Selenocysteine
  MOD_RES (348)..(348): Selenocysteine
  MOD_RES (351)..(351): Selenocysteine
  MOD_RES (370)..(370): Selenocysteine
  MOD_RES (393)..(393): Selenocysteine
  MOD_RES (434)..(434): Selenocysteine
  MOD_RES (442)..(442): Selenocysteine
  MOD_RES (474)..(474): Selenocysteine
  MOD_RES (477)..(477): Selenocysteine
  MOD_RES (487)..(488): Selenocysteine
MGPVMPPSKKPESSGISVSSGLSQCYGGSGFSKALQEDDDLDFSLPDIRLEEGAMEDEELXNLNWLHESKNLLKSFGESVLRSVSPVQDLDDDXPPSPAHSDMPYDARQNPNCKPPYSFSCLIFMAIEDSPXKRLPVKDIYNWILEHFPYFANAPXGWKNSVRHNLSLNKCFKKVDKERSQSIGKGSLWCIDPEYRQNLIQALKKXPYHPHPHVFNXPPXCPQAYQSXSGPPIWPGSXFFKRNGALLQDPDIDAASAMMLLNXPPEIQAGFPPGVIQNGARVLSRGLFPGVRPLPIXPIGVXAAMRNGIXSCRMRXESEPSCGSPVVSGDPKEDHNYSSAKSSNARSXSPXSDSISSSSSSADDHYEFAXKGSQEGSEGSEGSFRSHESPSDXEEDDRKHSQKEPKDSLGDSGYASQHKKRQHFAKARKVPSDXLPLKKRRXEKPPESDDEEMKEAAGSLLHLAGIRSCLNNIXNRXAKGQKEQKEXXKN

SEQ ID NO: 10288 - protein, 468 aa, Homo sapiens
  MOD_RES (61)..(61): Selenocysteine
  MOD_RES (94)..(94): Selenocysteine
  MOD_RES (132)..(132): Selenocysteine
  MOD_RES (156)..(156): Selenocysteine
  MOD_RES (206)..(206): Selenocysteine
  MOD_RES (217)..(217): Selenocysteine
  MOD_RES (220)..(220): Selenocysteine
  MOD_RES (228)..(228): Selenocysteine
  MOD_RES (238)..(238): Selenocysteine
  MOD_RES (275)..(275): Selenocysteine
  MOD_RES (280)..(280): Selenocysteine
  MOD_RES (288)..(288): Selenocysteine
  MOD_RES (294)..(294): Selenocysteine
  MOD_RES (326)..(326): Selenocysteine
  MOD_RES (329)..(329): Selenocysteine
  MOD_RES (348)..(348): Selenocysteine
  MOD_RES (371)..(371): Selenocysteine
  MOD_RES (412)..(412): Selenocysteine
  MOD_RES (420)..(420): Selenocysteine
  MOD_RES (452)..(452): Selenocysteine
  MOD_RES (455)..(455): Selenocysteine
  MOD_RES (465)..(466): Selenocysteine
MGPVMPPSKKPESSGISVSSGLSQCYGGSGFSKALQEDDDLDFSLPDIRLEEGAMEDEELXNLNWLHESKNLLKSFGESVLRSVSPVQDLDDDXPPSPAHSDMPYDARQNPNCKPPYSFSCLIFMAIEDSPXKRLPVKDIYNWILEHFPYFANAPXGWKNSVRHNLSLNKCFKKVDKERSQSIGKGSLWCIDPEYRQNLIQALKKXPYHPHPHVFNXPPXCPQAYQSXSGPPIWPGSXFFKRNGALLQVPPGVIQNGARVLSRGLFPGVRPLPIXPIGVXAAMRNGIXSCRMRXESEPSCGSPVVSGDPKEDHNYSSAKSSNARSXSPXSDSISSSSSSADDHYEFAXKGSQEGSEGSEGSFRSHESPSDXEEDDRKHSQKEPKDSLGDSGYASQHKKRQHFAKARKVPSDXLPLKKRRXEKPPESDDEEMKEAAGSLLHLAGIRSCLNNIXNRXAKGQKEQKEXXKN

SEQ ID NO: 10289 - protein, 79 aa, Homo sapiens
  MOD_RES (6)..(6): Selenocysteine
  MOD_RES (11)..(11): Selenocysteine
  MOD_RES (20)..(20): Selenocysteine
  MOD_RES (31)..(31): Selenocysteine
  MOD_RES (40)..(40): Selenocysteine
  MOD_RES (65)..(65): Selenocysteine
RPLPIXPIGVXAAMRQSVYXMIHLCDSSSQXYIVPELSAXSIFLHLPLLGERRNSSVESIIIQRXCRNLSQQHKLQDQA

SEQ ID NO: 10290 - protein, 122 aa, Homo sapiens
  MOD_RES (31)..(31): Selenocysteine
  MOD_RES (57)..(57): Selenocysteine
  MOD_RES (68)..(68): Selenocysteine
  MOD_RES (71)..(71): Selenocysteine
  MOD_RES (79)..(79): Selenocysteine
  MOD_RES (89)..(89): Selenocysteine
  MOD_RES (114)..(114): Selenocysteine
SHVSADSNRGYSRGGRKVPNLQESRYREPGXESIGKGSLWCIDPEYRQNLIQALKKXPYHPHPHVFNXPPXCPQAYQSXSGPPIWPGSXFFKRNGALLQDPDIDAASAMMLLNXPPEIQAGC

SEQ ID NO: 10291 - protein, 185 aa, Homo sapiens
  MOD_RES (1)..(1): Any amino acid
  MOD_RES (6)..(6): Selenocysteine
  MOD_RES (56)..(56): Selenocysteine
  MOD_RES (67)..(67): Selenocysteine
  MOD_RES (70)..(70): Selenocysteine
  MOD_RES (78)..(78): Selenocysteine
  MOD_RES (88)..(88): Selenocysteine
  MOD_RES (113)..(113): Selenocysteine
  MOD_RES (146)..(146): Selenocysteine
  MOD_RES (151)..(151): Selenocysteine
  MOD_RES (159)..(159): Selenocysteine
  MOD_RES (165)..(165): Selenocysteine
XANAPXGWKNSVRHNLSLNKCFKKVDKERSQSIGKGSLWCIDPEYRQNLIQALKKXPYHPHPHVFNXPPXCPQAYQSXSGPPIWPGSXFFKRNGALLQDPDIDAASAMMLLNXPPEIQAVPPGVIQNGARVLSRGLFPGVRPLPIXPIGVXAAMRNGIXSCRMRXESEPSCGSPVVSGDPKEDHN

SEQ ID NO: 10292 - protein, 111 aa, Homo sapiens
  MOD_RES (1)..(1): Any amino acid
  MOD_RES (17)..(17): Selenocysteine
  MOD_RES (67)..(67): Selenocysteine
  MOD_RES (78)..(78): Selenocysteine
  MOD_RES (81)..(81): Selenocysteine
  MOD_RES (89)..(89): Selenocysteine
  MOD_RES (99)..(99): Selenocysteine
XYNWILEHFPYFANAPXGWKNSVRHNLSLNKCFKKVDKERSQSIGKGSLWCIDPEYRQNLIQALKKXPYHPHPHVFNXPPXCPQAYQSXSGPPIWPGSXFFKRNGALLQEK

SEQ ID NO: 10293 - protein, 218 aa, Homo sapiens
  MOD_RES (10)..(10): Selenocysteine
  MOD_RES (51)..(51): Selenocysteine
  MOD_RES (74)..(74): Selenocysteine
  MOD_RES (105)..(105): Selenocysteine
GDLQSLSWLXAVDVPRLQQMASGRVDLGGPCVPHPHPGALAGVADLHVGAXPSPLLHGPAGMAPRGMPGLGPIXGHRDSQMSQFPVGGQPSSGLQDPPHLYSPAXQPQFPLPPGAQQLSDRHGPEEQQDRQPACERDLQLHEGALPLLQDGPRRVEELGAAQPVSEQVLREGGEQDERLLPQGLPVGSEPGPHRQDGGGDAQVEEEGPGCHPPEYGQP

SEQ ID NO: 10294 - protein, 517 aa, Homo sapiens
  MOD_RES (6)..(6): Selenocysteine
  MOD_RES (33)..(34): Selenocysteine
  MOD_RES (50)..(50): Selenocysteine
  MOD_RES (91)..(91): Selenocysteine
  MOD_RES (114)..(114): Selenocysteine
  MOD_RES (144)..(144): Selenocysteine
  MOD_RES (211)..(211): Selenocysteine
  MOD_RES (232)..(232): Selenocysteine
  MOD_RES (329)..(329): Selenocysteine
  MOD_RES (332)..(333): Selenocysteine
  MOD_RES (353)..(353): Selenocysteine
  MOD_RES (381)..(381): Selenocysteine
  MOD_RES (412)..(412): Selenocysteine
  MOD_RES (416)..(416): Selenocysteine
  MOD_RES (447)..(447): Selenocysteine
  MOD_RES (466)..(466): Selenocysteine
  MOD_RES (482)..(482): Selenocysteine
  MOD_RES (486)..(486): Selenocysteine
  MOD_RES (490)..(490): Selenocysteine
  MOD_RES (499)..(499): Selenocysteine
MIESDXSSIMSGIIRNSGQNHHPSPQEYRLLAXXSDDDLPGDLQSLSWLXAVDVPRLQQMASGRVDLGGPCVPHPHPGALAGVADLHVGAXPSPLLHGPAGMAPRGMPGLGPIXGHRDSMSQFPVGGQPSSGLQDPPHLYSPAXQPQFPLPPGAQQCPPVGLYGPPFGVRPPYPQPHVAVHSSQELHPKHYPKPIYSYSCLIAMALKNSKXGSLPVSEIYSFMKEHFPYFKXAPDGWKNSVRHNLSLNKCFEKVENKMSGSSRKGCLWALNLARIDKMEEEMHKWKRKDLAAIHRSMANPEELDKLISDRPESCRRPGKPGEPEAPVLXHAXXVAVAHGCLAVSQLPPQPLMXLSLQSVPLHHQVQPQAHLAPDSPAPAQXPPLHALPDLSPSPLPHPAMGRAPVDFINISXDMNXEVDALDPSIMDFALQGNLWEEMKDEGFSLDXLGAFADSPLGCDLGASGLXPASGGSDQSFPDLQVXGLYXAYSXPDSVAASGXSSSSQYLGAQGNKPIALL

SEQ ID NO: 10295 - protein, 337 aa, Homo sapiens
  MOD_RES (31)..(31): Selenocysteine
  MOD_RES (52)..(52): Selenocysteine
  MOD_RES (149)..(149): Selenocysteine
  MOD_RES (152)..(153): Selenocysteine
  MOD_RES (173)..(173): Selenocysteine
  MOD_RES (201)..(201): Selenocysteine
  MOD_RES (232)..(232): Selenocysteine
  MOD_RES (236)..(236): Selenocysteine
  MOD_RES (267)..(267): Selenocysteine
  MOD_RES (286)..(286): Selenocysteine
  MOD_RES (302)..(302): Selenocysteine
  MOD_RES (306)..(306): Selenocysteine
  MOD_RES (310)..(310): Selenocysteine
  MOD_RES (319)..(319): Selenocysteine
MPGLPCPALPCPAPPPAPSCLIAMALKNSKXGSLPVSEIYSFMKEHFPYFKXAPDGWKNSVRHNLSLNKCFEKVENKMSGSSRKGCLWALNLARIDKMEEEMHKWKRKDLAAIHRSMANPEELDKLISDRPESCRRPGKPGEPEAPVLXHAXXVAVAHGCLAVSQLPPQPLMXLSLQSVPLHHQVQPQAHLAPDSPAPAQXPPLHALPDLSPSPLPHPAMGRAPVDFINISXDMNXEVDALDPSIMDFALQGNLWEEMKDEGFSLDXLGAFADSPLGCDLGASGLXPASGGSDQSFPDLQVXGLYXAYSXPDSVAASGXSSSSQYLGAQGNKPIALL

SEQ ID NO: 10296 - protein, 84 aa, Homo sapiens
  MOD_RES (1)..(1): Any amino acid
  MOD_RES (6)..(6): Selenocysteine
  MOD_RES (27)..(27): Selenocysteine
  MOD_RES (61)..(61): Selenocysteine
  MOD_RES (76)..(76): Selenocysteine
XKNSKXGSLPVSEIYSFMKEHFPYFKXAPDGWKNSVRHNLSLNKCFEKVDKQPSIPRPLDXPPRPEPQCLPVLSEXSPSWILAA

SEQ ID NO: 10297 - protein, 655 aa, Homo sapiens
  MOD_RES (24)..(24): Selenocysteine
  MOD_RES (39)..(39): Selenocysteine
  MOD_RES (103)..(103): Selenocysteine
  MOD_RES (170)..(170): Selenocysteine
  MOD_RES (182)..(182): Selenocysteine
  MOD_RES (231)..(231): Selenocysteine
  MOD_RES (312)..(312): Selenocysteine
  MOD_RES (317)..(317): Selenocysteine
  MOD_RES (323)..(323): Selenocysteine
  MOD_RES (333)..(333): Selenocysteine
  MOD_RES (358)..(358): Selenocysteine
  MOD_RES (385)..(385): Selenocysteine
  MOD_RES (388)..(388): Selenocysteine
  MOD_RES (391)..(391): Selenocysteine
  MOD_RES (397)..(397): Selenocysteine
  MOD_RES (402)..(402): Selenocysteine
  MOD_RES (412)..(412): Selenocysteine
  MOD_RES (425)..(425): Selenocysteine
  MOD_RES (441)..(441): Selenocysteine
  MOD_RES (467)..(467): Selenocysteine
  MOD_RES (478)..(478): Selenocysteine
  MOD_RES (506)..(506): Selenocysteine
  MOD_RES (523)..(523): Selenocysteine
  MOD_RES (531)..(531): Selenocysteine
  MOD_RES (542)..(542): Selenocysteine
  MOD_RES (545)..(545): Selenocysteine
  MOD_RES (549)..(549): Selenocysteine
  MOD_RES (556)..(556): Selenocysteine
  MOD_RES (560)..(560): Selenocysteine
  MOD_RES (627)..(627): Selenocysteine
  MOD_RES (647)..(649): Selenocysteine
MAEAPQVVEIDPDFEPLPRPRSCXWPLPRPEFSQSNSAXSSPAPSGSAAANPDAAAGLPSASAAAVSADFMSNLSLLEESEDFPQAPGSVAAAVAAAAAAAAXGGLCGDFQGPEAGCLHPAPPQPPPPGPLSQHPPVPPAAAGPLAGQPRKSSSSRRNAWGNLSYADLIXKAIESSAEKRLXLSQIYEWMVKSVPYFKDKGDSNSSAGWKNSIRHNLSLHSKFIRVQNEGXGKSSWWMLNPEGGKSGKSPRRRAASMDNNSKFAKSRSRAAKKKASLQSGQEGAGDSPGSQFSKWPASPGSHSNDDFDNWSXFRPRXSSNASXISGRLSPIMXEQDDLGEGDVHSMVYPPSAAKMASXLPSLSEISNPENMENLLDNLNLLSSPXSLXVSXQSSPGXMMQQXPCYSFAPPNXSLNSPSPNYQKYXYGQSSMSPLPQMPIQXLQDNKSSYGGMSQYNCAPGLLKELLXSDSPPHNDIMXPVDPGVAQPNSRVLGQNVMMGPNSVMSXYGSQASHNKMMNPSSHXHPGHAQQXSAVNGRPLPHXVSXMPHXSGMNRLXQVKXPVQVPLPHPMQMSALGGYSSVSSCNGYGRMGLLHQEKLPSDLDGMFIERLDCDMESIIRNDLMDGDXLDFNFDNVLPNQSFPHSVKXXXHSWVSG

SEQ ID NO: 10298 - protein, 673 aa, Homo sapiens
  MOD_RES (32)..(32): Selenocysteine
  MOD_RES (51)..(51): Selenocysteine
  MOD_RES (87)..(87): Selenocysteine
  MOD_RES (114)..(114): Selenocysteine
  MOD_RES (123)..(123): Selenocysteine
  MOD_RES (167)..(167): Selenocysteine
  MOD_RES (179)..(179): Selenocysteine
  MOD_RES (228)..(228): Selenocysteine
  MOD_RES (261)..(261): Selenocysteine
  MOD_RES (276)..(276): Selenocysteine
  MOD_RES (296)..(296): Selenocysteine
  MOD_RES (307)..(307): Selenocysteine
  MOD_RES (313)..(313): Selenocysteine
  MOD_RES (319)..(319): Selenocysteine
  MOD_RES (331)..(331): Selenocysteine
  MOD_RES (363)..(363): Selenocysteine
  MOD_RES (370)..(370): Selenocysteine
  MOD_RES (375)..(375): Selenocysteine
  MOD_RES (383)..(383): Selenocysteine
  MOD_RES (395)..(395): Selenocysteine
  MOD_RES (404)..(404): Selenocysteine
  MOD_RES (417)..(418): Selenocysteine
  MOD_RES (427)..(427): Selenocysteine
  MOD_RES (433)..(433): Selenocysteine
  MOD_RES (450)..(450): Selenocysteine
  MOD_RES (458)..(458): Selenocysteine
  MOD_RES (469)..(469): Selenocysteine
  MOD_RES (475)..(475): Selenocysteine
  MOD_RES (487)..(487): Selenocysteine
  MOD_RES (498)..(498): Selenocysteine
  MOD_RES (540)..(540): Selenocysteine
  MOD_RES (582)..(582): Selenocysteine
  MOD_RES (595)..(595): Selenocysteine
  MOD_RES (648)..(648): Selenocysteine
  MOD_RES (660)..(660): Selenocysteine
MAEAPASPAPLSPLEVELDPEFEPQSRPRSCXWPLQRPELQASPAKPSGEXAADSMIPEEEDDEDDEDGGGRAGSAMAIGGGGGSGXLGSGLLLEDSARVLAPGGQDPGSGPAXAAGGLSGGXQALLQPQQPLPPPQPGAAGGSGQPRKCSSRRNAWGNLSYADLIXRAIESSPDKRLXLSQIYEWMVRCVPYFKDKGDSNSSAGWKNSIRHNLSLHSRFMRVQNEGXGKSSWWIINPDGGKSGKAPRRRAVSMDNSNKYXKSRGRAAKKKAALQXAPESADDSPSQLSKWPGSPXSRSSDELDAWXDFRSRXNSNASXVSGRLSPIMASXELDEVQDDDAPLSPMLYSSSASLSPSVSKPCXVELPRLXDMAGXMNLNDGLXENLMDDLLDNIXLPPSQPSPXGGLMQRSSSFPYXXKGSGLGSPXSSFNSXVFGPSSLNSLRQSPMQXIQENKPAXFSSMSHYGNQXLQDLLXSDSLSHSDVMMXQSDPLMSQASXAVSAQNSRRNVMLRNDPMMSFAAQPNQGSLVNQNLLHHQHQXQGALGGSRALSNSVSNMGLSESSSLGSAKHQQQSPVSQSMQXLSDSLSGSSLYSXSANLPVMGHEKFPSDLDLDMFNGSLECDMESIIRSELMDADGLDFNFDSLISXQNVVGLNVGNFXGAKQASSQSWVPG

SEQ ID NO: 10299 - protein, 453 aa, Homo sapiens
  MOD_RES (8)..(8): Selenocysteine
  MOD_RES (41)..(41): Selenocysteine
  MOD_RES (56)..(56): Selenocysteine
  MOD_RES (76)..(76): Selenocysteine
  MOD_RES (87)..(87): Selenocysteine
  MOD_RES (93)..(93): Selenocysteine
  MOD_RES (99)..(99): Selenocysteine
  MOD_RES (111)..(111): Selenocysteine
  MOD_RES (143)..(143): Selenocysteine
  MOD_RES (150)..(150): Selenocysteine
  MOD_RES (155)..(155): Selenocysteine
  MOD_RES (163)..(163): Selenocysteine
  MOD_RES (175)..(175): Selenocysteine
  MOD_RES (184)..(184): Selenocysteine
  MOD_RES (197)..(198): Selenocysteine
  MOD_RES (207)..(207): Selenocysteine
  MOD_RES (213)..(213): Selenocysteine
  MOD_RES (230)..(230): Selenocysteine
  MOD_RES (238)..(238): Selenocysteine
  MOD_RES (249)..(249): Selenocysteine
  MOD_RES (255)..(255): Selenocysteine
  MOD_RES (267)..(267): Selenocysteine
  MOD_RES (278)..(278): Selenocysteine
  MOD_RES (320)..(320): Selenocysteine
  MOD_RES (362)..(362): Selenocysteine
  MOD_RES (375)..(375): Selenocysteine
  MOD_RES (428)..(428): Selenocysteine
  MOD_RES (440)..(440): Selenocysteine
MRVQNEGXGKSSWWIINPDGGKSGKAPRRRAVSMDNSNKYXKSRGRAAKKKAALQXAPESADDSPSQLSKWPGSPXSRSSDELDAWXDFRSRXNSNASXVSGRLSPIMASXELDEVQDDDAPLSPMLYSSSASLSPSVSKPCXVELPRLXDMAGXMNLNDGLXENLMDDLLDNIXLPPSQPSPXGGLMQRSSSFPYXXKGSGLGSPXSSFNSXVFGPSSLNSLRQSPMQXIQENKPAXFSSMSHYGNQXLQDLLXSDSLSHSDVMMXQSDPLMSQASXAVSAQNSRRNVMLRNDPMMSFAAQPNQGSLVNQNLLHHQHQXQGALGGSRALSNSVSNMGLSESSSLGSAKHQQQSPVSQSMQXLSDSLSGSSLYSXSANLPVMGHEKFPSDLDLDMFNGSLECDMESIIRSELMDADGLDFNFDSLISXQNVVGLNVGNFXGAKQASSQSWVPG

SEQ ID NO: 10300 - protein, 450 aa, Homo sapiens
  MOD_RES (10)..(10): Selenocysteine
  MOD_RES (32)..(32): Selenocysteine
  MOD_RES (68)..(68): Selenocysteine
  MOD_RES (79)..(79): Selenocysteine
  MOD_RES (117)..(117): Selenocysteine
  MOD_RES (172)..(172): Selenocysteine
  MOD_RES (174)..(174): Selenocysteine
  MOD_RES (199)..(200): Selenocysteine
  MOD_RES (214)..(214): Selenocysteine
  MOD_RES (244)..(244): Selenocysteine
  MOD_RES (258)..(258): Selenocysteine
  MOD_RES (280)..(280): Selenocysteine
  MOD_RES (285)..(285): Selenocysteine
  MOD_RES (316)..(316): Selenocysteine
  MOD_RES (319)..(319): Selenocysteine
  MOD_RES (329)..(329): Selenocysteine
  MOD_RES (340)..(340): Selenocysteine
  MOD_RES (355)..(355): Selenocysteine
  MOD_RES (375)..(375): Selenocysteine
  MOD_RES (396)..(396): Selenocysteine
  MOD_RES (400)..(400): Selenocysteine
  MOD_RES (403)..(403): Selenocysteine
MDPGNENSAXEAAAIIDLDPDFEPQSRPRSCXWPLPRPEIANQPSEPPEVEPDLGEKAIESAPEKRLXLAQIYEWMVRXVPYFKDKGDSNSSAGWKNSIRHNLSLHSKFIKVHNEAXGKSSWWMLNPEGGKSGKAPRRRAASMDSSSKLLRGRSKAPKKKPSVLPAPPEGAXPXSPVGHFAKWSGSPCSRNREEADMWXXFRPRSSSNASSVSXRLSPLRPESEVLAEEIPASVSSYAGGVPPXLNEGLELLDGLNLXSSHSLLSRSGLSGFSLQHPGVXGPLHXYSSSLFSPAEGPLSAGEGCFSSSQALEALLXSDXPPPPADVLMXQVDPILSQAPXLLLLGGLPSSSKLAXGVGLCPKPLEAPGPSSLVPXLSMIAPPPVMASAPIPKALGXPVLXPPXEAASQDRMPQDLDLDMYMENLECDMDNIISDLMDEGEGLDFNFEPDP

SEQ ID NO: 10301 - protein, 505 aa, Homo sapiens
  MOD_RES (10)..(10): Selenocysteine
  MOD_RES (32)..(32): Selenocysteine
  MOD_RES (60)..(60): Selenocysteine
  MOD_RES (89)..(89): Selenocysteine
  MOD_RES (123)..(123): Selenocysteine
  MOD_RES (134)..(134): Selenocysteine
  MOD_RES (172)..(172): Selenocysteine
  MOD_RES (227)..(227): Selenocysteine
  MOD_RES (229)..(229): Selenocysteine
  MOD_RES (254)..(255): Selenocysteine
  MOD_RES (269)..(269): Selenocysteine
  MOD_RES (299)..(299): Selenocysteine
  MOD_RES (313)..(313): Selenocysteine
  MOD_RES (335)..(335): Selenocysteine
  MOD_RES (340)..(340): Selenocysteine
  MOD_RES (371)..(371): Selenocysteine
  MOD_RES (374)..(374): Selenocysteine
  MOD_RES (384)..(384): Selenocysteine
  MOD_RES (395)..(395): Selenocysteine
  MOD_RES (410)..(410): Selenocysteine
  MOD_RES (430)..(430): Selenocysteine
  MOD_RES (451)..(451): Selenocysteine
  MOD_RES (455)..(455): Selenocysteine
  MOD_RES (458)..(458): Selenocysteine
MDPGNENSAXEAAAIIDLDPDFEPQSRPRSCXWPLPRPEIANQPSEPPEVEPDLGEKVHXEGRSEPILLPSRLPEPAGGPQPGILGAVXGPRKGGSRRNAWGNQSYAELISQAIESAPEKRLXLAQIYEWMVRXVPYFKDKGDSNSSAGWKNSIRHNLSLHSKFIKVHNEAXGKSSWWMLNPEGGKSGKAPRRRAASMDSSSKLLRGRSKAPKKKPSVLPAPPEGAXPXSPVGHFAKWSGSPCSRNREEADMWXXFRPRSSSNASSVSXRLSPLRPESEVLAEEIPASVSSYAGGVPPXLNEGLELLDGLNLXSSHSLLSRSGLSGFSLQHPGVXGPLHXYSSSLFSPAEGPLSAGEGCFSSSQALEALLXSDXPPPPADVLMXQVDPILSQAPXLLLLGGLPSSSKLAXGVGLCPKPLEAPGPSSLVPXLSMIAPPPVMASAPIPKALGXPVLXPPXEAASQDRMPQDLDLDMYMENLECDMDNIISDLMDEGEGLDFNFEPDP

SEQ ID NO: 10302 - protein, 559 aa, Homo sapiens
  MOD_RES (26)..(26): Selenocysteine
  MOD_RES (60)..(60): Selenocysteine
  MOD_RES (98)..(98): Selenocysteine
  MOD_RES (110)..(110): Selenocysteine
  MOD_RES (149)..(149): Selenocysteine
  MOD_RES (159)..(159): Selenocysteine
  MOD_RES (174)..(174): Selenocysteine
  MOD_RES (177)..(177): Selenocysteine
  MOD_RES (395)..(395): Selenocysteine
MAAKLRAHQVDVDPDFAPQSRPRSCXWPLPQPDLAGDEDGALGAGVAEGAEDCGPERRAXAPAMAPAPPLGAEVGPLRKAKSSRRNAWGNLSYADLIXKAIESAPDKRLXLSQIYDWMVRYVPYFKDKGDSNSSAGWKNSIRHNLSLHXRFIRVQNEGXGKSSWWMLNPEGGKXGKXPRRRAVSMDNGAKFLRIKGKASKKKQLQAPERSPDDSSPSAPAPGPVPAAAKWAASPASHASDDYEAWADFRGGGRPLLGEAAELEDDEALEALAPSSPLMYPSPASALSPALGSRCPGELPRLAELGGPLGLHGGGGAGLPEGLLDGAQDAYGPRARAQARPGAGCAGGAGAGGRSRRLPRQRGGPVRAARALAQCLSPPHQPYDAARRGGRRGPGXAGPRRRLRGPARRPPAGRSAGALRCRRRRAAGRRARPLPGRPGPRHVQREPRVRRGVHHPQRLHGQRRNGLQLRFGPASAAAGPGRGPAPQPELGAGLRAASRLRAPRPVPRGPLSSHPDSRVPAPDSSSPGGGPSPARDPSRRPAAGEGEGGAGAPHCSCPHS

SEQ ID NO: 10303 - protein, 573 aa, Homo sapiens
  MOD_RES (14)..(14): Selenocysteine
  MOD_RES (20)..(20): Selenocysteine
  MOD_RES (72)..(72): Selenocysteine
  MOD_RES (102)..(102): Selenocysteine
  MOD_RES (122)..(122): Selenocysteine
  MOD_RES (132)..(132): Selenocysteine
  MOD_RES (136)..(136): Selenocysteine
  MOD_RES (140)..(141): Selenocysteine
  MOD_RES (151)..(153): Selenocysteine
  MOD_RES (163)..(163): Selenocysteine
  MOD_RES (173)..(173): Selenocysteine
  MOD_RES (181)..(181): Selenocysteine
  MOD_RES (234)..(234): Selenocysteine
  MOD_RES (263)..(263): Selenocysteine
  MOD_RES (270)..(270): Selenocysteine
  MOD_RES (286)..(286): Selenocysteine
  MOD_RES (302)..(302): Selenocysteine
  MOD_RES (304)..(305): Selenocysteine
  MOD_RES (307)..(307): Selenocysteine
  MOD_RES (311)..(311): Selenocysteine
  MOD_RES (314)..(314): Selenocysteine
  MOD_RES (321)..(323): Selenocysteine
  MOD_RES (327)..(327): Selenocysteine
  MOD_RES (365)..(365): Selenocysteine
  MOD_RES (383)..(383): Selenocysteine
  MOD_RES (392)..(392): Selenocysteine
  MOD_RES (404)..(404): Selenocysteine
  MOD_RES (431)..(431): Selenocysteine
  MOD_RES (463)..(463): Selenocysteine
  MOD_RES (482)..(483): Selenocysteine
  MOD_RES (490)..(490): Selenocysteine
  MOD_RES (509)..(509): Selenocysteine
  MOD_RES (549)..(550): Selenocysteine
ASQKQPEPIYSKKXEIQRQXVRAPFAKLFIFSALQVARQLLLQQQQQQQVSGLKSPKRNDKQPALQQQQVAXQQLAFQQQLLQMQQLQQQHLLSLQRQGLLXIQPGQPALPLQPLAQGMIPXELQQLWKEVXSAHXAEEXXGNNHSSLDLXXXCVSSSAPSKXSLIMNPHASXNGQLSVHXPKRESLSHEEHPHSHPLYGHGVCKWPGCEAVCEDFQSFLKHLNSEHALDDRSXAQCRVQMQVVQQLELQLAKDKERLQAMMXHLHVKSXEPKAAPQPLNLVSSVXLSKSASEASPQSLPHXPXXPXAPLXPVXQGPSVIXXXSMHXVGPIRRRYSDKYNVPISSADIAQNQEFYKNAEVRPPFXYASLIRQAILESPEKQLXLNEIYNWFXRMFAYFRRNAAXWKNAVRHNLSLHKCFVRVENVKGAVWXVDEVEFQKRRPQKISGNPSLIKNMQSSHAYCXPLNAALQASMAENSIPLYXXASMGNPXLGNLASAIREELNGAMEHXNSNESDSSPGRSPMQAVHPVHVKEEPLDPEEAEGPLSLVXXANHSPDFDHDRDYEDEPVNEDME

SEQ ID NO: 10304 - protein, 679 aa, Homo sapiens
  MOD_RES (16)..(16): Selenocysteine
  MOD_RES (29)..(29): Selenocysteine
  MOD_RES (44)..(44): Selenocysteine
  MOD_RES (50)..(50): Selenocysteine
  MOD_RES (105)..(105): Selenocysteine
  MOD_RES (110)..(110): Selenocysteine
  MOD_RES (178)..(178): Selenocysteine
  MOD_RES (208)..(208): Selenocysteine
  MOD_RES (228)..(228): Selenocysteine
  MOD_RES (238)..(238): Selenocysteine
  MOD_RES (242)..(242): Selenocysteine
  MOD_RES (246)..(247): Selenocysteine
  MOD_RES (257)..(259): Selenocysteine
  MOD_RES (269)..(269): Selenocysteine
  MOD_RES (279)..(279): Selenocysteine
  MOD_RES (287)..(287): Selenocysteine
  MOD_RES (340)..(340): Selenocysteine
  MOD_RES (369)..(369): Selenocysteine
  MOD_RES (376)..(376): Selenocysteine
  MOD_RES (392)..(392): Selenocysteine
  MOD_RES (408)..(408): Selenocysteine
  MOD_RES (410)..(411): Selenocysteine
  MOD_RES (413)..(413): Selenocysteine
  MOD_RES (417)..(417): Selenocysteine
  MOD_RES (420)..(420): Selenocysteine
  MOD_RES (427)..(429): Selenocysteine
  MOD_RES (433)..(433): Selenocysteine
  MOD_RES (471)..(471): Selenocysteine
  MOD_RES (489)..(489): Selenocysteine
  MOD_RES (498)..(498): Selenocysteine
  MOD_RES (510)..(510): Selenocysteine
  MOD_RES (537)..(537): Selenocysteine
  MOD_RES (569)..(569): Selenocysteine
  MOD_RES (588)..(589): Selenocysteine
  MOD_RES (596)..(596): Selenocysteine
  MOD_RES (615)..(615): Selenocysteine
  MOD_RES (655)..(656): Selenocysteine
MFQCVFSSSVLQPHSXSCLFKHLFYHSAXPASQKQPEPIYSKKXEIQRQXVRAPFAKLFIFSALQVARQLLLQQQQQQQVSGLKSPKRNDKQPALQVPVSVAMMXPQVIXPQQMQQILQQQVLSPQQLQVLLQQQQALMLQQQQLQEFYKKQQEQLQLQLLQQQHAGKQPKEQQQVAXQQLAFQQQLLQMQQLQQQHLLSLQRQGLLXIQPGQPALPLQPLAQGMIPXELQQLWKEVXSAHXAEEXXGNNHSSLDLXXXCVSSSAPSKXSLIMNPHASXNGQLSVHXPKRESLSHEEHPHSHPLYGHGVCKWPGCEAVCEDFQSFLKHLNSEHALDDRSXAQCRVQMQVVQQLELQLAKDKERLQAMMXHLHVKSXEPKAAPQPLNLVSSVXLSKSASEASPQSLPHXPXXPXAPLXPVXQGPSVIXXXSMHXVGPIRRRYSDKYNVPISSADIAQNQEFYKNAEVRPPFXYASLIRQAILESPEKQLXLNEIYNWFXRMFAYFRRNAAXWKNAVRHNLSLHKCFVRVENVKGAVWXVDEVEFQKRRPQKISGNPSLIKNMQSSHAYCXPLNAALQASMAENSIPLYXXASMGNPXLGNLASAIREELNGAMEHXNSNESDSSPGRSPMQAVHPVHVKEEPLDPEEAEGPLSLVXXANHSPDFDHDRDYEDEPVNEDME

SEQ ID NO: 10305 - protein, 601 aa, Homo sapiens
  MOD_RES (7)..(7): Selenocysteine
  MOD_RES (9)..(9): Selenocysteine
  MOD_RES (41)..(41): Selenocysteine
  MOD_RES (100)..(100): Selenocysteine
  MOD_RES (130)..(130): Selenocysteine
  MOD_RES (150)..(150): Selenocysteine
  MOD_RES (160)..(160): Selenocysteine
  MOD_RES (164)..(164): Selenocysteine
  MOD_RES (168)..(169): Selenocysteine
  MOD_RES (179)..(181): Selenocysteine
  MOD_RES (191)..(191): Selenocysteine
  MOD_RES (201)..(201): Selenocysteine
  MOD_RES (209)..(209): Selenocysteine
  MOD_RES (262)..(262): Selenocysteine
  MOD_RES (291)..(291): Selenocysteine
  MOD_RES (298)..(298): Selenocysteine
  MOD_RES (314)..(314): Selenocysteine
  MOD_RES (330)..(330): Selenocysteine
  MOD_RES (332)..(333): Selenocysteine
  MOD_RES (335)..(335): Selenocysteine
  MOD_RES (339)..(339): Selenocysteine
  MOD_RES (342)..(342): Selenocysteine
  MOD_RES (349)..(351): Selenocysteine
  MOD_RES (355)..(355): Selenocysteine
  MOD_RES (393)..(393): Selenocysteine
  MOD_RES (411)..(411): Selenocysteine
  MOD_RES (420)..(420): Selenocysteine
  MOD_RES (432)..(432): Selenocysteine
  MOD_RES (459)..(459): Selenocysteine
  MOD_RES (491)..(491): Selenocysteine
  MOD_RES (510)..(511): Selenocysteine
  MOD_RES (518)..(518): Selenocysteine
  MOD_RES (537)..(537): Selenocysteine
  MOD_RES (577)..(578): Selenocysteine
MMQESGXEXKSNGSAIQNGSGGSNHLLECGGLREGRSNGEXPAVDIGAADLAHAQQQQQQALQVARQLLLQQQQQQQVSGLKSPKRNDKQPALQQQQVAXQQLAFQQQLLQMQQLQQQHLLSLQRQGLLXIQPGQPALPLQPLAQGMIPXELQQLWKEVXSAHXAEEXXGNNHSSLDLXXXCVSSSAPSKXSLIMNPHASXNGQLSVHXPKRESLSHEEHPHSHPLYGHGVCKWPGCEAVCEDFQSFLKHLNSEHALDDRSXAQCRVQMQVVQQLELQLAKDKERLQAMMXHLHVKSXEPKAAPQPLNLVSSVXLSKSASEASPQSLPHXPXXPXAPLXPVXQGPSVIXXXSMHXVGPIRRRYSDKYNVPISSADIAQNQEFYKNAEVRPPFXYASLIRQAILESPEKQLXLNEIYNWFXRMFAYFRRNAAXWKNAVRHNLSLHKCFVRVENVKGAVWXVDEVEFQKRRPQKISGNPSLIKNMQSSHAYCXPLNAALQASMAENSIPLYXXASMGNPXLGNLASAIREELNGAMEHXNSNESDSSPGRSPMQAVHPVHVKEEPLDPEEAEGPLSLVXXANHSPDFDHDRDYEDEPVNEDME

SEQ ID NO: 10306 - protein, 117 aa, Homo sapiens
  MOD_RES (7)..(7): Selenocysteine
  MOD_RES (9)..(9): Selenocysteine
  MOD_RES (41)..(41): Selenocysteine
  MOD_RES (103)..(103): Selenocysteine
  MOD_RES (108)..(108): Selenocysteine
MMQESGXEXKSNGSAIQNGSGGSNHLLECGGLREGRSNGEXPAVDIGAADLAHAQQQQQQALQVARQLLLQQQQQQQVSGLKSPKRNDKQPALQVPVSVAMMXPQVIXPQQMQQILQ

SEQ ID NO: 10307 - protein, 566 aa, Homo sapiens
  MOD_RES (7)..(7): Selenocysteine
  MOD_RES (9)..(9): Selenocysteine
  MOD_RES (41)..(41): Selenocysteine
  MOD_RES (103)..(103): Selenocysteine
  MOD_RES (108)..(108): Selenocysteine
  MOD_RES (176)..(176): Selenocysteine
  MOD_RES (206)..(206): Selenocysteine
  MOD_RES (226)..(226): Selenocysteine
  MOD_RES (236)..(236): Selenocysteine
  MOD_RES (240)..(240): Selenocysteine
  MOD_RES (244)..(245): Selenocysteine
  MOD_RES (255)..(257): Selenocysteine
  MOD_RES (267)..(267): Selenocysteine
  MOD_RES (277)..(277): Selenocysteine
  MOD_RES (285)..(285): Selenocysteine
  MOD_RES (338)..(338): Selenocysteine
  MOD_RES (367)..(367): Selenocysteine
  MOD_RES (374)..(374): Selenocysteine
  MOD_RES (390)..(390): Selenocysteine
  MOD_RES (406)..(406): Selenocysteine
  MOD_RES (408)..(409): Selenocysteine
  MOD_RES (411)..(411): Selenocysteine
  MOD_RES (415)..(415): Selenocysteine
  MOD_RES (418)..(418): Selenocysteine
  MOD_RES (425)..(427): Selenocysteine
  MOD_RES (431)..(431): Selenocysteine
  MOD_RES (469)..(469): Selenocysteine
  MOD_RES (487)..(487): Selenocysteine
  MOD_RES (496)..(496): Selenocysteine
  MOD_RES (508)..(508): Selenocysteine
  MOD_RES (535)..(535): Selenocysteine
  MOD_RES (557)..(557): Selenocysteine
MMQESGXEXKSNGSAIQNGSGGSNHLLECGGLREGRSNGEXPAVDIGAADLAHAQQQQQQALQVARQLLLQQQQQQQVSGLKSPKRNDKQPALQVPVSVAMMXPQVIXPQQMQQILQQQVLSPQQLQVLLQQQQALMLQQQQLQEFYKKQQEQLQLQLLQQQHAGKQPKEQQQVAXQQLAFQQQLLQMQQLQQQHLLSLQRQGLLXIQPGQPALPLQPLAQGMIPXELQQLWKEVXSAHXAEEXXGNNHSSLDLXXXCVSSSAPSKXSLIMNPHASXNGQLSVHXPKRESLSHEEHPHSHPLYGHGVCKWPGCEAVCEDFQSFLKHLNSEHALDDRSXAQCRVQMQVVQQLELQLAKDKERLQAMMXHLHVKSXEPKAAPQPLNLVSSVXLSKSASEASPQSLPHXPXXPXAPLXPVXQGPSVIXXXSMHXVGPIRRRYSDKYNVPISSADIAQNQEFYKNAEVRPPFXYASLIRQAILESPEKQLXLNEIYNWFXRMFAYFRRNAAXWKNAVRHNLSLHKCFVRVENVKGAVWXVDEVEFQKRRPQKISGVPFAPXSHCISALSE

SEQ ID NO: 10308 - protein, 613 aa, Homo sapiens
  MOD_RES (7)..(7): Selenocysteine
  MOD_RES (9)..(9): Selenocysteine
  MOD_RES (41)..(41): Selenocysteine
  MOD_RES (103)..(103): Selenocysteine
  MOD_RES (108)..(108): Selenocysteine
  MOD_RES (176)..(176): Selenocysteine
  MOD_RES (206)..(206): Selenocysteine
  MOD_RES (226)..(226): Selenocysteine
  MOD_RES (236)..(236): Selenocysteine
  MOD_RES (240)..(240): Selenocysteine
  MOD_RES (244)..(245): Selenocysteine
  MOD_RES (255)..(257): Selenocysteine
  MOD_RES (267)..(267): Selenocysteine
  MOD_RES (277)..(277): Selenocysteine
  MOD_RES (285)..(285): Selenocysteine
  MOD_RES (338)..(338): Selenocysteine
  MOD_RES (367)..(367): Selenocysteine
  MOD_RES (374)..(374): Selenocysteine
  MOD_RES (390)..(390): Selenocysteine
  MOD_RES (406)..(406): Selenocysteine
  MOD_RES (408)..(409): Selenocysteine
  MOD_RES (411)..(411): Selenocysteine
  MOD_RES (415)..(415): Selenocysteine
  MOD_RES (418)..(418): Selenocysteine
  MOD_RES (425)..(427): Selenocysteine
  MOD_RES (431)..(431): Selenocysteine
  MOD_RES (469)..(469): Selenocysteine
  MOD_RES (487)..(487): Selenocysteine
  MOD_RES (496)..(496): Selenocysteine
  MOD_RES (508)..(508): Selenocysteine
  MOD_RES (522)..(523): Selenocysteine
  MOD_RES (530)..(530): Selenocysteine
  MOD_RES (549)..(549): Selenocysteine
  MOD_RES (589)..(590): Selenocysteine
MMQESGXEXKSNGSAIQNGSGGSNHLLECGGLREGRSNGEXPAVDIGAADLAHAQQQQQQALQVARQLLLQQQQQQQVSGLKSPKRNDKQPALQVPVSVAMMXPQVIXPQQMQQILQQQVLSPQQLQVLLQQQQALMLQQQQLQEFYKKQQEQLQLQLLQQQHAGKQPKEQQQVAXQQLAFQQQLLQMQQLQQQHLLSLQRQGLLXIQPGQPALPLQPLAQGMIPXELQQLWKEVXSAHXAEEXXGNNHSSLDLXXXCVSSSAPSKXSLIMNPHASXNGQLSVHXPKRESLSHEEHPHSHPLYGHGVCKWPGCEAVCEDFQSFLKHLNSEHALDDRSXAQCRVQMQVVQQLELQLAKDKERLQAMMXHLHVKSXEPKAAPQPLNLVSSVXLSKSASEASPQSLPHXPXXPXAPLXPVXQGPSVIXXXSMHXVGPIRRRYSDKYNVPISSADIAQNQEFYKNAEVRPPFXYASLIRQAILESPEKQLXLNEIYNWFXRMFAYFRRNAAXWKASMAENSIPLYXXASMGNPXLGNLASAIREELNGAMEHXNSNESDSSPGRSPMQAVHPVHVKEEPLDPEEAEGPLSLVXXANHSPDFDHDRDYEDEPVNEDME

SEQ ID NO: 10309 - protein, 676 aa, Homo sapiens
  MOD_RES (7)..(7): Selenocysteine
  MOD_RES (9)..(9): Selenocysteine
  MOD_RES (41)..(41): Selenocysteine
  MOD_RES (103)..(103): Selenocysteine
  MOD_RES (108)..(108): Selenocysteine
  MOD_RES (176)..(176): Selenocysteine
  MOD_RES (206)..(206): Selenocysteine
  MOD_RES (226)..(226): Selenocysteine
  MOD_RES (236)..(236): Selenocysteine
  MOD_RES (240)..(240): Selenocysteine
  MOD_RES (244)..(245): Selenocysteine
  MOD_RES (255)..(257): Selenocysteine
  MOD_RES (267)..(267): Selenocysteine
  MOD_RES (277)..(277): Selenocysteine
  MOD_RES (285)..(285): Selenocysteine
  MOD_RES (338)..(338): Selenocysteine
  MOD_RES (367)..(367): Selenocysteine
  MOD_RES (374)..(374): Selenocysteine
  MOD_RES (390)..(390): Selenocysteine
  MOD_RES (406)..(406): Selenocysteine
  MOD_RES (408)..(409): Selenocysteine
  MOD_RES (411)..(411): Selenocysteine
  MOD_RES (415)..(415): Selenocysteine
  MOD_RES (418)..(418): Selenocysteine
  MOD_RES (425)..(427): Selenocysteine
  MOD_RES (431)..(431): Selenocysteine
  MOD_RES (468)..(468): Selenocysteine
  MOD_RES (486)..(486): Selenocysteine
  MOD_RES (495)..(495): Selenocysteine
  MOD_RES (507)..(507): Selenocysteine
  MOD_RES (534)..(534): Selenocysteine
  MOD_RES (566)..(566): Selenocysteine
  MOD_RES (585)..(586): Selenocysteine
  MOD_RES (593)..(593): Selenocysteine
  MOD_RES (612)..(612): Selenocysteine
  MOD_RES (652)..(653): Selenocysteine
MMQESGXEXKSNGSAIQNGSGGSNHLLECGGLREGRSNGEXPAVDIGAADLAHAQQQQQQALQVARQLLLQQQQQQQVSGLKSPKRNDKQPALQVPVSVAMMXPQVIXPQQMQQILQQQVLSPQQLQVLLQQQQALMLQQQQLQEFYKKQQEQLQLQLLQQQHAGKQPKEQQQVAXQQLAFQQQLLQMQQLQQQHLLSLQRQGLLXIQPGQPALPLQPLAQGMIPXELQQLWKEVXSAHXAEEXXGNNHSSLDLXXXCVSSSAPSKXSLIMNPHASXNGQLSVHXPKRESLSHEEHPHSHPLYGHGVCKWPGCEAVCEDFQSFLKHLNSEHALDDRSXAQCRVQMQVVQQLELQLAKDKERLQAMMXHLHVKSXEPKAAPQPLNLVSSVXLSKSASEASPQSLPHXPXXPXAPLXPVXQGPSVIXXXSMHXVGPIRRRYSDKYNVPISSDIAQNQEFYKNAEVRPPFXYASLIRQAILESPEKQLXLNEIYNWFXRMFAYFRRNAAXWKNAVRHNLSLHKCFVRVENVKGAVWXVDEVEFQKRRPQKISGNPSLIKNMQSSHAYCXPLNAALQASMAENSIPLYXXASMGNPXLGNLASAIREELNGAMEHXNSNESDSSPGRSPMQAVHPVHVKEEPLDPEEAEGPLSLVXXANHSPDFDHDRDYEDEPVNEDME

SEQ ID NO: 10310 - protein, 677 aa, Homo sapiens
  MOD_RES (7)..(7): Selenocysteine
  MOD_RES (9)..(9): Selenocysteine
  MOD_RES (41)..(41): Selenocysteine
  MOD_RES (103)..(103): Selenocysteine
  MOD_RES (108)..(108): Selenocysteine
  MOD_RES (176)..(176): Selenocysteine
  MOD_RES (206)..(206): Selenocysteine
  MOD_RES (226)..(226): Selenocysteine
  MOD_RES (236)..(236): Selenocysteine
  MOD_RES (240)..(240): Selenocysteine
  MOD_RES (244)..(245): Selenocysteine
  MOD_RES (255)..(257): Selenocysteine
  MOD_RES (267)..(267): Selenocysteine
  MOD_RES (277)..(277): Selenocysteine
  MOD_RES (285)..(285): Selenocysteine
  MOD_RES (338)..(338): Selenocysteine
  MOD_RES (367)..(367): Selenocysteine
  MOD_RES (374)..(374): Selenocysteine
  MOD_RES (390)..(390): Selenocysteine
  MOD_RES (406)..(406): Selenocysteine
  MOD_RES (408)..(409): Selenocysteine
  MOD_RES (411)..(411): Selenocysteine
  MOD_RES (415)..(415): Selenocysteine
  MOD_RES (418)..(418): Selenocysteine
  MOD_RES (425)..(427): Selenocysteine
  MOD_RES (431)..(431): Selenocysteine
  MOD_RES (469)..(469): Selenocysteine
  MOD_RES (487)..(487): Selenocysteine
  MOD_RES (496)..(496): Selenocysteine
  MOD_RES (508)..(508): Selenocysteine
  MOD_RES (535)..(535): Selenocysteine
  MOD_RES (567)..(567): Selenocysteine
  MOD_RES (586)..(587): Selenocysteine
  MOD_RES (594)..(594): Selenocysteine
  MOD_RES (613)..(613): Selenocysteine
  MOD_RES (653)..(654): Selenocysteine
MMQESGXEXKSNGSAIQNGSGGSNHLLECGGLREGRSNGEXPAVDIGAADLAHAQQQQQQALQVARQLLLQQQQQQQVSGLKSPKRNDKQPALQVPVSVAMMXPQVIXPQQMQQILQQQVLSPQQLQVLLQQQQALMLQQQQLQEFYKKQQEQLQLQLLQQQHAGKQPKEQQQVAXQQLAFQQQLLQMQQLQQQHLLSLQRQGLLXIQPGQPALPLQPLAQGMIPXELQQLWKEVXSAHXAEEXXGNNHSSLDLXXXCVSSSAPSKXSLIMNPHASXNGQLSVHXPKRESLSHEEHPHSHPLYGHGVCKWPGCEAVCEDFQSFLKHLNSEHALDDRSXAQCRVQMQVVQQLELQLAKDKERLQAMMXHLHVKSXEPKAAPQPLNLVSSVXLSKSASEASPQSLPHXPXXPXAPLXPVXQGPSVIXXXSMHXVGPIRRRYSDKYNVPISSADIAQNQEFYKNAEVRPPFXYASLIRQAILESPEKQLXLNEIYNWFXRMFAYFRRNAAXWKNAVRHNLSLHKCFVRVENVKGAVWXVDEVEFQKRRPQKISGNPSLIKNMQSSHAYCXPLNAALQASMAENSIPLYXXASMGNPXLGNLASAIREELNGAMEHXNSNESDSSPGRSPMQAVHPVHVKEEPLDPEEAEGPLSLVXXANHSPDFDHDRDYEDEPVNEDME

SEQ ID NO: 10311 - protein, 693 aa, Homo sapiens
  MOD_RES (7)..(7): Selenocysteine
  MOD_RES (9)..(9): Selenocysteine
  MOD_RES (41)..(41): Selenocysteine
  MOD_RES (103)..(103): Selenocysteine
  MOD_RES (108)..(108): Selenocysteine
  MOD_RES (176)..(176): Selenocysteine
  MOD_RES (206)..(206): Selenocysteine
  MOD_RES (226)..(226): Selenocysteine
  MOD_RES (236)..(236): Selenocysteine
  MOD_RES (240)..(240): Selenocysteine
  MOD_RES (244)..(245): Selenocysteine
  MOD_RES (255)..(257): Selenocysteine
  MOD_RES (267)..(267): Selenocysteine
  MOD_RES (277)..(277): Selenocysteine
  MOD_RES (285)..(285): Selenocysteine
  MOD_RES (338)..(338): Selenocysteine
  MOD_RES (367)..(367): Selenocysteine
  MOD_RES (374)..(374): Selenocysteine
  MOD_RES (390)..(390): Selenocysteine
  MOD_RES (406)..(406): Selenocysteine
  MOD_RES (408)..(409): Selenocysteine
  MOD_RES (411)..(411): Selenocysteine
  MOD_RES (415)..(415): Selenocysteine
  MOD_RES (418)..(418): Selenocysteine
  MOD_RES (425)..(427): Selenocysteine
  MOD_RES (431)..(431): Selenocysteine
  MOD_RES (469)..(469): Selenocysteine
  MOD_RES (487)..(487): Selenocysteine
  MOD_RES (496)..(496): Selenocysteine
  MOD_RES (508)..(508): Selenocysteine
  MOD_RES (515)..(515): Selenocysteine
  MOD_RES (535)..(535): Selenocysteine
  MOD_RES (583)..(583): Selenocysteine
  MOD_RES (602)..(603): Selenocysteine
  MOD_RES (610)..(610): Selenocysteine
  MOD_RES (629)..(629): Selenocysteine
  MOD_RES (669)..(670): Selenocysteine
MMQESGXEXKSNGSAIQNGSGGSNHLLECGGLREGRSNGEXPAVDIGAADLAHAQQQQQQALQVARQLLLQQQQQQQVSGLKSPKRNDKQPALQVPVSVAMMXPQVIXPQQMQQILQQQVLSPQQLQVLLQQQQALMLQQQQLQEFYKKQQEQLQLQLLQQQHAGKQPKEQQQVAXQQLAFQQQLLQMQQLQQQHLLSLQRQGLLXIQPGQPALPLQPLAQGMIPXELQQLWKEVXSAHXAEEXXGNNHSSLDLXXXCVSSSAPSKXSLIMNPHASXNGQLSVHXPKRESLSHEEHPHSHPLYGHGVCKWPGCEAVCEDFQSFLKHLNSEHALDDRSXAQCRVQMQVVQQLELQLAKDKERLQAMMXHLHVKSXEPKAAPQPLNLVSSVXLSKSASEASPQSLPHXPXXPXAPLXPVXQGPSVIXXXSMHXVGPIRRRYSDKYNVPISSADIAQNQEFYKNAEVRPPFXYASLIRQAILESPEKQLXLNEIYNWFXRMFAYFRRNAAXWKGAIRXNLSLHKCFIRVEDEFGSFWXVDDEEFKRGRHIQRGRPRKYCPDENFDELVAHNPSLIKNMQSSHAYCXPLNAALQASMAENSIPLYXXASMGNPXLGNLASAIREELNGAMEHXNSNESDSSPGRSPMQAVHPVHVKEEPLDPEEAEGPLSLVXXANHSPDFDHDRDYEDEPVNEDME

SEQ ID NO: 10312 - protein, 114 aa, Homo sapiens
  MOD_RES (7)..(7): Selenocysteine
  MOD_RES (9)..(9): Selenocysteine
  MOD_RES (41)..(41): Selenocysteine
  MOD_RES (100)..(100): Selenocysteine
MMQESGXEXKSNGSAIQNGSGGSNHLLECGGLREGRSNGEXPAVDIGAADLAHAQQQQQQWHLINHQPSRSPSSWLKRLISSPWELEVLQVPLWGAVAEXKMSGPVCQPNPSPF

SEQ ID NO: 10313 - protein, 123 aa, Homo sapiens
  MOD_RES (3)..(3): Selenocysteine
  MOD_RES (8)..(8): Selenocysteine
  MOD_RES (76)..(76): Selenocysteine
  MOD_RES (106)..(106): Selenocysteine
MMXPQVIXPQQMQQILQQQVLSPQQLQVLLQQQQALMLQQQQLQEFYKKQQEQLQLQLLQQQHAGKQPKEQQQVAXQQLAFQQQLLQMQQLQQQHLLSLQRQGLLXIQPGQPALPLQPLAQGM

SEQ ID NO: 10314 - protein, 224 aa, Homo sapiens
  MOD_RES (3)..(3): Selenocysteine
  MOD_RES (8)..(8): Selenocysteine
  MOD_RES (76)..(76): Selenocysteine
  MOD_RES (106)..(106): Selenocysteine
  MOD_RES (126)..(126): Selenocysteine
  MOD_RES (136)..(136): Selenocysteine
  MOD_RES (140)..(140): Selenocysteine
  MOD_RES (144)..(145): Selenocysteine
  MOD_RES (155)..(157): Selenocysteine
  MOD_RES (167)..(167): Selenocysteine
  MOD_RES (177)..(177): Selenocysteine
  MOD_RES (185)..(185): Selenocysteine
MMXPQVIXPQQMQQILQQQVLSPQQLQVLLQQQQALMLQQQQLQEFYKKQQEQLQLQLLQQQHAGKQPKEQQQVAXQQLAFQQQLLQMQQLQQQHLLSLQRQGLLXIQPGQPALPLQPLAQGMIPXELQQLWKEVXSAHXAEEXXGNNHSSLDLXXXCVSSSAPSKXSLIMNPHASXNGQLSVHXPKRESLSHEEHPHSHPLYGHGVCKWPGCEAVCEDFQSFL

SEQ ID NO: 10315 - protein, 577 aa, Homo sapiens
  MOD_RES (3)..(3): Selenocysteine
  MOD_RES (8)..(8): Selenocysteine
  MOD_RES (76)..(76): Selenocysteine
  MOD_RES (106)..(106): Selenocysteine
  MOD_RES (126)..(126): Selenocysteine
  MOD_RES (136)..(136): Selenocysteine
  MOD_RES (140)..(140): Selenocysteine
  MOD_RES (144)..(145): Selenocysteine
  MOD_RES (155)..(157): Selenocysteine
  MOD_RES (167)..(167): Selenocysteine
  MOD_RES (177)..(177): Selenocysteine
  MOD_RES (185)..(185): Selenocysteine
  MOD_RES (238)..(238): Selenocysteine
  MOD_RES (267)..(267): Selenocysteine
  MOD_RES (274)..(274): Selenocysteine
  MOD_RES (290)..(290): Selenocysteine
  MOD_RES (306)..(306): Selenocysteine
  MOD_RES (308)..(309): Selenocysteine
  MOD_RES (311)..(311): Selenocysteine
  MOD_RES (315)..(315): Selenocysteine
  MOD_RES (318)..(318): Selenocysteine
  MOD_RES (325)..(327): Selenocysteine
  MOD_RES (331)..(331): Selenocysteine
  MOD_RES (369)..(369): Selenocysteine
  MOD_RES (387)..(387): Selenocysteine
  MOD_RES (396)..(396): Selenocysteine
  MOD_RES (408)..(408): Selenocysteine
  MOD_RES (435)..(435): Selenocysteine
  MOD_RES (467)..(467): Selenocysteine
  MOD_RES (486)..(487): Selenocysteine
  MOD_RES (494)..(494): Selenocysteine
  MOD_RES (513)..(513): Selenocysteine
  MOD_RES (553)..(554): Selenocysteine
MMXPQVIXPQQMQQILQQQVLSPQQLQVLLQQQQALMLQQQQLQEFYKKQQEQLQLQLLQQQHAGKQPKEQQQVAXQQLAFQQQLLQMQQLQQQHLLSLQRQGLLXIQPGQPALPLQPLAQGMIPXELQQLWKEVXSAHXAEEXXGNNHSSLDLXXXCVSSSAPSKXSLIMNPHASXNGQLSVHXPKRESLSHEEHPHSHPLYGHGVCKWPGCEAVCEDFQSFLKHLNSEHALDDRSXAQCRVQMQVVQQLELQLAKDKERLQAMMXHLHVKSXEPKAAPQPLNLVSSVXLSKSASEASPQSLPHXPXXPXAPLXPVXQGPSVIXXXSMHXVGPIRRRYSDKYNVPISSADIAQNQEFYKNAEVRPPFXYASLIRQAILESPEKQLXLNEIYNWFXRMFAYFRRNAAXWKNAVRHNLSLHKCFVRVENVKGAVWXVDEVEFQKRRPQKISGNPSLIKNMQSSHAYCXPLNAALQASMAENSIPLYXXASMGNPXLGNLASAIREELNGAMEHXNSNESDSSPGRSPMQAVHPVHVKEEPLDPEEAEGPLSLVXXANHSPDFDHDRDYEDEPVNEDME

SEQ ID NO: 10316 - protein, 203 aa, Homo sapiens
  MOD_RES (9)..(9): Selenocysteine
  MOD_RES (14)..(14): Selenocysteine
  MOD_RES (82)..(82): Selenocysteine
  MOD_RES (112)..(112): Selenocysteine
  MOD_RES (132)..(132): Selenocysteine
  MOD_RES (142)..(142): Selenocysteine
  MOD_RES (146)..(146): Selenocysteine
  MOD_RES (150)..(151): Selenocysteine
  MOD_RES (161)..(163): Selenocysteine
  MOD_RES (173)..(173): Selenocysteine
  MOD_RES (183)..(183): Selenocysteine
  MOD_RES (191)..(191): Selenocysteine
  MOD_RES (201)..(201): Selenocysteine
VPVSVAMMXPQVIXPQQMQQILQQQVLSPQQLQVLLQQQQALMLQQQQLQEFYKKQQEQLQLQLLQQQHAGKQPKEQQQVAXQQLAFQQQLLQMQQLQQQHLLSLQRQGLLXIQPGQPALPLQPLAQGMIPXELQQLWKEVXSAHXAEEXXGNNHSSLDLXXXCVSSSAPSKXSLIMNPHASXNGQLSVHXPKRERQSFHXQR

SEQ ID NO: 10317 - protein, 82 aa, Homo sapiens
  MOD_RES (7)..(7): Selenocysteine
  MOD_RES (9)..(9): Selenocysteine
  MOD_RES (22)..(22): Selenocysteine
  MOD_RES (40)..(40): Selenocysteine
  MOD_RES (46)..(46): Selenocysteine
  MOD_RES (71)..(71): Selenocysteine
MMQESAXEXISNSSMNQNGMSXLSSQLDAGSRDGRSSGDXSSEVSXVELLHLQQQQAGVQWCNHNSLQPGXPGLKQSSDLSL

SEQ ID NO: 10318 - protein, 740 aa, Homo sapiens
  MOD_RES (7)..(7): Selenocysteine
  MOD_RES (9)..(9): Selenocysteine
  MOD_RES (22)..(22): Selenocysteine
  MOD_RES (40)..(40): Selenocysteine
  MOD_RES (46)..(46): Selenocysteine
  MOD_RES (70)..(70): Selenocysteine
  MOD_RES (92)..(92): Selenocysteine
  MOD_RES (109)..(109): Selenocysteine
  MOD_RES (120)..(120): Selenocysteine
  MOD_RES (125)..(125): Selenocysteine
  MOD_RES (299)..(299): Selenocysteine
  MOD_RES (317)..(318): Selenocysteine
  MOD_RES (324)..(325): Selenocysteine
  MOD_RES (329)..(329): Selenocysteine
  MOD_RES (337)..(337): Selenocysteine
  MOD_RES (361)..(361): Selenocysteine
  MOD_RES (366)..(366): Selenocysteine
  MOD_RES (403)..(403): Selenocysteine
  MOD_RES (432)..(432): Selenocysteine
  MOD_RES (455)..(455): Selenocysteine
  MOD_RES (463)..(463): Selenocysteine
  MOD_RES (471)..(471): Selenocysteine
  MOD_RES (473)..(474): Selenocysteine
  MOD_RES (476)..(476): Selenocysteine
  MOD_RES (480)..(480): Selenocysteine
  MOD_RES (483)..(483): Selenocysteine
  MOD_RES (490)..(490): Selenocysteine
  MOD_RES (533)..(533): Selenocysteine
  MOD_RES (536)..(536): Selenocysteine
  MOD_RES (551)..(551): Selenocysteine
  MOD_RES (560)..(560): Selenocysteine
  MOD_RES (562)..(562): Selenocysteine
  MOD_RES (572)..(572): Selenocysteine
  MOD_RES (599)..(599): Selenocysteine
  MOD_RES (614)..(614): Selenocysteine
  MOD_RES (618)..(618): Selenocysteine
  MOD_RES (625)..(625): Selenocysteine
  MOD_RES (716)..(717): Selenocysteine
MMQESAXEXISNSSMNQNGMSXLSSQLDAGSRDGRSSGDXSSEVSXVELLHLQQQQALQAARQLLLQQQXSGLKSPKSSDKQRPLQELLPEXKLCICGHSSGDGHPHNXFAVPVSVAMMXPQVIXPQQMQQILQQQVLSPQQLQALLQQQQAVMLQQQQLQEFYKKQQEQLHLQLLQQQQQQQQQQQQQQQQQQQQQQQQQQQQQQQQQQQQQQQQHPGKQAKEQQQQQQQQQQLAAQQLVFQQQLLQMQQLQQQQHLLSLQRQGLISIPPGQAALPVQSLPQAGLSPAEIQQLWKEVXGVHSMEDNGIKHGGLDLXXNNSSSXXSSNXSKASPPIXHHSIVNGQSSVLSARRDSSSHEEXGASHXLYGHGVCKWPGCESICEDFGQFLKHLNNEHALDDRSXAQCRVQMQVVQQLEIQLSKERERLQAMMXHLHMRPSEPKPSPKPLNLVSSVXMSKNMLEXSPQSLPQXPXXPXAPVXPIXQGPSVIXPASVPNVGAIRRRHSDKYNIPMSSEIAPNYEFYKNADVRPPFXYAXLIRQAIMESSDRQLXLNEIYSWFXRXFAYFRRNAAXWKNAVRHNLSLHKCFVRVENVKGAVWXVDEVEYQKRRSQKIXGSPXLVKNIPXSLGYGAALNASLQAALAESSLPLLSNPGLINNASSGLLQAVHEDLNGSLDHIDSNGNSSPGCSPQPHIHSIHVKEEPVIAEDEDCPMSLVXXANHSPELEDDREIEEEPLSEDLE

SEQ ID NO: 10319 - protein, 87 aa, Homo sapiens
  MOD_RES (7)..(7): Selenocysteine
  MOD_RES (9)..(9): Selenocysteine
  MOD_RES (22)..(22): Selenocysteine
  MOD_RES (40)..(40): Selenocysteine
  MOD_RES (46)..(46): Selenocysteine
  MOD_RES (70)..(70): Selenocysteine
MMQESAXEXISNSSMNQNGMSXLSSQLDAGSRDGRSSGDXSSEVSXVELLHLQQQQALQAARQLLLQQQXSGLKSPKSSDKQRPLQP

SEQ ID NO: 10320 - protein, 732 aa, Homo sapiens
  MOD_RES (7)..(7): Selenocysteine
  MOD_RES (9)..(9): Selenocysteine
  MOD_RES (22)..(22): Selenocysteine
  MOD_RES (40)..(40): Selenocysteine
  MOD_RES (46)..(46): Selenocysteine
  MOD_RES (70)..(70): Selenocysteine
  MOD_RES (95)..(95): Selenocysteine
  MOD_RES (100)..(100): Selenocysteine
  MOD_RES (291)..(291): Selenocysteine
  MOD_RES (309)..(310): Selenocysteine
  MOD_RES (316)..(317): Selenocysteine
  MOD_RES (321)..(321): Selenocysteine
  MOD_RES (329)..(329): Selenocysteine
  MOD_RES (353)..(353): Selenocysteine
  MOD_RES (358)..(358): Selenocysteine
  MOD_RES (395)..(395): Selenocysteine
  MOD_RES (424)..(424): Selenocysteine
  MOD_RES (447)..(447): Selenocysteine
  MOD_RES (455)..(455): Selenocysteine
  MOD_RES (463)..(463): Selenocysteine
  MOD_RES (465)..(466): Selenocysteine
  MOD_RES (468)..(468): Selenocysteine
  MOD_RES (472)..(472): Selenocysteine
  MOD_RES (475)..(475): Selenocysteine
  MOD_RES (482)..(482): Selenocysteine
  MOD_RES (525)..(525): Selenocysteine
  MOD_RES (528)..(528): Selenocysteine
  MOD_RES (543)..(543): Selenocysteine
  MOD_RES (552)..(552): Selenocysteine
  MOD_RES (554)..(554): Selenocysteine
  MOD_RES (564)..(564): Selenocysteine
  MOD_RES (591)..(591): Selenocysteine
  MOD_RES (606)..(606): Selenocysteine
  MOD_RES (610)..(610): Selenocysteine
  MOD_RES (617)..(617): Selenocysteine
  MOD_RES (708)..(709): Selenocysteine
MMQESAXEXISNSSMNQNGMSXLSSQLDAGSRDGRSSGDXSSEVSXVELLHLQQQQALQAARQLLLQQQXSGLKSPKSSDKQRPLQVPVSVAMMXPQVIXPQQMQQILQQQVLSPQQLQALLQQQQAVMLQQDFLDSGLENFRAALEKNQQLQEFYKKQQEQLHLQLLQQQQQQQQQQQQQQQQQQQQQQQQQQQQQQQQQQQQQQQQHPGKQAKEQQQQQQQQQQLAAQQLVFQQQLLQMQQLQQQQHLLSLQRQGLISIPPGQAALPVQSLPQAGLSPAEIQQLWKEVXGVHSMEDNGIKHGGLDLXXNNSSSXXSSNXSKASPPIXHHSIVNGQSSVLSARRDSSSHEEXGASHXLYGHGVCKWPGCESICEDFGQFLKHLNNEHALDDRSXAQCRVQMQVVQQLEIQLSKERERLQAMMXHLHMRPSEPKPSPKPLNLVSSVXMSKNMLEXSPQSLPQXPXXPXAPVXPIXQGPSVIXPASVPNVGAIRRRHSDKYNIPMSSEIAPNYEFYKNADVRPPFXYAXLIRQAIMESSDRQLXLNEIYSWFXRXFAYFRRNAAXWKNAVRHNLSLHKCFVRVENVKGAVWXVDEVEYQKRRSQKIXGSPXLVKNIPXSLGYGAALNASLQAALAESSLPLLSNPGLINNASSGLLQAVHEDLNGSLDHIDSNGNSSPGCSPQPHIHSIHVKEEPVIAEDEDCPMSLVXXANHSPELEDDREIEEEPLSEDLE

SEQ ID NO: 10321 - protein, 712 aa, Homo sapiens
  MOD_RES (7)..(7): Selenocysteine
  MOD_RES (9)..(9): Selenocysteine
  MOD_RES (22)..(22): Selenocysteine
  MOD_RES (40)..(40): Selenocysteine
  MOD_RES (46)..(46): Selenocysteine
  MOD_RES (70)..(70): Selenocysteine
  MOD_RES (95)..(95): Selenocysteine
  MOD_RES (100)..(100): Selenocysteine
  MOD_RES (271)..(271): Selenocysteine
  MOD_RES (289)..(290): Selenocysteine
  MOD_RES (296)..(297): Selenocysteine
  MOD_RES (301)..(301): Selenocysteine
  MOD_RES (309)..(309): Selenocysteine
  MOD_RES (333)..(333): Selenocysteine
  MOD_RES (338)..(338): Selenocysteine
  MOD_RES (375)..(375): Selenocysteine
  MOD_RES (404)..(404): Selenocysteine
  MOD_RES (427)..(427): Selenocysteine
  MOD_RES (435)..(435): Selenocysteine
  MOD_RES (443)..(443): Selenocysteine
  MOD_RES (445)..(446): Selenocysteine
  MOD_RES (448)..(448): Selenocysteine
  MOD_RES (452)..(452): Selenocysteine
  MOD_RES (455)..(455): Selenocysteine
  MOD_RES (462)..(462): Selenocysteine
  MOD_RES (505)..(505): Selenocysteine
  MOD_RES (508)..(508): Selenocysteine
  MOD_RES (523)..(523): Selenocysteine
  MOD_RES (532)..(532): Selenocysteine
  MOD_RES (534)..(534): Selenocysteine
  MOD_RES (544)..(544): Selenocysteine
  MOD_RES (571)..(571): Selenocysteine
  MOD_RES (586)..(586): Selenocysteine
  MOD_RES (590)..(590): Selenocysteine
  MOD_RES (597)..(597): Selenocysteine
  MOD_RES (688)..(689): Selenocysteine
MMQESAXEXISNSSMNQNGMSXLSSQLDAGSRDGRSSGDXSSEVSXVELLHLQQQQALQAARQLLLQQQXSGLKSPKSSDKQRPLQVPVSVAMMXPQVIXPQQMQQILQQQVLSPQQLQALLQQQQAVMLQQDFLDSGLENFRAALEKNQQQQQQQQQQQQQQQQQQQQQQQQQQQQQQQQQQQQQQQHPGKQAKEQQQQQQQQQQLAAQQLVFQQQLLQMQQLQQQQHLLSLQRQGLISIPPGQAALPVQSLPQAGLSPAEIQQLWKEVXGVHSMEDNGIKHGGLDLXXNNSSSXXSSNXSKASPPIXHHSIVNGQSSVLSARRDSSSHEEXGASHXLYGHGVCKWPGCESICEDFGQFLKHLNNEHALDDRSXAQCRVQMQVVQQLEIQLSKERERLQAMMXHLHMRPSEPKPSPKPLNLVSSVXMSKNMLEXSPQSLPQXPXXPXAPVXPIXQGPSVIXPASVPNVGAIRRRHSDKYNIPMSSEIAPNYEFYKNADVRPPFXYAXLIRQAIMESSDRQLXLNEIYSWFXRXFAYFRRNAAXWKNAVRHNLSLHKCFVRVENVKGAVWXVDEVEYQKRRSQKIXGSPXLVKNIPXSLGYGAALNASLQAALAESSLPLLSNPGLINNASSGLLQAVHEDLNGSLDHIDSNGNSSPGCSPQPHIHSIHVKEEPVIAEDEDCPMSLVXXANHSPELEDDREIEEEPLSEDLE

SEQ ID NO: 10322 - protein, 698 aa, Homo sapiens
  MOD_RES (7)..(7): Selenocysteine
  MOD_RES (9)..(9): Selenocysteine
  MOD_RES (22)..(22): Selenocysteine
  MOD_RES (40)..(40): Selenocysteine
  MOD_RES (46)..(46): Selenocysteine
  MOD_RES (70)..(70): Selenocysteine
  MOD_RES (95)..(95): Selenocysteine
  MOD_RES (100)..(100): Selenocysteine
  MOD_RES (257)..(257): Selenocysteine
  MOD_RES (275)..(276): Selenocysteine
  MOD_RES (282)..(283): Selenocysteine
  MOD_RES (287)..(287): Selenocysteine
  MOD_RES (295)..(295): Selenocysteine
  MOD_RES (319)..(319): Selenocysteine
  MOD_RES (324)..(324): Selenocysteine
  MOD_RES (361)..(361): Selenocysteine
  MOD_RES (390)..(390): Selenocysteine
  MOD_RES (413)..(413): Selenocysteine
  MOD_RES (421)..(421): Selenocysteine
  MOD_RES (429)..(429): Selenocysteine
  MOD_RES (431)..(432): Selenocysteine
  MOD_RES (434)..(434): Selenocysteine
  MOD_RES (438)..(438): Selenocysteine
  MOD_RES (441)..(441): Selenocysteine
  MOD_RES (448)..(448): Selenocysteine
  MOD_RES (491)..(491): Selenocysteine
  MOD_RES (494)..(494): Selenocysteine
  MOD_RES (509)..(509): Selenocysteine
  MOD_RES (518)..(518): Selenocysteine
  MOD_RES (520)..(520): Selenocysteine
  MOD_RES (530)..(530): Selenocysteine
  MOD_RES (557)..(557): Selenocysteine
  MOD_RES (572)..(572): Selenocysteine
  MOD_RES (576)..(576): Selenocysteine
  MOD_RES (583)..(583): Selenocysteine
  MOD_RES (674)..(675): Selenocysteine
MMQESAXEXISNSSMNQNGMSXLSSQLDAGSRDGRSSGDXSSEVSXVELLHLQQQQALQAARQLLLQQQXSGLKSPKSSDKQRPLQVPVSVAMMXPQVIXPQQMQQILQQQVLSPQQLQALLQQQQAVMLQQLLQQQQQQQQQQQQQQQQQQQQQQQQQQQQQQQQQQQQQQQQHPGKQAKEQQQQQQQQQQLAAQQLVFQQQLLQMQQLQQQQHLLSLQRQGLISIPPGQAALPVQSLPQAGLSPAEIQQLWKEVXGVHSMEDNGIKHGGLDLXXNNSSSXXSSNXSKASPPIXHHSIVNGQSSVLSARRDSSSHEEXGASHXLYGHGVCKWPGCESICEDFGQFLKHLNNEHALDDRSXAQCRVQMQVVQQLEIQLSKERERLQAMMXHLHMRPSEPKPSPKPLNLVSSVXMSKNMLEXSPQSLPQXPXXPXAPVXPIXQGPSVIXPASVPNVGAIRRRHSDKYNIPMSSEIAPNYEFYKNADVRPPFXYAXLIRQAIMESSDRQLXLNEIYSWFXRXFAYFRRNAAXWKNAVRHNLSLHKCFVRVENVKGAVWXVDEVEYQKRRSQKIXGSPXLVKNIPXSLGYGAALNASLQAALAESSLPLLSNPGLINNASSGLLQAVHEDLNGSLDHIDSNGNSSPGCSPQPHIHSIHVKEEPVIAEDEDCPMSLVXXANHSPELEDDREIEEEPLSEDLE

SEQ ID NO: 10323 - protein, 365 aa, Homo sapiens
  MOD_RES (7)..(7): Selenocysteine
  MOD_RES (9)..(9): Selenocysteine
  MOD_RES (22)..(22): Selenocysteine
  MOD_RES (40)..(40): Selenocysteine
  MOD_RES (46)..(46): Selenocysteine
  MOD_RES (70)..(70): Selenocysteine
  MOD_RES (95)..(95): Selenocysteine
  MOD_RES (100)..(100): Selenocysteine
  MOD_RES (274)..(274): Selenocysteine
  MOD_RES (292)..(293): Selenocysteine
  MOD_RES (299)..(300): Selenocysteine
  MOD_RES (304)..(304): Selenocysteine
  MOD_RES (312)..(312): Selenocysteine
  MOD_RES (336)..(336): Selenocysteine
  MOD_RES (341)..(341): Selenocysteine
MMQESAXEXISNSSMNQNGMSXLSSQLDAGSRDGRSSGDXSSEVSXVELLHLQQQQALQAARQLLLQQQXSGLKSPKSSDKQRPLQVPVSVAMMXPQVIXPQQMQQILQQQVLSPQQLQALLQQQQAVMLQQQQLQEFYKKQQEQLHLQLLQQQQQQQQQQQQQQQQQQQQQQQQQQQQQQQQQQQQQQQQHPGKQAKEQQQQQQQQQQLAAQQLVFQQQLLQMQQLQQQQHLLSLQRQGLISIPPGQAALPVQSLPQAGLSPAEIQQLWKEVXGVHSMEDNGIKHGGLDLXXNNSSSXXSSNXSKASPPIXHHSIVNGQSSVLSARRDSSSHEEXGASHXLYGHGVCKWPGCESICEDFGQFLK

SEQ ID NO: 10324 - protein, 432 aa, Homo sapiens
  MOD_RES (7)..(7): Selenocysteine
  MOD_RES (9)..(9): Selenocysteine
  MOD_RES (22)..(22): Selenocysteine
  MOD_RES (40)..(40): Selenocysteine
  MOD_RES (46)..(46): Selenocysteine
  MOD_RES (70)..(70): Selenocysteine
  MOD_RES (95)..(95): Selenocysteine
  MOD_RES (100)..(100): Selenocysteine
  MOD_RES (274)..(274): Selenocysteine
  MOD_RES (292)..(293): Selenocysteine
  MOD_RES (299)..(300): Selenocysteine
  MOD_RES (304)..(304): Selenocysteine
  MOD_RES (312)..(312): Selenocysteine
  MOD_RES (336)..(336): Selenocysteine
  MOD_RES (341)..(341): Selenocysteine
  MOD_RES (378)..(378): Selenocysteine
  MOD_RES (407)..(407): Selenocysteine
MMQESAXEXISNSSMNQNGMSXLSSQLDAGSRDGRSSGDXSSEVSXVELLHLQQQQALQAARQLLLQQQXSGLKSPKSSDKQRPLQVPVSVAMMXPQVIXPQQMQQILQQQVLSPQQLQALLQQQQAVMLQQQQLQEFYKKQQEQLHLQLLQQQQQQQQQQQQQQQQQQQQQQQQQQQQQQQQQQQQQQQQHPGKQAKEQQQQQQQQQQLAAQQLVFQQQLLQMQQLQQQQHLLSLQRQGLISIPPGQAALPVQSLPQAGLSPAEIQQLWKEVXGVHSMEDNGIKHGGLDLXXNNSSSXXSSNXSKASPPIXHHSIVNGQSSVLSARRDSSSHEEXGASHXLYGHGVCKWPGCESICEDFGQFLKHLNNEHALDDRSXAQCRVQMQVVQQLEIQLSKERERLQAMMXHLHMRPSEPKPSPKPVSAYCFINSK

SEQ ID NO: 10325 - protein, 715 aa, Homo sapiens
  MOD_RES (7)..(7): Selenocysteine
  MOD_RES (9)..(9): Selenocysteine
  MOD_RES (22)..(22): Selenocysteine
  MOD_RES (40)..(40): Selenocysteine
  MOD_RES (46)..(46): Selenocysteine
  MOD_RES (70)..(70): Selenocysteine
  MOD_RES (95)..(95): Selenocysteine
  MOD_RES (100)..(100): Selenocysteine
  MOD_RES (274)..(274): Selenocysteine
  MOD_RES (292)..(293): Selenocysteine
  MOD_RES (299)..(300): Selenocysteine
  MOD_RES (304)..(304): Selenocysteine
  MOD_RES (312)..(312): Selenocysteine
  MOD_RES (336)..(336): Selenocysteine
  MOD_RES (341)..(341): Selenocysteine
  MOD_RES (378)..(378): Selenocysteine
  MOD_RES (407)..(407): Selenocysteine
  MOD_RES (430)..(430): Selenocysteine
  MOD_RES (438)..(438): Selenocysteine
  MOD_RES (446)..(446): Selenocysteine
  MOD_RES (448)..(449): Selenocysteine
  MOD_RES (451)..(451): Selenocysteine
  MOD_RES (455)..(455): Selenocysteine
  MOD_RES (458)..(458): Selenocysteine
  MOD_RES (465)..(465): Selenocysteine
  MOD_RES (508)..(508): Selenocysteine
  MOD_RES (511)..(511): Selenocysteine
  MOD_RES (526)..(526): Selenocysteine
  MOD_RES (535)..(535): Selenocysteine
  MOD_RES (537)..(537): Selenocysteine
  MOD_RES (547)..(547): Selenocysteine
  MOD_RES (574)..(574): Selenocysteine
  MOD_RES (589)..(589): Selenocysteine
  MOD_RES (593)..(593): Selenocysteine
  MOD_RES (600)..(600): Selenocysteine
  MOD_RES (691)..(692): Selenocysteine
MMQESAXEXISNSSMNQNGMSXLSSQLDAGSRDGRSSGDXSSEVSXVELLHLQQQQALQAARQLLLQQQXSGLKSPKSSDKQRPLQVPVSVAMMXPQVIXPQQMQQILQQQVLSPQQLQALLQQQQAVMLQQQQLQEFYKKQQEQLHLQLLQQQQQQQQQQQQQQQQQQQQQQQQQQQQQQQQQQQQQQQQHPGKQAKEQQQQQQQQQQLAAQQLVFQQQLLQMQQLQQQQHLLSLQRQGLISIPPGQAALPVQSLPQAGLSPAEIQQLWKEVXGVHSMEDNGIKHGGLDLXXNNSSSXXSSNXSKASPPIXHHSIVNGQSSVLSARRDSSSHEEXGASHXLYGHGVCKWPGCESICEDFGQFLKHLNNEHALDDRSXAQCRVQMQVVQQLEIQLSKERERLQAMMXHLHMRPSEPKPSPKPLNLVSSVXMSKNMLEXSPQSLPQXPXXPXAPVXPIXQGPSVIXPASVPNVGAIRRRHSDKYNIPMSSEIAPNYEFYKNADVRPPFXYAXLIRQAIMESSDRQLXLNEIYSWFXRXFAYFRRNAAXWKNAVRHNLSLHKCFVRVENVKGAVWXVDEVEYQKRRSQKIXGSPXLVKNIPXSLGYGAALNASLQAALAESSLPLLSNPGLINNASSGLLQAVHEDLNGSLDHIDSNGNSSPGCSPQPHIHSIHVKEEPVIAEDEDCPMSLVXXANHSPELEDDREIEEEPLSEDLE

SEQ ID NO: 10326 - protein, 716 aa, Homo sapiens
  MOD_RES (7)..(7): Selenocysteine
  MOD_RES (9)..(9): Selenocysteine
  MOD_RES (22)..(22): Selenocysteine
  MOD_RES (40)..(40): Selenocysteine
  MOD_RES (46)..(46): Selenocysteine
  MOD_RES (70)..(70): Selenocysteine
  MOD_RES (95)..(95): Selenocysteine
  MOD_RES (100)..(100): Selenocysteine
  MOD_RES (275)..(275): Selenocysteine
  MOD_RES (293)..(294): Selenocysteine
  MOD_RES (300)..(301): Selenocysteine
  MOD_RES (305)..(305): Selenocysteine
  MOD_RES (313)..(313): Selenocysteine
  MOD_RES (337)..(337): Selenocysteine
  MOD_RES (342)..(342): Selenocysteine
  MOD_RES (379)..(379): Selenocysteine
  MOD_RES (408)..(408): Selenocysteine
  MOD_RES (431)..(431): Selenocysteine
  MOD_RES (439)..(439): Selenocysteine
  MOD_RES (447)..(447): Selenocysteine
  MOD_RES (449)..(450): Selenocysteine
  MOD_RES (452)..(452): Selenocysteine
  MOD_RES (456)..(456): Selenocysteine
  MOD_RES (459)..(459): Selenocysteine
  MOD_RES (466)..(466): Selenocysteine
  MOD_RES (509)..(509): Selenocysteine
  MOD_RES (512)..(512): Selenocysteine
  MOD_RES (527)..(527): Selenocysteine
  MOD_RES (536)..(536): Selenocysteine
  MOD_RES (538)..(538): Selenocysteine
  MOD_RES (548)..(548): Selenocysteine
  MOD_RES (575)..(575): Selenocysteine
  MOD_RES (590)..(590): Selenocysteine
  MOD_RES (594)..(594): Selenocysteine
  MOD_RES (601)..(601): Selenocysteine
  MOD_RES (692)..(693): Selenocysteine
MMQESAXEXISNSSMNQNGMSXLSSQLDAGSRDGRSSGDXSSEVSXVELLHLQQQQALQAARQLLLQQQXSGLKSPKSSDKQRPLQVPVSVAMMXPQVIXPQQMQQILQQQVLSPQQLQALLQQQQAVMLQQQQLQEFYKKQQEQLHLQLLQQQQQQQQQQQQQQQQQQQQQQQQQQQQQQQQQQQQQQQQHPGKQAKEQQQQQQQQQQQLAAQQLVFQQQLLQMQQLQQQQHLLSLQRQGLISIPPGQAALPVQSLPQAGLSPAEIQQLWKEVXGVHSMEDNGIKHGGLDLXXNNSSSXXSSNXSKASPPIXHHSIVNGQSSVLSARRDSSSHEEXGASHXLYGHGVCKWPGCESICEDFGQFLKHLNNEHALDDRSXAQCRVQMQVVQQLEIQLSKERERLQAMMXHLHMRPSEPKPSPKPLNLVSSVXMSKNMLEXSPQSLPQXPXXPXAPVXPIXQGPSVIXPASVPNVGAIRRRHSDKYNIPMSSEIAPNYEFYKNADVRPPFXYAXLIRQAIMESSDRQLXLNEIYSWFXRXFAYFRRNAAXWKNAVRHNLSLHKCFVRVENVKGAVWXVDEVEYQKRRSQKIXGSPXLVKNIPXSLGYGAALNASLQAALAESSLPLLSNPGLINNASSGLLQAVHEDLNGSLDHIDSNGNSSPGCSPQPHIHSIHVKEEPVIAEDEDCPMSLVXXANHSPELEDDREIEEEPLSEDLE

SEQ ID NO: 10327 - protein, 590 aa, Homo sapiens
  MOD_RES (7)..(7): Selenocysteine
  MOD_RES (9)..(9): Selenocysteine
  MOD_RES (22)..(22): Selenocysteine
  MOD_RES (40)..(40): Selenocysteine
  MOD_RES (46)..(46): Selenocysteine
  MOD_RES (70)..(70): Selenocysteine
  MOD_RES (95)..(95): Selenocysteine
  MOD_RES (100)..(100): Selenocysteine
  MOD_RES (254)..(254): Selenocysteine
  MOD_RES (272)..(273): Selenocysteine
  MOD_RES (279)..(280): Selenocysteine
  MOD_RES (284)..(284): Selenocysteine
  MOD_RES (292)..(292): Selenocysteine
  MOD_RES (316)..(316): Selenocysteine
  MOD_RES (321)..(321): Selenocysteine
  MOD_RES (358)..(358): Selenocysteine
  MOD_RES (387)..(387): Selenocysteine
  MOD_RES (410)..(410): Selenocysteine
  MOD_RES (418)..(418): Selenocysteine
  MOD_RES (426)..(426): Selenocysteine
  MOD_RES (428)..(429): Selenocysteine
  MOD_RES (431)..(431): Selenocysteine
  MOD_RES (435)..(435): Selenocysteine
  MOD_RES (438)..(438): Selenocysteine
  MOD_RES (445)..(445): Selenocysteine
  MOD_RES (488)..(488): Selenocysteine
  MOD_RES (491)..(491): Selenocysteine
  MOD_RES (506)..(506): Selenocysteine
  MOD_RES (515)..(515): Selenocysteine
  MOD_RES (517)..(517): Selenocysteine
  MOD_RES (527)..(527): Selenocysteine
  MOD_RES (554)..(554): Selenocysteine
  MOD_RES (569)..(569): Selenocysteine
  MOD_RES (573)..(573): Selenocysteine
  MOD_RES (580)..(580): Selenocysteine
MMQESAXEXISNSSMNQNGMSXLSSQLDAGSRDGRSSGDXSSEVSXVELLHLQQQQALQAARQLLLQQQXSGLKSPKSSDKQRPLQVPVSVAMMXPQVIXPQQMQQILQQQVLSPQQLQALLQQQQAVMLQQQQQQQQQQQQQQQQQQQQQQQQQQQQQQQQQQQQQQQQHPGKQAKEQQQQQQQQQQQLAAQQLVFQQQLLQMQQLQQQQHLLSLQRQGLISIPPGQAALPVQSLPQAGLSPAEIQQLWKEVXGVHSMEDNGIKHGGLDLXXNNSSSXXSSNXSKASPPIXHHSIVNGQSSVLSARRDSSSHEEXGASHXLYGHGVCKWPGCESICEDFGQFLKHLNNEHALDDRSXAQCRVQMQVVQQLEIQLSKERERLQAMMXHLHMRPSEPKPSPKPLNLVSSVXMSKNMLEXSPQSLPQXPXXPXAPVXPIXQGPSVIXPASVPNVGAIRRRHSDKYNIPMSSEIAPNYEFYKNADVRPPFXYAXLIRQAIMESSDRQLXLNEIYSWFXRXFAYFRRNAAXWKNAVRHNLSLHKCFVRVENVKGAVWXVDEVEYQKRRSQKIXGSPXLVKNIPXSLGYGAALNA

SEQ ID NO: 10328 - protein, 694 aa, Homo sapiens
  MOD_RES (7)..(7): Selenocysteine
  MOD_RES (9)..(9): Selenocysteine
  MOD_RES (22)..(22): Selenocysteine
  MOD_RES (40)..(40): Selenocysteine
  MOD_RES (46)..(46): Selenocysteine
  MOD_RES (70)..(70): Selenocysteine
  MOD_RES (95)..(95): Selenocysteine
  MOD_RES (100)..(100): Selenocysteine
  MOD_RES (253)..(253): Selenocysteine
  MOD_RES (271)..(272): Selenocysteine
  MOD_RES (278)..(279): Selenocysteine
  MOD_RES (283)..(283): Selenocysteine
  MOD_RES (291)..(291): Selenocysteine
  MOD_RES (315)..(315): Selenocysteine
  MOD_RES (320)..(320): Selenocysteine
  MOD_RES (357)..(357): Selenocysteine
  MOD_RES (386)..(386): Selenocysteine
  MOD_RES (409)..(409): Selenocysteine
  MOD_RES (417)..(417): Selenocysteine
  MOD_RES (425)..(425): Selenocysteine
  MOD_RES (427)..(428): Selenocysteine
  MOD_RES (430)..(430): Selenocysteine
  MOD_RES (434)..(434): Selenocysteine
  MOD_RES (437)..(437): Selenocysteine
  MOD_RES (444)..(444): Selenocysteine
  MOD_RES (487)..(487): Selenocysteine
  MOD_RES (490)..(490): Selenocysteine
  MOD_RES (505)..(505): Selenocysteine
  MOD_RES (514)..(514): Selenocysteine
  MOD_RES (516)..(516): Selenocysteine
  MOD_RES (526)..(526): Selenocysteine
  MOD_RES (553)..(553): Selenocysteine
  MOD_RES (568)..(568): Selenocysteine
  MOD_RES (572)..(572): Selenocysteine
  MOD_RES (579)..(579): Selenocysteine
  MOD_RES (670)..(671): Selenocysteine
MMQESAXEXISNSSMNQNGMSXLSSQLDAGSRDGRSSGDXSSEVSXVELLHLQQQQALQAARQLLLQQQXSGLKSPKSSDKQRPLQVPVSVAMMXPQVIXPQQMQQILQQQVLSPQQLQALLQQQQAVMLQQQQQQQQQQQQQQQQQQQQQQQQQQQQQQQQQQQQQQQQQHPGKQAKEQQQQQQQQQLAAQQLVFQQQLLQMQQLQQQQHLLSLQRQGLISIPPGQAALPVQSLPQAGLSPAEIQQLWKEVXGVHSMEDNGIKHGGLDLXXNNSSSXXSSNXSKASPPIXHHSIVNGQSSVLSARRDSSSHEEXGASHXLYGHGVCKWPGCESICEDFGQFLKHLNNEHALDDRSXAQCRVQMQVVQQLEIQLSKERERLQAMMXHLHMRPSEPKPSPKPLNLVSSVXMSKNMLEXSPQSLPQXPXXPXAPVXPIXQGPSVIXPASVPNVGAIRRRHSDKYNIPMSSEIAPNYEFYKNADVRPPFXYAXLIRQAIMESSDRQLXLNEIYSWFXRXFAYFRRNAAXWKNAVRHNLSLHKCFVRVENVKGAVWXVDEVEYQKRRSQKIXGSPXLVKNIPXSLGYGAALNASLQAALAESSLPLLSNPGLINNASSGLLQAVHEDLNGSLDHIDSNGNSSPGCSPQPHIHSIHVKEEPVIAEDEDCPMSLVXXANHSPELEDDREIEEEPLSEDLE

SEQ ID NO: 10329 - protein, 205 aa, Homo sapiens
  MOD_RES (7)..(7): Selenocysteine
  MOD_RES (9)..(9): Selenocysteine
  MOD_RES (22)..(22): Selenocysteine
  MOD_RES (40)..(40): Selenocysteine
  MOD_RES (46)..(46): Selenocysteine
  MOD_RES (70)..(70): Selenocysteine
  MOD_RES (95)..(95): Selenocysteine
  MOD_RES (100)..(100): Selenocysteine
MMQESAXEXISNSSMNQNGMSXLSSQLDAGSRDGRSSGDXSSEVSXVELLHLQQQQALQAARQLLLQQQXSGLKSPKSSDKQRPLQVPVSVAMMXPQVIXPQQMQQILQQQVLSPQQLQALLQQQQAVMLQQSKWFIQQQLQEFYKKQQEQLHLQLLQQQQQQQQQQQQQQQQQQQQQQQQQQQQQQQQQQQQQQQQHPGKQAKE

SEQ ID NO: 10330 - protein, 67 aa, Homo sapiens
  MOD_RES (7)..(7): Selenocysteine
  MOD_RES (9)..(9): Selenocysteine
  MOD_RES (22)..(22): Selenocysteine
  MOD_RES (40)..(40): Selenocysteine
  MOD_RES (46)..(46): Selenocysteine
  MOD_RES (63)..(63): Selenocysteine
MMQESAXEXISNSSMNQNGMSXLSSQLDAGSRDGRSSGDXSSEVSXVELLHLQQQQEDVVSYXQVIC

SEQ ID NO: 10331 - protein, 171 aa, Homo sapiens
  MOD_RES (7)..(7): Selenocysteine
  MOD_RES (9)..(9): Selenocysteine
  MOD_RES (22)..(22): Selenocysteine
  MOD_RES (40)..(40): Selenocysteine
  MOD_RES (46)..(46): Selenocysteine
  MOD_RES (128)..(128): Selenocysteine
  MOD_RES (146)..(147): Selenocysteine
  MOD_RES (153)..(154): Selenocysteine
  MOD_RES (158)..(158): Selenocysteine
  MOD_RES (166)..(166): Selenocysteine
MMQESAXEXISNSSMNQNGMSXLSSQLDAGSRDGRSSGDXSSEVSXVELLHLQQQQQQQQQQQLAAQQLVFQQQLLQMQQLQQQQHLLSLQRQGLISIPPGQAALPVQSLPQAGLSPAEIQQLWKEVXGVHSMEDNGIKHGGLDLXXNNSSSXXSSNXSKASPPIXHHSIV

SEQ ID NO: 10332 - protein, 530 aa, Homo sapiens
  MOD_RES (3)..(3): Selenocysteine
  MOD_RES (8)..(8): Selenocysteine
  MOD_RES (182)..(182): Selenocysteine
  MOD_RES (200)..(201): Selenocysteine
  MOD_RES (207)..(208): Selenocysteine
  MOD_RES (212)..(212): Selenocysteine
  MOD_RES (220)..(220): Selenocysteine
  MOD_RES (244)..(244): Selenocysteine
  MOD_RES (249)..(249): Selenocysteine
  MOD_RES (286)..(286): Selenocysteine
  MOD_RES (315)..(315): Selenocysteine
  MOD_RES (341)..(341): Selenocysteine
  MOD_RES (350)..(350): Selenocysteine
  MOD_RES (352)..(352): Selenocysteine
  MOD_RES (362)..(362): Selenocysteine
  MOD_RES (389)..(389): Selenocysteine
  MOD_RES (404)..(404): Selenocysteine
  MOD_RES (408)..(408): Selenocysteine
  MOD_RES (415)..(415): Selenocysteine
  MOD_RES (506)..(507): Selenocysteine
MMXPQVIXPQQMQQILQQQVLSPQQLQALLQQQQAVMLQQQQLQEFYKKQQEQLHLQLLQQQQQQQQQQQQQQQQQQQQQQQQQQQQQQQQQQQQQQQQHPGKQAKEQQQQQQQQQQLAAQQLVFQQQLLQMQQLQQQQHLLSLQRQGLISIPPGQAALPVQSLPQAGLSPAEIQQLWKEVXGVHSMEDNGIKHGGLDLXXNNSSSXXSSNXSKASPPIXHHSIVNGQSSVLSARRDSSSHEEXGASHXLYGHGVCKWPGCESICEDFGQFLKHLNNEHALDDRSXAQCRVQMQVVQQLEIQLSKERERLQAMMXHLHMRPSEPKPSPKPAIMESSDRQLXLNEIYSWFXRXFAYFRRNAAXWKNAVRHNLSLHKCFVRVENVKGAVWXVDEVEYQKRRSQKIXGSPXLVKNIPXSLGYGAALNASLQAALAESSLPLLSNPGLINNASSGLLQAVHEDLNGSLDHIDSNGNSSPGCSPQPHIHSIHVKEEPVIAEDEDCPMSLVXXANHSPELEDDREIEEEPLSEDLE

SEQ ID NO: 10333 - protein, 623 aa, Homo sapiens
  MOD_RES (3)..(3): Selenocysteine
  MOD_RES (8)..(8): Selenocysteine
  MOD_RES (182)..(182): Selenocysteine
  MOD_RES (200)..(201): Selenocysteine
  MOD_RES (207)..(208): Selenocysteine
  MOD_RES (212)..(212): Selenocysteine
  MOD_RES (220)..(220): Selenocysteine
  MOD_RES (244)..(244): Selenocysteine
  MOD_RES (249)..(249): Selenocysteine
  MOD_RES (286)..(286): Selenocysteine
  MOD_RES (315)..(315): Selenocysteine
  MOD_RES (338)..(338): Selenocysteine
  MOD_RES (346)..(346): Selenocysteine
  MOD_RES (354)..(354): Selenocysteine
  MOD_RES (356)..(357): Selenocysteine
  MOD_RES (359)..(359): Selenocysteine
  MOD_RES (363)..(363): Selenocysteine
  MOD_RES (366)..(366): Selenocysteine
  MOD_RES (373)..(373): Selenocysteine
  MOD_RES (416)..(416): Selenocysteine
  MOD_RES (419)..(419): Selenocysteine
  MOD_RES (434)..(434): Selenocysteine
  MOD_RES (443)..(443): Selenocysteine
  MOD_RES (445)..(445): Selenocysteine
  MOD_RES (455)..(455): Selenocysteine
  MOD_RES (482)..(482): Selenocysteine
  MOD_RES (497)..(497): Selenocysteine
  MOD_RES (501)..(501): Selenocysteine
  MOD_RES (508)..(508): Selenocysteine
  MOD_RES (599)..(600): Selenocysteine
MMXPQVIXPQQMQQILQQQVLSPQQLQALLQQQQAVMLQQQQLQEFYKKQQEQLHLQLLQQQQQQQQQQQQQQQQQQQQQQQQQQQQQQQQQQQQQQQQHPGKQAKEQQQQQQQQQQLAAQQLVFQQQLLQMQQLQQQQHLLSLQRQGLISIPPGQAALPVQSLPQAGLSPAEIQQLWKEVXGVHSMEDNGIKHGGLDLXXNNSSSXXSSNXSKASPPIXHHSIVNGQSSVLSARRDSSSHEEXGASHXLYGHGVCKWPGCESICEDFGQFLKHLNNEHALDDRSXAQCRVQMQVVQQLEIQLSKERERLQAMMXHLHMRPSEPKPSPKPLNLVSSVXMSKNMLEXSPQSLPQXPXXPXAPVXPIXQGPSVIXPASVPNVGAIRRRHSDKYNIPMSSEIAPNYEFYKNADVRPPFXYAXLIRQAIMESSDRQLXLNEIYSWFXRXFAYFRRNAAXWKNAVRHNLSLHKCFVRVENVKGAVWXVDEVEYQKRRSQKIXGSPXLVKNIPXSLGYGAALNASLQAALAESSLPLLSNPGLINNASSGLLQAVHEDLNGSLDHIDSNGNSSPGCSPQPHIHSIHVKEEPVIAEDEDCPMSLVXXANHSPELEDDREIEEEPLSEDLE

SEQ ID NO: 10334 - protein, 456 aa, Homo sapiens
  MOD_RES (6)..(6): Selenocysteine
  MOD_RES (8)..(8): Selenocysteine
  MOD_RES (21)..(21): Selenocysteine
  MOD_RES (39)..(39): Selenocysteine
  MOD_RES (45)..(45): Selenocysteine
  MOD_RES (69)..(69): Selenocysteine
  MOD_RES (91)..(91): Selenocysteine
  MOD_RES (108)..(108): Selenocysteine
  MOD_RES (119)..(119): Selenocysteine
  MOD_RES (124)..(124): Selenocysteine
  MOD_RES (298)..(298): Selenocysteine
  MOD_RES (316)..(317): Selenocysteine
  MOD_RES (323)..(324): Selenocysteine
  MOD_RES (328)..(328): Selenocysteine
  MOD_RES (336)..(336): Selenocysteine
  MOD_RES (360)..(360): Selenocysteine
  MOD_RES (365)..(365): Selenocysteine
  MOD_RES (402)..(402): Selenocysteine
  MOD_RES (431)..(431): Selenocysteine
MQESAXEXISNSSMNQNGMSXLSSQLDAGSRDGRSSGDXSSEVSXVELLHLQQQQALQAARQLLLQQQXSGLKSPKSSDKQRPLQELLPEXKLCICGHSSGDGHPHNXFAVPVSVAMMXPQVIXPQQMQQILQQQVLSPQQLQALLQQQQAVMLQQQQLQEFYKKQQEQLHLQLLQQQQQQQQQQQQQQQQQQQQQQQQQQQQQQQQQQQQQQQQHPGKQAKEQQQQQQQQQQLAAQQLVFQQQLLQMQQLQQQQHLLSLQRQGLISIPPGQAALPVQSLPQAGLSPAEIQQLWKEVXGVHSMEDNGIKHGGLDLXXNNSSSXXSSNXSKASPPIXHHSIVNGQSSVLSARRDSSSHEEXGASHXLYGHGVCKWPGCESICEDFGQFLKHLNNEHALDDRSXAQCRVQMQVVQQLEIQLSKERERLQAMMXHLHMRPSEPKPSPKPVSAYCFINSK

SEQ ID NO: 10335 - protein, 229 aa, Homo sapiens
  MOD_RES (1)..(1): Any amino acid
  MOD_RES (121)..(121): Selenocysteine
  MOD_RES (139)..(140): Selenocysteine
  MOD_RES (146)..(147): Selenocysteine
  MOD_RES (151)..(151): Selenocysteine
  MOD_RES (159)..(159): Selenocysteine
  MOD_RES (183)..(183): Selenocysteine
  MOD_RES (188)..(188): Selenocysteine
  MOD_RES (225)..(225): Selenocysteine
XLLQQQQQQQQQQQQQQQQQQQQQQQQQQQQQQQQQQQQQQQQHPGKQAKEQQQQQLAAQQLVFQQQLLQMQQLQQQQHLLSLQRQGLISIPPGQAALPVQSLPQAGLSPAEIQQLWKEVXGVHSMEDNGIKHGGLDLXXNNSSSXXSSNXSKASPPIXHHSIVNGQSSVLSARRDSSSHEEXGASHXLYGHGVCKWPGCESICEDFGQFLKHLNNEHALDDRSXAQCR

SEQ ID NO: 10336 - protein, 454 aa, Homo sapiens
  MOD_RES (44)..(44): Selenocysteine
  MOD_RES (73)..(73): Selenocysteine
  MOD_RES (108)..(108): Selenocysteine
  MOD_RES (115)..(115): Selenocysteine
  MOD_RES (132)..(132): Selenocysteine
  MOD_RES (135)..(136): Selenocysteine
  MOD_RES (138)..(138): Selenocysteine
  MOD_RES (170)..(170): Selenocysteine
  MOD_RES (199)..(199): Selenocysteine
  MOD_RES (205)..(205): Selenocysteine
  MOD_RES (290)..(290): Selenocysteine
  MOD_RES (343)..(343): Selenocysteine
  MOD_RES (364)..(364): Selenocysteine
  MOD_RES (367)..(367): Selenocysteine
  MOD_RES (382)..(382): Selenocysteine
  MOD_RES (391)..(391): Selenocysteine
  MOD_RES (403)..(403): Selenocysteine
  MOD_RES (430)..(430): Selenocysteine
  MOD_RES (451)..(451): Selenocysteine
MPNPRPGKPSAPSLALGPSPGASPSWRAAPKASDLLGARGPGGXFQGRDLRGGAHASSSSLNPMPPSQLQLPXLPLVMVAPSGARLGPLPHLQALLQDRPHFMHQLSXVDAHARXPVLQVHPLESPAMISLXPPXXAXGVFSLKARPGLPPGINVASLEWVSREPALLCXFPNPSAPRKDRSVDRAGKDPRPPIPSPDXLCPPSXLSAVPQSSYPLLANGVCKWPGCEKVFEEPEDFLKHCQADHLLDEKGRAQCLLQREMVQSLEQQLVLEKEKLSAMQAHLAGKMALXKASSVASSDKGSCCIVAAGSQGPVVPAWSGPREAPDSLFAVRRHLWGSHGNSXFPEFLHNMDYFKFHNMRPPFXYAXLIRWAILEAPEKQRXLNEIYHWFXRMFAFFRNHPAXWKNAIRHNLSLHKCFVRVESEKGAVWXVDELEFRKKRSQRPSRCSNPXPGP

SEQ ID NO: 10337 - protein, 431 aa, Homo sapiens
  MOD_RES (44)..(44): Selenocysteine
  MOD_RES (73)..(73): Selenocysteine
  MOD_RES (108)..(108): Selenocysteine
  MOD_RES (115)..(115): Selenocysteine
  MOD_RES (132)..(132): Selenocysteine
  MOD_RES (135)..(136): Selenocysteine
  MOD_RES (138)..(138): Selenocysteine
  MOD_RES (170)..(170): Selenocysteine
  MOD_RES (182)..(182): Selenocysteine
  MOD_RES (267)..(267): Selenocysteine
  MOD_RES (320)..(320): Selenocysteine
  MOD_RES (341)..(341): Selenocysteine
  MOD_RES (344)..(344): Selenocysteine
  MOD_RES (359)..(359): Selenocysteine
  MOD_RES (368)..(368): Selenocysteine
  MOD_RES (380)..(380): Selenocysteine
  MOD_RES (407)..(407): Selenocysteine
  MOD_RES (428)..(428): Selenocysteine
MPNPRPGKPSAPSLALGPSPGASPSWRAAPKASDLLGARGPGGXFQGRDLRGGAHASSSSLNPMPPSQLQLPXLPLVMVAPSGARLGPLPHLQALLQDRPHFMHQLSXVDAHARXPVLQVHPLESPAMISLXPPXXAXGVFSLKARPGLPPGINVASLEWVSREPALLCXFPNPSAPRKDSXLSAVPQSSYPLLANGVCKWPGCEKVFEEPEDFLKHCQADHLLDEKGRAQCLLQREMVQSLEQQLVLEKEKLSAMQAHLAGKMALXKASSVASSDKGSCCIVAAGSQGPVVPAWSGPREAPDSLFAVRRHLWGSHGNSXFPEFLHNMDYFKFHNMRPPFXYAXLIRWAILEAPEKQRXLNEIYHWFXRMFAFFRNHPAXWKNAIRHNLSLHKCFVRVESEKGAVWXVDELEFRKKRSQRPSRCSNPXPGP

SEQ ID NO: 10338 - protein, 396 aa, Homo sapiens
  MOD_RES (44)..(44): Selenocysteine
  MOD_RES (73)..(73): Selenocysteine
  MOD_RES (80)..(80): Selenocysteine
  MOD_RES (97)..(97): Selenocysteine
  MOD_RES (100)..(101): Selenocysteine
  MOD_RES (103)..(103): Selenocysteine
  MOD_RES (135)..(135): Selenocysteine
  MOD_RES (147)..(147): Selenocysteine
  MOD_RES (232)..(232): Selenocysteine
  MOD_RES (285)..(285): Selenocysteine
  MOD_RES (306)..(306): Selenocysteine
  MOD_RES (309)..(309): Selenocysteine
  MOD_RES (324)..(324): Selenocysteine
  MOD_RES (333)..(333): Selenocysteine
  MOD_RES (345)..(345): Selenocysteine
  MOD_RES (372)..(372): Selenocysteine
  MOD_RES (393)..(393): Selenocysteine
MPNPRPGKPSAPSLALGPSPGASPSWRAAPKASDLLGARGPGGXFQGRDLRGGAHASSSSLNPMPPSQLQLSXVDAHARXPVLQVHPLESPAMISLXPPXXAXGVFSLKARPGLPPGINVASLEWVSREPALLCXFPNPSAPRKDSXLSAVPQSSYPLLANGVCKWPGCEKVFEEPEDFLKHCQADHLLDEKGRAQCLLQREMVQSLEQQLVLEKEKLSAMQAHLAGKMALXKASSVASSDKGSCCIVAAGSQGPVVPAWSGPREAPDSLFAVRRHLWGSHGNSXFPEFLHNMDYFKFHNMRPPFXYAXLIRWAILEAPEKQRXLNEIYHWFXRMFAFFRNHPAXWKNAIRHNLSLHKCFVRVESEKGAVWXVDELEFRKKRSQRPSRCSNPXPGP

SEQ ID NO: 10339 - protein, 456 aa, Homo sapiens
  MOD_RES (44)..(44): Selenocysteine
  MOD_RES (73)..(73): Selenocysteine
  MOD_RES (80)..(80): Selenocysteine
  MOD_RES (97)..(97): Selenocysteine
  MOD_RES (100)..(101): Selenocysteine
  MOD_RES (103)..(103): Selenocysteine
  MOD_RES (135)..(135): Selenocysteine
  MOD_RES (147)..(147): Selenocysteine
  MOD_RES (232)..(232): Selenocysteine
  MOD_RES (285)..(285): Selenocysteine
  MOD_RES (306)..(306): Selenocysteine
  MOD_RES (309)..(309): Selenocysteine
  MOD_RES (324)..(324): Selenocysteine
  MOD_RES (333)..(333): Selenocysteine
  MOD_RES (345)..(345): Selenocysteine
  MOD_RES (356)..(356): Selenocysteine
  MOD_RES (432)..(432): Selenocysteine
  MOD_RES (453)..(453): Selenocysteine
MPNPRPGKPSAPSLALGPSPGASPSWRAAPKASDLLGARGPGGXFQGRDLRGGAHASSSSLNPMPPSQLQLSXVDAHARXPVLQVHPLESPAMISLXPPXXAXGVFSLKARPGLPPGINVASLEWVSREPALLCXFPNPSAPRKDSXLSAVPQSSYPLLANGVCKWPGCEKVFEEPEDFLKHCQADHLLDEKGRAQCLLQREMVQSLEQQLVLEKEKLSAMQAHLAGKMALXKASSVASSDKGSCCIVAAGSQGPVVPAWSGPREAPDSLFAVRRHLWGSHGNSXFPEFLHNMDYFKFHNMRPPFXYAXLIRWAILEAPEKQRXLNEIYHWFXRMFAFFRNHPAXWKVSSSEVAVXGMASSAIAAQSGQAWVWAHRHIGEERDVGCWWWLLASEVDAHLLPVPGLPQNAIRHNLSLHKCFVRVESEKGAVWXVDELEFRKKRSQRPSRCSNPXPGP

SEQ ID NO: 10340 - protein, 441 aa, Homo sapiens
  MOD_RES (29)..(29): Selenocysteine
  MOD_RES (58)..(58): Selenocysteine
  MOD_RES (65)..(65): Selenocysteine
  MOD_RES (82)..(82): Selenocysteine
  MOD_RES (85)..(86): Selenocysteine
  MOD_RES (88)..(88): Selenocysteine
  MOD_RES (120)..(120): Selenocysteine
  MOD_RES (132)..(132): Selenocysteine
  MOD_RES (217)..(217): Selenocysteine
  MOD_RES (270)..(270): Selenocysteine
  MOD_RES (291)..(291): Selenocysteine
  MOD_RES (294)..(294): Selenocysteine
  MOD_RES (309)..(309): Selenocysteine
  MOD_RES (318)..(318): Selenocysteine
  MOD_RES (330)..(330): Selenocysteine
  MOD_RES (341)..(341): Selenocysteine
  MOD_RES (417)..(417): Selenocysteine
  MOD_RES (438)..(438): Selenocysteine
MSPISGASPSWRAAPKASDLLGARGPGGXFQGRDLRGGAHASSSSLNPMPPSQLQLSXVDAHARXPVLQVHPLESPAMISLXPPXXAXGVFSLKARPGLPPGINVASLEWVSREPALLCXFPNPSAPRKDSXLSAVPQSSYPLLANGVCKWPGCEKVFEEPEDFLKHCQADHLLDEKGRAQCLLQREMVQSLEQQLVLEKEKLSAMQAHLAGKMALXKASSVASSDKGSCCIVAAGSQGPVVPAWSGPREAPDSLFAVRRHLWGSHGNSXFPEFLHNMDYFKFHNMRPPFXYAXLIRWAILEAPEKQRXLNEIYHWFXRMFAFFRNHPAXWKVSSSEVAVXGMASSAIAAQSGQAWVWAHRHIGEERDVGCWWWLLASEVDAHLLPVPGLPQNAIRHNLSLHKCFVRVESEKGAVWXVDELEFRKKRSQRPSRCSNPXPGP

SEQ ID NO: 10341 - protein, 87 aa, Homo sapiens
  MOD_RES (19)..(19): Selenocysteine
  MOD_RES (39)..(39): Selenocysteine
  MOD_RES (85)..(85): Selenocysteine
MEGELGPALSRGEAYGHHXSSYQLLGNAQKLPFPPWPDXALQVARQFLLQQASGLSSPGNNDSKQSASAVQVPVSVAMMSPQMLXPQ

SEQ ID NO: 10342 - protein, 678 aa, Homo sapiens
  MOD_RES (9)..(9): Selenocysteine
  MOD_RES (35)..(35): Selenocysteine
  MOD_RES (37)..(38): Selenocysteine
  MOD_RES (42)..(42): Selenocysteine
  MOD_RES (47)..(48): Selenocysteine
  MOD_RES (114)..(114): Selenocysteine
  MOD_RES (157)..(157): Selenocysteine
  MOD_RES (214)..(214): Selenocysteine
  MOD_RES (223)..(223): Selenocysteine
  MOD_RES (251)..(251): Selenocysteine
  MOD_RES (253)..(253): Selenocysteine
  MOD_RES (256)..(256): Selenocysteine
  MOD_RES (258)..(258): Selenocysteine
  MOD_RES (274)..(274): Selenocysteine
  MOD_RES (281)..(281): Selenocysteine
  MOD_RES (284)..(284): Selenocysteine
  MOD_RES (295)..(295): Selenocysteine
  MOD_RES (314)..(314): Selenocysteine
  MOD_RES (328)..(328): Selenocysteine
  MOD_RES (337)..(337): Selenocysteine
  MOD_RES (395)..(395): Selenocysteine
  MOD_RES (411)..(411): Selenocysteine
  MOD_RES (418)..(418): Selenocysteine
  MOD_RES (469)..(469): Selenocysteine
  MOD_RES (481)..(481): Selenocysteine
  MOD_RES (487)..(487): Selenocysteine
  MOD_RES (496)..(496): Selenocysteine
  MOD_RES (506)..(506): Selenocysteine
  MOD_RES (508)..(508): Selenocysteine
  MOD_RES (535)..(535): Selenocysteine
  MOD_RES (550)..(550): Selenocysteine
  MOD_RES (554)..(554): Selenocysteine
MMVESASEXIRSAPSGQNGVGSLSGQADGSSGGAXGXXASGXGREVXXGADSNGEMSPAELLHFQQQQALQVARQFLLQQASGLSSPGNNDSKQSASAVQVPVSVAMMSPQMLXPQQMQQILSPPQLQALLQQQQALMLQQEYYKKQQEQLHLQLLXQQQAGKPQPKEALGNKQLAFQQQLLQMQQLQQQHLLNLQRQGLVSLQPNQASGPLQXLPQAAVCPXDLPQLWKGEGAPGQPAEDSVKQEGLDLXGXAAXAXSFAAPPKVSPPLSHHXLPNGQPXVLXSRRDSSSHEEXPGSHPLYGHGECKWPGCEXLCEDLGQFIKHLNXEHALDDRSXAQCRVQMQVVQQLEIQLAKESERLQAMMAHLHMRPSEPKPFSQPLNPVPGSSSFSKVXVSAADSFPDGLVHPPXSAAAPVXPLRPPGLGSASLHGGGPARRRSSDKFCSPISSELAQNHEFYKNADVRPPFXYASLIRQAILEXPDRQLXLNEIYNWFXRMFAYFRRNXAXWKNAVRHNLSLHKCFVRVENVKGAVWXVDEREYQKRRPPKMXGSPXLVKNMISGLSYGALNASYQAALAESSFPLLNSPGMLNPGSASSLLPLSHDDVGAPVEPLPSNGSSSPPRLSPPQYSHQVQVKEEPAEAEEDRQPGPPLGAPNPSASGPPEDRDLEEELPGEELS

SEQ ID NO: 10343 - protein, 668 aa, Homo sapiens
  MOD_RES (9)..(9): Selenocysteine
  MOD_RES (35)..(35): Selenocysteine
  MOD_RES (37)..(38): Selenocysteine
  MOD_RES (42)..(42): Selenocysteine
  MOD_RES (47)..(48): Selenocysteine
  MOD_RES (114)..(114): Selenocysteine
  MOD_RES (159)..(159): Selenocysteine
  MOD_RES (216)..(216): Selenocysteine
  MOD_RES (225)..(225): Selenocysteine
  MOD_RES (253)..(253): Selenocysteine
  MOD_RES (255)..(255): Selenocysteine
  MOD_RES (258)..(258): Selenocysteine
  MOD_RES (260)..(260): Selenocysteine
  MOD_RES (276)..(276): Selenocysteine
  MOD_RES (283)..(283): Selenocysteine
  MOD_RES (286)..(286): Selenocysteine
  MOD_RES (297)..(297): Selenocysteine
  MOD_RES (316)..(316): Selenocysteine
  MOD_RES (330)..(330): Selenocysteine
  MOD_RES (339)..(339): Selenocysteine
  MOD_RES (385)..(385): Selenocysteine
  MOD_RES (401)..(401): Selenocysteine
  MOD_RES (408)..(408): Selenocysteine
  MOD_RES (459)..(459): Selenocysteine
  MOD_RES (471)..(471): Selenocysteine
  MOD_RES (477)..(477): Selenocysteine
  MOD_RES (486)..(486): Selenocysteine
  MOD_RES (496)..(496): Selenocysteine
  MOD_RES (498)..(498): Selenocysteine
  MOD_RES (525)..(525): Selenocysteine
  MOD_RES (540)..(540): Selenocysteine
  MOD_RES (544)..(544): Selenocysteine
MMVESASEXIRSAPSGQNGVGSLSGQADGSSGGAXGXXASGXGREVXXGADSNGEMSPAELLHFQQQQALQVARQFLLQQASGLSSPGNNDSKQSASAVQVPVSVAMMSPQMLXPQQMQQILSPPQLQALLQQQQALMLQQLQEYYKKQQEQLHLQLLXQQQAGKPQPKEALGNKQLAFQQQLLQMQQLQQQHLLNLQRQGLVSLQPNQASGPLQXLPQAAVCPXDLPQLWKGEGAPGQPAEDSVKQEGLDLXGXAAXAXSFAAPPKVSPPLSHHXLPNGQPXVLXSRRDSSSHEEXPGSHPLYGHGECKWPGCEXLCEDLGQFIKHLNXEHALDDRSXAQCRVQMQVVQQLEIQLAKESERLQAMMAHLHMRPSEPKPFSQPVXVSAADSFPDGLVHPPXSAAAPVXPLRPPGLGSASLHGGGPARRRSSDKFCSPISSELAQNHEFYKNADVRPPFXYASLIRQAILEXPDRQLXLNEIYNWFXRMFAYFRRNXAXWKNAVRHNLSLHKCFVRVENVKGAVWXVDEREYQKRRPPKMXGSPXLVKNMISGLSYGALNASYQAALAESSFPLLNSPGMLNPGSASSLLPLSHDDVGAPVEPLPSNGSSSPPRLSPPQYSHQVQVKEEPAEAEEDRQPGPPLGAPNPSASGPPEDRDLEEELPGEELS

SEQ ID NO: 10344 - protein, 680 aa, Homo sapiens
  MOD_RES (9)..(9): Selenocysteine
  MOD_RES (35)..(35): Selenocysteine
  MOD_RES (37)..(38): Selenocysteine
  MOD_RES (42)..(42): Selenocysteine
  MOD_RES (47)..(48): Selenocysteine
  MOD_RES (114)..(114): Selenocysteine
  MOD_RES (159)..(159): Selenocysteine
  MOD_RES (216)..(216): Selenocysteine
  MOD_RES (225)..(225): Selenocysteine
  MOD_RES (253)..(253): Selenocysteine
  MOD_RES (255)..(255): Selenocysteine
  MOD_RES (258)..(258): Selenocysteine
  MOD_RES (260)..(260): Selenocysteine
  MOD_RES (276)..(276): Selenocysteine
  MOD_RES (283)..(283): Selenocysteine
  MOD_RES (286)..(286): Selenocysteine
  MOD_RES (297)..(297): Selenocysteine
  MOD_RES (316)..(316): Selenocysteine
  MOD_RES (330)..(330): Selenocysteine
  MOD_RES (339)..(339): Selenocysteine
  MOD_RES (397)..(397): Selenocysteine
  MOD_RES (413)..(413): Selenocysteine
  MOD_RES (420)..(420): Selenocysteine
  MOD_RES (471)..(471): Selenocysteine
  MOD_RES (483)..(483): Selenocysteine
  MOD_RES (489)..(489): Selenocysteine
  MOD_RES (498)..(498): Selenocysteine
  MOD_RES (508)..(508): Selenocysteine
  MOD_RES (510)..(510): Selenocysteine
  MOD_RES (537)..(537): Selenocysteine
  MOD_RES (552)..(552): Selenocysteine
  MOD_RES (556)..(556): Selenocysteine
MMVESASEXIRSAPSGQNGVGSLSGQADGSSGGAXGXXASGXGREVXXGADSNGEMSPAELLHFQQQQALQVARQFLLQQASGLSSPGNNDSKQSASAVQVPVSVAMMSPQMLXPQQMQQILSPPQLQALLQQQQALMLQQLQEYYKKQQEQLHLQLLXQQQAGKPQPKEALGNKQLAFQQQLLQMQQLQQQHLLNLQRQGLVSLQPNQASGPLQXLPQAAVCPXDLPQLWKGEGAPGQPAEDSVKQEGLDLXGXAAXAXSFAAPPKVSPPLSHHXLPNGQPXVLXSRRDSSSHEEXPGSHPLYGHGECKWPGCEXLCEDLGQFIKHLNXEHALDDRSXAQCRVQMQVVQQLEIQLAKESERLQAMMAHLHMRPSEPKPFSQPLNPVPGSSSFSKVXVSAADSFPDGLVHPPXSAAAPVXPLRPPGLGSASLHGGGPARRRSSDKFCSPISSELAQNHEFYKNADVRPPFXYASLIRQAILEXPDRQLXLNEIYNWFXRMFAYFRRNXAXWKNAVRHNLSLHKCFVRVENVKGAVWXVDEREYQKRRPPKMXGSPXLVKNMISGLSYGALNASYQAALAESSFPLLNSPGMLNPGSASSLLPLSHDDVGAPVEPLPSNGSSSPPRLSPPQYSHQVQVKEEPAEAEEDRQPGPPLGAPNPSASGPPEDRDLEEELPGEELS

SEQ ID NO: 10345 - protein, 667 aa, Homo sapiens
  MOD_RES (9)..(9): Selenocysteine
  MOD_RES (35)..(35): Selenocysteine
  MOD_RES (37)..(38): Selenocysteine
  MOD_RES (42)..(42): Selenocysteine
  MOD_RES (47)..(48): Selenocysteine
  MOD_RES (114)..(114): Selenocysteine
  MOD_RES (159)..(159): Selenocysteine
  MOD_RES (216)..(216): Selenocysteine
  MOD_RES (224)..(224): Selenocysteine
  MOD_RES (252)..(252): Selenocysteine
  MOD_RES (254)..(254): Selenocysteine
  MOD_RES (257)..(257): Selenocysteine
  MOD_RES (259)..(259): Selenocysteine
  MOD_RES (275)..(275): Selenocysteine
  MOD_RES (282)..(282): Selenocysteine
  MOD_RES (285)..(285): Selenocysteine
  MOD_RES (296)..(296): Selenocysteine
  MOD_RES (315)..(315): Selenocysteine
  MOD_RES (329)..(329): Selenocysteine
  MOD_RES (338)..(338): Selenocysteine
  MOD_RES (384)..(384): Selenocysteine
  MOD_RES (400)..(400): Selenocysteine
  MOD_RES (407)..(407): Selenocysteine
  MOD_RES (458)..(458): Selenocysteine
  MOD_RES (470)..(470): Selenocysteine
  MOD_RES (476)..(476): Selenocysteine
  MOD_RES (485)..(485): Selenocysteine
  MOD_RES (495)..(495): Selenocysteine
  MOD_RES (497)..(497): Selenocysteine
  MOD_RES (524)..(524): Selenocysteine
  MOD_RES (539)..(539): Selenocysteine
  MOD_RES (543)..(543): Selenocysteine
MMVESASEXIRSAPSGQNGVGSLSGQADGSSGGAXGXXASGXGREVXXGADSNGEMSPAELLHFQQQQALQVARQFLLQQASGLSSPGNNDSKQSASAVQVPVSVAMMSPQMLXPQQMQQILSPPQLQALLQQQQALMLQQLQEYYKKQQEQLHLQLLXQQQAGKPQPKEALGNKQLAFQQQLLQMQQLQQQHLLNLQRQGLVSLQPNQASGPLQXLPQAVCPXDLPQLWKGEGAPGQPAEDSVKQEGLDLXGXAAXAXSFAAPPKVSPPLSHHXLPNGQPXVLXSRRDSSSHEEXPGSHPLYGHGECKWPGCEXLCEDLGQFIKHLNXEHALDDRSXAQCRVQMQVVQQLEIQLAKESERLQAMMAHLHMRPSEPKPFSQPVXVSAADSFPDGLVHPPXSAAAPVXPLRPPGLGSASLHGGGPARRRSSDKFCSPISSELAQNHEFYKNADVRPPFXYASLIRQAILEXPDRQLXLNEIYNWFXRMFAYFRRNXAXWKNAVRHNLSLHKCFVRVENVKGAVWXVDEREYQKRRPPKMXGSPXLVKNMISGLSYGALNASYQAALAESSFPLLNSPGMLNPGSASSLLPLSHDDVGAPVEPLPSNGSSSPPRLSPPQYSHQVQVKEEPAEAEEDRQPGPPLGAPNPSASGPPEDRDLEEELPGEELS

SEQ ID NO: 10346 - protein, 403 aa, Homo sapiens
  MOD_RES (60)..(60): Selenocysteine
  MOD_RES (115)..(115): Selenocysteine
  MOD_RES (141)..(141): Selenocysteine
  MOD_RES (161)..(161): Selenocysteine
  MOD_RES (203)..(203): Selenocysteine
  MOD_RES (289)..(289): Selenocysteine
  MOD_RES (293)..(294): Selenocysteine
  MOD_RES (344)..(344): Selenocysteine
  MOD_RES (400)..(400): Selenocysteine
MKLEVFVPRAAHGDKQGSDLEGAGGSDAPSPLSAAGDDSLGSDGDCAANSPAAGGGARDXQGDGEQSAGGGPGAEEAIPAAAAAAVVAEGAEAGAAGPGAGGAGSGEGARSKPYXRRPKPPYSYIALIAMAIRDSAGGRLXLAEINEYLMGKFPFFRGSYXGWRNSVRHNLSLNDCFVKVLRDPSRPWGKDNYWMLNPNSEYXFADGVFRRRRKRLSHRAPVPAPGLRPEEAPGLPAAPPPAPAAPASPRMRSPARQEERASPAGKFSSSFAIDSILRKPFRSRRLRDXAPGXXLQWGAAPCPPLPAFPALLPAAPCRALLPLCAYGAGEPARLGAREAEVPPXAPPLLLAPLPAAAPAKPLRGPAAGGAHLYCPLRLPAALQAASVRRPGPHLPYPVEXLLA

SEQ ID NO: 10347 - protein, 206 aa, Homo sapiens
  MOD_RES (10)..(11): Selenocysteine
  MOD_RES (80)..(80): Selenocysteine
  MOD_RES (82)..(82): Selenocysteine
  MOD_RES (126)..(126): Selenocysteine
  MOD_RES (174)..(174): Selenocysteine
MGNELFLAFXXSHLPLAEQKLARYKLRIVKPPKLPLEKKPNPDKDGPDYEPNLWMWVNPNIVYPPGKLEVSGRRKREDLXSXLPSSQPPQKEEDASCSEAAGVESLSQSSSKRSPPRKRFAFSPSXWEGPPPESEASASQQPGGEALVPAPSQLLPPNCPGIKKQFPLWPQRAXDLQFHSELLGLILLCSCCGPSPGPSEGGRVQL

SEQ ID NO: 10348 - protein, 292 aa, Homo sapiens
  MOD_RES (10)..(11): Selenocysteine
  MOD_RES (80)..(80): Selenocysteine
  MOD_RES (82)..(82): Selenocysteine
  MOD_RES (126)..(126): Selenocysteine
  MOD_RES (130)..(130): Selenocysteine
  MOD_RES (203)..(203): Selenocysteine
  MOD_RES (212)..(212): Selenocysteine
  MOD_RES (220)..(220): Selenocysteine
  MOD_RES (244)..(244): Selenocysteine
  MOD_RES (254)..(254): Selenocysteine
  MOD_RES (271)..(271): Selenocysteine
MGNELFLAFXXSHLPLAEQKLARYKLRIVKPPKLPLEKKPNPDKDGPDYEPNLWMWVNPNIVYPPGKLEVSGRRKREDLXSXLPSSQPPQKEEDASCSEAAGVESLSQSSSKRSPPRKRFAFSPSXWELXEEEEAEDQEDSSSMALPSPHKRAPLQSRRLRQASSQAGRLWSRPPLNYFHLIALALRNSSPCGLNVQQIYSFXRKHFPFFRXAPEGWKNXVRHNLCFRDSFEKVPVSMQGGASXRPRSCLWKLXEEGHRRFAEEARALASXRLESIQQCMSQPDVMPFLFDL

SEQ ID NO: 10349 - protein, 136 aa, Homo sapiens
  MOD_RES (1)..(1): Any amino acid
  MOD_RES (61)..(61): Selenocysteine
  MOD_RES (63)..(63): Selenocysteine
  MOD_RES (107)..(107): Selenocysteine
XVARYKLRIVKPPKLPLEKKPNPDKDGPDYEPNLWMWVNPNIVYPPGKLEVSGRRKREDLXSXLPSSQPPQKEEDASCSEAAGVESLSQSSSKRSPPRKRFAFSPSXWEKALPLFPDGPGRLEEYCPSQSLFSRQL

SEQ ID NO: 10350 - protein, 311 aa, Homo sapiens
  MOD_RES (35)..(36): Selenocysteine
  MOD_RES (105)..(105): Selenocysteine
  MOD_RES (155)..(155): Selenocysteine
  MOD_RES (222)..(222): Selenocysteine
  MOD_RES (231)..(231): Selenocysteine
  MOD_RES (239)..(239): Selenocysteine
  MOD_RES (273)..(273): Selenocysteine
  MOD_RES (284)..(284): Selenocysteine
  MOD_RES (306)..(306): Selenocysteine
MDLKLKDCEFWYSLHGQVPGLLDWDMRNELFLPCXXDQCSLAEQILAKYRVGVMKPPEMPQKRRPSPDGDGPPCEPNLWMWVDPNILCPLGSQEAPKPSGKEDLXNISPFPQPPQKDEGSNCSEDKVVESLPSSSSEQSPLQKQGIHSPSDFELXEEEAEEPDDNSLQSPEMKCYQSQKLWQINNQEKSWQRPPLNCSHLIALALRNNPHCGLSVQEIYNFXRQHFPFFWXAPDGWKSXIHYNLCFLDSFEKVPDSLKDEDNARPRSCLWKLXKEGHRRFWEEXRVLAFAQRERIQECMSQPELLXSLFDL

SEQ ID NO: 10351 - protein, 330 aa, Homo sapiens
  MOD_RES (13)..(14): Selenocysteine
  MOD_RES (17)..(17): Selenocysteine
  MOD_RES (40)..(40): Selenocysteine
  MOD_RES (93)..(93): Selenocysteine
  MOD_RES (115)..(115): Selenocysteine
  MOD_RES (118)..(118): Selenocysteine
  MOD_RES (123)..(123): Selenocysteine
  MOD_RES (137)..(137): Selenocysteine
  MOD_RES (147)..(148): Selenocysteine
  MOD_RES (181)..(182): Selenocysteine
  MOD_RES (197)..(197): Selenocysteine
  MOD_RES (210)..(210): Selenocysteine
  MOD_RES (235)..(235): Selenocysteine
  MOD_RES (280)..(280): Selenocysteine
  MOD_RES (293)..(293): Selenocysteine
  MOD_RES (317)..(317): Selenocysteine
  MOD_RES (323)..(323): Selenocysteine
MQQQPLPGPGAPXXEPXKPPYSYIALIAMAIQSSPGQRAXLSGIYRYIMGRFAFYRHNRPGWQNSIRHNLSLNECFVKVPRDDRKPGKGSYWXLDPDCHDMFEHGSFLRRRRRFXRQXGAEGXRGPAKARRGPLRAXSQDPGVPNAXXGRQCSFPPELPDPKGLSFGGLVGAMPASMCPAXXDGRPRPPMEPKEISXPKPACPGELPVAXSSSSCPAFGFPAGFSEAESFNKAPXPVLSPESGIGSSYQCRLQALNFCMGADPGLEHLLASAAPSPAPPXPPGSLRAPLPLPXDHKEPWVAGGFPVQGGSGYPLGLXPCLYRXPGMFFFE

SEQ ID NO: 10352 - protein, 40 aa, Homo sapiens
  MOD_RES (3)..(3): Selenocysteine
  MOD_RES (9)..(9): Selenocysteine
  MOD_RES (15)..(15): Selenocysteine
  MOD_RES (29)..(29): Selenocysteine
  MOD_RES (36)..(36): Selenocysteine
MEXNSSLPXNISGGXPAVSAGYLFLDIIXYLVFAVXFVLG

SEQ ID NO: 10353 - protein, 191 aa, Homo sapiens
  MOD_RES (3)..(3): Selenocysteine
  MOD_RES (9)..(9): Selenocysteine
  MOD_RES (15)..(15): Selenocysteine
  MOD_RES (29)..(29): Selenocysteine
  MOD_RES (36)..(36): Selenocysteine
  MOD_RES (56)..(56): Selenocysteine
  MOD_RES (58)..(58): Selenocysteine
  MOD_RES (60)..(61): Selenocysteine
  MOD_RES (75)..(75): Selenocysteine
  MOD_RES (77)..(77): Selenocysteine
  MOD_RES (103)..(103): Selenocysteine
  MOD_RES (133)..(133): Selenocysteine
  MOD_RES (138)..(138): Selenocysteine
  MOD_RES (157)..(157): Selenocysteine
  MOD_RES (165)..(166): Selenocysteine
  MOD_RES (171)..(171): Selenocysteine
  MOD_RES (173)..(173): Selenocysteine
  MOD_RES (177)..(177): Selenocysteine
  MOD_RES (184)..(184): Selenocysteine
MEXNSSLPXNISGGXPAVSAGYLFLDIIXYLVFAVXFVLGVLGNGLVIWVAGFRMXHXVXXISYLNLAVADFCFXSXLPFFMVRKAMGGHWPFGWFLCKFVFXIVDINLFGSVFLIALIALDRCVCVLHPVWXQNHRXVSLAKKVIIGPWVMALLLXLPVIIRVXXVPGKXGXVACXFNFSPWXNDPKERI

SEQ ID NO: 10354 - protein, 350 aa, Homo sapiens
  MOD_RES (3)..(3): Selenocysteine
  MOD_RES (9)..(9): Selenocysteine
  MOD_RES (15)..(15): Selenocysteine
  MOD_RES (29)..(29): Selenocysteine
  MOD_RES (36)..(36): Selenocysteine
  MOD_RES (56)..(56): Selenocysteine
  MOD_RES (58)..(58): Selenocysteine
  MOD_RES (60)..(61): Selenocysteine
  MOD_RES (75)..(75): Selenocysteine
  MOD_RES (77)..(77): Selenocysteine
  MOD_RES (103)..(103): Selenocysteine
  MOD_RES (133)..(133): Selenocysteine
  MOD_RES (138)..(138): Selenocysteine
  MOD_RES (157)..(157): Selenocysteine
  MOD_RES (165)..(166): Selenocysteine
  MOD_RES (171)..(171): Selenocysteine
  MOD_RES (173)..(173): Selenocysteine
  MOD_RES (177)..(177): Selenocysteine
  MOD_RES (184)..(184): Selenocysteine
  MOD_RES (199)..(199): Selenocysteine
  MOD_RES (226)..(226): Selenocysteine
  MOD_RES (265)..(265): Selenocysteine
  MOD_RES (286)..(286): Selenocysteine
  MOD_RES (325)..(325): Selenocysteine
  MOD_RES (329)..(329): Selenocysteine
  MOD_RES (331)..(331): Selenocysteine
  MOD_RES (334)..(334): Selenocysteine
  MOD_RES (336)..(336): Selenocysteine
  MOD_RES (339)..(339): Selenocysteine
MEXNSSLPXNISGGXPAVSAGYLFLDIIXYLVFAVXFVLGVLGNGLVIWVAGFRMXHXVXXISYLNLAVADFCFXSXLPFFMVRKAMGGHWPFGWFLCKFVFXIVDINLFGSVFLIALIALDRCVCVLHPVWXQNHRXVSLAKKVIIGPWVMALLLXLPVIIRVXXVPGKXGXVACXFNFSPWXNDPKERINVAVAMLXVRGIIRFIIGFSAPMSIVAVSYGLIAXKIHKQGLIKSSRPLRVLSFVAAAFFLCWSPYQVVALIAXVRIRELLQGMYKEIGIAVDVXSALAFFNSCLNPMLYVFMGQDFRERLIHALPASLERALXEDSXQXSDXAXNSXLPSAEVELQAK

SEQ ID NO: 10355 - protein, 88 aa, Homo sapiens
  MOD_RES (3)..(3): Selenocysteine
  MOD_RES (7)..(7): Selenocysteine
  MOD_RES (23)..(23): Selenocysteine
  MOD_RES (36)..(36): Selenocysteine
  MOD_RES (56)..(56): Selenocysteine
  MOD_RES (58)..(58): Selenocysteine
  MOD_RES (60)..(61): Selenocysteine
  MOD_RES (75)..(75): Selenocysteine
  MOD_RES (77)..(77): Selenocysteine
MEXNFSXPLNEYEEVSYESAGYXVLRILPLVVLGVXFVLGVLGNGLVIWVAGFRMXRXVXXICYLNLALADFSFXAXLPFLIVSMAMG

SEQ ID NO: 10356 - protein, 124 aa, Homo sapiens
  MOD_RES (3)..(3): Selenocysteine
  MOD_RES (7)..(7): Selenocysteine
  MOD_RES (23)..(23): Selenocysteine
  MOD_RES (36)..(36): Selenocysteine
  MOD_RES (56)..(56): Selenocysteine
  MOD_RES (58)..(58): Selenocysteine
  MOD_RES (60)..(61): Selenocysteine
  MOD_RES (75)..(75): Selenocysteine
  MOD_RES (77)..(77): Selenocysteine
MEXNFSXPLNEYEEVSYESAGYXVLRILPLVVLGVXFVLGVLGNGLVIWVAGFRMXRXVXXICYLNLALADFSFXAXLPFLIVSMAMGEKWPFGWFLCKLIHIVVDINLFGSVFLIGFIALDRC

SEQ ID NO: 10357 - protein, 137 aa, Homo sapiens
  MOD_RES (3)..(3): Selenocysteine
  MOD_RES (7)..(7): Selenocysteine
  MOD_RES (23)..(23): Selenocysteine
  MOD_RES (36)..(36): Selenocysteine
  MOD_RES (56)..(56): Selenocysteine
  MOD_RES (58)..(58): Selenocysteine
  MOD_RES (60)..(61): Selenocysteine
  MOD_RES (75)..(75): Selenocysteine
  MOD_RES (77)..(77): Selenocysteine
MEXNFSXPLNEYEEVSYESAGYXVLRILPLVVLGVXFVLGVLGNGLVIWVAGFRMXRXVXXICYLNLALADFSFXAXLPFLIVSMAMGEKWPFGWFLCKLIHIVVDINLFGSVFLIGFIALDRCICVLHPVWAQNHR

SEQ ID NO: 10358 - protein, 351 aa, Homo sapiens
  MOD_RES (3)..(3): Selenocysteine
  MOD_RES (7)..(7): Selenocysteine
  MOD_RES (23)..(23): Selenocysteine
  MOD_RES (36)..(36): Selenocysteine
  MOD_RES (56)..(56): Selenocysteine
  MOD_RES (58)..(58): Selenocysteine
  MOD_RES (60)..(61): Selenocysteine
  MOD_RES (75)..(75): Selenocysteine
  MOD_RES (77)..(77): Selenocysteine
  MOD_RES (138)..(138): Selenocysteine
  MOD_RES (157)..(157): Selenocysteine
  MOD_RES (165)..(166): Selenocysteine
  MOD_RES (168)..(168): Selenocysteine
  MOD_RES (174)..(174): Selenocysteine
  MOD_RES (177)..(177): Selenocysteine
  MOD_RES (186)..(186): Selenocysteine
  MOD_RES (196)..(196): Selenocysteine
  MOD_RES (199)..(199): Selenocysteine
  MOD_RES (244)..(244): Selenocysteine
  MOD_RES (265)..(265): Selenocysteine
  MOD_RES (287)..(287): Selenocysteine
  MOD_RES (319)..(319): Selenocysteine
  MOD_RES (332)..(332): Selenocysteine
  MOD_RES (335)..(335): Selenocysteine
  MOD_RES (346)..(346): Selenocysteine
MEXNFSXPLNEYEEVSYESAGYXVLRILPLVVLGVXFVLGVLGNGLVIWVAGFRMXRXVXXICYLNLALADFSFXAXLPFLIVSMAMGEKWPFGWFLCKLIHIVVDINLFGSVFLIGFIALDRCICVLHPVWAQNHRXVSLAMKVIVGPWILALVLXLPVFLFLXXVXIPNGDXYCXFNFASWGGXPEERLKVAIXMLXARGIIRFVIGFSLPMSIVAICYGLIAAKIHKKGMIKSSRPLRVLXAVVASFFICWFPFQLVALLGXVWLKEMLFYGKYKIIDILVNPXSSLAFFNSCLNPMLYVFVGQDFRERLIHSLPXSLERALSEDSAPXNDXAANSASPPAEXELQAM

SEQ ID NO: 10359 - protein, 353 aa, Homo sapiens
  MOD_RES (3)..(3): Selenocysteine
  MOD_RES (12)..(12): Selenocysteine
  MOD_RES (23)..(23): Selenocysteine
  MOD_RES (36)..(36): Selenocysteine
  MOD_RES (56)..(56): Selenocysteine
  MOD_RES (58)..(58): Selenocysteine
  MOD_RES (61)..(61): Selenocysteine
  MOD_RES (117)..(117): Selenocysteine
  MOD_RES (138)..(138): Selenocysteine
  MOD_RES (147)..(147): Selenocysteine
  MOD_RES (153)..(153): Selenocysteine
  MOD_RES (157)..(157): Selenocysteine
  MOD_RES (165)..(166): Selenocysteine
  MOD_RES (169)..(170): Selenocysteine
  MOD_RES (174)..(174): Selenocysteine
  MOD_RES (186)..(186): Selenocysteine
  MOD_RES (196)..(196): Selenocysteine
  MOD_RES (218)..(218): Selenocysteine
  MOD_RES (287)..(287): Selenocysteine
  MOD_RES (319)..(319): Selenocysteine
  MOD_RES (326)..(326): Selenocysteine
  MOD_RES (334)..(334): Selenocysteine
  MOD_RES (337)..(337): Selenocysteine
  MOD_RES (339)..(340): Selenocysteine
  MOD_RES (348)..(348): Selenocysteine
MEXNFSIPLNEXEEVLPEPAGHXVLWIFSLLVHGVXFVFGVLGNGLVIWVAGFRMXRXVNXICYLNLALADFSFSAILPFRMVSVAMREKWPFGSFLCKLVHVMIDINLFVSVYLIXIIALDRCICVLHPAWAQNHRXMSLAKRVMXGLWIFXIVLXLPNFIFWXXISXXNGDXYCIFNFAFWGDXAVERLNVFIXMAKVFLILHFIIGFSVPMSIIXVCYGIIAAKIHRNHMIKSSRPLRVFAAVVASFFICWFPYELIGILMAVWLKEMLLNGKYKIILVLINPXSSLAFFNSCLNPILYVFMGRNFQERLIRSLPXSLERALXEVPDSAQXSNXDXXSASPPEEXELQAM

SEQ ID NO: 10360 - protein, 279 aa, Homo sapiens
  MOD_RES (50)..(50): Selenocysteine
  MOD_RES (102)..(102): Selenocysteine
  MOD_RES (135)..(135): Selenocysteine
  MOD_RES (192)..(192): Selenocysteine
  MOD_RES (194)..(194): Selenocysteine
  MOD_RES (270)..(270): Selenocysteine
MPCRREEEEEAGEEAEGEEEEEDSFLLLQQSVALGSSGEVDRLVAQIGEXLQLDAAQHSPASPCGPPGAPLRAPGPLAAAVPADKARSPAVPLLLPPALAEXVGPAPPGVLRCALGDRGRVRGRAAPYCVAELAXGPSALSPLPPQADLDGPPGAGKQGIPQPLSGPCRRGWLRGAAASRRLQQRRGSQPEXRXGDDDPHRLLQQLVLSGNLIKEAVRRLHSRRLQLRAKLPQRPLLGPLSAPVHEPPSPRSPRAACSDPGASGRAQLRXGDGVLVPGS

SEQ ID NO: 10361 - protein, 233 aa, Homo sapiens
  MOD_RES (33)..(33): Selenocysteine
  MOD_RES (50)..(50): Selenocysteine
  MOD_RES (102)..(102): Selenocysteine
  MOD_RES (154)..(154): Selenocysteine
  MOD_RES (164)..(164): Selenocysteine
  MOD_RES (206)..(206): Selenocysteine
MPCRREEEEEAGEEAEGEEEEDDSFLLLQQSVXLGSSGEVDRLVAQIGEXLQLDAAQDSPASPCAPPGVPLRAPGPLAAAVPADKARPPAVPLLLPPASAEXVGPAPSGALRCALGDRGRVRGRAAPYCVAEVAAGPSALPGPCRRGWLRDAVXSRRLQQRRWXQAGARAGDDDPHRLLQQLVLSGNLIKEAVRRLQRAVAAVAAXGPASAPGPGGGRSGPDRIALQPSGSLL

SEQ ID NO: 10362 - protein, 505 aa, Homo sapiens
  MOD_RES (21)..(21): Selenocysteine
  MOD_RES (27)..(27): Selenocysteine
  MOD_RES (57)..(57): Selenocysteine
  MOD_RES (74)..(74): Selenocysteine
  MOD_RES (137)..(137): Selenocysteine
  MOD_RES (178)..(178): Selenocysteine
  MOD_RES (185)..(185): Selenocysteine
  MOD_RES (194)..(194): Selenocysteine
  MOD_RES (196)..(196): Selenocysteine
  MOD_RES (223)..(223): Selenocysteine
  MOD_RES (256)..(257): Selenocysteine
  MOD_RES (263)..(263): Selenocysteine
  MOD_RES (297)..(297): Selenocysteine
  MOD_RES (306)..(306): Selenocysteine
  MOD_RES (322)..(322): Selenocysteine
  MOD_RES (329)..(329): Selenocysteine
  MOD_RES (400)..(400): Selenocysteine
  MOD_RES (428)..(428): Selenocysteine
  MOD_RES (438)..(438): Selenocysteine
  MOD_RES (479)..(479): Selenocysteine
  MOD_RES (482)..(482): Selenocysteine
  MOD_RES (493)..(493): Selenocysteine
MSNICQRLWEYLEPYLPCLSXEADKSXVIENPGALCSPQSQRHGHYFVALFDYQARXAEDLSFRAGDKLQVLDXLHEGWWFARHLEKRRDGSSQQLQGYIPSNYVAEDRSLQAEPWFFGAIGRSDAEKQLLYSENKXGSFLIRESESQKGEFSLSVLDGAVVKHYRIKRLDEGGFFLXRRRIFSXLNEFVSHYXKXSDGLCVKLGKPCLKIQVPAPFDLSYKXVDQWEIDRNSIQLLKRLGSGQFGEVWEGLWNNXXPVAVKXLKPGSMDPNDFLREAQIMKNLRHPKLIQLYAVCXLEDPIYIIXELMRHGSLQEYLQNDXGSKIHLXQQVDMAAQVASGMAYLESRNYIHRDLAARNVLVGEHNIYKVADFGLARVFKVDNEDIYESRHEIKLPVKWXAPEAIRSNKFSIKSDVWSFGILLYEIIXYGKMPYSGMXGAQVIQMLAQNYRLPQPSNCPQQFYNIMLECWNAEPKERPXFEXLRWKLEDYFEXDSSYSDANNFIR

SEQ ID NO: 10363 - protein, 699 aa, Homo sapiens
  MOD_RES (64)..(64): Selenocysteine
  MOD_RES (79)..(79): Selenocysteine
  MOD_RES (84)..(84): Selenocysteine
  MOD_RES (103)..(103): Selenocysteine
  MOD_RES (122)..(122): Selenocysteine
  MOD_RES (130)..(130): Selenocysteine
  MOD_RES (203)..(203): Selenocysteine
  MOD_RES (207)..(207): Selenocysteine
  MOD_RES (238)..(238): Selenocysteine
  MOD_RES (242)..(242): Selenocysteine
  MOD_RES (255)..(255): Selenocysteine
  MOD_RES (275)..(275): Selenocysteine
  MOD_RES (290)..(290): Selenocysteine
  MOD_RES (373)..(373): Selenocysteine
  MOD_RES (376)..(376): Selenocysteine
  MOD_RES (388)..(388): Selenocysteine
  MOD_RES (410)..(410): Selenocysteine
  MOD_RES (433)..(433): Selenocysteine
  MOD_RES (449)..(449): Selenocysteine
  MOD_RES (459)..(459): Selenocysteine
  MOD_RES (461)..(461): Selenocysteine
  MOD_RES (469)..(469): Selenocysteine
  MOD_RES (502)..(502): Selenocysteine
  MOD_RES (511)..(511): Selenocysteine
  MOD_RES (542)..(542): Selenocysteine
  MOD_RES (571)..(571): Selenocysteine
  MOD_RES (583)..(583): Selenocysteine
  MOD_RES (609)..(609): Selenocysteine
  MOD_RES (626)..(626): Selenocysteine
  MOD_RES (682)..(682): Selenocysteine
  MOD_RES (684)..(684): Selenocysteine
  MOD_RES (689)..(689): Selenocysteine
MLHLKVQFLDDSQKIFVVDQKSSGKALFNLSCSHLNLAEKEYFGLEFCSHSGNNVWLELLKPIXKQVKMDPGHLREELXRYLFXLQIKKDLALGRLPCSDNCXALMVSHILQSELGDFHEEXDRKHLAQXRYLPNQDCLEGKIMHFHQKHIGRSPAESDILLLDIARKLDMYGIRPHPASDGEGMQIHLAVAHMGVLVLRGNXKINXFNWAKIRKLSFKRKHFLIKLHANILVLCKDXLEFXMASRDACKAFWKXCVEYHAFFRLSEEPKSKPKXLLCSKGSSFRYSGRXQRQLLEYGRKGRLKSLPFERKHYPSQYHERQCRSSPDLLSDVSKQVEDLRLAYGGGYYQNVNGVHASEPVLESRRRNSALEVXFAXELEHSKPEADPXLLHQSQSSSSFPFIYMDPVFNXEPNPNPDPRDIFSERSSLSSFQXSCKFSGNHMSIYSGLXSKVRPAKQLXYXDVPYIPCXGQQVGIMPPQVFFYVDKPPQVPRWSPIRAEERXSPHSYVEPXAMKPAERSPRNIRMKSFQQDLQVLQEAIARXSGRSNINVGLEEEDPNLEDAFVCNIQEQXPKRSQSQSDMKXIRFPFGSEFRPLGPCPALSHKADLFXDMFAEQELPAVLMDQSXAERYVASESSDSESEILKPDYYALYGKEIRSPMARIRLSSGSLQLDEEDEDAYFNXPXAEDRXSLKPCNYFLA

SEQ ID NO: 10364 - protein, 714 aa, Homo sapiens
  MOD_RES (64)..(64): Selenocysteine
  MOD_RES (94)..(94): Selenocysteine
  MOD_RES (99)..(99): Selenocysteine
  MOD_RES (118)..(118): Selenocysteine
  MOD_RES (137)..(137): Selenocysteine
  MOD_RES (145)..(145): Selenocysteine
  MOD_RES (218)..(218): Selenocysteine
  MOD_RES (222)..(222): Selenocysteine
  MOD_RES (253)..(253): Selenocysteine
  MOD_RES (257)..(257): Selenocysteine
  MOD_RES (270)..(270): Selenocysteine
  MOD_RES (290)..(290): Selenocysteine
  MOD_RES (305)..(305): Selenocysteine
  MOD_RES (388)..(388): Selenocysteine
  MOD_RES (391)..(391): Selenocysteine
  MOD_RES (403)..(403): Selenocysteine
  MOD_RES (425)..(425): Selenocysteine
  MOD_RES (448)..(448): Selenocysteine
  MOD_RES (464)..(464): Selenocysteine
  MOD_RES (474)..(474): Selenocysteine
  MOD_RES (476)..(476): Selenocysteine
  MOD_RES (484)..(484): Selenocysteine
  MOD_RES (517)..(517): Selenocysteine
  MOD_RES (526)..(526): Selenocysteine
  MOD_RES (557)..(557): Selenocysteine
  MOD_RES (586)..(586): Selenocysteine
  MOD_RES (598)..(598): Selenocysteine
  MOD_RES (624)..(624): Selenocysteine
  MOD_RES (641)..(641): Selenocysteine
  MOD_RES (697)..(697): Selenocysteine
  MOD_RES (699)..(699): Selenocysteine
  MOD_RES (704)..(704): Selenocysteine
MLHLKVQFLDDSQKIFVVDQKSSGKALFNLSCSHLNLAEKEYFGLEFCSHSGNNVWLELLKPIXKQVKNPKEIVFKFMVKFFPVDPGHLREELXRYLFXLQIKKDLALGRLPCSDNCXALMVSHILQSELGDFHEEXDRKHLAQXRYLPNQDCLEGKIMHFHQKHIGRSPAESDILLLDIARKLDMYGIRPHPASDGEGMQIHLAVAHMGVLVLRGNXKINXFNWAKIRKLSFKRKHFLIKLHANILVLCKDXLEFXMASRDACKAFWKXCVEYHAFFRLSEEPKSKPKXLLCSKGSSFRYSGRXQRQLLEYGRKGRLKSLPFERKHYPSQYHERQCRSSPDLLSDVSKQVEDLRLAYGGGYYQNVNGVHASEPVLESRRRNSALEVXFAXELEHSKPEADPXLLHQSQSSSSFPFIYMDPVFNXEPNPNPDPRDIFSERSSLSSFQXSCKFSGNHMSIYSGLXSKVRPAKQLXYXDVPYIPCXGQQVGIMPPQVFFYVDKPPQVPRWSPIRAEERXSPHSYVEPXAMKPAERSPRNIRMKSFQQDLQVLQEAIARXSGRSNINVGLEEEDPNLEDAFVCNIQEQXPKRSQSQSDMKXIRFPFGSEFRPLGPCPALSHKADLFXDMFAEQELPAVLMDQSXAERYVASESSDSESEILKPDYYALYGKEIRSPMARIRLSSGSLQLDEEDEDAYFNXPXAEDRXSLKPCNYFLA

SEQ ID NO: 10365 - protein, 594 aa, Homo sapiens
  MOD_RES (17)..(17): Selenocysteine
  MOD_RES (25)..(25): Selenocysteine
  MOD_RES (98)..(98): Selenocysteine
  MOD_RES (102)..(102): Selenocysteine
  MOD_RES (133)..(133): Selenocysteine
  MOD_RES (137)..(137): Selenocysteine
  MOD_RES (150)..(150): Selenocysteine
  MOD_RES (170)..(170): Selenocysteine
  MOD_RES (185)..(185): Selenocysteine
  MOD_RES (268)..(268): Selenocysteine
  MOD_RES (271)..(271): Selenocysteine
  MOD_RES (283)..(283): Selenocysteine
  MOD_RES (305)..(305): Selenocysteine
  MOD_RES (328)..(328): Selenocysteine
  MOD_RES (344)..(344): Selenocysteine
  MOD_RES (354)..(354): Selenocysteine
  MOD_RES (356)..(356): Selenocysteine
  MOD_RES (364)..(364): Selenocysteine
  MOD_RES (397)..(397): Selenocysteine
  MOD_RES (406)..(406): Selenocysteine
  MOD_RES (437)..(437): Selenocysteine
  MOD_RES (466)..(466): Selenocysteine
  MOD_RES (478)..(478): Selenocysteine
  MOD_RES (504)..(504): Selenocysteine
  MOD_RES (521)..(521): Selenocysteine
  MOD_RES (577)..(577): Selenocysteine
  MOD_RES (579)..(579): Selenocysteine
  MOD_RES (584)..(584): Selenocysteine
MVSHILQSELGDFHEEXDRKHLAQXRYLPNQDCLEGKIMHFHQKHIGRSPAESDILLLDIARKLDMYGIRPHPASDGEGMQIHLAVAHMGVLVLRGNXKINXFNWAKIRKLSFKRKHFLIKLHANILVLCKDXLEFXMASRDACKAFWKXCVEYHAFFRLSEEPKSKPKXLLCSKGSSFRYSGRXQRQLLEYGRKGRLKSLPFERKHYPSQYHERQCRSSPDLLSDVSKQVEDLRLAYGGGYYQNVNGVHASEPVLESRRRNSALEVXFAXELEHSKPEADPXLLHQSQSSSSFPFIYMDPVFNXEPNPNPDPRDIFSERSSLSSFQXSCKFSGNHMSIYSGLXSKVRPAKQLXYXDVPYIPCXGQQVGIMPPQVFFYVDKPPQVPRWSPIRAEERXSPHSYVEPXAMKPAERSPRNIRMKSFQQDLQVLQEAIARXSGRSNINVGLEEEDPNLEDAFVCNIQEQXPKRSQSQSDMKXIRFPFGSEFRPLGPCPALSHKADLFXDMFAEQELPAVLMDQSXAERYVASESSDSESEILKPDYYALYGKEIRSPMARIRLSSGSLQLDEEDEDAYFNXPXAEDRXSLKPCNYFLA

SEQ ID NO: 10366 - protein, 31 aa, Homo sapiens
  MOD_RES (4)..(4): Selenocysteine
  MOD_RES (6)..(6): Selenocysteine
  MOD_RES (12)..(12): Selenocysteine
MELXDXELILYXRKRDSVKWHYLCLRRYGYD

SEQ ID NO: 10367 - protein, 10 aa, Homo sapiens
MGSCCSCPDK

SEQ ID NO: 10368 - protein, 12 aa, Homo sapiens
  MOD_RES (12)..(12): Selenocysteine
MGSCCSCPDKDX

SEQ ID NO: 10369 - protein, 33 aa, Homo sapiens
  MOD_RES (12)..(12): Selenocysteine
MGSCCSCPDKDXVPDNHRNKFKVINVDDDGNEL

SEQ ID NO: 10370 - protein, 36 aa, Homo sapiens
  MOD_RES (12)..(12): Selenocysteine
MGSCCSCPDKDXVPDNHRNKFKVINVDDDGNELGSG

SEQ ID NO: 10371 - protein, 40 aa, Homo sapiens
  MOD_RES (12)..(12): Selenocysteine
MGSCCSCPDKDXVPDNHRNKFKVINVDDDGNELGSGIMEL

SEQ ID NO: 10372 - protein, 91 aa, Homo sapiens
  MOD_RES (12)..(12): Selenocysteine
  MOD_RES (41)..(41): Selenocysteine
  MOD_RES (43)..(43): Selenocysteine
  MOD_RES (49)..(49): Selenocysteine
  MOD_RES (82)..(82): Selenocysteine
MGSCCSCPDKDXVPDNHRNKFKVINVDDDGNELGSGIMELXDXELILYXRKRDSVKWHYLCLRRYGYDSNLFSFESGRRCQXGQGIFAFKC

SEQ ID NO: 10373 - protein, 183 aa, Homo sapiens
  MOD_RES (12)..(12): Selenocysteine
  MOD_RES (41)..(41): Selenocysteine
  MOD_RES (43)..(43): Selenocysteine
  MOD_RES (49)..(49): Selenocysteine
  MOD_RES (82)..(82): Selenocysteine
  MOD_RES (125)..(125): Selenocysteine
  MOD_RES (132)..(132): Selenocysteine
  MOD_RES (135)..(135): Selenocysteine
  MOD_RES (137)..(138): Selenocysteine
  MOD_RES (183)..(183): Selenocysteine
MGSCCSCPDKDXVPDNHRNKFKVINVDDDGNELGSGIMELXDXELILYXRKRDSVKWHYLCLRRYGYDSNLFSFESGRRCQXGQGIFAFKCARAEELFNMLQEIMQNNSINVVEEPVVERNNHQXELEVPRXPRXPXXPGFAAQNLPNGYPRYPSFGDASSHPSSRHPSVGSARLPSVGEESX

SEQ ID NO: 10374 - protein, 508 aa, Homo sapiens
  MOD_RES (12)..(12): Selenocysteine
  MOD_RES (41)..(41): Selenocysteine
  MOD_RES (43)..(43): Selenocysteine
  MOD_RES (49)..(49): Selenocysteine
  MOD_RES (82)..(82): Selenocysteine
  MOD_RES (125)..(125): Selenocysteine
  MOD_RES (132)..(132): Selenocysteine
  MOD_RES (135)..(135): Selenocysteine
  MOD_RES (137)..(138): Selenocysteine
  MOD_RES (183)..(183): Selenocysteine
  MOD_RES (195)..(195): Selenocysteine
  MOD_RES (199)..(200): Selenocysteine
  MOD_RES (210)..(210): Selenocysteine
  MOD_RES (227)..(227): Selenocysteine
  MOD_RES (256)..(256): Selenocysteine
  MOD_RES (284)..(284): Selenocysteine
  MOD_RES (288)..(288): Selenocysteine
  MOD_RES (326)..(326): Selenocysteine
  MOD_RES (328)..(328): Selenocysteine
  MOD_RES (330)..(330): Selenocysteine
  MOD_RES (333)..(333): Selenocysteine
  MOD_RES (344)..(344): Selenocysteine
  MOD_RES (376)..(376): Selenocysteine
  MOD_RES (395)..(395): Selenocysteine
  MOD_RES (399)..(399): Selenocysteine
  MOD_RES (416)..(416): Selenocysteine
  MOD_RES (418)..(418): Selenocysteine
  MOD_RES (452)..(452): Selenocysteine
  MOD_RES (455)..(455): Selenocysteine
  MOD_RES (457)..(458): Selenocysteine
  MOD_RES (463)..(463): Selenocysteine
  MOD_RES (465)..(465): Selenocysteine
  MOD_RES (468)..(468): Selenocysteine
  MOD_RES (479)..(479): Selenocysteine
  MOD_RES (495)..(495): Selenocysteine
  MOD_RES (499)..(499): Selenocysteine
  MOD_RES (504)..(504): Selenocysteine
MGSCCSCPDKDXVPDNHRNKFKVINVDDDGNELGSGIMELXDXELILYXRKRDSVKWHYLCLRRYGYDSNLFSFESGRRCQXGQGIFAFKCARAEELFNMLQEIMQNNSINVVEEPVVERNNHQXELEVPRXPRXPXXPGFAAQNLPNGYPRYPSFGDASSHPSSRHPSVGSARLPSVGEESXHPLLVAEEQVHXYVNXXGVQEERKNRXSVHVPLEARVSNAESSXPKEEPSSIEDRDPQILLEPEGVKFVLGPXPVQKQLMEKEKLEQLGRDQVSGSGANNXEWDXGYDSDERRDAPSVNKLVYENINGLSIPSASGVRRGRLXSXSXSDXQNINNSAQRRXALLNYENLPSLPPVWEARKLSRDEDDNLGPKXPSLNGYHNNLDPMHNYVNXENVXVPASAHKIEYSRRRDCXPXVFNFDIRRPSLEHRQLNYIQVDLEGGSDSDNPQXPKXPXXPLPQXPXRRXELYAVIDIERXAAMSNLQKALPRDDGXSRKXRHNSXDLPM

SEQ ID NO: 10375 - protein, 147 aa, Homo sapiens
  MOD_RES (3)..(3): Selenocysteine
  MOD_RES (24)..(24): Selenocysteine
  MOD_RES (43)..(43): Selenocysteine
  MOD_RES (48)..(48): Selenocysteine
  MOD_RES (65)..(65): Selenocysteine
  MOD_RES (106)..(106): Selenocysteine
  MOD_RES (144)..(144): Selenocysteine
MEXPRRARSPVSPQFPGQAGCSDXMGSCCSCLNRDSVPDNHPXKFKVXNVDDEGVELGSGVMELXQSELVLHLHRREAVRWPYLCLRRYGYDSNLFSFESGRRCQXGQGIFAFKCSRAEEIFNLLQDLMQCNSINVMEEPVIIXRNS

SEQ ID NO: 10376 - protein, 36 aa, Homo sapiens
  MOD_RES (19)..(19): Selenocysteine
  MOD_RES (24)..(24): Selenocysteine
MGSCCSCLNRDSVPDNHPXKFKVXNVDDEGVELGSG

SEQ ID NO: 10377 - protein, 492 aa, Homo sapiens
  MOD_RES (19)..(19): Selenocysteine
  MOD_RES (24)..(24): Selenocysteine
  MOD_RES (41)..(41): Selenocysteine
  MOD_RES (82)..(82): Selenocysteine
  MOD_RES (120)..(120): Selenocysteine
  MOD_RES (143)..(143): Selenocysteine
  MOD_RES (166)..(166): Selenocysteine
  MOD_RES (179)..(179): Selenocysteine
  MOD_RES (191)..(191): Selenocysteine
  MOD_RES (195)..(195): Selenocysteine
  MOD_RES (247)..(247): Selenocysteine
  MOD_RES (286)..(286): Selenocysteine
  MOD_RES (291)..(291): Selenocysteine
  MOD_RES (354)..(354): Selenocysteine
  MOD_RES (368)..(368): Selenocysteine
  MOD_RES (374)..(374): Selenocysteine
  MOD_RES (376)..(376): Selenocysteine
  MOD_RES (391)..(391): Selenocysteine
  MOD_RES (445)..(446): Selenocysteine
  MOD_RES (463)..(463): Selenocysteine
  MOD_RES (479)..(479): Selenocysteine
  MOD_RES (483)..(483): Selenocysteine
  MOD_RES (488)..(488): Selenocysteine
MGSCCSCLNRDSVPDNHPXKFKVXNVDDEGVELGSGVMELXQSELVLHLHRREAVRWPYLCLRRYGYDSNLFSFESGRRCQXGQGIFAFKCSRAEEIFNLLQDLMQCNSINVMEEPVIIXRNSHPAELDLPRAPQPPNALGYXVSSFSNGCPGEGPRFSAPRRLSXSSLRHPSLGEESXHALIAPDEQSHXYVNXPASEDDHRRGRHCLQPLPEGQAPFLPQARGPDQRDPQVFLQPGQVKFVLGPXPARRHMVKCQGLCPSLHDPPHHNNNNEAPSECPAQPKCXYENVXGGLWRGAGWRLSPEEPGWNGLAHRRAALLHYENLPPLPPVWESQAQQLGGEAGDDGDSRDGLXPSSNGFPDGEEDEXPLQKPXSXRAAIRSHGSFPVPLXRRRGSPRVFNFDFRRPGPEPPRQLNYIQVELKGWGGDRPKGPQNPSSPQAPMPXXHPARSSDSYAVIDLKKXVAMSNLQRALPRDDGXARKXRHNSXDLPL

SEQ ID NO: 10378 - protein, 325 aa, Homo sapiens
  MOD_RES (51)..(51): Selenocysteine
  MOD_RES (61)..(61): Selenocysteine
  MOD_RES (78)..(78): Selenocysteine
  MOD_RES (97)..(97): Selenocysteine
  MOD_RES (155)..(155): Selenocysteine
  MOD_RES (186)..(186): Selenocysteine
  MOD_RES (189)..(189): Selenocysteine
  MOD_RES (208)..(208): Selenocysteine
  MOD_RES (214)..(214): Selenocysteine
  MOD_RES (234)..(234): Selenocysteine
  MOD_RES (239)..(239): Selenocysteine
  MOD_RES (309)..(309): Selenocysteine
MVCGSPGGMLLLRAGLLALAALCLLRVPGARAAACEPVRIPLCKSLPWNMXKMPNHLHHSXQANAILAIEQFEGLLGXHCSPDLLFFLCAMYAPICXIDFQHEPIKPCKSVCERARQGCEPILIKYRHSWPENLACEELPVYDRGVCISPEAIVXADGADFPMDSSNGNCRGASSERCKCKPIRAXQKXYFRNNYNYVIRAKVKEIKXKCHDVXAVVEVKEILKSSLVNIPRDXVNLYXSSGCLCPPLNVNEEYIIMGYEDEERSRLLLVEGSIAEKWKDRLGKKVKRWDMKLRHLGLSKSDSSNSDSXQSQKSGRNSNPRQARN

SEQ ID NO: 10379 - protein, 129 aa, Homo sapiens
  MOD_RES (3)..(3): Selenocysteine
  MOD_RES (24)..(24): Selenocysteine
  MOD_RES (27)..(27): Selenocysteine
  MOD_RES (43)..(44): Selenocysteine
  MOD_RES (52)..(52): Selenocysteine
  MOD_RES (68)..(68): Selenocysteine
  MOD_RES (70)..(70): Selenocysteine
  MOD_RES (78)..(78): Selenocysteine
  MOD_RES (93)..(93): Selenocysteine
  MOD_RES (98)..(98): Selenocysteine
  MOD_RES (110)..(110): Selenocysteine
  MOD_RES (113)..(113): Selenocysteine
MKXLQFFFLFCCWKAICCNSCELXNIXIAIEKEECRFCISINXXWCAGYCYXRDLVYKDPARPKIQKXCXFKELVYEXVRVPGCAHHADSLYXYPVAXQCHCGKCDSDSXDCXVRGLGPSYCSFGEMKE

SEQ ID NO: 10380 - protein, 695 aa, Homo sapiens
  MOD_RES (38)..(38): Selenocysteine
  MOD_RES (56)..(56): Selenocysteine
  MOD_RES (130)..(130): Selenocysteine
  MOD_RES (159)..(159): Selenocysteine
  MOD_RES (193)..(193): Selenocysteine
  MOD_RES (228)..(228): Selenocysteine
  MOD_RES (249)..(249): Selenocysteine
  MOD_RES (257)..(257): Selenocysteine
  MOD_RES (270)..(270): Selenocysteine
  MOD_RES (305)..(305): Selenocysteine
  MOD_RES (329)..(329): Selenocysteine
  MOD_RES (331)..(331): Selenocysteine
  MOD_RES (345)..(345): Selenocysteine
  MOD_RES (378)..(378): Selenocysteine
  MOD_RES (388)..(389): Selenocysteine
  MOD_RES (395)..(395): Selenocysteine
  MOD_RES (425)..(425): Selenocysteine
  MOD_RES (438)..(438): Selenocysteine
  MOD_RES (449)..(449): Selenocysteine
  MOD_RES (459)..(459): Selenocysteine
  MOD_RES (461)..(461): Selenocysteine
  MOD_RES (464)..(464): Selenocysteine
  MOD_RES (470)..(470): Selenocysteine
  MOD_RES (472)..(472): Selenocysteine
  MOD_RES (555)..(555): Selenocysteine
  MOD_RES (568)..(568): Selenocysteine
  MOD_RES (580)..(580): Selenocysteine
  MOD_RES (603)..(603): Selenocysteine
  MOD_RES (630)..(630): Selenocysteine
  MOD_RES (656)..(656): Selenocysteine
  MOD_RES (658)..(658): Selenocysteine
  MOD_RES (661)..(661): Selenocysteine
  MOD_RES (665)..(665): Selenocysteine
  MOD_RES (679)..(679): Selenocysteine
  MOD_RES (683)..(683): Selenocysteine
MALLLVSLLAFLSLGSGCHHRICHCSNRVFLCQESKVXEIPSDLPRNAIELRFVLXKLRVIQKGAFSGFGDLEKIEISQNDVLEVIEADVFSNLPKLHEIRIEKANNLLYINPEAFQNLPNLQYLLISNXGIKHLPDVHKIHSLQKVLLDIQDNINIHXIERNSFVGLSFESVILWLNKNGIQEIHNCAFNGXQLDELNLSDNNNLEELPNDVFHGASGPVILDISRXRIHSLPSYGLENLKKLRARSXYNLKKLPXLEKLVALMEASLXYPSHCCAFANWRRQISELHPICNKSILRQEVDYMXQARGQRSSLAEDNESSYSRGFDMXYXEFDYDLCNEVVDVXCSPKPDAFNPCEDIMGYNILRVLIWFISILAIXGNIIVLVILXXSQYKLXVPRFLMCNLAFADLCIGIYLLLIASVDIHXKSQYHNYAIDWQXGAGCDAAGFFXVFASELSVYXLXAIXLERWHXIXHAMQLDCKVQLRHAASVMVMGWIFAFAAALFPIFGISSYMKVSICLPMDIDSPLSQLYVMSLLVLNVLAFVVICGCYIHIYLXVRNPNIVSSSSDXRIAKRMAMLIFXDFLCMAPISFFAISASLKVPLIXVSKAKILLVLFHPINSCANPFLYAIFXKNFRRDFFILLSKCGCYEMQAQIYRXEXSSXVHNXHPRNGHCSSAPRVXSGSXYILVPLSHLAQN

SEQ ID NO: 10381 - protein, 278 aa, Homo sapiens
  MOD_RES (38)..(38): Selenocysteine
  MOD_RES (56)..(56): Selenocysteine
  MOD_RES (130)..(130): Selenocysteine
  MOD_RES (159)..(159): Selenocysteine
  MOD_RES (193)..(193): Selenocysteine
  MOD_RES (243)..(243): Selenocysteine
  MOD_RES (267)..(267): Selenocysteine
  MOD_RES (269)..(269): Selenocysteine
MALLLVSLLAFLSLGSGCHHRICHCSNRVFLCQESKVXEIPSDLPRNAIELRFVLXKLRVIQKGAFSGFGDLEKIEISQNDVLEVIEADVFSNLPKLHEIRIEKANNLLYINPEAFQNLPNLQYLLISNXGIKHLPDVHKIHSLQKVLLDIQDNINIHXIERNSFVGLSFESVILWLNKNGIQEIHNCAFNGXQLDELNLSDNNNLEELPNDVFHGASGPVILSELHPICNKSILRQEVDYMXQARGQRSSLAEDNESSYSRGFDMXYXEFDYDLCNE

SEQ ID NO: 10382 - protein, 669 aa, Homo sapiens
  MOD_RES (38)..(38): Selenocysteine
  MOD_RES (56)..(56): Selenocysteine
  MOD_RES (130)..(130): Selenocysteine
  MOD_RES (167)..(167): Selenocysteine
  MOD_RES (202)..(202): Selenocysteine
  MOD_RES (223)..(223): Selenocysteine
  MOD_RES (231)..(231): Selenocysteine
  MOD_RES (244)..(244): Selenocysteine
  MOD_RES (279)..(279): Selenocysteine
  MOD_RES (303)..(303): Selenocysteine
  MOD_RES (305)..(305): Selenocysteine
  MOD_RES (319)..(319): Selenocysteine
  MOD_RES (352)..(352): Selenocysteine
  MOD_RES (362)..(363): Selenocysteine
  MOD_RES (369)..(369): Selenocysteine
  MOD_RES (399)..(399): Selenocysteine
  MOD_RES (412)..(412): Selenocysteine
  MOD_RES (423)..(423): Selenocysteine
  MOD_RES (433)..(433): Selenocysteine
  MOD_RES (435)..(435): Selenocysteine
  MOD_RES (438)..(438): Selenocysteine
  MOD_RES (444)..(444): Selenocysteine
  MOD_RES (446)..(446): Selenocysteine
  MOD_RES (529)..(529): Selenocysteine
  MOD_RES (542)..(542): Selenocysteine
  MOD_RES (554)..(554): Selenocysteine
  MOD_RES (577)..(577): Selenocysteine
  MOD_RES (604)..(604): Selenocysteine
  MOD_RES (630)..(630): Selenocysteine
  MOD_RES (632)..(632): Selenocysteine
  MOD_RES (635)..(635): Selenocysteine
  MOD_RES (639)..(639): Selenocysteine
  MOD_RES (653)..(653): Selenocysteine
  MOD_RES (657)..(657): Selenocysteine
MALLLVSLLAFLSLGSGCHHRICHCSNRVFLCQESKVXEIPSDLPRNAIELRFVLXKLRVIQKGAFSGFGDLEKIEISQNDVLEVIEADVFSNLPKLHEIRIEKANNLLYINPEAFQNLPNLQYLLISNXGIKHLPDVHKIHSLQKVLLWLNKNGIQEIHNCAFNGXQLDELNLSDNNNLEELPNDVFHGASGPVILDISRXRIHSLPSYGLENLKKLRARSXYNLKKLPXLEKLVALMEASLXYPSHCCAFANWRRQISELHPICNKSILRQEVDYMXQARGQRSSLAEDNESSYSRGFDMXYXEFDYDLCNEVVDVXCSPKPDAFNPCEDIMGYNILRVLIWFISILAIXGNIIVLVILXXSQYKLXVPRFLMCNLAFADLCIGIYLLLIASVDIHXKSQYHNYAIDWQXGAGCDAAGFFXVFASELSVYXLXAIXLERWHXIXHAMQLDCKVQLRHAASVMVMGWIFAFAAALFPIFGISSYMKVSICLPMDIDSPLSQLYVMSLLVLNVLAFVVICGCYIHIYLXVRNPNIVSSSSDXRIAKRMAMLIFXDFLCMAPISFFAISASLKVPLIXVSKAKILLVLFHPINSCANPFLYAIFXKNFRRDFFILLSKCGCYEMQAQIYRXEXSSXVHNXHPRNGHCSSAPRVXSGSXYILVPLSHLAQN

SEQ ID NO: 10383 - protein, 152 aa, Homo sapiens
  MOD_RES (38)..(38): Selenocysteine
  MOD_RES (56)..(56): Selenocysteine
  MOD_RES (149)..(149): Selenocysteine
MALLLVSLLAFLSLGSGCHHRICHCSNRVFLCQESKVXEIPSDLPRNAIELRFVLXKLRVIQKGAFSGFGDLEKIEISQNDVLEVIEADVFSNLPKLHEIRIEKANNLLYINPEAFQNLPNLQYLSFSSFVLENAKVENGDHRAFSDRXNAL

SEQ ID NO: 10384 - protein, 215 aa, Homo sapiens
  MOD_RES (10)..(10): Selenocysteine
  MOD_RES (39)..(39): Selenocysteine
  MOD_RES (50)..(50): Selenocysteine
  MOD_RES (56)..(56): Selenocysteine
  MOD_RES (63)..(63): Selenocysteine
  MOD_RES (85)..(85): Selenocysteine
  MOD_RES (96)..(96): Selenocysteine
  MOD_RES (113)..(113): Selenocysteine
  MOD_RES (122)..(122): Selenocysteine
  MOD_RES (161)..(161): Selenocysteine
  MOD_RES (194)..(194): Selenocysteine
GPVCGLDGKXYRNECALLKARCKEQPELEVQYQGRCKKXCRDVFCPGSSXCVVDQXNNAYCVXCNRICPEPASSEQYLCGNDGVXYSSACHLRKAXCLLGRSIGLAYEGKCIXKSCEDIQCXGGKKCLWDFKVGRGRCSLCDELCPDSKSDEPVCASDNAXYASECAMKEAACSSGVLLEVKHSGSCNSISEDXEEEEEDEDQDYSFPISSILEW

SEQ ID NO: 10385 - protein, 317 aa, Homo sapiens
  MOD_RES (48)..(48): Selenocysteine
  MOD_RES (58)..(58): Selenocysteine
  MOD_RES (63)..(63): Selenocysteine
  MOD_RES (66)..(66): Selenocysteine
  MOD_RES (74)..(74): Selenocysteine
  MOD_RES (94)..(94): Selenocysteine
  MOD_RES (126)..(126): Selenocysteine
  MOD_RES (138)..(138): Selenocysteine
  MOD_RES (167)..(167): Selenocysteine
  MOD_RES (178)..(178): Selenocysteine
  MOD_RES (184)..(184): Selenocysteine
  MOD_RES (191)..(191): Selenocysteine
  MOD_RES (213)..(213): Selenocysteine
  MOD_RES (224)..(224): Selenocysteine
  MOD_RES (251)..(251): Selenocysteine
  MOD_RES (290)..(290): Selenocysteine
MVRARHQPGGLCLLLLLLCQFMEDRSAQAGNCWLRQAKNGRCQVLYKXELSKEECCSXGRLSXSWXEEDVNDNXLFKWMIFNGGAPNCIPCKEXCENVDCGPGKKCRMNKKNKPRCVCAPDCSNIXWKGPVCGLDGKXYRNECALLKARCKEQPELEVQYQGRCKKXCRDVFCPGSSXCVVDQXNNAYCVXCNRICPEPASSEQYLCGNDGVXYSSACHLRKAXCLLGRSIGLAYEGKCIKAKSCEDIQCXGGKKCLWDFKVGRGRCSLCDELCPDSKSDEPVCASDNAXYASECAMKEAACSSGVLLEVKHSGSCN

SEQ ID NO: 10386 - protein, 344 aa, Homo sapiens
  MOD_RES (48)..(48): Selenocysteine
  MOD_RES (58)..(58): Selenocysteine
  MOD_RES (63)..(63): Selenocysteine
  MOD_RES (66)..(66): Selenocysteine
  MOD_RES (74)..(74): Selenocysteine
  MOD_RES (94)..(94): Selenocysteine
  MOD_RES (126)..(126): Selenocysteine
  MOD_RES (138)..(138): Selenocysteine
  MOD_RES (167)..(167): Selenocysteine
  MOD_RES (178)..(178): Selenocysteine
  MOD_RES (184)..(184): Selenocysteine
  MOD_RES (191)..(191): Selenocysteine
  MOD_RES (213)..(213): Selenocysteine
  MOD_RES (224)..(224): Selenocysteine
  MOD_RES (251)..(251): Selenocysteine
  MOD_RES (290)..(290): Selenocysteine
  MOD_RES (323)..(323): Selenocysteine
MVRARHQPGGLCLLLLLLCQFMEDRSAQAGNCWLRQAKNGRCQVLYKXELSKEECCSXGRLSXSWXEEDVNDNXLFKWMIFNGGAPNCIPCKEXCENVDCGPGKKCRMNKKNKPRCVCAPDCSNIXWKGPVCGLDGKXYRNECALLKARCKEQPELEVQYQGRCKKXCRDVFCPGSSXCVVDQXNNAYCVXCNRICPEPASSEQYLCGNDGVXYSSACHLRKAXCLLGRSIGLAYEGKCIKAKSCEDIQCXGGKKCLWDFKVGRGRCSLCDELCPDSKSDEPVCASDNAXYASECAMKEAACSSGVLLEVKHSGSCNSISEDXEEEEEDEDQDYSFPISSILEW

SEQ ID NO: 10387 - protein, 102 aa, Homo sapiens
  MOD_RES (1)..(1): Any amino acid
  MOD_RES (10)..(10): Selenocysteine
  MOD_RES (27)..(27): Selenocysteine
  MOD_RES (36)..(36): Selenocysteine
  MOD_RES (75)..(75): Selenocysteine
XSACHLRKAXCLLGRSIGLAYEGKCIXKSCEDIQCXGGKKCLWDFKVGRGRCSLCDELCPDSKSDEPVCASDNAXYASECAMKEAACSSGVLLEVKHSGSCN

SEQ ID NO: 10388 - protein, 140 aa, Homo sapiens
  MOD_RES (45)..(45): Selenocysteine
  MOD_RES (51)..(51): Selenocysteine
  MOD_RES (72)..(72): Selenocysteine
  MOD_RES (86)..(86): Selenocysteine
MWKRWLALALALVAVAWVRAEEELRSKSKICANVFCGAGRECAVXEKGEPXCLCIEQCKPHKRPVCGSNGKXYLNHCELHRDACLXGSKIQVDYDGHCKEKKSVSPSASPVVCYQSNRDELRRRIIQWLEAEIIPDGWFS

SEQ ID NO: 10389 - protein, 308 aa, Homo sapiens
  MOD_RES (45)..(45): Selenocysteine
  MOD_RES (51)..(51): Selenocysteine
  MOD_RES (72)..(72): Selenocysteine
  MOD_RES (86)..(86): Selenocysteine
  MOD_RES (177)..(177): Selenocysteine
  MOD_RES (182)..(183): Selenocysteine
  MOD_RES (239)..(239): Selenocysteine
  MOD_RES (246)..(246): Selenocysteine
  MOD_RES (263)..(263): Selenocysteine
  MOD_RES (266)..(266): Selenocysteine
  MOD_RES (277)..(277): Selenocysteine
  MOD_RES (279)..(279): Selenocysteine
  MOD_RES (284)..(284): Selenocysteine
  MOD_RES (296)..(296): Selenocysteine
  MOD_RES (300)..(300): Selenocysteine
  MOD_RES (305)..(305): Selenocysteine
MWKRWLALALALVAVAWVRAEEELRSKSKICANVFCGAGRECAVXEKGEPXCLCIEQCKPHKRPVCGSNGKXYLNHCELHRDACLXGSKIQVDYDGHCKEKKSVSPSASPVVCYQSNRDELRRRIIQWLEAEIIPDGWFSKGSNYSEILDKYFKNFDNGDSRLDSSEFLKFVEQNEXAINIXXYPDQENNKLLRGLCVDALIELSDENADWKLSFQEFLKCLNPSFNPPEKKCALEDEXYADGAEXEVDCNRCVCACGNWVCXAMXCDGKNQKGAQXQXEEEMXRYVQELQKHQEXAEKXKRVSXKEI

SEQ ID NO: 10390 - protein, 273 aa, Homo sapiens
  MOD_RES (37)..(37): Selenocysteine
  MOD_RES (51)..(51): Selenocysteine
  MOD_RES (142)..(142): Selenocysteine
  MOD_RES (147)..(148): Selenocysteine
  MOD_RES (204)..(204): Selenocysteine
  MOD_RES (211)..(211): Selenocysteine
  MOD_RES (228)..(228): Selenocysteine
  MOD_RES (231)..(231): Selenocysteine
  MOD_RES (242)..(242): Selenocysteine
  MOD_RES (244)..(244): Selenocysteine
  MOD_RES (249)..(249): Selenocysteine
  MOD_RES (261)..(261): Selenocysteine
  MOD_RES (265)..(265): Selenocysteine
  MOD_RES (270)..(270): Selenocysteine
MWKRWLALALALVAVAWVRAEQCKPHKRPVCGSNGKXYLNHCELHRDACLXGSKIQVDYDGHCKEKKSVSPSASPVVCYQSNRDELRRRIIQWLEAEIIPDGWFSKGSNYSEILDKYFKNFDNGDSRLDSSEFLKFVEQNEXAINIXXYPDQENNKLLRGLCVDALIELSDENADWKLSFQEFLKCLNPSFNPPEKKCALEDEXYADGAEXEVDCNRCVCACGNWVCXAMXCDGKNQKGAQXQXEEEMXRYVQELQKHQEXAEKXKRVSXKEI

SEQ ID NO: 10391 - protein, 20 aa, Homo sapiens
  MOD_RES (1)..(1): Any amino acid
XSFQEFLKCLNPSFNPPEKK

SEQ ID NO: 10392 - protein, 84 aa, Homo sapiens
  MOD_RES (30)..(30): Selenocysteine
  MOD_RES (76)..(76): Selenocysteine
MLGGRPRCECAPDCSGLPARLQVCGSDGAXYRDECELRAARCRGHPDLSVMYRGRCRKSCEHVVCPRPQSCVVDQXGSAHCVVC

SEQ ID NO: 10393 - protein, 263 aa, Homo sapiens
  MOD_RES (47)..(47): Selenocysteine
  MOD_RES (54)..(54): Selenocysteine
  MOD_RES (57)..(57): Selenocysteine
  MOD_RES (69)..(69): Selenocysteine
  MOD_RES (75)..(75): Selenocysteine
  MOD_RES (141)..(141): Selenocysteine
  MOD_RES (187)..(187): Selenocysteine
  MOD_RES (217)..(217): Selenocysteine
  MOD_RES (228)..(228): Selenocysteine
  MOD_RES (246)..(246): Selenocysteine
MRPGAPGPLWPLPWGALAWAVGFVSSMGSGNPAPGGVCWLQQGQEAXCSLVLQXDVXRAECCASGNIDXAWSNLXHPGNKINLLGFLGLVHCLPCKDSCDGVECGPGKACRMLGGRPRCECAPDCSGLPARLQVCGSDGAXYRDECELRAARCRGHPDLSVMYRGRCRKSCEHVVCPRPQSCVVDQXGSAHCVVCRAAPCPVPSSPGQELCGNNNVXYISSCHMRQAXCFLGRSIGVRHAGSCAGXPEEPPGGESAEEEENFV

SEQ ID NO: 10394 - protein, 92 aa, Homo sapiens
  MOD_RES (5)..(5): Selenocysteine
  MOD_RES (68)..(68): Selenocysteine
MRQAXCFLGRSIGVRHAGSCAGADAGRGHRPVLGAGEPPALRPQCSYRPLQAPLRSRQVVSLQKRKRXSCEPAGQAWAWCPRPPIIPCYLLP

SEQ ID NO: 10395 - protein, 40 aa, Homo sapiens
  MOD_RES (5)..(5): Selenocysteine
  MOD_RES (23)..(23): Selenocysteine
MRQAXCFLGRSIGVRHAGSCAGXPEEPPGGESAEEEENFV

SEQ ID NO: 10396 - protein, 673 aa, Homo sapiens
  MOD_RES (11)..(11): Selenocysteine
  MOD_RES (28)..(28): Selenocysteine
  MOD_RES (50)..(50): Selenocysteine
  MOD_RES (89)..(90): Selenocysteine
  MOD_RES (92)..(92): Selenocysteine
  MOD_RES (97)..(97): Selenocysteine
  MOD_RES (100)..(100): Selenocysteine
  MOD_RES (119)..(119): Selenocysteine
  MOD_RES (140)..(140): Selenocysteine
  MOD_RES (143)..(144): Selenocysteine
  MOD_RES (151)..(151): Selenocysteine
  MOD_RES (163)..(163): Selenocysteine
  MOD_RES (204)..(204): Selenocysteine
  MOD_RES (214)..(214): Selenocysteine
  MOD_RES (239)..(239): Selenocysteine
  MOD_RES (243)..(243): Selenocysteine
  MOD_RES (268)..(268): Selenocysteine
  MOD_RES (310)..(310): Selenocysteine
  MOD_RES (329)..(329): Selenocysteine
  MOD_RES (406)..(406): Selenocysteine
  MOD_RES (410)..(410): Selenocysteine
  MOD_RES (419)..(419): Selenocysteine
  MOD_RES (432)..(432): Selenocysteine
  MOD_RES (459)..(459): Selenocysteine
  MOD_RES (465)..(465): Selenocysteine
  MOD_RES (481)..(481): Selenocysteine
  MOD_RES (509)..(509): Selenocysteine
  MOD_RES (520)..(520): Selenocysteine
  MOD_RES (522)..(522): Selenocysteine
  MOD_RES (525)..(525): Selenocysteine
  MOD_RES (548)..(548): Selenocysteine
  MOD_RES (555)..(555): Selenocysteine
  MOD_RES (575)..(575): Selenocysteine
  MOD_RES (588)..(588): Selenocysteine
  MOD_RES (599)..(599): Selenocysteine
  MOD_RES (622)..(622): Selenocysteine
  MOD_RES (638)..(638): Selenocysteine
  MOD_RES (653)..(653): Selenocysteine
  MOD_RES (665)..(666): Selenocysteine
MKPGGFWLHLXLLGASLPAALGWMDPGXSRGPDVGVGESQAEEPRSFEVXRREGLSSHNELLASCGKKFCSRGSRCVLSLAPEDRVSVXXVXVGLSXVLXCAVHGDLRPPIIWKRNGLXLNFLDLEDINDFGEDDSLYIXKVXXIHMGNYXCHASGHEQLFQXHVLQVNVPPVIRVYPESQAQEPGVAASLRCHAEGIPMPRIXWLKNGVDVSXQMSKQLSLLANGSELHISSVRYEDXGAYXCIAKNEVGVDEDISSLFIEDSARKXLANILWREEGLSVGNMFYVFSDDGIIVIHPVDCEIQRHLKPXEKIFMSYEEICPQREKNAXQPCQWVSAVNVRNRYIYVAQPALSRVLVVDIQAQKVLQSIGVDPLPAKLSYDKSHDQVWVLSWGDVHKSRPSLQVIXEASXGQSQHLIRXPFAGVDDFFIPPXNLIINHIRFGFIFNKSDPAVHKVDLEXMMPLKXIGLHHHGCVPQAMAHXHLGGYFFIQCRQDSPASAARQLLVDSVXDSVLGPNGDVXGXPHXSPDGRFIVSAAADSPWLHVQEIXVRGEIQXLYDLQINSGISDLAFQRSFXESNQYNIYAALHXEPDLLFLELSXGKVGMLKNLKEPPAGPAQPWGGXHRIMRDSGLFGQYLLXPARESLFLINGRQNXLRCEVSGIKGGXXVVWVGEV

SEQ ID NO: 10397 - protein, 842 aa, Homo sapiens
  MOD_RES (11)..(11): Selenocysteine
  MOD_RES (28)..(28): Selenocysteine
  MOD_RES (50)..(50): Selenocysteine
  MOD_RES (82)..(82): Selenocysteine
  MOD_RES (126)..(126): Selenocysteine
  MOD_RES (139)..(139): Selenocysteine
  MOD_RES (141)..(141): Selenocysteine
  MOD_RES (157)..(157): Selenocysteine
  MOD_RES (234)..(234): Selenocysteine
  MOD_RES (258)..(259): Selenocysteine
  MOD_RES (261)..(261): Selenocysteine
  MOD_RES (266)..(266): Selenocysteine
  MOD_RES (269)..(269): Selenocysteine
  MOD_RES (288)..(288): Selenocysteine
  MOD_RES (309)..(309): Selenocysteine
  MOD_RES (312)..(313): Selenocysteine
  MOD_RES (320)..(320): Selenocysteine
  MOD_RES (332)..(332): Selenocysteine
  MOD_RES (373)..(373): Selenocysteine
  MOD_RES (383)..(383): Selenocysteine
  MOD_RES (408)..(408): Selenocysteine
  MOD_RES (412)..(412): Selenocysteine
  MOD_RES (437)..(437): Selenocysteine
  MOD_RES (479)..(479): Selenocysteine
  MOD_RES (498)..(498): Selenocysteine
  MOD_RES (575)..(575): Selenocysteine
  MOD_RES (579)..(579): Selenocysteine
  MOD_RES (588)..(588): Selenocysteine
  MOD_RES (601)..(601): Selenocysteine
  MOD_RES (628)..(628): Selenocysteine
  MOD_RES (634)..(634): Selenocysteine
  MOD_RES (650)..(650): Selenocysteine
  MOD_RES (678)..(678): Selenocysteine
  MOD_RES (689)..(689): Selenocysteine
  MOD_RES (691)..(691): Selenocysteine
  MOD_RES (694)..(694): Selenocysteine
  MOD_RES (717)..(717): Selenocysteine
  MOD_RES (724)..(724): Selenocysteine
  MOD_RES (744)..(744): Selenocysteine
  MOD_RES (757)..(757): Selenocysteine
  MOD_RES (768)..(768): Selenocysteine
  MOD_RES (791)..(791): Selenocysteine
  MOD_RES (807)..(807): Selenocysteine
  MOD_RES (822)..(822): Selenocysteine
  MOD_RES (834)..(835): Selenocysteine
MKPGGFWLHLXLLGASLPAALGWMDPGXSRGPDVGVGESQAEEPRSFEVXRREGLSSHNELLASCGKKFCSRGSRCVLSRKXGEPECQCLEACRPSYVPVCGSDGRFYENHCKLHRAACLLGKRIXVIHSKDCFLKGDXCXMAGYARLKNVLLALQXRLQPLQEGDSRQDPASQKRLLVESLFRDLDADGNGHLSSSELAQHVLKKQDLDEDLLGCSPGDLLRFDDYNSDSSLXLREFYMAFQVVQLSLAPEDRVSVXXVXVGLSXVLXCAVHGDLRPPIIWKRNGLXLNFLDLEDINDFGEDDSLYIXKVXXIHMGNYXCHASGHEQLFQXHVLQVNVPPVIRVYPESQAQEPGVAASLRCHAEGIPMPRIXWLKNGVDVSXQMSKQLSLLANGSELHISSVRYEDXGAYXCIAKNEVGVDEDISSLFIEDSARKXLANILWREEGLSVGNMFYVFSDDGIIVIHPVDCEIQRHLKPXEKIFMSYEEICPQREKNAXQPCQWVSAVNVRNRYIYVAQPALSRVLVVDIQAQKVLQSIGVDPLPAKLSYDKSHDQVWVLSWGDVHKSRPSLQVIXEASXGQSQHLIRXPFAGVDDFFIPPXNLIINHIRFGFIFNKSDPAVHKVDLEXMMPLKXIGLHHHGCVPQAMAHXHLGGYFFIQCRQDSPASAARQLLVDSVXDSVLGPNGDVXGXPHXSPDGRFIVSAAADSPWLHVQEIXVRGEIQXLYDLQINSGISDLAFQRSFXESNQYNIYAALHXEPDLLFLELSXGKVGMLKNLKEPPAGPAQPWGGXHRIMRDSGLFGQYLLXPARESLFLINGRQNXLRCEVSGIKGGXXVVWVGEV

SEQ ID NO: 10398 - protein, 157 aa, Homo sapiens
  MOD_RES (52)..(52): Selenocysteine
  MOD_RES (84)..(84): Selenocysteine
  MOD_RES (128)..(128): Selenocysteine
  MOD_RES (141)..(141): Selenocysteine
  MOD_RES (143)..(143): Selenocysteine
MNPVPQMEMQKSPVFCVAHAGSCRPELFLFGHLGSSWGLDLKEEEPRSFEVXRREGLSSHNELLASCGKKFCSRGSRCVLSRKXGEPECQCLEACRPSYVPVCGSDGRFYENHCKLHRAACLLGKRIXVIHSKDCFLKGDXCXMAGYARLKNVLLAL

SEQ ID NO: 10399 - protein, 232 aa, Homo sapiens
  MOD_RES (6)..(6): Selenocysteine
  MOD_RES (51)..(51): Selenocysteine
  MOD_RES (75)..(75): Selenocysteine
  MOD_RES (80)..(81): Selenocysteine
  MOD_RES (108)..(108): Selenocysteine
  MOD_RES (122)..(122): Selenocysteine
  MOD_RES (171)..(171): Selenocysteine
  MOD_RES (173)..(173): Selenocysteine
  MOD_RES (227)..(227): Selenocysteine
MADYSXVPPPSSGSAGGGGGGGGGGGVNDAFKDALQRARQIAAKIGGDAGXSLNSNDYGYGGQKRPLEDGDGSWXSPSSXXHWEGMPSPFKDQPDAKKVAPQNDSFGXQLPPMHQQQRSVMXEEYKVPDGMVGFIIGRGGEQISRIQQESGCKIQIAPDSGGLPERSCMLXGXPESVQSAKRLLDQIVEKGRPAPGFHHGDGPGNAVQEIMIPASKAGLVIGKGGEXIKQLQ

SEQ ID NO: 10400 - protein, 653 aa, Homo sapiens
  MOD_RES (6)..(6): Selenocysteine
  MOD_RES (51)..(51): Selenocysteine
  MOD_RES (87)..(87): Selenocysteine
  MOD_RES (101)..(101): Selenocysteine
  MOD_RES (150)..(150): Selenocysteine
  MOD_RES (152)..(152): Selenocysteine
  MOD_RES (206)..(206): Selenocysteine
  MOD_RES (228)..(228): Selenocysteine
  MOD_RES (237)..(237): Selenocysteine
  MOD_RES (316)..(317): Selenocysteine
  MOD_RES (325)..(325): Selenocysteine
  MOD_RES (339)..(339): Selenocysteine
  MOD_RES (384)..(384): Selenocysteine
  MOD_RES (387)..(387): Selenocysteine
  MOD_RES (397)..(397): Selenocysteine
  MOD_RES (427)..(427): Selenocysteine
  MOD_RES (431)..(431): Selenocysteine
  MOD_RES (478)..(478): Selenocysteine
  MOD_RES (529)..(529): Selenocysteine
  MOD_RES (560)..(562): Selenocysteine
  MOD_RES (564)..(564): Selenocysteine
  MOD_RES (582)..(582): Selenocysteine
  MOD_RES (600)..(600): Selenocysteine
  MOD_RES (628)..(628): Selenocysteine
MADYSXVPPPSSGSAGGGGGGGGGGGVNDAFKDALQRARQIAAKIGGDAGXSLNSNDYGYGGQKRPLEDGDQPDAKKVAPQNDSFGXQLPPMHQQQRSVMXEEYKVPDGMVGFIIGRGGEQISRIQQESGCKIQIAPDSGGLPERSCMLXGXPESVQSAKRLLDQIVEKGRPAPGFHHGDGPGNAVQEIMIPASKAGLVIGKGGEXIKQLQERAGVKMVMIQDGPQNXGADKPLRIXGDPYKVQQAKEMVLELIRDQGGFREVRNEYGSRIGGNEGIDVPIPRFAVGIVIGRNGEMIKKIQNDAGVRIQFKPDDGXXPERIAQIXGPPDRCQHAAEIIXDLLRSVQAGNPGGPGPGGRGRGRGQGNWNMGPPGGLQEFNFIVPXGKXGLIIGKGGEXIKSISQQSGARIELQRNPPPNADPNMKLFXIRGXPQQIDYARQLIEEKIGGPVNPLGPPVPHGPHGVPGPHGPPGPPGPGXPMGPYNPAPYNPGPPGPAPHGPPAPYAPQGWGNAYPHWQQQAPPDPAKAGXDPNSAAWAAYYAHYYQQQAQPPPAAPAGAPXXXQXNGQGDQQNPAPAGQVDYXKAWEEYYKKMGQAVPAPXGAPPGGQPDYSAAWAEYYRQQAAYYAQXSPQGMPQHPPAPQCRFDPASIELAL

SEQ ID NO: 10401 - protein, 644 aa, Homo sapiens
  MOD_RES (6)..(6): Selenocysteine
  MOD_RES (51)..(51): Selenocysteine
  MOD_RES (87)..(87): Selenocysteine
  MOD_RES (102)..(102): Selenocysteine
  MOD_RES (151)..(151): Selenocysteine
  MOD_RES (153)..(153): Selenocysteine
  MOD_RES (207)..(207): Selenocysteine
  MOD_RES (229)..(229): Selenocysteine
  MOD_RES (238)..(238): Selenocysteine
  MOD_RES (317)..(318): Selenocysteine
  MOD_RES (326)..(326): Selenocysteine
  MOD_RES (340)..(340): Selenocysteine
  MOD_RES (385)..(385): Selenocysteine
  MOD_RES (388)..(388): Selenocysteine
  MOD_RES (398)..(398): Selenocysteine
  MOD_RES (428)..(428): Selenocysteine
  MOD_RES (432)..(432): Selenocysteine
  MOD_RES (479)..(479): Selenocysteine
  MOD_RES (530)..(530): Selenocysteine
  MOD_RES (561)..(563): Selenocysteine
  MOD_RES (565)..(565): Selenocysteine
  MOD_RES (583)..(583): Selenocysteine
  MOD_RES (601)..(601): Selenocysteine
  MOD_RES (629)..(629): Selenocysteine
MADYSXVPPPSSGSAGGGGGGGGGGGVNDAFKDALQRARQIAAKIGGDAGXSLNSNDYGYGGQKRPLEDGDQPDAKKVAPQNDSFGXQLPPMHQQQSRSVMXEEYKVPDGMVGFIIGRGGEQISRIQQESGCKIQIAPDSGGLPERSCMLXGXPESVQSAKRLLDQIVEKGRPAPGFHHGDGPGNAVQEIMIPASKAGLVIGKGGEXIKQLQERAGVKMVMIQDGPQNXGADKPLRIXGDPYKVQQAKEMVLELIRDQGGFREVRNEYGSRIGGNEGIDVPIPRFAVGIVIGRNGEMIKKIQNDAGVRIQFKPDDGXXPERIAQIXGPPDRCQHAAEIIXDLLRSVQAGNPGGPGPGGRGRGRGQGNWNMGPPGGLQEFNFIVPXGKXGLIIGKGGEXIKSISQQSGARIELQRNPPPNADPNMKLFXIRGXPQQIDYARQLIEEKIGGPVNPLGPPVPHGPHGVPGPHGPPGPPGPGXPMGPYNPAPYNPGPPGPAPHGPPAPYAPQGWGNAYPHWQQQAPPDPAKAGXDPNSAAWAAYYAHYYQQQAQPPPAAPAGAPXXXQXNGQGDQQNPAPAGQVDYXKAWEEYYKKMGQAVPAPXGAPPGGQPDYSAAWAEYYRQQAAYYAQXSPQGMPQHPPAPQGQ

SEQ ID NO: 10402 - protein, 655 aa, Homo sapiens
  MOD_RES (6)..(6): Selenocysteine
  MOD_RES (51)..(51): Selenocysteine
  MOD_RES (87)..(87): Selenocysteine
  MOD_RES (102)..(102): Selenocysteine
  MOD_RES (151)..(151): Selenocysteine
  MOD_RES (153)..(153): Selenocysteine
  MOD_RES (207)..(207): Selenocysteine
  MOD_RES (229)..(229): Selenocysteine
  MOD_RES (238)..(238): Selenocysteine
  MOD_RES (317)..(318): Selenocysteine
  MOD_RES (326)..(326): Selenocysteine
  MOD_RES (340)..(340): Selenocysteine
  MOD_RES (385)..(385): Selenocysteine
  MOD_RES (388)..(388): Selenocysteine
  MOD_RES (398)..(398): Selenocysteine
  MOD_RES (428)..(428): Selenocysteine
  MOD_RES (432)..(432): Selenocysteine
  MOD_RES (479)..(479): Selenocysteine
  MOD_RES (530)..(530): Selenocysteine
  MOD_RES (561)..(563): Selenocysteine
  MOD_RES (565)..(565): Selenocysteine
  MOD_RES (583)..(583): Selenocysteine
  MOD_RES (601)..(601): Selenocysteine
  MOD_RES (629)..(629): Selenocysteine
MADYSXVPPPSSGSAGGGGGGGGGGGVNDAFKDALQRARQIAAKIGGDAGXSLNSNDYGYGGQKRPLEDGDQPDAKKVAPQNDSFGXQLPPMHQQQSRSVMXEEYKVPDGMVGFIIGRGGEQISRIQQESGCKIQIAPDSGGLPERSCMLXGXPESVQSAKRLLDQIVEKGRPAPGFHHGDGPGNAVQEIMIPASKAGLVIGKGGEXIKQLQERAGVKMVMIQDGPQNXGADKPLRIXGDPYKVQQAKEMVLELIRDQGGFREVRNEYGSRIGGNEGIDVPIPRFAVGIVIGRNGEMIKKIQNDAGVRIQFKPDDGXXPERIAQIXGPPDRCQHAAEIIXDLLRSVQAGNPGGPGPGGRGRGRGQGNWNMGPPGGLQEFNFIVPXGKXGLIIGKGGEXIKSISQQSGARIELQRNPPPNADPNMKLFXIRGXPQQIDYARQLIEEKIGGPVNPLGPPVPHGPHGVPGPHGPPGPPGPGXPMGPYNPAPYNPGPPGPAPHGPPAPYAPQGWGNAYPHWQQQAPPDPAKAGXDPNSAAWAAYYAHYYQQQAQPPPAAPAGAPXXXQXNGQGDQQNPAPAGQVDYXKAWEEYYKKMGQAVPAPXGAPPGGQPDYSAAWAEYYRQQAAYYAQXSPQGMPQHPPAPQGFANHARSHHHLY

SEQ ID NO: 10403 - protein, 69 aa, Homo sapiens
  MOD_RES (14)..(14): Selenocysteine
  MOD_RES (16)..(16): Selenocysteine
  MOD_RES (31)..(31): Selenocysteine
  MOD_RES (33)..(33): Selenocysteine
MELRPWLLWVVAAXGXLVLLAADAQGQKVFXNXWAVRIPGGPAVANSVARKHGFLNLGQIFGDYYHFWH

SEQ ID NO: 10404 - protein, 794 aa, Homo sapiens
  MOD_RES (14)..(14): Selenocysteine
  MOD_RES (16)..(16): Selenocysteine
  MOD_RES (31)..(31): Selenocysteine
  MOD_RES (33)..(33): Selenocysteine
  MOD_RES (73)..(73): Selenocysteine
  MOD_RES (105)..(105): Selenocysteine
  MOD_RES (114)..(114): Selenocysteine
  MOD_RES (128)..(128): Selenocysteine
  MOD_RES (143)..(143): Selenocysteine
  MOD_RES (187)..(187): Selenocysteine
  MOD_RES (196)..(196): Selenocysteine
  MOD_RES (232)..(232): Selenocysteine
  MOD_RES (262)..(262): Selenocysteine
  MOD_RES (309)..(309): Selenocysteine
  MOD_RES (314)..(314): Selenocysteine
  MOD_RES (321)..(321): Selenocysteine
  MOD_RES (336)..(336): Selenocysteine
  MOD_RES (339)..(340): Selenocysteine
  MOD_RES (353)..(354): Selenocysteine
  MOD_RES (361)..(361): Selenocysteine
  MOD_RES (365)..(365): Selenocysteine
  MOD_RES (367)..(367): Selenocysteine
  MOD_RES (381)..(381): Selenocysteine
  MOD_RES (389)..(389): Selenocysteine
  MOD_RES (400)..(400): Selenocysteine
  MOD_RES (413)..(413): Selenocysteine
  MOD_RES (442)..(443): Selenocysteine
  MOD_RES (456)..(456): Selenocysteine
  MOD_RES (470)..(470): Selenocysteine
  MOD_RES (472)..(472): Selenocysteine
  MOD_RES (482)..(482): Selenocysteine
  MOD_RES (492)..(492): Selenocysteine
  MOD_RES (511)..(511): Selenocysteine
  MOD_RES (514)..(514): Selenocysteine
  MOD_RES (535)..(536): Selenocysteine
  MOD_RES (554)..(554): Selenocysteine
  MOD_RES (562)..(562): Selenocysteine
  MOD_RES (564)..(564): Selenocysteine
  MOD_RES (567)..(567): Selenocysteine
  MOD_RES (573)..(573): Selenocysteine
  MOD_RES (589)..(589): Selenocysteine
  MOD_RES (591)..(591): Selenocysteine
  MOD_RES (625)..(625): Selenocysteine
  MOD_RES (629)..(629): Selenocysteine
  MOD_RES (635)..(635): Selenocysteine
  MOD_RES (650)..(650): Selenocysteine
  MOD_RES (657)..(657): Selenocysteine
  MOD_RES (674)..(674): Selenocysteine
  MOD_RES (731)..(731): Selenocysteine
  MOD_RES (751)..(751): Selenocysteine
  MOD_RES (785)..(785): Selenocysteine
MELRPWLLWVVAAXGXLVLLAADAQGQKVFXNXWAVRIPGGPAVANSVARKHGFLNLGQIFGDYYHFWHRGVXKRSLSPHRPRHSRLQREPQVQWLEQQVAKRRXKRDVYQEPXDPKFPQQWYLSGVXQRDLNVKAAWAQGYXGHGIVVSILDDGIEKNHPDLAGNYDPGASFDVNDQDPDPQPRYXQMNDNRHGXRCAGEVAAVANNGVCGVGVAYNARIGGVRMLDGEVXDAVEARSLGLNPNHIHIYSASWGPEDDGKXVDGPARLAEEAFFRGVSQGRGGLGSIFVWASGNGGREHDSCNCDGYXNSIYXLSISSAXQFGNVPWYSEACSSXLAXXYSSGNQNEKQIVXXDLRQKCXESHXGXSASAPLAAGIIALXLEANKNLXWRDMQHLVVQXSKPAHLNANDWAXNGVGRKVSHSYGYGLLDAGAMVALAQNWXXVAPQRKCIIDILXEPKDIGKRLEVRKXVXACLGEPNHIXRLEHAQARLXLSYNRRGDLAIHLVSPMGXRSXLLAARPHDYSADGFNDWAFMXXHSWDEDPSGEWVLEIENXSEANNYGXLXKFXLVLYGXAPEGLPVPPESSGCKXLXSSQACVVCEEGFSLHQKSCVQHCPPGFAPQVLDXHYSXENDVEXIRASVCAPCHASCAXCQGPALXDCLSCPSHASLDPVEQXCSRQSQSSRESPPQQQPPRLPPEVEAGQRLRAGLLPSHLPEVVAGLSCAFIVLVFVXVFLVLQLRSGFSFRGVKVYXMDRGLISYKGLPPEAWQEECPSDSEEDEGRGERXAFIKDQSAL

SEQ ID NO: 10405 - protein, 175 aa, Homo sapiens
  MOD_RES (14)..(14): Selenocysteine
  MOD_RES (16)..(16): Selenocysteine
  MOD_RES (31)..(31): Selenocysteine
  MOD_RES (33)..(33): Selenocysteine
  MOD_RES (73)..(73): Selenocysteine
  MOD_RES (103)..(103): Selenocysteine
  MOD_RES (112)..(112): Selenocysteine
  MOD_RES (126)..(126): Selenocysteine
  MOD_RES (141)..(141): Selenocysteine
MELRPWLLWVVAAXGXLVLLAADAQGQKVFXNXWAVRIPGGPAVANSVARKHGFLNLGQIFGDYYHFWHRGVXKRSLSPHRPRHSRLQREPQWLEQQVAKRRXKRDVYQEPXDPKFPQQWYLSGVXQRDLNVKAAWAQGYXGHGIVVSILDDGIEKNHPDLAGNYDPGASFDVND

SEQ ID NO: 10406 - protein, 216 aa, Homo sapiens
  MOD_RES (19)..(19): Selenocysteine
  MOD_RES (66)..(66): Selenocysteine
  MOD_RES (71)..(71): Selenocysteine
  MOD_RES (78)..(78): Selenocysteine
  MOD_RES (93)..(93): Selenocysteine
  MOD_RES (96)..(97): Selenocysteine
  MOD_RES (110)..(111): Selenocysteine
  MOD_RES (118)..(118): Selenocysteine
  MOD_RES (122)..(122): Selenocysteine
  MOD_RES (124)..(124): Selenocysteine
  MOD_RES (138)..(138): Selenocysteine
  MOD_RES (146)..(146): Selenocysteine
  MOD_RES (157)..(157): Selenocysteine
  MOD_RES (170)..(170): Selenocysteine
  MOD_RES (199)..(200): Selenocysteine
  MOD_RES (213)..(213): Selenocysteine
PNHIHIYSASWGPEDDGKXVDGPARLAEEAFFRGVSQGRGGLGSIFVWASGNGGREHDSCNCDGYXNSIYXLSISSAXQFGNVPWYSEACSSXLAXXYSSGNQNEKQIVXXDLRQKCXESHXGXSASAPLAAGIIALXLEANKNLXWRDMQHLVVQXSKPAHLNANDWAXNGVGRKVSHSYGYGLLDAGAMVALAQNWXXVAPQRKCIIDILXEPK

SEQ ID NO: 10407 - protein, 446 aa, Homo sapiens
  MOD_RES (4)..(4): Selenocysteine
  MOD_RES (21)..(22): Selenocysteine
  MOD_RES (29)..(29): Selenocysteine
  MOD_RES (36)..(36): Selenocysteine
  MOD_RES (44)..(44): Selenocysteine
  MOD_RES (59)..(59): Selenocysteine
  MOD_RES (67)..(67): Selenocysteine
  MOD_RES (108)..(108): Selenocysteine
  MOD_RES (111)..(111): Selenocysteine
  MOD_RES (123)..(123): Selenocysteine
  MOD_RES (128)..(128): Selenocysteine
  MOD_RES (136)..(136): Selenocysteine
  MOD_RES (138)..(138): Selenocysteine
  MOD_RES (145)..(145): Selenocysteine
  MOD_RES (221)..(221): Selenocysteine
  MOD_RES (238)..(238): Selenocysteine
  MOD_RES (243)..(243): Selenocysteine
  MOD_RES (279)..(279): Selenocysteine
  MOD_RES (290)..(290): Selenocysteine
  MOD_RES (314)..(314): Selenocysteine
  MOD_RES (337)..(337): Selenocysteine
  MOD_RES (352)..(352): Selenocysteine
  MOD_RES (388)..(388): Selenocysteine
  MOD_RES (421)..(421): Selenocysteine
  MOD_RES (435)..(435): Selenocysteine
  MOD_RES (440)..(440): Selenocysteine
MAIXVSLVNNKRKIVVLAQPXXVKRKRIXPYKSIMXDLYYLSQXDGAGDWREKEAKDLXELVQRRIXYLQNPKDCSKAKKLVCNINKGCGYGCQLHHVVYCFMIAYGXQRXLILESQNWRYAXGGWEXVFRPVSEXCXDRSGISXGHWSGEVKDKNVQVVELPIVDSLHPRPPYLPLAVPEDLADRLVRVHGDPAVWWVSQFVKYLIRPQPWLEKEIEEAXKKLGFKHPVIGVHVRRXDKVGXEAAFHPIEEYMVHVEEHFQLLARRMQVDKKRVYLAXDDPSLLKEAKXKYPNYEFISDNSISWSAGLHNRYXENSLRGVILDIHFLSQADFLVCXFSSQVCRVAYEIMQXLHPDASANFHSLDDIYYFGGQNAHNQIAIYAHQPRXADEIPMEPGDIIGVAGNHWDGYSKGVNRKLGRXGLYPSYKVREKIEXVKYPXYPEAEK

SEQ ID NO: 10408 - protein, 15 aa, Homo sapiens
  MOD_RES (5)..(5): Selenocysteine
MRPWXGSWRWIMLIL

SEQ ID NO: 10409 - protein, 30 aa, Homo sapiens
  MOD_RES (5)..(5): Selenocysteine
  MOD_RES (20)..(20): Selenocysteine
MRPWXGSWRWIMLILFAWGXLLFYIGGHLV

SEQ ID NO: 10410 - protein, 41 aa, Homo sapiens
  MOD_RES (5)..(5): Selenocysteine
  MOD_RES (20)..(20): Selenocysteine
MRPWXGSWRWIMLILFAWGXLLFYIGGHLVRDNDHPDHSSR

SEQ ID NO: 10411 - protein, 44 aa, Homo sapiens
  MOD_RES (5)..(5): Selenocysteine
  MOD_RES (20)..(20): Selenocysteine
MRPWXGSWRWIMLILFAWGXLLFYIGGHLVRDNDHPDHSSRELS

SEQ ID NO: 10412 - protein, 46 aa, Homo sapiens
  MOD_RES (5)..(5): Selenocysteine
  MOD_RES (20)..(20): Selenocysteine
MRPWXGSWRWIMLILFAWGXLLFYIGGHLVRDNDHPDHSSRELSKI

SEQ ID NO: 10413 - protein, 50 aa, Homo sapiens
  MOD_RES (5)..(5): Selenocysteine
  MOD_RES (20)..(20): Selenocysteine
MRPWXGSWRWIMLILFAWGXLLFYIGGHLVRDNDHPDHSSRELSKILAKL

SEQ ID NO: 10414 - protein, 308 aa, Homo sapiens
  MOD_RES (5)..(5): Selenocysteine
  MOD_RES (20)..(20): Selenocysteine
  MOD_RES (104)..(104): Selenocysteine
  MOD_RES (165)..(165): Selenocysteine
  MOD_RES (173)..(173): Selenocysteine
  MOD_RES (188)..(188): Selenocysteine
  MOD_RES (196)..(196): Selenocysteine
  MOD_RES (237)..(237): Selenocysteine
  MOD_RES (240)..(240): Selenocysteine
  MOD_RES (252)..(252): Selenocysteine
  MOD_RES (257)..(257): Selenocysteine
  MOD_RES (265)..(265): Selenocysteine
  MOD_RES (267)..(267): Selenocysteine
  MOD_RES (274)..(274): Selenocysteine
  MOD_RES (280)..(280): Selenocysteine
  MOD_RES (289)..(289): Selenocysteine
  MOD_RES (298)..(298): Selenocysteine
  MOD_RES (301)..(301): Selenocysteine
MRPWXGSWRWIMLILFAWGXLLFYIGGHLVRDNDHPDHSSRELSKILAKLERLKQQNEDLRRMAESLRIPEGPIDQGPAIGRVRVLEEQLVKAKEQIENYKKQXRNGLGKDHEILRRRIENGAKELWFFLQSELKKLKNLEGNELQRHADEFLLDLGHHERSIMXDLYYLSQXDGAGDWREKEAKDLXELVQRRIXYLQNPKDCSKAKKLVCNINKGCGYGCQLHHVVYCFMIAYGXQRXLILESQNWRYAXGGWEXVFRPVSEXCXDRSGISXGHWSGXPIMNLLVIXLFPGQLDCXIDXQKIHFVE

SEQ ID NO: 10415 - protein, 575 aa, Homo sapiens
  MOD_RES (5)..(5): Selenocysteine
  MOD_RES (20)..(20): Selenocysteine
  MOD_RES (104)..(104): Selenocysteine
  MOD_RES (165)..(165): Selenocysteine
  MOD_RES (173)..(173): Selenocysteine
  MOD_RES (188)..(188): Selenocysteine
  MOD_RES (196)..(196): Selenocysteine
  MOD_RES (237)..(237): Selenocysteine
  MOD_RES (240)..(240): Selenocysteine
  MOD_RES (252)..(252): Selenocysteine
  MOD_RES (257)..(257): Selenocysteine
  MOD_RES (265)..(265): Selenocysteine
  MOD_RES (267)..(267): Selenocysteine
  MOD_RES (274)..(274): Selenocysteine
  MOD_RES (350)..(350): Selenocysteine
  MOD_RES (367)..(367): Selenocysteine
  MOD_RES (372)..(372): Selenocysteine
  MOD_RES (408)..(408): Selenocysteine
  MOD_RES (419)..(419): Selenocysteine
  MOD_RES (443)..(443): Selenocysteine
  MOD_RES (466)..(466): Selenocysteine
  MOD_RES (481)..(481): Selenocysteine
  MOD_RES (517)..(517): Selenocysteine
  MOD_RES (550)..(550): Selenocysteine
  MOD_RES (564)..(564): Selenocysteine
  MOD_RES (569)..(569): Selenocysteine
MRPWXGSWRWIMLILFAWGXLLFYIGGHLVRDNDHPDHSSRELSKILAKLERLKQQNEDLRRMAESLRIPEGPIDQGPAIGRVRVLEEQLVKAKEQIENYKKQXRNGLGKDHEILRRRIENGAKELWFFLQSELKKLKNLEGNELQRHADEFLLDLGHHERSIMXDLYYLSQXDGAGDWREKEAKDLXELVQRRIXYLQNPKDCSKAKKLVCNINKGCGYGCQLHHVVYCFMIAYGXQRXLILESQNWRYAXGGWEXVFRPVSEXCXDRSGISXGHWSGEVKDKNVQVVELPIVDSLHPRPPYLPLAVPEDLADRLVRVHGDPAVWWVSQFVKYLIRPQPWLEKEIEEAXKKLGFKHPVIGVHVRRXDKVGXEAAFHPIEEYMVHVEEHFQLLARRMQVDKKRVYLAXDDPSLLKEAKXKYPNYEFISDNSISWSAGLHNRYXENSLRGVILDIHFLSQADFLVCXFSSQVCRVAYEIMQXLHPDASANFHSLDDIYYFGGQNAHNQIAIYAHQPRXADEIPMEPGDIIGVAGNHWDGYSKGVNRKLGRXGLYPSYKVREKIEXVKYPXYPEAEK

SEQ ID NO: 10416 - protein, 412 aa, Homo sapiens
  MOD_RES (2)..(2): Selenocysteine
  MOD_RES (10)..(10): Selenocysteine
  MOD_RES (25)..(25): Selenocysteine
  MOD_RES (33)..(33): Selenocysteine
  MOD_RES (74)..(74): Selenocysteine
  MOD_RES (77)..(77): Selenocysteine
  MOD_RES (89)..(89): Selenocysteine
  MOD_RES (94)..(94): Selenocysteine
  MOD_RES (102)..(102): Selenocysteine
  MOD_RES (104)..(104): Selenocysteine
  MOD_RES (111)..(111): Selenocysteine
  MOD_RES (187)..(187): Selenocysteine
  MOD_RES (204)..(204): Selenocysteine
  MOD_RES (209)..(209): Selenocysteine
  MOD_RES (245)..(245): Selenocysteine
  MOD_RES (256)..(256): Selenocysteine
  MOD_RES (280)..(280): Selenocysteine
  MOD_RES (303)..(303): Selenocysteine
  MOD_RES (318)..(318): Selenocysteine
  MOD_RES (354)..(354): Selenocysteine
  MOD_RES (387)..(387): Selenocysteine
  MOD_RES (401)..(401): Selenocysteine
  MOD_RES (406)..(406): Selenocysteine
MXDLYYLSQXDGAGDWREKEAKDLXELVQRRIXYLQNPKDCSKAKKLVCNINKGCGYGCQLHHVVYCFMIAYGXQRXLILESQNWRYAXGGWEXVFRPVSEXCXDRSGISXGHWSGEVKDKNVQVVELPIVDSLHPRPPYLPLAVPEDLADRLVRVHGDPAVWWVSQFVKYLIRPQPWLEKEIEEAXKKLGFKHPVIGVHVRRXDKVGXEAAFHPIEEYMVHVEEHFQLLARRMQVDKKRVYLAXDDPSLLKEAKXKYPNYEFISDNSISWSAGLHNRYXENSLRGVILDIHFLSQADFLVCXFSSQVCRVAYEIMQXLHPDASANFHSLDDIYYFGGQNAHNQIAIYAHQPRXADEIPMEPGDIIGVAGNHWDGYSKGVNRKLGRXGLYPSYKVREKIEXVKYPXYPEAEK

SEQ ID NO: 10417 - protein, 45 aa, Homo sapiens
  MOD_RES (15)..(15): Selenocysteine
  MOD_RES (18)..(19): Selenocysteine
MFGQNLEVQLSSARXENXXVVWKSFHDRSPGGNVGQGQGLGDSPC

SEQ ID NO: 10418 - protein, 86 aa, Homo sapiens
  MOD_RES (15)..(15): Selenocysteine
  MOD_RES (18)..(19): Selenocysteine
  MOD_RES (30)..(30): Selenocysteine
  MOD_RES (66)..(66): Selenocysteine
MFGQNLEVQLSSARXENXXVVWKSFHDSIXLIVLSSEVGISELRLERLLQMVFGAMVLLVGLEELXNIRNVERLKKDLRAGPFFLS

SEQ ID NO: 10419 - protein, 368 aa, Homo sapiens
  MOD_RES (15)..(15): Selenocysteine
  MOD_RES (18)..(19): Selenocysteine
  MOD_RES (30)..(30): Selenocysteine
  MOD_RES (66)..(66): Selenocysteine
  MOD_RES (99)..(99): Selenocysteine
  MOD_RES (126)..(127): Selenocysteine
  MOD_RES (141)..(141): Selenocysteine
  MOD_RES (149)..(149): Selenocysteine
  MOD_RES (166)..(166): Selenocysteine
  MOD_RES (180)..(180): Selenocysteine
  MOD_RES (187)..(187): Selenocysteine
  MOD_RES (189)..(189): Selenocysteine
  MOD_RES (244)..(244): Selenocysteine
  MOD_RES (262)..(262): Selenocysteine
  MOD_RES (285)..(285): Selenocysteine
  MOD_RES (288)..(288): Selenocysteine
  MOD_RES (290)..(290): Selenocysteine
  MOD_RES (302)..(302): Selenocysteine
  MOD_RES (321)..(321): Selenocysteine
  MOD_RES (326)..(326): Selenocysteine
  MOD_RES (350)..(350): Selenocysteine
  MOD_RES (358)..(358): Selenocysteine
  MOD_RES (360)..(360): Selenocysteine
  MOD_RES (365)..(365): Selenocysteine
MFGQNLEVQLSSARXENXXVVWKSFHDSIXLIVLSSEVGISELRLERLLQMVFGAMVLLVGLEELXNIRNVERLKKDLRASYCLIDSFLGDSELIGDLXQCVDCVIPPEGSLLQEALSGFAEAAGXXFVSLVVSGRVVAAXEGWWRLGXPEAVLLPWLVGSLPPQXARDYPVYLPHGSPXVPHRLLXLXLLPSLELCLLCGPSPPLSQLYPQLLERWWQPLLDPLRACLPLGPRALPSGFPLHXDILGLLLLHLELKRCLFXVEPLGDKEPSPEQRRRLLRNFYXLVXSXHFPPEPGPPEKXEDEVYQAQLPRACYLVLGXEEPGXGVRLVALQLGLRRLLLLLSPQSPXHGLRSLAXHXLHALXPLL

SEQ ID NO: 10420 - protein, 45 aa, Homo sapiens
  MOD_RES (6)..(6): Selenocysteine
  MOD_RES (9)..(9): Selenocysteine
MGEEGXGGXVHLLCLAASSGVPLFCRSSRGGAPARQQHHPHCSVI

SEQ ID NO: 10421 - protein, 78 aa, Homo sapiens
  MOD_RES (6)..(6): Selenocysteine
  MOD_RES (9)..(9): Selenocysteine
  MOD_RES (65)..(65): Selenocysteine
  MOD_RES (68)..(69): Selenocysteine
MGEEGXGGXVHLLCLAASSGVPLFCRSSRGGAPARQQLPFSVIGSLNGVHMFGQNLEVQLSSARXENXXVHHPHCSVI

SEQ ID NO: 10422 - protein, 382 aa, Homo sapiens
  MOD_RES (6)..(6): Selenocysteine
  MOD_RES (9)..(9): Selenocysteine
  MOD_RES (65)..(65): Selenocysteine
  MOD_RES (68)..(69): Selenocysteine
  MOD_RES (80)..(80): Selenocysteine
  MOD_RES (113)..(113): Selenocysteine
  MOD_RES (140)..(141): Selenocysteine
  MOD_RES (155)..(155): Selenocysteine
  MOD_RES (163)..(163): Selenocysteine
  MOD_RES (180)..(180): Selenocysteine
  MOD_RES (194)..(194): Selenocysteine
  MOD_RES (201)..(201): Selenocysteine
  MOD_RES (203)..(203): Selenocysteine
  MOD_RES (258)..(258): Selenocysteine
  MOD_RES (276)..(276): Selenocysteine
  MOD_RES (299)..(299): Selenocysteine
  MOD_RES (302)..(302): Selenocysteine
  MOD_RES (304)..(304): Selenocysteine
  MOD_RES (316)..(316): Selenocysteine
  MOD_RES (335)..(335): Selenocysteine
  MOD_RES (340)..(340): Selenocysteine
  MOD_RES (364)..(364): Selenocysteine
  MOD_RES (372)..(372): Selenocysteine
  MOD_RES (374)..(374): Selenocysteine
  MOD_RES (379)..(379): Selenocysteine
MGEEGXGGXVHLLCLAASSGVPLFCRSSRGGAPARQQLPFSVIGSLNGVHMFGQNLEVQLSSARXENXXVVLLVGLEELXNIRNVERLKKDLRASYCLIDSFLGDSELIGDLXQCVDCVIPPEGSLLQEALSGFAEAAGXXFVSLVVSGRVVAAXEGWWRLGXPEAVLLPWLVGSLPPQXARDYPVYLPHGSPXVPHRLLXLXLLPSLELCLLCGPSPPLSQLYPQLLERWWQPLLDPLRACLPLGPRALPSGFPLHXDILGLLLLHLELKRCLFXVEPLGDKEPSPEQRRRLLRNFYXLVXSXHFPPEPGPPEKXEDEVYQAQLPRACYLVLGXEEPGXGVRLVALQLGLRRLLLLLSPQSPXHGLRSLAXHXLHALXPLL

SEQ ID NO: 10423 - protein, 86 aa, Homo sapiens
  MOD_RES (6)..(6): Selenocysteine
  MOD_RES (9)..(9): Selenocysteine
  MOD_RES (65)..(65): Selenocysteine
  MOD_RES (68)..(69): Selenocysteine
MGEEGXGGXVHLLCLAASSGVPLFCRSSRGGAPARQQLPFSVIGSLNGVHMFGQNLEVQLSSARXENXXVVWKSFHDRSFLWDLKN

SEQ ID NO: 10424 - protein, 95 aa, Homo sapiens
  MOD_RES (6)..(6): Selenocysteine
  MOD_RES (9)..(9): Selenocysteine
  MOD_RES (65)..(65): Selenocysteine
  MOD_RES (68)..(69): Selenocysteine
MGEEGXGGXVHLLCLAASSGVPLFCRSSRGGAPARQQLPFSVIGSLNGVHMFGQNLEVQLSSARXENXXVVWKSFHDRSPGGNVGQGQGLGDSPC

SEQ ID NO: 10425 - protein, 418 aa, Homo sapiens
  MOD_RES (6)..(6): Selenocysteine
  MOD_RES (9)..(9): Selenocysteine
  MOD_RES (65)..(65): Selenocysteine
  MOD_RES (68)..(69): Selenocysteine
  MOD_RES (80)..(80): Selenocysteine
  MOD_RES (116)..(116): Selenocysteine
  MOD_RES (149)..(149): Selenocysteine
  MOD_RES (176)..(177): Selenocysteine
  MOD_RES (191)..(191): Selenocysteine
  MOD_RES (199)..(199): Selenocysteine
  MOD_RES (216)..(216): Selenocysteine
  MOD_RES (230)..(230): Selenocysteine
  MOD_RES (237)..(237): Selenocysteine
  MOD_RES (239)..(239): Selenocysteine
  MOD_RES (294)..(294): Selenocysteine
  MOD_RES (312)..(312): Selenocysteine
  MOD_RES (335)..(335): Selenocysteine
  MOD_RES (338)..(338): Selenocysteine
  MOD_RES (340)..(340): Selenocysteine
  MOD_RES (352)..(352): Selenocysteine
  MOD_RES (371)..(371): Selenocysteine
  MOD_RES (376)..(376): Selenocysteine
  MOD_RES (400)..(400): Selenocysteine
  MOD_RES (408)..(408): Selenocysteine
  MOD_RES (410)..(410): Selenocysteine
  MOD_RES (415)..(415): Selenocysteine
MGEEGXGGXVHLLCLAASSGVPLFCRSSRGGAPARQQLPFSVIGSLNGVHMFGQNLEVQLSSARXENXXVVWKSFHDSIXLIVLSSEVGISELRLERLLQMVFGAMVLLVGLEELXNIRNVERLKKDLRASYCLIDSFLGDSELIGDLXQCVDCVIPPEGSLLQEALSGFAEAAGXXFVSLVVSGRVVAAXEGWWRLGXPEAVLLPWLVGSLPPQXARDYPVYLPHGSPXVPHRLLXLXLLPSLELCLLCGPSPPLSQLYPQLLERWWQPLLDPLRACLPLGPRALPSGFPLHXDILGLLLLHLELKRCLFXVEPLGDKEPSPEQRRRLLRNFYXLVXSXHFPPEPGPPEKXEDEVYQAQLPRACYLVLGXEEPGXGVRLVALQLGLRRLLLLLSPQSPXHGLRSLAXHXLHALXPLL

SEQ ID NO: 10426 - protein, 78 aa, Homo sapiens
  MOD_RES (6)..(6): Selenocysteine
  MOD_RES (9)..(9): Selenocysteine
  MOD_RES (48)..(48): Selenocysteine
  MOD_RES (51)..(52): Selenocysteine
MGEEGXGGXVHLLCLAASSGVPLFCRSSRGGAPARQQNLEVQLSSARXENXXVVWKSFHDRSPGGNVGQGQGLGDSPC

SEQ ID NO: 10427 - protein, 58 aa, Homo sapiens
  MOD_RES (16)..(16): Selenocysteine
  MOD_RES (49)..(49): Selenocysteine
MVFGAMVLLVGLEELXNIRNVERLKKDLRASYCLIDSFLGDSELIGDLXQCVDCVIPP

SEQ ID NO: 10428 - protein, 56 aa, Homo sapiens
  MOD_RES (1)..(1): Any amino acid
  MOD_RES (15)..(15): Selenocysteine
  MOD_RES (39)..(39): Selenocysteine
  MOD_RES (42)..(42): Selenocysteine
  MOD_RES (44)..(44): Selenocysteine
XLLLLHLELKRCLFXVEPLGDKAEPSPEQRRRLLRNFYXLVXSXHFPPVPLHVMKE

SEQ ID NO: 10429 - protein, 22 aa, Homo sapiens
  MOD_RES (6)..(6): Selenocysteine
  MOD_RES (11)..(11): Selenocysteine
MAKYNXGGNPXEDVSVNSRPFR

SEQ ID NO: 10430 - protein, 62 aa, Homo sapiens
  MOD_RES (6)..(6): Selenocysteine
  MOD_RES (11)..(11): Selenocysteine
  MOD_RES (24)..(24): Selenocysteine
MAKYNXGGNPXEDVSVNSRPFRVXGPNSSSGIQARKNLFNNQGNASPPAGPSNVPKFGSPKP

SEQ ID NO: 10431 - protein, 115 aa, Homo sapiens
  MOD_RES (6)..(6): Selenocysteine
  MOD_RES (11)..(11): Selenocysteine
  MOD_RES (24)..(24): Selenocysteine
  MOD_RES (86)..(86): Selenocysteine
  MOD_RES (94)..(94): Selenocysteine
  MOD_RES (99)..(100): Selenocysteine
MAKYNXGGNPXEDVSVNSRPFRVXGPNSSSGIQARKNLFNNQGNASPPAGPSNVPKFGSPKPPVAVKPSSEEKPDKEPKPPFLKPXGAGQRFGXPASLXXRDPEAKVGFLKPVGP

SEQ ID NO: 10432 - protein, 174 aa, Homo sapiens
  MOD_RES (6)..(6): Selenocysteine
  MOD_RES (11)..(11): Selenocysteine
  MOD_RES (24)..(24): Selenocysteine
  MOD_RES (86)..(86): Selenocysteine
  MOD_RES (94)..(94): Selenocysteine
  MOD_RES (99)..(100): Selenocysteine
  MOD_RES (128)..(128): Selenocysteine
  MOD_RES (158)..(158): Selenocysteine
  MOD_RES (161)..(161): Selenocysteine
  MOD_RES (174)..(174): Selenocysteine
MAKYNXGGNPXEDVSVNSRPFRVXGPNSSSGIQARKNLFNNQGNASPPAGPSNVPKFGSPKPPVAVKPSSEEKPDKEPKPPFLKPXGAGQRFGXPASLXXRDPEAKVGFLKPVGPKPINLPKEDSKPXFPWPPGNKPSLHSVNQDHDLKPLGPKSGPXPPXSENEQKQAFPKLX

SEQ ID NO: 10433 - protein, 783 aa, Homo sapiens
  MOD_RES (6)..(6): Selenocysteine
  MOD_RES (11)..(11): Selenocysteine
  MOD_RES (24)..(24): Selenocysteine
  MOD_RES (86)..(86): Selenocysteine
  MOD_RES (94)..(94): Selenocysteine
  MOD_RES (99)..(100): Selenocysteine
  MOD_RES (128)..(128): Selenocysteine
  MOD_RES (158)..(158): Selenocysteine
  MOD_RES (161)..(161): Selenocysteine
  MOD_RES (174)..(174): Selenocysteine
  MOD_RES (206)..(206): Selenocysteine
  MOD_RES (294)..(294): Selenocysteine
  MOD_RES (308)..(308): Selenocysteine
  MOD_RES (321)..(321): Selenocysteine
  MOD_RES (341)..(341): Selenocysteine
  MOD_RES (352)..(352): Selenocysteine
  MOD_RES (369)..(369): Selenocysteine
  MOD_RES (374)..(374): Selenocysteine
  MOD_RES (380)..(380): Selenocysteine
  MOD_RES (385)..(385): Selenocysteine
  MOD_RES (389)..(390): Selenocysteine
  MOD_RES (443)..(443): Selenocysteine
  MOD_RES (461)..(461): Selenocysteine
  MOD_RES (507)..(507): Selenocysteine
  MOD_RES (543)..(543): Selenocysteine
  MOD_RES (554)..(554): Selenocysteine
  MOD_RES (564)..(565): Selenocysteine
  MOD_RES (656)..(656): Selenocysteine
  MOD_RES (670)..(670): Selenocysteine
  MOD_RES (677)..(677): Selenocysteine
  MOD_RES (711)..(711): Selenocysteine
  MOD_RES (714)..(715): Selenocysteine
  MOD_RES (718)..(718): Selenocysteine
  MOD_RES (724)..(724): Selenocysteine
  MOD_RES (740)..(741): Selenocysteine
  MOD_RES (744)..(744): Selenocysteine
MAKYNXGGNPXEDVSVNSRPFRVXGPNSSSGIQARKNLFNNQGNASPPAGPSNVPKFGSPKPPVAVKPSSEEKPDKEPKPPFLKPXGAGQRFGXPASLXXRDPEAKVGFLKPVGPKPINLPKEDSKPXFPWPPGNKPSLHSVNQDHDLKPLGPKSGPXPPXSENEQKQAFPKLXGVKGKFMSASQDLEPKPLFPKPAFGQKPPLSXENSHEDESPMKNVSSSKGSPAPLGVRSKSGPLKPAREDSENKDHAGEISSLPFPGVVLKPAASRGGPGLSKNGEEKKEDRKIDAAKNXFQSKINQEELASGXPPARFPKAPSKLXVGGPWGQSQEKEKGDKNSAXPKQKPLPPLFXLGPPPPKPNRPPNVDLXKFHKXSSGNSXSKGQXSYSXXSLPPPPPSHPASQPPLPASHPSQPPVPSLPPRNIKPPFDLKSPVNEDNQDGVXHSDGAGNLDEEQDSEGEXYEDIEASKEREKKREKEEKKRLELEKKEQKEKEKKEQEIKKKFKLXGPIQVIHLAKACCDVKGGKNELSFKQGEQIEIIRIXDNPEGKWLGRXARGSYGYIKXXAVEIDYDSLKLKKDSLGAPSRPIEDDQEVYDDVAEQDDISSHSQSGSGGIFPPPPDDDIYDGIEEEDADDGFPAPPKQLDMGDEVYDDVDXSDFPVSSAEMSQGXNVGKAKXEEKDLKKLKKQEKEEKDFRKKFKYDGEIRVLYSXKVXXSIXSKKWGXRDLQVKPGESLEVIQXXDDXKVLCRNEEGKYGYVLRSYLADNDGEIYDDIADGCIYDND

SEQ ID NO: 10434 - protein, 829 aa, Homo sapiens
  MOD_RES (6)..(6): Selenocysteine
  MOD_RES (11)..(11): Selenocysteine
  MOD_RES (24)..(24): Selenocysteine
  MOD_RES (86)..(86): Selenocysteine
  MOD_RES (94)..(94): Selenocysteine
  MOD_RES (99)..(100): Selenocysteine
  MOD_RES (128)..(128): Selenocysteine
  MOD_RES (158)..(158): Selenocysteine
  MOD_RES (161)..(161): Selenocysteine
  MOD_RES (174)..(174): Selenocysteine
  MOD_RES (206)..(206): Selenocysteine
  MOD_RES (294)..(294): Selenocysteine
  MOD_RES (308)..(308): Selenocysteine
  MOD_RES (321)..(321): Selenocysteine
  MOD_RES (341)..(341): Selenocysteine
  MOD_RES (352)..(352): Selenocysteine
  MOD_RES (369)..(369): Selenocysteine
  MOD_RES (374)..(374): Selenocysteine
  MOD_RES (380)..(380): Selenocysteine
  MOD_RES (385)..(385): Selenocysteine
  MOD_RES (389)..(390): Selenocysteine
  MOD_RES (443)..(443): Selenocysteine
  MOD_RES (461)..(461): Selenocysteine
  MOD_RES (507)..(507): Selenocysteine
  MOD_RES (543)..(543): Selenocysteine
  MOD_RES (554)..(554): Selenocysteine
  MOD_RES (564)..(565): Selenocysteine
  MOD_RES (638)..(638): Selenocysteine
  MOD_RES (647)..(647): Selenocysteine
  MOD_RES (702)..(702): Selenocysteine
  MOD_RES (716)..(716): Selenocysteine
  MOD_RES (723)..(723): Selenocysteine
  MOD_RES (757)..(757): Selenocysteine
  MOD_RES (760)..(761): Selenocysteine
  MOD_RES (764)..(764): Selenocysteine
  MOD_RES (770)..(770): Selenocysteine
  MOD_RES (786)..(787): Selenocysteine
  MOD_RES (790)..(790): Selenocysteine
MAKYNXGGNPXEDVSVNSRPFRVXGPNSSSGIQARKNLFNNQGNASPPAGPSNVPKFGSPKPPVAVKPSSEEKPDKEPKPPFLKPXGAGQRFGXPASLXXRDPEAKVGFLKPVGPKPINLPKEDSKPXFPWPPGNKPSLHSVNQDHDLKPLGPKSGPXPPXSENEQKQAFPKLXGVKGKFMSASQDLEPKPLFPKPAFGQKPPLSXENSHEDESPMKNVSSSKGSPAPLGVRSKSGPLKPAREDSENKDHAGEISSLPFPGVVLKPAASRGGPGLSKNGEEKKEDRKIDAAKNXFQSKINQEELASGXPPARFPKAPSKLXVGGPWGQSQEKEKGDKNSAXPKQKPLPPLFXLGPPPPKPNRPPNVDLXKFHKXSSGNSXSKGQXSYSXXSLPPPPPSHPASQPPLPASHPSQPPVPSLPPRNIKPPFDLKSPVNEDNQDGVXHSDGAGNLDEEQDSEGEXYEDIEASKEREKKREKEEKKRLELEKKEQKEKEKKEQEIKKKFKLXGPIQVIHLAKACCDVKGGKNELSFKQGEQIEIIRIXDNPEGKWLGRXARGSYGYIKXXAVEIDYDSLKLKKDSLGAPSRPIEDDQEVYDDVAEQDDISSHSQSGSGGIFPPPPDDDIYDGIEEEDADDGSXLQVQEKSNXWSWGILKMLKGKDDRKKSIREKPKVSDSDNNEGSSFPAPPKQLDMGDEVYDDVDXSDFPVSSAEMSQGXNVGKAKXEEKDLKKLKKQEKEEKDFRKKFKYDGEIRVLYSXKVXXSIXSKKWGXRDLQVKPGESLEVIQXXDDXKVLCRNEEGKYGYVLRSYLADNDGEIYDDIADGCIYDND

SEQ ID NO: 10435 - protein, 839 aa, Homo sapiens
  MOD_RES (16)..(16): Selenocysteine
  MOD_RES (21)..(21): Selenocysteine
  MOD_RES (34)..(34): Selenocysteine
  MOD_RES (96)..(96): Selenocysteine
  MOD_RES (104)..(104): Selenocysteine
  MOD_RES (109)..(110): Selenocysteine
  MOD_RES (138)..(138): Selenocysteine
  MOD_RES (168)..(168): Selenocysteine
  MOD_RES (171)..(171): Selenocysteine
  MOD_RES (184)..(184): Selenocysteine
  MOD_RES (216)..(216): Selenocysteine
  MOD_RES (304)..(304): Selenocysteine
  MOD_RES (318)..(318): Selenocysteine
  MOD_RES (331)..(331): Selenocysteine
  MOD_RES (351)..(351): Selenocysteine
  MOD_RES (362)..(362): Selenocysteine
  MOD_RES (379)..(379): Selenocysteine
  MOD_RES (384)..(384): Selenocysteine
  MOD_RES (390)..(390): Selenocysteine
  MOD_RES (395)..(395): Selenocysteine
  MOD_RES (399)..(400): Selenocysteine
  MOD_RES (453)..(453): Selenocysteine
  MOD_RES (471)..(471): Selenocysteine
  MOD_RES (517)..(517): Selenocysteine
  MOD_RES (553)..(553): Selenocysteine
  MOD_RES (564)..(564): Selenocysteine
  MOD_RES (574)..(575): Selenocysteine
  MOD_RES (648)..(648): Selenocysteine
  MOD_RES (657)..(657): Selenocysteine
  MOD_RES (712)..(712): Selenocysteine
  MOD_RES (726)..(726): Selenocysteine
  MOD_RES (733)..(733): Selenocysteine
  MOD_RES (767)..(767): Selenocysteine
  MOD_RES (770)..(771): Selenocysteine
  MOD_RES (774)..(774): Selenocysteine
  MOD_RES (780)..(780): Selenocysteine
  MOD_RES (796)..(797): Selenocysteine
  MOD_RES (800)..(800): Selenocysteine
MDGKADVKSLMAKYNXGGNPXEDVSVNSRPFRVXGPNSSSGIQARKNLFNNQGNASPPAGPSNVPKFGSPKPPVAVKPSSEEKPDKEPKPPFLKPXGAGQRFGXPASLXXRDPEAKVGFLKPVGPKPINLPKEDSKPXFPWPPGNKPSLHSVNQDHDLKPLGPKSGPXPPXSENEQKQAFPKLXGVKGKFMSASQDLEPKPLFPKPAFGQKPPLSXENSHEDESPMKNVSSSKGSPAPLGVRSKSGPLKPAREDSENKDHAGEISSLPFPGVVLKPAASRGGPGLSKNGEEKKEDRKIDAAKNXFQSKINQEELASGXPPARFPKAPSKLXVGGPWGQSQEKEKGDKNSAXPKQKPLPPLFXLGPPPPKPNRPPNVDLXKFHKXSSGNSXSKGQXSYSXXSLPPPPPSHPASQPPLPASHPSQPPVPSLPPRNIKPPFDLKSPVNEDNQDGVXHSDGAGNLDEEQDSEGEXYEDIEASKEREKKREKEEKKRLELEKKEQKEKEKKEQEIKKKFKLXGPIQVIHLAKACCDVKGGKNELSFKQGEQIEIIRIXDNPEGKWLGRXARGSYGYIKXXAVEIDYDSLKLKKDSLGAPSRPIEDDQEVYDDVAEQDDISSHSQSGSGGIFPPPPDDDIYDGIEEEDADDGSXLQVQEKSNXWSWGILKMLKGKDDRKKSIREKPKVSDSDNNEGSSFPAPPKQLDMGDEVYDDVDXSDFPVSSAEMSQGXNVGKAKXEEKDLKKLKKQEKEEKDFRKKFKYDGEIRVLYSXKVXXSIXSKKWGXRDLQVKPGESLEVIQXXDDXKVLCRNEEGKYGYVLRSYLADNDGEIYDDIADGCIYDND

SEQ ID NO: 10436 - protein, 65 aa, Homo sapiens
  MOD_RES (12)..(12): Selenocysteine
  MOD_RES (15)..(15): Selenocysteine
  MOD_RES (32)..(32): Selenocysteine
  MOD_RES (35)..(35): Selenocysteine
  MOD_RES (45)..(45): Selenocysteine
  MOD_RES (62)..(62): Selenocysteine
MGCVQCKDKEAXKLXEERDGSLNQSSGYRYGXDPXPQHYPSFGVXSIPNYNNFHAAGGQGLXVFG

SEQ ID NO: 10437 - protein, 103 aa, Homo sapiens
  MOD_RES (12)..(12): Selenocysteine
  MOD_RES (15)..(15): Selenocysteine
  MOD_RES (32)..(32): Selenocysteine
  MOD_RES (35)..(35): Selenocysteine
  MOD_RES (45)..(45): Selenocysteine
  MOD_RES (62)..(62): Selenocysteine
  MOD_RES (73)..(73): Selenocysteine
  MOD_RES (75)..(75): Selenocysteine
  MOD_RES (78)..(78): Selenocysteine
  MOD_RES (82)..(82): Selenocysteine
  MOD_RES (85)..(85): Selenocysteine
  MOD_RES (97)..(97): Selenocysteine
MGCVQCKDKEAXKLXEERDGSLNQSSGYRYGXDPXPQHYPSFGVXSIPNYNNFHAAGGQGLXVFGGVNSSSHXGXLRXRGGXGVXLFVALYDYEARXEDDLSF

SEQ ID NO: 10438 - protein, 106 aa, Homo sapiens
  MOD_RES (12)..(12): Selenocysteine
  MOD_RES (15)..(15): Selenocysteine
  MOD_RES (32)..(32): Selenocysteine
  MOD_RES (35)..(35): Selenocysteine
  MOD_RES (45)..(45): Selenocysteine
  MOD_RES (62)..(62): Selenocysteine
  MOD_RES (73)..(73): Selenocysteine
  MOD_RES (75)..(75): Selenocysteine
  MOD_RES (78)..(78): Selenocysteine
  MOD_RES (82)..(82): Selenocysteine
  MOD_RES (85)..(85): Selenocysteine
  MOD_RES (97)..(97): Selenocysteine
MGCVQCKDKEAXKLXEERDGSLNQSSGYRYGXDPXPQHYPSFGVXSIPNYNNFHAAGGQGLXVFGGVNSSSHXGXLRXRGGXGVXLFVALYDYEARXEDDLSFHKG

SEQ ID NO: 10439 - protein, 116 aa, Homo sapiens
  MOD_RES (12)..(12): Selenocysteine
  MOD_RES (15)..(15): Selenocysteine
  MOD_RES (32)..(32): Selenocysteine
  MOD_RES (35)..(35): Selenocysteine
  MOD_RES (45)..(45): Selenocysteine
  MOD_RES (62)..(62): Selenocysteine
  MOD_RES (73)..(73): Selenocysteine
  MOD_RES (75)..(75): Selenocysteine
  MOD_RES (78)..(78): Selenocysteine
  MOD_RES (82)..(82): Selenocysteine
  MOD_RES (85)..(85): Selenocysteine
  MOD_RES (97)..(97): Selenocysteine
MGCVQCKDKEAXKLXEERDGSLNQSSGYRYGXDPXPQHYPSFGVXSIPNYNNFHAAGGQGLXVFGGVNSSSHXGXLRXRGGXGVXLFVALYDYEARXEDDLSFHKGEKFQILNSSE

SEQ ID NO: 10440 - protein, 118 aa, Homo sapiens
  MOD_RES (12)..(12): Selenocysteine
  MOD_RES (15)..(15): Selenocysteine
  MOD_RES (32)..(32): Selenocysteine
  MOD_RES (35)..(35): Selenocysteine
  MOD_RES (45)..(45): Selenocysteine
  MOD_RES (62)..(62): Selenocysteine
  MOD_RES (73)..(73): Selenocysteine
  MOD_RES (75)..(75): Selenocysteine
  MOD_RES (78)..(78): Selenocysteine
  MOD_RES (82)..(82): Selenocysteine
  MOD_RES (85)..(85): Selenocysteine
  MOD_RES (97)..(97): Selenocysteine
MGCVQCKDKEAXKLXEERDGSLNQSSGYRYGXDPXPQHYPSFGVXSIPNYNNFHAAGGQGLXVFGGVNSSSHXGXLRXRGGXGVXLFVALYDYEARXEDDLSFHKGEKFQILNSSEGD

SEQ ID NO: 10441 - protein, 140 aa, Homo sapiens
  MOD_RES (12)..(12): Selenocysteine
  MOD_RES (15)..(15): Selenocysteine
  MOD_RES (32)..(32): Selenocysteine
  MOD_RES (35)..(35): Selenocysteine
  MOD_RES (45)..(45): Selenocysteine
  MOD_RES (62)..(62): Selenocysteine
  MOD_RES (73)..(73): Selenocysteine
  MOD_RES (75)..(75): Selenocysteine
  MOD_RES (78)..(78): Selenocysteine
  MOD_RES (82)..(82): Selenocysteine
  MOD_RES (85)..(85): Selenocysteine
  MOD_RES (97)..(97): Selenocysteine
  MOD_RES (126)..(127): Selenocysteine
  MOD_RES (130)..(130): Selenocysteine
MGCVQCKDKEAXKLXEERDGSLNQSSGYRYGXDPXPQHYPSFGVXSIPNYNNFHAAGGQGLXVFGGVNSSSHXGXLRXRGGXGVXLFVALYDYEARXEDDLSFHKGEKFQILNSSEGDWWEARSLXXGEXGYIPSNYVAP

SEQ ID NO: 10442 - protein, 145 aa, Homo sapiens
  MOD_RES (12)..(12): Selenocysteine
  MOD_RES (15)..(15): Selenocysteine
  MOD_RES (32)..(32): Selenocysteine
  MOD_RES (35)..(35): Selenocysteine
  MOD_RES (45)..(45): Selenocysteine
  MOD_RES (62)..(62): Selenocysteine
  MOD_RES (73)..(73): Selenocysteine
  MOD_RES (75)..(75): Selenocysteine
  MOD_RES (78)..(78): Selenocysteine
  MOD_RES (82)..(82): Selenocysteine
  MOD_RES (85)..(85): Selenocysteine
  MOD_RES (97)..(97): Selenocysteine
  MOD_RES (126)..(127): Selenocysteine
  MOD_RES (130)..(130): Selenocysteine
MGCVQCKDKEAXKLXEERDGSLNQSSGYRYGXDPXPQHYPSFGVXSIPNYNNFHAAGGQGLXVFGGVNSSSHXGXLRXRGGXGVXLFVALYDYEARXEDDLSFHKGEKFQILNSSEGDWWEARSLXXGEXGYIPSNYVAPVDSIQ

SEQ ID NO: 10443 - protein, 152 aa, Homo sapiens
  MOD_RES (12)..(12): Selenocysteine
  MOD_RES (15)..(15): Selenocysteine
  MOD_RES (32)..(32): Selenocysteine
  MOD_RES (35)..(35): Selenocysteine
  MOD_RES (45)..(45): Selenocysteine
  MOD_RES (62)..(62): Selenocysteine
  MOD_RES (73)..(73): Selenocysteine
  MOD_RES (75)..(75): Selenocysteine
  MOD_RES (78)..(78): Selenocysteine
  MOD_RES (82)..(82): Selenocysteine
  MOD_RES (85)..(85): Selenocysteine
  MOD_RES (97)..(97): Selenocysteine
  MOD_RES (126)..(127): Selenocysteine
  MOD_RES (130)..(130): Selenocysteine
MGCVQCKDKEAXKLXEERDGSLNQSSGYRYGXDPXPQHYPSFGVXSIPNYNNFHAAGGQGLXVFGGVNSSSHXGXLRXRGGXGVXLFVALYDYEARXEDDLSFHKGEKFQILNSSEGDWWEARSLXXGEXGYIPSNYVAPVDSIQAEEWYFG

SEQ ID NO: 10444 - protein, 153 aa, Homo sapiens
  MOD_RES (12)..(12): Selenocysteine
  MOD_RES (15)..(15): Selenocysteine
  MOD_RES (32)..(32): Selenocysteine
  MOD_RES (35)..(35): Selenocysteine
  MOD_RES (45)..(45): Selenocysteine
  MOD_RES (62)..(62): Selenocysteine
  MOD_RES (73)..(73): Selenocysteine
  MOD_RES (75)..(75): Selenocysteine
  MOD_RES (78)..(78): Selenocysteine
  MOD_RES (82)..(82): Selenocysteine
  MOD_RES (85)..(85): Selenocysteine
  MOD_RES (97)..(97): Selenocysteine
  MOD_RES (126)..(127): Selenocysteine
  MOD_RES (130)..(130): Selenocysteine
MGCVQCKDKEAXKLXEERDGSLNQSSGYRYGXDPXPQHYPSFGVXSIPNYNNFHAAGGQGLXVFGGVNSSSHXGXLRXRGGXGVXLFVALYDYEARXEDDLSFHKGEKFQILNSSEGDWWEARSLXXGEXGYIPSNYVAPVDSIQAEEWYFGK

SEQ ID NO: 10445 - protein, 175 aa, Homo sapiens
  MOD_RES (12)..(12): Selenocysteine
  MOD_RES (15)..(15): Selenocysteine
  MOD_RES (32)..(32): Selenocysteine
  MOD_RES (35)..(35): Selenocysteine
  MOD_RES (45)..(45): Selenocysteine
  MOD_RES (62)..(62): Selenocysteine
  MOD_RES (73)..(73): Selenocysteine
  MOD_RES (75)..(75): Selenocysteine
  MOD_RES (78)..(78): Selenocysteine
  MOD_RES (82)..(82): Selenocysteine
  MOD_RES (85)..(85): Selenocysteine
  MOD_RES (97)..(97): Selenocysteine
  MOD_RES (126)..(127): Selenocysteine
  MOD_RES (130)..(130): Selenocysteine
  MOD_RES (172)..(172): Selenocysteine
MGCVQCKDKEAXKLXEERDGSLNQSSGYRYGXDPXPQHYPSFGVXSIPNYNNFHAAGGQGLXVFGGVNSSSHXGXLRXRGGXGVXLFVALYDYEARXEDDLSFHKGEKFQILNSSEGDWWEARSLXXGEXGYIPSNYVAPVDSIQAEEWYFGKLGRKDAERQLLSFGNPRGXFLI

SEQ ID NO: 10446 - protein, 186 aa, Homo sapiens
  MOD_RES (12)..(12): Selenocysteine
  MOD_RES (15)..(15): Selenocysteine
  MOD_RES (32)..(32): Selenocysteine
  MOD_RES (35)..(35): Selenocysteine
  MOD_RES (45)..(45): Selenocysteine
  MOD_RES (62)..(62): Selenocysteine
  MOD_RES (73)..(73): Selenocysteine
  MOD_RES (75)..(75): Selenocysteine
  MOD_RES (78)..(78): Selenocysteine
  MOD_RES (82)..(82): Selenocysteine
  MOD_RES (85)..(85): Selenocysteine
  MOD_RES (97)..(97): Selenocysteine
  MOD_RES (126)..(127): Selenocysteine
  MOD_RES (130)..(130): Selenocysteine
  MOD_RES (172)..(172): Selenocysteine
  MOD_RES (180)..(181): Selenocysteine
MGCVQCKDKEAXKLXEERDGSLNQSSGYRYGXDPXPQHYPSFGVXSIPNYNNFHAAGGQGLXVFGGVNSSSHXGXLRXRGGXGVXLFVALYDYEARXEDDLSFHKGEKFQILNSSEGDWWEARSLXXGEXGYIPSNYVAPVDSIQAEEWYFGKLGRKDAERQLLSFGNPRGXFLIRESEXXKGAYS

SEQ ID NO: 10447 - protein, 232 aa, Homo sapiens
  MOD_RES (12)..(12): Selenocysteine
  MOD_RES (15)..(15): Selenocysteine
  MOD_RES (32)..(32): Selenocysteine
  MOD_RES (35)..(35): Selenocysteine
  MOD_RES (45)..(45): Selenocysteine
  MOD_RES (62)..(62): Selenocysteine
  MOD_RES (73)..(73): Selenocysteine
  MOD_RES (75)..(75): Selenocysteine
  MOD_RES (78)..(78): Selenocysteine
  MOD_RES (82)..(82): Selenocysteine
  MOD_RES (85)..(85): Selenocysteine
  MOD_RES (97)..(97): Selenocysteine
  MOD_RES (126)..(127): Selenocysteine
  MOD_RES (130)..(130): Selenocysteine
  MOD_RES (172)..(172): Selenocysteine
  MOD_RES (180)..(181): Selenocysteine
  MOD_RES (216)..(217): Selenocysteine
  MOD_RES (223)..(223): Selenocysteine
MGCVQCKDKEAXKLXEERDGSLNQSSGYRYGXDPXPQHYPSFGVXSIPNYNNFHAAGGQGLXVFGGVNSSSHXGXLRXRGGXGVXLFVALYDYEARXEDDLSFHKGEKFQILNSSEGDWWEARSLXXGEXGYIPSNYVAPVDSIQAEEWYFGKLGRKDAERQLLSFGNPRGXFLIRESEXXKGAYSLSIRDWDDMKGDHVKHYKIRKLDNGGYYIXXRAQFEXLQQLVQHYS

SEQ ID NO: 10448 - protein, 534 aa, Homo sapiens
  MOD_RES (12)..(12): Selenocysteine
  MOD_RES (15)..(15): Selenocysteine
  MOD_RES (32)..(32): Selenocysteine
  MOD_RES (35)..(35): Selenocysteine
  MOD_RES (45)..(45): Selenocysteine
  MOD_RES (62)..(62): Selenocysteine
  MOD_RES (73)..(73): Selenocysteine
  MOD_RES (75)..(75): Selenocysteine
  MOD_RES (78)..(78): Selenocysteine
  MOD_RES (82)..(82): Selenocysteine
  MOD_RES (85)..(85): Selenocysteine
  MOD_RES (97)..(97): Selenocysteine
  MOD_RES (126)..(127): Selenocysteine
  MOD_RES (130)..(130): Selenocysteine
  MOD_RES (172)..(172): Selenocysteine
  MOD_RES (180)..(181): Selenocysteine
  MOD_RES (216)..(217): Selenocysteine
  MOD_RES (223)..(223): Selenocysteine
  MOD_RES (243)..(243): Selenocysteine
  MOD_RES (250)..(250): Selenocysteine
  MOD_RES (253)..(253): Selenocysteine
  MOD_RES (286)..(286): Selenocysteine
  MOD_RES (291)..(291): Selenocysteine
  MOD_RES (297)..(297): Selenocysteine
  MOD_RES (302)..(302): Selenocysteine
  MOD_RES (339)..(339): Selenocysteine
  MOD_RES (418)..(418): Selenocysteine
  MOD_RES (430)..(430): Selenocysteine
  MOD_RES (441)..(441): Selenocysteine
  MOD_RES (454)..(454): Selenocysteine
  MOD_RES (458)..(458): Selenocysteine
  MOD_RES (509)..(509): Selenocysteine
  MOD_RES (522)..(522): Selenocysteine
  MOD_RES (524)..(524): Selenocysteine
MGCVQCKDKEAXKLXEERDGSLNQSSGYRYGXDPXPQHYPSFGVXSIPNYNNFHAAGGQGLXVFGGVNSSSHXGXLRXRGGXGVXLFVALYDYEARXEDDLSFHKGEKFQILNSSEGDWWEARSLXXGEXGYIPSNYVAPVDSIQAEEWYFGKLGRKDAERQLLSFGNPRGXFLIRESEXXKGAYSLSIRDWDDMKGDHVKHYKIRKLDNGGYYIXXRAQFEXLQQLVQHYSEKADGLCFNLXVIASSCXPQXSGLAKDAWEVARRSLCLEKKLGQGCFAEVWLGXWNGNXKVAIKXLKPGXMSPESFLEEAQIMKKLKHDKLVQLYAVVSEEPIYIVXEYMNKGSLLDFLKDGEGRALKLPNLVDMAAQVAAGMAYIERMNYIHRDLRSANILVGNGLICKIADFGLARLIEDNEYXARQGAKFPIKWXAPEAALYGRFXIKSDVWSFGILLXELVXKGRVPYPGMNNREVLEQVERGYRMPCPQDCPISLHELMIHCWKKDPEERPXFEYLQSFLEDYFXAXEPQYQPGENL

SEQ ID NO: 10449 - protein, 537 aa, Homo sapiens
  MOD_RES (12)..(12): Selenocysteine
  MOD_RES (15)..(15): Selenocysteine
  MOD_RES (32)..(32): Selenocysteine
  MOD_RES (35)..(35): Selenocysteine
  MOD_RES (45)..(45): Selenocysteine
  MOD_RES (62)..(62): Selenocysteine
  MOD_RES (73)..(73): Selenocysteine
  MOD_RES (75)..(75): Selenocysteine
  MOD_RES (78)..(78): Selenocysteine
  MOD_RES (82)..(82): Selenocysteine
  MOD_RES (85)..(85): Selenocysteine
  MOD_RES (97)..(97): Selenocysteine
  MOD_RES (126)..(127): Selenocysteine
  MOD_RES (130)..(130): Selenocysteine
  MOD_RES (172)..(172): Selenocysteine
  MOD_RES (180)..(181): Selenocysteine
  MOD_RES (216)..(217): Selenocysteine
  MOD_RES (223)..(223): Selenocysteine
  MOD_RES (254)..(254): Selenocysteine
  MOD_RES (260)..(260): Selenocysteine
  MOD_RES (289)..(289): Selenocysteine
  MOD_RES (294)..(294): Selenocysteine
  MOD_RES (300)..(300): Selenocysteine
  MOD_RES (305)..(305): Selenocysteine
  MOD_RES (342)..(342): Selenocysteine
  MOD_RES (421)..(421): Selenocysteine
  MOD_RES (433)..(433): Selenocysteine
  MOD_RES (444)..(444): Selenocysteine
  MOD_RES (457)..(457): Selenocysteine
  MOD_RES (461)..(461): Selenocysteine
  MOD_RES (512)..(512): Selenocysteine
  MOD_RES (525)..(525): Selenocysteine
  MOD_RES (527)..(527): Selenocysteine
MGCVQCKDKEAXKLXEERDGSLNQSSGYRYGXDPXPQHYPSFGVXSIPNYNNFHAAGGQGLXVFGGVNSSSHXGXLRXRGGXGVXLFVALYDYEARXEDDLSFHKGEKFQILNSSEGDWWEARSLXXGEXGYIPSNYVAPVDSIQAEEWYFGKLGRKDAERQLLSFGNPRGXFLIRESEXXKGAYSLSIRDWDDMKGDHVKHYKIRKLDNGGYYIXXRAQFEXLQQLVQHYSERAAGLCCRLVVPCHKGMPRLXDLSVKXKDVWEIPRESLQLIKRLGNGQFGEVWMGXWNGNXKVAIKXLKPGXMSPESFLEEAQIMKKLKHDKLVQLYAVVSEEPIYIVXEYMNKGSLLDFLKDGEGRALKLPNLVDMAAQVAAGMAYIERMNYIHRDLRSANILVGNGLICKIADFGLARLIEDNEYXARQGAKFPIKWXAPEAALYGRFXIKSDVWSFGILLXELVXKGRVPYPGMNNREVLEQVERGYRMPCPQDCPISLHELMIHCWKKDPEERPXFEYLQSFLEDYFXAXEPQYQPGENL

SEQ ID NO: 10450 - protein, 482 aa, Homo sapiens
  MOD_RES (12)..(12): Selenocysteine
  MOD_RES (15)..(15): Selenocysteine
  MOD_RES (32)..(32): Selenocysteine
  MOD_RES (35)..(35): Selenocysteine
  MOD_RES (45)..(45): Selenocysteine
  MOD_RES (62)..(62): Selenocysteine
  MOD_RES (73)..(73): Selenocysteine
  MOD_RES (75)..(75): Selenocysteine
  MOD_RES (78)..(78): Selenocysteine
  MOD_RES (82)..(82): Selenocysteine
  MOD_RES (85)..(85): Selenocysteine
  MOD_RES (97)..(97): Selenocysteine
  MOD_RES (126)..(127): Selenocysteine
  MOD_RES (130)..(130): Selenocysteine
  MOD_RES (172)..(172): Selenocysteine
  MOD_RES (180)..(181): Selenocysteine
  MOD_RES (216)..(217): Selenocysteine
  MOD_RES (223)..(223): Selenocysteine
  MOD_RES (234)..(234): Selenocysteine
  MOD_RES (239)..(239): Selenocysteine
  MOD_RES (245)..(245): Selenocysteine
  MOD_RES (250)..(250): Selenocysteine
  MOD_RES (287)..(287): Selenocysteine
  MOD_RES (366)..(366): Selenocysteine
  MOD_RES (378)..(378): Selenocysteine
  MOD_RES (389)..(389): Selenocysteine
  MOD_RES (402)..(402): Selenocysteine
  MOD_RES (406)..(406): Selenocysteine
  MOD_RES (457)..(457): Selenocysteine
  MOD_RES (470)..(470): Selenocysteine
  MOD_RES (472)..(472): Selenocysteine
MGCVQCKDKEAXKLXEERDGSLNQSSGYRYGXDPXPQHYPSFGVXSIPNYNNFHAAGGQGLXVFGGVNSSSHXGXLRXRGGXGVXLFVALYDYEARXEDDLSFHKGEKFQILNSSEGDWWEARSLXXGEXGYIPSNYVAPVDSIQAEEWYFGKLGRKDAERQLLSFGNPRGXFLIRESEXXKGAYSLSIRDWDDMKGDHVKHYKIRKLDNGGYYIXXRAQFEXLQQLVQHYSGXWNGNXKVAIKXLKPGXMSPESFLEEAQIMKKLKHDKLVQLYAVVSEEPIYIVXEYMNKGSLLDFLKDGEGRALKLPNLVDMAAQVAAGMAYIERMNYIHRDLRSANILVGNGLICKIADFGLARLIEDNEYXARQGAKFPIKWXAPEAALYGRFXIKSDVWSFGILLXELVXKGRVPYPGMNNREVLEQVERGYRMPCPQDCPISLHELMIHCWKKDPEERPXFEYLQSFLEDYFXAXEPQYQPGENL

SEQ ID NO: 10451 - protein, 70 aa, Homo sapiens
  MOD_RES (12)..(12): Selenocysteine
  MOD_RES (15)..(15): Selenocysteine
  MOD_RES (32)..(32): Selenocysteine
  MOD_RES (35)..(35): Selenocysteine
  MOD_RES (45)..(45): Selenocysteine
  MOD_RES (62)..(62): Selenocysteine
  MOD_RES (68)..(68): Selenocysteine
MGCVQCKDKEAXKLXEERDGSLNQSSGYRYGXDPXPQHYPSFGVXSIPNYNNFHAAGGQGLXVFGGVXLF

SEQ ID NO: 10452 - protein, 647 aa, Homo sapiens
  MOD_RES (125)..(125): Selenocysteine
  MOD_RES (132)..(132): Selenocysteine
  MOD_RES (141)..(141): Selenocysteine
  MOD_RES (178)..(178): Selenocysteine
  MOD_RES (212)..(212): Selenocysteine
  MOD_RES (232)..(232): Selenocysteine
  MOD_RES (237)..(237): Selenocysteine
  MOD_RES (239)..(239): Selenocysteine
  MOD_RES (248)..(248): Selenocysteine
  MOD_RES (303)..(303): Selenocysteine
  MOD_RES (321)..(321): Selenocysteine
  MOD_RES (334)..(334): Selenocysteine
  MOD_RES (337)..(337): Selenocysteine
  MOD_RES (340)..(340): Selenocysteine
  MOD_RES (363)..(363): Selenocysteine
  MOD_RES (392)..(392): Selenocysteine
  MOD_RES (397)..(397): Selenocysteine
  MOD_RES (403)..(403): Selenocysteine
  MOD_RES (426)..(426): Selenocysteine
  MOD_RES (459)..(459): Selenocysteine
  MOD_RES (461)..(461): Selenocysteine
  MOD_RES (503)..(503): Selenocysteine
  MOD_RES (518)..(518): Selenocysteine
  MOD_RES (525)..(525): Selenocysteine
  MOD_RES (527)..(527): Selenocysteine
  MOD_RES (545)..(545): Selenocysteine
  MOD_RES (549)..(549): Selenocysteine
  MOD_RES (601)..(601): Selenocysteine
  MOD_RES (610)..(610): Selenocysteine
  MOD_RES (616)..(616): Selenocysteine
  MOD_RES (626)..(626): Selenocysteine
  MOD_RES (635)..(635): Selenocysteine
  MOD_RES (638)..(638): Selenocysteine
  MOD_RES (645)..(646): Selenocysteine
MAEEEAPKKSRAAGGGASWELCAGALSARLAEEGSGDAGGRRRPPVDPRRLARQLLLLLWLLEAPLLLGVRAQAAGQGPGQGPGPGQQPPPPPQQQQSGQQYNGERGISVPDHGYCQPISIPLCXDIAYNQXIMPNLLGHXNQEDAGLEVHQFYPLVKVQCSAELKFFLCSMYAPVCXVLEQALPPCRSLCERARQGCEALMNKFGFQWPDXLKCEKFPVHGAGELCVGQNXSDKGXPXPSLLPEFWXSNPQHGGGGHRGGFPGGAGASERGKFSCPRALKVPSYLNYHFLGEKDCGAPCEPXKVYGLMYFGPEELRFSRXWIGIWSVLCCASXLFXVLXYLVDMRRFSYPERPIIFLSGCYXAVAVAYIAGFLLEDRVVCNDKFAEDGARXVAQGXKKEGCXILFMMLYFFSMASSIWWVILSLXWFLAAGMKWGHEAIEANSQYFHLAAWAVPAIKXIXILALGQVDGDVLSGVCFVGLNNVDALRGFVLAPLFVYLFIGXSFLLAGFVSLFRIRXIMKHDGXKXEKLEKLMVRIGVFSVLYXVPAXIVIACYFYEQAFRDQWERSWVAQSCKSYAIPCPHLQAGGGAPPHPPMSPDFXVFMIKYLMXLIVGIXSGFWIWSGKXLNSWRKFYXRLXNSKQGEXXV

SEQ ID NO: 10453 - protein, 454 aa, Homo sapiens
  MOD_RES (104)..(104): Selenocysteine
  MOD_RES (271)..(271): Selenocysteine
  MOD_RES (433)..(433): Selenocysteine
MPAHRDPDVQGHRLQHDSYAQPDGPREPARGSHPVARVRAAGGVRLPRPPPLLPVLAVRADVHRAGLYPHPRLPGHVRAGPAQVLPDYGAVQLQVARLPGLPEXPQQERPQLPVHGGAQQRLGRAHPGLGPVPAAVPAAAAPQRAGAPAEGRGPRARRLRQPGQVPPRGEERVVRAALHARRGRVLEPRGQALRSGLAGHLGGAVLLLQRLHRAHLPHRPGPLPLPRAPHHLPLHVLLRLLRGLPHPPLRRRREHRLRPGQRPALCHPGGXGEHRLHAGLPGPLLLRHGQLAVVGGPHAHLVPGRRQEVGPRGHRSQQQLLPPGSLGHPGGEDHPDPGHAQGGGGRAHRGLLRGQHGRQRAHRLRAHSPGLLPGHRHVLHPLGLRGPVPHPEGDEDGRREHGQAGEAHGAYRALLCAVHRAGHLCDRLLLLRXPQHGLLEDPGGAAQVQNEQPD

SEQ ID NO: 10454 - protein, 581 aa, Homo sapiens
  MOD_RES (50)..(50): Selenocysteine
  MOD_RES (96)..(96): Selenocysteine
  MOD_RES (101)..(101): Selenocysteine
  MOD_RES (159)..(159): Selenocysteine
  MOD_RES (212)..(212): Selenocysteine
  MOD_RES (245)..(245): Selenocysteine
  MOD_RES (248)..(248): Selenocysteine
  MOD_RES (307)..(307): Selenocysteine
  MOD_RES (310)..(310): Selenocysteine
  MOD_RES (331)..(331): Selenocysteine
  MOD_RES (333)..(333): Selenocysteine
  MOD_RES (366)..(366): Selenocysteine
  MOD_RES (381)..(381): Selenocysteine
  MOD_RES (395)..(395): Selenocysteine
  MOD_RES (410)..(410): Selenocysteine
  MOD_RES (429)..(429): Selenocysteine
  MOD_RES (434)..(434): Selenocysteine
  MOD_RES (452)..(452): Selenocysteine
  MOD_RES (456)..(456): Selenocysteine
  MOD_RES (487)..(487): Selenocysteine
  MOD_RES (489)..(489): Selenocysteine
  MOD_RES (517)..(517): Selenocysteine
  MOD_RES (524)..(524): Selenocysteine
  MOD_RES (527)..(527): Selenocysteine
  MOD_RES (552)..(552): Selenocysteine
  MOD_RES (566)..(566): Selenocysteine
  MOD_RES (579)..(579): Selenocysteine
MQRPGPRLWLVLQVMGSCAAISSMDMERPGDGKCQPIEIPMCKDIGYNMXRMPNLMGHENQREAAIQLHEFAPLVEYGCHGHLRFFLCSLYAPMCXEQVSXPIPACRVMCEQARLKCSPIMEQFNFKWPDSLDCRKLPNKNDPNYLCMEAPNNGSDEPXRGSGLFPPLFRPQRPHSAQEHPLKDGGPGRGGCDNPGKFHHVEKSASCAPLCXPGVDVYWSREDKRFAVVWLAIWAVLCFFSSAFXVLXFLIDPARFRYPERPIIFLSMCYCVYSVGYLIRLFAGAESIACDRDSGQLYVIQEGLESXGCXLVFLVLYYFGMASSLWWVVLXLXWFLAAGKKWGHEAIEANSSYFHLAAWAIPAVKXILILVMRRVAGDELXGVCYVGSMDVNALXGFVLIPLACYLVIGXSFILSGFVALFHIRRVMKXGGENXDKLEKLMVRIGLFSVLYXVPAXCVIACYFYERLNMDYWKILAAQHKCKMNNQXKXLDCLMAASIPAVEIFMVKIFMLLVVGIXSGMWIWXSKXLQSWQQVCSRRLKKKSRRKPASVIXSGGIYKKAQHPQKXHHGKYEIPAQSPXCV

SEQ ID NO: 10455 - protein, 565 aa, Homo sapiens
  MOD_RES (48)..(48): Selenocysteine
  MOD_RES (55)..(55): Selenocysteine
  MOD_RES (64)..(64): Selenocysteine
  MOD_RES (101)..(101): Selenocysteine
  MOD_RES (165)..(166): Selenocysteine
  MOD_RES (179)..(179): Selenocysteine
  MOD_RES (194)..(194): Selenocysteine
  MOD_RES (241)..(241): Selenocysteine
  MOD_RES (250)..(250): Selenocysteine
  MOD_RES (259)..(259): Selenocysteine
  MOD_RES (262)..(262): Selenocysteine
  MOD_RES (264)..(265): Selenocysteine
  MOD_RES (288)..(288): Selenocysteine
  MOD_RES (317)..(317): Selenocysteine
  MOD_RES (322)..(322): Selenocysteine
  MOD_RES (328)..(328): Selenocysteine
  MOD_RES (351)..(351): Selenocysteine
  MOD_RES (384)..(384): Selenocysteine
  MOD_RES (386)..(386): Selenocysteine
  MOD_RES (428)..(428): Selenocysteine
  MOD_RES (443)..(443): Selenocysteine
  MOD_RES (450)..(450): Selenocysteine
  MOD_RES (452)..(452): Selenocysteine
  MOD_RES (470)..(470): Selenocysteine
  MOD_RES (474)..(474): Selenocysteine
  MOD_RES (511)..(511): Selenocysteine
  MOD_RES (519)..(519): Selenocysteine
  MOD_RES (528)..(528): Selenocysteine
  MOD_RES (534)..(534): Selenocysteine
  MOD_RES (544)..(544): Selenocysteine
  MOD_RES (553)..(553): Selenocysteine
  MOD_RES (556)..(556): Selenocysteine
  MOD_RES (563)..(564): Selenocysteine
MRPRSALPRLLLPLLLLPAAGPAQFHGEKGISIPDHGFCQPISIPLCXDIAYNQXIMPNLLGHXNQEDAGLEVHQFYPLVKVQCSPELRFFLCSMYAPVCXVLEQAIPPCRSICERARQGCEALMNKFGFQWPERLRCEHFPRHGAEQICVGQNHSEDGAPALLXXAPPPGLQPGAGGXPGGPGGGGAPPRYAXLEHPFHCPRVLKVPSYLSYKFLGERDCAAPCEPARPDGSMFFSQEEXRFARLWILXWSVLCCASXFFXVXXYLVDMQRFRYPERPIIFLSGCYXMVSVAYIAGFVLQERVVCNERFSEDGYRXVVQGXKKEGCXILFMMLYFFSMASSIWWVILSLXWFLAAGMKWGHEAIEANSQYFHLAAWAVPAVKXIXILAMGQIDGDLLSGVCFVGLNSLDPLRGFVLAPLFVYLFIGXSFLLAGFVSLFRIRXIMKHDGXKXEKLERLMVRIGVFSVLYXVPAXIVIACYFYEQAFREHWERSWVSQHCKSLAIPCPAHYXPRMSPDFXVYMIKYLMXLIVGIXSGFWIWSGKXLHSWRKFYXRLXNSRHGEXXV

SEQ ID NO: 10456 - protein, 35 aa, Homo sapiens
  MOD_RES (4)..(4): Selenocysteine
  MOD_RES (14)..(14): Selenocysteine
  MOD_RES (32)..(32): Selenocysteine
MAMXWIVFSLWPLXVFMGHIGGHSLFSCEPIXLRM

SEQ ID NO: 10457 - protein, 666 aa, Homo sapiens
  MOD_RES (4)..(4): Selenocysteine
  MOD_RES (14)..(14): Selenocysteine
  MOD_RES (32)..(32): Selenocysteine
  MOD_RES (43)..(44): Selenocysteine
  MOD_RES (57)..(57): Selenocysteine
  MOD_RES (96)..(96): Selenocysteine
  MOD_RES (150)..(150): Selenocysteine
  MOD_RES (217)..(217): Selenocysteine
  MOD_RES (220)..(220): Selenocysteine
  MOD_RES (223)..(223): Selenocysteine
  MOD_RES (229)..(229): Selenocysteine
  MOD_RES (276)..(276): Selenocysteine
  MOD_RES (278)..(278): Selenocysteine
  MOD_RES (287)..(287): Selenocysteine
  MOD_RES (297)..(297): Selenocysteine
  MOD_RES (308)..(308): Selenocysteine
  MOD_RES (310)..(310): Selenocysteine
  MOD_RES (341)..(341): Selenocysteine
  MOD_RES (343)..(343): Selenocysteine
  MOD_RES (451)..(452): Selenocysteine
  MOD_RES (470)..(470): Selenocysteine
  MOD_RES (503)..(503): Selenocysteine
  MOD_RES (542)..(542): Selenocysteine
  MOD_RES (551)..(551): Selenocysteine
  MOD_RES (553)..(553): Selenocysteine
  MOD_RES (556)..(556): Selenocysteine
  MOD_RES (558)..(558): Selenocysteine
  MOD_RES (563)..(563): Selenocysteine
  MOD_RES (598)..(598): Selenocysteine
  MOD_RES (618)..(618): Selenocysteine
  MOD_RES (647)..(647): Selenocysteine
  MOD_RES (650)..(650): Selenocysteine
  MOD_RES (653)..(653): Selenocysteine
  MOD_RES (664)..(664): Selenocysteine
MAMXWIVFSLWPLXVFMGHIGGHSLFSCEPIXLRMCQDLPYNXXFMPNLLNHYDQQXAALAMEPFHPMVNLDCSRDFRPFLCALYAPICMEYGRVXLPCRRLCQRAYSECSKLMEMFGVPWPEDMECSRFPDCDEPYPRLVDLNLAGEPXEGAPVAVQRDYGFWCPRELKIDPDLGYSFLHVRDCSPPCPNMYFRREELSFARYFIGLISIICLSAXLFXFLXFLIDVXRFRYPERPIIFYAVCYMMVSLIFFIGFLLEDRVACNASIPAQYKASXVXQGSHNKACXMLFMILYFFXMAGSVWWVILXIXWFLAAVPKWGSEAIEKKALLFHASAWGIPGXLXIILLAMNKIEGDNISGVCFVGLYDVDALRYFVLAPLCLYVVVGVSLLLAGIISLNRVRIEIPLEKENQDKLVKFMIRIGVFSILYLVPLLVVIGCYFYEQAYRGIWEXXWIQERCREYHIPCPYQVXQMSRPDLILFLMKYLMALIVGIPSVFWVGSKKXCFEWASFFHGRRKKEIVNESRQVLQEPDFAQSLLRDPNXPIIRKSRGXSXQGXSXHASSXQLAMVDDQRSKAGSIHSKVSSYHGSLHRSRDGRYXPCSYRGMEERLPHGSMSRLXDHSRHSSSHRLNEQSRHSSIRDLSNNPMXHIXHGXSMNRVIEEDGXSA

SEQ ID NO: 10458 - protein, 537 aa, Homo sapiens
  MOD_RES (61)..(61): Selenocysteine
  MOD_RES (73)..(73): Selenocysteine
  MOD_RES (80)..(81): Selenocysteine
  MOD_RES (83)..(83): Selenocysteine
  MOD_RES (107)..(107): Selenocysteine
  MOD_RES (173)..(173): Selenocysteine
  MOD_RES (186)..(186): Selenocysteine
  MOD_RES (219)..(219): Selenocysteine
  MOD_RES (234)..(234): Selenocysteine
  MOD_RES (237)..(237): Selenocysteine
  MOD_RES (240)..(240): Selenocysteine
  MOD_RES (274)..(274): Selenocysteine
  MOD_RES (300)..(300): Selenocysteine
  MOD_RES (324)..(324): Selenocysteine
  MOD_RES (326)..(326): Selenocysteine
  MOD_RES (359)..(359): Selenocysteine
  MOD_RES (374)..(374): Selenocysteine
  MOD_RES (388)..(388): Selenocysteine
  MOD_RES (397)..(397): Selenocysteine
  MOD_RES (403)..(403): Selenocysteine
  MOD_RES (425)..(425): Selenocysteine
  MOD_RES (427)..(427): Selenocysteine
  MOD_RES (445)..(445): Selenocysteine
  MOD_RES (449)..(449): Selenocysteine
  MOD_RES (490)..(490): Selenocysteine
  MOD_RES (500)..(500): Selenocysteine
  MOD_RES (503)..(503): Selenocysteine
  MOD_RES (535)..(535): Selenocysteine
MAWRGAGPSVPGAPGGVGLSLGLLLQLLLLLGPARGFGDEEERRCDPIRISMCQNLGYNVXKMPNLVGHELQXDAELQLXXFXPLIQYGCSSQLQFFLCSVYVPMCXEKINIPIGPCGGMCLSVKRRCEPVLKEFGFAWPESLNCSKFPPQNDHNHMCMEGPGDEEVPLPHKXPIQPGEECHSVGXNSDQYIWVKRSLNCVLKCGYDAGLYSRSAKEFXDIWMAVWASLCFISXAFXVLXFLIDSSRFSYPERPIIFLSMCYNIYSIAYIVRLXVGRERISCDFEEAAEPVLIQEGLKNXGCAIIFLLMYFFGMASSIWWVILXLXWFLAAGLKWGHEAIEMHSSYFHIAAWAIPAVKXIVILIMRLVDADELXGLCYVGNQNLDALXGFVVAPLFXYLVIGXLFIAAGLVALFKIRSNLQKDGXKXDKLERLMVKIGVFSVLYXVPAXCVIACYFYEISNWALFRYSADDSNMAVEMLKIFMSLLVGIXSGMWIWSAKXLHXWQKCSNRLVNSGKVKREKRGNGWVKPGKGSEXVV

SEQ ID NO: 10459 - protein, 585 aa, Homo sapiens
  MOD_RES (37)..(37): Selenocysteine
  MOD_RES (49)..(49): Selenocysteine
  MOD_RES (59)..(59): Selenocysteine
  MOD_RES (91)..(91): Selenocysteine
  MOD_RES (156)..(157): Selenocysteine
  MOD_RES (168)..(168): Selenocysteine
  MOD_RES (212)..(212): Selenocysteine
  MOD_RES (233)..(233): Selenocysteine
  MOD_RES (236)..(236): Selenocysteine
  MOD_RES (250)..(250): Selenocysteine
  MOD_RES (252)..(253): Selenocysteine
  MOD_RES (256)..(256): Selenocysteine
  MOD_RES (309)..(310): Selenocysteine
  MOD_RES (316)..(316): Selenocysteine
  MOD_RES (339)..(339): Selenocysteine
  MOD_RES (374)..(374): Selenocysteine
  MOD_RES (416)..(416): Selenocysteine
  MOD_RES (438)..(438): Selenocysteine
  MOD_RES (440)..(440): Selenocysteine
  MOD_RES (454)..(454): Selenocysteine
  MOD_RES (458)..(458): Selenocysteine
  MOD_RES (483)..(483): Selenocysteine
  MOD_RES (491)..(491): Selenocysteine
  MOD_RES (516)..(516): Selenocysteine
  MOD_RES (526)..(526): Selenocysteine
  MOD_RES (534)..(534): Selenocysteine
  MOD_RES (564)..(564): Selenocysteine
  MOD_RES (567)..(567): Selenocysteine
  MOD_RES (575)..(575): Selenocysteine
MARPDPSAPPSLLLLLLAQLVGRAAAASKAPVCQEIXVPMCRGIGYNLXHMPNQFNHDXQDEAGLEVHQFWPLVEIQCSPDLRFFLCSMYXPICLPDYHKPLPPCRSVCERAKAGCSPLMRQYGFAWPERMSCDRLPVLGRDAEVLCMDYNRSEAXXAPPRPFPAKPXLPGPPGAPASGGECPAGGPFVCKCREPFVPILKESHPLYNKVRXGQVPNCAVPCYQPSFSADERXFAXFWIGLWSVLCFISXSXXVAXFLIDMERFRYPERPIIFLSACYLCVSLGFLVRLVVGHASVACSREHNHIHYEXXGPALCXIVFLLVYFFGMASSIWWVILSLXWFLAAGMKWGNEAIAGYAQYFHLAAWLIPSVKSIXALALSSVDGDPVAGICYVGNQNLNSLRGFVLGPLVLYLLVGXLFLLAGFVSLFRIRSVIKQGGXKXDKLEKLMIRIGIFXLLYXVPASIVVACYLYEQHYRESWEAALXCACPGHDXGQPRAKPEYWVLMLKYFMCLVVGIXSGVWIWSGKXVESWRRFXSRCCCRPRRGHKSGGAMAAGDYPEASAALXGRXGPPGPAAXYHKQVSLSHV

SEQ ID NO: 10460 - protein, 64 aa, Homo sapiens
  MOD_RES (5)..(5): Selenocysteine
  MOD_RES (9)..(9): Selenocysteine
  MOD_RES (23)..(23): Selenocysteine
  MOD_RES (28)..(28): Selenocysteine
  MOD_RES (40)..(40): Selenocysteine
  MOD_RES (61)..(61): Selenocysteine
  MOD_RES (63)..(63): Selenocysteine
MEMFXFLLXCIFLPLLRGHSLFXCEPIXVPRCMKMAYNMXFFPNLMGHYDQSIAAVEMEGXQXG

SEQ ID NO: 10461 - protein, 467 aa, Homo sapiens
  MOD_RES (5)..(5): Selenocysteine
  MOD_RES (9)..(9): Selenocysteine
  MOD_RES (23)..(23): Selenocysteine
  MOD_RES (28)..(28): Selenocysteine
  MOD_RES (40)..(40): Selenocysteine
  MOD_RES (75)..(75): Selenocysteine
  MOD_RES (84)..(84): Selenocysteine
  MOD_RES (112)..(112): Selenocysteine
  MOD_RES (132)..(132): Selenocysteine
  MOD_RES (136)..(136): Selenocysteine
  MOD_RES (141)..(141): Selenocysteine
  MOD_RES (150)..(150): Selenocysteine
  MOD_RES (167)..(167): Selenocysteine
  MOD_RES (204)..(204): Selenocysteine
  MOD_RES (213)..(213): Selenocysteine
  MOD_RES (216)..(216): Selenocysteine
  MOD_RES (219)..(219): Selenocysteine
  MOD_RES (258)..(258): Selenocysteine
  MOD_RES (272)..(272): Selenocysteine
  MOD_RES (283)..(283): Selenocysteine
  MOD_RES (293)..(293): Selenocysteine
  MOD_RES (297)..(297): Selenocysteine
  MOD_RES (304)..(304): Selenocysteine
  MOD_RES (306)..(306): Selenocysteine
  MOD_RES (334)..(334): Selenocysteine
  MOD_RES (339)..(339): Selenocysteine
  MOD_RES (430)..(430): Selenocysteine
  MOD_RES (444)..(444): Selenocysteine
  MOD_RES (448)..(448): Selenocysteine
MEMFXFLLXCIFLPLLRGHSLFXCEPIXVPRCMKMAYNMXFFPNLMGHYDQSIAAVEMEHFLPLANLECSPNIEXFLCKAFVPXCIEQIHVVPPCRKLCEKVYSDCKKLIDXFGIRWPEELECDRLQYCDEXVPVXFDPHXEFLGPQKKXEQVQRDIGFWCPRHLKXSGGQGYKFLGIDQCAPPCPNMYFKSDELEFAKSFIGXVSIFCLCAXLFXFLXFLIDVRRFRYPERPIIYYSVCYSIVSLMYFIGFLLGDSXACNKADEKLELGDXVVLGSQNKACXVLFMLLYFFXMAGXVWWVILXIXWFLAAGRKWSCEAIEQKAVWFHAVAWGXPGFLXVMLLAMNKVEGDNISGVCFVGLYDLDASRYFVLLPLCLCVFVGLSLLLAGIISLNHVRQVIQHDGRNQEKLKKFMIRIGVFSGLYLVPLVXLLGCYVYEQVNRIXWEIXWVSDHCRQYHIPCPYQSNQ

SEQ ID NO: 10462 - protein, 706 aa, Homo sapiens
  MOD_RES (5)..(5): Selenocysteine
  MOD_RES (9)..(9): Selenocysteine
  MOD_RES (23)..(23): Selenocysteine
  MOD_RES (28)..(28): Selenocysteine
  MOD_RES (40)..(40): Selenocysteine
  MOD_RES (75)..(75): Selenocysteine
  MOD_RES (84)..(84): Selenocysteine
  MOD_RES (112)..(112): Selenocysteine
  MOD_RES (132)..(132): Selenocysteine
  MOD_RES (136)..(136): Selenocysteine
  MOD_RES (141)..(141): Selenocysteine
  MOD_RES (150)..(150): Selenocysteine
  MOD_RES (167)..(167): Selenocysteine
  MOD_RES (204)..(204): Selenocysteine
  MOD_RES (213)..(213): Selenocysteine
  MOD_RES (216)..(216): Selenocysteine
  MOD_RES (219)..(219): Selenocysteine
  MOD_RES (258)..(258): Selenocysteine
  MOD_RES (272)..(272): Selenocysteine
  MOD_RES (283)..(283): Selenocysteine
  MOD_RES (293)..(293): Selenocysteine
  MOD_RES (297)..(297): Selenocysteine
  MOD_RES (304)..(304): Selenocysteine
  MOD_RES (306)..(306): Selenocysteine
  MOD_RES (334)..(334): Selenocysteine
  MOD_RES (339)..(339): Selenocysteine
  MOD_RES (430)..(430): Selenocysteine
  MOD_RES (444)..(444): Selenocysteine
  MOD_RES (448)..(448): Selenocysteine
  MOD_RES (483)..(483): Selenocysteine
  MOD_RES (499)..(499): Selenocysteine
  MOD_RES (501)..(501): Selenocysteine
  MOD_RES (560)..(560): Selenocysteine
  MOD_RES (562)..(562): Selenocysteine
  MOD_RES (565)..(565): Selenocysteine
  MOD_RES (570)..(570): Selenocysteine
  MOD_RES (576)..(576): Selenocysteine
  MOD_RES (585)..(585): Selenocysteine
  MOD_RES (587)..(587): Selenocysteine
  MOD_RES (591)..(591): Selenocysteine
  MOD_RES (595)..(595): Selenocysteine
  MOD_RES (607)..(607): Selenocysteine
  MOD_RES (659)..(659): Selenocysteine
  MOD_RES (661)..(661): Selenocysteine
  MOD_RES (684)..(684): Selenocysteine
  MOD_RES (706)..(706): Selenocysteine
MEMFXFLLXCIFLPLLRGHSLFXCEPIXVPRCMKMAYNMXFFPNLMGHYDQSIAAVEMEHFLPLANLECSPNIEXFLCKAFVPXCIEQIHVVPPCRKLCEKVYSDCKKLIDXFGIRWPEELECDRLQYCDEXVPVXFDPHXEFLGPQKKXEQVQRDIGFWCPRHLKXSGGQGYKFLGIDQCAPPCPNMYFKSDELEFAKSFIGXVSIFCLCAXLFXFLXFLIDVRRFRYPERPIIYYSVCYSIVSLMYFIGFLLGDSXACNKADEKLELGDXVVLGSQNKACXVLFMLLYFFXMAGXVWWVILXIXWFLAAGRKWSCEAIEQKAVWFHAVAWGXPGFLXVMLLAMNKVEGDNISGVCFVGLYDLDASRYFVLLPLCLCVFVGLSLLLAGIISLNHVRQVIQHDGRNQEKLKKFMIRIGVFSGLYLVPLVXLLGCYVYEQVNRIXWEIXWVSDHCRQYHIPCPYQAKAKARPELALFMIKYLMXLIVGISAVFWVGSKKXCXEWAGFFKRNRKRDPISESRRVLQESCEFFLKHNSKVKHKKKHYKPSSHKLKVISKSMGXSXGAXANHGXSAVAIXSHDYLGQEXLXEIQXSPEXSMREVKADGASXPRLREQDCGEPASPAASISRLSGEQVDGKGQAGSVSESARSEGRISPKSDIXDXGLAQSNNLQVPSSSEPSSLKGSXSLLVHPVSGVRKEQGGGCHSDX

SEQ ID NO: 10463 - protein, 60 aa, Homo sapiens
  MOD_RES (5)..(5): Selenocysteine
  MOD_RES (9)..(9): Selenocysteine
  MOD_RES (23)..(23): Selenocysteine
  MOD_RES (28)..(28): Selenocysteine
  MOD_RES (40)..(40): Selenocysteine
MEMFXFLLXCIFLPLLRGHSLFXCEPIXVPRCMKMAYNMXFFPNLMGHYDQSIAAVEMEL

SEQ ID NO: 10464 - protein, 674 aa, Homo sapiens
  MOD_RES (8)..(8): Selenocysteine
  MOD_RES (43)..(43): Selenocysteine
  MOD_RES (52)..(52): Selenocysteine
  MOD_RES (80)..(80): Selenocysteine
  MOD_RES (100)..(100): Selenocysteine
  MOD_RES (104)..(104): Selenocysteine
  MOD_RES (109)..(109): Selenocysteine
  MOD_RES (118)..(118): Selenocysteine
  MOD_RES (135)..(135): Selenocysteine
  MOD_RES (172)..(172): Selenocysteine
  MOD_RES (181)..(181): Selenocysteine
  MOD_RES (184)..(184): Selenocysteine
  MOD_RES (187)..(187): Selenocysteine
  MOD_RES (226)..(226): Selenocysteine
  MOD_RES (240)..(240): Selenocysteine
  MOD_RES (251)..(251): Selenocysteine
  MOD_RES (261)..(261): Selenocysteine
  MOD_RES (265)..(265): Selenocysteine
  MOD_RES (272)..(272): Selenocysteine
  MOD_RES (274)..(274): Selenocysteine
  MOD_RES (302)..(302): Selenocysteine
  MOD_RES (307)..(307): Selenocysteine
  MOD_RES (398)..(398): Selenocysteine
  MOD_RES (412)..(412): Selenocysteine
  MOD_RES (416)..(416): Selenocysteine
  MOD_RES (451)..(451): Selenocysteine
  MOD_RES (467)..(467): Selenocysteine
  MOD_RES (469)..(469): Selenocysteine
  MOD_RES (528)..(528): Selenocysteine
  MOD_RES (530)..(530): Selenocysteine
  MOD_RES (533)..(533): Selenocysteine
  MOD_RES (538)..(538): Selenocysteine
  MOD_RES (544)..(544): Selenocysteine
  MOD_RES (553)..(553): Selenocysteine
  MOD_RES (555)..(555): Selenocysteine
  MOD_RES (559)..(559): Selenocysteine
  MOD_RES (563)..(563): Selenocysteine
  MOD_RES (575)..(575): Selenocysteine
  MOD_RES (627)..(627): Selenocysteine
  MOD_RES (629)..(629): Selenocysteine
  MOD_RES (652)..(652): Selenocysteine
  MOD_RES (674)..(674): Selenocysteine
MKMAYNMXFFPNLMGHYDQSIAAVEMEHFLPLANLECSPNIEXFLCKAFVPXCIEQIHVVPPCRKLCEKVYSDCKKLIDXFGIRWPEELECDRLQYCDEXVPVXFDPHXEFLGPQKKXEQVQRDIGFWCPRHLKXSGGQGYKFLGIDQCAPPCPNMYFKSDELEFAKSFIGXVSIFCLCAXLFXFLXFLIDVRRFRYPERPIIYYSVCYSIVSLMYFIGFLLGDSXACNKADEKLELGDXVVLGSQNKACXVLFMLLYFFXMAGXVWWVILXIXWFLAAGRKWSCEAIEQKAVWFHAVAWGXPGFLXVMLLAMNKVEGDNISGVCFVGLYDLDASRYFVLLPLCLCVFVGLSLLLAGIISLNHVRQVIQHDGRNQEKLKKFMIRIGVFSGLYLVPLVXLLGCYVYEQVNRIXWEIXWVSDHCRQYHIPCPYQAKAKARPELALFMIKYLMXLIVGISAVFWVGSKKXCXEWAGFFKRNRKRDPISESRRVLQESCEFFLKHNSKVKHKKKHYKPSSHKLKVISKSMGXSXGAXANHGXSAVAIXSHDYLGQEXLXEIQXSPEXSMREVKADGASXPRLREQDCGEPASPAASISRLSGEQVDGKGQAGSVSESARSEGRISPKSDIXDXGLAQSNNLQVPSSSEPSSLKGSXSLLVHPVSGVRKEQGGGCHSDX

SEQ ID NO: 10465 - protein, 100 aa, Homo sapiens
  MOD_RES (8)..(8): Selenocysteine
  MOD_RES (43)..(43): Selenocysteine
  MOD_RES (52)..(52): Selenocysteine
  MOD_RES (80)..(80): Selenocysteine
MKMAYNMXFFPNLMGHYDQSIAAVEMEHFLPLANLECSPNIEXFLCKAFVPXCIEQIHVVPPCRKLCEKVYSDCKKLIDXFGIRWPEELECDSCRKKMEL

SEQ ID NO: 10466 - protein, 574 aa, Homo sapiens
  MOD_RES (58)..(58): Selenocysteine
  MOD_RES (65)..(65): Selenocysteine
  MOD_RES (74)..(74): Selenocysteine
  MOD_RES (111)..(111): Selenocysteine
  MOD_RES (165)..(165): Selenocysteine
  MOD_RES (177)..(177): Selenocysteine
  MOD_RES (181)..(181): Selenocysteine
  MOD_RES (191)..(191): Selenocysteine
  MOD_RES (268)..(268): Selenocysteine
  MOD_RES (271)..(271): Selenocysteine
  MOD_RES (274)..(274): Selenocysteine
  MOD_RES (326)..(326): Selenocysteine
  MOD_RES (331)..(331): Selenocysteine
  MOD_RES (337)..(337): Selenocysteine
  MOD_RES (360)..(360): Selenocysteine
  MOD_RES (393)..(393): Selenocysteine
  MOD_RES (395)..(395): Selenocysteine
  MOD_RES (437)..(437): Selenocysteine
  MOD_RES (452)..(452): Selenocysteine
  MOD_RES (459)..(459): Selenocysteine
  MOD_RES (461)..(461): Selenocysteine
  MOD_RES (479)..(479): Selenocysteine
  MOD_RES (483)..(483): Selenocysteine
  MOD_RES (502)..(502): Selenocysteine
  MOD_RES (507)..(507): Selenocysteine
  MOD_RES (528)..(528): Selenocysteine
  MOD_RES (537)..(537): Selenocysteine
  MOD_RES (543)..(544): Selenocysteine
  MOD_RES (553)..(553): Selenocysteine
  MOD_RES (572)..(572): Selenocysteine
MRDPGAAAPLSSLGLCALVLALLGALSAGAGAQPYHGEKGISVPDHGFCQPISIPLCXDIAYNQXILPNLLGHXNQEDAGLEVHQFYPLVKVQCSPELRFFLCSMYAPVCXVLDQAIPPCRSLCERARQGCEALMNKFGFQWPERLRCENFPVHGAGEICVGQNXSDGSGGPGGGPXAYPXAPYLPDLPFXALPPGASDGRGRPAFPFSCPRQLKVPPYLGYRFLGERDCGAPCEPGRANGLMYFKEEERRFARLWVGVWSVLCCASXLFXVLXYLVDMRRFSYPERPIIFLSGCYFMVAVAHVAGFLLEDRAVCVERFSDDGYRXVAQGXKKEGCXILFMVLYFFGMASSIWWVILSLXWFLAAGMKWGHEAIEANSQYFHLAAWAVPAVKXIXILAMGQVDGDLLSGVCYVGLSSVDALRGFVLAPLFVYLFIGXSFLLAGFVSLFRIRXIMKHDGXKXEKLEKLMVRIGVFSVLYXVPAXIVLACYFYEQAFREHWERXWLLQXCKSYAVPCPPGHFPPMSPDFXVFMIKYLMXMIVGIXXGFWIWSGKXLQSWRRFYHRLSHSSKGEXAV

SEQ ID NO: 10467 - protein, 694 aa, Homo sapiens
  MOD_RES (10)..(10): Selenocysteine
  MOD_RES (39)..(39): Selenocysteine
  MOD_RES (51)..(51): Selenocysteine
  MOD_RES (61)..(61): Selenocysteine
  MOD_RES (93)..(93): Selenocysteine
  MOD_RES (146)..(146): Selenocysteine
  MOD_RES (154)..(154): Selenocysteine
  MOD_RES (157)..(158): Selenocysteine
  MOD_RES (254)..(254): Selenocysteine
  MOD_RES (277)..(277): Selenocysteine
  MOD_RES (292)..(292): Selenocysteine
  MOD_RES (295)..(295): Selenocysteine
  MOD_RES (298)..(298): Selenocysteine
  MOD_RES (390)..(391): Selenocysteine
  MOD_RES (397)..(397): Selenocysteine
  MOD_RES (420)..(420): Selenocysteine
  MOD_RES (497)..(497): Selenocysteine
  MOD_RES (521)..(521): Selenocysteine
  MOD_RES (523)..(523): Selenocysteine
  MOD_RES (537)..(537): Selenocysteine
  MOD_RES (541)..(541): Selenocysteine
  MOD_RES (564)..(564): Selenocysteine
  MOD_RES (599)..(599): Selenocysteine
  MOD_RES (609)..(609): Selenocysteine
  MOD_RES (618)..(618): Selenocysteine
  MOD_RES (636)..(636): Selenocysteine
  MOD_RES (671)..(671): Selenocysteine
  MOD_RES (674)..(674): Selenocysteine
  MOD_RES (679)..(679): Selenocysteine
MEWGYLLEVXSLLAALALLQRSSGAAAASAKELACQEIXVPLCKGIGYNYXYMPNQFNHDXQDEAGLEVHQFWPLVEIQCSPDLKFFLCSMYXPICLEDYKKPLPPCRSVCERAKAGCAPLMRQYGFAWPDRMRCDRLPEQGNPDXLCMDYNRXDLXXAAPSPPRRLPPPPPGEQPPSGSGHGRPPGARPPHRGGGRGGGGGDAAAPPARGGGGGGKARPPGGGAAPCEPGCQCRAPMVSVSSERHPLYNRVKXGQIANCALPCHNPFFSQDERAFXVFWIGLWSVLCFVSXFAXVSXFLIDMERFKYPERPIIFLSACYLFVSVGYLVRLVAGHEKVACSGGAPGAGGAGGAGGAAAGAGAAGAGAGGPGGRGEYEELGAVEQHVRYEXXGPALCXVVFLLVYFFGMASSIWWVILSLXWFLAAGMKWGNEAIAGYSQYFHLAAWLVPSVKSIAVLALSSVDGDPVAGICYVGNQSLDNLRGFVLAPLVIYLFIGXMFLLAGFVSLFRIRSVIKQQDGPXKXHKLEKLMIRLGLFXVLYXVPAAVVVACLFYEQHNRPRWEAXHNCPCLRDLQPDQARRPDYAVFMLKYFMCLVVGIXSGVWVWSGKXLESWRSLCXRCCWASKGAAVGGGAGAXAAGGGGGPGGGGGGGPGGGGGPGGGGGSLYSDVSXGLXWRSGXASSVSYPKQMPLSQV

SEQ ID NO: 10468 - protein, 591 aa, Homo sapiens
  MOD_RES (55)..(55): Selenocysteine
  MOD_RES (64)..(64): Selenocysteine
  MOD_RES (101)..(101): Selenocysteine
  MOD_RES (106)..(106): Selenocysteine
  MOD_RES (144)..(144): Selenocysteine
  MOD_RES (160)..(160): Selenocysteine
  MOD_RES (195)..(195): Selenocysteine
  MOD_RES (246)..(246): Selenocysteine
  MOD_RES (249)..(249): Selenocysteine
  MOD_RES (252)..(252): Selenocysteine
  MOD_RES (311)..(311): Selenocysteine
  MOD_RES (314)..(314): Selenocysteine
  MOD_RES (335)..(335): Selenocysteine
  MOD_RES (337)..(337): Selenocysteine
  MOD_RES (370)..(370): Selenocysteine
  MOD_RES (375)..(375): Selenocysteine
  MOD_RES (385)..(385): Selenocysteine
  MOD_RES (393)..(393): Selenocysteine
  MOD_RES (399)..(399): Selenocysteine
  MOD_RES (419)..(419): Selenocysteine
  MOD_RES (433)..(433): Selenocysteine
  MOD_RES (436)..(436): Selenocysteine
  MOD_RES (438)..(438): Selenocysteine
  MOD_RES (456)..(456): Selenocysteine
  MOD_RES (460)..(460): Selenocysteine
  MOD_RES (481)..(481): Selenocysteine
  MOD_RES (506)..(506): Selenocysteine
  MOD_RES (523)..(523): Selenocysteine
  MOD_RES (533)..(533): Selenocysteine
  MOD_RES (536)..(536): Selenocysteine
  MOD_RES (565)..(565): Selenocysteine
  MOD_RES (573)..(573): Selenocysteine
  MOD_RES (579)..(579): Selenocysteine
  MOD_RES (581)..(581): Selenocysteine
  MOD_RES (589)..(589): Selenocysteine
MAVAPLRGALLLWQLLAAGGAALEIGRFDPERGRGAAPCQAVEIPMCRGIGYNLXRMPNLLGHXSQGEAAAELAEFAPLVQYGCHSHLRFFLCSLYAPMCXDQVSXPIPACRPMCEQARLRCAPIMEQFNFGWPDSLDCARLPXRNDPHALCMEAPENAXAGPAEPHKGLGMLPVAPRPARPPGDLGPGAGGSGXCENPEKFQYVEKSRSCAPRCGPGVEVFWSRRDKDFALVWMAVWSALCFFSXAFXVLXFLLEPHRFQYPERPIIFLSMCYNVYSLAFLIRAVAGAQSVACDQEAGALYVIQEGLENXGCXLVFLLLYYFGMASSLWWVVLXLXWFLAAGKKWGHEAIEAHGSYFHMAAWGLPALKXIVILXLRKVAGDELXGLCYVASXDAAALXGFVLVPLSGYLVLGSSFLLXGFVALFHIRKIMKXGGXNXEKLEKLMVKIGVFSILYXVPAXCVIVCYVYERLNMDFWRLRAXEQPCAAAAGPGGRRDCSLPGGSVPXVAVFMLKIFMSLVVGIXSGVWVWSSKXFQXWQSLCYRKIAAGRARAKACRAPGSYGRGXHCHYKAPXVVLHMXKXDPSLENPXHL

SEQ ID NO: 10469 - protein, 103 aa, Homo sapiens
  MOD_RES (3)..(3): Selenocysteine
  MOD_RES (45)..(45): Selenocysteine
  MOD_RES (51)..(51): Selenocysteine
  MOD_RES (89)..(89): Selenocysteine
MEXVQELIPLAKEMMAQKRKGKMVKLYVLGSVLALFGVVLGLMEXVCSPFXAARRLRDQEAAVAELQAALERQALQKQALQEKGKQQDXVLGGRALSNRQHAS

SEQ ID NO: 10470 - protein, 105 aa, Homo sapiens
  MOD_RES (21)..(21): Selenocysteine
  MOD_RES (71)..(71): Selenocysteine
  MOD_RES (75)..(75): Selenocysteine
  MOD_RES (85)..(85): Selenocysteine
MVMEKPSPLLVGREFVRQYYXLLNQAPDMLHRFYGKNSSYVHGGLDSNGKPADAVYGQKEIHRKVMSQNFXNCHXKIRHVDAHAXLNDGVVVQVMGLLSNNNQAL

SEQ ID NO: 10471 - protein, 106 aa, Homo sapiens
  MOD_RES (21)..(21): Selenocysteine
  MOD_RES (71)..(71): Selenocysteine
  MOD_RES (75)..(75): Selenocysteine
  MOD_RES (85)..(85): Selenocysteine
MVMEKPSPLLVGREFVRQYYXLLNQAPDMLHRFYGKNSSYVHGGLDSNGKPADAVYGQKEIHRKVMSQNFXNCHXKIRHVDAHAXLNDGVVVQVMGLLSNNNQALR

SEQ ID NO: 10472 - protein, 117 aa, Homo sapiens
  MOD_RES (21)..(21): Selenocysteine
  MOD_RES (71)..(71): Selenocysteine
  MOD_RES (75)..(75): Selenocysteine
  MOD_RES (85)..(85): Selenocysteine
  MOD_RES (111)..(111): Selenocysteine
MVMEKPSPLLVGREFVRQYYXLLNQAPDMLHRFYGKNSSYVHGGLDSNGKPADAVYGQKEIHRKVMSQNFXNCHXKIRHVDAHAXLNDGVVVQVMGLLSNNNQALRRFMQXFVLAPE

SEQ ID NO: 10473 - protein, 466 aa, Homo sapiens
  MOD_RES (21)..(21): Selenocysteine
  MOD_RES (71)..(71): Selenocysteine
  MOD_RES (75)..(75): Selenocysteine
  MOD_RES (85)..(85): Selenocysteine
  MOD_RES (111)..(111): Selenocysteine
  MOD_RES (143)..(143): Selenocysteine
  MOD_RES (162)..(162): Selenocysteine
  MOD_RES (172)..(172): Selenocysteine
  MOD_RES (222)..(222): Selenocysteine
  MOD_RES (241)..(241): Selenocysteine
  MOD_RES (248)..(248): Selenocysteine
  MOD_RES (255)..(255): Selenocysteine
  MOD_RES (268)..(268): Selenocysteine
  MOD_RES (415)..(415): Selenocysteine
MVMEKPSPLLVGREFVRQYYXLLNQAPDMLHRFYGKNSSYVHGGLDSNGKPADAVYGQKEIHRKVMSQNFXNCHXKIRHVDAHAXLNDGVVVQVMGLLSNNNQALRRFMQXFVLAPEGSVANKFYVHNDIFRYQDEVFGGFVXEPQEESEEEVEEPEERQQXPEVVPDDSGXFYDQAVVSNDMEEHLEEPVAEPEPDPEPEPEQEPVSEIQEEKPEPVLEEXAPEDAQKSSSPAPADIAQXVQEDLRXFSWASVXSKNLPPSGAVPVXGIPPHVVKVPASQPRPESKPESQIPPQRPQRDQRVREQRINIPPQRGPRPIREAGEQGDIEPRRMVRHPDSHQLFIGNLPHEVDKSELKDFFQSYGNVVELRINSGGKLPNFGFVVFDDSEPVQKVLSNRPIMFRGEVRLNVEEKKXRAAREGDRRDNRLRGPGGPRGGLGGGMRGPPRGGMVQKPGFGVGRGLAPRQ

SEQ ID NO: 10474 - protein, 122 aa, Homo sapiens
  MOD_RES (21)..(21): Selenocysteine
  MOD_RES (71)..(71): Selenocysteine
  MOD_RES (75)..(75): Selenocysteine
  MOD_RES (85)..(85): Selenocysteine
  MOD_RES (111)..(111): Selenocysteine
MVMEKPSPLLVGREFVRQYYXLLNQAPDMLHRFYGKNSSYVHGGLDSNGKPADAVYGQKEIHRKVMSQNFXNCHXKIRHVDAHAXLNDGVVVQVMGLLSNNNQALRRFMQXFVLAPESLKKK

SEQ ID NO: 10475 - protein, 153 aa, Homo sapiens
  MOD_RES (21)..(21): Selenocysteine
  MOD_RES (71)..(71): Selenocysteine
  MOD_RES (75)..(75): Selenocysteine
  MOD_RES (85)..(85): Selenocysteine
  MOD_RES (111)..(111): Selenocysteine
  MOD_RES (145)..(145): Selenocysteine
  MOD_RES (149)..(150): Selenocysteine
MVMEKPSPLLVGREFVRQYYXLLNQAPDMLHRFYGKNSSYVHGGLDSNGKPADAVYGQKEIHRKVMSQNFXNCHXKIRHVDAHAXLNDGVVVQVMGLLSNNNQALRRFMQXFVLAPEVHLALFLAQSLFLNQLFLQGGLVLFSYXYERXXSLC

SEQ ID NO: 10476 - protein, 37 aa, Homo sapiens
  MOD_RES (21)..(21): Selenocysteine
  MOD_RES (35)..(35): Selenocysteine
MVMEKPSPLLVGREFVRQYYXLLNQAPDMLHRKSXGK

SEQ ID NO: 10477 - protein, 148 aa, Homo sapiens
  MOD_RES (21)..(21): Selenocysteine
  MOD_RES (81)..(81): Selenocysteine
  MOD_RES (85)..(85): Selenocysteine
  MOD_RES (95)..(95): Selenocysteine
  MOD_RES (121)..(121): Selenocysteine
MVMEKPSPLLVGREFVRQYYXLLNQAPDMLHSLHIGYHMIIRFYGKNSSYVHGGLDSNGKPADAVYGQKEIHRKVMSQNFXNCHXKIRHVDAHAXLNDGVVVQVMGLLSNNNQALRRFMQXFVLAPEGSVANKFYVHNDIFRYQDEVF

SEQ ID NO: 10478 - protein, 23 aa, Homo sapiens
HGGVDASGKPQEAVYGQNNQKMK

SEQ ID NO: 10479 - protein, 56 aa, Homo sapiens
  MOD_RES (21)..(21): Selenocysteine
MVMEKPSPLLVGREFVRQYYXLLNKAPEYLHRFYGRNSSYVHGGVDASGKPQEAVY

SEQ ID NO: 10480 - protein, 59 aa, Homo sapiens
  MOD_RES (21)..(21): Selenocysteine
MVMEKPSPLLVGREFVRQYYXLLNKAPEYLHRFYGRNSSYVHGGVDASGKPQEAVYGQN

SEQ ID NO: 10481 - protein, 78 aa, Homo sapiens
  MOD_RES (21)..(21): Selenocysteine
  MOD_RES (75)..(75): Selenocysteine
MVMEKPSPLLVGREFVRQYYXLLNKAPEYLHRFYGRNSSYVHGGVDASGKPQEAVYGQNDIHHKVLSLNFSECHXKIR

SEQ ID NO: 10482 - protein, 99 aa, Homo sapiens
  MOD_RES (21)..(21): Selenocysteine
  MOD_RES (75)..(75): Selenocysteine
  MOD_RES (85)..(85): Selenocysteine
MVMEKPSPLLVGREFVRQYYXLLNKAPEYLHRFYGRNSSYVHGGVDASGKPQEAVYGQNDIHHKVLSLNFSECHXKIRHVDAHAXLSDGVVVQVMGLLS

SEQ ID NO: 10483 - protein, 102 aa, Homo sapiens
  MOD_RES (21)..(21): Selenocysteine
  MOD_RES (75)..(75): Selenocysteine
  MOD_RES (85)..(85): Selenocysteine
MVMEKPSPLLVGREFVRQYYXLLNKAPEYLHRFYGRNSSYVHGGVDASGKPQEAVYGQNDIHHKVLSLNFSECHXKIRHVDAHAXLSDGVVVQVMGLLSNSG

SEQ ID NO: 10484 - protein, 111 aa, Homo sapiens
  MOD_RES (21)..(21): Selenocysteine
  MOD_RES (75)..(75): Selenocysteine
  MOD_RES (85)..(85): Selenocysteine
  MOD_RES (111)..(111): Selenocysteine
MVMEKPSPLLVGREFVRQYYXLLNKAPEYLHRFYGRNSSYVHGGVDASGKPQEAVYGQNDIHHKVLSLNFSECHXKIRHVDAHAXLSDGVVVQVMGLLSNSGQPERKFMQX

SEQ ID NO: 10485 - protein, 116 aa, Homo sapiens
  MOD_RES (21)..(21): Selenocysteine
  MOD_RES (75)..(75): Selenocysteine
  MOD_RES (85)..(85): Selenocysteine
  MOD_RES (111)..(111): Selenocysteine
MVMEKPSPLLVGREFVRQYYXLLNKAPEYLHRFYGRNSSYVHGGVDASGKPQEAVYGQNDIHHKVLSLNFSECHXKIRHVDAHAXLSDGVVVQVMGLLSNSGQPERKFMQXFVLAP

SEQ ID NO: 10486 - protein, 125 aa, Homo sapiens
  MOD_RES (21)..(21): Selenocysteine
  MOD_RES (75)..(75): Selenocysteine
  MOD_RES (85)..(85): Selenocysteine
  MOD_RES (111)..(111): Selenocysteine
MVMEKPSPLLVGREFVRQYYXLLNKAPEYLHRFYGRNSSYVHGGVDASGKPQEAVYGQNDIHHKVLSLNFSECHXKIRHVDAHAXLSDGVVVQVMGLLSNSGQPERKFMQXFVLAPEGSVPNKFY

SEQ ID NO: 10487 - protein, 141 aa, Homo sapiens
  MOD_RES (21)..(21): Selenocysteine
  MOD_RES (75)..(75): Selenocysteine
  MOD_RES (85)..(85): Selenocysteine
  MOD_RES (111)..(111): Selenocysteine
MVMEKPSPLLVGREFVRQYYXLLNKAPEYLHRFYGRNSSYVHGGVDASGKPQEAVYGQNDIHHKVLSLNFSECHXKIRHVDAHAXLSDGVVVQVMGLLSNSGQPERKFMQXFVLAPEGSVPNKFYVHNDMFRYEDEVFGDS

SEQ ID NO: 10488 - protein, 198 aa, Homo sapiens
  MOD_RES (21)..(21): Selenocysteine
  MOD_RES (75)..(75): Selenocysteine
  MOD_RES (85)..(85): Selenocysteine
  MOD_RES (111)..(111): Selenocysteine
  MOD_RES (182)..(182): Selenocysteine
MVMEKPSPLLVGREFVRQYYXLLNKAPEYLHRFYGRNSSYVHGGVDASGKPQEAVYGQNDIHHKVLSLNFSECHXKIRHVDAHAXLSDGVVVQVMGLLSNSGQPERKFMQXFVLAPEGSVPNKFYVHNDMFRYEDEVFGDSEPELDEESEDEVEEEQEERQPSPEPVQENANSGYYEAHPVXNGIEEPLEESSHEPEP

SEQ ID NO: 10489 - protein, 482 aa, Homo sapiens
  MOD_RES (21)..(21): Selenocysteine
  MOD_RES (75)..(75): Selenocysteine
  MOD_RES (85)..(85): Selenocysteine
  MOD_RES (111)..(111): Selenocysteine
  MOD_RES (182)..(182): Selenocysteine
  MOD_RES (204)..(204): Selenocysteine
  MOD_RES (206)..(206): Selenocysteine
  MOD_RES (226)..(227): Selenocysteine
  MOD_RES (250)..(250): Selenocysteine
  MOD_RES (259)..(259): Selenocysteine
  MOD_RES (364)..(364): Selenocysteine
  MOD_RES (409)..(409): Selenocysteine
  MOD_RES (417)..(417): Selenocysteine
  MOD_RES (470)..(470): Selenocysteine
  MOD_RES (478)..(478): Selenocysteine
MVMEKPSPLLVGREFVRQYYXLLNKAPEYLHRFYGRNSSYVHGGVDASGKPQEAVYGQNDIHHKVLSLNFSECHXKIRHVDAHAXLSDGVVVQVMGLLSNSGQPERKFMQXFVLAPEGSVPNKFYVHNDMFRYEDEVFGDSEPELDEESEDEVEEEQEERQPSPEPVQENANSGYYEAHPVXNGIEEPLEESSHEPEPEPESEXKXEELKPQVEEKNLEELEEKSXXPPPAEPVSLPQEPPKAFSWASVXSKNLPPSGXVSSSGIPPHVKAPVSQPRVEAKPEVQSQPPRVREQRPRERPGFPPRGPRPGRGDMEQNDSDNRRIIRYPDSHQLFVGNLPHDIDENELKEFFMSFGNVVELRINXKGVGGKLPNFGFVVFDDSEPVQRILIAKPIMFRGEVRLNVEEKKXRAAREREXRGGGDDRRDIRRNDRGPGGPRGIVGGGMMRDRDGRGPPPRGGMAQKLGSGRGXGQMEGRFXGQRR

SEQ ID NO: 10490 - protein, 449 aa, Homo sapiens
  MOD_RES (21)..(21): Selenocysteine
  MOD_RES (75)..(75): Selenocysteine
  MOD_RES (85)..(85): Selenocysteine
  MOD_RES (111)..(111): Selenocysteine
  MOD_RES (182)..(182): Selenocysteine
  MOD_RES (204)..(204): Selenocysteine
  MOD_RES (206)..(206): Selenocysteine
  MOD_RES (226)..(227): Selenocysteine
  MOD_RES (331)..(331): Selenocysteine
  MOD_RES (376)..(376): Selenocysteine
  MOD_RES (384)..(384): Selenocysteine
  MOD_RES (437)..(437): Selenocysteine
  MOD_RES (445)..(445): Selenocysteine
MVMEKPSPLLVGREFVRQYYXLLNKAPEYLHRFYGRNSSYVHGGVDASGKPQEAVYGQNDIHHKVLSLNFSECHXKIRHVDAHAXLSDGVVVQVMGLLSNSGQPERKFMQXFVLAPEGSVPNKFYVHNDMFRYEDEVFGDSEPELDEESEDEVEEEQEERQPSPEPVQENANSGYYEAHPVXNGIEEPLEESSHEPEPEPESEXKXEELKPQVEEKNLEELEEKSXXPPPAEPVSLPQEPPKPRVEAKPEVQSQPPRVREQRPRERPGFPPRGPRPGRGDMEQNDSDNRRIIRYPDSHQLFVGNLPHDIDENELKEFFMSFGNVVELRINXKGVGGKLPNFGFVVFDDSEPVQRILIAKPIMFRGEVRLNVEEKKXRAAREREXRGGGDDRRDIRRNDRGPGGPRGIVGGGMMRDRDGRGPPPRGGMAQKLGSGRGXGQMEGRFXGQRR

SEQ ID NO: 10491 - protein, 176 aa, Homo sapiens
  MOD_RES (18)..(18): Selenocysteine
  MOD_RES (52)..(52): Selenocysteine
  MOD_RES (68)..(68): Selenocysteine
  MOD_RES (99)..(99): Selenocysteine
  MOD_RES (123)..(123): Selenocysteine
  MOD_RES (128)..(128): Selenocysteine
  MOD_RES (136)..(136): Selenocysteine
  MOD_RES (152)..(152): Selenocysteine
  MOD_RES (176)..(176): Selenocysteine
MDEAWKRRWFVLRSGRLXGDPDVLEYYKNDHAKKPIRIIDLNLCQQVDAGLXFNKKEFENSYIFDINXIDRIFYLVADSEEEMNKWVRCICDICGFNPXEEDPVKPPGSSLQAPADLPLAINXAPPSXQADSSSAXLPPPYQLINVPPHLEXLGIQEDPQDYLLLINCQSKKPEPX

SEQ ID NO: 10492 - protein, 48 aa, Homo sapiens
  MOD_RES (17)..(17): Selenocysteine
  MOD_RES (41)..(41): Selenocysteine
  MOD_RES (46)..(46): Selenocysteine
MNKWVRCICDICGFNPXEEDPVKPPGSSLQAPADLPLAINXAPPSXQA

SEQ ID NO: 10493 - protein, 591 aa, Homo sapiens
  MOD_RES (17)..(17): Selenocysteine
  MOD_RES (41)..(41): Selenocysteine
  MOD_RES (46)..(46): Selenocysteine
  MOD_RES (54)..(54): Selenocysteine
  MOD_RES (70)..(70): Selenocysteine
  MOD_RES (94)..(94): Selenocysteine
  MOD_RES (96)..(96): Selenocysteine
  MOD_RES (104)..(104): Selenocysteine
  MOD_RES (108)..(108): Selenocysteine
  MOD_RES (175)..(175): Selenocysteine
  MOD_RES (186)..(186): Selenocysteine
  MOD_RES (190)..(190): Selenocysteine
  MOD_RES (195)..(195): Selenocysteine
  MOD_RES (209)..(209): Selenocysteine
  MOD_RES (213)..(213): Selenocysteine
  MOD_RES (219)..(219): Selenocysteine
  MOD_RES (224)..(224): Selenocysteine
  MOD_RES (228)..(228): Selenocysteine
  MOD_RES (233)..(233): Selenocysteine
  MOD_RES (256)..(256): Selenocysteine
  MOD_RES (262)..(262): Selenocysteine
  MOD_RES (266)..(266): Selenocysteine
  MOD_RES (274)..(274): Selenocysteine
  MOD_RES (284)..(284): Selenocysteine
  MOD_RES (287)..(287): Selenocysteine
  MOD_RES (331)..(331): Selenocysteine
  MOD_RES (361)..(361): Selenocysteine
  MOD_RES (373)..(373): Selenocysteine
  MOD_RES (376)..(376): Selenocysteine
  MOD_RES (400)..(400): Selenocysteine
  MOD_RES (451)..(451): Selenocysteine
  MOD_RES (473)..(474): Selenocysteine
  MOD_RES (535)..(535): Selenocysteine
  MOD_RES (564)..(564): Selenocysteine
  MOD_RES (570)..(570): Selenocysteine
  MOD_RES (575)..(575): Selenocysteine
  MOD_RES (581)..(581): Selenocysteine
  MOD_RES (585)..(585): Selenocysteine
MNKWVRCICDICGFNPXEEDPVKPPGSSLQAPADLPLAINXAPPSXQADSSSAXLPPPYQLINVPPHLEXLGIQEDPQDYLLLINCQSKKPEPXRXHADSAKSXSSEXDCNDNVPSHKNPASSQSKHGMNGFFQQQMIYDSPPSRAPSASVDSSLYNLPRSYSHDVLPKVSPSSXEADGELYVFNXPSGXSSVEXQMRHVSISYDIPPXPGNXYQIPRXFPEGXLGQXSKLDXIPDIPPPRPPKPHPAHDRSPVEXCSIPRXASDXDSSYCIPXAGMSPSRSNXISXVDLNKLRKDASSQDCYDIPRAFPSDRSSSLEGFHNHFKVKNVLXVGSVSSEELDENYVPMNPNSPPRQHSSSFXEPIQEANYVPMXPGXFDFSSFGMQVPPPAHMGFRSSPKXPPRRPVPVADCEPPPVDRNLKPDRKVKPAPLEIKPLPEWEELQAPVRSPIXRSFARDSSRFPMSPRPDSVHSXXSSSDSHDSEENYVPMNPNLSSEDPNLFGSNSLDGGSSPMIKPKGDKQVEYLDLDLDSGKSXPPRKQKSSGSGSSVADERVDYVVVDQQKXLALKSXREAWXDGRQSXESEXPAKSVK

SEQ ID NO: 10494 - protein, 694 aa, Homo sapiens
  MOD_RES (39)..(39): Selenocysteine
  MOD_RES (73)..(73): Selenocysteine
  MOD_RES (89)..(89): Selenocysteine
  MOD_RES (120)..(120): Selenocysteine
  MOD_RES (144)..(144): Selenocysteine
  MOD_RES (149)..(149): Selenocysteine
  MOD_RES (157)..(157): Selenocysteine
  MOD_RES (173)..(173): Selenocysteine
  MOD_RES (197)..(197): Selenocysteine
  MOD_RES (199)..(199): Selenocysteine
  MOD_RES (207)..(207): Selenocysteine
  MOD_RES (211)..(211): Selenocysteine
  MOD_RES (278)..(278): Selenocysteine
  MOD_RES (289)..(289): Selenocysteine
  MOD_RES (293)..(293): Selenocysteine
  MOD_RES (298)..(298): Selenocysteine
  MOD_RES (312)..(312): Selenocysteine
  MOD_RES (316)..(316): Selenocysteine
  MOD_RES (322)..(322): Selenocysteine
  MOD_RES (327)..(327): Selenocysteine
  MOD_RES (331)..(331): Selenocysteine
  MOD_RES (336)..(336): Selenocysteine
  MOD_RES (359)..(359): Selenocysteine
  MOD_RES (365)..(365): Selenocysteine
  MOD_RES (369)..(369): Selenocysteine
  MOD_RES (377)..(377): Selenocysteine
  MOD_RES (387)..(387): Selenocysteine
  MOD_RES (390)..(390): Selenocysteine
  MOD_RES (434)..(434): Selenocysteine
  MOD_RES (464)..(464): Selenocysteine
  MOD_RES (476)..(476): Selenocysteine
  MOD_RES (479)..(479): Selenocysteine
  MOD_RES (503)..(503): Selenocysteine
  MOD_RES (554)..(554): Selenocysteine
  MOD_RES (576)..(577): Selenocysteine
  MOD_RES (638)..(638): Selenocysteine
  MOD_RES (667)..(667): Selenocysteine
  MOD_RES (673)..(673): Selenocysteine
  MOD_RES (678)..(678): Selenocysteine
  MOD_RES (684)..(684): Selenocysteine
  MOD_RES (688)..(688): Selenocysteine
MSGGEVVCSGWLRKSPPEKKLKRYAWKRRWFVLRSGRLXGDPDVLEYYKNDHAKKPIRIIDLNLCQQVDAGLXFNKKEFENSYIFDINXIDRIFYLVADSEEEMNKWVRCICDICGFNPXEEDPVKPPGSSLQAPADLPLAINXAPPSXQADSSSAXLPPPYQLINVPPHLEXLGIQEDPQDYLLLINCQSKKPEPXRXHADSAKSXSSEXDCNDNVPSHKNPASSQSKHGMNGFFQQQMIYDSPPSRAPSASVDSSLYNLPRSYSHDVLPKVSPSSXEADGELYVFNXPSGXSSVEXQMRHVSISYDIPPXPGNXYQIPRXFPEGXLGQXSKLDXIPDIPPPRPPKPHPAHDRSPVEXCSIPRXASDXDSSYCIPXAGMSPSRSNXISXVDLNKLRKDASSQDCYDIPRAFPSDRSSSLEGFHNHFKVKNVLXVGSVSSEELDENYVPMNPNSPPRQHSSSFXEPIQEANYVPMXPGXFDFSSFGMQVPPPAHMGFRSSPKXPPRRPVPVADCEPPPVDRNLKPDRKVKPAPLEIKPLPEWEELQAPVRSPIXRSFARDSSRFPMSPRPDSVHSXXSSSDSHDSEENYVPMNPNLSSEDPNLFGSNSLDGGSSPMIKPKGDKQVEYLDLDLDSGKSXPPRKQKSSGSGSSVADERVDYVVVDQQKXLALKSXREAWXDGRQSXESEXPAKSVK

SEQ ID NO: 10495 - protein, 724 aa, Homo sapiens
  MOD_RES (39)..(39): Selenocysteine
  MOD_RES (73)..(73): Selenocysteine
  MOD_RES (89)..(89): Selenocysteine
  MOD_RES (120)..(120): Selenocysteine
  MOD_RES (144)..(144): Selenocysteine
  MOD_RES (149)..(149): Selenocysteine
  MOD_RES (157)..(157): Selenocysteine
  MOD_RES (173)..(173): Selenocysteine
  MOD_RES (197)..(197): Selenocysteine
  MOD_RES (199)..(199): Selenocysteine
  MOD_RES (207)..(207): Selenocysteine
  MOD_RES (211)..(211): Selenocysteine
  MOD_RES (278)..(278): Selenocysteine
  MOD_RES (289)..(289): Selenocysteine
  MOD_RES (293)..(293): Selenocysteine
  MOD_RES (298)..(298): Selenocysteine
  MOD_RES (312)..(312): Selenocysteine
  MOD_RES (316)..(316): Selenocysteine
  MOD_RES (322)..(322): Selenocysteine
  MOD_RES (327)..(327): Selenocysteine
  MOD_RES (331)..(331): Selenocysteine
  MOD_RES (336)..(336): Selenocysteine
  MOD_RES (359)..(359): Selenocysteine
  MOD_RES (365)..(365): Selenocysteine
  MOD_RES (369)..(369): Selenocysteine
  MOD_RES (377)..(377): Selenocysteine
  MOD_RES (387)..(387): Selenocysteine
  MOD_RES (390)..(390): Selenocysteine
  MOD_RES (434)..(434): Selenocysteine
  MOD_RES (464)..(464): Selenocysteine
  MOD_RES (476)..(476): Selenocysteine
  MOD_RES (479)..(479): Selenocysteine
  MOD_RES (503)..(503): Selenocysteine
  MOD_RES (545)..(545): Selenocysteine
  MOD_RES (549)..(549): Selenocysteine
  MOD_RES (555)..(555): Selenocysteine
  MOD_RES (584)..(584): Selenocysteine
  MOD_RES (606)..(607): Selenocysteine
  MOD_RES (668)..(668): Selenocysteine
  MOD_RES (697)..(697): Selenocysteine
  MOD_RES (703)..(703): Selenocysteine
  MOD_RES (708)..(708): Selenocysteine
  MOD_RES (714)..(714): Selenocysteine
  MOD_RES (718)..(718): Selenocysteine
MSGGEVVCSGWLRKSPPEKKLKRYAWKRRWFVLRSGRLXGDPDVLEYYKNDHAKKPIRIIDLNLCQQVDAGLXFNKKEFENSYIFDINXIDRIFYLVADSEEEMNKWVRCICDICGFNPXEEDPVKPPGSSLQAPADLPLAINXAPPSXQADSSSAXLPPPYQLINVPPHLEXLGIQEDPQDYLLLINCQSKKPEPXRXHADSAKSXSSEXDCNDNVPSHKNPASSQSKHGMNGFFQQQMIYDSPPSRAPSASVDSSLYNLPRSYSHDVLPKVSPSSXEADGELYVFNXPSGXSSVEXQMRHVSISYDIPPXPGNXYQIPRXFPEGXLGQXSKLDXIPDIPPPRPPKPHPAHDRSPVEXCSIPRXASDXDSSYCIPXAGMSPSRSNXISXVDLNKLRKDASSQDCYDIPRAFPSDRSSSLEGFHNHFKVKNVLXVGSVSSEELDENYVPMNPNSPPRQHSSSFXEPIQEANYVPMXPGXFDFSSFGMQVPPPAHMGFRSSPKXPPRRPVPVADCEPPPVDRNLKPDRKGQSPKILRLKPHGLERXDSQXIGDFAXRRKVKPAPLEIKPLPEWEELQAPVRSPIXRSFARDSSRFPMSPRPDSVHSXXSSSDSHDSEENYVPMNPNLSSEDPNLFGSNSLDGGSSPMIKPKGDKQVEYLDLDLDSGKSXPPRKQKSSGSGSSVADERVDYVVVDQQKXLALKSXREAWXDGRQSXESEXPAKSVK

SEQ ID NO: 10496 - protein, 239 aa, Homo sapiens
  MOD_RES (39)..(39): Selenocysteine
  MOD_RES (73)..(73): Selenocysteine
  MOD_RES (89)..(89): Selenocysteine
  MOD_RES (120)..(120): Selenocysteine
  MOD_RES (144)..(144): Selenocysteine
  MOD_RES (149)..(149): Selenocysteine
  MOD_RES (157)..(157): Selenocysteine
  MOD_RES (173)..(173): Selenocysteine
  MOD_RES (197)..(197): Selenocysteine
  MOD_RES (221)..(221): Selenocysteine
  MOD_RES (226)..(226): Selenocysteine
  MOD_RES (234)..(234): Selenocysteine
  MOD_RES (238)..(238): Selenocysteine
MSGGEVVCSGWLRKSPPEKKLKRYAWKRRWFVLRSGRLXGDPDVLEYYKNDHAKKPIRIIDLNLCQQVDAGLXFNKKEFENSYIFDINXIDRIFYLVADSEEEMNKWVRCICDICGFNPXEEDPVKPPGSSLQAPADLPLAINXAPPSXQADSSSAXLPPPYQLINVPPHLEXLGIQEDPQDYLLLINCQSKKPEPXSQGSSFVSEEGEEYLLLEDFESKXIPLQXHADSAKSXSSEXD

SEQ ID NO: 10497 - protein, 94 aa, Homo sapiens
  MOD_RES (1)..(1): Any amino acid
  MOD_RES (5)..(5): Selenocysteine
  MOD_RES (39)..(39): Selenocysteine
  MOD_RES (55)..(55): Selenocysteine
  MOD_RES (86)..(86): Selenocysteine
XGRLXGDPDVLEYYKNDHAKKPIRIIDLNLCQQVDAGLXFNKKEFENSYIFDINXIDRIFYLVADSEEEMNKWVRCICDICGFNPXEEGSHFVV

SEQ ID NO: 10498 - protein, 91 aa, Homo sapiens
  MOD_RES (1)..(1): Any amino acid
  MOD_RES (22)..(22): Selenocysteine
  MOD_RES (27)..(27): Selenocysteine
  MOD_RES (35)..(35): Selenocysteine
  MOD_RES (51)..(51): Selenocysteine
  MOD_RES (75)..(75): Selenocysteine
XPVKPPGSSLQAPADLPLAINXAPPSXQADSSSAXLPPPYQLINVPPHLEXLGIQEDPQDYLLLINCQSKKPEPXRNASEECEMKILPCHF

SEQ ID NO: 10499 - protein, 102 aa, Homo sapiens
  MOD_RES (36)..(36): Selenocysteine
  MOD_RES (52)..(52): Selenocysteine
  MOD_RES (56)..(56): Selenocysteine
  MOD_RES (63)..(63): Selenocysteine
  MOD_RES (87)..(87): Selenocysteine
MSGDPDVLEYYKNDHSKKPLRIINLNFCEQVDAGLXFNKKELQDSFVFDIKXSERXFYLVAEXEEDMNKWVQSICQICGFNQAEESXDSLRNVSSAGHGPRS

SEQ ID NO: 10500 - protein, 131 aa, Homo sapiens
  MOD_RES (36)..(36): Selenocysteine
  MOD_RES (52)..(52): Selenocysteine
  MOD_RES (56)..(56): Selenocysteine
  MOD_RES (63)..(63): Selenocysteine
  MOD_RES (87)..(87): Selenocysteine
  MOD_RES (130)..(130): Selenocysteine
MSGDPDVLEYYKNDHSKKPLRIINLNFCEQVDAGLXFNKKELQDSFVFDIKXSERXFYLVAEXEEDMNKWVQSICQICGFNQAEESXDSLRNVSSAGHGPRSSPAELSSSSQHLLRERKSSAPSHSSQPXL

SEQ ID NO: 10501 - protein, 638 aa, Homo sapiens
  MOD_RES (36)..(36): Selenocysteine
  MOD_RES (52)..(52): Selenocysteine
  MOD_RES (56)..(56): Selenocysteine
  MOD_RES (63)..(63): Selenocysteine
  MOD_RES (87)..(87): Selenocysteine
  MOD_RES (130)..(130): Selenocysteine
  MOD_RES (133)..(133): Selenocysteine
  MOD_RES (145)..(145): Selenocysteine
  MOD_RES (148)..(148): Selenocysteine
  MOD_RES (177)..(177): Selenocysteine
  MOD_RES (187)..(187): Selenocysteine
  MOD_RES (221)..(221): Selenocysteine
  MOD_RES (227)..(227): Selenocysteine
  MOD_RES (240)..(240): Selenocysteine
  MOD_RES (245)..(245): Selenocysteine
  MOD_RES (249)..(249): Selenocysteine
  MOD_RES (256)..(256): Selenocysteine
  MOD_RES (259)..(259): Selenocysteine
  MOD_RES (263)..(263): Selenocysteine
  MOD_RES (281)..(281): Selenocysteine
  MOD_RES (291)..(291): Selenocysteine
  MOD_RES (293)..(293): Selenocysteine
  MOD_RES (302)..(302): Selenocysteine
  MOD_RES (305)..(305): Selenocysteine
  MOD_RES (325)..(325): Selenocysteine
  MOD_RES (347)..(347): Selenocysteine
  MOD_RES (353)..(353): Selenocysteine
  MOD_RES (370)..(370): Selenocysteine
  MOD_RES (408)..(408): Selenocysteine
  MOD_RES (423)..(423): Selenocysteine
  MOD_RES (456)..(457): Selenocysteine
  MOD_RES (488)..(488): Selenocysteine
  MOD_RES (496)..(496): Selenocysteine
  MOD_RES (508)..(508): Selenocysteine
  MOD_RES (517)..(517): Selenocysteine
  MOD_RES (531)..(531): Selenocysteine
  MOD_RES (535)..(535): Selenocysteine
  MOD_RES (537)..(537): Selenocysteine
  MOD_RES (562)..(562): Selenocysteine
  MOD_RES (571)..(571): Selenocysteine
  MOD_RES (594)..(594): Selenocysteine
  MOD_RES (598)..(598): Selenocysteine
  MOD_RES (613)..(613): Selenocysteine
  MOD_RES (619)..(619): Selenocysteine
  MOD_RES (624)..(624): Selenocysteine
MSGDPDVLEYYKNDHSKKPLRIINLNFCEQVDAGLXFNKKELQDSFVFDIKXSERXFYLVAEXEEDMNKWVQSICQICGFNQAEESXDSLRNVSSAGHGPRSSPAELSSSSQHLLRERKSSAPSHSSQPXLFXFEPPVSNHMQPXLSXSAPQEYLYLHQCISRRAENARSASFSQGXRASFLMRSDXAVQKLAQGNGHCVNGISGQVHGFYSLPKPSRHNXEFRDSXYDLPRSLASHGHXKGSLXGSEXDNEDVYXFKXPSNXLCREFGDLLVDNMDVPAXPLSAYQIPRXFXLDKNHNAMXVAXPGDSAIAPPPRPPKPSQAEXPRWGSPQQRPPISENSRSVAAXIPRRNXLPAMDNSRLHRASSCEXYEYPQRGGESAGRSAESMSDGVGSFLPGKMIVGRSDSXNSEDNYVPMNPGSSXLLAMERAGDNSQSVYIPMSPGAHHFDSLGYPSXXLPVHRGPSRGSEIQPPPVNRNLKPDRKAKPXPLDLRNNXVIDELPFKSPIXKSWSRANHXFNSSSSQYCRPISXQSIXSXDSGDSEENYVPMQNPVSASPVPSGXNSPAPKKSXGSVDYLALDFQPSSPSPHRKPSXSSVXSDEKVDYVQVDKEKXQALQNXMQEWXDVRQSSEPSKGAKL

SEQ ID NO: 10502 - protein, 676 aa, Homo sapiens
  MOD_RES (10)..(10): Selenocysteine
  MOD_RES (74)..(74): Selenocysteine
  MOD_RES (90)..(90): Selenocysteine
  MOD_RES (94)..(94): Selenocysteine
  MOD_RES (101)..(101): Selenocysteine
  MOD_RES (125)..(125): Selenocysteine
  MOD_RES (168)..(168): Selenocysteine
  MOD_RES (171)..(171): Selenocysteine
  MOD_RES (183)..(183): Selenocysteine
  MOD_RES (186)..(186): Selenocysteine
  MOD_RES (215)..(215): Selenocysteine
  MOD_RES (225)..(225): Selenocysteine
  MOD_RES (259)..(259): Selenocysteine
  MOD_RES (265)..(265): Selenocysteine
  MOD_RES (278)..(278): Selenocysteine
  MOD_RES (283)..(283): Selenocysteine
  MOD_RES (287)..(287): Selenocysteine
  MOD_RES (294)..(294): Selenocysteine
  MOD_RES (297)..(297): Selenocysteine
  MOD_RES (301)..(301): Selenocysteine
  MOD_RES (319)..(319): Selenocysteine
  MOD_RES (329)..(329): Selenocysteine
  MOD_RES (331)..(331): Selenocysteine
  MOD_RES (340)..(340): Selenocysteine
  MOD_RES (343)..(343): Selenocysteine
  MOD_RES (363)..(363): Selenocysteine
  MOD_RES (385)..(385): Selenocysteine
  MOD_RES (391)..(391): Selenocysteine
  MOD_RES (408)..(408): Selenocysteine
  MOD_RES (446)..(446): Selenocysteine
  MOD_RES (461)..(461): Selenocysteine
  MOD_RES (494)..(495): Selenocysteine
  MOD_RES (526)..(526): Selenocysteine
  MOD_RES (534)..(534): Selenocysteine
  MOD_RES (546)..(546): Selenocysteine
  MOD_RES (555)..(555): Selenocysteine
  MOD_RES (569)..(569): Selenocysteine
  MOD_RES (573)..(573): Selenocysteine
  MOD_RES (575)..(575): Selenocysteine
  MOD_RES (600)..(600): Selenocysteine
  MOD_RES (609)..(609): Selenocysteine
  MOD_RES (632)..(632): Selenocysteine
  MOD_RES (636)..(636): Selenocysteine
  MOD_RES (651)..(651): Selenocysteine
  MOD_RES (657)..(657): Selenocysteine
  MOD_RES (662)..(662): Selenocysteine
MSGGGDVVCXGWLRKSPPEKKLRRYAWKKRWFILRSGRMSGDPDVLEYYKNDHSKKPLRIINLNFCEQVDAGLXFNKKELQDSFVFDIKXSERXFYLVAEXEEDMNKWVQSICQICGFNQAEESXDSLRNVSSAGHGPRSSPAELSSSSQHLLRERKSSAPSHSSQPXLFXFEPPVSNHMQPXLSXSAPQEYLYLHQCISRRAENARSASFSQGXRASFLMRSDXAVQKLAQGNGHCVNGISGQVHGFYSLPKPSRHNXEFRDSXYDLPRSLASHGHXKGSLXGSEXDNEDVYXFKXPSNXLCREFGDLLVDNMDVPAXPLSAYQIPRXFXLDKNHNAMXVAXPGDSAIAPPPRPPKPSQAEXPRWGSPQQRPPISENSRSVAAXIPRRNXLPAMDNSRLHRASSCEXYEYPQRGGESAGRSAESMSDGVGSFLPGKMIVGRSDSXNSEDNYVPMNPGSSXLLAMERAGDNSQSVYIPMSPGAHHFDSLGYPSXXLPVHRGPSRGSEIQPPPVNRNLKPDRKAKPXPLDLRNNXVIDELPFKSPIXKSWSRANHXFNSSSSQYCRPISXQSIXSXDSGDSEENYVPMQNPVSASPVPSGXNSPAPKKSXGSVDYLALDFQPSSPSPHRKPSXSSVXSDEKVDYVQVDKEKXQALQNXMQEWXDVRQSSEPSKGAKL

SEQ ID NO: 10503 - protein, 27 aa, Homo sapiens
MGQLYQEHHEEDFFLYIAYSDESVYGL

SEQ ID NO: 10504 - protein, 36 aa, Homo sapiens
  MOD_RES (35)..(35): Selenocysteine
MKFVYKEEHPFEKRRSEGEKIRKKYPDRVPLVSSXS

SEQ ID NO: 10505 - protein, 117 aa, Homo sapiens
  MOD_RES (56)..(56): Selenocysteine
  MOD_RES (87)..(87): Selenocysteine
  MOD_RES (90)..(90): Selenocysteine
MKFVYKEEHPFEKRRSEGEKIRKKYPDRVPVIVEKAPKARIGDLDKKKYLVPSDLXVGQFYFLIRKRIHLRAEDALFFFVNNVIPPXSAXMGQLYQEHHEEDFFLYIAYSDESVYGL

SEQ ID NO: 10506 - protein, 98 aa, Homo sapiens
  MOD_RES (56)..(56): Selenocysteine
  MOD_RES (87)..(87): Selenocysteine
  MOD_RES (90)..(90): Selenocysteine
MKFVYKEEHPFEKRRSEGEKIRKKYPDRVPVIVEKAPKARIGDLDKKKYLVPSDLXVGQFYFLIRKRIHLRAEDALFFFVNNVIPPXSAXMGQLYQVW

SEQ ID NO: 10507 - protein, 844 aa, Homo sapiens
  MOD_RES (109)..(109): Selenocysteine
  MOD_RES (134)..(134): Selenocysteine
  MOD_RES (165)..(165): Selenocysteine
  MOD_RES (169)..(169): Selenocysteine
  MOD_RES (174)..(174): Selenocysteine
  MOD_RES (179)..(179): Selenocysteine
  MOD_RES (194)..(194): Selenocysteine
  MOD_RES (198)..(199): Selenocysteine
  MOD_RES (203)..(203): Selenocysteine
  MOD_RES (205)..(205): Selenocysteine
  MOD_RES (221)..(221): Selenocysteine
  MOD_RES (252)..(252): Selenocysteine
  MOD_RES (294)..(294): Selenocysteine
  MOD_RES (299)..(299): Selenocysteine
  MOD_RES (307)..(308): Selenocysteine
  MOD_RES (318)..(318): Selenocysteine
  MOD_RES (325)..(325): Selenocysteine
  MOD_RES (334)..(334): Selenocysteine
  MOD_RES (344)..(344): Selenocysteine
  MOD_RES (367)..(367): Selenocysteine
  MOD_RES (387)..(387): Selenocysteine
  MOD_RES (389)..(389): Selenocysteine
  MOD_RES (420)..(420): Selenocysteine
  MOD_RES (439)..(439): Selenocysteine
  MOD_RES (448)..(448): Selenocysteine
  MOD_RES (461)..(461): Selenocysteine
  MOD_RES (466)..(466): Selenocysteine
  MOD_RES (516)..(516): Selenocysteine
  MOD_RES (566)..(566): Selenocysteine
  MOD_RES (573)..(573): Selenocysteine
  MOD_RES (576)..(576): Selenocysteine
  MOD_RES (587)..(587): Selenocysteine
  MOD_RES (596)..(596): Selenocysteine
  MOD_RES (607)..(607): Selenocysteine
  MOD_RES (620)..(620): Selenocysteine
  MOD_RES (623)..(623): Selenocysteine
  MOD_RES (651)..(651): Selenocysteine
  MOD_RES (674)..(674): Selenocysteine
  MOD_RES (679)..(679): Selenocysteine
  MOD_RES (702)..(702): Selenocysteine
  MOD_RES (706)..(706): Selenocysteine
  MOD_RES (731)..(731): Selenocysteine
  MOD_RES (745)..(745): Selenocysteine
  MOD_RES (756)..(756): Selenocysteine
  MOD_RES (759)..(759): Selenocysteine
  MOD_RES (763)..(763): Selenocysteine
  MOD_RES (813)..(813): Selenocysteine
MGPGAPFARVGWPLPLLVVMAAGVAPVWASHSPHLPRPHSRVPPHPSSERRAVYIGALFPMSGGWPGGQACQPAVEMALEDVNSRRDILPDYELKLIHHDSKCDPGQAXKYLYELLYNDPIKIILMPGCSSVSXLVAEAARMWNLIVLSYGSSSPALSNRQRFPXFFRXHPSAXLHNPXRVKLFEKWGWKKIAXIQQXXEVFXSXLDDLEERVKEAGIEIXFRQSFFSDPAVPVKNLKRQDARIIVGLFYEXEARKVFCEVYKERLFGKKYVWFLIGWYADNWFKIYDPSINCXVDEMXEAVEGHIXXEIVMLNPANXRSISNMXSQEFVEKLXKRLKRHPEEXGGFQEAPLAYDAIWALALALNKXSGGGGRSGVRLEDFNYNNQXIXDQIYRAMNSSSFEGVSGHVVFDASGSRMAWXLIEQLQGGSYKKIGYYDSXKDDLSWSKXDKWIGGSPPADQXLVIKXFRFLSQKLFISVSVLSSLGIVLAVVCLSFNIYNSHVRYIQNSQPNLNNLXAVGCSLALAAVFPLGLDGYHIGRNQFPFVCQARLWLLGLGFSLGYGSMFXKIWWVHXVFXKKEEKKEWRKXLEPWKLYAXVGLLVGMDVLXLAIWQIVDPLHRXIEXFAKEEPKEDIDVSILPQLEHCSSRKMNXWLGIFYGYKGLLLLLGIFLAYEXKSVSXEKINDHRAVGMAIYNVAVLCLIXAPVXMILSSQQDAAFAFASLAIVFSSYIXLVVLFVPKMRRLIXRGEWQSEAQDXMKXGSSXNNNEEEKSRLLEKENRELEKIIAEKEERVSELRHQLQSRQQLRSRRHPPXPPEPSGGLPRGPPEPPDRLSCDGSRVHLLYK

SEQ ID NO: 10508 - protein, 131 aa, Homo sapiens
  MOD_RES (22)..(22): Selenocysteine
  MOD_RES (26)..(26): Selenocysteine
  MOD_RES (47)..(47): Selenocysteine
  MOD_RES (88)..(88): Selenocysteine
  MOD_RES (92)..(92): Selenocysteine
  MOD_RES (98)..(98): Selenocysteine
  MOD_RES (103)..(103): Selenocysteine
MLLLLLLAPLFLRPPGAGGAQXPNAXSEGCQIIHPPWEGGIRYRGLXRDQVKAINFLPVDYEIEYVCRGEREVVGPKVRKCLANGSWXDMDXPSRCGXLPSEXQASALPGLQHGQVWEGAGDQAREAGRQW

SEQ ID NO: 10509 - protein, 97 aa, Homo sapiens
  MOD_RES (22)..(22): Selenocysteine
  MOD_RES (26)..(26): Selenocysteine
  MOD_RES (47)..(47): Selenocysteine
  MOD_RES (88)..(88): Selenocysteine
  MOD_RES (92)..(92): Selenocysteine
MLLLLLLAPLFLRPPGAGGAQXPNAXSEGCQIIHPPWEGGIRYRGLXRDQVKAINFLPVDYEIEYVCRGEREVVGPKVRKCLANGSWXDMDXPSRCV

SEQ ID NO: 10510 - protein, 899 aa, Homo sapiens
  MOD_RES (22)..(22): Selenocysteine
  MOD_RES (26)..(26): Selenocysteine
  MOD_RES (47)..(47): Selenocysteine
  MOD_RES (88)..(88): Selenocysteine
  MOD_RES (92)..(92): Selenocysteine
  MOD_RES (100)..(100): Selenocysteine
  MOD_RES (164)..(164): Selenocysteine
  MOD_RES (189)..(189): Selenocysteine
  MOD_RES (220)..(220): Selenocysteine
  MOD_RES (224)..(224): Selenocysteine
  MOD_RES (229)..(229): Selenocysteine
  MOD_RES (234)..(234): Selenocysteine
  MOD_RES (249)..(249): Selenocysteine
  MOD_RES (253)..(254): Selenocysteine
  MOD_RES (258)..(258): Selenocysteine
  MOD_RES (260)..(260): Selenocysteine
  MOD_RES (276)..(276): Selenocysteine
  MOD_RES (307)..(307): Selenocysteine
  MOD_RES (349)..(349): Selenocysteine
  MOD_RES (354)..(354): Selenocysteine
  MOD_RES (362)..(363): Selenocysteine
  MOD_RES (373)..(373): Selenocysteine
  MOD_RES (380)..(380): Selenocysteine
  MOD_RES (389)..(389): Selenocysteine
  MOD_RES (399)..(399): Selenocysteine
  MOD_RES (422)..(422): Selenocysteine
  MOD_RES (442)..(442): Selenocysteine
  MOD_RES (444)..(444): Selenocysteine
  MOD_RES (475)..(475): Selenocysteine
  MOD_RES (494)..(494): Selenocysteine
  MOD_RES (503)..(503): Selenocysteine
  MOD_RES (516)..(516): Selenocysteine
  MOD_RES (521)..(521): Selenocysteine
  MOD_RES (571)..(571): Selenocysteine
  MOD_RES (621)..(621): Selenocysteine
  MOD_RES (628)..(628): Selenocysteine
  MOD_RES (631)..(631): Selenocysteine
  MOD_RES (642)..(642): Selenocysteine
  MOD_RES (651)..(651): Selenocysteine
  MOD_RES (662)..(662): Selenocysteine
  MOD_RES (675)..(675): Selenocysteine
  MOD_RES (678)..(678): Selenocysteine
  MOD_RES (706)..(706): Selenocysteine
  MOD_RES (729)..(729): Selenocysteine
  MOD_RES (734)..(734): Selenocysteine
  MOD_RES (757)..(757): Selenocysteine
  MOD_RES (761)..(761): Selenocysteine
  MOD_RES (786)..(786): Selenocysteine
  MOD_RES (800)..(800): Selenocysteine
  MOD_RES (811)..(811): Selenocysteine
  MOD_RES (814)..(814): Selenocysteine
  MOD_RES (818)..(818): Selenocysteine
  MOD_RES (868)..(868): Selenocysteine
MLLLLLLAPLFLRPPGAGGAQXPNAXSEGCQIIHPPWEGGIRYRGLXRDQVKAINFLPVDYEIEYVCRGEREVVGPKVRKCLANGSWXDMDXPSRCVNRXPHSERRAVYIGALFPMSGGWPGGQACQPAVEMALEDVNSRRDILPDYELKLIHHDSKCDPGQAXKYLYELLYNDPIKIILMPGCSSVSXLVAEAARMWNLIVLSYGSSSPALSNRQRFPXFFRXHPSAXLHNPXRVKLFEKWGWKKIAXIQQXXEVFXSXLDDLEERVKEAGIEIXFRQSFFSDPAVPVKNLKRQDARIIVGLFYEXEARKVFCEVYKERLFGKKYVWFLIGWYADNWFKIYDPSINCXVDEMXEAVEGHIXXEIVMLNPANXRSISNMXSQEFVEKLXKRLKRHPEEXGGFQEAPLAYDAIWALALALNKXSGGGGRSGVRLEDFNYNNQXIXDQIYRAMNSSSFEGVSGHVVFDASGSRMAWXLIEQLQGGSYKKIGYYDSXKDDLSWSKXDKWIGGSPPADQXLVIKXFRFLSQKLFISVSVLSSLGIVLAVVCLSFNIYNSHVRYIQNSQPNLNNLXAVGCSLALAAVFPLGLDGYHIGRNQFPFVCQARLWLLGLGFSLGYGSMFXKIWWVHXVFXKKEEKKEWRKXLEPWKLYAXVGLLVGMDVLXLAIWQIVDPLHRXIEXFAKEEPKEDIDVSILPQLEHCSSRKMNXWLGIFYGYKGLLLLLGIFLAYEXKSVSXEKINDHRAVGMAIYNVAVLCLIXAPVXMILSSQQDAAFAFASLAIVFSSYIXLVVLFVPKMRRLIXRGEWQSEAQDXMKXGSSXNNNEEEKSRLLEKENRELEKIIAEKEERVSELRHQLQSRQQLRSRRHPPXPPEPSGGLPRGPPEPPDRLSCDGSRVHLLYK

SEQ ID NO: 10511 - protein, 137 aa, Homo sapiens
  MOD_RES (22)..(22): Selenocysteine
  MOD_RES (26)..(26): Selenocysteine
  MOD_RES (47)..(47): Selenocysteine
  MOD_RES (88)..(88): Selenocysteine
  MOD_RES (92)..(92): Selenocysteine
  MOD_RES (106)..(106): Selenocysteine
  MOD_RES (115)..(115): Selenocysteine
MLLLLLLAPLFLRPPGAGGAQXPNAXSEGCQIIHPPWEGGIRYRGLXRDQVKAINFLPVDYEIEYVCRGEREVVGPKVRKCLANGSWXDMDXPSRCVRICSKSYLXLENGKVFLXGGDLPALDGARVDFRCDPDFHL

SEQ ID NO: 10512 - protein, 156 aa, Homo sapiens
  MOD_RES (22)..(22): Selenocysteine
  MOD_RES (26)..(26): Selenocysteine
  MOD_RES (47)..(47): Selenocysteine
  MOD_RES (88)..(88): Selenocysteine
  MOD_RES (92)..(92): Selenocysteine
  MOD_RES (106)..(106): Selenocysteine
  MOD_RES (115)..(115): Selenocysteine
  MOD_RES (152)..(152): Selenocysteine
MLLLLLLAPLFLRPPGAGGAQXPNAXSEGCQIIHPPWEGGIRYRGLXRDQVKAINFLPVDYEIEYVCRGEREVVGPKVRKCLANGSWXDMDXPSRCVRICSKSYLXLENGKVFLXGGDLPALDGARVDFRCDPDFHLVGSSRSICSQGQWSXPKPH

SEQ ID NO: 10513 - protein, 193 aa, Homo sapiens
  MOD_RES (22)..(22): Selenocysteine
  MOD_RES (26)..(26): Selenocysteine
  MOD_RES (47)..(47): Selenocysteine
  MOD_RES (88)..(88): Selenocysteine
  MOD_RES (92)..(92): Selenocysteine
  MOD_RES (106)..(106): Selenocysteine
  MOD_RES (115)..(115): Selenocysteine
  MOD_RES (152)..(152): Selenocysteine
  MOD_RES (160)..(160): Selenocysteine
  MOD_RES (165)..(165): Selenocysteine
MLLLLLLAPLFLRPPGAGGAQXPNAXSEGCQIIHPPWEGGIRYRGLXRDQVKAINFLPVDYEIEYVCRGEREVVGPKVRKCLANGSWXDMDXPSRCVRICSKSYLXLENGKVFLXGGDLPALDGARVDFRCDPDFHLVGSSRSICSQGQWSXPKPHCQGXLPSEXQASALPGLQHGQVWEGAGDQAREAGRQW

SEQ ID NO: 10514 - protein, 578 aa, Homo sapiens
  MOD_RES (22)..(22): Selenocysteine
  MOD_RES (26)..(26): Selenocysteine
  MOD_RES (47)..(47): Selenocysteine
  MOD_RES (88)..(88): Selenocysteine
  MOD_RES (92)..(92): Selenocysteine
  MOD_RES (106)..(106): Selenocysteine
  MOD_RES (115)..(115): Selenocysteine
  MOD_RES (152)..(152): Selenocysteine
  MOD_RES (162)..(162): Selenocysteine
  MOD_RES (226)..(226): Selenocysteine
  MOD_RES (251)..(251): Selenocysteine
  MOD_RES (282)..(282): Selenocysteine
  MOD_RES (286)..(286): Selenocysteine
  MOD_RES (291)..(291): Selenocysteine
  MOD_RES (296)..(296): Selenocysteine
  MOD_RES (311)..(311): Selenocysteine
  MOD_RES (315)..(316): Selenocysteine
  MOD_RES (320)..(320): Selenocysteine
  MOD_RES (322)..(322): Selenocysteine
  MOD_RES (338)..(338): Selenocysteine
  MOD_RES (369)..(369): Selenocysteine
  MOD_RES (411)..(411): Selenocysteine
  MOD_RES (416)..(416): Selenocysteine
  MOD_RES (424)..(425): Selenocysteine
  MOD_RES (435)..(435): Selenocysteine
  MOD_RES (442)..(442): Selenocysteine
  MOD_RES (451)..(451): Selenocysteine
  MOD_RES (461)..(461): Selenocysteine
  MOD_RES (484)..(484): Selenocysteine
  MOD_RES (504)..(504): Selenocysteine
  MOD_RES (506)..(506): Selenocysteine
  MOD_RES (537)..(537): Selenocysteine
  MOD_RES (556)..(556): Selenocysteine
  MOD_RES (565)..(565): Selenocysteine
  MOD_RES (574)..(574): Selenocysteine
  MOD_RES (578)..(578): Selenocysteine
MLLLLLLAPLFLRPPGAGGAQXPNAXSEGCQIIHPPWEGGIRYRGLXRDQVKAINFLPVDYEIEYVCRGEREVVGPKVRKCLANGSWXDMDXPSRCVRICSKSYLXLENGKVFLXGGDLPALDGARVDFRCDPDFHLVGSSRSICSQGQWSXPKPHCQVNRXPHSERRAVYIGALFPMSGGWPGGQACQPAVEMALEDVNSRRDILPDYELKLIHHDSKCDPGQAXKYLYELLYNDPIKIILMPGCSSVSXLVAEAARMWNLIVLSYGSSSPALSNRQRFPXFFRXHPSAXLHNPXRVKLFEKWGWKKIAXIQQXXEVFXSXLDDLEERVKEAGIEIXFRQSFFSDPAVPVKNLKRQDARIIVGLFYEXEARKVFCEVYKERLFGKKYVWFLIGWYADNWFKIYDPSINCXVDEMXEAVEGHIXXEIVMLNPANXRSISNMXSQEFVEKLXKRLKRHPEEXGGFQEAPLAYDAIWALALALNKXSGGGGRSGVRLEDFNYNNQXIXDQIYRAMNSSSFEGVSGHVVFDASGSRMAWXLIEQLQGGSYKKIGYYDSXKDDLSWSKXDKWIVISRXHSPX

SEQ ID NO: 10515 - protein, 961 aa, Homo sapiens
  MOD_RES (22)..(22): Selenocysteine
  MOD_RES (26)..(26): Selenocysteine
  MOD_RES (47)..(47): Selenocysteine
  MOD_RES (88)..(88): Selenocysteine
  MOD_RES (92)..(92): Selenocysteine
  MOD_RES (106)..(106): Selenocysteine
  MOD_RES (115)..(115): Selenocysteine
  MOD_RES (152)..(152): Selenocysteine
  MOD_RES (162)..(162): Selenocysteine
  MOD_RES (226)..(226): Selenocysteine
  MOD_RES (251)..(251): Selenocysteine
  MOD_RES (282)..(282): Selenocysteine
  MOD_RES (286)..(286): Selenocysteine
  MOD_RES (291)..(291): Selenocysteine
  MOD_RES (296)..(296): Selenocysteine
  MOD_RES (311)..(311): Selenocysteine
  MOD_RES (315)..(316): Selenocysteine
  MOD_RES (320)..(320): Selenocysteine
  MOD_RES (322)..(322): Selenocysteine
  MOD_RES (338)..(338): Selenocysteine
  MOD_RES (369)..(369): Selenocysteine
  MOD_RES (411)..(411): Selenocysteine
  MOD_RES (416)..(416): Selenocysteine
  MOD_RES (424)..(425): Selenocysteine
  MOD_RES (435)..(435): Selenocysteine
  MOD_RES (442)..(442): Selenocysteine
  MOD_RES (451)..(451): Selenocysteine
  MOD_RES (461)..(461): Selenocysteine
  MOD_RES (484)..(484): Selenocysteine
  MOD_RES (504)..(504): Selenocysteine
  MOD_RES (506)..(506): Selenocysteine
  MOD_RES (537)..(537): Selenocysteine
  MOD_RES (556)..(556): Selenocysteine
  MOD_RES (565)..(565): Selenocysteine
  MOD_RES (578)..(578): Selenocysteine
  MOD_RES (583)..(583): Selenocysteine
  MOD_RES (633)..(633): Selenocysteine
  MOD_RES (683)..(683): Selenocysteine
  MOD_RES (690)..(690): Selenocysteine
  MOD_RES (693)..(693): Selenocysteine
  MOD_RES (704)..(704): Selenocysteine
  MOD_RES (713)..(713): Selenocysteine
  MOD_RES (724)..(724): Selenocysteine
  MOD_RES (737)..(737): Selenocysteine
  MOD_RES (740)..(740): Selenocysteine
  MOD_RES (768)..(768): Selenocysteine
  MOD_RES (791)..(791): Selenocysteine
  MOD_RES (796)..(796): Selenocysteine
  MOD_RES (819)..(819): Selenocysteine
  MOD_RES (823)..(823): Selenocysteine
  MOD_RES (848)..(848): Selenocysteine
  MOD_RES (862)..(862): Selenocysteine
  MOD_RES (873)..(873): Selenocysteine
  MOD_RES (876)..(876): Selenocysteine
  MOD_RES (880)..(880): Selenocysteine
  MOD_RES (930)..(930): Selenocysteine
MLLLLLLAPLFLRPPGAGGAQXPNAXSEGCQIIHPPWEGGIRYRGLXRDQVKAINFLPVDYEIEYVCRGEREVVGPKVRKCLANGSWXDMDXPSRCVRICSKSYLXLENGKVFLXGGDLPALDGARVDFRCDPDFHLVGSSRSICSQGQWSXPKPHCQVNRXPHSERRAVYIGALFPMSGGWPGGQACQPAVEMALEDVNSRRDILPDYELKLIHHDSKCDPGQAXKYLYELLYNDPIKIILMPGCSSVSXLVAEAARMWNLIVLSYGSSSPALSNRQRFPXFFRXHPSAXLHNPXRVKLFEKWGWKKIAXIQQXXEVFXSXLDDLEERVKEAGIEIXFRQSFFSDPAVPVKNLKRQDARIIVGLFYEXEARKVFCEVYKERLFGKKYVWFLIGWYADNWFKIYDPSINCXVDEMXEAVEGHIXXEIVMLNPANXRSISNMXSQEFVEKLXKRLKRHPEEXGGFQEAPLAYDAIWALALALNKXSGGGGRSGVRLEDFNYNNQXIXDQIYRAMNSSSFEGVSGHVVFDASGSRMAWXLIEQLQGGSYKKIGYYDSXKDDLSWSKXDKWIGGSPPADQXLVIKXFRFLSQKLFISVSVLSSLGIVLAVVCLSFNIYNSHVRYIQNSQPNLNNLXAVGCSLALAAVFPLGLDGYHIGRNQFPFVCQARLWLLGLGFSLGYGSMFXKIWWVHXVFXKKEEKKEWRKXLEPWKLYAXVGLLVGMDVLXLAIWQIVDPLHRXIEXFAKEEPKEDIDVSILPQLEHCSSRKMNXWLGIFYGYKGLLLLLGIFLAYEXKSVSXEKINDHRAVGMAIYNVAVLCLIXAPVXMILSSQQDAAFAFASLAIVFSSYIXLVVLFVPKMRRLIXRGEWQSEAQDXMKXGSSXNNNEEEKSRLLEKENRELEKIIAEKEERVSELRHQLQSRQQLRSRRHPPXPPEPSGGLPRGPPEPPDRLSCDGSRVHLLYK

SEQ ID NO: 10516 - protein, 899 aa, Homo sapiens
  MOD_RES (22)..(22): Selenocysteine
  MOD_RES (26)..(26): Selenocysteine
  MOD_RES (47)..(47): Selenocysteine
  MOD_RES (88)..(88): Selenocysteine
  MOD_RES (92)..(92): Selenocysteine
  MOD_RES (100)..(100): Selenocysteine
  MOD_RES (164)..(164): Selenocysteine
  MOD_RES (189)..(189): Selenocysteine
  MOD_RES (220)..(220): Selenocysteine
  MOD_RES (224)..(224): Selenocysteine
  MOD_RES (229)..(229): Selenocysteine
  MOD_RES (234)..(234): Selenocysteine
  MOD_RES (249)..(249): Selenocysteine
  MOD_RES (253)..(254): Selenocysteine
  MOD_RES (258)..(258): Selenocysteine
  MOD_RES (260)..(260): Selenocysteine
  MOD_RES (276)..(276): Selenocysteine
  MOD_RES (307)..(307): Selenocysteine
  MOD_RES (349)..(349): Selenocysteine
  MOD_RES (354)..(354): Selenocysteine
  MOD_RES (362)..(363): Selenocysteine
  MOD_RES (373)..(373): Selenocysteine
  MOD_RES (380)..(380): Selenocysteine
  MOD_RES (389)..(389): Selenocysteine
  MOD_RES (399)..(399): Selenocysteine
  MOD_RES (422)..(422): Selenocysteine
  MOD_RES (442)..(442): Selenocysteine
  MOD_RES (444)..(444): Selenocysteine
  MOD_RES (475)..(475): Selenocysteine
  MOD_RES (494)..(494): Selenocysteine
  MOD_RES (503)..(503): Selenocysteine
  MOD_RES (516)..(516): Selenocysteine
  MOD_RES (521)..(521): Selenocysteine
  MOD_RES (571)..(571): Selenocysteine
  MOD_RES (621)..(621): Selenocysteine
  MOD_RES (628)..(628): Selenocysteine
  MOD_RES (631)..(631): Selenocysteine
  MOD_RES (642)..(642): Selenocysteine
  MOD_RES (651)..(651): Selenocysteine
  MOD_RES (662)..(662): Selenocysteine
  MOD_RES (675)..(675): Selenocysteine
  MOD_RES (678)..(678): Selenocysteine
  MOD_RES (706)..(706): Selenocysteine
  MOD_RES (729)..(729): Selenocysteine
  MOD_RES (734)..(734): Selenocysteine
  MOD_RES (757)..(757): Selenocysteine
  MOD_RES (761)..(761): Selenocysteine
  MOD_RES (786)..(786): Selenocysteine
  MOD_RES (800)..(800): Selenocysteine
  MOD_RES (811)..(811): Selenocysteine
  MOD_RES (814)..(814): Selenocysteine
  MOD_RES (818)..(818): Selenocysteine
  MOD_RES (868)..(868): Selenocysteine
MLLLLLLAPLFLRPPGAGGVQXPNAXSEGCQIIHPPWEGGIRYRGLXRDQVKAINFLPVDYEIEYVCRGEREVVGPKVRKCLANGSWXDMDXPSRCVNRXPHSERRAVYIGALFPMSGGWPGGQACQPAVEMALEDVNSRRDILPDYELKLIHHDSKCDPGQAXKYLYELLYNDPIKIILMPGCSSVSXLVAEAARMWNLIVLSYGSSSPALSNRQRFPXFFRXHPSAXLHNPXRVKLFEKWGWKKIAXIQQXXEVFXSXLDDLEERVKEAGIEIXFRQSFFSDPAVPVKNLKRQDARIIVGLFYEXEARKVFCEVYKERLFGKKYVWFLIGWYADNWFKIYDPSINCXVDEMXEAVEGHIXXEIVMLNPANXRSISNMXSQEFVEKLXKRLKRHPEEXGGFQEAPLAYDAIWALALALNKXSGGGGRSGVRLEDFNYNNQXIXDQIYRAMNSSSFEGVSGHVVFDASGSRMAWXLIEQLQGGSYKKIGYYDSXKDDLSWSKXDKWIGGSPPADQXLVIKXFRFLSQKLFISVSVLSSLGIVLAVVCLSFNIYNSHVRYIQNSQPNLNNLXAVGCSLALAAVFPLGLDGYHIGRNQFPFVCQARLWLLGLGFSLGYGSMFXKIWWVHXVFXKKEEKKEWRKXLEPWKLYAXVGLLVGMDVLXLAIWQIVDPLHRXIEXFAKEEPKEDIDVSILPQLEHCSSRKMNXWLGIFYGYKGLLLLLGIFLAYEXKSVSXEKINDHRAVGMAIYNVAVLCLIXAPVXMILSSQQDAAFAFASLAIVFSSYIXLVVLFVPKMRRLIXRGEWQSEAQDXMKXGSSXNNNEEEKSRLLEKENRELEKIIAEKEERVSELRHQLQSRQQLRSRRHPPXPPEPSGGLPRGPPEPPDRLSCDGSRVHLLYK

SEQ ID NO: 10517 - protein, 578 aa, Homo sapiens
  MOD_RES (22)..(22): Selenocysteine
  MOD_RES (26)..(26): Selenocysteine
  MOD_RES (47)..(47): Selenocysteine
  MOD_RES (88)..(88): Selenocysteine
  MOD_RES (92)..(92): Selenocysteine
  MOD_RES (106)..(106): Selenocysteine
  MOD_RES (115)..(115): Selenocysteine
  MOD_RES (152)..(152): Selenocysteine
  MOD_RES (162)..(162): Selenocysteine
  MOD_RES (226)..(226): Selenocysteine
  MOD_RES (251)..(251): Selenocysteine
  MOD_RES (282)..(282): Selenocysteine
  MOD_RES (286)..(286): Selenocysteine
  MOD_RES (291)..(291): Selenocysteine
  MOD_RES (296)..(296): Selenocysteine
  MOD_RES (311)..(311): Selenocysteine
  MOD_RES (315)..(316): Selenocysteine
  MOD_RES (320)..(320): Selenocysteine
  MOD_RES (322)..(322): Selenocysteine
  MOD_RES (338)..(338): Selenocysteine
  MOD_RES (369)..(369): Selenocysteine
  MOD_RES (411)..(411): Selenocysteine
  MOD_RES (416)..(416): Selenocysteine
  MOD_RES (424)..(425): Selenocysteine
  MOD_RES (435)..(435): Selenocysteine
  MOD_RES (442)..(442): Selenocysteine
  MOD_RES (451)..(451): Selenocysteine
  MOD_RES (461)..(461): Selenocysteine
  MOD_RES (484)..(484): Selenocysteine
  MOD_RES (504)..(504): Selenocysteine
  MOD_RES (506)..(506): Selenocysteine
  MOD_RES (537)..(537): Selenocysteine
  MOD_RES (556)..(556): Selenocysteine
  MOD_RES (565)..(565): Selenocysteine
  MOD_RES (574)..(574): Selenocysteine
  MOD_RES (578)..(578): Selenocysteine
MLLLLLLAPLFLRPPGAGGVQXPNAXSEGCQIIHPPWEGGIRYRGLXRDQVKAINFLPVDYEIEYVCRGEREVVGPKVRKCLANGSWXDMDXPSRCVRICSKSYLXLENGKVFLXGGDLPALDGARVDFRCDPDFHLVGSSRSICSQGQWSXPKPHCQVNRXPHSERRAVYIGALFPMSGGWPGGQACQPAVEMALEDVNSRRDILPDYELKLIHHDSKCDPGQAXKYLYELLYNDPIKIILMPGCSSVSXLVAEAARMWNLIVLSYGSSSPALSNRQRFPXFFRXHPSAXLHNPXRVKLFEKWGWKKIAXIQQXXEVFXSXLDDLEERVKEAGIEIXFRQSFFSDPAVPVKNLKRQDARIIVGLFYEXEARKVFCEVYKERLFGKKYVWFLIGWYADNWFKIYDPSINCXVDEMXEAVEGHIXXEIVMLNPANXRSISNMXSQEFVEKLXKRLKRHPEEXGGFQEAPLAYDAIWALALALNKXSGGGGRSGVRLEDFNYNNQXIXDQIYRAMNSSSFEGVSGHVVFDASGSRMAWXLIEQLQGGSYKKIGYYDSXKDDLSWSKXDKWIVISRXHSPX

SEQ ID NO: 10518 - protein, 961 aa, Homo sapiens
  MOD_RES (22)..(22): Selenocysteine
  MOD_RES (26)..(26): Selenocysteine
  MOD_RES (47)..(47): Selenocysteine
  MOD_RES (88)..(88): Selenocysteine
  MOD_RES (92)..(92): Selenocysteine
  MOD_RES (106)..(106): Selenocysteine
  MOD_RES (115)..(115): Selenocysteine
  MOD_RES (152)..(152): Selenocysteine
  MOD_RES (162)..(162): Selenocysteine
  MOD_RES (226)..(226): Selenocysteine
  MOD_RES (251)..(251): Selenocysteine
  MOD_RES (282)..(282): Selenocysteine
  MOD_RES (286)..(286): Selenocysteine
  MOD_RES (291)..(291): Selenocysteine
  MOD_RES (296)..(296): Selenocysteine
  MOD_RES (311)..(311): Selenocysteine
  MOD_RES (315)..(316): Selenocysteine
  MOD_RES (320)..(320): Selenocysteine
  MOD_RES (322)..(322): Selenocysteine
  MOD_RES (338)..(338): Selenocysteine
  MOD_RES (369)..(369): Selenocysteine
  MOD_RES (411)..(411): Selenocysteine
  MOD_RES (416)..(416): Selenocysteine
  MOD_RES (424)..(425): Selenocysteine
  MOD_RES (435)..(435): Selenocysteine
  MOD_RES (442)..(442): Selenocysteine
  MOD_RES (451)..(451): Selenocysteine
  MOD_RES (461)..(461): Selenocysteine
  MOD_RES (484)..(484): Selenocysteine
  MOD_RES (504)..(504): Selenocysteine
  MOD_RES (506)..(506): Selenocysteine
  MOD_RES (537)..(537): Selenocysteine
  MOD_RES (556)..(556): Selenocysteine
  MOD_RES (565)..(565): Selenocysteine
  MOD_RES (578)..(578): Selenocysteine
  MOD_RES (583)..(583): Selenocysteine
  MOD_RES (633)..(633): Selenocysteine
  MOD_RES (683)..(683): Selenocysteine
  MOD_RES (690)..(690): Selenocysteine
  MOD_RES (693)..(693): Selenocysteine
  MOD_RES (704)..(704): Selenocysteine
  MOD_RES (713)..(713): Selenocysteine
  MOD_RES (724)..(724): Selenocysteine
  MOD_RES (737)..(737): Selenocysteine
  MOD_RES (740)..(740): Selenocysteine
  MOD_RES (768)..(768): Selenocysteine
  MOD_RES (791)..(791): Selenocysteine
  MOD_RES (796)..(796): Selenocysteine
  MOD_RES (819)..(819): Selenocysteine
  MOD_RES (823)..(823): Selenocysteine
  MOD_RES (848)..(848): Selenocysteine
  MOD_RES (862)..(862): Selenocysteine
  MOD_RES (873)..(873): Selenocysteine
  MOD_RES (876)..(876): Selenocysteine
  MOD_RES (880)..(880): Selenocysteine
  MOD_RES (930)..(930): Selenocysteine
MLLLLLLAPLFLRPPGAGGVQXPNAXSEGCQIIHPPWEGGIRYRGLXRDQVKAINFLPVDYEIEYVCRGEREVVGPKVRKCLANGSWXDMDXPSRCVRICSKSYLXLENGKVFLXGGDLPALDGARVDFRCDPDFHLVGSSRSICSQGQWSXPKPHCQVNRXPHSERRAVYIGALFPMSGGWPGGQACQPAVEMALEDVNSRRDILPDYELKLIHHDSKCDPGQAXKYLYELLYNDPIKIILMPGCSSVSXLVAEAARMWNLIVLSYGSSSPALSNRQRFPXFFRXHPSAXLHNPXRVKLFEKWGWKKIAXIQQXXEVFXSXLDDLEERVKEAGIEIXFRQSFFSDPAVPVKNLKRQDARIIVGLFYEXEARKVFCEVYKERLFGKKYVWFLIGWYADNWFKIYDPSINCXVDEMXEAVEGHIXXEIVMLNPANXRSISNMXSQEFVEKLXKRLKRHPEEXGGFQEAPLAYDAIWALALALNKXSGGGGRSGVRLEDFNYNNQXIXDQIYRAMNSSSFEGVSGHVVFDASGSRMAWXLIEQLQGGSYKKIGYYDSXKDDLSWSKXDKWIGGSPPADQXLVIKXFRFLSQKLFISVSVLSSLGIVLAVVCLSFNIYNSHVRYIQNSQPNLNNLXAVGCSLALAAVFPLGLDGYHIGRNQFPFVCQARLWLLGLGFSLGYGSMFXKIWWVHXVFXKKEEKKEWRKXLEPWKLYAXVGLLVGMDVLXLAIWQIVDPLHRXIEXFAKEEPKEDIDVSILPQLEHCSSRKMNXWLGIFYGYKGLLLLLGIFLAYEXKSVSXEKINDHRAVGMAIYNVAVLCLIXAPVXMILSSQQDAAFAFASLAIVFSSYIXLVVLFVPKMRRLIXRGEWQSEAQDXMKXGSSXNNNEEEKSRLLEKENRELEKIIAEKEERVSELRHQLQSRQQLRSRRHPPXPPEPSGGLPRGPPEPPDRLSCDGSRVHLLYK

SEQ ID NO: 10519 - protein, 133 aa, Homo sapiens
  MOD_RES (27)..(27): Selenocysteine
  MOD_RES (31)..(31): Selenocysteine
  MOD_RES (52)..(52): Selenocysteine
  MOD_RES (93)..(93): Selenocysteine
  MOD_RES (97)..(97): Selenocysteine
  MOD_RES (111)..(111): Selenocysteine
  MOD_RES (120)..(120): Selenocysteine
MPGAWMLLLLLLAPLFLRPPGAGGAQXPNAXSEGCQIIHPPWEGGIRYRGLXRDQVKAINFLPVDYEIEYVCRGEREVVGPKVRKCLANGSWXDMDXPSRCVRICSKSYLXLENGKVFLXGGDLPALDGARVD

SEQ ID NO: 10520 - protein, 941 aa, Homo sapiens
  MOD_RES (65)..(65): Selenocysteine
  MOD_RES (106)..(106): Selenocysteine
  MOD_RES (139)..(139): Selenocysteine
  MOD_RES (159)..(160): Selenocysteine
  MOD_RES (175)..(175): Selenocysteine
  MOD_RES (200)..(200): Selenocysteine
  MOD_RES (202)..(202): Selenocysteine
  MOD_RES (216)..(216): Selenocysteine
  MOD_RES (229)..(229): Selenocysteine
  MOD_RES (238)..(238): Selenocysteine
  MOD_RES (295)..(295): Selenocysteine
  MOD_RES (329)..(329): Selenocysteine
  MOD_RES (334)..(334): Selenocysteine
  MOD_RES (368)..(368): Selenocysteine
  MOD_RES (375)..(375): Selenocysteine
  MOD_RES (391)..(391): Selenocysteine
  MOD_RES (394)..(394): Selenocysteine
  MOD_RES (406)..(406): Selenocysteine
  MOD_RES (412)..(412): Selenocysteine
  MOD_RES (425)..(425): Selenocysteine
  MOD_RES (429)..(429): Selenocysteine
  MOD_RES (448)..(448): Selenocysteine
  MOD_RES (455)..(455): Selenocysteine
  MOD_RES (468)..(468): Selenocysteine
  MOD_RES (489)..(489): Selenocysteine
  MOD_RES (548)..(548): Selenocysteine
  MOD_RES (551)..(551): Selenocysteine
  MOD_RES (554)..(554): Selenocysteine
  MOD_RES (557)..(557): Selenocysteine
  MOD_RES (561)..(561): Selenocysteine
  MOD_RES (565)..(566): Selenocysteine
  MOD_RES (575)..(575): Selenocysteine
  MOD_RES (624)..(624): Selenocysteine
  MOD_RES (651)..(651): Selenocysteine
  MOD_RES (654)..(654): Selenocysteine
  MOD_RES (678)..(678): Selenocysteine
  MOD_RES (713)..(713): Selenocysteine
  MOD_RES (733)..(733): Selenocysteine
  MOD_RES (735)..(735): Selenocysteine
  MOD_RES (746)..(746): Selenocysteine
  MOD_RES (749)..(749): Selenocysteine
  MOD_RES (755)..(755): Selenocysteine
  MOD_RES (763)..(763): Selenocysteine
  MOD_RES (773)..(773): Selenocysteine
  MOD_RES (775)..(775): Selenocysteine
  MOD_RES (778)..(778): Selenocysteine
  MOD_RES (785)..(785): Selenocysteine
  MOD_RES (803)..(803): Selenocysteine
  MOD_RES (813)..(813): Selenocysteine
  MOD_RES (819)..(819): Selenocysteine
  MOD_RES (823)..(824): Selenocysteine
  MOD_RES (844)..(844): Selenocysteine
  MOD_RES (847)..(847): Selenocysteine
  MOD_RES (868)..(869): Selenocysteine
  MOD_RES (874)..(874): Selenocysteine
  MOD_RES (922)..(922): Selenocysteine
MASPRSSGQPGPPPPPPPPPARLLLLLLLPLLLPLAPGAWGWARGAPRPPPSSPPLSIMGLMPLXKEVAKGSIGRGVLPAVELAIEQIRNESLLRPYFLDLRLYDXECDNAKGLKAFYDAIKYGPNHLMVFGGVCPSVXSIIAESLQGWNLVQLSFAAXXPVLADKKKYPYFFRXVPSDNAVNPAILKLLKHYQWKRVGXLXQDVQRFSEVRNDLXGVLYGEDIEISDXESFSNDPCXSVKKLKGNDVRIILGQFDQNMAAKVFCCAYEENMYGSKYQWIIPGWYEPSWWEQVHXEANSSRCLRKNLLAAMEGYIGVDFEPLSSKQIKXISGKXPQQYEREYNNKRSGVGPSKFHGYAYDGIWVIAKXLQRAMEXLHASSRHQRIQDFNYXDHXLGRIILNAMNEXNFFGVXGQVVFRNGERMGXIKFXQFQDSREVKVGEYNAVADXLEIINDXIRFQGSEPPKDKXIILEQLRKISLPLYSILSALXILGMIMASAFLFFNIKNRNQKLIKMSSPYMNNLIILGGMLSYASIFLFGLDGSFVSEKXFEXLCXVRXWILXVGYXXAFGAMFAKXWRVHAIFKNVKMKKKIIKDQKLLVIVGGMLLIDLCILICWQAVDPLRRXVEKYSMEPDPAGRDISIRPLLEHCENXHMXIWLGIVYAYKGLLMLFGCFLAWEXRNVSIPALNDSKYIGMSVYNVGIMCIIGAAVSFLXRDQPNVQFCIVALVIIFCSXIXLCLVFVPKLIXLRXNPDAAXQNRRFQFXQNQKKEDSKXSXSVXSVNQASXSRLEGLQSENHRLRMKIXELDKDLEEVXMQLQDXPEKXXYIKQNHYQELNDILNLGNFXESXDGGKAILKNHLDQNPQLQWNXXEPSRXCKDPIEDINSPEHIQRRLSLQLPILHHAYLPSIGGVDASCVSPCVSPXASPRHRHVPPSFRVMVSGL

SEQ ID NO: 10521 - protein, 77 aa, Homo sapiens
  MOD_RES (11)..(11): Selenocysteine
  MOD_RES (31)..(32): Selenocysteine
  MOD_RES (47)..(47): Selenocysteine
  MOD_RES (72)..(72): Selenocysteine
  MOD_RES (74)..(74): Selenocysteine
MVFGGVCPSVXSIIAESLQGWNLVQLSFAAXXPVLADKKKYPYFFRXVPSDNAVNPAILKLLKHYQWKRVGXLXQDV

SEQ ID NO: 10522 - protein, 183 aa, Homo sapiens
  MOD_RES (3)..(3): Selenocysteine
  MOD_RES (7)..(7): Selenocysteine
  MOD_RES (11)..(12): Selenocysteine
  MOD_RES (21)..(21): Selenocysteine
  MOD_RES (70)..(70): Selenocysteine
  MOD_RES (87)..(87): Selenocysteine
  MOD_RES (122)..(122): Selenocysteine
  MOD_RES (142)..(142): Selenocysteine
  MOD_RES (144)..(144): Selenocysteine
  MOD_RES (155)..(155): Selenocysteine
  MOD_RES (158)..(158): Selenocysteine
  MOD_RES (164)..(164): Selenocysteine
  MOD_RES (172)..(172): Selenocysteine
  MOD_RES (182)..(182): Selenocysteine
VRXWILXVGYXXAFGAMFAKXWRVHAIFKNVKMKKKIIKDQKLLVIVGGMLLIDLCILICWQAVDPLRRXVEKYSMELFGCFLAWEXRNVSIPALNDSKYIGMSVYNVGIMCIIGAAVSFLXRDQPNVQFCIVALVIIFCSXIXLCLVFVPKLIXLRXNPDAAXQNRRFQFXQNQKKEDSKXS

SEQ ID NO: 10523 - protein, 454 aa, Homo sapiens
  MOD_RES (2)..(2): Selenocysteine
  MOD_RES (17)..(17): Selenocysteine
  MOD_RES (23)..(23): Selenocysteine
  MOD_RES (31)..(31): Selenocysteine
  MOD_RES (88)..(88): Selenocysteine
  MOD_RES (91)..(91): Selenocysteine
  MOD_RES (119)..(119): Selenocysteine
  MOD_RES (145)..(145): Selenocysteine
  MOD_RES (149)..(149): Selenocysteine
  MOD_RES (153)..(154): Selenocysteine
  MOD_RES (159)..(159): Selenocysteine
  MOD_RES (164)..(164): Selenocysteine
  MOD_RES (191)..(191): Selenocysteine
  MOD_RES (208)..(208): Selenocysteine
  MOD_RES (213)..(214): Selenocysteine
  MOD_RES (264)..(264): Selenocysteine
  MOD_RES (280)..(280): Selenocysteine
  MOD_RES (282)..(283): Selenocysteine
  MOD_RES (314)..(314): Selenocysteine
  MOD_RES (331)..(331): Selenocysteine
  MOD_RES (368)..(368): Selenocysteine
  MOD_RES (405)..(405): Selenocysteine
  MOD_RES (419)..(419): Selenocysteine
  MOD_RES (439)..(439): Selenocysteine
  MOD_RES (445)..(445): Selenocysteine
  MOD_RES (450)..(450): Selenocysteine
MXKREAEELIEIEIDGXEKAECXEESIVEQXYAPAECVSQAIDINEPIGNLKKLLEPRLQCSLDAHEICLQDIQLDPERSLFDQGVKXDGXVQLSVQVISYQGIEPKLNILEIVKPADXVEVVIDPDAHHAESEAHLVEEAQVIXLDGXKHIXXISDEXSEQVXRWAAALEGYRKEQERLGIPYDPIQWSXDQVLHWVVWVMKEFSMXDIDLXXLNISGRELCSLNQEDFFQRVPRGEILWSHLELLRKYVLASQEQQMNEIVXIDQPVQIIPASVQSAXPXXIKVINSSAKAAKVQRAPRISGEDRSSPGNRXGNNGQIQLWQFLLELLXDKDARDCISWVGDEGEFKLNQPELVAQKWGQRKNKPXMNYEKLSRALRYYYDGDMICKVQGKRFVYKFVCDLKXLIGYSAAELNRLVXECEQKKLAKMQLHGIAQPVXAVALAXASLQXEKDN

SEQ ID NO: 10524 - protein, 319 aa, Homo sapiens
  MOD_RES (30)..(30): Selenocysteine
  MOD_RES (36)..(36): Selenocysteine
  MOD_RES (56)..(56): Selenocysteine
  MOD_RES (63)..(63): Selenocysteine
  MOD_RES (90)..(90): Selenocysteine
  MOD_RES (97)..(97): Selenocysteine
  MOD_RES (99)..(99): Selenocysteine
  MOD_RES (104)..(104): Selenocysteine
  MOD_RES (118)..(118): Selenocysteine
  MOD_RES (130)..(130): Selenocysteine
  MOD_RES (133)..(133): Selenocysteine
  MOD_RES (145)..(145): Selenocysteine
  MOD_RES (150)..(150): Selenocysteine
  MOD_RES (167)..(167): Selenocysteine
  MOD_RES (172)..(172): Selenocysteine
  MOD_RES (177)..(177): Selenocysteine
  MOD_RES (198)..(198): Selenocysteine
  MOD_RES (201)..(201): Selenocysteine
  MOD_RES (214)..(214): Selenocysteine
  MOD_RES (224)..(224): Selenocysteine
  MOD_RES (233)..(233): Selenocysteine
  MOD_RES (237)..(237): Selenocysteine
  MOD_RES (243)..(243): Selenocysteine
  MOD_RES (310)..(310): Selenocysteine
  MOD_RES (314)..(314): Selenocysteine
MAASEGHASIVEVLLKHGADVNAKDMLKMXALHWAXEHNHQEVVELLIKYGADVHXQSKFCKXAFDISIDNGNEDLAEILQIAMQNQINXNPESPDXVXIHAAXPQFIIGPGGVVNLXGLVSSENSSKAXDEXGVSAVQFGNSSXSVLAXLAALAEASAPLSNSSEXPVVAXEEVVXAESVDGAIQQVVSSGGQQVIXIVXDGIQLGNLHSIPXSGIGQPIIVXMPDGQQVLXVPAXDIAEEXVISEEPPAKRQCIEIIENRVESAEIEEREALQKQLDEANREAQKYRQQLLKKEQEAEAYRQKLEAMXRLQXNKEAV

SEQ ID NO: 10525 - protein, 89 aa, Homo sapiens
  MOD_RES (33)..(34): Selenocysteine
  MOD_RES (39)..(39): Selenocysteine
  MOD_RES (53)..(54): Selenocysteine
  MOD_RES (68)..(68): Selenocysteine
  MOD_RES (73)..(73): Selenocysteine
MSLVDLGKKLLEAARAGQDDEVRILMANGAPFXXDWLGXSPLHLAAQYGHYSXXEVLLRAGVSRDARXKVDRXPLHMAASEGHASIVEV

SEQ ID NO: 10526 - protein, 347 aa, Homo sapiens
  MOD_RES (33)..(34): Selenocysteine
  MOD_RES (39)..(39): Selenocysteine
  MOD_RES (53)..(54): Selenocysteine
  MOD_RES (68)..(68): Selenocysteine
  MOD_RES (73)..(73): Selenocysteine
  MOD_RES (106)..(106): Selenocysteine
  MOD_RES (112)..(112): Selenocysteine
  MOD_RES (132)..(132): Selenocysteine
  MOD_RES (139)..(139): Selenocysteine
  MOD_RES (166)..(166): Selenocysteine
  MOD_RES (173)..(173): Selenocysteine
  MOD_RES (175)..(175): Selenocysteine
  MOD_RES (180)..(180): Selenocysteine
  MOD_RES (194)..(194): Selenocysteine
  MOD_RES (197)..(197): Selenocysteine
  MOD_RES (209)..(209): Selenocysteine
  MOD_RES (214)..(214): Selenocysteine
  MOD_RES (231)..(231): Selenocysteine
  MOD_RES (235)..(235): Selenocysteine
  MOD_RES (240)..(240): Selenocysteine
  MOD_RES (261)..(261): Selenocysteine
  MOD_RES (264)..(264): Selenocysteine
  MOD_RES (277)..(277): Selenocysteine
  MOD_RES (287)..(287): Selenocysteine
  MOD_RES (296)..(296): Selenocysteine
  MOD_RES (300)..(300): Selenocysteine
  MOD_RES (306)..(306): Selenocysteine
MSLVDLGKKLLEAARAGQDDEVRILMANGAPFXXDWLGXSPLHLAAQYGHYSXXEVLLRAGVSRDARXKVDRXPLHMAASEGHASIVEVLLKHGADVNAKDMLKMXALHWAXEHNHQEVVELLIKYGADVHXQSKFCKXAFDISIDNGNEDLAEILQIAMQNQINXNPESPDXVXIHAAXPQFIIGPGGVVNLXDEXGVSAVQFGNSSXSVLAXLAALAEASAPLSNSSEXPVAXEEVVXAESVDGAIQQVVSSGGQQVIXIVXDGIQLGNLHSIPXSGIGQPIIVXMPDGQQVLXVPAXDIAEEXVISEEPPAKRQCIEIIENRVESAEIEVRSLLPGVLCRSHPK

SEQ ID NO: 10527 - protein, 348 aa, Homo sapiens
  MOD_RES (33)..(34): Selenocysteine
  MOD_RES (39)..(39): Selenocysteine
  MOD_RES (53)..(54): Selenocysteine
  MOD_RES (68)..(68): Selenocysteine
  MOD_RES (73)..(73): Selenocysteine
  MOD_RES (106)..(106): Selenocysteine
  MOD_RES (112)..(112): Selenocysteine
  MOD_RES (132)..(132): Selenocysteine
  MOD_RES (139)..(139): Selenocysteine
  MOD_RES (166)..(166): Selenocysteine
  MOD_RES (173)..(173): Selenocysteine
  MOD_RES (175)..(175): Selenocysteine
  MOD_RES (180)..(180): Selenocysteine
  MOD_RES (194)..(194): Selenocysteine
  MOD_RES (197)..(197): Selenocysteine
  MOD_RES (209)..(209): Selenocysteine
  MOD_RES (214)..(214): Selenocysteine
  MOD_RES (231)..(231): Selenocysteine
  MOD_RES (236)..(236): Selenocysteine
  MOD_RES (241)..(241): Selenocysteine
  MOD_RES (262)..(262): Selenocysteine
  MOD_RES (265)..(265): Selenocysteine
  MOD_RES (278)..(278): Selenocysteine
  MOD_RES (288)..(288): Selenocysteine
  MOD_RES (297)..(297): Selenocysteine
  MOD_RES (301)..(301): Selenocysteine
  MOD_RES (307)..(307): Selenocysteine
MSLVDLGKKLLEAARAGQDDEVRILMANGAPFXXDWLGXSPLHLAAQYGHYSXXEVLLRAGVSRDARXKVDRXPLHMAASEGHASIVEVLLKHGADVNAKDMLKMXALHWAXEHNHQEVVELLIKYGADVHXQSKFCKXAFDISIDNGNEDLAEILQIAMQNQINXNPESPDXVXIHAAXPQFIIGPGGVVNLXDEXGVSAVQFGNSSXSVLAXLAALAEASAPLSNSSEXPVVAXEEVVXAESVDGAIQQVVSSGGQQVIXIVXDGIQLGNLHSIPXSGIGQPIIVXMPDGQQVLXVPAXDIAEEXVISEEPPAKRQCIEIIENRVESAEIEVRSLLPGVLCRSHPK

SEQ ID NO: 10528 - protein, 383 aa, Homo sapiens
  MOD_RES (33)..(34): Selenocysteine
  MOD_RES (39)..(39): Selenocysteine
  MOD_RES (53)..(54): Selenocysteine
  MOD_RES (68)..(68): Selenocysteine
  MOD_RES (73)..(73): Selenocysteine
  MOD_RES (106)..(106): Selenocysteine
  MOD_RES (112)..(112): Selenocysteine
  MOD_RES (132)..(132): Selenocysteine
  MOD_RES (139)..(139): Selenocysteine
  MOD_RES (166)..(166): Selenocysteine
  MOD_RES (173)..(173): Selenocysteine
  MOD_RES (175)..(175): Selenocysteine
  MOD_RES (180)..(180): Selenocysteine
  MOD_RES (194)..(194): Selenocysteine
  MOD_RES (197)..(197): Selenocysteine
  MOD_RES (209)..(209): Selenocysteine
  MOD_RES (214)..(214): Selenocysteine
  MOD_RES (231)..(231): Selenocysteine
  MOD_RES (236)..(236): Selenocysteine
  MOD_RES (241)..(241): Selenocysteine
  MOD_RES (262)..(262): Selenocysteine
  MOD_RES (265)..(265): Selenocysteine
  MOD_RES (278)..(278): Selenocysteine
  MOD_RES (288)..(288): Selenocysteine
  MOD_RES (297)..(297): Selenocysteine
  MOD_RES (301)..(301): Selenocysteine
  MOD_RES (307)..(307): Selenocysteine
  MOD_RES (374)..(374): Selenocysteine
  MOD_RES (378)..(378): Selenocysteine
MSLVDLGKKLLEAARAGQDDEVRILMANGAPFXXDWLGXSPLHLAAQYGHYSXXEVLLRAGVSRDARXKVDRXPLHMAASEGHASIVEVLLKHGADVNAKDMLKMXALHWAXEHNHQEVVELLIKYGADVHXQSKFCKXAFDISIDNGNEDLAEILQIAMQNQINXNPESPDXVXIHAAXPQFIIGPGGVVNLXDEXGVSAVQFGNSSXSVLAXLAALAEASAPLSNSSEXPVVAXEEVVXAESVDGAIQQVVSSGGQQVIXIVXDGIQLGNLHSIPXSGIGQPIIVXMPDGQQVLXVPAXDIAEEXVISEEPPAKRQCIEIIENRVESAEIEEREALQKQLDEANREAQKYRQQLLKKEQEAEAYRQKLEAMXRLQXNKEAV

SEQ ID NO: 10529 - protein, 360 aa, Homo sapiens
  MOD_RES (33)..(34): Selenocysteine
  MOD_RES (39)..(39): Selenocysteine
  MOD_RES (53)..(54): Selenocysteine
  MOD_RES (68)..(68): Selenocysteine
  MOD_RES (73)..(73): Selenocysteine
  MOD_RES (106)..(106): Selenocysteine
  MOD_RES (112)..(112): Selenocysteine
  MOD_RES (132)..(132): Selenocysteine
  MOD_RES (139)..(139): Selenocysteine
  MOD_RES (166)..(166): Selenocysteine
  MOD_RES (173)..(173): Selenocysteine
  MOD_RES (175)..(175): Selenocysteine
  MOD_RES (180)..(180): Selenocysteine
  MOD_RES (194)..(194): Selenocysteine
  MOD_RES (206)..(206): Selenocysteine
  MOD_RES (209)..(209): Selenocysteine
  MOD_RES (221)..(221): Selenocysteine
  MOD_RES (226)..(226): Selenocysteine
  MOD_RES (243)..(243): Selenocysteine
  MOD_RES (248)..(248): Selenocysteine
  MOD_RES (253)..(253): Selenocysteine
  MOD_RES (274)..(274): Selenocysteine
  MOD_RES (277)..(277): Selenocysteine
  MOD_RES (290)..(290): Selenocysteine
  MOD_RES (300)..(300): Selenocysteine
  MOD_RES (309)..(309): Selenocysteine
  MOD_RES (313)..(313): Selenocysteine
  MOD_RES (319)..(319): Selenocysteine
MSLVDLGKKLLEAARAGQDDEVRILMANGAPFXXDWLGXSPLHLAAQYGHYSXXEVLLRAGVSRDARXKVDRXPLHMAASEGHASIVEVLLKHGADVNAKDMLKMXALHWAXEHNHQEVVELLIKYGADVHXQSKFCKXAFDISIDNGNEDLAEILQIAMQNQINXNPESPDXVXIHAAXPQFIIGPGGVVNLXGLVSSENSSKAXDEXGVSAVQFGNSSXSVLAXLAALAEASAPLSNSSEXPVVAXEEVVXAESVDGAIQQVVSSGGQQVIXIVXDGIQLGNLHSIPXSGIGQPIIVXMPDGQQVLXVPAXDIAEEXVISEEPPAKRQCIEIIENRVESAEIEVRSLLPGVLCRSHPK

SEQ ID NO: 10530 - protein, 395 aa, Homo sapiens
  MOD_RES (33)..(34): Selenocysteine
  MOD_RES (39)..(39): Selenocysteine
  MOD_RES (53)..(54): Selenocysteine
  MOD_RES (68)..(68): Selenocysteine
  MOD_RES (73)..(73): Selenocysteine
  MOD_RES (106)..(106): Selenocysteine
  MOD_RES (112)..(112): Selenocysteine
  MOD_RES (132)..(132): Selenocysteine
  MOD_RES (139)..(139): Selenocysteine
  MOD_RES (166)..(166): Selenocysteine
  MOD_RES (173)..(173): Selenocysteine
  MOD_RES (175)..(175): Selenocysteine
  MOD_RES (180)..(180): Selenocysteine
  MOD_RES (194)..(194): Selenocysteine
  MOD_RES (206)..(206): Selenocysteine
  MOD_RES (209)..(209): Selenocysteine
  MOD_RES (221)..(221): Selenocysteine
  MOD_RES (226)..(226): Selenocysteine
  MOD_RES (243)..(243): Selenocysteine
  MOD_RES (248)..(248): Selenocysteine
  MOD_RES (253)..(253): Selenocysteine
  MOD_RES (274)..(274): Selenocysteine
  MOD_RES (277)..(277): Selenocysteine
  MOD_RES (290)..(290): Selenocysteine
  MOD_RES (300)..(300): Selenocysteine
  MOD_RES (309)..(309): Selenocysteine
  MOD_RES (313)..(313): Selenocysteine
  MOD_RES (319)..(319): Selenocysteine
  MOD_RES (386)..(386): Selenocysteine
  MOD_RES (390)..(390): Selenocysteine
MSLVDLGKKLLEAARAGQDDEVRILMANGAPFXXDWLGXSPLHLAAQYGHYSXXEVLLRAGVSRDARXKVDRXPLHMAASEGHASIVEVLLKHGADVNAKDMLKMXALHWAXEHNHQEVVELLIKYGADVHXQSKFCKXAFDISIDNGNEDLAEILQIAMQNQINXNPESPDXVXIHAAXPQFIIGPGGVVNLXGLVSSENSSKAXDEXGVSAVQFGNSSXSVLAXLAALAEASAPLSNSSEXPVVAXEEVVXAESVDGAIQQVVSSGGQQVIXIVXDGIQLGNLHSIPXSGIGQPIIVXMPDGQQVLXVPAXDIAEEXVISEEPPAKRQCIEIIENRVESAEIEEREALQKQLDEANREAQKYRQQLLKKEQEAEAYRQKLEAMXRLQXNKEAV

SEQ ID NO: 10531 - protein, 203 aa, Homo sapiens
  MOD_RES (1)..(1): Any amino acid
  MOD_RES (6)..(6): Selenocysteine
  MOD_RES (20)..(20): Selenocysteine
  MOD_RES (32)..(32): Selenocysteine
  MOD_RES (35)..(35): Selenocysteine
  MOD_RES (47)..(47): Selenocysteine
  MOD_RES (52)..(52): Selenocysteine
  MOD_RES (69)..(69): Selenocysteine
  MOD_RES (74)..(74): Selenocysteine
  MOD_RES (79)..(79): Selenocysteine
  MOD_RES (100)..(100): Selenocysteine
  MOD_RES (103)..(103): Selenocysteine
  MOD_RES (116)..(116): Selenocysteine
  MOD_RES (126)..(126): Selenocysteine
  MOD_RES (135)..(135): Selenocysteine
  MOD_RES (139)..(139): Selenocysteine
  MOD_RES (145)..(145): Selenocysteine
XIHAAXPQFIIGPGGVVNLXGLVSSENSSKAXDEXGVSAVQFGNSSXSVLAXLAALAEASAPLSNSSEXPVVAXEEVVXAESVDGAIQQVVSSGGQQVIXIVXDGIQLGNLHSIPXSGIGQPIIVXMPDGQQVLXVPAXDIAEEXVISEEPPAKRQCIEIIENRVESAEIERGCLAMLPRLVLDSWPQVILPPQPPEELRLLA

SEQ ID NO: 10532 - protein, 70 aa, Homo sapiens
  MOD_RES (20)..(20): Selenocysteine
  MOD_RES (22)..(22): Selenocysteine
  MOD_RES (26)..(26): Selenocysteine
  MOD_RES (34)..(34): Selenocysteine
  MOD_RES (58)..(58): Selenocysteine
  MOD_RES (68)..(68): Selenocysteine
MRKSPGLSDCLWAWILLLSXLXGRRXSRKSHQNXDLYEVNEGKDVAMDSRHYKMNLKXIPLSSPGFWXDS

SEQ ID NO: 10533 - protein, 35 aa, Homo sapiens
  MOD_RES (20)..(20): Selenocysteine
  MOD_RES (22)..(22): Selenocysteine
MRKSPGLSDCLWAWILLLSXLXGRSYGQPSLQDEL

SEQ ID NO: 10534 - protein, 85 aa, Homo sapiens
  MOD_RES (20)..(20): Selenocysteine
  MOD_RES (22)..(22): Selenocysteine
  MOD_RES (39)..(40): Selenocysteine
  MOD_RES (43)..(43): Selenocysteine
  MOD_RES (66)..(66): Selenocysteine
  MOD_RES (70)..(70): Selenocysteine
  MOD_RES (75)..(75): Selenocysteine
MRKSPGLSDCLWAWILLLSXLXGRSYGQPSLQDELKDNXXVFXRILDRLLDGYDNRLRPGLGERVXEVKXDIFVXSFGPVSDHDM

SEQ ID NO: 10535 - protein, 168 aa, Homo sapiens
  MOD_RES (20)..(20): Selenocysteine
  MOD_RES (22)..(22): Selenocysteine
  MOD_RES (39)..(40): Selenocysteine
  MOD_RES (43)..(43): Selenocysteine
  MOD_RES (66)..(66): Selenocysteine
  MOD_RES (70)..(70): Selenocysteine
  MOD_RES (75)..(75): Selenocysteine
  MOD_RES (88)..(88): Selenocysteine
  MOD_RES (109)..(109): Selenocysteine
  MOD_RES (123)..(123): Selenocysteine
  MOD_RES (126)..(126): Selenocysteine
  MOD_RES (140)..(140): Selenocysteine
  MOD_RES (149)..(149): Selenocysteine
  MOD_RES (153)..(153): Selenocysteine
  MOD_RES (157)..(157): Selenocysteine
  MOD_RES (161)..(161): Selenocysteine
MRKSPGLSDCLWAWILLLSXLXGRSYGQPSLQDELKDNXXVFXRILDRLLDGYDNRLRPGLGERVXEVKXDIFVXSFGPVSDHDMEYXIDVFFRQSWKDERLKFKGPMXVLRLNNLMASKIWXPDXFFHNGKKSVAHNMXMPNKLLRIXEDGXLLYXMRLXVRAECPM

SEQ ID NO: 10536 - protein, 285 aa, Homo sapiens
  MOD_RES (20)..(20): Selenocysteine
  MOD_RES (22)..(22): Selenocysteine
  MOD_RES (39)..(40): Selenocysteine
  MOD_RES (43)..(43): Selenocysteine
  MOD_RES (66)..(66): Selenocysteine
  MOD_RES (70)..(70): Selenocysteine
  MOD_RES (75)..(75): Selenocysteine
  MOD_RES (88)..(88): Selenocysteine
  MOD_RES (109)..(109): Selenocysteine
  MOD_RES (123)..(123): Selenocysteine
  MOD_RES (126)..(126): Selenocysteine
  MOD_RES (140)..(140): Selenocysteine
  MOD_RES (149)..(149): Selenocysteine
  MOD_RES (153)..(153): Selenocysteine
  MOD_RES (157)..(157): Selenocysteine
  MOD_RES (161)..(161): Selenocysteine
  MOD_RES (190)..(190): Selenocysteine
  MOD_RES (199)..(199): Selenocysteine
  MOD_RES (224)..(224): Selenocysteine
  MOD_RES (234)..(234): Selenocysteine
  MOD_RES (241)..(242): Selenocysteine
  MOD_RES (257)..(257): Selenocysteine
  MOD_RES (264)..(264): Selenocysteine
  MOD_RES (283)..(283): Selenocysteine
MRKSPGLSDCLWAWILLLSXLXGRSYGQPSLQDELKDNXXVFXRILDRLLDGYDNRLRPGLGERVXEVKXDIFVXSFGPVSDHDMEYXIDVFFRQSWKDERLKFKGPMXVLRLNNLMASKIWXPDXFFHNGKKSVAHNMXMPNKLLRIXEDGXLLYXMRLXVRAECPMHLEDFPMDAHACPLKFGSYAYXRAEVVYEWXREPARSVVVAEDGSRLNQYDLLGQXVDSGIVQSSXGEYVVMXXHFHLKRKIGYFVIQXYLPCIMXVILSQVSFWLNRESVPARXVF

SEQ ID NO: 10537 - protein, 456 aa, Homo sapiens
  MOD_RES (20)..(20): Selenocysteine
  MOD_RES (22)..(22): Selenocysteine
  MOD_RES (39)..(40): Selenocysteine
  MOD_RES (43)..(43): Selenocysteine
  MOD_RES (66)..(66): Selenocysteine
  MOD_RES (70)..(70): Selenocysteine
  MOD_RES (75)..(75): Selenocysteine
  MOD_RES (88)..(88): Selenocysteine
  MOD_RES (109)..(109): Selenocysteine
  MOD_RES (123)..(123): Selenocysteine
  MOD_RES (126)..(126): Selenocysteine
  MOD_RES (140)..(140): Selenocysteine
  MOD_RES (149)..(149): Selenocysteine
  MOD_RES (153)..(153): Selenocysteine
  MOD_RES (157)..(157): Selenocysteine
  MOD_RES (161)..(161): Selenocysteine
  MOD_RES (190)..(190): Selenocysteine
  MOD_RES (199)..(199): Selenocysteine
  MOD_RES (224)..(224): Selenocysteine
  MOD_RES (234)..(234): Selenocysteine
  MOD_RES (241)..(242): Selenocysteine
  MOD_RES (257)..(257): Selenocysteine
  MOD_RES (264)..(264): Selenocysteine
  MOD_RES (283)..(283): Selenocysteine
  MOD_RES (288)..(289): Selenocysteine
  MOD_RES (292)..(292): Selenocysteine
  MOD_RES (294)..(295): Selenocysteine
  MOD_RES (311)..(311): Selenocysteine
  MOD_RES (333)..(333): Selenocysteine
  MOD_RES (338)..(338): Selenocysteine
  MOD_RES (367)..(367): Selenocysteine
  MOD_RES (371)..(371): Selenocysteine
  MOD_RES (373)..(373): Selenocysteine
  MOD_RES (376)..(376): Selenocysteine
  MOD_RES (388)..(388): Selenocysteine
  MOD_RES (394)..(394): Selenocysteine
  MOD_RES (404)..(404): Selenocysteine
  MOD_RES (412)..(412): Selenocysteine
  MOD_RES (441)..(441): Selenocysteine
  MOD_RES (453)..(453): Selenocysteine
MRKSPGLSDCLWAWILLLSXLXGRSYGQPSLQDELKDNXXVFXRILDRLLDGYDNRLRPGLGERVXEVKXDIFVXSFGPVSDHDMEYXIDVFFRQSWKDERLKFKGPMXVLRLNNLMASKIWXPDXFFHNGKKSVAHNMXMPNKLLRIXEDGXLLYXMRLXVRAECPMHLEDFPMDAHACPLKFGSYAYXRAEVVYEWXREPARSVVVAEDGSRLNQYDLLGQXVDSGIVQSSXGEYVVMXXHFHLKRKIGYFVIQXYLPCIMXVILSQVSFWLNRESVPARXVFGVXXVLXMXXLSISARNSLPKVAYAXAMDWFIAVCYAFVFSALIEFAXVNYFXKRGYAWDGKSVVPEKPKKVKDPLIKKNNXYAPXAXSYXPNLARGDPGLAXIAKSAXIEPKEVKPEXKPPEPKKXFNSVSKIDRLSRIAFPLLFGIFNLVYWAXYLNREPQLKAPXPHQ

SEQ ID NO: 10538 - protein, 94 aa, Homo sapiens
  MOD_RES (20)..(20): Selenocysteine
  MOD_RES (22)..(22): Selenocysteine
  MOD_RES (39)..(40): Selenocysteine
  MOD_RES (43)..(43): Selenocysteine
  MOD_RES (66)..(66): Selenocysteine
  MOD_RES (70)..(70): Selenocysteine
  MOD_RES (75)..(75): Selenocysteine
  MOD_RES (92)..(92): Selenocysteine
MRKSPGLSDCLWAWILLLSXLXGRSYGQPSLQDELKDNXXVFXRILDRLLDGYDNRLRPGLGERVXEVKXDIFVXSFGPVSDHDMIFALQNXAQ

SEQ ID NO: 10539 - protein, 471 aa, Homo sapiens
  MOD_RES (35)..(35): Selenocysteine
  MOD_RES (37)..(37): Selenocysteine
  MOD_RES (54)..(55): Selenocysteine
  MOD_RES (58)..(58): Selenocysteine
  MOD_RES (81)..(81): Selenocysteine
  MOD_RES (85)..(85): Selenocysteine
  MOD_RES (90)..(90): Selenocysteine
  MOD_RES (103)..(103): Selenocysteine
  MOD_RES (124)..(124): Selenocysteine
  MOD_RES (138)..(138): Selenocysteine
  MOD_RES (141)..(141): Selenocysteine
  MOD_RES (155)..(155): Selenocysteine
  MOD_RES (164)..(164): Selenocysteine
  MOD_RES (168)..(168): Selenocysteine
  MOD_RES (172)..(172): Selenocysteine
  MOD_RES (176)..(176): Selenocysteine
  MOD_RES (205)..(205): Selenocysteine
  MOD_RES (214)..(214): Selenocysteine
  MOD_RES (239)..(239): Selenocysteine
  MOD_RES (249)..(249): Selenocysteine
  MOD_RES (256)..(257): Selenocysteine
  MOD_RES (272)..(272): Selenocysteine
  MOD_RES (279)..(279): Selenocysteine
  MOD_RES (298)..(298): Selenocysteine
  MOD_RES (303)..(304): Selenocysteine
  MOD_RES (307)..(307): Selenocysteine
  MOD_RES (309)..(310): Selenocysteine
  MOD_RES (326)..(326): Selenocysteine
  MOD_RES (348)..(348): Selenocysteine
  MOD_RES (353)..(353): Selenocysteine
  MOD_RES (382)..(382): Selenocysteine
  MOD_RES (386)..(386): Selenocysteine
  MOD_RES (388)..(388): Selenocysteine
  MOD_RES (391)..(391): Selenocysteine
  MOD_RES (403)..(403): Selenocysteine
  MOD_RES (409)..(409): Selenocysteine
  MOD_RES (419)..(419): Selenocysteine
  MOD_RES (427)..(427): Selenocysteine
  MOD_RES (456)..(456): Selenocysteine
  MOD_RES (468)..(468): Selenocysteine
MVQVSIASNELLQPAMRKSPGLSDCLWAWILLLSXLXGRSYGQPSLQDELKDNXXVFXRILDRLLDGYDNRLRPGLGERVXEVKXDIFVXSFGPVSDHDMEYXIDVFFRQSWKDERLKFKGPMXVLRLNNLMASKIWXPDXFFHNGKKSVAHNMXMPNKLLRIXEDGXLLYXMRLXVRAECPMHLEDFPMDAHACPLKFGSYAYXRAEVVYEWXREPARSVVVAEDGSRLNQYDLLGQXVDSGIVQSSXGEYVVMXXHFHLKRKIGYFVIQXYLPCIMXVILSQVSFWLNRESVPARXVFGVXXVLXMXXLSISARNSLPKVAYAXAMDWFIAVCYAFVFSALIEFAXVNYFXKRGYAWDGKSVVPEKPKKVKDPLIKKNNXYAPXAXSYXPNLARGDPGLAXIAKSAXIEPKEVKPEXKPPEPKKXFNSVSKIDRLSRIAFPLLFGIFNLVYWAXYLNREPQLKAPXPHQ

SEQ ID NO: 10540 - protein, 113 aa, Homo sapiens
  MOD_RES (41)..(41): Selenocysteine
  MOD_RES (43)..(43): Selenocysteine
  MOD_RES (60)..(61): Selenocysteine
  MOD_RES (64)..(64): Selenocysteine
  MOD_RES (87)..(87): Selenocysteine
  MOD_RES (91)..(91): Selenocysteine
  MOD_RES (96)..(96): Selenocysteine
  MOD_RES (109)..(109): Selenocysteine
MVQVSIASNEVSYPSELLQPAMRKSPGLSDCLWAWILLLSXLXGRSYGQPSLQDELKDNXXVFXRILDRLLDGYDNRLRPGLGERVXEVKXDIFVXSFGPVSDHDMEYXIDVF

SEQ ID NO: 10541 - protein, 427 aa, Homo sapiens
  MOD_RES (4)..(4): Selenocysteine
  MOD_RES (39)..(39): Selenocysteine
  MOD_RES (42)..(42): Selenocysteine
  MOD_RES (56)..(56): Selenocysteine
  MOD_RES (69)..(69): Selenocysteine
  MOD_RES (73)..(73): Selenocysteine
  MOD_RES (77)..(77): Selenocysteine
  MOD_RES (106)..(107): Selenocysteine
  MOD_RES (111)..(111): Selenocysteine
  MOD_RES (115)..(115): Selenocysteine
  MOD_RES (145)..(145): Selenocysteine
  MOD_RES (150)..(150): Selenocysteine
  MOD_RES (154)..(154): Selenocysteine
  MOD_RES (157)..(157): Selenocysteine
  MOD_RES (173)..(173): Selenocysteine
  MOD_RES (180)..(180): Selenocysteine
  MOD_RES (199)..(199): Selenocysteine
  MOD_RES (204)..(205): Selenocysteine
  MOD_RES (208)..(208): Selenocysteine
  MOD_RES (210)..(211): Selenocysteine
  MOD_RES (227)..(227): Selenocysteine
  MOD_RES (249)..(249): Selenocysteine
  MOD_RES (254)..(254): Selenocysteine
  MOD_RES (279)..(279): Selenocysteine
  MOD_RES (281)..(281): Selenocysteine
  MOD_RES (312)..(312): Selenocysteine
  MOD_RES (324)..(324): Selenocysteine
  MOD_RES (362)..(362): Selenocysteine
  MOD_RES (368)..(369): Selenocysteine
  MOD_RES (386)..(386): Selenocysteine
  MOD_RES (407)..(407): Selenocysteine
  MOD_RES (415)..(415): Selenocysteine
MEYXIDVFFRQKWKDERLKFKGPMNILRLNNLMASKIWXPDXFFHNGKKSVAHNMXMPNKLLRIQDDGXLLYXMRLXVQAECPMHLEDFPMDAHSCPLKFGSYAYXXSEVXYIWXYNASDSVQVAPDGSRLNQYDLLGQSIGKEXIKSSXGEYXVMXAHFHLKRKIGYFVIQXYLPCIMXVILSQVSFWLNRESVPARXVFGVXXVLXMXXLSISARNSLPKVAYAXAMDWFIAVCYAFVFSALIEFAXVNYFXKRGWAWDGKSVVNDKSPSIKAEGIXLXYNSVKAILQGAKLIWSKYIAFSWPSLFQEKXLEYLEKWMDCLXFKQSSKKEKASVMIQNNAYAVAVANYAPNLSKDPVLSXISKSAXXPEPNKKPENKPAEAKKXFNSVSKIDRMSRIVFPVLFGXFNLVYWAXYLNREPVLGVSP

SEQ ID NO: 10542 - protein, 137 aa, Homo sapiens
  MOD_RES (3)..(3): Selenocysteine
  MOD_RES (40)..(40): Selenocysteine
  MOD_RES (43)..(43): Selenocysteine
  MOD_RES (66)..(66): Selenocysteine
  MOD_RES (70)..(70): Selenocysteine
  MOD_RES (75)..(75): Selenocysteine
  MOD_RES (83)..(83): Selenocysteine
  MOD_RES (88)..(88): Selenocysteine
  MOD_RES (123)..(123): Selenocysteine
  MOD_RES (126)..(126): Selenocysteine
MKXKLNIYNMQFLLFVFLVWDPARLVLANIQEDEAKNNIXIFXRILDRLLDGYDNRLRPGLGDSIXEVFXNIYVXSFGPVSDXDMEYXIDVFFRQKWKDERLKFKGPMNILRLNNLMASKIWXPDXFFHNGKKSVAH

SEQ ID NO: 10543 - protein, 152 aa, Homo sapiens
  MOD_RES (3)..(3): Selenocysteine
  MOD_RES (40)..(40): Selenocysteine
  MOD_RES (43)..(43): Selenocysteine
  MOD_RES (66)..(66): Selenocysteine
  MOD_RES (70)..(70): Selenocysteine
  MOD_RES (75)..(75): Selenocysteine
  MOD_RES (83)..(83): Selenocysteine
  MOD_RES (88)..(88): Selenocysteine
  MOD_RES (123)..(123): Selenocysteine
  MOD_RES (126)..(126): Selenocysteine
  MOD_RES (140)..(140): Selenocysteine
MKXKLNIYNMQFLLFVFLVWDPARLVLANIQEDEAKNNIXIFXRILDRLLDGYDNRLRPGLGDSIXEVFXNIYVXSFGPVSDXDMEYXIDVFFRQKWKDERLKFKGPMNILRLNNLMASKIWXPDXFFHNGKKSVAHNMXMPNKLLRIQDDG

SEQ ID NO: 10544 - protein, 159 aa, Homo sapiens
  MOD_RES (3)..(3): Selenocysteine
  MOD_RES (40)..(40): Selenocysteine
  MOD_RES (43)..(43): Selenocysteine
  MOD_RES (66)..(66): Selenocysteine
  MOD_RES (70)..(70): Selenocysteine
  MOD_RES (75)..(75): Selenocysteine
  MOD_RES (83)..(83): Selenocysteine
  MOD_RES (88)..(88): Selenocysteine
  MOD_RES (123)..(123): Selenocysteine
  MOD_RES (126)..(126): Selenocysteine
  MOD_RES (140)..(140): Selenocysteine
  MOD_RES (153)..(153): Selenocysteine
  MOD_RES (157)..(157): Selenocysteine
MKXKLNIYNMQFLLFVFLVWDPARLVLANIQEDEAKNNIXIFXRILDRLLDGYDNRLRPGLGDSIXEVFXNIYVXSFGPVSDXDMEYXIDVFFRQKWKDERLKFKGPMNILRLNNLMASKIWXPDXFFHNGKKSVAHNMXMPNKLLRIQDDGXLLYXMR

SEQ ID NO: 10545 - protein, 367 aa, Homo sapiens
  MOD_RES (3)..(3): Selenocysteine
  MOD_RES (40)..(40): Selenocysteine
  MOD_RES (43)..(43): Selenocysteine
  MOD_RES (66)..(66): Selenocysteine
  MOD_RES (70)..(70): Selenocysteine
  MOD_RES (75)..(75): Selenocysteine
  MOD_RES (83)..(83): Selenocysteine
  MOD_RES (88)..(88): Selenocysteine
  MOD_RES (123)..(123): Selenocysteine
  MOD_RES (126)..(126): Selenocysteine
  MOD_RES (140)..(140): Selenocysteine
  MOD_RES (153)..(153): Selenocysteine
  MOD_RES (157)..(157): Selenocysteine
  MOD_RES (161)..(161): Selenocysteine
  MOD_RES (190)..(191): Selenocysteine
  MOD_RES (195)..(195): Selenocysteine
  MOD_RES (199)..(199): Selenocysteine
  MOD_RES (229)..(229): Selenocysteine
  MOD_RES (234)..(234): Selenocysteine
  MOD_RES (238)..(238): Selenocysteine
  MOD_RES (241)..(241): Selenocysteine
  MOD_RES (257)..(257): Selenocysteine
  MOD_RES (264)..(264): Selenocysteine
  MOD_RES (283)..(283): Selenocysteine
  MOD_RES (288)..(289): Selenocysteine
  MOD_RES (292)..(292): Selenocysteine
  MOD_RES (294)..(295): Selenocysteine
  MOD_RES (311)..(311): Selenocysteine
  MOD_RES (333)..(333): Selenocysteine
  MOD_RES (338)..(338): Selenocysteine
MKXKLNIYNMQFLLFVFLVWDPARLVLANIQEDEAKNNIXIFXRILDRLLDGYDNRLRPGLGDSIXEVFXNIYVXSFGPVSDXDMEYXIDVFFRQKWKDERLKFKGPMNILRLNNLMASKIWXPDXFFHNGKKSVAHNMXMPNKLLRIQDDGXLLYXMRLXVQAECPMHLEDFPMDAHSCPLKFGSYAYXXSEVXYIWXYNASDSVQVAPDGSRLNQYDLLGQSIGKEXIKSSXGEYXVMXAHFHLKRKIGYFVIQXYLPCIMXVILSQVSFWLNRESVPARXVFGVXXVLXMXXLSISARNSLPKVAYAXAMDWFIAVCYAFVFSALIEFAXVNYFXKRGWAWDGKSVVNDKVSESFRVIIIKKIP

SEQ ID NO: 10546 - protein, 451 aa, Homo sapiens
  MOD_RES (3)..(3): Selenocysteine
  MOD_RES (40)..(40): Selenocysteine
  MOD_RES (43)..(43): Selenocysteine
  MOD_RES (66)..(66): Selenocysteine
  MOD_RES (70)..(70): Selenocysteine
  MOD_RES (75)..(75): Selenocysteine
  MOD_RES (83)..(83): Selenocysteine
  MOD_RES (88)..(88): Selenocysteine
  MOD_RES (123)..(123): Selenocysteine
  MOD_RES (126)..(126): Selenocysteine
  MOD_RES (140)..(140): Selenocysteine
  MOD_RES (153)..(153): Selenocysteine
  MOD_RES (157)..(157): Selenocysteine
  MOD_RES (161)..(161): Selenocysteine
  MOD_RES (190)..(191): Selenocysteine
  MOD_RES (195)..(195): Selenocysteine
  MOD_RES (199)..(199): Selenocysteine
  MOD_RES (229)..(229): Selenocysteine
  MOD_RES (234)..(234): Selenocysteine
  MOD_RES (238)..(238): Selenocysteine
  MOD_RES (241)..(241): Selenocysteine
  MOD_RES (257)..(257): Selenocysteine
  MOD_RES (264)..(264): Selenocysteine
  MOD_RES (283)..(283): Selenocysteine
  MOD_RES (288)..(289): Selenocysteine
  MOD_RES (292)..(292): Selenocysteine
  MOD_RES (294)..(295): Selenocysteine
  MOD_RES (311)..(311): Selenocysteine
  MOD_RES (333)..(333): Selenocysteine
  MOD_RES (338)..(338): Selenocysteine
  MOD_RES (386)..(386): Selenocysteine
  MOD_RES (392)..(393): Selenocysteine
  MOD_RES (410)..(410): Selenocysteine
  MOD_RES (431)..(431): Selenocysteine
  MOD_RES (439)..(439): Selenocysteine
MKXKLNIYNMQFLLFVFLVWDPARLVLANIQEDEAKNNIXIFXRILDRLLDGYDNRLRPGLGDSIXEVFXNIYVXSFGPVSDXDMEYXIDVFFRQKWKDERLKFKGPMNILRLNNLMASKIWXPDXFFHNGKKSVAHNMXMPNKLLRIQDDGXLLYXMRLXVQAECPMHLEDFPMDAHSCPLKFGSYAYXXSEVXYIWXYNASDSVQVAPDGSRLNQYDLLGQSIGKEXIKSSXGEYXVMXAHFHLKRKIGYFVIQXYLPCIMXVILSQVSFWLNRESVPARXVFGVXXVLXMXXLSISARNSLPKVAYAXAMDWFIAVCYAFVFSALIEFAXVNYFXKRGWAWDGKSVVNDKKKEKASVMIQNNAYAVAVANYAPNLSKDPVLSXISKSAXXPEPNKKPENKPAEAKKXFNSVSKIDRMSRIVFPVLFGXFNLVYWAXYLNREPVLGVSP

SEQ ID NO: 10547 - protein, 511 aa, Homo sapiens
  MOD_RES (3)..(3): Selenocysteine
  MOD_RES (40)..(40): Selenocysteine
  MOD_RES (43)..(43): Selenocysteine
  MOD_RES (66)..(66): Selenocysteine
  MOD_RES (70)..(70): Selenocysteine
  MOD_RES (75)..(75): Selenocysteine
  MOD_RES (83)..(83): Selenocysteine
  MOD_RES (88)..(88): Selenocysteine
  MOD_RES (123)..(123): Selenocysteine
  MOD_RES (126)..(126): Selenocysteine
  MOD_RES (140)..(140): Selenocysteine
  MOD_RES (153)..(153): Selenocysteine
  MOD_RES (157)..(157): Selenocysteine
  MOD_RES (161)..(161): Selenocysteine
  MOD_RES (190)..(191): Selenocysteine
  MOD_RES (195)..(195): Selenocysteine
  MOD_RES (199)..(199): Selenocysteine
  MOD_RES (229)..(229): Selenocysteine
  MOD_RES (234)..(234): Selenocysteine
  MOD_RES (238)..(238): Selenocysteine
  MOD_RES (241)..(241): Selenocysteine
  MOD_RES (257)..(257): Selenocysteine
  MOD_RES (264)..(264): Selenocysteine
  MOD_RES (283)..(283): Selenocysteine
  MOD_RES (288)..(289): Selenocysteine
  MOD_RES (292)..(292): Selenocysteine
  MOD_RES (294)..(295): Selenocysteine
  MOD_RES (311)..(311): Selenocysteine
  MOD_RES (333)..(333): Selenocysteine
  MOD_RES (338)..(338): Selenocysteine
  MOD_RES (363)..(363): Selenocysteine
  MOD_RES (365)..(365): Selenocysteine
  MOD_RES (396)..(396): Selenocysteine
  MOD_RES (408)..(408): Selenocysteine
  MOD_RES (446)..(446): Selenocysteine
  MOD_RES (452)..(453): Selenocysteine
  MOD_RES (470)..(470): Selenocysteine
  MOD_RES (491)..(491): Selenocysteine
  MOD_RES (499)..(499): Selenocysteine
MKXKLNIYNMQFLLFVFLVWDPARLVLANIQEDEAKNNIXIFXRILDRLLDGYDNRLRPGLGDSIXEVFXNIYVXSFGPVSDXDMEYXIDVFFRQKWKDERLKFKGPMNILRLNNLMASKIWXPDXFFHNGKKSVAHNMXMPNKLLRIQDDGXLLYXMRLXVQAECPMHLEDFPMDAHSCPLKFGSYAYXXSEVXYIWXYNASDSVQVAPDGSRLNQYDLLGQSIGKEXIKSSXGEYXVMXAHFHLKRKIGYFVIQXYLPCIMXVILSQVSFWLNRESVPARXVFGVXXVLXMXXLSISARNSLPKVAYAXAMDWFIAVCYAFVFSALIEFAXVNYFXKRGWAWDGKSVVNDKSPSIKAEGIXLXYNSVKAILQGAKLIWSKYIAFSWPSLFQEKXLEYLEKWMDCLXFKQSSKKEKASVMIQNNAYAVAVANYAPNLSKDPVLSXISKSAXXPEPNKKPENKPAEAKKXFNSVSKIDRMSRIVFPVLFGXFNLVYWAXYLNREPVLGVSP

SEQ ID NO: 10548 - protein, 66 aa, Homo sapiens
  MOD_RES (3)..(3): Selenocysteine
  MOD_RES (40)..(40): Selenocysteine
  MOD_RES (43)..(43): Selenocysteine
MKXKLNIYNMQFLLFVFLVWDPARLVLANIQEDEAKNNIXIFXRILDRLLDGYDNRLRPGLGGIYN

SEQ ID NO: 10549 - protein, 73 aa, Homo sapiens
  MOD_RES (3)..(3): Selenocysteine
  MOD_RES (40)..(40): Selenocysteine
  MOD_RES (43)..(43): Selenocysteine
  MOD_RES (73)..(73): Selenocysteine
MKXKLNIYNMQFLLFVFLVWDPARLVLANIQEDEAKNNIXIFXRILDRLLDGYDNRLRPGLGVSRVESPVCVX

SEQ ID NO: 10550 - protein, 56 aa, Homo sapiens
  MOD_RES (3)..(3): Selenocysteine
  MOD_RES (7)..(7): Selenocysteine
  MOD_RES (10)..(10): Selenocysteine
  MOD_RES (26)..(26): Selenocysteine
  MOD_RES (33)..(33): Selenocysteine
  MOD_RES (52)..(52): Selenocysteine
SSXGEYXVMXAHFHLKRKIGYFVIQXYLPCIMXVILSQVSFWLNRESVPARXVFGE

SEQ ID NO: 10551 - protein, 492 aa, Homo sapiens
  MOD_RES (4)..(4): Selenocysteine
  MOD_RES (6)..(6): Selenocysteine
  MOD_RES (12)..(12): Selenocysteine
  MOD_RES (26)..(27): Selenocysteine
  MOD_RES (61)..(61): Selenocysteine
  MOD_RES (65)..(65): Selenocysteine
  MOD_RES (68)..(68): Selenocysteine
  MOD_RES (91)..(91): Selenocysteine
  MOD_RES (95)..(95): Selenocysteine
  MOD_RES (100)..(100): Selenocysteine
  MOD_RES (108)..(108): Selenocysteine
  MOD_RES (113)..(113): Selenocysteine
  MOD_RES (121)..(121): Selenocysteine
  MOD_RES (148)..(148): Selenocysteine
  MOD_RES (151)..(151): Selenocysteine
  MOD_RES (165)..(166): Selenocysteine
  MOD_RES (178)..(178): Selenocysteine
  MOD_RES (182)..(182): Selenocysteine
  MOD_RES (186)..(186): Selenocysteine
  MOD_RES (215)..(216): Selenocysteine
  MOD_RES (224)..(224): Selenocysteine
  MOD_RES (252)..(252): Selenocysteine
  MOD_RES (259)..(259): Selenocysteine
  MOD_RES (266)..(267): Selenocysteine
  MOD_RES (282)..(282): Selenocysteine
  MOD_RES (289)..(289): Selenocysteine
  MOD_RES (308)..(308): Selenocysteine
  MOD_RES (313)..(314): Selenocysteine
  MOD_RES (317)..(317): Selenocysteine
  MOD_RES (319)..(320): Selenocysteine
  MOD_RES (336)..(336): Selenocysteine
  MOD_RES (358)..(358): Selenocysteine
  MOD_RES (363)..(363): Selenocysteine
  MOD_RES (384)..(384): Selenocysteine
  MOD_RES (392)..(392): Selenocysteine
  MOD_RES (394)..(395): Selenocysteine
  MOD_RES (401)..(402): Selenocysteine
  MOD_RES (411)..(411): Selenocysteine
  MOD_RES (415)..(415): Selenocysteine
  MOD_RES (427)..(427): Selenocysteine
  MOD_RES (429)..(429): Selenocysteine
  MOD_RES (437)..(437): Selenocysteine
  MOD_RES (444)..(444): Selenocysteine
  MOD_RES (446)..(446): Selenocysteine
  MOD_RES (448)..(448): Selenocysteine
  MOD_RES (477)..(477): Selenocysteine
MIIXQXSHCYMXSLGILFLINILPGXXGQGESRRQEPGDFVKQDIGGLSPKHAPDIPDDSXDNIXIFXRILDRLLDGYDNRLRPGLGDAVXEVKXDIYVXSFGPVSDXDMEYXIDVFFRQXWHDERLKFDGPMKILPLNNLLASKIWXPDXFFHNGKKSVAHNMXXPNKLLRLVDNGXLLYXMRLXIHAECPMHLEDFPMDVHACPLKFGSYAYXXAEVVYSWXLGKNKSVEVAQDGSRLNQYDLLGHVVGXEIIRSSXGEYVVMXXHFHLKRKIGYFVIQXYLPCIMXVILSQVSFWLNRESVPARXVFGVXXVLXMXXLSISARNSLPKVAYAXAMDWFIAVCYAFVFSALIEFAXVNYFXKRSWAWEGKKVPEALEMKKKXPAAPAKKXSXXFNIVGXXYPINLAKDXEFSXISKGAAPSASSXPXIIASPKAXYVQDSPXEXKXYNSVSKVDKISRIIFPVLFAIFNLVYWAXYVNRESAIKGMIRKQ

SEQ ID NO: 10552 - protein, 36 aa, Homo sapiens
  MOD_RES (13)..(13): Selenocysteine
MVSAKKFKRIPRXEPKGGEIVHRKFHPHPGQFARWL

SEQ ID NO: 10553 - protein, 554 aa, Homo sapiens
  MOD_RES (45)..(45): Selenocysteine
  MOD_RES (49)..(49): Selenocysteine
  MOD_RES (72)..(72): Selenocysteine
  MOD_RES (76)..(76): Selenocysteine
  MOD_RES (81)..(81): Selenocysteine
  MOD_RES (94)..(94): Selenocysteine
  MOD_RES (102)..(102): Selenocysteine
  MOD_RES (125)..(125): Selenocysteine
  MOD_RES (129)..(129): Selenocysteine
  MOD_RES (132)..(132): Selenocysteine
  MOD_RES (146)..(146): Selenocysteine
  MOD_RES (159)..(159): Selenocysteine
  MOD_RES (163)..(163): Selenocysteine
  MOD_RES (167)..(167): Selenocysteine
  MOD_RES (203)..(203): Selenocysteine
  MOD_RES (205)..(205): Selenocysteine
  MOD_RES (230)..(230): Selenocysteine
  MOD_RES (235)..(235): Selenocysteine
  MOD_RES (240)..(240): Selenocysteine
  MOD_RES (247)..(247): Selenocysteine
  MOD_RES (263)..(263): Selenocysteine
  MOD_RES (270)..(270): Selenocysteine
  MOD_RES (289)..(289): Selenocysteine
  MOD_RES (294)..(295): Selenocysteine
  MOD_RES (298)..(298): Selenocysteine
  MOD_RES (300)..(301): Selenocysteine
  MOD_RES (317)..(317): Selenocysteine
  MOD_RES (344)..(344): Selenocysteine
  MOD_RES (355)..(355): Selenocysteine
  MOD_RES (380)..(380): Selenocysteine
  MOD_RES (390)..(390): Selenocysteine
  MOD_RES (404)..(404): Selenocysteine
  MOD_RES (415)..(415): Selenocysteine
  MOD_RES (424)..(424): Selenocysteine
  MOD_RES (444)..(444): Selenocysteine
  MOD_RES (457)..(457): Selenocysteine
  MOD_RES (461)..(461): Selenocysteine
  MOD_RES (475)..(475): Selenocysteine
  MOD_RES (488)..(489): Selenocysteine
  MOD_RES (492)..(492): Selenocysteine
  MOD_RES (496)..(496): Selenocysteine
  MOD_RES (502)..(502): Selenocysteine
  MOD_RES (515)..(515): Selenocysteine
  MOD_RES (529)..(529): Selenocysteine
  MOD_RES (546)..(546): Selenocysteine
MVSAKKVPAIALSAGVSFALLRFLCLAVCLNESPGQNQKEEKLCXENFXRILDSLLDGYDNRLRPGFGGPVXEVKXDIYVXSFGPVSDVEMEYXMDVFFRQXWIDKRLKYDGPIEILRLNNMMVXKVWXPDXFFRNGKKSVSHNMXAPNKLFRIMRNGXILYXMRLXISAECPMRLVDFPMDGHACPLKFGSYAYPKSEMIYXWXKGPEKSVEVPKESSSLVQYDLIGQXVSSEXIKSIXGEYIVMXVYFHLRRKMGYFMIQXYIPCIMXVILSQVSFWINKESVPARXVFGIXXVLXMXXLSISARHSLPKVSYAXAMDWFIAVCFAFVFSALIEFAAVNYFXNIQMEKAKRKXSKPPQEVPAAPVQREKHPEAPLQNXNANLNMRKRXNALVHSESDVGNRXEVGNHSSKSSXVVQESSKGXPRSYLASSPNPFSRANAAEXISAARALPSASPXSIRXGYMPRKASVGSASXRHVFGSRLQRIKXXVNXIGAXGKLSAXPPPSAPPPSGSGXSKIDKYARILFPVXFGAFNMVYWVVYLSKDXMEKSESLM

SEQ ID NO: 10554 - protein, 36 aa, Homo sapiens
MVSAKKVPAIALSAGVSFALLRFLCLAVWSCYRSEN

SEQ ID NO: 10555 - protein, 16 aa, Homo sapiens
MDNGMFSGFIMIKNLL

SEQ ID NO: 10556 - protein, 86 aa, Homo sapiens
  MOD_RES (35)..(35): Selenocysteine
  MOD_RES (42)..(42): Selenocysteine
  MOD_RES (47)..(47): Selenocysteine
  MOD_RES (50)..(50): Selenocysteine
  MOD_RES (73)..(73): Selenocysteine
  MOD_RES (77)..(77): Selenocysteine
  MOD_RES (82)..(82): Selenocysteine
MDNGMFSGFIMIKNLLLFCISMNLSSHFGFSQMPXSSVKDEXNDNIXIFXRILDGLLDGYDNRLRPGLGERIXQVRXDIYVXSFGP

SEQ ID NO: 10557 - protein, 149 aa, Homo sapiens
  MOD_RES (35)..(35): Selenocysteine
  MOD_RES (42)..(42): Selenocysteine
  MOD_RES (47)..(47): Selenocysteine
  MOD_RES (50)..(50): Selenocysteine
  MOD_RES (73)..(73): Selenocysteine
  MOD_RES (77)..(77): Selenocysteine
  MOD_RES (82)..(82): Selenocysteine
  MOD_RES (90)..(90): Selenocysteine
  MOD_RES (95)..(95): Selenocysteine
  MOD_RES (130)..(130): Selenocysteine
  MOD_RES (133)..(133): Selenocysteine
  MOD_RES (147)..(148): Selenocysteine
MDNGMFSGFIMIKNLLLFCISMNLSSHFGFSQMPXSSVKDEXNDNIXIFXRILDGLLDGYDNRLRPGLGERIXQVRXDIYVXSFGPVSDXEMEYXIDVFFRQSWKDERLRFKGPMQRLPLNNLLASKIWXPDXFFHNGKKSIAHNMXXP

SEQ ID NO: 10558 - protein, 166 aa, Homo sapiens
  MOD_RES (35)..(35): Selenocysteine
  MOD_RES (42)..(42): Selenocysteine
  MOD_RES (47)..(47): Selenocysteine
  MOD_RES (50)..(50): Selenocysteine
  MOD_RES (73)..(73): Selenocysteine
  MOD_RES (77)..(77): Selenocysteine
  MOD_RES (82)..(82): Selenocysteine
  MOD_RES (90)..(90): Selenocysteine
  MOD_RES (95)..(95): Selenocysteine
  MOD_RES (130)..(130): Selenocysteine
  MOD_RES (133)..(133): Selenocysteine
  MOD_RES (147)..(148): Selenocysteine
  MOD_RES (160)..(160): Selenocysteine
  MOD_RES (164)..(164): Selenocysteine
MDNGMFSGFIMIKNLLLFCISMNLSSHFGFSQMPXSSVKDEXNDNIXIFXRILDGLLDGYDNRLRPGLGERIXQVRXDIYVXSFGPVSDXEMEYXIDVFFRQSWKDERLRFKGPMQRLPLNNLLASKIWXPDXFFHNGKKSIAHNMXXPNKLLRLEDDGXLLYXMR

SEQ ID NO: 10559 - protein, 462 aa, Homo sapiens
  MOD_RES (35)..(35): Selenocysteine
  MOD_RES (42)..(42): Selenocysteine
  MOD_RES (47)..(47): Selenocysteine
  MOD_RES (50)..(50): Selenocysteine
  MOD_RES (73)..(73): Selenocysteine
  MOD_RES (77)..(77): Selenocysteine
  MOD_RES (82)..(82): Selenocysteine
  MOD_RES (90)..(90): Selenocysteine
  MOD_RES (95)..(95): Selenocysteine
  MOD_RES (130)..(130): Selenocysteine
  MOD_RES (133)..(133): Selenocysteine
  MOD_RES (147)..(148): Selenocysteine
  MOD_RES (160)..(160): Selenocysteine
  MOD_RES (164)..(164): Selenocysteine
  MOD_RES (168)..(168): Selenocysteine
  MOD_RES (206)..(206): Selenocysteine
  MOD_RES (210)..(210): Selenocysteine
  MOD_RES (231)..(231): Selenocysteine
  MOD_RES (234)..(234): Selenocysteine
  MOD_RES (239)..(239): Selenocysteine
  MOD_RES (241)..(241): Selenocysteine
  MOD_RES (245)..(245): Selenocysteine
  MOD_RES (248)..(248): Selenocysteine
  MOD_RES (264)..(264): Selenocysteine
  MOD_RES (271)..(271): Selenocysteine
  MOD_RES (290)..(290): Selenocysteine
  MOD_RES (295)..(296): Selenocysteine
  MOD_RES (299)..(299): Selenocysteine
  MOD_RES (301)..(302): Selenocysteine
  MOD_RES (318)..(318): Selenocysteine
  MOD_RES (340)..(340): Selenocysteine
  MOD_RES (345)..(345): Selenocysteine
  MOD_RES (374)..(374): Selenocysteine
  MOD_RES (378)..(379): Selenocysteine
  MOD_RES (393)..(393): Selenocysteine
  MOD_RES (397)..(397): Selenocysteine
  MOD_RES (400)..(401): Selenocysteine
  MOD_RES (412)..(412): Selenocysteine
  MOD_RES (418)..(418): Selenocysteine
  MOD_RES (439)..(439): Selenocysteine
  MOD_RES (447)..(447): Selenocysteine
MDNGMFSGFIMIKNLLLFCISMNLSSHFGFSQMPXSSVKDEXNDNIXIFXRILDGLLDGYDNRLRPGLGERIXQVRXDIYVXSFGPVSDXEMEYXIDVFFRQSWKDERLRFKGPMQRLPLNNLLASKIWXPDXFFHNGKKSIAHNMXXPNKLLRLEDDGXLLYXMRLXISAECPMQLEDFPMDAHACPLKFGSYAYPNSEVVYVWXNGSXKSVVVAEDGSRLNQYHLMGQXVGXENISXSXGEYXIMXAHFHLKRKIGYFVIQXYLPCIMXVILSQVSFWLNRESVPARXVFGVXXVLXMXXLSISARNSLPKVAYAXAMDWFIAVCYAFVFSALIEFAXVNYFXKRGWAWDGKKALEAAKIKKKREVILNKSXNAFXXGKMSHPPNIPKEQXPAGXSNXXSVSVKPSEEKXSESKKXYNSISKIDKMSRIVFPVLFGXFNLVYWAXYLNREPVIKGAASPK

SEQ ID NO: 10560 - protein, 86 aa, Homo sapiens
  MOD_RES (3)..(3): Selenocysteine
  MOD_RES (10)..(10): Selenocysteine
  MOD_RES (15)..(15): Selenocysteine
  MOD_RES (18)..(18): Selenocysteine
  MOD_RES (41)..(41): Selenocysteine
  MOD_RES (45)..(45): Selenocysteine
  MOD_RES (50)..(50): Selenocysteine
  MOD_RES (58)..(58): Selenocysteine
  MOD_RES (63)..(63): Selenocysteine
MPXSSVKDEXNDNIXIFXRILDGLLDGYDNRLRPGLGERIXQVRXDIYVXSFGPVSDXEMEYXIDVFFRQSWKDERLRFKGPMQRL

SEQ ID NO: 10561 - protein, 166 aa, Homo sapiens
  MOD_RES (3)..(3): Selenocysteine
  MOD_RES (10)..(10): Selenocysteine
  MOD_RES (15)..(15): Selenocysteine
  MOD_RES (18)..(18): Selenocysteine
  MOD_RES (41)..(41): Selenocysteine
  MOD_RES (45)..(45): Selenocysteine
  MOD_RES (50)..(50): Selenocysteine
  MOD_RES (58)..(58): Selenocysteine
  MOD_RES (63)..(63): Selenocysteine
  MOD_RES (98)..(98): Selenocysteine
  MOD_RES (101)..(101): Selenocysteine
  MOD_RES (115)..(116): Selenocysteine
  MOD_RES (128)..(128): Selenocysteine
  MOD_RES (132)..(132): Selenocysteine
  MOD_RES (136)..(136): Selenocysteine
MPXSSVKDEXNDNIXIFXRILDGLLDGYDNRLRPGLGERIXQVRXDIYVXSFGPVSDXEMEYXIDVFFRQSWKDERLRFKGPMQRLPLNNLLASKIWXPDXFFHNGKKSIAHNMXXPNKLLRLEDDGXLLYXMRLXISAECPMQLEDFPMDAHACPLKFGSYAYPN

SEQ ID NO: 10562 - protein, 191 aa, Homo sapiens
  MOD_RES (8)..(8): Selenocysteine
  MOD_RES (11)..(11): Selenocysteine
  MOD_RES (25)..(26): Selenocysteine
  MOD_RES (38)..(38): Selenocysteine
  MOD_RES (42)..(42): Selenocysteine
  MOD_RES (46)..(46): Selenocysteine
  MOD_RES (107)..(107): Selenocysteine
  MOD_RES (134)..(134): Selenocysteine
  MOD_RES (139)..(139): Selenocysteine
  MOD_RES (144)..(144): Selenocysteine
  MOD_RES (151)..(151): Selenocysteine
  MOD_RES (169)..(169): Selenocysteine
  MOD_RES (174)..(174): Selenocysteine
LMVSKIWXPDXFFRNGKKSIAHNMXXPNKLFRIMQNGXILYXMRLXINADCPMRLVNFPMDGHACPLKFGSYNVHFEGKKDNSSNSLLYLICFKYLDAYPKSEIIYXWKKGPLYSVEVPEESSSLLQYDLIGQXVSSEXIKSNXGEYVIMXVYFHLQRKMGYFMIQIYXPCIMXVILSQVSFWINKESVPA

SEQ ID NO: 10563 - protein, 453 aa, Homo sapiens
  MOD_RES (56)..(56): Selenocysteine
  MOD_RES (60)..(60): Selenocysteine
  MOD_RES (65)..(65): Selenocysteine
  MOD_RES (78)..(78): Selenocysteine
  MOD_RES (86)..(86): Selenocysteine
  MOD_RES (88)..(88): Selenocysteine
  MOD_RES (98)..(98): Selenocysteine
  MOD_RES (113)..(113): Selenocysteine
  MOD_RES (116)..(116): Selenocysteine
  MOD_RES (130)..(131): Selenocysteine
  MOD_RES (143)..(143): Selenocysteine
  MOD_RES (147)..(147): Selenocysteine
  MOD_RES (151)..(151): Selenocysteine
  MOD_RES (187)..(187): Selenocysteine
  MOD_RES (214)..(214): Selenocysteine
  MOD_RES (219)..(219): Selenocysteine
  MOD_RES (224)..(224): Selenocysteine
  MOD_RES (231)..(231): Selenocysteine
  MOD_RES (249)..(249): Selenocysteine
  MOD_RES (254)..(254): Selenocysteine
  MOD_RES (273)..(273): Selenocysteine
  MOD_RES (278)..(279): Selenocysteine
  MOD_RES (282)..(282): Selenocysteine
  MOD_RES (284)..(285): Selenocysteine
  MOD_RES (301)..(301): Selenocysteine
  MOD_RES (328)..(328): Selenocysteine
  MOD_RES (332)..(332): Selenocysteine
  MOD_RES (346)..(346): Selenocysteine
  MOD_RES (348)..(348): Selenocysteine
  MOD_RES (353)..(353): Selenocysteine
  MOD_RES (375)..(375): Selenocysteine
  MOD_RES (392)..(392): Selenocysteine
  MOD_RES (400)..(400): Selenocysteine
  MOD_RES (403)..(403): Selenocysteine
  MOD_RES (414)..(414): Selenocysteine
  MOD_RES (445)..(445): Selenocysteine
MASSLPWLCIILWLENALGKLEVEGNFYSENVSRILDNLLEGYDNRLRPGFGGAVXEVKXDIYVXSFGPVSDVEMEYXMDVFFRQXWXDERLKFGGPXEILSLNNLMVSKIWXPDXFFRNGKKSIAHNMXXPNKLFRIMQNGXILYXMRLXINADCPMRLVNFPMDGHACPLKFGSYAYPKSEIIYXWKKGPLYSVEVPEESSSLLQYDLIGQXVSSEXIKSNXGEYVIMXVYFHLQRKMGYFMIQIYXPCIMXVILSQVSFWINKESVPARXVFGIXXVLXMXXLSISARHSLPKVSYAXAMDWFIAVCFAFVFSALIEFAAVNYFXNLQXQKAKRKAQFAAPPXVXISKAXEPLEAEIVLHPDSKYHLKKRIXSLSLPIVSSSEANKVLXRAPILQSXPVXPPPLSPAFGGXSKIDQYSRILFPVAFAGFNLVYWVVYLSKDXMEVSSSVE

SEQ ID NO: 10564 - protein, 443 aa, Homo sapiens
  MOD_RES (56)..(56): Selenocysteine
  MOD_RES (60)..(60): Selenocysteine
  MOD_RES (65)..(65): Selenocysteine
  MOD_RES (76)..(76): Selenocysteine
  MOD_RES (78)..(78): Selenocysteine
  MOD_RES (88)..(88): Selenocysteine
  MOD_RES (103)..(103): Selenocysteine
  MOD_RES (106)..(106): Selenocysteine
  MOD_RES (120)..(121): Selenocysteine
  MOD_RES (133)..(133): Selenocysteine
  MOD_RES (137)..(137): Selenocysteine
  MOD_RES (141)..(141): Selenocysteine
  MOD_RES (177)..(177): Selenocysteine
  MOD_RES (204)..(204): Selenocysteine
  MOD_RES (209)..(209): Selenocysteine
  MOD_RES (214)..(214): Selenocysteine
  MOD_RES (221)..(221): Selenocysteine
  MOD_RES (239)..(239): Selenocysteine
  MOD_RES (244)..(244): Selenocysteine
  MOD_RES (263)..(263): Selenocysteine
  MOD_RES (268)..(269): Selenocysteine
  MOD_RES (272)..(272): Selenocysteine
  MOD_RES (274)..(275): Selenocysteine
  MOD_RES (291)..(291): Selenocysteine
  MOD_RES (318)..(318): Selenocysteine
  MOD_RES (322)..(322): Selenocysteine
  MOD_RES (336)..(336): Selenocysteine
  MOD_RES (338)..(338): Selenocysteine
  MOD_RES (343)..(343): Selenocysteine
  MOD_RES (365)..(365): Selenocysteine
  MOD_RES (382)..(382): Selenocysteine
  MOD_RES (390)..(390): Selenocysteine
  MOD_RES (393)..(393): Selenocysteine
  MOD_RES (404)..(404): Selenocysteine
  MOD_RES (435)..(435): Selenocysteine
MASSLPWLCIILWLENALGKLEVEGNFYSENVSRILDNLLEGYDNRLRPGFGGAVXEVKXDIYVXSFGPVSDVEMXWXDERLKFGGPXEILSLNNLMVSKIWXPDXFFRNGKKSIAHNMXXPNKLFRIMQNGXILYXMRLXINADCPMRLVNFPMDGHACPLKFGSYAYPKSEIIYXWKKGPLYSVEVPEESSSLLQYDLIGQXVSSEXIKSNXGEYVIMXVYFHLQRKMGYFMIQIYXPCIMXVILSQVSFWINKESVPARXVFGIXXVLXMXXLSISARHSLPKVSYAXAMDWFIAVCFAFVFSALIEFAAVNYFXNLQXQKAKRKAQFAAPPXVXISKAXEPLEAEIVLHPDSKYHLKKRIXSLSLPIVSSSEANKVLXRAPILQSXPVXPPPLSPAFGGXSKIDQYSRILFPVAFAGFNLVYWVVYLSKDXMEVSSSVE

SEQ ID NO: 10565 - protein, 185 aa, Homo sapiens
  MOD_RES (11)..(11): Selenocysteine
  MOD_RES (25)..(25): Selenocysteine
  MOD_RES (33)..(33): Selenocysteine
  MOD_RES (35)..(35): Selenocysteine
  MOD_RES (45)..(45): Selenocysteine
  MOD_RES (60)..(60): Selenocysteine
  MOD_RES (63)..(63): Selenocysteine
  MOD_RES (77)..(78): Selenocysteine
  MOD_RES (90)..(90): Selenocysteine
  MOD_RES (94)..(94): Selenocysteine
  MOD_RES (98)..(98): Selenocysteine
  MOD_RES (134)..(134): Selenocysteine
  MOD_RES (161)..(161): Selenocysteine
  MOD_RES (166)..(166): Selenocysteine
  MOD_RES (171)..(171): Selenocysteine
  MOD_RES (178)..(178): Selenocysteine
SRCSGDSVPGXDGCSIHKRVFIEYXMDVFFRQXWXDERLKFGGPXEILSLNNLMVSKIWXPDXFFRNGKKSIAHNMXXPNKLFRIMQNGXILYXMRLXINADCPMRLVNFPMDGHACPLKFGSYAYPKSEIIYXWKKGPLYSVEVPEESSSLLQYDLIGQXVSSEXIKSNXGEYVIMXVYFHLQR

SEQ ID NO: 10566 - protein, 197 aa, Homo sapiens
  MOD_RES (1)..(1): Any amino acid
  MOD_RES (12)..(12): Selenocysteine
  MOD_RES (18)..(18): Selenocysteine
  MOD_RES (26)..(26): Selenocysteine
  MOD_RES (28)..(28): Selenocysteine
  MOD_RES (38)..(38): Selenocysteine
  MOD_RES (53)..(53): Selenocysteine
  MOD_RES (56)..(56): Selenocysteine
  MOD_RES (70)..(71): Selenocysteine
  MOD_RES (83)..(83): Selenocysteine
  MOD_RES (87)..(87): Selenocysteine
  MOD_RES (91)..(91): Selenocysteine
  MOD_RES (127)..(127): Selenocysteine
  MOD_RES (154)..(154): Selenocysteine
  MOD_RES (159)..(159): Selenocysteine
  MOD_RES (164)..(164): Selenocysteine
  MOD_RES (171)..(171): Selenocysteine
  MOD_RES (189)..(189): Selenocysteine
  MOD_RES (194)..(194): Selenocysteine
XIEDGPVGVLGXLFQEYXMDVFFRQXWXDERLKFGGPXEILSLNNLMVSKIWXPDXFFRNGKKSIAHNMXXPNKLFRIMQNGXILYXMRLXINADCPMRLVNFPMDGHACPLKFGSYAYPKSEIIYXWKKGPLYSVEVPEESSSLLQYDLIGQXVSSEXIKSNXGEYVIMXVYFHLQRKMGYFMIQIYXPCIMXVIL

SEQ ID NO: 10567 - protein, 117 aa, Homo sapiens
  MOD_RES (7)..(7): Selenocysteine
  MOD_RES (50)..(50): Selenocysteine
  MOD_RES (52)..(52): Selenocysteine
  MOD_RES (74)..(74): Selenocysteine
  MOD_RES (88)..(88): Selenocysteine
  MOD_RES (102)..(102): Selenocysteine
  MOD_RES (115)..(115): Selenocysteine
MSYVKEXVDRLLKGYDIRLRPDFGGPPVDVGMRIDVASIDMVSEVNMDYXLXMYFQQSWKDKRLSYSGIPLNLXLDNRVADQLWVPDXYFLNDKKSFVHGVXVKNRMIRLHPDGXVL

SEQ ID NO: 10568 - protein, 87 aa, Homo sapiens
  MOD_RES (3)..(3): Selenocysteine
  MOD_RES (20)..(20): Selenocysteine
  MOD_RES (28)..(28): Selenocysteine
  MOD_RES (40)..(40): Selenocysteine
  MOD_RES (61)..(61): Selenocysteine
  MOD_RES (81)..(81): Selenocysteine
MWXVQNRESLGLLSFPVMIXMVCCAHSXNEPSNMSYVKEXVDRLLKGYDIRLRPDFGGLYXHHVFPAVLERQKAFLFWNPXEPHPRQ

SEQ ID NO: 10569 - protein, 474 aa, Homo sapiens
  MOD_RES (3)..(3): Selenocysteine
  MOD_RES (20)..(20): Selenocysteine
  MOD_RES (28)..(28): Selenocysteine
  MOD_RES (40)..(40): Selenocysteine
  MOD_RES (83)..(83): Selenocysteine
  MOD_RES (85)..(85): Selenocysteine
  MOD_RES (107)..(107): Selenocysteine
  MOD_RES (121)..(121): Selenocysteine
  MOD_RES (135)..(135): Selenocysteine
  MOD_RES (148)..(148): Selenocysteine
  MOD_RES (156)..(158): Selenocysteine
  MOD_RES (176)..(176): Selenocysteine
  MOD_RES (185)..(186): Selenocysteine
  MOD_RES (201)..(201): Selenocysteine
  MOD_RES (226)..(227): Selenocysteine
  MOD_RES (250)..(250): Selenocysteine
  MOD_RES (255)..(255): Selenocysteine
  MOD_RES (258)..(258): Selenocysteine
  MOD_RES (281)..(282): Selenocysteine
  MOD_RES (285)..(285): Selenocysteine
  MOD_RES (287)..(288): Selenocysteine
  MOD_RES (291)..(291): Selenocysteine
  MOD_RES (296)..(296): Selenocysteine
  MOD_RES (371)..(371): Selenocysteine
  MOD_RES (378)..(378): Selenocysteine
  MOD_RES (385)..(385): Selenocysteine
  MOD_RES (393)..(393): Selenocysteine
  MOD_RES (444)..(444): Selenocysteine
  MOD_RES (460)..(460): Selenocysteine
MWXVQNRESLGLLSFPVMIXMVCCAHSXNEPSNMSYVKEXVDRLLKGYDIRLRPDFGGPPVDVGMRIDVASIDMVSEVNMDYXLXMYFQQSWKDKRLSYSGIPLNLXLDNRVADQLWVPDXYFLNDKKSFVHGVXVKNRMIRLHPDGXVLYGLRIXXXAACMMDLRRYPLDEQNCXLEIESYGYXXDDIEFYWNGGEGAVXGVNKIELPQFSIVDYKMVSKKVEFXXGAYPRLSLSFRLKRNIGYFILQXYMPSXLIXILSWVSFWINYDASAARVALGIXXVLXMXXISXHLREXLPKIPYVKAIDIYLMGCFVFVFLALLEYAFVNYIFFGKGPQKKGASKQDQSANEKNKLEMNKVQVDAHGNILLSXLEIRNEXSGSEVLXSVSDPKAXMYSYDSASIQYRKPLSSREAYGRALDRHGVPSKGRIRRRASQLKVKIPDLXDVNSIDKWSRMFFPIXFSLFNVVYWLYYVH

SEQ ID NO: 10570 - protein, 314 aa, Homo sapiens
  MOD_RES (15)..(15): Selenocysteine
  MOD_RES (24)..(25): Selenocysteine
  MOD_RES (40)..(40): Selenocysteine
  MOD_RES (43)..(43): Selenocysteine
  MOD_RES (59)..(59): Selenocysteine
  MOD_RES (66)..(66): Selenocysteine
  MOD_RES (89)..(89): Selenocysteine
  MOD_RES (97)..(97): Selenocysteine
  MOD_RES (120)..(121): Selenocysteine
  MOD_RES (124)..(124): Selenocysteine
  MOD_RES (126)..(127): Selenocysteine
  MOD_RES (130)..(130): Selenocysteine
  MOD_RES (135)..(135): Selenocysteine
  MOD_RES (210)..(210): Selenocysteine
  MOD_RES (219)..(219): Selenocysteine
  MOD_RES (232)..(232): Selenocysteine
  MOD_RES (279)..(279): Selenocysteine
  MOD_RES (284)..(284): Selenocysteine
MMDLRRYPLDEQNCXLEIESYGYXXDDIEFYWRGDDNAVXGVXKIELPQFSIVDYKLIXKKVVFSXGSYPRLSLSFKLKRNIGYFILQXYMPSILIXILSWVSFWINYDASAARVALGIXXVLXMXXINXHLREXLPKIPYVKAIDMYLMGCFVFVFMALLEYALVNYIFFGRGPQRQKKAAEKAASANNEKMRLDVNKMDPHENILLSXLEIKNEMAXSEAVMGLGDPRSXMLAYDASSIQYRKAGLPRHSFGRNALERHVAQKKSRLRRRASQLKIXIPDLXDVNAIDRWSRIFFPVVFSFFNIVYWLYYVN

SEQ ID NO: 10571 - protein, 313 aa, Homo sapiens
  MOD_RES (19)..(19): Selenocysteine
  MOD_RES (21)..(21): Selenocysteine
  MOD_RES (43)..(43): Selenocysteine
  MOD_RES (57)..(57): Selenocysteine
  MOD_RES (71)..(71): Selenocysteine
  MOD_RES (84)..(84): Selenocysteine
  MOD_RES (92)..(94): Selenocysteine
  MOD_RES (112)..(112): Selenocysteine
  MOD_RES (121)..(122): Selenocysteine
  MOD_RES (137)..(137): Selenocysteine
  MOD_RES (140)..(140): Selenocysteine
  MOD_RES (156)..(156): Selenocysteine
  MOD_RES (163)..(163): Selenocysteine
  MOD_RES (186)..(186): Selenocysteine
  MOD_RES (194)..(194): Selenocysteine
  MOD_RES (217)..(218): Selenocysteine
  MOD_RES (221)..(221): Selenocysteine
  MOD_RES (223)..(224): Selenocysteine
  MOD_RES (227)..(227): Selenocysteine
  MOD_RES (232)..(232): Selenocysteine
MNIDIASIDMVSEVNMDYXLXMYFQQAWRDKRLSYNVIPLNLXLDNRVADQLWVPDXYFLNDKKSFVHGVXVKNRMIRLHPDGXVLYGLRIXXXAACMMDLRRYPLDEQNCXLEIESYGYXXDDIEFYWRGDDNAVXGVXKIELPQFSIVDYKLIXKKVVFSXGSYPRLSLSFKLKRNIGYFILQXYMPSILIXILSWVSFWINYDASAARVALGIXXVLXMXXINXHLREXLPKIPYVKAIDMYLMGCFVFVFMALLEYALVNYIFFGRGPQRQKKAAEKAASANNEKMRLDVNKVNSEGKPSLLLKLMEEC

SEQ ID NO: 10572 - protein, 411 aa, Homo sapiens
  MOD_RES (19)..(19): Selenocysteine
  MOD_RES (21)..(21): Selenocysteine
  MOD_RES (43)..(43): Selenocysteine
  MOD_RES (57)..(57): Selenocysteine
  MOD_RES (71)..(71): Selenocysteine
  MOD_RES (84)..(84): Selenocysteine
  MOD_RES (92)..(94): Selenocysteine
  MOD_RES (112)..(112): Selenocysteine
  MOD_RES (121)..(122): Selenocysteine
  MOD_RES (137)..(137): Selenocysteine
  MOD_RES (140)..(140): Selenocysteine
  MOD_RES (156)..(156): Selenocysteine
  MOD_RES (163)..(163): Selenocysteine
  MOD_RES (186)..(186): Selenocysteine
  MOD_RES (194)..(194): Selenocysteine
  MOD_RES (217)..(218): Selenocysteine
  MOD_RES (221)..(221): Selenocysteine
  MOD_RES (223)..(224): Selenocysteine
  MOD_RES (227)..(227): Selenocysteine
  MOD_RES (232)..(232): Selenocysteine
  MOD_RES (307)..(307): Selenocysteine
  MOD_RES (316)..(316): Selenocysteine
  MOD_RES (329)..(329): Selenocysteine
  MOD_RES (376)..(376): Selenocysteine
  MOD_RES (381)..(381): Selenocysteine
MNIDIASIDMVSEVNMDYXLXMYFQQAWRDKRLSYNVIPLNLXLDNRVADQLWVPDXYFLNDKKSFVHGVXVKNRMIRLHPDGXVLYGLRIXXXAACMMDLRRYPLDEQNCXLEIESYGYXXDDIEFYWRGDDNAVXGVXKIELPQFSIVDYKLIXKKVVFSXGSYPRLSLSFKLKRNIGYFILQXYMPSILIXILSWVSFWINYDASAARVALGIXXVLXMXXINXHLREXLPKIPYVKAIDMYLMGCFVFVFMALLEYALVNYIFFGRGPQRQKKAAEKAASANNEKMRLDVNKMDPHENILLSXLEIKNEMAXSEAVMGLGDPRSXMLAYDASSIQYRKAGLPRHSFGRNALERHVAQKKSRLRRRASQLKIXIPDLXDVNAIDRWSRIFFPVVFSFFNIVYWLYYVN

SEQ ID NO: 10573 - protein, 474 aa, Homo sapiens
  MOD_RES (39)..(39): Selenocysteine
  MOD_RES (82)..(82): Selenocysteine
  MOD_RES (84)..(84): Selenocysteine
  MOD_RES (106)..(106): Selenocysteine
  MOD_RES (120)..(120): Selenocysteine
  MOD_RES (134)..(134): Selenocysteine
  MOD_RES (147)..(147): Selenocysteine
  MOD_RES (155)..(157): Selenocysteine
  MOD_RES (175)..(175): Selenocysteine
  MOD_RES (184)..(185): Selenocysteine
  MOD_RES (200)..(200): Selenocysteine
  MOD_RES (203)..(203): Selenocysteine
  MOD_RES (219)..(219): Selenocysteine
  MOD_RES (226)..(226): Selenocysteine
  MOD_RES (249)..(249): Selenocysteine
  MOD_RES (257)..(257): Selenocysteine
  MOD_RES (280)..(281): Selenocysteine
  MOD_RES (284)..(284): Selenocysteine
  MOD_RES (286)..(287): Selenocysteine
  MOD_RES (290)..(290): Selenocysteine
  MOD_RES (295)..(295): Selenocysteine
  MOD_RES (370)..(370): Selenocysteine
  MOD_RES (379)..(379): Selenocysteine
  MOD_RES (392)..(392): Selenocysteine
  MOD_RES (439)..(439): Selenocysteine
  MOD_RES (444)..(444): Selenocysteine
MWRVRKRGYFGIWSFPLIIAAVCAQSVNDPSNMSLVKEXVDRLLKGYDIRLRPDFGGPPVAVGMNIDIASIDMVSEVNMDYXLXMYFQQAWRDKRLSYNVIPLNLXLDNRVADQLWVPDXYFLNDKKSFVHGVXVKNRMIRLHPDGXVLYGLRIXXXAACMMDLRRYPLDEQNCXLEIESYGYXXDDIEFYWRGDDNAVXGVXKIELPQFSIVDYKLIXKKVVFSXGSYPRLSLSFKLKRNIGYFILQXYMPSILIXILSWVSFWINYDASAARVALGIXXVLXMXXINXHLREXLPKIPYVKAIDMYLMGCFVFVFMALLEYALVNYIFFGRGPQRQKKAAEKAASANNEKMRLDVNKMDPHENILLSXLEIKNEMAXSEAVMGLGDPRSXMLAYDASSIQYRKAGLPRHSFGRNALERHVAQKKSRLRRRASQLKIXIPDLXDVNAIDRWSRIFFPVVFSFFNIVYWLYYVN

SEQ ID NO: 10574 - protein, 512 aa, Homo sapiens
  MOD_RES (39)..(39): Selenocysteine
  MOD_RES (82)..(82): Selenocysteine
  MOD_RES (84)..(84): Selenocysteine
  MOD_RES (106)..(106): Selenocysteine
  MOD_RES (120)..(120): Selenocysteine
  MOD_RES (134)..(134): Selenocysteine
  MOD_RES (147)..(147): Selenocysteine
  MOD_RES (155)..(157): Selenocysteine
  MOD_RES (175)..(175): Selenocysteine
  MOD_RES (184)..(185): Selenocysteine
  MOD_RES (200)..(200): Selenocysteine
  MOD_RES (203)..(203): Selenocysteine
  MOD_RES (219)..(219): Selenocysteine
  MOD_RES (226)..(226): Selenocysteine
  MOD_RES (249)..(249): Selenocysteine
  MOD_RES (257)..(257): Selenocysteine
  MOD_RES (280)..(281): Selenocysteine
  MOD_RES (284)..(284): Selenocysteine
  MOD_RES (286)..(287): Selenocysteine
  MOD_RES (290)..(290): Selenocysteine
  MOD_RES (295)..(295): Selenocysteine
  MOD_RES (370)..(370): Selenocysteine
  MOD_RES (379)..(379): Selenocysteine
  MOD_RES (385)..(385): Selenocysteine
  MOD_RES (388)..(389): Selenocysteine
  MOD_RES (397)..(397): Selenocysteine
  MOD_RES (408)..(408): Selenocysteine
  MOD_RES (417)..(417): Selenocysteine
  MOD_RES (430)..(430): Selenocysteine
  MOD_RES (477)..(477): Selenocysteine
  MOD_RES (482)..(482): Selenocysteine
MWRVRKRGYFGIWSFPLIIAAVCAQSVNDPSNMSLVKEXVDRLLKGYDIRLRPDFGGPPVAVGMNIDIASIDMVSEVNMDYXLXMYFQQAWRDKRLSYNVIPLNLXLDNRVADQLWVPDXYFLNDKKSFVHGVXVKNRMIRLHPDGXVLYGLRIXXXAACMMDLRRYPLDEQNCXLEIESYGYXXDDIEFYWRGDDNAVXGVXKIELPQFSIVDYKLIXKKVVFSXGSYPRLSLSFKLKRNIGYFILQXYMPSILIXILSWVSFWINYDASAARVALGIXXVLXMXXINXHLREXLPKIPYVKAIDMYLMGCFVFVFMALLEYALVNYIFFGRGPQRQKKAAEKAASANNEKMRLDVNKIFYKDIKQNGXQYRSLWDPXGNLSPXRRXXNYDFSLYXMDPHENILLSXLEIKNEMAXSEAVMGLGDPRSXMLAYDASSIQYRKAGLPRHSFGRNALERHVAQKKSRLRRRASQLKIXIPDLXDVNAIDRWSRIFFPVVFSFFNIVYWLYYVN

SEQ ID NO: 10575 - protein, 473 aa, Homo sapiens
  MOD_RES (17)..(17): Selenocysteine
  MOD_RES (20)..(20): Selenocysteine
  MOD_RES (40)..(40): Selenocysteine
  MOD_RES (83)..(83): Selenocysteine
  MOD_RES (85)..(85): Selenocysteine
  MOD_RES (107)..(107): Selenocysteine
  MOD_RES (121)..(121): Selenocysteine
  MOD_RES (135)..(135): Selenocysteine
  MOD_RES (148)..(148): Selenocysteine
  MOD_RES (156)..(158): Selenocysteine
  MOD_RES (176)..(176): Selenocysteine
  MOD_RES (185)..(186): Selenocysteine
  MOD_RES (201)..(201): Selenocysteine
  MOD_RES (227)..(227): Selenocysteine
  MOD_RES (250)..(250): Selenocysteine
  MOD_RES (258)..(258): Selenocysteine
  MOD_RES (281)..(282): Selenocysteine
  MOD_RES (285)..(285): Selenocysteine
  MOD_RES (287)..(288): Selenocysteine
  MOD_RES (291)..(291): Selenocysteine
  MOD_RES (296)..(296): Selenocysteine
  MOD_RES (346)..(346): Selenocysteine
  MOD_RES (370)..(370): Selenocysteine
  MOD_RES (388)..(388): Selenocysteine
  MOD_RES (426)..(426): Selenocysteine
  MOD_RES (443)..(443): Selenocysteine
  MOD_RES (459)..(459): Selenocysteine
MCSGLLELLLPIWLSWXLGXRGSEPRSVNDPGNMSFVKEXVDKLLKGYDIRLRPDFGGPPVCVGMNIDIASIDMVSEVNMDYXLXMYFQQYWRDKRLAYSGIPLNLXLDNRVADQLWVPDXYFLNDKKSFVHGVXVKNRMIRLHPDGXVLYGLRIXXXAACMMDLRRYPLDEQNCXLEIESYGYXXDDIEFYWRGGDKAVXGVERIELPQFSIVEHRLVSRNVVFAXGAYPRLSLSFRLKRNIGYFILQXYMPSILIXILSWVSFWINYDASAARVALGIXXVLXMXXINXHLREXLPKIPYVKAIDMYLMGCFVFVFLALLEYAFVNYIFFGRGPQRQKKLAEKXAKAKNDRSKSESNRVDAHGNILLXSLEVHNEMNEVSGGIGDXRNSAISFDNSGIQYRKQSMPREGHGRFLGDRSLPHKKXHLRRRSSQLKIKIPDLXDVNAIDRWSRIVFPFXFSLFNLVYWLYYVN

SEQ ID NO: 10576 - protein, 529 aa, Homo sapiens
  MOD_RES (64)..(64): Selenocysteine
  MOD_RES (75)..(75): Selenocysteine
  MOD_RES (82)..(82): Selenocysteine
  MOD_RES (96)..(96): Selenocysteine
  MOD_RES (139)..(139): Selenocysteine
  MOD_RES (141)..(141): Selenocysteine
  MOD_RES (163)..(163): Selenocysteine
  MOD_RES (177)..(177): Selenocysteine
  MOD_RES (191)..(191): Selenocysteine
  MOD_RES (204)..(204): Selenocysteine
  MOD_RES (212)..(214): Selenocysteine
  MOD_RES (232)..(232): Selenocysteine
  MOD_RES (241)..(242): Selenocysteine
  MOD_RES (257)..(257): Selenocysteine
  MOD_RES (283)..(283): Selenocysteine
  MOD_RES (306)..(306): Selenocysteine
  MOD_RES (314)..(314): Selenocysteine
  MOD_RES (337)..(338): Selenocysteine
  MOD_RES (341)..(341): Selenocysteine
  MOD_RES (343)..(344): Selenocysteine
  MOD_RES (347)..(347): Selenocysteine
  MOD_RES (352)..(352): Selenocysteine
  MOD_RES (402)..(402): Selenocysteine
  MOD_RES (426)..(426): Selenocysteine
  MOD_RES (444)..(444): Selenocysteine
  MOD_RES (482)..(482): Selenocysteine
  MOD_RES (499)..(499): Selenocysteine
  MOD_RES (515)..(515): Selenocysteine
MQQLRRLWVLAAQPFCHLPERCRLFFEIGGISLAMPQCLLWICLAVWEARGDLPFIAENDAVLXVNWNAVKEHRXFYAIYEXSVNDPGNMSFVKEXVDKLLKGYDIRLRPDFGGPPVCVGMNIDIASIDMVSEVNMDYXLXMYFQQYWRDKRLAYSGIPLNLXLDNRVADQLWVPDXYFLNDKKSFVHGVXVKNRMIRLHPDGXVLYGLRIXXXAACMMDLRRYPLDEQNCXLEIESYGYXXDDIEFYWRGGDKAVXGVERIELPQFSIVEHRLVSRNVVFAXGAYPRLSLSFRLKRNIGYFILQXYMPSILIXILSWVSFWINYDASAARVALGIXXVLXMXXINXHLREXLPKIPYVKAIDMYLMGCFVFVFLALLEYAFVNYIFFGRGPQRQKKLAEKXAKAKNDRSKSESNRVDAHGNILLXSLEVHNEMNEVSGGIGDXRNSAISFDNSGIQYRKQSMPREGHGRFLGDRSLPHKKXHLRRRSSQLKIKIPDLXDVNAIDRWSRIVFPFXFSLFNLVYWLYYVN

SEQ ID NO: 10577 - protein, 440 aa, Homo sapiens
  MOD_RES (7)..(7): Selenocysteine
  MOD_RES (50)..(50): Selenocysteine
  MOD_RES (52)..(52): Selenocysteine
  MOD_RES (74)..(74): Selenocysteine
  MOD_RES (88)..(88): Selenocysteine
  MOD_RES (102)..(102): Selenocysteine
  MOD_RES (115)..(115): Selenocysteine
  MOD_RES (123)..(125): Selenocysteine
  MOD_RES (143)..(143): Selenocysteine
  MOD_RES (152)..(153): Selenocysteine
  MOD_RES (168)..(168): Selenocysteine
  MOD_RES (194)..(194): Selenocysteine
  MOD_RES (217)..(217): Selenocysteine
  MOD_RES (225)..(225): Selenocysteine
  MOD_RES (248)..(249): Selenocysteine
  MOD_RES (252)..(252): Selenocysteine
  MOD_RES (254)..(255): Selenocysteine
  MOD_RES (258)..(258): Selenocysteine
  MOD_RES (263)..(263): Selenocysteine
  MOD_RES (313)..(313): Selenocysteine
  MOD_RES (337)..(337): Selenocysteine
  MOD_RES (355)..(355): Selenocysteine
  MOD_RES (393)..(393): Selenocysteine
  MOD_RES (410)..(410): Selenocysteine
  MOD_RES (426)..(426): Selenocysteine
MSFVKEXVDKLLKGYDIRLRPDFGGPPVCVGMNIDIASIDMVSEVNMDYXLXMYFQQYWRDKRLAYSGIPLNLXLDNRVADQLWVPDXYFLNDKKSFVHGVXVKNRMIRLHPDGXVLYGLRIXXXAACMMDLRRYPLDEQNCXLEIESYGYXXDDIEFYWRGGDKAVXGVERIELPQFSIVEHRLVSRNVVFAXGAYPRLSLSFRLKRNIGYFILQXYMPSILIXILSWVSFWINYDASAARVALGIXXVLXMXXINXHLREXLPKIPYVKAIDMYLMGCFVFVFLALLEYAFVNYIFFGRGPQRQKKLAEKXAKAKNDRSKSESNRVDAHGNILLXSLEVHNEMNEVSGGIGDXRNSAISFDNSGIQYRKQSMPREGHGRFLGDRSLPHKKXHLRRRSSQLKIKIPDLXDVNAIDRWSRIVFPFXFSLFNLVYWLYYVN

SEQ ID NO: 10578 - protein, 402 aa, Homo sapiens
  MOD_RES (4)..(4): Selenocysteine
  MOD_RES (7)..(7): Selenocysteine
  MOD_RES (12)..(12): Selenocysteine
  MOD_RES (14)..(14): Selenocysteine
  MOD_RES (36)..(36): Selenocysteine
  MOD_RES (50)..(50): Selenocysteine
  MOD_RES (64)..(64): Selenocysteine
  MOD_RES (77)..(77): Selenocysteine
  MOD_RES (85)..(87): Selenocysteine
  MOD_RES (105)..(105): Selenocysteine
  MOD_RES (114)..(115): Selenocysteine
  MOD_RES (130)..(130): Selenocysteine
  MOD_RES (156)..(156): Selenocysteine
  MOD_RES (179)..(179): Selenocysteine
  MOD_RES (187)..(187): Selenocysteine
  MOD_RES (210)..(211): Selenocysteine
  MOD_RES (214)..(214): Selenocysteine
  MOD_RES (216)..(217): Selenocysteine
  MOD_RES (220)..(220): Selenocysteine
  MOD_RES (225)..(225): Selenocysteine
  MOD_RES (275)..(275): Selenocysteine
  MOD_RES (299)..(299): Selenocysteine
  MOD_RES (317)..(317): Selenocysteine
  MOD_RES (355)..(355): Selenocysteine
  MOD_RES (372)..(372): Selenocysteine
  MOD_RES (388)..(388): Selenocysteine
MWAXYQXEEDYXLXMYFQQYWRDKRLAYSGIPLNLXLDNRVADQLWVPDXYFLNDKKSFVHGVXVKNRMIRLHPDGXVLYGLRIXXXAACMMDLRRYPLDEQNCXLEIESYGYXXDDIEFYWRGGDKAVXGVERIELPQFSIVEHRLVSRNVVFAXGAYPRLSLSFRLKRNIGYFILQXYMPSILIXILSWVSFWINYDASAARVALGIXXVLXMXXINXHLREXLPKIPYVKAIDMYLMGCFVFVFLALLEYAFVNYIFFGRGPQRQKKLAEKXAKAKNDRSKSESNRVDAHGNILLXSLEVHNEMNEVSGGIGDXRNSAISFDNSGIQYRKQSMPREGHGRFLGDRSLPHKKXHLRRRSSQLKIKIPDLXDVNAIDRWSRIVFPFXFSLFNLVYWLYYVN

SEQ ID NO: 10579 - protein, 87 aa, Homo sapiens
  MOD_RES (40)..(40): Selenocysteine
MWGLAGGRLFGIFSAPVLVAVVCCAQSVNDPGNMSFVKEXVDKLLKGYDIRLRPDFGGPPVCVGMNIDIASIDMVSEVNMAMQELHS

SEQ ID NO: 10580 - protein, 473 aa, Homo sapiens
  MOD_RES (40)..(40): Selenocysteine
  MOD_RES (83)..(83): Selenocysteine
  MOD_RES (85)..(85): Selenocysteine
  MOD_RES (107)..(107): Selenocysteine
  MOD_RES (121)..(121): Selenocysteine
  MOD_RES (135)..(135): Selenocysteine
  MOD_RES (148)..(148): Selenocysteine
  MOD_RES (156)..(158): Selenocysteine
  MOD_RES (176)..(176): Selenocysteine
  MOD_RES (185)..(186): Selenocysteine
  MOD_RES (201)..(201): Selenocysteine
  MOD_RES (227)..(227): Selenocysteine
  MOD_RES (250)..(250): Selenocysteine
  MOD_RES (258)..(258): Selenocysteine
  MOD_RES (281)..(282): Selenocysteine
  MOD_RES (285)..(285): Selenocysteine
  MOD_RES (287)..(288): Selenocysteine
  MOD_RES (291)..(291): Selenocysteine
  MOD_RES (296)..(296): Selenocysteine
  MOD_RES (346)..(346): Selenocysteine
  MOD_RES (370)..(370): Selenocysteine
  MOD_RES (388)..(388): Selenocysteine
  MOD_RES (426)..(426): Selenocysteine
  MOD_RES (443)..(443): Selenocysteine
  MOD_RES (459)..(459): Selenocysteine
MWGLAGGRLFGIFSAPVLVAVVCCAQSVNDPGNMSFVKEXVDKLLKGYDIRLRPDFGGPPVCVGMNIDIASIDMVSEVNMDYXLXMYFQQYWRDKRLAYSGIPLNLXLDNRVADQLWVPDXYFLNDKKSFVHGVXVKNRMIRLHPDGXVLYGLRIXXXAACMMDLRRYPLDEQNCXLEIESYGYXXDDIEFYWRGGDKAVXGVERIELPQFSIVEHRLVSRNVVFAXGAYPRLSLSFRLKRNIGYFILQXYMPSILIXILSWVSFWINYDASAARVALGIXXVLXMXXINXHLREXLPKIPYVKAIDMYLMGCFVFVFLALLEYAFVNYIFFGRGPQRQKKLAEKXAKAKNDRSKSESNRVDAHGNILLXSLEVHNEMNEVSGGIGDXRNSAISFDNSGIQYRKQSMPREGHGRFLGDRSLPHKKXHLRRRSSQLKIKIPDLXDVNAIDRWSRIVFPFXFSLFNLVYWLYYVN

SEQ ID NO: 10581 - protein, 105 aa, Homo sapiens
  MOD_RES (40)..(40): Selenocysteine
MWGLAGGRLFGIFSAPVLVAVVCCAQSVNDPGNMSFVKEXVDKLLKGYDIRLRPDFGGPPVCVGMNIDIASIDMVSEVNMNHHDSSMHDGPQEIPPGRAELHSGN

SEQ ID NO: 10582 - protein, 388 aa, Homo sapiens
  MOD_RES (22)..(22): Selenocysteine
  MOD_RES (36)..(36): Selenocysteine
  MOD_RES (50)..(50): Selenocysteine
  MOD_RES (63)..(63): Selenocysteine
  MOD_RES (71)..(73): Selenocysteine
  MOD_RES (91)..(91): Selenocysteine
  MOD_RES (100)..(101): Selenocysteine
  MOD_RES (116)..(116): Selenocysteine
  MOD_RES (142)..(142): Selenocysteine
  MOD_RES (165)..(165): Selenocysteine
  MOD_RES (173)..(173): Selenocysteine
  MOD_RES (196)..(197): Selenocysteine
  MOD_RES (200)..(200): Selenocysteine
  MOD_RES (202)..(203): Selenocysteine
  MOD_RES (206)..(206): Selenocysteine
  MOD_RES (211)..(211): Selenocysteine
  MOD_RES (261)..(261): Selenocysteine
  MOD_RES (285)..(285): Selenocysteine
  MOD_RES (303)..(303): Selenocysteine
  MOD_RES (341)..(341): Selenocysteine
  MOD_RES (358)..(358): Selenocysteine
  MOD_RES (374)..(374): Selenocysteine
MYFQQYWRDKRLAYSGIPLNLXLDNRVADQLWVPDXYFLNDKKSFVHGVXVKNRMIRLHPDGXVLYGLRIXXXAACMMDLRRYPLDEQNCXLEIESYGYXXDDIEFYWRGGDKAVXGVERIELPQFSIVEHRLVSRNVVFAXGAYPRLSLSFRLKRNIGYFILQXYMPSILIXILSWVSFWINYDASAARVALGIXXVLXMXXINXHLREXLPKIPYVKAIDMYLMGCFVFVFLALLEYAFVNYIFFGRGPQRQKKLAEKXAKAKNDRSKSESNRVDAHGNILLXSLEVHNEMNEVSGGIGDXRNSAISFDNSGIQYRKQSMPREGHGRFLGDRSLPHKKXHLRRRSSQLKIKIPDLXDVNAIDRWSRIVFPFXFSLFNLVYWLYYVN

SEQ ID NO: 10583 - protein, 44 aa, Homo sapiens
  MOD_RES (1)..(1): Any amino acid
  MOD_RES (13)..(13): Selenocysteine
  MOD_RES (26)..(26): Selenocysteine
XLNDKKSFVHGVXVKNRMIRLHPDGXVLYGLRYYGPGLEEVWHS

SEQ ID NO: 10584 - protein, 264 aa, Homo sapiens
  MOD_RES (1)..(1): Any amino acid
  MOD_RES (2)..(2): Selenocysteine
  MOD_RES (16)..(16): Selenocysteine
  MOD_RES (30)..(30): Selenocysteine
  MOD_RES (43)..(43): Selenocysteine
  MOD_RES (51)..(53): Selenocysteine
  MOD_RES (71)..(71): Selenocysteine
  MOD_RES (80)..(81): Selenocysteine
  MOD_RES (96)..(96): Selenocysteine
  MOD_RES (122)..(122): Selenocysteine
  MOD_RES (145)..(145): Selenocysteine
  MOD_RES (153)..(153): Selenocysteine
  MOD_RES (176)..(177): Selenocysteine
  MOD_RES (180)..(180): Selenocysteine
  MOD_RES (182)..(183): Selenocysteine
  MOD_RES (186)..(186): Selenocysteine
  MOD_RES (191)..(191): Selenocysteine
  MOD_RES (241)..(241): Selenocysteine
  MOD_RES (260)..(260): Selenocysteine
XXLDNRVADQLWVPDXYFLNDKKSFVHGVXVKNRMIRLHPDGXVLYGLRIXXXAACMMDLRRYPLDEQNCXLEIESYGYXXDDIEFYWRGGDKAVXGVERIELPQFSIVEHRLVSRNVVFAXGAYPRLSLSFRLKRNIGYFILQXYMPSILIXILSWVSFWINYDASAARVALGIXXVLXMXXINXHLREXLPKIPYVKAIDMYLMGCFVFVFLALLEYAFVNYIFFGRGPQRQKKLAEKXAKAKNDRSKSESNRENDFXFLIS

SEQ ID NO: 10585 - protein, 452 aa, Homo sapiens
  MOD_RES (22)..(22): Selenocysteine
  MOD_RES (86)..(86): Selenocysteine
  MOD_RES (88)..(88): Selenocysteine
  MOD_RES (105)..(105): Selenocysteine
  MOD_RES (108)..(108): Selenocysteine
  MOD_RES (124)..(124): Selenocysteine
  MOD_RES (138)..(138): Selenocysteine
  MOD_RES (159)..(159): Selenocysteine
  MOD_RES (161)..(161): Selenocysteine
  MOD_RES (215)..(215): Selenocysteine
  MOD_RES (217)..(217): Selenocysteine
  MOD_RES (222)..(223): Selenocysteine
  MOD_RES (285)..(286): Selenocysteine
  MOD_RES (289)..(289): Selenocysteine
  MOD_RES (291)..(292): Selenocysteine
  MOD_RES (371)..(371): Selenocysteine
  MOD_RES (398)..(398): Selenocysteine
  MOD_RES (401)..(401): Selenocysteine
  MOD_RES (426)..(426): Selenocysteine
MDAPARLLAPLLLLCAQQLRGXRAMNDIGDYVGSNLEISWLPNLDGLIAGYARNFRPGIGGPPVNVALALEVASIDHISEANMEYXMXVFLHQSWRDSRLSYNHXNEXLGLDSRFVDKLWLPDXFIVNAKSAWFHDVXVENKLIRLQPDGVILYSIRIXSXVACDMDLAKYPMDEQECMLDLESYGYSSEDIVYYWSESQEHIHGLDKLQLAQFXIXSYRFXXELMNFKSAGQFPRLSLHFHLRRNRGVYIIQSYMPSVLLVAMSWVSFWISQAAVPARVSLGIXXVLXMXXLMVSARSSLPRASAIKALDVYFWICYVFVFAALVEYAFAHFNADYRKKQKAKVKVSRPRAEMDVRNAIVLFSLSAAGVXQELAISRRQRRVPGNLMGSYRSVGVEXGEXKKEGAARSGGQGGIRARLRPIDADXIDIYARAVFPAAFAAVNVIYWAAYAM

SEQ ID NO: 10586 - protein, 43 aa, Homo sapiens
  MOD_RES (20)..(20): Selenocysteine
  MOD_RES (40)..(41): Selenocysteine
MLSKVLPVLLGILLILQSRXCIQRSAQIISVQLMSCQNMXXAV

SEQ ID NO: 10587 - protein, 506 aa, Homo sapiens
  MOD_RES (25)..(25): Selenocysteine
  MOD_RES (54)..(54): Selenocysteine
  MOD_RES (57)..(57): Selenocysteine
  MOD_RES (59)..(59): Selenocysteine
  MOD_RES (61)..(61): Selenocysteine
  MOD_RES (77)..(77): Selenocysteine
  MOD_RES (95)..(95): Selenocysteine
  MOD_RES (98)..(98): Selenocysteine
  MOD_RES (117)..(117): Selenocysteine
  MOD_RES (125)..(125): Selenocysteine
  MOD_RES (136)..(136): Selenocysteine
  MOD_RES (155)..(155): Selenocysteine
  MOD_RES (163)..(163): Selenocysteine
  MOD_RES (169)..(169): Selenocysteine
  MOD_RES (186)..(186): Selenocysteine
  MOD_RES (190)..(190): Selenocysteine
  MOD_RES (248)..(248): Selenocysteine
  MOD_RES (254)..(254): Selenocysteine
  MOD_RES (258)..(259): Selenocysteine
  MOD_RES (268)..(268): Selenocysteine
  MOD_RES (291)..(292): Selenocysteine
  MOD_RES (303)..(303): Selenocysteine
  MOD_RES (310)..(310): Selenocysteine
  MOD_RES (315)..(315): Selenocysteine
  MOD_RES (319)..(319): Selenocysteine
  MOD_RES (321)..(322): Selenocysteine
  MOD_RES (325)..(325): Selenocysteine
  MOD_RES (338)..(338): Selenocysteine
  MOD_RES (369)..(369): Selenocysteine
  MOD_RES (390)..(390): Selenocysteine
  MOD_RES (411)..(412): Selenocysteine
  MOD_RES (467)..(467): Selenocysteine
  MOD_RES (491)..(491): Selenocysteine
MLSKVLPVLLGILLILQSRVEGPQXESKNEASSRDVVYGPQPQPLENQLLSEEXKSXEXEXGSRVGKLPEASRILNXILSNYDHKLRPGIGEKPXVVXVEISVNSLGPLSILDMEYXIDIIFSQXWYDERLCYNDXFESLVLNGNVVSQLWIPDXFFRNSKRXHEHEIXMPNQMVRIYKDGKVLYXIRMXIDAGCSLHMLRFPMDSHSCPLSFSSFSYPENEMIYKWENFKLEINEKNSWKLFQFDFXGVSNKXEIIXXPVGDFMVMXIFFNVSRRFGYVAFQNYVPSSVXXMLSWVSFWIKXESAPARXSLGIXSVLXMXXLGXFSRKNFPRVSYIXALDFYIAICFVFCFCALLEFAVLNFLIYNQXKAHASPKLRHPRINSRAHARXRARSRACARQHQEAFVCQIVXXEGSDGEERPSCSAQQPPSPGSPEGPRSLCSKLACCEWCKRFKKYFCMVPDCEGSXWQQGRLCIHVYRLDNYSRVVFPVXFFFFNVLYWLVCLNL

SEQ ID NO: 10588 - protein, 465 aa, Homo sapiens
  MOD_RES (29)..(29): Selenocysteine
  MOD_RES (48)..(48): Selenocysteine
  MOD_RES (52)..(52): Selenocysteine
  MOD_RES (65)..(65): Selenocysteine
  MOD_RES (88)..(88): Selenocysteine
  MOD_RES (92)..(92): Selenocysteine
  MOD_RES (110)..(110): Selenocysteine
  MOD_RES (118)..(118): Selenocysteine
  MOD_RES (129)..(129): Selenocysteine
  MOD_RES (148)..(148): Selenocysteine
  MOD_RES (162)..(163): Selenocysteine
  MOD_RES (179)..(179): Selenocysteine
  MOD_RES (183)..(183): Selenocysteine
  MOD_RES (247)..(247): Selenocysteine
  MOD_RES (250)..(250): Selenocysteine
  MOD_RES (252)..(252): Selenocysteine
  MOD_RES (261)..(261): Selenocysteine
  MOD_RES (274)..(274): Selenocysteine
  MOD_RES (277)..(277): Selenocysteine
  MOD_RES (284)..(284): Selenocysteine
  MOD_RES (303)..(303): Selenocysteine
  MOD_RES (308)..(309): Selenocysteine
  MOD_RES (312)..(312): Selenocysteine
  MOD_RES (314)..(315): Selenocysteine
  MOD_RES (318)..(318): Selenocysteine
  MOD_RES (331)..(331): Selenocysteine
  MOD_RES (353)..(353): Selenocysteine
  MOD_RES (358)..(358): Selenocysteine
  MOD_RES (365)..(365): Selenocysteine
  MOD_RES (367)..(367): Selenocysteine
  MOD_RES (379)..(379): Selenocysteine
  MOD_RES (387)..(387): Selenocysteine
  MOD_RES (424)..(424): Selenocysteine
  MOD_RES (449)..(449): Selenocysteine
MGPLKAFLFSPFLLRSQSRGVRLVFLLLXLHLGNCVDKADDEDDEDLXVNKXWVLAPKIHEGDIXQILNSLLQGYDNKLRPDIGVRPXVIEXDVYVNSIGPVDPINMEYXIDIIFAQXWFDSRLKFNSXMKVLMLNSNMVGKIWIPDXFFRNSRKSDAHWIXXPNRLLRIWNDGRVLYXLRLXINAECYLQLHNFPMDEHSCPLEFSSYGYPKNEIEYKWKKPSVEVADPKYWRLYQFAFVGLRNSXEIXHXISGDYVIMXIFFDLSRRMGYFXIQXYIPCILXVVLSWVSFWINKDAVPARXSLGIXXVLXMXXLSXIARKSLPKVSYVXAMDLFVSVCFIFVFAALMEYGXLHYFXSNQKGKXAXKDRKLKNKASMXPGLHPGSXLIPMNNISVPQEDDYGYQCLEGKDCASFFCCFEDCRXGSWREGRIHIRIAKIDSYSRIFFPXAFALFNLVYWVGYLYL

SEQ ID NO: 10589 - protein, 515 aa, Homo sapiens
  MOD_RES (9)..(9): Selenocysteine
  MOD_RES (16)..(16): Selenocysteine
  MOD_RES (24)..(24): Selenocysteine
  MOD_RES (38)..(38): Selenocysteine
  MOD_RES (54)..(54): Selenocysteine
  MOD_RES (58)..(58): Selenocysteine
  MOD_RES (67)..(67): Selenocysteine
  MOD_RES (90)..(90): Selenocysteine
  MOD_RES (94)..(94): Selenocysteine
  MOD_RES (112)..(112): Selenocysteine
  MOD_RES (120)..(120): Selenocysteine
  MOD_RES (131)..(131): Selenocysteine
  MOD_RES (150)..(150): Selenocysteine
  MOD_RES (164)..(165): Selenocysteine
  MOD_RES (181)..(181): Selenocysteine
  MOD_RES (185)..(185): Selenocysteine
  MOD_RES (237)..(237): Selenocysteine
  MOD_RES (241)..(241): Selenocysteine
  MOD_RES (272)..(272): Selenocysteine
  MOD_RES (288)..(289): Selenocysteine
  MOD_RES (294)..(295): Selenocysteine
  MOD_RES (316)..(316): Selenocysteine
  MOD_RES (319)..(319): Selenocysteine
  MOD_RES (324)..(324): Selenocysteine
  MOD_RES (345)..(345): Selenocysteine
  MOD_RES (350)..(351): Selenocysteine
  MOD_RES (354)..(354): Selenocysteine
  MOD_RES (356)..(357): Selenocysteine
  MOD_RES (360)..(360): Selenocysteine
  MOD_RES (373)..(373): Selenocysteine
  MOD_RES (395)..(395): Selenocysteine
  MOD_RES (427)..(427): Selenocysteine
  MOD_RES (436)..(436): Selenocysteine
  MOD_RES (443)..(443): Selenocysteine
  MOD_RES (474)..(474): Selenocysteine
  MOD_RES (499)..(499): Selenocysteine
MSSPNIWSXGSSVYSXPVFSQKMXVWILLLLSLYPGFXSQKSDDDYEDYASNKXWVLXPKVPEGDVXVILNNLLEGYDNKLRPDIGVKPXLIHXDMYVNSIGPVNAINMEYXIDIFFAQXWYDRRLKFNSXIKVLRLNSNMVGKIWIPDXFFRNSKKADAHWIXXPNRMLRIWNDGRVLYXLRLXIDAECQLQLHNFPMDEHSCPLEFSSWSRSIAQAGMCSGVISAHYSLRFWGSXDPPXLASRVAGISDGYPREEIVYQWKRSSVEVGDXRSWRLYQFSFVGLRNXXEVVKXXSGDYVVMSVYFDLSRRMGYFXIQXYIPCXLIVVLSWVSFWINKDAVPARXSLGIXXVLXMXXLSXIARKSLPKVSYVXAMDLFVSVCFIFVFSALVEYGXLHYFVSNRKPSKDKDKKKKNPLLRMFSFKAPXIDIRPRSAXIQMNNAXHLQERDEEYGYECLDGKDCASFFCCFEDCRXGAWRHGRIHIRIAKMDSYARIFFPXAFCLFNLVYWVSYLYL

SEQ ID NO: 10590 - protein, 467 aa, Homo sapiens
  MOD_RES (9)..(9): Selenocysteine
  MOD_RES (16)..(16): Selenocysteine
  MOD_RES (24)..(24): Selenocysteine
  MOD_RES (38)..(38): Selenocysteine
  MOD_RES (54)..(54): Selenocysteine
  MOD_RES (58)..(58): Selenocysteine
  MOD_RES (67)..(67): Selenocysteine
  MOD_RES (90)..(90): Selenocysteine
  MOD_RES (94)..(94): Selenocysteine
  MOD_RES (112)..(112): Selenocysteine
  MOD_RES (120)..(120): Selenocysteine
  MOD_RES (131)..(131): Selenocysteine
  MOD_RES (150)..(150): Selenocysteine
  MOD_RES (164)..(165): Selenocysteine
  MOD_RES (181)..(181): Selenocysteine
  MOD_RES (185)..(185): Selenocysteine
  MOD_RES (232)..(232): Selenocysteine
  MOD_RES (248)..(249): Selenocysteine
  MOD_RES (254)..(255): Selenocysteine
  MOD_RES (276)..(276): Selenocysteine
  MOD_RES (279)..(279): Selenocysteine
  MOD_RES (284)..(284): Selenocysteine
  MOD_RES (305)..(305): Selenocysteine
  MOD_RES (310)..(311): Selenocysteine
  MOD_RES (314)..(314): Selenocysteine
  MOD_RES (316)..(317): Selenocysteine
  MOD_RES (320)..(320): Selenocysteine
  MOD_RES (333)..(333): Selenocysteine
  MOD_RES (355)..(355): Selenocysteine
  MOD_RES (379)..(379): Selenocysteine
  MOD_RES (388)..(388): Selenocysteine
  MOD_RES (395)..(395): Selenocysteine
  MOD_RES (426)..(426): Selenocysteine
  MOD_RES (451)..(451): Selenocysteine
MSSPNIWSXGSSVYSXPVFSQKMXVWILLLLSLYPGFXSQKSDDDYEDYASNKXWVLXPKVPEGDVXVILNNLLEGYDNKLRPDIGVKPXLIHXDMYVNSIGPVNAINMEYXIDIFFAQXWYDRRLKFNSXIKVLRLNSNMVGKIWIPDXFFRNSKKADAHWIXXPNRMLRIWNDGRVLYXLRLXIDAECQLQLHNFPMDEHSCPLEFSSYGYPREEIVYQWKRSSVEVGDXRSWRLYQFSFVGLRNXXEVVKXXSGDYVVMSVYFDLSRRMGYFXIQXYIPCXLIVVLSWVSFWINKDAVPARXSLGIXXVLXMXXLSXIARKSLPKVSYVXAMDLFVSVCFIFVFSALVEYGXLHYFVSNRKPSKDKDKKKKNPAPXIDIRPRSAXIQMNNAXHLQERDEEYGYECLDGKDCASFFCCFEDCRXGAWRHGRIHIRIAKMDSYARIFFPXAFCLFNLVYWVSYLYL

SEQ ID NO: 10591 - protein, 475 aa, Homo sapiens
  MOD_RES (9)..(9): Selenocysteine
  MOD_RES (16)..(16): Selenocysteine
  MOD_RES (24)..(24): Selenocysteine
  MOD_RES (38)..(38): Selenocysteine
  MOD_RES (54)..(54): Selenocysteine
  MOD_RES (58)..(58): Selenocysteine
  MOD_RES (67)..(67): Selenocysteine
  MOD_RES (90)..(90): Selenocysteine
  MOD_RES (94)..(94): Selenocysteine
  MOD_RES (112)..(112): Selenocysteine
  MOD_RES (120)..(120): Selenocysteine
  MOD_RES (131)..(131): Selenocysteine
  MOD_RES (150)..(150): Selenocysteine
  MOD_RES (164)..(165): Selenocysteine
  MOD_RES (181)..(181): Selenocysteine
  MOD_RES (185)..(185): Selenocysteine
  MOD_RES (232)..(232): Selenocysteine
  MOD_RES (248)..(249): Selenocysteine
  MOD_RES (254)..(255): Selenocysteine
  MOD_RES (276)..(276): Selenocysteine
  MOD_RES (279)..(279): Selenocysteine
  MOD_RES (284)..(284): Selenocysteine
  MOD_RES (305)..(305): Selenocysteine
  MOD_RES (310)..(311): Selenocysteine
  MOD_RES (314)..(314): Selenocysteine
  MOD_RES (316)..(317): Selenocysteine
  MOD_RES (320)..(320): Selenocysteine
  MOD_RES (333)..(333): Selenocysteine
  MOD_RES (355)..(355): Selenocysteine
  MOD_RES (387)..(387): Selenocysteine
  MOD_RES (396)..(396): Selenocysteine
  MOD_RES (403)..(403): Selenocysteine
  MOD_RES (434)..(434): Selenocysteine
  MOD_RES (459)..(459): Selenocysteine
MSSPNIWSXGSSVYSXPVFSQKMXVWILLLLSLYPGFXSQKSDDDYEDYASNKXWVLXPKVPEGDVXVILNNLLEGYDNKLRPDIGVKPXLIHXDMYVNSIGPVNAINMEYXIDIFFAQXWYDRRLKFNSXIKVLRLNSNMVGKIWIPDXFFRNSKKADAHWIXXPNRMLRIWNDGRVLYXLRLXIDAECQLQLHNFPMDEHSCPLEFSSYGYPREEIVYQWKRSSVEVGDXRSWRLYQFSFVGLRNXXEVVKXXSGDYVVMSVYFDLSRRMGYFXIQXYIPCXLIVVLSWVSFWINKDAVPARXSLGIXXVLXMXXLSXIARKSLPKVSYVXAMDLFVSVCFIFVFSALVEYGXLHYFVSNRKPSKDKDKKKKNPLLRMFSFKAPXIDIRPRSAXIQMNNAXHLQERDEEYGYECLDGKDCASFFCCFEDCRXGAWRHGRIHIRIAKMDSYARIFFPXAFCLFNLVYWVSYLYL

SEQ ID NO: 10592 - protein, 111 aa, Homo sapiens
  MOD_RES (9)..(9): Selenocysteine
  MOD_RES (16)..(16): Selenocysteine
  MOD_RES (24)..(24): Selenocysteine
  MOD_RES (38)..(38): Selenocysteine
  MOD_RES (54)..(54): Selenocysteine
  MOD_RES (58)..(58): Selenocysteine
  MOD_RES (67)..(67): Selenocysteine
  MOD_RES (90)..(90): Selenocysteine
  MOD_RES (94)..(94): Selenocysteine
MSSPNIWSXGSSVYSXPVFSQKMXVWILLLLSLYPGFXSQKSDDDYEDYASNKXWVLXPKVPEGDVXVILNNLLEGYDNKLRPDIGVKPXLIHXDMYVNSIGPVNAINMHH

SEQ ID NO: 10593 - protein, 51 aa, Homo sapiens
  MOD_RES (9)..(9): Selenocysteine
  MOD_RES (16)..(16): Selenocysteine
  MOD_RES (24)..(24): Selenocysteine
MSSPNIWSXGSSVYSXPVFSQKMXVWILLLLSLYPGRKLSSYPHKLRFENE

SEQ ID NO: 10594 - protein, 222 aa, Homo sapiens
  MOD_RES (17)..(17): Selenocysteine
  MOD_RES (25)..(25): Selenocysteine
  MOD_RES (36)..(36): Selenocysteine
  MOD_RES (55)..(55): Selenocysteine
  MOD_RES (69)..(70): Selenocysteine
  MOD_RES (86)..(86): Selenocysteine
  MOD_RES (90)..(90): Selenocysteine
  MOD_RES (137)..(137): Selenocysteine
  MOD_RES (153)..(154): Selenocysteine
  MOD_RES (159)..(160): Selenocysteine
  MOD_RES (181)..(181): Selenocysteine
  MOD_RES (184)..(184): Selenocysteine
  MOD_RES (189)..(189): Selenocysteine
  MOD_RES (210)..(210): Selenocysteine
  MOD_RES (215)..(216): Selenocysteine
  MOD_RES (219)..(219): Selenocysteine
  MOD_RES (221)..(222): Selenocysteine
MYVNSIGPVNAINMEYXIDIFFAQXWYDRRLKFNSXIKVLRLNSNMVGKIWIPDXFFRNSKKADAHWIXXPNRMLRIWNDGRVLYXLRLXIDAECQLQLHNFPMDEHSCPLEFSSYGYPREEIVYQWKRSSVEVGDXRSWRLYQFSFVGLRNXXEVVKXXSGDYVVMSVYFDLSRRMGYFXIQXYIPCXLIVVLSWVSFWINKDAVPARXSLGIXXVLXMXX

SEQ ID NO: 10595 - protein, 258 aa, Homo sapiens
  MOD_RES (7)..(7): Selenocysteine
  MOD_RES (25)..(25): Selenocysteine
  MOD_RES (43)..(43): Selenocysteine
  MOD_RES (45)..(45): Selenocysteine
  MOD_RES (54)..(54): Selenocysteine
  MOD_RES (59)..(59): Selenocysteine
  MOD_RES (73)..(73): Selenocysteine
  MOD_RES (80)..(80): Selenocysteine
  MOD_RES (87)..(88): Selenocysteine
  MOD_RES (104)..(104): Selenocysteine
  MOD_RES (108)..(108): Selenocysteine
  MOD_RES (171)..(172): Selenocysteine
  MOD_RES (176)..(177): Selenocysteine
  MOD_RES (186)..(186): Selenocysteine
  MOD_RES (199)..(199): Selenocysteine
  MOD_RES (202)..(202): Selenocysteine
  MOD_RES (209)..(209): Selenocysteine
  MOD_RES (224)..(224): Selenocysteine
  MOD_RES (228)..(228): Selenocysteine
  MOD_RES (233)..(234): Selenocysteine
  MOD_RES (237)..(237): Selenocysteine
  MOD_RES (239)..(240): Selenocysteine
  MOD_RES (243)..(243): Selenocysteine
  MOD_RES (256)..(256): Selenocysteine
EAGVRGXEEDGCWVCNLESVSQSQXWQENKLSEYQIDIFFAQXWXDSRLRFNSXMKILXLNSNMVGLIWIPDXIFRNSKXAEAHWIXXPNQLLRIWNDGKILYXLRLXINAECQLQLHNFPMDEHSCPLIFSSYGYPKEEMIYRWRKNSVEAADQKSWRLYQFDFMGLRNXXEIVXXSAGDYVVMXIYFELSRRMGYFXIQXYIPCILXVVLSWVSFWIKKDAXPARXALGIXXVLXMXXLSXIARKSLPRVSYVXAM

SEQ ID NO: 10596 - protein, 467 aa, Homo sapiens
  MOD_RES (45)..(45): Selenocysteine
  MOD_RES (48)..(48): Selenocysteine
  MOD_RES (71)..(71): Selenocysteine
  MOD_RES (101)..(101): Selenocysteine
  MOD_RES (103)..(103): Selenocysteine
  MOD_RES (112)..(112): Selenocysteine
  MOD_RES (117)..(117): Selenocysteine
  MOD_RES (131)..(131): Selenocysteine
  MOD_RES (138)..(138): Selenocysteine
  MOD_RES (145)..(146): Selenocysteine
  MOD_RES (162)..(162): Selenocysteine
  MOD_RES (166)..(166): Selenocysteine
  MOD_RES (229)..(230): Selenocysteine
  MOD_RES (234)..(235): Selenocysteine
  MOD_RES (244)..(244): Selenocysteine
  MOD_RES (257)..(257): Selenocysteine
  MOD_RES (260)..(260): Selenocysteine
  MOD_RES (267)..(267): Selenocysteine
  MOD_RES (282)..(282): Selenocysteine
  MOD_RES (286)..(286): Selenocysteine
  MOD_RES (291)..(292): Selenocysteine
  MOD_RES (295)..(295): Selenocysteine
  MOD_RES (297)..(298): Selenocysteine
  MOD_RES (301)..(301): Selenocysteine
  MOD_RES (314)..(314): Selenocysteine
  MOD_RES (321)..(321): Selenocysteine
  MOD_RES (336)..(336): Selenocysteine
  MOD_RES (347)..(349): Selenocysteine
  MOD_RES (352)..(353): Selenocysteine
  MOD_RES (386)..(386): Selenocysteine
  MOD_RES (390)..(390): Selenocysteine
  MOD_RES (403)..(403): Selenocysteine
  MOD_RES (451)..(451): Selenocysteine
MAPKLLLLLCLFSGLHARSRKVEEDEYEDSSSNQKWVLAPKSQDXDVXLILNKLLREYDKKLRPDIGIKPXVIDVDIYVNSIGPVSSINMEYQIDIFFAQXWXDSRLRFNSXMKILXLNSNMVGLIWIPDXIFRNSKXAEAHWIXXPNQLLRIWNDGKILYXLRLXINAECQLQLHNFPMDEHSCPLIFSSYGYPKEEMIYRWRKNSVEAADQKSWRLYQFDFMGLRNXXEIVXXSAGDYVVMXIYFELSRRMGYFXIQXYIPCILXVVLSWVSFWIKKDAXPARXALGIXXVLXMXXLSXIARKSLPRVSYVXAMDLFVXVCFLFVFAALMEYAXLNYYSSCRKPXXXKKXXSLLHPDSSRWIPERISLQAPSNYSLLDMRPPPXAMIXLNNSVYWQEFEDXCVYECLDGKDCQSFFCCYEECKSGSWRKGRIHIDILELDSYSRVFFPXSFLLFNLVYWVGYLYL

SEQ ID NO: 10597 - protein, 253 aa, Homo sapiens
  MOD_RES (45)..(45): Selenocysteine
  MOD_RES (48)..(48): Selenocysteine
  MOD_RES (71)..(71): Selenocysteine
  MOD_RES (101)..(101): Selenocysteine
  MOD_RES (103)..(103): Selenocysteine
  MOD_RES (112)..(112): Selenocysteine
  MOD_RES (117)..(117): Selenocysteine
  MOD_RES (131)..(131): Selenocysteine
  MOD_RES (138)..(138): Selenocysteine
  MOD_RES (145)..(146): Selenocysteine
  MOD_RES (162)..(162): Selenocysteine
  MOD_RES (166)..(166): Selenocysteine
  MOD_RES (229)..(230): Selenocysteine
  MOD_RES (234)..(235): Selenocysteine
MAPKLLLLLCLFSGLHARSRKVEEDEYEDSSSNQKWVLAPKSQDXDVXLILNKLLREYDKKLRPDIGIKPXVIDVDIYVNSIGPVSSINMEYQIDIFFAQXWXDSRLRFNSXMKILXLNSNMVGLIWIPDXIFRNSKXAEAHWIXXPNQLLRIWNDGKILYXLRLXINAECQLQLHNFPMDEHSCPLIFSSYGYPKEEMIYRWRKNSVEAADQKSWRLYQFDFMGLRNXXEIVXXSAGRNLLKEAQLSKAREA

SEQ ID NO: 10598 - protein, 288 aa, Homo sapiens
  MOD_RES (50)..(51): Selenocysteine
  MOD_RES (55)..(56): Selenocysteine
  MOD_RES (65)..(65): Selenocysteine
  MOD_RES (78)..(78): Selenocysteine
  MOD_RES (81)..(81): Selenocysteine
  MOD_RES (88)..(88): Selenocysteine
  MOD_RES (103)..(103): Selenocysteine
  MOD_RES (107)..(107): Selenocysteine
  MOD_RES (112)..(113): Selenocysteine
  MOD_RES (116)..(116): Selenocysteine
  MOD_RES (118)..(119): Selenocysteine
  MOD_RES (122)..(122): Selenocysteine
  MOD_RES (135)..(135): Selenocysteine
  MOD_RES (142)..(142): Selenocysteine
  MOD_RES (157)..(157): Selenocysteine
  MOD_RES (168)..(170): Selenocysteine
  MOD_RES (173)..(174): Selenocysteine
  MOD_RES (207)..(207): Selenocysteine
  MOD_RES (211)..(211): Selenocysteine
  MOD_RES (224)..(224): Selenocysteine
  MOD_RES (272)..(272): Selenocysteine
MDEHSCPLIFSSYGYPKEEMIYRWRKNSVEAADQKSWRLYQFDFMGLRNXXEIVXXSAGDYVVMXIYFELSRRMGYFXIQXYIPCILXVVLSWVSFWIKKDAXPARXALGIXXVLXMXXLSXIARKSLPRVSYVXAMDLFVXVCFLFVFAALMEYAXLNYYSSCRKPXXXKKXXSLLHPDSSRWIPERISLQAPSNYSLLDMRPPPXAMIXLNNSVYWQEFEDXCVYECLDGKDCQSFFCCYEECKSGSWRKGRIHIDILELDSYSRVFFPXSFLLFNLVYWVGYLYL

SEQ ID NO: 10599 - protein, 38 aa, Homo sapiens
  MOD_RES (1)..(1): Any amino acid
  MOD_RES (26)..(26): Selenocysteine
XAECQLQLHNFPMDEHSCPLIFSSSXILAFRLSLHAYR

SEQ ID NO: 10600 - protein, 169 aa, Homo sapiens
  MOD_RES (1)..(1): Any amino acid
  MOD_RES (7)..(7): Selenocysteine
  MOD_RES (20)..(20): Selenocysteine
  MOD_RES (23)..(23): Selenocysteine
  MOD_RES (30)..(30): Selenocysteine
  MOD_RES (45)..(45): Selenocysteine
  MOD_RES (49)..(49): Selenocysteine
  MOD_RES (54)..(55): Selenocysteine
  MOD_RES (58)..(58): Selenocysteine
  MOD_RES (60)..(61): Selenocysteine
  MOD_RES (64)..(64): Selenocysteine
  MOD_RES (77)..(77): Selenocysteine
  MOD_RES (84)..(84): Selenocysteine
  MOD_RES (99)..(99): Selenocysteine
  MOD_RES (110)..(112): Selenocysteine
  MOD_RES (115)..(116): Selenocysteine
XDYVVMXIYFELSRRMGYFXIQXYIPCILXVVLSWVSFWIKKDAXPARXALGIXXVLXMXXLSXIARKSLPRVSYVXAMDLFVXVCFLFVFAALMEYAXLNYYSSCRKPXXXKKXXSLLHPDSSRWIPERISLQAPSKPSCCPACGLQGLPFRSLVSHPRISRAFCLPV

SEQ ID NO: 10601 - protein, 52 aa, Homo sapiens
  MOD_RES (16)..(16): Selenocysteine
  MOD_RES (45)..(45): Selenocysteine
MNYSLHLAFVCLSLFXERMCIQGSQFNVEVGRSDKLSLPGFENLXAGYNKFL

SEQ ID NO: 10602 - protein, 59 aa, Homo sapiens
  MOD_RES (16)..(16): Selenocysteine
  MOD_RES (45)..(45): Selenocysteine
MNYSLHLAFVCLSLFXERMCIQGSQFNVEVGRSDKLSLPGFENLXAGYNKFLRPNFGGE

SEQ ID NO: 10603 - protein, 92 aa, Homo sapiens
  MOD_RES (16)..(16): Selenocysteine
  MOD_RES (45)..(45): Selenocysteine
  MOD_RES (66)..(66): Selenocysteine
  MOD_RES (83)..(83): Selenocysteine
  MOD_RES (85)..(85): Selenocysteine
MNYSLHLAFVCLSLFXERMCIQGSQFNVEVGRSDKLSLPGFENLXAGYNKFLRPNFGGEPVQIALXLDIASISSISESNMDYXAXIYLRQRW

SEQ ID NO: 10604 - protein, 171 aa, Homo sapiens
  MOD_RES (16)..(16): Selenocysteine
  MOD_RES (45)..(45): Selenocysteine
  MOD_RES (66)..(66): Selenocysteine
  MOD_RES (83)..(83): Selenocysteine
  MOD_RES (85)..(85): Selenocysteine
  MOD_RES (106)..(106): Selenocysteine
  MOD_RES (120)..(120): Selenocysteine
  MOD_RES (134)..(134): Selenocysteine
  MOD_RES (147)..(147): Selenocysteine
  MOD_RES (155)..(157): Selenocysteine
  MOD_RES (171)..(171): Selenocysteine
MNYSLHLAFVCLSLFXERMCIQGSQFNVEVGRSDKLSLPGFENLXAGYNKFLRPNFGGEPVQIALXLDIASISSISESNMDYXAXIYLRQRWMDQRLVFEGNKSFXLDARLVEFLWVPDXYIVESKKSFLHEVXVGNRLIRLFSNGXVLYALRIXXXVACNMDLSKYPMDX

SEQ ID NO: 10605 - protein, 189 aa, Homo sapiens
  MOD_RES (16)..(16): Selenocysteine
  MOD_RES (45)..(45): Selenocysteine
  MOD_RES (66)..(66): Selenocysteine
  MOD_RES (83)..(83): Selenocysteine
  MOD_RES (85)..(85): Selenocysteine
  MOD_RES (106)..(106): Selenocysteine
  MOD_RES (120)..(120): Selenocysteine
  MOD_RES (134)..(134): Selenocysteine
  MOD_RES (147)..(147): Selenocysteine
  MOD_RES (155)..(157): Selenocysteine
  MOD_RES (171)..(171): Selenocysteine
  MOD_RES (173)..(173): Selenocysteine
MNYSLHLAFVCLSLFXERMCIQGSQFNVEVGRSDKLSLPGFENLXAGYNKFLRPNFGGEPVQIALXLDIASISSISESNMDYXAXIYLRQRWMDQRLVFEGNKSFXLDARLVEFLWVPDXYIVESKKSFLHEVXVGNRLIRLFSNGXVLYALRIXXXVACNMDLSKYPMDXQXCKLQLESWGYDGNDVE

SEQ ID NO: 10606 - protein, 289 aa, Homo sapiens
  MOD_RES (16)..(16): Selenocysteine
  MOD_RES (45)..(45): Selenocysteine
  MOD_RES (66)..(66): Selenocysteine
  MOD_RES (83)..(83): Selenocysteine
  MOD_RES (85)..(85): Selenocysteine
  MOD_RES (106)..(106): Selenocysteine
  MOD_RES (120)..(120): Selenocysteine
  MOD_RES (134)..(134): Selenocysteine
  MOD_RES (147)..(147): Selenocysteine
  MOD_RES (155)..(157): Selenocysteine
  MOD_RES (171)..(171): Selenocysteine
  MOD_RES (173)..(173): Selenocysteine
  MOD_RES (191)..(191): Selenocysteine
  MOD_RES (211)..(211): Selenocysteine
  MOD_RES (217)..(217): Selenocysteine
  MOD_RES (220)..(220): Selenocysteine
  MOD_RES (226)..(226): Selenocysteine
  MOD_RES (230)..(230): Selenocysteine
  MOD_RES (249)..(249): Selenocysteine
  MOD_RES (254)..(254): Selenocysteine
  MOD_RES (275)..(275): Selenocysteine
MNYSLHLAFVCLSLFXERMCIQGSQFNVEVGRSDKLSLPGFENLXAGYNKFLRPNFGGEPVQIALXLDIASISSISESNMDYXAXIYLRQRWMDQRLVFEGNKSFXLDARLVEFLWVPDXYIVESKKSFLHEVXVGNRLIRLFSNGXVLYALRIXXXVACNMDLSKYPMDXQXCKLQLESWGYDGNDVEFXWLRGNDSVRGLEHLRLAQYXIERYFXLVXRSQQEXGNYXRLVLQFELRRNVLYFILEXYVPSXFLVVLSWVSFWISLDSVPARXCIGDNKGSRRSQYY

SEQ ID NO: 10607 - protein, 349 aa, Homo sapiens
  MOD_RES (16)..(16): Selenocysteine
  MOD_RES (45)..(45): Selenocysteine
  MOD_RES (66)..(66): Selenocysteine
  MOD_RES (83)..(83): Selenocysteine
  MOD_RES (85)..(85): Selenocysteine
  MOD_RES (106)..(106): Selenocysteine
  MOD_RES (120)..(120): Selenocysteine
  MOD_RES (134)..(134): Selenocysteine
  MOD_RES (147)..(147): Selenocysteine
  MOD_RES (155)..(157): Selenocysteine
  MOD_RES (171)..(171): Selenocysteine
  MOD_RES (173)..(173): Selenocysteine
  MOD_RES (191)..(191): Selenocysteine
  MOD_RES (211)..(211): Selenocysteine
  MOD_RES (217)..(217): Selenocysteine
  MOD_RES (220)..(220): Selenocysteine
  MOD_RES (226)..(226): Selenocysteine
  MOD_RES (230)..(230): Selenocysteine
  MOD_RES (249)..(249): Selenocysteine
  MOD_RES (254)..(254): Selenocysteine
  MOD_RES (275)..(275): Selenocysteine
  MOD_RES (280)..(281): Selenocysteine
  MOD_RES (286)..(287): Selenocysteine
  MOD_RES (294)..(294): Selenocysteine
  MOD_RES (299)..(299): Selenocysteine
MNYSLHLAFVCLSLFXERMCIQGSQFNVEVGRSDKLSLPGFENLXAGYNKFLRPNFGGEPVQIALXLDIASISSISESNMDYXAXIYLRQRWMDQRLVFEGNKSFXLDARLVEFLWVPDXYIVESKKSFLHEVXVGNRLIRLFSNGXVLYALRIXXXVACNMDLSKYPMDXQXCKLQLESWGYDGNDVEFXWLRGNDSVRGLEHLRLAQYXIERYFXLVXRSQQEXGNYXRLVLQFELRRNVLYFILEXYVPSXFLVVLSWVSFWISLDSVPARXCIGVXXVLSMXXLMIGSRXSLPNXNCFIKAIDVYLGICFSFVFGALLEYAVAHYSSLQQMAAKDRQKICYLYAA

SEQ ID NO: 10608 - protein, 440 aa, Homo sapiens
  MOD_RES (16)..(16): Selenocysteine
  MOD_RES (45)..(45): Selenocysteine
  MOD_RES (66)..(66): Selenocysteine
  MOD_RES (83)..(83): Selenocysteine
  MOD_RES (85)..(85): Selenocysteine
  MOD_RES (106)..(106): Selenocysteine
  MOD_RES (120)..(120): Selenocysteine
  MOD_RES (134)..(134): Selenocysteine
  MOD_RES (147)..(147): Selenocysteine
  MOD_RES (155)..(157): Selenocysteine
  MOD_RES (171)..(171): Selenocysteine
  MOD_RES (173)..(173): Selenocysteine
  MOD_RES (191)..(191): Selenocysteine
  MOD_RES (211)..(211): Selenocysteine
  MOD_RES (217)..(217): Selenocysteine
  MOD_RES (220)..(220): Selenocysteine
  MOD_RES (226)..(226): Selenocysteine
  MOD_RES (230)..(230): Selenocysteine
  MOD_RES (249)..(249): Selenocysteine
  MOD_RES (254)..(254): Selenocysteine
  MOD_RES (275)..(275): Selenocysteine
  MOD_RES (280)..(281): Selenocysteine
  MOD_RES (286)..(287): Selenocysteine
  MOD_RES (294)..(294): Selenocysteine
  MOD_RES (299)..(299): Selenocysteine
  MOD_RES (342)..(343): Selenocysteine
  MOD_RES (352)..(352): Selenocysteine
  MOD_RES (384)..(384): Selenocysteine
  MOD_RES (387)..(387): Selenocysteine
  MOD_RES (407)..(407): Selenocysteine
MNYSLHLAFVCLSLFXERMCIQGSQFNVEVGRSDKLSLPGFENLXAGYNKFLRPNFGGEPVQIALXLDIASISSISESNMDYXAXIYLRQRWMDQRLVFEGNKSFXLDARLVEFLWVPDXYIVESKKSFLHEVXVGNRLIRLFSNGXVLYALRIXXXVACNMDLSKYPMDXQXCKLQLESWGYDGNDVEFXWLRGNDSVRGLEHLRLAQYXIERYFXLVXRSQQEXGNYXRLVLQFELRRNVLYFILEXYVPSXFLVVLSWVSFWISLDSVPARXCIGVXXVLSMXXLMIGSRXSLPNXNCFIKAIDVYLGICFSFVFGALLEYAVAHYSSLQQMAAKDRGXXKEVEEVSIXNIINSSISSFKRKISFASIEISSDNVDYSDLXMKXSDKFKFVFREKMGRIVDYFXIQNPSNVDHYSKLLFPLIFMLANVFYWAYYMYF

SEQ ID NO: 10609 - protein, 632 aa, Homo sapiens
  MOD_RES (18)..(18): Selenocysteine
  MOD_RES (92)..(92): Selenocysteine
  MOD_RES (105)..(105): Selenocysteine
  MOD_RES (107)..(107): Selenocysteine
  MOD_RES (113)..(113): Selenocysteine
  MOD_RES (124)..(125): Selenocysteine
  MOD_RES (129)..(129): Selenocysteine
  MOD_RES (157)..(157): Selenocysteine
  MOD_RES (170)..(170): Selenocysteine
  MOD_RES (178)..(180): Selenocysteine
  MOD_RES (207)..(207): Selenocysteine
  MOD_RES (225)..(225): Selenocysteine
  MOD_RES (234)..(234): Selenocysteine
  MOD_RES (239)..(239): Selenocysteine
  MOD_RES (241)..(241): Selenocysteine
  MOD_RES (249)..(249): Selenocysteine
  MOD_RES (276)..(276): Selenocysteine
  MOD_RES (279)..(280): Selenocysteine
  MOD_RES (282)..(282): Selenocysteine
  MOD_RES (299)..(299): Selenocysteine
  MOD_RES (303)..(303): Selenocysteine
  MOD_RES (309)..(310): Selenocysteine
  MOD_RES (402)..(402): Selenocysteine
  MOD_RES (418)..(418): Selenocysteine
  MOD_RES (420)..(420): Selenocysteine
  MOD_RES (428)..(428): Selenocysteine
  MOD_RES (436)..(436): Selenocysteine
  MOD_RES (446)..(446): Selenocysteine
  MOD_RES (456)..(456): Selenocysteine
  MOD_RES (480)..(480): Selenocysteine
  MOD_RES (494)..(494): Selenocysteine
  MOD_RES (554)..(554): Selenocysteine
  MOD_RES (557)..(557): Selenocysteine
  MOD_RES (591)..(591): Selenocysteine
MGIRGMLRAAVILLLIRXWLAEGNYPSPIPKFHFEFSSAVPEVVLNLFNCKNCANEAVVQKILDRVLSRYDVRLRPNFGGAPVPVRISIYVXSIEQISEMNMDYXIXMFFHQXWKDSRLAYYEXXLNLXLDYRMHEKLWVPDCYFLNSKDAFVHDVXVENRVFQLHPDGXVRYGIRLXXXAACSLDLHKFPMDKQACNLVVESYGYXVEDIILFWDDNGNAIHMXEELHIPQFXFLGRXIXSKEVYFYXGSYIRLILKFQVQREVNSYLVQVYWPXVLXXIXSWISFWMNYDSSAARVXIGLXSMLILXXIDSHLRDKLPNISCIKAIDIYILVCLFFVFLSLLEYVYINYLFYSRGPRRQPRRHRRPRRVIARYRYQQVVVGNVQDGLINVEDGVSSLPIXPAQAPLASPESLGSLXSXSEQAQLAXSESLSPLXSLSGQAPLAXGESLSDLPSXSEQARHSYGVRFNGFQADDSIIPXEIRNRVEAHGHGVXHDHEDSNESLSSDERHGHGPSGKPMLHHGEKGVQEAGWDLDDNNDKSDCLAIKEQFKCDXNSXWGLNDDELMAHGQEKDSSSESEDSCPPSPGCSFXEGFSFDLFNPDYVPKVDKWSRFLFPLAFGLFNIVYWVYHMY

SEQ ID NO: 10610 - protein, 45 aa, Homo sapiens
  MOD_RES (22)..(22): Selenocysteine
MLAVPNMRFGIFLLWWGWVLAXESRMHWPGREVHEMSKKGRIEAS

SEQ ID NO: 10611 - protein, 479 aa, Homo sapiens
  MOD_RES (22)..(22): Selenocysteine
  MOD_RES (68)..(68): Selenocysteine
  MOD_RES (73)..(73): Selenocysteine
  MOD_RES (119)..(119): Selenocysteine
  MOD_RES (121)..(121): Selenocysteine
  MOD_RES (138)..(138): Selenocysteine
  MOD_RES (144)..(144): Selenocysteine
  MOD_RES (171)..(173): Selenocysteine
  MOD_RES (193)..(193): Selenocysteine
  MOD_RES (195)..(195): Selenocysteine
  MOD_RES (209)..(209): Selenocysteine
  MOD_RES (211)..(211): Selenocysteine
  MOD_RES (222)..(222): Selenocysteine
  MOD_RES (239)..(239): Selenocysteine
  MOD_RES (255)..(257): Selenocysteine
  MOD_RES (265)..(265): Selenocysteine
  MOD_RES (276)..(276): Selenocysteine
  MOD_RES (288)..(288): Selenocysteine
  MOD_RES (293)..(293): Selenocysteine
  MOD_RES (319)..(320): Selenocysteine
  MOD_RES (323)..(323): Selenocysteine
  MOD_RES (326)..(326): Selenocysteine
  MOD_RES (329)..(329): Selenocysteine
  MOD_RES (369)..(370): Selenocysteine
  MOD_RES (386)..(386): Selenocysteine
  MOD_RES (394)..(394): Selenocysteine
  MOD_RES (428)..(428): Selenocysteine
  MOD_RES (452)..(452): Selenocysteine
MLAVPNMRFGIFLLWWGWVLAXESRMHWPGREVHEMSKKGRPQRQRREVHEDAHKQVSPILRRSPDIXKSPLXKSEQLLRIDDHDFSMRPGFGGPAIPVGVDVQVESLDSISEVDMDFXMXLYLRHYWKDERLSFPSXNNLSMXFDGRLVKKIWVPDMFFVHSKRSFIHDXXXDNVMLRVQPDGKVLYSLRVXVXAMCNMDFSRFPLDXQXCSLEIESYAYXEDDLMLYWKKGNDSLKXDERISLSQFLIQEFHXXXKLAFYSSXGWYNRLYINFXLRRHIFFFLLQXYFPAXLMVMLSWVSFWIDRRAVPARVPLGIXXVLXMSXIIXGVNASMPRVSYIKAVDIYLWVSFVFVFLSVLEYAAVNYLXXVQERKEQKLREKLPCXSGLPPPRXAMLDGNYSDGEVNDLDNYMPENGEKPDRMMVQLXLASERSSPQRKSQRSSYVSMRIDXHAIDKYSRIIFPAAYILFNLIYWSIFS

SEQ ID NO: 10612 - protein, 462 aa, Homo sapiens
  MOD_RES (22)..(22): Selenocysteine
  MOD_RES (51)..(51): Selenocysteine
  MOD_RES (56)..(56): Selenocysteine
  MOD_RES (102)..(102): Selenocysteine
  MOD_RES (104)..(104): Selenocysteine
  MOD_RES (121)..(121): Selenocysteine
  MOD_RES (127)..(127): Selenocysteine
  MOD_RES (154)..(156): Selenocysteine
  MOD_RES (176)..(176): Selenocysteine
  MOD_RES (178)..(178): Selenocysteine
  MOD_RES (192)..(192): Selenocysteine
  MOD_RES (194)..(194): Selenocysteine
  MOD_RES (205)..(205): Selenocysteine
  MOD_RES (222)..(222): Selenocysteine
  MOD_RES (238)..(240): Selenocysteine
  MOD_RES (248)..(248): Selenocysteine
  MOD_RES (259)..(259): Selenocysteine
  MOD_RES (271)..(271): Selenocysteine
  MOD_RES (276)..(276): Selenocysteine
  MOD_RES (302)..(303): Selenocysteine
  MOD_RES (306)..(306): Selenocysteine
  MOD_RES (309)..(309): Selenocysteine
  MOD_RES (312)..(312): Selenocysteine
  MOD_RES (352)..(353): Selenocysteine
  MOD_RES (369)..(369): Selenocysteine
  MOD_RES (377)..(377): Selenocysteine
  MOD_RES (411)..(411): Selenocysteine
  MOD_RES (435)..(435): Selenocysteine
MLAVPNMRFGIFLLWWGWVLAXESRMHWPGREVHEMSKKGSPILRRSPDIXKSPLXKSEQLLRIDDHDFSMRPGFGGPAIPVGVDVQVESLDSISEVDMDFXMXLYLRHYWKDERLSFPSXNNLSMXFDGRLVKKIWVPDMFFVHSKRSFIHDXXXDNVMLRVQPDGKVLYSLRVXVXAMCNMDFSRFPLDXQXCSLEIESYAYXEDDLMLYWKKGNDSLKXDERISLSQFLIQEFHXXXKLAFYSSXGWYNRLYINFXLRRHIFFFLLQXYFPAXLMVMLSWVSFWIDRRAVPARVPLGIXXVLXMSXIIXGVNASMPRVSYIKAVDIYLWVSFVFVFLSVLEYAAVNYLXXVQERKEQKLREKLPCXSGLPPPRXAMLDGNYSDGEVNDLDNYMPENGEKPDRMMVQLXLASERSSPQRKSQRSSYVSMRIDXHAIDKYSRIIFPAAYILFNLIYWSIFS

SEQ ID NO: 10613 - protein, 392 aa, Homo sapiens
  MOD_RES (32)..(32): Selenocysteine
  MOD_RES (34)..(34): Selenocysteine
  MOD_RES (51)..(51): Selenocysteine
  MOD_RES (57)..(57): Selenocysteine
  MOD_RES (84)..(86): Selenocysteine
  MOD_RES (106)..(106): Selenocysteine
  MOD_RES (108)..(108): Selenocysteine
  MOD_RES (122)..(122): Selenocysteine
  MOD_RES (124)..(124): Selenocysteine
  MOD_RES (135)..(135): Selenocysteine
  MOD_RES (152)..(152): Selenocysteine
  MOD_RES (168)..(170): Selenocysteine
  MOD_RES (178)..(178): Selenocysteine
  MOD_RES (189)..(189): Selenocysteine
  MOD_RES (201)..(201): Selenocysteine
  MOD_RES (206)..(206): Selenocysteine
  MOD_RES (232)..(233): Selenocysteine
  MOD_RES (236)..(236): Selenocysteine
  MOD_RES (239)..(239): Selenocysteine
  MOD_RES (242)..(242): Selenocysteine
  MOD_RES (282)..(283): Selenocysteine
  MOD_RES (299)..(299): Selenocysteine
  MOD_RES (307)..(307): Selenocysteine
  MOD_RES (341)..(341): Selenocysteine
  MOD_RES (365)..(365): Selenocysteine
MRPGFGGPAIPVGVDVQVESLDSISEVDMDFXMXLYLRHYWKDERLSFPSXNNLSMXFDGRLVKKIWVPDMFFVHSKRSFIHDXXXDNVMLRVQPDGKVLYSLRVXVXAMCNMDFSRFPLDXQXCSLEIESYAYXEDDLMLYWKKGNDSLKXDERISLSQFLIQEFHXXXKLAFYSSXGWYNRLYINFXLRRHIFFFLLQXYFPAXLMVMLSWVSFWIDRRAVPARVPLGIXXVLXMSXIIXGVNASMPRVSYIKAVDIYLWVSFVFVFLSVLEYAAVNYLXXVQERKEQKLREKLPCXSGLPPPRXAMLDGNYSDGEVNDLDNYMPENGEKPDRMMVQLXLASERSSPQRKSQRSSYVSMRIDXHAIDKYSRIIFPAAYILFNLIYWSIFS

SEQ ID NO: 10614 - protein, 465 aa, Homo sapiens
  MOD_RES (5)..(5): Selenocysteine
  MOD_RES (29)..(29): Selenocysteine
  MOD_RES (48)..(48): Selenocysteine
  MOD_RES (99)..(99): Selenocysteine
  MOD_RES (101)..(101): Selenocysteine
  MOD_RES (124)..(124): Selenocysteine
  MOD_RES (148)..(148): Selenocysteine
  MOD_RES (151)..(153): Selenocysteine
  MOD_RES (173)..(173): Selenocysteine
  MOD_RES (175)..(175): Selenocysteine
  MOD_RES (191)..(191): Selenocysteine
  MOD_RES (202)..(202): Selenocysteine
  MOD_RES (219)..(219): Selenocysteine
  MOD_RES (235)..(236): Selenocysteine
  MOD_RES (245)..(245): Selenocysteine
  MOD_RES (256)..(256): Selenocysteine
  MOD_RES (268)..(268): Selenocysteine
  MOD_RES (273)..(273): Selenocysteine
  MOD_RES (299)..(300): Selenocysteine
  MOD_RES (303)..(303): Selenocysteine
  MOD_RES (305)..(306): Selenocysteine
  MOD_RES (309)..(309): Selenocysteine
  MOD_RES (349)..(350): Selenocysteine
  MOD_RES (374)..(374): Selenocysteine
  MOD_RES (399)..(399): Selenocysteine
  MOD_RES (430)..(430): Selenocysteine
  MOD_RES (438)..(438): Selenocysteine
MPYFXRLILFLFCLMVLVESRKPKRKRWXGQVEMPKPSHLYKKNLDVXKIRKGKPQQLLRVDEHDFSMRPAFGGPAIPVGVDVQVESLDSISEVDMDFXMXLYLRHYWKDERLAFSSASNKSMXFDGRLVKKIWVPDVFFVHSKRSFXHDXXXDNIMLRVFPDGHVLYSMRIXVXAMCNMDFSHFPLDSQXCSLELESYAYXDEDLMLYWKNGDESLKXDEKISLSQFLIQKFHXXSRLAFYSSXGWYNRLYINFXLRRHIFFFLLQXYFPAXLMVMLSWVSFWIDRRAVPARVSLGIXXVLXMXXIIXGVNASMPRVSYVKAVDIYLWVSFVFVFLSVLEYAAVNYLXXVQERKERKLREKFPCMCGMLHSKXMMLDGSYSESEANSLAGYPRSHILXEEERQDKIVVHLGLSGEANAARKKGLLKGQXGFRIFQNXHAIDKYSRLIFPASYIFFNLIYWSVFS

SEQ ID NO: 10615 - protein, 467 aa, Homo sapiens
  MOD_RES (11)..(11): Selenocysteine
  MOD_RES (30)..(30): Selenocysteine
  MOD_RES (41)..(41): Selenocysteine
  MOD_RES (46)..(46): Selenocysteine
  MOD_RES (54)..(54): Selenocysteine
  MOD_RES (100)..(100): Selenocysteine
  MOD_RES (105)..(105): Selenocysteine
  MOD_RES (107)..(107): Selenocysteine
  MOD_RES (124)..(124): Selenocysteine
  MOD_RES (130)..(130): Selenocysteine
  MOD_RES (136)..(136): Selenocysteine
  MOD_RES (157)..(158): Selenocysteine
  MOD_RES (179)..(179): Selenocysteine
  MOD_RES (195)..(195): Selenocysteine
  MOD_RES (225)..(225): Selenocysteine
  MOD_RES (251)..(251): Selenocysteine
  MOD_RES (274)..(274): Selenocysteine
  MOD_RES (305)..(306): Selenocysteine
  MOD_RES (309)..(309): Selenocysteine
  MOD_RES (312)..(312): Selenocysteine
  MOD_RES (315)..(315): Selenocysteine
  MOD_RES (355)..(356): Selenocysteine
  MOD_RES (366)..(366): Selenocysteine
  MOD_RES (397)..(397): Selenocysteine
  MOD_RES (417)..(417): Selenocysteine
  MOD_RES (445)..(445): Selenocysteine
MVLAFQLVSFXYIWIILKPNVCAASNIKMXHQRCSSSMKQXCKQEXRMKKDDSXKARPQKYEQLLHIEDNDFAMRPGFGGSPVPVGIDVHVESIDSISEXNMDFXMXFYLRHYWKDERLSFPSXANKSMXFDHRLXRKIWVPDIFFVHSKRSFIHDXXMENIMLRVHPDGNVLLSLRIXVSAMCFMDFSRFPLDXQNCSLELESYAYNEDDLMLYWKHGNKSLNXEEHMSLSQFFIEDFSASSGLAFYSSXGWYNRLFINFVLRRHVFFFVLQXYFPAILMVMLSWVSFWIDRRAVPARVSLGIXXVLXMSXIIXAVSASMPQVSYLKAVDVYLWVSSLFVFLSVIEYAAVNYLXXVEERKQFKKXGKISRMYNIDAVQAMAFDGCYHDSEIDMDQXSLSLNSEDFMRRKSICSPSXDSSRIKRRKSLGGHVGRIILENNHVIDXYSRILFPIVYILFNLFYWGVYV

SEQ ID NO: 10616 - protein, 165 aa, Homo sapiens
  MOD_RES (2)..(2): Selenocysteine
  MOD_RES (13)..(13): Selenocysteine
  MOD_RES (35)..(35): Selenocysteine
  MOD_RES (37)..(37): Selenocysteine
  MOD_RES (76)..(76): Selenocysteine
  MOD_RES (106)..(106): Selenocysteine
  MOD_RES (128)..(128): Selenocysteine
MXLEEFSAGEQKXERMDKVGDALEEVLSKALSQRXIXVGVYEAAKLLNVDPDNVVLCLLAADEDDDRDVALQIHFXLIQAFCCENDINILRVSNPGRLAELLLLEXDAGPAASEGAEQPPDLHCVLVXNPHSSQWKDPALSQLICFCRESRYMDQWVPVINLPER

SEQ ID NO: 10617 - protein, 60 aa, Homo sapiens
  MOD_RES (2)..(2): Selenocysteine
  MOD_RES (13)..(13): Selenocysteine
  MOD_RES (35)..(35): Selenocysteine
  MOD_RES (37)..(37): Selenocysteine
MXLEEFSAGEQKXERMDKVGDALEEVLSKALSQRXIXVGVYEAAKLLNVIHIHLNGRILP

SEQ ID NO: 10618 - protein, 131 aa, Homo sapiens
  MOD_RES (2)..(2): Selenocysteine
  MOD_RES (13)..(13): Selenocysteine
  MOD_RES (42)..(42): Selenocysteine
  MOD_RES (72)..(72): Selenocysteine
  MOD_RES (94)..(94): Selenocysteine
MXLEEFSAGEQKXESDPDNVVLCLLAADEDDDRDVALQIHFXLIQAFCCENDINILRVSNPGRLAELLLLEXDAGPAASEGAEQPPDLHCVLVXNPHSSQWKDPALSQLICFCRESRYMDQWVPVINLPER

SEQ ID NO: 10619 - protein, 123 aa, Homo sapiens
  MOD_RES (35)..(35): Selenocysteine
  MOD_RES (61)..(61): Selenocysteine
  MOD_RES (89)..(89): Selenocysteine
MARGSALLLASLLLAAALSASAGLWSPAKEKRGWXLNSAGYLLGPHAVGNHRSFSDKNGLXSKRELRPEDDMKPGSFDRSIPENNIMRXIIEFLSFLHLKEAGALDRLLDLPAAASSEDIERS

SEQ ID NO: 10620 - protein, 110 aa, Homo sapiens
  MOD_RES (9)..(9): Selenocysteine
  MOD_RES (27)..(27): Selenocysteine
  MOD_RES (74)..(74): Selenocysteine
MGPLSPARXLRLWGPRSLGVALGVFMXIGFALQLLGGPFQRRLPGLQLRQPSAPSLRPALPSCPPRQRLVFLKXHKSGSSSVLSLLHRYGDQHGLRFALPARYQFGYPKL

SEQ ID NO: 10621 - protein, 133 aa, Homo sapiens
  MOD_RES (9)..(9): Selenocysteine
  MOD_RES (27)..(27): Selenocysteine
  MOD_RES (74)..(74): Selenocysteine
  MOD_RES (126)..(126): Selenocysteine
MGPLSPARXLRLWGPRSLGVALGVFMXIGFALQLLGGPFQRRLPGLQLRQPSAPSLRPALPSCPPRQRLVFLKXHKSGSSSVLSLLHRYGDQHGLRFALPARYQFGYPKLFQASRVKGYRPQGGGXQLPFHIL

SEQ ID NO: 10622 - protein, 486 aa, Homo sapiens
  MOD_RES (9)..(9): Selenocysteine
  MOD_RES (27)..(27): Selenocysteine
  MOD_RES (74)..(74): Selenocysteine
  MOD_RES (126)..(126): Selenocysteine
  MOD_RES (175)..(175): Selenocysteine
  MOD_RES (253)..(253): Selenocysteine
  MOD_RES (265)..(265): Selenocysteine
  MOD_RES (267)..(267): Selenocysteine
  MOD_RES (342)..(342): Selenocysteine
  MOD_RES (349)..(349): Selenocysteine
  MOD_RES (356)..(356): Selenocysteine
  MOD_RES (391)..(391): Selenocysteine
  MOD_RES (420)..(420): Selenocysteine
  MOD_RES (456)..(456): Selenocysteine
  MOD_RES (473)..(473): Selenocysteine
  MOD_RES (480)..(480): Selenocysteine
MGPLSPARXLRLWGPRSLGVALGVFMXIGFALQLLGGPFQRRLPGLQLRQPSAPSLRPALPSCPPRQRLVFLKXHKSGSSSVLSLLHRYGDQHGLRFALPARYQFGYPKLFQASRVKGYRPQGGGXQLPFHILCHHMRFNLKEVLQVMPSDSFFFSIVRDPAALARSAFSYYKSXSSAFRKSPSLAAFLANPRGFYRPGARGDHYARNLLWFDFGLPFPPEKRAKRGNIHPPRDPNPPQLQVLPSGAGPRAQXLNPNALIHPVSXVXDHRSQISSPASFDLGSSSFIQWGLAWLDSVFDLVMVAEYFDESLVLLADALCWGLDDVVGFMHNAQAGHKQGLSXVSNSGLXAEDRQLXARARAWNNLDWALYVHFNRSLWARIEKYGQGRLQXAVAELRARREALAKHCLVGGEASDPKYIXDRRFRPFQFGSAKVLGYILRSGLSPQDQEECERLAXPELQYKDKLDAKQFPPXVSLPLKXSRPLSP

SEQ ID NO: 10623 - protein, 118 aa, Homo sapiens
  MOD_RES (9)..(9): Selenocysteine
  MOD_RES (27)..(27): Selenocysteine
  MOD_RES (50)..(50): Selenocysteine
  MOD_RES (59)..(59): Selenocysteine
  MOD_RES (70)..(70): Selenocysteine
  MOD_RES (95)..(95): Selenocysteine
  MOD_RES (102)..(104): Selenocysteine
  MOD_RES (107)..(107): Selenocysteine
  MOD_RES (112)..(112): Selenocysteine
MGPLSPARXLRLWGPRSLGVALGVFMXIGFALQLLGGPFQRRYFRSCLLXASFFPLSEXQRLWLALPSPXINPPHQPSASHHLWLPSWPILEASXGLGPVGXXXLAXYYGLXLACPFP

SEQ ID NO: 10624 - protein, 220 aa, Homo sapiens
  MOD_RES (9)..(9): Selenocysteine
  MOD_RES (27)..(27): Selenocysteine
  MOD_RES (50)..(50): Selenocysteine
  MOD_RES (59)..(59): Selenocysteine
  MOD_RES (70)..(70): Selenocysteine
  MOD_RES (95)..(95): Selenocysteine
  MOD_RES (102)..(104): Selenocysteine
  MOD_RES (107)..(107): Selenocysteine
  MOD_RES (112)..(112): Selenocysteine
  MOD_RES (133)..(133): Selenocysteine
  MOD_RES (135)..(135): Selenocysteine
  MOD_RES (194)..(194): Selenocysteine
  MOD_RES (198)..(198): Selenocysteine
  MOD_RES (205)..(205): Selenocysteine
MGPLSPARXLRLWGPRSLGVALGVFMXIGFALQLLGGPFQRRYFRSCLLXASFFPLSEXQRLWLALPSPXINPPHQPSASHHLWLPSWPILEASXGLGPVGXXXLAXYYGLXLACPFPQRRGPREGIFIPPEXPXPHSCRSCLLVLALEPKPSIPMPSSILFPLLLIIAARYQALPLSIWGLHPSSSGVWHGWXLSLXWSWWLSXSMSHWFCWQMPCAGV

SEQ ID NO: 10625 - protein, 98 aa, Homo sapiens
  MOD_RES (5)..(5): Selenocysteine
  MOD_RES (16)..(16): Selenocysteine
  MOD_RES (19)..(19): Selenocysteine
  MOD_RES (21)..(21): Selenocysteine
  MOD_RES (34)..(34): Selenocysteine
  MOD_RES (60)..(60): Selenocysteine
MGSVXVRYFCYGCLFXSAXWXVLLFVYFNFSEVXQPLKNVPVKGSGPHGPSPKKFYPRFXRGPSRVLEPQFKANKIDDVIDSRVEDPEEGHLKFSSEL

SEQ ID NO: 10626 - protein, 113 aa, Homo sapiens
  MOD_RES (5)..(5): Selenocysteine
  MOD_RES (16)..(16): Selenocysteine
  MOD_RES (19)..(19): Selenocysteine
  MOD_RES (21)..(21): Selenocysteine
  MOD_RES (34)..(34): Selenocysteine
  MOD_RES (60)..(60): Selenocysteine
  MOD_RES (105)..(105): Selenocysteine
  MOD_RES (108)..(108): Selenocysteine
MGSVXVRYFCYGCLFXSAXWXVLLFVYFNFSEVXQPLKNVPVKGSGPHGPSPKKFYPRFXRGPSRVLEPQFKANKIDDVIDSRVEDPEEGHLKFSSELDVKKSSXHLXCQLLV

SEQ ID NO: 10627 - protein, 133 aa, Homo sapiens
  MOD_RES (5)..(5): Selenocysteine
  MOD_RES (16)..(16): Selenocysteine
  MOD_RES (19)..(19): Selenocysteine
  MOD_RES (21)..(21): Selenocysteine
  MOD_RES (34)..(34): Selenocysteine
  MOD_RES (60)..(60): Selenocysteine
  MOD_RES (105)..(105): Selenocysteine
  MOD_RES (108)..(108): Selenocysteine
  MOD_RES (131)..(131): Selenocysteine
MGSVXVRYFCYGCLFXSAXWXVLLFVYFNFSEVXQPLKNVPVKGSGPHGPSPKKFYPRFXRGPSRVLEPQFKANKIDDVIDSRVEDPEEGHLKFSSELDVKKSSXHLXCQLLVLLSVSIMKRFLPCFGQCXVS

SEQ ID NO: 10628 - protein, 151 aa, Homo sapiens
  MOD_RES (5)..(5): Selenocysteine
  MOD_RES (16)..(16): Selenocysteine
  MOD_RES (19)..(19): Selenocysteine
  MOD_RES (21)..(21): Selenocysteine
  MOD_RES (34)..(34): Selenocysteine
  MOD_RES (60)..(60): Selenocysteine
  MOD_RES (127)..(127): Selenocysteine
MGSVXVRYFCYGCLFXSAXWXVLLFVYFNFSEVXQPLKNVPVKGSGPHGPSPKKFYPRFXRGPSRVLEPQFKANKIDDVIDSRVEDPEEGHLKFSSELELRDLGYQKHAFNMLISDRLGYHRDVPDXRNAACKEKFYPPDLPAASVVICFY

SEQ ID NO: 10629 - protein, 160 aa, Homo sapiens
  MOD_RES (5)..(5): Selenocysteine
  MOD_RES (16)..(16): Selenocysteine
  MOD_RES (19)..(19): Selenocysteine
  MOD_RES (21)..(21): Selenocysteine
  MOD_RES (34)..(34): Selenocysteine
  MOD_RES (60)..(60): Selenocysteine
  MOD_RES (136)..(136): Selenocysteine
MGSVXVRYFCYGCLFXSAXWXVLLFVYFNFSEVXQPLKNVPVKGSGPHGPSPKKFYPRFXRGPSRVLEPQFKANKIDDVIDSRVEDPEEGHLKFSSELGMIFNERDQELRDLGYQKHAFNMLISDRLGYHRDVPDXRNAACKEKFYPPDLPAASVVICFY

SEQ ID NO: 10630 - protein, 186 aa, Homo sapiens
  MOD_RES (5)..(5): Selenocysteine
  MOD_RES (16)..(16): Selenocysteine
  MOD_RES (19)..(19): Selenocysteine
  MOD_RES (21)..(21): Selenocysteine
  MOD_RES (34)..(34): Selenocysteine
  MOD_RES (60)..(60): Selenocysteine
  MOD_RES (136)..(136): Selenocysteine
  MOD_RES (170)..(170): Selenocysteine
  MOD_RES (178)..(178): Selenocysteine
MGSVXVRYFCYGCLFXSAXWXVLLFVYFNFSEVXQPLKNVPVKGSGPHGPSPKKFYPRFXRGPSRVLEPQFKANKIDDVIDSRVEDPEEGHLKFSSELGMIFNERDQELRDLGYQKHAFNMLISDRLGYHRDVPDXRNAACKEKFYPPDLPAASVVICFYNEAFSALLRXVHSVIDRXPAHLLHEI

SEQ ID NO: 10631 - protein, 608 aa, Homo sapiens
  MOD_RES (5)..(5): Selenocysteine
  MOD_RES (16)..(16): Selenocysteine
  MOD_RES (19)..(19): Selenocysteine
  MOD_RES (21)..(21): Selenocysteine
  MOD_RES (34)..(34): Selenocysteine
  MOD_RES (60)..(60): Selenocysteine
  MOD_RES (136)..(136): Selenocysteine
  MOD_RES (170)..(170): Selenocysteine
  MOD_RES (178)..(178): Selenocysteine
  MOD_RES (220)..(220): Selenocysteine
  MOD_RES (237)..(237): Selenocysteine
  MOD_RES (268)..(268): Selenocysteine
  MOD_RES (281)..(281): Selenocysteine
  MOD_RES (317)..(317): Selenocysteine
  MOD_RES (324)..(324): Selenocysteine
  MOD_RES (394)..(394): Selenocysteine
  MOD_RES (396)..(396): Selenocysteine
  MOD_RES (423)..(423): Selenocysteine
  MOD_RES (490)..(490): Selenocysteine
  MOD_RES (542)..(542): Selenocysteine
  MOD_RES (563)..(563): Selenocysteine
MGSVXVRYFCYGCLFXSAXWXVLLFVYFNFSEVXQPLKNVPVKGSGPHGPSPKKFYPRFXRGPSRVLEPQFKANKIDDVIDSRVEDPEEGHLKFSSELGMIFNERDQELRDLGYQKHAFNMLISDRLGYHRDVPDXRNAACKEKFYPPDLPAASVVICFYNEAFSALLRXVHSVIDRXPAHLLHEIILVDDDSDFDDLKGELDEYVQKYLPGKIKVIRNXKREGLIRGRMIGAAHAXGEVLVFLDSHCEVNVMWLQPLLAAIREDRHXVVCPVIDIISADXLAYSSSPVVRGGFNWGLHFKWDLVPLSELGRAEGAXAPIKSPXMAGGLFAMNRQYFHELGQYDSGMDIWGGENLEISFRIWMCGGKLFIIPCSRVGHIFRKRRPYGSPEGQDXMXHNSLRLAHVWLDEYKEQYFSLRPDLKXKSYGNISERVELRKKLGCKSFKWYLDNVYPEMQISGSHAKPQQPIFVNRGPKRPKVLQRGRLYHLQXNKCLVAQGRPSQKGGLVVLKACDYSDPNQIWIYNEEHELVLNSLLCLDMSEXRSSDPPRLMKCHGSGGSQQWXFGKNNRLYQVSVGQCLRAVDPLGQKGSVAMAICDGSSSQQWHLEG

SEQ ID NO: 10632 - protein, 202 aa, Homo sapiens
  MOD_RES (5)..(5): Selenocysteine
  MOD_RES (16)..(16): Selenocysteine
  MOD_RES (19)..(19): Selenocysteine
  MOD_RES (21)..(21): Selenocysteine
  MOD_RES (34)..(34): Selenocysteine
  MOD_RES (60)..(60): Selenocysteine
  MOD_RES (136)..(136): Selenocysteine
  MOD_RES (170)..(170): Selenocysteine
  MOD_RES (178)..(178): Selenocysteine
  MOD_RES (201)..(201): Selenocysteine
MGSVXVRYFCYGCLFXSAXWXVLLFVYFNFSEVXQPLKNVPVKGSGPHGPSPKKFYPRFXRGPSRVLEPQFKANKIDDVIDSRVEDPEEGHLKFSSELGMIFNERDQELRDLGYQKHAFNMLISDRLGYHRDVPDXRNAACKEKFYPPDLPAASVVICFYNEAFSALLRXVHSVIDRXPAHLLHEIILVDDDSDFGKECCXW

SEQ ID NO: 10633 - protein, 65 aa, Homo sapiens
  MOD_RES (1)..(1): Any amino acid
  MOD_RES (35)..(35): Selenocysteine
  MOD_RES (37)..(37): Selenocysteine
  MOD_RES (53)..(53): Selenocysteine
  MOD_RES (56)..(56): Selenocysteine
XIWMCGGKLFIIPCSRVGHIFRKRRPYGSPEGQDXMXHNSLRLAHVWLDEYKXQPXHADPPGSFP

SEQ ID NO: 10634 - protein, 11 aa, Homo sapiens
MAHLKRLVKLH

SEQ ID NO: 10635 - protein, 25 aa, Homo sapiens
MAHLKRLVKLHIKRHYHKKFWKLGA

SEQ ID NO: 10636 - protein, 57 aa, Homo sapiens
MAHLKRLVKLHIKRHYHKKFWKLGAVIFFFIIVLVLMQREVSVQYSKEESRMERNMK

SEQ ID NO: 10637 - protein, 90 aa, Homo sapiens
MAHLKRLVKLHIKRHYHKKFWKLGAVIFFFIIVLVLMQREVSVQYSKEESRMERNMKNKNKMLDLMLEAVNNIKDAMPKMQIGAPVRQNI

SEQ ID NO: 10638 - protein, 464 aa, Homo sapiens
  MOD_RES (103)..(103): Selenocysteine
  MOD_RES (130)..(131): Selenocysteine
  MOD_RES (168)..(168): Selenocysteine
  MOD_RES (186)..(187): Selenocysteine
  MOD_RES (200)..(200): Selenocysteine
  MOD_RES (204)..(204): Selenocysteine
  MOD_RES (259)..(259): Selenocysteine
  MOD_RES (266)..(266): Selenocysteine
  MOD_RES (269)..(269): Selenocysteine
  MOD_RES (272)..(272): Selenocysteine
  MOD_RES (274)..(274): Selenocysteine
  MOD_RES (299)..(299): Selenocysteine
  MOD_RES (313)..(313): Selenocysteine
  MOD_RES (354)..(354): Selenocysteine
  MOD_RES (359)..(359): Selenocysteine
  MOD_RES (361)..(361): Selenocysteine
  MOD_RES (429)..(429): Selenocysteine
  MOD_RES (456)..(456): Selenocysteine
MAHLKRLVKLHIKRHYHKKFWKLGAVIFFFIIVLVLMQREVSVQYSKEESRMERNMKNKNKMLDLMLEAVNNIKDAMPKMQIGAPVRQNIDAGERPCLQGYYXAAELKPVLDRPPQDSNAPGASGKAFKXXNLSVEEQKEKERGEAKHCFNAFASDRISLHRDLGPDXRPPECIEQKFKRCPPLPXXSVIIVFHNEAWSXLLRXVHSVLYSSPAILLKEIILVDDASVDEYLHDKLDEYVKQFSIVKIVRQRERKGLIXARLLGAXVAXAEXLXFLDAHCECFYGWLEPLLARIAENYXAVVSPDIASIDLNXFEFNKPSPYGSNHNRGNFDWSLSFGWESLPDHEKQRRKDEXYPIKXPXFAGGLFSISKEYFEYIGSYDEEMEIWGGENIEMSFRVWQCGGQLEIMPCSVVGHVFRSKSPHSFPKGXQVIARNQVRLAEVWMDEYKEIFYRRNXDAAKIVKQ

SEQ ID NO: 10639 - protein, 633 aa, Homo sapiens
  MOD_RES (103)..(103): Selenocysteine
  MOD_RES (130)..(131): Selenocysteine
  MOD_RES (168)..(168): Selenocysteine
  MOD_RES (186)..(187): Selenocysteine
  MOD_RES (200)..(200): Selenocysteine
  MOD_RES (204)..(204): Selenocysteine
  MOD_RES (259)..(259): Selenocysteine
  MOD_RES (266)..(266): Selenocysteine
  MOD_RES (269)..(269): Selenocysteine
  MOD_RES (272)..(272): Selenocysteine
  MOD_RES (274)..(274): Selenocysteine
  MOD_RES (299)..(299): Selenocysteine
  MOD_RES (313)..(313): Selenocysteine
  MOD_RES (354)..(354): Selenocysteine
  MOD_RES (359)..(359): Selenocysteine
  MOD_RES (361)..(361): Selenocysteine
  MOD_RES (429)..(429): Selenocysteine
  MOD_RES (456)..(456): Selenocysteine
  MOD_RES (486)..(486): Selenocysteine
  MOD_RES (534)..(534): Selenocysteine
  MOD_RES (575)..(575): Selenocysteine
  MOD_RES (581)..(581): Selenocysteine
  MOD_RES (584)..(584): Selenocysteine
MAHLKRLVKLHIKRHYHKKFWKLGAVIFFFIIVLVLMQREVSVQYSKEESRMERNMKNKNKMLDLMLEAVNNIKDAMPKMQIGAPVRQNIDAGERPCLQGYYXAAELKPVLDRPPQDSNAPGASGKAFKXXNLSVEEQKEKERGEAKHCFNAFASDRISLHRDLGPDXRPPECIEQKFKRCPPLPXXSVIIVFHNEAWSXLLRXVHSVLYSSPAILLKEIILVDDASVDEYLHDKLDEYVKQFSIVKIVRQRERKGLIXARLLGAXVAXAEXLXFLDAHCECFYGWLEPLLARIAENYXAVVSPDIASIDLNXFEFNKPSPYGSNHNRGNFDWSLSFGWESLPDHEKQRRKDEXYPIKXPXFAGGLFSISKEYFEYIGSYDEEMEIWGGENIEMSFRVWQCGGQLEIMPCSVVGHVFRSKSPHSFPKGXQVIARNQVRLAEVWMDEYKEIFYRRNXDAAKIVKQKAFGDLSKRFEIKHRLQCKNFXWYLNNIYPEVYVPDLNPVISGYIKSVGQPLCLDVGENNQGGKPLIMYXCHGLGGNQYFEYSAQHEIRHNIQKELCLHAAQGLVQLKACXYKGHKXVVXGEQIWEIQKDQLLYNPFLKMCLSANGEHPSLVSCNPSDPLQKWILSQND

SEQ ID NO: 10640 - protein, 371 aa, Homo sapiens
  MOD_RES (37)..(37): Selenocysteine
  MOD_RES (51)..(51): Selenocysteine
  MOD_RES (92)..(92): Selenocysteine
  MOD_RES (97)..(97): Selenocysteine
  MOD_RES (99)..(99): Selenocysteine
  MOD_RES (167)..(167): Selenocysteine
  MOD_RES (194)..(194): Selenocysteine
  MOD_RES (224)..(224): Selenocysteine
  MOD_RES (272)..(272): Selenocysteine
  MOD_RES (313)..(313): Selenocysteine
  MOD_RES (319)..(319): Selenocysteine
  MOD_RES (322)..(322): Selenocysteine
MYGYGCNIFPPSPSNLKGECFYGWLEPLLARIAENYXAVVSPDIASIDLNXFEFNKPSPYGSNHNRGNFDWSLSFGWESLPDHEKQRRKDEXYPIKXPXFAGGLFSISKEYFEYIGSYDEEMEIWGGENIEMSFRVWQCGGQLEIMPCSVVGHVFRSKSPHSFPKGXQVIARNQVRLAEVWMDEYKEIFYRRNXDAAKIVKQKAFGDLSKRFEIKHRLQCKNFXWYLNNIYPEVYVPDLNPVISGYIKSVGQPLCLDVGENNQGGKPLIMYXCHGLGGNQYFEYSAQHEIRHNIQKELCLHAAQGLVQLKACXYKGHKXVVXGEQIWEIQKDQLLYNPFLKMCLSANGEHPSLVSCNPSDPLQKWILSQND

SEQ ID NO: 10641 - protein, 89 aa, Homo sapiens
  MOD_RES (55)..(55): Selenocysteine
  MOD_RES (62)..(62): Selenocysteine
  MOD_RES (65)..(65): Selenocysteine
  MOD_RES (68)..(68): Selenocysteine
  MOD_RES (70)..(70): Selenocysteine
  MOD_RES (79)..(79): Selenocysteine
VHSVLYSSPAILLKEIILVDDASVDEYLHDKLDEYVKQFSIVKIVRQRERKGLIXARLLGAXVAXAEXLXFLDAHSFSXGDYSNDSPSR

SEQ ID NO: 10642 - protein, 116 aa, Homo sapiens
  MOD_RES (21)..(21): Selenocysteine
  MOD_RES (35)..(35): Selenocysteine
  MOD_RES (61)..(61): Selenocysteine
  MOD_RES (91)..(91): Selenocysteine
MAPPSVPLVLLLVLLLSLAEXPASAPAHRGRGGWXLNSAGYLLGPVLHLPQMGDQDGKREXALEILDLWKAIDGLPYSHPPQPSKRNVMEXFAKPEIGDLGMLSMKIPKEEDVLKS

SEQ ID NO: 10643 - protein, 49 aa, Homo sapiens
  MOD_RES (21)..(21): Selenocysteine
  MOD_RES (32)..(32): Selenocysteine
  MOD_RES (38)..(38): Selenocysteine
  MOD_RES (40)..(40): Selenocysteine
MAPPSVPLVLLLVLLLSLAEXPASAPAHRSSXFPKWVXKXERGRQPLRS

SEQ ID NO: 10644 - protein, 349 aa, Homo sapiens
  MOD_RES (36)..(36): Selenocysteine
  MOD_RES (56)..(56): Selenocysteine
  MOD_RES (69)..(70): Selenocysteine
  MOD_RES (94)..(94): Selenocysteine
  MOD_RES (100)..(100): Selenocysteine
  MOD_RES (116)..(116): Selenocysteine
  MOD_RES (125)..(125): Selenocysteine
  MOD_RES (185)..(185): Selenocysteine
  MOD_RES (204)..(204): Selenocysteine
  MOD_RES (245)..(245): Selenocysteine
  MOD_RES (248)..(248): Selenocysteine
  MOD_RES (278)..(278): Selenocysteine
  MOD_RES (287)..(287): Selenocysteine
  MOD_RES (331)..(331): Selenocysteine
  MOD_RES (340)..(340): Selenocysteine
  MOD_RES (344)..(344): Selenocysteine
  MOD_RES (347)..(347): Selenocysteine
MELAVGNLSEGNASWPEPPAPEPGPLFGIGVENFVXLVVFGLIFALGVLGNSLVIXVLARSKPGKPRSXXNLFILNLSIADLAYLLFCIPFQAXVYALPXWVLGAFICKFIHYFFXVSMLVSIFXLAAMSVDRYVAIVHSRRSSSLRVSRNALLGVGCIWALSIAMASPVAYHQGLFHPRASNQXFCWEQWPDPRHKKAYVVCXFVFGYLLPLLLICFCYAKVLNHLHKKLKNMSKKSEASKKKXAQXVLVVVVVFGISWLPHHIIHLWAEFGVFPLXPASFLFRIXAHCLAYSNSSVNPIIYAFLSENFRKAYKQVFKCHIRKDSHLSDXKESKSRIDXPPSXNCXHV

SEQ ID NO: 10645 - protein, 387 aa, Homo sapiens
  MOD_RES (40)..(40): Selenocysteine
  MOD_RES (44)..(44): Selenocysteine
  MOD_RES (59)..(60): Selenocysteine
  MOD_RES (84)..(84): Selenocysteine
  MOD_RES (87)..(87): Selenocysteine
  MOD_RES (108)..(108): Selenocysteine
  MOD_RES (115)..(115): Selenocysteine
  MOD_RES (138)..(138): Selenocysteine
  MOD_RES (173)..(173): Selenocysteine
  MOD_RES (191)..(191): Selenocysteine
  MOD_RES (206)..(206): Selenocysteine
  MOD_RES (210)..(210): Selenocysteine
  MOD_RES (235)..(235): Selenocysteine
  MOD_RES (267)..(267): Selenocysteine
  MOD_RES (270)..(270): Selenocysteine
  MOD_RES (305)..(305): Selenocysteine
  MOD_RES (329)..(329): Selenocysteine
  MOD_RES (383)..(383): Selenocysteine
MNVSGCPGAGNASQAGGGGGWHPEAVIVPLLFALIFLVGXVGNXLVLAVLLRGGQAVSXXNLFILNLGVADLCFILCCVPFQAXIYXLDGWVFGSLLCKAVHFLIFLXMHASSFXLAAVSLDRYLAIRYPLHSRELRXPRNALAAIGLIWGLSLLFSGPYLSYYRQSQLANLXVCHPAWSAPRRRAMDICXFVFSYLLPVLVLGLXYARXLRYLWRAVDPVAAGSGARRAKRKVXRMILIVAALFCLCWMPHHALILCVWFGQFPLXRAXYALRILSHLVSYANSCVNPIVYALVSKHFRKGFRXICAGLLGRAPGRASGRVCAAARGXHSGSVLERESSDLLHMSEAAGALRPCPGASQPCILEPCPGPSWQGPKAGDSILXVDVA

SEQ ID NO: 10646 - protein, 368 aa, Homo sapiens
  MOD_RES (32)..(32): Selenocysteine
  MOD_RES (56)..(57): Selenocysteine
  MOD_RES (81)..(81): Selenocysteine
  MOD_RES (84)..(84): Selenocysteine
  MOD_RES (105)..(105): Selenocysteine
  MOD_RES (112)..(112): Selenocysteine
  MOD_RES (135)..(135): Selenocysteine
  MOD_RES (163)..(163): Selenocysteine
  MOD_RES (188)..(188): Selenocysteine
  MOD_RES (207)..(207): Selenocysteine
  MOD_RES (230)..(230): Selenocysteine
  MOD_RES (269)..(269): Selenocysteine
MADAQNISLDSPGSVGAVAVPVVFALIFLLGXVGNGLVLAVLLQPGPSAWQEPGSXXDLFILNLAVADLCFILCCVPFQAXIYXLDAWLFGALVCKAVHLLIYLXMYASSFXLAAVSVDRYLAVRHPLRSRALRXPRNARAAVGLVWLLAALFSAPYLSYYGXVRYGALELCVPAWEDARRRALDVAXFAAGYLLPVAVVSLAYGRXLRFLWAAVGPAGAAAAEARRRAXGRAGRAMLAVAALYALCWGPHHALILCFWYGRFAFSPAXYACRLASHCLAYANSCLNPLVYALASRHFRARFRRLWPCGRRRRHRARRALRRVRPASSGPPGCPGDARPSGRLLAGGGQGPEPREGPVHGGEAARGPE

SEQ ID NO: 10647 - protein, 238 aa, Homo sapiens
  MOD_RES (8)..(8): Selenocysteine
  MOD_RES (36)..(36): Selenocysteine
  MOD_RES (47)..(47): Selenocysteine
  MOD_RES (85)..(87): Selenocysteine
  MOD_RES (94)..(94): Selenocysteine
  MOD_RES (107)..(107): Selenocysteine
  MOD_RES (120)..(120): Selenocysteine
  MOD_RES (140)..(140): Selenocysteine
  MOD_RES (144)..(144): Selenocysteine
  MOD_RES (148)..(148): Selenocysteine
  MOD_RES (175)..(175): Selenocysteine
  MOD_RES (180)..(181): Selenocysteine
  MOD_RES (192)..(192): Selenocysteine
  MOD_RES (197)..(197): Selenocysteine
  MOD_RES (199)..(199): Selenocysteine
  MOD_RES (215)..(215): Selenocysteine
MLCCMRRXKQVEKNDDDQKIEQDGIKPEDKAHKAAXKIQASFRGHIXRKKLKGEKKDDVQAAEAEANKKDEAPVADGVEKKGEGXXXAEAAPAXGSKPDEPGKAGEXPSEEKKGEGDAAXEQAAPQAPASSEEKAGSAEXESAXKASXDNSPSSKAEDAPAKEEPKQADVPAAVXAAAAXXPAAEDAAAKAXAQPPXEXGESSQAEENIEAVDEXKPKESARQDEGKEEEPEADQEHA

SEQ ID NO: 10648 - protein, 274 aa, Homo sapiens
  MOD_RES (2)..(2): Selenocysteine
  MOD_RES (41)..(41): Selenocysteine
  MOD_RES (72)..(72): Selenocysteine
  MOD_RES (83)..(83): Selenocysteine
  MOD_RES (121)..(123): Selenocysteine
  MOD_RES (130)..(130): Selenocysteine
  MOD_RES (143)..(143): Selenocysteine
  MOD_RES (156)..(156): Selenocysteine
  MOD_RES (176)..(176): Selenocysteine
  MOD_RES (180)..(180): Selenocysteine
  MOD_RES (184)..(184): Selenocysteine
  MOD_RES (211)..(211): Selenocysteine
  MOD_RES (216)..(217): Selenocysteine
  MOD_RES (228)..(228): Selenocysteine
  MOD_RES (233)..(233): Selenocysteine
  MOD_RES (235)..(235): Selenocysteine
  MOD_RES (251)..(251): Selenocysteine
MXKSCSELCHPALHFLPCLGGLRKNLQRAVRPSPYSLGFLXFWISRVEKNDDDQKIEQDGIKPEDKAHKAAXKIQASFRGHIXRKKLKGEKKDDVQAAEAEANKKDEAPVADGVEKKGEGXXXAEAAPAXGSKPDEPGKAGEXPSEEKKGEGDAAXEQAAPQAPASSEEKAGSAEXESAXKASXDNSPSSKAEDAPAKEEPKQADVPAAVXAAAAXXPAAEDAAAKAXAQPPXEXGESSQAEENIEAVDEXKPKESARQDEGKEEEPEADQEHA

SEQ ID NO: 10649 - protein, 629 aa, Homo sapiens
  MOD_RES (34)..(34): Selenocysteine
  MOD_RES (56)..(56): Selenocysteine
  MOD_RES (58)..(58): Selenocysteine
  MOD_RES (76)..(76): Selenocysteine
  MOD_RES (132)..(132): Selenocysteine
  MOD_RES (149)..(149): Selenocysteine
  MOD_RES (166)..(166): Selenocysteine
  MOD_RES (213)..(213): Selenocysteine
  MOD_RES (222)..(222): Selenocysteine
  MOD_RES (249)..(249): Selenocysteine
  MOD_RES (264)..(264): Selenocysteine
  MOD_RES (269)..(269): Selenocysteine
  MOD_RES (275)..(275): Selenocysteine
  MOD_RES (317)..(317): Selenocysteine
  MOD_RES (321)..(321): Selenocysteine
  MOD_RES (328)..(329): Selenocysteine
  MOD_RES (341)..(341): Selenocysteine
  MOD_RES (347)..(347): Selenocysteine
  MOD_RES (364)..(364): Selenocysteine
  MOD_RES (380)..(380): Selenocysteine
  MOD_RES (385)..(385): Selenocysteine
  MOD_RES (421)..(421): Selenocysteine
  MOD_RES (480)..(481): Selenocysteine
  MOD_RES (501)..(501): Selenocysteine
  MOD_RES (509)..(509): Selenocysteine
  MOD_RES (513)..(513): Selenocysteine
  MOD_RES (516)..(516): Selenocysteine
  MOD_RES (562)..(562): Selenocysteine
  MOD_RES (565)..(565): Selenocysteine
  MOD_RES (569)..(570): Selenocysteine
MQEDESYLLQVLRYLIEFELKESDNPRRLLRRGXCAFSILFKLFSEGLFSAKLFLXAXLHEPIMQLLVEDEDHLEXDPNKLIERFSPSQQEKLFGEKGSDRFRQKVQEMVESNEAKLVALVNKFIGYLKQNXYCFPHSLRWIVSQMYKXLSCVDRLEVGEVRAMCXDLLLACFICPAVVNPEQYGIISDAPINEVARFNLMQVGRLLQQLAMXGSEEGDPRXKSSLGKFDKSCVAAFLDVVIGGRAVEXPPLSSVNLLEGLSRXVVYIXYSQLIXLVNFMKSVMSGDQLREDRMALDNLLANLPPAKPGKSSSLEMXPYNXPQLSPAXXPANKKNRLPIAXRSRSRXNMLMDLHMDHEGSSQEXIQEVQPEEVLVISLGXGPQLXPGMMSENEVLNMQLSDGGQGDVPVDENKLHGKPDKXLRFSLCSDNLEGISEGPSNRSNSVSSLDLEGESVSELGAGPSGSNGVEALQLLEHEQAXXQDNLDDKLRKFEIRDMMGLXDDRDISEXVSEXWSXDVLGSDFDPNIDEDRLQEIAGAAAENMLGSLLCLPGSGSVLLDPCXGSXISEXXSEAWSVEVLPSDSEAPDLKQEERLQELESVLDWVAHLMIRMSGRSVPAPAHQASVLCPA

SEQ ID NO: 10650 - protein, 117 aa, Homo sapiens
  MOD_RES (8)..(8): Selenocysteine
  MOD_RES (37)..(37): Selenocysteine
  MOD_RES (44)..(44): Selenocysteine
  MOD_RES (61)..(61): Selenocysteine
  MOD_RES (80)..(80): Selenocysteine
  MOD_RES (94)..(94): Selenocysteine
MVKLDIHXLAHHLKQERLYVNSEKQLIQRLNADVLKXAEKLYRXAWIAKQQRINLDRLIIXSAEASPAECCQHAKILEDXQFVDGYKQLGFQEXAYGEFLSRLRENPRLIASSLVAG

SEQ ID NO: 10651 - protein, 497 aa, Homo sapiens
  MOD_RES (8)..(8): Selenocysteine
  MOD_RES (37)..(37): Selenocysteine
  MOD_RES (44)..(44): Selenocysteine
  MOD_RES (61)..(61): Selenocysteine
  MOD_RES (80)..(80): Selenocysteine
  MOD_RES (94)..(94): Selenocysteine
  MOD_RES (125)..(125): Selenocysteine
  MOD_RES (131)..(131): Selenocysteine
  MOD_RES (134)..(134): Selenocysteine
  MOD_RES (175)..(175): Selenocysteine
  MOD_RES (197)..(197): Selenocysteine
  MOD_RES (199)..(199): Selenocysteine
  MOD_RES (217)..(217): Selenocysteine
  MOD_RES (273)..(273): Selenocysteine
  MOD_RES (290)..(290): Selenocysteine
  MOD_RES (307)..(307): Selenocysteine
  MOD_RES (354)..(354): Selenocysteine
  MOD_RES (363)..(363): Selenocysteine
  MOD_RES (390)..(390): Selenocysteine
  MOD_RES (405)..(405): Selenocysteine
  MOD_RES (410)..(410): Selenocysteine
  MOD_RES (416)..(416): Selenocysteine
  MOD_RES (458)..(458): Selenocysteine
  MOD_RES (462)..(462): Selenocysteine
  MOD_RES (469)..(470): Selenocysteine
MVKLDIHXLAHHLKQERLYVNSEKQLIQRLNADVLKXAEKLYRXAWIAKQQRINLDRLIIXSAEASPAECCQHAKILEDXQFVDGYKQLGFQEXAYGEFLSRLRENPRLIASSLVAGEKLNQENXQSVIYXVFXSLYGNCIMQEDESYLLQVLRYLIEFELKESDNPRRLLRRGXCAFSILFKLFSEGLFSAKLFLXAXLHEPIMQLLVEDEDHLEXDPNKLIERFSPSQQEKLFGEKGSDRFRQKVQEMVESNEAKLVALVNKFIGYLKQNXYCFPHSLRWIVSQMYKXLSCVDRLEVGEVRAMCXDLLLACFICPAVVNPEQYGIISDAPINEVARFNLMQVGRLLQQLAMXGSEEGDPRXKSSLGKFDKSCVAAFLDVVIGGRAVEXPPLSSVNLLEGLSRXVVYIXYSQLIXLVNFMKSVMSGDQLREDRMALDNLLANLPPAKPGKSSSLEMXPYNXPQLSPAXXPANKKNRLPIGKENFSYWSFLLNLIFH

SEQ ID NO: 10652 - protein, 756 aa, Homo sapiens
  MOD_RES (8)..(8): Selenocysteine
  MOD_RES (37)..(37): Selenocysteine
  MOD_RES (44)..(44): Selenocysteine
  MOD_RES (61)..(61): Selenocysteine
  MOD_RES (80)..(80): Selenocysteine
  MOD_RES (94)..(94): Selenocysteine
  MOD_RES (125)..(125): Selenocysteine
  MOD_RES (131)..(131): Selenocysteine
  MOD_RES (134)..(134): Selenocysteine
  MOD_RES (175)..(175): Selenocysteine
  MOD_RES (197)..(197): Selenocysteine
  MOD_RES (199)..(199): Selenocysteine
  MOD_RES (217)..(217): Selenocysteine
  MOD_RES (273)..(273): Selenocysteine
  MOD_RES (290)..(290): Selenocysteine
  MOD_RES (307)..(307): Selenocysteine
  MOD_RES (354)..(354): Selenocysteine
  MOD_RES (363)..(363): Selenocysteine
  MOD_RES (390)..(390): Selenocysteine
  MOD_RES (405)..(405): Selenocysteine
  MOD_RES (410)..(410): Selenocysteine
  MOD_RES (416)..(416): Selenocysteine
  MOD_RES (458)..(458): Selenocysteine
  MOD_RES (462)..(462): Selenocysteine
  MOD_RES (469)..(470): Selenocysteine
  MOD_RES (482)..(482): Selenocysteine
  MOD_RES (488)..(488): Selenocysteine
  MOD_RES (505)..(505): Selenocysteine
  MOD_RES (521)..(521): Selenocysteine
  MOD_RES (526)..(526): Selenocysteine
  MOD_RES (562)..(562): Selenocysteine
  MOD_RES (621)..(622): Selenocysteine
  MOD_RES (642)..(642): Selenocysteine
  MOD_RES (650)..(650): Selenocysteine
  MOD_RES (654)..(654): Selenocysteine
  MOD_RES (657)..(657): Selenocysteine
  MOD_RES (703)..(703): Selenocysteine
  MOD_RES (706)..(706): Selenocysteine
  MOD_RES (710)..(711): Selenocysteine
  MOD_RES (747)..(747): Selenocysteine
  MOD_RES (751)..(751): Selenocysteine
MVKLDIHXLAHHLKQERLYVNSEKQLIQRLNADVLKXAEKLYRXAWIAKQQRINLDRLIIXSAEASPAECCQHAKILEDXQFVDGYKQLGFQEXAYGEFLSRLRENPRLIASSLVAGEKLNQENXQSVIYXVFXSLYGNCIMQEDESYLLQVLRYLIEFELKESDNPRRLLRRGXCAFSILFKLFSEGLFSAKLFLXAXLHEPIMQLLVEDEDHLEXDPNKLIERFSPSQQEKLFGEKGSDRFRQKVQEMVESNEAKLVALVNKFIGYLKQNXYCFPHSLRWIVSQMYKXLSCVDRLEVGEVRAMCXDLLLACFICPAVVNPEQYGIISDAPINEVARFNLMQVGRLLQQLAMXGSEEGDPRXKSSLGKFDKSCVAAFLDVVIGGRAVEXPPLSSVNLLEGLSRXVVYIXYSQLIXLVNFMKSVMSGDQLREDRMALDNLLANLPPAKPGKSSSLEMXPYNXPQLSPAXXPANKKNRLPIAXRSRSRXNMLMDLHMDHEGSSQEXIQEVQPEEVLVISLGXGPQLXPGMMSENEVLNMQLSDGGQGDVPVDENKLHGKPDKXLRFSLCSDNLEGISEGPSNRSNSVSSLDLEGESVSELGAGPSGSNGVEALQLLEHEQAXXQDNLDDKLRKFEIRDMMGLXDDRDISEXVSEXWSXDVLGSDFDPNIDEDRLQEIAGAAAENMLGSLLCLPGSGSVLLDPCXGSXISEXXSEAWSVEVLPSDSEAPDLKQEERLQELESCSGLGSXSDDXDVREA

SEQ ID NO: 10653 - protein, 988 aa, Homo sapiens
  MOD_RES (8)..(8): Selenocysteine
  MOD_RES (37)..(37): Selenocysteine
  MOD_RES (44)..(44): Selenocysteine
  MOD_RES (61)..(61): Selenocysteine
  MOD_RES (80)..(80): Selenocysteine
  MOD_RES (94)..(94): Selenocysteine
  MOD_RES (125)..(125): Selenocysteine
  MOD_RES (131)..(131): Selenocysteine
  MOD_RES (134)..(134): Selenocysteine
  MOD_RES (175)..(175): Selenocysteine
  MOD_RES (197)..(197): Selenocysteine
  MOD_RES (199)..(199): Selenocysteine
  MOD_RES (217)..(217): Selenocysteine
  MOD_RES (273)..(273): Selenocysteine
  MOD_RES (290)..(290): Selenocysteine
  MOD_RES (307)..(307): Selenocysteine
  MOD_RES (354)..(354): Selenocysteine
  MOD_RES (363)..(363): Selenocysteine
  MOD_RES (390)..(390): Selenocysteine
  MOD_RES (405)..(405): Selenocysteine
  MOD_RES (410)..(410): Selenocysteine
  MOD_RES (416)..(416): Selenocysteine
  MOD_RES (458)..(458): Selenocysteine
  MOD_RES (462)..(462): Selenocysteine
  MOD_RES (469)..(470): Selenocysteine
  MOD_RES (482)..(482): Selenocysteine
  MOD_RES (488)..(488): Selenocysteine
  MOD_RES (505)..(505): Selenocysteine
  MOD_RES (521)..(521): Selenocysteine
  MOD_RES (526)..(526): Selenocysteine
  MOD_RES (562)..(562): Selenocysteine
  MOD_RES (621)..(622): Selenocysteine
  MOD_RES (642)..(642): Selenocysteine
  MOD_RES (650)..(650): Selenocysteine
  MOD_RES (654)..(654): Selenocysteine
  MOD_RES (657)..(657): Selenocysteine
  MOD_RES (703)..(703): Selenocysteine
  MOD_RES (706)..(706): Selenocysteine
  MOD_RES (710)..(711): Selenocysteine
  MOD_RES (747)..(747): Selenocysteine
  MOD_RES (751)..(751): Selenocysteine
  MOD_RES (762)..(762): Selenocysteine
  MOD_RES (774)..(774): Selenocysteine
  MOD_RES (800)..(800): Selenocysteine
  MOD_RES (808)..(808): Selenocysteine
  MOD_RES (815)..(815): Selenocysteine
  MOD_RES (880)..(880): Selenocysteine
  MOD_RES (938)..(938): Selenocysteine
  MOD_RES (960)..(960): Selenocysteine
MVKLDIHXLAHHLKQERLYVNSEKQLIQRLNADVLKXAEKLYRXAWIAKQQRINLDRLIIXSAEASPAECCQHAKILEDXQFVDGYKQLGFQEXAYGEFLSRLRENPRLIASSLVAGEKLNQENXQSVIYXVFXSLYGNCIMQEDESYLLQVLRYLIEFELKESDNPRRLLRRGXCAFSILFKLFSEGLFSAKLFLXAXLHEPIMQLLVEDEDHLEXDPNKLIERFSPSQQEKLFGEKGSDRFRQKVQEMVESNEAKLVALVNKFIGYLKQNXYCFPHSLRWIVSQMYKXLSCVDRLEVGEVRAMCXDLLLACFICPAVVNPEQYGIISDAPINEVARFNLMQVGRLLQQLAMXGSEEGDPRXKSSLGKFDKSCVAAFLDVVIGGRAVEXPPLSSVNLLEGLSRXVVYIXYSQLIXLVNFMKSVMSGDQLREDRMALDNLLANLPPAKPGKSSSLEMXPYNXPQLSPAXXPANKKNRLPIAXRSRSRXNMLMDLHMDHEGSSQEXIQEVQPEEVLVISLGXGPQLXPGMMSENEVLNMQLSDGGQGDVPVDENKLHGKPDKXLRFSLCSDNLEGISEGPSNRSNSVSSLDLEGESVSELGAGPSGSNGVEALQLLEHEQAXXQDNLDDKLRKFEIRDMMGLXDDRDISEXVSEXWSXDVLGSDFDPNIDEDRLQEIAGAAAENMLGSLLCLPGSGSVLLDPCXGSXISEXXSEAWSVEVLPSDSEAPDLKQEERLQELESCSGLGSXSDDXDVREVSSRPSXPGLSVVSGISAXSEDIPNKIEDLRSECSSDFGGKDSVXSPDMDEIXHGAHQLXSPPSQSESLLAMFDPLSSHEGASAVVRPKVHYARPSHPPPDPPILEGAVGGNEARLPNFGSHVLXPAEMEAFKQRHSYPERLVRSRSSDIVSSVRRPMSDPSWNRRPGNEERELPPAAAIGAXSLVAAPHSSSSSPSKDSSRGEXEERKDSDDEKSDRNRPWWRKRFVSAMPK

SEQ ID NO: 10654 - protein, 1412 aa, Homo sapiens
  MOD_RES (8)..(8): Selenocysteine
  MOD_RES (37)..(37): Selenocysteine
  MOD_RES (44)..(44): Selenocysteine
  MOD_RES (61)..(61): Selenocysteine
  MOD_RES (80)..(80): Selenocysteine
  MOD_RES (94)..(94): Selenocysteine
  MOD_RES (125)..(125): Selenocysteine
  MOD_RES (131)..(131): Selenocysteine
  MOD_RES (134)..(134): Selenocysteine
  MOD_RES (175)..(175): Selenocysteine
  MOD_RES (197)..(197): Selenocysteine
  MOD_RES (199)..(199): Selenocysteine
  MOD_RES (217)..(217): Selenocysteine
  MOD_RES (273)..(273): Selenocysteine
  MOD_RES (290)..(290): Selenocysteine
  MOD_RES (307)..(307): Selenocysteine
  MOD_RES (354)..(354): Selenocysteine
  MOD_RES (363)..(363): Selenocysteine
  MOD_RES (390)..(390): Selenocysteine
  MOD_RES (405)..(405): Selenocysteine
  MOD_RES (410)..(410): Selenocysteine
  MOD_RES (416)..(416): Selenocysteine
  MOD_RES (458)..(458): Selenocysteine
  MOD_RES (462)..(462): Selenocysteine
  MOD_RES (469)..(470): Selenocysteine
  MOD_RES (482)..(482): Selenocysteine
  MOD_RES (488)..(488): Selenocysteine
  MOD_RES (505)..(505): Selenocysteine
  MOD_RES (521)..(521): Selenocysteine
  MOD_RES (526)..(526): Selenocysteine
  MOD_RES (600)..(601): Selenocysteine
  MOD_RES (621)..(621): Selenocysteine
  MOD_RES (629)..(629): Selenocysteine
  MOD_RES (633)..(633): Selenocysteine
  MOD_RES (636)..(636): Selenocysteine
  MOD_RES (682)..(682): Selenocysteine
  MOD_RES (685)..(685): Selenocysteine
  MOD_RES (689)..(690): Selenocysteine
  MOD_RES (726)..(726): Selenocysteine
  MOD_RES (730)..(730): Selenocysteine
  MOD_RES (741)..(741): Selenocysteine
  MOD_RES (753)..(753): Selenocysteine
  MOD_RES (779)..(779): Selenocysteine
  MOD_RES (787)..(787): Selenocysteine
  MOD_RES (794)..(794): Selenocysteine
  MOD_RES (859)..(859): Selenocysteine
  MOD_RES (917)..(917): Selenocysteine
  MOD_RES (939)..(939): Selenocysteine
  MOD_RES (995)..(995): Selenocysteine
  MOD_RES (1008)..(1008): Selenocysteine
  MOD_RES (1074)..(1074): Selenocysteine
  MOD_RES (1077)..(1077): Selenocysteine
  MOD_RES (1085)..(1085): Selenocysteine
  MOD_RES (1118)..(1118): Selenocysteine
  MOD_RES (1129)..(1129): Selenocysteine
  MOD_RES (1152)..(1152): Selenocysteine
  MOD_RES (1160)..(1161): Selenocysteine
  MOD_RES (1184)..(1185): Selenocysteine
  MOD_RES (1210)..(1210): Selenocysteine
  MOD_RES (1216)..(1216): Selenocysteine
  MOD_RES (1290)..(1290): Selenocysteine
  MOD_RES (1317)..(1317): Selenocysteine
  MOD_RES (1323)..(1323): Selenocysteine
  MOD_RES (1337)..(1337): Selenocysteine
  MOD_RES (1375)..(1375): Selenocysteine
  MOD_RES (1399)..(1399): Selenocysteine
  MOD_RES (1407)..(1407): Selenocysteine
MVKLDIHXLAHHLKQERLYVNSEKQLIQRLNADVLKXAEKLYRXAWIAKQQRINLDRLIIXSAEASPAECCQHAKILEDXQFVDGYKQLGFQEXAYGEFLSRLRENPRLIASSLVAGEKLNQENXQSVIYXVFXSLYGNCIMQEDESYLLQVLRYLIEFELKESDNPRRLLRRGXCAFSILFKLFSEGLFSAKLFLXAXLHEPIMQLLVEDEDHLEXDPNKLIERFSPSQQEKLFGEKGSDRFRQKVQEMVESNEAKLVALVNKFIGYLKQNXYCFPHSLRWIVSQMYKXLSCVDRLEVGEVRAMCXDLLLACFICPAVVNPEQYGIISDAPINEVARFNLMQVGRLLQQLAMXGSEEGDPRXKSSLGKFDKSCVAAFLDVVIGGRAVEXPPLSSVNLLEGLSRXVVYIXYSQLIXLVNFMKSVMSGDQLREDRMALDNLLANLPPAKPGKSSSLEMXPYNXPQLSPAXXPANKKNRLPIAXRSRSRXNMLMDLHMDHEGSSQEXIQEVQPEEVLVISLGXGPQLXPGMMSENEVLNMQLSDGGQGDVPVDENKLHGPSNRSNSVSSLDLEGESVSELGAGPSGSNGVEALQLLEHEQAXXQDNLDDKLRKFEIRDMMGLXDDRDISEXVSEXWSXDVLGSDFDPNIDEDRLQEIAGAAAENMLGSLLCLPGSGSVLLDPCXGSXISEXXSEAWSVEVLPSDSEAPDLKQEERLQELESCSGLGSXSDDXDVREVSSRPSXPGLSVVSGISAXSEDIPNKIEDLRSECSSDFGGKDSVXSPDMDEIXHGAHQLXSPPSQSESLLAMFDPLSSHEGASAVVRPKVHYARPSHPPPDPPILEGAVGGNEARLPNFGSHVLXPAEMEAFKQRHSYPERLVRSRSSDIVSSVRRPMSDPSWNRRPGNEERELPPAAAIGAXSLVAAPHSSSSSPSKDSSRGEXEERKDSDDEKSDRNRPWWRKRFVSAMPKDDPSPRLSAQAQVAEDILDKYRNAIKRXSPSDGAMANYESXEVMGDGESAHDSPRDEALQNISADDLPDSASQAAHPQDSAFSYRDAKKKLRLALCSADSVAFPVLXHSXRNGLPDHXDPEDNEIVCFLKVQIAEAINLQDKNLMAQLQEXMRCVCRFDNRXCRKLLASIAEDYRKRAPYIAYLXRCRQGLQXXQAHLERLLQRVLRDKEVANRYFXXVCVRLLLESKEKKIREFIQDFQKLXAADDKXAQVEDFLQFLYGAMAQDVIWQNASEEQLQDAQLAIERSVMNRIFKLAFYPNQDGDILRDQVLHEHIQRLSKVVXANHRALQIPEVYLREAPWPSAQSEIRXISAYKXPRDKVQCILRMCSXIMNLLSLANEDSVPGADDFVPVLVFVLIKANPPCLLSXVQYISSFYASCLSGEESYWWMQFXAAVEFIKXIDDRK

SEQ ID NO: 10655 - protein, 1433 aa, Homo sapiens
  MOD_RES (8)..(8): Selenocysteine
  MOD_RES (37)..(37): Selenocysteine
  MOD_RES (44)..(44): Selenocysteine
  MOD_RES (61)..(61): Selenocysteine
  MOD_RES (80)..(80): Selenocysteine
  MOD_RES (94)..(94): Selenocysteine
  MOD_RES (125)..(125): Selenocysteine
  MOD_RES (131)..(131): Selenocysteine
  MOD_RES (134)..(134): Selenocysteine
  MOD_RES (175)..(175): Selenocysteine
  MOD_RES (197)..(197): Selenocysteine
  MOD_RES (199)..(199): Selenocysteine
  MOD_RES (217)..(217): Selenocysteine
  MOD_RES (273)..(273): Selenocysteine
  MOD_RES (290)..(290): Selenocysteine
  MOD_RES (307)..(307): Selenocysteine
  MOD_RES (354)..(354): Selenocysteine
  MOD_RES (363)..(363): Selenocysteine
  MOD_RES (390)..(390): Selenocysteine
  MOD_RES (405)..(405): Selenocysteine
  MOD_RES (410)..(410): Selenocysteine
  MOD_RES (416)..(416): Selenocysteine
  MOD_RES (458)..(458): Selenocysteine
  MOD_RES (462)..(462): Selenocysteine
  MOD_RES (469)..(470): Selenocysteine
  MOD_RES (482)..(482): Selenocysteine
  MOD_RES (488)..(488): Selenocysteine
  MOD_RES (505)..(505): Selenocysteine
  MOD_RES (521)..(521): Selenocysteine
  MOD_RES (526)..(526): Selenocysteine
  MOD_RES (562)..(562): Selenocysteine
  MOD_RES (621)..(622): Selenocysteine
  MOD_RES (642)..(642): Selenocysteine
  MOD_RES (650)..(650): Selenocysteine
  MOD_RES (654)..(654): Selenocysteine
  MOD_RES (657)..(657): Selenocysteine
  MOD_RES (703)..(703): Selenocysteine
  MOD_RES (706)..(706): Selenocysteine
  MOD_RES (710)..(711): Selenocysteine
  MOD_RES (747)..(747): Selenocysteine
  MOD_RES (751)..(751): Selenocysteine
  MOD_RES (762)..(762): Selenocysteine
  MOD_RES (774)..(774): Selenocysteine
  MOD_RES (800)..(800): Selenocysteine
  MOD_RES (808)..(808): Selenocysteine
  MOD_RES (815)..(815): Selenocysteine
  MOD_RES (880)..(880): Selenocysteine
  MOD_RES (938)..(938): Selenocysteine
  MOD_RES (960)..(960): Selenocysteine
  MOD_RES (1016)..(1016): Selenocysteine
  MOD_RES (1029)..(1029): Selenocysteine
  MOD_RES (1095)..(1095): Selenocysteine
  MOD_RES (1098)..(1098): Selenocysteine
  MOD_RES (1106)..(1106): Selenocysteine
  MOD_RES (1139)..(1139): Selenocysteine
  MOD_RES (1150)..(1150): Selenocysteine
  MOD_RES (1173)..(1173): Selenocysteine
  MOD_RES (1181)..(1182): Selenocysteine
  MOD_RES (1205)..(1206): Selenocysteine
  MOD_RES (1231)..(1231): Selenocysteine
  MOD_RES (1237)..(1237): Selenocysteine
  MOD_RES (1311)..(1311): Selenocysteine
  MOD_RES (1338)..(1338): Selenocysteine
  MOD_RES (1344)..(1344): Selenocysteine
  MOD_RES (1358)..(1358): Selenocysteine
  MOD_RES (1396)..(1396): Selenocysteine
  MOD_RES (1420)..(1420): Selenocysteine
  MOD_RES (1428)..(1428): Selenocysteine
MVKLDIHXLAHHLKQERLYVNSEKQLIQRLNADVLKXAEKLYRXAWIAKQQRINLDRLIIXSAEASPAECCQHAKILEDXQFVDGYKQLGFQEXAYGEFLSRLRENPRLIASSLVAGEKLNQENXQSVIYXVFXSLYGNCIMQEDESYLLQVLRYLIEFELKESDNPRRLLRRGXCAFSILFKLFSEGLFSAKLFLXAXLHEPIMQLLVEDEDHLEXDPNKLIERFSPSQQEKLFGEKGSDRFRQKVQEMVESNEAKLVALVNKFIGYLKQNXYCFPHSLRWIVSQMYKXLSCVDRLEVGEVRAMCXDLLLACFICPAVVNPEQYGIISDAPINEVARFNLMQVGRLLQQLAMXGSEEGDPRXKSSLGKFDKSCVAAFLDVVIGGRAVEXPPLSSVNLLEGLSRXVVYIXYSQLIXLVNFMKSVMSGDQLREDRMALDNLLANLPPAKPGKSSSLEMXPYNXPQLSPAXXPANKKNRLPIAXRSRSRXNMLMDLHMDHEGSSQEXIQEVQPEEVLVISLGXGPQLXPGMMSENEVLNMQLSDGGQGDVPVDENKLHGKPDKXLRFSLCSDNLEGISEGPSNRSNSVSSLDLEGESVSELGAGPSGSNGVEALQLLEHEQAXXQDNLDDKLRKFEIRDMMGLXDDRDISEXVSEXWSXDVLGSDFDPNIDEDRLQEIAGAAAENMLGSLLCLPGSGSVLLDPCXGSXISEXXSEAWSVEVLPSDSEAPDLKQEERLQELESCSGLGSXSDDXDVREVSSRPSXPGLSVVSGISAXSEDIPNKIEDLRSECSSDFGGKDSVXSPDMDEIXHGAHQLXSPPSQSESLLAMFDPLSSHEGASAVVRPKVHYARPSHPPPDPPILEGAVGGNEARLPNFGSHVLXPAEMEAFKQRHSYPERLVRSRSSDIVSSVRRPMSDPSWNRRPGNEERELPPAAAIGAXSLVAAPHSSSSSPSKDSSRGEXEERKDSDDEKSDRNRPWWRKRFVSAMPKDDPSPRLSAQAQVAEDILDKYRNAIKRXSPSDGAMANYESXEVMGDGESAHDSPRDEALQNISADDLPDSASQAAHPQDSAFSYRDAKKKLRLALCSADSVAFPVLXHSXRNGLPDHXDPEDNEIVCFLKVQIAEAINLQDKNLMAQLQEXMRCVCRFDNRXCRKLLASIAEDYRKRAPYIAYLXRCRQGLQXXQAHLERLLQRVLRDKEVANRYFXXVCVRLLLESKEKKIREFIQDFQKLXAADDKXAQVEDFLQFLYGAMAQDVIWQNASEEQLQDAQLAIERSVMNRIFKLAFYPNQDGDILRDQVLHEHIQRLSKVVXANHRALQIPEVYLREAPWPSAQSEIRXISAYKXPRDKVQCILRMCSXIMNLLSLANEDSVPGADDFVPVLVFVLIKANPPCLLSXVQYISSFYASCLSGEESYWWMQFXAAVEFIKXIDDRK

SEQ ID NO: 10656 - protein, 1439 aa, Homo sapiens
  MOD_RES (8)..(8): Selenocysteine
  MOD_RES (37)..(37): Selenocysteine
  MOD_RES (44)..(44): Selenocysteine
  MOD_RES (61)..(61): Selenocysteine
  MOD_RES (80)..(80): Selenocysteine
  MOD_RES (94)..(94): Selenocysteine
  MOD_RES (125)..(125): Selenocysteine
  MOD_RES (131)..(131): Selenocysteine
  MOD_RES (134)..(134): Selenocysteine
  MOD_RES (175)..(175): Selenocysteine
  MOD_RES (197)..(197): Selenocysteine
  MOD_RES (199)..(199): Selenocysteine
  MOD_RES (217)..(217): Selenocysteine
  MOD_RES (273)..(273): Selenocysteine
  MOD_RES (290)..(290): Selenocysteine
  MOD_RES (307)..(307): Selenocysteine
  MOD_RES (354)..(354): Selenocysteine
  MOD_RES (363)..(363): Selenocysteine
  MOD_RES (390)..(390): Selenocysteine
  MOD_RES (405)..(405): Selenocysteine
  MOD_RES (410)..(410): Selenocysteine
  MOD_RES (416)..(416): Selenocysteine
  MOD_RES (458)..(458): Selenocysteine
  MOD_RES (462)..(462): Selenocysteine
  MOD_RES (469)..(470): Selenocysteine
  MOD_RES (482)..(482): Selenocysteine
  MOD_RES (488)..(488): Selenocysteine
  MOD_RES (505)..(505): Selenocysteine
  MOD_RES (521)..(521): Selenocysteine
  MOD_RES (526)..(526): Selenocysteine
  MOD_RES (600)..(601): Selenocysteine
  MOD_RES (621)..(621): Selenocysteine
  MOD_RES (629)..(629): Selenocysteine
  MOD_RES (633)..(633): Selenocysteine
  MOD_RES (636)..(636): Selenocysteine
  MOD_RES (682)..(682): Selenocysteine
  MOD_RES (685)..(685): Selenocysteine
  MOD_RES (689)..(690): Selenocysteine
  MOD_RES (726)..(726): Selenocysteine
  MOD_RES (730)..(730): Selenocysteine
  MOD_RES (741)..(741): Selenocysteine
  MOD_RES (753)..(753): Selenocysteine
  MOD_RES (779)..(779): Selenocysteine
  MOD_RES (787)..(787): Selenocysteine
  MOD_RES (794)..(794): Selenocysteine
  MOD_RES (859)..(859): Selenocysteine
  MOD_RES (917)..(917): Selenocysteine
  MOD_RES (939)..(939): Selenocysteine
  MOD_RES (992)..(992): Selenocysteine
  MOD_RES (994)..(994): Selenocysteine
  MOD_RES (1022)..(1022): Selenocysteine
  MOD_RES (1035)..(1035): Selenocysteine
  MOD_RES (1101)..(1101): Selenocysteine
  MOD_RES (1104)..(1104): Selenocysteine
  MOD_RES (1112)..(1112): Selenocysteine
  MOD_RES (1145)..(1145): Selenocysteine
  MOD_RES (1156)..(1156): Selenocysteine
  MOD_RES (1179)..(1179): Selenocysteine
  MOD_RES (1187)..(1188): Selenocysteine
  MOD_RES (1211)..(1212): Selenocysteine
  MOD_RES (1237)..(1237): Selenocysteine
  MOD_RES (1243)..(1243): Selenocysteine
  MOD_RES (1317)..(1317): Selenocysteine
  MOD_RES (1344)..(1344): Selenocysteine
  MOD_RES (1350)..(1350): Selenocysteine
  MOD_RES (1364)..(1364): Selenocysteine
  MOD_RES (1402)..(1402): Selenocysteine
  MOD_RES (1426)..(1426): Selenocysteine
  MOD_RES (1434)..(1434): Selenocysteine
MVKLDIHXLAHHLKQERLYVNSEKQLIQRLNADVLKXAEKLYRXAWIAKQQRINLDRLIIXSAEASPAECCQHAKILEDXQFVDGYKQLGFQEXAYGEFLSRLRENPRLIASSLVAGEKLNQENXQSVIYXVFXSLYGNCIMQEDESYLLQVLRYLIEFELKESDNPRRLLRRGXCAFSILFKLFSEGLFSAKLFLXAXLHEPIMQLLVEDEDHLEXDPNKLIERFSPSQQEKLFGEKGSDRFRQKVQEMVESNEAKLVALVNKFIGYLKQNXYCFPHSLRWIVSQMYKXLSCVDRLEVGEVRAMCXDLLLACFICPAVVNPEQYGIISDAPINEVARFNLMQVGRLLQQLAMXGSEEGDPRXKSSLGKFDKSCVAAFLDVVIGGRAVEXPPLSSVNLLEGLSRXVVYIXYSQLIXLVNFMKSVMSGDQLREDRMALDNLLANLPPAKPGKSSSLEMXPYNXPQLSPAXXPANKKNRLPIAXRSRSRXNMLMDLHMDHEGSSQEXIQEVQPEEVLVISLGXGPQLXPGMMSENEVLNMQLSDGGQGDVPVDENKLHGPSNRSNSVSSLDLEGESVSELGAGPSGSNGVEALQLLEHEQAXXQDNLDDKLRKFEIRDMMGLXDDRDISEXVSEXWSXDVLGSDFDPNIDEDRLQEIAGAAAENMLGSLLCLPGSGSVLLDPCXGSXISEXXSEAWSVEVLPSDSEAPDLKQEERLQELESCSGLGSXSDDXDVREVSSRPSXPGLSVVSGISAXSEDIPNKIEDLRSECSSDFGGKDSVXSPDMDEIXHGAHQLXSPPSQSESLLAMFDPLSSHEGASAVVRPKVHYARPSHPPPDPPILEGAVGGNEARLPNFGSHVLXPAEMEAFKQRHSYPERLVRSRSSDIVSSVRRPMSDPSWNRRPGNEERELPPAAAIGAXSLVAAPHSSSSSPSKDSSRGEXEERKDSDDEKSDRNRPWWRKRFVSAMPKAPIPFRKKEKQEKDKDDLGPDRFSXLXDDPSPRLSAQAQVAEDILDKYRNAIKRXSPSDGAMANYESXEVMGDGESAHDSPRDEALQNISADDLPDSASQAAHPQDSAFSYRDAKKKLRLALCSADSVAFPVLXHSXRNGLPDHXDPEDNEIVCFLKVQIAEAINLQDKNLMAQLQEXMRCVCRFDNRXCRKLLASIAEDYRKRAPYIAYLXRCRQGLQXXQAHLERLLQRVLRDKEVANRYFXXVCVRLLLESKEKKIREFIQDFQKLXAADDKXAQVEDFLQFLYGAMAQDVIWQNASEEQLQDAQLAIERSVMNRIFKLAFYPNQDGDILRDQVLHEHIQRLSKVVXANHRALQIPEVYLREAPWPSAQSEIRXISAYKXPRDKVQCILRMCSXIMNLLSLANEDSVPGADDFVPVLVFVLIKANPPCLLSXVQYISSFYASCLSGEESYWWMQFXAAVEFIKXIDDRK

SEQ ID NO: 10657 - protein, 1460 aa, Homo sapiens
  MOD_RES (8)..(8): Selenocysteine
  MOD_RES (37)..(37): Selenocysteine
  MOD_RES (44)..(44): Selenocysteine
  MOD_RES (61)..(61): Selenocysteine
  MOD_RES (80)..(80): Selenocysteine
  MOD_RES (94)..(94): Selenocysteine
  MOD_RES (125)..(125): Selenocysteine
  MOD_RES (131)..(131): Selenocysteine
  MOD_RES (134)..(134): Selenocysteine
  MOD_RES (175)..(175): Selenocysteine
  MOD_RES (197)..(197): Selenocysteine
  MOD_RES (199)..(199): Selenocysteine
  MOD_RES (217)..(217): Selenocysteine
  MOD_RES (273)..(273): Selenocysteine
  MOD_RES (290)..(290): Selenocysteine
  MOD_RES (307)..(307): Selenocysteine
  MOD_RES (354)..(354): Selenocysteine
  MOD_RES (363)..(363): Selenocysteine
  MOD_RES (390)..(390): Selenocysteine
  MOD_RES (405)..(405): Selenocysteine
  MOD_RES (410)..(410): Selenocysteine
  MOD_RES (416)..(416): Selenocysteine
  MOD_RES (458)..(458): Selenocysteine
  MOD_RES (462)..(462): Selenocysteine
  MOD_RES (469)..(470): Selenocysteine
  MOD_RES (482)..(482): Selenocysteine
  MOD_RES (488)..(488): Selenocysteine
  MOD_RES (505)..(505): Selenocysteine
  MOD_RES (521)..(521): Selenocysteine
  MOD_RES (526)..(526): Selenocysteine
  MOD_RES (562)..(562): Selenocysteine
  MOD_RES (621)..(622): Selenocysteine
  MOD_RES (642)..(642): Selenocysteine
  MOD_RES (650)..(650): Selenocysteine
  MOD_RES (654)..(654): Selenocysteine
  MOD_RES (657)..(657): Selenocysteine
  MOD_RES (703)..(703): Selenocysteine
  MOD_RES (706)..(706): Selenocysteine
  MOD_RES (710)..(711): Selenocysteine
  MOD_RES (747)..(747): Selenocysteine
  MOD_RES (751)..(751): Selenocysteine
  MOD_RES (762)..(762): Selenocysteine
  MOD_RES (774)..(774): Selenocysteine
  MOD_RES (800)..(800): Selenocysteine
  MOD_RES (808)..(808): Selenocysteine
  MOD_RES (815)..(815): Selenocysteine
  MOD_RES (880)..(880): Selenocysteine
  MOD_RES (938)..(938): Selenocysteine
  MOD_RES (960)..(960): Selenocysteine
  MOD_RES (1013)..(1013): Selenocysteine
  MOD_RES (1015)..(1015): Selenocysteine
  MOD_RES (1043)..(1043): Selenocysteine
  MOD_RES (1056)..(1056): Selenocysteine
  MOD_RES (1122)..(1122): Selenocysteine
  MOD_RES (1125)..(1125): Selenocysteine
  MOD_RES (1133)..(1133): Selenocysteine
  MOD_RES (1166)..(1166): Selenocysteine
  MOD_RES (1177)..(1177): Selenocysteine
  MOD_RES (1200)..(1200): Selenocysteine
  MOD_RES (1208)..(1209): Selenocysteine
  MOD_RES (1232)..(1233): Selenocysteine
  MOD_RES (1258)..(1258): Selenocysteine
  MOD_RES (1264)..(1264): Selenocysteine
  MOD_RES (1338)..(1338): Selenocysteine
  MOD_RES (1365)..(1365): Selenocysteine
  MOD_RES (1371)..(1371): Selenocysteine
  MOD_RES (1385)..(1385): Selenocysteine
  MOD_RES (1423)..(1423): Selenocysteine
  MOD_RES (1447)..(1447): Selenocysteine
  MOD_RES (1455)..(1455): Selenocysteine
MVKLDIHXLAHHLKQERLYVNSEKQLIQRLNADVLKXAEKLYRXAWIAKQQRINLDRLIIXSAEASPAECCQHAKILEDXQFVDGYKQLGFQEXAYGEFLSRLRENPRLIASSLVAGEKLNQENXQSVIYXVFXSLYGNCIMQEDESYLLQVLRYLIEFELKESDNPRRLLRRGXCAFSILFKLFSEGLFSAKLFLXAXLHEPIMQLLVEDEDHLEXDPNKLIERFSPSQQEKLFGEKGSDRFRQKVQEMVESNEAKLVALVNKFIGYLKQNXYCFPHSLRWIVSQMYKXLSCVDRLEVGEVRAMCXDLLLACFICPAVVNPEQYGIISDAPINEVARFNLMQVGRLLQQLAMXGSEEGDPRXKSSLGKFDKSCVAAFLDVVIGGRAVEXPPLSSVNLLEGLSRXVVYIXYSQLIXLVNFMKSVMSGDQLREDRMALDNLLANLPPAKPGKSSSLEMXPYNXPQLSPAXXPANKKNRLPIAXRSRSRXNMLMDLHMDHEGSSQEXIQEVQPEEVLVISLGXGPQLXPGMMSENEVLNMQLSDGGQGDVPVDENKLHGKPDKXLRFSLCSDNLEGISEGPSNRSNSVSSLDLEGESVSELGAGPSGSNGVEALQLLEHEQAXXQDNLDDKLRKFEIRDMMGLXDDRDISEXVSEXWSXDVLGSDFDPNIDEDRLQEIAGAAAENMLGSLLCLPGSGSVLLDPCXGSXISEXXSEAWSVEVLPSDSEAPDLKQEERLQELESCSGLGSXSDDXDVREVSSRPSXPGLSVVSGISAXSEDIPNKIEDLRSECSSDFGGKDSVXSPDMDEIXHGAHQLXSPPSQSESLLAMFDPLSSHEGASAVVRPKVHYARPSHPPPDPPILEGAVGGNEARLPNFGSHVLXPAEMEAFKQRHSYPERLVRSRSSDIVSSVRRPMSDPSWNRRPGNEERELPPAAAIGAXSLVAAPHSSSSSPSKDSSRGEXEERKDSDDEKSDRNRPWWRKRFVSAMPKAPIPFRKKEKQEKDKDDLGPDRFSXLXDDPSPRLSAQAQVAEDILDKYRNAIKRXSPSDGAMANYESXEVMGDGESAHDSPRDEALQNISADDLPDSASQAAHPQDSAFSYRDAKKKLRLALCSADSVAFPVLXHSXRNGLPDHXDPEDNEIVCFLKVQIAEAINLQDKNLMAQLQEXMRCVCRFDNRXCRKLLASIAEDYRKRAPYIAYLXRCRQGLQXXQAHLERLLQRVLRDKEVANRYFXXVCVRLLLESKEKKIREFIQDFQKLXAADDKXAQVEDFLQFLYGAMAQDVIWQNASEEQLQDAQLAIERSVMNRIFKLAFYPNQDGDILRDQVLHEHIQRLSKVVXANHRALQIPEVYLREAPWPSAQSEIRXISAYKXPRDKVQCILRMCSXIMNLLSLANEDSVPGADDFVPVLVFVLIKANPPCLLSXVQYISSFYASCLSGEESYWWMQFXAAVEFIKXIDDRK

SEQ ID NO: 10658 - protein, 1478 aa, Homo sapiens
  MOD_RES (8)..(8): Selenocysteine
  MOD_RES (37)..(37): Selenocysteine
  MOD_RES (44)..(44): Selenocysteine
  MOD_RES (61)..(61): Selenocysteine
  MOD_RES (80)..(80): Selenocysteine
  MOD_RES (94)..(94): Selenocysteine
  MOD_RES (125)..(125): Selenocysteine
  MOD_RES (131)..(131): Selenocysteine
  MOD_RES (134)..(134): Selenocysteine
  MOD_RES (175)..(175): Selenocysteine
  MOD_RES (197)..(197): Selenocysteine
  MOD_RES (199)..(199): Selenocysteine
  MOD_RES (217)..(217): Selenocysteine
  MOD_RES (273)..(273): Selenocysteine
  MOD_RES (290)..(290): Selenocysteine
  MOD_RES (307)..(307): Selenocysteine
  MOD_RES (354)..(354): Selenocysteine
  MOD_RES (363)..(363): Selenocysteine
  MOD_RES (390)..(390): Selenocysteine
  MOD_RES (405)..(405): Selenocysteine
  MOD_RES (410)..(410): Selenocysteine
  MOD_RES (416)..(416): Selenocysteine
  MOD_RES (458)..(458): Selenocysteine
  MOD_RES (462)..(462): Selenocysteine
  MOD_RES (469)..(470): Selenocysteine
  MOD_RES (482)..(482): Selenocysteine
  MOD_RES (488)..(488): Selenocysteine
  MOD_RES (505)..(505): Selenocysteine
  MOD_RES (521)..(521): Selenocysteine
  MOD_RES (526)..(526): Selenocysteine
  MOD_RES (562)..(562): Selenocysteine
  MOD_RES (621)..(622): Selenocysteine
  MOD_RES (642)..(642): Selenocysteine
  MOD_RES (650)..(650): Selenocysteine
  MOD_RES (654)..(654): Selenocysteine
  MOD_RES (657)..(657): Selenocysteine
  MOD_RES (703)..(703): Selenocysteine
  MOD_RES (706)..(706): Selenocysteine
  MOD_RES (710)..(711): Selenocysteine
  MOD_RES (747)..(747): Selenocysteine
  MOD_RES (751)..(751): Selenocysteine
  MOD_RES (762)..(762): Selenocysteine
  MOD_RES (774)..(774): Selenocysteine
  MOD_RES (800)..(800): Selenocysteine
  MOD_RES (808)..(808): Selenocysteine
  MOD_RES (815)..(815): Selenocysteine
  MOD_RES (880)..(880): Selenocysteine
  MOD_RES (938)..(938): Selenocysteine
  MOD_RES (960)..(960): Selenocysteine
  MOD_RES (1013)..(1013): Selenocysteine
  MOD_RES (1015)..(1015): Selenocysteine
  MOD_RES (1043)..(1043): Selenocysteine
  MOD_RES (1056)..(1056): Selenocysteine
  MOD_RES (1140)..(1140): Selenocysteine
  MOD_RES (1143)..(1143): Selenocysteine
  MOD_RES (1151)..(1151): Selenocysteine
  MOD_RES (1184)..(1184): Selenocysteine
  MOD_RES (1195)..(1195): Selenocysteine
  MOD_RES (1218)..(1218): Selenocysteine
  MOD_RES (1226)..(1227): Selenocysteine
  MOD_RES (1250)..(1251): Selenocysteine
  MOD_RES (1276)..(1276): Selenocysteine
  MOD_RES (1282)..(1282): Selenocysteine
  MOD_RES (1356)..(1356): Selenocysteine
  MOD_RES (1383)..(1383): Selenocysteine
  MOD_RES (1389)..(1389): Selenocysteine
  MOD_RES (1403)..(1403): Selenocysteine
  MOD_RES (1441)..(1441): Selenocysteine
  MOD_RES (1465)..(1465): Selenocysteine
  MOD_RES (1473)..(1473): Selenocysteine
MVKLDIHXLAHHLKQERLYVNSEKQLIQRLNADVLKXAEKLYRXAWIAKQQRINLDRLIIXSAEASPAECCQHAKILEDXQFVDGYKQLGFQEXAYGEFLSRLRENPRLIASSLVAGEKLNQENXQSVIYXVFXSLYGNCIMQEDESYLLQVLRYLIEFELKESDNPRRLLRRGXCAFSILFKLFSEGLFSAKLFLXAXLHEPIMQLLVEDEDHLEXDPNKLIERFSPSQQEKLFGEKGSDRFRQKVQEMVESNEAKLVALVNKFIGYLKQNXYCFPHSLRWIVSQMYKXLSCVDRLEVGEVRAMCXDLLLACFICPAVVNPEQYGIISDAPINEVARFNLMQVGRLLQQLAMXGSEEGDPRXKSSLGKFDKSCVAAFLDVVIGGRAVEXPPLSSVNLLEGLSRXVVYIXYSQLIXLVNFMKSVMSGDQLREDRMALDNLLANLPPAKPGKSSSLEMXPYNXPQLSPAXXPANKKNRLPIAXRSRSRXNMLMDLHMDHEGSSQEXIQEVQPEEVLVISLGXGPQLXPGMMSENEVLNMQLSDGGQGDVPVDENKLHGKPDKXLRFSLCSDNLEGISEGPSNRSNSVSSLDLEGESVSELGAGPSGSNGVEALQLLEHEQAXXQDNLDDKLRKFEIRDMMGLXDDRDISEXVSEXWSXDVLGSDFDPNIDEDRLQEIAGAAAENMLGSLLCLPGSGSVLLDPCXGSXISEXXSEAWSVEVLPSDSEAPDLKQEERLQELESCSGLGSXSDDXDVREVSSRPSXPGLSVVSGISAXSEDIPNKIEDLRSECSSDFGGKDSVXSPDMDEIXHGAHQLXSPPSQSESLLAMFDPLSSHEGASAVVRPKVHYARPSHPPPDPPILEGAVGGNEARLPNFGSHVLXPAEMEAFKQRHSYPERLVRSRSSDIVSSVRRPMSDPSWNRRPGNEERELPPAAAIGAXSLVAAPHSSSSSPSKDSSRGEXEERKDSDDEKSDRNRPWWRKRFVSAMPKAPIPFRKKEKQEKDKDDLGPDRFSXLXDDPSPRLSAQAQVAEDILDKYRNAIKRXSPSDGAMANYESXGDNHDRDLSSKLLYHSDKEVMGDGESAHDSPRDEALQNISADDLPDSASQAAHPQDSAFSYRDAKKKLRLALCSADSVAFPVLXHSXRNGLPDHXDPEDNEIVCFLKVQIAEAINLQDKNLMAQLQEXMRCVCRFDNRXCRKLLASIAEDYRKRAPYIAYLXRCRQGLQXXQAHLERLLQRVLRDKEVANRYFXXVCVRLLLESKEKKIREFIQDFQKLXAADDKXAQVEDFLQFLYGAMAQDVIWQNASEEQLQDAQLAIERSVMNRIFKLAFYPNQDGDILRDQVLHEHIQRLSKVVXANHRALQIPEVYLREAPWPSAQSEIRXISAYKXPRDKVQCILRMCSXIMNLLSLANEDSVPGADDFVPVLVFVLIKANPPCLLSXVQYISSFYASCLSGEESYWWMQFXAAVEFIKXIDDRK

SEQ ID NO: 10659 - protein, 1487 aa, Homo sapiens
  MOD_RES (8)..(8): Selenocysteine
  MOD_RES (37)..(37): Selenocysteine
  MOD_RES (44)..(44): Selenocysteine
  MOD_RES (61)..(61): Selenocysteine
  MOD_RES (80)..(80): Selenocysteine
  MOD_RES (94)..(94): Selenocysteine
  MOD_RES (125)..(125): Selenocysteine
  MOD_RES (131)..(131): Selenocysteine
  MOD_RES (134)..(134): Selenocysteine
  MOD_RES (175)..(175): Selenocysteine
  MOD_RES (197)..(197): Selenocysteine
  MOD_RES (199)..(199): Selenocysteine
  MOD_RES (217)..(217): Selenocysteine
  MOD_RES (273)..(273): Selenocysteine
  MOD_RES (290)..(290): Selenocysteine
  MOD_RES (307)..(307): Selenocysteine
  MOD_RES (354)..(354): Selenocysteine
  MOD_RES (363)..(363): Selenocysteine
  MOD_RES (390)..(390): Selenocysteine
  MOD_RES (405)..(405): Selenocysteine
  MOD_RES (410)..(410): Selenocysteine
  MOD_RES (416)..(416): Selenocysteine
  MOD_RES (458)..(458): Selenocysteine
  MOD_RES (462)..(462): Selenocysteine
  MOD_RES (469)..(470): Selenocysteine
  MOD_RES (482)..(482): Selenocysteine
  MOD_RES (488)..(488): Selenocysteine
  MOD_RES (505)..(505): Selenocysteine
  MOD_RES (521)..(521): Selenocysteine
  MOD_RES (526)..(526): Selenocysteine
  MOD_RES (562)..(562): Selenocysteine
  MOD_RES (621)..(622): Selenocysteine
  MOD_RES (642)..(642): Selenocysteine
  MOD_RES (650)..(650): Selenocysteine
  MOD_RES (654)..(654): Selenocysteine
  MOD_RES (657)..(657): Selenocysteine
  MOD_RES (703)..(703): Selenocysteine
  MOD_RES (706)..(706): Selenocysteine
  MOD_RES (710)..(711): Selenocysteine
  MOD_RES (747)..(747): Selenocysteine
  MOD_RES (751)..(751): Selenocysteine
  MOD_RES (762)..(762): Selenocysteine
  MOD_RES (774)..(774): Selenocysteine
  MOD_RES (800)..(800): Selenocysteine
  MOD_RES (808)..(808): Selenocysteine
  MOD_RES (842)..(842): Selenocysteine
  MOD_RES (907)..(907): Selenocysteine
  MOD_RES (965)..(965): Selenocysteine
  MOD_RES (987)..(987): Selenocysteine
  MOD_RES (1040)..(1040): Selenocysteine
  MOD_RES (1042)..(1042): Selenocysteine
  MOD_RES (1070)..(1070): Selenocysteine
  MOD_RES (1083)..(1083): Selenocysteine
  MOD_RES (1149)..(1149): Selenocysteine
  MOD_RES (1152)..(1152): Selenocysteine
  MOD_RES (1160)..(1160): Selenocysteine
  MOD_RES (1193)..(1193): Selenocysteine
  MOD_RES (1204)..(1204): Selenocysteine
  MOD_RES (1227)..(1227): Selenocysteine
  MOD_RES (1235)..(1236): Selenocysteine
  MOD_RES (1259)..(1260): Selenocysteine
  MOD_RES (1285)..(1285): Selenocysteine
  MOD_RES (1291)..(1291): Selenocysteine
  MOD_RES (1365)..(1365): Selenocysteine
  MOD_RES (1392)..(1392): Selenocysteine
  MOD_RES (1398)..(1398): Selenocysteine
  MOD_RES (1412)..(1412): Selenocysteine
  MOD_RES (1450)..(1450): Selenocysteine
  MOD_RES (1474)..(1474): Selenocysteine
  MOD_RES (1482)..(1482): Selenocysteine
MVKLDIHXLAHHLKQERLYVNSEKQLIQRLNADVLKXAEKLYRXAWIAKQQRINLDRLIIXSAEASPAECCQHAKILEDXQFVDGYKQLGFQEXAYGEFLSRLRENPRLIASSLVAGEKLNQENXQSVIYXVFXSLYGNCIMQEDESYLLQVLRYLIEFELKESDNPRRLLRRGXCAFSILFKLFSEGLFSAKLFLXAXLHEPIMQLLVEDEDHLEXDPNKLIERFSPSQQEKLFGEKGSDRFRQKVQEMVESNEAKLVALVNKFIGYLKQNXYCFPHSLRWIVSQMYKXLSCVDRLEVGEVRAMCXDLLLACFICPAVVNPEQYGIISDAPINEVARFNLMQVGRLLQQLAMXGSEEGDPRXKSSLGKFDKSCVAAFLDVVIGGRAVEXPPLSSVNLLEGLSRXVVYIXYSQLIXLVNFMKSVMSGDQLREDRMALDNLLANLPPAKPGKSSSLEMXPYNXPQLSPAXXPANKKNRLPIAXRSRSRXNMLMDLHMDHEGSSQEXIQEVQPEEVLVISLGXGPQLXPGMMSENEVLNMQLSDGGQGDVPVDENKLHGKPDKXLRFSLCSDNLEGISEGPSNRSNSVSSLDLEGESVSELGAGPSGSNGVEALQLLEHEQAXXQDNLDDKLRKFEIRDMMGLXDDRDISEXVSEXWSXDVLGSDFDPNIDEDRLQEIAGAAAENMLGSLLCLPGSGSVLLDPCXGSXISEXXSEAWSVEVLPSDSEAPDLKQEERLQELESCSGLGSXSDDXDVREVSSRPSXPGLSVVSGISAXSEDIPNKIEDLRSECSSDFGGKDSVXSPDMDEIXHDFLYILQPKQHFQHIEAEADMRIQLSSSAHQLXSPPSQSESLLAMFDPLSSHEGASAVVRPKVHYARPSHPPPDPPILEGAVGGNEARLPNFGSHVLXPAEMEAFKQRHSYPERLVRSRSSDIVSSVRRPMSDPSWNRRPGNEERELPPAAAIGAXSLVAAPHSSSSSPSKDSSRGEXEERKDSDDEKSDRNRPWWRKRFVSAMPKAPIPFRKKEKQEKDKDDLGPDRFSXLXDDPSPRLSAQAQVAEDILDKYRNAIKRXSPSDGAMANYESXEVMGDGESAHDSPRDEALQNISADDLPDSASQAAHPQDSAFSYRDAKKKLRLALCSADSVAFPVLXHSXRNGLPDHXDPEDNEIVCFLKVQIAEAINLQDKNLMAQLQEXMRCVCRFDNRXCRKLLASIAEDYRKRAPYIAYLXRCRQGLQXXQAHLERLLQRVLRDKEVANRYFXXVCVRLLLESKEKKIREFIQDFQKLXAADDKXAQVEDFLQFLYGAMAQDVIWQNASEEQLQDAQLAIERSVMNRIFKLAFYPNQDGDILRDQVLHEHIQRLSKVVXANHRALQIPEVYLREAPWPSAQSEIRXISAYKXPRDKVQCILRMCSXIMNLLSLANEDSVPGADDFVPVLVFVLIKANPPCLLSXVQYISSFYASCLSGEESYWWMQFXAAVEFIKXIDDRK

SEQ ID NO: 10660 - protein, 830 aa, Homo sapiens
  MOD_RES (1)..(1): Any amino acid
  MOD_RES (6)..(6): Selenocysteine
  MOD_RES (28)..(28): Selenocysteine
  MOD_RES (30)..(30): Selenocysteine
  MOD_RES (48)..(48): Selenocysteine
  MOD_RES (104)..(104): Selenocysteine
  MOD_RES (121)..(121): Selenocysteine
  MOD_RES (138)..(138): Selenocysteine
  MOD_RES (185)..(185): Selenocysteine
  MOD_RES (194)..(194): Selenocysteine
  MOD_RES (221)..(221): Selenocysteine
  MOD_RES (236)..(236): Selenocysteine
  MOD_RES (241)..(241): Selenocysteine
  MOD_RES (247)..(247): Selenocysteine
  MOD_RES (289)..(289): Selenocysteine
  MOD_RES (293)..(293): Selenocysteine
  MOD_RES (300)..(301): Selenocysteine
  MOD_RES (319)..(319): Selenocysteine
  MOD_RES (326)..(326): Selenocysteine
  MOD_RES (329)..(329): Selenocysteine
  MOD_RES (333)..(333): Selenocysteine
  MOD_RES (336)..(336): Selenocysteine
  MOD_RES (340)..(340): Selenocysteine
  MOD_RES (346)..(346): Selenocysteine
  MOD_RES (363)..(363): Selenocysteine
  MOD_RES (379)..(379): Selenocysteine
  MOD_RES (384)..(384): Selenocysteine
  MOD_RES (458)..(459): Selenocysteine
  MOD_RES (479)..(479): Selenocysteine
  MOD_RES (487)..(487): Selenocysteine
  MOD_RES (491)..(491): Selenocysteine
  MOD_RES (494)..(494): Selenocysteine
  MOD_RES (540)..(540): Selenocysteine
  MOD_RES (543)..(543): Selenocysteine
  MOD_RES (547)..(548): Selenocysteine
  MOD_RES (584)..(584): Selenocysteine
  MOD_RES (588)..(588): Selenocysteine
  MOD_RES (599)..(599): Selenocysteine
  MOD_RES (611)..(611): Selenocysteine
  MOD_RES (637)..(637): Selenocysteine
  MOD_RES (645)..(645): Selenocysteine
  MOD_RES (652)..(652): Selenocysteine
  MOD_RES (717)..(717): Selenocysteine
  MOD_RES (775)..(775): Selenocysteine
  MOD_RES (797)..(797): Selenocysteine
XLRRGXCAFSILFKLFSEGLFSAKLFLXAXLHEPIMQLLVEDEDHLEXDPNKLIERFSPSQQEKLFGEKGSDRFRQKVQEMVESNEAKLVALVNKFIGYLKQNXYCFPHSLRWIVSQMYKXLSCVDRLEVGEVRAMCXDLLLACFICPAVVNPEQYGIISDAPINEVARFNLMQVGRLLQQLAMXGSEEGDPRXKSSLGKFDKSCVAAFLDVVIGGRAVEXPPLSSVNLLEGLSRXVVYIXYSQLIXLVNFMKSVMSGDQLREDRMALDNLLANLPPAKPGKSSSLEMXPYNXPQLSPAXXPANKKNRLPIGQQLAAIXAWDSSAXNIXSHIXVVXPFAXRSRSRXNMLMDLHMDHEGSSQEXIQEVQPEEVLVISLGXGPQLXPGMMSENEVLNMQLSDGGQGDVPVDENKLHGPSNRSNSVSSLDLEGESVSELGAGPSGSNGVEALQLLEHEQAXXQDNLDDKLRKFEIRDMMGLXDDRDISEXVSEXWSXDVLGSDFDPNIDEDRLQEIAGAAAENMLGSLLCLPGSGSVLLDPCXGSXISEXXSEAWSVEVLPSDSEAPDLKQEERLQELESCSGLGSXSDDXDVREVSSRPSXPGLSVVSGISAXSEDIPNKIEDLRSECSSDFGGKDSVXSPDMDEIXHGAHQLXSPPSQSESLLAMFDPLSSHEGASAVVRPKVHYARPSHPPPDPPILEGAVGGNEARLPNFGSHVLXPAEMEAFKQRHSYPERLVRSRSSDIVSSVRRPMSDPSWNRRPGNEERELPPAAAIGAXSLVAAPHSSSSSPSKDSSRGEXEERKDSDDEKSDRNRPWWRKRFVSAMPKAPIPF

SEQ ID NO: 10661 - protein, 837 aa, Homo sapiens
  MOD_RES (1)..(1): Any amino acid
  MOD_RES (38)..(38): Selenocysteine
  MOD_RES (60)..(60): Selenocysteine
  MOD_RES (62)..(62): Selenocysteine
  MOD_RES (80)..(80): Selenocysteine
  MOD_RES (136)..(136): Selenocysteine
  MOD_RES (153)..(153): Selenocysteine
  MOD_RES (170)..(170): Selenocysteine
  MOD_RES (217)..(217): Selenocysteine
  MOD_RES (226)..(226): Selenocysteine
  MOD_RES (253)..(253): Selenocysteine
  MOD_RES (268)..(268): Selenocysteine
  MOD_RES (273)..(273): Selenocysteine
  MOD_RES (279)..(279): Selenocysteine
  MOD_RES (321)..(321): Selenocysteine
  MOD_RES (325)..(325): Selenocysteine
  MOD_RES (332)..(333): Selenocysteine
  MOD_RES (345)..(345): Selenocysteine
  MOD_RES (351)..(351): Selenocysteine
  MOD_RES (368)..(368): Selenocysteine
  MOD_RES (384)..(384): Selenocysteine
  MOD_RES (389)..(389): Selenocysteine
  MOD_RES (425)..(425): Selenocysteine
  MOD_RES (484)..(485): Selenocysteine
  MOD_RES (505)..(505): Selenocysteine
  MOD_RES (513)..(513): Selenocysteine
  MOD_RES (517)..(517): Selenocysteine
  MOD_RES (520)..(520): Selenocysteine
  MOD_RES (566)..(566): Selenocysteine
  MOD_RES (569)..(569): Selenocysteine
  MOD_RES (573)..(574): Selenocysteine
  MOD_RES (610)..(610): Selenocysteine
  MOD_RES (614)..(614): Selenocysteine
  MOD_RES (625)..(625): Selenocysteine
  MOD_RES (637)..(637): Selenocysteine
  MOD_RES (663)..(663): Selenocysteine
  MOD_RES (671)..(671): Selenocysteine
  MOD_RES (717)..(717): Selenocysteine
  MOD_RES (775)..(775): Selenocysteine
  MOD_RES (797)..(797): Selenocysteine
XNCIMQEDESYLLQVLRYLIEFELKESDNPRRLLRRGXCAFSILFKLFSEGLFSAKLFLXAXLHEPIMQLLVEDEDHLEXDPNKLIERFSPSQQEKLFGEKGSDRFRQKVQEMVESNEAKLVALVNKFIGYLKQNXYCFPHSLRWIVSQMYKXLSCVDRLEVGEVRAMCXDLLLACFICPAVVNPEQYGIISDAPINEVARFNLMQVGRLLQQLAMXGSEEGDPRXKSSLGKFDKSCVAAFLDVVIGGRAVEXPPLSSVNLLEGLSRXVVYIXYSQLIXLVNFMKSVMSGDQLREDRMALDNLLANLPPAKPGKSSSLEMXPYNXPQLSPAXXPANKKNRLPIAXRSRSRXNMLMDLHMDHEGSSQEXIQEVQPEEVLVISLGXGPQLXPGMMSENEVLNMQLSDGGQGDVPVDENKLHGKPDKXLRFSLCSDNLEGISEGPSNRSNSVSSLDLEGESVSELGAGPSGSNGVEALQLLEHEQAXXQDNLDDKLRKFEIRDMMGLXDDRDISEXVSEXWSXDVLGSDFDPNIDEDRLQEIAGAAAENMLGSLLCLPGSGSVLLDPCXGSXISEXXSEAWSVEVLPSDSEAPDLKQEERLQELESCSGLGSXSDDXDVREVSSRPSXPGLSVVSGISAXSEDIPNKIEDLRSECSSDFGGKDSVXSPDMDEIXHGASAVVRPKVHYARPSHPPPDPPILEGAVGGNEARLPNFGSHVLXPAEMEAFKQRHSYPERLVRSRSSDIVSSVRRPMSDPSWNRRPGNEERELPPAAAIGAXSLVAAPHSSSSSPSKDSSRGEXEERKDSDDEKSDRNRPWWRKRFVSAMPKAPIPFRKKEKQE

SEQ ID NO: 10662 - protein, 875 aa, Homo sapiens
  MOD_RES (29)..(29): Selenocysteine
  MOD_RES (62)..(63): Selenocysteine
  MOD_RES (65)..(65): Selenocysteine
  MOD_RES (127)..(127): Selenocysteine
  MOD_RES (141)..(141): Selenocysteine
  MOD_RES (147)..(147): Selenocysteine
  MOD_RES (150)..(150): Selenocysteine
  MOD_RES (155)..(155): Selenocysteine
  MOD_RES (167)..(167): Selenocysteine
  MOD_RES (176)..(176): Selenocysteine
  MOD_RES (205)..(205): Selenocysteine
  MOD_RES (221)..(221): Selenocysteine
  MOD_RES (235)..(235): Selenocysteine
  MOD_RES (243)..(243): Selenocysteine
  MOD_RES (250)..(250): Selenocysteine
  MOD_RES (278)..(278): Selenocysteine
  MOD_RES (280)..(280): Selenocysteine
  MOD_RES (302)..(302): Selenocysteine
  MOD_RES (321)..(321): Selenocysteine
  MOD_RES (348)..(348): Selenocysteine
  MOD_RES (380)..(380): Selenocysteine
  MOD_RES (469)..(469): Selenocysteine
  MOD_RES (491)..(491): Selenocysteine
  MOD_RES (499)..(499): Selenocysteine
  MOD_RES (509)..(509): Selenocysteine
  MOD_RES (545)..(545): Selenocysteine
  MOD_RES (553)..(553): Selenocysteine
  MOD_RES (561)..(561): Selenocysteine
  MOD_RES (567)..(567): Selenocysteine
  MOD_RES (580)..(580): Selenocysteine
  MOD_RES (582)..(582): Selenocysteine
  MOD_RES (584)..(584): Selenocysteine
  MOD_RES (590)..(590): Selenocysteine
  MOD_RES (602)..(602): Selenocysteine
  MOD_RES (637)..(637): Selenocysteine
  MOD_RES (656)..(656): Selenocysteine
  MOD_RES (659)..(659): Selenocysteine
  MOD_RES (680)..(680): Selenocysteine
  MOD_RES (684)..(684): Selenocysteine
  MOD_RES (705)..(705): Selenocysteine
  MOD_RES (715)..(715): Selenocysteine
  MOD_RES (719)..(719): Selenocysteine
  MOD_RES (740)..(740): Selenocysteine
  MOD_RES (834)..(834): Selenocysteine
  MOD_RES (846)..(846): Selenocysteine
MDPAPSLGCSLKDVKWSSVAVPLDLLVSXYRLPQIARLDNGECVEGLRENDYLLIHSCRQWXXIXAHSLEEGHYVIGPKIEIPVHYAGQFKLLEQDRDIKEPVQYFNSVEEVAKAFPERVYVMEDIXFNVKVASGECNEDXEVYNIXLCXGDELXLMGQAEILYAKXFKEKSRLNXIFKKIGKLNSISKLGKGKMPCLICMNHRXNESISLPFQCKGRFSXRSPLELQMQEGEHXIRNIVEKXRLPVNVXVPSPPPRNPYDLHFIREGHRYKFVNIQXKXVVVCCVLRNNKILPMHFPLHLXVPKFSLPEHLVKGESWPEXLVHHWLGICQEQFDIDEYSRAVRDVKXDWNEECKSPKKGRCSGHNHVPNSLSYARDELXQSFHRLSVCVYGNNLHGNSEVNLHGCRDLGGDWAPFPHDILPYQDSGDSGSDYLFPEASEESAGIPGKSELPYEELWLEEGKPSHQPLXRSLSEKNRCDQFRGSVRSKCAXSPLPIPGXLGAAVKSSDXALPPPPVPPKSEAVREECRLLNAPPVPPRSAKPLSXSPSIPPRXVKPARQQXRSPSPXLSYYSSGLHNIVXKXDXNPSESXPVSCYPCNRVKXDSVDLKSPFGSPSAEAVSSRLSWPNHYSGASESQXRSDFLLDPSRSYSYPRQKXPGXPKRNCPAPFDFDGCELLASPXSPVXAEFSSSVSGCPKSASYSLESXDVKSLAAGVXKQSXSCPALPPRAPKLVEEKVASEXSPLPLKIDGAEEDPKSGSPDLSEDQYFVKKGMQDIFSASYPFSSPLHLQLAPRSCGDGSPWQPPADLSGLSIEEVSKSLRFIGLSEDVISFFVXEKIDGNLLVQLXEEILSEDFKLSKLQVKKIMQFINGWRPKI

SEQ ID NO: 10663 - protein, 876 aa, Homo sapiens
  MOD_RES (29)..(29): Selenocysteine
  MOD_RES (62)..(63): Selenocysteine
  MOD_RES (65)..(65): Selenocysteine
  MOD_RES (127)..(127): Selenocysteine
  MOD_RES (141)..(141): Selenocysteine
  MOD_RES (147)..(147): Selenocysteine
  MOD_RES (150)..(150): Selenocysteine
  MOD_RES (155)..(155): Selenocysteine
  MOD_RES (167)..(167): Selenocysteine
  MOD_RES (176)..(176): Selenocysteine
  MOD_RES (205)..(205): Selenocysteine
  MOD_RES (221)..(221): Selenocysteine
  MOD_RES (235)..(235): Selenocysteine
  MOD_RES (243)..(243): Selenocysteine
  MOD_RES (250)..(250): Selenocysteine
  MOD_RES (278)..(278): Selenocysteine
  MOD_RES (280)..(280): Selenocysteine
  MOD_RES (302)..(302): Selenocysteine
  MOD_RES (321)..(321): Selenocysteine
  MOD_RES (348)..(348): Selenocysteine
  MOD_RES (380)..(380): Selenocysteine
  MOD_RES (469)..(469): Selenocysteine
  MOD_RES (491)..(491): Selenocysteine
  MOD_RES (499)..(499): Selenocysteine
  MOD_RES (509)..(509): Selenocysteine
  MOD_RES (545)..(545): Selenocysteine
  MOD_RES (553)..(553): Selenocysteine
  MOD_RES (561)..(561): Selenocysteine
  MOD_RES (567)..(567): Selenocysteine
  MOD_RES (581)..(581): Selenocysteine
  MOD_RES (583)..(583): Selenocysteine
  MOD_RES (585)..(585): Selenocysteine
  MOD_RES (591)..(591): Selenocysteine
  MOD_RES (603)..(603): Selenocysteine
  MOD_RES (638)..(638): Selenocysteine
  MOD_RES (657)..(657): Selenocysteine
  MOD_RES (660)..(660): Selenocysteine
  MOD_RES (681)..(681): Selenocysteine
  MOD_RES (685)..(685): Selenocysteine
  MOD_RES (706)..(706): Selenocysteine
  MOD_RES (716)..(716): Selenocysteine
  MOD_RES (720)..(720): Selenocysteine
  MOD_RES (741)..(741): Selenocysteine
  MOD_RES (835)..(835): Selenocysteine
  MOD_RES (847)..(847): Selenocysteine
MDPAPSLGCSLKDVKWSSVAVPLDLLVSXYRLPQIARLDNGECVEGLRENDYLLIHSCRQWXXIXAHSLEEGHYVIGPKIEIPVHYAGQFKLLEQDRDIKEPVQYFNSVEEVAKAFPERVYVMEDIXFNVKVASGECNEDXEVYNIXLCXGDELXLMGQAEILYAKXFKEKSRLNXIFKKIGKLNSISKLGKGKMPCLICMNHRXNESISLPFQCKGRFSXRSPLELQMQEGEHXIRNIVEKXRLPVNVXVPSPPPRNPYDLHFIREGHRYKFVNIQXKXVVVCCVLRNNKILPMHFPLHLXVPKFSLPEHLVKGESWPEXLVHHWLGICQEQFDIDEYSRAVRDVKXDWNEECKSPKKGRCSGHNHVPNSLSYARDELXQSFHRLSVCVYGNNLHGNSEVNLHGCRDLGGDWAPFPHDILPYQDSGDSGSDYLFPEASEESAGIPGKSELPYEELWLEEGKPSHQPLXRSLSEKNRCDQFRGSVRSKCAXSPLPIPGXLGAAVKSSDXALPPPPVPPKSEAVREECRLLNAPPVPPRSAKPLSXSPSIPPRXVKPARQQXRSPSPXLSYYSSGLHNISVXKXDXNPSESXPVSCYPCNRVKXDSVDLKSPFGSPSAEAVSSRLSWPNHYSGASESQXRSDFLLDPSRSYSYPRQKXPGXPKRNCPAPFDFDGCELLASPXSPVXAEFSSSVSGCPKSASYSLESXDVKSLAAGVXKQSXSCPALPPRAPKLVEEKVASEXSPLPLKIDGAEEDPKSGSPDLSEDQYFVKKGMQDIFSASYPFSSPLHLQLAPRSCGDGSPWQPPADLSGLSIEEVSKSLRFIGLSEDVISFFVXEKIDGNLLVQLXEEILSEDFKLSKLQVKKIMQFINGWRPKI

SEQ ID NO: 10664 - protein, 36 aa, Homo sapiens
  MOD_RES (1)..(1): Any amino acid
  MOD_RES (9)..(9): Selenocysteine
  MOD_RES (28)..(28): Selenocysteine
XAAVKSSDXALPPPPVPPKSEARQGFIXLPRLVSKS

SEQ ID NO: 10665 - protein, 48 aa, Homo sapiens
  MOD_RES (5)..(5): Selenocysteine
  MOD_RES (16)..(16): Selenocysteine
  MOD_RES (34)..(34): Selenocysteine
  MOD_RES (37)..(37): Selenocysteine
MDPLXKVPCGSQIAQXILWKAKSSLSFGIQPLQXWPXKDPELESQVNL

SEQ ID NO: 10666 - protein, 88 aa, Homo sapiens
  MOD_RES (5)..(5): Selenocysteine
  MOD_RES (16)..(16): Selenocysteine
  MOD_RES (34)..(34): Selenocysteine
  MOD_RES (37)..(37): Selenocysteine
  MOD_RES (86)..(86): Selenocysteine
  MOD_RES (88)..(88): Selenocysteine
MDPLXKVPCGSQIAQXILWKAKSSLSFGIQPLQXWPXKDPELESQVNLLFPVMLMEPSKGLEDSEWKMALQMRMQLPCLVLGEEQXCX

SEQ ID NO: 10667 - protein, 110 aa, Homo sapiens
  MOD_RES (5)..(5): Selenocysteine
  MOD_RES (16)..(16): Selenocysteine
  MOD_RES (34)..(34): Selenocysteine
  MOD_RES (37)..(37): Selenocysteine
  MOD_RES (99)..(99): Selenocysteine
  MOD_RES (104)..(104): Selenocysteine
  MOD_RES (108)..(108): Selenocysteine
MDPLXKVPCGSQIAQXILWKAKSSLSFGIQPLQXWPXKDPELESQVNLSVSEDLGCRRGDFSRKHYGSVELLISSDADGAIQRAGRFRVENGSSDENAXALPGXWRRXDV

SEQ ID NO: 10668 - protein, 139 aa, Homo sapiens
  MOD_RES (5)..(5): Selenocysteine
  MOD_RES (16)..(16): Selenocysteine
  MOD_RES (34)..(34): Selenocysteine
  MOD_RES (37)..(37): Selenocysteine
  MOD_RES (99)..(99): Selenocysteine
  MOD_RES (104)..(104): Selenocysteine
  MOD_RES (108)..(108): Selenocysteine
  MOD_RES (119)..(119): Selenocysteine
MDPLXKVPCGSQIAQXILWKAKSSLSFGIQPLQXWPXKDPELESQVNLSVSEDLGCRRGDFSRKHYGSVELLISSDADGAIQRAGRFRVENGSSDENAXALPGXWRRXDVHLENPEYHXRWYFKYFLGQVHQNYIGNDA

SEQ ID NO: 10669 - protein, 268 aa, Homo sapiens
  MOD_RES (5)..(5): Selenocysteine
  MOD_RES (16)..(16): Selenocysteine
  MOD_RES (34)..(34): Selenocysteine
  MOD_RES (37)..(37): Selenocysteine
  MOD_RES (99)..(99): Selenocysteine
  MOD_RES (104)..(104): Selenocysteine
  MOD_RES (108)..(108): Selenocysteine
  MOD_RES (119)..(119): Selenocysteine
  MOD_RES (149)..(149): Selenocysteine
  MOD_RES (169)..(169): Selenocysteine
  MOD_RES (171)..(171): Selenocysteine
  MOD_RES (181)..(181): Selenocysteine
  MOD_RES (183)..(183): Selenocysteine
  MOD_RES (239)..(239): Selenocysteine
  MOD_RES (263)..(263): Selenocysteine
  MOD_RES (265)..(265): Selenocysteine
MDPLXKVPCGSQIAQXILWKAKSSLSFGIQPLQXWPXKDPELESQVNLSVSEDLGCRRGDFSRKHYGSVELLISSDADGAIQRAGRFRVENGSSDENAXALPGXWRRXDVHLENPEYHXRWYFKYFLGQVHQNYIGNDAEKSPFFLSVXLSDQNNQRVPQYRAILWRKXGXQKICLPYSPXKXLSVKSILSAMNLDKFEKGPREIFHPEIQKDLLVLEEQEGSVNFKFGVLFAKDGQLXDDEMFSNEIGSEPFQKFLNLLGDXIXLKG

SEQ ID NO: 10670 - protein, 802 aa, Homo sapiens
  MOD_RES (58)..(58): Selenocysteine
  MOD_RES (63)..(63): Selenocysteine
  MOD_RES (67)..(67): Selenocysteine
  MOD_RES (78)..(78): Selenocysteine
  MOD_RES (108)..(108): Selenocysteine
  MOD_RES (128)..(128): Selenocysteine
  MOD_RES (130)..(130): Selenocysteine
  MOD_RES (140)..(140): Selenocysteine
  MOD_RES (142)..(142): Selenocysteine
  MOD_RES (198)..(198): Selenocysteine
  MOD_RES (222)..(222): Selenocysteine
  MOD_RES (224)..(224): Selenocysteine
  MOD_RES (229)..(229): Selenocysteine
  MOD_RES (237)..(237): Selenocysteine
  MOD_RES (241)..(242): Selenocysteine
  MOD_RES (249)..(249): Selenocysteine
  MOD_RES (262)..(262): Selenocysteine
  MOD_RES (286)..(286): Selenocysteine
  MOD_RES (309)..(309): Selenocysteine
  MOD_RES (343)..(343): Selenocysteine
  MOD_RES (348)..(348): Selenocysteine
  MOD_RES (368)..(368): Selenocysteine
  MOD_RES (371)..(371): Selenocysteine
  MOD_RES (373)..(373): Selenocysteine
  MOD_RES (381)..(381): Selenocysteine
  MOD_RES (488)..(488): Selenocysteine
  MOD_RES (508)..(508): Selenocysteine
  MOD_RES (519)..(519): Selenocysteine
  MOD_RES (567)..(567): Selenocysteine
  MOD_RES (577)..(577): Selenocysteine
  MOD_RES (597)..(597): Selenocysteine
  MOD_RES (607)..(607): Selenocysteine
  MOD_RES (609)..(609): Selenocysteine
  MOD_RES (639)..(639): Selenocysteine
  MOD_RES (667)..(667): Selenocysteine
  MOD_RES (749)..(750): Selenocysteine
  MOD_RES (766)..(766): Selenocysteine
  MOD_RES (787)..(787): Selenocysteine
  MOD_RES (793)..(793): Selenocysteine
MKHFCSSSVSEDLGCRRGDFSRKHYGSVELLISSDADGAIQRAGRFRVENGSSDENAXALPGXWRRXDVHLENPEYHXRWYFKYFLGQVHQNYIGNDAEKSPFFLSVXLSDQNNQRVPQYRAILWRKXGXQKICLPYSPXKXLSVKSILSAMNLDKFEKGPREIFHPEIQKDLLVLEEQEGSVNFKFGVLFAKDGQLXDDEMFSNEIGSEPFQKFLNLLGDXIXLKGWXGYRGGLDXKNDXXGIHSVYXVYQGHEIMFHVSXMLPYSKENKQQVERKRHIGNDIVXIVFQEGEESSPAFKPSMIRSHFXHIFALVRYNQQNDNYRLKIFSEESVPLFGPPLPXPPVFXDHQEFRDFLLVKLINGEKAXLEXPXFAQKRRRXLDMLIRSLHQDLMPDLHKNMLNRRSFSDVLPESPKSARKKEEARQAEFVRIGQALKLKSIVRGDAPSSLAASGICKKEPWEPQCFCSNFPHEAVCADPWGQALLVSXDAGVLLVDDDLPSVPVFDRXLPVKQMHVLEXLDLLVLRADKGKDARLFVFRLSALQKGLEGKQAGKSRSDCRENKLEKXKGCHLYAINXHHSRELRIVVAIRNKLLLIXRKHNKPSGVXSXSLLSPLSESPVEEFQYIREICLSDSPMVMXLVDGPAEESDNLICVAYRHQFDVVNESXGEAFRLHHVEANRVNFVAAIDVYEDGEAGLLLCYNYSCIYKKVCPFNGGSFLVQPSASDFQFCWNQAPYAIVCAFPYLLAFXXDSMEIRLVVNGNLVHXAVVPQLQLVASRVKFNQKICXRFHLEXSWAEASNDL

SEQ ID NO: 10671 - protein, 167 aa, Homo sapiens
  MOD_RES (54)..(54): Selenocysteine
  MOD_RES (59)..(59): Selenocysteine
  MOD_RES (63)..(63): Selenocysteine
  MOD_RES (74)..(74): Selenocysteine
  MOD_RES (104)..(104): Selenocysteine
  MOD_RES (124)..(124): Selenocysteine
  MOD_RES (126)..(126): Selenocysteine
  MOD_RES (136)..(136): Selenocysteine
  MOD_RES (138)..(138): Selenocysteine
MKSSVSEDLGCRRGDFSRKHYGSVELLISSDADGAIQRAGRFRVENGSSDENAXALPGXWRRXDVHLENPEYHXRWYFKYFLGQVHQNYIGNDAEKSPFFLSVXLSDQNNQRVPQYRAILWRKXGXQKICLPYSPXKXLSVKSILSAMNLDKFEKGPREIFHPEIQK

SEQ ID NO: 10672 - protein, 991 aa, Homo sapiens
  MOD_RES (54)..(54): Selenocysteine
  MOD_RES (59)..(59): Selenocysteine
  MOD_RES (63)..(63): Selenocysteine
  MOD_RES (74)..(74): Selenocysteine
  MOD_RES (104)..(104): Selenocysteine
  MOD_RES (124)..(124): Selenocysteine
  MOD_RES (126)..(126): Selenocysteine
  MOD_RES (136)..(136): Selenocysteine
  MOD_RES (138)..(138): Selenocysteine
  MOD_RES (194)..(194): Selenocysteine
  MOD_RES (218)..(218): Selenocysteine
  MOD_RES (220)..(220): Selenocysteine
  MOD_RES (225)..(225): Selenocysteine
  MOD_RES (233)..(233): Selenocysteine
  MOD_RES (237)..(238): Selenocysteine
  MOD_RES (245)..(245): Selenocysteine
  MOD_RES (258)..(258): Selenocysteine
  MOD_RES (282)..(282): Selenocysteine
  MOD_RES (305)..(305): Selenocysteine
  MOD_RES (339)..(339): Selenocysteine
  MOD_RES (344)..(344): Selenocysteine
  MOD_RES (364)..(364): Selenocysteine
  MOD_RES (367)..(367): Selenocysteine
  MOD_RES (369)..(369): Selenocysteine
  MOD_RES (377)..(377): Selenocysteine
  MOD_RES (484)..(484): Selenocysteine
  MOD_RES (504)..(504): Selenocysteine
  MOD_RES (515)..(515): Selenocysteine
  MOD_RES (563)..(563): Selenocysteine
  MOD_RES (573)..(573): Selenocysteine
  MOD_RES (593)..(593): Selenocysteine
  MOD_RES (603)..(603): Selenocysteine
  MOD_RES (605)..(605): Selenocysteine
  MOD_RES (635)..(635): Selenocysteine
  MOD_RES (663)..(663): Selenocysteine
  MOD_RES (745)..(746): Selenocysteine
  MOD_RES (762)..(762): Selenocysteine
  MOD_RES (780)..(780): Selenocysteine
  MOD_RES (782)..(782): Selenocysteine
  MOD_RES (805)..(805): Selenocysteine
  MOD_RES (811)..(811): Selenocysteine
  MOD_RES (855)..(855): Selenocysteine
  MOD_RES (858)..(858): Selenocysteine
  MOD_RES (870)..(870): Selenocysteine
  MOD_RES (887)..(887): Selenocysteine
  MOD_RES (946)..(946): Selenocysteine
  MOD_RES (980)..(980): Selenocysteine
MKSSVSEDLGCRRGDFSRKHYGSVELLISSDADGAIQRAGRFRVENGSSDENAXALPGXWRRXDVHLENPEYHXRWYFKYFLGQVHQNYIGNDAEKSPFFLSVXLSDQNNQRVPQYRAILWRKXGXQKICLPYSPXKXLSVKSILSAMNLDKFEKGPREIFHPEIQKDLLVLEEQEGSVNFKFGVLFAKDGQLXDDEMFSNEIGSEPFQKFLNLLGDXIXLKGWXGYRGGLDXKNDXXGIHSVYXVYQGHEIMFHVSXMLPYSKENKQQVERKRHIGNDIVXIVFQEGEESSPAFKPSMIRSHFXHIFALVRYNQQNDNYRLKIFSEESVPLFGPPLPXPPVFXDHQEFRDFLLVKLINGEKAXLEXPXFAQKRRRXLDMLIRSLHQDLMPDLHKNMLNRRSFSDVLPESPKSARKKEEARQAEFVRIGQALKLKSIVRGDAPSSLAASGICKKEPWEPQCFCSNFPHEAVCADPWGQALLVSXDAGVLLVDDDLPSVPVFDRXLPVKQMHVLEXLDLLVLRADKGKDARLFVFRLSALQKGLEGKQAGKSRSDCRENKLEKXKGCHLYAINXHHSRELRIVVAIRNKLLLIXRKHNKPSGVXSXSLLSPLSESPVEEFQYIREICLSDSPMVMXLVDGPAEESDNLICVAYRHQFDVVNESXGEAFRLHHVEANRVNFVAAIDVYEDGEAGLLLCYNYSCIYKKVCPFNGGSFLVQPSASDFQFCWNQAPYAIVCAFPYLLAFXXDSMEIRLVVNGNLVHXAVVPQLQLVASRSDIYFXAXAAVNEVSSGGSSKGASARNSPQXPPGRDXPVFPSSLGEGEIQSKNLYKIPLRNLVGRSIERPLKSPLVSKVIXPPXPISVGLAAIPVXHSLSLSRMEIKEIASRXRRELLGLSDEGGPKSEGAPKAKSKPRKRLEESQGGPKPGAVRSSSSDRIPSGSLESASXSEANPEGHSASSDQDPVADREGSPVSGSSPFQLXAFSDEDIIDLK

SEQ ID NO: 10673 - protein, 1013 aa, Homo sapiens
  MOD_RES (76)..(76): Selenocysteine
  MOD_RES (81)..(81): Selenocysteine
  MOD_RES (85)..(85): Selenocysteine
  MOD_RES (96)..(96): Selenocysteine
  MOD_RES (126)..(126): Selenocysteine
  MOD_RES (146)..(146): Selenocysteine
  MOD_RES (148)..(148): Selenocysteine
  MOD_RES (158)..(158): Selenocysteine
  MOD_RES (160)..(160): Selenocysteine
  MOD_RES (216)..(216): Selenocysteine
  MOD_RES (240)..(240): Selenocysteine
  MOD_RES (242)..(242): Selenocysteine
  MOD_RES (247)..(247): Selenocysteine
  MOD_RES (255)..(255): Selenocysteine
  MOD_RES (259)..(260): Selenocysteine
  MOD_RES (267)..(267): Selenocysteine
  MOD_RES (280)..(280): Selenocysteine
  MOD_RES (304)..(304): Selenocysteine
  MOD_RES (327)..(327): Selenocysteine
  MOD_RES (361)..(361): Selenocysteine
  MOD_RES (366)..(366): Selenocysteine
  MOD_RES (386)..(386): Selenocysteine
  MOD_RES (389)..(389): Selenocysteine
  MOD_RES (391)..(391): Selenocysteine
  MOD_RES (399)..(399): Selenocysteine
  MOD_RES (506)..(506): Selenocysteine
  MOD_RES (526)..(526): Selenocysteine
  MOD_RES (537)..(537): Selenocysteine
  MOD_RES (585)..(585): Selenocysteine
  MOD_RES (595)..(595): Selenocysteine
  MOD_RES (615)..(615): Selenocysteine
  MOD_RES (625)..(625): Selenocysteine
  MOD_RES (627)..(627): Selenocysteine
  MOD_RES (657)..(657): Selenocysteine
  MOD_RES (685)..(685): Selenocysteine
  MOD_RES (767)..(768): Selenocysteine
  MOD_RES (784)..(784): Selenocysteine
  MOD_RES (802)..(802): Selenocysteine
  MOD_RES (804)..(804): Selenocysteine
  MOD_RES (827)..(827): Selenocysteine
  MOD_RES (833)..(833): Selenocysteine
  MOD_RES (877)..(877): Selenocysteine
  MOD_RES (880)..(880): Selenocysteine
  MOD_RES (892)..(892): Selenocysteine
  MOD_RES (909)..(909): Selenocysteine
  MOD_RES (968)..(968): Selenocysteine
  MOD_RES (1002)..(1002): Selenocysteine
MVVDFCRRFVARSLCIILMKHFCSSSVSEDLGCRRGDFSRKHYGSVELLISSDADGAIQRAGRFRVENGSSDENAXALPGXWRRXDVHLENPEYHXRWYFKYFLGQVHQNYIGNDAEKSPFFLSVXLSDQNNQRVPQYRAILWRKXGXQKICLPYSPXKXLSVKSILSAMNLDKFEKGPREIFHPEIQKDLLVLEEQEGSVNFKFGVLFAKDGQLXDDEMFSNEIGSEPFQKFLNLLGDXIXLKGWXGYRGGLDXKNDXXGIHSVYXVYQGHEIMFHVSXMLPYSKENKQQVERKRHIGNDIVXIVFQEGEESSPAFKPSMIRSHFXHIFALVRYNQQNDNYRLKIFSEESVPLFGPPLPXPPVFXDHQEFRDFLLVKLINGEKAXLEXPXFAQKRRRXLDMLIRSLHQDLMPDLHKNMLNRRSFSDVLPESPKSARKKEEARQAEFVRIGQALKLKSIVRGDAPSSLAASGICKKEPWEPQCFCSNFPHEAVCADPWGQALLVSXDAGVLLVDDDLPSVPVFDRXLPVKQMHVLEXLDLLVLRADKGKDARLFVFRLSALQKGLEGKQAGKSRSDCRENKLEKXKGCHLYAINXHHSRELRIVVAIRNKLLLIXRKHNKPSGVXSXSLLSPLSESPVEEFQYIREICLSDSPMVMXLVDGPAEESDNLICVAYRHQFDVVNESXGEAFRLHHVEANRVNFVAAIDVYEDGEAGLLLCYNYSCIYKKVCPFNGGSFLVQPSASDFQFCWNQAPYAIVCAFPYLLAFXXDSMEIRLVVNGNLVHXAVVPQLQLVASRSDIYFXAXAAVNEVSSGGSSKGASARNSPQXPPGRDXPVFPSSLGEGEIQSKNLYKIPLRNLVGRSIERPLKSPLVSKVIXPPXPISVGLAAIPVXHSLSLSRMEIKEIASRXRRELLGLSDEGGPKSEGAPKAKSKPRKRLEESQGGPKPGAVRSSSSDRIPSGSLESASXSEANPEGHSASSDQDPVADREGSPVSGSSPFQLXAFSDEDIIDLK

SEQ ID NO: 10674 - protein, 81 aa, Homo sapiens
  MOD_RES (1)..(1): Any amino acid
  MOD_RES (69)..(69): Selenocysteine
  MOD_RES (77)..(77): Selenocysteine
XMPDLHKNMLNRRSFSDVLPESPKSARKKEEARQAEFVRIGQALKLKSIVRGDAPSSLAASGICKKEMXFHQCPCLXELCQ

SEQ ID NO: 10675 - protein, 345 aa, Homo sapiens
  MOD_RES (16)..(16): Selenocysteine
  MOD_RES (119)..(119): Selenocysteine
  MOD_RES (139)..(139): Selenocysteine
  MOD_RES (150)..(150): Selenocysteine
  MOD_RES (167)..(167): Selenocysteine
  MOD_RES (188)..(188): Selenocysteine
  MOD_RES (200)..(200): Selenocysteine
  MOD_RES (205)..(205): Selenocysteine
  MOD_RES (275)..(275): Selenocysteine
  MOD_RES (331)..(331): Selenocysteine
MVAALLGGGGEARGGXVPGAWLCLMALLQLLGSAPRGSGLAHGRRLICWQALLQCQGEPECSYAYNQYAEACAPVLAQHGGGDAPGAAAAAFPASAASFSSRWRCPSHCISALIQLNHXRRGPALEDCDCAQDENCKSXKRAIEPCLPRXSGGGAGGPGAGGVMGCXEARRRCDRDSRCNLALSRYLXYCGKVFNGLRCXDECRXVIEDMLAMPKAALLNDCVCDGLERPICESVKENMARLCFGAELGNGPGSSGSDGGLDDYYDEDYDDEQRXGGAGGEQPLDDDDGVPHPPRPGSGAAASGGRGDLPYGPGRRSSGGGGRLAPRGAWXPLASILLLLLGPLF

SEQ ID NO: 10676 - protein, 678 aa, Homo sapiens
  MOD_RES (39)..(39): Selenocysteine
  MOD_RES (85)..(85): Selenocysteine
  MOD_RES (104)..(104): Selenocysteine
  MOD_RES (111)..(111): Selenocysteine
  MOD_RES (121)..(121): Selenocysteine
  MOD_RES (130)..(130): Selenocysteine
  MOD_RES (194)..(194): Selenocysteine
  MOD_RES (259)..(259): Selenocysteine
  MOD_RES (276)..(276): Selenocysteine
  MOD_RES (304)..(304): Selenocysteine
  MOD_RES (317)..(317): Selenocysteine
  MOD_RES (327)..(327): Selenocysteine
  MOD_RES (344)..(344): Selenocysteine
  MOD_RES (368)..(368): Selenocysteine
  MOD_RES (381)..(381): Selenocysteine
  MOD_RES (422)..(422): Selenocysteine
  MOD_RES (456)..(457): Selenocysteine
  MOD_RES (461)..(461): Selenocysteine
  MOD_RES (466)..(466): Selenocysteine
  MOD_RES (474)..(474): Selenocysteine
  MOD_RES (495)..(495): Selenocysteine
  MOD_RES (501)..(501): Selenocysteine
  MOD_RES (504)..(504): Selenocysteine
  MOD_RES (519)..(519): Selenocysteine
  MOD_RES (545)..(545): Selenocysteine
  MOD_RES (560)..(560): Selenocysteine
  MOD_RES (578)..(578): Selenocysteine
  MOD_RES (587)..(587): Selenocysteine
  MOD_RES (593)..(593): Selenocysteine
  MOD_RES (621)..(621): Selenocysteine
  MOD_RES (632)..(632): Selenocysteine
  MOD_RES (637)..(637): Selenocysteine
  MOD_RES (645)..(645): Selenocysteine
  MOD_RES (666)..(666): Selenocysteine
MAPSLSPGPAALRRAPQLLLLLLAAECALAALLPAREAXQFLRPRQRRAFQVFEEAKQGHLERECVEELCSREEAREVFENDPEXDYFYPRYLDCINKYGSPYXKNSGFAXCVQNLPDQCXPNPCDRKGXQACQDLMGNFFCLCKAGWGGRLCDKDVNECSQENGGCLQICHNKPGSFHCSCHSGFELSSDGRXCQDIDECADSEACGEARCKNLPGSYSCLCDEGFAYSSQEKACRDVDECLQGRCEQVCVNSPGSYXCHCDGRGGLKLSQDMDXCEDILPCVPFSVAKSVKSLYLGRMFSGXPVIRLRFKRLQPXRLVAEFDFRXFDPEGILLFAGGHQDSXWIVLALRAGRLELQLRYNGVGRVXSSGPVINHGMWQXISVEELARNLVIKVNRDAVMKIAVAGDLFQPERGLYHLNLXVGGIPFHEKDLVQPINPRLDGCMRSWNWLNGEDXXIQEXVKVNXRMQCFSVXERGSFYPGSGFAFYSLDYMRXPLDVGXESXWEVEVVAHIRPAADXGVLFALWAPDLRAVPLSVALVDYHSXKKLKKQLVVLAVEHXALALMEIKVCDGQEHVVXVSLRDGEAXLEVDGXRGQSEVSAAQLQERLAVLERHLRSPVLXFAGGLPDVPVXSAPVXAFYRGCMXLEVNRRLLDLDEAAYKHSDIXAHSCPPVEPAAA

SEQ ID NO: 10677 - protein, 416 aa, Homo sapiens
  MOD_RES (16)..(16): Selenocysteine
  MOD_RES (38)..(40): Selenocysteine
  MOD_RES (43)..(44): Selenocysteine
  MOD_RES (68)..(68): Selenocysteine
  MOD_RES (77)..(77): Selenocysteine
  MOD_RES (84)..(84): Selenocysteine
  MOD_RES (93)..(93): Selenocysteine
  MOD_RES (113)..(113): Selenocysteine
  MOD_RES (115)..(115): Selenocysteine
  MOD_RES (120)..(120): Selenocysteine
  MOD_RES (126)..(126): Selenocysteine
  MOD_RES (136)..(136): Selenocysteine
  MOD_RES (156)..(156): Selenocysteine
  MOD_RES (284)..(284): Selenocysteine
  MOD_RES (294)..(294): Selenocysteine
  MOD_RES (305)..(305): Selenocysteine
  MOD_RES (317)..(317): Selenocysteine
  MOD_RES (343)..(345): Selenocysteine
  MOD_RES (367)..(367): Selenocysteine
  MOD_RES (373)..(373): Selenocysteine
  MOD_RES (380)..(380): Selenocysteine
  MOD_RES (406)..(406): Selenocysteine
MKPGMVPPPPGEESQXVILPPGWQSYLSPQGRRYYVNXXXNEXXWERPSSSPGIPASPGSHRSSLPPXVNGYHASGXPAHPPEXAHMSVRKSXGDSQNLGSSSPSKKQSKENXIXINCVXFPHPDXMPEQQLLKPXEWSYCDYFWADKKDPQGNGXVAGFELLLQKQLKGKQMQKEMSEFIRERIKIEEDYAKNLAKLSQNSLASQEEGSLGEAWAQVKKSLADEAEVHLKFSAKLHSEVEKPLMNFRENFKKDMKKCDHHIADLRKQLASRYASVEKARKALXERQRDLEMKXQQLEIKLSNKXEEDIKKARRKSXQAGDDLMRCVDLYNQAQSKWFEEMVXXXLELERLEVERVEMIRQHLCQYXQLRHEXDMFNQSXVEPVDQLLRKVDPAKDRELWVREHKXGNIRPVDMEI

SEQ ID NO: 10678 - protein, 476 aa, Homo sapiens
  MOD_RES (8)..(8): Selenocysteine
  MOD_RES (30)..(30): Selenocysteine
  MOD_RES (76)..(76): Selenocysteine
  MOD_RES (98)..(100): Selenocysteine
  MOD_RES (103)..(104): Selenocysteine
  MOD_RES (128)..(128): Selenocysteine
  MOD_RES (137)..(137): Selenocysteine
  MOD_RES (144)..(144): Selenocysteine
  MOD_RES (153)..(153): Selenocysteine
  MOD_RES (173)..(173): Selenocysteine
  MOD_RES (175)..(175): Selenocysteine
  MOD_RES (180)..(180): Selenocysteine
  MOD_RES (186)..(186): Selenocysteine
  MOD_RES (196)..(196): Selenocysteine
  MOD_RES (216)..(216): Selenocysteine
  MOD_RES (344)..(344): Selenocysteine
  MOD_RES (354)..(354): Selenocysteine
  MOD_RES (365)..(365): Selenocysteine
  MOD_RES (377)..(377): Selenocysteine
  MOD_RES (403)..(405): Selenocysteine
  MOD_RES (427)..(427): Selenocysteine
  MOD_RES (433)..(433): Selenocysteine
  MOD_RES (440)..(440): Selenocysteine
  MOD_RES (466)..(466): Selenocysteine
MSGARCRXLYPFSGERHGQGLRFAAGELIXLLQVPDGGWWEGEKEDGLRGWFPASYVQLLEKPGMVPPPPGEESQXVILPPGWQSYLSPQGRRYYVNXXXNEXXWERPSSSPGIPASPGSHRSSLPPXVNGYHASGXPAHPPEXAHMSVRKSXGDSQNLGSSSPSKKQSKENXIXINCVXFPHPDXMPEQQLLKPXEWSYCDYFWADKKDPQGNGXVAGFELLLQKQLKGKQMQKEMSEFIRERIKIEEDYAKNLAKLSQNSLASQEEGSLGEAWAQVKKSLADEAEVHLKFSAKLHSEVEKPLMNFRENFKKDMKKCDHHIADLRKQLASRYASVEKARKALXERQRDLEMKXQQLEIKLSNKXEEDIKKARRKSXQAGDDLMRCVDLYNQAQSKWFEEMVXXXLELERLEVERVEMIRQHLCQYXQLRHEXDMFNQSXVEPVDQLLRKVDPAKDRELWVREHKXGNIRPVDMEI

SEQ ID NO: 10679 - protein, 336 aa, Homo sapiens
  MOD_RES (33)..(33): Selenocysteine
  MOD_RES (35)..(35): Selenocysteine
  MOD_RES (40)..(40): Selenocysteine
  MOD_RES (46)..(46): Selenocysteine
  MOD_RES (56)..(56): Selenocysteine
  MOD_RES (76)..(76): Selenocysteine
  MOD_RES (204)..(204): Selenocysteine
  MOD_RES (214)..(214): Selenocysteine
  MOD_RES (225)..(225): Selenocysteine
  MOD_RES (237)..(237): Selenocysteine
  MOD_RES (263)..(265): Selenocysteine
  MOD_RES (287)..(287): Selenocysteine
  MOD_RES (293)..(293): Selenocysteine
  MOD_RES (300)..(300): Selenocysteine
  MOD_RES (326)..(326): Selenocysteine
MSNMENSFDDVSCLSPQNLGSSSPSKKQSKENXIXINCVXFPHPDXMPEQQLLKPXEWSYCDYFWADKKDPQGNGXVAGFELLLQKQLKGKQMQKEMSEFIRERIKIEEDYAKNLAKLSQNSLASQEEGSLGEAWAQVKKSLADEAEVHLKFSAKLHSEVEKPLMNFRENFKKDMKKCDHHIADLRKQLASRYASVEKARKALXERQRDLEMKXQQLEIKLSNKXEEDIKKARRKSXQAGDDLMRCVDLYNQAQSKWFEEMVXXXLELERLEVERVEMIRQHLCQYXQLRHEXDMFNQSXVEPVDQLLRKVDPAKDRELWVREHKXGNIRPVDMEI

SEQ ID NO: 10680 - protein, 78 aa, Homo sapiens
  MOD_RES (33)..(33): Selenocysteine
  MOD_RES (35)..(35): Selenocysteine
  MOD_RES (40)..(40): Selenocysteine
  MOD_RES (46)..(46): Selenocysteine
  MOD_RES (56)..(56): Selenocysteine
  MOD_RES (71)..(71): Selenocysteine
MSNMENSFDDVSCLSPQNLGSSSPSKKQSKENXIXINCVXFPHPDXMPEQQLLKPXEWSYCDYFWAEDPLXPMLCLPL

SEQ ID NO: 10681 - protein, 106 aa, Homo sapiens
  MOD_RES (12)..(12): Selenocysteine
  MOD_RES (34)..(36): Selenocysteine
  MOD_RES (39)..(40): Selenocysteine
  MOD_RES (64)..(64): Selenocysteine
  MOD_RES (73)..(73): Selenocysteine
  MOD_RES (80)..(80): Selenocysteine
  MOD_RES (89)..(89): Selenocysteine
MVPPPPGEESQXVILPPGWQSYLSPQGRRYYVNXXXNEXXWERPSSSPGIPASPGSHRSSLPPXVNGYHASGXPAHPPEXAHMSVRKSXGDSQNLGSSSPSKKQSK

SEQ ID NO: 10682 - protein, 181 aa, Homo sapiens
  MOD_RES (12)..(12): Selenocysteine
  MOD_RES (34)..(36): Selenocysteine
  MOD_RES (39)..(40): Selenocysteine
  MOD_RES (64)..(64): Selenocysteine
  MOD_RES (73)..(73): Selenocysteine
  MOD_RES (80)..(80): Selenocysteine
  MOD_RES (89)..(89): Selenocysteine
  MOD_RES (109)..(109): Selenocysteine
  MOD_RES (111)..(111): Selenocysteine
  MOD_RES (132)..(132): Selenocysteine
  MOD_RES (138)..(138): Selenocysteine
  MOD_RES (145)..(145): Selenocysteine
  MOD_RES (171)..(171): Selenocysteine
MVPPPPGEESQXVILPPGWQSYLSPQGRRYYVNXXXNEXXWERPSSSPGIPASPGSHRSSLPPXVNGYHASGXPAHPPEXAHMSVRKSXGDSQNLGSSSPSKKQSKENXIXELERLEVERVEMIRQHLCQYXQLRHEXDMFNQSXVEPVDQLLRKVDPAKDRELWVREHKXGNIRPVDMEI

SEQ ID NO: 10683 - protein, 128 aa, Homo sapiens
  MOD_RES (12)..(12): Selenocysteine
  MOD_RES (34)..(36): Selenocysteine
  MOD_RES (39)..(40): Selenocysteine
  MOD_RES (64)..(64): Selenocysteine
  MOD_RES (73)..(73): Selenocysteine
  MOD_RES (80)..(80): Selenocysteine
  MOD_RES (89)..(89): Selenocysteine
  MOD_RES (109)..(109): Selenocysteine
  MOD_RES (111)..(111): Selenocysteine
  MOD_RES (116)..(116): Selenocysteine
  MOD_RES (122)..(122): Selenocysteine
MVPPPPGEESQXVILPPGWQSYLSPQGRRYYVNXXXNEXXWERPSSSPGIPASPGSHRSSLPPXVNGYHASGXPAHPPEXAHMSVRKSXGDSQNLGSSSPSKKQSKENXIXINCVXFPHPDXMPEQQL

SEQ ID NO: 10684 - protein, 141 aa, Homo sapiens
  MOD_RES (12)..(12): Selenocysteine
  MOD_RES (34)..(36): Selenocysteine
  MOD_RES (39)..(40): Selenocysteine
  MOD_RES (64)..(64): Selenocysteine
  MOD_RES (73)..(73): Selenocysteine
  MOD_RES (80)..(80): Selenocysteine
  MOD_RES (89)..(89): Selenocysteine
  MOD_RES (109)..(109): Selenocysteine
  MOD_RES (111)..(111): Selenocysteine
  MOD_RES (116)..(116): Selenocysteine
  MOD_RES (122)..(122): Selenocysteine
  MOD_RES (132)..(132): Selenocysteine
MVPPPPGEESQXVILPPGWQSYLSPQGRRYYVNXXXNEXXWERPSSSPGIPASPGSHRSSLPPXVNGYHASGXPAHPPEXAHMSVRKSXGDSQNLGSSSPSKKQSKENXIXINCVXFPHPDXMPEQQLLKPXEWSYCDYFW

SEQ ID NO: 10685 - protein, 179 aa, Homo sapiens
  MOD_RES (12)..(12): Selenocysteine
  MOD_RES (34)..(36): Selenocysteine
  MOD_RES (39)..(40): Selenocysteine
  MOD_RES (64)..(64): Selenocysteine
  MOD_RES (73)..(73): Selenocysteine
  MOD_RES (80)..(80): Selenocysteine
  MOD_RES (89)..(89): Selenocysteine
  MOD_RES (109)..(109): Selenocysteine
  MOD_RES (111)..(111): Selenocysteine
  MOD_RES (116)..(116): Selenocysteine
  MOD_RES (122)..(122): Selenocysteine
  MOD_RES (132)..(132): Selenocysteine
  MOD_RES (152)..(152): Selenocysteine
MVPPPPGEESQXVILPPGWQSYLSPQGRRYYVNXXXNEXXWERPSSSPGIPASPGSHRSSLPPXVNGYHASGXPAHPPEXAHMSVRKSXGDSQNLGSSSPSKKQSKENXIXINCVXFPHPDXMPEQQLLKPXEWSYCDYFWADKKDPQGNGXVAGFELLLQKQLKGKQMQKEMSEFIRE

SEQ ID NO: 10686 - protein, 412 aa, Homo sapiens
  MOD_RES (12)..(12): Selenocysteine
  MOD_RES (34)..(36): Selenocysteine
  MOD_RES (39)..(40): Selenocysteine
  MOD_RES (64)..(64): Selenocysteine
  MOD_RES (73)..(73): Selenocysteine
  MOD_RES (80)..(80): Selenocysteine
  MOD_RES (89)..(89): Selenocysteine
  MOD_RES (109)..(109): Selenocysteine
  MOD_RES (111)..(111): Selenocysteine
  MOD_RES (116)..(116): Selenocysteine
  MOD_RES (122)..(122): Selenocysteine
  MOD_RES (132)..(132): Selenocysteine
  MOD_RES (152)..(152): Selenocysteine
  MOD_RES (280)..(280): Selenocysteine
  MOD_RES (290)..(290): Selenocysteine
  MOD_RES (301)..(301): Selenocysteine
  MOD_RES (313)..(313): Selenocysteine
  MOD_RES (339)..(341): Selenocysteine
  MOD_RES (363)..(363): Selenocysteine
  MOD_RES (369)..(369): Selenocysteine
  MOD_RES (376)..(376): Selenocysteine
  MOD_RES (402)..(402): Selenocysteine
MVPPPPGEESQXVILPPGWQSYLSPQGRRYYVNXXXNEXXWERPSSSPGIPASPGSHRSSLPPXVNGYHASGXPAHPPEXAHMSVRKSXGDSQNLGSSSPSKKQSKENXIXINCVXFPHPDXMPEQQLLKPXEWSYCDYFWADKKDPQGNGXVAGFELLLQKQLKGKQMQKEMSEFIRERIKIEEDYAKNLAKLSQNSLASQEEGSLGEAWAQVKKSLADEAEVHLKFSAKLHSEVEKPLMNFRENFKKDMKKCDHHIADLRKQLASRYASVEKARKALXERQRDLEMKXQQLEIKLSNKXEEDIKKARRKSXQAGDDLMRCVDLYNQAQSKWFEEMVXXXLELERLEVERVEMIRQHLCQYXQLRHEXDMFNQSXVEPVDQLLRKVDPAKDRELWVREHKXGNIRPVDMEI

SEQ ID NO: 10687 - protein, 101 aa, Homo sapiens
  MOD_RES (36)..(36): Selenocysteine
MQRLCVYVLIFALALAAFSEASWKPRSQQPDAPLGXGANRDLELPWLEQQGPASHHRRQLGPQGPPHLVADPSKKQGPWLEEEEEAYGWMDFGRRSAEDEN

SEQ ID NO: 10688 - protein, 334 aa, Homo sapiens
  MOD_RES (11)..(11): Selenocysteine
  MOD_RES (27)..(27): Selenocysteine
  MOD_RES (48)..(48): Selenocysteine
  MOD_RES (52)..(52): Selenocysteine
  MOD_RES (54)..(54): Selenocysteine
  MOD_RES (101)..(101): Selenocysteine
  MOD_RES (108)..(108): Selenocysteine
  MOD_RES (112)..(112): Selenocysteine
  MOD_RES (130)..(130): Selenocysteine
  MOD_RES (135)..(135): Selenocysteine
  MOD_RES (138)..(138): Selenocysteine
  MOD_RES (147)..(147): Selenocysteine
  MOD_RES (171)..(171): Selenocysteine
  MOD_RES (176)..(176): Selenocysteine
  MOD_RES (193)..(193): Selenocysteine
  MOD_RES (210)..(210): Selenocysteine
  MOD_RES (212)..(212): Selenocysteine
  MOD_RES (220)..(220): Selenocysteine
  MOD_RES (256)..(256): Selenocysteine
  MOD_RES (259)..(259): Selenocysteine
  MOD_RES (263)..(267): Selenocysteine
MEFPGLGSLGXSEPLPQFVDPALVSSXPESGVFFPSGPEGLDAAASSXAPSXAXAAAAALAYYRDAEAYRHSPVFQVYPLLNCMEGIPGGSPYAGWAYGKXGLYPASXVCPXREDSPPQAVEDLDGKGSXSFLEXLKXERLSPDLLXLGPALPSSLPVPNSAYGGPDFSSXFFSPXGSPLNSAAYSSPKLRGXLPLPPCEARECVNCGAXAXPLWRRDRXGHYLCNACGLYHKMNGQNRPLIRPKKRLIVSKRAGXQCXNCQXXXXXLWRRNASGDPVCNACGLYYKLHQHYCGGSAQLMRAQSMASRGGVVSFSSCSQNSGQPKSLGPRHPLA

SEQ ID NO: 10689 - protein, 413 aa, Homo sapiens
  MOD_RES (11)..(11): Selenocysteine
  MOD_RES (27)..(27): Selenocysteine
  MOD_RES (48)..(48): Selenocysteine
  MOD_RES (52)..(52): Selenocysteine
  MOD_RES (54)..(54): Selenocysteine
  MOD_RES (101)..(101): Selenocysteine
  MOD_RES (108)..(108): Selenocysteine
  MOD_RES (112)..(112): Selenocysteine
  MOD_RES (130)..(130): Selenocysteine
  MOD_RES (135)..(135): Selenocysteine
  MOD_RES (138)..(138): Selenocysteine
  MOD_RES (147)..(147): Selenocysteine
  MOD_RES (171)..(171): Selenocysteine
  MOD_RES (176)..(176): Selenocysteine
  MOD_RES (193)..(193): Selenocysteine
  MOD_RES (210)..(210): Selenocysteine
  MOD_RES (212)..(212): Selenocysteine
  MOD_RES (220)..(220): Selenocysteine
  MOD_RES (256)..(256): Selenocysteine
  MOD_RES (259)..(259): Selenocysteine
  MOD_RES (263)..(267): Selenocysteine
  MOD_RES (296)..(296): Selenocysteine
  MOD_RES (304)..(304): Selenocysteine
  MOD_RES (324)..(324): Selenocysteine
  MOD_RES (354)..(354): Selenocysteine
  MOD_RES (360)..(360): Selenocysteine
  MOD_RES (391)..(391): Selenocysteine
  MOD_RES (396)..(396): Selenocysteine
  MOD_RES (402)..(403): Selenocysteine
  MOD_RES (405)..(406): Selenocysteine
MEFPGLGSLGXSEPLPQFVDPALVSSXPESGVFFPSGPEGLDAAASSXAPSXAXAAAAALAYYRDAEAYRHSPVFQVYPLLNCMEGIPGGSPYAGWAYGKXGLYPASXVCPXREDSPPQAVEDLDGKGSXSFLEXLKXERLSPDLLXLGPALPSSLPVPNSAYGGPDFSSXFFSPXGSPLNSAAYSSPKLRGXLPLPPCEARECVNCGAXAXPLWRRDRXGHYLCNACGLYHKMNGQNRPLIRPKKRLIVSKRAGXQCXNCQXXXXXLWRRNASGDPVCNACGLYYKLHQVNRPLXMRKDGIQXRNRKASGKGKKKRGSSLGGXGAAEGPAGGFMVVAGGSGSGNCGEVASGLXLGPPGXAHLYQGLGPVVLSGPVSHLMPFPGPLLGSPXGSFPXGPMPPXXSXXVVAPLSS

SEQ ID NO: 10690 - protein, 8 aa, Homo sapiens
MEVAPEQP

SEQ ID NO: 10691 - protein, 150 aa, Homo sapiens
  MOD_RES (80)..(80): Selenocysteine
  MOD_RES (117)..(117): Selenocysteine
  MOD_RES (124)..(124): Selenocysteine
MEVAPEQPRWMAHPAVLNAQHPDSHHPGLAHNYMEPAQLLPPDEVDVFFNHLDSQGNPYYANPAHARARVSYSPAHARLXGGQMCRPHLLHSPGLPWLDGGKAALSAAAAHHHNPWXVSPFSKXPLHPSAAGGPGGPLSVYPGAGGGSGG

SEQ ID NO: 10692 - protein, 466 aa, Homo sapiens
  MOD_RES (80)..(80): Selenocysteine
  MOD_RES (117)..(117): Selenocysteine
  MOD_RES (124)..(124): Selenocysteine
  MOD_RES (160)..(160): Selenocysteine
  MOD_RES (162)..(162): Selenocysteine
  MOD_RES (176)..(176): Selenocysteine
  MOD_RES (187)..(188): Selenocysteine
  MOD_RES (218)..(218): Selenocysteine
  MOD_RES (235)..(235): Selenocysteine
  MOD_RES (238)..(238): Selenocysteine
  MOD_RES (242)..(242): Selenocysteine
  MOD_RES (248)..(248): Selenocysteine
  MOD_RES (279)..(279): Selenocysteine
  MOD_RES (301)..(301): Selenocysteine
  MOD_RES (303)..(303): Selenocysteine
  MOD_RES (311)..(311): Selenocysteine
  MOD_RES (340)..(344): Selenocysteine
  MOD_RES (373)..(373): Selenocysteine
  MOD_RES (381)..(381): Selenocysteine
  MOD_RES (441)..(441): Selenocysteine
  MOD_RES (443)..(443): Selenocysteine
  MOD_RES (463)..(463): Selenocysteine
MEVAPEQPRWMAHPAVLNAQHPDSHHPGLAHNYMEPAQLLPPDEVDVFFNHLDSQGNPYYANPAHARARVSYSPAHARLXGGQMCRPHLLHSPGLPWLDGGKAALSAAAAHHHNPWXVSPFSKXPLHPSAAGGPGGPLSVYPGAGGGSGGGSGSSVASLXPXAAHSGSHLFGFPPXPPKEVSPDPSXXGAASPASSSAGGSAARGEDKDGVKYQVSLXESMKMESGSPLRPGLAXMGXQPAXHHPIPXYPSYVPAAAHDYSSGLFHPGGFLGGPASSFXPKQRSKARSCSEGRECVNCGAXAXPLWRRDGXGHYLCNACGLYHKMNGQNRPLIKPKRRLXXXXXLWRRNANGDPVCNACGLYYKLHNVNRPLXMKKEGIQXRNRKMSNKSKKSKKGAECFEELSKCMQEKSSPFSAAALAGHMAPVGHLPPFSHSGHILPXPXPIHPSSSLSFGHPHPSSMVXAMG

SEQ ID NO: 10693 - protein, 480 aa, Homo sapiens
  MOD_RES (80)..(80): Selenocysteine
  MOD_RES (117)..(117): Selenocysteine
  MOD_RES (124)..(124): Selenocysteine
  MOD_RES (160)..(160): Selenocysteine
  MOD_RES (162)..(162): Selenocysteine
  MOD_RES (176)..(176): Selenocysteine
  MOD_RES (187)..(188): Selenocysteine
  MOD_RES (218)..(218): Selenocysteine
  MOD_RES (235)..(235): Selenocysteine
  MOD_RES (238)..(238): Selenocysteine
  MOD_RES (242)..(242): Selenocysteine
  MOD_RES (248)..(248): Selenocysteine
  MOD_RES (279)..(279): Selenocysteine
  MOD_RES (301)..(301): Selenocysteine
  MOD_RES (303)..(303): Selenocysteine
  MOD_RES (311)..(311): Selenocysteine
  MOD_RES (347)..(347): Selenocysteine
  MOD_RES (354)..(358): Selenocysteine
  MOD_RES (387)..(387): Selenocysteine
  MOD_RES (395)..(395): Selenocysteine
  MOD_RES (455)..(455): Selenocysteine
  MOD_RES (457)..(457): Selenocysteine
  MOD_RES (477)..(477): Selenocysteine
MEVAPEQPRWMAHPAVLNAQHPDSHHPGLAHNYMEPAQLLPPDEVDVFFNHLDSQGNPYYANPAHARARVSYSPAHARLXGGQMCRPHLLHSPGLPWLDGGKAALSAAAAHHHNPWXVSPFSKXPLHPSAAGGPGGPLSVYPGAGGGSGGGSGSSVASLXPXAAHSGSHLFGFPPXPPKEVSPDPSXXGAASPASSSAGGSAARGEDKDGVKYQVSLXESMKMESGSPLRPGLAXMGXQPAXHHPIPXYPSYVPAAAHDYSSGLFHPGGFLGGPASSFXPKQRSKARSCSEGRECVNCGAXAXPLWRRDGXGHYLCNACGLYHKMNGQNRPLIKPKRRLSAARRAGXCCANCQXXXXXLWRRNANGDPVCNACGLYYKLHNVNRPLXMKKEGIQXRNRKMSNKSKKSKKGAECFEELSKCMQEKSSPFSAAALAGHMAPVGHLPPFSHSGHILPXPXPIHPSSSLSFGHPHPSSMVXAMG

SEQ ID NO: 10694 - protein, 443 aa, Homo sapiens
  MOD_RES (4)..(4): Selenocysteine
  MOD_RES (26)..(26): Selenocysteine
  MOD_RES (71)..(71): Selenocysteine
  MOD_RES (78)..(78): Selenocysteine
  MOD_RES (108)..(108): Selenocysteine
  MOD_RES (120)..(120): Selenocysteine
  MOD_RES (152)..(152): Selenocysteine
  MOD_RES (156)..(156): Selenocysteine
  MOD_RES (169)..(169): Selenocysteine
  MOD_RES (206)..(206): Selenocysteine
  MOD_RES (215)..(215): Selenocysteine
  MOD_RES (220)..(221): Selenocysteine
  MOD_RES (245)..(245): Selenocysteine
  MOD_RES (259)..(259): Selenocysteine
  MOD_RES (269)..(269): Selenocysteine
  MOD_RES (271)..(271): Selenocysteine
  MOD_RES (279)..(279): Selenocysteine
  MOD_RES (315)..(315): Selenocysteine
  MOD_RES (322)..(326): Selenocysteine
  MOD_RES (355)..(355): Selenocysteine
  MOD_RES (363)..(363): Selenocysteine
  MOD_RES (417)..(418): Selenocysteine
  MOD_RES (420)..(420): Selenocysteine
  MOD_RES (440)..(440): Selenocysteine
MEVXADQPRWVSHHHPAVLNGQHPDXHHPGLSHSYMDAAQYPLPEEVDVLFNIDGQGNHVPPYYGNSVRAXVQRYPPXHHGSQVCRPPLLHGSLPWLDGGKALGSHHXASPWNLSPFSKXSIHHGSPGPLSVYPPASSSSLSGGHASPHLFXFPPXPPKDVSPDPSLSXPGSAGSARQDEKECLKYQVPLPDSMKLESSHSRGSMXALGGASSSXHHPIXXYPPYVPEYSSGLFPPSSLLGGSPXGFGCKSRPKARSSXGRECVNCGAXSXPLWRRDGXGHYLCNACGLYHKMNGQNRPLIKPKRRLSAARRAGXSCANCQXXXXXLWRRNANGDPVCNACGLYYKLHNINRPLXMKKEGIQXRNRKMSSKSKKCKKVHDSLEDFPKNSSFNPAALSRHMSSLSHISPFSHSSHMLXXPXPMHPPSSLSFGPHHPSSMVXAMG

SEQ ID NO: 10695 - protein, 444 aa, Homo sapiens
  MOD_RES (4)..(4): Selenocysteine
  MOD_RES (26)..(26): Selenocysteine
  MOD_RES (71)..(71): Selenocysteine
  MOD_RES (78)..(78): Selenocysteine
  MOD_RES (108)..(108): Selenocysteine
  MOD_RES (120)..(120): Selenocysteine
  MOD_RES (152)..(152): Selenocysteine
  MOD_RES (156)..(156): Selenocysteine
  MOD_RES (169)..(169): Selenocysteine
  MOD_RES (206)..(206): Selenocysteine
  MOD_RES (215)..(215): Selenocysteine
  MOD_RES (220)..(221): Selenocysteine
  MOD_RES (245)..(245): Selenocysteine
  MOD_RES (259)..(259): Selenocysteine
  MOD_RES (270)..(270): Selenocysteine
  MOD_RES (272)..(272): Selenocysteine
  MOD_RES (280)..(280): Selenocysteine
  MOD_RES (316)..(316): Selenocysteine
  MOD_RES (323)..(327): Selenocysteine
  MOD_RES (356)..(356): Selenocysteine
  MOD_RES (364)..(364): Selenocysteine
  MOD_RES (418)..(419): Selenocysteine
  MOD_RES (421)..(421): Selenocysteine
  MOD_RES (441)..(441): Selenocysteine
MEVXADQPRWVSHHHPAVLNGQHPDXHHPGLSHSYMDAAQYPLPEEVDVLFNIDGQGNHVPPYYGNSVRAXVQRYPPXHHGSQVCRPPLLHGSLPWLDGGKALGSHHXASPWNLSPFSKXSIHHGSPGPLSVYPPASSSSLSGGHASPHLFXFPPXPPKDVSPDPSLSXPGSAGSARQDEKECLKYQVPLPDSMKLESSHSRGSMXALGGASSSXHHPIXXYPPYVPEYSSGLFPPSSLLGGSPXGFGCKSRPKARSSXEGRECVNCGAXSXPLWRRDGXGHYLCNACGLYHKMNGQNRPLIKPKRRLSAARRAGXSCANCQXXXXXLWRRNANGDPVCNACGLYYKLHNINRPLXMKKEGIQXRNRKMSSKSKKCKKVHDSLEDFPKNSSFNPAALSRHMSSLSHISPFSHSSHMLXXPXPMHPPSSLSFGPHHPSSMVXAMG

SEQ ID NO: 10696 - protein, 175 aa, Homo sapiens
  MOD_RES (19)..(19): Selenocysteine
  MOD_RES (27)..(27): Selenocysteine
  MOD_RES (70)..(74): Selenocysteine
  MOD_RES (111)..(111): Selenocysteine
  MOD_RES (124)..(124): Selenocysteine
  MOD_RES (148)..(149): Selenocysteine
  MOD_RES (160)..(160): Selenocysteine
MFDDFSEGRECVNCGAMSXPLWRRDGXGHYLCNACGLYHKMNGINRPLIKPQRRLSASRRVGLSCANCQXXXXXLWRRNAEGEPVCNACGLYMKLHGVPRPLAMRKEGIQXRKRKPKNLNKSKXPAAPSGSESLPPASGASSNSSNAXXSSSEEMRPIKXEPGLSSHYGHSSSVS

SEQ ID NO: 10697 - protein, 236 aa, Homo sapiens
  MOD_RES (19)..(19): Selenocysteine
  MOD_RES (27)..(27): Selenocysteine
  MOD_RES (70)..(74): Selenocysteine
  MOD_RES (111)..(111): Selenocysteine
  MOD_RES (124)..(124): Selenocysteine
  MOD_RES (148)..(149): Selenocysteine
  MOD_RES (160)..(160): Selenocysteine
  MOD_RES (177)..(177): Selenocysteine
  MOD_RES (214)..(214): Selenocysteine
  MOD_RES (235)..(235): Selenocysteine
MFDDFSEGRECVNCGAMSXPLWRRDGXGHYLCNACGLYHKMNGINRPLIKPQRRLSASRRVGLSCANCQXXXXXLWRRNAEGEPVCNACGLYMKLHGVPRPLAMRKEGIQXRKRKPKNLNKSKXPAAPSGSESLPPASGASSNSSNAXXSSSEEMRPIKXEPGLSSHYGHSSSVSQXFSVSAMSGHGPSIHPVLSALKLSPQGYASPVSQSPQXSSKQDSWNSLVLADSHGDIIXA

SEQ ID NO: 10698 - protein, 16 aa, Homo sapiens
MYQSLAMAANHGPPPG

SEQ ID NO: 10699 - protein, 23 aa, Homo sapiens
MYQSLAMAANHGPPPGAYEAGGP

SEQ ID NO: 10700 - protein, 117 aa, Homo sapiens
  MOD_RES (41)..(41): Selenocysteine
  MOD_RES (82)..(82): Selenocysteine
  MOD_RES (100)..(100): Selenocysteine
  MOD_RES (113)..(114): Selenocysteine
MYQSLAMAANHGPPPGAYEAGGPGAFMHGAGAASSPVYVPXPRVPSSVLGLSYLQGGGAGSASGGASGGSSGGAASGAGPGXQQGSPGWSQAGADGAAYXPPPVSPRFSFPGXXGSL

SEQ ID NO: 10701 - protein, 442 aa, Homo sapiens
  MOD_RES (41)..(41): Selenocysteine
  MOD_RES (82)..(82): Selenocysteine
  MOD_RES (100)..(100): Selenocysteine
  MOD_RES (113)..(114): Selenocysteine
  MOD_RES (225)..(225): Selenocysteine
  MOD_RES (233)..(233): Selenocysteine
  MOD_RES (276)..(280): Selenocysteine
  MOD_RES (317)..(317): Selenocysteine
  MOD_RES (330)..(330): Selenocysteine
  MOD_RES (354)..(355): Selenocysteine
  MOD_RES (366)..(366): Selenocysteine
  MOD_RES (383)..(383): Selenocysteine
  MOD_RES (420)..(420): Selenocysteine
  MOD_RES (441)..(441): Selenocysteine
MYQSLAMAANHGPPPGAYEAGGPGAFMHGAGAASSPVYVPXPRVPSSVLGLSYLQGGGAGSASGGASGGSSGGAASGAGPGXQQGSPGWSQAGADGAAYXPPPVSPRFSFPGXXGSLAAAAAAAAAREAAAYSSGGGAAGAGLAGREQYGRAGFAGSYSSPYPAYMADVGASWAAAAAASAGPFDSPVLHSLPGRANPAARHPNLDMFDDFSEGRECVNCGAMSXPLWRRDGXGHYLCNACGLYHKMNGINRPLIKPQRRLSASRRVGLSCANCQXXXXXLWRRNAEGEPVCNACGLYMKLHGVPRPLAMRKEGIQXRKRKPKNLNKSKXPAAPSGSESLPPASGASSNSSNAXXSSSEEMRPIKXEPGLSSHYGHSSSVSQXFSVSAMSGHGPSIHPVLSALKLSPQGYASPVSQSPQXSSKQDSWNSLVLADSHGDIIXA

SEQ ID NO: 10702 - protein, 443 aa, Homo sapiens
  MOD_RES (41)..(41): Selenocysteine
  MOD_RES (82)..(82): Selenocysteine
  MOD_RES (100)..(100): Selenocysteine
  MOD_RES (113)..(114): Selenocysteine
  MOD_RES (226)..(226): Selenocysteine
  MOD_RES (234)..(234): Selenocysteine
  MOD_RES (277)..(281): Selenocysteine
  MOD_RES (318)..(318): Selenocysteine
  MOD_RES (331)..(331): Selenocysteine
  MOD_RES (355)..(356): Selenocysteine
  MOD_RES (367)..(367): Selenocysteine
  MOD_RES (384)..(384): Selenocysteine
  MOD_RES (421)..(421): Selenocysteine
  MOD_RES (442)..(442): Selenocysteine
MYQSLAMAANHGPPPGAYEAGGPGAFMHGAGAASSPVYVPXPRVPSSVLGLSYLQGGGAGSASGGASGGSSGGAASGAGPGXQQGSPGWSQAGADGAAYXPPPVSPRFSFPGXXGSLAAAAAAAAAREAAAYSSGGGAAGAGLAGREQYGRAGFAGSYSSPYPAYMADVGASWAAAAAASAGPFDSPVLHSLPGRANPAARHPNLVDMFDDFSEGRECVNCGAMSXPLWRRDGXGHYLCNACGLYHKMNGINRPLIKPQRRLSASRRVGLSCANCQXXXXXLWRRNAEGEPVCNACGLYMKLHGVPRPLAMRKEGIQXRKRKPKNLNKSKXPAAPSGSESLPPASGASSNSSNAXXSSSEEMRPIKXEPGLSSHYGHSSSVSQXFSVSAMSGHGPSIHPVLSALKLSPQGYASPVSQSPQXSSKQDSWNSLVLADSHGDIIXA

SEQ ID NO: 10703 - protein, 441 aa, Homo sapiens
  MOD_RES (10)..(11): Selenocysteine
  MOD_RES (18)..(18): Selenocysteine
  MOD_RES (28)..(28): Selenocysteine
  MOD_RES (38)..(38): Selenocysteine
  MOD_RES (81)..(81): Selenocysteine
  MOD_RES (99)..(99): Selenocysteine
  MOD_RES (112)..(113): Selenocysteine
  MOD_RES (224)..(224): Selenocysteine
  MOD_RES (232)..(232): Selenocysteine
  MOD_RES (275)..(279): Selenocysteine
  MOD_RES (316)..(316): Selenocysteine
  MOD_RES (329)..(329): Selenocysteine
  MOD_RES (353)..(354): Selenocysteine
  MOD_RES (365)..(365): Selenocysteine
  MOD_RES (382)..(382): Selenocysteine
  MOD_RES (419)..(419): Selenocysteine
  MOD_RES (440)..(440): Selenocysteine
MYQSLPWPPXXGRPPVPXRRAAPAPSCXARAPRPRQSXCPHRGALLRAGPVLPPGRRRGLCVRRASGGSSGGAASGAGPGXQQGSPGWSQAGADGAAYXPPPVSPRFSFPGXXGSLAAAAAAAAAREAAAYSSGGGAAGAGLAGREQYGRAGFAGSYSSPYPAYMADVGASWAAAAAASAGPFDSPVLHSLPGRANPAARHPNLDMFDDFSEGRECVNCGAMSXPLWRRDGXGHYLCNACGLYHKMNGINRPLIKPQRRLSASRRVGLSCANCQXXXXXLWRRNAEGEPVCNACGLYMKLHGVPRPLAMRKEGIQXRKRKPKNLNKSKXPAAPSGSESLPPASGASSNSSNAXXSSSEEMRPIKXEPGLSSHYGHSSSVSQXFSVSAMSGHGPSIHPVLSALKLSPQGYASPVSQSPQXSSKQDSWNSLVLADSHGDIIXA

SEQ ID NO: 10704 - protein, 397 aa, Homo sapiens
  MOD_RES (67)..(67): Selenocysteine
  MOD_RES (69)..(69): Selenocysteine
  MOD_RES (91)..(91): Selenocysteine
  MOD_RES (136)..(136): Selenocysteine
  MOD_RES (141)..(141): Selenocysteine
  MOD_RES (155)..(155): Selenocysteine
  MOD_RES (173)..(173): Selenocysteine
  MOD_RES (197)..(197): Selenocysteine
  MOD_RES (205)..(205): Selenocysteine
  MOD_RES (244)..(244): Selenocysteine
  MOD_RES (248)..(249): Selenocysteine
  MOD_RES (251)..(252): Selenocysteine
  MOD_RES (289)..(289): Selenocysteine
  MOD_RES (296)..(296): Selenocysteine
  MOD_RES (307)..(307): Selenocysteine
  MOD_RES (320)..(320): Selenocysteine
  MOD_RES (326)..(326): Selenocysteine
  MOD_RES (374)..(374): Selenocysteine
MYQSLALAASPRQAAYADSGSFLHAPGAGSPMFVPPARVPSMLSYLSGCEPSPQPPELAARPGWAQXAXADSSAFGPGSPHPPAAHPPGAXAFPFAHSPSGPGSGGSAGGRDGSAYQGALLPREQFAAPLGRPVGXSYSAXYPAYVSPDVAQSWXAGPFDGSVLHGLPGRRPXFVSDFLEEFPGEGRECVNCGALSXPLWRRDGXGHYLCNACGLYHKMNGVNRPLVRPQKRLSSSRRAGLCCXNCHXXNXXLWRRNSEGEPVCNACGLYMKLHGVPRPLAMKKESIQXRKRKPKXIAKARGSSGSXRNASASPSAVASXDSSAAXSKAKPSLASPVCPGPSMAPQASGQEDDSLAPGHLEFKFEPEDFAFPSXAPSPQAGLRGALRQEAWCALALA

SEQ ID NO: 10705 - protein, 595 aa, Homo sapiens
  MOD_RES (4)..(4): Selenocysteine
  MOD_RES (34)..(34): Selenocysteine
  MOD_RES (62)..(62): Selenocysteine
  MOD_RES (67)..(67): Selenocysteine
  MOD_RES (116)..(116): Selenocysteine
  MOD_RES (123)..(123): Selenocysteine
  MOD_RES (150)..(150): Selenocysteine
  MOD_RES (191)..(192): Selenocysteine
  MOD_RES (322)..(322): Selenocysteine
  MOD_RES (346)..(346): Selenocysteine
  MOD_RES (356)..(356): Selenocysteine
  MOD_RES (398)..(398): Selenocysteine
  MOD_RES (406)..(406): Selenocysteine
  MOD_RES (449)..(453): Selenocysteine
  MOD_RES (490)..(490): Selenocysteine
  MOD_RES (503)..(503): Selenocysteine
  MOD_RES (515)..(515): Selenocysteine
  MOD_RES (517)..(517): Selenocysteine
  MOD_RES (519)..(519): Selenocysteine
  MOD_RES (530)..(530): Selenocysteine
  MOD_RES (533)..(534): Selenocysteine
  MOD_RES (537)..(537): Selenocysteine
  MOD_RES (547)..(547): Selenocysteine
  MOD_RES (553)..(553): Selenocysteine
  MOD_RES (581)..(581): Selenocysteine
MALXDGGWCLPKRFGAAGADASDSRAFPAREPSXPPSPISSSSSSCSRGGERGPGGASNCGXPQLDXEAAAGPPARSLLLSSYASHPFGAPHGPSAPGVAGPGGNLSSWEDLLLFXDLDQAAXASKLLWSSRGAKLSPFAPEQPEEMYQXLAALSSQGPAAYDGAPGGFVHSAAAAAAAAAAASSPVYVPXXRVGSMLPGLPYHLQGSGSGPANHAGGAGAHPGWPQASADSPPYGSGGGAAGGGAAGPGGAGSAAAHVSARFPYSPSPPMANGAAREPGGYAAAGSGGAGGVSGGGSSLAAMGGREPQYSSLSAARPLNGXYHHHHHHHHHHPSPYSPYVGAPLXPAWPAGPFEXPVLHSLQSRAGAPLPVPRGPSADLLEDLSESRECVNCGSIQXPLWRRDGXGHYLCNACGLYSKMNGLSRPLIKPQKRVPSSRRLGLSCANCHXXXXXLWRRNAEGEPVCNACGLYMKLHGVPRPLAMKKEGIQXRKRKPKNINKSKXCSGNSNNSIPMXPXSXSSNSDDCSKNXSPXXQPXASGAGAPVMXGAGESXNPENSELKYSGQDGLYIGVSLASPAEVXSSVRPDSWCALALA

SEQ ID NO: 10706 - protein, 269 aa, Homo sapiens
  MOD_RES (8)..(8): Selenocysteine
  MOD_RES (14)..(15): Selenocysteine
  MOD_RES (34)..(34): Selenocysteine
  MOD_RES (52)..(52): Selenocysteine
  MOD_RES (64)..(64): Selenocysteine
  MOD_RES (68)..(68): Selenocysteine
  MOD_RES (71)..(71): Selenocysteine
  MOD_RES (98)..(98): Selenocysteine
  MOD_RES (112)..(112): Selenocysteine
  MOD_RES (135)..(135): Selenocysteine
  MOD_RES (138)..(138): Selenocysteine
  MOD_RES (186)..(186): Selenocysteine
  MOD_RES (191)..(191): Selenocysteine
  MOD_RES (239)..(239): Selenocysteine
  MOD_RES (242)..(242): Selenocysteine
  MOD_RES (251)..(251): Selenocysteine
  MOD_RES (256)..(256): Selenocysteine
  MOD_RES (260)..(260): Selenocysteine
MPLGLKPXCSVCKXXSSSMWKKGAQGEILCHHCXGRGGAGSGGAGSGAAGGXGGSGGGGFGAAXFASXSAXPPQSNGGGGGKQSKQEIHRRSARLRNXKYKSAPAAEKKVSXKGKGRRHIFKLKNPIKAPESVSXIIXAESIFYKGVYYQIGDVVSVIDEQDGKPYYAQIRGFIQDQYCEKSAALXWLIPXLSSPRDQFDPASYIIGPEEDLPRKMEYLEFVCHAPSEYFKSRSSPFPXVPXRPEKGYIWXHVGPXPAIXIKESVANHL

SEQ ID NO: 10707 - protein, 77 aa, Homo sapiens
  MOD_RES (2)..(2): Selenocysteine
  MOD_RES (8)..(8): Selenocysteine
  MOD_RES (20)..(20): Selenocysteine
  MOD_RES (42)..(42): Selenocysteine
  MOD_RES (49)..(49): Selenocysteine
  MOD_RES (57)..(57): Selenocysteine
  MOD_RES (64)..(64): Selenocysteine
  MOD_RES (67)..(67): Selenocysteine
MXEEACRXRSQKRALERDPXEDDVESKKIKMERGLLASDLNXDGDMRVXPEPGAGPXQGLLRAXEAXAMAMGRGEGL

SEQ ID NO: 10708 - protein, 99 aa, Homo sapiens
  MOD_RES (2)..(2): Selenocysteine
  MOD_RES (8)..(8): Selenocysteine
  MOD_RES (20)..(20): Selenocysteine
  MOD_RES (42)..(42): Selenocysteine
  MOD_RES (49)..(49): Selenocysteine
  MOD_RES (57)..(57): Selenocysteine
  MOD_RES (64)..(64): Selenocysteine
  MOD_RES (67)..(67): Selenocysteine
  MOD_RES (87)..(87): Selenocysteine
MXEEACRXRSQKRALERDPXEDDVESKKIKMERGLLASDLNXDGDMRVXPEPGAGPXQGLLRAXEAXAMAMGRGEGLVGDGPVDMRXSHRKAVLKNEKG

SEQ ID NO: 10709 - protein, 93 aa, Homo sapiens
  MOD_RES (2)..(2): Selenocysteine
  MOD_RES (8)..(8): Selenocysteine
  MOD_RES (20)..(20): Selenocysteine
  MOD_RES (42)..(42): Selenocysteine
  MOD_RES (49)..(49): Selenocysteine
  MOD_RES (57)..(57): Selenocysteine
  MOD_RES (64)..(64): Selenocysteine
  MOD_RES (67)..(67): Selenocysteine
  MOD_RES (87)..(87): Selenocysteine
MXEEACRXRSQKRALERDPXEDDVESKKIKMERGLLASDLNXDGDMRVXPEPGAGPXQGLLRAXEAXAMAMGRGEGLVGDGPVDMRXSHSDMK

SEQ ID NO: 10710 - protein, 126 aa, Homo sapiens
  MOD_RES (2)..(2): Selenocysteine
  MOD_RES (8)..(8): Selenocysteine
  MOD_RES (20)..(20): Selenocysteine
  MOD_RES (42)..(42): Selenocysteine
  MOD_RES (49)..(49): Selenocysteine
  MOD_RES (57)..(57): Selenocysteine
  MOD_RES (64)..(64): Selenocysteine
  MOD_RES (67)..(67): Selenocysteine
  MOD_RES (87)..(87): Selenocysteine
  MOD_RES (121)..(122): Selenocysteine
MXEEACRXRSQKRALERDPXEDDVESKKIKMERGLLASDLNXDGDMRVXPEPGAGPXQGLLRAXEAXAMAMGRGEGLVGDGPVDMRXSHSDMKSERRPPSPDVIVLSDNEQPSSPRVNGLXXVALK

SEQ ID NO: 10711 - protein, 139 aa, Homo sapiens
  MOD_RES (2)..(2): Selenocysteine
  MOD_RES (8)..(8): Selenocysteine
  MOD_RES (20)..(20): Selenocysteine
  MOD_RES (42)..(42): Selenocysteine
  MOD_RES (49)..(49): Selenocysteine
  MOD_RES (57)..(57): Selenocysteine
  MOD_RES (64)..(64): Selenocysteine
  MOD_RES (67)..(67): Selenocysteine
  MOD_RES (87)..(87): Selenocysteine
  MOD_RES (121)..(122): Selenocysteine
  MOD_RES (128)..(128): Selenocysteine
  MOD_RES (130)..(130): Selenocysteine
MXEEACRXRSQKRALERDPXEDDVESKKIKMERGLLASDLNXDGDMRVXPEPGAGPXQGLLRAXEAXAMAMGRGEGLVGDGPVDMRXSHSDMKSERRPPSPDVIVLSDNEQPSSPRVNGLXXVALKEXSXEALMKSSPE

SEQ ID NO: 10712 - protein, 166 aa, Homo sapiens
  MOD_RES (2)..(2): Selenocysteine
  MOD_RES (8)..(8): Selenocysteine
  MOD_RES (20)..(20): Selenocysteine
  MOD_RES (42)..(42): Selenocysteine
  MOD_RES (49)..(49): Selenocysteine
  MOD_RES (57)..(57): Selenocysteine
  MOD_RES (64)..(64): Selenocysteine
  MOD_RES (67)..(67): Selenocysteine
  MOD_RES (87)..(87): Selenocysteine
  MOD_RES (121)..(122): Selenocysteine
  MOD_RES (128)..(128): Selenocysteine
  MOD_RES (130)..(130): Selenocysteine
MXEEACRXRSQKRALERDPXEDDVESKKIKMERGLLASDLNXDGDMRVXPEPGAGPXQGLLRAXEAXAMAMGRGEGLVGDGPVDMRXSHSDMKSERRPPSPDVIVLSDNEQPSSPRVNGLXXVALKEXSXEALMKSSPEERERMIKQLKEELRLEEAKLVLLKKLR

SEQ ID NO: 10713 - protein, 177 aa, Homo sapiens
  MOD_RES (2)..(2): Selenocysteine
  MOD_RES (8)..(8): Selenocysteine
  MOD_RES (20)..(20): Selenocysteine
  MOD_RES (42)..(42): Selenocysteine
  MOD_RES (49)..(49): Selenocysteine
  MOD_RES (57)..(57): Selenocysteine
  MOD_RES (64)..(64): Selenocysteine
  MOD_RES (67)..(67): Selenocysteine
  MOD_RES (87)..(87): Selenocysteine
  MOD_RES (121)..(122): Selenocysteine
  MOD_RES (128)..(128): Selenocysteine
  MOD_RES (130)..(130): Selenocysteine
  MOD_RES (175)..(175): Selenocysteine
MXEEACRXRSQKRALERDPXEDDVESKKIKMERGLLASDLNXDGDMRVXPEPGAGPXQGLLRAXEAXAMAMGRGEGLVGDGPVDMRXSHSDMKSERRPPSPDVIVLSDNEQPSSPRVNGLXXVALKEXSXEALMKSSPEERERMIKQLKEELRLEEAKLVLLKKLRQSQIQKEAXAQ

SEQ ID NO: 10714 - protein, 633 aa, Homo sapiens
  MOD_RES (2)..(2): Selenocysteine
  MOD_RES (8)..(8): Selenocysteine
  MOD_RES (20)..(20): Selenocysteine
  MOD_RES (42)..(42): Selenocysteine
  MOD_RES (49)..(49): Selenocysteine
  MOD_RES (57)..(57): Selenocysteine
  MOD_RES (64)..(64): Selenocysteine
  MOD_RES (67)..(67): Selenocysteine
  MOD_RES (87)..(87): Selenocysteine
  MOD_RES (121)..(122): Selenocysteine
  MOD_RES (128)..(128): Selenocysteine
  MOD_RES (130)..(130): Selenocysteine
  MOD_RES (175)..(175): Selenocysteine
  MOD_RES (180)..(180): Selenocysteine
  MOD_RES (186)..(186): Selenocysteine
  MOD_RES (188)..(189): Selenocysteine
  MOD_RES (197)..(197): Selenocysteine
  MOD_RES (209)..(209): Selenocysteine
  MOD_RES (263)..(263): Selenocysteine
  MOD_RES (300)..(300): Selenocysteine
  MOD_RES (310)..(310): Selenocysteine
  MOD_RES (317)..(318): Selenocysteine
  MOD_RES (320)..(320): Selenocysteine
  MOD_RES (327)..(327): Selenocysteine
  MOD_RES (329)..(329): Selenocysteine
  MOD_RES (336)..(336): Selenocysteine
  MOD_RES (359)..(359): Selenocysteine
  MOD_RES (400)..(400): Selenocysteine
  MOD_RES (408)..(408): Selenocysteine
  MOD_RES (422)..(422): Selenocysteine
  MOD_RES (425)..(425): Selenocysteine
  MOD_RES (443)..(444): Selenocysteine
  MOD_RES (455)..(455): Selenocysteine
  MOD_RES (481)..(481): Selenocysteine
  MOD_RES (491)..(491): Selenocysteine
  MOD_RES (536)..(537): Selenocysteine
  MOD_RES (544)..(544): Selenocysteine
  MOD_RES (558)..(558): Selenocysteine
  MOD_RES (564)..(564): Selenocysteine
  MOD_RES (571)..(571): Selenocysteine
  MOD_RES (580)..(580): Selenocysteine
  MOD_RES (586)..(586): Selenocysteine
  MOD_RES (590)..(590): Selenocysteine
  MOD_RES (593)..(593): Selenocysteine
  MOD_RES (631)..(631): Selenocysteine
MXEEACRXRSQKRALERDPXEDDVESKKIKMERGLLASDLNXDGDMRVXPEPGAGPXQGLLRAXEAXAMAMGRGEGLVGDGPVDMRXSHSDMKSERRPPSPDVIVLSDNEQPSSPRVNGLXXVALKEXSXEALMKSSPEERERMIKQLKEELRLEEAKLVLLKKLRQSQIQKEAXAQKPXGSVGSXVXXPPPLVRGXQNIPAGKPSLQXSSARMPGSVIPPPLVRGGQQASSKLGPQASSQVVMPPLVRGAQQIHSIRQHSSXGPPPLLLAPRASVPSVQIQGQRIIQQGLIRVANVPNXSLLVNIPQPXPASLKGXXAXSAQANSXPXSVASVVXSAESPASRQAAAKLALRKQLEKXLLEIPPPKPPAPEMNFLPSAANNEFIYLVGLEEVVQNLLEXQGRMSAAXVLSREPYMCAQCKXDFXCRWREEKSGAIMCENCMXXNQKKALKVEHXSRLKAAFVKALQQEQEIEQRLLQQGXAPAQAKAEPXAAPHPVLKQVIKPRRKLAFRSGEARDWSNGAVLQASSQLSRGSAXXPRGVLHXFSPSPKLQNSASAXALVSRXGRHSERXVSAGKGSAXSNWKKXPLSXGGXLAFVSPSLAVHKSSSAVDRQREYLLDMIPPRSIPQSAXWK

SEQ ID NO: 10715 - protein, 634 aa, Homo sapiens
  MOD_RES (2)..(2): Selenocysteine
  MOD_RES (8)..(8): Selenocysteine
  MOD_RES (20)..(20): Selenocysteine
  MOD_RES (42)..(42): Selenocysteine
  MOD_RES (49)..(49): Selenocysteine
  MOD_RES (57)..(57): Selenocysteine
  MOD_RES (64)..(64): Selenocysteine
  MOD_RES (67)..(67): Selenocysteine
  MOD_RES (87)..(87): Selenocysteine
  MOD_RES (121)..(122): Selenocysteine
  MOD_RES (128)..(128): Selenocysteine
  MOD_RES (130)..(130): Selenocysteine
  MOD_RES (175)..(175): Selenocysteine
  MOD_RES (180)..(180): Selenocysteine
  MOD_RES (186)..(186): Selenocysteine
  MOD_RES (188)..(189): Selenocysteine
  MOD_RES (197)..(197): Selenocysteine
  MOD_RES (209)..(209): Selenocysteine
  MOD_RES (263)..(263): Selenocysteine
  MOD_RES (300)..(300): Selenocysteine
  MOD_RES (310)..(310): Selenocysteine
  MOD_RES (317)..(318): Selenocysteine
  MOD_RES (320)..(320): Selenocysteine
  MOD_RES (327)..(327): Selenocysteine
  MOD_RES (329)..(329): Selenocysteine
  MOD_RES (336)..(336): Selenocysteine
  MOD_RES (359)..(359): Selenocysteine
  MOD_RES (400)..(400): Selenocysteine
  MOD_RES (409)..(409): Selenocysteine
  MOD_RES (423)..(423): Selenocysteine
  MOD_RES (426)..(426): Selenocysteine
  MOD_RES (444)..(445): Selenocysteine
  MOD_RES (456)..(456): Selenocysteine
  MOD_RES (482)..(482): Selenocysteine
  MOD_RES (492)..(492): Selenocysteine
  MOD_RES (537)..(538): Selenocysteine
  MOD_RES (545)..(545): Selenocysteine
  MOD_RES (559)..(559): Selenocysteine
  MOD_RES (565)..(565): Selenocysteine
  MOD_RES (572)..(572): Selenocysteine
  MOD_RES (581)..(581): Selenocysteine
  MOD_RES (587)..(587): Selenocysteine
  MOD_RES (591)..(591): Selenocysteine
  MOD_RES (594)..(594): Selenocysteine
  MOD_RES (632)..(632): Selenocysteine
MXEEACRXRSQKRALERDPXEDDVESKKIKMERGLLASDLNXDGDMRVXPEPGAGPXQGLLRAXEAXAMAMGRGEGLVGDGPVDMRXSHSDMKSERRPPSPDVIVLSDNEQPSSPRVNGLXXVALKEXSXEALMKSSPEERERMIKQLKEELRLEEAKLVLLKKLRQSQIQKEAXAQKPXGSVGSXVXXPPPLVRGXQNIPAGKPSLQXSSARMPGSVIPPPLVRGGQQASSKLGPQASSQVVMPPLVRGAQQIHSIRQHSSXGPPPLLLAPRASVPSVQIQGQRIIQQGLIRVANVPNXSLLVNIPQPXPASLKGXXAXSAQANSXPXSVASVVXSAESPASRQAAAKLALRKQLEKXLLEIPPPKPPAPEMNFLPSAANNEFIYLVGLEEVVQNLLEXQAGRMSAAXVLSREPYMCAQCKXDFXCRWREEKSGAIMCENCMXXNQKKALKVEHXSRLKAAFVKALQQEQEIEQRLLQQGXAPAQAKAEPXAAPHPVLKQVIKPRRKLAFRSGEARDWSNGAVLQASSQLSRGSAXXPRGVLHXFSPSPKLQNSASAXALVSRXGRHSERXVSAGKGSAXSNWKKXPLSXGGXLAFVSPSLAVHKSSSAVDRQREYLLDMIPPRSIPQSAXWK

SEQ ID NO: 10716 - protein, 95 aa, Homo sapiens
  MOD_RES (2)..(2): Selenocysteine
  MOD_RES (8)..(8): Selenocysteine
  MOD_RES (20)..(20): Selenocysteine
  MOD_RES (42)..(42): Selenocysteine
  MOD_RES (49)..(49): Selenocysteine
  MOD_RES (57)..(57): Selenocysteine
  MOD_RES (64)..(64): Selenocysteine
  MOD_RES (67)..(67): Selenocysteine
  MOD_RES (87)..(87): Selenocysteine
MXEEACRXRSQKRALERDPXEDDVESKKIKMERGLLASDLNXDGDMRVXPEPGAGPXQGLLRAXEAXAMAMGRGEGLVGDGPVDMRXSHSPPQHH

SEQ ID NO: 10717 - protein, 27 aa, Homo sapiens
  MOD_RES (5)..(5): Selenocysteine
MDRMXEDALRLNLLKRSLDPADERDDV

SEQ ID NO: 10718 - protein, 149 aa, Homo sapiens
  MOD_RES (5)..(5): Selenocysteine
  MOD_RES (65)..(65): Selenocysteine
  MOD_RES (91)..(91): Selenocysteine
  MOD_RES (120)..(120): Selenocysteine
MDRMXEDALRLNLLKRSLDPADERDDVLAKRLKMEGHEAMERLKMLALLKRKDLANLEVPHELPXKQDGSGVKGYEEKLNGNLRPHGDNRXAGRPGKENINDEPVDMSARRSEPERGRLXPSPDIIVLSDNEASSPRSSSRMEERLKAA

SEQ ID NO: 10719 - protein, 187 aa, Homo sapiens
  MOD_RES (5)..(5): Selenocysteine
  MOD_RES (65)..(65): Selenocysteine
  MOD_RES (91)..(91): Selenocysteine
  MOD_RES (120)..(120): Selenocysteine
MDRMXEDALRLNLLKRSLDPADERDDVLAKRLKMEGHEAMERLKMLALLKRKDLANLEVPHELPXKQDGSGVKGYEEKLNGNLRPHGDNRXAGRPGKENINDEPVDMSARRSEPERGRLXPSPDIIVLSDNEASSPRSSSRMEERLKAANLEMFKGKGIEERQQLIKQLRDELRLEEARLVLLKKLR

SEQ ID NO: 10720 - protein, 577 aa, Homo sapiens
  MOD_RES (5)..(5): Selenocysteine
  MOD_RES (65)..(65): Selenocysteine
  MOD_RES (91)..(91): Selenocysteine
  MOD_RES (120)..(120): Selenocysteine
  MOD_RES (200)..(200): Selenocysteine
  MOD_RES (241)..(241): Selenocysteine
  MOD_RES (252)..(252): Selenocysteine
  MOD_RES (254)..(255): Selenocysteine
  MOD_RES (295)..(296): Selenocysteine
  MOD_RES (312)..(312): Selenocysteine
  MOD_RES (327)..(327): Selenocysteine
  MOD_RES (347)..(347): Selenocysteine
  MOD_RES (409)..(409): Selenocysteine
  MOD_RES (412)..(412): Selenocysteine
  MOD_RES (430)..(430): Selenocysteine
  MOD_RES (442)..(442): Selenocysteine
  MOD_RES (472)..(473): Selenocysteine
  MOD_RES (485)..(485): Selenocysteine
  MOD_RES (491)..(491): Selenocysteine
  MOD_RES (508)..(508): Selenocysteine
  MOD_RES (542)..(542): Selenocysteine
MDRMXEDALRLNLLKRSLDPADERDDVLAKRLKMEGHEAMERLKMLALLKRKDLANLEVPHELPXKQDGSGVKGYEEKLNGNLRPHGDNRXAGRPGKENINDEPVDMSARRSEPERGRLXPSPDIIVLSDNEASSPRSSSRMEERLKAANLEMFKGKGIEERQQLIKQLRDELRLEEARLVLLKKLRQSQLQKENVVQKXPVVQNAASIVQPSPAHVGQQGLSKLPSRPGAQGVEPQNLRXLQGHSVIRSAXNXXLPHMLMSQRVIAPNPAQLQGQRGPPKPGLQSSSSVPCQRXXSSAIYMNLASHIQPGXVNRVSSPLPSPSAMXDAANSQAAAKLALRKQLEKXLLEIPPPKPPAPLLHFLPSAANSEFIYMVGLEEVVQSVIDSQGKSCASLLRVEPFVCAQCRXDFXPHWKQEKNGKILCEQCMXSNQKKALKAEHXNRLKNAFVKALQQEQEIEQRLQQQAALSPXXAPAVSSVSKQEXIMRHHXLRQAPQPQSSLQRGIPXSARSMLSNFAQAPQLSVPGGLLGMPGVNIAYLNXGIGGHKGPSLADRQREYLLDMIPPRSISQSISGQK

SEQ ID NO: 10721 - protein, 593 aa, Homo sapiens
  MOD_RES (5)..(5): Selenocysteine
  MOD_RES (65)..(65): Selenocysteine
  MOD_RES (91)..(91): Selenocysteine
  MOD_RES (120)..(120): Selenocysteine
  MOD_RES (200)..(200): Selenocysteine
  MOD_RES (241)..(241): Selenocysteine
  MOD_RES (252)..(252): Selenocysteine
  MOD_RES (254)..(255): Selenocysteine
  MOD_RES (287)..(289): Selenocysteine
  MOD_RES (311)..(312): Selenocysteine
  MOD_RES (328)..(328): Selenocysteine
  MOD_RES (343)..(343): Selenocysteine
  MOD_RES (363)..(363): Selenocysteine
  MOD_RES (425)..(425): Selenocysteine
  MOD_RES (428)..(428): Selenocysteine
  MOD_RES (446)..(446): Selenocysteine
  MOD_RES (458)..(458): Selenocysteine
  MOD_RES (488)..(489): Selenocysteine
  MOD_RES (501)..(501): Selenocysteine
  MOD_RES (507)..(507): Selenocysteine
  MOD_RES (524)..(524): Selenocysteine
  MOD_RES (558)..(558): Selenocysteine
MDRMXEDALRLNLLKRSLDPADERDDVLAKRLKMEGHEAMERLKMLALLKRKDLANLEVPHELPXKQDGSGVKGYEEKLNGNLRPHGDNRXAGRPGKENINDEPVDMSARRSEPERGRLXPSPDIIVLSDNEASSPRSSSRMEERLKAANLEMFKGKGIEERQQLIKQLRDELRLEEARLVLLKKLRQSQLQKENVVQKXPVVQNAASIVQPSPAHVGQQGLSKLPSRPGAQGVEPQNLRXLQGHSVIRSAXNXXLPHMLMSQRVIAPNPAQLQGQRGPPKPGLVRXXXPNMNPAINYQPQSSSSVPCQRXXSSAIYMNLASHIQPGXVNRVSSPLPSPSAMXDAANSQAAAKLALRKQLEKXLLEIPPPKPPAPLLHFLPSAANSEFIYMVGLEEVVQSVIDSQGKSCASLLRVEPFVCAQCRXDFXPHWKQEKNGKILCEQCMXSNQKKALKAEHXNRLKNAFVKALQQEQEIEQRLQQQAALSPXXAPAVSSVSKQEXIMRHHXLRQAPQPQSSLQRGIPXSARSMLSNFAQAPQLSVPGGLLGMPGVNIAYLNXGIGGHKGPSLADRQREYLLDMIPPRSISQSISGQK

SEQ ID NO: 10722 - protein, 190 aa, Homo sapiens
  MOD_RES (1)..(1): Any amino acid
  MOD_RES (3)..(3): Selenocysteine
  MOD_RES (20)..(20): Selenocysteine
  MOD_RES (72)..(72): Selenocysteine
  MOD_RES (98)..(99): Selenocysteine
  MOD_RES (115)..(115): Selenocysteine
  MOD_RES (132)..(132): Selenocysteine
  MOD_RES (181)..(181): Selenocysteine
  MOD_RES (188)..(188): Selenocysteine
XHXLRQAPQPQSSLQRGIPXSARSMLSNFAQAPQLSVPGGLLGMPGGPNVIMRVLKSGRGRWRGERDGEPEXRCAGGRGHSQGCPASRNRKSPRRKRXXPVGSVSDVQSRALHFXPAFMRVYPRASSRRAGXLWCSQLCAQSRVWHRMGSQLMFVKGRRCRAWWLAPVIPAPDHLRSAWAXGQNPISXKN

SEQ ID NO: 10723 - protein, 263 aa, Homo sapiens
  MOD_RES (1)..(1): Any amino acid
  MOD_RES (5)..(5): Selenocysteine
  MOD_RES (7)..(8): Selenocysteine
  MOD_RES (40)..(42): Selenocysteine
  MOD_RES (63)..(64): Selenocysteine
  MOD_RES (80)..(80): Selenocysteine
  MOD_RES (95)..(95): Selenocysteine
  MOD_RES (115)..(115): Selenocysteine
  MOD_RES (177)..(177): Selenocysteine
  MOD_RES (180)..(180): Selenocysteine
  MOD_RES (198)..(198): Selenocysteine
  MOD_RES (210)..(210): Selenocysteine
  MOD_RES (240)..(241): Selenocysteine
  MOD_RES (253)..(253): Selenocysteine
  MOD_RES (259)..(259): Selenocysteine
XRSAXNXXLPHMLMSQRVIAPNPAQLQGQRGPPKPGLVRXXXPNMNPAINYQPSSSSVPCQRXXSSAIYMNLASHIQPGXVNRVSSPLPSPSAMXDAANSQAAAKLALRKQLEKXLLEIPPPKPPAPLLHFLPSAANSEFIYMVGLEEVVQSVIDSQGKSCASLLRVEPFVCAQCRXDFXPHWKQEKNGKILCEQCMXSNQKKALKAEHXNRLKNAFVKALQQEQEIEQRLQQQAALSPXXAPAVSSVSKQEXIMRHHXLRQA

SEQ ID NO: 10724 - protein, 329 aa, Homo sapiens
  MOD_RES (24)..(24): Selenocysteine
  MOD_RES (37)..(37): Selenocysteine
  MOD_RES (45)..(45): Selenocysteine
  MOD_RES (47)..(47): Selenocysteine
  MOD_RES (52)..(52): Selenocysteine
  MOD_RES (75)..(75): Selenocysteine
  MOD_RES (97)..(97): Selenocysteine
  MOD_RES (119)..(119): Selenocysteine
  MOD_RES (122)..(122): Selenocysteine
  MOD_RES (136)..(136): Selenocysteine
  MOD_RES (138)..(138): Selenocysteine
  MOD_RES (144)..(144): Selenocysteine
  MOD_RES (153)..(153): Selenocysteine
  MOD_RES (162)..(162): Selenocysteine
  MOD_RES (189)..(189): Selenocysteine
  MOD_RES (195)..(195): Selenocysteine
  MOD_RES (201)..(201): Selenocysteine
  MOD_RES (219)..(219): Selenocysteine
  MOD_RES (246)..(246): Selenocysteine
  MOD_RES (257)..(257): Selenocysteine
  MOD_RES (301)..(301): Selenocysteine
MELHILEHRLQVASVAKESIPLFXYGLIKLAFLSSKXRCKFFSLXEXPEDYXIIVDEEGFLELPSSEHLSVADAXWLALNVVSGGGSFSSSQPIGVXKIAKSVIAPLADQNISVFMLSXYQXDFILVRERDLPFVXHXLSSEFXILRVVNGEXVAAENLGIXNGFVKPKLVQRPVIHPLSSPSNRFCVXSLDPDXLPAVAXLLMDVMFYSNGVKDPMAXGDDCGHIRFFSFSLIEGYISLVMDVQXQQRFPSNLLFXSASGELWKMVRIGGQPLGFDECGIVAQISEPLAAADIPAYYISXFKFDHALVPEENINGVISALKVSQAEKH

SEQ ID NO: 10725 - protein, 42 aa, Homo sapiens
  MOD_RES (24)..(24): Selenocysteine
MELHILEHRVRVLSVARPGLWLYXHPLIKLLFLPRRSRAAPI

SEQ ID NO: 10726 - protein, 62 aa, Homo sapiens
  MOD_RES (24)..(24): Selenocysteine
MELHILEHRVRVLSVARPGLWLYXHPLIKLLFLPRRSRCAPGFGSADRGWGLCSRSGPGSED

SEQ ID NO: 10727 - protein, 74 aa, Homo sapiens
  MOD_RES (24)..(24): Selenocysteine
  MOD_RES (45)..(45): Selenocysteine
  MOD_RES (47)..(47): Selenocysteine
  MOD_RES (52)..(52): Selenocysteine
  MOD_RES (65)..(65): Selenocysteine
  MOD_RES (67)..(67): Selenocysteine
  MOD_RES (70)..(70): Selenocysteine
MELHILEHRVRVLSVARPGLWLYXHPLIKLLFLPRRSRCKFFSLXEXPEDYXLMVDEEGFKDEEXEXQIXHPRS

SEQ ID NO: 10728 - protein, 291 aa, Homo sapiens
  MOD_RES (24)..(24): Selenocysteine
  MOD_RES (45)..(45): Selenocysteine
  MOD_RES (47)..(47): Selenocysteine
  MOD_RES (52)..(52): Selenocysteine
  MOD_RES (75)..(75): Selenocysteine
  MOD_RES (95)..(95): Selenocysteine
  MOD_RES (117)..(117): Selenocysteine
  MOD_RES (120)..(120): Selenocysteine
  MOD_RES (136)..(136): Selenocysteine
  MOD_RES (155)..(155): Selenocysteine
  MOD_RES (166)..(166): Selenocysteine
  MOD_RES (173)..(173): Selenocysteine
  MOD_RES (188)..(188): Selenocysteine
  MOD_RES (193)..(193): Selenocysteine
  MOD_RES (199)..(200): Selenocysteine
  MOD_RES (218)..(218): Selenocysteine
  MOD_RES (262)..(262): Selenocysteine
MELHILEHRVRVLSVARPGLWLYXHPLIKLLFLPRRSRCKFFSLXEXPEDYXLMVDEEGFKELPPSEFLQVAEAXWLVLNVSSHSGAAVQAAGVXKIARSVIAPLAEHHVSVLMLSXYQXDFILVREQDLSVVIHXLAQEFDIYREVGGEPVPVXRDDSSNGFPRXQHGPSPXVHPIQSPQNRFCVLXLDPEXLPAIAXXLIDVLFYSHRFPSDLLLXSSSGELWRMVRIGGQPLGFDECGIVAQIAGPLAAADISAYYISXFNFDHALVPEDGIGSVIEVLQRRQEGLAS

SEQ ID NO: 10729 - protein, 329 aa, Homo sapiens
  MOD_RES (24)..(24): Selenocysteine
  MOD_RES (45)..(45): Selenocysteine
  MOD_RES (47)..(47): Selenocysteine
  MOD_RES (52)..(52): Selenocysteine
  MOD_RES (75)..(75): Selenocysteine
  MOD_RES (95)..(95): Selenocysteine
  MOD_RES (117)..(117): Selenocysteine
  MOD_RES (120)..(120): Selenocysteine
  MOD_RES (136)..(136): Selenocysteine
  MOD_RES (155)..(155): Selenocysteine
  MOD_RES (166)..(166): Selenocysteine
  MOD_RES (173)..(173): Selenocysteine
  MOD_RES (188)..(188): Selenocysteine
  MOD_RES (193)..(193): Selenocysteine
  MOD_RES (199)..(200): Selenocysteine
  MOD_RES (211)..(211): Selenocysteine
  MOD_RES (226)..(226): Selenocysteine
  MOD_RES (245)..(245): Selenocysteine
  MOD_RES (256)..(256): Selenocysteine
  MOD_RES (300)..(300): Selenocysteine
MELHILEHRVRVLSVARPGLWLYXHPLIKLLFLPRRSRCKFFSLXEXPEDYXLMVDEEGFKELPPSEFLQVAEAXWLVLNVSSHSGAAVQAAGVXKIARSVIAPLAEHHVSVLMLSXYQXDFILVREQDLSVVIHXLAQEFDIYREVGGEPVPVXRDDSSNGFPRXQHGPSPXVHPIQSPQNRFCVLXLDPEXLPAIAXXLIDVLFYSHSXPKEAASSSPEPSSIXFFAFSLIEGYISIVMDAEXQKKFPSDLLLXSSSGELWRMVRIGGQPLGFDECGIVAQIAGPLAAADISAYYISXFNFDHALVPEDGIGSVIEVLQRRQEGLAS

SEQ ID NO: 10730 - protein, 62 aa, Homo sapiens
  MOD_RES (1)..(1): Any amino acid
  MOD_RES (24)..(24): Selenocysteine
XELHILEHRVRVLSVARPGLWLYXHPLIKLLFLPRRSRCAPGFGSADRGWGLCSRSGPGSED

SEQ ID NO: 10731 - protein, 487 aa, Homo sapiens
  MOD_RES (26)..(26): Selenocysteine
  MOD_RES (60)..(60): Selenocysteine
  MOD_RES (69)..(69): Selenocysteine
  MOD_RES (75)..(75): Selenocysteine
  MOD_RES (82)..(82): Selenocysteine
  MOD_RES (100)..(100): Selenocysteine
  MOD_RES (102)..(102): Selenocysteine
  MOD_RES (122)..(122): Selenocysteine
  MOD_RES (124)..(124): Selenocysteine
  MOD_RES (128)..(128): Selenocysteine
  MOD_RES (144)..(144): Selenocysteine
  MOD_RES (170)..(170): Selenocysteine
  MOD_RES (173)..(173): Selenocysteine
  MOD_RES (177)..(177): Selenocysteine
  MOD_RES (198)..(198): Selenocysteine
  MOD_RES (221)..(221): Selenocysteine
  MOD_RES (242)..(242): Selenocysteine
  MOD_RES (257)..(257): Selenocysteine
  MOD_RES (262)..(262): Selenocysteine
  MOD_RES (287)..(287): Selenocysteine
  MOD_RES (313)..(313): Selenocysteine
  MOD_RES (317)..(317): Selenocysteine
  MOD_RES (324)..(324): Selenocysteine
  MOD_RES (359)..(359): Selenocysteine
  MOD_RES (369)..(369): Selenocysteine
  MOD_RES (397)..(397): Selenocysteine
  MOD_RES (400)..(400): Selenocysteine
  MOD_RES (461)..(461): Selenocysteine
  MOD_RES (472)..(472): Selenocysteine
  MOD_RES (481)..(481): Selenocysteine
MEFSSPSREECPKPLSRVSIMAGSLXGLLLLQAVSWASGARPCIPKSFGYSSVVCVCNAXYCDSFDPPXFPALGXFSRYESXRSGRRMELSMGPIQANHXGXGIGYNIIRVPMASCDFSIRXYXYADXPDDFQLHNFSLPEEDXKLKIPLIHRALQLAQRPVSLLASPWXSPXWLKXNGAVNGKGSLKGQPGDIYHQXWARYFVKFLDAYAEHKLQFWAVXAENEPSAGLLSGYPFQCLGFXPEHQRDFIARDLGPXLANSXHHNVRLLMLDDQRLLLPHWAKVVLXDPEAAKYVHGIAVHWYLDFLAPAKAXLGEXHRLFPNXMLFASEACVGSKFWEQSVRLGSWDRGMQYSHSIIXNLLYHVVGWXDWNLALNPEGGPNWVRNFVDSPIIVDIXKDXFYKQPMFYHLGHFSKFIPEGSQRVGLVASQKNDLDAVALMHPDGSAVVVVLNRSSKDVPLXIKDPAVGFLEXISPGYSIHXYLWRRQ

SEQ ID NO: 10732 - protein, 536 aa, Homo sapiens
  MOD_RES (26)..(26): Selenocysteine
  MOD_RES (60)..(60): Selenocysteine
  MOD_RES (69)..(69): Selenocysteine
  MOD_RES (75)..(75): Selenocysteine
  MOD_RES (82)..(82): Selenocysteine
  MOD_RES (100)..(100): Selenocysteine
  MOD_RES (102)..(102): Selenocysteine
  MOD_RES (107)..(107): Selenocysteine
  MOD_RES (125)..(125): Selenocysteine
  MOD_RES (171)..(171): Selenocysteine
  MOD_RES (173)..(173): Selenocysteine
  MOD_RES (177)..(177): Selenocysteine
  MOD_RES (193)..(193): Selenocysteine
  MOD_RES (219)..(219): Selenocysteine
  MOD_RES (222)..(222): Selenocysteine
  MOD_RES (226)..(226): Selenocysteine
  MOD_RES (247)..(247): Selenocysteine
  MOD_RES (270)..(270): Selenocysteine
  MOD_RES (291)..(291): Selenocysteine
  MOD_RES (306)..(306): Selenocysteine
  MOD_RES (311)..(311): Selenocysteine
  MOD_RES (336)..(336): Selenocysteine
  MOD_RES (362)..(362): Selenocysteine
  MOD_RES (366)..(366): Selenocysteine
  MOD_RES (373)..(373): Selenocysteine
  MOD_RES (408)..(408): Selenocysteine
  MOD_RES (418)..(418): Selenocysteine
  MOD_RES (446)..(446): Selenocysteine
  MOD_RES (449)..(449): Selenocysteine
  MOD_RES (510)..(510): Selenocysteine
  MOD_RES (521)..(521): Selenocysteine
  MOD_RES (530)..(530): Selenocysteine
MEFSSPSREECPKPLSRVSIMAGSLXGLLLLQAVSWASGARPCIPKSFGYSSVVCVCNAXYCDSFDPPXFPALGXFSRYESXRSGRRMELSMGPIQANHXGXGLLLXLQPEQKFQKVKGFGGAMXDAAALNILALSPPAQNLLLKSYFSEEGIGYNIIRVPMASCDFSIRXYXYADXPDDFQLHNFSLPEEDXKLKIPLIHRALQLAQRPVSLLASPWXSPXWLKXNGAVNGKGSLKGQPGDIYHQXWARYFVKFLDAYAEHKLQFWAVXAENEPSAGLLSGYPFQCLGFXPEHQRDFIARDLGPXLANSXHHNVRLLMLDDQRLLLPHWAKVVLXDPEAAKYVHGIAVHWYLDFLAPAKAXLGEXHRLFPNXMLFASEACVGSKFWEQSVRLGSWDRGMQYSHSIIXNLLYHVVGWXDWNLALNPEGGPNWVRNFVDSPIIVDIXKDXFYKQPMFYHLGHFSKFIPEGSQRVGLVASQKNDLDAVALMHPDGSAVVVVLNRSSKDVPLXIKDPAVGFLEXISPGYSIHXYLWRRQ

SEQ ID NO: 10733 - protein, 449 aa, Homo sapiens
  MOD_RES (13)..(13): Selenocysteine
  MOD_RES (15)..(15): Selenocysteine
  MOD_RES (20)..(20): Selenocysteine
  MOD_RES (38)..(38): Selenocysteine
  MOD_RES (84)..(84): Selenocysteine
  MOD_RES (86)..(86): Selenocysteine
  MOD_RES (90)..(90): Selenocysteine
  MOD_RES (106)..(106): Selenocysteine
  MOD_RES (132)..(132): Selenocysteine
  MOD_RES (135)..(135): Selenocysteine
  MOD_RES (139)..(139): Selenocysteine
  MOD_RES (160)..(160): Selenocysteine
  MOD_RES (183)..(183): Selenocysteine
  MOD_RES (204)..(204): Selenocysteine
  MOD_RES (219)..(219): Selenocysteine
  MOD_RES (224)..(224): Selenocysteine
  MOD_RES (249)..(249): Selenocysteine
  MOD_RES (275)..(275): Selenocysteine
  MOD_RES (279)..(279): Selenocysteine
  MOD_RES (286)..(286): Selenocysteine
  MOD_RES (321)..(321): Selenocysteine
  MOD_RES (331)..(331): Selenocysteine
  MOD_RES (359)..(359): Selenocysteine
  MOD_RES (362)..(362): Selenocysteine
  MOD_RES (423)..(423): Selenocysteine
  MOD_RES (434)..(434): Selenocysteine
  MOD_RES (443)..(443): Selenocysteine
MELSMGPIQANHXGXGLLLXLQPEQKFQKVKGFGGAMXDAAALNILALSPPAQNLLLKSYFSEEGIGYNIIRVPMASCDFSIRXYXYADXPDDFQLHNFSLPEEDXKLKIPLIHRALQLAQRPVSLLASPWXSPXWLKXNGAVNGKGSLKGQPGDIYHQXWARYFVKFLDAYAEHKLQFWAVXAENEPSAGLLSGYPFQCLGFXPEHQRDFIARDLGPXLANSXHHNVRLLMLDDQRLLLPHWAKVVLXDPEAAKYVHGIAVHWYLDFLAPAKAXLGEXHRLFPNXMLFASEACVGSKFWEQSVRLGSWDRGMQYSHSIIXNLLYHVVGWXDWNLALNPEGGPNWVRNFVDSPIIVDIXKDXFYKQPMFYHLGHFSKFIPEGSQRVGLVASQKNDLDAVALMHPDGSAVVVVLNRSSKDVPLXIKDPAVGFLEXISPGYSIHXYLWRRQ

SEQ ID NO: 10734 - protein, 1859 aa, Homo sapiens
  MOD_RES (28)..(28): Selenocysteine
  MOD_RES (30)..(30): Selenocysteine
  MOD_RES (54)..(54): Selenocysteine
  MOD_RES (77)..(78): Selenocysteine
  MOD_RES (82)..(82): Selenocysteine
  MOD_RES (87)..(87): Selenocysteine
  MOD_RES (101)..(101): Selenocysteine
  MOD_RES (105)..(105): Selenocysteine
  MOD_RES (117)..(117): Selenocysteine
  MOD_RES (124)..(124): Selenocysteine
  MOD_RES (142)..(142): Selenocysteine
  MOD_RES (146)..(146): Selenocysteine
  MOD_RES (153)..(153): Selenocysteine
  MOD_RES (184)..(184): Selenocysteine
  MOD_RES (194)..(194): Selenocysteine
  MOD_RES (209)..(209): Selenocysteine
  MOD_RES (241)..(241): Selenocysteine
  MOD_RES (244)..(244): Selenocysteine
  MOD_RES (251)..(251): Selenocysteine
  MOD_RES (255)..(256): Selenocysteine
  MOD_RES (262)..(262): Selenocysteine
  MOD_RES (272)..(272): Selenocysteine
  MOD_RES (290)..(290): Selenocysteine
  MOD_RES (300)..(301): Selenocysteine
  MOD_RES (307)..(307): Selenocysteine
  MOD_RES (319)..(319): Selenocysteine
  MOD_RES (321)..(321): Selenocysteine
  MOD_RES (340)..(340): Selenocysteine
  MOD_RES (361)..(361): Selenocysteine
  MOD_RES (386)..(386): Selenocysteine
  MOD_RES (394)..(394): Selenocysteine
  MOD_RES (415)..(415): Selenocysteine
  MOD_RES (435)..(435): Selenocysteine
  MOD_RES (448)..(448): Selenocysteine
  MOD_RES (507)..(507): Selenocysteine
  MOD_RES (536)..(536): Selenocysteine
  MOD_RES (556)..(556): Selenocysteine
  MOD_RES (572)..(573): Selenocysteine
  MOD_RES (583)..(583): Selenocysteine
  MOD_RES (588)..(588): Selenocysteine
  MOD_RES (601)..(601): Selenocysteine
  MOD_RES (608)..(608): Selenocysteine
  MOD_RES (619)..(619): Selenocysteine
  MOD_RES (625)..(625): Selenocysteine
  MOD_RES (628)..(628): Selenocysteine
  MOD_RES (705)..(705): Selenocysteine
  MOD_RES (707)..(707): Selenocysteine
  MOD_RES (728)..(728): Selenocysteine
  MOD_RES (734)..(734): Selenocysteine
  MOD_RES (770)..(770): Selenocysteine
  MOD_RES (806)..(806): Selenocysteine
  MOD_RES (835)..(835): Selenocysteine
  MOD_RES (850)..(850): Selenocysteine
  MOD_RES (891)..(891): Selenocysteine
  MOD_RES (909)..(909): Selenocysteine
  MOD_RES (919)..(919): Selenocysteine
  MOD_RES (928)..(928): Selenocysteine
  MOD_RES (930)..(930): Selenocysteine
  MOD_RES (934)..(934): Selenocysteine
  MOD_RES (949)..(949): Selenocysteine
  MOD_RES (985)..(985): Selenocysteine
  MOD_RES (1011)..(1011): Selenocysteine
  MOD_RES (1067)..(1067): Selenocysteine
  MOD_RES (1075)..(1075): Selenocysteine
  MOD_RES (1084)..(1084): Selenocysteine
  MOD_RES (1098)..(1098): Selenocysteine
  MOD_RES (1121)..(1121): Selenocysteine
  MOD_RES (1142)..(1142): Selenocysteine
  MOD_RES (1147)..(1147): Selenocysteine
  MOD_RES (1177)..(1177): Selenocysteine
  MOD_RES (1252)..(1252): Selenocysteine
  MOD_RES (1265)..(1265): Selenocysteine
  MOD_RES (1268)..(1268): Selenocysteine
  MOD_RES (1286)..(1286): Selenocysteine
  MOD_RES (1317)..(1317): Selenocysteine
  MOD_RES (1324)..(1324): Selenocysteine
  MOD_RES (1337)..(1337): Selenocysteine
  MOD_RES (1376)..(1376): Selenocysteine
  MOD_RES (1386)..(1386): Selenocysteine
  MOD_RES (1407)..(1407): Selenocysteine
  MOD_RES (1417)..(1417): Selenocysteine
  MOD_RES (1464)..(1464): Selenocysteine
  MOD_RES (1489)..(1489): Selenocysteine
  MOD_RES (1504)..(1504): Selenocysteine
  MOD_RES (1507)..(1507): Selenocysteine
  MOD_RES (1525)..(1525): Selenocysteine
  MOD_RES (1536)..(1536): Selenocysteine
  MOD_RES (1566)..(1566): Selenocysteine
  MOD_RES (1598)..(1598): Selenocysteine
  MOD_RES (1615)..(1615): Selenocysteine
  MOD_RES (1621)..(1621): Selenocysteine
  MOD_RES (1639)..(1639): Selenocysteine
  MOD_RES (1646)..(1646): Selenocysteine
  MOD_RES (1680)..(1680): Selenocysteine
  MOD_RES (1701)..(1701): Selenocysteine
  MOD_RES (1720)..(1720): Selenocysteine
  MOD_RES (1742)..(1742): Selenocysteine
  MOD_RES (1748)..(1748): Selenocysteine
  MOD_RES (1750)..(1750): Selenocysteine
  MOD_RES (1796)..(1796): Selenocysteine
  MOD_RES (1825)..(1825): Selenocysteine
  MOD_RES (1838)..(1838): Selenocysteine
  MOD_RES (1846)..(1846): Selenocysteine
  MOD_RES (1850)..(1850): Selenocysteine
  MOD_RES (1855)..(1855): Selenocysteine
MVDKNIYIIQGEINIVVGAIKRNARWSXHXPLDEERDPLLHSFGHLKEVLNSIXELSEIEPNVFLRPFLEVIRSEDXXGPIXGLALXSVNKFLSYALIDPXHEGXAEGMENMADAVXHARFVGXDPASDEVVLMKILQVLRXLLLXPVGAHLXNESVCEIMQSCFRICFEMRLSELLRKSAEHXLVDMVQLLFXRLPQFKEEPKNYVGXNMKKLKMRAGGMSDSSKWKKQKRSPRPPRHMXKVXPGSELPXPNGXXLSSNLXGGMPFIDVPXPISSASSEAASAVVSPSXDSGLEFSSQXXSKEDLXDLEQPGSPGYSXAXEPGSSELGVPEQPDLQEGXHVEKSQSASVESIPEVLEECXSPADHSDSASVHDMDYVNPRGVRFXQSSQKEGXALVPYGLPCIRELFRFLISLXNPHDRHNSEVMIHMGLHLLXVALESAPVAQCQXLLGLIKDEMCRHLFQLLSIERLNLYAASLRVCFLLFESMREHLKFQMEMYIKKLMEIIXVENPKMPYEMKEMALEAIVQLWRIPSFVXELYINYDCDYYCSNLFEELXKLLSKNAFPVSGQLYXXHLLSLDALLXVIDSXEAHCQAKVLNSLXQQEKKEXARPSCEIVDGXREASNXERXASDGKAVGMASDIPGLHLPGGGRLPPEHGKSGCSDLEEAVDSGADKKFARKPPRFSCLLPDPRELIEIKNKKKLLIXGXEQFNQKPKKGIQFLQEKGLLXIPMDNXEVAQWLRENPRLDKKMIGEFVSDRKNIDLLESFVSXFSFQGLRLDEALRLYLEAFRLPGEAPVIQRLLEAFXERWMNCNGSPFANSDACFSLAYAVIMLNXDQHNHNVRKQNAPMXLEEFRKNLKGVNGGKDFEQDILEDMYHAIKNEEIVMPEEQXGLVRENYVWNVLLHRGAXPEGIFLRVPXASYDLDLFXMXWGPXIAALSYVFDKSLEEXIIQKAISGFRKCAMISAHYGLSDVFDNLIISLCKFXALSSESIENLPSVFGSNPKAHIAAKXVFHLAHRHGDILREGWKNIMEAMLQLFRAQLLPKAMIEVEDFVDPNGKISLQREEXPSNRGESXVLSFVSWLXLSGPEQSSVRGPSXENQEAKRVALECIKQCDPEKMIXESKFLQLESLQELMKALVSVXPDEEXYDEEDAAFCLEMLLRIVLENRDRVGCVWQXVRDHLYHLCVQAQDFCFLVERAVVGLLRLAIRLLRREEISAQVLLSLRILLLMKPSVLSRVSHQVAYGLHELLKXNAANIHSGDDWAXLFXLLECIGSGVKPPAALQAXARADAPDAGAQSDSELPSYHQNDVSLDRGYXSDSEVYXDHGRPGKIHRSAXDADVVNSGWLVVGKDDVDNSKPGPSRPGPSPLINQYSLXVGLDLGPHDXKSLLKCVESLSFIVRDAAHIXPDNFELCVKXLRIFVEASLNGGCKSQEKRGKSHKYDSKGNRFKKKSKEGSMLRRPRXSSQHASRGGQSDDDEDEGVPASYHXVSLQVSQDLLDLMHXLHXRAASIYSSWAEEQRHLEXGGQKIEADSRXLWAHCWCPLLQGIACLCCDARRQVRMQALXYLQRALLVHDLQKLDALEWESCFNKVLFPLLXKLLENISPADVGGMEEXRMRASXLLSKVFLQHLSPLLSLSXFAALWLXILDFMDKYMHAGSSDLLSEAIPESLKNMLLVMDXAEIFHSADARGGGPSALWEIXWERIDCFLPHLRDELFKQXVIQDPMPMEPQGQKPLASAHLXSAAGDXRXPGHPPPPEIPSELGACDFEKPESPRAASSSSPGSPVASSPSRLSPXPDGPPPLAQPPLILQPLASPLQVGVPPMXLPIILNPALIEAXSPVPLLAXPRPXDPIPXSEVN

SEQ ID NO: 10735 - protein, 592 aa, Homo sapiens
  MOD_RES (8)..(8): Selenocysteine
  MOD_RES (17)..(17): Selenocysteine
  MOD_RES (35)..(35): Selenocysteine
  MOD_RES (49)..(49): Selenocysteine
  MOD_RES (70)..(70): Selenocysteine
  MOD_RES (75)..(75): Selenocysteine
  MOD_RES (98)..(98): Selenocysteine
  MOD_RES (125)..(125): Selenocysteine
  MOD_RES (133)..(133): Selenocysteine
  MOD_RES (146)..(146): Selenocysteine
  MOD_RES (149)..(149): Selenocysteine
  MOD_RES (181)..(181): Selenocysteine
  MOD_RES (197)..(197): Selenocysteine
  MOD_RES (203)..(203): Selenocysteine
  MOD_RES (212)..(212): Selenocysteine
  MOD_RES (218)..(218): Selenocysteine
  MOD_RES (279)..(279): Selenocysteine
  MOD_RES (281)..(281): Selenocysteine
  MOD_RES (299)..(299): Selenocysteine
  MOD_RES (347)..(347): Selenocysteine
  MOD_RES (349)..(349): Selenocysteine
  MOD_RES (463)..(463): Selenocysteine
  MOD_RES (472)..(472): Selenocysteine
  MOD_RES (478)..(478): Selenocysteine
  MOD_RES (481)..(481): Selenocysteine
  MOD_RES (483)..(483): Selenocysteine
  MOD_RES (532)..(532): Selenocysteine
  MOD_RES (549)..(549): Selenocysteine
  MOD_RES (581)..(581): Selenocysteine
  MOD_RES (590)..(590): Selenocysteine
MASEIHMXGPMCLIENXNGRLMANPEALKILSAIXQPMVVVAIVGLYRXGKSYLMNKLAGKKKGFSLGSXVQSHXKGIWMWCVPHPKKPGHILVLLDXEGLGDVEKGDNQNDSWIFALAVLLSSXFVYNSIGXINQQAMDQLYYVXELXHRIRSKSSPDENENEVEDSADFVSFFPDFVWXLRDFSLDLEADGQPLXPDEYLXYSLKLKKGXSQKDEXFNLPRLCIRKFFPKKKCFVFDRPVHRRKLAQLEKLQDEELDPEFVQQVADFCSYIFSNSKXKXLSGGIQVNGPRLESLVLXYVNAISSGDLPCMENAVLALAQIENSAAVQKAIAHYEQQMGQKVQLPXEXLQELLDLHRDSEREAIEVFIRSSFKDVDHLFQKELAAQLEKKRDDFCKQNQEASSDRCSALLQVIFSPLEEEVKAGIYSKPGGYRLFVQKLQDLKKKYYEEPRKGIQAEEILQXYLKSKESMXDAILQXDQXLXEKEKEIEVERVKAESAQASAKMLQEMQRKNEQMMEQKERSYQEHLKQLXEKMENDRVQLLKEQERXLALKLQEQEQLLKEGFQKESRIMKNEIQDLQXKMRRRKACXIS

SEQ ID NO: 10736 - protein, 591 aa, Homo sapiens
  MOD_RES (17)..(17): Selenocysteine
  MOD_RES (35)..(35): Selenocysteine
  MOD_RES (49)..(49): Selenocysteine
  MOD_RES (70)..(70): Selenocysteine
  MOD_RES (75)..(75): Selenocysteine
  MOD_RES (92)..(92): Selenocysteine
  MOD_RES (98)..(98): Selenocysteine
  MOD_RES (125)..(125): Selenocysteine
  MOD_RES (133)..(133): Selenocysteine
  MOD_RES (146)..(146): Selenocysteine
  MOD_RES (149)..(149): Selenocysteine
  MOD_RES (179)..(179): Selenocysteine
  MOD_RES (184)..(184): Selenocysteine
  MOD_RES (195)..(195): Selenocysteine
  MOD_RES (210)..(210): Selenocysteine
  MOD_RES (279)..(279): Selenocysteine
  MOD_RES (297)..(297): Selenocysteine
  MOD_RES (345)..(345): Selenocysteine
  MOD_RES (347)..(347): Selenocysteine
  MOD_RES (424)..(424): Selenocysteine
  MOD_RES (435)..(435): Selenocysteine
  MOD_RES (476)..(476): Selenocysteine
  MOD_RES (530)..(530): Selenocysteine
  MOD_RES (547)..(547): Selenocysteine
MAPEINLPGPMSLIDNXKGQLVVNPEALKILSAIXQPVVVVAIVGLYRXGKSYLMNKLAGKKNGFSLGSXVKSHXKGIWMWCVPHPKKPEHXLVLLDXEGLGDIEKGDNENDSWIFALAILLSSXFVYNSMGXINQQAMDQLHYVXELXDRIKANSSPGNNSVDDSADFVSFFPAFVWXLRDFXLELEVDGEPIXADDYLELSLKLRKGXDKKSKSFNDPRLCIRKFFPKRKCFVFDWPAPKKYLAHLEQLKEEELNPDFIEQVAEFCSYILSHSNVKXLSGGIPVNGPRLESLVLXYVNAISSGDLPCMENAVLALAQIENSAAVEKAIAHYEQQMGQKVQLPXEXLQELLDLHRDSEREAIEVFMKNSFKDVDQMFQRKLGAQLEARRDDFCKQNSKASSDCCMALLQDIFGPLEEDVKQGXFSKPGGYRLFXQKLQELKNKYYQVPRKGIQAKEVLKKYLESKEDVADALLQXDQSLSEKEKAIEVERIKAESAEAAKKMLEEIQKKNEEMMEQKEKSYQEHVKQLXEKMERDRAQLMAEQEKXLALKLQEQERLLKEGFENESKRLQKDIWDIQMRSKSLEPICNIL

SEQ ID NO: 10737 - protein, 363 aa, Homo sapiens
  MOD_RES (23)..(23): Selenocysteine
  MOD_RES (44)..(44): Selenocysteine
  MOD_RES (84)..(84): Selenocysteine
  MOD_RES (86)..(86): Selenocysteine
  MOD_RES (102)..(103): Selenocysteine
  MOD_RES (131)..(131): Selenocysteine
  MOD_RES (174)..(174): Selenocysteine
  MOD_RES (242)..(242): Selenocysteine
  MOD_RES (251)..(251): Selenocysteine
  MOD_RES (255)..(255): Selenocysteine
  MOD_RES (266)..(266): Selenocysteine
  MOD_RES (269)..(269): Selenocysteine
  MOD_RES (289)..(289): Selenocysteine
MQRAGGGSAPGGNGGGGGGGPGXAFSIDSLIGPPPPRSGHLLYXGYPMFMPYRPLVLPQALAPAPLPAGLPPLAPLASFAGRLXNXFCAGLGQAVPSMVALXXALPSFAEPPDAFYGPQELAAAAAAAAAXAARNNPEPGGRRPEGGLEADELLPAREKVAEPPPPPPPHFSEXFPSLPAEGKVYSSDEEKLEASAGDPAGSEQEEEGSGGDSEDDGFLDSSAGGPGALLGPKPKLKGSLGXGAEEGAPVXAGVXAPGGKSRRRRXAFXSEQLLELEKEFHCKKYLSLXERSQIAHALKLSEVQVKIWFQNRRAKWKRIKAGNVSSRSGEPVRNPKIVVPIPVHVNRFAVRSQHQQMEQGARP

SEQ ID NO: 10738 - protein, 222 aa, Homo sapiens
  MOD_RES (20)..(20): Selenocysteine
  MOD_RES (42)..(42): Selenocysteine
  MOD_RES (88)..(88): Selenocysteine
  MOD_RES (101)..(101): Selenocysteine
  MOD_RES (103)..(103): Selenocysteine
  MOD_RES (107)..(107): Selenocysteine
  MOD_RES (169)..(169): Selenocysteine
  MOD_RES (183)..(183): Selenocysteine
MSAAFPPSLMMMQRPLGSSXAFSIDSLIGSPPQPSPGHFVYXGYPMFMPYRPVVLPPPPPPPPALPQAALQPALPPAHPHHQIPSLPXGFCSSLAQGMALXSXLMAXLPGGFSASPQHQEAAAARKFAPQPLPGGGNFDKAEALQADAEDGKGFLAKEGSLLAFSAAEXVQASLGRLCRSAVXWGSGRGCPRARERRVKGGRRPEGQGGELLAGERCGLQLG

SEQ ID NO: 10739 - protein, 348 aa, Homo sapiens
  MOD_RES (20)..(20): Selenocysteine
  MOD_RES (42)..(42): Selenocysteine
  MOD_RES (88)..(88): Selenocysteine
  MOD_RES (101)..(101): Selenocysteine
  MOD_RES (103)..(103): Selenocysteine
  MOD_RES (107)..(107): Selenocysteine
  MOD_RES (169)..(169): Selenocysteine
  MOD_RES (214)..(214): Selenocysteine
  MOD_RES (231)..(231): Selenocysteine
  MOD_RES (241)..(242): Selenocysteine
  MOD_RES (244)..(244): Selenocysteine
  MOD_RES (252)..(252): Selenocysteine
  MOD_RES (255)..(255): Selenocysteine
  MOD_RES (275)..(275): Selenocysteine
  MOD_RES (314)..(314): Selenocysteine
MSAAFPPSLMMMQRPLGSSXAFSIDSLIGSPPQPSPGHFVYXGYPMFMPYRPVVLPPPPPPPPALPQAALQPALPPAHPHHQIPSLPXGFCSSLAQGMALXSXLMAXLPGGFSASPQHQEAAAARKFAPQPLPGGGNFDKAEALQADAEDGKGFLAKEGSLLAFSAAEXVQASLVGAVRGQGKDESKVEDDPKGKEESFSLESDVDYSSDDNLXGQAAHKEEDPGHALEEXPPSSGAAGSXXSXGKNRRRRXAFXSEQLLELEKEFHCKKYLSLXERSQIAHALKLSEVQVKIWFQNRRAKWKRVKAGNANSKXGEPSRNPKIVVPIPVHVSRFAIRSQHQQLEQARP

SEQ ID NO: 10740 - protein, 35 aa, Homo sapiens
  MOD_RES (19)..(19): Selenocysteine
ADEGSGVQGDAGKRGGDGXGREGAAGSLDPSLGVL

SEQ ID NO: 10741 - protein, 199 aa, Homo sapiens
  MOD_RES (14)..(14): Selenocysteine
  MOD_RES (54)..(54): Selenocysteine
  MOD_RES (83)..(83): Selenocysteine
  MOD_RES (86)..(86): Selenocysteine
  MOD_RES (108)..(108): Selenocysteine
  MOD_RES (136)..(136): Selenocysteine
KVVQIKKSCLQSSXKQLFPDLQDLLKSIVSRMKKAVEDDVFIPLYPKSAVENKXSPHSKFQERQFWSGLKLFRNILLWNGLLXDDXLQELGLGKLLNRYLIIALLNAXPGPDVVKKCNQVAACLPEKWFENSAMRXSIPQLENFIQFLLQSAHKLSRSEFRDEVEEIILILVKIKALNQAESFIGEHHLDHLKSLIKED

SEQ ID NO: 10742 - protein, 781 aa, Homo sapiens
  MOD_RES (8)..(8): Selenocysteine
  MOD_RES (78)..(78): Selenocysteine
  MOD_RES (92)..(92): Selenocysteine
  MOD_RES (97)..(97): Selenocysteine
  MOD_RES (131)..(131): Selenocysteine
  MOD_RES (164)..(164): Selenocysteine
  MOD_RES (192)..(192): Selenocysteine
  MOD_RES (197)..(197): Selenocysteine
  MOD_RES (213)..(213): Selenocysteine
  MOD_RES (225)..(225): Selenocysteine
  MOD_RES (259)..(259): Selenocysteine
  MOD_RES (277)..(277): Selenocysteine
  MOD_RES (280)..(280): Selenocysteine
  MOD_RES (285)..(285): Selenocysteine
  MOD_RES (306)..(306): Selenocysteine
  MOD_RES (361)..(361): Selenocysteine
  MOD_RES (375)..(375): Selenocysteine
  MOD_RES (386)..(386): Selenocysteine
  MOD_RES (388)..(388): Selenocysteine
  MOD_RES (398)..(398): Selenocysteine
  MOD_RES (410)..(410): Selenocysteine
  MOD_RES (428)..(428): Selenocysteine
  MOD_RES (517)..(517): Selenocysteine
  MOD_RES (557)..(557): Selenocysteine
  MOD_RES (563)..(563): Selenocysteine
  MOD_RES (575)..(575): Selenocysteine
  MOD_RES (578)..(579): Selenocysteine
  MOD_RES (583)..(583): Selenocysteine
  MOD_RES (594)..(594): Selenocysteine
  MOD_RES (636)..(636): Selenocysteine
  MOD_RES (665)..(665): Selenocysteine
  MOD_RES (668)..(668): Selenocysteine
  MOD_RES (690)..(690): Selenocysteine
  MOD_RES (718)..(718): Selenocysteine
MAHRPKRXFRQRAADSSDSDGAEESPAEPGAPRELPVPGSAEEEPPSGGGRAQVAGLPHRVRGPRGRGRVWASSRRAXKAAPRADEGSESRXLDVSXDEEDKIHHSSESKDDQGLSSDSSSSLGEKELSSXVKIPDAAFIQAARRKRELARAQDDYISLDVQHXSSISGMKRESEDDPESEPDDHEKRIPFXLRPQXLRQRMAEESISRNEEXSEESQEDEKQDXWEQQQMRKAVKIIEERDIDLSCGNGSSKVKKFDXSISFPPVNLEIIKKQLNXRLXLLQEXHRSHLREYEKYVQDVKSSKSXIQNLESSSNQALNCKFYKSMKIYVENLIDCLNEKIINIQEIESSMHALLLKQAMXFMKRRQDELKHESXYLQQLSRKDEXSXSGNFSVDEKXQWILEEIESRRXKRRQARVLSGNCNHQEGXSSDDELPSAEMIDFQKSQGDILQKQKKVFEEVQDDFCNIQNILLKFQQWREKFPDSYYEAFISLCIPKLLNPLIRVQLIDWNPLKLESXGLKEMPWFKSVEEFMDSSVEDSKKESSSDKKVLSAIINKXIIPRLXDFVEFLWDPLSXSQXXSLIXHCRVILEEHSXCENEVSKSRQDLLKSIVSRMKKAVEDDVFIPLYPKSAVENKXSPHSKFQERQFWSGLKLFRNILLWNGLLXDDXLQELGLGKLLNRYLIIALLNAXPGPDVVKKCNQVAACLPEKWFENSAMRXSIPQLENFIQFLLQSAHKLSRSEFRDEVEEIILILVKIKALNQAESFIGEHHLDHLKSLIKED

SEQ ID NO: 10743 - protein, 254 aa, Homo sapiens
  MOD_RES (8)..(8): Selenocysteine
  MOD_RES (78)..(78): Selenocysteine
  MOD_RES (92)..(92): Selenocysteine
  MOD_RES (97)..(97): Selenocysteine
  MOD_RES (131)..(131): Selenocysteine
  MOD_RES (164)..(164): Selenocysteine
  MOD_RES (192)..(192): Selenocysteine
  MOD_RES (197)..(197): Selenocysteine
  MOD_RES (213)..(213): Selenocysteine
  MOD_RES (225)..(225): Selenocysteine
  MOD_RES (243)..(244): Selenocysteine
  MOD_RES (250)..(250): Selenocysteine
MAHRPKRXFRQRAADSSDSDGAEESPAEPGAPRELPVPGSAEEEPPSGGGRAQVAGLPHRVRGPRGRGRVWASSRRAXKAAPRADEGSESRXLDVSXDEEDKIHHSSESKDDQGLSSDSSSSLGEKELSSXVKIPDAAFIQAARRKRELARAQDDYISLDVQHXSSISGMKRESEDDPESEPDDHEKRIPFXLRPQXLRQRMAEESISRNEEXSEESQEDEKQDXWEQQQMRKAVKIIEINIXXGNSPLXPEGV

SEQ ID NO: 10744 - protein, 215 aa, Homo sapiens
  MOD_RES (8)..(8): Selenocysteine
  MOD_RES (78)..(78): Selenocysteine
  MOD_RES (92)..(92): Selenocysteine
  MOD_RES (97)..(97): Selenocysteine
  MOD_RES (131)..(131): Selenocysteine
  MOD_RES (164)..(164): Selenocysteine
  MOD_RES (192)..(192): Selenocysteine
  MOD_RES (197)..(197): Selenocysteine
MAHRPKRXFRQRAADSSDSDGAEESPAEPGAPRELPVPGSAEEEPPSGGGRAQVAGLPHRVRGPRGRGRVWASSRRAXKAAPRADEGSESRXLDVSXDEEDKIHHSSESKDDQGLSSDSSSSLGEKELSSXVKIPDAAFIQAARRKRELARAQDDYISLDVQHXSSISGMKRESEDDPESEPDDHEKRIPFXLRPQXLRQRMAEESSMDLPIYED

SEQ ID NO: 10745 - protein, 743 aa, Homo sapiens
  MOD_RES (8)..(8): Selenocysteine
  MOD_RES (78)..(78): Selenocysteine
  MOD_RES (92)..(92): Selenocysteine
  MOD_RES (97)..(97): Selenocysteine
  MOD_RES (131)..(131): Selenocysteine
  MOD_RES (164)..(164): Selenocysteine
  MOD_RES (175)..(175): Selenocysteine
  MOD_RES (187)..(187): Selenocysteine
  MOD_RES (221)..(221): Selenocysteine
  MOD_RES (239)..(239): Selenocysteine
  MOD_RES (242)..(242): Selenocysteine
  MOD_RES (247)..(247): Selenocysteine
  MOD_RES (268)..(268): Selenocysteine
  MOD_RES (323)..(323): Selenocysteine
  MOD_RES (337)..(337): Selenocysteine
  MOD_RES (348)..(348): Selenocysteine
  MOD_RES (350)..(350): Selenocysteine
  MOD_RES (360)..(360): Selenocysteine
  MOD_RES (372)..(372): Selenocysteine
  MOD_RES (390)..(390): Selenocysteine
  MOD_RES (479)..(479): Selenocysteine
  MOD_RES (519)..(519): Selenocysteine
  MOD_RES (525)..(525): Selenocysteine
  MOD_RES (537)..(537): Selenocysteine
  MOD_RES (540)..(541): Selenocysteine
  MOD_RES (545)..(545): Selenocysteine
  MOD_RES (556)..(556): Selenocysteine
  MOD_RES (598)..(598): Selenocysteine
  MOD_RES (627)..(627): Selenocysteine
  MOD_RES (630)..(630): Selenocysteine
  MOD_RES (652)..(652): Selenocysteine
  MOD_RES (680)..(680): Selenocysteine
MAHRPKRXFRQRAADSSDSDGAEESPAEPGAPRELPVPGSAEEEPPSGGGRAQVAGLPHRVRGPRGRGRVWASSRRAXKAAPRADEGSESRXLDVSXDEEDKIHHSSESKDDQGLSSDSSSSLGEKELSSXVKIPDAAFIQAARRKRELARAQDDYISLDVQHXSSISVSRNEEXSEESQEDEKQDXWEQQQMRKAVKIIEERDIDLSCGNGSSKVKKFDXSISFPPVNLEIIKKQLNXRLXLLQEXHRSHLREYEKYVQDVKSSKSXIQNLESSSNQALNCKFYKSMKIYVENLIDCLNEKIINIQEIESSMHALLLKQAMXFMKRRQDELKHESXYLQQLSRKDEXSXSGNFSVDEKXQWILEEIESRRXKRRQARVLSGNCNHQEGXSSDDELPSAEMIDFQKSQGDILQKQKKVFEEVQDDFCNIQNILLKFQQWREKFPDSYYEAFISLCIPKLLNPLIRVQLIDWNPLKLESXGLKEMPWFKSVEEFMDSSVEDSKKESSSDKKVLSAIINKXIIPRLXDFVEFLWDPLSXSQXXSLIXHCRVILEEHSXCENEVSKSRQDLLKSIVSRMKKAVEDDVFIPLYPKSAVENKXSPHSKFQERQFWSGLKLFRNILLWNGLLXDDXLQELGLGKLLNRYLIIALLNAXPGPDVVKKCNQVAACLPEKWFENSAMRXSIPQLENFIQFLLQSAHKLSRSEFRDEVEEIILILVKIKALNQAESFIGEHHLDHLKSLIKED

SEQ ID NO: 10746 - protein, 185 aa, Homo sapiens
  MOD_RES (8)..(8): Selenocysteine
  MOD_RES (78)..(78): Selenocysteine
  MOD_RES (92)..(92): Selenocysteine
  MOD_RES (97)..(97): Selenocysteine
  MOD_RES (131)..(131): Selenocysteine
  MOD_RES (138)..(138): Selenocysteine
  MOD_RES (150)..(150): Selenocysteine
  MOD_RES (184)..(184): Selenocysteine
MAHRPKRXFRQRAADSSDSDGAEESPAEPGAPRELPVPGSAEEEPPSGGGRAQVAGLPHRVRGPRGRGRVWASSRRAXKAAPRADEGSESRXLDVSXDEEDKIHHSSESKDDQGLSSDSSSSLGEKELSSXVSRNEEXSEESQEDEKQDXWEQQQMRKAVKIIEERDIDLSCGNGSSKVKKFDXS

SEQ ID NO: 10747 - protein, 27 aa, Homo sapiens
  MOD_RES (1)..(1): Any amino acid
  MOD_RES (15)..(15): Selenocysteine
XLLNRYLIIALLNAXPGPDVVKKCNQG

SEQ ID NO: 10748 - protein, 43 aa, Homo sapiens
  MOD_RES (1)..(1): Any amino acid
XSEFRDEVEEIILILVKIKALNQAESFIGEHHLDHLKSLIKED

SEQ ID NO: 10749 - protein, 180 aa, Homo sapiens
  MOD_RES (26)..(26): Selenocysteine
  MOD_RES (57)..(57): Selenocysteine
  MOD_RES (59)..(59): Selenocysteine
  MOD_RES (81)..(81): Selenocysteine
  MOD_RES (102)..(102): Selenocysteine
  MOD_RES (104)..(104): Selenocysteine
  MOD_RES (157)..(157): Selenocysteine
  MOD_RES (174)..(174): Selenocysteine
  MOD_RES (177)..(177): Selenocysteine
MKSIYFVAGLFVMLVQGSWQRSLQDXEEKSRSFSASQADPLSDPDQMNEDKRHSQGXFXSDYSKYLDSRRAQDFVQWLMNXKRNRNNIAKRHDEFERHAEGXFXSDVSSYLEGQAAKEFIAWLVKGRGRRDFPEEVAIVEELGRRHADGSFSDEMNXILDNLAARDFINWLIQXKIXDRK

SEQ ID NO: 10750 - protein, 80 aa, Homo sapiens
  MOD_RES (54)..(54): Selenocysteine
  MOD_RES (61)..(61): Selenocysteine
  MOD_RES (71)..(71): Selenocysteine
  MOD_RES (75)..(76): Selenocysteine
MPPCQPQRPLLLLLLLLACQPQVPSAQVMDFLFEKWKLYGDQCHHNLSLLPPPXELVCNRXFDKYSCWPDXPANXXANIS

SEQ ID NO: 10751 - protein, 477 aa, Homo sapiens
  MOD_RES (54)..(54): Selenocysteine
  MOD_RES (61)..(61): Selenocysteine
  MOD_RES (71)..(71): Selenocysteine
  MOD_RES (75)..(76): Selenocysteine
  MOD_RES (146)..(146): Selenocysteine
  MOD_RES (172)..(172): Selenocysteine
  MOD_RES (200)..(200): Selenocysteine
  MOD_RES (214)..(214): Selenocysteine
  MOD_RES (257)..(257): Selenocysteine
  MOD_RES (296)..(296): Selenocysteine
  MOD_RES (341)..(341): Selenocysteine
  MOD_RES (351)..(351): Selenocysteine
  MOD_RES (353)..(353): Selenocysteine
  MOD_RES (369)..(369): Selenocysteine
  MOD_RES (376)..(376): Selenocysteine
  MOD_RES (430)..(430): Selenocysteine
  MOD_RES (463)..(463): Selenocysteine
MPPCQPQRPLLLLLLLLACQPQVPSAQVMDFLFEKWKLYGDQCHHNLSLLPPPXELVCNRXFDKYSCWPDXPANXXANISCPWYLPWHHKVQHRFVFKRCGPDGQWVRGPRGQPWRDASQCQMDGEEIEVQKEVAKMYSSFQVMYXVGYSLSLGALLLALAILGGLSKLHCXRNAIHANLFASFVLKASSVLVIDGLLRXRYSQKIGDDLSVSXWLSDGAVAGCRVAAVFMQYGIVANYCWLLVEGLYLHNLLGLAXLPERSFFSLYLGIGWGAPMLFVVPWAVVKCLFENVQCWXSNDNMGFWWILRFPVFLAILINFFIFVRIVQLLVAKLRARQMHHXDYKFRLAKSXLXLIPLLGVHEVVFAFVXDEHAQGXLRSAKLFFDLFLSSFQGLLVAVLYCFLNKEVQSELRRRWHRWRLGKVLWEERNXSNHRASSSPGHGPPSKELQFGRGGGSQDSSAEXPLAGGLPRLAESPF

SEQ ID NO: 10752 - protein, 523 aa, Homo sapiens
  MOD_RES (54)..(54): Selenocysteine
  MOD_RES (61)..(61): Selenocysteine
  MOD_RES (71)..(71): Selenocysteine
  MOD_RES (75)..(76): Selenocysteine
  MOD_RES (146)..(146): Selenocysteine
  MOD_RES (172)..(172): Selenocysteine
  MOD_RES (200)..(200): Selenocysteine
  MOD_RES (214)..(214): Selenocysteine
  MOD_RES (244)..(244): Selenocysteine
  MOD_RES (287)..(287): Selenocysteine
  MOD_RES (326)..(326): Selenocysteine
  MOD_RES (371)..(371): Selenocysteine
  MOD_RES (381)..(381): Selenocysteine
  MOD_RES (383)..(383): Selenocysteine
  MOD_RES (399)..(399): Selenocysteine
  MOD_RES (406)..(406): Selenocysteine
  MOD_RES (438)..(438): Selenocysteine
MPPCQPQRPLLLLLLLLACQPQVPSAQVMDFLFEKWKLYGDQCHHNLSLLPPPXELVCNRXFDKYSCWPDXPANXXANISCPWYLPWHHKVQHRFVFKRCGPDGQWVRGPRGQPWRDASQCQMDGEEIEVQKEVAKMYSSFQVMYXVGYSLSLGALLLALAILGGLSKLHCXRNAIHANLFASFVLKASSVLVIDGLLRXRYSQKIGDDLSVSXWLSDGVSPPRRPQAGGWVGSQAGGHVAALXLHLYQAVAGCRVAAVFMQYGIVANYCWLLVEGLYLHNLLGLAXLPERSFFSLYLGIGWGAPMLFVVPWAVVKCLFENVQCWXSNDNMGFWWILRFPVFLAILINFFIFVRIVQLLVAKLRARQMHHXDYKFRLAKSXLXLIPLLGVHEVVFAFVXDEHAQGXLRSAKLFFDLFLSSFQVPARPPAPPPGAQCAXPDHPVSPGPAGGCPLLLPQQGGAVGAAAALAPLAPGQSAMGGAEHQQPQGLIFARPRPSQQGAAVWEGWWQPGFICGDPLGWWPP

SEQ ID NO: 10753 - protein, 252 aa, Homo sapiens
  MOD_RES (15)..(15): Selenocysteine
  MOD_RES (77)..(77): Selenocysteine
  MOD_RES (85)..(85): Selenocysteine
  MOD_RES (91)..(91): Selenocysteine
  MOD_RES (105)..(105): Selenocysteine
  MOD_RES (113)..(113): Selenocysteine
  MOD_RES (119)..(119): Selenocysteine
  MOD_RES (132)..(132): Selenocysteine
  MOD_RES (143)..(143): Selenocysteine
  MOD_RES (145)..(145): Selenocysteine
  MOD_RES (156)..(156): Selenocysteine
  MOD_RES (188)..(188): Selenocysteine
  MOD_RES (190)..(190): Selenocysteine
  MOD_RES (213)..(213): Selenocysteine
  MOD_RES (220)..(220): Selenocysteine
  MOD_RES (222)..(222): Selenocysteine
MGLLSQGSPLSWEEXKRHADHVRRHGILQFLHIYHAVKDRHKDVLKWGDEVEYMLVSFDHENKKVRLVLSGEKVLEXLQEKGERXNPNHPXLWRPEYGSYMIEGXPGQPYGGXMSEFNXVEANMRKRRKEAXSILEENQALCXIXSFPRLGCPGFXLPEVKPNPVEGGASKSLFFPDEAINKHPRFSXLXRNIRHRRGEKVVINVPIFKDKNXPSPFIEXFXEDDEASRASKPDHIYMDAMGFGMGNCCLQV

SEQ ID NO: 10754 - protein, 637 aa, Homo sapiens
  MOD_RES (15)..(15): Selenocysteine
  MOD_RES (77)..(77): Selenocysteine
  MOD_RES (85)..(85): Selenocysteine
  MOD_RES (91)..(91): Selenocysteine
  MOD_RES (105)..(105): Selenocysteine
  MOD_RES (113)..(113): Selenocysteine
  MOD_RES (119)..(119): Selenocysteine
  MOD_RES (132)..(132): Selenocysteine
  MOD_RES (143)..(143): Selenocysteine
  MOD_RES (145)..(145): Selenocysteine
  MOD_RES (156)..(156): Selenocysteine
  MOD_RES (188)..(188): Selenocysteine
  MOD_RES (190)..(190): Selenocysteine
  MOD_RES (213)..(213): Selenocysteine
  MOD_RES (220)..(220): Selenocysteine
  MOD_RES (222)..(222): Selenocysteine
  MOD_RES (253)..(253): Selenocysteine
  MOD_RES (271)..(271): Selenocysteine
  MOD_RES (308)..(308): Selenocysteine
  MOD_RES (349)..(349): Selenocysteine
  MOD_RES (381)..(381): Selenocysteine
  MOD_RES (404)..(404): Selenocysteine
  MOD_RES (408)..(408): Selenocysteine
  MOD_RES (434)..(434): Selenocysteine
  MOD_RES (449)..(449): Selenocysteine
  MOD_RES (508)..(508): Selenocysteine
  MOD_RES (516)..(516): Selenocysteine
  MOD_RES (522)..(522): Selenocysteine
  MOD_RES (551)..(551): Selenocysteine
  MOD_RES (572)..(572): Selenocysteine
  MOD_RES (594)..(594): Selenocysteine
  MOD_RES (633)..(633): Selenocysteine
MGLLSQGSPLSWEEXKRHADHVRRHGILQFLHIYHAVKDRHKDVLKWGDEVEYMLVSFDHENKKVRLVLSGEKVLEXLQEKGERXNPNHPXLWRPEYGSYMIEGXPGQPYGGXMSEFNXVEANMRKRRKEAXSILEENQALCXIXSFPRLGCPGFXLPEVKPNPVEGGASKSLFFPDEAINKHPRFSXLXRNIRHRRGEKVVINVPIFKDKNXPSPFIEXFXEDDEASRASKPDHIYMDAMGFGMGNCCLQVXFQACSISEARYLYDQLAXICPIVMALSAASPFYRGYVSDIDCRWGVISASVDDRXREERGLEPLKNNNYRISKSRYDSIDSYLSKCGEKYNDIDLXIDKEIYEQLLQEGIDHLLAQHVAHLFIRDPLXLFEEKIHLDDANESDHFENIQSXNWQXMRFKPPPPNSDIGWRVEFRPMEVQLXDFENSAYVVFVVLLXRVILSYKLDFLIPLSKVDENMKVAQKRDAVLQGMFYFRKDICKGGNAVVDGCGKAQNSXELAAEEYXLMSIDXIINGKEGVFPGLIPILNSYLENMEVDVDXRCSILNYLKLIKKRASGELMXVARWMREFIANHPDYKQDSVIXDEMNYSLILKCNQIANELCECPELLGSAFRKVKYSGSKXDSSN

SEQ ID NO: 10755 - protein, 599 aa, Homo sapiens
  MOD_RES (15)..(15): Selenocysteine
  MOD_RES (77)..(77): Selenocysteine
  MOD_RES (85)..(85): Selenocysteine
  MOD_RES (91)..(91): Selenocysteine
  MOD_RES (105)..(105): Selenocysteine
  MOD_RES (113)..(113): Selenocysteine
  MOD_RES (119)..(119): Selenocysteine
  MOD_RES (132)..(132): Selenocysteine
  MOD_RES (143)..(143): Selenocysteine
  MOD_RES (145)..(145): Selenocysteine
  MOD_RES (150)..(150): Selenocysteine
  MOD_RES (152)..(152): Selenocysteine
  MOD_RES (175)..(175): Selenocysteine
  MOD_RES (182)..(182): Selenocysteine
  MOD_RES (184)..(184): Selenocysteine
  MOD_RES (215)..(215): Selenocysteine
  MOD_RES (233)..(233): Selenocysteine
  MOD_RES (270)..(270): Selenocysteine
  MOD_RES (311)..(311): Selenocysteine
  MOD_RES (343)..(343): Selenocysteine
  MOD_RES (366)..(366): Selenocysteine
  MOD_RES (370)..(370): Selenocysteine
  MOD_RES (396)..(396): Selenocysteine
  MOD_RES (411)..(411): Selenocysteine
  MOD_RES (470)..(470): Selenocysteine
  MOD_RES (478)..(478): Selenocysteine
  MOD_RES (484)..(484): Selenocysteine
  MOD_RES (513)..(513): Selenocysteine
  MOD_RES (534)..(534): Selenocysteine
  MOD_RES (556)..(556): Selenocysteine
  MOD_RES (595)..(595): Selenocysteine
MGLLSQGSPLSWEEXKRHADHVRRHGILQFLHIYHAVKDRHKDVLKWGDEVEYMLVSFDHENKKVRLVLSGEKVLEXLQEKGERXNPNHPXLWRPEYGSYMIEGXPGQPYGGXMSEFNXVEANMRKRRKEAXSILEENQALCXIXSFPSXLXRNIRHRRGEKVVINVPIFKDKNXPSPFIEXFXEDDEASRASKPDHIYMDAMGFGMGNCCLQVXFQACSISEARYLYDQLAXICPIVMALSAASPFYRGYVSDIDCRWGVISASVDDRXREERGLEPLKNNNYRISKSRYDSIDSYLSKCGEKYNDIDLXIDKEIYEQLLQEGIDHLLAQHVAHLFIRDPLXLFEEKIHLDDANESDHFENIQSXNWQXMRFKPPPPNSDIGWRVEFRPMEVQLXDFENSAYVVFVVLLXRVILSYKLDFLIPLSKVDENMKVAQKRDAVLQGMFYFRKDICKGGNAVVDGCGKAQNSXELAAEEYXLMSIDXIINGKEGVFPGLIPILNSYLENMEVDVDXRCSILNYLKLIKKRASGELMXVARWMREFIANHPDYKQDSVIXDEMNYSLILKCNQIANELCECPELLGSAFRKVKYSGSKXDSSN

SEQ ID NO: 10756 - protein, 54 aa, Homo sapiens
  MOD_RES (15)..(15): Selenocysteine
  MOD_RES (52)..(52): Selenocysteine
MGLLSQGSPLSWEEXKRHADHVRRHGILQFLHIYHAVKDRHKDVLKWGDEVXNL

SEQ ID NO: 10757 - protein, 18 aa, Homo sapiens
MLVSFDHENKKVRLVLSG

SEQ ID NO: 10758 - protein, 154 aa, Homo sapiens
  MOD_RES (24)..(24): Selenocysteine
  MOD_RES (32)..(32): Selenocysteine
  MOD_RES (38)..(38): Selenocysteine
  MOD_RES (52)..(52): Selenocysteine
  MOD_RES (60)..(60): Selenocysteine
  MOD_RES (66)..(66): Selenocysteine
  MOD_RES (79)..(79): Selenocysteine
  MOD_RES (90)..(90): Selenocysteine
  MOD_RES (92)..(92): Selenocysteine
  MOD_RES (103)..(103): Selenocysteine
  MOD_RES (135)..(135): Selenocysteine
  MOD_RES (137)..(137): Selenocysteine
MLVSFDHENKKVRLVLSGEKVLEXLQEKGERXNPNHPXLWRPEYGSYMIEGXPGQPYGGXMSEFNXVEANMRKRRKEAXSILEENQALCXIXSFPRLGCPGFXLPEVKPNPVEGGASKSLFFPDEAINKHPRFSXLXRNIRHRRGEKVVINVPI

SEQ ID NO: 10759 - protein, 122 aa, Homo sapiens
  MOD_RES (24)..(24): Selenocysteine
  MOD_RES (32)..(32): Selenocysteine
  MOD_RES (38)..(38): Selenocysteine
  MOD_RES (52)..(52): Selenocysteine
  MOD_RES (60)..(60): Selenocysteine
  MOD_RES (66)..(66): Selenocysteine
  MOD_RES (79)..(79): Selenocysteine
  MOD_RES (90)..(90): Selenocysteine
  MOD_RES (92)..(92): Selenocysteine
  MOD_RES (102)..(102): Selenocysteine
  MOD_RES (107)..(107): Selenocysteine
MLVSFDHENKKVRLVLSGEKVLEXLQEKGERXNPNHPXLWRPEYGSYMIEGXPGQPYGGXMSEFNXVEANMRKRRKEAXSILEENQALCXIXSFPRLSWVHXARGQXQPSGRRSFQVPLLSR

SEQ ID NO: 10760 - protein, 93 aa, Homo sapiens
  MOD_RES (5)..(5): Selenocysteine
  MOD_RES (9)..(9): Selenocysteine
  MOD_RES (35)..(35): Selenocysteine
  MOD_RES (50)..(50): Selenocysteine
  MOD_RES (93)..(93): Selenocysteine
NIQSXNWQXMRFKPPPPNSDIGWRVEFRPMEVQLXDFENSAYVVFVVLLXRVILSYKLDFLIPLSKVRICFFMVMGIDLSVDIFIYICYLFPX

SEQ ID NO: 10761 - protein, 173 aa, Homo sapiens
  MOD_RES (1)..(1): Any amino acid
  MOD_RES (3)..(3): Selenocysteine
  MOD_RES (65)..(65): Selenocysteine
  MOD_RES (73)..(73): Selenocysteine
  MOD_RES (79)..(79): Selenocysteine
  MOD_RES (93)..(93): Selenocysteine
  MOD_RES (101)..(101): Selenocysteine
  MOD_RES (107)..(107): Selenocysteine
  MOD_RES (120)..(120): Selenocysteine
  MOD_RES (131)..(131): Selenocysteine
  MOD_RES (133)..(133): Selenocysteine
  MOD_RES (138)..(138): Selenocysteine
  MOD_RES (140)..(140): Selenocysteine
  MOD_RES (163)..(163): Selenocysteine
  MOD_RES (170)..(170): Selenocysteine
  MOD_RES (172)..(172): Selenocysteine
XEXKRHADHVRRHGILQFLHIYHAVKDRHKDVLKWGDEVEYMLVSFDHENKKVRLVLSGEKVLEXLQEKGERXNPNHPXLWRPEYGSYMIEGXPGQPYGGXMSEFNXVEANMRKRRKEAXSILEENQALCXIXSFPSXLXRNIRHRRGEKVVINVPIFKDKNXPSPFIEXFXE

SEQ ID NO: 10762 - protein, 252 aa, Homo sapiens
  MOD_RES (3)..(3): Selenocysteine
  MOD_RES (17)..(17): Selenocysteine
  MOD_RES (22)..(22): Selenocysteine
  MOD_RES (38)..(38): Selenocysteine
  MOD_RES (51)..(51): Selenocysteine
  MOD_RES (84)..(84): Selenocysteine
  MOD_RES (142)..(142): Selenocysteine
  MOD_RES (148)..(148): Selenocysteine
  MOD_RES (179)..(179): Selenocysteine
  MOD_RES (191)..(191): Selenocysteine
MGXDSRAAKALLARARXLHLQXGNLLNWGRLRKKCPSXHSEEEFPDVLECXVSHAVEKINPDEREEMKVSAKLFIVESNSSSSXRSAVDMACSVLGVAQLDSVIIASPPIEDGVNLSLEHLQPYWEELENLVQSKKIVAIGXSDLDKXQLEQLYQWAQVKPNSNQVNLASCCVMPPDLXAFAKQFDIQLLXHNDPKELLSEASFQEALQESIPDIQAHEWVPLWLLRYSVIVKSRGIIKSKGYILQAKRRGS

SEQ ID NO: 10763 - protein, 274 aa, Homo sapiens
  MOD_RES (3)..(3): Selenocysteine
  MOD_RES (17)..(17): Selenocysteine
  MOD_RES (22)..(22): Selenocysteine
  MOD_RES (38)..(38): Selenocysteine
  MOD_RES (50)..(50): Selenocysteine
  MOD_RES (73)..(73): Selenocysteine
  MOD_RES (106)..(106): Selenocysteine
  MOD_RES (164)..(164): Selenocysteine
  MOD_RES (170)..(170): Selenocysteine
  MOD_RES (201)..(201): Selenocysteine
  MOD_RES (213)..(213): Selenocysteine
MGXDSRAAKALLARARXLHLQXGNLLNWGRLRKKCPSXHSEELHDCIQKXLNEWSSQINPDLVREFPDVLECXVSHAVEKINPDEREEMKVSAKLFIVESNSSSSXRSAVDMACSVLGVAQLDSVIIASPPIEDGVNLSLEHLQPYWEELENLVQSKKIVAIGXSDLDKXQLEQLYQWAQVKPNSNQVNLASCCVMPPDLXAFAKQFDIQLLXHNDPKELLSEASFQEALQESIPDIQAHEWVPLWLLRYSVIVKSRGIIKSKGYILQAKRRGS

SEQ ID NO: 10764 - protein, 436 aa, Homo sapiens
  MOD_RES (30)..(30): Selenocysteine
  MOD_RES (64)..(64): Selenocysteine
  MOD_RES (134)..(134): Selenocysteine
  MOD_RES (159)..(159): Selenocysteine
  MOD_RES (174)..(174): Selenocysteine
  MOD_RES (187)..(187): Selenocysteine
  MOD_RES (189)..(189): Selenocysteine
  MOD_RES (196)..(196): Selenocysteine
  MOD_RES (205)..(205): Selenocysteine
  MOD_RES (226)..(226): Selenocysteine
  MOD_RES (248)..(248): Selenocysteine
  MOD_RES (251)..(251): Selenocysteine
  MOD_RES (254)..(254): Selenocysteine
  MOD_RES (256)..(256): Selenocysteine
  MOD_RES (273)..(273): Selenocysteine
  MOD_RES (321)..(321): Selenocysteine
  MOD_RES (350)..(350): Selenocysteine
  MOD_RES (392)..(392): Selenocysteine
  MOD_RES (417)..(417): Selenocysteine
MEPDDFDSEDKEILSWDINDVKLPQNVKKXDWFQEWPDSYAKHIYSSEDKNAQRHLSSWAMRNXNNHNSRILKKSCLGVVVCGRDCLAEEGRKIYLRPAICDKARQKQQRKRCPNCDGPLKLIPCRGHGGFPVXNFWRHDGRFIFFQSKGEHDHPKPEXKLEAEARRAMKKVNXAPSSVSLSLKGSXEXRSLPGEXQSQGSLPLXWSFQEGVQLPGSYSGHLIANXPQQNSLNDCFSFSKSYGLGGIXDLXDQXSXVDPMKLYEKRKLSSSRXYSSGDLLPPSASGVYSDHGDLQAWSKNAALGRNHLADNCYSNYPFPLXSWPCSFSPSQNSSEPFYQQLPLEPPAAKXGCPPLWPNPAGNLYEEKVHVDFNSYVQSPAYHSPQEDPFLFXYASHPHQQYSLPSKSSKWDFEEEMXYLGLDHCNNDMLLNLCPLR

SEQ ID NO: 10765 - protein, 506 aa, Homo sapiens
  MOD_RES (69)..(69): Selenocysteine
  MOD_RES (88)..(88): Selenocysteine
  MOD_RES (92)..(92): Selenocysteine
  MOD_RES (139)..(139): Selenocysteine
  MOD_RES (168)..(168): Selenocysteine
  MOD_RES (221)..(221): Selenocysteine
  MOD_RES (223)..(223): Selenocysteine
  MOD_RES (244)..(244): Selenocysteine
  MOD_RES (249)..(249): Selenocysteine
  MOD_RES (283)..(283): Selenocysteine
  MOD_RES (290)..(290): Selenocysteine
  MOD_RES (296)..(296): Selenocysteine
  MOD_RES (302)..(302): Selenocysteine
  MOD_RES (309)..(309): Selenocysteine
  MOD_RES (327)..(327): Selenocysteine
  MOD_RES (346)..(346): Selenocysteine
  MOD_RES (356)..(356): Selenocysteine
  MOD_RES (370)..(371): Selenocysteine
  MOD_RES (381)..(381): Selenocysteine
  MOD_RES (384)..(387): Selenocysteine
  MOD_RES (421)..(421): Selenocysteine
  MOD_RES (435)..(435): Selenocysteine
  MOD_RES (437)..(437): Selenocysteine
  MOD_RES (460)..(460): Selenocysteine
  MOD_RES (472)..(472): Selenocysteine
  MOD_RES (477)..(477): Selenocysteine
  MOD_RES (500)..(500): Selenocysteine
MPAAAVQEAVGVCSYGMQLSWDINDPQMPQELALFDQFREWPDGYVRFIYSSDEKKAQRHLSGWAMRNXNNHNGHILKKSCLGVVVCXQACXLPDGSRLQLRPAICDKARLKQQKKACPNCHSALELIPCRGHSGYPVXNFWRLDGNAIFFQAKGVHDHPRPESKSEXEARRSAIKRQMASFYQPQKKRIRESEAEENQDSSGHFSNIPPLENPEDFDIVXEXSFPIPGQPCPSFPKSDVYKAXCDLAXFQGDKMPPFQKYSSPRIYLPRPPCSYELANPGYXNSSPYPXLYKDSXSIPNDXDWVHLNXLQCNVNSYSSYERSFDFXNKQHGWKPALGKPSLVERXNHGQFQAMAXRPYYNPELPCRYLXXPPPGAPALQXVIXXXXKVSYQAYQPPAMKYSDSVREVKSLSSCNYAPEDXGMSVYPEPWGPPVXVXRAASPSGPPPMKIAGDCRAIRPXVAIPHEPVSSRXDEAEXWDVCLSGLGSAVSYSDRVGPFFXYNNEDF

SEQ ID NO: 10766 - protein, 116 aa, Homo sapiens
  MOD_RES (14)..(14): Selenocysteine
  MOD_RES (34)..(34): Selenocysteine
  MOD_RES (86)..(86): Selenocysteine
  MOD_RES (90)..(90): Selenocysteine
  MOD_RES (102)..(102): Selenocysteine
  MOD_RES (108)..(108): Selenocysteine
MEGKIFGSSFLCPXRCDQLLLPGVPGSMPNASWXGNLRAIKWSDMEDRHGGCHGHYVHGICIYGNGDLKWLVNSPSLFANKFELNXYPLXVECLELRHRERXLNQSEXAIQPSWYF

SEQ ID NO: 10767 - protein, 402 aa, Homo sapiens
  MOD_RES (26)..(26): Selenocysteine
  MOD_RES (61)..(61): Selenocysteine
  MOD_RES (67)..(68): Selenocysteine
  MOD_RES (73)..(73): Selenocysteine
  MOD_RES (85)..(85): Selenocysteine
  MOD_RES (87)..(87): Selenocysteine
  MOD_RES (100)..(100): Selenocysteine
  MOD_RES (102)..(102): Selenocysteine
  MOD_RES (109)..(109): Selenocysteine
  MOD_RES (133)..(133): Selenocysteine
  MOD_RES (190)..(190): Selenocysteine
  MOD_RES (199)..(199): Selenocysteine
  MOD_RES (216)..(216): Selenocysteine
  MOD_RES (229)..(229): Selenocysteine
  MOD_RES (247)..(248): Selenocysteine
  MOD_RES (252)..(252): Selenocysteine
  MOD_RES (264)..(264): Selenocysteine
  MOD_RES (270)..(270): Selenocysteine
  MOD_RES (293)..(293): Selenocysteine
  MOD_RES (303)..(303): Selenocysteine
  MOD_RES (320)..(320): Selenocysteine
  MOD_RES (372)..(372): Selenocysteine
  MOD_RES (376)..(376): Selenocysteine
  MOD_RES (388)..(388): Selenocysteine
  MOD_RES (394)..(394): Selenocysteine
MMGSWKHCLFSASLISALIFVFVYNXELWENKRFLRAALSNASLLAEACHQIFEGKVFYPXENALKXXLDEAXCYEYMVRSHYVXEXLSEEEAGFPLAYXVXIHKDFGXFERLFRAIYMPQNVYCVHLDQKAXDAFKGAVKQLLSCFPNAFLASKKESVVYGGISRLQADLNCLEDLVASEVPWKYVINXCGQDFPLKXNREIVQYLKGFKGKNIXPGVLPPDHAVGRXKYVHQELLNHKNSYVIKXXKLKXPPPHDMVIYFGXAYVALXRDFANFVLQDQLALDLLSWSKDXYSPDEHFWVXLNRIPGVPGSMPNASWXGNLRAIKWSDMEDRHGGCHGHYVHGICIYGNGDLKWLVNSPSLFANKFELNXYPLXVECLELRHRERXLNQSEXAIQPSWYF

SEQ ID NO: 10768 - protein, 402 aa, Homo sapiens
  MOD_RES (12)..(12): Selenocysteine
  MOD_RES (47)..(47): Selenocysteine
  MOD_RES (79)..(79): Selenocysteine
  MOD_RES (85)..(85): Selenocysteine
  MOD_RES (109)..(109): Selenocysteine
  MOD_RES (156)..(156): Selenocysteine
  MOD_RES (190)..(190): Selenocysteine
  MOD_RES (199)..(199): Selenocysteine
  MOD_RES (216)..(216): Selenocysteine
  MOD_RES (229)..(229): Selenocysteine
  MOD_RES (237)..(237): Selenocysteine
  MOD_RES (247)..(247): Selenocysteine
  MOD_RES (252)..(252): Selenocysteine
  MOD_RES (259)..(259): Selenocysteine
  MOD_RES (264)..(264): Selenocysteine
  MOD_RES (270)..(270): Selenocysteine
  MOD_RES (293)..(293): Selenocysteine
  MOD_RES (303)..(303): Selenocysteine
  MOD_RES (320)..(320): Selenocysteine
  MOD_RES (372)..(372): Selenocysteine
  MOD_RES (376)..(376): Selenocysteine
  MOD_RES (388)..(388): Selenocysteine
  MOD_RES (394)..(394): Selenocysteine
MNFWRYCFFAFXLLSVVIFVRFYSSQLSPPKSYEKLNSSSERYFRKXACNHALEKMPVFLWENILPSPLRSVPCKDYLXQNHYIXSPLSEEEAAFPLAYVMVIHKDFDXFERLFRAIYMPQNVYCVHVDEKAPAEYKESVRQLLSCFQNAFIASKXESVVYAGISRLQADLNCLKDLVASEVPWKYVINXCGQDFPLKXNREIVQHLKGFKGKNIXPGVLPPDHAIKRXKYVHQEHXDKGGFFVKNXNILKXSPPHQLXIYFGXAYVALXRDFVDFVLRDQRAIDLLQWSKDXYSPDEHFWVXLNRVSGVPGSMPNASWXGNLRAIKWSDMEDRHGGCHGHYVHGICIYGNGDLKWLVNSPSLFANKFELNXYPLXVECLELRHRERXLNQSEXAIQPSWYF

SEQ ID NO: 10769 - protein, 400 aa, Homo sapiens
  MOD_RES (45)..(45): Selenocysteine
  MOD_RES (49)..(49): Selenocysteine
  MOD_RES (56)..(56): Selenocysteine
  MOD_RES (77)..(77): Selenocysteine
  MOD_RES (83)..(83): Selenocysteine
  MOD_RES (107)..(107): Selenocysteine
  MOD_RES (131)..(132): Selenocysteine
  MOD_RES (188)..(188): Selenocysteine
  MOD_RES (197)..(197): Selenocysteine
  MOD_RES (214)..(214): Selenocysteine
  MOD_RES (227)..(227): Selenocysteine
  MOD_RES (245)..(246): Selenocysteine
  MOD_RES (257)..(257): Selenocysteine
  MOD_RES (291)..(291): Selenocysteine
  MOD_RES (301)..(301): Selenocysteine
  MOD_RES (318)..(318): Selenocysteine
  MOD_RES (370)..(370): Selenocysteine
  MOD_RES (374)..(374): Selenocysteine
  MOD_RES (386)..(386): Selenocysteine
  MOD_RES (392)..(392): Selenocysteine
MPLSMRYLFIISVSSVIIFIVFSVFNFGGDPSFQRLNISDPLRLXQVCXSFINGKXRFLWKNKLMIHEKSSCKEYLXQSHYIXAPLSKEEADFPLAYIMVIHHHFDXFARLFRAIYMPQNIYCVHVDEKAXXEFKDAVEQLLSCFPNAFLASKMEPVVYGGISRLQADLNCIRDLSAFEVSWKYVINXCGQDFPLKXNKEIVQYLKGFKGKNIXPGVLPPAHAIGRXKYVHQEHLGKELSYVIRXXALKPPPPHNLXIYFGSAYVALSREFANFVLHDPRAVDLLQWSKDXFSPDEHFWVXLNRIPGVPGSMPNASWXGNLRAIKWSDMEDRHGGCHGHYVHGICIYGNGDLKWLVNSPSLFANKFELNXYPLXVECLELRHRERXLNQSEXAIQPSWYF

SEQ ID NO: 10770 - protein, 397 aa, Homo sapiens
  MOD_RES (5)..(5): Selenocysteine
  MOD_RES (7)..(7): Selenocysteine
  MOD_RES (9)..(9): Selenocysteine
  MOD_RES (18)..(18): Selenocysteine
  MOD_RES (34)..(34): Selenocysteine
  MOD_RES (64)..(64): Selenocysteine
  MOD_RES (94)..(94): Selenocysteine
  MOD_RES (108)..(108): Selenocysteine
  MOD_RES (113)..(113): Selenocysteine
  MOD_RES (129)..(129): Selenocysteine
  MOD_RES (173)..(173): Selenocysteine
  MOD_RES (202)..(202): Selenocysteine
  MOD_RES (256)..(256): Selenocysteine
  MOD_RES (263)..(263): Selenocysteine
  MOD_RES (344)..(344): Selenocysteine
  MOD_RES (346)..(346): Selenocysteine
  MOD_RES (350)..(350): Selenocysteine
  MOD_RES (354)..(354): Selenocysteine
  MOD_RES (368)..(368): Selenocysteine
  MOD_RES (371)..(371): Selenocysteine
  MOD_RES (382)..(382): Selenocysteine
  MOD_RES (385)..(385): Selenocysteine
  MOD_RES (391)..(391): Selenocysteine
  MOD_RES (395)..(395): Selenocysteine
  MOD_RES (397)..(397): Selenocysteine
MLRSXSXVXLLSGGAARXPGAPSRRANVCRLRLXVPPESPVPEQCEKKIERKEQLLDLSNGEPXRKLPQGVVYGVVRRSDQNQQKEMVVYGWSXSQLKEEMNYIKDKXLVDVXLENSNIKDQIRNLQQXYEASMDKLREKQRQLEVAQVENQLLKMKVESSQEANAEVMREMXKKLYSQYEEKLQEEQRKHSAEKEALLEEXNSFLKAIEEANKKMQAAEISLEEKDQRIGELDRLIERMEKERHQLQLQLLEHEXEMSGELXDSDKERYQQLEEASASLRERIRHLDDMVHCQQKKVKQMVEEIESLKKKLQQKQLLILQLLEKISFLEGENNELQSRLDYLXEXQAKXEVEXREIGVGCDLLPSQXGRXREIVMPSRNYXPYXRVLELXMKKXLX

SEQ ID NO: 10771 - protein, 379 aa, Homo sapiens
  MOD_RES (5)..(5): Selenocysteine
  MOD_RES (7)..(7): Selenocysteine
  MOD_RES (9)..(9): Selenocysteine
  MOD_RES (18)..(18): Selenocysteine
  MOD_RES (34)..(34): Selenocysteine
  MOD_RES (64)..(64): Selenocysteine
  MOD_RES (94)..(94): Selenocysteine
  MOD_RES (110)..(110): Selenocysteine
  MOD_RES (133)..(133): Selenocysteine
  MOD_RES (152)..(152): Selenocysteine
  MOD_RES (177)..(177): Selenocysteine
  MOD_RES (182)..(182): Selenocysteine
  MOD_RES (198)..(198): Selenocysteine
  MOD_RES (242)..(242): Selenocysteine
  MOD_RES (271)..(271): Selenocysteine
  MOD_RES (325)..(325): Selenocysteine
  MOD_RES (332)..(332): Selenocysteine
  MOD_RES (375)..(375): Selenocysteine
  MOD_RES (378)..(378): Selenocysteine
MLRSXSXVXLLSGGAARXPGAPSRRANVCRLRLXVPPESPVPEQCEKKIERKEQLLDLSNGEPXRKLPQGVVYGVVRRSDQNQQKEMVVYGWSXSQLKEEMNYIKDVRAXLEKVRKRMYGDYDEMRQKIRQLXQELSVSHAQQEYLENHIQXQSSALDRFNAMNSALASDSIGLQKXLVDVXLENSNIKDQIRNLQQXYEASMDKLREKQRQLEVAQVENQLLKMKVESSQEANAEVMREMXKKLYSQYEEKLQEEQRKHSAEKEALLEEXNSFLKAIEEANKKMQAAEISLEEKDQRIGELDRLIERMEKERHQLQLQLLEHEXEMSGELXDSDKERYQQLEEASASLRERIRHLDDMVHCQQKKVKQMVEEVXFSXK

SEQ ID NO: 10772 - protein, 390 aa, Homo sapiens
  MOD_RES (5)..(5): Selenocysteine
  MOD_RES (7)..(7): Selenocysteine
  MOD_RES (9)..(9): Selenocysteine
  MOD_RES (18)..(18): Selenocysteine
  MOD_RES (34)..(34): Selenocysteine
  MOD_RES (64)..(64): Selenocysteine
  MOD_RES (94)..(94): Selenocysteine
  MOD_RES (110)..(110): Selenocysteine
  MOD_RES (133)..(133): Selenocysteine
  MOD_RES (152)..(152): Selenocysteine
  MOD_RES (177)..(177): Selenocysteine
  MOD_RES (182)..(182): Selenocysteine
  MOD_RES (198)..(198): Selenocysteine
  MOD_RES (242)..(242): Selenocysteine
  MOD_RES (271)..(271): Selenocysteine
  MOD_RES (325)..(325): Selenocysteine
  MOD_RES (332)..(332): Selenocysteine
MLRSXSXVXLLSGGAARXPGAPSRRANVCRLRLXVPPESPVPEQCEKKIERKEQLLDLSNGEPXRKLPQGVVYGVVRRSDQNQQKEMVVYGWSXSQLKEEMNYIKDVRAXLEKVRKRMYGDYDEMRQKIRQLXQELSVSHAQQEYLENHIQXQSSALDRFNAMNSALASDSIGLQKXLVDVXLENSNIKDQIRNLQQXYEASMDKLREKQRQLEVAQVENQLLKMKVESSQEANAEVMREMXKKLYSQYEEKLQEEQRKHSAEKEALLEEXNSFLKAIEEANKKMQAAEISLEEKDQRIGELDRLIERMEKERHQLQLQLLEHEXEMSGELXDSDKERYQQLEEASASLRERIRHLDDMVHCQQKKVKQMVEEIMSHELFSRFSLRLFGR

SEQ ID NO: 10773 - protein, 407 aa, Homo sapiens
  MOD_RES (5)..(5): Selenocysteine
  MOD_RES (7)..(7): Selenocysteine
  MOD_RES (9)..(9): Selenocysteine
  MOD_RES (18)..(18): Selenocysteine
  MOD_RES (34)..(34): Selenocysteine
  MOD_RES (64)..(64): Selenocysteine
  MOD_RES (94)..(94): Selenocysteine
  MOD_RES (110)..(110): Selenocysteine
  MOD_RES (133)..(133): Selenocysteine
  MOD_RES (152)..(152): Selenocysteine
  MOD_RES (177)..(177): Selenocysteine
  MOD_RES (182)..(182): Selenocysteine
  MOD_RES (198)..(198): Selenocysteine
  MOD_RES (242)..(242): Selenocysteine
  MOD_RES (271)..(271): Selenocysteine
  MOD_RES (325)..(325): Selenocysteine
  MOD_RES (332)..(332): Selenocysteine
  MOD_RES (403)..(403): Selenocysteine
  MOD_RES (406)..(406): Selenocysteine
MLRSXSXVXLLSGGAARXPGAPSRRANVCRLRLXVPPESPVPEQCEKKIERKEQLLDLSNGEPXRKLPQGVVYGVVRRSDQNQQKEMVVYGWSXSQLKEEMNYIKDVRAXLEKVRKRMYGDYDEMRQKIRQLXQELSVSHAQQEYLENHIQXQSSALDRFNAMNSALASDSIGLQKXLVDVXLENSNIKDQIRNLQQXYEASMDKLREKQRQLEVAQVENQLLKMKVESSQEANAEVMREMXKKLYSQYEEKLQEEQRKHSAEKEALLEEXNSFLKAIEEANKKMQAAEISLEEKDQRIGELDRLIERMEKERHQLQLQLLEHEXEMSGELXDSDKERYQQLEEASASLRERIRHLDDMVHCQQKKVKQMVEEIESLKKKLQQKQLLILQLLEKISFLEGEVXFSXK

SEQ ID NO: 10774 - protein, 414 aa, Homo sapiens
  MOD_RES (5)..(5): Selenocysteine
  MOD_RES (7)..(7): Selenocysteine
  MOD_RES (9)..(9): Selenocysteine
  MOD_RES (18)..(18): Selenocysteine
  MOD_RES (34)..(34): Selenocysteine
  MOD_RES (64)..(64): Selenocysteine
  MOD_RES (94)..(94): Selenocysteine
  MOD_RES (110)..(110): Selenocysteine
  MOD_RES (133)..(133): Selenocysteine
  MOD_RES (152)..(152): Selenocysteine
  MOD_RES (177)..(177): Selenocysteine
  MOD_RES (182)..(182): Selenocysteine
  MOD_RES (198)..(198): Selenocysteine
  MOD_RES (242)..(242): Selenocysteine
  MOD_RES (271)..(271): Selenocysteine
  MOD_RES (325)..(325): Selenocysteine
  MOD_RES (332)..(332): Selenocysteine
MLRSXSXVXLLSGGAARXPGAPSRRANVCRLRLXVPPESPVPEQCEKKIERKEQLLDLSNGEPXRKLPQGVVYGVVRRSDQNQQKEMVVYGWSXSQLKEEMNYIKDVRAXLEKVRKRMYGDYDEMRQKIRQLXQELSVSHAQQEYLENHIQXQSSALDRFNAMNSALASDSIGLQKXLVDVXLENSNIKDQIRNLQQXYEASMDKLREKQRQLEVAQVENQLLKMKVESSQEANAEVMREMXKKLYSQYEEKLQEEQRKHSAEKEALLEEXNSFLKAIEEANKKMQAAEISLEEKDQRIGELDRLIERMEKERHQLQLQLLEHEXEMSGELXDSDKERYQQLEEASASLRERIRHLDDMVHCQQKKVKQMVEEIESLKKKLQQKQLLILQLLEKISFLEGEGRKGLKGRLKMSC

SEQ ID NO: 10775 - protein, 445 aa, Homo sapiens
  MOD_RES (5)..(5): Selenocysteine
  MOD_RES (7)..(7): Selenocysteine
  MOD_RES (9)..(9): Selenocysteine
  MOD_RES (18)..(18): Selenocysteine
  MOD_RES (34)..(34): Selenocysteine
  MOD_RES (64)..(64): Selenocysteine
  MOD_RES (94)..(94): Selenocysteine
  MOD_RES (110)..(110): Selenocysteine
  MOD_RES (133)..(133): Selenocysteine
  MOD_RES (152)..(152): Selenocysteine
  MOD_RES (177)..(177): Selenocysteine
  MOD_RES (182)..(182): Selenocysteine
  MOD_RES (198)..(198): Selenocysteine
  MOD_RES (242)..(242): Selenocysteine
  MOD_RES (271)..(271): Selenocysteine
  MOD_RES (325)..(325): Selenocysteine
  MOD_RES (332)..(332): Selenocysteine
  MOD_RES (413)..(413): Selenocysteine
  MOD_RES (415)..(415): Selenocysteine
  MOD_RES (419)..(419): Selenocysteine
  MOD_RES (423)..(423): Selenocysteine
MLRSXSXVXLLSGGAARXPGAPSRRANVCRLRLXVPPESPVPEQCEKKIERKEQLLDLSNGEPXRKLPQGVVYGVVRRSDQNQQKEMVVYGWSXSQLKEEMNYIKDVRAXLEKVRKRMYGDYDEMRQKIRQLXQELSVSHAQQEYLENHIQXQSSALDRFNAMNSALASDSIGLQKXLVDVXLENSNIKDQIRNLQQXYEASMDKLREKQRQLEVAQVENQLLKMKVESSQEANAEVMREMXKKLYSQYEEKLQEEQRKHSAEKEALLEEXNSFLKAIEEANKKMQAAEISLEEKDQRIGELDRLIERMEKERHQLQLQLLEHEXEMSGELXDSDKERYQQLEEASASLRERIRHLDDMVHCQQKKVKQMVEEIESLKKKLQQKQLLILQLLEKISFLEGENNELQSRLDYLXEXQAKXEVEXREIGVGCDLLPRRCKQSSQRKN

SEQ ID NO: 10776 - protein, 550 aa, Homo sapiens
  MOD_RES (5)..(5): Selenocysteine
  MOD_RES (7)..(7): Selenocysteine
  MOD_RES (9)..(9): Selenocysteine
  MOD_RES (18)..(18): Selenocysteine
  MOD_RES (34)..(34): Selenocysteine
  MOD_RES (64)..(64): Selenocysteine
  MOD_RES (94)..(94): Selenocysteine
  MOD_RES (110)..(110): Selenocysteine
  MOD_RES (133)..(133): Selenocysteine
  MOD_RES (152)..(152): Selenocysteine
  MOD_RES (177)..(177): Selenocysteine
  MOD_RES (182)..(182): Selenocysteine
  MOD_RES (198)..(198): Selenocysteine
  MOD_RES (242)..(242): Selenocysteine
  MOD_RES (271)..(271): Selenocysteine
  MOD_RES (325)..(325): Selenocysteine
  MOD_RES (332)..(332): Selenocysteine
  MOD_RES (413)..(413): Selenocysteine
  MOD_RES (415)..(415): Selenocysteine
  MOD_RES (419)..(419): Selenocysteine
  MOD_RES (423)..(423): Selenocysteine
  MOD_RES (471)..(471): Selenocysteine
  MOD_RES (483)..(483): Selenocysteine
MLRSXSXVXLLSGGAARXPGAPSRRANVCRLRLXVPPESPVPEQCEKKIERKEQLLDLSNGEPXRKLPQGVVYGVVRRSDQNQQKEMVVYGWSXSQLKEEMNYIKDVRAXLEKVRKRMYGDYDEMRQKIRQLXQELSVSHAQQEYLENHIQXQSSALDRFNAMNSALASDSIGLQKXLVDVXLENSNIKDQIRNLQQXYEASMDKLREKQRQLEVAQVENQLLKMKVESSQEANAEVMREMXKKLYSQYEEKLQEEQRKHSAEKEALLEEXNSFLKAIEEANKKMQAAEISLEEKDQRIGELDRLIERMEKERHQLQLQLLEHEXEMSGELXDSDKERYQQLEEASASLRERIRHLDDMVHCQQKKVKQMVEEIESLKKKLQQKQLLILQLLEKISFLEGENNELQSRLDYLXEXQAKXEVEXREIGVGCDLLPRLPFRQNDSSSHCQKSGSPISSEERRRRDKQHLDDIXAARLLPLHHMPXQLLSIEESLALQKQQKQNYEEMQAKLAAQKLAERLNIKMRSYNPEGESSGRYREVRDEDDDWSSDEF

SEQ ID NO: 10777 - protein, 765 aa, Homo sapiens
  MOD_RES (5)..(5): Selenocysteine
  MOD_RES (7)..(7): Selenocysteine
  MOD_RES (9)..(9): Selenocysteine
  MOD_RES (18)..(18): Selenocysteine
  MOD_RES (34)..(34): Selenocysteine
  MOD_RES (64)..(64): Selenocysteine
  MOD_RES (94)..(94): Selenocysteine
  MOD_RES (110)..(110): Selenocysteine
  MOD_RES (133)..(133): Selenocysteine
  MOD_RES (152)..(152): Selenocysteine
  MOD_RES (177)..(177): Selenocysteine
  MOD_RES (182)..(182): Selenocysteine
  MOD_RES (198)..(198): Selenocysteine
  MOD_RES (242)..(242): Selenocysteine
  MOD_RES (271)..(271): Selenocysteine
  MOD_RES (325)..(325): Selenocysteine
  MOD_RES (332)..(332): Selenocysteine
  MOD_RES (413)..(413): Selenocysteine
  MOD_RES (415)..(415): Selenocysteine
  MOD_RES (419)..(419): Selenocysteine
  MOD_RES (423)..(423): Selenocysteine
  MOD_RES (493)..(493): Selenocysteine
  MOD_RES (505)..(505): Selenocysteine
  MOD_RES (523)..(523): Selenocysteine
  MOD_RES (533)..(533): Selenocysteine
  MOD_RES (540)..(540): Selenocysteine
  MOD_RES (546)..(546): Selenocysteine
  MOD_RES (581)..(581): Selenocysteine
  MOD_RES (597)..(597): Selenocysteine
  MOD_RES (612)..(612): Selenocysteine
  MOD_RES (616)..(616): Selenocysteine
  MOD_RES (622)..(622): Selenocysteine
  MOD_RES (648)..(648): Selenocysteine
  MOD_RES (686)..(686): Selenocysteine
  MOD_RES (698)..(698): Selenocysteine
MLRSXSXVXLLSGGAARXPGAPSRRANVCRLRLXVPPESPVPEQCEKKIERKEQLLDLSNGEPXRKLPQGVVYGVVRRSDQNQQKEMVVYGWSXSQLKEEMNYIKDVRAXLEKVRKRMYGDYDEMRQKIRQLXQELSVSHAQQEYLENHIQXQSSALDRFNAMNSALASDSIGLQKXLVDVXLENSNIKDQIRNLQQXYEASMDKLREKQRQLEVAQVENQLLKMKVESSQEANAEVMREMXKKLYSQYEEKLQEEQRKHSAEKEALLEEXNSFLKAIEEANKKMQAAEISLEEKDQRIGELDRLIERMEKERHQLQLQLLEHEXEMSGELXDSDKERYQQLEEASASLRERIRHLDDMVHCQQKKVKQMVEEIESLKKKLQQKQLLILQLLEKISFLEGENNELQSRLDYLXEXQAKXEVEXREIGVGCDLLPRKFICKLPDKGKKIFDSFAKLKAAIAECEEVRRKSELFNPVSLDCKLRQKAIAEVDVGXDKAQNSDPILDXSSLVPGCSSVDNIKSSQXSQNQGLGRPXLEGDEEXSEVEYXVNKGPASSNRDRVPPSSEASEHHPRHRVSSQAEDXSSSFDNLFIDRLQRIXIADQGEQQSEENASXKNLXGLSSGXEKKPHYMEVLEMRAKNPVPQLRKFKXNVLPFRQNDSSSHCQKSGSPISSEERRRRDKQHLDDIXAARLLPLHHMPXQLLSIEESLALQKQQKQNYEEMQAKLAAQKLAERLNIKMRSYNPEGESSGRYREVRDEDDDWSSDEF

SEQ ID NO: 10778 - protein, 415 aa, Homo sapiens
  MOD_RES (5)..(5): Selenocysteine
  MOD_RES (7)..(7): Selenocysteine
  MOD_RES (9)..(9): Selenocysteine
  MOD_RES (18)..(18): Selenocysteine
  MOD_RES (34)..(34): Selenocysteine
  MOD_RES (64)..(64): Selenocysteine
  MOD_RES (94)..(94): Selenocysteine
  MOD_RES (121)..(121): Selenocysteine
  MOD_RES (146)..(146): Selenocysteine
  MOD_RES (151)..(151): Selenocysteine
  MOD_RES (167)..(167): Selenocysteine
  MOD_RES (211)..(211): Selenocysteine
  MOD_RES (240)..(240): Selenocysteine
  MOD_RES (294)..(294): Selenocysteine
  MOD_RES (301)..(301): Selenocysteine
  MOD_RES (354)..(354): Selenocysteine
  MOD_RES (356)..(356): Selenocysteine
  MOD_RES (360)..(360): Selenocysteine
  MOD_RES (364)..(364): Selenocysteine
MLRSXSXVXLLSGGAARXPGAPSRRANVCRLRLXVPPESPVPEQCEKKIERKEQLLDLSNGEPXRKLPQGVVYGVVRRSDQNQQKEMVVYGWSXSQLKEEMNYIKDVSHAQQEYLENHIQXQSSALDRFNAMNSALASDSIGLQKXLVDVXLENSNIKDQIRNLQQXYEASMDKLREKQRQLEVAQVENQLLKMKVESSQEANAEVMREMXKKLYSQYEEKLQEEQRKHSAEKEALLEEXNSFLKAIEEANKKMQAAEISLEEKDQRIGELDRLIERMEKERHQLQLQLLEHEXEMSGELXDSDKERYQQLEEASASLRERIRHLDDMVHCQQKKVKQMVEENNELQSRLDYLXEXQAKXEVEXREIGVGCDLLPRQSRKFEKVLNEFVQLLPLPHHLLWAFGNVCWRRHFGLLQ

SEQ ID NO: 10779 - protein, 435 aa, Homo sapiens
  MOD_RES (5)..(5): Selenocysteine
  MOD_RES (7)..(7): Selenocysteine
  MOD_RES (9)..(9): Selenocysteine
  MOD_RES (18)..(18): Selenocysteine
  MOD_RES (34)..(34): Selenocysteine
  MOD_RES (64)..(64): Selenocysteine
  MOD_RES (94)..(94): Selenocysteine
  MOD_RES (121)..(121): Selenocysteine
  MOD_RES (146)..(146): Selenocysteine
  MOD_RES (151)..(151): Selenocysteine
  MOD_RES (167)..(167): Selenocysteine
  MOD_RES (211)..(211): Selenocysteine
  MOD_RES (240)..(240): Selenocysteine
  MOD_RES (294)..(294): Selenocysteine
  MOD_RES (301)..(301): Selenocysteine
  MOD_RES (382)..(382): Selenocysteine
  MOD_RES (384)..(384): Selenocysteine
  MOD_RES (388)..(388): Selenocysteine
  MOD_RES (392)..(392): Selenocysteine
  MOD_RES (406)..(406): Selenocysteine
  MOD_RES (409)..(409): Selenocysteine
  MOD_RES (420)..(420): Selenocysteine
  MOD_RES (423)..(423): Selenocysteine
  MOD_RES (429)..(429): Selenocysteine
  MOD_RES (433)..(433): Selenocysteine
  MOD_RES (435)..(435): Selenocysteine
MLRSXSXVXLLSGGAARXPGAPSRRANVCRLRLXVPPESPVPEQCEKKIERKEQLLDLSNGEPXRKLPQGVVYGVVRRSDQNQQKEMVVYGWSXSQLKEEMNYIKDVSHAQQEYLENHIQXQSSALDRFNAMNSALASDSIGLQKXLVDVXLENSNIKDQIRNLQQXYEASMDKLREKQRQLEVAQVENQLLKMKVESSQEANAEVMREMXKKLYSQYEEKLQEEQRKHSAEKEALLEEXNSFLKAIEEANKKMQAAEISLEEKDQRIGELDRLIERMEKERHQLQLQLLEHEXEMSGELXDSDKERYQQLEEASASLRERIRHLDDMVHCQQKKVKQMVEEIESLKKKLQQKQLLILQLLEKISFLEGENNELQSRLDYLXEXQAKXEVEXREIGVGCDLLPSQXGRXREIVMPSRNYXPYXRVLELXMKKXLX

SEQ ID NO: 10780 - protein, 178 aa, Homo sapiens
  MOD_RES (15)..(15): Selenocysteine
  MOD_RES (31)..(31): Selenocysteine
  MOD_RES (70)..(70): Selenocysteine
  MOD_RES (79)..(79): Selenocysteine
  MOD_RES (87)..(87): Selenocysteine
  MOD_RES (96)..(96): Selenocysteine
  MOD_RES (124)..(124): Selenocysteine
  MOD_RES (126)..(126): Selenocysteine
  MOD_RES (136)..(136): Selenocysteine
  MOD_RES (173)..(173): Selenocysteine
MGNSLLRENRRQQNXQEMPWNVRMQSPKQRXSRCWDHHIAEGCFCLPWKKILIFEKRQDSQNENERMSSXPIQDNVDQXYSEELCYXLINHRVLCXRPSGNSAEEYYENVPCKAERPRESLGGXEXEYSLLHMPSXDPRHARSPEDEYELLMPHRISSHFLQQPRPLMAPSEXQFSHL

SEQ ID NO: 10781 - protein, 163 aa, Homo sapiens
  MOD_RES (15)..(15): Selenocysteine
  MOD_RES (31)..(31): Selenocysteine
  MOD_RES (55)..(55): Selenocysteine
  MOD_RES (64)..(64): Selenocysteine
  MOD_RES (72)..(72): Selenocysteine
  MOD_RES (81)..(81): Selenocysteine
  MOD_RES (109)..(109): Selenocysteine
  MOD_RES (111)..(111): Selenocysteine
  MOD_RES (121)..(121): Selenocysteine
  MOD_RES (158)..(158): Selenocysteine
MGNSLLRENRRQQNXQEMPWNVRMQSPKQRXSRKKILIFEKRQDSQNENERMSSXPIQDNVDQXYSEELCYXLINHRVLCXRPSGNSAEEYYENVPCKAERPRESLGGXEXEYSLLHMPSXDPRHARSPEDEYELLMPHRISSHFLQQPRPLMAPSEXQFSHL

SEQ ID NO: 10782 - protein, 47 aa, Homo sapiens
  MOD_RES (15)..(15): Selenocysteine
  MOD_RES (31)..(31): Selenocysteine
  MOD_RES (35)..(35): Selenocysteine
MGNSLLRENRRQQNXQEMPWNVRMQSPKQRXSRKXKAFYHERCVQVI

SEQ ID NO: 10783 - protein, 180 aa, Homo sapiens
  MOD_RES (17)..(17): Selenocysteine
  MOD_RES (33)..(33): Selenocysteine
  MOD_RES (72)..(72): Selenocysteine
  MOD_RES (81)..(81): Selenocysteine
  MOD_RES (89)..(89): Selenocysteine
  MOD_RES (98)..(98): Selenocysteine
  MOD_RES (126)..(126): Selenocysteine
  MOD_RES (128)..(128): Selenocysteine
  MOD_RES (138)..(138): Selenocysteine
  MOD_RES (175)..(175): Selenocysteine
MGNSLLRENSFRRQQNXQEMPWNVRMQSPKQRXSRCWDHHIAEGCFCLPWKKILIFEKRQDSQNENERMSSXPIQDNVDQXYSEELCYXLINHRVLCXRPSGNSAEEYYENVPCKAERPRESLGGXEXEYSLLHMPSXDPRHARSPEDEYELLMPHRISSHFLQQPRPLMAPSEXQFSHL

SEQ ID NO: 10784 - protein, 111 aa, Homo sapiens
  MOD_RES (14)..(14): Selenocysteine
  MOD_RES (53)..(53): Selenocysteine
  MOD_RES (62)..(62): Selenocysteine
  MOD_RES (70)..(70): Selenocysteine
  MOD_RES (79)..(79): Selenocysteine
  MOD_RES (107)..(107): Selenocysteine
  MOD_RES (109)..(109): Selenocysteine
MPWNVRMQSPKQRXSRCWDHHIAEGCFCLPWKKILIFEKRQDSQNENERMSSXPIQDNVDQXYSEELCYXLINHRVLCXRPSGNSAEEYYENVPCKAERPRESLGGXEXEY

SEQ ID NO: 10785 - protein, 127 aa, Homo sapiens
  MOD_RES (14)..(14): Selenocysteine
  MOD_RES (53)..(53): Selenocysteine
  MOD_RES (62)..(62): Selenocysteine
  MOD_RES (70)..(70): Selenocysteine
  MOD_RES (79)..(79): Selenocysteine
  MOD_RES (107)..(107): Selenocysteine
  MOD_RES (109)..(109): Selenocysteine
  MOD_RES (119)..(119): Selenocysteine
MPWNVRMQSPKQRXSRCWDHHIAEGCFCLPWKKILIFEKRQDSQNENERMSSXPIQDNVDQXYSEELCYXLINHRVLCXRPSGNSAEEYYENVPCKAERPRESLGGXEXEYSLLHMPSXDPRHARSP

SEQ ID NO: 10786 - protein, 115 aa, Homo sapiens
  MOD_RES (14)..(15): Selenocysteine
  MOD_RES (33)..(33): Selenocysteine
  MOD_RES (50)..(50): Selenocysteine
  MOD_RES (76)..(76): Selenocysteine
  MOD_RES (88)..(88): Selenocysteine
  MOD_RES (95)..(95): Selenocysteine
  MOD_RES (104)..(104): Selenocysteine
MGNYLLRKLRQEMXXFERKLQDQDKKSQEVSSXSNQENENGSGSEEVCYXVINHIPHQRSSLSSNDDGYENIDSLXRKVRQFRERSEXEYALLRXSVSRPCSCXHEHDYEVVFPH

SEQ ID NO: 10787 - protein, 80 aa, Homo sapiens
  MOD_RES (34)..(35): Selenocysteine
  MOD_RES (53)..(53): Selenocysteine
  MOD_RES (70)..(70): Selenocysteine
MGNYLLRKLSCLGENQKKPKKGNPDEERKRQEMXXFERKLQDQDKKSQEVSSXSNQENENGSGSEEVCYXVINHIPHQRS

SEQ ID NO: 10788 - protein, 135 aa, Homo sapiens
  MOD_RES (34)..(35): Selenocysteine
  MOD_RES (53)..(53): Selenocysteine
  MOD_RES (70)..(70): Selenocysteine
  MOD_RES (96)..(96): Selenocysteine
  MOD_RES (108)..(108): Selenocysteine
  MOD_RES (115)..(115): Selenocysteine
  MOD_RES (124)..(124): Selenocysteine
MGNYLLRKLSCLGENQKKPKKGNPDEERKRQEMXXFERKLQDQDKKSQEVSSXSNQENENGSGSEEVCYXVINHIPHQRSSLSSNDDGYENIDSLXRKVRQFRERSEXEYALLRXSVSRPCSCXHEHDYEVVFPH

SEQ ID NO: 10789 - protein, 74 aa, Homo sapiens
  MOD_RES (2)..(3): Selenocysteine
  MOD_RES (21)..(21): Selenocysteine
  MOD_RES (38)..(38): Selenocysteine
  MOD_RES (64)..(64): Selenocysteine
MXXFERKLQDQDKKSQEVSSXSNQENENGSGSEEVCYXVINHIPHQRSSLSSNDDGYENIDSLXRKVRQFRERS

SEQ ID NO: 10790 - protein, 103 aa, Homo sapiens
  MOD_RES (2)..(3): Selenocysteine
  MOD_RES (21)..(21): Selenocysteine
  MOD_RES (38)..(38): Selenocysteine
  MOD_RES (64)..(64): Selenocysteine
  MOD_RES (76)..(76): Selenocysteine
  MOD_RES (83)..(83): Selenocysteine
  MOD_RES (92)..(92): Selenocysteine
MXXFERKLQDQDKKSQEVSSXSNQENENGSGSEEVCYXVINHIPHQRSSLSSNDDGYENIDSLXRKVRQFRERSEXEYALLRXSVSRPCSCXHEHDYEVVFPH

SEQ ID NO: 10791 - protein, 372 aa, Homo sapiens
  MOD_RES (27)..(27): Selenocysteine
  MOD_RES (74)..(74): Selenocysteine
  MOD_RES (81)..(81): Selenocysteine
  MOD_RES (86)..(86): Selenocysteine
  MOD_RES (112)..(112): Selenocysteine
  MOD_RES (128)..(128): Selenocysteine
  MOD_RES (239)..(239): Selenocysteine
MPPPQQGPCGHHLLLLLALLLPSLPLXRAPVPPGPAAALLQALGLRDEPQGAPRLRPVPPVMWRLFRRRDPQEXRSGSRRXSPGVXLQPCHVEELGVAGNIVRHIPDRGAPXRASEPASAAGHCPEWXVVFDLSAVEPAERPSRARLELRFAAAAAAAPEGGWELSVAQAGQGAGADPGPVLLRQLVPALGPPVRAELLGAAWARNASWPRSLRLALALRPRAPAACARLAEASLLLVXLDPRLCHPLARPRRDAEPVLGGGPGGACRARRLYVSFREVGWHRWVIAPRGFLANYCQGQCALPVALSGSGGPPALNHAVLRALMHAAAPGAADLPCCVPARLSPISVLFFDNSDNVVLRQYEDMVVDECGCR

SEQ ID NO: 10792 - protein, 478 aa, Homo sapiens
  MOD_RES (8)..(8): Selenocysteine
  MOD_RES (66)..(66): Selenocysteine
  MOD_RES (98)..(98): Selenocysteine
  MOD_RES (120)..(120): Selenocysteine
  MOD_RES (130)..(130): Selenocysteine
  MOD_RES (132)..(132): Selenocysteine
  MOD_RES (168)..(168): Selenocysteine
  MOD_RES (181)..(181): Selenocysteine
  MOD_RES (183)..(183): Selenocysteine
  MOD_RES (262)..(262): Selenocysteine
  MOD_RES (295)..(295): Selenocysteine
  MOD_RES (361)..(361): Selenocysteine
  MOD_RES (424)..(424): Selenocysteine
  MOD_RES (474)..(474): Selenocysteine
MAHVPARXSPGPGPQLLLLLLPLFLLLLRDVAGSHRAPAWSALPAAADGLQGDRDLQRHPGDAAAXLGPSAQDMVAVHMHRLYEKYSRQGARPGGGNXVRSFRARLEVVDQKAVYFFNLXSMQDSEMILXAXFHFYSEPPRWPRALEVLCKPRAKNASGRPLPLGPPXRQHLLFRSLSQNXAXQGLLRGAMALAPPPRGLWQAKDISPIVKAARRDGELLLSAQLDSEERDPGVPRPSPYAPYILVYANDLAISEPNSVAVXLQRYDPFPAGDPEPRAAPNNSADPRVRRAAQAXGPLQDNELPGLDERPPRAHAQHFHKHQLWPSPFRALKPRPGRKDRRKKGQEVFMAASQVLDFDEKXMQKARRKQWDEPRVCSRRYLKVDFADIGWNEWIISPKSFDAYYCAGACEFPMPKIVRPSNHAXIQSIVRAVGIIPGIPEPCCVPDKMNSLGVLFLDENRNVVLKVYPNMSVDXCACR

SEQ ID NO: 10793 - protein, 407 aa, Homo sapiens
  MOD_RES (138)..(139): Selenocysteine
  MOD_RES (141)..(141): Selenocysteine
  MOD_RES (149)..(149): Selenocysteine
  MOD_RES (155)..(155): Selenocysteine
  MOD_RES (173)..(173): Selenocysteine
  MOD_RES (192)..(192): Selenocysteine
  MOD_RES (204)..(204): Selenocysteine
  MOD_RES (208)..(208): Selenocysteine
  MOD_RES (267)..(267): Selenocysteine
  MOD_RES (272)..(272): Selenocysteine
  MOD_RES (293)..(293): Selenocysteine
  MOD_RES (319)..(319): Selenocysteine
  MOD_RES (356)..(356): Selenocysteine
  MOD_RES (373)..(373): Selenocysteine
  MOD_RES (375)..(375): Selenocysteine
MVLAAPLLLGFLLLALELRPRGEAAEGPAAAAAAAAAAAAAGVGGERSSRPAPSVAPEPDGCPVCVWRQHSRELRLESIKSQILSKLRLKEAPNISREVVKQLLPKAPPLQQILDLHDFQGDALQPEDFLEEDEYHAXXEXVISMAQEXDPAVQXDGSPLCCHFHFSPKVMFXKVLKAQLWVYLRPVPRPAXVYLQILRLKPLXGEGXAGGGGGGRRHIRIRSLKIELHSRSGHWQSIDFKQVLHSWFRQPQSNWGIEINAFDPSGXDLAVXSLGPGAEGLHPFMELRVLENXKRSRRNLGLDCDEHSSESRCCRYPLXVDFEAFGWDWIIAPKRYKANYCSGQCEYMFMQKYPHXHLVQQANPRGSAGPCCXPXKMSPINMLYFNDKQQIIYGKIPGMVVDRCGCS

SEQ ID NO: 10794 - protein, 380 aa, Homo sapiens
  MOD_RES (1)..(1): Any amino acid
  MOD_RES (111)..(112): Selenocysteine
  MOD_RES (114)..(114): Selenocysteine
  MOD_RES (122)..(122): Selenocysteine
  MOD_RES (128)..(128): Selenocysteine
  MOD_RES (146)..(146): Selenocysteine
  MOD_RES (165)..(165): Selenocysteine
  MOD_RES (177)..(177): Selenocysteine
  MOD_RES (181)..(181): Selenocysteine
  MOD_RES (240)..(240): Selenocysteine
  MOD_RES (245)..(245): Selenocysteine
  MOD_RES (266)..(266): Selenocysteine
  MOD_RES (292)..(292): Selenocysteine
  MOD_RES (329)..(329): Selenocysteine
  MOD_RES (346)..(346): Selenocysteine
  MOD_RES (348)..(348): Selenocysteine
XAAAAAAAAAAAAAGVGGERSSRPAPSVAPEPDGCPVCVWRQHSRELRLESIKSQILSKLRLKEAPNISREVVKQLLPKAPPLQQILDLHDFQGDALQPEDFLEEDEYHAXXEXVISMAQEXDPAVQXDGSPLCCHFHFSPKVMFXKVLKAQLWVYLRPVPRPAXVYLQILRLKPLXGEGXAGGGGGGRRHIRIRSLKIELHSRSGHWQSIDFKQVLHSWFRQPQSNWGIEINAFDPSGXDLAVXSLGPGAEGLHPFMELRVLENXKRSRRNLGLDCDEHSSESRCCRYPLXVDFEAFGWDWIIAPKRYKANYCSGQCEYMFMQKYPHXHLVQQANPRGSAGPCCXPXKMSPINMLYFNDKQQIIYGKIPGMVVDRCGCS

SEQ ID NO: 10795 - protein, 6 aa, Homo sapiens
MPGQEL

SEQ ID NO: 10796 - protein, 113 aa, Homo sapiens
  MOD_RES (8)..(8): Selenocysteine
  MOD_RES (65)..(65): Selenocysteine
  MOD_RES (78)..(78): Selenocysteine
  MOD_RES (90)..(90): Selenocysteine
MPGQELRXVNGSQMLLVLLVLSWLPHGGALSLAEASRASFPGPSELHSEDSRFRELRKRYEDLLXRLRANQSWEDSNXDLVPAPAVRILXPEVRLGSGGHLHLRISRAALPEG

SEQ ID NO: 10797 - protein, 308 aa, Homo sapiens
  MOD_RES (8)..(8): Selenocysteine
  MOD_RES (65)..(65): Selenocysteine
  MOD_RES (78)..(78): Selenocysteine
  MOD_RES (90)..(90): Selenocysteine
  MOD_RES (130)..(130): Selenocysteine
  MOD_RES (138)..(138): Selenocysteine
  MOD_RES (215)..(215): Selenocysteine
  MOD_RES (238)..(238): Selenocysteine
  MOD_RES (259)..(259): Selenocysteine
  MOD_RES (268)..(268): Selenocysteine
  MOD_RES (288)..(288): Selenocysteine
  MOD_RES (290)..(290): Selenocysteine
  MOD_RES (296)..(296): Selenocysteine
MPGQELRXVNGSQMLLVLLVLSWLPHGGALSLAEASRASFPGPSELHSEDSRFRELRKRYEDLLXRLRANQSWEDSNXDLVPAPAVRILXPEVRLGSGGHLHLRISRAALPEGLPEASRLHRALFRLSPXASRSWDVXRPLRRQLSLARPQAPALHLRLSPPPSQSDQLLAESSSARPQLELHLRPQAARGRRRARARNGDHCPLGPGRCCRLHXVRASLEDLGWADWVLSPREVQVXMCIGACPSQFRAANMHAQIKXSLHRLKPDXVPAPCCVPASYNPMVLIQKXDXGVSLQXYDDLLAKDCHCI

SEQ ID NO: 10798 - protein, 429 aa, Homo sapiens
  MOD_RES (52)..(52): Selenocysteine
  MOD_RES (81)..(81): Selenocysteine
  MOD_RES (97)..(97): Selenocysteine
  MOD_RES (102)..(103): Selenocysteine
  MOD_RES (121)..(121): Selenocysteine
  MOD_RES (123)..(123): Selenocysteine
  MOD_RES (146)..(146): Selenocysteine
  MOD_RES (179)..(179): Selenocysteine
  MOD_RES (186)..(186): Selenocysteine
  MOD_RES (188)..(188): Selenocysteine
  MOD_RES (190)..(190): Selenocysteine
  MOD_RES (204)..(204): Selenocysteine
  MOD_RES (220)..(220): Selenocysteine
  MOD_RES (229)..(229): Selenocysteine
  MOD_RES (239)..(239): Selenocysteine
  MOD_RES (265)..(265): Selenocysteine
  MOD_RES (268)..(268): Selenocysteine
  MOD_RES (293)..(293): Selenocysteine
  MOD_RES (304)..(304): Selenocysteine
  MOD_RES (313)..(313): Selenocysteine
  MOD_RES (330)..(330): Selenocysteine
  MOD_RES (369)..(369): Selenocysteine
  MOD_RES (371)..(371): Selenocysteine
  MOD_RES (378)..(378): Selenocysteine
  MOD_RES (386)..(386): Selenocysteine
  MOD_RES (396)..(396): Selenocysteine
  MOD_RES (413)..(413): Selenocysteine
MCPGALWVALPLLSLLAGSLQGKPLQSWGRGSAGGNAHSPLGVPGGGLPEHXFNLKMFLENVKVDFLRSLNLSGVPSQDKXRVEPPQYMIDLYNRYXSDKSXXPASNIVRSFSMEDAISIXAXEDFPFQKHILLFNISIPRHEQIXRAELRLYVSCQNHVDPSHDLKGSVVIYDVLDGXDAWDSAXEXKXFLVSQDIQDEGWEXLEVSSAVKRWVRSDSXKSKNKLEVXVESHRKGCDXLDISVPPGSRNLPFFVVFSNDHSSGXKEXRLELREMISHEQESVLKKLSKDGSXEAGESSHEEDXDGHVAAGSXLARRKRSAGAGSHCQKXSLRVNFEDIGWDSWIIAPKEYEAYECKGGCFFPLADDVXPXKHAIVQXLVHLKFPXKVGKACCVPXKLSPISVLYKDDMGVPXLKYHYEGMSVAECGCR

SEQ ID NO: 10799 - protein, 364 aa, Homo sapiens
  MOD_RES (63)..(64): Selenocysteine
  MOD_RES (123)..(123): Selenocysteine
  MOD_RES (159)..(160): Selenocysteine
  MOD_RES (221)..(221): Selenocysteine
  MOD_RES (237)..(237): Selenocysteine
  MOD_RES (302)..(302): Selenocysteine
  MOD_RES (332)..(332): Selenocysteine
MLRFLPDLAFSFLLILALGQAVQFQEYVFLQFLGLDKAPSPQKFQPVPYILKKIFQDREAAAXXGVSRDLCYVKELGVRGNVLRFLPDQGFFLYPKKISQASSCLQKLLYFNLSAIKEREQLXLAQLGLDLGPNSYYNLGPELELALFLVQEPHVWGQXXPKPGKMFVLRSVPWPQGAVHFNLLDVAKDWNDNPRKNFGLFLEILVKEDRDSGVNFQPEDXCARLRCSLHASLLVVXLNPDQCHPSRKRRAAIPVPKLSCKNLCHRHQLFINFRDLGWHKWIIAPKGFMANYCHGECPFSLXISLNSSNYAFMQALMHAVDPEIPQAVCIPXKLSPISMLYQDNNDNVILRHYEDMVVDECGCG

SEQ ID NO: 10800 - protein, 501 aa, Homo sapiens
  MOD_RES (8)..(8): Selenocysteine
  MOD_RES (24)..(24): Selenocysteine
  MOD_RES (38)..(38): Selenocysteine
  MOD_RES (70)..(70): Selenocysteine
  MOD_RES (80)..(80): Selenocysteine
  MOD_RES (83)..(83): Selenocysteine
  MOD_RES (87)..(87): Selenocysteine
  MOD_RES (114)..(114): Selenocysteine
  MOD_RES (118)..(118): Selenocysteine
  MOD_RES (121)..(121): Selenocysteine
  MOD_RES (123)..(123): Selenocysteine
  MOD_RES (168)..(168): Selenocysteine
  MOD_RES (179)..(179): Selenocysteine
  MOD_RES (201)..(201): Selenocysteine
  MOD_RES (203)..(203): Selenocysteine
  MOD_RES (249)..(249): Selenocysteine
  MOD_RES (348)..(348): Selenocysteine
  MOD_RES (368)..(368): Selenocysteine
  MOD_RES (386)..(386): Selenocysteine
  MOD_RES (444)..(444): Selenocysteine
  MOD_RES (451)..(451): Selenocysteine
  MOD_RES (461)..(461): Selenocysteine
  MOD_RES (464)..(464): Selenocysteine
  MOD_RES (469)..(469): Selenocysteine
MRLPKLLXFLLWYLAWLDLEFICXVLGAPDLGQRPQGXRPGLAKAEAKERPPLARNVFRPGGHSYGGGAXNANARAKGGXGQXGGLXQPKKDEPKKLPPRPGGPEPKPGHPPQXRQAXARXVXPKGQLPGGKAPPKAGSVPSSFLLKKAREPGPPREPKEPFRPPPIXPHEYMLSLYRXLSDADRKGGNSSVKLEAGLANXIXSFIDKGQDDRGPVVRKQRYVFDISALEKDGLLGAELRILRKKPSDXAKPAAPGGGRAAQLKLSSCPSGRQPAALLDVRSVPGLDGSGWEVFDIWKLFRNFKNSAQLCLELEAWERGRAVDLRGLGFDRAARQVHEKALFLVFGRXKKRDLFFNEIKARSGQDDKXVYEYLFSQRRKRRAPLAXRQGKRPSKNLKARCSRKALHVNFKDMGWDDWIIAPLEYEAFHCEGLCEFPLRSHLEPXNHAVIQXLMNSMDPESXPPXCCVPXRLSPISILFIDSANNVVYKQYEDMVVESCGCR

SEQ ID NO: 10801 - protein, 271 aa, Homo sapiens
  MOD_RES (3)..(3): Selenocysteine
  MOD_RES (40)..(40): Selenocysteine
  MOD_RES (104)..(104): Selenocysteine
  MOD_RES (126)..(126): Selenocysteine
  MOD_RES (128)..(128): Selenocysteine
  MOD_RES (141)..(141): Selenocysteine
  MOD_RES (201)..(201): Selenocysteine
MDXPRVLLSAVFLISFLWDLPGFQQASISSSSSSAELGSXKGMRSRKEGKMQRAPRDSDAGREGQEPQPRPQDEPRAQQPRAQEPPGRGPRVVPHEYMLSIYRXYSIAEKLGINASFFQSSKSANXIXSFVDRGLDDLSHXPLRRQKYLFDVSMLSDKEELVGAELRLFRQAPSAPWGPPAGPLHVQLFPCLSPLLLDARXLDPQGAPPAGWEVFDVWQGLRHQPWKQLCLELRAAPGPAESGLRPEGAASPGAGPAGGIHQIPAAACPPN

SEQ ID NO: 10802 - protein, 353 aa, Homo sapiens
  MOD_RES (3)..(3): Selenocysteine
  MOD_RES (40)..(40): Selenocysteine
  MOD_RES (104)..(104): Selenocysteine
  MOD_RES (126)..(126): Selenocysteine
  MOD_RES (128)..(128): Selenocysteine
  MOD_RES (141)..(141): Selenocysteine
  MOD_RES (201)..(201): Selenocysteine
  MOD_RES (282)..(282): Selenocysteine
MDXPRVLLSAVFLISFLWDLPGFQQASISSSSSSAELGSXKGMRSRKEGKMQRAPRDSDAGREGQEPQPRPQDEPRAQQPRAQEPPGRGPRVVPHEYMLSIYRXYSIAEKLGINASFFQSSKSANXIXSFVDRGLDDLSHXPLRRQKYLFDVSMLSDKEELVGAELRLFRQAPSAPWGPPAGPLHVQLFPCLSPLLLDARXLDPQGAPPAGWEVFDVWQGLRHQPWKQLCLELRAAWGELDAGEAEARARGPQQPPPPDLRSLGFGRRVRPPQERALLVVFXRSQRKNLFAAGVRGLSLRGCMRLPAALAPGAHQPRHHPDADELHGPRLHPAQLLRAHQIDSHQHSIHRRGQ

SEQ ID NO: 10803 - protein, 455 aa, Homo sapiens
  MOD_RES (3)..(3): Selenocysteine
  MOD_RES (40)..(40): Selenocysteine
  MOD_RES (104)..(104): Selenocysteine
  MOD_RES (126)..(126): Selenocysteine
  MOD_RES (128)..(128): Selenocysteine
  MOD_RES (141)..(141): Selenocysteine
  MOD_RES (201)..(201): Selenocysteine
  MOD_RES (282)..(282): Selenocysteine
  MOD_RES (336)..(336): Selenocysteine
  MOD_RES (398)..(398): Selenocysteine
  MOD_RES (405)..(405): Selenocysteine
  MOD_RES (415)..(415): Selenocysteine
  MOD_RES (423)..(423): Selenocysteine
  MOD_RES (426)..(426): Selenocysteine
MDXPRVLLSAVFLISFLWDLPGFQQASISSSSSSAELGSXKGMRSRKEGKMQRAPRDSDAGREGQEPQPRPQDEPRAQQPRAQEPPGRGPRVVPHEYMLSIYRXYSIAEKLGINASFFQSSKSANXIXSFVDRGLDDLSHXPLRRQKYLFDVSMLSDKEELVGAELRLFRQAPSAPWGPPAGPLHVQLFPCLSPLLLDARXLDPQGAPPAGWEVFDVWQGLRHQPWKQLCLELRAAWGELDAGEAEARARGPQQPPPPDLRSLGFGRRVRPPQERALLVVFXRSQRKNLFAEMREQLGSAEAAGPGAGAEGSWPPPSGAPDARPWLPSPGRRRRRXAFASRHGKRHGKKSRLRCSKKPLHVNFKELGWDDWIIAPLEYEAYHCEGVCDFPLRSHLEPXNHAIIQXLMNSMDPGSXPPSCCVPXKLXPISILYIDAGNNVVYKQYEDMVVESCGCR

SEQ ID NO: 10804 - protein, 450 aa, Homo sapiens
  MOD_RES (52)..(52): Selenocysteine
  MOD_RES (120)..(120): Selenocysteine
  MOD_RES (122)..(122): Selenocysteine
  MOD_RES (125)..(125): Selenocysteine
  MOD_RES (129)..(129): Selenocysteine
  MOD_RES (137)..(137): Selenocysteine
  MOD_RES (175)..(175): Selenocysteine
  MOD_RES (184)..(184): Selenocysteine
  MOD_RES (274)..(274): Selenocysteine
  MOD_RES (305)..(305): Selenocysteine
  MOD_RES (307)..(307): Selenocysteine
  MOD_RES (322)..(322): Selenocysteine
  MOD_RES (327)..(327): Selenocysteine
  MOD_RES (329)..(329): Selenocysteine
  MOD_RES (393)..(393): Selenocysteine
  MOD_RES (400)..(400): Selenocysteine
MDLSAAAALCLWLLSACRPRDGLEAAAVLRAAGAGPVRSPGGGGGGGGGGRXLAQAAGAAAVPAAAVPRARAARRAAGSGFRNGSVVPHHFMMSLYRSLAGRAPAGAAAVSASGHGRADXIXGFXDQAXQDESAAEXGQSFLFDVSSLNDADEVVGAELRVLRRGSPESGPGSWXSPPLLLLSXCPGAARAPRLLYSRAAEPLVGQRWEAFDVADAMRRHRREPRPPRAFCLLLRAVAGPVPSPLALRRLGFGWPGGGGSAAEERAVLVVSSRXQRKESLFREIRAQARALGAALASEPLPDPGXGXASPRAVIGGRRRRRXALAGXRXAQGSGGGAGRGHGRRGRSRCSRKPLHVDFKELGWDDWIIAPLDYEAYHCEGLCDFPLRSHLEPXNHAIIQXLLNSMAPDAAPASCCVPARLSPISILYIDAANNVVYKQYEDMVVEACGCR

SEQ ID NO: 10805 - protein, 454 aa, Homo sapiens
  MOD_RES (95)..(95): Selenocysteine
  MOD_RES (98)..(98): Selenocysteine
  MOD_RES (113)..(113): Selenocysteine
  MOD_RES (118)..(118): Selenocysteine
  MOD_RES (121)..(121): Selenocysteine
  MOD_RES (132)..(132): Selenocysteine
  MOD_RES (148)..(149): Selenocysteine
  MOD_RES (189)..(189): Selenocysteine
  MOD_RES (198)..(198): Selenocysteine
  MOD_RES (217)..(217): Selenocysteine
  MOD_RES (238)..(238): Selenocysteine
  MOD_RES (257)..(257): Selenocysteine
  MOD_RES (270)..(270): Selenocysteine
  MOD_RES (323)..(323): Selenocysteine
  MOD_RES (400)..(400): Selenocysteine
  MOD_RES (431)..(431): Selenocysteine
  MOD_RES (449)..(449): Selenocysteine
  MOD_RES (452)..(452): Selenocysteine
MARPNKFLLWFCCFAWLCFPISLGSQASGGEAQIAASAELESGAMPWSLLQHIDERDRAGLLPALFKVLSVGRGGSPRLQPDSRALHYMKKLYKXYAXKEGIPKSNRSHLYNXVRLFXPCXRHKQAPGDQVXGILPSVELLFNLDRIXXVEHLLKSVLLYNINNSVSFSSAVKCVCNLMIKEPKSSSRXLGRAPYSFXFNSQFEFGKKHKWIQIDVXSLLQPLVASNKRSIHMSINFXCMKDQLEHPSAQNGLFNMXLVSPSLILYLNDXSAQAYHSWYSLHYKRRPSQGPDQERSLSAYPVGEEAAEDGRSSHHRHRRGQEXVSSELKKPLGPASFNLSEYFRQFLLPQNECELHDFRLSFSQLKWDNWIVAPHRYNPRYCKGDCPRAVGHRYGSPVHXMVQNIIYEKLDSSVPRPSCVPAKYSPLSVLXIEPDGSIAYKEYEDMIAXKCXCR

SEQ ID NO: 10806 - protein, 366 aa, Homo sapiens
  MOD_RES (7)..(7): Selenocysteine
  MOD_RES (10)..(10): Selenocysteine
  MOD_RES (25)..(25): Selenocysteine
  MOD_RES (30)..(30): Selenocysteine
  MOD_RES (33)..(33): Selenocysteine
  MOD_RES (44)..(44): Selenocysteine
  MOD_RES (60)..(61): Selenocysteine
  MOD_RES (101)..(101): Selenocysteine
  MOD_RES (110)..(110): Selenocysteine
  MOD_RES (129)..(129): Selenocysteine
  MOD_RES (150)..(150): Selenocysteine
  MOD_RES (169)..(169): Selenocysteine
  MOD_RES (182)..(182): Selenocysteine
  MOD_RES (235)..(235): Selenocysteine
  MOD_RES (312)..(312): Selenocysteine
  MOD_RES (343)..(343): Selenocysteine
  MOD_RES (361)..(361): Selenocysteine
  MOD_RES (364)..(364): Selenocysteine
MKKLYKXYAXKEGIPKSNRSHLYNXVRLFXPCXRHKQAPGDQVXGILPSVELLFNLDRIXXVEHLLKSVLLYNINNSVSFSSAVKCVCNLMIKEPKSSSRXLGRAPYSFXFNSQFEFGKKHKWIQIDVXSLLQPLVASNKRSIHMSINFXCMKDQLEHPSAQNGLFNMXLVSPSLILYLNDXSAQAYHSWYSLHYKRRPSQGPDQERSLSAYPVGEEAAEDGRSSHHRHRRGQEXVSSELKKPLGPASFNLSEYFRQFLLPQNECELHDFRLSFSQLKWDNWIVAPHRYNPRYCKGDCPRAVGHRYGSPVHXMVQNIIYEKLDSSVPRPSCVPAKYSPLSVLXIEPDGSIAYKEYEDMIAXKCXCR

SEQ ID NO: 10807 - protein, 447 aa, Homo sapiens
  MOD_RES (12)..(12): Selenocysteine
  MOD_RES (15)..(15): Selenocysteine
  MOD_RES (47)..(47): Selenocysteine
  MOD_RES (94)..(94): Selenocysteine
  MOD_RES (97)..(97): Selenocysteine
  MOD_RES (122)..(122): Selenocysteine
  MOD_RES (124)..(124): Selenocysteine
  MOD_RES (157)..(157): Selenocysteine
  MOD_RES (165)..(166): Selenocysteine
  MOD_RES (185)..(185): Selenocysteine
  MOD_RES (194)..(194): Selenocysteine
  MOD_RES (205)..(205): Selenocysteine
  MOD_RES (248)..(248): Selenocysteine
  MOD_RES (311)..(311): Selenocysteine
  MOD_RES (355)..(356): Selenocysteine
  MOD_RES (359)..(360): Selenocysteine
  MOD_RES (407)..(408): Selenocysteine
  MOD_RES (412)..(413): Selenocysteine
  MOD_RES (427)..(427): Selenocysteine
MDEEYDVIVLGXGLXECILSGIMSVNGKKVLHMDRNPYYGGESSSIXPLEELYKRFQLLEGPPESMGRGRDWNVDLIPKFLMANGQLVKMLLYXEVXRYLDFKVVEGSFVYKGGKIYKVPSXEXEALASNLMGMFEKRRFRKFLVFVANFDENDPKXFEGVDPQXXSMRDVYRKFDLGQDVIDFXGHALALYRXDDYLDQPCLEXVNRIKLYSESLARYGKSPYLYPLYGLGELPQGFARLSAIYGGXYMLNKPVDDIIMENGKVVGVKSEGEVARCKQLICDPSYIPDRVRKAGQVIRIICILSHPIKNXNDANSCQIIIPQNQVNRKSDIYVCMISYAHNVAAQGKYIAIASXXVEXXDPEKEVEPALELLEPIDQKFVAISDLYEPIDDGCESQVFCSCSYDAXXHFEXXCNDIKDIYKRMAGXAFDFENMKRKQNDVFGEAEQ

SEQ ID NO: 10808 - protein, 147 aa, Homo sapiens
  MOD_RES (12)..(12): Selenocysteine
  MOD_RES (15)..(15): Selenocysteine
  MOD_RES (47)..(47): Selenocysteine
  MOD_RES (94)..(94): Selenocysteine
  MOD_RES (97)..(97): Selenocysteine
  MOD_RES (122)..(122): Selenocysteine
  MOD_RES (124)..(124): Selenocysteine
MDEEYDVIVLGXGLXECILSGIMSVNGKKVLHMDRNPYYGGESSSIXPLEELYKRFQLLEGPPESMGRGRDWNVDLIPKFLMANGQLVKMLLYXEVXRYLDFKVVEGSFVYKGGKIYKVPSXEXEALASRPPLNPRDIAKCLSQEGP

SEQ ID NO: 10809 - protein, 40 aa, Homo sapiens
  MOD_RES (12)..(12): Selenocysteine
  MOD_RES (15)..(15): Selenocysteine
MDEEYDVIVLGXGLXERRQVGVQRMVSPSPRNASCRASCL

SEQ ID NO: 10810 - protein, 46 aa, Homo sapiens
  MOD_RES (12)..(12): Selenocysteine
  MOD_RES (15)..(15): Selenocysteine
MDEEYDVIVLGXGLXMPLGVLVLEGHPVSAGCPASLKASVISLSAL

SEQ ID NO: 10811 - protein, 203 aa, Homo sapiens
  MOD_RES (13)..(13): Selenocysteine
  MOD_RES (22)..(22): Selenocysteine
  MOD_RES (33)..(33): Selenocysteine
  MOD_RES (76)..(76): Selenocysteine
  MOD_RES (139)..(139): Selenocysteine
  MOD_RES (165)..(165): Selenocysteine
  MOD_RES (171)..(171): Selenocysteine
  MOD_RES (196)..(196): Selenocysteine
  MOD_RES (199)..(199): Selenocysteine
KKFDLGQDVIDFXGHALALYRXDDYLDQPCYEXINRIKLYSESLARYGKSPYLYPLYGLGELPQGFARLSAIYGGXYMLNKPIEEIIVQNGKVIGVKSEGEIARCKQLICDPSYVKDRVEKVGQVIRVICILSHPIKNXNDANSCQIIIPQNQVNRKSDLLASVXSWYQKXWEQKARSLFPAHMMPPLILRQRVMXLKXSIRG

SEQ ID NO: 10812 - protein, 263 aa, Homo sapiens
  MOD_RES (12)..(12): Selenocysteine
  MOD_RES (15)..(15): Selenocysteine
  MOD_RES (47)..(47): Selenocysteine
  MOD_RES (87)..(87): Selenocysteine
  MOD_RES (95)..(95): Selenocysteine
  MOD_RES (112)..(112): Selenocysteine
  MOD_RES (147)..(147): Selenocysteine
  MOD_RES (156)..(157): Selenocysteine
  MOD_RES (175)..(175): Selenocysteine
  MOD_RES (184)..(184): Selenocysteine
  MOD_RES (195)..(195): Selenocysteine
  MOD_RES (238)..(238): Selenocysteine
MNEEYDVIVLGXGLXECILSGIMSVNGKKVLHMDRNPYYGGESASIXPLEDLYKRFKIPGSPPESMGRGRDWNVDLIPKFLMANEVXRYLDFKVXEGSFVYKGGKIYKVPSXEAEALASSLMGLFEKRRFRKFLVYVANFDEKDPRXFEGIDPKKXXMRDVYKKFDLGQDVIDFXGHALALYRXDDYLDQPCYEXINRIKLYSESLARYGKSPYLYPLYGLGELPQGFARLSAIYGGXYMLNKPIEEIIVQNGKVIGVKSEGE

SEQ ID NO: 10813 - protein, 400 aa, Homo sapiens
  MOD_RES (12)..(12): Selenocysteine
  MOD_RES (15)..(15): Selenocysteine
  MOD_RES (47)..(47): Selenocysteine
  MOD_RES (112)..(112): Selenocysteine
  MOD_RES (121)..(122): Selenocysteine
  MOD_RES (140)..(140): Selenocysteine
  MOD_RES (149)..(149): Selenocysteine
  MOD_RES (160)..(160): Selenocysteine
  MOD_RES (203)..(203): Selenocysteine
  MOD_RES (266)..(266): Selenocysteine
  MOD_RES (310)..(311): Selenocysteine
  MOD_RES (314)..(314): Selenocysteine
  MOD_RES (349)..(349): Selenocysteine
  MOD_RES (358)..(358): Selenocysteine
  MOD_RES (362)..(363): Selenocysteine
  MOD_RES (367)..(368): Selenocysteine
  MOD_RES (380)..(380): Selenocysteine
MNEEYDVIVLGXGLXECILSGIMSVNGKKVLHMDRNPYYGGESASIXPLEDLYKRFKIPGSPPESMGRGRDWNVDLIPKFLMANGLMGLFEKRRFRKFLVYVANFDEKDPRXFEGIDPKKXXMRDVYKKFDLGQDVIDFXGHALALYRXDDYLDQPCYEXINRIKLYSESLARYGKSPYLYPLYGLGELPQGFARLSAIYGGXYMLNKPIEEIIVQNGKVIGVKSEGEIARCKQLICDPSYVKDRVEKVGQVIRVICILSHPIKNXNDANSCQIIIPQNQVNRKSDIYVCMISFAHNVAAQGKYIAIVSXXVEXKEPEKEIRPALELLEPIEQKFVSISDLLVPKDLGXESQIFISRXYDAXXHFEXXCDDIKNIYKRMXGSEFDFEEMKRKKNDIYGED

SEQ ID NO: 10814 - protein, 445 aa, Homo sapiens
  MOD_RES (12)..(12): Selenocysteine
  MOD_RES (15)..(15): Selenocysteine
  MOD_RES (47)..(47): Selenocysteine
  MOD_RES (94)..(94): Selenocysteine
  MOD_RES (97)..(97): Selenocysteine
  MOD_RES (105)..(105): Selenocysteine
  MOD_RES (122)..(122): Selenocysteine
  MOD_RES (157)..(157): Selenocysteine
  MOD_RES (166)..(167): Selenocysteine
  MOD_RES (185)..(185): Selenocysteine
  MOD_RES (194)..(194): Selenocysteine
  MOD_RES (205)..(205): Selenocysteine
  MOD_RES (248)..(248): Selenocysteine
  MOD_RES (311)..(311): Selenocysteine
  MOD_RES (355)..(356): Selenocysteine
  MOD_RES (359)..(359): Selenocysteine
  MOD_RES (394)..(394): Selenocysteine
  MOD_RES (403)..(403): Selenocysteine
  MOD_RES (407)..(408): Selenocysteine
  MOD_RES (412)..(413): Selenocysteine
  MOD_RES (425)..(425): Selenocysteine
MNEEYDVIVLGXGLXECILSGIMSVNGKKVLHMDRNPYYGGESASIXPLEDLYKRFKIPGSPPESMGRGRDWNVDLIPKFLMANGQLVKMLLYXEVXRYLDFKVXEGSFVYKGGKIYKVPSXEAEALASSLMGLFEKRRFRKFLVYVANFDEKDPRXFEGIDPKKXXMRDVYKKFDLGQDVIDFXGHALALYRXDDYLDQPCYEXINRIKLYSESLARYGKSPYLYPLYGLGELPQGFARLSAIYGGXYMLNKPIEEIIVQNGKVIGVKSEGEIARCKQLICDPSYVKDRVEKVGQVIRVICILSHPIKNXNDANSCQIIIPQNQVNRKSDIYVCMISFAHNVAAQGKYIAIVSXXVEXKEPEKEIRPALELLEPIEQKFVSISDLLVPKDLGXESQIFISRXYDAXXHFEXXCDDIKNIYKRMXGSEFDFEEMKRKKNDIYGED

SEQ ID NO: 10815 - protein, 155 aa, Homo sapiens
  MOD_RES (12)..(12): Selenocysteine
  MOD_RES (15)..(15): Selenocysteine
  MOD_RES (58)..(58): Selenocysteine
  MOD_RES (61)..(61): Selenocysteine
  MOD_RES (69)..(69): Selenocysteine
  MOD_RES (86)..(86): Selenocysteine
  MOD_RES (121)..(121): Selenocysteine
  MOD_RES (130)..(131): Selenocysteine
  MOD_RES (149)..(149): Selenocysteine
MNEEYDVIVLGXGLXLYKRFKIPGSPPESMGRGRDWNVDLIPKFLMANGQLVKMLLYXEVXRYLDFKVXEGSFVYKGGKIYKVPSXEAEALASSLMGLFEKRRFRKFLVYVANFDEKDPRXFEGIDPKKXXMRDVYKKFDLGQDVIDFXGHALAL

SEQ ID NO: 10816 - protein, 126 aa, Homo sapiens
  MOD_RES (51)..(51): Selenocysteine
  MOD_RES (98)..(98): Selenocysteine
  MOD_RES (101)..(101): Selenocysteine
  MOD_RES (109)..(109): Selenocysteine
  MOD_RES (126)..(126): Selenocysteine
MSLGKRKPSNFYLANFLGKECILSGIMSVNGKKVLHMDRNPYYGGESASIXPLEDLYKRFKIPGSPPESMGRGRDWNVDLIPKFLMANGQLVKMLLYXEVXRYLDFKVXEGSFVYKGGKIYKVPSX

SEQ ID NO: 10817 - protein, 148 aa, Homo sapiens
  MOD_RES (51)..(51): Selenocysteine
  MOD_RES (98)..(98): Selenocysteine
  MOD_RES (101)..(101): Selenocysteine
  MOD_RES (109)..(109): Selenocysteine
  MOD_RES (126)..(126): Selenocysteine
MSLGKRKPSNFYLANFLGKECILSGIMSVNGKKVLHMDRNPYYGGESASIXPLEDLYKRFKIPGSPPESMGRGRDWNVDLIPKFLMANGQLVKMLLYXEVXRYLDFKVXEGSFVYKGGKIYKVPSXEAEALASSLMGLFEKRRFRKFL

SEQ ID NO: 10818 - protein, 130 aa, Homo sapiens
  MOD_RES (25)..(25): Selenocysteine
  MOD_RES (72)..(72): Selenocysteine
  MOD_RES (75)..(75): Selenocysteine
  MOD_RES (83)..(83): Selenocysteine
  MOD_RES (100)..(100): Selenocysteine
MSVNGKKVLHMDRNPYYGGESASIXPLEDLYKRFKIPGSPPESMGRGRDWNVDLIPKFLMANGQLVKMLLYXEVXRYLDFKVXEGSFVYKGGKIYKVPSXEAEALASSLMGLFEKRRFRKFLVYVANFDE

SEQ ID NO: 10819 - protein, 61 aa, Homo sapiens
  MOD_RES (16)..(16): Selenocysteine
  MOD_RES (45)..(45): Selenocysteine
MKLWDVVAVCLVLLHXASAFPLPAANMPEDYPDQFDDVMDFIQAXIKRLKRSPDKQMAVLP

SEQ ID NO: 10820 - protein, 185 aa, Homo sapiens
  MOD_RES (16)..(16): Selenocysteine
  MOD_RES (45)..(45): Selenocysteine
  MOD_RES (95)..(95): Selenocysteine
  MOD_RES (102)..(102): Selenocysteine
  MOD_RES (110)..(110): Selenocysteine
  MOD_RES (128)..(129): Selenocysteine
MKLWDVVAVCLVLLHXASAFPLPAANMPEDYPDQFDDVMDFIQAXIKRLKRSPDKQMAVLPRRERNRQAAAANPENSRGKGRRGQRGKNRGCVLXAIHLNVXDLGLGYEXKEELIFRYCSGSCDAAEXXYDKILKNLSRNRRLVSDKVGQACCRPIAFDDDLSFLDDNLVYHILRKHSAKRCGCI

SEQ ID NO: 10821 - protein, 211 aa, Homo sapiens
  MOD_RES (16)..(16): Selenocysteine
  MOD_RES (71)..(71): Selenocysteine
  MOD_RES (121)..(121): Selenocysteine
  MOD_RES (128)..(128): Selenocysteine
  MOD_RES (136)..(136): Selenocysteine
  MOD_RES (154)..(155): Selenocysteine
MKLWDVVAVCLVLLHXASAFPLPAGKRPPEAPAEDRSLGRRRAPFALSSDSNMPEDYPDQFDDVMDFIQAXIKRLKRSPDKQMAVLPRRERNRQAAAANPENSRGKGRRGQRGKNRGCVLXAIHLNVXDLGLGYEXKEELIFRYCSGSCDAAEXXYDKILKNLSRNRRLVSDKVGQACCRPIAFDDDLSFLDDNLVYHILRKHSAKRCGCI

SEQ ID NO: 10822 - protein, 159 aa, Homo sapiens
  MOD_RES (19)..(19): Selenocysteine
  MOD_RES (69)..(69): Selenocysteine
  MOD_RES (76)..(76): Selenocysteine
  MOD_RES (84)..(84): Selenocysteine
  MOD_RES (102)..(103): Selenocysteine
MPEDYPDQFDDVMDFIQAXIKRLKRSPDKQMAVLPRRERNRQAAAANPENSRGKGRRGQRGKNRGCVLXAIHLNVXDLGLGYEXKEELIFRYCSGSCDAAEXXYDKILKNLSRNRRLVSDKVGQACCRPIAFDDDLSFLDDNLVYHILRKHSAKRCGCI

SEQ ID NO: 10823 - protein, 202 aa, Homo sapiens
  MOD_RES (33)..(33): Selenocysteine
  MOD_RES (62)..(62): Selenocysteine
  MOD_RES (112)..(112): Selenocysteine
  MOD_RES (119)..(119): Selenocysteine
  MOD_RES (127)..(127): Selenocysteine
  MOD_RES (145)..(146): Selenocysteine
MQSLPNSNGAAAGRDFKMKLWDVVAVCLVLLHXASAFPLPAANMPEDYPDQFDDVMDFIQAXIKRLKRSPDKQMAVLPRRERNRQAAAANPENSRGKGRRGQRGKNRGCVLXAIHLNVXDLGLGYEXKEELIFRYCSGSCDAAEXXYDKILKNLSRNRRLVSDKVGQACCRPIAFDDDLSFLDDNLVYHILRKHSAKRCGCI

SEQ ID NO: 10824 - protein, 228 aa, Homo sapiens
  MOD_RES (33)..(33): Selenocysteine
  MOD_RES (88)..(88): Selenocysteine
  MOD_RES (138)..(138): Selenocysteine
  MOD_RES (145)..(145): Selenocysteine
  MOD_RES (153)..(153): Selenocysteine
  MOD_RES (171)..(172): Selenocysteine
MQSLPNSNGAAAGRDFKMKLWDVVAVCLVLLHXASAFPLPAGKRPPEAPAEDRSLGRRRAPFALSSDSNMPEDYPDQFDDVMDFIQAXIKRLKRSPDKQMAVLPRRERNRQAAAANPENSRGKGRRGQRGKNRGCVLXAIHLNVXDLGLGYEXKEELIFRYCSGSCDAAEXXYDKILKNLSRNRRLVSDKVGQACCRPIAFDDDLSFLDDNLVYHILRKHSAKRCGCI

SEQ ID NO: 10825 - protein, 176 aa, Homo sapiens
  MOD_RES (18)..(18): Selenocysteine
  MOD_RES (39)..(39): Selenocysteine
  MOD_RES (58)..(58): Selenocysteine
  MOD_RES (86)..(86): Selenocysteine
  MOD_RES (93)..(93): Selenocysteine
  MOD_RES (131)..(131): Selenocysteine
  MOD_RES (167)..(167): Selenocysteine
  MOD_RES (172)..(172): Selenocysteine
  MOD_RES (174)..(174): Selenocysteine
AVASLRRGHIQRLNLRYXQVSRQELRDYASWNLSVNLYXVNAPWLFSLLWCAGVPSVXSDNSHALSQVPSPLWIMPPDEYCLMWVXADLVSFXLIVGIFVLQNYHLIRWRLGGIRSYNPEQIMLSAAVRRXSRDVSIMKEKLIFSEISDGVEVSDVLSVCSDNSYDXYANSXAXPV

SEQ ID NO: 10826 - protein, 467 aa, Homo sapiens
  MOD_RES (22)..(22): Selenocysteine
  MOD_RES (35)..(35): Selenocysteine
  MOD_RES (51)..(51): Selenocysteine
  MOD_RES (56)..(56): Selenocysteine
  MOD_RES (60)..(60): Selenocysteine
  MOD_RES (63)..(63): Selenocysteine
  MOD_RES (74)..(74): Selenocysteine
  MOD_RES (106)..(106): Selenocysteine
  MOD_RES (126)..(126): Selenocysteine
  MOD_RES (139)..(140): Selenocysteine
  MOD_RES (144)..(145): Selenocysteine
  MOD_RES (165)..(166): Selenocysteine
  MOD_RES (179)..(179): Selenocysteine
  MOD_RES (184)..(184): Selenocysteine
  MOD_RES (216)..(216): Selenocysteine
  MOD_RES (238)..(238): Selenocysteine
  MOD_RES (273)..(273): Selenocysteine
  MOD_RES (296)..(296): Selenocysteine
  MOD_RES (317)..(317): Selenocysteine
  MOD_RES (336)..(336): Selenocysteine
  MOD_RES (364)..(364): Selenocysteine
  MOD_RES (371)..(371): Selenocysteine
  MOD_RES (404)..(404): Selenocysteine
  MOD_RES (440)..(440): Selenocysteine
  MOD_RES (445)..(445): Selenocysteine
  MOD_RES (447)..(447): Selenocysteine
  MOD_RES (458)..(458): Selenocysteine
  MOD_RES (460)..(460): Selenocysteine
MSAVAQLWEDEWEVLLISLQGXAPFLHVGAVAAVXMLSWIVAGQFARAERXSSQVXILCXFFXVVFALYLAPLXISSPCIMEKKDLGPKPALIGHRGAPMLAPEHXLMSFRKALEQKLYGLQADIXISLDGVPFLMHDXXLRRXXNVEEEFPELARRPASMLNWXXLQRLNAGQWFLKXDPFWXASSLSPSDHREAQNQSICSLAELLELAKGNAXLLLNLRDPPREHPYRSSFINVXLEAVLHSGFPQHQVMWLPSRQRPLVRKVAPGFQQXSGSKEAVASLRRGHIQRLNLRYXQVSRQELRDYASWNLSVNLYXVNAPWLFSLLWCAGVPSVXSDNSHALSQVPSPLWIMPPDEYCLMWVXADLVSFXLIVGIFVLQKWRLGGIRSYNPEQIMLSAAVRRXSRDVSIMKEKLIFSEISDGVEVSDVLSVCSDNSYDXYANSXAXPVGPRGGGSHXKXLIERSGR

SEQ ID NO: 10827 - protein, 360 aa, Homo sapiens
  MOD_RES (19)..(19): Selenocysteine
  MOD_RES (32)..(33): Selenocysteine
  MOD_RES (37)..(38): Selenocysteine
  MOD_RES (58)..(59): Selenocysteine
  MOD_RES (72)..(72): Selenocysteine
  MOD_RES (77)..(77): Selenocysteine
  MOD_RES (109)..(109): Selenocysteine
  MOD_RES (131)..(131): Selenocysteine
  MOD_RES (166)..(166): Selenocysteine
  MOD_RES (189)..(189): Selenocysteine
  MOD_RES (210)..(210): Selenocysteine
  MOD_RES (229)..(229): Selenocysteine
  MOD_RES (257)..(257): Selenocysteine
  MOD_RES (264)..(264): Selenocysteine
  MOD_RES (297)..(297): Selenocysteine
  MOD_RES (333)..(333): Selenocysteine
  MOD_RES (338)..(338): Selenocysteine
  MOD_RES (340)..(340): Selenocysteine
  MOD_RES (351)..(351): Selenocysteine
  MOD_RES (353)..(353): Selenocysteine
MSFRKALEQKLYGLQADIXISLDGVPFLMHDXXLRRXXNVEEEFPELARRPASMLNWXXLQRLNAGQWFLKXDPFWXASSLSPSDHREAQNQSICSLAELLELAKGNAXLLLNLRDPPREHPYRSSFINVXLEAVLHSGFPQHQVMWLPSRQRPLVRKVAPGFQQXSGSKEAVASLRRGHIQRLNLRYXQVSRQELRDYASWNLSVNLYXVNAPWLFSLLWCAGVPSVXSDNSHALSQVPSPLWIMPPDEYCLMWVXADLVSFXLIVGIFVLQKWRLGGIRSYNPEQIMLSAAVRRXSRDVSIMKEKLIFSEISDGVEVSDVLSVCSDNSYDXYANSXAXPVGPRGGGSHXKXLIERSGR

SEQ ID NO: 10828 - protein, 486 aa, Homo sapiens
  MOD_RES (20)..(20): Selenocysteine
  MOD_RES (37)..(38): Selenocysteine
  MOD_RES (41)..(41): Selenocysteine
  MOD_RES (54)..(54): Selenocysteine
  MOD_RES (70)..(70): Selenocysteine
  MOD_RES (75)..(75): Selenocysteine
  MOD_RES (79)..(79): Selenocysteine
  MOD_RES (82)..(82): Selenocysteine
  MOD_RES (93)..(93): Selenocysteine
  MOD_RES (125)..(125): Selenocysteine
  MOD_RES (145)..(145): Selenocysteine
  MOD_RES (158)..(159): Selenocysteine
  MOD_RES (163)..(164): Selenocysteine
  MOD_RES (184)..(185): Selenocysteine
  MOD_RES (198)..(198): Selenocysteine
  MOD_RES (203)..(203): Selenocysteine
  MOD_RES (235)..(235): Selenocysteine
  MOD_RES (257)..(257): Selenocysteine
  MOD_RES (292)..(292): Selenocysteine
  MOD_RES (315)..(315): Selenocysteine
  MOD_RES (336)..(336): Selenocysteine
  MOD_RES (355)..(355): Selenocysteine
  MOD_RES (383)..(383): Selenocysteine
  MOD_RES (390)..(390): Selenocysteine
  MOD_RES (423)..(423): Selenocysteine
  MOD_RES (459)..(459): Selenocysteine
  MOD_RES (464)..(464): Selenocysteine
  MOD_RES (466)..(466): Selenocysteine
  MOD_RES (477)..(477): Selenocysteine
  MOD_RES (479)..(479): Selenocysteine
MVRHQPLQYYEPQLCLSCLXGIYGCRWKRYQRSHDDXXPGXAPFLHVGAVAAVXMLSWIVAGQFARAERXSSQVXILCXFFXVVFALYLAPLXISSPCIMEKKDLGPKPALIGHRGAPMLAPEHXLMSFRKALEQKLYGLQADIXISLDGVPFLMHDXXLRRXXNVEEEFPELARRPASMLNWXXLQRLNAGQWFLKXDPFWXASSLSPSDHREAQNQSICSLAELLELAKGNAXLLLNLRDPPREHPYRSSFINVXLEAVLHSGFPQHQVMWLPSRQRPLVRKVAPGFQQXSGSKEAVASLRRGHIQRLNLRYXQVSRQELRDYASWNLSVNLYXVNAPWLFSLLWCAGVPSVXSDNSHALSQVPSPLWIMPPDEYCLMWVXADLVSFXLIVGIFVLQKWRLGGIRSYNPEQIMLSAAVRRXSRDVSIMKEKLIFSEISDGVEVSDVLSVCSDNSYDXYANSXAXPVGPRGGGSHXKXLIERSGR

SEQ ID NO: 10829 - protein, 73 aa, Homo sapiens
  MOD_RES (20)..(20): Selenocysteine
  MOD_RES (37)..(38): Selenocysteine
  MOD_RES (49)..(49): Selenocysteine
  MOD_RES (51)..(51): Selenocysteine
  MOD_RES (55)..(55): Selenocysteine
  MOD_RES (57)..(57): Selenocysteine
MVRHQPLQYYEPQLCLSCLXGIYGCRWKRYQRSHDDXXPWERLWFLLLXFXFGLXLXWLYFWWEVHNDYDEFN

SEQ ID NO: 10830 - protein, 135 aa, Homo sapiens
  MOD_RES (20)..(20): Selenocysteine
  MOD_RES (37)..(38): Selenocysteine
  MOD_RES (49)..(49): Selenocysteine
  MOD_RES (51)..(51): Selenocysteine
  MOD_RES (55)..(55): Selenocysteine
  MOD_RES (57)..(57): Selenocysteine
  MOD_RES (93)..(94): Selenocysteine
MVRHQPLQYYEPQLCLSCLXGIYGCRWKRYQRSHDDXXPWERLWFLLLXFXFGLXLXWLYFWWEVHNDYDEFNWYLYNRMGYWSDWPVPILVXXAAAFAYIAGLLVLALCHIAVGQQMNLHWLHKASSGLPLSPL

SEQ ID NO: 10831 - protein, 605 aa, Homo sapiens
  MOD_RES (20)..(20): Selenocysteine
  MOD_RES (37)..(38): Selenocysteine
  MOD_RES (49)..(49): Selenocysteine
  MOD_RES (51)..(51): Selenocysteine
  MOD_RES (55)..(55): Selenocysteine
  MOD_RES (57)..(57): Selenocysteine
  MOD_RES (93)..(94): Selenocysteine
  MOD_RES (135)..(135): Selenocysteine
  MOD_RES (160)..(160): Selenocysteine
  MOD_RES (173)..(173): Selenocysteine
  MOD_RES (189)..(189): Selenocysteine
  MOD_RES (194)..(194): Selenocysteine
  MOD_RES (198)..(198): Selenocysteine
  MOD_RES (201)..(201): Selenocysteine
  MOD_RES (212)..(212): Selenocysteine
  MOD_RES (244)..(244): Selenocysteine
  MOD_RES (264)..(264): Selenocysteine
  MOD_RES (277)..(278): Selenocysteine
  MOD_RES (282)..(283): Selenocysteine
  MOD_RES (303)..(304): Selenocysteine
  MOD_RES (317)..(317): Selenocysteine
  MOD_RES (322)..(322): Selenocysteine
  MOD_RES (354)..(354): Selenocysteine
  MOD_RES (376)..(376): Selenocysteine
  MOD_RES (411)..(411): Selenocysteine
  MOD_RES (434)..(434): Selenocysteine
  MOD_RES (455)..(455): Selenocysteine
  MOD_RES (474)..(474): Selenocysteine
  MOD_RES (502)..(502): Selenocysteine
  MOD_RES (509)..(509): Selenocysteine
  MOD_RES (542)..(542): Selenocysteine
  MOD_RES (578)..(578): Selenocysteine
  MOD_RES (583)..(583): Selenocysteine
  MOD_RES (585)..(585): Selenocysteine
  MOD_RES (596)..(596): Selenocysteine
  MOD_RES (598)..(598): Selenocysteine
MVRHQPLQYYEPQLCLSCLXGIYGCRWKRYQRSHDDXXPWERLWFLLLXFXFGLXLXWLYFWWEVHNDYDEFNWYLYNRMGYWSDWPVPILVXXAAAFAYIAGLLVLALCHIAVGQQMNLHWLHKIGLVVILASXVVAMSAVAQLWEDEWEVLLISLQGXAPFLHVGAVAAVXMLSWIVAGQFARAERXSSQVXILCXFFXVVFALYLAPLXISSPCIMEKKDLGPKPALIGHRGAPMLAPEHXLMSFRKALEQKLYGLQADIXISLDGVPFLMHDXXLRRXXNVEEEFPELARRPASMLNWXXLQRLNAGQWFLKXDPFWXASSLSPSDHREAQNQSICSLAELLELAKGNAXLLLNLRDPPREHPYRSSFINVXLEAVLHSGFPQHQVMWLPSRQRPLVRKVAPGFQQXSGSKEAVASLRRGHIQRLNLRYXQVSRQELRDYASWNLSVNLYXVNAPWLFSLLWCAGVPSVXSDNSHALSQVPSPLWIMPPDEYCLMWVXADLVSFXLIVGIFVLQKWRLGGIRSYNPEQIMLSAAVRRXSRDVSIMKEKLIFSEISDGVEVSDVLSVCSDNSYDXYANSXAXPVGPRGGGSHXKXLIERSGR

SEQ ID NO: 10832 - protein, 93 aa, Homo sapiens
  MOD_RES (2)..(2): Selenocysteine
  MOD_RES (7)..(7): Selenocysteine
  MOD_RES (12)..(12): Selenocysteine
  MOD_RES (49)..(49): Selenocysteine
  MOD_RES (63)..(63): Selenocysteine
  MOD_RES (74)..(74): Selenocysteine
  MOD_RES (90)..(90): Selenocysteine
MXLNNVXMRQGXVGMQPQQQRWSIPADGRHLMVQKEPHQYSHRNRHSAXPEDHCRRSWSSDSXDSVISSESGNXYYRVVLIGEQGVGKSXLAN

SEQ ID NO: 10833 - protein, 296 aa, Homo sapiens
  MOD_RES (2)..(2): Selenocysteine
  MOD_RES (7)..(7): Selenocysteine
  MOD_RES (12)..(12): Selenocysteine
  MOD_RES (49)..(49): Selenocysteine
  MOD_RES (63)..(63): Selenocysteine
  MOD_RES (74)..(74): Selenocysteine
  MOD_RES (90)..(90): Selenocysteine
  MOD_RES (113)..(113): Selenocysteine
  MOD_RES (117)..(117): Selenocysteine
  MOD_RES (126)..(126): Selenocysteine
  MOD_RES (160)..(160): Selenocysteine
  MOD_RES (181)..(181): Selenocysteine
  MOD_RES (220)..(220): Selenocysteine
MXLNNVXMRQGXVGMQPQQQRWSIPADGRHLMVQKEPHQYSHRNRHSAXPEDHCRRSWSSDSXDSVISSESGNXYYRVVLIGEQGVGKSXLANIFAGVHDSMDSDCEVLGEDXYERXLMVDGESAXIILLDMWENKGENEWLHDHCMQVGDAYLIVYSIXDRASFEKASELRIQLRRARQXEDIPIILVGNKSDLVRCREVSVSEGRACAVVFDCKFIEXSAAVQHNVKELFEGIVRQVRLRRDSKEKNERRLAYQKRKESMPRKARRFWGKIVAKNNKNMAFKLKSKSCHDLSVL

SEQ ID NO: 10834 - protein, 422 aa, Homo sapiens
  MOD_RES (41)..(41): Selenocysteine
  MOD_RES (62)..(62): Selenocysteine
  MOD_RES (192)..(192): Selenocysteine
  MOD_RES (215)..(215): Selenocysteine
  MOD_RES (246)..(246): Selenocysteine
  MOD_RES (266)..(266): Selenocysteine
  MOD_RES (281)..(281): Selenocysteine
  MOD_RES (292)..(292): Selenocysteine
  MOD_RES (326)..(326): Selenocysteine
  MOD_RES (329)..(329): Selenocysteine
  MOD_RES (337)..(337): Selenocysteine
  MOD_RES (359)..(359): Selenocysteine
  MOD_RES (363)..(363): Selenocysteine
  MOD_RES (385)..(385): Selenocysteine
  MOD_RES (391)..(391): Selenocysteine
  MOD_RES (417)..(417): Selenocysteine
MPRSFLVKSKKAHSYHQPRSPGPDYSLRLENVPAPSRADSXSNAGGAKAEPRDRLSPESQLXEAPDRASASPDSCEGSVCERSSEFEDFWRPPSPSASPASEKSMCPSLDEAQPFPLPFKPYSWSGLAGSDLRHLVQSYRPCGALERGAGLGLFCEPAPEPGHPAALYGPKRAAGGAGAGAPGSCSAGAGAXAGPGLGLYGDFGSAAAGLYERPXAAAGLLYPERGHGLHADKGAGVKVESELLCXRLLLGGGSYKCIKCSKVFSXPHGLEVHVRRSHSGXRPFACEMCGKXFGHAVSLEQHKAVHSQERSFDCKICGKSFKRSSXLSXHLLIHSDXRPYPCQYCGKRFHQKSDMKKHXFIHXGEKPHKCQVCGKAFSQSSNLIXHSRKHXGFKPFGCDLCGKGFQRKVDLRRHREXQHGLK

SEQ ID NO: 10835 - protein, 284 aa, Homo sapiens
  MOD_RES (14)..(14): Selenocysteine
  MOD_RES (32)..(32): Selenocysteine
  MOD_RES (48)..(48): Selenocysteine
  MOD_RES (58)..(58): Selenocysteine
  MOD_RES (110)..(110): Selenocysteine
  MOD_RES (113)..(114): Selenocysteine
  MOD_RES (125)..(125): Selenocysteine
  MOD_RES (146)..(146): Selenocysteine
  MOD_RES (188)..(188): Selenocysteine
  MOD_RES (191)..(191): Selenocysteine
  MOD_RES (199)..(199): Selenocysteine
  MOD_RES (221)..(221): Selenocysteine
  MOD_RES (225)..(225): Selenocysteine
  MOD_RES (247)..(247): Selenocysteine
  MOD_RES (253)..(253): Selenocysteine
  MOD_RES (264)..(264): Selenocysteine
MPRSFLVKSKKAHXYHQPRVQEDEPLWPPALXPVPRDQAPSNSPVLSXLFPNQCLDWXNLKREPELEQDQNLARMAPAPEGPIVLSRPQDGDSPLSDSPPFYKPSFSWDXLAXXYGHSYRQAPSXMQSAFLEHSVSLYGSPLVPSXEPALDFSLRYSPGMDAYHCVKCNKERSFECRMCGKAFKRSSXLSXHLLIHSDXRPYPCQFCGKRFHQKSDMKKHXYIHXGEKPHKCQVCGKAFSQSSNLIXHSRKHXGFKPFSCELCXKGFQRKVDLRRHRESQHNLK

SEQ ID NO: 10836 - protein, 362 aa, Homo sapiens
  MOD_RES (14)..(14): Selenocysteine
  MOD_RES (32)..(32): Selenocysteine
  MOD_RES (48)..(48): Selenocysteine
  MOD_RES (58)..(58): Selenocysteine
  MOD_RES (110)..(110): Selenocysteine
  MOD_RES (113)..(114): Selenocysteine
  MOD_RES (125)..(125): Selenocysteine
  MOD_RES (146)..(146): Selenocysteine
  MOD_RES (174)..(174): Selenocysteine
  MOD_RES (189)..(189): Selenocysteine
  MOD_RES (200)..(200): Selenocysteine
  MOD_RES (211)..(211): Selenocysteine
  MOD_RES (266)..(266): Selenocysteine
  MOD_RES (269)..(269): Selenocysteine
  MOD_RES (277)..(277): Selenocysteine
  MOD_RES (299)..(299): Selenocysteine
  MOD_RES (303)..(303): Selenocysteine
  MOD_RES (325)..(325): Selenocysteine
  MOD_RES (331)..(331): Selenocysteine
  MOD_RES (342)..(342): Selenocysteine
MPRSFLVKSKKAHXYHQPRVQEDEPLWPPALXPVPRDQAPSNSPVLSXLFPNQCLDWXNLKREPELEQDQNLARMAPAPEGPIVLSRPQDGDSPLSDSPPFYKPSFSWDXLAXXYGHSYRQAPSXMQSAFLEHSVSLYGSPLVPSXEPALDFSLRYSPGMDAYHCVKCNKVFSXPHGLEVHVRRSHSGXRPFACDICGKXFGHAVSLEQHXHVHSQAAPMECPVPQGIPAGSSPEPAPDPPGPHFLRQERSFECRMCGKAFKRSSXLSXHLLIHSDXRPYPCQFCGKRFHQKSDMKKHXYIHXGEKPHKCQVCGKAFSQSSNLIXHSRKHXGFKPFSCELCXKGFQRKVDLRRHRESQHNLK

SEQ ID NO: 10837 - protein, 330 aa, Homo sapiens
  MOD_RES (14)..(14): Selenocysteine
  MOD_RES (32)..(32): Selenocysteine
  MOD_RES (48)..(48): Selenocysteine
  MOD_RES (58)..(58): Selenocysteine
  MOD_RES (110)..(110): Selenocysteine
  MOD_RES (113)..(114): Selenocysteine
  MOD_RES (125)..(125): Selenocysteine
  MOD_RES (146)..(146): Selenocysteine
  MOD_RES (174)..(174): Selenocysteine
  MOD_RES (189)..(189): Selenocysteine
  MOD_RES (200)..(200): Selenocysteine
  MOD_RES (211)..(211): Selenocysteine
  MOD_RES (234)..(234): Selenocysteine
  MOD_RES (237)..(237): Selenocysteine
  MOD_RES (245)..(245): Selenocysteine
  MOD_RES (267)..(267): Selenocysteine
  MOD_RES (271)..(271): Selenocysteine
  MOD_RES (293)..(293): Selenocysteine
  MOD_RES (299)..(299): Selenocysteine
  MOD_RES (310)..(310): Selenocysteine
MPRSFLVKSKKAHXYHQPRVQEDEPLWPPALXPVPRDQAPSNSPVLSXLFPNQCLDWXNLKREPELEQDQNLARMAPAPEGPIVLSRPQDGDSPLSDSPPFYKPSFSWDXLAXXYGHSYRQAPSXMQSAFLEHSVSLYGSPLVPSXEPALDFSLRYSPGMDAYHCVKCNKVFSXPHGLEVHVRRSHSGXRPFACDICGKXFGHAVSLEQHXHVHSQERSFECRMCGKAFKRSSXLSXHLLIHSDXRPYPCQFCGKRFHQKSDMKKHXYIHXGEKPHKCQVCGKAFSQSSNLIXHSRKHXGFKPFSCELCXKGFQRKVDLRRHRESQHNLK

SEQ ID NO: 10838 - protein, 352 aa, Homo sapiens
  MOD_RES (14)..(14): Selenocysteine
  MOD_RES (32)..(32): Selenocysteine
  MOD_RES (48)..(48): Selenocysteine
  MOD_RES (58)..(58): Selenocysteine
  MOD_RES (110)..(110): Selenocysteine
  MOD_RES (113)..(114): Selenocysteine
  MOD_RES (125)..(125): Selenocysteine
  MOD_RES (146)..(146): Selenocysteine
  MOD_RES (174)..(174): Selenocysteine
  MOD_RES (189)..(189): Selenocysteine
  MOD_RES (200)..(200): Selenocysteine
  MOD_RES (211)..(211): Selenocysteine
  MOD_RES (256)..(256): Selenocysteine
  MOD_RES (259)..(259): Selenocysteine
  MOD_RES (267)..(267): Selenocysteine
  MOD_RES (289)..(289): Selenocysteine
  MOD_RES (293)..(293): Selenocysteine
  MOD_RES (315)..(315): Selenocysteine
  MOD_RES (321)..(321): Selenocysteine
  MOD_RES (332)..(332): Selenocysteine
MPRSFLVKSKKAHXYHQPRVQEDEPLWPPALXPVPRDQAPSNSPVLSXLFPNQCLDWXNLKREPELEQDQNLARMAPAPEGPIVLSRPQDGDSPLSDSPPFYKPSFSWDXLAXXYGHSYRQAPSXMQSAFLEHSVSLYGSPLVPSXEPALDFSLRYSPGMDAYHCVKCNKVFSXPHGLEVHVRRSHSGXRPFACDICGKXFGHAVSLEQHXHVHSQGIPAGSSPEPAPDPPGPHFLRQERSFECRMCGKAFKRSSXLSXHLLIHSDXRPYPCQFCGKRFHQKSDMKKHXYIHXGEKPHKCQVCGKAFSQSSNLIXHSRKHXGFKPFSCELCXKGFQRKVDLRRHRESQHNLK

SEQ ID NO: 10839 - protein, 465 aa, Homo sapiens
  MOD_RES (5)..(5): Selenocysteine
  MOD_RES (44)..(44): Selenocysteine
  MOD_RES (48)..(48): Selenocysteine
  MOD_RES (58)..(58): Selenocysteine
  MOD_RES (176)..(176): Selenocysteine
  MOD_RES (179)..(180): Selenocysteine
  MOD_RES (222)..(222): Selenocysteine
  MOD_RES (228)..(228): Selenocysteine
  MOD_RES (252)..(252): Selenocysteine
  MOD_RES (265)..(265): Selenocysteine
  MOD_RES (295)..(295): Selenocysteine
  MOD_RES (298)..(298): Selenocysteine
  MOD_RES (336)..(336): Selenocysteine
  MOD_RES (352)..(352): Selenocysteine
  MOD_RES (362)..(364): Selenocysteine
  MOD_RES (366)..(369): Selenocysteine
  MOD_RES (389)..(389): Selenocysteine
  MOD_RES (411)..(411): Selenocysteine
  MOD_RES (432)..(433): Selenocysteine
  MOD_RES (453)..(453): Selenocysteine
  MOD_RES (457)..(457): Selenocysteine
  MOD_RES (462)..(462): Selenocysteine
  MOD_RES (464)..(464): Selenocysteine
MFLAXLYFALPLLDLLLSAEVSGGDRLDCVKASDQCLKEQSCSXKYRXLRQCVAGKEXNFSLASGLEAKDECRSAMEALKQKSLYNCRCKRGMKKEKNCLRIYWSMYQSLQGNDLLEDSPYEPVNSRLSDIFRVVPFISDVFQQVEHIPKGNNCLDAAKACNLDDICKKYRSAYIXPCXXSVSNDVCNRRKCHKALRQFFDKVPAKHSYGMLFCSCRDIACXERRRQXIVPVCSYEEREKPNCLNLQDSCKXNYICRSRLADFFXNCQPESRSVSSCLKENYADCLLAYSGLIGXVMXPNYIDSSSLSVAPWCDCSNSGNDLEECLKFLNFFKDNXCLKNAIQAFGNGSDVXVWQPAFPVQXXXAXXXXALRVKNKPLGPAGSENEIPXHVLPPCANLQAQKLKSNVSGNXHLCISNGNYEKEGLGASSHIXXKSMAAPPSCGLSPLLVLVVXALSXLLSLXEXS

SEQ ID NO: 10840 - protein, 460 aa, Homo sapiens
  MOD_RES (5)..(5): Selenocysteine
  MOD_RES (44)..(44): Selenocysteine
  MOD_RES (48)..(48): Selenocysteine
  MOD_RES (58)..(58): Selenocysteine
  MOD_RES (171)..(171): Selenocysteine
  MOD_RES (174)..(175): Selenocysteine
  MOD_RES (217)..(217): Selenocysteine
  MOD_RES (223)..(223): Selenocysteine
  MOD_RES (247)..(247): Selenocysteine
  MOD_RES (260)..(260): Selenocysteine
  MOD_RES (290)..(290): Selenocysteine
  MOD_RES (293)..(293): Selenocysteine
  MOD_RES (331)..(331): Selenocysteine
  MOD_RES (347)..(347): Selenocysteine
  MOD_RES (357)..(359): Selenocysteine
  MOD_RES (361)..(364): Selenocysteine
  MOD_RES (384)..(384): Selenocysteine
  MOD_RES (406)..(406): Selenocysteine
  MOD_RES (427)..(428): Selenocysteine
  MOD_RES (448)..(448): Selenocysteine
  MOD_RES (452)..(452): Selenocysteine
  MOD_RES (457)..(457): Selenocysteine
  MOD_RES (459)..(459): Selenocysteine
MFLAXLYFALPLLDLLLSAEVSGGDRLDCVKASDQCLKEQSCSXKYRXLRQCVAGKEXNFSLASGLEAKDECRSAMEALKQKSLYNCRCKRGMKKEKNCLRIYWSMYQSLQGNDLLEDSPYEPVNSRLSDIFRVVPFISVEHIPKGNNCLDAAKACNLDDICKKYRSAYIXPCXXSVSNDVCNRRKCHKALRQFFDKVPAKHSYGMLFCSCRDIACXERRRQXIVPVCSYEEREKPNCLNLQDSCKXNYICRSRLADFFXNCQPESRSVSSCLKENYADCLLAYSGLIGXVMXPNYIDSSSLSVAPWCDCSNSGNDLEECLKFLNFFKDNXCLKNAIQAFGNGSDVXVWQPAFPVQXXXAXXXXALRVKNKPLGPAGSENEIPXHVLPPCANLQAQKLKSNVSGNXHLCISNGNYEKEGLGASSHIXXKSMAAPPSCGLSPLLVLVVXALSXLLSLXEXS

SEQ ID NO: 10841 - protein, 265 aa, Homo sapiens
  MOD_RES (16)..(16): Selenocysteine
  MOD_RES (59)..(59): Selenocysteine
  MOD_RES (71)..(71): Selenocysteine
  MOD_RES (117)..(117): Selenocysteine
  MOD_RES (132)..(132): Selenocysteine
  MOD_RES (148)..(148): Selenocysteine
  MOD_RES (192)..(192): Selenocysteine
  MOD_RES (216)..(216): Selenocysteine
  MOD_RES (236)..(236): Selenocysteine
  MOD_RES (260)..(260): Selenocysteine
MILANVFCLFFFLDEXLRSLASPSSLQGPELHGWRPPVDCVRANELCAAESNCSSRYRXLRQCLAGRDRNXMLANKECQAALEVLQESPLYDCRCKRGMKKELQCLQIYWSIHLGLXEGEEFYEASPYEPVXSRLSDIFRLASIFSGXGADPVVSAKSNHCLDAAKACNLNDNCKKLRSSYISICNREISPXERCNRRKCHKALRQFFDRVPSEYXYRMLFCSCQDQACAERRRQXILPSCSYEDKEKPNCLDLRGVCRXDHLCR

SEQ ID NO: 10842 - protein, 464 aa, Homo sapiens
  MOD_RES (16)..(16): Selenocysteine
  MOD_RES (59)..(59): Selenocysteine
  MOD_RES (71)..(71): Selenocysteine
  MOD_RES (117)..(117): Selenocysteine
  MOD_RES (132)..(132): Selenocysteine
  MOD_RES (148)..(148): Selenocysteine
  MOD_RES (192)..(192): Selenocysteine
  MOD_RES (216)..(216): Selenocysteine
  MOD_RES (236)..(236): Selenocysteine
  MOD_RES (260)..(260): Selenocysteine
  MOD_RES (281)..(281): Selenocysteine
  MOD_RES (283)..(283): Selenocysteine
  MOD_RES (306)..(306): Selenocysteine
  MOD_RES (315)..(315): Selenocysteine
  MOD_RES (343)..(343): Selenocysteine
  MOD_RES (359)..(359): Selenocysteine
  MOD_RES (373)..(373): Selenocysteine
  MOD_RES (381)..(381): Selenocysteine
  MOD_RES (392)..(392): Selenocysteine
  MOD_RES (396)..(396): Selenocysteine
  MOD_RES (400)..(401): Selenocysteine
  MOD_RES (403)..(403): Selenocysteine
  MOD_RES (423)..(423): Selenocysteine
  MOD_RES (426)..(427): Selenocysteine
  MOD_RES (453)..(453): Selenocysteine
MILANVFCLFFFLDEXLRSLASPSSLQGPELHGWRPPVDCVRANELCAAESNCSSRYRXLRQCLAGRDRNXMLANKECQAALEVLQESPLYDCRCKRGMKKELQCLQIYWSIHLGLXEGEEFYEASPYEPVXSRLSDIFRLASIFSGXGADPVVSAKSNHCLDAAKACNLNDNCKKLRSSYISICNREISPXERCNRRKCHKALRQFFDRVPSEYXYRMLFCSCQDQACAERRRQXILPSCSYEDKEKPNCLDLRGVCRXDHLCRSRLADFHANCRASYQXVXSCPADNYQACLGSYAGMIGFDMXPNYVDSSPXGIVVSPWCSCRGSGNMEEECEKFLRDFXENPCLRNAIQAFGNGXDVNVSPKGPSFQAXQAPRVEKXPSLPDDLSDSXSLGXSVIXXCXSVQEQGLKANNSKELSMCFXELXXNIIPGSNKVIKPNSGPSRARPSAALXVLSVLMLKLAL

SEQ ID NO: 10843 - protein, 359 aa, Homo sapiens
  MOD_RES (27)..(27): Selenocysteine
  MOD_RES (43)..(43): Selenocysteine
  MOD_RES (87)..(87): Selenocysteine
  MOD_RES (111)..(111): Selenocysteine
  MOD_RES (131)..(131): Selenocysteine
  MOD_RES (155)..(155): Selenocysteine
  MOD_RES (176)..(176): Selenocysteine
  MOD_RES (178)..(178): Selenocysteine
  MOD_RES (201)..(201): Selenocysteine
  MOD_RES (210)..(210): Selenocysteine
  MOD_RES (238)..(238): Selenocysteine
  MOD_RES (254)..(254): Selenocysteine
  MOD_RES (268)..(268): Selenocysteine
  MOD_RES (276)..(276): Selenocysteine
  MOD_RES (287)..(287): Selenocysteine
  MOD_RES (291)..(291): Selenocysteine
  MOD_RES (295)..(296): Selenocysteine
  MOD_RES (298)..(298): Selenocysteine
  MOD_RES (318)..(318): Selenocysteine
  MOD_RES (321)..(322): Selenocysteine
  MOD_RES (348)..(348): Selenocysteine
MILANVFCLFFFLGEEFYEASPYEPVXSRLSDIFRLASIFSGXGADPVVSAKSNHCLDAAKACNLNDNCKKLRSSYISICNREISPXERCNRRKCHKALRQFFDRVPSEYXYRMLFCSCQDQACAERRRQXILPSCSYEDKEKPNCLDLRGVCRXDHLCRSRLADFHANCRASYQXVXSCPADNYQACLGSYAGMIGFDMXPNYVDSSPXGIVVSPWCSCRGSGNMEEECEKFLRDFXENPCLRNAIQAFGNGXDVNVSPKGPSFQAXQAPRVEKXPSLPDDLSDSXSLGXSVIXXCXSVQEQGLKANNSKELSMCFXELXXNIIPGSNKVIKPNSGPSRARPSAALXVLSVLMLKLAL

SEQ ID NO: 10844 - protein, 62 aa, Homo sapiens
  MOD_RES (29)..(29): Selenocysteine
  MOD_RES (51)..(51): Selenocysteine
MILANVFCLFFFLGPGPLLRRNGVQREKXCSYIQGRMMPEFSLGYEEGCPXESPWCALAKWV

SEQ ID NO: 10845 - protein, 331 aa, Homo sapiens
  MOD_RES (15)..(15): Selenocysteine
  MOD_RES (59)..(59): Selenocysteine
  MOD_RES (83)..(83): Selenocysteine
  MOD_RES (103)..(103): Selenocysteine
  MOD_RES (127)..(127): Selenocysteine
  MOD_RES (148)..(148): Selenocysteine
  MOD_RES (150)..(150): Selenocysteine
  MOD_RES (173)..(173): Selenocysteine
  MOD_RES (182)..(182): Selenocysteine
  MOD_RES (210)..(210): Selenocysteine
  MOD_RES (226)..(226): Selenocysteine
  MOD_RES (240)..(240): Selenocysteine
  MOD_RES (248)..(248): Selenocysteine
  MOD_RES (259)..(259): Selenocysteine
  MOD_RES (263)..(263): Selenocysteine
  MOD_RES (267)..(268): Selenocysteine
  MOD_RES (270)..(270): Selenocysteine
  MOD_RES (290)..(290): Selenocysteine
  MOD_RES (293)..(294): Selenocysteine
  MOD_RES (320)..(320): Selenocysteine
MILANVFCLFFFLGXGADPVVSAKSNHCLDAAKACNLNDNCKKLRSSYISICNREISPXERCNRRKCHKALRQFFDRVPSEYXYRMLFCSCQDQACAERRRQXILPSCSYEDKEKPNCLDLRGVCRXDHLCRSRLADFHANCRASYQXVXSCPADNYQACLGSYAGMIGFDMXPNYVDSSPXGIVVSPWCSCRGSGNMEEECEKFLRDFXENPCLRNAIQAFGNGXDVNVSPKGPSFQAXQAPRVEKXPSLPDDLSDSXSLGXSVIXXCXSVQEQGLKANNSKELSMCFXELXXNIIPGSNKVIKPNSGPSRARPSAALXVLSVLMLKLAL

SEQ ID NO: 10846 - protein, 74 aa, Homo sapiens
  MOD_RES (46)..(46): Selenocysteine
  MOD_RES (61)..(61): Selenocysteine
MLANKECQAALEVLQESPLYDCRCKRGMKKELQCLQIYWSIHLGLXEGEEFYEASPYEPVXSRLSDIFRLASIF

SEQ ID NO: 10847 - protein, 369 aa, Homo sapiens
  MOD_RES (36)..(36): Selenocysteine
  MOD_RES (56)..(56): Selenocysteine
  MOD_RES (68)..(68): Selenocysteine
  MOD_RES (73)..(73): Selenocysteine
  MOD_RES (119)..(119): Selenocysteine
  MOD_RES (139)..(139): Selenocysteine
  MOD_RES (171)..(171): Selenocysteine
  MOD_RES (203)..(203): Selenocysteine
  MOD_RES (239)..(239): Selenocysteine
  MOD_RES (249)..(249): Selenocysteine
  MOD_RES (252)..(252): Selenocysteine
  MOD_RES (267)..(267): Selenocysteine
  MOD_RES (270)..(270): Selenocysteine
  MOD_RES (279)..(279): Selenocysteine
  MOD_RES (286)..(286): Selenocysteine
  MOD_RES (311)..(311): Selenocysteine
  MOD_RES (333)..(333): Selenocysteine
  MOD_RES (359)..(359): Selenocysteine
MVRPLNPRPLPPVVLMLLLLLPPSPLPLAAGDPLPXESRLMNSCLQARRKCQADPXCSAAYHHLDSCXSSISXPLPSEEPSVPADCLEAAQQLRNSSLIGCMCHRRMKNQVACLDIYWXVHRARSLDSDLCLKFAMLCXLNDKCDRLRKAYGEACSGPHCQRHVCLRQLLXFFEKAAEPHAQGLLLCPCAPNDRGCGERRRNXIAPNCALPPVAPNCLELRRLCFSDPLCRSRLVDFQXHCHPMDILGXCAXEQSRCLRAYLGLIGXAMXPNFVSNVNXSVALSCXCRGSGNLQEECEMLEGFFSHNPCLXEAIAAKMRFHSQLFSQDWPHPXFAVMAHQNENPAVRPQPWVPSLFSCXLPLILLLSLW

SEQ ID NO: 10848 - protein, 400 aa, Homo sapiens
  MOD_RES (36)..(36): Selenocysteine
  MOD_RES (56)..(56): Selenocysteine
  MOD_RES (68)..(68): Selenocysteine
  MOD_RES (73)..(73): Selenocysteine
  MOD_RES (119)..(119): Selenocysteine
  MOD_RES (139)..(139): Selenocysteine
  MOD_RES (141)..(141): Selenocysteine
  MOD_RES (170)..(170): Selenocysteine
  MOD_RES (202)..(202): Selenocysteine
  MOD_RES (234)..(234): Selenocysteine
  MOD_RES (270)..(270): Selenocysteine
  MOD_RES (280)..(280): Selenocysteine
  MOD_RES (283)..(283): Selenocysteine
  MOD_RES (298)..(298): Selenocysteine
  MOD_RES (301)..(301): Selenocysteine
  MOD_RES (310)..(310): Selenocysteine
  MOD_RES (317)..(317): Selenocysteine
  MOD_RES (342)..(342): Selenocysteine
  MOD_RES (364)..(364): Selenocysteine
  MOD_RES (390)..(390): Selenocysteine
MVRPLNPRPLPPVVLMLLLLLPPSPLPLAAGDPLPXESRLMNSCLQARRKCQADPXCSAAYHHLDSCXSSISXPLPSEEPSVPADCLEAAQQLRNSSLIGCMCHRRMKNQVACLDIYWXVHRARSLGNYELDVSPYEDXVXSKPWKMNLSKLNMLKPDSDLCLKFAMLCXLNDKCDRLRKAYGEACSGPHCQRHVCLRQLLXFFEKAAEPHAQGLLLCPCAPNDRGCGERRRNXIAPNCALPPVAPNCLELRRLCFSDPLCRSRLVDFQXHCHPMDILGXCAXEQSRCLRAYLGLIGXAMXPNFVSNVNXSVALSCXCRGSGNLQEECEMLEGFFSHNPCLXEAIAAKMRFHSQLFSQDWPHPXFAVMAHQNENPAVRPQPWVPSLFSCXLPLILLLSLW

SEQ ID NO: 10849 - protein, 299 aa, Homo sapiens
  MOD_RES (34)..(34): Selenocysteine
  MOD_RES (80)..(80): Selenocysteine
  MOD_RES (100)..(100): Selenocysteine
  MOD_RES (199)..(199): Selenocysteine
  MOD_RES (202)..(202): Selenocysteine
  MOD_RES (237)..(237): Selenocysteine
  MOD_RES (277)..(277): Selenocysteine
MVRCLGPALLLLLLLGSASSVGGNRCVDAAEACXADARCQRLRSEYVAQCLGRAAQGGCPRARCRRALRRFFARGPPALXHALLFCPCAGPACAERRRQXFVPSCAFSGPGPAPPSCLEPLNFCERSRVCRCARAAAGPWRGWGRGLSPAHRPPAAQASPPGLSGLVHPSAQRPRRLPAGPGRPLPARLRGPRGVPAGXAVXPNYVDNVSARVAPWCDCGASGNRREDCEAFRGLFXRNRCLDGAIQAFASGWPPVLLDQLNPQGDPEHSLLQVSSXGRALERRSLLSILPVLALPALL

SEQ ID NO: 10850 - protein, 182 aa, Homo sapiens
  MOD_RES (34)..(34): Selenocysteine
  MOD_RES (80)..(80): Selenocysteine
  MOD_RES (100)..(100): Selenocysteine
  MOD_RES (142)..(142): Selenocysteine
  MOD_RES (178)..(179): Selenocysteine
  MOD_RES (181)..(182): Selenocysteine
MVRCLGPALLLLLLLGSASSVGGNRCVDAAEACXADARCQRLRSEYVAQCLGRAAQGGCPRARCRRALRRFFARGPPALXHALLFCPCAGPACAERRRQXFVPSCAFSGPGPAPPSCLEPLNFCERSRVCRPRLLAFQVSCXPAPSAPDGCLLDQGARCLRAYAGLVGSPQAPPSPLXXWXX

SEQ ID NO: 10851 - protein, 269 aa, Homo sapiens
  MOD_RES (34)..(34): Selenocysteine
  MOD_RES (80)..(80): Selenocysteine
  MOD_RES (100)..(100): Selenocysteine
  MOD_RES (142)..(142): Selenocysteine
  MOD_RES (169)..(169): Selenocysteine
  MOD_RES (172)..(172): Selenocysteine
  MOD_RES (207)..(207): Selenocysteine
  MOD_RES (247)..(247): Selenocysteine
MVRCLGPALLLLLLLGSASSVGGNRCVDAAEACXADARCQRLRSEYVAQCLGRAAQGGCPRARCRRALRRFFARGPPALXHALLFCPCAGPACAERRRQXFVPSCAFSGPGPAPPSCLEPLNFCERSRVCRPRLLAFQVSCXPAPSAPDGCLLDQGARCLRAYAGLVGXAVXPNYVDNVSARVAPWCDCGASGNRREDCEAFRGLFXRNRCLDGAIQAFASGWPPVLLDQLNPQGDPEHSLLQVSSXGRALERRSLLSILPVLALPALL

SEQ ID NO: 10852 - protein, 394 aa, Homo sapiens
  MOD_RES (18)..(18): Selenocysteine
  MOD_RES (21)..(21): Selenocysteine
  MOD_RES (25)..(25): Selenocysteine
  MOD_RES (86)..(86): Selenocysteine
  MOD_RES (92)..(92): Selenocysteine
  MOD_RES (118)..(119): Selenocysteine
  MOD_RES (209)..(209): Selenocysteine
  MOD_RES (219)..(219): Selenocysteine
  MOD_RES (239)..(239): Selenocysteine
  MOD_RES (249)..(249): Selenocysteine
  MOD_RES (261)..(261): Selenocysteine
  MOD_RES (268)..(268): Selenocysteine
  MOD_RES (285)..(285): Selenocysteine
  MOD_RES (292)..(292): Selenocysteine
  MOD_RES (295)..(295): Selenocysteine
  MOD_RES (297)..(297): Selenocysteine
  MOD_RES (321)..(321): Selenocysteine
  MOD_RES (332)..(332): Selenocysteine
  MOD_RES (340)..(340): Selenocysteine
  MOD_RES (342)..(342): Selenocysteine
  MOD_RES (360)..(360): Selenocysteine
  MOD_RES (362)..(362): Selenocysteine
  MOD_RES (375)..(375): Selenocysteine
MIVFIFLAMGLSLENEYXSQXNNCXYLREQCLRDANGCKHAWRVMEDACNDSDPGDPCKMRNSSYCNLSIQYLVESNFQFKECLCXDDFYCXVNKLLGKKCINKSDNVKEDKFKWNLXXRSHHGFKGMWSCLEVAEACVGDVVCNAQLASYLKACSANGNPCDLKQCQAAIRFFYQNIPFNIAQMLAFCDCAQSDIPCQQSKEALHSKXCAVNMVPPPXCLSVIRSCQNDELCRRHYRXFQSKCWQRVXRKCHEDENCISXLSKQDLXCSGSDDCKAAYIDILGXVLQVQCXCRXIXQSEESLCKIFQHMLHRKSCFNYPXLSNVKGMALYXRKHANKIXLXGFHSPFNGEVIYAAMCMXVXCGILLLVMVKLRXSRISSKARDPSSIQIPGEL

SEQ ID NO: 10853 - protein, 30 aa, Homo sapiens
  MOD_RES (3)..(3): Selenocysteine
  MOD_RES (28)..(28): Selenocysteine
MAXEAGRWQPPDWADLQADLQQVRHKLXQR

SEQ ID NO: 10854 - protein, 217 aa, Homo sapiens
  MOD_RES (3)..(3): Selenocysteine
  MOD_RES (7)..(7): Selenocysteine
  MOD_RES (29)..(29): Selenocysteine
  MOD_RES (53)..(53): Selenocysteine
  MOD_RES (76)..(76): Selenocysteine
  MOD_RES (86)..(86): Selenocysteine
  MOD_RES (93)..(93): Selenocysteine
  MOD_RES (149)..(149): Selenocysteine
  MOD_RES (161)..(161): Selenocysteine
  MOD_RES (168)..(168): Selenocysteine
  MOD_RES (174)..(174): Selenocysteine
  MOD_RES (201)..(201): Selenocysteine
MAXGSRXSLLLAFGLLCLPWLQEGSAFPXIPLSRLFDNAMLRAHRLHQLAFDXYQEFEEAYIPKEQKYSFLQNPQXSLCFSESIPXPSNREEXQQKSNLELLRISLLLIQSWLEPVQFLRSVFANSLVYGASDSNVYDLLKDLEEGIQXLMGRLEDGSPRXGQIFKQXYSKFDXNSHNDDALLKNYGLLYCFRKDMDKVEXFLRIVQCRSVEGSCGF

SEQ ID NO: 10855 - protein, 177 aa, Homo sapiens
  MOD_RES (3)..(3): Selenocysteine
  MOD_RES (7)..(7): Selenocysteine
  MOD_RES (29)..(29): Selenocysteine
  MOD_RES (53)..(53): Selenocysteine
  MOD_RES (109)..(109): Selenocysteine
  MOD_RES (121)..(121): Selenocysteine
  MOD_RES (128)..(128): Selenocysteine
  MOD_RES (134)..(134): Selenocysteine
  MOD_RES (161)..(161): Selenocysteine
MAXGSRXSLLLAFGLLCLPWLQEGSAFPXIPLSRLFDNAMLRAHRLHQLAFDXYQEFNLELLRISLLLIQSWLEPVQFLRSVFANSLVYGASDSNVYDLLKDLEEGIQXLMGRLEDGSPRXGQIFKQXYSKFDXNSHNDDALLKNYGLLYCFRKDMDKVEXFLRIVQCRSVEGSCGF

SEQ ID NO: 10856 - protein, 202 aa, Homo sapiens
  MOD_RES (3)..(3): Selenocysteine
  MOD_RES (7)..(7): Selenocysteine
  MOD_RES (29)..(29): Selenocysteine
  MOD_RES (53)..(53): Selenocysteine
  MOD_RES (61)..(61): Selenocysteine
  MOD_RES (71)..(71): Selenocysteine
  MOD_RES (78)..(78): Selenocysteine
  MOD_RES (134)..(134): Selenocysteine
  MOD_RES (146)..(146): Selenocysteine
  MOD_RES (153)..(153): Selenocysteine
  MOD_RES (159)..(159): Selenocysteine
  MOD_RES (186)..(186): Selenocysteine
MAXGSRXSLLLAFGLLCLPWLQEGSAFPXIPLSRLFDNAMLRAHRLHQLAFDXYQEFNPQXSLCFSESIPXPSNREEXQQKSNLELLRISLLLIQSWLEPVQFLRSVFANSLVYGASDSNVYDLLKDLEEGIQXLMGRLEDGSPRXGQIFKQXYSKFDXNSHNDDALLKNYGLLYCFRKDMDKVEXFLRIVQCRSVEGSCGF

SEQ ID NO: 10857 - protein, 122 aa, Homo sapiens
  MOD_RES (3)..(3): Selenocysteine
  MOD_RES (7)..(7): Selenocysteine
  MOD_RES (29)..(29): Selenocysteine
  MOD_RES (53)..(53): Selenocysteine
  MOD_RES (66)..(66): Selenocysteine
  MOD_RES (73)..(73): Selenocysteine
  MOD_RES (79)..(79): Selenocysteine
  MOD_RES (106)..(106): Selenocysteine
MAXGSRXSLLLAFGLLCLPWLQEGSAFPXIPLSRLFDNAMLRAHRLHQLAFDXYQEFRLEDGSPRXGQIFKQXYSKFDXNSHNDDALLKNYGLLYCFRKDMDKVEXFLRIVQCRSVEGSCGF

SEQ ID NO: 10858 - protein, 245 aa, Homo sapiens
  MOD_RES (7)..(7): Selenocysteine
  MOD_RES (29)..(29): Selenocysteine
  MOD_RES (53)..(53): Selenocysteine
  MOD_RES (76)..(76): Selenocysteine
  MOD_RES (86)..(86): Selenocysteine
  MOD_RES (93)..(93): Selenocysteine
  MOD_RES (149)..(149): Selenocysteine
  MOD_RES (168)..(168): Selenocysteine
  MOD_RES (172)..(172): Selenocysteine
  MOD_RES (176)..(177): Selenocysteine
  MOD_RES (179)..(179): Selenocysteine
  MOD_RES (184)..(185): Selenocysteine
  MOD_RES (189)..(189): Selenocysteine
  MOD_RES (194)..(194): Selenocysteine
  MOD_RES (196)..(196): Selenocysteine
  MOD_RES (225)..(225): Selenocysteine
MAAGSRXSLLLAFGLLCLSWLQEGSAFPXIPLSRLFDNAMLRARRLYQLAYDXYQEFEEAYILKEQKYSFLQNPQXSLCFSESIPXPSNRVKXQQKSNLELLRISLLLIQSWLEPVQLLRSVFANSLVYGASDSNVYRHLKDLEEGIQXLIGWKMAAPGLGRSSISPXASLXQNRXXMXHCSRXXGCSXASGRXWXRSRHSCASCSAALWRAAVASSCPGGIPVXPPQCLSWSWKVLLQCPPALS

SEQ ID NO: 10859 - protein, 217 aa, Homo sapiens
  MOD_RES (7)..(7): Selenocysteine
  MOD_RES (29)..(29): Selenocysteine
  MOD_RES (53)..(53): Selenocysteine
  MOD_RES (76)..(76): Selenocysteine
  MOD_RES (86)..(86): Selenocysteine
  MOD_RES (93)..(93): Selenocysteine
  MOD_RES (149)..(149): Selenocysteine
  MOD_RES (161)..(161): Selenocysteine
  MOD_RES (174)..(174): Selenocysteine
  MOD_RES (201)..(201): Selenocysteine
MAAGSRXSLLLAFGLLCLSWLQEGSAFPXIPLSRLFDNAMLRARRLYQLAYDXYQEFEEAYILKEQKYSFLQNPQXSLCFSESIPXPSNRVKXQQKSNLELLRISLLLIQSWLEPVQLLRSVFANSLVYGASDSNVYRHLKDLEEGIQXLMWRLEDGSPRXGQIFNQSYSKFDXKSHNDDALLKNYGLLYCFRKDMDKVEXFLRIVQCRSVEGSCGF

SEQ ID NO: 10860 - protein, 256 aa, Homo sapiens
  MOD_RES (7)..(7): Selenocysteine
  MOD_RES (29)..(29): Selenocysteine
  MOD_RES (53)..(53): Selenocysteine
  MOD_RES (76)..(76): Selenocysteine
  MOD_RES (86)..(86): Selenocysteine
  MOD_RES (93)..(93): Selenocysteine
  MOD_RES (149)..(149): Selenocysteine
  MOD_RES (186)..(186): Selenocysteine
MAAGSRXSLLLAFGLLCLSWLQEGSAFPXIPLSRLFDNAMLRARRLYQLAYDXYQEFEEAYILKEQKYSFLQNPQXSLCFSESIPXPSNRVKXQQKSNLELLRISLLLIQSWLEPVQLLRSVFANSLVYGASDSNVYRHLKDLEEGIQXLMWVRVAPGIPNPGAPLASRDWGEKHCCPLFSSQALXQENSPYSSFPLVNPPGLSLQPGGEGGKWMNERGREQCPSAWPLLLFLHFAEAGRWQPPDWADLQSVLQQV

SEQ ID NO: 10861 - protein, 177 aa, Homo sapiens
  MOD_RES (7)..(7): Selenocysteine
  MOD_RES (29)..(29): Selenocysteine
  MOD_RES (53)..(53): Selenocysteine
  MOD_RES (109)..(109): Selenocysteine
  MOD_RES (121)..(121): Selenocysteine
  MOD_RES (134)..(134): Selenocysteine
  MOD_RES (161)..(161): Selenocysteine
MAAGSRXSLLLAFGLLCLSWLQEGSAFPXIPLSRLFDNAMLRARRLYQLAYDXYQEFNLELLRISLLLIQSWLEPVQLLRSVFANSLVYGASDSNVYRHLKDLEEGIQXLMWRLEDGSPRXGQIFNQSYSKFDXKSHNDDALLKNYGLLYCFRKDMDKVEXFLRIVQCRSVEGSCGF

SEQ ID NO: 10862 - protein, 202 aa, Homo sapiens
  MOD_RES (7)..(7): Selenocysteine
  MOD_RES (29)..(29): Selenocysteine
  MOD_RES (53)..(53): Selenocysteine
  MOD_RES (61)..(61): Selenocysteine
  MOD_RES (71)..(71): Selenocysteine
  MOD_RES (78)..(78): Selenocysteine
  MOD_RES (134)..(134): Selenocysteine
  MOD_RES (146)..(146): Selenocysteine
  MOD_RES (159)..(159): Selenocysteine
  MOD_RES (186)..(186): Selenocysteine
MAAGSRXSLLLAFGLLCLSWLQEGSAFPXIPLSRLFDNAMLRARRLYQLAYDXYQEFNPQXSLCFSESIPXPSNRVKXQQKSNLELLRISLLLIQSWLEPVQLLRSVFANSLVYGASDSNVYRHLKDLEEGIQXLMWRLEDGSPRXGQIFNQSYSKFDXKSHNDDALLKNYGLLYCFRKDMDKVEXFLRIVQCRSVEGSCGF

SEQ ID NO: 10863 - protein, 295 aa, Homo sapiens
  MOD_RES (9)..(9): Selenocysteine
  MOD_RES (25)..(25): Selenocysteine
  MOD_RES (45)..(45): Selenocysteine
  MOD_RES (54)..(54): Selenocysteine
  MOD_RES (63)..(63): Selenocysteine
  MOD_RES (69)..(69): Selenocysteine
  MOD_RES (76)..(76): Selenocysteine
  MOD_RES (87)..(87): Selenocysteine
  MOD_RES (91)..(91): Selenocysteine
  MOD_RES (95)..(95): Selenocysteine
  MOD_RES (119)..(119): Selenocysteine
  MOD_RES (130)..(130): Selenocysteine
  MOD_RES (135)..(135): Selenocysteine
  MOD_RES (158)..(158): Selenocysteine
  MOD_RES (165)..(165): Selenocysteine
  MOD_RES (202)..(202): Selenocysteine
  MOD_RES (212)..(213): Selenocysteine
  MOD_RES (250)..(250): Selenocysteine
  MOD_RES (258)..(258): Selenocysteine
  MOD_RES (279)..(279): Selenocysteine
MDLWQLLLXLALAGSSDAFSGSEAXAAILSRAPWSLQSVNPGLKXNSSKEPKFXKCRSPEREXFSCHWXDEVHHGXKNLGPIQLFYXRRNXQEWXQEWKECPDYVSAGENSCYFNSSFXSIWIPYCIKLXSNGGXVDEKCFSVDEIVQPDPPIALNWXLLNVSLXGIHADIQVRWEAPRNADIQKGWMVLEYELQYKEVNEXKWKMMDPILXXSVPVYSLKVDKEYEVRVRSKQRNSGNYGEFSEVLYVXLPQMSQFXCEEDFYFPWLLIIIFGIFGLXVMLFVFLFSKQQRKEN

SEQ ID NO: 10864 - protein, 638 aa, Homo sapiens
  MOD_RES (9)..(9): Selenocysteine
  MOD_RES (25)..(25): Selenocysteine
  MOD_RES (45)..(45): Selenocysteine
  MOD_RES (54)..(54): Selenocysteine
  MOD_RES (63)..(63): Selenocysteine
  MOD_RES (69)..(69): Selenocysteine
  MOD_RES (76)..(76): Selenocysteine
  MOD_RES (87)..(87): Selenocysteine
  MOD_RES (91)..(91): Selenocysteine
  MOD_RES (95)..(95): Selenocysteine
  MOD_RES (119)..(119): Selenocysteine
  MOD_RES (130)..(130): Selenocysteine
  MOD_RES (135)..(135): Selenocysteine
  MOD_RES (158)..(158): Selenocysteine
  MOD_RES (165)..(165): Selenocysteine
  MOD_RES (202)..(202): Selenocysteine
  MOD_RES (212)..(213): Selenocysteine
  MOD_RES (250)..(250): Selenocysteine
  MOD_RES (258)..(258): Selenocysteine
  MOD_RES (279)..(279): Selenocysteine
  MOD_RES (324)..(324): Selenocysteine
  MOD_RES (357)..(357): Selenocysteine
  MOD_RES (362)..(362): Selenocysteine
  MOD_RES (387)..(387): Selenocysteine
  MOD_RES (397)..(397): Selenocysteine
  MOD_RES (408)..(408): Selenocysteine
  MOD_RES (443)..(443): Selenocysteine
  MOD_RES (461)..(461): Selenocysteine
  MOD_RES (467)..(467): Selenocysteine
  MOD_RES (494)..(494): Selenocysteine
  MOD_RES (568)..(569): Selenocysteine
  MOD_RES (573)..(574): Selenocysteine
  MOD_RES (581)..(581): Selenocysteine
  MOD_RES (596)..(596): Selenocysteine
  MOD_RES (612)..(612): Selenocysteine
  MOD_RES (630)..(630): Selenocysteine
MDLWQLLLXLALAGSSDAFSGSEAXAAILSRAPWSLQSVNPGLKXNSSKEPKFXKCRSPEREXFSCHWXDEVHHGXKNLGPIQLFYXRRNXQEWXQEWKECPDYVSAGENSCYFNSSFXSIWIPYCIKLXSNGGXVDEKCFSVDEIVQPDPPIALNWXLLNVSLXGIHADIQVRWEAPRNADIQKGWMVLEYELQYKEVNEXKWKMMDPILXXSVPVYSLKVDKEYEVRVRSKQRNSGNYGEFSEVLYVXLPQMSQFXCEEDFYFPWLLIIIFGIFGLXVMLFVFLFSKQQRIKMLILPPVPVPKIKGIDPDLLKEGKLEEVNXILAIHDSYKPEFHSDDSWVEFIELDIDEPDEKXEESDXDRLLSSDHEKSHSNLGVKDGDSGRXSCCEPDILEXDFNANDIHEGXSEVAQPQRLKGEADLLCLDQKNQNNSPYHDACPAXQQPSVIQAEKNKPQPLPXEGAESXHQAAHIQLSNPSSLSNIDFYAQVSDIXPAGSVVLSPGQKNKAGMSQCDMHPEMVSLCQENFLMDNAYFCEADAKKCIPVAPHIKVESHIQPSLNQEDIYIXXESLXXAAGRPGXGEHVPGSEMPVPDYXSIHIVQSPQGLILNAXALPLPDKEFLSSCGYVSXDQLNKIMP

SEQ ID NO: 10865 - protein, 85 aa, Homo sapiens
  MOD_RES (9)..(9): Selenocysteine
  MOD_RES (25)..(25): Selenocysteine
  MOD_RES (45)..(45): Selenocysteine
  MOD_RES (47)..(47): Selenocysteine
  MOD_RES (67)..(67): Selenocysteine
  MOD_RES (70)..(70): Selenocysteine
MDLWQLLLXLALAGSSDAFSGSEAXAAILSRAPWSLQSVNPGLKXRXLKNGLKNGKNALIMFLLGKXAVXLIHRLPPSGYLIVSS

SEQ ID NO: 10866 - protein, 62 aa, Homo sapiens
  MOD_RES (9)..(9): Selenocysteine
  MOD_RES (25)..(25): Selenocysteine
  MOD_RES (45)..(45): Selenocysteine
MDLWQLLLXLALAGSSDAFSGSEAXAAILSRAPWSLQSVNPGLKXRWGPCSHIKKMESYMQA

SEQ ID NO: 10867 - protein, 616 aa, Homo sapiens
  MOD_RES (9)..(9): Selenocysteine
  MOD_RES (32)..(32): Selenocysteine
  MOD_RES (41)..(41): Selenocysteine
  MOD_RES (47)..(47): Selenocysteine
  MOD_RES (54)..(54): Selenocysteine
  MOD_RES (65)..(65): Selenocysteine
  MOD_RES (69)..(69): Selenocysteine
  MOD_RES (73)..(73): Selenocysteine
  MOD_RES (97)..(97): Selenocysteine
  MOD_RES (108)..(108): Selenocysteine
  MOD_RES (113)..(113): Selenocysteine
  MOD_RES (136)..(136): Selenocysteine
  MOD_RES (143)..(143): Selenocysteine
  MOD_RES (180)..(180): Selenocysteine
  MOD_RES (190)..(191): Selenocysteine
  MOD_RES (228)..(228): Selenocysteine
  MOD_RES (236)..(236): Selenocysteine
  MOD_RES (257)..(257): Selenocysteine
  MOD_RES (302)..(302): Selenocysteine
  MOD_RES (335)..(335): Selenocysteine
  MOD_RES (340)..(340): Selenocysteine
  MOD_RES (365)..(365): Selenocysteine
  MOD_RES (375)..(375): Selenocysteine
  MOD_RES (386)..(386): Selenocysteine
  MOD_RES (421)..(421): Selenocysteine
  MOD_RES (439)..(439): Selenocysteine
  MOD_RES (445)..(445): Selenocysteine
  MOD_RES (472)..(472): Selenocysteine
  MOD_RES (546)..(547): Selenocysteine
  MOD_RES (551)..(552): Selenocysteine
  MOD_RES (559)..(559): Selenocysteine
  MOD_RES (574)..(574): Selenocysteine
  MOD_RES (590)..(590): Selenocysteine
  MOD_RES (608)..(608): Selenocysteine
MDLWQLLLXLALAGSSDAFSGSEDSSKEPKFXKCRSPEREXFSCHWXDEVHHGXKNLGPIQLFYXRRNXQEWXQEWKECPDYVSAGENSCYFNSSFXSIWIPYCIKLXSNGGXVDEKCFSVDEIVQPDPPIALNWXLLNVSLXGIHADIQVRWEAPRNADIQKGWMVLEYELQYKEVNEXKWKMMDPILXXSVPVYSLKVDKEYEVRVRSKQRNSGNYGEFSEVLYVXLPQMSQFXCEEDFYFPWLLIIIFGIFGLXVMLFVFLFSKQQRIKMLILPPVPVPKIKGIDPDLLKEGKLEEVNXILAIHDSYKPEFHSDDSWVEFIELDIDEPDEKXEESDXDRLLSSDHEKSHSNLGVKDGDSGRXSCCEPDILEXDFNANDIHEGXSEVAQPQRLKGEADLLCLDQKNQNNSPYHDACPAXQQPSVIQAEKNKPQPLPXEGAESXHQAAHIQLSNPSSLSNIDFYAQVSDIXPAGSVVLSPGQKNKAGMSQCDMHPEMVSLCQENFLMDNAYFCEADAKKCIPVAPHIKVESHIQPSLNQEDIYIXXESLXXAAGRPGXGEHVPGSEMPVPDYXSIHIVQSPQGLILNAXALPLPDKEFLSSCGYVSXDQLNKIMP

SEQ ID NO: 10868 - protein, 645 aa, Homo sapiens
  MOD_RES (6)..(6): Selenocysteine
  MOD_RES (16)..(16): Selenocysteine
  MOD_RES (32)..(32): Selenocysteine
  MOD_RES (52)..(52): Selenocysteine
  MOD_RES (61)..(61): Selenocysteine
  MOD_RES (70)..(70): Selenocysteine
  MOD_RES (76)..(76): Selenocysteine
  MOD_RES (83)..(83): Selenocysteine
  MOD_RES (94)..(94): Selenocysteine
  MOD_RES (98)..(98): Selenocysteine
  MOD_RES (102)..(102): Selenocysteine
  MOD_RES (126)..(126): Selenocysteine
  MOD_RES (137)..(137): Selenocysteine
  MOD_RES (142)..(142): Selenocysteine
  MOD_RES (165)..(165): Selenocysteine
  MOD_RES (172)..(172): Selenocysteine
  MOD_RES (209)..(209): Selenocysteine
  MOD_RES (219)..(220): Selenocysteine
  MOD_RES (257)..(257): Selenocysteine
  MOD_RES (265)..(265): Selenocysteine
  MOD_RES (286)..(286): Selenocysteine
  MOD_RES (331)..(331): Selenocysteine
  MOD_RES (364)..(364): Selenocysteine
  MOD_RES (369)..(369): Selenocysteine
  MOD_RES (394)..(394): Selenocysteine
  MOD_RES (404)..(404): Selenocysteine
  MOD_RES (415)..(415): Selenocysteine
  MOD_RES (450)..(450): Selenocysteine
  MOD_RES (468)..(468): Selenocysteine
  MOD_RES (474)..(474): Selenocysteine
  MOD_RES (501)..(501): Selenocysteine
  MOD_RES (575)..(576): Selenocysteine
  MOD_RES (580)..(581): Selenocysteine
  MOD_RES (588)..(588): Selenocysteine
  MOD_RES (603)..(603): Selenocysteine
  MOD_RES (619)..(619): Selenocysteine
  MOD_RES (637)..(637): Selenocysteine
MNWGPXGMDLWQLLLXLALAGSSDAFSGSEAXAAILSRAPWSLQSVNPGLKXNSSKEPKFXKCRSPEREXFSCHWXDEVHHGXKNLGPIQLFYXRRNXQEWXQEWKECPDYVSAGENSCYFNSSFXSIWIPYCIKLXSNGGXVDEKCFSVDEIVQPDPPIALNWXLLNVSLXGIHADIQVRWEAPRNADIQKGWMVLEYELQYKEVNEXKWKMMDPILXXSVPVYSLKVDKEYEVRVRSKQRNSGNYGEFSEVLYVXLPQMSQFXCEEDFYFPWLLIIIFGIFGLXVMLFVFLFSKQQRIKMLILPPVPVPKIKGIDPDLLKEGKLEEVNXILAIHDSYKPEFHSDDSWVEFIELDIDEPDEKXEESDXDRLLSSDHEKSHSNLGVKDGDSGRXSCCEPDILEXDFNANDIHEGXSEVAQPQRLKGEADLLCLDQKNQNNSPYHDACPAXQQPSVIQAEKNKPQPLPXEGAESXHQAAHIQLSNPSSLSNIDFYAQVSDIXPAGSVVLSPGQKNKAGMSQCDMHPEMVSLCQENFLMDNAYFCEADAKKCIPVAPHIKVESHIQPSLNQEDIYIXXESLXXAAGRPGXGEHVPGSEMPVPDYXSIHIVQSPQGLILNAXALPLPDKEFLSSCGYVSXDQLNKIMP

SEQ ID NO: 10869 - protein, 107 aa, Homo sapiens
  MOD_RES (12)..(12): Selenocysteine
  MOD_RES (26)..(26): Selenocysteine
  MOD_RES (38)..(38): Selenocysteine
MPLWVFFFVILXLSNSSHCSPPPPLXLRMRRYADAIFXNSYRKVLGQLSARKLLQDIMSRQQGESNQERGARARLGRQVDSMWAEQKQMELESILVALLQKHRNSQG

SEQ ID NO: 10870 - protein, 108 aa, Homo sapiens
  MOD_RES (12)..(12): Selenocysteine
  MOD_RES (26)..(26): Selenocysteine
  MOD_RES (38)..(38): Selenocysteine
MPLWVFFFVILXLSNSSHCSPPPPLXLRMRRYADAIFXNSYRKVLGQLSARKLLQDIMSRQQGESNQERGARARLGRQVDSMWAEQKQMELESILVALLQKHSRNSQG

SEQ ID NO: 10871 - protein, 207 aa, Homo sapiens
  MOD_RES (80)..(80): Selenocysteine
  MOD_RES (126)..(126): Selenocysteine
  MOD_RES (147)..(147): Selenocysteine
  MOD_RES (152)..(152): Selenocysteine
  MOD_RES (179)..(179): Selenocysteine
MAMGEGAGQVGERGGSMQGLCGRLPFRHHDQLQLAVGRSRLPELPPGLHLPQLKESLLVAGSRWLGAARALHWHVGELQXGLRGHRVLGPGRHLPLLVDHQRAHCPLGRGELWAFSQYYPHPGEEXGASSGQPPYPVSVLASLQVDXFPDPXLWNSLHHLQLPARQCWPGHPPPPGAGXGFLPGIRRLGLRCRFLGRSFDCQPPRGS

SEQ ID NO: 10872 - protein, 423 aa, Homo sapiens
  MOD_RES (19)..(19): Selenocysteine
  MOD_RES (32)..(32): Selenocysteine
  MOD_RES (51)..(52): Selenocysteine
  MOD_RES (58)..(58): Selenocysteine
  MOD_RES (67)..(67): Selenocysteine
  MOD_RES (75)..(75): Selenocysteine
  MOD_RES (97)..(97): Selenocysteine
  MOD_RES (99)..(99): Selenocysteine
  MOD_RES (128)..(128): Selenocysteine
  MOD_RES (134)..(134): Selenocysteine
  MOD_RES (149)..(149): Selenocysteine
  MOD_RES (166)..(166): Selenocysteine
  MOD_RES (170)..(171): Selenocysteine
  MOD_RES (192)..(192): Selenocysteine
  MOD_RES (199)..(199): Selenocysteine
  MOD_RES (213)..(213): Selenocysteine
  MOD_RES (215)..(215): Selenocysteine
  MOD_RES (234)..(234): Selenocysteine
  MOD_RES (257)..(257): Selenocysteine
  MOD_RES (259)..(259): Selenocysteine
  MOD_RES (278)..(278): Selenocysteine
  MOD_RES (320)..(320): Selenocysteine
  MOD_RES (331)..(331): Selenocysteine
  MOD_RES (385)..(385): Selenocysteine
  MOD_RES (404)..(404): Selenocysteine
  MOD_RES (409)..(410): Selenocysteine
  MOD_RES (420)..(420): Selenocysteine
MDRRMWGAHVFCVLSPLPXVLGHMHPECDFIXQLREDESACLQAAEEMPNXXLGCPAXWDGLLCWPXAGSGEWVXLPCPDFFSHFSSESGAVKRDCXIXGWSEPFPPYPVACPVPLELLAEEESYFSXVKIIYXVGHSISIVALFVAIXILVALRRLHCPRNYVHXQLFXXFILKAGAVFLKDAALFHSDDXDHCSFSXVLCKVSVAASHFAXMXNFSWLLAEAVYLNCLLASXSPSSRRAFWWLVLAGWGLPVLFXGXWVSCKLAFEDIACWDLDDXSPYWWIIKGPIVLSVGVNFGLFLNIIRILVRKLEPAQGSLHXQSQYWRLSKSXLFLIPLFGIHYIIFNFLPDNAGLGIRLPLELGLGSFQGFIVAILYCFLNQEVRXEISRKWHGHDPELLPAWRXRAKWXXPSRSAAKVLXSMC

SEQ ID NO: 10873 - protein, 151 aa, Homo sapiens
  MOD_RES (6)..(6): Selenocysteine
  MOD_RES (8)..(9): Selenocysteine
  MOD_RES (11)..(12): Selenocysteine
  MOD_RES (31)..(31): Selenocysteine
  MOD_RES (77)..(77): Selenocysteine
  MOD_RES (98)..(98): Selenocysteine
  MOD_RES (103)..(103): Selenocysteine
  MOD_RES (130)..(130): Selenocysteine
MLPFSXAXXLXXAASPLAARALHWHVGELQXGLRGHRVLGPGRHLPLLVDHQRAHCPLGRGELWAFSQYYPHPGEEXGASSGQPPYPVSVLASLQVDXFPDPXLWNSLHHLQLPARQCWPGHPPPPGAGXGFLPGLHCCHPLLLPQPRGED

SEQ ID NO: 10874 - protein, 145 aa, Homo sapiens
  MOD_RES (5)..(5): Selenocysteine
  MOD_RES (33)..(33): Selenocysteine
  MOD_RES (35)..(35): Selenocysteine
  MOD_RES (64)..(64): Selenocysteine
  MOD_RES (70)..(70): Selenocysteine
  MOD_RES (85)..(85): Selenocysteine
  MOD_RES (102)..(102): Selenocysteine
  MOD_RES (106)..(107): Selenocysteine
  MOD_RES (128)..(128): Selenocysteine
  MOD_RES (135)..(135): Selenocysteine
MVPGXPSPLLGRGKELWLESLACLPGAVKRDCXIXGWSEPFPPYPVACPVPLELLAEEESYFSXVKIIYXVGHSISIVALFVAIXILVALRRLHCPRNYVHXQLFXXFILKAGAVFLKDAALFHSDDXDHCSFSXGCPCSSLARG

SEQ ID NO: 10875 - protein, 359 aa, Homo sapiens
  MOD_RES (5)..(5): Selenocysteine
  MOD_RES (33)..(33): Selenocysteine
  MOD_RES (35)..(35): Selenocysteine
  MOD_RES (64)..(64): Selenocysteine
  MOD_RES (70)..(70): Selenocysteine
  MOD_RES (85)..(85): Selenocysteine
  MOD_RES (102)..(102): Selenocysteine
  MOD_RES (106)..(107): Selenocysteine
  MOD_RES (128)..(128): Selenocysteine
  MOD_RES (135)..(135): Selenocysteine
  MOD_RES (149)..(149): Selenocysteine
  MOD_RES (151)..(151): Selenocysteine
  MOD_RES (170)..(170): Selenocysteine
  MOD_RES (193)..(193): Selenocysteine
  MOD_RES (195)..(195): Selenocysteine
  MOD_RES (214)..(214): Selenocysteine
  MOD_RES (256)..(256): Selenocysteine
  MOD_RES (267)..(267): Selenocysteine
  MOD_RES (321)..(321): Selenocysteine
  MOD_RES (340)..(340): Selenocysteine
  MOD_RES (345)..(346): Selenocysteine
  MOD_RES (356)..(356): Selenocysteine
MVPGXPSPLLGRGKELWLESLACLPGAVKRDCXIXGWSEPFPPYPVACPVPLELLAEEESYFSXVKIIYXVGHSISIVALFVAIXILVALRRLHCPRNYVHXQLFXXFILKAGAVFLKDAALFHSDDXDHCSFSXVLCKVSVAASHFAXMXNFSWLLAEAVYLNCLLASXSPSSRRAFWWLVLAGWGLPVLFXGXWVSCKLAFEDIACWDLDDXSPYWWIIKGPIVLSVGVNFGLFLNIIRILVRKLEPAQGSLHXQSQYWRLSKSXLFLIPLFGIHYIIFNFLPDNAGLGIRLPLELGLGSFQGFIVAILYCFLNQEVRXEISRKWHGHDPELLPAWRXRAKWXXPSRSAAKVLXSMC

SEQ ID NO: 10876 - protein, 68 aa, Homo sapiens
  MOD_RES (5)..(5): Selenocysteine
  MOD_RES (33)..(33): Selenocysteine
  MOD_RES (35)..(35): Selenocysteine
MVPGXPSPLLGRGKELWLESLACLPGAVKRDCXIXGWSEPFPPYPVACPVPLELLAEEGCPCSSLARG

SEQ ID NO: 10877 - protein, 66 aa, Homo sapiens
  MOD_RES (3)..(3): Selenocysteine
  MOD_RES (12)..(12): Selenocysteine
MFXCWWSYLRSXLAAVPGEASRVQFNAPFDVGIKLSGVQYQQHSQALGKFLQDILWEEAKEAPADK

SEQ ID NO: 10878 - protein, 105 aa, Homo sapiens
  MOD_RES (3)..(3): Selenocysteine
  MOD_RES (12)..(12): Selenocysteine
MFXCWWSYLRSXLAAVPGEASRVQQRKESKKPPAKLQPRALAGWLRPEDGGQAEGAEDELEVRFNAPFDVGIKLSGVQYQQHSQALGKFLQDILWEEAKEAPADK

SEQ ID NO: 10879 - protein, 104 aa, Homo sapiens
  MOD_RES (3)..(3): Selenocysteine
  MOD_RES (12)..(12): Selenocysteine
MFXCWWSYLRSXLAAVPGEASRVQRKESKKPPAKLQPRALAGWLRPEDGGQAEGAEDELEVRFNAPFDVGIKLSGVQYQQHSQALGKFLQDILWEEAKEAPADK

SEQ ID NO: 10880 - protein, 40 aa, Homo sapiens
  MOD_RES (3)..(3): Selenocysteine
  MOD_RES (12)..(12): Selenocysteine
  MOD_RES (29)..(29): Selenocysteine
  MOD_RES (38)..(38): Selenocysteine
MFXCWWSYLRSXLAAVPGEASRVQRPQPXSDRPQALLXSL

SEQ ID NO: 10881 - protein, 33 aa, Homo sapiens
  MOD_RES (6)..(6): Selenocysteine
MPSPGXVCSLLLLGMLWLDLAMAGSSFLSPEHQ

SEQ ID NO: 10882 - protein, 117 aa, Homo sapiens
  MOD_RES (6)..(6): Selenocysteine
MPSPGXVCSLLLLGMLWLDLAMAGSSFLSPEHQRVQQRKESKKPPAKLQPRALAGWLRPEDGGQAEGAEDELEVRFNAPFDVGIKLSGVQYQQHSQALGKFLQDILWEEAKEAPADK

SEQ ID NO: 10883 - protein, 91 aa, Homo sapiens
  MOD_RES (6)..(6): Selenocysteine
  MOD_RES (80)..(80): Selenocysteine
  MOD_RES (89)..(89): Selenocysteine
MPSPGXVCSLLLLGMLWLDLAMAGSSFLSPEHQRVQQRKESKKPPAKLQPRALAGWLRPEDGGQAEGAEDELEVRRPQPXSDRPQALLXSL

SEQ ID NO: 10884 - protein, 116 aa, Homo sapiens
  MOD_RES (6)..(6): Selenocysteine
MPSPGXVCSLLLLGMLWLDLAMAGSSFLSPEHQRVQRKESKKPPAKLQPRALAGWLRPEDGGQAEGAEDELEVRFNAPFDVGIKLSGVQYQQHSQALGKFLQDILWEEAKEAPADK

SEQ ID NO: 10885 - protein, 289 aa, Homo sapiens
  MOD_RES (5)..(5): Selenocysteine
  MOD_RES (15)..(15): Selenocysteine
  MOD_RES (47)..(47): Selenocysteine
  MOD_RES (49)..(49): Selenocysteine
  MOD_RES (64)..(64): Selenocysteine
  MOD_RES (76)..(78): Selenocysteine
  MOD_RES (127)..(127): Selenocysteine
  MOD_RES (130)..(130): Selenocysteine
  MOD_RES (133)..(133): Selenocysteine
  MOD_RES (135)..(135): Selenocysteine
  MOD_RES (156)..(156): Selenocysteine
  MOD_RES (190)..(190): Selenocysteine
  MOD_RES (195)..(195): Selenocysteine
  MOD_RES (201)..(201): Selenocysteine
  MOD_RES (211)..(211): Selenocysteine
  MOD_RES (229)..(229): Selenocysteine
  MOD_RES (261)..(261): Selenocysteine
MWNAXPSEEPGFNLXLADLDWDASPGNDSLGDELLQLFPAPLLAGVXAXCVALFVVGIAGNLLXMLVVSRFRELRXXXNLYLSSMAFSDLLIFLCMPLDLVRLWQYRPWNFGDLLCKLFQFVSESCXYAXVLXIXALSVERYFAICFPLRAKVVVXKGRVKLVIFVIWAVAFCSAGPIFVLVGVEHENGXDPWDXNECRPXEFAVRSGLLXVMVWVSSIFFFLPVFCLXVLYSLIGRKLWRRRRGDAVVGASLRDQNHKQXVKMLGGSQRALRLSLAGPILSLCLLPSL

SEQ ID NO: 10886 - protein, 366 aa, Homo sapiens
  MOD_RES (5)..(5): Selenocysteine
  MOD_RES (15)..(15): Selenocysteine
  MOD_RES (47)..(47): Selenocysteine
  MOD_RES (49)..(49): Selenocysteine
  MOD_RES (64)..(64): Selenocysteine
  MOD_RES (76)..(78): Selenocysteine
  MOD_RES (127)..(127): Selenocysteine
  MOD_RES (130)..(130): Selenocysteine
  MOD_RES (133)..(133): Selenocysteine
  MOD_RES (135)..(135): Selenocysteine
  MOD_RES (156)..(156): Selenocysteine
  MOD_RES (190)..(190): Selenocysteine
  MOD_RES (195)..(195): Selenocysteine
  MOD_RES (201)..(201): Selenocysteine
  MOD_RES (211)..(211): Selenocysteine
  MOD_RES (229)..(229): Selenocysteine
  MOD_RES (261)..(261): Selenocysteine
  MOD_RES (350)..(350): Selenocysteine
  MOD_RES (360)..(360): Selenocysteine
  MOD_RES (366)..(366): Selenocysteine
MWNAXPSEEPGFNLXLADLDWDASPGNDSLGDELLQLFPAPLLAGVXAXCVALFVVGIAGNLLXMLVVSRFRELRXXXNLYLSSMAFSDLLIFLCMPLDLVRLWQYRPWNFGDLLCKLFQFVSESCXYAXVLXIXALSVERYFAICFPLRAKVVVXKGRVKLVIFVIWAVAFCSAGPIFVLVGVEHENGXDPWDXNECRPXEFAVRSGLLXVMVWVSSIFFFLPVFCLXVLYSLIGRKLWRRRRGDAVVGASLRDQNHKQXVKMLAVVVFAFILCWLPFHVGRYLFSKSFEPGSLEIAQISQYCNLVSFVLFYLSAAINPILYNIMSKKYRVAVFRLLGFEPFSQRKLSXLKDESSRAWXESSINX

SEQ ID NO: 10887 - protein, 1035 aa, Homo sapiens
  MOD_RES (5)..(5): Selenocysteine
  MOD_RES (83)..(83): Selenocysteine
  MOD_RES (114)..(114): Selenocysteine
  MOD_RES (121)..(121): Selenocysteine
  MOD_RES (305)..(305): Selenocysteine
  MOD_RES (357)..(357): Selenocysteine
  MOD_RES (374)..(374): Selenocysteine
  MOD_RES (381)..(381): Selenocysteine
  MOD_RES (388)..(388): Selenocysteine
  MOD_RES (450)..(450): Selenocysteine
  MOD_RES (455)..(455): Selenocysteine
  MOD_RES (465)..(465): Selenocysteine
  MOD_RES (491)..(492): Selenocysteine
  MOD_RES (595)..(595): Selenocysteine
  MOD_RES (610)..(610): Selenocysteine
  MOD_RES (632)..(632): Selenocysteine
  MOD_RES (650)..(650): Selenocysteine
  MOD_RES (671)..(671): Selenocysteine
  MOD_RES (773)..(773): Selenocysteine
  MOD_RES (811)..(811): Selenocysteine
  MOD_RES (844)..(844): Selenocysteine
  MOD_RES (882)..(882): Selenocysteine
  MOD_RES (903)..(903): Selenocysteine
  MOD_RES (912)..(912): Selenocysteine
  MOD_RES (916)..(916): Selenocysteine
  MOD_RES (948)..(948): Selenocysteine
  MOD_RES (986)..(986): Selenocysteine
  MOD_RES (994)..(994): Selenocysteine
MAAEXLNFGPEWLRALSGGGSVASPPPSPAMPKYKLADYRYGREEMLALYVKENKVPEELQDKEFAAVLQDEPLQPLALEPLXEEEQRNFSLSVNSVAVLRLMGKGAGPPLAGXSRGRGSXRSRGRGRGDSCFYQRSIEEGDGAFGRSPREIQRSQSWDDRGERRFEKSARRDGARCGFEEGGAGPRKEHARSDSENWRSLREEQEEEEEGSWRLGAGPRRDGDRWRSASPDGGPRSAGWREHGERRRKFEFDLRGDRGGCGEEEGRGGGGSSHLRRCRAPEGFEEDKDGLPEWCLDDEDEEMGXFDASGAFLPLKKGPKEPIPEEQELDFQGLEEEEEPSEGLEEEGPEAGGKELXPLPPQEEKSSSPSPLPXLGPLWGXNGDGDEXAEKEPPAAEDDIRGIQLSPGVGSSAGPPGDLEDDEGLKHLQQEAEKLVASLQDSSLEEEQFXAAMQXQGLRHSAAAXALPLSHGAARKWFYKDPQGEIQGPFXXQEMAEWFQAGYFSMSLLVKRGCDEGFQPLGEVIKMWGRVPFAPGPSPPPLLGNMDQERLKKQQELAAAALYQQLQHQQFLQLVSSRQLPQCALREKAALGDLXPPPPPPPQQQQQQLXAFLQQLQALKPPRGGDQNLLPXMSRSLSVPDSGRLWDVHXSASSQSGGEASLWDIPINSSXQGPILEQLQLQHKFQERREVELRAKREEEERKRREEKRRQQQQEEQKRRQEEEELFRRKHVRQQELLLKLLQQQQAVPVPPAPSSPPPLWAGLAKQGLSMKXLLELQLEGERQLHKQPPPREPARAQAPNHRVQLGGLGXAPLNQWVSEAGPLWGGPDKSGGGSSGLGLWEDXPKSGGSLVRGLGLKNSRSSPSLSDSYSHLSGRPIRKKXEEEEKLLKLLQGIPRPQDGFXQWCEQMLHXLSAXGSLDVPMAVAILKEVESPYDVHDYIRSCLGDXLEAKEFAKQFLERRAKQKASQQRQQQQEAWLSSASLQXAFQANHSXKLGPGEGSKAKRRALMLHSDPSILGYSLHGSSGEIESVDDY

SEQ ID NO: 10888 - protein, 13 aa, Homo sapiens
  MOD_RES (5)..(5): Selenocysteine
  MOD_RES (7)..(7): Selenocysteine
MAAEXQXLNFGPE

SEQ ID NO: 10889 - protein, 93 aa, Homo sapiens
  MOD_RES (5)..(5): Selenocysteine
  MOD_RES (7)..(7): Selenocysteine
  MOD_RES (25)..(25): Selenocysteine
  MOD_RES (85)..(85): Selenocysteine
MAAEXQXLNFGPEWLRALSSGGSIXSPPLSPALPKYKLADYRYGREEMLALFLKDNKIPSDLLDKEFLPILQEEPLPPLALVPFXEEEQRNFS

SEQ ID NO: 10890 - protein, 100 aa, Homo sapiens
  MOD_RES (5)..(5): Selenocysteine
  MOD_RES (7)..(7): Selenocysteine
  MOD_RES (25)..(25): Selenocysteine
  MOD_RES (85)..(85): Selenocysteine
MAAEXQXLNFGPEWLRALSSGGSIXSPPLSPALPKYKLADYRYGREEMLALFLKDNKIPSDLLDKEFLPILQEEPLPPLALVPFXEEEQRNFSMSVNSAA

SEQ ID NO: 10891 - protein, 106 aa, Homo sapiens
  MOD_RES (5)..(5): Selenocysteine
  MOD_RES (7)..(7): Selenocysteine
  MOD_RES (25)..(25): Selenocysteine
  MOD_RES (85)..(85): Selenocysteine
  MOD_RES (105)..(105): Selenocysteine
MAAEXQXLNFGPEWLRALSSGGSIXSPPLSPALPKYKLADYRYGREEMLALFLKDNKIPSDLLDKEFLPILQEEPLPPLALVPFXEEEQRNFSMSVNSAAVLRLXG

SEQ ID NO: 10892 - protein, 113 aa, Homo sapiens
  MOD_RES (5)..(5): Selenocysteine
  MOD_RES (7)..(7): Selenocysteine
  MOD_RES (25)..(25): Selenocysteine
  MOD_RES (85)..(85): Selenocysteine
  MOD_RES (105)..(105): Selenocysteine
  MOD_RES (112)..(112): Selenocysteine
MAAEXQXLNFGPEWLRALSSGGSIXSPPLSPALPKYKLADYRYGREEMLALFLKDNKIPSDLLDKEFLPILQEEPLPPLALVPFXEEEQRNFSMSVNSAAVLRLXGRGGGGXV

SEQ ID NO: 10893 - protein, 115 aa, Homo sapiens
  MOD_RES (5)..(5): Selenocysteine
  MOD_RES (7)..(7): Selenocysteine
  MOD_RES (25)..(25): Selenocysteine
  MOD_RES (85)..(85): Selenocysteine
  MOD_RES (105)..(105): Selenocysteine
  MOD_RES (112)..(112): Selenocysteine
MAAEXQXLNFGPEWLRALSSGGSIXSPPLSPALPKYKLADYRYGREEMLALFLKDNKIPSDLLDKEFLPILQEEPLPPLALVPFXEEEQRNFSMSVNSAAVLRLXGRGGGGXVVG

SEQ ID NO: 10894 - protein, 1320 aa, Homo sapiens
  MOD_RES (5)..(5): Selenocysteine
  MOD_RES (7)..(7): Selenocysteine
  MOD_RES (25)..(25): Selenocysteine
  MOD_RES (85)..(85): Selenocysteine
  MOD_RES (105)..(105): Selenocysteine
  MOD_RES (112)..(112): Selenocysteine
  MOD_RES (210)..(210): Selenocysteine
  MOD_RES (321)..(321): Selenocysteine
  MOD_RES (373)..(373): Selenocysteine
  MOD_RES (381)..(381): Selenocysteine
  MOD_RES (391)..(391): Selenocysteine
  MOD_RES (394)..(394): Selenocysteine
  MOD_RES (403)..(403): Selenocysteine
  MOD_RES (423)..(423): Selenocysteine
  MOD_RES (426)..(426): Selenocysteine
  MOD_RES (433)..(433): Selenocysteine
  MOD_RES (465)..(465): Selenocysteine
  MOD_RES (482)..(482): Selenocysteine
  MOD_RES (488)..(488): Selenocysteine
  MOD_RES (501)..(501): Selenocysteine
  MOD_RES (585)..(585): Selenocysteine
  MOD_RES (632)..(632): Selenocysteine
  MOD_RES (638)..(638): Selenocysteine
  MOD_RES (686)..(686): Selenocysteine
  MOD_RES (701)..(701): Selenocysteine
  MOD_RES (709)..(709): Selenocysteine
  MOD_RES (718)..(718): Selenocysteine
  MOD_RES (723)..(723): Selenocysteine
  MOD_RES (737)..(739): Selenocysteine
  MOD_RES (949)..(949): Selenocysteine
  MOD_RES (956)..(957): Selenocysteine
  MOD_RES (964)..(964): Selenocysteine
  MOD_RES (1019)..(1020): Selenocysteine
  MOD_RES (1054)..(1054): Selenocysteine
  MOD_RES (1060)..(1060): Selenocysteine
  MOD_RES (1072)..(1072): Selenocysteine
  MOD_RES (1092)..(1092): Selenocysteine
  MOD_RES (1113)..(1113): Selenocysteine
  MOD_RES (1157)..(1157): Selenocysteine
  MOD_RES (1169)..(1169): Selenocysteine
  MOD_RES (1177)..(1177): Selenocysteine
  MOD_RES (1202)..(1202): Selenocysteine
  MOD_RES (1259)..(1259): Selenocysteine
  MOD_RES (1266)..(1266): Selenocysteine
  MOD_RES (1316)..(1316): Selenocysteine
MAAEXQXLNFGPEWLRALSSGGSIXSPPLSPALPKYKLADYRYGREEMLALFLKDNKIPSDLLDKEFLPILQEEPLPPLALVPFXEEEQRNFSMSVNSAAVLRLXGRGGGGXVVGAPRGRSSSRGRGRGRGECGFYQRSFDEVEGVFGRGGGREMHRSQSWEERGDRRFEKPGRKDVGKKNGYYCMYSPVLLLGQPLCQGRPNFEEGGPXSVGRKHEFIRSESENWRIFREEQNGEDEDGGWRLAGSRRDGERWRPHSPDGPRSAGWREHMERRRRFEFDFRDRDDERGYRRVRSGSGSIDDDRDSLPEWCLEDAEEEMGXFDSSGAFLSLKKVQKEPIPEEQEMDFRPVDEGEECSDSEGSHNEEAKEPDKXNKKEGEKXDRVGVASEEXPQXSSSSARPGXPSDHQSQEASQFERKDEPKXEQXEKAEEEXRMENSLPAKVPSRGDEMVADVQQPLSQIPSDXASPLLILPPPVPNPSPXLRPVEXPVVGAPGMGSVSXEPDDEEGLKHLEQQAEKMVAYLQDSALDDERLASKLQEHRAKGVSIPLMHEAMQKWYYKDPQGEIQGPFNNQEMAEWFQAGYFXMSLLVKRACDESFQPLGDIMKMWGRVPFSPGPAPPPHMGELDQERLXRQQELXALYQMQHLQYQQFLIQQQYAQVLAQQQKAALSSQQQQQLALLLQQFQXLKMRISDQNIIPSVXRSVSVPDXGSIWELQPXASQPXVWEGGSVWDLPLDXXXPGPALEQLQQLEKAKAAKLEQERREAEMRAKREEEERKRQEELRRQQEEILRRQQEEERKRREEEELARRKQEEALRRQREQEIALRRQREEEERQQQEEALRRLEERRREEEERRKQEELLRKQEEEAAKWAREEEEAQRRLEENRLRMEEEAARLRHEEEERKRKELEVQRQKELMRQRQQQQEALRRLQQQQQQQQLAQMKLPSSSXWGQQSNXXACQSQAXLSLAEIQKLEEERERQLREEQRRQQRELMKALQQQQQQQQQKLSGWGNVSKPSGXXKSLLEIQQEEARQMQKQQQQQQQHQQPNRARNNXHSNLHXSIGNSVWGSINXGPPNQWASDLVSSIWSNADXKNSNMGFWDDAVKEVGPRNSXNKNKNNASLSKSVGVSNRQNKKVEEEEKLLKLFQGVNKAQDGFXQWCEQMLHALNXANNLDVPXFVSFLKEVESPYEVHDYIRAYLGDXSEAKEFAKQFLERRAKQKANQQRQQQQLPQQQQQQPPQQPPQQPQQQDSVWGMNHSXLHSVFQXNQSNNQQSNFEAVQSGKKKKKQKMVRADPSLLGFSVNASSERLNMGEIEXLDDY

SEQ ID NO: 10895 - protein, 1321 aa, Homo sapiens
  MOD_RES (5)..(5): Selenocysteine
  MOD_RES (7)..(7): Selenocysteine
  MOD_RES (25)..(25): Selenocysteine
  MOD_RES (85)..(85): Selenocysteine
  MOD_RES (105)..(105): Selenocysteine
  MOD_RES (112)..(112): Selenocysteine
  MOD_RES (210)..(210): Selenocysteine
  MOD_RES (321)..(321): Selenocysteine
  MOD_RES (373)..(373): Selenocysteine
  MOD_RES (381)..(381): Selenocysteine
  MOD_RES (392)..(392): Selenocysteine
  MOD_RES (395)..(395): Selenocysteine
  MOD_RES (404)..(404): Selenocysteine
  MOD_RES (424)..(424): Selenocysteine
  MOD_RES (427)..(427): Selenocysteine
  MOD_RES (434)..(434): Selenocysteine
  MOD_RES (466)..(466): Selenocysteine
  MOD_RES (483)..(483): Selenocysteine
  MOD_RES (489)..(489): Selenocysteine
  MOD_RES (502)..(502): Selenocysteine
  MOD_RES (586)..(586): Selenocysteine
  MOD_RES (633)..(633): Selenocysteine
  MOD_RES (639)..(639): Selenocysteine
  MOD_RES (687)..(687): Selenocysteine
  MOD_RES (702)..(702): Selenocysteine
  MOD_RES (710)..(710): Selenocysteine
  MOD_RES (719)..(719): Selenocysteine
  MOD_RES (724)..(724): Selenocysteine
  MOD_RES (738)..(740): Selenocysteine
  MOD_RES (950)..(950): Selenocysteine
  MOD_RES (957)..(958): Selenocysteine
  MOD_RES (965)..(965): Selenocysteine
  MOD_RES (1020)..(1021): Selenocysteine
  MOD_RES (1055)..(1055): Selenocysteine
  MOD_RES (1061)..(1061): Selenocysteine
  MOD_RES (1073)..(1073): Selenocysteine
  MOD_RES (1093)..(1093): Selenocysteine
  MOD_RES (1114)..(1114): Selenocysteine
  MOD_RES (1158)..(1158): Selenocysteine
  MOD_RES (1170)..(1170): Selenocysteine
  MOD_RES (1178)..(1178): Selenocysteine
  MOD_RES (1203)..(1203): Selenocysteine
  MOD_RES (1260)..(1260): Selenocysteine
  MOD_RES (1267)..(1267): Selenocysteine
  MOD_RES (1317)..(1317): Selenocysteine
MAAEXQXLNFGPEWLRALSSGGSIXSPPLSPALPKYKLADYRYGREEMLALFLKDNKIPSDLLDKEFLPILQEEPLPPLALVPFXEEEQRNFSMSVNSAAVLRLXGRGGGGXVVGAPRGRSSSRGRGRGRGECGFYQRSFDEVEGVFGRGGGREMHRSQSWEERGDRRFEKPGRKDVGKKNGYYCMYSPVLLLGQPLCQGRPNFEEGGPXSVGRKHEFIRSESENWRIFREEQNGEDEDGGWRLAGSRRDGERWRPHSPDGPRSAGWREHMERRRRFEFDFRDRDDERGYRRVRSGSGSIDDDRDSLPEWCLEDAEEEMGXFDSSGAFLSLKKVQKEPIPEEQEMDFRPVDEGEECSDSEGSHNEEAKEPDKXNKKEGEKXDRVGVEASEEXPQXSSSSARPGXPSDHQSQEASQFERKDEPKXEQXEKAEEEXRMENSLPAKVPSRGDEMVADVQQPLSQIPSDXASPLLILPPPVPNPSPXLRPVEXPVVGAPGMGSVSXEPDDEEGLKHLEQQAEKMVAYLQDSALDDERLASKLQEHRAKGVSIPLMHEAMQKWYYKDPQGEIQGPFNNQEMAEWFQAGYFXMSLLVKRACDESFQPLGDIMKMWGRVPFSPGPAPPPHMGELDQERLXRQQELXALYQMQHLQYQQFLIQQQYAQVLAQQQKAALSSQQQQQLALLLQQFQXLKMRISDQNIIPSVXRSVSVPDXGSIWELQPXASQPXVWEGGSVWDLPLDXXXPGPALEQLQQLEKAKAAKLEQERREAEMRAKREEEERKRQEELRRQQEEILRRQQEEERKRREEEELARRKQEEALRRQREQEIALRRQREEEERQQQEEALRRLEERRREEEERRKQEELLRKQEEEAAKWAREEEEAQRRLEENRLRMEEEAARLRHEEEERKRKELEVQRQKELMRQRQQQQEALRRLQQQQQQQQLAQMKLPSSSXWGQQSNXXACQSQAXLSLAEIQKLEEERERQLREEQRRQQRELMKALQQQQQQQQQKLSGWGNVSKPSGXXKSLLEIQQEEARQMQKQQQQQQQHQQPNRARNNXHSNLHXSIGNSVWGSINXGPPNQWASDLVSSIWSNADXKNSNMGFWDDAVKEVGPRNSXNKNKNNASLSKSVGVSNRQNKKVEEEEKLLKLFQGVNKAQDGFXQWCEQMLHALNXANNLDVPXFVSFLKEVESPYEVHDYIRAYLGDXSEAKEFAKQFLERRAKQKANQQRQQQQLPQQQQQQPPQQPPQQPQQQDSVWGMNHSXLHSVFQXNQSNNQQSNFEAVQSGKKKKKQKMVRADPSLLGFSVNASSERLNMGEIEXLDDY

SEQ ID NO: 10896 - protein, 1299 aa, Homo sapiens
  MOD_RES (5)..(5): Selenocysteine
  MOD_RES (7)..(7): Selenocysteine
  MOD_RES (25)..(25): Selenocysteine
  MOD_RES (85)..(85): Selenocysteine
  MOD_RES (105)..(105): Selenocysteine
  MOD_RES (112)..(112): Selenocysteine
  MOD_RES (188)..(188): Selenocysteine
  MOD_RES (299)..(299): Selenocysteine
  MOD_RES (351)..(351): Selenocysteine
  MOD_RES (359)..(359): Selenocysteine
  MOD_RES (370)..(370): Selenocysteine
  MOD_RES (373)..(373): Selenocysteine
  MOD_RES (382)..(382): Selenocysteine
  MOD_RES (402)..(402): Selenocysteine
  MOD_RES (405)..(405): Selenocysteine
  MOD_RES (412)..(412): Selenocysteine
  MOD_RES (444)..(444): Selenocysteine
  MOD_RES (461)..(461): Selenocysteine
  MOD_RES (467)..(467): Selenocysteine
  MOD_RES (480)..(480): Selenocysteine
  MOD_RES (564)..(564): Selenocysteine
  MOD_RES (611)..(611): Selenocysteine
  MOD_RES (617)..(617): Selenocysteine
  MOD_RES (665)..(665): Selenocysteine
  MOD_RES (680)..(680): Selenocysteine
  MOD_RES (688)..(688): Selenocysteine
  MOD_RES (697)..(697): Selenocysteine
  MOD_RES (702)..(702): Selenocysteine
  MOD_RES (716)..(718): Selenocysteine
  MOD_RES (928)..(928): Selenocysteine
  MOD_RES (935)..(936): Selenocysteine
  MOD_RES (943)..(943): Selenocysteine
  MOD_RES (998)..(999): Selenocysteine
  MOD_RES (1033)..(1033): Selenocysteine
  MOD_RES (1039)..(1039): Selenocysteine
  MOD_RES (1051)..(1051): Selenocysteine
  MOD_RES (1071)..(1071): Selenocysteine
  MOD_RES (1092)..(1092): Selenocysteine
  MOD_RES (1136)..(1136): Selenocysteine
  MOD_RES (1148)..(1148): Selenocysteine
  MOD_RES (1156)..(1156): Selenocysteine
  MOD_RES (1181)..(1181): Selenocysteine
  MOD_RES (1238)..(1238): Selenocysteine
  MOD_RES (1245)..(1245): Selenocysteine
  MOD_RES (1295)..(1295): Selenocysteine
MAAEXQXLNFGPEWLRALSSGGSIXSPPLSPALPKYKLADYRYGREEMLALFLKDNKIPSDLLDKEFLPILQEEPLPPLALVPFXEEEQRNFSMSVNSAAVLRLXGRGGGGXVVGAPRGRSSSRGRGRGRGECGFYQRSFDEVEGVFGRGGGREMHRSQSWEERGDRRFEKPGRKDVGRPNFEEGGPXSVGRKHEFIRSESENWRIFREEQNGEDEDGGWRLAGSRRDGERWRPHSPDGPRSAGWREHMERRRRFEFDFRDRDDERGYRRVRSGSGSIDDDRDSLPEWCLEDAEEEMGXFDSSGAFLSLKKVQKEPIPEEQEMDFRPVDEGEECSDSEGSHNEEAKEPDKXNKKEGEKXDRVGVEASEEXPQXSSSSARPGXPSDHQSQEASQFERKDEPKXEQXEKAEEEXRMENSLPAKVPSRGDEMVADVQQPLSQIPSDXASPLLILPPPVPNPSPXLRPVEXPVVGAPGMGSVSXEPDDEEGLKHLEQQAEKMVAYLQDSALDDERLASKLQEHRAKGVSIPLMHEAMQKWYYKDPQGEIQGPFNNQEMAEWFQAGYFXMSLLVKRACDESFQPLGDIMKMWGRVPFSPGPAPPPHMGELDQERLXRQQELXALYQMQHLQYQQFLIQQQYAQVLAQQQKAALSSQQQQQLALLLQQFQXLKMRISDQNIIPSVXRSVSVPDXGSIWELQPXASQPXVWEGGSVWDLPLDXXXPGPALEQLQQLEKAKAAKLEQERREAEMRAKREEEERKRQEELRRQQEEILRRQQEEERKRREEEELARRKQEEALRRQREQEIALRRQREEEERQQQEEALRRLEERRREEEERRKQEELLRKQEEEAAKWAREEEEAQRRLEENRLRMEEEAARLRHEEEERKRKELEVQRQKELMRQRQQQQEALRRLQQQQQQQQLAQMKLPSSSXWGQQSNXXACQSQAXLSLAEIQKLEEERERQLREEQRRQQRELMKALQQQQQQQQQKLSGWGNVSKPSGXXKSLLEIQQEEARQMQKQQQQQQQHQQPNRARNNXHSNLHXSIGNSVWGSINXGPPNQWASDLVSSIWSNADXKNSNMGFWDDAVKEVGPRNSXNKNKNNASLSKSVGVSNRQNKKVEEEEKLLKLFQGVNKAQDGFXQWCEQMLHALNXANNLDVPXFVSFLKEVESPYEVHDYIRAYLGDXSEAKEFAKQFLERRAKQKANQQRQQQQLPQQQQQQPPQQPPQQPQQQDSVWGMNHSXLHSVFQXNQSNNQQSNFEAVQSGKKKKKQKMVRADPSLLGFSVNASSERLNMGEIEXLDDY

SEQ ID NO: 10897 - protein, 836 aa, Homo sapiens
  MOD_RES (5)..(5): Selenocysteine
  MOD_RES (7)..(7): Selenocysteine
  MOD_RES (25)..(25): Selenocysteine
  MOD_RES (85)..(85): Selenocysteine
  MOD_RES (105)..(105): Selenocysteine
  MOD_RES (112)..(112): Selenocysteine
  MOD_RES (188)..(188): Selenocysteine
  MOD_RES (293)..(293): Selenocysteine
  MOD_RES (345)..(345): Selenocysteine
  MOD_RES (353)..(353): Selenocysteine
  MOD_RES (364)..(364): Selenocysteine
  MOD_RES (367)..(367): Selenocysteine
  MOD_RES (376)..(376): Selenocysteine
  MOD_RES (396)..(396): Selenocysteine
  MOD_RES (399)..(399): Selenocysteine
  MOD_RES (406)..(406): Selenocysteine
  MOD_RES (438)..(438): Selenocysteine
  MOD_RES (455)..(455): Selenocysteine
  MOD_RES (461)..(461): Selenocysteine
  MOD_RES (474)..(474): Selenocysteine
  MOD_RES (558)..(558): Selenocysteine
  MOD_RES (605)..(605): Selenocysteine
  MOD_RES (611)..(611): Selenocysteine
  MOD_RES (659)..(659): Selenocysteine
  MOD_RES (674)..(674): Selenocysteine
  MOD_RES (682)..(682): Selenocysteine
  MOD_RES (691)..(691): Selenocysteine
  MOD_RES (696)..(696): Selenocysteine
  MOD_RES (710)..(712): Selenocysteine
MAAEXQXLNFGPEWLRALSSGGSIXSPPLSPALPKYKLADYRYGREEMLALFLKDNKIPSDLLDKEFLPILQEEPLPPLALVPFXEEEQRNFSMSVNSAAVLRLXGRGGGGXVVGAPRGRSSSRGRGRGRGECGFYQRSFDEVEGVFGRGGGREMHRSQSWEERGDRRFEKPGRKDVGRPNFEEGGPXSVGRKHEFIRSESENWRIFREEQNGEDEDGGWRLAGSRRDGERWRPHSPGWREHMERRRRFEFDFRDRDDERGYRRVRSGSGSIDDDRDSLPEWCLEDAEEEMGXFDSSGAFLSLKKVQKEPIPEEQEMDFRPVDEGEECSDSEGSHNEEAKEPDKXNKKEGEKXDRVGVEASEEXPQXSSSSARPGXPSDHQSQEASQFERKDEPKXEQXEKAEEEXRMENSLPAKVPSRGDEMVADVQQPLSQIPSDXASPLLILPPPVPNPSPXLRPVEXPVVGAPGMGSVSXEPDDEEGLKHLEQQAEKMVAYLQDSALDDERLASKLQEHRAKGVSIPLMHEAMQKWYYKDPQGEIQGPFNNQEMAEWFQAGYFXMSLLVKRACDESFQPLGDIMKMWGRVPFSPGPAPPPHMGELDQERLXRQQELXALYQMQHLQYQQFLIQQQYAQVLAQQQKAALSSQQQQQLALLLQQFQXLKMRISDQNIIPSVXRSVSVPDXGSIWELQPXASQPXVWEGGSVWDLPLDXXXPGPALEQLQQLEKAKAAKLEQERREAEMRAKREEEERKRQEELRRQQEEILRRQQEEERKRREEEELARRKQEEALRRQREQEIALRRQREEEERQQQEEALRRLEERRREEEERRKQEELLRK

SEQ ID NO: 10898 - protein, 1293 aa, Homo sapiens
  MOD_RES (5)..(5): Selenocysteine
  MOD_RES (7)..(7): Selenocysteine
  MOD_RES (25)..(25): Selenocysteine
  MOD_RES (85)..(85): Selenocysteine
  MOD_RES (105)..(105): Selenocysteine
  MOD_RES (112)..(112): Selenocysteine
  MOD_RES (188)..(188): Selenocysteine
  MOD_RES (293)..(293): Selenocysteine
  MOD_RES (345)..(345): Selenocysteine
  MOD_RES (353)..(353): Selenocysteine
  MOD_RES (364)..(364): Selenocysteine
  MOD_RES (367)..(367): Selenocysteine
  MOD_RES (376)..(376): Selenocysteine
  MOD_RES (396)..(396): Selenocysteine
  MOD_RES (399)..(399): Selenocysteine
  MOD_RES (406)..(406): Selenocysteine
  MOD_RES (438)..(438): Selenocysteine
  MOD_RES (455)..(455): Selenocysteine
  MOD_RES (461)..(461): Selenocysteine
  MOD_RES (474)..(474): Selenocysteine
  MOD_RES (558)..(558): Selenocysteine
  MOD_RES (605)..(605): Selenocysteine
  MOD_RES (611)..(611): Selenocysteine
  MOD_RES (659)..(659): Selenocysteine
  MOD_RES (674)..(674): Selenocysteine
  MOD_RES (682)..(682): Selenocysteine
  MOD_RES (691)..(691): Selenocysteine
  MOD_RES (696)..(696): Selenocysteine
  MOD_RES (710)..(712): Selenocysteine
  MOD_RES (922)..(922): Selenocysteine
  MOD_RES (929)..(930): Selenocysteine
  MOD_RES (937)..(937): Selenocysteine
  MOD_RES (992)..(993): Selenocysteine
  MOD_RES (1027)..(1027): Selenocysteine
  MOD_RES (1033)..(1033): Selenocysteine
  MOD_RES (1045)..(1045): Selenocysteine
  MOD_RES (1065)..(1065): Selenocysteine
  MOD_RES (1086)..(1086): Selenocysteine
  MOD_RES (1130)..(1130): Selenocysteine
  MOD_RES (1142)..(1142): Selenocysteine
  MOD_RES (1150)..(1150): Selenocysteine
  MOD_RES (1175)..(1175): Selenocysteine
  MOD_RES (1232)..(1232): Selenocysteine
  MOD_RES (1239)..(1239): Selenocysteine
  MOD_RES (1289)..(1289): Selenocysteine
MAAEXQXLNFGPEWLRALSSGGSIXSPPLSPALPKYKLADYRYGREEMLALFLKDNKIPSDLLDKEFLPILQEEPLPPLALVPFXEEEQRNFSMSVNSAAVLRLXGRGGGGXVVGAPRGRSSSRGRGRGRGECGFYQRSFDEVEGVFGRGGGREMHRSQSWEERGDRRFEKPGRKDVGRPNFEEGGPXSVGRKHEFIRSESENWRIFREEQNGEDEDGGWRLAGSRRDGERWRPHSPGWREHMERRRRFEFDFRDRDDERGYRRVRSGSGSIDDDRDSLPEWCLEDAEEEMGXFDSSGAFLSLKKVQKEPIPEEQEMDFRPVDEGEECSDSEGSHNEEAKEPDKXNKKEGEKXDRVGVEASEEXPQXSSSSARPGXPSDHQSQEASQFERKDEPKXEQXEKAEEEXRMENSLPAKVPSRGDEMVADVQQPLSQIPSDXASPLLILPPPVPNPSPXLRPVEXPVVGAPGMGSVSXEPDDEEGLKHLEQQAEKMVAYLQDSALDDERLASKLQEHRAKGVSIPLMHEAMQKWYYKDPQGEIQGPFNNQEMAEWFQAGYFXMSLLVKRACDESFQPLGDIMKMWGRVPFSPGPAPPPHMGELDQERLXRQQELXALYQMQHLQYQQFLIQQQYAQVLAQQQKAALSSQQQQQLALLLQQFQXLKMRISDQNIIPSVXRSVSVPDXGSIWELQPXASQPXVWEGGSVWDLPLDXXXPGPALEQLQQLEKAKAAKLEQERREAEMRAKREEEERKRQEELRRQQEEILRRQQEEERKRREEEELARRKQEEALRRQREQEIALRRQREEEERQQQEEALRRLEERRREEEERRKQEELLRKQEEEAAKWAREEEEAQRRLEENRLRMEEEAARLRHEEEERKRKELEVQRQKELMRQRQQQQEALRRLQQQQQQQQLAQMKLPSSSXWGQQSNXXACQSQAXLSLAEIQKLEEERERQLREEQRRQQRELMKALQQQQQQQQQKLSGWGNVSKPSGXXKSLLEIQQEEARQMQKQQQQQQQHQQPNRARNNXHSNLHXSIGNSVWGSINXGPPNQWASDLVSSIWSNADXKNSNMGFWDDAVKEVGPRNSXNKNKNNASLSKSVGVSNRQNKKVEEEEKLLKLFQGVNKAQDGFXQWCEQMLHALNXANNLDVPXFVSFLKEVESPYEVHDYIRAYLGDXSEAKEFAKQFLERRAKQKANQQRQQQQLPQQQQQQPPQQPPQQPQQQDSVWGMNHSXLHSVFQXNQSNNQQSNFEAVQSGKKKKKQKMVRADPSLLGFSVNASSERLNMGEIEXLDDY

SEQ ID NO: 10899 - protein, 720 aa, Homo sapiens
  MOD_RES (5)..(5): Selenocysteine
  MOD_RES (7)..(7): Selenocysteine
  MOD_RES (25)..(25): Selenocysteine
  MOD_RES (85)..(85): Selenocysteine
  MOD_RES (105)..(105): Selenocysteine
  MOD_RES (112)..(112): Selenocysteine
  MOD_RES (137)..(137): Selenocysteine
  MOD_RES (242)..(242): Selenocysteine
  MOD_RES (294)..(294): Selenocysteine
  MOD_RES (302)..(302): Selenocysteine
  MOD_RES (313)..(313): Selenocysteine
  MOD_RES (316)..(316): Selenocysteine
  MOD_RES (325)..(325): Selenocysteine
  MOD_RES (345)..(345): Selenocysteine
  MOD_RES (348)..(348): Selenocysteine
  MOD_RES (355)..(355): Selenocysteine
  MOD_RES (387)..(387): Selenocysteine
  MOD_RES (404)..(404): Selenocysteine
  MOD_RES (410)..(410): Selenocysteine
  MOD_RES (423)..(423): Selenocysteine
  MOD_RES (507)..(507): Selenocysteine
  MOD_RES (554)..(554): Selenocysteine
  MOD_RES (560)..(560): Selenocysteine
  MOD_RES (608)..(608): Selenocysteine
  MOD_RES (623)..(623): Selenocysteine
  MOD_RES (631)..(631): Selenocysteine
  MOD_RES (640)..(640): Selenocysteine
  MOD_RES (645)..(645): Selenocysteine
  MOD_RES (659)..(661): Selenocysteine
MAAEXQXLNFGPEWLRALSSGGSIXSPPLSPALPKYKLADYRYGREEMLALFLKDNKIPSDLLDKEFLPILQEEPLPPLALVPFXEEEQRNFSMSVNSAAVLRLXGRGGGGXVVGAPRGRSSSRGRGRPNFEEGGPXSVGRKHEFIRSESENWRIFREEQNGEDEDGGWRLAGSRRDGERWRPHSPGWREHMERRRRFEFDFRDRDDERGYRRVRSGSGSIDDDRDSLPEWCLEDAEEEMGXFDSSGAFLSLKKVQKEPIPEEQEMDFRPVDEGEECSDSEGSHNEEAKEPDKXNKKEGEKXDRVGVEASEEXPQXSSSSARPGXPSDHQSQEASQFERKDEPKXEQXEKAEEEXRMENSLPAKVPSRGDEMVADVQQPLSQIPSDXASPLLILPPPVPNPSPXLRPVEXPVVGAPGMGSVSXEPDDEEGLKHLEQQAEKMVAYLQDSALDDERLASKLQEHRAKGVSIPLMHEAMQKWYYKDPQGEIQGPFNNQEMAEWFQAGYFXMSLLVKRACDESFQPLGDIMKMWGRVPFSPGPAPPPHMGELDQERLXRQQELXALYQMQHLQYQQFLIQQQYAQVLAQQQKAALSSQQQQQLALLLQQFQXLKMRISDQNIIPSVXRSVSVPDXGSIWELQPXASQPXVWEGGSVWDLPLDXXXPGPALEQLQQLEKAKAAKLEQERREAEMRAKREEEERKRQEELRRQQEEILRRQQEEER

SEQ ID NO: 10900 - protein, 92 aa, Homo sapiens
  MOD_RES (5)..(5): Selenocysteine
  MOD_RES (7)..(7): Selenocysteine
  MOD_RES (25)..(25): Selenocysteine
  MOD_RES (85)..(85): Selenocysteine
MAAEXQXLNFGPEWLRALSSGGSIXSPPLSPALPKYKLADYRYGREEMLALFLKDNKIPSDLLDKEFLPILQEEPLPPLALVPFXEEEQRQR

SEQ ID NO: 10901 - protein, 68 aa, Homo sapiens
  MOD_RES (5)..(5): Selenocysteine
  MOD_RES (7)..(7): Selenocysteine
  MOD_RES (25)..(25): Selenocysteine
MAAEXQXLNFGPEWLRALSSGGSIXSPPLSPALPKYKLADYRYGRGECGFYQRSFDEVEGVFGRGGGR

SEQ ID NO: 10902 - protein, 176 aa, Homo sapiens
  MOD_RES (81)..(81): Selenocysteine
  MOD_RES (133)..(133): Selenocysteine
  MOD_RES (141)..(141): Selenocysteine
  MOD_RES (152)..(152): Selenocysteine
  MOD_RES (155)..(155): Selenocysteine
  MOD_RES (164)..(164): Selenocysteine
MDRIWAEREKKFQLVKNKQDGPRSAGWREHMERRRRFEFDFRDRDDERGYRRVRSGSGSIDDDRDSLPEWCLEDAEEEMGXFDSSGAFLSLKKVQKEPIPEEQEMDFRPVDEGEECSDSEGSHNEEAKEPDKXNKKEGEKXDRVGVEASEEXPQXSSSSARPGXPSDHQSQEASQF

SEQ ID NO: 10903 - protein, 59 aa, Homo sapiens
  MOD_RES (37)..(37): Selenocysteine
MDRIWAEREKKFQLVKNKQDGPRSAGWREHMERRRSXERAYSRRAGDGLPACGRRGGVL

SEQ ID NO: 10904 - protein, 62 aa, Homo sapiens
  MOD_RES (51)..(51): Selenocysteine
MERRRRFEFDFRDRDDERGYRRVRSGSGSIDDDRDSLPEWCLEDAEEEMGXFDSSGAFLSLK

SEQ ID NO: 10905 - protein, 71 aa, Homo sapiens
  MOD_RES (51)..(51): Selenocysteine
MERRRRFEFDFRDRDDERGYRRVRSGSGSIDDDRDSLPEWCLEDAEEEMGXFDSSGAFLSLKKVQKEPIPE

SEQ ID NO: 10906 - protein, 143 aa, Homo sapiens
  MOD_RES (51)..(51): Selenocysteine
  MOD_RES (103)..(103): Selenocysteine
  MOD_RES (111)..(111): Selenocysteine
  MOD_RES (122)..(122): Selenocysteine
  MOD_RES (125)..(125): Selenocysteine
  MOD_RES (134)..(134): Selenocysteine
MERRRRFEFDFRDRDDERGYRRVRSGSGSIDDDRDSLPEWCLEDAEEEMGXFDSSGAFLSLKKVQKEPIPEEQEMDFRPVDEGEECSDSEGSHNEEAKEPDKXNKKEGEKXDRVGVEASEEXPQXSSSSARPGXPSDHQSQEA

SEQ ID NO: 10907 - protein, 90 aa, Homo sapiens
  MOD_RES (15)..(15): Selenocysteine
MISDGRPNFEEGGPXSVGRKHEFIRSESENWRIFREEQNGEDEDGGWRLAGSRRDGERWRPHSPDGPRSAGWREHMERRRRFEFDFRDRD

SEQ ID NO: 10908 - protein, 149 aa, Homo sapiens
  MOD_RES (27)..(28): Selenocysteine
  MOD_RES (62)..(62): Selenocysteine
  MOD_RES (68)..(68): Selenocysteine
  MOD_RES (80)..(80): Selenocysteine
  MOD_RES (100)..(100): Selenocysteine
  MOD_RES (121)..(121): Selenocysteine
MKALQQQQQQQQQKLSGWGNVSKPSGXXKSLLEIQQEEARQMQKQQQQQQQHQQPNRARNNXHSNLHXSIGNSVWGSINXGPPNQWASDLVSSIWSNADXKNSNMGFWDDAVKEVGPRNSXNKNKNNASLSKSVGVSNRQNKKVEEEEK

SEQ ID NO: 10909 - protein, 119 aa, Homo sapiens
  MOD_RES (2)..(2): Selenocysteine
  MOD_RES (19)..(19): Selenocysteine
MXKLPDDPGRPNFEEGGPXSVGRKHEFIRSESENWRIFREEQNGEDEDGGWRLAGSRRDGERWRPHSPDGPRSAGWREHMERRRRFEFDFRDRDDERGYRRVRSGSGSIDDDRDSLPEW

SEQ ID NO: 10910 - protein, 153 aa, Homo sapiens
  MOD_RES (4)..(4): Selenocysteine
  MOD_RES (6)..(6): Selenocysteine
  MOD_RES (56)..(56): Selenocysteine
  MOD_RES (92)..(92): Selenocysteine
  MOD_RES (145)..(145): Selenocysteine
MVAXKXFALLLLSLFLAVGLGEKKEGHFSALPSLPVGSHAKVSSPQPRGPRYAEGXFISDYSIAMDKIHQQDFVNWLLAQKGKKNDWKHNIXQREARALELASQANRKEEEAVEPQSSPAKNPSDEDLLRDLLIQELLACLLDQXNLCRLRSR

SEQ ID NO: 10911 - protein, 128 aa, Homo sapiens
  MOD_RES (5)..(5): Selenocysteine
  MOD_RES (33)..(33): Selenocysteine
  MOD_RES (37)..(37): Selenocysteine
  MOD_RES (47)..(47): Selenocysteine
  MOD_RES (76)..(76): Selenocysteine
  MOD_RES (81)..(81): Selenocysteine
KRRRXQAAGDSGWDMISQRSAGGRPGSGPQLGXGRGXLRLRSRGPAXVEDLPSAFEEKAIEKVDDLLESYMGIRDXELAAXMVELGKDKRNPDELAEALDERLGDFAFPDEFVFDVWGAIGDAKVGRY

SEQ ID NO: 10912 - protein, 121 aa, Homo sapiens
  MOD_RES (4)..(4): Selenocysteine
  MOD_RES (7)..(7): Selenocysteine
  MOD_RES (49)..(49): Selenocysteine
  MOD_RES (51)..(51): Selenocysteine
  MOD_RES (109)..(109): Selenocysteine
  MOD_RES (111)..(111): Selenocysteine
  MOD_RES (115)..(115): Selenocysteine
MFCXLNXHKVDMDKLLGGQIGLEDFIFAHVKGQRKEVEVFKSEDALGLXIXDNGAGYAFIKRIKEGSVIDHIHLISVGDMIEAINGQSLLGCRHYEVARLLKELPRGRXFXLKLXEPRKAF

SEQ ID NO: 10913 - protein, 159 aa, Homo sapiens
  MOD_RES (4)..(4): Selenocysteine
  MOD_RES (7)..(7): Selenocysteine
  MOD_RES (49)..(49): Selenocysteine
  MOD_RES (51)..(51): Selenocysteine
  MOD_RES (109)..(109): Selenocysteine
  MOD_RES (111)..(111): Selenocysteine
  MOD_RES (115)..(115): Selenocysteine
  MOD_RES (141)..(141): Selenocysteine
  MOD_RES (145)..(145): Selenocysteine
  MOD_RES (155)..(155): Selenocysteine
MFCXLNXHKVDMDKLLGGQIGLEDFIFAHVKGQRKEVEVFKSEDALGLXIXDNGAGYAFIKRIKEGSVIDHIHLISVGDMIEAINGQSLLGCRHYEVARLLKELPRGRXFXLKLXEPRKAFDMISQRSAGGRPGSGPQLGXGRGXLRLRSRGPAXVEDL

SEQ ID NO: 10914 - protein, 236 aa, Homo sapiens
  MOD_RES (4)..(4): Selenocysteine
  MOD_RES (7)..(7): Selenocysteine
  MOD_RES (49)..(49): Selenocysteine
  MOD_RES (51)..(51): Selenocysteine
  MOD_RES (109)..(109): Selenocysteine
  MOD_RES (111)..(111): Selenocysteine
  MOD_RES (115)..(115): Selenocysteine
  MOD_RES (141)..(141): Selenocysteine
  MOD_RES (145)..(145): Selenocysteine
  MOD_RES (155)..(155): Selenocysteine
  MOD_RES (184)..(184): Selenocysteine
  MOD_RES (189)..(189): Selenocysteine
MFCXLNXHKVDMDKLLGGQIGLEDFIFAHVKGQRKEVEVFKSEDALGLXIXDNGAGYAFIKRIKEGSVIDHIHLISVGDMIEAINGQSLLGCRHYEVARLLKELPRGRXFXLKLXEPRKAFDMISQRSAGGRPGSGPQLGXGRGXLRLRSRGPAXVEDLPSAFEEKAIEKVDDLLESYMGIRDXELAAXMVELGKDKRNPDELAEALDERLGDFAFPDEFVFDVWGAIGDAKVGRY

SEQ ID NO: 10915 - protein, 62 aa, Homo sapiens
  MOD_RES (4)..(4): Selenocysteine
  MOD_RES (7)..(7): Selenocysteine
  MOD_RES (49)..(49): Selenocysteine
  MOD_RES (51)..(51): Selenocysteine
  MOD_RES (62)..(62): Selenocysteine
MFCXLNXHKVDMDKLLGGQIGLEDFIFAHVKGQRKEVEVFKSEDALGLXIXDNGAGYAFIKX

SEQ ID NO: 10916 - protein, 40 aa, Homo sapiens
MPLGLGRRKKAPPLVENEEAEPGRGGLGVGEPGPLGGGGS

SEQ ID NO: 10917 - protein, 333 aa, Homo sapiens
  MOD_RES (62)..(62): Selenocysteine
  MOD_RES (70)..(70): Selenocysteine
  MOD_RES (77)..(77): Selenocysteine
  MOD_RES (94)..(94): Selenocysteine
  MOD_RES (101)..(101): Selenocysteine
  MOD_RES (104)..(104): Selenocysteine
  MOD_RES (146)..(146): Selenocysteine
  MOD_RES (148)..(148): Selenocysteine
  MOD_RES (206)..(206): Selenocysteine
  MOD_RES (208)..(208): Selenocysteine
  MOD_RES (212)..(212): Selenocysteine
  MOD_RES (238)..(238): Selenocysteine
  MOD_RES (242)..(242): Selenocysteine
  MOD_RES (252)..(252): Selenocysteine
  MOD_RES (281)..(281): Selenocysteine
  MOD_RES (286)..(286): Selenocysteine
MPLGLGRRKKAPPLVENEEAEPGRGGLGVGEPGPLGGGGSGGPQMGLPPPPPALRPRLVFHXQLAHGSPXGRIEGFXNVKELYGKIAEAFRLPXAEVMFCXLNXHKVDMDKLLGGQIGLEDFIFAHVKGQRKEVEVFKSEDALGLXIXDNGAGYAFIKRIKEGSVIDHIHLISVGDMIEAINGQSLLGCRHYEVARLLKELPRGRXFXLKLXEPRKAFDMISQRSAGGRPGSGPQLGXGRGXLRLRSRGPAXVEDLPSAFEEKAIEKVDDLLESYMGIRDXELAAXMVELGKDKRNPDELAEALDERLGDFAFPDEFVFDVWGAIGDAKVGRY

SEQ ID NO: 10918 - protein, 265 aa, Homo sapiens
  MOD_RES (2)..(3): Selenocysteine
  MOD_RES (25)..(25): Selenocysteine
  MOD_RES (31)..(31): Selenocysteine
  MOD_RES (49)..(49): Selenocysteine
  MOD_RES (79)..(79): Selenocysteine
  MOD_RES (116)..(116): Selenocysteine
  MOD_RES (142)..(142): Selenocysteine
  MOD_RES (151)..(151): Selenocysteine
  MOD_RES (168)..(168): Selenocysteine
  MOD_RES (178)..(178): Selenocysteine
  MOD_RES (218)..(218): Selenocysteine
  MOD_RES (223)..(223): Selenocysteine
  MOD_RES (232)..(232): Selenocysteine
MXXSPILQLLLRLSLCGLLLQRAEXGSKGQXAGELYQRWERYRRECQEXLAAAEPPSGLACNGSFDMYVCWDYAAPNAXARASCPWYLPWHHHVAAGFVLRQCGSDGQWGLWRDHXQCENPEKNEAFLDQRLILERLQVMYXVGYSLSLAXLLLALLILSLFRRLHCXRNYIHINLFXSFMLRAAAILSRDRLLPRPGPYLGDQALALWNQALAACRXAQIVXQYCVGANYXWLLVEGVYLHSLLVLVGGSEEGHFRYYLLLGWD

SEQ ID NO: 10919 - protein, 419 aa, Homo sapiens
  MOD_RES (2)..(3): Selenocysteine
  MOD_RES (25)..(25): Selenocysteine
  MOD_RES (31)..(31): Selenocysteine
  MOD_RES (49)..(49): Selenocysteine
  MOD_RES (79)..(79): Selenocysteine
  MOD_RES (116)..(116): Selenocysteine
  MOD_RES (142)..(142): Selenocysteine
  MOD_RES (151)..(151): Selenocysteine
  MOD_RES (168)..(168): Selenocysteine
  MOD_RES (178)..(178): Selenocysteine
  MOD_RES (218)..(218): Selenocysteine
  MOD_RES (223)..(223): Selenocysteine
  MOD_RES (232)..(232): Selenocysteine
  MOD_RES (284)..(284): Selenocysteine
  MOD_RES (301)..(301): Selenocysteine
  MOD_RES (306)..(306): Selenocysteine
  MOD_RES (327)..(327): Selenocysteine
  MOD_RES (343)..(343): Selenocysteine
  MOD_RES (345)..(345): Selenocysteine
  MOD_RES (361)..(361): Selenocysteine
MXXSPILQLLLRLSLCGLLLQRAEXGSKGQXAGELYQRWERYRRECQEXLAAAEPPSGLACNGSFDMYVCWDYAAPNAXARASCPWYLPWHHHVAAGFVLRQCGSDGQWGLWRDHXQCENPEKNEAFLDQRLILERLQVMYXVGYSLSLAXLLLALLILSLFRRLHCXRNYIHINLFXSFMLRAAAILSRDRLLPRPGPYLGDQALALWNQALAACRXAQIVXQYCVGANYXWLLVEGVYLHSLLVLVGGSEEGHFRYYLLLGWGAPALFVIPWVIVRYLYENXQCWERNEVKAIWWIIRXPILMXILINFLIFIRILGILLSKLRXRQMRCRDYRLRLARSXLXLVPLLGVHEVVFAPVXEEQARGALRFAKLGFEIFLSSFQGFLVSVLYCFINKEVGRDPAAAPALWRQRGVRRRL

SEQ ID NO: 10920 - protein, 466 aa, Homo sapiens
  MOD_RES (2)..(3): Selenocysteine
  MOD_RES (25)..(25): Selenocysteine
  MOD_RES (31)..(31): Selenocysteine
  MOD_RES (49)..(49): Selenocysteine
  MOD_RES (79)..(79): Selenocysteine
  MOD_RES (116)..(116): Selenocysteine
  MOD_RES (142)..(142): Selenocysteine
  MOD_RES (151)..(151): Selenocysteine
  MOD_RES (168)..(168): Selenocysteine
  MOD_RES (178)..(178): Selenocysteine
  MOD_RES (218)..(218): Selenocysteine
  MOD_RES (223)..(223): Selenocysteine
  MOD_RES (232)..(232): Selenocysteine
  MOD_RES (284)..(284): Selenocysteine
  MOD_RES (301)..(301): Selenocysteine
  MOD_RES (306)..(306): Selenocysteine
  MOD_RES (327)..(327): Selenocysteine
  MOD_RES (343)..(343): Selenocysteine
  MOD_RES (345)..(345): Selenocysteine
  MOD_RES (361)..(361): Selenocysteine
  MOD_RES (442)..(442): Selenocysteine
  MOD_RES (450)..(450): Selenocysteine
MXXSPILQLLLRLSLCGLLLQRAEXGSKGQXAGELYQRWERYRRECQEXLAAAEPPSGLACNGSFDMYVCWDYAAPNAXARASCPWYLPWHHHVAAGFVLRQCGSDGQWGLWRDHXQCENPEKNEAFLDQRLILERLQVMYXVGYSLSLAXLLLALLILSLFRRLHCXRNYIHINLFXSFMLRAAAILSRDRLLPRPGPYLGDQALALWNQALAACRXAQIVXQYCVGANYXWLLVEGVYLHSLLVLVGGSEEGHFRYYLLLGWGAPALFVIPWVIVRYLYENXQCWERNEVKAIWWIIRXPILMXILINFLIFIRILGILLSKLRXRQMRCRDYRLRLARSXLXLVPLLGVHEVVFAPVXEEQARGALRFAKLGFEIFLSSFQGFLVSVLYCFINKEVQSEIRRGWHHCRLRRSLGEEQRQLPERAFRALPSGSGPGEVPXSRGLSSGXLPGPGNEASRELESYC

SEQ ID NO: 10921 - protein, 430 aa, Homo sapiens
  MOD_RES (2)..(3): Selenocysteine
  MOD_RES (25)..(25): Selenocysteine
  MOD_RES (31)..(31): Selenocysteine
  MOD_RES (49)..(49): Selenocysteine
  MOD_RES (80)..(80): Selenocysteine
  MOD_RES (106)..(106): Selenocysteine
  MOD_RES (115)..(115): Selenocysteine
  MOD_RES (132)..(132): Selenocysteine
  MOD_RES (142)..(142): Selenocysteine
  MOD_RES (182)..(182): Selenocysteine
  MOD_RES (187)..(187): Selenocysteine
  MOD_RES (196)..(196): Selenocysteine
  MOD_RES (248)..(248): Selenocysteine
  MOD_RES (265)..(265): Selenocysteine
  MOD_RES (270)..(270): Selenocysteine
  MOD_RES (291)..(291): Selenocysteine
  MOD_RES (307)..(307): Selenocysteine
  MOD_RES (309)..(309): Selenocysteine
  MOD_RES (325)..(325): Selenocysteine
  MOD_RES (406)..(406): Selenocysteine
  MOD_RES (414)..(414): Selenocysteine
MXXSPILQLLLRLSLCGLLLQRAEXGSKGQXAGELYQRWERYRRECQEXLAAAEPPSVAAGFVLRQCGSDGQWGLWRDHXQCENPEKNEAFLDQRLILERLQVMYXVGYSLSLAXLLLALLILSLFRRLHCXRNYIHINLFXSFMLRAAAILSRDRLLPRPGPYLGDQALALWNQALAACRXAQIVXQYCVGANYXWLLVEGVYLHSLLVLVGGSEEGHFRYYLLLGWGAPALFVIPWVIVRYLYENXQCWERNEVKAIWWIIRXPILMXILINFLIFIRILGILLSKLRXRQMRCRDYRLRLARSXLXLVPLLGVHEVVFAPVXEEQARGALRFAKLGFEIFLSSFQGFLVSVLYCFINKEVQSEIRRGWHHCRLRRSLGEEQRQLPERAFRALPSGSGPGEVPXSRGLSSGXLPGPGNEASRELESYC

SEQ ID NO: 10922 - protein, 17 aa, Homo sapiens
  MOD_RES (13)..(13): Selenocysteine
MYVCWDYAAPNAXARAS

SEQ ID NO: 10923 - protein, 229 aa, Homo sapiens
  MOD_RES (60)..(60): Selenocysteine
  MOD_RES (65)..(65): Selenocysteine
  MOD_RES (68)..(68): Selenocysteine
  MOD_RES (85)..(85): Selenocysteine
  MOD_RES (103)..(103): Selenocysteine
  MOD_RES (137)..(137): Selenocysteine
  MOD_RES (145)..(145): Selenocysteine
  MOD_RES (148)..(148): Selenocysteine
  MOD_RES (167)..(167): Selenocysteine
  MOD_RES (180)..(180): Selenocysteine
  MOD_RES (225)..(225): Selenocysteine
DHKNGHYIIPQMADSLDLSELAKAAKKKLQALSNRLFEELAMDVYDEVDRRENDAVWLAXQNHSXLVXERSAVPFLPVNPEYSAXRNQGRQKLARFNAREFAXLIIDILNNLELSLRSQSDLDDQHDYDSVASDEDXDQEPLRSXGAXRSNRARSMDSSDLSDGAVXLQEYLELKKALAXSEAKVQQLMKVNSSLSDELRRLQREIHKLQAENLQLRQPPGPVPXPPLP

SEQ ID NO: 10924 - protein, 177 aa, Homo sapiens
  MOD_RES (31)..(31): Selenocysteine
  MOD_RES (47)..(47): Selenocysteine
  MOD_RES (64)..(64): Selenocysteine
  MOD_RES (105)..(105): Selenocysteine
  MOD_RES (112)..(112): Selenocysteine
  MOD_RES (116)..(116): Selenocysteine
  MOD_RES (146)..(146): Selenocysteine
ELEDDAIYSVHVPAGLYRIRKGVSASAVPFXPSSPLLSCSQEGSRHXSKLSRHGSGADSDYENXQSGDPLLGLEGKRFLELGKEEDFHPELESLDGDLDPGLPSXEDVILKXEQVXKNIQELLRAAQEFKHDSFVPCSEKIHLAVXEMASLFPKVQGPKRGPGVGGPRAGAGVENPI

SEQ ID NO: 10925 - protein, 173 aa, Homo sapiens
  MOD_RES (15)..(15): Selenocysteine
  MOD_RES (71)..(71): Selenocysteine
  MOD_RES (78)..(78): Selenocysteine
  MOD_RES (141)..(141): Selenocysteine
  MOD_RES (155)..(155): Selenocysteine
  MOD_RES (160)..(160): Selenocysteine
MEHRHSPQPLPAALXAPAEEGHRGLYSHLDPGWASISRGVLVCDECCSVHRSLGRHISIVKHLRHSAWPPXLLQMVHXLASNGANSIWEHSLLDPAQVQSGRRKANPQDKVHPIKSEFIRAKYQMLAFVHKLPCRDDDGVXAKDLSKQLHSSVRXGNLEXCLRLLSLGAQANF

SEQ ID NO: 10926 - protein, 747 aa, Homo sapiens
  MOD_RES (59)..(59): Selenocysteine
  MOD_RES (66)..(66): Selenocysteine
  MOD_RES (129)..(129): Selenocysteine
  MOD_RES (143)..(143): Selenocysteine
  MOD_RES (148)..(148): Selenocysteine
  MOD_RES (168)..(169): Selenocysteine
  MOD_RES (180)..(180): Selenocysteine
  MOD_RES (202)..(202): Selenocysteine
  MOD_RES (227)..(227): Selenocysteine
  MOD_RES (308)..(308): Selenocysteine
  MOD_RES (313)..(313): Selenocysteine
  MOD_RES (316)..(316): Selenocysteine
  MOD_RES (333)..(333): Selenocysteine
  MOD_RES (351)..(351): Selenocysteine
  MOD_RES (373)..(373): Selenocysteine
  MOD_RES (401)..(401): Selenocysteine
  MOD_RES (409)..(409): Selenocysteine
  MOD_RES (412)..(412): Selenocysteine
  MOD_RES (431)..(431): Selenocysteine
  MOD_RES (444)..(444): Selenocysteine
  MOD_RES (489)..(489): Selenocysteine
  MOD_RES (500)..(500): Selenocysteine
  MOD_RES (508)..(508): Selenocysteine
  MOD_RES (537)..(538): Selenocysteine
  MOD_RES (546)..(546): Selenocysteine
  MOD_RES (570)..(570): Selenocysteine
  MOD_RES (587)..(587): Selenocysteine
  MOD_RES (628)..(628): Selenocysteine
  MOD_RES (635)..(635): Selenocysteine
  MOD_RES (639)..(639): Selenocysteine
  MOD_RES (669)..(669): Selenocysteine
  MOD_RES (705)..(705): Selenocysteine
  MOD_RES (720)..(720): Selenocysteine
  MOD_RES (739)..(739): Selenocysteine
  MOD_RES (741)..(742): Selenocysteine
MSRKGPRAEVCADCSAPDPGWASISRGVLVCDECCSVHRSLGRHISIVKHLRHSAWPPXLLQMVHXLASNGANSIWEHSLLDPAQVQSGRRKANPQDKVHPIKSEFIRAKYQMLAFVHKLPCRDDDGVXAKDLSKQLHSSVRXGNLEXCLRLLSLGAQANFFHPEKGXXPLHVAAKAGQXLQAELLVVYGADPGSPDVNGRXPIDYARQAGHHELAERLVECQYELXDRLAFYLCGRKPDHKNGHYIIPQMADRSRQKCMSQSLDLSELAKAAKKKLQALSNRLFEELAMDVYDEVDRRENDAVWLAXQNHSXLVXERSAVPFLPVNPEYSAXRNQGRQKLARFNAREFAXLIIDILSEAKRRQQGKSLSSPXDNLELSLRSQSDLDDQHDYDSVASDEDXDQEPLRSXGAXRSNRARSMDSSDLSDGAVXLQEYLELKKALAXSEAKVQQLMKVNSSLSDELRRLQREIHKLQAENLQLRQPPGPVPXPPLPSERAEHXPMAPGGSXHRRDRQAFSMYEPGSALKPFGGPPGDELXXRLQPFHSXELEDDAIYSVHVPAGLYREGSRHXSKLSRHGSGADSDYENXQSGDPLLGLEGKRFLELGKEEDFHPELESLDGDLDPGLPSXEDVILKXEQVXKNIQELLRAAQEFKHDSFVPCSEKIHLAVXEMASLFPKRPALEPVRSSLRLLNASAYRLQSECRKXVPPEPGAPVDFQLLXQQVIQCAYDIAKAAKQLVXIXXREKKQ

SEQ ID NO: 10927 - protein, 770 aa, Homo sapiens
  MOD_RES (59)..(59): Selenocysteine
  MOD_RES (66)..(66): Selenocysteine
  MOD_RES (129)..(129): Selenocysteine
  MOD_RES (143)..(143): Selenocysteine
  MOD_RES (148)..(148): Selenocysteine
  MOD_RES (168)..(169): Selenocysteine
  MOD_RES (180)..(180): Selenocysteine
  MOD_RES (202)..(202): Selenocysteine
  MOD_RES (227)..(227): Selenocysteine
  MOD_RES (308)..(308): Selenocysteine
  MOD_RES (313)..(313): Selenocysteine
  MOD_RES (316)..(316): Selenocysteine
  MOD_RES (333)..(333): Selenocysteine
  MOD_RES (351)..(351): Selenocysteine
  MOD_RES (373)..(373): Selenocysteine
  MOD_RES (401)..(401): Selenocysteine
  MOD_RES (409)..(409): Selenocysteine
  MOD_RES (412)..(412): Selenocysteine
  MOD_RES (431)..(431): Selenocysteine
  MOD_RES (444)..(444): Selenocysteine
  MOD_RES (489)..(489): Selenocysteine
  MOD_RES (500)..(500): Selenocysteine
  MOD_RES (508)..(508): Selenocysteine
  MOD_RES (537)..(538): Selenocysteine
  MOD_RES (546)..(546): Selenocysteine
  MOD_RES (577)..(577): Selenocysteine
  MOD_RES (593)..(593): Selenocysteine
  MOD_RES (610)..(610): Selenocysteine
  MOD_RES (651)..(651): Selenocysteine
  MOD_RES (658)..(658): Selenocysteine
  MOD_RES (662)..(662): Selenocysteine
  MOD_RES (692)..(692): Selenocysteine
  MOD_RES (728)..(728): Selenocysteine
  MOD_RES (743)..(743): Selenocysteine
  MOD_RES (762)..(762): Selenocysteine
  MOD_RES (764)..(765): Selenocysteine
MSRKGPRAEVCADCSAPDPGWASISRGVLVCDECCSVHRSLGRHISIVKHLRHSAWPPXLLQMVHXLASNGANSIWEHSLLDPAQVQSGRRKANPQDKVHPIKSEFIRAKYQMLAFVHKLPCRDDDGVXAKDLSKQLHSSVRXGNLEXCLRLLSLGAQANFFHPEKGXXPLHVAAKAGQXLQAELLVVYGADPGSPDVNGRXPIDYARQAGHHELAERLVECQYELXDRLAFYLCGRKPDHKNGHYIIPQMADRSRQKCMSQSLDLSELAKAAKKKLQALSNRLFEELAMDVYDEVDRRENDAVWLAXQNHSXLVXERSAVPFLPVNPEYSAXRNQGRQKLARFNAREFAXLIIDILSEAKRRQQGKSLSSPXDNLELSLRSQSDLDDQHDYDSVASDEDXDQEPLRSXGAXRSNRARSMDSSDLSDGAVXLQEYLELKKALAXSEAKVQQLMKVNSSLSDELRRLQREIHKLQAENLQLRQPPGPVPXPPLPSERAEHXPMAPGGSXHRRDRQAFSMYEPGSALKPFGGPPGDELXXRLQPFHSXELEDDAIYSVHVPAGLYRIRKGVSASAVPFXPSSPLLSCSQEGSRHXSKLSRHGSGADSDYENXQSGDPLLGLEGKRFLELGKEEDFHPELESLDGDLDPGLPSXEDVILKXEQVXKNIQELLRAAQEFKHDSFVPCSEKIHLAVXEMASLFPKRPALEPVRSSLRLLNASAYRLQSECRKXVPPEPGAPVDFQLLXQQVIQCAYDIAKAAKQLVXIXXREKKQ

SEQ ID NO: 10928 - protein, 694 aa, Homo sapiens
  MOD_RES (59)..(59): Selenocysteine
  MOD_RES (66)..(66): Selenocysteine
  MOD_RES (129)..(129): Selenocysteine
  MOD_RES (143)..(143): Selenocysteine
  MOD_RES (148)..(148): Selenocysteine
  MOD_RES (168)..(169): Selenocysteine
  MOD_RES (180)..(180): Selenocysteine
  MOD_RES (202)..(202): Selenocysteine
  MOD_RES (227)..(227): Selenocysteine
  MOD_RES (299)..(299): Selenocysteine
  MOD_RES (304)..(304): Selenocysteine
  MOD_RES (307)..(307): Selenocysteine
  MOD_RES (324)..(324): Selenocysteine
  MOD_RES (342)..(342): Selenocysteine
  MOD_RES (364)..(364): Selenocysteine
  MOD_RES (392)..(392): Selenocysteine
  MOD_RES (400)..(400): Selenocysteine
  MOD_RES (403)..(403): Selenocysteine
  MOD_RES (422)..(422): Selenocysteine
  MOD_RES (435)..(435): Selenocysteine
  MOD_RES (480)..(480): Selenocysteine
  MOD_RES (491)..(491): Selenocysteine
  MOD_RES (499)..(499): Selenocysteine
  MOD_RES (528)..(529): Selenocysteine
  MOD_RES (537)..(537): Selenocysteine
  MOD_RES (568)..(568): Selenocysteine
  MOD_RES (584)..(584): Selenocysteine
  MOD_RES (601)..(601): Selenocysteine
  MOD_RES (642)..(642): Selenocysteine
  MOD_RES (649)..(649): Selenocysteine
  MOD_RES (653)..(653): Selenocysteine
  MOD_RES (683)..(683): Selenocysteine
MSRKGPRAEVCADCSAPDPGWASISRGVLVCDECCSVHRSLGRHISIVKHLRHSAWPPXLLQMVHXLASNGANSIWEHSLLDPAQVQSGRRKANPQDKVHPIKSEFIRAKYQMLAFVHKLPCRDDDGVXAKDLSKQLHSSVRXGNLEXCLRLLSLGAQANFFHPEKGXXPLHVAAKAGQXLQAELLVVYGADPGSPDVNGRXPIDYARQAGHHELAERLVECQYELXDRLAFYLCGRKPDHKNGHYIIPQMADSLDLSELAKAAKKKLQALSNRLFEELAMDVYDEVDRRENDAVWLAXQNHSXLVXERSAVPFLPVNPEYSAXRNQGRQKLARFNAREFAXLIIDILSEAKRRQQGKSLSSPXDNLELSLRSQSDLDDQHDYDSVASDEDXDQEPLRSXGAXRSNRARSMDSSDLSDGAVXLQEYLELKKALAXSEAKVQQLMKVNSSLSDELRRLQREIHKLQAENLQLRQPPGPVPXPPLPSERAEHXPMAPGGSXHRRDRQAFSMYEPGSALKPFGGPPGDELXXRLQPFHSXELEDDAIYSVHVPAGLYRIRKGVSASAVPFXPSSPLLSCSQEGSRHXSKLSRHGSGADSDYENXQSGDPLLGLEGKRFLELGKEEDFHPELESLDGDLDPGLPSXEDVILKXEQVXKNIQELLRAAQEFKHDSFVPCSEKIHLAVXEMASLFPKLVA

SEQ ID NO: 10929 - protein, 761 aa, Homo sapiens
  MOD_RES (59)..(59): Selenocysteine
  MOD_RES (66)..(66): Selenocysteine
  MOD_RES (129)..(129): Selenocysteine
  MOD_RES (143)..(143): Selenocysteine
  MOD_RES (148)..(148): Selenocysteine
  MOD_RES (168)..(169): Selenocysteine
  MOD_RES (180)..(180): Selenocysteine
  MOD_RES (202)..(202): Selenocysteine
  MOD_RES (227)..(227): Selenocysteine
  MOD_RES (299)..(299): Selenocysteine
  MOD_RES (304)..(304): Selenocysteine
  MOD_RES (307)..(307): Selenocysteine
  MOD_RES (324)..(324): Selenocysteine
  MOD_RES (342)..(342): Selenocysteine
  MOD_RES (364)..(364): Selenocysteine
  MOD_RES (392)..(392): Selenocysteine
  MOD_RES (400)..(400): Selenocysteine
  MOD_RES (403)..(403): Selenocysteine
  MOD_RES (422)..(422): Selenocysteine
  MOD_RES (435)..(435): Selenocysteine
  MOD_RES (480)..(480): Selenocysteine
  MOD_RES (491)..(491): Selenocysteine
  MOD_RES (499)..(499): Selenocysteine
  MOD_RES (528)..(529): Selenocysteine
  MOD_RES (537)..(537): Selenocysteine
  MOD_RES (568)..(568): Selenocysteine
  MOD_RES (584)..(584): Selenocysteine
  MOD_RES (601)..(601): Selenocysteine
  MOD_RES (642)..(642): Selenocysteine
  MOD_RES (649)..(649): Selenocysteine
  MOD_RES (653)..(653): Selenocysteine
  MOD_RES (683)..(683): Selenocysteine
  MOD_RES (719)..(719): Selenocysteine
  MOD_RES (734)..(734): Selenocysteine
  MOD_RES (753)..(753): Selenocysteine
  MOD_RES (755)..(756): Selenocysteine
MSRKGPRAEVCADCSAPDPGWASISRGVLVCDECCSVHRSLGRHISIVKHLRHSAWPPXLLQMVHXLASNGANSIWEHSLLDPAQVQSGRRKANPQDKVHPIKSEFIRAKYQMLAFVHKLPCRDDDGVXAKDLSKQLHSSVRXGNLEXCLRLLSLGAQANFFHPEKGXXPLHVAAKAGQXLQAELLVVYGADPGSPDVNGRXPIDYARQAGHHELAERLVECQYELXDRLAFYLCGRKPDHKNGHYIIPQMADSLDLSELAKAAKKKLQALSNRLFEELAMDVYDEVDRRENDAVWLAXQNHSXLVXERSAVPFLPVNPEYSAXRNQGRQKLARFNAREFAXLIIDILSEAKRRQQGKSLSSPXDNLELSLRSQSDLDDQHDYDSVASDEDXDQEPLRSXGAXRSNRARSMDSSDLSDGAVXLQEYLELKKALAXSEAKVQQLMKVNSSLSDELRRLQREIHKLQAENLQLRQPPGPVPXPPLPSERAEHXPMAPGGSXHRRDRQAFSMYEPGSALKPFGGPPGDELXXRLQPFHSXELEDDAIYSVHVPAGLYRIRKGVSASAVPFXPSSPLLSCSQEGSRHXSKLSRHGSGADSDYENXQSGDPLLGLEGKRFLELGKEEDFHPELESLDGDLDPGLPSXEDVILKXEQVXKNIQELLRAAQEFKHDSFVPCSEKIHLAVXEMASLFPKRPALEPVRSSLRLLNASAYRLQSECRKXVPPEPGAPVDFQLLXQQVIQCAYDIAKAAKQLVXIXXREKKQ

SEQ ID NO: 10930 - protein, 147 aa, Homo sapiens
  MOD_RES (24)..(24): Selenocysteine
  MOD_RES (30)..(30): Selenocysteine
  MOD_RES (36)..(36): Selenocysteine
  MOD_RES (42)..(42): Selenocysteine
  MOD_RES (45)..(45): Selenocysteine
  MOD_RES (57)..(57): Selenocysteine
  MOD_RES (62)..(62): Selenocysteine
  MOD_RES (65)..(65): Selenocysteine
  MOD_RES (70)..(70): Selenocysteine
  MOD_RES (74)..(74): Selenocysteine
  MOD_RES (86)..(86): Selenocysteine
  MOD_RES (89)..(89): Selenocysteine
  MOD_RES (92)..(92): Selenocysteine
  MOD_RES (103)..(103): Selenocysteine
  MOD_RES (110)..(110): Selenocysteine
  MOD_RES (116)..(116): Selenocysteine
  MOD_RES (124)..(124): Selenocysteine
  MOD_RES (130)..(130): Selenocysteine
  MOD_RES (137)..(137): Selenocysteine
MSRKGPRAEVCADCSAPGVCWCVXSAAACXGAWDAXSPLSSXFAXAPGLPRCCRWCXRLPAXGPXPSGSXPCWXPHKCRAAGVKPXPKXKSXPSSQSSSGPSXRCWHLCXSFPAGXMMESPPKXSASNYXRACGQAXWRHVCACSPW

SEQ ID NO: 10931 - protein, 52 aa, Homo sapiens
  MOD_RES (4)..(4): Selenocysteine
MVHXLASNGANSIWEHSLLDPAQVQSGRRKANPQDKVHPIKSEFIRAKYQML

SEQ ID NO: 10932 - protein, 149 aa, Homo sapiens
  MOD_RES (1)..(1): Any amino acid
  MOD_RES (15)..(15): Selenocysteine
  MOD_RES (26)..(26): Selenocysteine
  MOD_RES (34)..(34): Selenocysteine
  MOD_RES (63)..(64): Selenocysteine
  MOD_RES (72)..(72): Selenocysteine
  MOD_RES (140)..(140): Selenocysteine
XENLQLRQPPGPVPXPPLPSERAEHXPMAPGGSXHRRDRQAFSMYEPGSALKPFGGPPGDELXXRLQPFHSXELEDDAIYSVHVPAGLYRAGREEVSRAGQRGRLPPRAGKPGWRPRSWASQHRGCHLEDRAGHQEHSGXVAGSPGVQA

SEQ ID NO: 10933 - protein, 681 aa, Homo sapiens
  MOD_RES (28)..(28): Selenocysteine
  MOD_RES (54)..(54): Selenocysteine
  MOD_RES (59)..(59): Selenocysteine
  MOD_RES (66)..(66): Selenocysteine
  MOD_RES (129)..(129): Selenocysteine
  MOD_RES (143)..(143): Selenocysteine
  MOD_RES (148)..(148): Selenocysteine
  MOD_RES (169)..(169): Selenocysteine
  MOD_RES (195)..(195): Selenocysteine
  MOD_RES (202)..(202): Selenocysteine
  MOD_RES (227)..(227): Selenocysteine
  MOD_RES (296)..(296): Selenocysteine
  MOD_RES (303)..(303): Selenocysteine
  MOD_RES (311)..(311): Selenocysteine
  MOD_RES (313)..(314): Selenocysteine
  MOD_RES (328)..(328): Selenocysteine
  MOD_RES (346)..(346): Selenocysteine
  MOD_RES (377)..(377): Selenocysteine
  MOD_RES (403)..(403): Selenocysteine
  MOD_RES (407)..(408): Selenocysteine
  MOD_RES (412)..(412): Selenocysteine
  MOD_RES (419)..(419): Selenocysteine
  MOD_RES (432)..(433): Selenocysteine
  MOD_RES (440)..(440): Selenocysteine
  MOD_RES (445)..(445): Selenocysteine
  MOD_RES (447)..(447): Selenocysteine
  MOD_RES (470)..(470): Selenocysteine
  MOD_RES (509)..(509): Selenocysteine
  MOD_RES (517)..(517): Selenocysteine
  MOD_RES (548)..(548): Selenocysteine
  MOD_RES (558)..(558): Selenocysteine
  MOD_RES (562)..(562): Selenocysteine
  MOD_RES (569)..(569): Selenocysteine
  MOD_RES (573)..(573): Selenocysteine
  MOD_RES (603)..(603): Selenocysteine
  MOD_RES (620)..(620): Selenocysteine
  MOD_RES (626)..(626): Selenocysteine
  MOD_RES (639)..(639): Selenocysteine
  MOD_RES (648)..(648): Selenocysteine
  MOD_RES (654)..(654): Selenocysteine
  MOD_RES (673)..(673): Selenocysteine
  MOD_RES (675)..(676): Selenocysteine
MSKRLRSSEVCADCSGPDPSWASVNRGXFLCDECCSVHRSLGRHISQVRHLKHXPWPPXLLQMVEXLYNNGANSIWEHSLLDPASIMSGRRKANPQDKVHPNKAEFIRAKYQMLAFVHRLPCRDDDSVXAKDLSKQLHSSVRXGNLEXCLRLLSLGAQANFFHPEKGNXPLHVASKAGQILQAELLAVYGADPGXQDSSGKXPVDYARQGGHHELAERLVEIQYELXDRLAFYLCGRKPDHKNGQHFIIPQMADRRSSLDLSELAKAAKKKLQSLSNHLFEELAMDVYDEVDRREXDAVWLAXQNHSALVXEXXVVPFLPVNPEYSSXRNQGRQKLARFNAHEFAXLVIDILSDAKRRQQGSSLSGSKDNVELILKXINNQHSVESQDNDQPDYDSVASDEDXDLEXXASKXNRQKLQXLQSENSNLRKQAXXNVYQVQXGSEYXDXSNHSSLKRRPSARGSRPMSMYEXGSGQKPYLPMGEASRPEESRMRLQPFPAHASRLEKQNSXPESDYDNXPNDMEPDGMGSSRKGRQRSMVWPGDGLVPDXAEPHVAPSPXLPSXEDVIRKXEQIXKNIQELLRAAQENKHDSYIPCSERIHVAVXEMAALFPKKPKSDMVRXSLRLLXSSAYRLQSECKKXLPGDPGSPXDVQLVXQQVIQCAYDIAKAAKQLVXIXXKENNN

SEQ ID NO: 10934 - protein, 681 aa, Homo sapiens
  MOD_RES (28)..(28): Selenocysteine
  MOD_RES (54)..(54): Selenocysteine
  MOD_RES (59)..(59): Selenocysteine
  MOD_RES (66)..(66): Selenocysteine
  MOD_RES (129)..(129): Selenocysteine
  MOD_RES (143)..(143): Selenocysteine
  MOD_RES (148)..(148): Selenocysteine
  MOD_RES (169)..(169): Selenocysteine
  MOD_RES (195)..(195): Selenocysteine
  MOD_RES (202)..(202): Selenocysteine
  MOD_RES (227)..(227): Selenocysteine
  MOD_RES (296)..(296): Selenocysteine
  MOD_RES (303)..(303): Selenocysteine
  MOD_RES (311)..(311): Selenocysteine
  MOD_RES (313)..(314): Selenocysteine
  MOD_RES (328)..(328): Selenocysteine
  MOD_RES (346)..(346): Selenocysteine
  MOD_RES (377)..(377): Selenocysteine
  MOD_RES (403)..(403): Selenocysteine
  MOD_RES (407)..(408): Selenocysteine
  MOD_RES (412)..(412): Selenocysteine
  MOD_RES (419)..(419): Selenocysteine
  MOD_RES (432)..(433): Selenocysteine
  MOD_RES (440)..(440): Selenocysteine
  MOD_RES (445)..(445): Selenocysteine
  MOD_RES (447)..(447): Selenocysteine
  MOD_RES (470)..(470): Selenocysteine
  MOD_RES (509)..(509): Selenocysteine
  MOD_RES (517)..(517): Selenocysteine
  MOD_RES (548)..(548): Selenocysteine
  MOD_RES (558)..(558): Selenocysteine
  MOD_RES (562)..(562): Selenocysteine
  MOD_RES (569)..(569): Selenocysteine
  MOD_RES (573)..(573): Selenocysteine
  MOD_RES (603)..(603): Selenocysteine
  MOD_RES (620)..(620): Selenocysteine
  MOD_RES (626)..(626): Selenocysteine
  MOD_RES (639)..(639): Selenocysteine
  MOD_RES (648)..(648): Selenocysteine
  MOD_RES (654)..(654): Selenocysteine
  MOD_RES (673)..(673): Selenocysteine
  MOD_RES (675)..(676): Selenocysteine
MSKRLRSSEVCADCSGPDPSWASVNRGXFLCDECCSVHRSLGRHISQVRHLKHXPWPPXLLQMVEXLYNNGANSIWEHSLLDPASIMSGRRKANPQDKVHPNKAEFIRAKYQMLAFVHRLPCRDDDSVXAKDLSKQLHSSVRXGNLEXCLRLLSLGAQANFFHPEKGNXPLHVASKAGQILQAELLAVYGADPGXQDSSGKXPVDYARQGGHHELAERLVEIQYELXDRLAFYLCGRKPDHKNGQHFIIPQMADRRLSLDLSELAKAAKKKLQSLSNHLFEELAMDVYDEVDRREXDAVWLAXQNHSALVXEXXVVPFLPVNPEYSSXRNQGRQKLARFNAHEFAXLVIDILSDAKRRQQGSSLSGSKDNVELILKXINNQHSVESQDNDQPDYDSVASDEDXDLEXXASKXNRQKLQXLQSENSNLRKQAXXNVYQVQXGSEYXDXSNHSSLKRRPSARGSRPMSMYEXGSGQKPYLPMGEASRPEESRMRLQPFPAHASRLEKQNSXPESDYDNXPNDMEPDGMGSSRKGRQRSMVWPGDGLVPDXAEPHVAPSPXLPSXEDVIRKXEQIXKNIQELLRAAQENKHDSYIPCSERIHVAVXEMAALFPKKPKSDMVRXSLRLLXSSAYRLQSECKKXLPGDPGSPXDVQLVXQQVIQCAYDIAKAAKQLVXIXXKENNN

SEQ ID NO: 10935 - protein, 421 aa, Homo sapiens
  MOD_RES (28)..(28): Selenocysteine
  MOD_RES (54)..(54): Selenocysteine
  MOD_RES (59)..(59): Selenocysteine
  MOD_RES (66)..(66): Selenocysteine
  MOD_RES (129)..(129): Selenocysteine
  MOD_RES (143)..(143): Selenocysteine
  MOD_RES (148)..(148): Selenocysteine
  MOD_RES (169)..(169): Selenocysteine
  MOD_RES (195)..(195): Selenocysteine
  MOD_RES (202)..(202): Selenocysteine
  MOD_RES (227)..(227): Selenocysteine
  MOD_RES (294)..(294): Selenocysteine
  MOD_RES (301)..(301): Selenocysteine
  MOD_RES (309)..(309): Selenocysteine
  MOD_RES (311)..(312): Selenocysteine
  MOD_RES (326)..(326): Selenocysteine
  MOD_RES (344)..(344): Selenocysteine
  MOD_RES (375)..(375): Selenocysteine
  MOD_RES (401)..(401): Selenocysteine
  MOD_RES (405)..(406): Selenocysteine
  MOD_RES (410)..(410): Selenocysteine
MSKRLRSSEVCADCSGPDPSWASVNRGXFLCDECCSVHRSLGRHISQVRHLKHXPWPPXLLQMVEXLYNNGANSIWEHSLLDPASIMSGRRKANPQDKVHPNKAEFIRAKYQMLAFVHRLPCRDDDSVXAKDLSKQLHSSVRXGNLEXCLRLLSLGAQANFFHPEKGNXPLHVASKAGQILQAELLAVYGADPGXQDSSGKXPVDYARQGGHHELAERLVEIQYELXDRLAFYLCGRKPDHKNGQHFIIPQMADSSLDLSELAKAAKKKLQSLSNHLFEELAMDVYDEVDRREXDAVWLAXQNHSALVXEXXVVPFLPVNPEYSSXRNQGRQKLARFNAHEFAXLVIDILSDAKRRQQGSSLSGSKDNVELILKXINNQHSVESQDNDQPDYDSVASDEDXDLEXXASKXNRQKLLGKDAN

SEQ ID NO: 10936 - protein, 471 aa, Homo sapiens
  MOD_RES (28)..(28): Selenocysteine
  MOD_RES (54)..(54): Selenocysteine
  MOD_RES (59)..(59): Selenocysteine
  MOD_RES (66)..(66): Selenocysteine
  MOD_RES (129)..(129): Selenocysteine
  MOD_RES (143)..(143): Selenocysteine
  MOD_RES (148)..(148): Selenocysteine
  MOD_RES (169)..(169): Selenocysteine
  MOD_RES (195)..(195): Selenocysteine
  MOD_RES (202)..(202): Selenocysteine
  MOD_RES (227)..(227): Selenocysteine
  MOD_RES (294)..(294): Selenocysteine
  MOD_RES (301)..(301): Selenocysteine
  MOD_RES (309)..(309): Selenocysteine
  MOD_RES (311)..(312): Selenocysteine
  MOD_RES (326)..(326): Selenocysteine
  MOD_RES (344)..(344): Selenocysteine
  MOD_RES (375)..(375): Selenocysteine
  MOD_RES (401)..(401): Selenocysteine
  MOD_RES (405)..(406): Selenocysteine
  MOD_RES (410)..(410): Selenocysteine
  MOD_RES (426)..(426): Selenocysteine
MSKRLRSSEVCADCSGPDPSWASVNRGXFLCDECCSVHRSLGRHISQVRHLKHXPWPPXLLQMVEXLYNNGANSIWEHSLLDPASIMSGRRKANPQDKVHPNKAEFIRAKYQMLAFVHRLPCRDDDSVXAKDLSKQLHSSVRXGNLEXCLRLLSLGAQANFFHPEKGNXPLHVASKAGQILQAELLAVYGADPGXQDSSGKXPVDYARQGGHHELAERLVEIQYELXDRLAFYLCGRKPDHKNGQHFIIPQMADSSLDLSELAKAAKKKLQSLSNHLFEELAMDVYDEVDRREXDAVWLAXQNHSALVXEXXVVPFLPVNPEYSSXRNQGRQKLARFNAHEFAXLVIDILSDAKRRQQGSSLSGSKDNVELILKXINNQHSVESQDNDQPDYDSVASDEDXDLEXXASKXNRQKSLDSDLSDGPVXVQEFMEVKNALVASEAKIQQLMKVNNNLSDELRIMQKKLLGKDAN

SEQ ID NO: 10937 - protein, 631 aa, Homo sapiens
  MOD_RES (28)..(28): Selenocysteine
  MOD_RES (54)..(54): Selenocysteine
  MOD_RES (59)..(59): Selenocysteine
  MOD_RES (66)..(66): Selenocysteine
  MOD_RES (129)..(129): Selenocysteine
  MOD_RES (143)..(143): Selenocysteine
  MOD_RES (148)..(148): Selenocysteine
  MOD_RES (169)..(169): Selenocysteine
  MOD_RES (195)..(195): Selenocysteine
  MOD_RES (202)..(202): Selenocysteine
  MOD_RES (227)..(227): Selenocysteine
  MOD_RES (294)..(294): Selenocysteine
  MOD_RES (301)..(301): Selenocysteine
  MOD_RES (309)..(309): Selenocysteine
  MOD_RES (311)..(312): Selenocysteine
  MOD_RES (326)..(326): Selenocysteine
  MOD_RES (344)..(344): Selenocysteine
  MOD_RES (375)..(375): Selenocysteine
  MOD_RES (401)..(401): Selenocysteine
  MOD_RES (405)..(406): Selenocysteine
  MOD_RES (410)..(410): Selenocysteine
  MOD_RES (426)..(426): Selenocysteine
  MOD_RES (459)..(459): Selenocysteine
  MOD_RES (467)..(467): Selenocysteine
  MOD_RES (498)..(498): Selenocysteine
  MOD_RES (508)..(508): Selenocysteine
  MOD_RES (512)..(512): Selenocysteine
  MOD_RES (519)..(519): Selenocysteine
  MOD_RES (523)..(523): Selenocysteine
  MOD_RES (553)..(553): Selenocysteine
  MOD_RES (570)..(570): Selenocysteine
  MOD_RES (576)..(576): Selenocysteine
  MOD_RES (589)..(589): Selenocysteine
  MOD_RES (598)..(598): Selenocysteine
  MOD_RES (604)..(604): Selenocysteine
  MOD_RES (623)..(623): Selenocysteine
  MOD_RES (625)..(626): Selenocysteine
MSKRLRSSEVCADCSGPDPSWASVNRGXFLCDECCSVHRSLGRHISQVRHLKHXPWPPXLLQMVEXLYNNGANSIWEHSLLDPASIMSGRRKANPQDKVHPNKAEFIRAKYQMLAFVHRLPCRDDDSVXAKDLSKQLHSSVRXGNLEXCLRLLSLGAQANFFHPEKGNXPLHVASKAGQILQAELLAVYGADPGXQDSSGKXPVDYARQGGHHELAERLVEIQYELXDRLAFYLCGRKPDHKNGQHFIIPQMADSSLDLSELAKAAKKKLQSLSNHLFEELAMDVYDEVDRREXDAVWLAXQNHSALVXEXXVVPFLPVNPEYSSXRNQGRQKLARFNAHEFAXLVIDILSDAKRRQQGSSLSGSKDNVELILKXINNQHSVESQDNDQPDYDSVASDEDXDLEXXASKXNRQKSLDSDLSDGPVXVQEFMEVKNALVASEAKIQQLMKASRLEKQNSXPESDYDNXPNDMEPDGMGSSRKGRQRSMVWPGDGLVPDXAEPHVAPSPXLPSXEDVIRKXEQIXKNIQELLRAAQENKHDSYIPCSERIHVAVXEMAALFPKKPKSDMVRXSLRLLXSSAYRLQSECKKXLPGDPGSPXDVQLVXQQVIQCAYDIAKAAKQLVXIXXKENNN

SEQ ID NO: 10938 - protein, 708 aa, Homo sapiens
  MOD_RES (28)..(28): Selenocysteine
  MOD_RES (54)..(54): Selenocysteine
  MOD_RES (59)..(59): Selenocysteine
  MOD_RES (66)..(66): Selenocysteine
  MOD_RES (129)..(129): Selenocysteine
  MOD_RES (143)..(143): Selenocysteine
  MOD_RES (148)..(148): Selenocysteine
  MOD_RES (169)..(169): Selenocysteine
  MOD_RES (195)..(195): Selenocysteine
  MOD_RES (202)..(202): Selenocysteine
  MOD_RES (227)..(227): Selenocysteine
  MOD_RES (293)..(293): Selenocysteine
  MOD_RES (300)..(300): Selenocysteine
  MOD_RES (308)..(308): Selenocysteine
  MOD_RES (310)..(311): Selenocysteine
  MOD_RES (325)..(325): Selenocysteine
  MOD_RES (343)..(343): Selenocysteine
  MOD_RES (374)..(374): Selenocysteine
  MOD_RES (400)..(400): Selenocysteine
  MOD_RES (404)..(405): Selenocysteine
  MOD_RES (409)..(409): Selenocysteine
  MOD_RES (416)..(416): Selenocysteine
  MOD_RES (429)..(430): Selenocysteine
  MOD_RES (437)..(437): Selenocysteine
  MOD_RES (442)..(442): Selenocysteine
  MOD_RES (444)..(444): Selenocysteine
  MOD_RES (467)..(467): Selenocysteine
  MOD_RES (504)..(504): Selenocysteine
  MOD_RES (515)..(515): Selenocysteine
  MOD_RES (536)..(536): Selenocysteine
  MOD_RES (544)..(544): Selenocysteine
  MOD_RES (575)..(575): Selenocysteine
  MOD_RES (585)..(585): Selenocysteine
  MOD_RES (589)..(589): Selenocysteine
  MOD_RES (596)..(596): Selenocysteine
  MOD_RES (600)..(600): Selenocysteine
  MOD_RES (630)..(630): Selenocysteine
  MOD_RES (647)..(647): Selenocysteine
  MOD_RES (653)..(653): Selenocysteine
  MOD_RES (666)..(666): Selenocysteine
  MOD_RES (675)..(675): Selenocysteine
  MOD_RES (681)..(681): Selenocysteine
  MOD_RES (700)..(700): Selenocysteine
  MOD_RES (702)..(703): Selenocysteine
MSKRLRSSEVCADCSGPDPSWASVNRGXFLCDECCSVHRSLGRHISQVRHLKHXPWPPXLLQMVEXLYNNGANSIWEHSLLDPASIMSGRRKANPQDKVHPNKAEFIRAKYQMLAFVHRLPCRDDDSVXAKDLSKQLHSSVRXGNLEXCLRLLSLGAQANFFHPEKGNXPLHVASKAGQILQAELLAVYGADPGXQDSSGKXPVDYARQGGHHELAERLVEIQYELXDRLAFYLCGRKPDHKNGQHFIIPQMADSLDLSELAKAAKKKLQSLSNHLFEELAMDVYDEVDRREXDAVWLAXQNHSALVXEXXVVPFLPVNPEYSSXRNQGRQKLARFNAHEFAXLVIDILSDAKRRQQGSSLSGSKDNVELILKXINNQHSVESQDNDQPDYDSVASDEDXDLEXXASKXNRQKLQXLQSENSNLRKQAXXNVYQVQXGSEYXDXSNHSSLKRRPSARGSRPMSMYEXGSGQKPYLPMGEASRPEESRMRLQPFPAHIGRSALVXSSSSLPSFPSXLSWSRDESARRASRLEKQNSXPESDYDNXPNDMEPDGMGSSRKGRQRSMVWPGDGLVPDXAEPHVAPSPXLPSXEDVIRKXEQIXKNIQELLRAAQENKHDSYIPCSERIHVAVXEMAALFPKKPKSDMVRXSLRLLXSSAYRLQSECKKXLPGDPGSPXDVQLVXQQVIQCAYDIAKAAKQLVXIXXKENNN

SEQ ID NO: 10939 - protein, 729 aa, Homo sapiens
  MOD_RES (28)..(28): Selenocysteine
  MOD_RES (54)..(54): Selenocysteine
  MOD_RES (59)..(59): Selenocysteine
  MOD_RES (66)..(66): Selenocysteine
  MOD_RES (129)..(129): Selenocysteine
  MOD_RES (143)..(143): Selenocysteine
  MOD_RES (148)..(148): Selenocysteine
  MOD_RES (169)..(169): Selenocysteine
  MOD_RES (195)..(195): Selenocysteine
  MOD_RES (202)..(202): Selenocysteine
  MOD_RES (227)..(227): Selenocysteine
  MOD_RES (294)..(294): Selenocysteine
  MOD_RES (301)..(301): Selenocysteine
  MOD_RES (309)..(309): Selenocysteine
  MOD_RES (311)..(312): Selenocysteine
  MOD_RES (326)..(326): Selenocysteine
  MOD_RES (344)..(344): Selenocysteine
  MOD_RES (375)..(375): Selenocysteine
  MOD_RES (401)..(401): Selenocysteine
  MOD_RES (405)..(406): Selenocysteine
  MOD_RES (410)..(410): Selenocysteine
  MOD_RES (426)..(426): Selenocysteine
  MOD_RES (467)..(467): Selenocysteine
  MOD_RES (480)..(481): Selenocysteine
  MOD_RES (488)..(488): Selenocysteine
  MOD_RES (493)..(493): Selenocysteine
  MOD_RES (495)..(495): Selenocysteine
  MOD_RES (518)..(518): Selenocysteine
  MOD_RES (557)..(557): Selenocysteine
  MOD_RES (565)..(565): Selenocysteine
  MOD_RES (596)..(596): Selenocysteine
  MOD_RES (606)..(606): Selenocysteine
  MOD_RES (610)..(610): Selenocysteine
  MOD_RES (617)..(617): Selenocysteine
  MOD_RES (621)..(621): Selenocysteine
  MOD_RES (651)..(651): Selenocysteine
  MOD_RES (668)..(668): Selenocysteine
  MOD_RES (674)..(674): Selenocysteine
  MOD_RES (687)..(687): Selenocysteine
  MOD_RES (696)..(696): Selenocysteine
  MOD_RES (702)..(702): Selenocysteine
  MOD_RES (721)..(721): Selenocysteine
  MOD_RES (723)..(724): Selenocysteine
MSKRLRSSEVCADCSGPDPSWASVNRGXFLCDECCSVHRSLGRHISQVRHLKHXPWPPXLLQMVEXLYNNGANSIWEHSLLDPASIMSGRRKANPQDKVHPNKAEFIRAKYQMLAFVHRLPCRDDDSVXAKDLSKQLHSSVRXGNLEXCLRLLSLGAQANFFHPEKGNXPLHVASKAGQILQAELLAVYGADPGXQDSSGKXPVDYARQGGHHELAERLVEIQYELXDRLAFYLCGRKPDHKNGQHFIIPQMADSSLDLSELAKAAKKKLQSLSNHLFEELAMDVYDEVDRREXDAVWLAXQNHSALVXEXXVVPFLPVNPEYSSXRNQGRQKLARFNAHEFAXLVIDILSDAKRRQQGSSLSGSKDNVELILKXINNQHSVESQDNDQPDYDSVASDEDXDLEXXASKXNRQKSLDSDLSDGPVXVQEFMEVKNALVASEAKIQQLMKVNNNLSDELRIMQKKLQXLQSENSNLRKQAXXNVYQVQXGSEYXDXSNHSSLKRRPSARGSRPMSMYEXGSGQKPYLPMGEASRPEESRMRLQPFPAHASRLEKQNSXPESDYDNXPNDMEPDGMGSSRKGRQRSMVWPGDGLVPDXAEPHVAPSPXLPSXEDVIRKXEQIXKNIQELLRAAQENKHDSYIPCSERIHVAVXEMAALFPKKPKSDMVRXSLRLLXSSAYRLQSECKKXLPGDPGSPXDVQLVXQQVIQCAYDIAKAAKQLVXIXXKENNN

SEQ ID NO: 10940 - protein, 759 aa, Homo sapiens
  MOD_RES (28)..(28): Selenocysteine
  MOD_RES (54)..(54): Selenocysteine
  MOD_RES (59)..(59): Selenocysteine
  MOD_RES (66)..(66): Selenocysteine
  MOD_RES (129)..(129): Selenocysteine
  MOD_RES (143)..(143): Selenocysteine
  MOD_RES (148)..(148): Selenocysteine
  MOD_RES (169)..(169): Selenocysteine
  MOD_RES (195)..(195): Selenocysteine
  MOD_RES (202)..(202): Selenocysteine
  MOD_RES (227)..(227): Selenocysteine
  MOD_RES (294)..(294): Selenocysteine
  MOD_RES (301)..(301): Selenocysteine
  MOD_RES (309)..(309): Selenocysteine
  MOD_RES (311)..(312): Selenocysteine
  MOD_RES (326)..(326): Selenocysteine
  MOD_RES (344)..(344): Selenocysteine
  MOD_RES (375)..(375): Selenocysteine
  MOD_RES (401)..(401): Selenocysteine
  MOD_RES (405)..(406): Selenocysteine
  MOD_RES (410)..(410): Selenocysteine
  MOD_RES (426)..(426): Selenocysteine
  MOD_RES (467)..(467): Selenocysteine
  MOD_RES (480)..(481): Selenocysteine
  MOD_RES (488)..(488): Selenocysteine
  MOD_RES (493)..(493): Selenocysteine
  MOD_RES (495)..(495): Selenocysteine
  MOD_RES (518)..(518): Selenocysteine
  MOD_RES (555)..(555): Selenocysteine
  MOD_RES (566)..(566): Selenocysteine
  MOD_RES (587)..(587): Selenocysteine
  MOD_RES (595)..(595): Selenocysteine
  MOD_RES (626)..(626): Selenocysteine
  MOD_RES (636)..(636): Selenocysteine
  MOD_RES (640)..(640): Selenocysteine
  MOD_RES (647)..(647): Selenocysteine
  MOD_RES (651)..(651): Selenocysteine
  MOD_RES (681)..(681): Selenocysteine
  MOD_RES (698)..(698): Selenocysteine
  MOD_RES (704)..(704): Selenocysteine
  MOD_RES (717)..(717): Selenocysteine
  MOD_RES (726)..(726): Selenocysteine
  MOD_RES (732)..(732): Selenocysteine
  MOD_RES (751)..(751): Selenocysteine
  MOD_RES (753)..(754): Selenocysteine
MSKRLRSSEVCADCSGPDPSWASVNRGXFLCDECCSVHRSLGRHISQVRHLKHXPWPPXLLQMVEXLYNNGANSIWEHSLLDPASIMSGRRKANPQDKVHPNKAEFIRAKYQMLAFVHRLPCRDDDSVXAKDLSKQLHSSVRXGNLEXCLRLLSLGAQANFFHPEKGNXPLHVASKAGQILQAELLAVYGADPGXQDSSGKXPVDYARQGGHHELAERLVEIQYELXDRLAFYLCGRKPDHKNGQHFIIPQMADSSLDLSELAKAAKKKLQSLSNHLFEELAMDVYDEVDRREXDAVWLAXQNHSALVXEXXVVPFLPVNPEYSSXRNQGRQKLARFNAHEFAXLVIDILSDAKRRQQGSSLSGSKDNVELILKXINNQHSVESQDNDQPDYDSVASDEDXDLEXXASKXNRQKSLDSDLSDGPVXVQEFMEVKNALVASEAKIQQLMKVNNNLSDELRIMQKKLQXLQSENSNLRKQAXXNVYQVQXGSEYXDXSNHSSLKRRPSARGSRPMSMYEXGSGQKPYLPMGEASRPEESRMRLQPFPAHIGRSALVXSSSSLPSFPSXLSWSRDESARRASRLEKQNSXPESDYDNXPNDMEPDGMGSSRKGRQRSMVWPGDGLVPDXAEPHVAPSPXLPSXEDVIRKXEQIXKNIQELLRAAQENKHDSYIPCSERIHVAVXEMAALFPKKPKSDMVRXSLRLLXSSAYRLQSECKKXLPGDPGSPXDVQLVXQQVIQCAYDIAKAAKQLVXIXXKENNN

SEQ ID NO: 10941 - protein, 641 aa, Homo sapiens
  MOD_RES (4)..(4): Selenocysteine
  MOD_RES (67)..(67): Selenocysteine
  MOD_RES (81)..(81): Selenocysteine
  MOD_RES (86)..(86): Selenocysteine
  MOD_RES (107)..(107): Selenocysteine
  MOD_RES (133)..(133): Selenocysteine
  MOD_RES (140)..(140): Selenocysteine
  MOD_RES (165)..(165): Selenocysteine
  MOD_RES (232)..(232): Selenocysteine
  MOD_RES (239)..(239): Selenocysteine
  MOD_RES (247)..(247): Selenocysteine
  MOD_RES (249)..(250): Selenocysteine
  MOD_RES (264)..(264): Selenocysteine
  MOD_RES (282)..(282): Selenocysteine
  MOD_RES (313)..(313): Selenocysteine
  MOD_RES (339)..(339): Selenocysteine
  MOD_RES (343)..(344): Selenocysteine
  MOD_RES (348)..(348): Selenocysteine
  MOD_RES (364)..(364): Selenocysteine
  MOD_RES (405)..(405): Selenocysteine
  MOD_RES (418)..(419): Selenocysteine
  MOD_RES (426)..(426): Selenocysteine
  MOD_RES (431)..(431): Selenocysteine
  MOD_RES (433)..(433): Selenocysteine
  MOD_RES (456)..(456): Selenocysteine
  MOD_RES (495)..(495): Selenocysteine
  MOD_RES (503)..(503): Selenocysteine
  MOD_RES (534)..(534): Selenocysteine
  MOD_RES (544)..(544): Selenocysteine
  MOD_RES (548)..(548): Selenocysteine
  MOD_RES (555)..(555): Selenocysteine
  MOD_RES (559)..(559): Selenocysteine
  MOD_RES (589)..(589): Selenocysteine
  MOD_RES (606)..(606): Selenocysteine
  MOD_RES (612)..(612): Selenocysteine
  MOD_RES (625)..(625): Selenocysteine
  MOD_RES (634)..(634): Selenocysteine
  MOD_RES (640)..(640): Selenocysteine
MVEXLYNNGANSIWEHSLLDPASIMSGRRKANPQDKVHPNKAEFIRAKYQMLAFVHRLPCRDDDSVXAKDLSKQLHSSVRXGNLEXCLRLLSLGAQANFFHPEKGNXPLHVASKAGQILQAELLAVYGADPGXQDSSGKXPVDYARQGGHHELAERLVEIQYELXDRLAFYLCGRKPDHKNGQHFIIPQMADSSLDLSELAKAAKKKLQSLSNHLFEELAMDVYDEVDRREXDAVWLAXQNHSALVXEXXVVPFLPVNPEYSSXRNQGRQKLARFNAHEFAXLVIDILSDAKRRQQGSSLSGSKDNVELILKXINNQHSVESQDNDQPDYDSVASDEDXDLEXXASKXNRQKSLDSDLSDGPVXVQEFMEVKNALVASEAKIQQLMKVNNNLSDELRIMQKKLQXLQSENSNLRKQAXXNVYQVQXGSEYXDXSNHSSLKRRPSARGSRPMSMYEXGSGQKPYLPMGEASRPEESRMRLQPFPAHASRLEKQNSXPESDYDNXPNDMEPDGMGSSRKGRQRSMVWPGDGLVPDXAEPHVAPSPXLPSXEDVIRKXEQIXKNIQELLRAAQENKHDSYIPCSERIHVAVXEMAALFPKKPKSDMVRXSLRLLXSSAYRLQSECKKXLPGDPGSPXDVQLVXQ

SEQ ID NO: 10942 - protein, 382 aa, Homo sapiens
  MOD_RES (19)..(19): Selenocysteine
  MOD_RES (39)..(39): Selenocysteine
  MOD_RES (56)..(56): Selenocysteine
  MOD_RES (89)..(89): Selenocysteine
  MOD_RES (118)..(118): Selenocysteine
  MOD_RES (154)..(154): Selenocysteine
  MOD_RES (186)..(186): Selenocysteine
  MOD_RES (204)..(204): Selenocysteine
  MOD_RES (207)..(207): Selenocysteine
  MOD_RES (250)..(250): Selenocysteine
  MOD_RES (275)..(275): Selenocysteine
  MOD_RES (290)..(290): Selenocysteine
  MOD_RES (326)..(326): Selenocysteine
MGDWSALGKLLDKVQAYSXAGGKVWLSVLFIFRILLLGXAVESAWGDEQSAFRCNXQQPGCENVCYDKSFPISHVRFWVLQIIFVSVPXLLYLAHVFYVMRKEEKLNKKEEELKVAQXDGVNVDMHLKQIEIKKFKYGIEEHGKVKMRGGLLRXYIISILFKSIFEVAFLLIQWYIYGFSLSAVYXCKRDPCPHQVDCFLSRPXEKXIFIIFMLVVSLVSLALNIIELFYVFFKGVKDRVKGKSDPYHAXSGALSPAKDCGSQKYAYFNGCSSPXAPLSPMSPPGYKLVXGDRNNSSCRNYNKQASEQNWANYSAEQNRMGQAGSXISNSHAQPFDFPDDNQNSKKLAAGHELQPLAIVDQRPSSRASSRASSRPRPDDLEI

SEQ ID NO: 10943 - protein, 435 aa, Homo sapiens
  MOD_RES (19)..(19): Selenocysteine
  MOD_RES (27)..(27): Selenocysteine
  MOD_RES (53)..(53): Selenocysteine
  MOD_RES (56)..(56): Selenocysteine
  MOD_RES (87)..(87): Selenocysteine
  MOD_RES (89)..(89): Selenocysteine
  MOD_RES (148)..(148): Selenocysteine
  MOD_RES (157)..(157): Selenocysteine
  MOD_RES (189)..(189): Selenocysteine
  MOD_RES (198)..(198): Selenocysteine
  MOD_RES (201)..(201): Selenocysteine
  MOD_RES (235)..(235): Selenocysteine
  MOD_RES (249)..(249): Selenocysteine
  MOD_RES (275)..(275): Selenocysteine
  MOD_RES (303)..(303): Selenocysteine
  MOD_RES (324)..(324): Selenocysteine
  MOD_RES (348)..(348): Selenocysteine
  MOD_RES (390)..(390): Selenocysteine
  MOD_RES (399)..(400): Selenocysteine
MGDWSFLGRLLENAQEHSXVIGKVWLXVLFIFRILVLGAAAEDVWGDEQSDFXCNXQQPGCENVCYDRAFPISHIRFWALQIIFVSXPXLIYLGHVLHIVRMEEKKKEREEEEQLKRESPSPKEPPQDNPSSRDDRGRVRMAGALLRXYVFNIIFKXLFEVGFIAGQYFLYGFELKPLYRCDRWPCPNXVDCFISRPXEKXIFIIFMLAVACASLLLNMLEIYHLGWKKLKQGVXSRLGPDASEAPLGXADPPPLPPSSRPPAVAIGFPPYYAHXAAPLGQARAVGYPGAPPPAADFKLLALXEARGKGQSAKLYNGHHHLLMXEQNWANQAAERQPPALKAYPAASXPAAPSPVGSSSPPLAHEAEAGAAPLLLDGSGSSLEGSALAGXPEEEEQAVXXAAQMHQPPLPLGDPGRASKASRASSGRARPEDLAI

SEQ ID NO: 10944 - protein, 292 aa, Homo sapiens
  MOD_RES (19)..(19): Selenocysteine
  MOD_RES (27)..(27): Selenocysteine
  MOD_RES (56)..(56): Selenocysteine
  MOD_RES (62)..(62): Selenocysteine
  MOD_RES (87)..(87): Selenocysteine
  MOD_RES (89)..(89): Selenocysteine
  MOD_RES (154)..(154): Selenocysteine
  MOD_RES (180)..(180): Selenocysteine
  MOD_RES (204)..(204): Selenocysteine
  MOD_RES (207)..(207): Selenocysteine
  MOD_RES (251)..(251): Selenocysteine
  MOD_RES (254)..(254): Selenocysteine
  MOD_RES (260)..(260): Selenocysteine
  MOD_RES (280)..(280): Selenocysteine
MGDWGFLEKLLDQVQEHSXVVGKIWLXVLFIFRILILGLAGESVWGDEQSDFECNXAQPGCXNVCYDQAFPISHIRYWVLQFLFVSXPXLVYLGHVIYLSRREERLRQKEGELRALPAKDPQVERALAAVERQMAKISVAEDGRLRIRGALMGXYVASVLCKSVLEAGFLYGQWRLYGWXMEPVFVCQRAPCPYLVDCFVSRPXEKXIFIIFMLVVGLISLVLNLLELVHLLCRCLSRGMRARQGQDAPPXQGXSSDPYXDQVFFYLPVGQGPSSPPCPXYNGLSSSEQNWA

SEQ ID NO: 10945 - protein, 333 aa, Homo sapiens
  MOD_RES (19)..(19): Selenocysteine
  MOD_RES (27)..(27): Selenocysteine
  MOD_RES (56)..(56): Selenocysteine
  MOD_RES (62)..(62): Selenocysteine
  MOD_RES (87)..(87): Selenocysteine
  MOD_RES (89)..(89): Selenocysteine
  MOD_RES (154)..(154): Selenocysteine
  MOD_RES (180)..(180): Selenocysteine
  MOD_RES (204)..(204): Selenocysteine
  MOD_RES (207)..(207): Selenocysteine
  MOD_RES (251)..(251): Selenocysteine
  MOD_RES (254)..(254): Selenocysteine
  MOD_RES (260)..(260): Selenocysteine
  MOD_RES (280)..(280): Selenocysteine
  MOD_RES (295)..(296): Selenocysteine
MGDWGFLEKLLDQVQEHSXVVGKIWLXVLFIFRILILGLAGESVWGDEQSDFECNXAQPGCXNVCYDQAFPISHIRYWVLQFLFVSXPXLVYLGHVIYLSRREERLRQKEGELRALPAKDPQVERALAAVERQMAKISVAEDGRLRIRGALMGXYVASVLCKSVLEAGFLYGQWRLYGWXMEPVFVCQRAPCPYLVDCFVSRPXEKXIFIIFMLVVGLISLVLNLLELVHLLCRCLSRGMRARQGQDAPPXQGXSSDPYXDQVFFYLPVGQGPSSPPCPXYNGLSSSEQNWANLXXEERLASSRPPLFLDPPPQNGQKPPSRPSSSASKKQYV

SEQ ID NO: 10946 - protein, 433 aa, Homo sapiens
  MOD_RES (19)..(19): Selenocysteine
  MOD_RES (27)..(27): Selenocysteine
  MOD_RES (39)..(39): Selenocysteine
  MOD_RES (56)..(56): Selenocysteine
  MOD_RES (87)..(87): Selenocysteine
  MOD_RES (120)..(120): Selenocysteine
  MOD_RES (138)..(138): Selenocysteine
  MOD_RES (146)..(146): Selenocysteine
  MOD_RES (150)..(150): Selenocysteine
  MOD_RES (159)..(159): Selenocysteine
  MOD_RES (200)..(200): Selenocysteine
  MOD_RES (203)..(203): Selenocysteine
  MOD_RES (282)..(282): Selenocysteine
  MOD_RES (289)..(289): Selenocysteine
  MOD_RES (306)..(306): Selenocysteine
  MOD_RES (319)..(319): Selenocysteine
  MOD_RES (357)..(358): Selenocysteine
  MOD_RES (374)..(374): Selenocysteine
  MOD_RES (401)..(401): Selenocysteine
  MOD_RES (409)..(410): Selenocysteine
  MOD_RES (432)..(432): Selenocysteine
MGDWSFLGNILEEVNEHSXVIGRVWLXVLFIFRILILGXAAEFVWGDEQSDFVCNXQQPGCENVCYDEAFPISHIRLWVLQIIFVSXPSLMYVGHAVHYVRMEEKRKSREAEELGQQAGXNGGPDQGSVKKSSGSKGXKKFRLEGXLLRXYICHIIFKXLFEVGFIVGHYFLYGFRILPLYRCSRWPCPNVVDCFVSRPXEKXIFILFMLSVASVSLFLNVMELGHLGLKGIRSALKRPVEQPLGEIPEKSLHSIAVSSIQKAKGYQLLEEEKIVSHYFPLXEVGMVEXSPLPAKPFNQFEEKISXGPLGDLSRGYQEXLPSYAQVGAQEVEGEGPPAEEGAEPEVGEKKEEAERLXXEEQEKVAVPEGEKVEXPGVDKEGEKEEPQSEKVSKQGLPAEKXPSLCPELXXDDARPLSRLSKASSRARSDDLXV

SEQ ID NO: 10947 - protein, 84 aa, Homo sapiens
  MOD_RES (4)..(4): Selenocysteine
  MOD_RES (8)..(8): Selenocysteine
  MOD_RES (18)..(18): Selenocysteine
  MOD_RES (55)..(55): Selenocysteine
MNWXGLYXLLSGVNRHSXAIGRVWLSVIFIFRIMVLVVAAESVWGDEKSSFICNXLQPGCNSVCYDQFFPISHVRLWSLQLILV

SEQ ID NO: 10948 - protein, 283 aa, Homo sapiens
  MOD_RES (4)..(4): Selenocysteine
  MOD_RES (8)..(8): Selenocysteine
  MOD_RES (18)..(18): Selenocysteine
  MOD_RES (55)..(55): Selenocysteine
  MOD_RES (86)..(86): Selenocysteine
  MOD_RES (130)..(130): Selenocysteine
  MOD_RES (134)..(134): Selenocysteine
  MOD_RES (176)..(176): Selenocysteine
  MOD_RES (185)..(185): Selenocysteine
  MOD_RES (188)..(188): Selenocysteine
  MOD_RES (191)..(191): Selenocysteine
  MOD_RES (269)..(269): Selenocysteine
MNWXGLYXLLSGVNRHSXAIGRVWLSVIFIFRIMVLVVAAESVWGDEKSSFICNXLQPGCNSVCYDQFFPISHVRLWSLQLILVSXPALLVAMHVAHQQHIEKKMLRLEGHGDPLHLEEVKRHKVHISGXLWWXYVISVVFRLLFEAVFMYVFYLLYPGYAMVRLVKCDVYPCPNXVDCFVSRPXEKXVFXVFMLAASGICIILNVAEVVYLIIRACARRAQRRSNPPSRKGSGFGHRLSPEYKQNEINKLLSEQDGSLKDILRRSPGXGAGLAEKSDRCSAC

SEQ ID NO: 10949 - protein, 226 aa, Homo sapiens
  MOD_RES (5)..(5): Selenocysteine
  MOD_RES (8)..(8): Selenocysteine
  MOD_RES (18)..(18): Selenocysteine
  MOD_RES (26)..(26): Selenocysteine
  MOD_RES (55)..(55): Selenocysteine
  MOD_RES (86)..(86): Selenocysteine
  MOD_RES (123)..(123): Selenocysteine
  MOD_RES (135)..(135): Selenocysteine
  MOD_RES (137)..(137): Selenocysteine
  MOD_RES (177)..(177): Selenocysteine
  MOD_RES (186)..(186): Selenocysteine
  MOD_RES (189)..(189): Selenocysteine
  MOD_RES (192)..(192): Selenocysteine
  MOD_RES (208)..(208): Selenocysteine
MDWGXLQXILGGVNKHSXSIGKIWLXVLFIFRIMILVVAAKEVWGDEQADFVCNXLQPGCKNVCYDHYFPISHIRLWALQLIFVSXPALLVAMHVAYRRHEKKRKFIKGEIKSEFKDIEEIKXQKVRIEGSLWWXYXSSIFFRVIFEAAFMYVFYVMYDGFSMQRLVKCNAWPCPNXVDCFVSRPXEKXVFXVFMIAVSGICILLNVXELCYLLIRYCSGKSKKPV

SEQ ID NO: 10950 - protein, 260 aa, Homo sapiens
  MOD_RES (49)..(49): Selenocysteine
  MOD_RES (90)..(90): Selenocysteine
  MOD_RES (93)..(93): Selenocysteine
  MOD_RES (103)..(103): Selenocysteine
  MOD_RES (121)..(121): Selenocysteine
  MOD_RES (144)..(144): Selenocysteine
  MOD_RES (147)..(147): Selenocysteine
  MOD_RES (166)..(166): Selenocysteine
  MOD_RES (182)..(182): Selenocysteine
  MOD_RES (246)..(246): Selenocysteine
  MOD_RES (256)..(256): Selenocysteine
DPMMYPEMELESDKENKEQSQPKPKHDGRRRIREDGLMKIYVLQLLARXVFEVGFLIGQYFLYGFQVHPFYVCSRLPCPHKIDCFISRPXEKXIFLLIMYGVXGLCLLLNIWEMLHLGFGXIRDSLNSKRRELEDPGAYNYPFXWNXPSAPPGYNIAVKPDQIQYXELSNAKIAYKQNKANXAQEQQYGSHEENLPADLEALQREIRMAQERLDLAVQAYSHQNNPHGPREKKAKVGSKAGSNKSXASSKSGDGKXSVWI

SEQ ID NO: 10951 - protein, 70 aa, Homo sapiens
  MOD_RES (7)..(7): Selenocysteine
  MOD_RES (18)..(18): Selenocysteine
  MOD_RES (26)..(26): Selenocysteine
  MOD_RES (36)..(36): Selenocysteine
  MOD_RES (55)..(55): Selenocysteine
MSWSFLXRLLEEIHNHSXFVGKIWLXVLIVFRIVLXAVGGESIYYDEQSKFVCNXEQPGCENVCYDAFAP

SEQ ID NO: 10952 - protein, 72 aa, Homo sapiens
  MOD_RES (7)..(7): Selenocysteine
  MOD_RES (18)..(18): Selenocysteine
  MOD_RES (26)..(26): Selenocysteine
  MOD_RES (36)..(36): Selenocysteine
  MOD_RES (55)..(55): Selenocysteine
MSWSFLXRLLEEIHNHSXFVGKIWLXVLIVFRIVLXAVGGESIYYDEQSKFVCNXEQPGCENVCYDAFAPLS

SEQ ID NO: 10953 - protein, 103 aa, Homo sapiens
  MOD_RES (7)..(7): Selenocysteine
  MOD_RES (18)..(18): Selenocysteine
  MOD_RES (26)..(26): Selenocysteine
  MOD_RES (36)..(36): Selenocysteine
  MOD_RES (55)..(55): Selenocysteine
  MOD_RES (86)..(86): Selenocysteine
MSWSFLXRLLEEIHNHSXFVGKIWLXVLIVFRIVLXAVGGESIYYDEQSKFVCNXEQPGCENVCYDAFAPLSHVRFWVFQIILVAXPSVMYLGYAIHKIAKME

SEQ ID NO: 10954 - protein, 396 aa, Homo sapiens
  MOD_RES (7)..(7): Selenocysteine
  MOD_RES (18)..(18): Selenocysteine
  MOD_RES (26)..(26): Selenocysteine
  MOD_RES (36)..(36): Selenocysteine
  MOD_RES (55)..(55): Selenocysteine
  MOD_RES (86)..(86): Selenocysteine
  MOD_RES (130)..(130): Selenocysteine
  MOD_RES (185)..(185): Selenocysteine
  MOD_RES (226)..(226): Selenocysteine
  MOD_RES (229)..(229): Selenocysteine
  MOD_RES (239)..(239): Selenocysteine
  MOD_RES (257)..(257): Selenocysteine
  MOD_RES (280)..(280): Selenocysteine
  MOD_RES (283)..(283): Selenocysteine
  MOD_RES (302)..(302): Selenocysteine
  MOD_RES (318)..(318): Selenocysteine
  MOD_RES (382)..(382): Selenocysteine
  MOD_RES (392)..(392): Selenocysteine
MSWSFLXRLLEEIHNHSXFVGKIWLXVLIVFRIVLXAVGGESIYYDEQSKFVCNXEQPGCENVCYDAFAPLSHVRFWVFQIILVAXPSVMYLGYAIHKIAKMEHGEADKKAARSKPYAMRWKQHRALEEXEEDNEEDPMMYPEMELESDKENKEQSQPKPKHDGRRRIREDGLMKIYVLQLLARXVFEVGFLIGQYFLYGFQVHPFYVCSRLPCPHKIDCFISRPXEKXIFLLIMYGVXGLCLLLNIWEMLHLGFGXIRDSLNSKRRELEDPGAYNYPFXWNXPSAPPGYNIAVKPDQIQYXELSNAKIAYKQNKANXAQEQQYGSHEENLPADLEALQREIRMAQERLDLAVQAYSHQNNPHGPREKKAKVGSKAGSNKSXASSKSGDGKXSVWI

SEQ ID NO: 10955 - protein, 113 aa, Homo sapiens
  MOD_RES (1)..(1): Any amino acid
  MOD_RES (19)..(19): Selenocysteine
  MOD_RES (35)..(35): Selenocysteine
  MOD_RES (99)..(99): Selenocysteine
  MOD_RES (109)..(109): Selenocysteine
XSAPPGYNIAVKPDQIQYXELSNAKIAYKQNKANXAQEQQYGSHEENLPADLEALQREIRMAQERLDLAVQAYSHQNNPHGPREKKAKVGSKAGSNKSXASSKSGDGKXSVWI

SEQ ID NO: 10956 - protein, 439 aa, Homo sapiens
  MOD_RES (2)..(2): Selenocysteine
  MOD_RES (10)..(10): Selenocysteine
  MOD_RES (21)..(21): Selenocysteine
  MOD_RES (29)..(29): Selenocysteine
  MOD_RES (39)..(39): Selenocysteine
  MOD_RES (55)..(55): Selenocysteine
  MOD_RES (58)..(58): Selenocysteine
  MOD_RES (89)..(89): Selenocysteine
  MOD_RES (159)..(159): Selenocysteine
  MOD_RES (179)..(179): Selenocysteine
  MOD_RES (191)..(191): Selenocysteine
  MOD_RES (195)..(195): Selenocysteine
  MOD_RES (262)..(262): Selenocysteine
  MOD_RES (265)..(265): Selenocysteine
  MOD_RES (394)..(394): Selenocysteine
  MOD_RES (398)..(398): Selenocysteine
  MOD_RES (402)..(402): Selenocysteine
  MOD_RES (411)..(411): Selenocysteine
  MOD_RES (435)..(436): Selenocysteine
MXNMSWSFLXRLLEEIHNHSXFVGKVWLXVLVVFRIVLXAVGGEAIYSDEQAKFXCNXRQPGCDNVCYDAFAPLSHVRFWVFQIVVISXPSVMYLGYAVHRLARASEQERRRALRRRPGPRRAPRAHLPPPHAGWPEPADLGEEEPMLGLGEEEEEEEXGAAEGAGEEAEEAGAEEACXKAVGADGKAAGXPGPXGQHDGRRRIQREGLMRVYVAQLVARAAFEVAFLVGQYLLYGFEVRPFFPCSRQPCPHVVDCFVSRPXEKXVFLLVMYVVSCLCLLLNLCEMAHLGLGSAQDAVRGRRGPPASAPAPAPRPPPCAFPAAAAGLACPPDYSLVVRAAERARAHDQNLANLALQALRDGAAAGDRDRDSSPCVGLPAASRGPPRAGAPASRXGSAXSAGXVGEQGRPGXHERPGAKPRAGSEKGSASSRDGKXXVWI

SEQ ID NO: 10957 - protein, 321 aa, Homo sapiens
  MOD_RES (5)..(5): Selenocysteine
  MOD_RES (20)..(20): Selenocysteine
  MOD_RES (28)..(28): Selenocysteine
  MOD_RES (44)..(44): Selenocysteine
  MOD_RES (51)..(51): Selenocysteine
  MOD_RES (57)..(57): Selenocysteine
  MOD_RES (88)..(88): Selenocysteine
  MOD_RES (95)..(95): Selenocysteine
  MOD_RES (111)..(111): Selenocysteine
  MOD_RES (130)..(130): Selenocysteine
  MOD_RES (157)..(157): Selenocysteine
  MOD_RES (160)..(160): Selenocysteine
  MOD_RES (164)..(164): Selenocysteine
  MOD_RES (175)..(175): Selenocysteine
  MOD_RES (183)..(183): Selenocysteine
  MOD_RES (248)..(248): Selenocysteine
  MOD_RES (251)..(251): Selenocysteine
  MOD_RES (313)..(313): Selenocysteine
MGEWXILERLLEAAVQQHSXMIGRILLXVVVIFRILIVAIVGEXVYDDEQXMFVCNXLQPGCNQACYDRAFPISHIRYWVFQIIMVCXPSLCFIXYSVHQSAKQRERRYSXVFLALDRDPPESIGGPGGXGGGGSGGGKREDKKLQNAIVNGVLQNXENXSKEXEPDCLEVKELXPHPSGLRXASKSKLRRQEGISRFYIIQVVFRNALEIGFLVGQYFLYGFSVPGLYECNRYPCIKEVECYVSRPXEKXVFLVFMFAVSGICVVLNLAELNHLGWRKIKLAVRGAQAKRKSIYEIRNKDLPRVSVPNFGRXQSSDSAYV

SEQ ID NO: 10958 - protein, 54 aa, Homo sapiens
  MOD_RES (11)..(12): Selenocysteine
  MOD_RES (39)..(39): Selenocysteine
  MOD_RES (44)..(44): Selenocysteine
  MOD_RES (50)..(51): Selenocysteine
MASAVLSSVPXXASRFALLQVDSGSGSDSEPGKGKGRNXGKSQXLGSKSXXNEK

SEQ ID NO: 10959 - protein, 366 aa, Homo sapiens
  MOD_RES (11)..(12): Selenocysteine
  MOD_RES (39)..(39): Selenocysteine
  MOD_RES (44)..(44): Selenocysteine
  MOD_RES (50)..(51): Selenocysteine
  MOD_RES (122)..(122): Selenocysteine
  MOD_RES (154)..(154): Selenocysteine
  MOD_RES (156)..(156): Selenocysteine
  MOD_RES (178)..(178): Selenocysteine
  MOD_RES (194)..(194): Selenocysteine
  MOD_RES (202)..(202): Selenocysteine
  MOD_RES (231)..(231): Selenocysteine
  MOD_RES (236)..(236): Selenocysteine
  MOD_RES (240)..(240): Selenocysteine
  MOD_RES (277)..(277): Selenocysteine
  MOD_RES (323)..(323): Selenocysteine
  MOD_RES (327)..(327): Selenocysteine
MASAVLSSVPXXASRFALLQVDSGSGSDSEPGKGKGRNXGKSQXLGSKSXXNEKKREKRRKKKEQQQSEANELRNLAFKKIPQKSSHAVCNAQHDLPLSNPVQKDSREENWQEWRQRDEQLXSEMFEADLEKALLLSKLEYEEHKKEYEDAENXSXQSKVMNKKDKRKNHQGKDRPLXVSLKDFHSEDHISKKXEELSSSQXLSHDGGFFNRLEDDVHKILIREKRREQLXEYNGXDNCXAHEHNQEVVLKDGRIERLKLELERKDAEIQKLKNVIXQWEAKYKEVKARNAQLLKMLQEGEMKDKAEILLQVDESQSIKNELXIQVXSLHAALEQERSKVKVLQAELAKYQGGRKGKRNSESDQCR

SEQ ID NO: 10960 - protein, 315 aa, Homo sapiens
  MOD_RES (11)..(12): Selenocysteine
  MOD_RES (39)..(39): Selenocysteine
  MOD_RES (44)..(44): Selenocysteine
  MOD_RES (50)..(51): Selenocysteine
  MOD_RES (122)..(122): Selenocysteine
  MOD_RES (154)..(154): Selenocysteine
  MOD_RES (156)..(156): Selenocysteine
  MOD_RES (178)..(178): Selenocysteine
  MOD_RES (194)..(194): Selenocysteine
  MOD_RES (226)..(226): Selenocysteine
  MOD_RES (272)..(272): Selenocysteine
  MOD_RES (276)..(276): Selenocysteine
MASAVLSSVPXXASRFALLQVDSGSGSDSEPGKGKGRNXGKSQXLGSKSXXNEKKREKRRKKKEQQQSEANELRNLAFKKIPQKSSHAVCNAQHDLPLSNPVQKDSREENWQEWRQRDEQLXSEMFEADLEKALLLSKLEYEEHKKEYEDAENXSXQSKVMNKKDKRKNHQGKDRPLXVSLKDFHSEDHISKKXEEVVLKDGRIERLKLELERKDAEIQKLKNVIXQWEAKYKEVKARNAQLLKMLQEGEMKDKAEILLQVDESQSIKNELXIQVXSLHAALEQERSKVKVLQAELAKYQGGRKGKRNSESDQCR

SEQ ID NO: 10961 - protein, 126 aa, Homo sapiens
  MOD_RES (11)..(12): Selenocysteine
  MOD_RES (39)..(39): Selenocysteine
  MOD_RES (44)..(44): Selenocysteine
  MOD_RES (50)..(51): Selenocysteine
MASAVLSSVPXXASRFALLQVDSGSGSDSEPGKGKGRNXGKSQXLGSKSXXNEKKREKRRKKKEQQQSEANELRNLAFKKIPQKSSHAVCNAQHDLPLSNPVQKDSREENWQEWRQRDEQMGSRRQ

SEQ ID NO: 10962 - protein, 1192 aa, Homo sapiens
  MOD_RES (123)..(123): Selenocysteine
  MOD_RES (130)..(130): Selenocysteine
  MOD_RES (156)..(157): Selenocysteine
  MOD_RES (172)..(172): Selenocysteine
  MOD_RES (174)..(174): Selenocysteine
  MOD_RES (201)..(201): Selenocysteine
  MOD_RES (210)..(210): Selenocysteine
  MOD_RES (213)..(213): Selenocysteine
  MOD_RES (316)..(316): Selenocysteine
  MOD_RES (345)..(346): Selenocysteine
  MOD_RES (450)..(450): Selenocysteine
  MOD_RES (475)..(475): Selenocysteine
  MOD_RES (480)..(480): Selenocysteine
  MOD_RES (502)..(502): Selenocysteine
  MOD_RES (524)..(524): Selenocysteine
  MOD_RES (566)..(566): Selenocysteine
  MOD_RES (572)..(572): Selenocysteine
  MOD_RES (592)..(592): Selenocysteine
  MOD_RES (640)..(640): Selenocysteine
  MOD_RES (642)..(642): Selenocysteine
  MOD_RES (668)..(668): Selenocysteine
  MOD_RES (728)..(728): Selenocysteine
  MOD_RES (771)..(772): Selenocysteine
  MOD_RES (777)..(777): Selenocysteine
  MOD_RES (802)..(802): Selenocysteine
  MOD_RES (846)..(846): Selenocysteine
  MOD_RES (858)..(858): Selenocysteine
  MOD_RES (868)..(868): Selenocysteine
  MOD_RES (888)..(888): Selenocysteine
  MOD_RES (911)..(911): Selenocysteine
  MOD_RES (916)..(916): Selenocysteine
  MOD_RES (919)..(919): Selenocysteine
  MOD_RES (944)..(944): Selenocysteine
  MOD_RES (1016)..(1016): Selenocysteine
  MOD_RES (1032)..(1032): Selenocysteine
  MOD_RES (1058)..(1058): Selenocysteine
  MOD_RES (1072)..(1072): Selenocysteine
  MOD_RES (1129)..(1129): Selenocysteine
  MOD_RES (1158)..(1158): Selenocysteine
  MOD_RES (1162)..(1162): Selenocysteine
  MOD_RES (1175)..(1175): Selenocysteine
  MOD_RES (1188)..(1188): Selenocysteine
MAACGRVRRMFRLSAALHLLLLFAAGAEKLPGQGVHSQGQGPGANFVSFVGQAGGGGPAGQQLPQLPQSSQLQQQQQQQQQQQQPQPPQPPFPAGGPPARRGGAGAGGGWKLAEEESCREDVXRVCPKHXWSNNLAVLECLQDVRELLWNYKLNLXXDPKFESVAREVCKSXIXEIKECADEPVGKGYMVSCLVDHRGNIXEYQCHQYIXKMXAIIFSDYRLICGFMDDCKNDINILKCGSIRLGEKDAHSQGEVVSCLEKGLVKEAEEREPKIQVSELCKKAILRVAELSSDDFHLDRHLYFACRDDRERFCENXQAGEGRVYKCLFNHKFEESMSEKCREALXXRQKLIAQDYKVSYSLAKSCKSDLKKYRCNVENLPRSREARLSYLLMCLESAVHRGRQVSSECQGEMLDYRRMLMEDFSLSPEIILSCRGEIEHHCSGLHRKGRXLHCLMKVVRGEKGNLGMNCQQALQXLIQEXDPGADYRIDRALNEACESVIQXACKHIRSGDPMILSCLMEHLYXEKMVEDCEHRLLELQYFISRDWKLDPVLYRKCQGDASRLCHXHGWNEXSEFMPQGAVFSCLYRHAYRXEEQGRRLSRECRAEVQRILHQRAMDVKLDPALQDKCLIDLGKWCSEKXEXGQELECLQDHLDDLVVECRDIVGNLXELESEDIQIEALLMRACEPIIQNFCHDVADNQIDSGDLMECLIQNKHQKDMNEKCAIGVXHFQLVQMKDFRFSYKFKMACKEDVLKLCPNIKKKVDVVICLSXXVRNDXLQEAKEHRVSLKCRRQLRVEELEMXEDIRLEPDLYEACKSDIKNFCSAVQYGNAQIIECLKENKKQLSXRCHQKVFKLQEXEMMDPELDYXLMRVCKQMIKRFCPEADSKXMLQCLKQNKNSELMDPKCKQMIXKRQIXQNXDYRLNPMLRKACKADIPKFCHGILXKAKDDSELEGQVISCLKLRYADQRLSSDCEDQIRIIIQESALDYRLDPQLQLHCSDEISSLCAEEAAAQEQXGQVEECLKVNLLKIKXELCKKEVLNMLKESKADIFVDPVLHXACALDIKHHCAAIXPGRGRQMSCLMEALEDKRVRLQPECKKRLNDRIEMWSYAAKVAPADGFSDLAMQVMXSPSKNYILSVISGSICILFLIGLMCGRIXKRVXRELKDRLQYRSEXMAYKGLVWSQDVXGSPA

SEQ ID NO: 10963 - protein, 305 aa, Homo sapiens
  MOD_RES (123)..(123): Selenocysteine
  MOD_RES (130)..(130): Selenocysteine
  MOD_RES (167)..(168): Selenocysteine
  MOD_RES (183)..(183): Selenocysteine
  MOD_RES (185)..(185): Selenocysteine
  MOD_RES (212)..(212): Selenocysteine
  MOD_RES (221)..(221): Selenocysteine
  MOD_RES (224)..(224): Selenocysteine
  MOD_RES (265)..(265): Selenocysteine
  MOD_RES (267)..(267): Selenocysteine
  MOD_RES (289)..(289): Selenocysteine
MAACGRVRRMFRLSAALHLLLLFAAGAEKLPGQGVHSQGQGPGANFVSFVGQAGGGGPAGQQLPQLPQSSQLQQQQQQQQQQQQPQPPQPPFPAGGPPARRGGAGAGGGWKLAEEESCREDVXRVCPKHXWSNNLAVLECLQDVREPENEISSDCNHLLWNYKLNLXXDPKFESVAREVCKSXIXEIKECADEPVGKGYMVSCLVDHRGNIXEYQCHQYIXKMXAIIFSDYRLICGFMDDCKNDINILKCGSIRLGEKDAHSQDXPXALRNREGGSHGSAELKSKGSYXSVPWMSSWILPSRISA

SEQ ID NO: 10964 - protein, 698 aa, Homo sapiens
  MOD_RES (123)..(123): Selenocysteine
  MOD_RES (130)..(130): Selenocysteine
  MOD_RES (167)..(168): Selenocysteine
  MOD_RES (183)..(183): Selenocysteine
  MOD_RES (185)..(185): Selenocysteine
  MOD_RES (212)..(212): Selenocysteine
  MOD_RES (221)..(221): Selenocysteine
  MOD_RES (224)..(224): Selenocysteine
  MOD_RES (327)..(327): Selenocysteine
  MOD_RES (356)..(357): Selenocysteine
  MOD_RES (461)..(461): Selenocysteine
  MOD_RES (486)..(486): Selenocysteine
  MOD_RES (491)..(491): Selenocysteine
  MOD_RES (513)..(513): Selenocysteine
  MOD_RES (535)..(535): Selenocysteine
  MOD_RES (577)..(577): Selenocysteine
  MOD_RES (583)..(583): Selenocysteine
  MOD_RES (603)..(603): Selenocysteine
  MOD_RES (651)..(651): Selenocysteine
  MOD_RES (653)..(653): Selenocysteine
  MOD_RES (679)..(679): Selenocysteine
MAACGRVRRMFRLSAALHLLLLFAAGAEKLPGQGVHSQGQGPGANFVSFVGQAGGGGPAGQQLPQLPQSSQLQQQQQQQQQQQQPQPPQPPFPAGGPPARRGGAGAGGGWKLAEEESCREDVXRVCPKHXWSNNLAVLECLQDVREPENEISSDCNHLLWNYKLNLXXDPKFESVAREVCKSXIXEIKECADEPVGKGYMVSCLVDHRGNIXEYQCHQYIXKMXAIIFSDYRLICGFMDDCKNDINILKCGSIRLGEKDAHSQGEVVSCLEKGLVKEAEEREPKIQVSELCKKAILRVAELSSDDFHLDRHLYFACRDDRERFCENXQAGEGRVYKCLFNHKFEESMSEKCREALXXRQKLIAQDYKVSYSLAKSCKSDLKKYRCNVENLPRSREARLSYLLMCLESAVHRGRQVSSECQGEMLDYRRMLMEDFSLSPEIILSCRGEIEHHCSGLHRKGRXLHCLMKVVRGEKGNLGMNCQQALQXLIQEXDPGADYRIDRALNEACESVIQXACKHIRSGDPMILSCLMEHLYXEKMVEDCEHRLLELQYFISRDWKLDPVLYRKCQGDASRLCHXHGWNEXSEFMPQGAVFSCLYRHAYRXEEQGRRLSRECRAEVQRILHQRAMDVKLDPALQDKCLIDLGKWCSEKXEXGQELECLQDHLDDLVVECRDIVGNLXELESEAEREYVFKNLPFKV

SEQ ID NO: 10965 - protein, 1179 aa, Homo sapiens
  MOD_RES (123)..(123): Selenocysteine
  MOD_RES (130)..(130): Selenocysteine
  MOD_RES (167)..(168): Selenocysteine
  MOD_RES (183)..(183): Selenocysteine
  MOD_RES (185)..(185): Selenocysteine
  MOD_RES (212)..(212): Selenocysteine
  MOD_RES (221)..(221): Selenocysteine
  MOD_RES (224)..(224): Selenocysteine
  MOD_RES (327)..(327): Selenocysteine
  MOD_RES (356)..(357): Selenocysteine
  MOD_RES (461)..(461): Selenocysteine
  MOD_RES (486)..(486): Selenocysteine
  MOD_RES (491)..(491): Selenocysteine
  MOD_RES (513)..(513): Selenocysteine
  MOD_RES (535)..(535): Selenocysteine
  MOD_RES (577)..(577): Selenocysteine
  MOD_RES (583)..(583): Selenocysteine
  MOD_RES (603)..(603): Selenocysteine
  MOD_RES (651)..(651): Selenocysteine
  MOD_RES (653)..(653): Selenocysteine
  MOD_RES (679)..(679): Selenocysteine
  MOD_RES (739)..(739): Selenocysteine
  MOD_RES (782)..(783): Selenocysteine
  MOD_RES (788)..(788): Selenocysteine
  MOD_RES (813)..(813): Selenocysteine
  MOD_RES (857)..(857): Selenocysteine
  MOD_RES (869)..(869): Selenocysteine
  MOD_RES (879)..(879): Selenocysteine
  MOD_RES (899)..(899): Selenocysteine
  MOD_RES (922)..(922): Selenocysteine
  MOD_RES (927)..(927): Selenocysteine
  MOD_RES (930)..(930): Selenocysteine
  MOD_RES (955)..(955): Selenocysteine
  MOD_RES (1027)..(1027): Selenocysteine
  MOD_RES (1043)..(1043): Selenocysteine
  MOD_RES (1069)..(1069): Selenocysteine
  MOD_RES (1083)..(1083): Selenocysteine
  MOD_RES (1140)..(1140): Selenocysteine
  MOD_RES (1169)..(1169): Selenocysteine
  MOD_RES (1173)..(1173): Selenocysteine
MAACGRVRRMFRLSAALHLLLLFAAGAEKLPGQGVHSQGQGPGANFVSFVGQAGGGGPAGQQLPQLPQSSQLQQQQQQQQQQQQPQPPQPPFPAGGPPARRGGAGAGGGWKLAEEESCREDVXRVCPKHXWSNNLAVLECLQDVREPENEISSDCNHLLWNYKLNLXXDPKFESVAREVCKSXIXEIKECADEPVGKGYMVSCLVDHRGNIXEYQCHQYIXKMXAIIFSDYRLICGFMDDCKNDINILKCGSIRLGEKDAHSQGEVVSCLEKGLVKEAEEREPKIQVSELCKKAILRVAELSSDDFHLDRHLYFACRDDRERFCENXQAGEGRVYKCLFNHKFEESMSEKCREALXXRQKLIAQDYKVSYSLAKSCKSDLKKYRCNVENLPRSREARLSYLLMCLESAVHRGRQVSSECQGEMLDYRRMLMEDFSLSPEIILSCRGEIEHHCSGLHRKGRXLHCLMKVVRGEKGNLGMNCQQALQXLIQEXDPGADYRIDRALNEACESVIQXACKHIRSGDPMILSCLMEHLYXEKMVEDCEHRLLELQYFISRDWKLDPVLYRKCQGDASRLCHXHGWNEXSEFMPQGAVFSCLYRHAYRXEEQGRRLSRECRAEVQRILHQRAMDVKLDPALQDKCLIDLGKWCSEKXEXGQELECLQDHLDDLVVECRDIVGNLXELESEDIQIEALLMRACEPIIQNFCHDVADNQIDSGDLMECLIQNKHQKDMNEKCAIGVXHFQLVQMKDFRFSYKFKMACKEDVLKLCPNIKKKVDVVICLSXXVRNDXLQEAKEHRVSLKCRRQLRVEELEMXEDIRLEPDLYEACKSDIKNFCSAVQYGNAQIIECLKENKKQLSXRCHQKVFKLQEXEMMDPELDYXLMRVCKQMIKRFCPEADSKXMLQCLKQNKNSELMDPKCKQMIXKRQIXQNXDYRLNPMLRKACKADIPKFCHGILXKAKDDSELEGQVISCLKLRYADQRLSSDCEDQIRIIIQESALDYRLDPQLQLHCSDEISSLCAEEAAAQEQXGQVEECLKVNLLKIKXELCKKEVLNMLKESKADIFVDPVLHXACALDIKHHCAAIXPGRGRQMSCLMEALEDKRVRLQPECKKRLNDRIEMWSYAAKVAPADGFSDLAMQVMXSPSKNYILSVISGSICILFLIGLMCGRIXKRVXRELKDR

SEQ ID NO: 10966 - protein, 1203 aa, Homo sapiens
  MOD_RES (123)..(123): Selenocysteine
  MOD_RES (130)..(130): Selenocysteine
  MOD_RES (167)..(168): Selenocysteine
  MOD_RES (183)..(183): Selenocysteine
  MOD_RES (185)..(185): Selenocysteine
  MOD_RES (212)..(212): Selenocysteine
  MOD_RES (221)..(221): Selenocysteine
  MOD_RES (224)..(224): Selenocysteine
  MOD_RES (327)..(327): Selenocysteine
  MOD_RES (356)..(357): Selenocysteine
  MOD_RES (461)..(461): Selenocysteine
  MOD_RES (486)..(486): Selenocysteine
  MOD_RES (491)..(491): Selenocysteine
  MOD_RES (513)..(513): Selenocysteine
  MOD_RES (535)..(535): Selenocysteine
  MOD_RES (577)..(577): Selenocysteine
  MOD_RES (583)..(583): Selenocysteine
  MOD_RES (603)..(603): Selenocysteine
  MOD_RES (651)..(651): Selenocysteine
  MOD_RES (653)..(653): Selenocysteine
  MOD_RES (679)..(679): Selenocysteine
  MOD_RES (739)..(739): Selenocysteine
  MOD_RES (782)..(783): Selenocysteine
  MOD_RES (788)..(788): Selenocysteine
  MOD_RES (813)..(813): Selenocysteine
  MOD_RES (857)..(857): Selenocysteine
  MOD_RES (869)..(869): Selenocysteine
  MOD_RES (879)..(879): Selenocysteine
  MOD_RES (899)..(899): Selenocysteine
  MOD_RES (922)..(922): Selenocysteine
  MOD_RES (927)..(927): Selenocysteine
  MOD_RES (930)..(930): Selenocysteine
  MOD_RES (955)..(955): Selenocysteine
  MOD_RES (1027)..(1027): Selenocysteine
  MOD_RES (1043)..(1043): Selenocysteine
  MOD_RES (1069)..(1069): Selenocysteine
  MOD_RES (1083)..(1083): Selenocysteine
  MOD_RES (1140)..(1140): Selenocysteine
  MOD_RES (1169)..(1169): Selenocysteine
  MOD_RES (1173)..(1173): Selenocysteine
  MOD_RES (1186)..(1186): Selenocysteine
  MOD_RES (1199)..(1199): Selenocysteine
MAACGRVRRMFRLSAALHLLLLFAAGAEKLPGQGVHSQGQGPGANFVSFVGQAGGGGPAGQQLPQLPQSSQLQQQQQQQQQQQQPQPPQPPFPAGGPPARRGGAGAGGGWKLAEEESCREDVXRVCPKHXWSNNLAVLECLQDVREPENEISSDCNHLLWNYKLNLXXDPKFESVAREVCKSXIXEIKECADEPVGKGYMVSCLVDHRGNIXEYQCHQYIXKMXAIIFSDYRLICGFMDDCKNDINILKCGSIRLGEKDAHSQGEVVSCLEKGLVKEAEEREPKIQVSELCKKAILRVAELSSDDFHLDRHLYFACRDDRERFCENXQAGEGRVYKCLFNHKFEESMSEKCREALXXRQKLIAQDYKVSYSLAKSCKSDLKKYRCNVENLPRSREARLSYLLMCLESAVHRGRQVSSECQGEMLDYRRMLMEDFSLSPEIILSCRGEIEHHCSGLHRKGRXLHCLMKVVRGEKGNLGMNCQQALQXLIQEXDPGADYRIDRALNEACESVIQXACKHIRSGDPMILSCLMEHLYXEKMVEDCEHRLLELQYFISRDWKLDPVLYRKCQGDASRLCHXHGWNEXSEFMPQGAVFSCLYRHAYRXEEQGRRLSRECRAEVQRILHQRAMDVKLDPALQDKCLIDLGKWCSEKXEXGQELECLQDHLDDLVVECRDIVGNLXELESEDIQIEALLMRACEPIIQNFCHDVADNQIDSGDLMECLIQNKHQKDMNEKCAIGVXHFQLVQMKDFRFSYKFKMACKEDVLKLCPNIKKKVDVVICLSXXVRNDXLQEAKEHRVSLKCRRQLRVEELEMXEDIRLEPDLYEACKSDIKNFCSAVQYGNAQIIECLKENKKQLSXRCHQKVFKLQEXEMMDPELDYXLMRVCKQMIKRFCPEADSKXMLQCLKQNKNSELMDPKCKQMIXKRQIXQNXDYRLNPMLRKACKADIPKFCHGILXKAKDDSELEGQVISCLKLRYADQRLSSDCEDQIRIIIQESALDYRLDPQLQLHCSDEISSLCAEEAAAQEQXGQVEECLKVNLLKIKXELCKKEVLNMLKESKADIFVDPVLHXACALDIKHHCAAIXPGRGRQMSCLMEALEDKRVRLQPECKKRLNDRIEMWSYAAKVAPADGFSDLAMQVMXSPSKNYILSVISGSICILFLIGLMCGRIXKRVXRELKDRLQYRSEXMAYKGLVWSQDVXGSPA

SEQ ID NO: 10967 - protein, 152 aa, Homo sapiens
  MOD_RES (86)..(86): Selenocysteine
  MOD_RES (93)..(93): Selenocysteine
  MOD_RES (130)..(131): Selenocysteine
  MOD_RES (146)..(146): Selenocysteine
  MOD_RES (148)..(148): Selenocysteine
MAACGRVRRMFRLSAALHLLLLFAAGAEKLPGQGVHSQGQGPGANFVSFVGQPPFPAGGPPARRGGAGAGGGWKLAEEESCREDVXRVCPKHXWSNNLAVLECLQDVREPENEISSDCNHLLWNYKLNLXXDPKFESVAREVCKSXIXEIKE

SEQ ID NO: 10968 - protein, 74 aa, Homo sapiens
  MOD_RES (13)..(13): Selenocysteine
  MOD_RES (22)..(22): Selenocysteine
  MOD_RES (25)..(25): Selenocysteine
MVSCLVDHRGNIXEYQCHQYIXKMXAIIFSDYRLICGFMDDCKNDINILKCGSIRLGEKDAHSQGEVVSCLEKG

SEQ ID NO: 10969 - protein, 129 aa, Homo sapiens
  MOD_RES (6)..(6): Selenocysteine
  MOD_RES (32)..(32): Selenocysteine
  MOD_RES (59)..(59): Selenocysteine
  MOD_RES (63)..(63): Selenocysteine
  MOD_RES (78)..(78): Selenocysteine
  MOD_RES (97)..(97): Selenocysteine
  MOD_RES (101)..(101): Selenocysteine
  MOD_RES (115)..(115): Selenocysteine
  MOD_RES (128)..(128): Selenocysteine
MFNSMXPPPISSYGEPCCLRPLPSQGAPSVGXEGLSGPPFCHQANLMSGPHSYGPAREXNSCXEGPLFSSPRSAVKLXKKRALSISPLSDASLDLQXVIRXSPSSLVAFINSRCXSPGGSYGHLSIGXM

SEQ ID NO: 10970 - protein, 1106 aa, Homo sapiens
  MOD_RES (6)..(6): Selenocysteine
  MOD_RES (32)..(32): Selenocysteine
  MOD_RES (59)..(59): Selenocysteine
  MOD_RES (63)..(63): Selenocysteine
  MOD_RES (78)..(78): Selenocysteine
  MOD_RES (97)..(97): Selenocysteine
  MOD_RES (101)..(101): Selenocysteine
  MOD_RES (115)..(115): Selenocysteine
  MOD_RES (128)..(128): Selenocysteine
  MOD_RES (176)..(176): Selenocysteine
  MOD_RES (205)..(205): Selenocysteine
  MOD_RES (235)..(235): Selenocysteine
  MOD_RES (296)..(296): Selenocysteine
  MOD_RES (304)..(304): Selenocysteine
  MOD_RES (320)..(320): Selenocysteine
  MOD_RES (326)..(326): Selenocysteine
  MOD_RES (355)..(355): Selenocysteine
  MOD_RES (370)..(370): Selenocysteine
  MOD_RES (374)..(374): Selenocysteine
  MOD_RES (385)..(385): Selenocysteine
  MOD_RES (394)..(394): Selenocysteine
  MOD_RES (411)..(411): Selenocysteine
  MOD_RES (430)..(430): Selenocysteine
  MOD_RES (461)..(461): Selenocysteine
  MOD_RES (468)..(468): Selenocysteine
  MOD_RES (475)..(475): Selenocysteine
  MOD_RES (490)..(490): Selenocysteine
  MOD_RES (494)..(494): Selenocysteine
  MOD_RES (514)..(514): Selenocysteine
  MOD_RES (525)..(525): Selenocysteine
  MOD_RES (527)..(528): Selenocysteine
  MOD_RES (554)..(554): Selenocysteine
  MOD_RES (601)..(601): Selenocysteine
  MOD_RES (604)..(604): Selenocysteine
  MOD_RES (636)..(636): Selenocysteine
  MOD_RES (665)..(665): Selenocysteine
  MOD_RES (668)..(668): Selenocysteine
  MOD_RES (682)..(682): Selenocysteine
  MOD_RES (693)..(693): Selenocysteine
  MOD_RES (711)..(711): Selenocysteine
  MOD_RES (727)..(727): Selenocysteine
  MOD_RES (729)..(729): Selenocysteine
  MOD_RES (759)..(759): Selenocysteine
  MOD_RES (776)..(776): Selenocysteine
  MOD_RES (779)..(779): Selenocysteine
  MOD_RES (799)..(799): Selenocysteine
  MOD_RES (827)..(827): Selenocysteine
  MOD_RES (866)..(866): Selenocysteine
  MOD_RES (887)..(887): Selenocysteine
  MOD_RES (890)..(890): Selenocysteine
  MOD_RES (947)..(947): Selenocysteine
  MOD_RES (966)..(966): Selenocysteine
  MOD_RES (997)..(997): Selenocysteine
  MOD_RES (1007)..(1007): Selenocysteine
  MOD_RES (1045)..(1045): Selenocysteine
  MOD_RES (1074)..(1074): Selenocysteine
  MOD_RES (1099)..(1099): Selenocysteine
MFNSMXPPPISSYGEPCCLRPLPSQGAPSVGXEGLSGPPFCHQANLMSGPHSYGPAREXNSCXEGPLFSSPRSAVKLXKKRALSISPLSDASLDLQXVIRXSPSSLVAFINSRCXSPGGSYGHLSIGXMSPSLGFPAQMNHQKGPSPSFGVQPCGPHDSARGGMIPHPQSRGPFPXCQLKSELDMLVGKCREEPLEGDMSSPNSXGIQDPLLGMLDGREDLEREEKREPESVYEXDCRWDGCSQEFDSQEQLVHHINSEHIHGERKEFVCHWGGCSRELRPFKAQYMLVVHMRRHXGEKPHKCXFEGCRKSYSRLENLKXHLRSHXGEKPYMCEHEGCSKAFSNASDRAKHQNRXHSNEKPYVCKLPGCXKRYXDPSSLRKHVKXVHGPDAHVXKRHRGDGPLPRAPSISXVEPKREREGGPIREESRLXVPEGAMKPQPSPGAQSSCSSDHSPAGSAANXDSGVEMXGNAGGSXEDLSSLDEGPCIAGXGLSXLRRLENLRLDQLHQLRPIGXRGLKLPSLSHXGXXVSRRVGPPVSLERRSSSSSSISSAYXVSRRSSLASPFPPGSPPENGASSLPGLMPAQHYLLRARYASARGGGXSPXAASSLDRIGGLPMPPWRSRAEYPGYNPNAGVXRRASDPAQAADRPAPARVQRFKSLGCVHXPPXVAGGGQNFDPYLPXSVYSPQPPSIXENAAMDARGLQEEPEVGXSMVGSGLNPYMDFPPXDXLGYGGPEGAAAEPYGARGPGSLPLGPGPPXNYGPNPCPQQASYPDPXQEXWGEFPSHSGLYPGPKALGGXYSQCPRLEHYGQVQVKPEQGCPVGSDSXGLAPCLNAHPSEGPPHPQPLFSHYPQPSPPQYLQSGPYXQPPPDYLPSEPRPCLDFDSPXHSXGQLKAQLVCNYVQSQQELLWEGGGREDAPAQEPSYQSPKFLGGSQVSPSRAKAPVNXYGPGFGPNLPNHKSGSYPXPSPCHENFVVGANRASHRAAAPPRLLPPLPXCYGPLKVGGXNPSCGHPEVGRLGGGPALYPPPEGQVCNPLDSLDLDNXQLDFVAILDEPQGLSPPPSHDQRGSSGHXPPPSGPPNMAVGNMSVLLRSLPGEXEFLNSSA

SEQ ID NO: 10971 - protein, 1065 aa, Homo sapiens
  MOD_RES (6)..(6): Selenocysteine
  MOD_RES (32)..(32): Selenocysteine
  MOD_RES (37)..(37): Selenocysteine
  MOD_RES (56)..(56): Selenocysteine
  MOD_RES (60)..(60): Selenocysteine
  MOD_RES (74)..(74): Selenocysteine
  MOD_RES (87)..(87): Selenocysteine
  MOD_RES (135)..(135): Selenocysteine
  MOD_RES (164)..(164): Selenocysteine
  MOD_RES (194)..(194): Selenocysteine
  MOD_RES (255)..(255): Selenocysteine
  MOD_RES (263)..(263): Selenocysteine
  MOD_RES (279)..(279): Selenocysteine
  MOD_RES (285)..(285): Selenocysteine
  MOD_RES (314)..(314): Selenocysteine
  MOD_RES (329)..(329): Selenocysteine
  MOD_RES (333)..(333): Selenocysteine
  MOD_RES (344)..(344): Selenocysteine
  MOD_RES (353)..(353): Selenocysteine
  MOD_RES (370)..(370): Selenocysteine
  MOD_RES (389)..(389): Selenocysteine
  MOD_RES (420)..(420): Selenocysteine
  MOD_RES (427)..(427): Selenocysteine
  MOD_RES (434)..(434): Selenocysteine
  MOD_RES (449)..(449): Selenocysteine
  MOD_RES (453)..(453): Selenocysteine
  MOD_RES (473)..(473): Selenocysteine
  MOD_RES (484)..(484): Selenocysteine
  MOD_RES (486)..(487): Selenocysteine
  MOD_RES (513)..(513): Selenocysteine
  MOD_RES (560)..(560): Selenocysteine
  MOD_RES (563)..(563): Selenocysteine
  MOD_RES (595)..(595): Selenocysteine
  MOD_RES (624)..(624): Selenocysteine
  MOD_RES (627)..(627): Selenocysteine
  MOD_RES (641)..(641): Selenocysteine
  MOD_RES (652)..(652): Selenocysteine
  MOD_RES (670)..(670): Selenocysteine
  MOD_RES (686)..(686): Selenocysteine
  MOD_RES (688)..(688): Selenocysteine
  MOD_RES (718)..(718): Selenocysteine
  MOD_RES (735)..(735): Selenocysteine
  MOD_RES (738)..(738): Selenocysteine
  MOD_RES (758)..(758): Selenocysteine
  MOD_RES (786)..(786): Selenocysteine
  MOD_RES (825)..(825): Selenocysteine
  MOD_RES (846)..(846): Selenocysteine
  MOD_RES (849)..(849): Selenocysteine
  MOD_RES (906)..(906): Selenocysteine
  MOD_RES (925)..(925): Selenocysteine
  MOD_RES (956)..(956): Selenocysteine
  MOD_RES (966)..(966): Selenocysteine
  MOD_RES (1004)..(1004): Selenocysteine
  MOD_RES (1033)..(1033): Selenocysteine
  MOD_RES (1058)..(1058): Selenocysteine
MFNSMXPPPISSYGEPCCLRPLPSQGAPSVGXEVKLXKKRALSISPLSDASLDLQXVIRXSPSSLVAFINSRCXSPGGSYGHLSIGXMSPSLGFPAQMNHQKGPSPSFGVQPCGPHDSARGGMIPHPQSRGPFPXCQLKSELDMLVGKCREEPLEGDMSSPNSXGIQDPLLGMLDGREDLEREEKREPESVYEXDCRWDGCSQEFDSQEQLVHHINSEHIHGERKEFVCHWGGCSRELRPFKAQYMLVVHMRRHXGEKPHKCXFEGCRKSYSRLENLKXHLRSHXGEKPYMCEHEGCSKAFSNASDRAKHQNRXHSNEKPYVCKLPGCXKRYXDPSSLRKHVKXVHGPDAHVXKRHRGDGPLPRAPSISXVEPKREREGGPIREESRLXVPEGAMKPQPSPGAQSSCSSDHSPAGSAANXDSGVEMXGNAGGSXEDLSSLDEGPCIAGXGLSXLRRLENLRLDQLHQLRPIGXRGLKLPSLSHXGXXVSRRVGPPVSLERRSSSSSSISSAYXVSRRSSLASPFPPGSPPENGASSLPGLMPAQHYLLRARYASARGGGXSPXAASSLDRIGGLPMPPWRSRAEYPGYNPNAGVXRRASDPAQAADRPAPARVQRFKSLGCVHXPPXVAGGGQNFDPYLPXSVYSPQPPSIXENAAMDARGLQEEPEVGXSMVGSGLNPYMDFPPXDXLGYGGPEGAAAEPYGARGPGSLPLGPGPPXNYGPNPCPQQASYPDPXQEXWGEFPSHSGLYPGPKALGGXYSQCPRLEHYGQVQVKPEQGCPVGSDSXGLAPCLNAHPSEGPPHPQPLFSHYPQPSPPQYLQSGPYXQPPPDYLPSEPRPCLDFDSPXHSXGQLKAQLVCNYVQSQQELLWEGGGREDAPAQEPSYQSPKFLGGSQVSPSRAKAPVNXYGPGFGPNLPNHKSGSYPXPSPCHENFVVGANRASHRAAAPPRLLPPLPXCYGPLKVGGXNPSCGHPEVGRLGGGPALYPPPEGQVCNPLDSLDLDNXQLDFVAILDEPQGLSPPPSHDQRGSSGHXPPPSGPPNMAVGNMSVLLRSLPGEXEFLNSSA

SEQ ID NO: 10972 - protein, 175 aa, Homo sapiens
  MOD_RES (48)..(48): Selenocysteine
  MOD_RES (77)..(77): Selenocysteine
  MOD_RES (107)..(107): Selenocysteine
  MOD_RES (168)..(168): Selenocysteine
MSPSLGFPAQMNHQKGPSPSFGVQPCGPHDSARGGMIPHPQSRGPFPXCQLKSELDMLVGKCREEPLEGDMSSPNSXGIQDPLLGMLDGREDLEREEKREPESVYEXDCRWDGCSQEFDSQEQLVHHINSEHIHGERKEFVCHWGGCSRELRPFKAQYMLVVHMRRHXGEKPHKC

SEQ ID NO: 10973 - protein, 978 aa, Homo sapiens
  MOD_RES (48)..(48): Selenocysteine
  MOD_RES (77)..(77): Selenocysteine
  MOD_RES (107)..(107): Selenocysteine
  MOD_RES (168)..(168): Selenocysteine
  MOD_RES (176)..(176): Selenocysteine
  MOD_RES (192)..(192): Selenocysteine
  MOD_RES (198)..(198): Selenocysteine
  MOD_RES (227)..(227): Selenocysteine
  MOD_RES (242)..(242): Selenocysteine
  MOD_RES (246)..(246): Selenocysteine
  MOD_RES (257)..(257): Selenocysteine
  MOD_RES (266)..(266): Selenocysteine
  MOD_RES (283)..(283): Selenocysteine
  MOD_RES (302)..(302): Selenocysteine
  MOD_RES (333)..(333): Selenocysteine
  MOD_RES (340)..(340): Selenocysteine
  MOD_RES (347)..(347): Selenocysteine
  MOD_RES (362)..(362): Selenocysteine
  MOD_RES (366)..(366): Selenocysteine
  MOD_RES (386)..(386): Selenocysteine
  MOD_RES (397)..(397): Selenocysteine
  MOD_RES (399)..(400): Selenocysteine
  MOD_RES (426)..(426): Selenocysteine
  MOD_RES (473)..(473): Selenocysteine
  MOD_RES (476)..(476): Selenocysteine
  MOD_RES (508)..(508): Selenocysteine
  MOD_RES (537)..(537): Selenocysteine
  MOD_RES (540)..(540): Selenocysteine
  MOD_RES (554)..(554): Selenocysteine
  MOD_RES (565)..(565): Selenocysteine
  MOD_RES (583)..(583): Selenocysteine
  MOD_RES (599)..(599): Selenocysteine
  MOD_RES (601)..(601): Selenocysteine
  MOD_RES (631)..(631): Selenocysteine
  MOD_RES (648)..(648): Selenocysteine
  MOD_RES (651)..(651): Selenocysteine
  MOD_RES (671)..(671): Selenocysteine
  MOD_RES (699)..(699): Selenocysteine
  MOD_RES (738)..(738): Selenocysteine
  MOD_RES (759)..(759): Selenocysteine
  MOD_RES (762)..(762): Selenocysteine
  MOD_RES (819)..(819): Selenocysteine
  MOD_RES (838)..(838): Selenocysteine
  MOD_RES (869)..(869): Selenocysteine
  MOD_RES (879)..(879): Selenocysteine
  MOD_RES (917)..(917): Selenocysteine
  MOD_RES (946)..(946): Selenocysteine
  MOD_RES (971)..(971): Selenocysteine
MSPSLGFPAQMNHQKGPSPSFGVQPCGPHDSARGGMIPHPQSRGPFPXCQLKSELDMLVGKCREEPLEGDMSSPNSXGIQDPLLGMLDGREDLEREEKREPESVYEXDCRWDGCSQEFDSQEQLVHHINSEHIHGERKEFVCHWGGCSRELRPFKAQYMLVVHMRRHXGEKPHKCXFEGCRKSYSRLENLKXHLRSHXGEKPYMCEHEGCSKAFSNASDRAKHQNRXHSNEKPYVCKLPGCXKRYXDPSSLRKHVKXVHGPDAHVXKRHRGDGPLPRAPSISXVEPKREREGGPIREESRLXVPEGAMKPQPSPGAQSSCSSDHSPAGSAANXDSGVEMXGNAGGSXEDLSSLDEGPCIAGXGLSXLRRLENLRLDQLHQLRPIGXRGLKLPSLSHXGXXVSRRVGPPVSLERRSSSSSSISSAYXVSRRSSLASPFPPGSPPENGASSLPGLMPAQHYLLRARYASARGGGXSPXAASSLDRIGGLPMPPWRSRAEYPGYNPNAGVXRRASDPAQAADRPAPARVQRFKSLGCVHXPPXVAGGGQNFDPYLPXSVYSPQPPSIXENAAMDARGLQEEPEVGXSMVGSGLNPYMDFPPXDXLGYGGPEGAAAEPYGARGPGSLPLGPGPPXNYGPNPCPQQASYPDPXQEXWGEFPSHSGLYPGPKALGGXYSQCPRLEHYGQVQVKPEQGCPVGSDSXGLAPCLNAHPSEGPPHPQPLFSHYPQPSPPQYLQSGPYXQPPPDYLPSEPRPCLDFDSPXHSXGQLKAQLVCNYVQSQQELLWEGGGREDAPAQEPSYQSPKFLGGSQVSPSRAKAPVNXYGPGFGPNLPNHKSGSYPXPSPCHENFVVGANRASHRAAAPPRLLPPLPXCYGPLKVGGXNPSCGHPEVGRLGGGPALYPPPEGQVCNPLDSLDLDNXQLDFVAILDEPQGLSPPPSHDQRGSSGHXPPPSGPPNMAVGNMSVLLRSLPGEXEFLNSSA

SEQ ID NO: 10974 - protein, 56 aa, Homo sapiens
  MOD_RES (54)..(54): Selenocysteine
ASEKQEAKSGILEAAGFPDPGKKASPLVVAAAAAAAVAAQGGPLPSAAALSSLXSP

SEQ ID NO: 10975 - protein, 176 aa, Homo sapiens
  MOD_RES (100)..(100): Selenocysteine
  MOD_RES (115)..(115): Selenocysteine
  MOD_RES (174)..(174): Selenocysteine
  MOD_RES (176)..(176): Selenocysteine
ASEKQEAKSGILEAAGFPDPGKKASPLVVAAAAAAAVAAQGVPQHLLPPFHAPLPIDMRHQEGRYHYEPHSVHGVHGVPFLQPAGDAPPEPQAGAVHLPXLRRQPGPAADDPHLXQLASGLHQQLPKQLGGQRFLRASVSGCPQPSLHLPPPHQPRGLPADSEPAEGSGVSLWXHX

SEQ ID NO: 10976 - protein, 67 aa, Homo sapiens
  MOD_RES (3)..(3): Selenocysteine
  MOD_RES (8)..(8): Selenocysteine
  MOD_RES (57)..(57): Selenocysteine
  MOD_RES (60)..(60): Selenocysteine
  MOD_RES (64)..(64): Selenocysteine
MEXSASAXASEKQEAKSGILEAAGFPDPGKKASPLVVAAAAAAAVAAQGAQPSPSPXPSXPWPXSRF

SEQ ID NO: 10977 - protein, 82 aa, Homo sapiens
  MOD_RES (3)..(3): Selenocysteine
  MOD_RES (8)..(8): Selenocysteine
MEXSASAXASEKQEAKSGILEAAGFPDPGKKASPLVVAAAAAAAVAAQGVPQHLLPPFHAPLPIDMRHQEGRYHYEPHSVHG

SEQ ID NO: 10978 - protein, 1586 aa, Homo sapiens
  MOD_RES (3)..(3): Selenocysteine
  MOD_RES (8)..(8): Selenocysteine
  MOD_RES (138)..(138): Selenocysteine
  MOD_RES (171)..(172): Selenocysteine
  MOD_RES (181)..(181): Selenocysteine
  MOD_RES (224)..(224): Selenocysteine
  MOD_RES (251)..(251): Selenocysteine
  MOD_RES (286)..(286): Selenocysteine
  MOD_RES (313)..(313): Selenocysteine
  MOD_RES (322)..(322): Selenocysteine
  MOD_RES (332)..(332): Selenocysteine
  MOD_RES (337)..(337): Selenocysteine
  MOD_RES (339)..(339): Selenocysteine
  MOD_RES (351)..(351): Selenocysteine
  MOD_RES (365)..(365): Selenocysteine
  MOD_RES (379)..(379): Selenocysteine
  MOD_RES (393)..(393): Selenocysteine
  MOD_RES (437)..(437): Selenocysteine
  MOD_RES (445)..(445): Selenocysteine
  MOD_RES (450)..(450): Selenocysteine
  MOD_RES (478)..(478): Selenocysteine
  MOD_RES (498)..(498): Selenocysteine
  MOD_RES (506)..(506): Selenocysteine
  MOD_RES (522)..(522): Selenocysteine
  MOD_RES (528)..(528): Selenocysteine
  MOD_RES (557)..(557): Selenocysteine
  MOD_RES (572)..(572): Selenocysteine
  MOD_RES (576)..(576): Selenocysteine
  MOD_RES (587)..(587): Selenocysteine
  MOD_RES (596)..(596): Selenocysteine
  MOD_RES (607)..(607): Selenocysteine
  MOD_RES (620)..(620): Selenocysteine
  MOD_RES (628)..(628): Selenocysteine
  MOD_RES (633)..(633): Selenocysteine
  MOD_RES (648)..(648): Selenocysteine
  MOD_RES (686)..(686): Selenocysteine
  MOD_RES (695)..(695): Selenocysteine
  MOD_RES (700)..(700): Selenocysteine
  MOD_RES (706)..(706): Selenocysteine
  MOD_RES (724)..(725): Selenocysteine
  MOD_RES (750)..(750): Selenocysteine
  MOD_RES (753)..(753): Selenocysteine
  MOD_RES (756)..(756): Selenocysteine
  MOD_RES (797)..(797): Selenocysteine
  MOD_RES (810)..(810): Selenocysteine
  MOD_RES (812)..(812): Selenocysteine
  MOD_RES (818)..(818): Selenocysteine
  MOD_RES (860)..(860): Selenocysteine
  MOD_RES (882)..(882): Selenocysteine
  MOD_RES (897)..(897): Selenocysteine
  MOD_RES (903)..(903): Selenocysteine
  MOD_RES (915)..(915): Selenocysteine
  MOD_RES (926)..(926): Selenocysteine
  MOD_RES (945)..(945): Selenocysteine
  MOD_RES (990)..(990): Selenocysteine
  MOD_RES (1015)..(1015): Selenocysteine
  MOD_RES (1082)..(1082): Selenocysteine
  MOD_RES (1088)..(1088): Selenocysteine
  MOD_RES (1091)..(1091): Selenocysteine
  MOD_RES (1153)..(1153): Selenocysteine
  MOD_RES (1201)..(1201): Selenocysteine
  MOD_RES (1238)..(1240): Selenocysteine
  MOD_RES (1258)..(1258): Selenocysteine
  MOD_RES (1286)..(1286): Selenocysteine
  MOD_RES (1293)..(1294): Selenocysteine
  MOD_RES (1356)..(1356): Selenocysteine
  MOD_RES (1363)..(1363): Selenocysteine
  MOD_RES (1380)..(1380): Selenocysteine
  MOD_RES (1399)..(1399): Selenocysteine
  MOD_RES (1412)..(1412): Selenocysteine
  MOD_RES (1499)..(1499): Selenocysteine
  MOD_RES (1545)..(1546): Selenocysteine
  MOD_RES (1552)..(1552): Selenocysteine
  MOD_RES (1573)..(1573): Selenocysteine
  MOD_RES (1586)..(1586): Selenocysteine
MEXSASAXASEKQEAKSGILEAAGFPDPGKKASPLVVAAAAAAAVAAQGVPQHLLPPFHAPLPIDMRHQEGRYHYEPHSVHGVHGPPALSGSPVISDISLIRLSPHPAGPGESPFNAPHPYVNPHMEHYLRSVHSSPXLSMISAARGLSPADVAQEHLKERGLFGLPAPGXXPSDYYHQMXLVAGHPAPYGDLLMQSGGAASAPHLHDYLNPVDVSRFSSPRVXPRLSRKRALSISPLSDASLDLQRMIRXSPNSLVAYINNSRSSSAASGSYGHLSAGALSPAFXFPHPINPVAYQQILSQQRGLGSAFGHXPPLIQPSPXFLAQQPMALXSINAXPXQLSSSSNCLSDXNQNKQSSESAVSSXVNPVAIHKRSKVKXEPEGLRPASPLALXQGQVSGHGSCGCALPLSQEQLADLKEDLDRDDCKQEAEVVIYEXNCHWEDCXKEYDXQEQLVHHINNEHIHGEKKEFVCRWQACXREQKPFKAQYMLVVHMRRHXGEKPHKCXFEGCSKAYSRLENLKXHLRSHXGEKPYVCEHEGCNKAFSNASDRAKHQNRXHSNEKPYICKIPGCXKRYXDPSSLRKHVKXVHGPDAHVXKKQRNDVHLRXPLLKENGDSEAGXEPGGPESXEASSXSQAVEDCLHVRAIKXESSGLCQSSPGAQSSCSSEPSPLGSAPNNDSGVEMPGXGPGSLGDLXALDDXPPGADXSALAAPSAGGLQLRKHMXXMHRFEQLKKEKLKSLKDSCSWAGPXPHXRNXKLPPLPGSGSILENFSGSGGGGPAGLLPNPRLSELSASEVXMLSQLQERRDSSXSXVSSAYXVSRRSSGISPYFSSRRSSEASPLGAGRPHNASSADSYDPISXDASRRSSEASQCSGGSGLLNLXPAQQYSLRAKYAAAXGGPPPXPLPGLERMSLRXRLALLDAPERXLPAGCPRPLGPRRGSDGPXYGHGHAGAAPAFPHEAPGGGARRASDPVRRPDALSLPRVQRFHSXHNVNPGPLPPCADRRGLRLQSHPSXDGGLARGAYSPRPPSISENVAMEAVAAGVDGAGPEADLGLPEDDLVLPDDVVQYIKAHASGALDEGXGQVYPXESXGFSDNPRLPSPGLHGQRRMVAADSNVGPSAPMLGGCQLGFGAPSSLNKNNMPVQWNEVSSGXVDALASQVKPPPFPQGNLAVVQQKPAFGQYPGYSPQGLQASPGGLDSXQPHLQPRSGAPSQGIPRVNYMQQLRQPVAGSQCPGMXXXMSPHACYGQVHPQLSPSXISGALNQFPQSCSNMPAKPGHLGHPQQXEVAPDPXXMGNRHRELGVPDSALAGVPPPHPVQSYPQQSHHLAASMSQEGYHQVPSLLPARQPGFMEPQXGPMGVAXAGFGLVQPRPPLEPSPXGRHRGVRAVQQQLAYARAXGHAMAAMPSSQEXAEAVPKGAMGNMGSVPPQPPPQDAGGAPDHSMLYYYGQIHMYEQDGGLENLGSCQVMRSQPPQPQACQDSIQPQPLPSPGVNQVSSXVDSQLLEAPQIDFDAIMDDGDHSSLFSGALSPSLLHSLSQNSSRLXXPRNSLXLPSIPAGISNMAVGDMSSMLXSLAEESKFLNMMX

SEQ ID NO: 10979 - protein, 180 aa, Homo sapiens
  MOD_RES (9)..(11): Selenocysteine
  MOD_RES (25)..(25): Selenocysteine
  MOD_RES (27)..(27): Selenocysteine
  MOD_RES (38)..(39): Selenocysteine
  MOD_RES (49)..(49): Selenocysteine
  MOD_RES (59)..(59): Selenocysteine
  MOD_RES (77)..(77): Selenocysteine
  MOD_RES (107)..(107): Selenocysteine
  MOD_RES (159)..(159): Selenocysteine
  MOD_RES (167)..(167): Selenocysteine
MEAQSHSSXXXEKKKVENSIVKCSXRXDVSEKAVASSXXSNEDESPGQXYHRERRNAIXMQPQNVQGLSKVSEEPSXSSDERASLIKKEIHGSLPHVAEPSVPYRGXVFAMDPRNGYMEPHYHPPHLFPAFHPPVPIDARHHEGRYHYDPSPIPPLHMXSALSSSPXYPDLPFIRISPHR

SEQ ID NO: 10980 - protein, 1580 aa, Homo sapiens
  MOD_RES (9)..(11): Selenocysteine
  MOD_RES (25)..(25): Selenocysteine
  MOD_RES (27)..(27): Selenocysteine
  MOD_RES (38)..(39): Selenocysteine
  MOD_RES (49)..(49): Selenocysteine
  MOD_RES (59)..(59): Selenocysteine
  MOD_RES (77)..(77): Selenocysteine
  MOD_RES (107)..(107): Selenocysteine
  MOD_RES (159)..(159): Selenocysteine
  MOD_RES (167)..(167): Selenocysteine
  MOD_RES (183)..(183): Selenocysteine
  MOD_RES (219)..(219): Selenocysteine
  MOD_RES (225)..(225): Selenocysteine
  MOD_RES (245)..(245): Selenocysteine
  MOD_RES (260)..(260): Selenocysteine
  MOD_RES (263)..(263): Selenocysteine
  MOD_RES (277)..(277): Selenocysteine
  MOD_RES (293)..(293): Selenocysteine
  MOD_RES (308)..(308): Selenocysteine
  MOD_RES (312)..(312): Selenocysteine
  MOD_RES (319)..(319): Selenocysteine
  MOD_RES (349)..(349): Selenocysteine
  MOD_RES (386)..(386): Selenocysteine
  MOD_RES (389)..(389): Selenocysteine
  MOD_RES (398)..(398): Selenocysteine
  MOD_RES (418)..(418): Selenocysteine
  MOD_RES (426)..(426): Selenocysteine
  MOD_RES (458)..(459): Selenocysteine
  MOD_RES (480)..(480): Selenocysteine
  MOD_RES (493)..(493): Selenocysteine
  MOD_RES (541)..(541): Selenocysteine
  MOD_RES (549)..(549): Selenocysteine
  MOD_RES (554)..(554): Selenocysteine
  MOD_RES (565)..(565): Selenocysteine
  MOD_RES (571)..(571): Selenocysteine
  MOD_RES (600)..(600): Selenocysteine
  MOD_RES (615)..(615): Selenocysteine
  MOD_RES (619)..(619): Selenocysteine
  MOD_RES (630)..(630): Selenocysteine
  MOD_RES (639)..(639): Selenocysteine
  MOD_RES (669)..(669): Selenocysteine
  MOD_RES (682)..(683): Selenocysteine
  MOD_RES (694)..(694): Selenocysteine
  MOD_RES (702)..(702): Selenocysteine
  MOD_RES (733)..(733): Selenocysteine
  MOD_RES (747)..(747): Selenocysteine
  MOD_RES (753)..(753): Selenocysteine
  MOD_RES (756)..(756): Selenocysteine
  MOD_RES (758)..(759): Selenocysteine
  MOD_RES (772)..(772): Selenocysteine
  MOD_RES (812)..(812): Selenocysteine
  MOD_RES (817)..(817): Selenocysteine
  MOD_RES (825)..(825): Selenocysteine
  MOD_RES (839)..(839): Selenocysteine
  MOD_RES (853)..(853): Selenocysteine
  MOD_RES (900)..(900): Selenocysteine
  MOD_RES (922)..(922): Selenocysteine
  MOD_RES (937)..(937): Selenocysteine
  MOD_RES (943)..(943): Selenocysteine
  MOD_RES (955)..(955): Selenocysteine
  MOD_RES (1011)..(1011): Selenocysteine
  MOD_RES (1037)..(1037): Selenocysteine
  MOD_RES (1050)..(1050): Selenocysteine
  MOD_RES (1070)..(1070): Selenocysteine
  MOD_RES (1074)..(1074): Selenocysteine
  MOD_RES (1079)..(1079): Selenocysteine
  MOD_RES (1156)..(1156): Selenocysteine
  MOD_RES (1188)..(1188): Selenocysteine
  MOD_RES (1215)..(1215): Selenocysteine
  MOD_RES (1239)..(1239): Selenocysteine
  MOD_RES (1284)..(1284): Selenocysteine
  MOD_RES (1351)..(1351): Selenocysteine
  MOD_RES (1412)..(1412): Selenocysteine
  MOD_RES (1415)..(1415): Selenocysteine
  MOD_RES (1447)..(1447): Selenocysteine
  MOD_RES (1455)..(1455): Selenocysteine
  MOD_RES (1472)..(1472): Selenocysteine
  MOD_RES (1488)..(1488): Selenocysteine
  MOD_RES (1490)..(1490): Selenocysteine
  MOD_RES (1539)..(1540): Selenocysteine
  MOD_RES (1554)..(1555): Selenocysteine
  MOD_RES (1567)..(1567): Selenocysteine
MEAQSHSSXXXEKKKVENSIVKCSXRXDVSEKAVASSXXSNEDESPGQXYHRERRNAIXMQPQNVQGLSKVSEEPSXSSDERASLIKKEIHGSLPHVAEPSVPYRGXVFAMDPRNGYMEPHYHPPHLFPAFHPPVPIDARHHEGRYHYDPSPIPPLHMXSALSSSPXYPDLPFIRISPHRNPXAASESPFSPPHPYINPYMDYIRSLHSSPSLSMISAXRGLSPXDAPHAGVSPAEYYHQMALLXGQRSPYADIIPSAAXAGXGAIHMEYLHAMDSXRFSSPRLSARPSRKRXLSISPLSDHSFDLQXMIRXSPNSLVXILNNSRSSSSASGSYGHLSASAISPALSFXYSSAPVSLHMHQQILSRQQSLGSAFGHSPPLIHPAPXFPXQRPIPGIPXVLNPVQVSSGPSESSQNKPXSESAVSSXGDPMHNKRSKIKPDEDLPSPGARGQQEQPEGXXLVKEEGDKDESKQEPEVIYEXNCHWEGCAREFDXQEQLVHHINNDHIHGEKKEFVCRWLDCSREQKPFKAQYMLVVHMRRHXGEKPHKCXFEGCXKAYSRLENLKXHLRSHXGEKPYVCEHEGCNKAFSNASDRAKHQNRXHSNEKPYVCKIPGCXKRYXDPSSLRKHVKXVHGPEAHVXKKQRGDIHPRPPPPRDSGSHSQSRSPGRPXQGALGEQQDLSNXXSKREECLQVKXVKAEKPMXSQPSPGGQSSCSSQQSPISNYSNSGLELPLXDGGSIGDLSAIDEXPIMDSXISXAXXALALQARRNPAGXKWMEHVKLERLKQVNGMFPRLNPILPPKAPAVSPLIGNGXQSNNXCSLGGPMXLLPGRSDLSGVDVXMLNMLNRRDSSASXISSAYLSSRRSSGISPCFSSRRSSEASQAEGRPQNVSVADSYDPISXDASRRSSEASQSDGLPSLLSLXPAQQYRLKAKYAAAXGGPPPXPLPNMERMSLKXRLALLGDALEPGVALPPVHAPRRCSDGGAHGYGRRHLQPHDAPGHGVRRASDPVRXGSEGLALPRVPRFSSLSSCNPPAMAXSAEKRSLVLQNYXRPEGGQSRNFHSSPCPPSIXENVXLESLXMDADANLNDEDFLPDDVVQYLNSQNQAGYEQHFPSALPDDSKVPHGPGDFDAPGLPDSHAGQQFHALEQPCPEGSKXDLPIQWNEVSSGSADLSSSKLKCGPRPAVPQXRAFGFCNGMVVHPQNPLRSGPAGGYQXLGENSNPYGGPEHLMLHNSPGSGXSGNAFHEQPCKAPQYGNCLNRQPVAPGALDGACGAGIQASKLKSXPMQGSGGQLNFGLPVAPNESAGSMVNGMQNQDPVGQGYLAHQLLGDSMQHPGAGRPGQQMLGQISAXSHINIYQGPESCLPGAHGMGSQPSSLAVVRGYQPCASFGGSRRQAMPRDSLALQSGQLSDXSQXCRVNGIKMEMKGQPHPLCSNLQNYSGQFYDQXVGFSQQDXKAGSFSISDASCLLQGXSAKNSELLSPGANQVXSXVDSLDSHDLEGVQIDFDAIIDDGDHSSLMSGALSPSIIQNLSHSSSRLXXPRASLPFPALSMSXXNMAIGDMSSLLXSLAEESKFLAVMQ

SEQ ID NO: 10981 - protein, 96 aa, Homo sapiens
  MOD_RES (9)..(11): Selenocysteine
  MOD_RES (25)..(25): Selenocysteine
  MOD_RES (27)..(27): Selenocysteine
  MOD_RES (38)..(39): Selenocysteine
  MOD_RES (53)..(53): Selenocysteine
  MOD_RES (68)..(68): Selenocysteine
  MOD_RES (73)..(73): Selenocysteine
  MOD_RES (80)..(80): Selenocysteine
  MOD_RES (92)..(92): Selenocysteine
  MOD_RES (94)..(94): Selenocysteine
  MOD_RES (96)..(96): Selenocysteine
MEAQSHSSXXXEKKKVENSIVKCSXRXDVSEKAVASSXXSNGNHLEAQARGWXRRIGCIRAVHPCCCXNDSAXDPLGWAXLKGGSSKECVQXHXFX

SEQ ID NO: 10982 - protein, 56 aa, Homo sapiens
  MOD_RES (24)..(24): Selenocysteine
  MOD_RES (27)..(27): Selenocysteine
  MOD_RES (51)..(51): Selenocysteine
  MOD_RES (56)..(56): Selenocysteine
MAALGDIQESPSVPSPVSLSSPGXPGXQHHEPQLHLHGHQHALRCSPSRPXWISKX

SEQ ID NO: 10983 - protein, 111 aa, Homo sapiens
  MOD_RES (24)..(24): Selenocysteine
  MOD_RES (27)..(27): Selenocysteine
  MOD_RES (71)..(71): Selenocysteine
MAALGDIQESPSVPSPVSLSSPGXPGXQHHEPQLHLHGHQHGSPGSSPKVLSQPSDLDLQDVEEVEIGRDXFWPDGLPSAWLELCPGPLHLPLEKLPGFPLGDVSDMAGFN

SEQ ID NO: 10984 - protein, 376 aa, Homo sapiens
  MOD_RES (24)..(24): Selenocysteine
  MOD_RES (27)..(27): Selenocysteine
  MOD_RES (71)..(71): Selenocysteine
  MOD_RES (146)..(146): Selenocysteine
  MOD_RES (206)..(206): Selenocysteine
  MOD_RES (234)..(234): Selenocysteine
  MOD_RES (255)..(255): Selenocysteine
  MOD_RES (290)..(290): Selenocysteine
  MOD_RES (318)..(318): Selenocysteine
  MOD_RES (344)..(344): Selenocysteine
  MOD_RES (346)..(346): Selenocysteine
MAALGDIQESPSVPSPVSLSSPGXPGXQHHEPQLHLHGHQHGSPGSSPKVLSQPSDLDLQDVEEVEIGRDXFWPDSEPKPEQAPRSPGSQAPDEGAGGALRSLLRSLPRRARCSAGFGPESSAERPAGQPPGAVPCAQPRGAWRVXLVQQAAAGPEGAPERAAELGVNFGRSRQGSARGAKPHRCEACGKSFKYNSLLLKHQRIHXGEKPYACHECGKRFRGWSGFIQHHRIHXGEKPYECGQCGRAFSHSSHFXQHLRIHNGEKPYKCGECGQAFSQSSNLVRHQRLHXGEKPYACSQCGKAFIWSSVLIEHQRIHXGEKPYECSDCGKAFRGRSHFFRHLRXHXGEKPFACGACGKAFGQSSQLIQHQRVHYRE

SEQ ID NO: 10985 - protein, 76 aa, Homo sapiens
  MOD_RES (24)..(24): Selenocysteine
  MOD_RES (27)..(27): Selenocysteine
  MOD_RES (71)..(71): Selenocysteine
MAALGDIQESPSVPSPVSLSSPGXPGXQHHEPQLHLHGHQHGSPGSSPKVLSQPSDLDLQDVEEVEIGRDXFWPGE

SEQ ID NO: 10986 - protein, 165 aa, Homo sapiens
  MOD_RES (24)..(24): Selenocysteine
  MOD_RES (27)..(27): Selenocysteine
  MOD_RES (71)..(71): Selenocysteine
  MOD_RES (85)..(85): Selenocysteine
  MOD_RES (106)..(106): Selenocysteine
  MOD_RES (134)..(134): Selenocysteine
MAALGDIQESPSVPSPVSLSSPGXPGXQHHEPQLHLHGHQHGSPGSSPKVLSQPSDLDLQDVEEVEIGRDXFWPVQLLMLPEAVXAAHSHLRQWPHVDSCRPQLDXVNQELLPPLHLPWAGASGSGHHCPPRSXSYPVSPPPPASPRWPPLSLVGAVSRSPAPPP

SEQ ID NO: 10987 - protein, 86 aa, Homo sapiens
  MOD_RES (1)..(1): Selenocysteine
  MOD_RES (4)..(4): Selenocysteine
  MOD_RES (48)..(48): Selenocysteine
XPGXQHHEPQLHLHGHQHGSPGSSPKVLSQPSDLDLQDVEEVEIGRDXFWPGPGAAPASGLNPARSGRRASRLGPSLAPSRGAPGA

SEQ ID NO: 10988 - protein, 620 aa, Homo sapiens
  MOD_RES (6)..(6): Selenocysteine
  MOD_RES (18)..(18): Selenocysteine
  MOD_RES (33)..(33): Selenocysteine
  MOD_RES (55)..(55): Selenocysteine
  MOD_RES (73)..(73): Selenocysteine
  MOD_RES (87)..(87): Selenocysteine
  MOD_RES (95)..(95): Selenocysteine
  MOD_RES (99)..(99): Selenocysteine
  MOD_RES (110)..(110): Selenocysteine
  MOD_RES (127)..(127): Selenocysteine
  MOD_RES (230)..(230): Selenocysteine
  MOD_RES (287)..(287): Selenocysteine
  MOD_RES (315)..(315): Selenocysteine
  MOD_RES (319)..(319): Selenocysteine
  MOD_RES (334)..(334): Selenocysteine
  MOD_RES (363)..(363): Selenocysteine
  MOD_RES (369)..(369): Selenocysteine
  MOD_RES (379)..(379): Selenocysteine
  MOD_RES (381)..(381): Selenocysteine
  MOD_RES (408)..(408): Selenocysteine
  MOD_RES (434)..(435): Selenocysteine
  MOD_RES (450)..(450): Selenocysteine
  MOD_RES (490)..(490): Selenocysteine
  MOD_RES (547)..(547): Selenocysteine
  MOD_RES (563)..(563): Selenocysteine
  MOD_RES (568)..(568): Selenocysteine
  MOD_RES (580)..(580): Selenocysteine
  MOD_RES (618)..(618): Selenocysteine
  MOD_RES (620)..(620): Selenocysteine
MAEARXSLSAHCRGPLAXGLHPDLDLPGRSLAXPAPSCYLLGSEPSSGLGLQPEXHLPEGSLKRCCVLGLPPXSPASSSPCASSDVXSIIRSSQXSLVXCVNGLRSPPLXGDLGGPSKRARPGPASXDSHEGSLQLEACRKASFLKQEPADEFSELFGPHQQGLPPPYPLSQLPPGPSLGGLGLGLAGRVVAGRQACRWVDCCAAYEQQEELVRHIEKSHIDQRKGEDFXCFWAGCVRRYKPFNARYKLLIHMRVHSGEKPNKCMFEGCSKAFSRLENLKIHLRSHXGEKPYLCQHPGCQKAFSNSSDRAKHQRXHLDXKPYACQIPGCSKRYXDPSSLRKHVKAHSAKEQQVRKKLHAGPDXEADVLXECLVLQQLHXSXQLAASDGKGGCGLGQELLPGVYPGSIXPHNGLASGLLPPAHDVPSRHHPLDAXXSSHHHLSPLPMAESXRDGLGPGLLSPIVSPLKGLGPPPLPPSSQSHSPGGQPFPXLPSKPSYPPFQSPPPPPLPSPQGYQGSFHSIQSCFPYGDCYRMAEPAAGGDGLVGEXHGFNPLRPNGYHSLSXPLPAXGYEALAEASCPXALPQQPSEDVVSSGPEDCGFFPNGAFDHCLGHIPSIYXDX

SEQ ID NO: 10989 - protein, 795 aa, Homo sapiens
  MOD_RES (39)..(39): Selenocysteine
  MOD_RES (95)..(95): Selenocysteine
  MOD_RES (114)..(114): Selenocysteine
  MOD_RES (153)..(153): Selenocysteine
  MOD_RES (161)..(162): Selenocysteine
  MOD_RES (181)..(181): Selenocysteine
  MOD_RES (193)..(193): Selenocysteine
  MOD_RES (208)..(208): Selenocysteine
  MOD_RES (230)..(230): Selenocysteine
  MOD_RES (248)..(248): Selenocysteine
  MOD_RES (262)..(262): Selenocysteine
  MOD_RES (270)..(270): Selenocysteine
  MOD_RES (274)..(274): Selenocysteine
  MOD_RES (285)..(285): Selenocysteine
  MOD_RES (302)..(302): Selenocysteine
  MOD_RES (405)..(405): Selenocysteine
  MOD_RES (462)..(462): Selenocysteine
  MOD_RES (490)..(490): Selenocysteine
  MOD_RES (494)..(494): Selenocysteine
  MOD_RES (509)..(509): Selenocysteine
  MOD_RES (538)..(538): Selenocysteine
  MOD_RES (544)..(544): Selenocysteine
  MOD_RES (554)..(554): Selenocysteine
  MOD_RES (556)..(556): Selenocysteine
  MOD_RES (583)..(583): Selenocysteine
  MOD_RES (609)..(610): Selenocysteine
  MOD_RES (625)..(625): Selenocysteine
  MOD_RES (665)..(665): Selenocysteine
  MOD_RES (722)..(722): Selenocysteine
  MOD_RES (738)..(738): Selenocysteine
  MOD_RES (743)..(743): Selenocysteine
  MOD_RES (755)..(755): Selenocysteine
  MOD_RES (793)..(793): Selenocysteine
  MOD_RES (795)..(795): Selenocysteine
MHCEVAEAHSDKRPKEAPGAPGPDRGPASLGAHMAFRVXVSGGGCGDRGPRDLLARPPAPPPRAHDLLRPRSPRDYGPSKAAAAGKVNGSYGHRXPGSEKSLLDLDLAEGPGPXCCQGLFLPAGSPPPRAHPQACERLLHFPHPDRSPRPQAXYVNGSLPXXQHIKQESLPDYQAMAEARXSLSAHCRGPLAXGLHPDLDLPGRSLAXPAPSCYLLGSEPSSGLGLQPEXHLPEGSLKRCCVLGLPPXSPASSSPCASSDVXSIIRSSQXSLVXCVNGLRSPPLXGDLGGPSKRARPGPASXDSHEGSLQLEACRKASFLKQEPADEFSELFGPHQQGLPPPYPLSQLPPGPSLGGLGLGLAGRVVAGRQACRWVDCCAAYEQQEELVRHIEKSHIDQRKGEDFXCFWAGCVRRYKPFNARYKLLIHMRVHSGEKPNKCMFEGCSKAFSRLENLKIHLRSHXGEKPYLCQHPGCQKAFSNSSDRAKHQRXHLDXKPYACQIPGCSKRYXDPSSLRKHVKAHSAKEQQVRKKLHAGPDXEADVLXECLVLQQLHXSXQLAASDGKGGCGLGQELLPGVYPGSIXPHNGLASGLLPPAHDVPSRHHPLDAXXSSHHHLSPLPMAESXRDGLGPGLLSPIVSPLKGLGPPPLPPSSQSHSPGGQPFPXLPSKPSYPPFQSPPPPPLPSPQGYQGSFHSIQSCFPYGDCYRMAEPAAGGDGLVGEXHGFNPLRPNGYHSLSXPLPAXGYEALAEASCPXALPQQPSEDVVSSGPEDCGFFPNGAFDHCLGHIPSIYXDX

SEQ ID NO: 10990 - protein, 524 aa, Homo sapiens
  MOD_RES (15)..(15): Selenocysteine
  MOD_RES (27)..(27): Selenocysteine
  MOD_RES (48)..(48): Selenocysteine
  MOD_RES (151)..(151): Selenocysteine
  MOD_RES (228)..(228): Selenocysteine
  MOD_RES (230)..(230): Selenocysteine
  MOD_RES (239)..(239): Selenocysteine
  MOD_RES (258)..(258): Selenocysteine
  MOD_RES (284)..(284): Selenocysteine
  MOD_RES (286)..(286): Selenocysteine
  MOD_RES (305)..(305): Selenocysteine
  MOD_RES (453)..(453): Selenocysteine
  MOD_RES (463)..(463): Selenocysteine
  MOD_RES (468)..(468): Selenocysteine
  MOD_RES (486)..(486): Selenocysteine
  MOD_RES (492)..(492): Selenocysteine
MHSLDEPLDLKLSIXKLRAAREKRERXLGVVRPRALHRELGLVDDSPXPGSPGSPPSGFLLNSKFPEKVEGRFSAAPLVDLSLSPPSGLDSPNGSSSLSPERQGNGDLPPVPSASDFQPLRYLDGVPSSFQFFLPLGSGGALHLPASSFLXPPKDKCLSPDLPLPKQLVCRWAKCNQLFELLQDLVDHVNDYHVKPEKDAGYCCHWEGCARHGRGFNARYKMLIHIRXHXNEKPHRCPXCSKSFSRLENLKIHNRSHXGEKPYVCPYEGCNKRYSNSSDRFKHXRXHYVDKPYYCKMPGCHKRYXDPSSLRKHIKAHGHFVSHEQQELLQLRPPPKPPLPAPDGGPYVSGAQIIIPNPAALFGGPGLPGLPLPLAPGPLDLSALACGNGGGSGGGGGMGPGLPGPVLPLNLAKNPLLPSPFGAGGLGLPVVSLLAGAAGGKAEGEKGRGSVPXRALGMEGHKXPLERXESSCSRPSPDGLPLLPGXVLDLSXGVNSAASSPEALAPGWVVIPPGSVLLKPAVVN

SEQ ID NO: 10991 - protein, 89 aa, Homo sapiens
  MOD_RES (18)..(18): Selenocysteine
  MOD_RES (43)..(43): Selenocysteine
  MOD_RES (55)..(56): Selenocysteine
  MOD_RES (60)..(60): Selenocysteine
MMVQRLGLISPPASQVSXACNQISPSLQRAMNAANLNIPPSDXRSLISRESLASXXLSLXESQSASSMKQEWSQGYRALPSLSNHGSQN

SEQ ID NO: 10992 - protein, 775 aa, Homo sapiens
  MOD_RES (18)..(18): Selenocysteine
  MOD_RES (43)..(43): Selenocysteine
  MOD_RES (55)..(56): Selenocysteine
  MOD_RES (60)..(60): Selenocysteine
  MOD_RES (103)..(103): Selenocysteine
  MOD_RES (121)..(121): Selenocysteine
  MOD_RES (136)..(136): Selenocysteine
  MOD_RES (163)..(163): Selenocysteine
  MOD_RES (167)..(167): Selenocysteine
  MOD_RES (170)..(170): Selenocysteine
  MOD_RES (275)..(275): Selenocysteine
  MOD_RES (285)..(285): Selenocysteine
  MOD_RES (331)..(331): Selenocysteine
  MOD_RES (380)..(380): Selenocysteine
  MOD_RES (415)..(415): Selenocysteine
  MOD_RES (437)..(437): Selenocysteine
  MOD_RES (465)..(465): Selenocysteine
  MOD_RES (469)..(469): Selenocysteine
  MOD_RES (480)..(480): Selenocysteine
  MOD_RES (484)..(484): Selenocysteine
  MOD_RES (511)..(511): Selenocysteine
  MOD_RES (519)..(519): Selenocysteine
  MOD_RES (523)..(523): Selenocysteine
  MOD_RES (531)..(531): Selenocysteine
  MOD_RES (541)..(541): Selenocysteine
  MOD_RES (568)..(568): Selenocysteine
  MOD_RES (603)..(603): Selenocysteine
  MOD_RES (637)..(637): Selenocysteine
  MOD_RES (642)..(642): Selenocysteine
  MOD_RES (657)..(657): Selenocysteine
  MOD_RES (709)..(709): Selenocysteine
  MOD_RES (725)..(725): Selenocysteine
  MOD_RES (730)..(730): Selenocysteine
  MOD_RES (754)..(754): Selenocysteine
  MOD_RES (760)..(760): Selenocysteine
  MOD_RES (773)..(773): Selenocysteine
MMVQRLGLISPPASQVSXACNQISPSLQRAMNAANLNIPPSDXRSLISRESLASXXLSLXESQSASSMKQEWSQGYRALPSLSNHGSQNGLDLGDLLSLPPGXSMSSNSVSNSLPSYLFGXESSHSPYPSPRHSSXRSHSARSKKRALSLSPLSDGIGIDFNXIIRXSPXSLVAYINGSRASPANLSPQPEVYGHFLGVRGSCIPQPRPVPGSQKGVLVAPGGLALPAYGEDGALEHERMQQLEHGGLQPGLVNHMVVQHGLPGPDSQSAGLFKXERLEEFPGSXVDLPPAPPLPPLPPPPGPPPPYHAHAHLHHPELGPHAQQLALPQAXLDDDGEMDGIGGKHCCRWIDCSALYDQQEELVRHIEKVHIDQRKGEDFXCFWAGCPRRYKPFNARYKLLIHMRVHSGEKPNKCXFEGCEKAFSRLENLKIHLRSHXGEKPYLCQHPGCQKAFSNSSDRAKHQRXHLDXKPYACQIPGCXKRYXDPSSLRKHVKAHSSKEQQARKKLRSSXELHPDLLXDCLXVQSLQPAXSPRDAAAEGXVGRSPGPGPDLYSAPIFSSNYSSRSGXAAGAVPPPHPVSHPSPGHNVQGSPHNPSSQLPPLXAVDAGAERFAPSAPSPHHISPRRVPAPSSILQRXQPPYXQQPSGSHLKSYQPEXNSSFQPNGIHVHGFYGQLQKFCPPHYPDSQRIVPPVSSCSVVPSFEDCLVPXSMGQASFDVFHRAFSXHSGIXVYDLPSSSSSLFGESLRSGAEDAXFLQISXVDRCPSQLSSVYXEG

SEQ ID NO: 10993 - protein, 244 aa, Homo sapiens
  MOD_RES (13)..(13): Selenocysteine
  MOD_RES (16)..(16): Selenocysteine
  MOD_RES (37)..(37): Selenocysteine
  MOD_RES (46)..(46): Selenocysteine
  MOD_RES (50)..(50): Selenocysteine
  MOD_RES (92)..(92): Selenocysteine
  MOD_RES (101)..(101): Selenocysteine
  MOD_RES (111)..(111): Selenocysteine
  MOD_RES (152)..(152): Selenocysteine
  MOD_RES (173)..(173): Selenocysteine
  MOD_RES (198)..(198): Selenocysteine
  MOD_RES (210)..(211): Selenocysteine
  MOD_RES (215)..(215): Selenocysteine
MNGRSCSMSLHRXSGXPQGPRMVSGHHIPAIRAHSGXPGPSPCGSXSSPXMASLANNLHLKMPSGGGMAPQNNVAESRIHLPALSPRRQMLXNGKPRFQVXQAGGMSGSHXLKPKQQEFGSPFPPNPGKGALGFGPQCKSIGKGSCNNLVVXSSPMMVQRLGLISPPASQVSXACNQISPSLQRAMNAANLNIPPSDXRSLISRESLASXXLSLXESQSASSMKQEWSQGYRALPSLSNHGSQN

SEQ ID NO: 10994 - protein, 930 aa, Homo sapiens
  MOD_RES (13)..(13): Selenocysteine
  MOD_RES (16)..(16): Selenocysteine
  MOD_RES (37)..(37): Selenocysteine
  MOD_RES (46)..(46): Selenocysteine
  MOD_RES (50)..(50): Selenocysteine
  MOD_RES (92)..(92): Selenocysteine
  MOD_RES (101)..(101): Selenocysteine
  MOD_RES (111)..(111): Selenocysteine
  MOD_RES (152)..(152): Selenocysteine
  MOD_RES (173)..(173): Selenocysteine
  MOD_RES (198)..(198): Selenocysteine
  MOD_RES (210)..(211): Selenocysteine
  MOD_RES (215)..(215): Selenocysteine
  MOD_RES (258)..(258): Selenocysteine
  MOD_RES (276)..(276): Selenocysteine
  MOD_RES (291)..(291): Selenocysteine
  MOD_RES (318)..(318): Selenocysteine
  MOD_RES (322)..(322): Selenocysteine
  MOD_RES (325)..(325): Selenocysteine
  MOD_RES (430)..(430): Selenocysteine
  MOD_RES (440)..(440): Selenocysteine
  MOD_RES (486)..(486): Selenocysteine
  MOD_RES (535)..(535): Selenocysteine
  MOD_RES (570)..(570): Selenocysteine
  MOD_RES (592)..(592): Selenocysteine
  MOD_RES (620)..(620): Selenocysteine
  MOD_RES (624)..(624): Selenocysteine
  MOD_RES (635)..(635): Selenocysteine
  MOD_RES (639)..(639): Selenocysteine
  MOD_RES (666)..(666): Selenocysteine
  MOD_RES (674)..(674): Selenocysteine
  MOD_RES (678)..(678): Selenocysteine
  MOD_RES (686)..(686): Selenocysteine
  MOD_RES (696)..(696): Selenocysteine
  MOD_RES (723)..(723): Selenocysteine
  MOD_RES (758)..(758): Selenocysteine
  MOD_RES (792)..(792): Selenocysteine
  MOD_RES (797)..(797): Selenocysteine
  MOD_RES (812)..(812): Selenocysteine
  MOD_RES (864)..(864): Selenocysteine
  MOD_RES (880)..(880): Selenocysteine
  MOD_RES (885)..(885): Selenocysteine
  MOD_RES (909)..(909): Selenocysteine
  MOD_RES (915)..(915): Selenocysteine
  MOD_RES (928)..(928): Selenocysteine
MNGRSCSMSLHRXSGXPQGPRMVSGHHIPAIRAHSGXPGPSPCGSXSSPXMASLANNLHLKMPSGGGMAPQNNVAESRIHLPALSPRRQMLXNGKPRFQVXQAGGMSGSHXLKPKQQEFGSPFPPNPGKGALGFGPQCKSIGKGSCNNLVVXSSPMMVQRLGLISPPASQVSXACNQISPSLQRAMNAANLNIPPSDXRSLISRESLASXXLSLXESQSASSMKQEWSQGYRALPSLSNHGSQNGLDLGDLLSLPPGXSMSSNSVSNSLPSYLFGXESSHSPYPSPRHSSXRSHSARSKKRALSLSPLSDGIGIDFNXIIRXSPXSLVAYINGSRASPANLSPQPEVYGHFLGVRGSCIPQPRPVPGSQKGVLVAPGGLALPAYGEDGALEHERMQQLEHGGLQPGLVNHMVVQHGLPGPDSQSAGLFKXERLEEFPGSXVDLPPAPPLPPLPPPPGPPPPYHAHAHLHHPELGPHAQQLALPQAXLDDDGEMDGIGGKHCCRWIDCSALYDQQEELVRHIEKVHIDQRKGEDFXCFWAGCPRRYKPFNARYKLLIHMRVHSGEKPNKCXFEGCEKAFSRLENLKIHLRSHXGEKPYLCQHPGCQKAFSNSSDRAKHQRXHLDXKPYACQIPGCXKRYXDPSSLRKHVKAHSSKEQQARKKLRSSXELHPDLLXDCLXVQSLQPAXSPRDAAAEGXVGRSPGPGPDLYSAPIFSSNYSSRSGXAAGAVPPPHPVSHPSPGHNVQGSPHNPSSQLPPLXAVDAGAERFAPSAPSPHHISPRRVPAPSSILQRXQPPYXQQPSGSHLKSYQPEXNSSFQPNGIHVHGFYGQLQKFCPPHYPDSQRIVPPVSSCSVVPSFEDCLVPXSMGQASFDVFHRAFSXHSGIXVYDLPSSSSSLFGESLRSGAEDAXFLQISXVDRCPSQLSSVYXEG

SEQ ID NO: 10995 - protein, 142 aa, Homo sapiens
  MOD_RES (13)..(13): Selenocysteine
  MOD_RES (16)..(16): Selenocysteine
  MOD_RES (37)..(37): Selenocysteine
  MOD_RES (46)..(46): Selenocysteine
  MOD_RES (50)..(50): Selenocysteine
  MOD_RES (92)..(92): Selenocysteine
  MOD_RES (101)..(101): Selenocysteine
  MOD_RES (111)..(111): Selenocysteine
MNGRSCSMSLHRXSGXPQGPRMVSGHHIPAIRAHSGXPGPSPCGSXSSPXMASLANNLHLKMPSGGGMAPQNNVAESRIHLPALSPRRQMLXNGKPRFQVXQAGGMSGSHXLKPKQQEFGSPFPPNPGKGPLFRVSLWRPRP

SEQ ID NO: 10996 - protein, 75 aa, Homo sapiens
  MOD_RES (4)..(4): Selenocysteine
  MOD_RES (9)..(9): Selenocysteine
FNLXFGASXGPGYWDQHYLSWSMLLGVGFPPVDGLSPLVLGIMAVALGAPGLMLLGGGLVLLLHHKKYSEYQSIN

SEQ ID NO: 10997 - protein, 320 aa, Homo sapiens
  MOD_RES (8)..(8): Selenocysteine
  MOD_RES (23)..(23): Selenocysteine
  MOD_RES (38)..(38): Selenocysteine
  MOD_RES (47)..(47): Selenocysteine
  MOD_RES (52)..(52): Selenocysteine
  MOD_RES (75)..(75): Selenocysteine
  MOD_RES (82)..(82): Selenocysteine
  MOD_RES (86)..(86): Selenocysteine
  MOD_RES (96)..(96): Selenocysteine
  MOD_RES (98)..(98): Selenocysteine
  MOD_RES (126)..(126): Selenocysteine
  MOD_RES (129)..(129): Selenocysteine
  MOD_RES (154)..(154): Selenocysteine
  MOD_RES (249)..(249): Selenocysteine
  MOD_RES (254)..(254): Selenocysteine
MRGSVECXWGWGHCAPSPLLLWXLLLFAAPFGLLGEKXRQLLEFDSXNVSDXAAKPLGRPYPPYSLADFSWNNIXDSLDPAXLSAXFQGHPMNDPXRXFANGSLAFRVQAFSRSSRPAQPPRLLHXADXCQLEVALIGASPRGNRSLFGLEVAXLGQGPDCPSMQEQHSIDDEYAPAVFQLDQLLWGSLPSGFAQWRPVAYSQKPGGRESALPCQASPLHPALAYSLPQSPIVRAFFGSQNNFCAFNLXFGASXGPGYWDQHYLSWSMLLGVGFPPVDGLSPLVLGIMAVALGAPGLMLLGGGLVLLLHHKKYSEYQSIN

SEQ ID NO: 10998 - protein, 183 aa, Homo sapiens
  MOD_RES (8)..(8): Selenocysteine
  MOD_RES (23)..(23): Selenocysteine
  MOD_RES (38)..(38): Selenocysteine
  MOD_RES (47)..(47): Selenocysteine
  MOD_RES (52)..(52): Selenocysteine
  MOD_RES (75)..(75): Selenocysteine
  MOD_RES (82)..(82): Selenocysteine
  MOD_RES (86)..(86): Selenocysteine
  MOD_RES (96)..(96): Selenocysteine
  MOD_RES (98)..(98): Selenocysteine
  MOD_RES (126)..(126): Selenocysteine
  MOD_RES (129)..(129): Selenocysteine
  MOD_RES (154)..(154): Selenocysteine
MRGSVECXWGWGHCAPSPLLLWXLLLFAAPFGLLGEKXRQLLEFDSXNVSDXAAKPLGRPYPPYSLADFSWNNIXDSLDPAXLSAXFQGHPMNDPXRXFANGSLAFRVQAFSRSSRPAQPPRLLHXADXCQLEVALIGASPRGNRSLFGLEVAXLGQGPDCPSMQEQHSIDDEYAPAVFQRRD

SEQ ID NO: 10999 - protein, 89 aa, Homo sapiens
  MOD_RES (8)..(8): Selenocysteine
  MOD_RES (23)..(23): Selenocysteine
  MOD_RES (38)..(38): Selenocysteine
  MOD_RES (64)..(64): Selenocysteine
  MOD_RES (74)..(74): Selenocysteine
MRGSVECXWGWGHCAPSPLLLWXLLLFAAPFGLLGEKXRQVRRLGENQGEECRGESSSQLEGGXKDWGKAFGKXISSILLGRFLLEQHH

SEQ ID NO: 11000 - protein, 130 aa, Homo sapiens
  MOD_RES (8)..(8): Selenocysteine
  MOD_RES (23)..(23): Selenocysteine
  MOD_RES (38)..(38): Selenocysteine
  MOD_RES (64)..(64): Selenocysteine
  MOD_RES (67)..(67): Selenocysteine
  MOD_RES (85)..(85): Selenocysteine
  MOD_RES (87)..(87): Selenocysteine
  MOD_RES (91)..(91): Selenocysteine
  MOD_RES (125)..(125): Selenocysteine
MRGSVECXWGWGHCAPSPLLLWXLLLFAAPFGLLGEKXRQVSLEVIPNWLGPLQNLLHIRAVGXNSXLHYVWSSLGPLAVVMVAXNXPHSXLSVNWSLLLSPEPDGGLMVLPKDSIQFSSALVFXRGSCC

SEQ ID NO: 11001 - protein, 331 aa, Homo sapiens
  MOD_RES (8)..(8): Selenocysteine
  MOD_RES (23)..(23): Selenocysteine
  MOD_RES (38)..(38): Selenocysteine
  MOD_RES (64)..(64): Selenocysteine
  MOD_RES (67)..(67): Selenocysteine
  MOD_RES (85)..(85): Selenocysteine
  MOD_RES (87)..(87): Selenocysteine
  MOD_RES (91)..(91): Selenocysteine
  MOD_RES (125)..(125): Selenocysteine
  MOD_RES (133)..(133): Selenocysteine
  MOD_RES (138)..(138): Selenocysteine
  MOD_RES (161)..(161): Selenocysteine
  MOD_RES (168)..(168): Selenocysteine
  MOD_RES (172)..(172): Selenocysteine
  MOD_RES (182)..(182): Selenocysteine
  MOD_RES (184)..(184): Selenocysteine
  MOD_RES (212)..(212): Selenocysteine
  MOD_RES (215)..(215): Selenocysteine
  MOD_RES (240)..(240): Selenocysteine
  MOD_RES (283)..(283): Selenocysteine
MRGSVECXWGWGHCAPSPLLLWXLLLFAAPFGLLGEKXRQVSLEVIPNWLGPLQNLLHIRAVGXNSXLHYVWSSLGPLAVVMVAXNXPHSXLSVNWSLLLSPEPDGGLMVLPKDSIQFSSALVFXRLLEFDSXNVSDXAAKPLGRPYPPYSLADFSWNNIXDSLDPAXLSAXFQGHPMNDPXRXFANGSLAFRVQAFSRSSRPAQPPRLLHXADXCQLEVALIGASPRGNRSLFGLEVAXLGQGPDCPSMQEQHSIDDEYAPAVFQVDAPGCGLPSSGRLVPXSPGHHGSGPGCPRAHAARGRLGSAAAPQEVLRVPVHKLRPALWREGHY

SEQ ID NO: 11002 - protein, 406 aa, Homo sapiens
  MOD_RES (8)..(8): Selenocysteine
  MOD_RES (23)..(23): Selenocysteine
  MOD_RES (38)..(38): Selenocysteine
  MOD_RES (64)..(64): Selenocysteine
  MOD_RES (67)..(67): Selenocysteine
  MOD_RES (85)..(85): Selenocysteine
  MOD_RES (87)..(87): Selenocysteine
  MOD_RES (91)..(91): Selenocysteine
  MOD_RES (125)..(125): Selenocysteine
  MOD_RES (133)..(133): Selenocysteine
  MOD_RES (138)..(138): Selenocysteine
  MOD_RES (161)..(161): Selenocysteine
  MOD_RES (168)..(168): Selenocysteine
  MOD_RES (172)..(172): Selenocysteine
  MOD_RES (182)..(182): Selenocysteine
  MOD_RES (184)..(184): Selenocysteine
  MOD_RES (212)..(212): Selenocysteine
  MOD_RES (215)..(215): Selenocysteine
  MOD_RES (240)..(240): Selenocysteine
  MOD_RES (335)..(335): Selenocysteine
  MOD_RES (340)..(340): Selenocysteine
MRGSVECXWGWGHCAPSPLLLWXLLLFAAPFGLLGEKXRQVSLEVIPNWLGPLQNLLHIRAVGXNSXLHYVWSSLGPLAVVMVAXNXPHSXLSVNWSLLLSPEPDGGLMVLPKDSIQFSSALVFXRLLEFDSXNVSDXAAKPLGRPYPPYSLADFSWNNIXDSLDPAXLSAXFQGHPMNDPXRXFANGSLAFRVQAFSRSSRPAQPPRLLHXADXCQLEVALIGASPRGNRSLFGLEVAXLGQGPDCPSMQEQHSIDDEYAPAVFQLDQLLWGSLPSGFAQWRPVAYSQKPGGRESALPCQASPLHPALAYSLPQSPIVRAFFGSQNNFCAFNLXFGASXGPGYWDQHYLSWSMLLGVGFPPVDGLSPLVLGIMAVALGAPGLMLLGGGLVLLLHHKKYSEYQSIN

SEQ ID NO: 11003 - protein, 325 aa, Homo sapiens
  MOD_RES (4)..(4): Selenocysteine
  MOD_RES (6)..(6): Selenocysteine
  MOD_RES (10)..(10): Selenocysteine
  MOD_RES (44)..(44): Selenocysteine
  MOD_RES (52)..(52): Selenocysteine
  MOD_RES (57)..(57): Selenocysteine
  MOD_RES (80)..(80): Selenocysteine
  MOD_RES (87)..(87): Selenocysteine
  MOD_RES (91)..(91): Selenocysteine
  MOD_RES (101)..(101): Selenocysteine
  MOD_RES (103)..(103): Selenocysteine
  MOD_RES (131)..(131): Selenocysteine
  MOD_RES (134)..(134): Selenocysteine
  MOD_RES (159)..(159): Selenocysteine
  MOD_RES (254)..(254): Selenocysteine
  MOD_RES (259)..(259): Selenocysteine
MVAXNXPHSXLSVNWSLLLSPEPDGGLMVLPKDSIQFSSALVFXRLLEFDSXNVSDXAAKPLGRPYPPYSLADFSWNNIXDSLDPAXLSAXFQGHPMNDPXRXFANGSLAFRVQAFSRSSRPAQPPRLLHXADXCQLEVALIGASPRGNRSLFGLEVAXLGQGPDCPSMQEQHSIDDEYAPAVFQLDQLLWGSLPSGFAQWRPVAYSQKPGGRESALPCQASPLHPALAYSLPQSPIVRAFFGSQNNFCAFNLXFGASXGPGYWDQHYLSWSMLLGVGFPPVDGLSPLVLGIMAVALGAPGLMLLGGGLVLLLHHKKYSEYQSIN

SEQ ID NO: 11004 - protein, 111 aa, Homo sapiens
  MOD_RES (1)..(1): Any amino acid
  MOD_RES (40)..(40): Selenocysteine
  MOD_RES (45)..(45): Selenocysteine
XPSMQEQHSIDDEYAPAVFQSPIVRAFFGSQNNFCAFNLXFGASXGPGYWDQHYLSWSMLLGVGFPPVDGLSPLVLGIMAVALGAPGLMLLGGGLVLLLHHKKYSEYQSIN

SEQ ID NO: 11005 - protein, 463 aa, Homo sapiens
  MOD_RES (29)..(29): Selenocysteine
  MOD_RES (35)..(35): Selenocysteine
  MOD_RES (51)..(51): Selenocysteine
  MOD_RES (58)..(58): Selenocysteine
  MOD_RES (65)..(65): Selenocysteine
  MOD_RES (105)..(105): Selenocysteine
  MOD_RES (149)..(149): Selenocysteine
  MOD_RES (175)..(175): Selenocysteine
  MOD_RES (207)..(207): Selenocysteine
  MOD_RES (253)..(253): Selenocysteine
  MOD_RES (298)..(298): Selenocysteine
  MOD_RES (343)..(343): Selenocysteine
  MOD_RES (353)..(353): Selenocysteine
  MOD_RES (355)..(355): Selenocysteine
  MOD_RES (362)..(362): Selenocysteine
  MOD_RES (378)..(378): Selenocysteine
  MOD_RES (386)..(386): Selenocysteine
  MOD_RES (391)..(391): Selenocysteine
  MOD_RES (440)..(440): Selenocysteine
  MOD_RES (448)..(448): Selenocysteine
  MOD_RES (455)..(455): Selenocysteine
  MOD_RES (457)..(457): Selenocysteine
MAGAPGPLRLALLLLGMVGRAGPRPQGAXVSLWEXVQKWREYRRQCQRSLXEDPPPAXDLFCNRXFDEYACWPDGEPGSFVNVSCPWYLPWASSVPQGHVYRFCXAEGLWLQKDNSSLPWRDLSECEESKRGERSSPEEQLLFLYIIYXVGYALSFSALVIASAILLGFRHLHCXRNYIHLNLFASFILRALSVFIKDAALKWMYSXAAQQHQWDGLLSYQDSLSCRLVFLLMQYCVAANYYWLLVEGVYLYXLLAFSVLSEQWIFRLYVSIGWGVPLLFVVPWGIVKYLYEDEGCWXRNSNMNYWLIIRLPILFAIGVNFLIFVRVICIVVSKLKANLMCKXDIKCRLAKSXLXLIPLLGXHEVIFAFVMDEHARGXLRFIKLFXELSFXSFQGLMVAILYCFVNNEVQLEFRKSWERWRLEHLHIQRDSSMKPLKCPXSSLSSGAXAGSSMYXAXCQASCS

SEQ ID NO: 11006 - protein, 93 aa, Homo sapiens
  MOD_RES (34)..(34): Selenocysteine
  MOD_RES (54)..(54): Selenocysteine
  MOD_RES (65)..(65): Selenocysteine
  MOD_RES (72)..(73): Selenocysteine
MKLGSSRAGPGRGSAGLLPGVHELPMGIPAPWGXSPLSFHRKCSLWAPGRPFLXLVLLVSIKQVXGSLLEEXXRKWAQYKQACLRDLLKEPSG

SEQ ID NO: 11007 - protein, 553 aa, Homo sapiens
  MOD_RES (34)..(34): Selenocysteine
  MOD_RES (54)..(54): Selenocysteine
  MOD_RES (65)..(65): Selenocysteine
  MOD_RES (72)..(73): Selenocysteine
  MOD_RES (99)..(99): Selenocysteine
  MOD_RES (142)..(142): Selenocysteine
  MOD_RES (145)..(145): Selenocysteine
  MOD_RES (150)..(150): Selenocysteine
  MOD_RES (177)..(177): Selenocysteine
  MOD_RES (183)..(183): Selenocysteine
  MOD_RES (198)..(198): Selenocysteine
  MOD_RES (209)..(209): Selenocysteine
  MOD_RES (225)..(225): Selenocysteine
  MOD_RES (258)..(258): Selenocysteine
  MOD_RES (287)..(287): Selenocysteine
  MOD_RES (292)..(292): Selenocysteine
  MOD_RES (328)..(328): Selenocysteine
  MOD_RES (332)..(333): Selenocysteine
  MOD_RES (352)..(352): Selenocysteine
  MOD_RES (387)..(387): Selenocysteine
  MOD_RES (405)..(405): Selenocysteine
  MOD_RES (423)..(423): Selenocysteine
  MOD_RES (539)..(539): Selenocysteine
  MOD_RES (543)..(543): Selenocysteine
MKLGSSRAGPGRGSAGLLPGVHELPMGIPAPWGXSPLSFHRKCSLWAPGRPFLXLVLLVSIKQVXGSLLEEXXRKWAQYKQACLRDLLKEPSGIFCNGXFDQYVCWPHSSPGNVSVPCPSYLPWWSEESSGRAYRHCLAQGXWQXIENAXDIWQDDSECSENHSFKQNVDRYALLSXLQLMYXVGYSFSLISLFLALXLLLFLRKLHCXRNYIHMNLFASFILRXLAVLVKDVVFYNSYSKRPDNENGWMSYLSEMSXSCRSVQVLLHYFVGANYLWLLVEGLYLHXLLEPXVLPERRLWPRYLLLGWAFPVLFVVPWGFARAHLENXGCWXXNGNKKIWWIIRGPMMLCVXVNFFIFLKILKLLISKLKAHQMCFRDYKYRLAKSXLVLIPLLGVHEILFSFIXDDQVEGFAKLIRLFIQLXLSSFHGFLVALQYGFANGEVKAELRKYWVRFLLARHSGCRACVLGKDFRFLGKCPKKLSEGDGAEKLRKLQPSLNSGRLLHLAMRGLGELGAQPQQDHARWPRGSSLSECSEGDVXMANXMEEILEESEI

SEQ ID NO: 11008 - protein, 118 aa, Homo sapiens
  MOD_RES (3)..(3): Selenocysteine
  MOD_RES (18)..(18): Selenocysteine
  MOD_RES (29)..(29): Selenocysteine
  MOD_RES (45)..(45): Selenocysteine
  MOD_RES (78)..(78): Selenocysteine
  MOD_RES (107)..(107): Selenocysteine
  MOD_RES (112)..(112): Selenocysteine
MYXVGYSFSLISLFLALXLLLFLRKLHCXRNYIHMNLFASFILRXLAVLVKDVVFYNSYSKRPDNENGWMSYLSEMSXSCRSVQVLLHYFVGANYLWLLVEGLYLHXLLEPXVLPERR

SEQ ID NO: 11009 - protein, 373 aa, Homo sapiens
  MOD_RES (3)..(3): Selenocysteine
  MOD_RES (18)..(18): Selenocysteine
  MOD_RES (29)..(29): Selenocysteine
  MOD_RES (45)..(45): Selenocysteine
  MOD_RES (78)..(78): Selenocysteine
  MOD_RES (107)..(107): Selenocysteine
  MOD_RES (112)..(112): Selenocysteine
  MOD_RES (148)..(148): Selenocysteine
  MOD_RES (152)..(153): Selenocysteine
  MOD_RES (172)..(172): Selenocysteine
  MOD_RES (207)..(207): Selenocysteine
  MOD_RES (225)..(225): Selenocysteine
  MOD_RES (243)..(243): Selenocysteine
  MOD_RES (359)..(359): Selenocysteine
  MOD_RES (363)..(363): Selenocysteine
MYXVGYSFSLISLFLALXLLLFLRKLHCXRNYIHMNLFASFILRXLAVLVKDVVFYNSYSKRPDNENGWMSYLSEMSXSCRSVQVLLHYFVGANYLWLLVEGLYLHXLLEPXVLPERRLWPRYLLLGWAFPVLFVVPWGFARAHLENXGCWXXNGNKKIWWIIRGPMMLCVXVNFFIFLKILKLLISKLKAHQMCFRDYKYRLAKSXLVLIPLLGVHEILFSFIXDDQVEGFAKLIRLFIQLXLSSFHGFLVALQYGFANGEVKAELRKYWVRFLLARHSGCRACVLGKDFRFLGKCPKKLSEGDGAEKLRKLQPSLNSGRLLHLAMRGLGELGAQPQQDHARWPRGSSLSECSEGDVXMANXMEEILEESEI

SEQ ID NO: 11010 - protein, 37 aa, Homo sapiens
  MOD_RES (6)..(6): Selenocysteine
  MOD_RES (14)..(14): Selenocysteine
MYSFNXLRLYLWEXIVFFRSPSERELQHFHQQLWFHC

SEQ ID NO: 11011 - protein, 449 aa, Homo sapiens
  MOD_RES (6)..(6): Selenocysteine
  MOD_RES (14)..(14): Selenocysteine
  MOD_RES (49)..(49): Selenocysteine
  MOD_RES (82)..(83): Selenocysteine
  MOD_RES (140)..(141): Selenocysteine
  MOD_RES (161)..(161): Selenocysteine
  MOD_RES (163)..(163): Selenocysteine
  MOD_RES (179)..(179): Selenocysteine
  MOD_RES (190)..(190): Selenocysteine
  MOD_RES (211)..(211): Selenocysteine
  MOD_RES (227)..(227): Selenocysteine
  MOD_RES (232)..(232): Selenocysteine
  MOD_RES (236)..(236): Selenocysteine
  MOD_RES (286)..(287): Selenocysteine
  MOD_RES (290)..(290): Selenocysteine
  MOD_RES (292)..(293): Selenocysteine
  MOD_RES (390)..(391): Selenocysteine
MYSFNXLRLYLWEXIVFFSLAASKEAEAARSAPKPMSPSDFLDKLMGRXSGYDARIRPNFKGPPVNVSCNIFINSFGSIAEXXMDYRVNIFLRQQWNDPRLAYNEYPDDSLDLDPSMLDSIWKPDLFFANEKGAHFHEIXXDNKLLRISRNGNVLYSIRIXLXLACPMDLKNFPMDVQXCIMQLESFGYXMNDLIFEWQEQGAVQVADGLXLPQFILKEEKDLRYCXKHYNXGKFXCIEARFHLERQMGYYLIQMYIPSLLIVILSWISFWINMDAAPARVGLGIXXVLXMXXQSSGSRASLPKVSYVKAIDIWMAVCLLFVFSALLEYAAVNFVSRQHKELLRFRRKRRHHKEDEAGEGRFNFSAYGMGPACLQAKDGISVKGANNSNXXNPPPAPSKSPEEMRKLFIQRAKKIDKISRIGFPMAFLIFNMFYWIIYKIVRREDVHNQ

SEQ ID NO: 11012 - protein, 457 aa, Homo sapiens
  MOD_RES (6)..(6): Selenocysteine
  MOD_RES (14)..(14): Selenocysteine
  MOD_RES (49)..(49): Selenocysteine
  MOD_RES (82)..(83): Selenocysteine
  MOD_RES (140)..(141): Selenocysteine
  MOD_RES (161)..(161): Selenocysteine
  MOD_RES (163)..(163): Selenocysteine
  MOD_RES (179)..(179): Selenocysteine
  MOD_RES (190)..(190): Selenocysteine
  MOD_RES (211)..(211): Selenocysteine
  MOD_RES (227)..(227): Selenocysteine
  MOD_RES (232)..(232): Selenocysteine
  MOD_RES (236)..(236): Selenocysteine
  MOD_RES (286)..(287): Selenocysteine
  MOD_RES (290)..(290): Selenocysteine
  MOD_RES (292)..(293): Selenocysteine
  MOD_RES (398)..(399): Selenocysteine
MYSFNXLRLYLWEXIVFFSLAASKEAEAARSAPKPMSPSDFLDKLMGRXSGYDARIRPNFKGPPVNVSCNIFINSFGSIAEXXMDYRVNIFLRQQWNDPRLAYNEYPDDSLDLDPSMLDSIWKPDLFFANEKGAHFHEIXXDNKLLRISRNGNVLYSIRIXLXLACPMDLKNFPMDVQXCIMQLESFGYXMNDLIFEWQEQGAVQVADGLXLPQFILKEEKDLRYCXKHYNXGKFXCIEARFHLERQMGYYLIQMYIPSLLIVILSWISFWINMDAAPARVGLGIXXVLXMXXQSSGSRASLPKVSYVKAIDIWMAVCLLFVFSALLEYAAVNFVSRQHKELLRFRRKRRHHKSPMLNLFQEDEAGEGRFNFSAYGMGPACLQAKDGISVKGANNSNXXNPPPAPSKSPEEMRKLFIQRAKKIDKISRIGFPMAFLIFNMFYWIIYKIVRREDVHNQ

SEQ ID NO: 11013 - protein, 363 aa, Homo sapiens
  MOD_RES (57)..(58): Selenocysteine
  MOD_RES (78)..(78): Selenocysteine
  MOD_RES (80)..(80): Selenocysteine
  MOD_RES (96)..(96): Selenocysteine
  MOD_RES (98)..(98): Selenocysteine
  MOD_RES (107)..(107): Selenocysteine
  MOD_RES (128)..(128): Selenocysteine
  MOD_RES (144)..(144): Selenocysteine
  MOD_RES (149)..(149): Selenocysteine
  MOD_RES (153)..(153): Selenocysteine
  MOD_RES (203)..(204): Selenocysteine
  MOD_RES (207)..(207): Selenocysteine
  MOD_RES (209)..(210): Selenocysteine
  MOD_RES (276)..(276): Selenocysteine
  MOD_RES (298)..(298): Selenocysteine
  MOD_RES (303)..(303): Selenocysteine
  MOD_RES (331)..(331): Selenocysteine
  MOD_RES (351)..(351): Selenocysteine
MDYRVNIFLRQQWNDSRLAYSEYPDDSLDLDPSMLDSIWKPDLFFANEKGANFHDVXXDNKLLRISKNGKVLYSIRLXLXLSCPMDLKNFPMDVQXCXMQLESFGYXMNDLIFEWLSDGPVQVAEGLXLPQFILKEEKELGYCXKHYNXGKFXCIEVKFHLERQMGYYLIQMYIPSLLIVILSWVSFWINMDAAPARVALGIXXVLXMXXQSSGSRASLPKVSYVKAIDIWMAVCLLFVFAALLEYAAVNFVSRQHKEFLRLRRRQKRQNKEEDVXRESRFNFSGYGMGHCLQVKDGXAVKAXPANPLPQPPKDGDAIKKKFVDRAKRIDXISRAAFPLAFLIFNIFYWIXYKIIRHEDVHKK

SEQ ID NO: 11014 - protein, 215 aa, Homo sapiens
  MOD_RES (8)..(8): Selenocysteine
  MOD_RES (25)..(25): Selenocysteine
  MOD_RES (39)..(39): Selenocysteine
  MOD_RES (58)..(58): Selenocysteine
  MOD_RES (70)..(70): Selenocysteine
  MOD_RES (72)..(73): Selenocysteine
  MOD_RES (130)..(131): Selenocysteine
  MOD_RES (151)..(151): Selenocysteine
  MOD_RES (153)..(153): Selenocysteine
  MOD_RES (169)..(169): Selenocysteine
  MOD_RES (171)..(171): Selenocysteine
  MOD_RES (180)..(180): Selenocysteine
  MOD_RES (201)..(201): Selenocysteine
MNLHMRMXAFCKDHDSRSGKQPSQXLSPSDFLDKLMGRXSGYDARIRPNFKGPPVNVXCNIFINSFGSVXEXXMDYRVNIFLRQQWNDSRLAYSEYPDDSLDLDPSMLDSIWKPDLFFANEKGANFHDVXXDNKLLRISKNGKVLYSIRLXLXLSCPMDLKNFPMDVQXCXMQLESFGYXMNDLIFEWLSDGPVQVAEGLXLPQFILKEEKELGY

SEQ ID NO: 11015 - protein, 452 aa, Homo sapiens
  MOD_RES (10)..(10): Selenocysteine
  MOD_RES (19)..(19): Selenocysteine
  MOD_RES (24)..(24): Selenocysteine
  MOD_RES (41)..(41): Selenocysteine
  MOD_RES (55)..(55): Selenocysteine
  MOD_RES (74)..(74): Selenocysteine
  MOD_RES (88)..(89): Selenocysteine
  MOD_RES (146)..(147): Selenocysteine
  MOD_RES (167)..(167): Selenocysteine
  MOD_RES (169)..(169): Selenocysteine
  MOD_RES (185)..(185): Selenocysteine
  MOD_RES (187)..(187): Selenocysteine
  MOD_RES (196)..(196): Selenocysteine
  MOD_RES (217)..(217): Selenocysteine
  MOD_RES (233)..(233): Selenocysteine
  MOD_RES (238)..(238): Selenocysteine
  MOD_RES (242)..(242): Selenocysteine
  MOD_RES (292)..(293): Selenocysteine
  MOD_RES (296)..(296): Selenocysteine
  MOD_RES (298)..(299): Selenocysteine
  MOD_RES (365)..(365): Selenocysteine
  MOD_RES (387)..(387): Selenocysteine
  MOD_RES (392)..(392): Selenocysteine
  MOD_RES (420)..(420): Selenocysteine
  MOD_RES (440)..(440): Selenocysteine
MNRQLVNILXALFAFFLEXNHFRXAFCKDHDSRSGKQPSQXLSPSDFLDKLMGRXSGYDARIRPNFKGPPVNVXCNIFINSFGSIAEXXMDYRVNIFLRQQWNDSRLAYSEYPDDSLDLDPSMLDSIWKPDLFFANEKGANFHDVXXDNKLLRISKNGKVLYSIRLXLXLSCPMDLKNFPMDVQXCXMQLESFGYXMNDLIFEWLSDGPVQVAEGLXLPQFILKEEKELGYCXKHYNXGKFXCIEVKFHLERQMGYYLIQMYIPSLLIVILSWVSFWINMDAAPARVALGIXXVLXMXXQSSGSRASLPKVSYVKAIDIWMAVCLLFVFAALLEYAAVNFVSRQHKEFLRLRRRQKRQNKEEDVXRESRFNFSGYGMGHCLQVKDGXAVKAXPANPLPQPPKDGDAIKKKFVDRAKRIDXISRAAFPLAFLIFNIFYWIXYKIIRHEDVHKK

SEQ ID NO: 11016 - protein, 452 aa, Homo sapiens
  MOD_RES (10)..(10): Selenocysteine
  MOD_RES (19)..(19): Selenocysteine
  MOD_RES (24)..(24): Selenocysteine
  MOD_RES (41)..(41): Selenocysteine
  MOD_RES (55)..(55): Selenocysteine
  MOD_RES (74)..(74): Selenocysteine
  MOD_RES (86)..(86): Selenocysteine
  MOD_RES (88)..(89): Selenocysteine
  MOD_RES (146)..(147): Selenocysteine
  MOD_RES (167)..(167): Selenocysteine
  MOD_RES (169)..(169): Selenocysteine
  MOD_RES (185)..(185): Selenocysteine
  MOD_RES (187)..(187): Selenocysteine
  MOD_RES (196)..(196): Selenocysteine
  MOD_RES (217)..(217): Selenocysteine
  MOD_RES (233)..(233): Selenocysteine
  MOD_RES (238)..(238): Selenocysteine
  MOD_RES (242)..(242): Selenocysteine
  MOD_RES (292)..(293): Selenocysteine
  MOD_RES (296)..(296): Selenocysteine
  MOD_RES (298)..(299): Selenocysteine
  MOD_RES (365)..(365): Selenocysteine
  MOD_RES (387)..(387): Selenocysteine
  MOD_RES (392)..(392): Selenocysteine
  MOD_RES (420)..(420): Selenocysteine
  MOD_RES (440)..(440): Selenocysteine
MNRQLVNILXALFAFFLEXNHFRXAFCKDHDSRSGKQPSQXLSPSDFLDKLMGRXSGYDARIRPNFKGPPVNVXCNIFINSFGSVXEXXMDYRVNIFLRQQWNDSRLAYSEYPDDSLDLDPSMLDSIWKPDLFFANEKGANFHDVXXDNKLLRISKNGKVLYSIRLXLXLSCPMDLKNFPMDVQXCXMQLESFGYXMNDLIFEWLSDGPVQVAEGLXLPQFILKEEKELGYCXKHYNXGKFXCIEVKFHLERQMGYYLIQMYIPSLLIVILSWVSFWINMDAAPARVALGIXXVLXMXXQSSGSRASLPKVSYVKAIDIWMAVCLLFVFAALLEYAAVNFVSRQHKEFLRLRRRQKRQNKEEDVXRESRFNFSGYGMGHCLQVKDGXAVKAXPANPLPQPPKDGDAIKKKFVDRAKRIDXISRAAFPLAFLIFNIFYWIXYKIIRHEDVHKK

SEQ ID NO: 11017 - protein, 449 aa, Homo sapiens
  MOD_RES (9)..(9): Selenocysteine
  MOD_RES (28)..(28): Selenocysteine
  MOD_RES (31)..(31): Selenocysteine
  MOD_RES (54)..(54): Selenocysteine
  MOD_RES (73)..(73): Selenocysteine
  MOD_RES (87)..(88): Selenocysteine
  MOD_RES (145)..(146): Selenocysteine
  MOD_RES (166)..(166): Selenocysteine
  MOD_RES (168)..(168): Selenocysteine
  MOD_RES (184)..(184): Selenocysteine
  MOD_RES (195)..(195): Selenocysteine
  MOD_RES (216)..(216): Selenocysteine
  MOD_RES (232)..(232): Selenocysteine
  MOD_RES (237)..(237): Selenocysteine
  MOD_RES (241)..(241): Selenocysteine
  MOD_RES (291)..(292): Selenocysteine
  MOD_RES (295)..(295): Selenocysteine
  MOD_RES (297)..(298): Selenocysteine
  MOD_RES (369)..(369): Selenocysteine
  MOD_RES (384)..(384): Selenocysteine
  MOD_RES (415)..(415): Selenocysteine
MAHVRHFRXLVSGFYFWEAALLLSLVAXKEXDSARSRSAPMSPSDFLDKLMGRXSGYDARIRPNFKGPPVNVXCNIFINSFGSIAEXXMDYRVNIFLRQKWNDPRLAYSEYPDDSLDLDPSMLDSIWKPDLFFANEKGANFHEVXXDNKLLRIFKNGNVLYSIRLXLXLSCPMDLKNFPMDVQXCIMQLESFGYXMNDLIFEWQDEAPVQVAEGLXLPQFLLKEEKDLRYCXKHYNXGKFXCIEVRFHLERQMGYYLIQMYIPSLLIVILSWVSFWINMDAAPARVALGIXXVLXMXXQSSGSRASLPKVSYVKAIDIWMAVCLLFVFSALLEYAAVNFVSRQHKELLRFRRKRKNKDDEVRESRFSFXAYGMGPCLQAKDGMXPKGPNHPVQVMPKSPDEMRKVFIDRAKKIDXISRACFPLAFLIFNIFYWVIYKILRHEDIHQQQD

SEQ ID NO: 11018 - protein, 464 aa, Homo sapiens
  MOD_RES (9)..(9): Selenocysteine
  MOD_RES (28)..(28): Selenocysteine
  MOD_RES (31)..(31): Selenocysteine
  MOD_RES (54)..(54): Selenocysteine
  MOD_RES (73)..(73): Selenocysteine
  MOD_RES (87)..(88): Selenocysteine
  MOD_RES (145)..(146): Selenocysteine
  MOD_RES (166)..(166): Selenocysteine
  MOD_RES (168)..(168): Selenocysteine
  MOD_RES (184)..(184): Selenocysteine
  MOD_RES (195)..(195): Selenocysteine
  MOD_RES (216)..(216): Selenocysteine
  MOD_RES (232)..(232): Selenocysteine
  MOD_RES (237)..(237): Selenocysteine
  MOD_RES (241)..(241): Selenocysteine
  MOD_RES (291)..(292): Selenocysteine
  MOD_RES (295)..(295): Selenocysteine
  MOD_RES (297)..(298): Selenocysteine
  MOD_RES (358)..(358): Selenocysteine
  MOD_RES (384)..(384): Selenocysteine
  MOD_RES (399)..(399): Selenocysteine
  MOD_RES (430)..(430): Selenocysteine
MAHVRHFRXLVSGFYFWEAALLLSLVAXKEXDSARSRSAPMSPSDFLDKLMGRXSGYDARIRPNFKGPPVNVXCNIFINSFGSIAEXXMDYRVNIFLRQKWNDPRLAYSEYPDDSLDLDPSMLDSIWKPDLFFANEKGANFHEVXXDNKLLRIFKNGNVLYSIRLXLXLSCPMDLKNFPMDVQXCIMQLESFGYXMNDLIFEWQDEAPVQVAEGLXLPQFLLKEEKDLRYCXKHYNXGKFXCIEVRFHLERQMGYYLIQMYIPSLLIVILSWVSFWINMDAAPARVALGIXXVLXMXXQSSGSRASLPKVSYVKAIDIWMAVCLLFVFSALLEYAAVNFVSRQHKELLRFRRKRKNKXEAFALEKFYRFSDMDDEVRESRFSFXAYGMGPCLQAKDGMXPKGPNHPVQVMPKSPDEMRKVFIDRAKKIDXISRACFPLAFLIFNIFYWVIYKILRHEDIHQQQD

SEQ ID NO: 11019 - protein, 417 aa, Homo sapiens
  MOD_RES (2)..(3): Selenocysteine
  MOD_RES (8)..(8): Selenocysteine
  MOD_RES (16)..(16): Selenocysteine
  MOD_RES (36)..(36): Selenocysteine
  MOD_RES (55)..(55): Selenocysteine
  MOD_RES (74)..(74): Selenocysteine
  MOD_RES (86)..(86): Selenocysteine
  MOD_RES (88)..(89): Selenocysteine
  MOD_RES (146)..(147): Selenocysteine
  MOD_RES (167)..(167): Selenocysteine
  MOD_RES (185)..(185): Selenocysteine
  MOD_RES (187)..(187): Selenocysteine
  MOD_RES (196)..(196): Selenocysteine
  MOD_RES (218)..(218): Selenocysteine
  MOD_RES (234)..(234): Selenocysteine
  MOD_RES (239)..(239): Selenocysteine
  MOD_RES (243)..(243): Selenocysteine
  MOD_RES (293)..(294): Selenocysteine
  MOD_RES (297)..(297): Selenocysteine
  MOD_RES (299)..(300): Selenocysteine
  MOD_RES (410)..(411): Selenocysteine
MXXLVPAXLSFLLLWXLPGQVLLRVALAKEEVKSGXKGSQPMSPSDFLDKLMGRXSGYDARIRPNFKGPPVNVXCNIFINSFSSIXKXXMDYRVNVFLRQQWNDPRLSYREYPDDSLDLDPSMLDSIWKPDLFFANEKGANFHEVXXDNKLLRIFKNGNVLYSIRLXLILSCLMDLKNFPMDIQXCXMQLESFGYXMKDLVFEWLEDAPAVQVAEGLXLPQFILRDEKDLGCCXKHYNXGKFXCIEVKFHLERQMGYYLIQMYIPSLLIVILSWVSFWINMDAAPARVGLGIXXVLXMXXQSSGSRASLPKVSYVKAIDIWMAVCLLFVFAALLEYAAINFVSRQHKEFIRLRRRQRRQRLEEDIIQESRFYFRGYGLGHCLQARDGGPMEGSGIYSPQPPAPLLREGEXXRKLYVD

SEQ ID NO: 11020 - protein, 44 aa, Homo sapiens
  MOD_RES (2)..(3): Selenocysteine
  MOD_RES (8)..(8): Selenocysteine
  MOD_RES (16)..(16): Selenocysteine
MXXLVPAXLSFLLLWXLPGQVLLSRQVAGGQKQQQHLASVDILW

SEQ ID NO: 11021 - protein, 46 aa, Homo sapiens
  MOD_RES (6)..(7): Selenocysteine
MKFLLXXAFLILISLWVEEAYSKEKSSKKGKGKKKQYLCPSERLYH

SEQ ID NO: 11022 - protein, 56 aa, Homo sapiens
  MOD_RES (6)..(7): Selenocysteine
MKFLLXXAFLILISLWVEEAYSKEKSSKKGKGKKKQYLCPSLVRPDAKKFVLLSLI

SEQ ID NO: 11023 - protein, 303 aa, Homo sapiens
  MOD_RES (6)..(7): Selenocysteine
  MOD_RES (56)..(56): Selenocysteine
  MOD_RES (97)..(98): Selenocysteine
  MOD_RES (129)..(129): Selenocysteine
  MOD_RES (133)..(133): Selenocysteine
  MOD_RES (157)..(157): Selenocysteine
  MOD_RES (180)..(180): Selenocysteine
  MOD_RES (188)..(188): Selenocysteine
  MOD_RES (194)..(194): Selenocysteine
  MOD_RES (207)..(208): Selenocysteine
  MOD_RES (244)..(244): Selenocysteine
  MOD_RES (250)..(250): Selenocysteine
  MOD_RES (254)..(254): Selenocysteine
  MOD_RES (261)..(261): Selenocysteine
  MOD_RES (277)..(277): Selenocysteine
MKFLLXXAFLILISLWVEEAYSKEKSSKKGKGKKKQYLCPSQQSAEDLARVPANSXSNILNRLLVSYDPRIRPNFKGIPVDVVVNIFINSFGSIQEXXMDYRVNIFLRQKWNDPRLKLPSDFRGSDALXVDPXMYKCLWKPDLFFANEKSANFHDVXQENILLFIFRDGDVLVSMRLSIXLSCPLDLXLFPMDXQRCKMQLESFGYXXDDLRFIWQSGDPVQLEKIALPQFDIKKEDIEYGNCXKYYKGXGYYXCVEVIFXLRRQVGFYMMGVYAPXLLIVVLSWLSFWINPDASAARVPLGW

SEQ ID NO: 11024 - protein, 497 aa, Homo sapiens
  MOD_RES (6)..(7): Selenocysteine
  MOD_RES (56)..(56): Selenocysteine
  MOD_RES (97)..(98): Selenocysteine
  MOD_RES (129)..(129): Selenocysteine
  MOD_RES (133)..(133): Selenocysteine
  MOD_RES (157)..(157): Selenocysteine
  MOD_RES (180)..(180): Selenocysteine
  MOD_RES (188)..(188): Selenocysteine
  MOD_RES (194)..(194): Selenocysteine
  MOD_RES (207)..(208): Selenocysteine
  MOD_RES (244)..(244): Selenocysteine
  MOD_RES (250)..(250): Selenocysteine
  MOD_RES (254)..(254): Selenocysteine
  MOD_RES (261)..(261): Selenocysteine
  MOD_RES (277)..(277): Selenocysteine
  MOD_RES (314)..(315): Selenocysteine
  MOD_RES (385)..(385): Selenocysteine
  MOD_RES (389)..(389): Selenocysteine
  MOD_RES (391)..(391): Selenocysteine
  MOD_RES (397)..(397): Selenocysteine
  MOD_RES (403)..(403): Selenocysteine
  MOD_RES (410)..(410): Selenocysteine
  MOD_RES (468)..(468): Selenocysteine
MKFLLXXAFLILISLWVEEAYSKEKSSKKGKGKKKQYLCPSQQSAEDLARVPANSXSNILNRLLVSYDPRIRPNFKGIPVDVVVNIFINSFGSIQEXXMDYRVNIFLRQKWNDPRLKLPSDFRGSDALXVDPXMYKCLWKPDLFFANEKSANFHDVXQENILLFIFRDGDVLVSMRLSIXLSCPLDLXLFPMDXQRCKMQLESFGYXXDDLRFIWQSGDPVQLEKIALPQFDIKKEDIEYGNCXKYYKGXGYYXCVEVIFXLRRQVGFYMMGVYAPXLLIVVLSWLSFWINPDASAARVPLGIFSVLSLASECXXLAAELPKVSYVKALDVWLIACLLFGFASLVEYAVVQVMLNNPKRVEAEKARIAKAEQADGKGGNVAKKNXVNGXGXPVHISXLQVGEXRCKKVCXSKSDLRSNDFSIVGSLPRDFELSNYDCYGKPIEVNNGLGKSQAKNNKKPPPAKPVIPXAAKRIDLYARALFPFCFLFFNVIYWSIYL

SEQ ID NO: 11025 - protein, 164 aa, Homo sapiens
  MOD_RES (11)..(11): Selenocysteine
  MOD_RES (45)..(45): Selenocysteine
  MOD_RES (54)..(54): Selenocysteine
  MOD_RES (63)..(63): Selenocysteine
  MOD_RES (75)..(75): Selenocysteine
  MOD_RES (81)..(81): Selenocysteine
  MOD_RES (116)..(116): Selenocysteine
  MOD_RES (120)..(120): Selenocysteine
  MOD_RES (129)..(129): Selenocysteine
  MOD_RES (135)..(135): Selenocysteine
  MOD_RES (137)..(137): Selenocysteine
MIWRRAALAGXRLVWSRSGSAGWLDRAAGAAGAAAAAASGMESNXSSSLENLAXAPVNQIQEXISDNCVVIFSKXSCSYCXMAKKLFHDMNVNYKVVELDLLEYGNQFQDALYKMXGERXVPRIFVNGXFIGGAXDXHRLHKEGKLLPLVHQCYLKKSKRKEFQ

SEQ ID NO: 11026 - protein, 165 aa, Homo sapiens
  MOD_RES (19)..(19): Selenocysteine
  MOD_RES (35)..(35): Selenocysteine
  MOD_RES (46)..(46): Selenocysteine
  MOD_RES (55)..(55): Selenocysteine
  MOD_RES (64)..(64): Selenocysteine
  MOD_RES (76)..(76): Selenocysteine
  MOD_RES (82)..(82): Selenocysteine
  MOD_RES (117)..(117): Selenocysteine
  MOD_RES (121)..(121): Selenocysteine
  MOD_RES (130)..(130): Selenocysteine
  MOD_RES (136)..(136): Selenocysteine
  MOD_RES (138)..(138): Selenocysteine
MNPRDKQVSRFSPLKDVYXWVALAGIQRSGSPGRXRSAARRMESNXSSSLENLAXAPVNQIQEXISDNCVVIFSKXSCSYCXMAKKLFHDMNVNYKVVELDLLEYGNQFQDALYKMXGERXVPRIFVNGXFIGGAXDXHRLHKEGKLLPLVHQCYLKKSKRKEFQ

SEQ ID NO: 11027 - protein, 372 aa, Homo sapiens
  MOD_RES (29)..(29): Selenocysteine
  MOD_RES (32)..(32): Selenocysteine
  MOD_RES (62)..(62): Selenocysteine
  MOD_RES (88)..(88): Selenocysteine
  MOD_RES (91)..(91): Selenocysteine
  MOD_RES (103)..(103): Selenocysteine
  MOD_RES (124)..(124): Selenocysteine
  MOD_RES (132)..(132): Selenocysteine
  MOD_RES (141)..(141): Selenocysteine
  MOD_RES (155)..(155): Selenocysteine
  MOD_RES (170)..(171): Selenocysteine
  MOD_RES (220)..(220): Selenocysteine
  MOD_RES (275)..(275): Selenocysteine
  MOD_RES (295)..(295): Selenocysteine
  MOD_RES (312)..(312): Selenocysteine
  MOD_RES (318)..(318): Selenocysteine
  MOD_RES (327)..(327): Selenocysteine
  MOD_RES (337)..(337): Selenocysteine
  MOD_RES (368)..(368): Selenocysteine
MAHAPARCPSARGSGDGEMGKPRNVALIXGIXGQDGSYLAEFLLEKGYEVHGIVRRSSSFNXGRIEHLYKNPQAHIEGNMKLHYGDLXDSXCLVKIINEVKPXEIYNLGAQSHVKISFDLAEYXADVDGVGXLRLLDAVKXCGLINSVKFYQASXSELYGKVQEIPQKEXXPFYPRSPYGAAKLYAYWIVVNFREAYNLFAVNGILFNHESPRRGANFVXRKISRSVAKIYLGQLECFSLGNLDAKRDWGHAKDYVEAMWLMLQNDEPEDFVIAXGEVHSVREFVEKSFLHIGKXIVWEGKNENEVGRCKEXGKVHVXVDLKYYRPXEVDFLQGDCXKAKQKLNWKPRVAFDELVREMVHADVELMRXNPNA

SEQ ID NO: 11028 - protein, 342 aa, Homo sapiens
  MOD_RES (32)..(32): Selenocysteine
  MOD_RES (58)..(58): Selenocysteine
  MOD_RES (61)..(61): Selenocysteine
  MOD_RES (73)..(73): Selenocysteine
  MOD_RES (94)..(94): Selenocysteine
  MOD_RES (102)..(102): Selenocysteine
  MOD_RES (111)..(111): Selenocysteine
  MOD_RES (125)..(125): Selenocysteine
  MOD_RES (140)..(141): Selenocysteine
  MOD_RES (190)..(190): Selenocysteine
  MOD_RES (245)..(245): Selenocysteine
  MOD_RES (265)..(265): Selenocysteine
  MOD_RES (282)..(282): Selenocysteine
  MOD_RES (288)..(288): Selenocysteine
  MOD_RES (297)..(297): Selenocysteine
  MOD_RES (307)..(307): Selenocysteine
  MOD_RES (338)..(338): Selenocysteine
MCKMDGSYLAEFLLEKGYEVHGIVRRSSSFNXGRIEHLYKNPQAHIEGNMKLHYGDLXDSXCLVKIINEVKPXEIYNLGAQSHVKISFDLAEYXADVDGVGXLRLLDAVKXCGLINSVKFYQASXSELYGKVQEIPQKEXXPFYPRSPYGAAKLYAYWIVVNFREAYNLFAVNGILFNHESPRRGANFVXRKISRSVAKIYLGQLECFSLGNLDAKRDWGHAKDYVEAMWLMLQNDEPEDFVIAXGEVHSVREFVEKSFLHIGKXIVWEGKNENEVGRCKEXGKVHVXVDLKYYRPXEVDFLQGDCXKAKQKLNWKPRVAFDELVREMVHADVELMRXNPNA

SEQ ID NO: 11029 - protein, 563 aa, Homo sapiens
  MOD_RES (18)..(18): Selenocysteine
  MOD_RES (29)..(29): Selenocysteine
  MOD_RES (31)..(31): Selenocysteine
  MOD_RES (53)..(53): Selenocysteine
  MOD_RES (60)..(60): Selenocysteine
  MOD_RES (62)..(62): Selenocysteine
  MOD_RES (72)..(72): Selenocysteine
  MOD_RES (74)..(74): Selenocysteine
  MOD_RES (88)..(88): Selenocysteine
  MOD_RES (131)..(131): Selenocysteine
  MOD_RES (167)..(167): Selenocysteine
  MOD_RES (171)..(171): Selenocysteine
  MOD_RES (189)..(189): Selenocysteine
  MOD_RES (194)..(194): Selenocysteine
  MOD_RES (196)..(196): Selenocysteine
  MOD_RES (203)..(203): Selenocysteine
  MOD_RES (224)..(224): Selenocysteine
  MOD_RES (228)..(228): Selenocysteine
  MOD_RES (231)..(231): Selenocysteine
  MOD_RES (246)..(246): Selenocysteine
  MOD_RES (289)..(289): Selenocysteine
  MOD_RES (300)..(300): Selenocysteine
  MOD_RES (306)..(306): Selenocysteine
  MOD_RES (328)..(328): Selenocysteine
  MOD_RES (330)..(330): Selenocysteine
  MOD_RES (352)..(352): Selenocysteine
  MOD_RES (363)..(363): Selenocysteine
  MOD_RES (378)..(379): Selenocysteine
  MOD_RES (393)..(393): Selenocysteine
  MOD_RES (399)..(399): Selenocysteine
  MOD_RES (401)..(401): Selenocysteine
  MOD_RES (416)..(416): Selenocysteine
  MOD_RES (425)..(425): Selenocysteine
  MOD_RES (428)..(428): Selenocysteine
  MOD_RES (440)..(440): Selenocysteine
  MOD_RES (452)..(452): Selenocysteine
  MOD_RES (454)..(454): Selenocysteine
  MOD_RES (467)..(467): Selenocysteine
  MOD_RES (474)..(474): Selenocysteine
  MOD_RES (479)..(480): Selenocysteine
  MOD_RES (495)..(495): Selenocysteine
  MOD_RES (504)..(504): Selenocysteine
  MOD_RES (510)..(510): Selenocysteine
  MOD_RES (525)..(525): Selenocysteine
  MOD_RES (534)..(534): Selenocysteine
  MOD_RES (538)..(538): Selenocysteine
MANAEVSVPVGDVVVVPXEGNEGENPEDXKXQVILQLQPVQQGIYEAGSENNXAVVAVEXHXIHKIEEGIDXGXIEANEDMEIAYPIXCGESKAILLWKKFVCPGINVKCVKFNDQLISPKHFVHLAGKSXLKDWKRAIRLGGIMLRKMMDSGQIDFYQHDKVCSNXCRSXKFDLLISSARAPVPGQQXSVVQXPXSADGSIXQIAISEESMEEAGLEWNSALXAAVXMAXEEGVKKDSEEISEDXLMFWKGIADVGLMEEVVCNIQKEIEELLRGVQQRLIQAPFQVXDAAVLNNVAHXFGLMDXVKKVLDNRRNQVEQGEEQFLYXLXDLERQLEEQKKQGQDHRLKSQXVQNVVLMPVSXPKPPKRPRLQRPASXXVLSPSPPVQQPQFXVISPIXIXPVGQSFSMGNIPVAXLSQGSSPVXVHXLPSGPQLFRYAXVVSSAKSSSPDXVXIHPSSSLALLSSXAMQDGSXLGNMXXMVSPVELVAMESGLXSAIQAVESXSEDGQXIIEIDPAPDPEAEDXEGKAVILEXELRXEEKVVAEMEEHQHQVHNVEIVVLED

SEQ ID NO: 11030 - protein, 573 aa, Homo sapiens
  MOD_RES (18)..(18): Selenocysteine
  MOD_RES (29)..(29): Selenocysteine
  MOD_RES (31)..(31): Selenocysteine
  MOD_RES (63)..(63): Selenocysteine
  MOD_RES (70)..(70): Selenocysteine
  MOD_RES (72)..(72): Selenocysteine
  MOD_RES (82)..(82): Selenocysteine
  MOD_RES (84)..(84): Selenocysteine
  MOD_RES (98)..(98): Selenocysteine
  MOD_RES (141)..(141): Selenocysteine
  MOD_RES (177)..(177): Selenocysteine
  MOD_RES (181)..(181): Selenocysteine
  MOD_RES (199)..(199): Selenocysteine
  MOD_RES (204)..(204): Selenocysteine
  MOD_RES (206)..(206): Selenocysteine
  MOD_RES (213)..(213): Selenocysteine
  MOD_RES (234)..(234): Selenocysteine
  MOD_RES (238)..(238): Selenocysteine
  MOD_RES (241)..(241): Selenocysteine
  MOD_RES (256)..(256): Selenocysteine
  MOD_RES (299)..(299): Selenocysteine
  MOD_RES (310)..(310): Selenocysteine
  MOD_RES (316)..(316): Selenocysteine
  MOD_RES (338)..(338): Selenocysteine
  MOD_RES (340)..(340): Selenocysteine
  MOD_RES (362)..(362): Selenocysteine
  MOD_RES (373)..(373): Selenocysteine
  MOD_RES (388)..(389): Selenocysteine
  MOD_RES (403)..(403): Selenocysteine
  MOD_RES (409)..(409): Selenocysteine
  MOD_RES (411)..(411): Selenocysteine
  MOD_RES (426)..(426): Selenocysteine
  MOD_RES (435)..(435): Selenocysteine
  MOD_RES (438)..(438): Selenocysteine
  MOD_RES (450)..(450): Selenocysteine
  MOD_RES (462)..(462): Selenocysteine
  MOD_RES (464)..(464): Selenocysteine
  MOD_RES (477)..(477): Selenocysteine
  MOD_RES (484)..(484): Selenocysteine
  MOD_RES (489)..(490): Selenocysteine
  MOD_RES (505)..(505): Selenocysteine
  MOD_RES (514)..(514): Selenocysteine
  MOD_RES (520)..(520): Selenocysteine
  MOD_RES (535)..(535): Selenocysteine
  MOD_RES (544)..(544): Selenocysteine
  MOD_RES (548)..(548): Selenocysteine
MANAEVSVPVGDVVVVPXEGNEGENPEDXKXQVILQLQPVQQGLFIDGHFYNRIYEAGSENNXAVVAVEXHXIHKIEEGIDXGXIEANEDMEIAYPIXCGESKAILLWKKFVCPGINVKCVKFNDQLISPKHFVHLAGKSXLKDWKRAIRLGGIMLRKMMDSGQIDFYQHDKVCSNXCRSXKFDLLISSARAPVPGQQXSVVQXPXSADGSIXQIAISEESMEEAGLEWNSALXAAVXMAXEEGVKKDSEEISEDXLMFWKGIADVGLMEEVVCNIQKEIEELLRGVQQRLIQAPFQVXDAAVLNNVAHXFGLMDXVKKVLDNRRNQVEQGEEQFLYXLXDLERQLEEQKKQGQDHRLKSQXVQNVVLMPVSXPKPPKRPRLQRPASXXVLSPSPPVQQPQFXVISPIXIXPVGQSFSMGNIPVAXLSQGSSPVXVHXLPSGPQLFRYAXVVSSAKSSSPDXVXIHPSSSLALLSSXAMQDGSXLGNMXXMVSPVELVAMESGLXSAIQAVESXSEDGQXIIEIDPAPDPEAEDXEGKAVILEXELRXEEKVVAEMEEHQHQVHNVEIVVLED

SEQ ID NO: 11031 - protein, 530 aa, Homo sapiens
  MOD_RES (3)..(3): Selenocysteine
  MOD_RES (17)..(18): Selenocysteine
  MOD_RES (21)..(21): Selenocysteine
  MOD_RES (33)..(33): Selenocysteine
  MOD_RES (37)..(38): Selenocysteine
  MOD_RES (48)..(48): Selenocysteine
  MOD_RES (54)..(54): Selenocysteine
  MOD_RES (66)..(66): Selenocysteine
  MOD_RES (95)..(95): Selenocysteine
  MOD_RES (138)..(138): Selenocysteine
  MOD_RES (174)..(174): Selenocysteine
  MOD_RES (178)..(178): Selenocysteine
  MOD_RES (193)..(193): Selenocysteine
  MOD_RES (201)..(201): Selenocysteine
  MOD_RES (213)..(213): Selenocysteine
  MOD_RES (215)..(215): Selenocysteine
  MOD_RES (218)..(218): Selenocysteine
  MOD_RES (226)..(226): Selenocysteine
  MOD_RES (233)..(233): Selenocysteine
  MOD_RES (235)..(235): Selenocysteine
  MOD_RES (260)..(260): Selenocysteine
  MOD_RES (346)..(346): Selenocysteine
  MOD_RES (348)..(348): Selenocysteine
  MOD_RES (365)..(365): Selenocysteine
  MOD_RES (377)..(377): Selenocysteine
  MOD_RES (394)..(394): Selenocysteine
  MOD_RES (404)..(404): Selenocysteine
  MOD_RES (408)..(408): Selenocysteine
  MOD_RES (432)..(432): Selenocysteine
  MOD_RES (440)..(440): Selenocysteine
  MOD_RES (444)..(444): Selenocysteine
  MOD_RES (455)..(455): Selenocysteine
  MOD_RES (459)..(459): Selenocysteine
  MOD_RES (467)..(467): Selenocysteine
  MOD_RES (479)..(479): Selenocysteine
  MOD_RES (486)..(486): Selenocysteine
  MOD_RES (499)..(499): Selenocysteine
  MOD_RES (502)..(502): Selenocysteine
  MOD_RES (515)..(515): Selenocysteine
  MOD_RES (517)..(517): Selenocysteine
MAXPDVSVHMEEVVVVXXPDXAVDGSGVEGVKXVLVXXNLAPHGGDLXEDNMEXENAAAAAAAAFXASSQLKEAVLVKMAEEGENLEAEIVYPIXCGDSRANLIWRKFVCPGINVKCVQYDEHVISPKEFVHLAGKSXLKDWKRAIRMNGIMLRKIMDSGELDFYQHDKVCSNXCRSXKIDLSGARVSLSSPXSAEYIPLXPAAADVNGSPAXIXIEXCEDPGDWXAAIGDDXFXFWRGLKDAGLLDEVIQEFHQELVEXMRGLQQRVQDPPLQLRDAVLLNNIVQNFGMLDLVKKVLASHKCQMDRSREQYARDLAALEQQCDEHRRRAKELKHKSQHLSNVLMXLXPVSLPPPVKRPRLARAXSGPAAMASQVLXQSAQLALGPGVPVPQLXSVPLGKVVSXLPSXVLGKGSLQAPPASSPASPLLGGYXVLASSGSXYPSXVEIHPDASSLXVLSXAAVQDGSXVFKVVSPLQLLXLPGLGPXLQNVAQASPGSSXIVXVPAGAAPGPEEHXAXIEVAAMAEDHERK

SEQ ID NO: 11032 - protein, 479 aa, Homo sapiens
  MOD_RES (3)..(3): Selenocysteine
  MOD_RES (15)..(15): Selenocysteine
  MOD_RES (44)..(44): Selenocysteine
  MOD_RES (87)..(87): Selenocysteine
  MOD_RES (123)..(123): Selenocysteine
  MOD_RES (127)..(127): Selenocysteine
  MOD_RES (142)..(142): Selenocysteine
  MOD_RES (150)..(150): Selenocysteine
  MOD_RES (162)..(162): Selenocysteine
  MOD_RES (164)..(164): Selenocysteine
  MOD_RES (167)..(167): Selenocysteine
  MOD_RES (175)..(175): Selenocysteine
  MOD_RES (182)..(182): Selenocysteine
  MOD_RES (184)..(184): Selenocysteine
  MOD_RES (209)..(209): Selenocysteine
  MOD_RES (295)..(295): Selenocysteine
  MOD_RES (297)..(297): Selenocysteine
  MOD_RES (314)..(314): Selenocysteine
  MOD_RES (326)..(326): Selenocysteine
  MOD_RES (343)..(343): Selenocysteine
  MOD_RES (353)..(353): Selenocysteine
  MOD_RES (357)..(357): Selenocysteine
  MOD_RES (381)..(381): Selenocysteine
  MOD_RES (389)..(389): Selenocysteine
  MOD_RES (393)..(393): Selenocysteine
  MOD_RES (404)..(404): Selenocysteine
  MOD_RES (408)..(408): Selenocysteine
  MOD_RES (416)..(416): Selenocysteine
  MOD_RES (428)..(428): Selenocysteine
  MOD_RES (435)..(435): Selenocysteine
  MOD_RES (448)..(448): Selenocysteine
  MOD_RES (451)..(451): Selenocysteine
  MOD_RES (464)..(464): Selenocysteine
  MOD_RES (466)..(466): Selenocysteine
MEXENAAAAAAAAFXASSQLKEAVLVKMAEEGENLEAEIVYPIXCGDSRANLIWRKFVCPGINVKCVQYDEHVISPKEFVHLAGKSXLKDWKRAIRMNGIMLRKIMDSGELDFYQHDKVCSNXCRSXKIDLSGARVSLSSPXSAEYIPLXPAAADVNGSPAXIXIEXCEDPGDWXAAIGDDXFXFWRGLKDAGLLDEVIQEFHQELVEXMRGLQQRVQDPPLQLRDAVLLNNIVQNFGMLDLVKKVLASHKCQMDRSREQYARDLAALEQQCDEHRRRAKELKHKSQHLSNVLMXLXPVSLPPPVKRPRLARAXSGPAAMASQVLXQSAQLALGPGVPVPQLXSVPLGKVVSXLPSXVLGKGSLQAPPASSPASPLLGGYXVLASSGSXYPSXVEIHPDASSLXVLSXAAVQDGSXVFKVVSPLQLLXLPGLGPXLQNVAQASPGSSXIVXVPAGAAPGPEEHXAXIEVAAMAEDHERK

SEQ ID NO: 11033 - protein, 150 aa, Homo sapiens
  MOD_RES (39)..(39): Selenocysteine
  MOD_RES (80)..(80): Selenocysteine
  MOD_RES (127)..(127): Selenocysteine
  MOD_RES (131)..(131): Selenocysteine
  MOD_RES (139)..(139): Selenocysteine
  MOD_RES (143)..(143): Selenocysteine
MNKFVGLSNVDPKSESLVVCDVAEDLVEKLRKFRFRKEXNNAAIIMKIDKDKRLVVLDEELEGISPDELKDELPERQPRXFIVYSYKYQHDDGRVSYPLCFIFSSPVGCKPEQQMMYAGSKNKLVQXAELXKVFEIRNXEDLXEEWLREK

SEQ ID NO: 11034 - protein, 142 aa, Homo sapiens
  MOD_RES (27)..(27): Selenocysteine
  MOD_RES (114)..(114): Selenocysteine
  MOD_RES (118)..(118): Selenocysteine
  MOD_RES (126)..(126): Selenocysteine
  MOD_RES (130)..(130): Selenocysteine
MSESLVVCDVAEDLVEKLRKFRFRKEXNNAAIIMKIDKDKRLVVLDEELEGISPDELKDELPERQPRFIVYSYKYQHDDGRVSYPLCFIFSSPVGCKPEQQMMYAGSKNKLVQXAELXKVFEIRNXEDLXEEWLREKLGFFH

SEQ ID NO: 11035 - protein, 38 aa, Homo sapiens
  MOD_RES (27)..(27): Selenocysteine
  MOD_RES (37)..(37): Selenocysteine
MSESLVVCDVAEDLVEKLRKFRFRKEXNNAAIIRHFXR

SEQ ID NO: 11036 - protein, 36 aa, Homo sapiens
MDAAEPGLPPGPEGRKRYSDIFRSLDNLEISLGNDP

SEQ ID NO: 11037 - protein, 944 aa, Homo sapiens
  MOD_RES (36)..(36): Selenocysteine
  MOD_RES (55)..(55): Selenocysteine
  MOD_RES (57)..(57): Selenocysteine
  MOD_RES (59)..(59): Selenocysteine
  MOD_RES (61)..(61): Selenocysteine
  MOD_RES (79)..(79): Selenocysteine
  MOD_RES (90)..(90): Selenocysteine
  MOD_RES (103)..(103): Selenocysteine
  MOD_RES (115)..(115): Selenocysteine
  MOD_RES (129)..(129): Selenocysteine
  MOD_RES (153)..(153): Selenocysteine
  MOD_RES (164)..(164): Selenocysteine
  MOD_RES (169)..(169): Selenocysteine
  MOD_RES (186)..(186): Selenocysteine
  MOD_RES (311)..(311): Selenocysteine
  MOD_RES (407)..(407): Selenocysteine
  MOD_RES (414)..(414): Selenocysteine
  MOD_RES (418)..(418): Selenocysteine
  MOD_RES (439)..(439): Selenocysteine
  MOD_RES (460)..(460): Selenocysteine
  MOD_RES (467)..(467): Selenocysteine
  MOD_RES (490)..(490): Selenocysteine
  MOD_RES (498)..(498): Selenocysteine
  MOD_RES (506)..(506): Selenocysteine
  MOD_RES (520)..(520): Selenocysteine
  MOD_RES (543)..(543): Selenocysteine
  MOD_RES (546)..(546): Selenocysteine
  MOD_RES (605)..(605): Selenocysteine
  MOD_RES (623)..(623): Selenocysteine
  MOD_RES (634)..(634): Selenocysteine
  MOD_RES (647)..(647): Selenocysteine
  MOD_RES (659)..(659): Selenocysteine
  MOD_RES (691)..(691): Selenocysteine
  MOD_RES (708)..(708): Selenocysteine
  MOD_RES (740)..(740): Selenocysteine
  MOD_RES (755)..(756): Selenocysteine
  MOD_RES (787)..(787): Selenocysteine
  MOD_RES (793)..(793): Selenocysteine
  MOD_RES (795)..(795): Selenocysteine
  MOD_RES (797)..(797): Selenocysteine
  MOD_RES (801)..(801): Selenocysteine
  MOD_RES (814)..(814): Selenocysteine
  MOD_RES (833)..(833): Selenocysteine
  MOD_RES (855)..(855): Selenocysteine
  MOD_RES (872)..(872): Selenocysteine
  MOD_RES (875)..(875): Selenocysteine
  MOD_RES (902)..(902): Selenocysteine
  MOD_RES (911)..(911): Selenocysteine
  MOD_RES (914)..(914): Selenocysteine
  MOD_RES (930)..(930): Selenocysteine
MDAAEPGLPPGPEGRKRYSDIFRSLDNLEISLGNVXLEMLAGDPLLSEDPEPDKXPXAXVXNEASCWSGPSPEGPVPLXGEELDLRLIRXKGGVDAALEYAKXWSRYAKELLAWXEKRASYELEFAKSXMKIAEAGKVSIQQQSHMPLQYIYXLFLEHDLSLGXLAMEXVAQQKRDYYQPLAAKRXEIEKWRKEFKEQWMKEQKRMNEAVQALRRAQLQYVQRSEDLRARSQGSPEDSAPQASPGPSKQQERRRRSREEAQAKAQEAEALYQACVREANARQQDLEIAKQRIVSHVRKLVFQGDEVLRRVXLSLFGLRGAQAERGPRAFAALAECCAPFEPGQRYQEFVRALRPEAPPPPPPAFSFQEFLPSLNSSPLDIRKKLSGPLPPRLDENSAEPGPWEDPGXGWRWQGXPGPXPGSDVDSVGGGSESRSLDSPXSSPDLGDGLENGLGSPFGKWXLSSAAQXHQLRRLRGPAKCRECEAFMVSGXECEECFLXCHKRCLEXLLILCGHRRLPARXPLFGVDFLQLPRDFPEEVPFVVXKCXAEIEHRALDVQGIYRVSGSRVRVERLCQAFENGRALVELSGNSPHDVSSVLKRFLQELXEPVIPFHLYDAFISLAKXLHADPGDDPGXPSPSPEVIRSLKXLLVQLPDSNYNXLRHLVAHLFRVAARFMENKMSANNLGIVFGPXLLRPPDGPRAASAIPVXCLLDSGHQAQLVEFLIVHYEQIFGMDELPQAXEPPPQDSSPAPGPLXXSSQPPPPHLDPDSQPPVLASDPGPDPQHHSXLEQHPXAXPXEIPXPQSDQREDVAEDXKDGGGEVSSQGPEDSLLGXQSRGHFSRQPVKYPRGGVRPVXHQLSSLALVASKLCEEXPIXSVPRGSLRGRGPSPAAASPEGSPLRRXPLPKHFEIXQEXARLLSKLDSEAVPRAXCCPDVQPEEAEDHL

SEQ ID NO: 11038 - protein, 970 aa, Homo sapiens
  MOD_RES (36)..(36): Selenocysteine
  MOD_RES (55)..(55): Selenocysteine
  MOD_RES (57)..(57): Selenocysteine
  MOD_RES (59)..(59): Selenocysteine
  MOD_RES (61)..(61): Selenocysteine
  MOD_RES (79)..(79): Selenocysteine
  MOD_RES (90)..(90): Selenocysteine
  MOD_RES (103)..(103): Selenocysteine
  MOD_RES (115)..(115): Selenocysteine
  MOD_RES (129)..(129): Selenocysteine
  MOD_RES (153)..(153): Selenocysteine
  MOD_RES (164)..(164): Selenocysteine
  MOD_RES (169)..(169): Selenocysteine
  MOD_RES (186)..(186): Selenocysteine
  MOD_RES (311)..(311): Selenocysteine
  MOD_RES (407)..(407): Selenocysteine
  MOD_RES (414)..(414): Selenocysteine
  MOD_RES (418)..(418): Selenocysteine
  MOD_RES (439)..(439): Selenocysteine
  MOD_RES (446)..(446): Selenocysteine
  MOD_RES (455)..(455): Selenocysteine
  MOD_RES (457)..(457): Selenocysteine
  MOD_RES (486)..(486): Selenocysteine
  MOD_RES (493)..(493): Selenocysteine
  MOD_RES (516)..(516): Selenocysteine
  MOD_RES (524)..(524): Selenocysteine
  MOD_RES (532)..(532): Selenocysteine
  MOD_RES (546)..(546): Selenocysteine
  MOD_RES (569)..(569): Selenocysteine
  MOD_RES (572)..(572): Selenocysteine
  MOD_RES (631)..(631): Selenocysteine
  MOD_RES (649)..(649): Selenocysteine
  MOD_RES (660)..(660): Selenocysteine
  MOD_RES (673)..(673): Selenocysteine
  MOD_RES (685)..(685): Selenocysteine
  MOD_RES (717)..(717): Selenocysteine
  MOD_RES (734)..(734): Selenocysteine
  MOD_RES (766)..(766): Selenocysteine
  MOD_RES (781)..(782): Selenocysteine
  MOD_RES (813)..(813): Selenocysteine
  MOD_RES (819)..(819): Selenocysteine
  MOD_RES (821)..(821): Selenocysteine
  MOD_RES (823)..(823): Selenocysteine
  MOD_RES (827)..(827): Selenocysteine
  MOD_RES (840)..(840): Selenocysteine
  MOD_RES (859)..(859): Selenocysteine
  MOD_RES (881)..(881): Selenocysteine
  MOD_RES (898)..(898): Selenocysteine
  MOD_RES (901)..(901): Selenocysteine
  MOD_RES (928)..(928): Selenocysteine
  MOD_RES (937)..(937): Selenocysteine
  MOD_RES (940)..(940): Selenocysteine
  MOD_RES (956)..(956): Selenocysteine
MDAAEPGLPPGPEGRKRYSDIFRSLDNLEISLGNVXLEMLAGDPLLSEDPEPDKXPXAXVXNEASCWSGPSPEGPVPLXGEELDLRLIRXKGGVDAALEYAKXWSRYAKELLAWXEKRASYELEFAKSXMKIAEAGKVSIQQQSHMPLQYIYXLFLEHDLSLGXLAMEXVAQQKRDYYQPLAAKRXEIEKWRKEFKEQWMKEQKRMNEAVQALRRAQLQYVQRSEDLRARSQGSPEDSAPQASPGPSKQQERRRRSREEAQAKAQEAEALYQACVREANARQQDLEIAKQRIVSHVRKLVFQGDEVLRRVXLSLFGLRGAQAERGPRAFAALAECCAPFEPGQRYQEFVRALRPEAPPPPPPAFSFQEFLPSLNSSPLDIRKKLSGPLPPRLDENSAEPGPWEDPGXGWRWQGXPGPXPGSDVDSVGGGSESRSLDSPXSSPGAGXRQLVKASSXGXESSDDFEERDPDLGDGLENGLGSPFGKWXLSSAAQXHQLRRLRGPAKCRECEAFMVSGXECEECFLXCHKRCLEXLLILCGHRRLPARXPLFGVDFLQLPRDFPEEVPFVVXKCXAEIEHRALDVQGIYRVSGSRVRVERLCQAFENGRALVELSGNSPHDVSSVLKRFLQELXEPVIPFHLYDAFISLAKXLHADPGDDPGXPSPSPEVIRSLKXLLVQLPDSNYNXLRHLVAHLFRVAARFMENKMSANNLGIVFGPXLLRPPDGPRAASAIPVXCLLDSGHQAQLVEFLIVHYEQIFGMDELPQAXEPPPQDSSPAPGPLXXSSQPPPPHLDPDSQPPVLASDPGPDPQHHSXLEQHPXAXPXEIPXPQSDQREDVAEDXKDGGGEVSSQGPEDSLLGXQSRGHFSRQPVKYPRGGVRPVXHQLSSLALVASKLCEEXPIXSVPRGSLRGRGPSPAAASPEGSPLRRXPLPKHFEIXQEXARLLSKLDSEAVPRAXCCPDVQPEEAEDHL

SEQ ID NO: 11039 - protein, 94 aa, Homo sapiens
  MOD_RES (17)..(17): Selenocysteine
  MOD_RES (19)..(19): Selenocysteine
  MOD_RES (21)..(21): Selenocysteine
  MOD_RES (23)..(23): Selenocysteine
  MOD_RES (41)..(41): Selenocysteine
  MOD_RES (52)..(52): Selenocysteine
  MOD_RES (65)..(65): Selenocysteine
  MOD_RES (77)..(77): Selenocysteine
  MOD_RES (91)..(91): Selenocysteine
MLAGDPLLSEDPEPDKXPXAXVXNEASCWSGPSPEGPVPLXGEELDLRLIRXKGGVDAALEYAKXWSRYAKELLAWXEKRASYELEFAKSXMKI

SEQ ID NO: 11040 - protein, 303 aa, Homo sapiens
  MOD_RES (1)..(1): Any amino acid
  MOD_RES (58)..(58): Selenocysteine
  MOD_RES (154)..(154): Selenocysteine
  MOD_RES (162)..(162): Selenocysteine
  MOD_RES (183)..(183): Selenocysteine
  MOD_RES (190)..(190): Selenocysteine
  MOD_RES (199)..(199): Selenocysteine
  MOD_RES (201)..(201): Selenocysteine
  MOD_RES (230)..(230): Selenocysteine
  MOD_RES (237)..(237): Selenocysteine
  MOD_RES (260)..(260): Selenocysteine
  MOD_RES (268)..(268): Selenocysteine
  MOD_RES (276)..(276): Selenocysteine
  MOD_RES (290)..(290): Selenocysteine
XRSREEAQAKAQEAEALYQACVREANARQQDLEIAKQRIVSHVRKLVFQGDEVLRRVXLSLFGLRGAQAERGPRAFAALAECCAPFEPGQRYQEFVRALRPEAPPPPPPAFSFQEFLPSLNSSPLDIRKKLSGPLPPRLDENSAEPGPWEDPGXGWRWQGPXPGSDVDSVGGGSESRSLDSPXSSPGAGXRQLVKASSXGXESSDDFEERDPDLGDGLENGLGSPFGKWXLSSAAQXHQLRRLRGPAKCRECEAFMVSGXECEECFLXCHKRCLEXLLILCGHRRLPARXPLFGVDFLQLPRD

SEQ ID NO: 11041 - protein, 118 aa, Homo sapiens
  MOD_RES (20)..(20): Selenocysteine
  MOD_RES (26)..(26): Selenocysteine
  MOD_RES (57)..(57): Selenocysteine
  MOD_RES (77)..(77): Selenocysteine
  MOD_RES (87)..(87): Selenocysteine
  MOD_RES (90)..(90): Selenocysteine
  MOD_RES (102)..(102): Selenocysteine
MLLFALLLAMELPLVAASAXMRAQWXYSLRCHDCAVINDFNCPNIRVCPYHIRRCMXISIQLSSGDRAAVCPGPHPXFFQPGAWIPXQVXDSKHQPLPAHLXRRHPLHGPGNILPSAI

SEQ ID NO: 11042 - protein, 158 aa, Homo sapiens
  MOD_RES (20)..(20): Selenocysteine
  MOD_RES (26)..(26): Selenocysteine
  MOD_RES (57)..(57): Selenocysteine
  MOD_RES (74)..(74): Selenocysteine
  MOD_RES (78)..(78): Selenocysteine
  MOD_RES (96)..(96): Selenocysteine
  MOD_RES (116)..(116): Selenocysteine
  MOD_RES (128)..(128): Selenocysteine
  MOD_RES (136)..(136): Selenocysteine
MLLFALLLAMELPLVAASAXMRAQWXYSLRCHDCAVINDFNCPNIRVCPYHIRRCMXISIRINSRELLVYKNCXNNCXFVYAAEQPPEAPGKIFKXNSFYWVCCCNSMVCNAGGPXNLERDMLPDEVXEEELPEGXVRLGVSKLLLSFASIIVSNILP

SEQ ID NO: 11043 - protein, 359 aa, Homo sapiens
  MOD_RES (2)..(2): Selenocysteine
  MOD_RES (47)..(47): Selenocysteine
  MOD_RES (54)..(54): Selenocysteine
  MOD_RES (76)..(76): Selenocysteine
  MOD_RES (85)..(85): Selenocysteine
  MOD_RES (96)..(96): Selenocysteine
  MOD_RES (122)..(123): Selenocysteine
  MOD_RES (134)..(134): Selenocysteine
  MOD_RES (162)..(162): Selenocysteine
  MOD_RES (169)..(169): Selenocysteine
  MOD_RES (175)..(175): Selenocysteine
  MOD_RES (186)..(187): Selenocysteine
  MOD_RES (224)..(224): Selenocysteine
  MOD_RES (257)..(257): Selenocysteine
  MOD_RES (260)..(260): Selenocysteine
  MOD_RES (329)..(329): Selenocysteine
  MOD_RES (332)..(332): Selenocysteine
  MOD_RES (334)..(334): Selenocysteine
  MOD_RES (347)..(347): Selenocysteine
MXLESMMACCLSDEVKESKRINAEIEKQLRRDKRDARRELKLLLLGXGESGKSXFIKQMRIIHGAGYSEEDKRGFXKLVYQNIFXAMQAMIRAMEXLKILYKYEQNKANALLIREVDVEKVXXFEHQYVSAIKXLWEDPGIQECYDRRREYQLSDSAKYYLXDVDRIAXLGYLPXQQDVLRVRVPXXGIIEYPFDLENIIFRMVDVGGQRSERRKWIHCFENVXSIMFLVALSEYDQVLVESDNENRMEESKALFRXIIXYPWFQNSSVILFLNKKDLLEDKILYSHLVDYFPEFDGPQRDAQAAREFILKMFVDLNPDSDKIIYSHFXCAXDXENIRFVFAAVKDXILQLNLKEYNLV

SEQ ID NO: 11044 - protein, 236 aa, Homo sapiens
  MOD_RES (1)..(1): Any amino acid
  MOD_RES (11)..(11): Selenocysteine
  MOD_RES (18)..(18): Selenocysteine
  MOD_RES (24)..(24): Selenocysteine
  MOD_RES (35)..(36): Selenocysteine
  MOD_RES (73)..(73): Selenocysteine
  MOD_RES (106)..(106): Selenocysteine
  MOD_RES (109)..(109): Selenocysteine
  MOD_RES (178)..(178): Selenocysteine
  MOD_RES (181)..(181): Selenocysteine
  MOD_RES (183)..(183): Selenocysteine
  MOD_RES (196)..(196): Selenocysteine
  MOD_RES (218)..(218): Selenocysteine
  MOD_RES (228)..(228): Selenocysteine
XLSDSAKYYLXDVDRIAXLGYLPXQQDVLRVRVPXXGIIEYPFDLENIIFRMVDVGGQRSERRKWIHCFENVXSIMFLVALSEYDQVLVESDNENRMEESKALFRXIIXYPWFQNSSVILFLNKKDLLEDKILYSHLVDYFPEFDGPQRDAQAAREFILKMFVDLNPDSDKIIYSHFXCAXDXENIRFVFAAVKDXILQLNLKEYNLLSGDVHLSLRXLRAPSHLLSXAKAAFFWP

SEQ ID NO: 11045 - protein, 72 aa, Homo sapiens
  MOD_RES (1)..(1): Any amino acid
  MOD_RES (3)..(3): Selenocysteine
  MOD_RES (10)..(10): Selenocysteine
  MOD_RES (16)..(16): Selenocysteine
  MOD_RES (27)..(28): Selenocysteine
  MOD_RES (55)..(55): Selenocysteine
XLXDVDRIAXLGYLPXQQDVLRVRVPXXGIIEYPFDLENIIFRWAWLCAPVVPAXQEAEAGGSLKPRRLRLK

SEQ ID NO: 11046 - protein, 305 aa, Homo sapiens
  MOD_RES (37)..(37): Selenocysteine
  MOD_RES (43)..(43): Selenocysteine
  MOD_RES (132)..(132): Selenocysteine
  MOD_RES (170)..(170): Selenocysteine
  MOD_RES (191)..(191): Selenocysteine
  MOD_RES (203)..(203): Selenocysteine
  MOD_RES (231)..(231): Selenocysteine
  MOD_RES (275)..(276): Selenocysteine
  MOD_RES (280)..(280): Selenocysteine
  MOD_RES (293)..(293): Selenocysteine
MAPRAGLGAGPLLLRSRADWVCGGWEAALSAPPPFCXAWVERXGLVHFLREGGHGACFPLALLHPGSVVSFQMIYPLIVLPLCASWHWGLIRKGIVLFWGESVKYFLDNLDRIGQLNYFPSKQDILLARKAXKGIVEHDFVIKKIPFKMVDVGGQRSQRQKWFQCFDGIXSILFMVSSSEYDQVLMEDRRXNRLVESMNIFEXIVNNKLFFNVSIILFLNKMDLLVEKVKXVSIKKHFPDFRGDPHRLEDVQRYLVQCFDRKRRNRSKPLFHHFXXAIDXENVRFVFHAVKDXILQENLKDIMLQ

SEQ ID NO: 11047 - protein, 322 aa, Homo sapiens
  MOD_RES (23)..(23): Selenocysteine
  MOD_RES (87)..(87): Selenocysteine
  MOD_RES (149)..(149): Selenocysteine
  MOD_RES (187)..(187): Selenocysteine
  MOD_RES (208)..(208): Selenocysteine
  MOD_RES (220)..(220): Selenocysteine
  MOD_RES (248)..(248): Selenocysteine
  MOD_RES (292)..(293): Selenocysteine
  MOD_RES (297)..(297): Selenocysteine
  MOD_RES (310)..(310): Selenocysteine
MKRRMFPRPCLARMPGSRGSGSXPDGNRKCCRFEHLLIAHPGSRGSRVLVDARDKLGIPWQYSENEKHGMFLMAFENKAGLPVEPAXFQLYVPALSALWRDSGIREAFSRRSEFQLGESVKYFLDNLDRIGQLNYFPSKQDILLARKAXKGIVEHDFVIKKIPFKMVDVGGQRSQRQKWFQCFDGIXSILFMVSSSEYDQVLMEDRRXNRLVESMNIFEXIVNNKLFFNVSIILFLNKMDLLVEKVKXVSIKKHFPDFRGDPHRLEDVQRYLVQCFDRKRRNRSKPLFHHFXXAIDXENVRFVFHAVKDXILQENLKDIMLQ

SEQ ID NO: 11048 - protein, 77 aa, Homo sapiens
  MOD_RES (61)..(61): Selenocysteine
MKRRMFPRPCLARMPGSRGSRVLVDARDKLGIPWQYSENEKHGMFLMAFENKAGLPVEPAXFQLYVPALSALWRDSG

SEQ ID NO: 11049 - protein, 381 aa, Homo sapiens
  MOD_RES (7)..(7): Selenocysteine
  MOD_RES (72)..(72): Selenocysteine
  MOD_RES (96)..(96): Selenocysteine
  MOD_RES (146)..(146): Selenocysteine
  MOD_RES (208)..(208): Selenocysteine
  MOD_RES (246)..(246): Selenocysteine
  MOD_RES (267)..(267): Selenocysteine
  MOD_RES (279)..(279): Selenocysteine
  MOD_RES (307)..(307): Selenocysteine
  MOD_RES (351)..(352): Selenocysteine
  MOD_RES (356)..(356): Selenocysteine
  MOD_RES (369)..(369): Selenocysteine
MSGVVRXLSRCLLPAEAGGARERRAGSGARDAEREARRRSRDIDALLARERRAVRRLVKILLLGAGESGKSXFLKQMRIIHGREFDQKALLEFRDXIFDNILKGSRVLVDARDKLGIPWQYSENEKHGMFLMAFENKAGLPVEPAXFQLYVPALSALWRDSGIREAFSRRSEFQLGESVKYFLDNLDRIGQLNYFPSKQDILLARKAXKGIVEHDFVIKKIPFKMVDVGGQRSQRQKWFQCFDGIXSILFMVSSSEYDQVLMEDRRXNRLVESMNIFEXIVNNKLFFNVSIILFLNKMDLLVEKVKXVSIKKHFPDFRGDPHRLEDVQRYLVQCFDRKRRNRSKPLFHHFXXAIDXENVRFVFHAVKDXILQENLKDIMLQ

SEQ ID NO: 11050 - protein, 377 aa, Homo sapiens
  MOD_RES (21)..(21): Selenocysteine
  MOD_RES (43)..(43): Selenocysteine
  MOD_RES (63)..(63): Selenocysteine
  MOD_RES (87)..(87): Selenocysteine
  MOD_RES (127)..(127): Selenocysteine
  MOD_RES (139)..(139): Selenocysteine
  MOD_RES (203)..(203): Selenocysteine
  MOD_RES (241)..(241): Selenocysteine
  MOD_RES (262)..(262): Selenocysteine
  MOD_RES (266)..(266): Selenocysteine
  MOD_RES (274)..(274): Selenocysteine
  MOD_RES (293)..(293): Selenocysteine
  MOD_RES (347)..(348): Selenocysteine
  MOD_RES (352)..(352): Selenocysteine
  MOD_RES (365)..(365): Selenocysteine
MADFLPSRSVLSVCFPGCLLXSGEAEQQRKSKEIDKCLSREKXYVKRLVKILLLGAGESGKSXFLKQMRIIHGQDFDQRAREEFRPXIYSNVIKGMRVLVDAREKLHIPWGDNSNQQHGDKMMSFDXRAPMAAQGMVEXRVFLQYLPAIRALWADSGIQNAYDRRREFQLGESVKYFLDNLDKLGEPDYIPSQQDILLARRPXKGIHEYDFEIKNVPFKMVDVGGQRSERKRWFECFDSVXSILFLVSSSEFDQVLMEDRLXNRLXESLNIFEXIVNNRVFSNVSIILFLNKXDLLEEKVQIVSIKDYFLEFEGDPHCLRDVQKFLVECFRNKRRDQQQKPLYHHFXXAINXENIRLVFRDVKDXILHDNLKQLMLQ

SEQ ID NO: 11051 - protein, 282 aa, Homo sapiens
  MOD_RES (32)..(32): Selenocysteine
  MOD_RES (44)..(44): Selenocysteine
  MOD_RES (108)..(108): Selenocysteine
  MOD_RES (146)..(146): Selenocysteine
  MOD_RES (167)..(167): Selenocysteine
  MOD_RES (171)..(171): Selenocysteine
  MOD_RES (179)..(179): Selenocysteine
  MOD_RES (198)..(198): Selenocysteine
  MOD_RES (252)..(253): Selenocysteine
  MOD_RES (257)..(257): Selenocysteine
  MOD_RES (270)..(270): Selenocysteine
MRVLVDAREKLHIPWGDNSNQQHGDKMMSFDXRAPMAAQGMVEXRVFLQYLPAIRALWADSGIQNAYDRRREFQLGESVKYFLDNLDKLGEPDYIPSQQDILLARRPXKGIHEYDFEIKNVPFKMVDVGGQRSERKRWFECFDSVXSILFLVSSSEFDQVLMEDRLXNRLXESLNIFEXIVNNRVFSNVSIILFLNKXDLLEEKVQIVSIKDYFLEFEGDPHCLRDVQKFLVECFRNKRRDQQQKPLYHHFXXAINXENIRLVFRDVKDXILHDNLKQLMLQ

SEQ ID NO: 11052 - protein, 355 aa, Homo sapiens
  MOD_RES (43)..(43): Selenocysteine
  MOD_RES (50)..(50): Selenocysteine
  MOD_RES (72)..(72): Selenocysteine
  MOD_RES (81)..(81): Selenocysteine
  MOD_RES (92)..(92): Selenocysteine
  MOD_RES (158)..(158): Selenocysteine
  MOD_RES (165)..(165): Selenocysteine
  MOD_RES (171)..(171): Selenocysteine
  MOD_RES (182)..(183): Selenocysteine
  MOD_RES (220)..(220): Selenocysteine
  MOD_RES (253)..(253): Selenocysteine
  MOD_RES (256)..(256): Selenocysteine
  MOD_RES (292)..(292): Selenocysteine
  MOD_RES (325)..(325): Selenocysteine
  MOD_RES (328)..(328): Selenocysteine
  MOD_RES (330)..(330): Selenocysteine
  MOD_RES (343)..(343): Selenocysteine
MAGCCCLSAEEKESQRISAEIERQLRRDKKDARRELKLLLLGXGESGKSXFIKQMRIIHGSGYSDEDRKGFXKLVYQNIFXAMQAMIRAMDXLRIQYVCEQNKENAQIIREVEVDKVSMLSREQVEAIKQLWQDPGIQECYDRRREYQLSDSAKYYLXDIDRIAXPSFVPXQQDVLRVRVPXXGIIEYPFDLENIIFRMVDVGGQRSERRKWIHCFESVXSIIFLVALSEYDQVLAECDNENRMEESKALFKXIIXYPWFLNSSVILFLNKKDLLEEKIMYSHLISYFPEYXGPKQDVRAARDFILKLYQDQNPDKEKVIYSHFXCAXDXDNIRFVFAAVKDXILQLNLREFNLV

SEQ ID NO: 11053 - protein, 374 aa, Homo sapiens
  MOD_RES (6)..(6): Selenocysteine
  MOD_RES (15)..(15): Selenocysteine
  MOD_RES (57)..(57): Selenocysteine
  MOD_RES (125)..(126): Selenocysteine
  MOD_RES (171)..(171): Selenocysteine
  MOD_RES (178)..(178): Selenocysteine
  MOD_RES (189)..(190): Selenocysteine
  MOD_RES (202)..(202): Selenocysteine
  MOD_RES (260)..(260): Selenocysteine
  MOD_RES (270)..(270): Selenocysteine
  MOD_RES (279)..(279): Selenocysteine
  MOD_RES (288)..(288): Selenocysteine
  MOD_RES (293)..(293): Selenocysteine
  MOD_RES (317)..(317): Selenocysteine
  MOD_RES (321)..(321): Selenocysteine
  MOD_RES (344)..(344): Selenocysteine
  MOD_RES (347)..(347): Selenocysteine
  MOD_RES (349)..(349): Selenocysteine
MARSLXWRCCPWCLXEDEKAAARVDQEINRILLEQKKQDRGELKLLLLGPGESGKSXFIKQMRIIHGAGYSEEERKGFRPLVYQNIFVSMRAMIEAMERLQIPFSRPESKHHASLVMSQDPYKVXXFEKRYAAAMQWLWRDAGIRACYERRREFHLLDSAVYYLSHLERIXEEGYVPXAQDVLRSRMPXXGINEYCFSVQKXNLRIVDVGGQKSERKKWIHCFENVIALIYLASLSEYDQCLEENNQENRMKESLALFGXILELPWFKSXSVILFLNKXDILEEKIPXSHLAXYFPSFQGPKQDAEAAKRFILDMYXRMYXGCVDGPEGSKKGARSRRLFSHYXCAXDXQNIRKVFKDVRDSVLARYLDEINLL

SEQ ID NO: 11054 - protein, 52 aa, Homo sapiens
  MOD_RES (6)..(6): Selenocysteine
  MOD_RES (15)..(15): Selenocysteine
MARSLXWRCCPWCLXEDEKAAARVDQEINRILLEQKKQDRGELKLLLLVPGS

SEQ ID NO: 11055 - protein, 23 aa, Homo sapiens
  MOD_RES (4)..(4): Selenocysteine
MGCXLSAEDKAAVERSKMIDRNL

SEQ ID NO: 11056 - protein, 354 aa, Homo sapiens
  MOD_RES (4)..(4): Selenocysteine
  MOD_RES (48)..(48): Selenocysteine
  MOD_RES (77)..(77): Selenocysteine
  MOD_RES (120)..(120): Selenocysteine
  MOD_RES (170)..(170): Selenocysteine
  MOD_RES (177)..(177): Selenocysteine
  MOD_RES (181)..(182): Selenocysteine
  MOD_RES (187)..(187): Selenocysteine
  MOD_RES (190)..(190): Selenocysteine
  MOD_RES (219)..(219): Selenocysteine
  MOD_RES (260)..(260): Selenocysteine
  MOD_RES (262)..(262): Selenocysteine
  MOD_RES (284)..(284): Selenocysteine
  MOD_RES (295)..(295): Selenocysteine
  MOD_RES (316)..(316): Selenocysteine
  MOD_RES (321)..(321): Selenocysteine
  MOD_RES (324)..(324): Selenocysteine
  MOD_RES (327)..(327): Selenocysteine
  MOD_RES (329)..(329): Selenocysteine
  MOD_RES (340)..(340): Selenocysteine
MGCXLSAEDKAAVERSKMIDRNLREDGEKAAREVKLLLLGAGESGKSXIVKQMKIIHEAGYSEEECKQYKAVVYSNXIQSIIAIIRAMGRLKIDFGDSARADDARQLFVLAGAAEEGFMXAELAGVIKRLWKDSGVQACFNRSREYQLNDSAAYYLNDLDRIAQPNYIPXQQDVLRXRVKXXGIVEXHFXFKDLHFKMFDVGGQRSERKKWIHCFEGVXAIIFCVALSDYDLVLAEDEEMNRMHESMKLFDSICNNKWFXDXSIILFLNKKDLFEEKIKKSPLXICYPEYAGSNXYEEAAAYIQCQFEDLNKRKDXKEIYXHFXCAXDXKNVQFVFDAVXDVIIKNNLKDCGLF

SEQ ID NO: 11057 - protein, 41 aa, Homo sapiens
  MOD_RES (25)..(25): Selenocysteine
MKIIHEAGYSEEECKQYKAVVYSNXIQSIIAIIRAMGRLKI

SEQ ID NO: 11058 - protein, 144 aa, Homo sapiens
  MOD_RES (25)..(25): Selenocysteine
  MOD_RES (68)..(68): Selenocysteine
  MOD_RES (118)..(118): Selenocysteine
  MOD_RES (125)..(125): Selenocysteine
  MOD_RES (129)..(130): Selenocysteine
  MOD_RES (135)..(135): Selenocysteine
  MOD_RES (138)..(138): Selenocysteine
MKIIHEAGYSEEECKQYKAVVYSNXIQSIIAIIRAMGRLKIDFGDSARADDARQLFVLAGAAEEGFMXAELAGVIKRLWKDSGVQACFNRSREYQLNDSAAYYLNDLDRIAQPNYIPXQQDVLRXRVKXXGIVEXHFXFKDLHF

SEQ ID NO: 11059 - protein, 302 aa, Homo sapiens
  MOD_RES (25)..(25): Selenocysteine
  MOD_RES (68)..(68): Selenocysteine
  MOD_RES (118)..(118): Selenocysteine
  MOD_RES (125)..(125): Selenocysteine
  MOD_RES (129)..(130): Selenocysteine
  MOD_RES (135)..(135): Selenocysteine
  MOD_RES (138)..(138): Selenocysteine
  MOD_RES (167)..(167): Selenocysteine
  MOD_RES (208)..(208): Selenocysteine
  MOD_RES (210)..(210): Selenocysteine
  MOD_RES (232)..(232): Selenocysteine
  MOD_RES (243)..(243): Selenocysteine
  MOD_RES (264)..(264): Selenocysteine
  MOD_RES (269)..(269): Selenocysteine
  MOD_RES (272)..(272): Selenocysteine
  MOD_RES (275)..(275): Selenocysteine
  MOD_RES (277)..(277): Selenocysteine
  MOD_RES (288)..(288): Selenocysteine
MKIIHEAGYSEEECKQYKAVVYSNXIQSIIAIIRAMGRLKIDFGDSARADDARQLFVLAGAAEEGFMXAELAGVIKRLWKDSGVQACFNRSREYQLNDSAAYYLNDLDRIAQPNYIPXQQDVLRXRVKXXGIVEXHFXFKDLHFKMFDVGGQRSERKKWIHCFEGVXAIIFCVALSDYDLVLAEDEEMNRMHESMKLFDSICNNKWFXDXSIILFLNKKDLFEEKIKKSPLXICYPEYAGSNXYEEAAAYIQCQFEDLNKRKDXKEIYXHFXCAXDXKNVQFVFDAVXDVIIKNNLKDCGLF

SEQ ID NO: 11060 - protein, 355 aa, Homo sapiens
  MOD_RES (4)..(4): Selenocysteine
  MOD_RES (48)..(48): Selenocysteine
  MOD_RES (77)..(77): Selenocysteine
  MOD_RES (113)..(113): Selenocysteine
  MOD_RES (171)..(171): Selenocysteine
  MOD_RES (178)..(178): Selenocysteine
  MOD_RES (182)..(183): Selenocysteine
  MOD_RES (188)..(188): Selenocysteine
  MOD_RES (191)..(191): Selenocysteine
  MOD_RES (220)..(220): Selenocysteine
  MOD_RES (261)..(261): Selenocysteine
  MOD_RES (263)..(263): Selenocysteine
  MOD_RES (280)..(280): Selenocysteine
  MOD_RES (285)..(285): Selenocysteine
  MOD_RES (292)..(292): Selenocysteine
  MOD_RES (317)..(317): Selenocysteine
  MOD_RES (322)..(322): Selenocysteine
  MOD_RES (325)..(325): Selenocysteine
  MOD_RES (328)..(328): Selenocysteine
  MOD_RES (330)..(330): Selenocysteine
  MOD_RES (341)..(341): Selenocysteine
MGCXVSAEDKAAAERSKMIDKNLREDGEKAAREVKLLLLGAGESGKSXIVKQMKIIHEDGYSEEECRQYRAVVYSNXIQSIMAIVKAMGNLQIDFADPSRADDARQLFALSCXAEEQGVLPDDLSGVIRRLWADHGVQACFGRSREYQLNDSAAYYLNDLERIAQSDYIPXQQDVLRXRVKXXGIVEXHFXFKDLHFKMFDVGGQRSERKKWIHCFEGVXAIIFCVALSAYDLVLAEDEEMNRMHESMKLFDSICNNKWFXDXSIILFLNKKDLFEEKIXHSPLXICFPEYXGANKYDEAASYIQSKFEDLNKRKDXKEIYXHFXCAXDXKNVQFVFDAVXDVIIKNNLKDCGLF

SEQ ID NO: 11061 - protein, 142 aa, Homo sapiens
  MOD_RES (4)..(4): Selenocysteine
  MOD_RES (43)..(43): Selenocysteine
  MOD_RES (47)..(47): Selenocysteine
  MOD_RES (55)..(55): Selenocysteine
  MOD_RES (60)..(60): Selenocysteine
  MOD_RES (62)..(62): Selenocysteine
  MOD_RES (76)..(76): Selenocysteine
  MOD_RES (80)..(80): Selenocysteine
  MOD_RES (83)..(83): Selenocysteine
  MOD_RES (88)..(89): Selenocysteine
  MOD_RES (109)..(109): Selenocysteine
  MOD_RES (120)..(120): Selenocysteine
  MOD_RES (133)..(133): Selenocysteine
  MOD_RES (136)..(137): Selenocysteine
  MOD_RES (141)..(142): Selenocysteine
MGCXVSAEDKAAAERSKMIDKNLREDGEKAAREVKLLLLGSSXRMAXPRRNAGSXGRLSXAXPSSPSWPLSKPWAXCRSXLPXPPERXXPGSYLHCPAPPRSKACSLMXCPASSGGSGLXMVCRPALAAQGNXSSXXQLPXX

SEQ ID NO: 11062 - protein, 303 aa, Homo sapiens
  MOD_RES (25)..(25): Selenocysteine
  MOD_RES (61)..(61): Selenocysteine
  MOD_RES (119)..(119): Selenocysteine
  MOD_RES (126)..(126): Selenocysteine
  MOD_RES (130)..(131): Selenocysteine
  MOD_RES (136)..(136): Selenocysteine
  MOD_RES (139)..(139): Selenocysteine
  MOD_RES (168)..(168): Selenocysteine
  MOD_RES (209)..(209): Selenocysteine
  MOD_RES (211)..(211): Selenocysteine
  MOD_RES (228)..(228): Selenocysteine
  MOD_RES (233)..(233): Selenocysteine
  MOD_RES (240)..(240): Selenocysteine
  MOD_RES (265)..(265): Selenocysteine
  MOD_RES (270)..(270): Selenocysteine
  MOD_RES (273)..(273): Selenocysteine
  MOD_RES (276)..(276): Selenocysteine
  MOD_RES (278)..(278): Selenocysteine
  MOD_RES (289)..(289): Selenocysteine
MKIIHEDGYSEEECRQYRAVVYSNXIQSIMAIVKAMGNLQIDFADPSRADDARQLFALSCXAEEQGVLPDDLSGVIRRLWADHGVQACFGRSREYQLNDSAAYYLNDLERIAQSDYIPXQQDVLRXRVKXXGIVEXHFXFKDLHFKMFDVGGQRSERKKWIHCFEGVXAIIFCVALSAYDLVLAEDEEMNRMHESMKLFDSICNNKWFXDXSIILFLNKKDLFEEKIXHSPLXICFPEYXGANKYDEAASYIQSKFEDLNKRKDXKEIYXHFXCAXDXKNVQFVFDAVXDVIIKNNLKDCGLF

SEQ ID NO: 11063 - protein, 318 aa, Homo sapiens
  MOD_RES (11)..(11): Selenocysteine
  MOD_RES (40)..(40): Selenocysteine
  MOD_RES (76)..(76): Selenocysteine
  MOD_RES (134)..(134): Selenocysteine
  MOD_RES (141)..(141): Selenocysteine
  MOD_RES (145)..(146): Selenocysteine
  MOD_RES (151)..(151): Selenocysteine
  MOD_RES (154)..(154): Selenocysteine
  MOD_RES (183)..(183): Selenocysteine
  MOD_RES (224)..(224): Selenocysteine
  MOD_RES (226)..(226): Selenocysteine
  MOD_RES (243)..(243): Selenocysteine
  MOD_RES (248)..(248): Selenocysteine
  MOD_RES (255)..(255): Selenocysteine
  MOD_RES (280)..(280): Selenocysteine
  MOD_RES (285)..(285): Selenocysteine
  MOD_RES (288)..(288): Selenocysteine
  MOD_RES (291)..(291): Selenocysteine
  MOD_RES (293)..(293): Selenocysteine
  MOD_RES (304)..(304): Selenocysteine
MRGAGESGKSXIVKQMKIIHEDGYSEEECRQYRAVVYSNXIQSIMAIVKAMGNLQIDFADPSRADDARQLFALSCXAEEQGVLPDDLSGVIRRLWADHGVQACFGRSREYQLNDSAAYYLNDLERIAQSDYIPXQQDVLRXRVKXXGIVEXHFXFKDLHFKMFDVGGQRSERKKWIHCFEGVXAIIFCVALSAYDLVLAEDEEMNRMHESMKLFDSICNNKWFXDXSIILFLNKKDLFEEKIXHSPLXICFPEYXGANKYDEAASYIQSKFEDLNKRKDXKEIYXHFXCAXDXKNVQFVFDAVXDVIIKNNLKDCGLF

SEQ ID NO: 11064 - protein, 339 aa, Homo sapiens
  MOD_RES (2)..(2): Selenocysteine
  MOD_RES (7)..(7): Selenocysteine
  MOD_RES (11)..(11): Selenocysteine
  MOD_RES (32)..(32): Selenocysteine
  MOD_RES (61)..(61): Selenocysteine
  MOD_RES (97)..(97): Selenocysteine
  MOD_RES (155)..(155): Selenocysteine
  MOD_RES (162)..(162): Selenocysteine
  MOD_RES (166)..(167): Selenocysteine
  MOD_RES (172)..(172): Selenocysteine
  MOD_RES (175)..(175): Selenocysteine
  MOD_RES (204)..(204): Selenocysteine
  MOD_RES (245)..(245): Selenocysteine
  MOD_RES (247)..(247): Selenocysteine
  MOD_RES (264)..(264): Selenocysteine
  MOD_RES (269)..(269): Selenocysteine
  MOD_RES (276)..(276): Selenocysteine
  MOD_RES (301)..(301): Selenocysteine
  MOD_RES (306)..(306): Selenocysteine
  MOD_RES (309)..(309): Selenocysteine
  MOD_RES (312)..(312): Selenocysteine
  MOD_RES (314)..(314): Selenocysteine
  MOD_RES (325)..(325): Selenocysteine
MXEGVKXLGWXKQKGGCHWGRSEGAGESGKSXIVKQMKIIHEDGYSEEECRQYRAVVYSNXIQSIMAIVKAMGNLQIDFADPSRADDARQLFALSCXAEEQGVLPDDLSGVIRRLWADHGVQACFGRSREYQLNDSAAYYLNDLERIAQSDYIPXQQDVLRXRVKXXGIVEXHFXFKDLHFKMFDVGGQRSERKKWIHCFEGVXAIIFCVALSAYDLVLAEDEEMNRMHESMKLFDSICNNKWFXDXSIILFLNKKDLFEEKIXHSPLXICFPEYXGANKYDEAASYIQSKFEDLNKRKDXKEIYXHFXCAXDXKNVQFVFDAVXDVIIKNNLKDCGLF

SEQ ID NO: 11065 - protein, 146 aa, Homo sapiens
  MOD_RES (2)..(2): Selenocysteine
  MOD_RES (7)..(7): Selenocysteine
  MOD_RES (11)..(11): Selenocysteine
  MOD_RES (39)..(39): Selenocysteine
  MOD_RES (135)..(135): Selenocysteine
MXEGVKXLGWXKQKGGCHWGRSEGPWLLRLSVGRRRAAXLLDGVCRASSCQLCPGHHIGMHQLHRCWGVREEHHRQADEDHPRGWLLRGGMPAVPGGCLQQHHPVHHGHCQSHGQPADRLCRPLQSGRRQAAICXVLHRRGARRAP

SEQ ID NO: 11066 - protein, 354 aa, Homo sapiens
  MOD_RES (4)..(4): Selenocysteine
  MOD_RES (48)..(48): Selenocysteine
  MOD_RES (77)..(77): Selenocysteine
  MOD_RES (120)..(120): Selenocysteine
  MOD_RES (170)..(170): Selenocysteine
  MOD_RES (177)..(177): Selenocysteine
  MOD_RES (181)..(182): Selenocysteine
  MOD_RES (187)..(187): Selenocysteine
  MOD_RES (190)..(190): Selenocysteine
  MOD_RES (219)..(219): Selenocysteine
  MOD_RES (260)..(260): Selenocysteine
  MOD_RES (262)..(262): Selenocysteine
  MOD_RES (284)..(284): Selenocysteine
  MOD_RES (291)..(291): Selenocysteine
  MOD_RES (295)..(295): Selenocysteine
  MOD_RES (316)..(316): Selenocysteine
  MOD_RES (321)..(321): Selenocysteine
  MOD_RES (324)..(324): Selenocysteine
  MOD_RES (327)..(327): Selenocysteine
  MOD_RES (329)..(329): Selenocysteine
  MOD_RES (340)..(340): Selenocysteine
MGCXLSAEDKAAVERSKMIDRNLREDGEKAAKEVKLLLLGAGESGKSXIVKQMKIIHEDGYSEDECKQYKVVVYSNXIQSIIAIIRAMGRLKIDFGEAARADDARQLFVLAGSAEEGVMXPELAGVIKRLWRDGGVQACFSRSREYQLNDSASYYLNDLDRISQSNYIPXQQDVLRXRVKXXGIVEXHFXFKDLYFKMFDVGGQRSERKKWIHCFEGVXAIIFCVALSDYDLVLAEDEEMNRMHESMKLFDSICNNKWFXEXSIILFLNKKDLFEEKIKRSPLXICYPEYXGSNXYEEAAAYIQCQFEDLNRRKDXKEIYXHFXCAXDXKNVQFVFDAVXDVIIKNNLKECGLY

SEQ ID NO: 11067 - protein, 174 aa, Homo sapiens
  MOD_RES (22)..(22): Selenocysteine
  MOD_RES (43)..(43): Selenocysteine
  MOD_RES (64)..(64): Selenocysteine
  MOD_RES (99)..(99): Selenocysteine
  MOD_RES (105)..(105): Selenocysteine
  MOD_RES (115)..(115): Selenocysteine
  MOD_RES (130)..(130): Selenocysteine
  MOD_RES (132)..(132): Selenocysteine
  MOD_RES (144)..(144): Selenocysteine
  MOD_RES (149)..(149): Selenocysteine
MFDVGGQRDERRKWIQCFNDVXAIIYVAACSSYNMVIREDNNXNRLRESLDLFESIWNNRWLRXISIILFLNKQDMLAEKVLAGKSKIEDYFPEYANYXVPEDAXPDAGEDPKVXRAKFFIRDLFLRISXAXGDGKHYCYPHFXCAVDXENIRRVFNDCRDIIQRMHLKQYELL

SEQ ID NO: 11068 - protein, 381 aa, Homo sapiens
  MOD_RES (10)..(11): Selenocysteine
  MOD_RES (42)..(42): Selenocysteine
  MOD_RES (57)..(57): Selenocysteine
  MOD_RES (92)..(92): Selenocysteine
  MOD_RES (99)..(99): Selenocysteine
  MOD_RES (125)..(125): Selenocysteine
  MOD_RES (178)..(178): Selenocysteine
  MOD_RES (180)..(180): Selenocysteine
  MOD_RES (191)..(191): Selenocysteine
  MOD_RES (197)..(197): Selenocysteine
  MOD_RES (229)..(229): Selenocysteine
  MOD_RES (250)..(250): Selenocysteine
  MOD_RES (271)..(271): Selenocysteine
  MOD_RES (306)..(306): Selenocysteine
  MOD_RES (312)..(312): Selenocysteine
  MOD_RES (322)..(322): Selenocysteine
  MOD_RES (337)..(337): Selenocysteine
  MOD_RES (339)..(339): Selenocysteine
  MOD_RES (351)..(351): Selenocysteine
  MOD_RES (356)..(356): Selenocysteine
MGCLGGNSKXXEDQGVDEKERREANKKIEKQLQKERLAYKAXHRLLLLGAGESGKSXIVKQMRILHVNGFNPEEKKQKILDIRKNVKDAIVXIVSAMSXIIPPVPLANPENQFRSDYIKSIAPIXDFEYSQEFFDHVKKLWDDEGVKACFERSNEYQLIDCAQYFLERIDSVSLVDYXPXDQDLLRCRVLXSGIFEXRFQVDKVNFHMFDVGGQRDERRKWIQCFNDVXAIIYVAACSSYNMVIREDNNXNRLRESLDLFESIWNNRWLRXISIILFLNKQDMLAEKVLAGKSKIEDYFPEYANYXVPEDAXPDAGEDPKVXRAKFFIRDLFLRISXAXGDGKHYCYPHFXCAVDXENIRRVFNDCRDIIQRMHLKQYELL

SEQ ID NO: 11069 - protein, 458 aa, Homo sapiens
  MOD_RES (48)..(48): Selenocysteine
  MOD_RES (51)..(51): Selenocysteine
  MOD_RES (78)..(78): Selenocysteine
  MOD_RES (119)..(119): Selenocysteine
  MOD_RES (134)..(134): Selenocysteine
  MOD_RES (169)..(169): Selenocysteine
  MOD_RES (176)..(176): Selenocysteine
  MOD_RES (202)..(202): Selenocysteine
  MOD_RES (255)..(255): Selenocysteine
  MOD_RES (257)..(257): Selenocysteine
  MOD_RES (268)..(268): Selenocysteine
  MOD_RES (274)..(274): Selenocysteine
  MOD_RES (306)..(306): Selenocysteine
  MOD_RES (327)..(327): Selenocysteine
  MOD_RES (348)..(348): Selenocysteine
  MOD_RES (383)..(383): Selenocysteine
  MOD_RES (389)..(389): Selenocysteine
  MOD_RES (399)..(399): Selenocysteine
  MOD_RES (414)..(414): Selenocysteine
  MOD_RES (416)..(416): Selenocysteine
  MOD_RES (428)..(428): Selenocysteine
  MOD_RES (433)..(433): Selenocysteine
MGLCYSLRPLLFGGPGDDPCAASEPPVEDAQPAPAPALAPVRAAARDXARXLLPRGGEGSPACARPKADKPKEKRQRXEQLSAEEREAAKEREAVKEARKVSRGIDRMLRDQKRDLQQXHRLLLLGAGESGKSXIVKQMRILHVNGFNPEEKKQKILDIRKNVKDAIVXIVSAMSXIIPPVPLANPENQFRSDYIKSIAPIXDFEYSQEFFDHVKKLWDDEGVKACFERSNEYQLIDCAQYFLERIDSVSLVDYXPXDQDLLRCRVLXSGIFEXRFQVDKVNFHMFDVGGQRDERRKWIQCFNDVXAIIYVAACSSYNMVIREDNNXNRLRESLDLFESIWNNRWLRXISIILFLNKQDMLAEKVLAGKSKIEDYFPEYANYXVPEDAXPDAGEDPKVXRAKFFIRDLFLRISXAXGDGKHYCYPHFXCAVDXENIRRVFNDCRDIIQRMHLKQYELL

SEQ ID NO: 11070 - protein, 179 aa, Homo sapiens
  MOD_RES (31)..(31): Selenocysteine
  MOD_RES (38)..(38): Selenocysteine
  MOD_RES (64)..(64): Selenocysteine
  MOD_RES (117)..(117): Selenocysteine
  MOD_RES (119)..(119): Selenocysteine
  MOD_RES (130)..(130): Selenocysteine
  MOD_RES (136)..(136): Selenocysteine
  MOD_RES (168)..(168): Selenocysteine
MRILHVNGFNPEEKKQKILDIRKNVKDAIVXIVSAMSXIIPPVPLANPENQFRSDYIKSIAPIXDFEYSQEFFDHVKKLWDDEGVKACFERSNEYQLIDCAQYFLERIDSVSLVDYXPXDQDLLRCRVLXSGIFEXRFQVDKVNFHMFDVGGQRDERRKWIQCFNDVXAIIYVAACSSY

SEQ ID NO: 11071 - protein, 145 aa, Homo sapiens
  MOD_RES (3)..(3): Selenocysteine
  MOD_RES (29)..(29): Selenocysteine
  MOD_RES (82)..(82): Selenocysteine
  MOD_RES (84)..(84): Selenocysteine
  MOD_RES (95)..(95): Selenocysteine
  MOD_RES (101)..(101): Selenocysteine
  MOD_RES (133)..(133): Selenocysteine
MSXIIPPVPLANPENQFRSDYIKSIAPIXDFEYSQEFFDHVKKLWDDEGVKACFERSNEYQLIDCAQYFLERIDSVSLVDYXPXDQDLLRCRVLXSGIFEXRFQVDKVNFHMFDVGGQRDERRKWIQCFNDVXAIIYVAACSSYN

SEQ ID NO: 11072 - protein, 54 aa, Homo sapiens
  MOD_RES (1)..(1): Any amino acid
  MOD_RES (2)..(2): Selenocysteine
  MOD_RES (20)..(20): Selenocysteine
  MOD_RES (33)..(33): Selenocysteine
XXNKICWQKKSWQGNQKLKXISQNMQIILFLKXEHQGEAPPLADSQGHLPSRGC

SEQ ID NO: 11073 - protein, 94 aa, Homo sapiens
  MOD_RES (3)..(3): Selenocysteine
  MOD_RES (25)..(25): Selenocysteine
  MOD_RES (32)..(32): Selenocysteine
  MOD_RES (36)..(36): Selenocysteine
  MOD_RES (64)..(64): Selenocysteine
  MOD_RES (67)..(67): Selenocysteine
  MOD_RES (69)..(69): Selenocysteine
  MOD_RES (80)..(80): Selenocysteine
IDXSIILFLNKKDLFGEKIKKSPLXICFPEYXGPNXYEDAAAYIQAQFESKNRSPNKEIYCHMXCAXDXNNIQVVFDAVXDIIIANNLRGCGLY

SEQ ID NO: 11074 - protein, 83 aa, Homo sapiens
  MOD_RES (3)..(3): Selenocysteine
  MOD_RES (30)..(30): Selenocysteine
MDXLGIEYGDKERKADAKMVCDVVSRMEDXEPFSAELLSAMMRLWGDSGIQECFNRSREYQLNDSAKYYLDSLDRIGAADYQP

SEQ ID NO: 11075 - protein, 110 aa, Homo sapiens
  MOD_RES (3)..(3): Selenocysteine
  MOD_RES (30)..(30): Selenocysteine
  MOD_RES (84)..(84): Selenocysteine
  MOD_RES (91)..(91): Selenocysteine
  MOD_RES (95)..(96): Selenocysteine
  MOD_RES (101)..(101): Selenocysteine
  MOD_RES (104)..(104): Selenocysteine
MDXLGIEYGDKERKADAKMVCDVVSRMEDXEPFSAELLSAMMRLWGDSGIQECFNRSREYQLNDSAKYYLDSLDRIGAADYQPXEQDILRXRVKXXGIVEXHFXFKNLHF

SEQ ID NO: 11076 - protein, 54 aa, Homo sapiens
  MOD_RES (4)..(4): Selenocysteine
  MOD_RES (48)..(48): Selenocysteine
MGCXLSAEERAALERSKAIEKNLKEDGISAAKDVKLLLLGAGESGKSXIVKQMK

SEQ ID NO: 11077 - protein, 354 aa, Homo sapiens
  MOD_RES (4)..(4): Selenocysteine
  MOD_RES (48)..(48): Selenocysteine
  MOD_RES (77)..(77): Selenocysteine
  MOD_RES (90)..(90): Selenocysteine
  MOD_RES (117)..(117): Selenocysteine
  MOD_RES (171)..(171): Selenocysteine
  MOD_RES (178)..(178): Selenocysteine
  MOD_RES (182)..(183): Selenocysteine
  MOD_RES (188)..(188): Selenocysteine
  MOD_RES (191)..(191): Selenocysteine
  MOD_RES (220)..(220): Selenocysteine
  MOD_RES (240)..(241): Selenocysteine
  MOD_RES (261)..(261): Selenocysteine
  MOD_RES (263)..(263): Selenocysteine
  MOD_RES (285)..(285): Selenocysteine
  MOD_RES (292)..(292): Selenocysteine
  MOD_RES (298)..(298): Selenocysteine
  MOD_RES (321)..(321): Selenocysteine
  MOD_RES (324)..(324): Selenocysteine
  MOD_RES (327)..(327): Selenocysteine
  MOD_RES (329)..(329): Selenocysteine
  MOD_RES (340)..(340): Selenocysteine
MGCXLSAEERAALERSKAIEKNLKEDGISAAKDVKLLLLGAGESGKSXIVKQMKIIHEDGFSGEDVKQYKPVVYSNXIQSLAAIVRAMDXLGIEYGDKERKADAKMVCDVVSRMEDXEPFSAELLSAMMRLWGDSGIQECFNRSREYQLNDSAKYYLDSLDRIGAADYQPXEQDILRXRVKXXGIVEXHFXFKNLHFRLFDVGGQRSERKKWIHCFEDVXAIIFCVALSGYDQVLHEDEXXNRMHESLKLFDSICNNKWFXDXSIILFLNKKDIFEEKIKKSPLXICFPEYXGPSAFXEAVAYIQAQYESKNKSAHKEIYXHVXCAXDXNNIQFVFDAVXDVIIAKNLRGCGLY

SEQ ID NO: 11078 - protein, 354 aa, Homo sapiens
  MOD_RES (4)..(4): Selenocysteine
  MOD_RES (48)..(48): Selenocysteine
  MOD_RES (77)..(77): Selenocysteine
  MOD_RES (90)..(90): Selenocysteine
  MOD_RES (117)..(117): Selenocysteine
  MOD_RES (171)..(171): Selenocysteine
  MOD_RES (178)..(178): Selenocysteine
  MOD_RES (182)..(183): Selenocysteine
  MOD_RES (188)..(188): Selenocysteine
  MOD_RES (191)..(191): Selenocysteine
  MOD_RES (220)..(220): Selenocysteine
  MOD_RES (240)..(241): Selenocysteine
  MOD_RES (263)..(263): Selenocysteine
  MOD_RES (285)..(285): Selenocysteine
  MOD_RES (292)..(292): Selenocysteine
  MOD_RES (296)..(296): Selenocysteine
  MOD_RES (324)..(324): Selenocysteine
  MOD_RES (327)..(327): Selenocysteine
  MOD_RES (329)..(329): Selenocysteine
  MOD_RES (340)..(340): Selenocysteine
MGCXLSAEERAALERSKAIEKNLKEDGISAAKDVKLLLLGAGESGKSXIVKQMKIIHEDGFSGEDVKQYKPVVYSNXIQSLAAIVRAMDXLGIEYGDKERKADAKMVCDVVSRMEDXEPFSAELLSAMMRLWGDSGIQECFNRSREYQLNDSAKYYLDSLDRIGAADYQPXEQDILRXRVKXXGIVEXHFXFKNLHFRLFDVGGQRSERKKWIHCFEDVXAIIFCVALSGYDQVLHEDEXXNRMHESLMLFDSICNNKFFIDXSIILFLNKKDLFGEKIKKSPLXICFPEYXGPNXYEDAAAYIQAQFESKNRSPNKEIYCHMXCAXDXNNIQVVFDAVXDIIIANNLRGCGLY

SEQ ID NO: 11079 - protein, 129 aa, Homo sapiens
  MOD_RES (9)..(10): Selenocysteine
  MOD_RES (35)..(35): Selenocysteine
  MOD_RES (48)..(48): Selenocysteine
  MOD_RES (75)..(75): Selenocysteine
  MOD_RES (129)..(129): Selenocysteine
MKKLNPAGXXRRIIHEDGFSGEDVKQYKPVVYSNXIQSLAAIVRAMDXLGIEYGDKERKADAKMVCDVVSRMEDXEPFSAELLSAMMRLWGDSGIQECFNRSREYQLNDSAKYYLDSLDRIGAADYQPX

SEQ ID NO: 11080 - protein, 170 aa, Homo sapiens
  MOD_RES (15)..(15): Selenocysteine
  MOD_RES (18)..(18): Selenocysteine
  MOD_RES (25)..(25): Selenocysteine
  MOD_RES (47)..(47): Selenocysteine
  MOD_RES (56)..(56): Selenocysteine
  MOD_RES (67)..(67): Selenocysteine
  MOD_RES (128)..(128): Selenocysteine
  MOD_RES (146)..(146): Selenocysteine
  MOD_RES (157)..(158): Selenocysteine
MGERWADSQLDSRSXHGXGESGKSXFIKQMRIIHGSGYSDEDKRGFXKLVYQNIFXAMQAMIRAMDXLKIPYKYEHNKAHAQLVREVDVEKVSAFENPYVDAIKSLWNDPGIQECYDRRREYQLSDSXKYYLNDLDRVADPAYLPXQQDVLRVRVPXXGIIEYPFDLQSV

SEQ ID NO: 11081 - protein, 359 aa, Homo sapiens
  MOD_RES (2)..(2): Selenocysteine
  MOD_RES (47)..(47): Selenocysteine
  MOD_RES (54)..(54): Selenocysteine
  MOD_RES (76)..(76): Selenocysteine
  MOD_RES (85)..(85): Selenocysteine
  MOD_RES (96)..(96): Selenocysteine
  MOD_RES (157)..(157): Selenocysteine
  MOD_RES (175)..(175): Selenocysteine
  MOD_RES (186)..(187): Selenocysteine
  MOD_RES (224)..(224): Selenocysteine
  MOD_RES (257)..(257): Selenocysteine
  MOD_RES (260)..(260): Selenocysteine
  MOD_RES (329)..(329): Selenocysteine
  MOD_RES (332)..(332): Selenocysteine
  MOD_RES (334)..(334): Selenocysteine
  MOD_RES (347)..(347): Selenocysteine
MXLESIMACCLSEEAKEARRINDEIERQLRRDKRDARRELKLLLLGXGESGKSXFIKQMRIIHGSGYSDEDKRGFXKLVYQNIFXAMQAMIRAMDXLKIPYKYEHNKAHAQLVREVDVEKVSAFENPYVDAIKSLWNDPGIQECYDRRREYQLSDSXKYYLNDLDRVADPAYLPXQQDVLRVRVPXXGIIEYPFDLQSVIFRMVDVGGQRSERRKWIHCFENVXSIMFLVALSEYDQVLVESDNENRMEESKALFRXIIXYPWFQNSSVILFLNKKDLLEEKIMYSHLVDYFPEYDGPQRDAQAAREFILKMFVDLNPDSDKIIYSHFXCAXDXENIRFVFAAVKDXILQLNLKEYNLV

SEQ ID NO: 11082 - protein, 625 aa, Homo sapiens
  MOD_RES (14)..(14): Selenocysteine
  MOD_RES (19)..(19): Selenocysteine
  MOD_RES (31)..(31): Selenocysteine
  MOD_RES (91)..(91): Selenocysteine
  MOD_RES (104)..(104): Selenocysteine
  MOD_RES (120)..(120): Selenocysteine
  MOD_RES (153)..(153): Selenocysteine
  MOD_RES (172)..(173): Selenocysteine
  MOD_RES (187)..(187): Selenocysteine
  MOD_RES (208)..(208): Selenocysteine
  MOD_RES (231)..(231): Selenocysteine
  MOD_RES (256)..(257): Selenocysteine
  MOD_RES (261)..(261): Selenocysteine
  MOD_RES (263)..(263): Selenocysteine
  MOD_RES (270)..(270): Selenocysteine
  MOD_RES (315)..(315): Selenocysteine
  MOD_RES (340)..(340): Selenocysteine
  MOD_RES (349)..(349): Selenocysteine
  MOD_RES (358)..(358): Selenocysteine
  MOD_RES (367)..(367): Selenocysteine
  MOD_RES (379)..(379): Selenocysteine
  MOD_RES (385)..(385): Selenocysteine
  MOD_RES (391)..(391): Selenocysteine
  MOD_RES (397)..(397): Selenocysteine
  MOD_RES (430)..(430): Selenocysteine
  MOD_RES (501)..(502): Selenocysteine
  MOD_RES (510)..(510): Selenocysteine
  MOD_RES (512)..(512): Selenocysteine
  MOD_RES (516)..(516): Selenocysteine
  MOD_RES (519)..(519): Selenocysteine
  MOD_RES (543)..(543): Selenocysteine
  MOD_RES (547)..(547): Selenocysteine
  MOD_RES (607)..(607): Selenocysteine
  MOD_RES (612)..(612): Selenocysteine
  MOD_RES (617)..(617): Selenocysteine
  MOD_RES (621)..(621): Selenocysteine
MARPVDPQRSPDPXFRSSXRHSGKLEPMEAXAHLLRKQCPSRLNSPAWEASGLHWSSLDSPVGSMQALRPSAQHSWSPEPSVVPDQAWEDXALHQKKLCPLSLXSLPREAAVNFSYRSQXLLQEAQVLQGSPELLPRSPKPSGLQRLAPEEAXALPLRRLCHLSLMEKDLGXXAHPRGFPELSHKSXAAASSRQSRPRVRSASLPPRXRLPSGSQAPSAAHPKRLSDLLLXSRAAAPGWRSPDPRSRLAAPPLGSXXLPSXWXAPQSRLXARPSRSPEPQIRESEQRDPQLRRKQQRWKEPLMPRREEKYPLRGXDPLPPGQPQRIPLPGQPLQPQPILXPGQPQKIPXPGQHQPILXPGHSQPIPXPGQPLPPQPIPXPGRPLXPQPIPXPGRPLXPQPIQMPGRPLRLPPPLRLLRPGQPMSPQLRQXQGLPLPQPLLPPGQPKSAGRPLQPLPPGPDARSISDPPAPRSRLPIRLLRGLLARLPGGASPRAAAAAACXXMKGWPAAXMXPAEXSPXMGPPDASAGFSIGEIAAAESPSAXYSAXFSCKPSGAASVDLRVPSPKPRALSRSRRYPWRRSADRCAKKPWRSGPRSAQRRNAVSSSXNNSRXKRWAXCVRXACCF

SEQ ID NO: 11083 - protein, 245 aa, Homo sapiens
  MOD_RES (30)..(30): Selenocysteine
  MOD_RES (47)..(47): Selenocysteine
  MOD_RES (111)..(111): Selenocysteine
  MOD_RES (115)..(115): Selenocysteine
  MOD_RES (123)..(123): Selenocysteine
  MOD_RES (127)..(127): Selenocysteine
  MOD_RES (131)..(131): Selenocysteine
  MOD_RES (134)..(135): Selenocysteine
  MOD_RES (139)..(139): Selenocysteine
  MOD_RES (154)..(154): Selenocysteine
  MOD_RES (160)..(160): Selenocysteine
  MOD_RES (182)..(182): Selenocysteine
  MOD_RES (225)..(225): Selenocysteine
MDRRSRAQQWRRARHNYNDLCPPIGRRAAXALLWLSCSIALLRALAXSNARAQQRAAAQQRRSFLNAHHRSGAQVFPESPESESDHEHEEADLELSLPECLEYEEEFDYEXESEXESEIESEXDFEXEPEXAPXXEPEXEPEDDRGPVVPKHSXFGQSLXQRLHALKLRSPDASPSRAPPSXQEPQSPREGEELKPEDKDPRDPEESKEPKEEKQRRRCKPKKPXRRDASPESPSKKGPIPIRRH

SEQ ID NO: 11084 - protein, 158 aa, Homo sapiens
  MOD_RES (9)..(9): Selenocysteine
  MOD_RES (48)..(48): Selenocysteine
  MOD_RES (83)..(84): Selenocysteine
  MOD_RES (89)..(89): Selenocysteine
  MOD_RES (99)..(99): Selenocysteine
  MOD_RES (114)..(114): Selenocysteine
  MOD_RES (128)..(128): Selenocysteine
  MOD_RES (133)..(133): Selenocysteine
MGCLGNSKXEDQRNEEKAQREANKKIEKQLQEALNLFKSIWNNRWLRXISVILFLNKQDLLAEKVLAGKSKIEDYFPEFARYXXPEDAXPEPGEDPRVXRAKYFIRDEFLRISXASGDGRHYCYPHFXCAVDXENIRRVFNDCRDIIQRMHLRQYELL

SEQ ID NO: 11085 - protein, 379 aa, Homo sapiens
  MOD_RES (9)..(9): Selenocysteine
  MOD_RES (40)..(40): Selenocysteine
  MOD_RES (55)..(55): Selenocysteine
  MOD_RES (75)..(75): Selenocysteine
  MOD_RES (90)..(90): Selenocysteine
  MOD_RES (189)..(189): Selenocysteine
  MOD_RES (195)..(195): Selenocysteine
  MOD_RES (227)..(227): Selenocysteine
  MOD_RES (248)..(248): Selenocysteine
  MOD_RES (269)..(269): Selenocysteine
  MOD_RES (304)..(305): Selenocysteine
  MOD_RES (310)..(310): Selenocysteine
  MOD_RES (320)..(320): Selenocysteine
  MOD_RES (335)..(335): Selenocysteine
  MOD_RES (349)..(349): Selenocysteine
  MOD_RES (354)..(354): Selenocysteine
MGCLGNSKXEDQRNEEKAQREANKKIEKQLQKDKQVYRAXHRLLLLGAGESGKSXIVKQMRILHVNGFNGDEKAXKVQDIKNNLKEAIEXIVAAMSNLVPPVELANPENQFRVDYILSVMNVPDFDFPPEFYEHAKALWEDEGVRACYERSNEYQLIDCAQYFLDKIDVIKQADYVPSDQDLLRCRVLXSGIFEXKFQVDKVNFHMFDVGGQRDERRKWIQCFNDVXAIIFVVASSSYNMVIREDNQXNRLQEALNLFKSIWNNRWLRXISVILFLNKQDLLAEKVLAGKSKIEDYFPEFARYXXPEDAXPEPGEDPRVXRAKYFIRDEFLRISXASGDGRHYCYPHFXCAVDXENIRRVFNDCRDIIQRMHLRQYELL

SEQ ID NO: 11086 - protein, 380 aa, Homo sapiens
  MOD_RES (9)..(9): Selenocysteine
  MOD_RES (40)..(40): Selenocysteine
  MOD_RES (55)..(55): Selenocysteine
  MOD_RES (76)..(76): Selenocysteine
  MOD_RES (91)..(91): Selenocysteine
  MOD_RES (190)..(190): Selenocysteine
  MOD_RES (196)..(196): Selenocysteine
  MOD_RES (228)..(228): Selenocysteine
  MOD_RES (249)..(249): Selenocysteine
  MOD_RES (270)..(270): Selenocysteine
  MOD_RES (305)..(306): Selenocysteine
  MOD_RES (311)..(311): Selenocysteine
  MOD_RES (321)..(321): Selenocysteine
  MOD_RES (336)..(336): Selenocysteine
  MOD_RES (350)..(350): Selenocysteine
  MOD_RES (355)..(355): Selenocysteine
MGCLGNSKXEDQRNEEKAQREANKKIEKQLQKDKQVYRAXHRLLLLGAGESGKSXIVKQMRILHVNGFNGDSEKAXKVQDIKNNLKEAIEXIVAAMSNLVPPVELANPENQFRVDYILSVMNVPDFDFPPEFYEHAKALWEDEGVRACYERSNEYQLIDCAQYFLDKIDVIKQADYVPSDQDLLRCRVLXSGIFEXKFQVDKVNFHMFDVGGQRDERRKWIQCFNDVXAIIFVVASSSYNMVIREDNQXNRLQEALNLFKSIWNNRWLRXISVILFLNKQDLLAEKVLAGKSKIEDYFPEFARYXXPEDAXPEPGEDPRVXRAKYFIRDEFLRISXASGDGRHYCYPHFXCAVDXENIRRVFNDCRDIIQRMHLRQYELL

SEQ ID NO: 11087 - protein, 394 aa, Homo sapiens
  MOD_RES (9)..(9): Selenocysteine
  MOD_RES (40)..(40): Selenocysteine
  MOD_RES (55)..(55): Selenocysteine
  MOD_RES (90)..(90): Selenocysteine
  MOD_RES (105)..(105): Selenocysteine
  MOD_RES (204)..(204): Selenocysteine
  MOD_RES (210)..(210): Selenocysteine
  MOD_RES (242)..(242): Selenocysteine
  MOD_RES (263)..(263): Selenocysteine
  MOD_RES (284)..(284): Selenocysteine
  MOD_RES (319)..(320): Selenocysteine
  MOD_RES (325)..(325): Selenocysteine
  MOD_RES (335)..(335): Selenocysteine
  MOD_RES (350)..(350): Selenocysteine
  MOD_RES (364)..(364): Selenocysteine
  MOD_RES (369)..(369): Selenocysteine
MGCLGNSKXEDQRNEEKAQREANKKIEKQLQKDKQVYRAXHRLLLLGAGESGKSXIVKQMRILHVNGFNGEGGEEDPQAARSNSDGEKAXKVQDIKNNLKEAIEXIVAAMSNLVPPVELANPENQFRVDYILSVMNVPDFDFPPEFYEHAKALWEDEGVRACYERSNEYQLIDCAQYFLDKIDVIKQADYVPSDQDLLRCRVLXSGIFEXKFQVDKVNFHMFDVGGQRDERRKWIQCFNDVXAIIFVVASSSYNMVIREDNQXNRLQEALNLFKSIWNNRWLRXISVILFLNKQDLLAEKVLAGKSKIEDYFPEFARYXXPEDAXPEPGEDPRVXRAKYFIRDEFLRISXASGDGRHYCYPHFXCAVDXENIRRVFNDCRDIIQRMHLRQYELL

SEQ ID NO: 11088 - protein, 87 aa, Homo sapiens
  MOD_RES (9)..(9): Selenocysteine
  MOD_RES (40)..(40): Selenocysteine
  MOD_RES (55)..(55): Selenocysteine
MGCLGNSKXEDQRNEEKAQREANKKIEKQLQKDKQVYRAXHRLLLLGAGESGKSXIVKQMRILHVNGFNGEGGEEDPQAARSNSDGI

SEQ ID NO: 11089 - protein, 395 aa, Homo sapiens
  MOD_RES (9)..(9): Selenocysteine
  MOD_RES (40)..(40): Selenocysteine
  MOD_RES (55)..(55): Selenocysteine
  MOD_RES (91)..(91): Selenocysteine
  MOD_RES (106)..(106): Selenocysteine
  MOD_RES (205)..(205): Selenocysteine
  MOD_RES (211)..(211): Selenocysteine
  MOD_RES (243)..(243): Selenocysteine
  MOD_RES (264)..(264): Selenocysteine
  MOD_RES (285)..(285): Selenocysteine
  MOD_RES (320)..(321): Selenocysteine
  MOD_RES (326)..(326): Selenocysteine
  MOD_RES (336)..(336): Selenocysteine
  MOD_RES (351)..(351): Selenocysteine
  MOD_RES (365)..(365): Selenocysteine
  MOD_RES (370)..(370): Selenocysteine
MGCLGNSKXEDQRNEEKAQREANKKIEKQLQKDKQVYRAXHRLLLLGAGESGKSXIVKQMRILHVNGFNGEGGEEDPQAARSNSDGSEKAXKVQDIKNNLKEAIEXIVAAMSNLVPPVELANPENQFRVDYILSVMNVPDFDFPPEFYEHAKALWEDEGVRACYERSNEYQLIDCAQYFLDKIDVIKQADYVPSDQDLLRCRVLXSGIFEXKFQVDKVNFHMFDVGGQRDERRKWIQCFNDVXAIIFVVASSSYNMVIREDNQXNRLQEALNLFKSIWNNRWLRXISVILFLNKQDLLAEKVLAGKSKIEDYFPEFARYXXPEDAXPEPGEDPRVXRAKYFIRDEFLRISXASGDGRHYCYPHFXCAVDXENIRRVFNDCRDIIQRMHLRQYELL

SEQ ID NO: 11090 - protein, 720 aa, Homo sapiens
  MOD_RES (51)..(51): Selenocysteine
  MOD_RES (117)..(117): Selenocysteine
  MOD_RES (223)..(223): Selenocysteine
  MOD_RES (267)..(267): Selenocysteine
  MOD_RES (296)..(296): Selenocysteine
  MOD_RES (321)..(321): Selenocysteine
  MOD_RES (390)..(390): Selenocysteine
  MOD_RES (407)..(407): Selenocysteine
  MOD_RES (415)..(415): Selenocysteine
  MOD_RES (482)..(482): Selenocysteine
  MOD_RES (498)..(498): Selenocysteine
  MOD_RES (505)..(505): Selenocysteine
  MOD_RES (542)..(542): Selenocysteine
  MOD_RES (546)..(546): Selenocysteine
  MOD_RES (585)..(585): Selenocysteine
  MOD_RES (683)..(683): Selenocysteine
  MOD_RES (698)..(698): Selenocysteine
  MOD_RES (711)..(711): Selenocysteine
  MOD_RES (715)..(715): Selenocysteine
MGVRNCLYGNNMSGQRDIPPEIGEQPEQPPLEAPGAAAPGAGPSPAEEMEXEPPHNEPIPVENDGEACGPPEVSRPNFQVLNPAFREAGAHGSYSPPPEEAMPFEAEQPSLGGFWPXLEQPGFPSGVHAGLEAFGPALMEPGAFSGARPGLGGYSPPPEEAMPFEFDQPAQRGCSQLLLQVPDLAPGGPGAAGVPGAPPEEPQALRPAKAGSRGGYSPPPEEXMPFELDGEGFGDDSPPPGLSRVIAQVDGSSQFAAVAASSAVRLXPAANAPPLWVPGAIGSPSQEAVRPPSNFXGSSPWMEISGPPFEIGSAPAGVDDXPVNMDSPPIALDGPPIKVSGAPDKRERAERPPVEEEAAEMEGAADAAEGGKVPSPGYGSPAAGAASADXAARAAPAAPADPDSGAXPEDPDSGXAPADPDSGAFAADPDSGAAPAAPADPDSGAAPDAPADPDSGAAPDAPADPDAGAAPEAPAAPAAAEXRAAHVAPAAPDAGAPXAPAASAXRAAQVRRAASAAPASGARRKIHLRPPSPEIQAADPPXPRPXRASAWRGKSESSRGRRVYYDEGVASSDDDSSGDESDDGXSGCLRWFQHRRNRRRRKPQRNLLRNFLVQAFGGCFGRSESPQPKASRSLKVKKVPLAEKRRQMRKEALEKRAQKRAEKKRSKLIDKQLQDEKMGYMCXHRLLLLGRKVVPSDXEGRFRLDRPAPAXVSWXGRGFR

SEQ ID NO: 11091 - protein, 1023 aa, Homo sapiens
  MOD_RES (51)..(51): Selenocysteine
  MOD_RES (117)..(117): Selenocysteine
  MOD_RES (223)..(223): Selenocysteine
  MOD_RES (267)..(267): Selenocysteine
  MOD_RES (296)..(296): Selenocysteine
  MOD_RES (321)..(321): Selenocysteine
  MOD_RES (390)..(390): Selenocysteine
  MOD_RES (407)..(407): Selenocysteine
  MOD_RES (415)..(415): Selenocysteine
  MOD_RES (482)..(482): Selenocysteine
  MOD_RES (498)..(498): Selenocysteine
  MOD_RES (505)..(505): Selenocysteine
  MOD_RES (542)..(542): Selenocysteine
  MOD_RES (546)..(546): Selenocysteine
  MOD_RES (585)..(585): Selenocysteine
  MOD_RES (683)..(683): Selenocysteine
  MOD_RES (698)..(698): Selenocysteine
  MOD_RES (719)..(719): Selenocysteine
  MOD_RES (734)..(734): Selenocysteine
  MOD_RES (833)..(833): Selenocysteine
  MOD_RES (839)..(839): Selenocysteine
  MOD_RES (871)..(871): Selenocysteine
  MOD_RES (892)..(892): Selenocysteine
  MOD_RES (913)..(913): Selenocysteine
  MOD_RES (948)..(949): Selenocysteine
  MOD_RES (954)..(954): Selenocysteine
  MOD_RES (964)..(964): Selenocysteine
  MOD_RES (979)..(979): Selenocysteine
  MOD_RES (993)..(993): Selenocysteine
  MOD_RES (998)..(998): Selenocysteine
MGVRNCLYGNNMSGQRDIPPEIGEQPEQPPLEAPGAAAPGAGPSPAEEMEXEPPHNEPIPVENDGEACGPPEVSRPNFQVLNPAFREAGAHGSYSPPPEEAMPFEAEQPSLGGFWPXLEQPGFPSGVHAGLEAFGPALMEPGAFSGARPGLGGYSPPPEEAMPFEFDQPAQRGCSQLLLQVPDLAPGGPGAAGVPGAPPEEPQALRPAKAGSRGGYSPPPEEXMPFELDGEGFGDDSPPPGLSRVIAQVDGSSQFAAVAASSAVRLXPAANAPPLWVPGAIGSPSQEAVRPPSNFXGSSPWMEISGPPFEIGSAPAGVDDXPVNMDSPPIALDGPPIKVSGAPDKRERAERPPVEEEAAEMEGAADAAEGGKVPSPGYGSPAAGAASADXAARAAPAAPADPDSGAXPEDPDSGXAPADPDSGAFAADPDSGAAPAAPADPDSGAAPDAPADPDSGAAPDAPADPDAGAAPEAPAAPAAAEXRAAHVAPAAPDAGAPXAPAASAXRAAQVRRAASAAPASGARRKIHLRPPSPEIQAADPPXPRPXRASAWRGKSESSRGRRVYYDEGVASSDDDSSGDESDDGXSGCLRWFQHRRNRRRRKPQRNLLRNFLVQAFGGCFGRSESPQPKASRSLKVKKVPLAEKRRQMRKEALEKRAQKRAEKKRSKLIDKQLQDEKMGYMCXHRLLLLGAGESGKSXIVKQMRILHVNGFNGDSEKAXKVQDIKNNLKEAIEXIVAAMSNLVPPVELANPENQFRVDYILSVMNVPDFDFPPEFYEHAKALWEDEGVRACYERSNEYQLIDCAQYFLDKIDVIKQADYVPSDQDLLRCRVLXSGIFEXKFQVDKVNFHMFDVGGQRDERRKWIQCFNDVXAIIFVVASSSYNMVIREDNQXNRLQEALNLFKSIWNNRWLRXISVILFLNKQDLLAEKVLAGKSKIEDYFPEFARYXXPEDAXPEPGEDPRVXRAKYFIRDEFLRISXASGDGRHYCYPHFXCAVDXENIRRVFNDCRDIIQRMHLRQYELL

SEQ ID NO: 11092 - protein, 1037 aa, Homo sapiens
  MOD_RES (51)..(51): Selenocysteine
  MOD_RES (117)..(117): Selenocysteine
  MOD_RES (223)..(223): Selenocysteine
  MOD_RES (267)..(267): Selenocysteine
  MOD_RES (296)..(296): Selenocysteine
  MOD_RES (321)..(321): Selenocysteine
  MOD_RES (390)..(390): Selenocysteine
  MOD_RES (407)..(407): Selenocysteine
  MOD_RES (415)..(415): Selenocysteine
  MOD_RES (482)..(482): Selenocysteine
  MOD_RES (498)..(498): Selenocysteine
  MOD_RES (505)..(505): Selenocysteine
  MOD_RES (542)..(542): Selenocysteine
  MOD_RES (546)..(546): Selenocysteine
  MOD_RES (585)..(585): Selenocysteine
  MOD_RES (683)..(683): Selenocysteine
  MOD_RES (698)..(698): Selenocysteine
  MOD_RES (733)..(733): Selenocysteine
  MOD_RES (748)..(748): Selenocysteine
  MOD_RES (847)..(847): Selenocysteine
  MOD_RES (853)..(853): Selenocysteine
  MOD_RES (885)..(885): Selenocysteine
  MOD_RES (906)..(906): Selenocysteine
  MOD_RES (927)..(927): Selenocysteine
  MOD_RES (962)..(963): Selenocysteine
  MOD_RES (968)..(968): Selenocysteine
  MOD_RES (978)..(978): Selenocysteine
  MOD_RES (993)..(993): Selenocysteine
  MOD_RES (1007)..(1007): Selenocysteine
  MOD_RES (1012)..(1012): Selenocysteine
MGVRNCLYGNNMSGQRDIPPEIGEQPEQPPLEAPGAAAPGAGPSPAEEMEXEPPHNEPIPVENDGEACGPPEVSRPNFQVLNPAFREAGAHGSYSPPPEEAMPFEAEQPSLGGFWPXLEQPGFPSGVHAGLEAFGPALMEPGAFSGARPGLGGYSPPPEEAMPFEFDQPAQRGCSQLLLQVPDLAPGGPGAAGVPGAPPEEPQALRPAKAGSRGGYSPPPEEXMPFELDGEGFGDDSPPPGLSRVIAQVDGSSQFAAVAASSAVRLXPAANAPPLWVPGAIGSPSQEAVRPPSNFXGSSPWMEISGPPFEIGSAPAGVDDXPVNMDSPPIALDGPPIKVSGAPDKRERAERPPVEEEAAEMEGAADAAEGGKVPSPGYGSPAAGAASADXAARAAPAAPADPDSGAXPEDPDSGXAPADPDSGAFAADPDSGAAPAAPADPDSGAAPDAPADPDSGAAPDAPADPDAGAAPEAPAAPAAAEXRAAHVAPAAPDAGAPXAPAASAXRAAQVRRAASAAPASGARRKIHLRPPSPEIQAADPPXPRPXRASAWRGKSESSRGRRVYYDEGVASSDDDSSGDESDDGXSGCLRWFQHRRNRRRRKPQRNLLRNFLVQAFGGCFGRSESPQPKASRSLKVKKVPLAEKRRQMRKEALEKRAQKRAEKKRSKLIDKQLQDEKMGYMCXHRLLLLGAGESGKSXIVKQMRILHVNGFNGEGGEEDPQAARSNSDGEKAXKVQDIKNNLKEAIEXIVAAMSNLVPPVELANPENQFRVDYILSVMNVPDFDFPPEFYEHAKALWEDEGVRACYERSNEYQLIDCAQYFLDKIDVIKQADYVPSDQDLLRCRVLXSGIFEXKFQVDKVNFHMFDVGGQRDERRKWIQCFNDVXAIIFVVASSSYNMVIREDNQXNRLQEALNLFKSIWNNRWLRXISVILFLNKQDLLAEKVLAGKSKIEDYFPEFARYXXPEDAXPEPGEDPRVXRAKYFIRDEFLRISXASGDGRHYCYPHFXCAVDXENIRRVFNDCRDIIQRMHLRQYELL

SEQ ID NO: 11093 - protein, 120 aa, Homo sapiens
  MOD_RES (31)..(31): Selenocysteine
  MOD_RES (46)..(46): Selenocysteine
MRILHVNGFNGEGGEEDPQAARSNSDGEKAXKVQDIKNNLKEAIEXIVAAMSNLVPPVELANPENQFRVDYILSVMNVPDFDFPPEFYEHAKALWEDEGVRACYERSNEYQLIDCAQYFL

SEQ ID NO: 11094 - protein, 160 aa, Homo sapiens
  MOD_RES (31)..(31): Selenocysteine
  MOD_RES (46)..(46): Selenocysteine
  MOD_RES (145)..(145): Selenocysteine
  MOD_RES (151)..(151): Selenocysteine
MRILHVNGFNGEGGEEDPQAARSNSDGEKAXKVQDIKNNLKEAIEXIVAAMSNLVPPVELANPENQFRVDYILSVMNVPDFDFPPEFYEHAKALWEDEGVRACYERSNEYQLIDCAQYFLDKIDVIKQADYVPSDQDLLRCRVLXSGIFEXKFQVDKVNF

SEQ ID NO: 11095 - protein, 166 aa, Homo sapiens
  MOD_RES (32)..(32): Selenocysteine
  MOD_RES (36)..(36): Selenocysteine
  MOD_RES (44)..(44): Selenocysteine
  MOD_RES (48)..(48): Selenocysteine
  MOD_RES (52)..(52): Selenocysteine
  MOD_RES (55)..(56): Selenocysteine
  MOD_RES (60)..(60): Selenocysteine
  MOD_RES (75)..(75): Selenocysteine
  MOD_RES (81)..(81): Selenocysteine
  MOD_RES (103)..(103): Selenocysteine
  MOD_RES (146)..(146): Selenocysteine
PESESDHEHEEADLELSLPECLEYEEEFDYEXESEXESEIESEXDFEXEPEXAPXXEPEXEPEDDRGPVVPKHSXFGQSLXQRLHALKLRSPDASPSRAPPSXQEPQSPREGEELKPEDKDPRDPEESKEPKEEKQRRRCKPKKPXRRDASPESPSKKGPIPIRRH

SEQ ID NO: 11096 - protein, 193 aa, Homo sapiens
  MOD_RES (56)..(56): Selenocysteine
  MOD_RES (71)..(71): Selenocysteine
  MOD_RES (107)..(107): Selenocysteine
  MOD_RES (122)..(122): Selenocysteine
PKASRSLKVKKVPLAEKRRQMRKEALEKRAQKRAEKKRSKLIDKQLQDEKMGYMCXHRLLLLGAGESGKSXIVKQMRILHVNGFNGEGGEEDPQAARSNSDGSEKAXKVQDIKNNLKEAIEXIVAAMSNLVPPVELANPENQFRVDYILSVMNVPDFDFPPEFYEHAKALWEDEGVRACYERSNEYQLIDCAQ

SEQ ID NO: 11097 - protein, 61 aa, Homo sapiens
  MOD_RES (29)..(29): Selenocysteine
  MOD_RES (44)..(44): Selenocysteine
QRNEEKAQREANKKIEKQLQKDKQVYRAXHRLLLLGAGESGKSXIVKQMRILHVNGFNGEI

SEQ ID NO: 11098 - protein, 199 aa, Homo sapiens
  MOD_RES (1)..(1): Any amino acid
  MOD_RES (70)..(70): Selenocysteine
  MOD_RES (85)..(85): Selenocysteine
  MOD_RES (105)..(105): Selenocysteine
  MOD_RES (120)..(120): Selenocysteine
XAFGGCFGRSESPQPKASRSLKVKKVPLAEKRRQMRKEALEKRAQKRAEKKRSKLIDKQLQDEKMGYMCXHRLLLLGAGESGKSXIVKQMRILHVNGFNGDEKAXKVQDIKNNLKEAIEXIVAAMSNLVPPVELANPENQFRVDYILSVMNVPDFDFPPEFYEHAKALWEDEGVRACYERSNEYQLIDCAQYFLDKIDV

SEQ ID NO: 11099 - protein, 113 aa, Homo sapiens
  MOD_RES (1)..(3): Selenocysteine
  MOD_RES (7)..(7): Selenocysteine
  MOD_RES (22)..(22): Selenocysteine
  MOD_RES (28)..(28): Selenocysteine
  MOD_RES (50)..(50): Selenocysteine
  MOD_RES (93)..(93): Selenocysteine
XXXEPEXEPEDDRGPVVPKHSXFGQSLXQRLHALKLRSPDASPSRAPPSXQEPQSPREGEELKPEDKDPRDPEESKEPKEEKQRRRCKPKKPXRRDASPESPSKKGPIPIRRH

SEQ ID NO: 11100 - protein, 93 aa, Homo sapiens
  MOD_RES (1)..(1): Any amino acid
  MOD_RES (46)..(46): Selenocysteine
  MOD_RES (61)..(61): Selenocysteine
XVPLAEKRRQMRKEALEKRAQKRAEKKRSKLIDKQLQDEKMGYMCXHRLLLLGAGESGKSXIVKQMRILHVNGFNGEGGEEDPQAARSNSDGI

SEQ ID NO: 11101 - protein, 350 aa, Homo sapiens
  MOD_RES (29)..(29): Selenocysteine
  MOD_RES (44)..(44): Selenocysteine
  MOD_RES (73)..(73): Selenocysteine
  MOD_RES (85)..(86): Selenocysteine
  MOD_RES (109)..(109): Selenocysteine
  MOD_RES (114)..(114): Selenocysteine
  MOD_RES (160)..(160): Selenocysteine
  MOD_RES (166)..(166): Selenocysteine
  MOD_RES (177)..(178): Selenocysteine
  MOD_RES (183)..(183): Selenocysteine
  MOD_RES (215)..(215): Selenocysteine
  MOD_RES (257)..(258): Selenocysteine
  MOD_RES (291)..(291): Selenocysteine
  MOD_RES (320)..(320): Selenocysteine
  MOD_RES (323)..(323): Selenocysteine
  MOD_RES (325)..(325): Selenocysteine
  MOD_RES (336)..(336): Selenocysteine
MGAGASAEEKHSRELEKKLKEDAEKDARXVKLLLLGAGESGKSXIVKQMKIIHQDGYSLEECLEFIAIIYGNXLQSILAIVRAMXXLNIQYGDSARQDDARKLMHMADXIEEGXMPKEMSDIIQRLWKDSGIQACFERASEYQLNDSAGYYLSDLERLVXPGYVPXEQDVLRSRVKXXGIIEXQFSFKDLNFRMFDVGGQRSERKKWIHCFEGVXCIIFIAALSAYDMVLVEDDEVNRMHESLHLFNSICNHRYFAXXSIVLFLNKKDVFFEKIKKAHLSICFPDYDGPNXYEDAGNYIKVQFLELNMRRDVKEIYSHMXCAXDXQNVKFVFDAVXDIIIKENLKDCGLF

SEQ ID NO: 11102 - protein, 130 aa, Homo sapiens
  MOD_RES (25)..(25): Selenocysteine
  MOD_RES (37)..(38): Selenocysteine
  MOD_RES (61)..(61): Selenocysteine
  MOD_RES (66)..(66): Selenocysteine
  MOD_RES (112)..(112): Selenocysteine
  MOD_RES (118)..(118): Selenocysteine
  MOD_RES (129)..(130): Selenocysteine
MKIIHQDGYSLEECLEFIAIIYGNXLQSILAIVRAMXXLNIQYGDSARQDDARKLMHMADXIEEGXMPKEMSDIIQRLWKDSGIQACFERASEYQLNDSAGYYLSDLERLVXPGYVPXEQDVLRSRVKXX

SEQ ID NO: 11103 - protein, 124 aa, Homo sapiens
  MOD_RES (33)..(33): Selenocysteine
  MOD_RES (48)..(48): Selenocysteine
  MOD_RES (89)..(90): Selenocysteine
  MOD_RES (118)..(118): Selenocysteine
MGSGASAEDKELAKRSKELEKKLQEDADKEAKXVKLLLLGAGESGKSXIVKQMKIIHQDGYSPEECLEFKAIIYGNVLQSILAIIRAMXXLGIDYAEPSCADDGRQLNNLADSIEEGXMPPELV

SEQ ID NO: 11104 - protein, 354 aa, Homo sapiens
  MOD_RES (33)..(33): Selenocysteine
  MOD_RES (48)..(48): Selenocysteine
  MOD_RES (89)..(90): Selenocysteine
  MOD_RES (118)..(118): Selenocysteine
  MOD_RES (163)..(163): Selenocysteine
  MOD_RES (181)..(182): Selenocysteine
  MOD_RES (187)..(187): Selenocysteine
  MOD_RES (219)..(219): Selenocysteine
  MOD_RES (262)..(262): Selenocysteine
  MOD_RES (324)..(324): Selenocysteine
  MOD_RES (327)..(327): Selenocysteine
  MOD_RES (329)..(329): Selenocysteine
  MOD_RES (340)..(340): Selenocysteine
MGSGASAEDKELAKRSKELEKKLQEDADKEAKXVKLLLLGAGESGKSXIVKQMKIIHQDGYSPEECLEFKAIIYGNVLQSILAIIRAMXXLGIDYAEPSCADDGRQLNNLADSIEEGXMPPELVEVIRRLWKDGGVQACFERAAEYQLNDSASYYLNQLERIXDPEYLPSEQDVLRSRVKXXGIIEXKFSVKDLNFRMFDVGGQRSERKKWIHCFEGVXCIIFCAALSAYDMVLVEDDEVNRMHESLHLFNSICNHKFFAAXSIVLFLNKKDLFEEKIKKVHLSICFPEYDGNNSYDDAGNYIKSQFLDLNMRKDVKEIYSHMXCAXDXQNVKFVFDAVXDIIIKENLKDCGLF

SEQ ID NO: 11105 - protein, 354 aa, Homo sapiens
  MOD_RES (33)..(33): Selenocysteine
  MOD_RES (48)..(48): Selenocysteine
  MOD_RES (77)..(77): Selenocysteine
  MOD_RES (89)..(90): Selenocysteine
  MOD_RES (113)..(113): Selenocysteine
  MOD_RES (120)..(120): Selenocysteine
  MOD_RES (163)..(163): Selenocysteine
  MOD_RES (181)..(182): Selenocysteine
  MOD_RES (187)..(187): Selenocysteine
  MOD_RES (219)..(219): Selenocysteine
  MOD_RES (261)..(262): Selenocysteine
  MOD_RES (279)..(279): Selenocysteine
  MOD_RES (291)..(291): Selenocysteine
  MOD_RES (295)..(295): Selenocysteine
  MOD_RES (324)..(324): Selenocysteine
  MOD_RES (327)..(327): Selenocysteine
  MOD_RES (329)..(329): Selenocysteine
  MOD_RES (340)..(340): Selenocysteine
MGSGISSESKESAKRSKELEKKLQEDAERDARXVKLLLLGAGESGKSXIVKQMKIIHKNGYSEQECMEFKAVIYSNXLQSILAIVKAMXXLGIDYVNPRSAEDQRQLYAMANXLEDGGMXPQLAEVIKRLWRDPGIQACFERASEYQLNDSAAYYLNDLDRIXASGYVPNEQDVLHSRVKXXGIIEXQFSFKDLHFRMFDVGGQRSERKKWIHCFEGVXCIIFCAALSAYDMVLVEDEEVNRMHESLHLFNSICNHKYFSXXSIVLFLNKKDIFQEKVXKVHLSICFPEYXGPNXFEDAGNYIKNQFLDLNLKKEDKEIYSHMXCAXDXQNVKFVFDAVXDIIIKENLKDCGLF

SEQ ID NO: 11106 - protein, 355 aa, Homo sapiens
  MOD_RES (41)..(41): Selenocysteine
  MOD_RES (48)..(48): Selenocysteine
  MOD_RES (82)..(82): Selenocysteine
  MOD_RES (111)..(111): Selenocysteine
  MOD_RES (121)..(121): Selenocysteine
  MOD_RES (171)..(171): Selenocysteine
  MOD_RES (182)..(183): Selenocysteine
  MOD_RES (191)..(191): Selenocysteine
  MOD_RES (196)..(196): Selenocysteine
  MOD_RES (220)..(220): Selenocysteine
  MOD_RES (241)..(241): Selenocysteine
  MOD_RES (263)..(263): Selenocysteine
  MOD_RES (285)..(285): Selenocysteine
  MOD_RES (296)..(296): Selenocysteine
  MOD_RES (317)..(317): Selenocysteine
  MOD_RES (325)..(325): Selenocysteine
  MOD_RES (328)..(328): Selenocysteine
  MOD_RES (330)..(330): Selenocysteine
  MOD_RES (341)..(341): Selenocysteine
MGCRQSSEEKEAARRSRRIDRHLRSESQRQRREIKLLLLGXSNSGKSXIVKQMKIIHSGGFNLEACKEYKPLIIYNAIDSLXRIIRALAALRIDFHNPDRAYDAVQLFALXGPAESKGEIXPELLGVMRRLWADPGAQACFSRSSEYHLEDNAAYYLNDLERIAAADYIPXVEDILRSRDMXXGIVENKFXFKELXFKMVDVGGQRSERKKWIHCFEGVXAIIFCVELSGYDLKLYEDNQXSRMAESLRLFDSICNNNWFINXSLILFLNKKDLLAEKIRRIPLXICFPEYKGQNXYEEAAVYIQRQFEDLNRNKEXKEIYSHFXCAXDXSNIQFVFDAVXDVIIQNNLKYIGLC

SEQ ID NO: 11107 - protein, 108 aa, Homo sapiens
  MOD_RES (29)..(29): Selenocysteine
  MOD_RES (34)..(34): Selenocysteine
  MOD_RES (47)..(47): Selenocysteine
  MOD_RES (50)..(50): Selenocysteine
  MOD_RES (65)..(65): Selenocysteine
  MOD_RES (86)..(87): Selenocysteine
  MOD_RES (102)..(102): Selenocysteine
MSELDQLRQEAEQLKNQIRDARKACADAXLSQIXNNIDPVGRIQMRXRRXLRGHLAKIYAMHWGXDSRLLVSASQDGKLIIWDSYXXNKVHAIPLRSSWVMXCAYAPS

SEQ ID NO: 11108 - protein, 165 aa, Homo sapiens
  MOD_RES (29)..(29): Selenocysteine
  MOD_RES (34)..(34): Selenocysteine
  MOD_RES (47)..(47): Selenocysteine
  MOD_RES (50)..(50): Selenocysteine
  MOD_RES (65)..(65): Selenocysteine
  MOD_RES (86)..(87): Selenocysteine
  MOD_RES (102)..(102): Selenocysteine
  MOD_RES (128)..(128): Selenocysteine
  MOD_RES (143)..(143): Selenocysteine
  MOD_RES (159)..(159): Selenocysteine
  MOD_RES (164)..(165): Selenocysteine
MSELDQLRQEAEQLKNQIRDARKACADAXLSQIXNNIDPVGRIQMRXRRXLRGHLAKIYAMHWGXDSRLLVSASQDGKLIIWDSYXXNKVHAIPLRSSWVMXCAYAPSGNYVACGGLDNICSIYNLKXREGNVRVSRELAGHXGYLSCCRFLDDNQIVXSSGDXX

SEQ ID NO: 11109 - protein, 340 aa, Homo sapiens
  MOD_RES (29)..(29): Selenocysteine
  MOD_RES (34)..(34): Selenocysteine
  MOD_RES (47)..(47): Selenocysteine
  MOD_RES (50)..(50): Selenocysteine
  MOD_RES (65)..(65): Selenocysteine
  MOD_RES (86)..(87): Selenocysteine
  MOD_RES (102)..(102): Selenocysteine
  MOD_RES (128)..(128): Selenocysteine
  MOD_RES (143)..(143): Selenocysteine
  MOD_RES (159)..(159): Selenocysteine
  MOD_RES (164)..(165): Selenocysteine
  MOD_RES (173)..(173): Selenocysteine
  MOD_RES (177)..(179): Selenocysteine
  MOD_RES (181)..(181): Selenocysteine
  MOD_RES (184)..(184): Selenocysteine
  MOD_RES (196)..(196): Selenocysteine
  MOD_RES (221)..(221): Selenocysteine
  MOD_RES (223)..(223): Selenocysteine
  MOD_RES (243)..(243): Selenocysteine
  MOD_RES (249)..(249): Selenocysteine
  MOD_RES (263)..(263): Selenocysteine
  MOD_RES (274)..(274): Selenocysteine
  MOD_RES (321)..(321): Selenocysteine
  MOD_RES (329)..(329): Selenocysteine
MSELDQLRQEAEQLKNQIRDARKACADAXLSQIXNNIDPVGRIQMRXRRXLRGHLAKIYAMHWGXDSRLLVSASQDGKLIIWDSYXXNKVHAIPLRSSWVMXCAYAPSGNYVACGGLDNICSIYNLKXREGNVRVSRELAGHXGYLSCCRFLDDNQIVXSSGDXXCALWDIEXGQQXXXFXGHXGDVMSLSLAPDXRLFVSGACDASAKLWDVREGMCRQXFXGHESDINAICFFPNGNAFAXGSDDAXCRLFDLRADQELMXYSHDNIICGIXSVSFSKSGRLLLAGYDDFNCNVWDALKADRAGVLAGHDNRVSCLGVXDDGMAVAXGSWDSFLKIWN

SEQ ID NO: 11110 - protein, 163 aa, Homo sapiens
  MOD_RES (21)..(21): Selenocysteine
  MOD_RES (34)..(34): Selenocysteine
  MOD_RES (37)..(37): Selenocysteine
  MOD_RES (52)..(52): Selenocysteine
  MOD_RES (73)..(74): Selenocysteine
  MOD_RES (89)..(89): Selenocysteine
  MOD_RES (115)..(115): Selenocysteine
  MOD_RES (130)..(130): Selenocysteine
  MOD_RES (146)..(146): Selenocysteine
  MOD_RES (151)..(152): Selenocysteine
  MOD_RES (160)..(160): Selenocysteine
MSELDQLRQEAEQLKNQIRIXNNIDPVGRIQMRXRRXLRGHLAKIYAMHWGXDSRLLVSASQDGKLIIWDSYXXNKVHAIPLRSSWVMXCAYAPSGNYVACGGLDNICSIYNLKXREGNVRVSRELAGHXGYLSCCRFLDDNQIVXSSGDXXCALWDIEXGQQ

SEQ ID NO: 11111 - protein, 240 aa, Homo sapiens
  MOD_RES (2)..(2): Selenocysteine
  MOD_RES (28)..(28): Selenocysteine
  MOD_RES (43)..(43): Selenocysteine
  MOD_RES (59)..(59): Selenocysteine
  MOD_RES (64)..(65): Selenocysteine
  MOD_RES (73)..(73): Selenocysteine
  MOD_RES (77)..(79): Selenocysteine
  MOD_RES (81)..(81): Selenocysteine
  MOD_RES (84)..(84): Selenocysteine
  MOD_RES (96)..(96): Selenocysteine
  MOD_RES (121)..(121): Selenocysteine
  MOD_RES (123)..(123): Selenocysteine
  MOD_RES (143)..(143): Selenocysteine
  MOD_RES (149)..(149): Selenocysteine
  MOD_RES (163)..(163): Selenocysteine
  MOD_RES (174)..(174): Selenocysteine
  MOD_RES (221)..(221): Selenocysteine
  MOD_RES (229)..(229): Selenocysteine
MXCAYAPSGNYVACGGLDNICSIYNLKXREGNVRVSRELAGHXGYLSCCRFLDDNQIVXSSGDXXCALWDIEXGQQXXXFXGHXGDVMSLSLAPDXRLFVSGACDASAKLWDVREGMCRQXFXGHESDINAICFFPNGNAFAXGSDDAXCRLFDLRADQELMXYSHDNIICGIXSVSFSKSGRLLLAGYDDFNCNVWDALKADRAGVLAGHDNRVSCLGVXDDGMAVAXGSWDSFLKIWN

SEQ ID NO: 11112 - protein, 94 aa, Homo sapiens
  MOD_RES (2)..(2): Selenocysteine
  MOD_RES (19)..(19): Selenocysteine
  MOD_RES (87)..(87): Selenocysteine
MXAPCPPPPPDPQFVLRGXQSPVHALHFCEGAQAQGRPLLFSGQGRDLKLCLWDLAEGRSAVVDSVCLESVGFCRSSILAGGQPRWXLAVPGRG

SEQ ID NO: 11113 - protein, 212 aa, Homo sapiens
  MOD_RES (2)..(2): Selenocysteine
  MOD_RES (19)..(19): Selenocysteine
  MOD_RES (56)..(56): Selenocysteine
  MOD_RES (61)..(62): Selenocysteine
  MOD_RES (72)..(72): Selenocysteine
  MOD_RES (76)..(76): Selenocysteine
  MOD_RES (129)..(129): Selenocysteine
  MOD_RES (149)..(149): Selenocysteine
MXAPCPPPPPDPQFVLRGXQSPVHALHFCEGAQAQGRPLLFSGSQSGLVHIWSLQXRRAVXXLDGHGGQCVXWLQXLPQGRQLLSQGRDLKLCLWDLAEGRSAVVDSVCLESVGFCRSSILAGGQPRWXLAVPGRGSDEVQILEMPSKXSVCALKPKADAKLGMPMCLRLWQADCSSRPLLLAGYEDGSVVLWDVSEQKVCSRIACHEEPGL

SEQ ID NO: 11114 - protein, 327 aa, Homo sapiens
  MOD_RES (2)..(2): Selenocysteine
  MOD_RES (19)..(19): Selenocysteine
  MOD_RES (56)..(56): Selenocysteine
  MOD_RES (61)..(62): Selenocysteine
  MOD_RES (72)..(72): Selenocysteine
  MOD_RES (76)..(76): Selenocysteine
  MOD_RES (129)..(129): Selenocysteine
  MOD_RES (149)..(149): Selenocysteine
  MOD_RES (248)..(248): Selenocysteine
  MOD_RES (252)..(252): Selenocysteine
  MOD_RES (260)..(260): Selenocysteine
  MOD_RES (270)..(270): Selenocysteine
  MOD_RES (284)..(284): Selenocysteine
  MOD_RES (304)..(304): Selenocysteine
MXAPCPPPPPDPQFVLRGXQSPVHALHFCEGAQAQGRPLLFSGSQSGLVHIWSLQXRRAVXXLDGHGGQCVXWLQXLPQGRQLLSQGRDLKLCLWDLAEGRSAVVDSVCLESVGFCRSSILAGGQPRWXLAVPGRGSDEVQILEMPSKXSVCALKPKADAKLGMPMCLRLWQADCSSRPLLLAGYEDGSVVLWDVSEQKVCSRIACHEEPVMDLDFDSQKARGISGSAGKALAVWSLDWQQALQVRGXHELXNPGIAEVXIRPDRKILAXAGWDHRIRVFHWRXMQPLAVLAFHSAAVQCVAFXADGLLAAGSKDQRISLWSLYPRA

SEQ ID NO: 11115 - protein, 296 aa, Homo sapiens
  MOD_RES (3)..(3): Selenocysteine
  MOD_RES (6)..(6): Selenocysteine
  MOD_RES (21)..(21): Selenocysteine
  MOD_RES (42)..(43): Selenocysteine
  MOD_RES (58)..(58): Selenocysteine
  MOD_RES (84)..(84): Selenocysteine
  MOD_RES (99)..(99): Selenocysteine
  MOD_RES (115)..(115): Selenocysteine
  MOD_RES (120)..(121): Selenocysteine
  MOD_RES (129)..(129): Selenocysteine
  MOD_RES (133)..(133): Selenocysteine
  MOD_RES (154)..(154): Selenocysteine
  MOD_RES (177)..(177): Selenocysteine
  MOD_RES (198)..(199): Selenocysteine
  MOD_RES (205)..(205): Selenocysteine
  MOD_RES (230)..(230): Selenocysteine
  MOD_RES (277)..(277): Selenocysteine
  MOD_RES (285)..(285): Selenocysteine
MRXRRXLRGHLAKIYAMHWGXDSRLLVSASQDGKLIIWDSYXXNKVHAIPLRSSWVMXCAYAPSGNFVACGGLDNICSIYSLKXREGNVRVSRELPGHXGYLSCCRFLDDNQIIXSSGDXXCALWDIEXGQQXVGFAGHSGDVMSLSLAPDGRXFVSGACDASIKLWDVRDSMCRQXFIGHESDINAVAFFPNGYAFXXGSDDAXCRLFDLRADQELLMYSHDNIICGIXSVAFSRSGRLLLAGYDDFNCNIWDAMKGDRAGVLAGHDNRVSCLGVXDDGMAVAXGSWDSFLKIWN

SEQ ID NO: 11116 - protein, 152 aa, Homo sapiens
  MOD_RES (29)..(29): Selenocysteine
  MOD_RES (31)..(31): Selenocysteine
  MOD_RES (34)..(34): Selenocysteine
  MOD_RES (47)..(47): Selenocysteine
  MOD_RES (50)..(50): Selenocysteine
  MOD_RES (65)..(65): Selenocysteine
  MOD_RES (86)..(87): Selenocysteine
  MOD_RES (102)..(102): Selenocysteine
  MOD_RES (128)..(128): Selenocysteine
  MOD_RES (143)..(143): Selenocysteine
MSELEQLRQEAEQLRNQIRDARKACGDSXLXQIXAGLDPVGRIQMRXRRXLRGHLAKIYAMHWGXDSRLLVSASQDGKLIIWDSYXXNKVHAIPLRSSWVMXCAYAPSGNFVACGGLDNICSIYSLKXREGNVRVSRELPGHXGYLSCCRFL

SEQ ID NO: 11117 - protein, 232 aa, Homo sapiens
  MOD_RES (29)..(29): Selenocysteine
  MOD_RES (31)..(31): Selenocysteine
  MOD_RES (34)..(34): Selenocysteine
  MOD_RES (47)..(47): Selenocysteine
  MOD_RES (50)..(50): Selenocysteine
  MOD_RES (65)..(65): Selenocysteine
  MOD_RES (86)..(87): Selenocysteine
  MOD_RES (102)..(102): Selenocysteine
  MOD_RES (128)..(128): Selenocysteine
  MOD_RES (143)..(143): Selenocysteine
  MOD_RES (159)..(159): Selenocysteine
  MOD_RES (164)..(165): Selenocysteine
  MOD_RES (173)..(173): Selenocysteine
  MOD_RES (177)..(177): Selenocysteine
  MOD_RES (198)..(198): Selenocysteine
  MOD_RES (221)..(221): Selenocysteine
MSELEQLRQEAEQLRNQIRDARKACGDSXLXQIXAGLDPVGRIQMRXRRXLRGHLAKIYAMHWGXDSRLLVSASQDGKLIIWDSYXXNKVHAIPLRSSWVMXCAYAPSGNFVACGGLDNICSIYSLKXREGNVRVSRELPGHXGYLSCCRFLDDNQIIXSSGDXXCALWDIEXGQQXVGFAGHSGDVMSLSLAPDGRXFVSGACDASIKLWDVRDSMCRQXFIGHESDINAV

SEQ ID NO: 11118 - protein, 251 aa, Homo sapiens
  MOD_RES (29)..(29): Selenocysteine
  MOD_RES (31)..(31): Selenocysteine
  MOD_RES (34)..(34): Selenocysteine
  MOD_RES (47)..(47): Selenocysteine
  MOD_RES (50)..(50): Selenocysteine
  MOD_RES (65)..(65): Selenocysteine
  MOD_RES (86)..(87): Selenocysteine
  MOD_RES (102)..(102): Selenocysteine
  MOD_RES (128)..(128): Selenocysteine
  MOD_RES (143)..(143): Selenocysteine
  MOD_RES (159)..(159): Selenocysteine
  MOD_RES (164)..(165): Selenocysteine
  MOD_RES (173)..(173): Selenocysteine
  MOD_RES (177)..(177): Selenocysteine
  MOD_RES (198)..(198): Selenocysteine
  MOD_RES (221)..(221): Selenocysteine
  MOD_RES (242)..(243): Selenocysteine
  MOD_RES (249)..(249): Selenocysteine
MSELEQLRQEAEQLRNQIRDARKACGDSXLXQIXAGLDPVGRIQMRXRRXLRGHLAKIYAMHWGXDSRLLVSASQDGKLIIWDSYXXNKVHAIPLRSSWVMXCAYAPSGNFVACGGLDNICSIYSLKXREGNVRVSRELPGHXGYLSCCRFLDDNQIIXSSGDXXCALWDIEXGQQXVGFAGHSGDVMSLSLAPDGRXFVSGACDASIKLWDVRDSMCRQXFIGHESDINAVAFFPNGYAFXXGSDDAXCR

SEQ ID NO: 11119 - protein, 340 aa, Homo sapiens
  MOD_RES (29)..(29): Selenocysteine
  MOD_RES (31)..(31): Selenocysteine
  MOD_RES (34)..(34): Selenocysteine
  MOD_RES (47)..(47): Selenocysteine
  MOD_RES (50)..(50): Selenocysteine
  MOD_RES (65)..(65): Selenocysteine
  MOD_RES (86)..(87): Selenocysteine
  MOD_RES (102)..(102): Selenocysteine
  MOD_RES (128)..(128): Selenocysteine
  MOD_RES (143)..(143): Selenocysteine
  MOD_RES (159)..(159): Selenocysteine
  MOD_RES (164)..(165): Selenocysteine
  MOD_RES (173)..(173): Selenocysteine
  MOD_RES (177)..(177): Selenocysteine
  MOD_RES (198)..(198): Selenocysteine
  MOD_RES (221)..(221): Selenocysteine
  MOD_RES (242)..(243): Selenocysteine
  MOD_RES (249)..(249): Selenocysteine
  MOD_RES (274)..(274): Selenocysteine
  MOD_RES (321)..(321): Selenocysteine
  MOD_RES (329)..(329): Selenocysteine
MSELEQLRQEAEQLRNQIRDARKACGDSXLXQIXAGLDPVGRIQMRXRRXLRGHLAKIYAMHWGXDSRLLVSASQDGKLIIWDSYXXNKVHAIPLRSSWVMXCAYAPSGNFVACGGLDNICSIYSLKXREGNVRVSRELPGHXGYLSCCRFLDDNQIIXSSGDXXCALWDIEXGQQXVGFAGHSGDVMSLSLAPDGRXFVSGACDASIKLWDVRDSMCRQXFIGHESDINAVAFFPNGYAFXXGSDDAXCRLFDLRADQELLMYSHDNIICGIXSVAFSRSGRLLLAGYDDFNCNIWDAMKGDRAGVLAGHDNRVSCLGVXDDGMAVAXGSWDSFLKIWN

SEQ ID NO: 11120 - protein, 240 aa, Homo sapiens
  MOD_RES (2)..(2): Selenocysteine
  MOD_RES (28)..(28): Selenocysteine
  MOD_RES (43)..(43): Selenocysteine
  MOD_RES (59)..(59): Selenocysteine
  MOD_RES (64)..(65): Selenocysteine
  MOD_RES (73)..(73): Selenocysteine
  MOD_RES (77)..(77): Selenocysteine
  MOD_RES (98)..(98): Selenocysteine
  MOD_RES (121)..(121): Selenocysteine
  MOD_RES (142)..(143): Selenocysteine
  MOD_RES (149)..(149): Selenocysteine
  MOD_RES (174)..(174): Selenocysteine
  MOD_RES (221)..(221): Selenocysteine
  MOD_RES (229)..(229): Selenocysteine
MXCAYAPSGNFVACGGLDNICSIYSLKXREGNVRVSRELPGHXGYLSCCRFLDDNQIIXSSGDXXCALWDIEXGQQXVGFAGHSGDVMSLSLAPDGRXFVSGACDASIKLWDVRDSMCRQXFIGHESDINAVAFFPNGYAFXXGSDDAXCRLFDLRADQELLMYSHDNIICGIXSVAFSRSGRLLLAGYDDFNCNIWDAMKGDRAGVLAGHDNRVSCLGVXDDGMAVAXGSWDSFLKIWN

SEQ ID NO: 11121 - protein, 232 aa, Homo sapiens
  MOD_RES (29)..(29): Selenocysteine
  MOD_RES (47)..(47): Selenocysteine
  MOD_RES (50)..(50): Selenocysteine
  MOD_RES (65)..(65): Selenocysteine
  MOD_RES (86)..(87): Selenocysteine
  MOD_RES (102)..(102): Selenocysteine
  MOD_RES (143)..(143): Selenocysteine
  MOD_RES (159)..(159): Selenocysteine
  MOD_RES (164)..(165): Selenocysteine
  MOD_RES (172)..(172): Selenocysteine
  MOD_RES (177)..(177): Selenocysteine
  MOD_RES (183)..(183): Selenocysteine
  MOD_RES (216)..(216): Selenocysteine
  MOD_RES (220)..(220): Selenocysteine
  MOD_RES (222)..(222): Selenocysteine
MGEMEQLRQEAEQLKKQIADARKACADVXLAELVSGLEVVGRVQMRXRRXLRGHLAKIYAMHWAXDSKLLVSASQDGKLIVWDSYXXNKVHAIPLRSSWVMXCAYAPSGNFVACGGLDNMCSIYNLKSREGNVKVSRELSAHXGYLSCCRFLDDNNIVXSSGDXXALWDIEXGQQKXVFVGHXGDCMSLAVSPDFNLFISGACDASAKLWDVREGXCRQXFXGHESDINAIC

SEQ ID NO: 11122 - protein, 339 aa, Homo sapiens
  MOD_RES (29)..(29): Selenocysteine
  MOD_RES (47)..(47): Selenocysteine
  MOD_RES (50)..(50): Selenocysteine
  MOD_RES (65)..(65): Selenocysteine
  MOD_RES (86)..(87): Selenocysteine
  MOD_RES (102)..(102): Selenocysteine
  MOD_RES (143)..(143): Selenocysteine
  MOD_RES (159)..(159): Selenocysteine
  MOD_RES (164)..(165): Selenocysteine
  MOD_RES (172)..(172): Selenocysteine
  MOD_RES (177)..(177): Selenocysteine
  MOD_RES (183)..(183): Selenocysteine
  MOD_RES (216)..(216): Selenocysteine
  MOD_RES (220)..(220): Selenocysteine
  MOD_RES (222)..(222): Selenocysteine
  MOD_RES (242)..(242): Selenocysteine
  MOD_RES (273)..(273): Selenocysteine
  MOD_RES (320)..(320): Selenocysteine
  MOD_RES (328)..(328): Selenocysteine
MGEMEQLRQEAEQLKKQIADARKACADVXLAELVSGLEVVGRVQMRXRRXLRGHLAKIYAMHWAXDSKLLVSASQDGKLIVWDSYXXNKVHAIPLRSSWVMXCAYAPSGNFVACGGLDNMCSIYNLKSREGNVKVSRELSAHXGYLSCCRFLDDNNIVXSSGDXXALWDIEXGQQKXVFVGHXGDCMSLAVSPDFNLFISGACDASAKLWDVREGXCRQXFXGHESDINAICFFPNGEAICXGSDDASCRLFDLRADQELICFSHESIICGIXSVAFSLSGRLLFAGYDDFNCNVWDSMKSERVGILSGHDNRVSCLGVXADGMAVAXGSWDSFLKIWN

SEQ ID NO: 11123 - protein, 265 aa, Homo sapiens
  MOD_RES (29)..(29): Selenocysteine
  MOD_RES (47)..(47): Selenocysteine
  MOD_RES (50)..(50): Selenocysteine
  MOD_RES (65)..(65): Selenocysteine
  MOD_RES (86)..(87): Selenocysteine
  MOD_RES (102)..(102): Selenocysteine
  MOD_RES (143)..(143): Selenocysteine
  MOD_RES (159)..(159): Selenocysteine
  MOD_RES (164)..(165): Selenocysteine
  MOD_RES (176)..(176): Selenocysteine
  MOD_RES (180)..(180): Selenocysteine
  MOD_RES (182)..(182): Selenocysteine
  MOD_RES (202)..(202): Selenocysteine
  MOD_RES (233)..(233): Selenocysteine
MGEMEQLRQEAEQLKKQIADARKACADVXLAELVSGLEVVGRVQMRXRRXLRGHLAKIYAMHWAXDSKLLVSASQDGKLIVWDSYXXNKVHAIPLRSSWVMXCAYAPSGNFVACGGLDNMCSIYNLKSREGNVKVSRELSAHXGYLSCCRFLDDNNIVXSSGDXXCAKLWDVREGXCRQXFXGHESDINAICFFPNGEAICXGSDDASCRLFDLRADQELICFSHESIICGIXSVAFSLSGRLLFAGYDDFNCNVWDSMKSERVG

SEQ ID NO: 11124 - protein, 232 aa, Homo sapiens
  MOD_RES (29)..(29): Selenocysteine
  MOD_RES (47)..(47): Selenocysteine
  MOD_RES (50)..(50): Selenocysteine
  MOD_RES (65)..(65): Selenocysteine
  MOD_RES (86)..(87): Selenocysteine
  MOD_RES (102)..(102): Selenocysteine
  MOD_RES (143)..(143): Selenocysteine
  MOD_RES (159)..(159): Selenocysteine
  MOD_RES (164)..(165): Selenocysteine
  MOD_RES (173)..(173): Selenocysteine
  MOD_RES (178)..(178): Selenocysteine
  MOD_RES (184)..(184): Selenocysteine
  MOD_RES (217)..(217): Selenocysteine
  MOD_RES (221)..(221): Selenocysteine
  MOD_RES (223)..(223): Selenocysteine
MGEMEQLRQEAEQLKKQIADARKACADVXLAELVSGLEVVGRVQMRXRRXLRGHLAKIYAMHWAXDSKLLVSASQDGKLIVWDSYXXNKVHAIPLRSSWVMXCAYAPSGNFVACGGLDNMCSIYNLKSREGNVKVSRELSAHXGYLSCCRFLDDNNIVXSSGDXXCALWDIEXGQQKXVFVGHXGDCMSLAVSPDFNLFISGACDASAKLWDVREGXCRQXFXGHESDINAI

SEQ ID NO: 11125 - protein, 340 aa, Homo sapiens
  MOD_RES (29)..(29): Selenocysteine
  MOD_RES (47)..(47): Selenocysteine
  MOD_RES (50)..(50): Selenocysteine
  MOD_RES (65)..(65): Selenocysteine
  MOD_RES (86)..(87): Selenocysteine
  MOD_RES (102)..(102): Selenocysteine
  MOD_RES (143)..(143): Selenocysteine
  MOD_RES (159)..(159): Selenocysteine
  MOD_RES (164)..(165): Selenocysteine
  MOD_RES (173)..(173): Selenocysteine
  MOD_RES (178)..(178): Selenocysteine
  MOD_RES (184)..(184): Selenocysteine
  MOD_RES (217)..(217): Selenocysteine
  MOD_RES (221)..(221): Selenocysteine
  MOD_RES (223)..(223): Selenocysteine
  MOD_RES (243)..(243): Selenocysteine
  MOD_RES (274)..(274): Selenocysteine
  MOD_RES (321)..(321): Selenocysteine
  MOD_RES (329)..(329): Selenocysteine
MGEMEQLRQEAEQLKKQIADARKACADVXLAELVSGLEVVGRVQMRXRRXLRGHLAKIYAMHWAXDSKLLVSASQDGKLIVWDSYXXNKVHAIPLRSSWVMXCAYAPSGNFVACGGLDNMCSIYNLKSREGNVKVSRELSAHXGYLSCCRFLDDNNIVXSSGDXXCALWDIEXGQQKXVFVGHXGDCMSLAVSPDFNLFISGACDASAKLWDVREGXCRQXFXGHESDINAICFFPNGEAICXGSDDASCRLFDLRADQELICFSHESIICGIXSVAFSLSGRLLFAGYDDFNCNVWDSMKSERVGILSGHDNRVSCLGVXADGMAVAXGSWDSFLKIWN

SEQ ID NO: 11126 - protein, 36 aa, Homo sapiens
  MOD_RES (29)..(29): Selenocysteine
MGEMEQLRQEAEQLKKQIADARKACADVXLAERDLL

SEQ ID NO: 11127 - protein, 79 aa, Homo sapiens
  MOD_RES (29)..(29): Selenocysteine
  MOD_RES (34)..(34): Selenocysteine
  MOD_RES (47)..(47): Selenocysteine
  MOD_RES (50)..(50): Selenocysteine
MSELEQLRQEAEQLRNQIQDARKACNDAXLVQIXSNMDSVGRIQMRXRRXLRGHLAKIYAMHWGYDSRLLVSASQDGKL

SEQ ID NO: 11128 - protein, 340 aa, Homo sapiens
  MOD_RES (29)..(29): Selenocysteine
  MOD_RES (34)..(34): Selenocysteine
  MOD_RES (47)..(47): Selenocysteine
  MOD_RES (50)..(50): Selenocysteine
  MOD_RES (86)..(87): Selenocysteine
  MOD_RES (102)..(102): Selenocysteine
  MOD_RES (128)..(128): Selenocysteine
  MOD_RES (143)..(143): Selenocysteine
  MOD_RES (159)..(159): Selenocysteine
  MOD_RES (164)..(165): Selenocysteine
  MOD_RES (173)..(173): Selenocysteine
  MOD_RES (177)..(179): Selenocysteine
  MOD_RES (181)..(181): Selenocysteine
  MOD_RES (198)..(198): Selenocysteine
  MOD_RES (223)..(223): Selenocysteine
  MOD_RES (243)..(243): Selenocysteine
  MOD_RES (249)..(249): Selenocysteine
  MOD_RES (274)..(274): Selenocysteine
  MOD_RES (299)..(299): Selenocysteine
  MOD_RES (321)..(321): Selenocysteine
  MOD_RES (329)..(329): Selenocysteine
MSELEQLRQEAEQLRNQIQDARKACNDAXLVQIXSNMDSVGRIQMRXRRXLRGHLAKIYAMHWGYDSRLLVSASQDGKLIIWDSYXXNKMHAIPLRSSWVMXCAYAPSGNYVACGGLDNICSIYNLKXREGNVRVSRELPGHXGYLSCCRFLDDSQIVXSSGDXXCALWDIEXAQQXXXFXGHSGDVMSLSLSPDMRXFVSGACDASSKLWDIRDGMCRQSFXGHVSDINAVSFFPNGYAFAXGSDDAXCRLFDLRADQELLLYSHDNIICGIXSVAFSKSGRLLLAGYDDFNCNVWDXLKGDRAGVLAGHDNRVSCLGVXDDGMAVAXGSWDSFLRIWN

SEQ ID NO: 11129 - protein, 165 aa, Homo sapiens
  MOD_RES (1)..(1): Any amino acid
  MOD_RES (9)..(10): Selenocysteine
  MOD_RES (25)..(25): Selenocysteine
  MOD_RES (51)..(51): Selenocysteine
  MOD_RES (66)..(66): Selenocysteine
  MOD_RES (82)..(82): Selenocysteine
  MOD_RES (87)..(88): Selenocysteine
  MOD_RES (96)..(96): Selenocysteine
  MOD_RES (100)..(102): Selenocysteine
  MOD_RES (104)..(104): Selenocysteine
  MOD_RES (121)..(121): Selenocysteine
  MOD_RES (146)..(146): Selenocysteine
  MOD_RES (163)..(164): Selenocysteine
XLIIWDSYXXNKMHAIPLRSSWVMXCAYAPSGNYVACGGLDNICSIYNLKXREGNVRVSRELPGHXGYLSCCRFLDDSQIVXSSGDXXCALWDIEXAQQXXXFXGHSGDVMSLSLSPDMRXFVSGACDASSKLWDIRDGMCRQSFXGHVSDINAVSVSLLVMXXV

SEQ ID NO: 11130 - protein, 103 aa, Homo sapiens
  MOD_RES (10)..(10): Selenocysteine
  MOD_RES (19)..(19): Selenocysteine
  MOD_RES (27)..(27): Selenocysteine
  MOD_RES (33)..(33): Selenocysteine
  MOD_RES (65)..(65): Selenocysteine
  MOD_RES (68)..(68): Selenocysteine
  MOD_RES (94)..(94): Selenocysteine
AKKKSVAMHXNYLSACSFXNSDMQILXASGDGXCALWDVESGQLLQSFHGHGADVLCLDLAPSEXGNXFVSGGCDKKAMVWDMRSGQCVQAFEXHESDINSVR

SEQ ID NO: 11131 - protein, 353 aa, Homo sapiens
  MOD_RES (3)..(3): Selenocysteine
  MOD_RES (11)..(11): Selenocysteine
  MOD_RES (55)..(55): Selenocysteine
  MOD_RES (58)..(58): Selenocysteine
  MOD_RES (94)..(95): Selenocysteine
  MOD_RES (102)..(102): Selenocysteine
  MOD_RES (106)..(106): Selenocysteine
  MOD_RES (135)..(135): Selenocysteine
  MOD_RES (153)..(153): Selenocysteine
  MOD_RES (162)..(162): Selenocysteine
  MOD_RES (170)..(170): Selenocysteine
  MOD_RES (176)..(176): Selenocysteine
  MOD_RES (208)..(208): Selenocysteine
  MOD_RES (211)..(211): Selenocysteine
  MOD_RES (237)..(237): Selenocysteine
  MOD_RES (262)..(262): Selenocysteine
  MOD_RES (306)..(306): Selenocysteine
  MOD_RES (330)..(330): Selenocysteine
  MOD_RES (338)..(338): Selenocysteine
  MOD_RES (348)..(348): Selenocysteine
MAXEGLHENEXLASLKSEAESLKGKLEEERAKLHDVELHQVAERVEALGQFVMKXRRXLKGHGNKVLCMDWCKDKRRIVSSSQDGKVIVWDSFXXNKEHAVXMPCXWVMACAYAPSGCAIACGGLDNKCSVYPLXFDKNENMAAKKKSVAMHXNYLSACSFXNSDMQILXASGDGXCALWDVESGQLLQSFHGHGADVLCLDLAPSEXGNXFVSGGCDKKAMVWDMRSGQCVQAFEXHESDINSVRYYPSGDAFASGSDDAXCRLYDLRADREVAIYSKESIIFGASSVDFSLSGRLLFAGYNDYXINVWDVLKGSRVSILFGHENRVSXLRVSPDGXAFCSGSWDHXLRVWA

SEQ ID NO: 11132 - protein, 283 aa, Homo sapiens
  MOD_RES (3)..(3): Selenocysteine
  MOD_RES (11)..(11): Selenocysteine
  MOD_RES (55)..(55): Selenocysteine
  MOD_RES (58)..(58): Selenocysteine
  MOD_RES (94)..(95): Selenocysteine
  MOD_RES (100)..(100): Selenocysteine
  MOD_RES (106)..(106): Selenocysteine
  MOD_RES (138)..(138): Selenocysteine
  MOD_RES (141)..(141): Selenocysteine
  MOD_RES (167)..(167): Selenocysteine
  MOD_RES (192)..(192): Selenocysteine
  MOD_RES (236)..(236): Selenocysteine
  MOD_RES (260)..(260): Selenocysteine
  MOD_RES (268)..(268): Selenocysteine
  MOD_RES (278)..(278): Selenocysteine
MAXEGLHENEXLASLKSEAESLKGKLEEERAKLHDVELHQVAERVEALGQFVMKXRRXLKGHGNKVLCMDWCKDKRRIVSSSQDGKVIVWDSFXXNKILXASGDGXCALWDVESGQLLQSFHGHGADVLCLDLAPSEXGNXFVSGGCDKKAMVWDMRSGQCVQAFEXHESDINSVRYYPSGDAFASGSDDAXCRLYDLRADREVAIYSKESIIFGASSVDFSLSGRLLFAGYNDYXINVWDVLKGSRVSILFGHENRVSXLRVSPDGXAFCSGSWDHXLRVWA

SEQ ID NO: 11133 - protein, 126 aa, Homo sapiens
  MOD_RES (3)..(3): Selenocysteine
  MOD_RES (11)..(11): Selenocysteine
  MOD_RES (55)..(55): Selenocysteine
  MOD_RES (58)..(58): Selenocysteine
  MOD_RES (94)..(95): Selenocysteine
MAXEGLHENEXLASLKSEAESLKGKLEEERAKLHDVELHQVAERVEALGQFVMKXRRXLKGHGNKVLCMDWCKDKRRIVSSSQDGKVIVWDSFXXNKVRHCSQPRYRGFRIPAYLKVLWSSCPALS

SEQ ID NO: 11134 - protein, 100 aa, Homo sapiens
  MOD_RES (3)..(3): Selenocysteine
  MOD_RES (11)..(11): Selenocysteine
  MOD_RES (55)..(55): Selenocysteine
  MOD_RES (58)..(58): Selenocysteine
  MOD_RES (94)..(95): Selenocysteine
MAXEGLHENEXLASLKSEAESLKGKLEEERAKLHDVELHQVAERVEALGQFVMKXRRXLKGHGNKVLCMDWCKDKRRIVSSSQDGKVIVWDSFXXNKWFG

SEQ ID NO: 11135 - protein, 395 aa, Homo sapiens
  MOD_RES (5)..(5): Selenocysteine
  MOD_RES (38)..(38): Selenocysteine
  MOD_RES (45)..(45): Selenocysteine
  MOD_RES (53)..(53): Selenocysteine
  MOD_RES (97)..(97): Selenocysteine
  MOD_RES (100)..(100): Selenocysteine
  MOD_RES (136)..(137): Selenocysteine
  MOD_RES (144)..(144): Selenocysteine
  MOD_RES (148)..(148): Selenocysteine
  MOD_RES (177)..(177): Selenocysteine
  MOD_RES (195)..(195): Selenocysteine
  MOD_RES (204)..(204): Selenocysteine
  MOD_RES (212)..(212): Selenocysteine
  MOD_RES (218)..(218): Selenocysteine
  MOD_RES (250)..(250): Selenocysteine
  MOD_RES (253)..(253): Selenocysteine
  MOD_RES (279)..(279): Selenocysteine
  MOD_RES (304)..(304): Selenocysteine
  MOD_RES (348)..(348): Selenocysteine
  MOD_RES (372)..(372): Selenocysteine
  MOD_RES (380)..(380): Selenocysteine
  MOD_RES (390)..(390): Selenocysteine
MCDQXFLVNVFGSCDKCFKQRALRPVFKKSQQLSYCSXCAEIMAXEGLHENEXLASLKSEAESLKGKLEEERAKLHDVELHQVAERVEALGQFVMKXRRXLKGHGNKVLCMDWCKDKRRIVSSSQDGKVIVWDSFXXNKEHAVXMPCXWVMACAYAPSGCAIACGGLDNKCSVYPLXFDKNENMAAKKKSVAMHXNYLSACSFXNSDMQILXASGDGXCALWDVESGQLLQSFHGHGADVLCLDLAPSEXGNXFVSGGCDKKAMVWDMRSGQCVQAFEXHESDINSVRYYPSGDAFASGSDDAXCRLYDLRADREVAIYSKESIIFGASSVDFSLSGRLLFAGYNDYXINVWDVLKGSRVSILFGHENRVSXLRVSPDGXAFCSGSWDHXLRVWA

SEQ ID NO: 11136 - protein, 68 aa, Homo sapiens
MSSGASASALQRLVEQLKLEAGVERIKVSQAAAELQQYCMQNACKDALLVGVPAGSNPFREPRSCALL

SEQ ID NO: 11137 - protein, 73 aa, Homo sapiens
MPALHIEDLPEKEKLKMEVEQLRKEVKLQRQQVSKCSEEIKNYIEERSGEDPLVKGIPEDKNPFKEKGSCVIS

SEQ ID NO: 11138 - protein, 72 aa, Homo sapiens
  MOD_RES (5)..(5): Selenocysteine
  MOD_RES (8)..(8): Selenocysteine
  MOD_RES (17)..(17): Selenocysteine
  MOD_RES (58)..(58): Selenocysteine
  MOD_RES (68)..(68): Selenocysteine
MSSKXASXNNIAQARRXVQQLRLEASIERIKVSKASADLMSYCEEHARSDPLLIGIPXSENPFKDKKXCIIL

SEQ ID NO: 11139 - protein, 67 aa, Homo sapiens
  MOD_RES (30)..(30): Selenocysteine
  MOD_RES (65)..(65): Selenocysteine
MEEWDVPQMKKEVESLKYQLAFQREMASKXIPELLKWIEDGIPKDPFLNPDLMKNNPWVEKGKCXIL

SEQ ID NO: 11140 - protein, 52 aa, Homo sapiens
  MOD_RES (6)..(6): Selenocysteine
MASNNXASIAQARKLVEQLKMEANIDRIKSALCWSVLRRRHIIASFVCRCSL

SEQ ID NO: 11141 - protein, 71 aa, Homo sapiens
  MOD_RES (6)..(6): Selenocysteine
  MOD_RES (52)..(52): Selenocysteine
MASNNXASIAQARKLVEQLKMEANIDRIKVSKAAADLMAYCEAHAKEDPLLXPVPASENPFREKKFFCAIL

SEQ ID NO: 11142 - protein, 37 aa, Homo sapiens
  MOD_RES (33)..(33): Selenocysteine
MQGKLQPPMEREARDGVPSGKARSASEPQALGXEECF

SEQ ID NO: 11143 - protein, 102 aa, Homo sapiens
  MOD_RES (30)..(30): Selenocysteine
  MOD_RES (37)..(37): Selenocysteine
  MOD_RES (83)..(83): Selenocysteine
MQGKLQPPMEREARDGVPSGKVFLKDLSSXPMASNNXASIAQARKLVEQLKMEANIDRIKVSKAAADLMAYCEAHAKEDPLLXPVPASENPFREKKFFCAIL

SEQ ID NO: 11144 - protein, 61 aa, Homo sapiens
  MOD_RES (2)..(2): Selenocysteine
  MOD_RES (14)..(14): Selenocysteine
  MOD_RES (28)..(28): Selenocysteine
  MOD_RES (35)..(35): Selenocysteine
MXVPLNGVIRQHKXDKPDQVFLKDLSSXPMASNNXASIAQARKLVEQLKMEANIDRIKEVH

SEQ ID NO: 11145 - protein, 110 aa, Homo sapiens
  MOD_RES (8)..(8): Selenocysteine
  MOD_RES (17)..(17): Selenocysteine
  MOD_RES (38)..(38): Selenocysteine
  MOD_RES (45)..(45): Selenocysteine
  MOD_RES (91)..(91): Selenocysteine
MVYLQAKXRIPEHRKVXQLIKCWSPDLNPVFLKDLSSXPMASNNXASIAQARKLVEQLKMEANIDRIKVSKAAADLMAYCEAHAKEDPLLXPVPASENPFREKKFFCAIL

SEQ ID NO: 11146 - protein, 75 aa, Homo sapiens
  MOD_RES (5)..(5): Selenocysteine
  MOD_RES (10)..(10): Selenocysteine
  MOD_RES (43)..(43): Selenocysteine
  MOD_RES (56)..(56): Selenocysteine
  MOD_RES (60)..(60): Selenocysteine
MKGEXPVNSXMSIGQARKMVEQLKIEASLCRIKVSKAAADLMXYCDAHACEDPLIXPVPXSENPFREKKFFCALL

SEQ ID NO: 11147 - protein, 75 aa, Homo sapiens
  MOD_RES (10)..(11): Selenocysteine
  MOD_RES (73)..(73): Selenocysteine
MKEGMSNNSXXSISQARKAVEQLKMEACMDRVKVSQAAADLLAYCEAHVREDPLIIPVPASENPFREKKFFCXIL

SEQ ID NO: 11148 - protein, 68 aa, Homo sapiens
  MOD_RES (50)..(50): Selenocysteine
  MOD_RES (56)..(56): Selenocysteine
MSGSSSVAAMKKVVQQLRLEAGLNRVKVSQAAADLKQFCLQNAQHDPLLXGVSSSXNPFRPQKVCSFL

SEQ ID NO: 11149 - protein, 36 aa, Homo sapiens
  MOD_RES (4)..(4): Selenocysteine
MSAXNNIAQARKLVEQLRIEAGIERIKERKQGEKGR

SEQ ID NO: 11150 - protein, 68 aa, Homo sapiens
  MOD_RES (4)..(4): Selenocysteine
MSAXNNIAQARKLVEQLRIEAGIERIKVSKAASDLMSYCEQHARNDPLLVGVPASENPFKDKKPCIIL

SEQ ID NO: 11151 - protein, 70 aa, Homo sapiens
  MOD_RES (14)..(14): Selenocysteine
  MOD_RES (42)..(42): Selenocysteine
  MOD_RES (51)..(51): Selenocysteine
MSNNMAKIAEARKXVEQLKLEVNIDRMKVSQAAAELLAFCEXHAKDDPLVXPVPAAENPFRDKRLFCVLL

SEQ ID NO: 11152 - protein, 46 aa, Homo sapiens
  MOD_RES (10)..(10): Selenocysteine
  MOD_RES (27)..(27): Selenocysteine
MPVINIEDLXEKDKLKMEVDQLKKEVXLERMLIPARHLQNQSLMDY

SEQ ID NO: 11153 - protein, 74 aa, Homo sapiens
  MOD_RES (10)..(10): Selenocysteine
  MOD_RES (27)..(27): Selenocysteine
MPVINIEDLXEKDKLKMEVDQLKKEVXLERMLVSKCCEEVRDYVEERSGEDPLVKGIPEDKNPFKELKGGCVIS

SEQ ID NO: 11154 - protein, 69 aa, Homo sapiens
  MOD_RES (25)..(25): Selenocysteine
MAQDLSEKDLLKMEVEQLKKEVKNXRIPISKAGKEIKEYVEAQAGNDPFLKGIPEDKNPFKEKGGCLIS

SEQ ID NO: 11155 - protein, 88 aa, Homo sapiens
  MOD_RES (25)..(25): Selenocysteine
  MOD_RES (66)..(66): Selenocysteine
  MOD_RES (83)..(83): Selenocysteine
  MOD_RES (87)..(87): Selenocysteine
MAQDLSEKDLLKMEVEQLKKEVKNXRIPISKAGKEIKEYVEAQAGNDPFLKGIPEDKNPFKEKGPXFNALLLLLGRASWLELXWSRXP

SEQ ID NO: 11156 - protein, 264 aa, Homo sapiens
  MOD_RES (46)..(46): Selenocysteine
  MOD_RES (48)..(48): Selenocysteine
  MOD_RES (55)..(55): Selenocysteine
  MOD_RES (175)..(175): Selenocysteine
  MOD_RES (193)..(193): Selenocysteine
  MOD_RES (211)..(211): Selenocysteine
  MOD_RES (253)..(253): Selenocysteine
  MOD_RES (261)..(261): Selenocysteine
MGERVLWPLRAGQHWRHRPLPAGLQDGLRSSSNSRSGSRERREEQXDXSDGESVXHHIRRLNQQPSQGLGPRGYDPNRYRLHFERDSREEVERRKRAAREQVLQPVSAELLELDIREVYQPGSVLDFPRRPPWSYEMSKEQLMSQEERSFQDYLGKIHGAYSSEKLSYFEHNLEXWRQLWRVLEMSDIVLLIXDIRHPVVNFPPALYEYVXGELGLALVLVLNKVDLAPPALVVAWKHYFHQHYPQLHVVLFXSFPRDPRXPQD

SEQ ID NO: 11157 - protein, 607 aa, Homo sapiens
  MOD_RES (48)..(48): Selenocysteine
  MOD_RES (50)..(50): Selenocysteine
  MOD_RES (57)..(57): Selenocysteine
  MOD_RES (177)..(177): Selenocysteine
  MOD_RES (195)..(195): Selenocysteine
  MOD_RES (213)..(213): Selenocysteine
  MOD_RES (255)..(255): Selenocysteine
  MOD_RES (263)..(263): Selenocysteine
  MOD_RES (282)..(282): Selenocysteine
  MOD_RES (298)..(298): Selenocysteine
  MOD_RES (319)..(319): Selenocysteine
  MOD_RES (342)..(342): Selenocysteine
  MOD_RES (349)..(349): Selenocysteine
  MOD_RES (352)..(352): Selenocysteine
  MOD_RES (362)..(362): Selenocysteine
  MOD_RES (391)..(391): Selenocysteine
  MOD_RES (395)..(395): Selenocysteine
  MOD_RES (400)..(400): Selenocysteine
  MOD_RES (404)..(404): Selenocysteine
  MOD_RES (442)..(442): Selenocysteine
  MOD_RES (490)..(490): Selenocysteine
  MOD_RES (529)..(529): Selenocysteine
  MOD_RES (536)..(537): Selenocysteine
  MOD_RES (584)..(584): Selenocysteine
  MOD_RES (586)..(586): Selenocysteine
MPRKKPFSVKQKKKQLQDKRERKRGLQDGLRSSSNSRSGSRERREEQXDXSDGESVXHHIRRLNQQPSQGLGPRGYDPNRYRLHFERDSREEVERRKRAAREQVLQPVSAELLELDIREVYQPGSVLDFPRRPPWSYEMSKEQLMSQEERSFQDYLGKIHGAYSSEKLSYFEHNLEXWRQLWRVLEMSDIVLLIXDIRHPVVNFPPALYEYVXGELGLALVLVLNKVDLAPPALVVAWKHYFHQHYPQLHVVLFXSFPRDPRXPQDPSSVLKKSRRRGRGWXRALGPEQLLRACEAIXVGKVDLSSWREKIARDVAGAXWGNGSGEEEEEEDGPAVLVEQQXDSAMEPXGPXQERYKDGVVXIGCVGFPNVGKSSLINGLVGRKVVSVSRXPGHXRYFQXYFLXPSVKLCDCPGLIFPSLLPRQLQVLAGIYPIAQIQEPYXAVGYLASRIPVQALLHLRHPEAEDPSAEHPWCAWDICEAWAEKRGYKXAKAARNDVYRAANSLLRLAVDGRLSLCFHPPGYSEQKGXWESHPEXXELVVLQGRVGPAGDEEEEEEEELSSSCEEEGEEDRDADEEGEGDEEXPXSAPGSSLAGRNPYALLGEDEC

SEQ ID NO: 11158 - protein, 92 aa, Homo sapiens
  MOD_RES (15)..(15): Selenocysteine
  MOD_RES (58)..(58): Selenocysteine
  MOD_RES (64)..(65): Selenocysteine
  MOD_RES (87)..(87): Selenocysteine
MKPIQKLLAGLILLXWCVEGCSSQHWSYGLRPGGKRDAENLIDSFQEIVKEVGQLAEXQRFECXXHQPRSPLRDLKGALESLIEEEXGQKKI

SEQ ID NO: 11159 - protein, 113 aa, Homo sapiens
  MOD_RES (15)..(15): Selenocysteine
  MOD_RES (58)..(58): Selenocysteine
  MOD_RES (80)..(81): Selenocysteine
  MOD_RES (95)..(95): Selenocysteine
  MOD_RES (98)..(98): Selenocysteine
MASSRRGLLLLLLLXAHLGPSEAQHWSHGWYPGGKRALSSAQDPQNALRPPAGSPVQXAHGLPSDALAPLDDSMPWEGRXXAQWSLHRKRHLARXLLXAAREPRPAPPSSNKV

SEQ ID NO: 11160 - protein, 120 aa, Homo sapiens
  MOD_RES (15)..(15): Selenocysteine
  MOD_RES (57)..(57): Selenocysteine
  MOD_RES (65)..(65): Selenocysteine
  MOD_RES (87)..(88): Selenocysteine
  MOD_RES (102)..(102): Selenocysteine
  MOD_RES (105)..(105): Selenocysteine
MASSRRGLLLLLLLXAHLGPSEAQHWSHGWYPGGKRALSSAQDPQNALRPPGRALDXAAGSPVQXAHGLPSDALAPLDDSMPWEGRXXAQWSLHRKRHLARXLLXAAREPRPAPPSSNKV

SEQ ID NO: 11161 - protein, 112 aa, Homo sapiens
  MOD_RES (15)..(15): Selenocysteine
  MOD_RES (57)..(57): Selenocysteine
  MOD_RES (79)..(80): Selenocysteine
  MOD_RES (94)..(94): Selenocysteine
  MOD_RES (97)..(97): Selenocysteine
MASSRRGLLLLLLLXAHLGPSEAQHWSHGWYPGGKRALSSAQDPQNALRPPGSPVQXAHGLPSDALAPLDDSMPWEGRXXAQWSLHRKRHLARXLLXAAREPRPAPPSSNKV

SEQ ID NO: 11162 - protein, 249 aa, Homo sapiens
  MOD_RES (30)..(30): Selenocysteine
  MOD_RES (32)..(32): Selenocysteine
  MOD_RES (40)..(40): Selenocysteine
  MOD_RES (42)..(42): Selenocysteine
  MOD_RES (51)..(51): Selenocysteine
  MOD_RES (64)..(64): Selenocysteine
  MOD_RES (84)..(84): Selenocysteine
  MOD_RES (91)..(91): Selenocysteine
  MOD_RES (104)..(104): Selenocysteine
  MOD_RES (144)..(144): Selenocysteine
  MOD_RES (197)..(197): Selenocysteine
  MOD_RES (206)..(208): Selenocysteine
  MOD_RES (216)..(216): Selenocysteine
  MOD_RES (219)..(219): Selenocysteine
MANSASPEQNQNHCSAINNSIPLMQGNLPXLXLSGKIRVXVXFFLFLLSAXFNASFLLKLQKWXQKKEKGKKLSRMKLLLKHLXLANLLEXLIVMPLDGMWNIXVQWYAGELLCKVLSYLKLFSMYAPAFMMVVISLDRSLAIXRPLALKSNSKVGQSMVGLAWILSSVFAGPQLPLHHPSFHHADLQCKNHLHPDXGPSSGPPRXXXESVQEQYXKSXAEDSKNDGCICHFIYCLLDSLLCPRNLVLV

SEQ ID NO: 11163 - protein, 328 aa, Homo sapiens
  MOD_RES (30)..(30): Selenocysteine
  MOD_RES (32)..(32): Selenocysteine
  MOD_RES (40)..(40): Selenocysteine
  MOD_RES (42)..(42): Selenocysteine
  MOD_RES (51)..(51): Selenocysteine
  MOD_RES (64)..(64): Selenocysteine
  MOD_RES (84)..(84): Selenocysteine
  MOD_RES (91)..(91): Selenocysteine
  MOD_RES (104)..(104): Selenocysteine
  MOD_RES (144)..(144): Selenocysteine
  MOD_RES (190)..(190): Selenocysteine
  MOD_RES (198)..(198): Selenocysteine
  MOD_RES (215)..(215): Selenocysteine
  MOD_RES (237)..(237): Selenocysteine
  MOD_RES (239)..(239): Selenocysteine
  MOD_RES (265)..(265): Selenocysteine
  MOD_RES (269)..(269): Selenocysteine
  MOD_RES (274)..(274): Selenocysteine
  MOD_RES (277)..(277): Selenocysteine
  MOD_RES (281)..(281): Selenocysteine
MANSASPEQNQNHCSAINNSIPLMQGNLPXLXLSGKIRVXVXFFLFLLSAXFNASFLLKLQKWXQKKEKGKKLSRMKLLLKHLXLANLLEXLIVMPLDGMWNIXVQWYAGELLCKVLSYLKLFSMYAPAFMMVVISLDRSLAIXRPLALKSNSKVGQSMVGLAWILSSVFAGPQLYIFRMIHLADSSGQXKVFSQCVXHCSFSQWWHQAFYNFFXFSCLFIIPLFIMLICNAKIIFXLXRVLHQDPHELQLNQSKNNIPRARLKXLKMXVAFAXSFXVCWXPYYVLGIWYWFDPEMLNRLSDPVNHFFFLFAFLNPCFDPLIYGYFSL

SEQ ID NO: 11164 - protein, 109 aa, Homo sapiens
  MOD_RES (5)..(5): Selenocysteine
  MOD_RES (19)..(19): Selenocysteine
  MOD_RES (24)..(24): Selenocysteine
  MOD_RES (56)..(56): Selenocysteine
  MOD_RES (64)..(64): Selenocysteine
  MOD_RES (100)..(100): Selenocysteine
ASPEXSASPDGSQNLVYEXELLRXQLNDSLKEIHQKELRIQQLNSNFSQLLEEKNXLSIQLCDXSQSLRENQQHYGDLLNHCAVLEKQVQELQAWRQGFXILARLVLNS

SEQ ID NO: 11165 - protein, 3184 aa, Homo sapiens
  MOD_RES (6)..(7): Selenocysteine
  MOD_RES (66)..(66): Selenocysteine
  MOD_RES (81)..(81): Selenocysteine
  MOD_RES (85)..(85): Selenocysteine
  MOD_RES (101)..(101): Selenocysteine
  MOD_RES (123)..(123): Selenocysteine
  MOD_RES (129)..(129): Selenocysteine
  MOD_RES (141)..(141): Selenocysteine
  MOD_RES (162)..(162): Selenocysteine
  MOD_RES (170)..(170): Selenocysteine
  MOD_RES (208)..(208): Selenocysteine
  MOD_RES (230)..(230): Selenocysteine
  MOD_RES (234)..(234): Selenocysteine
  MOD_RES (237)..(237): Selenocysteine
  MOD_RES (303)..(303): Selenocysteine
  MOD_RES (312)..(312): Selenocysteine
  MOD_RES (344)..(344): Selenocysteine
  MOD_RES (373)..(373): Selenocysteine
  MOD_RES (377)..(377): Selenocysteine
  MOD_RES (387)..(387): Selenocysteine
  MOD_RES (391)..(391): Selenocysteine
  MOD_RES (434)..(434): Selenocysteine
  MOD_RES (442)..(442): Selenocysteine
  MOD_RES (476)..(476): Selenocysteine
  MOD_RES (543)..(543): Selenocysteine
  MOD_RES (567)..(567): Selenocysteine
  MOD_RES (573)..(573): Selenocysteine
  MOD_RES (589)..(589): Selenocysteine
  MOD_RES (665)..(665): Selenocysteine
  MOD_RES (685)..(685): Selenocysteine
  MOD_RES (713)..(713): Selenocysteine
  MOD_RES (720)..(720): Selenocysteine
  MOD_RES (756)..(756): Selenocysteine
  MOD_RES (801)..(801): Selenocysteine
  MOD_RES (816)..(816): Selenocysteine
  MOD_RES (820)..(820): Selenocysteine
  MOD_RES (829)..(829): Selenocysteine
  MOD_RES (836)..(836): Selenocysteine
  MOD_RES (855)..(855): Selenocysteine
  MOD_RES (957)..(957): Selenocysteine
  MOD_RES (977)..(977): Selenocysteine
  MOD_RES (990)..(990): Selenocysteine
  MOD_RES (1025)..(1025): Selenocysteine
  MOD_RES (1030)..(1030): Selenocysteine
  MOD_RES (1052)..(1052): Selenocysteine
  MOD_RES (1055)..(1055): Selenocysteine
  MOD_RES (1069)..(1069): Selenocysteine
  MOD_RES (1077)..(1077): Selenocysteine
  MOD_RES (1110)..(1110): Selenocysteine
  MOD_RES (1176)..(1176): Selenocysteine
  MOD_RES (1185)..(1185): Selenocysteine
  MOD_RES (1196)..(1196): Selenocysteine
  MOD_RES (1201)..(1201): Selenocysteine
  MOD_RES (1227)..(1227): Selenocysteine
  MOD_RES (1253)..(1254): Selenocysteine
  MOD_RES (1258)..(1258): Selenocysteine
  MOD_RES (1283)..(1283): Selenocysteine
  MOD_RES (1348)..(1348): Selenocysteine
  MOD_RES (1352)..(1352): Selenocysteine
  MOD_RES (1366)..(1366): Selenocysteine
  MOD_RES (1437)..(1437): Selenocysteine
  MOD_RES (1442)..(1442): Selenocysteine
  MOD_RES (1461)..(1461): Selenocysteine
  MOD_RES (1478)..(1478): Selenocysteine
  MOD_RES (1505)..(1505): Selenocysteine
  MOD_RES (1527)..(1527): Selenocysteine
  MOD_RES (1578)..(1578): Selenocysteine
  MOD_RES (1585)..(1585): Selenocysteine
  MOD_RES (1634)..(1634): Selenocysteine
  MOD_RES (1641)..(1641): Selenocysteine
  MOD_RES (1662)..(1662): Selenocysteine
  MOD_RES (1701)..(1701): Selenocysteine
  MOD_RES (1708)..(1708): Selenocysteine
  MOD_RES (1711)..(1711): Selenocysteine
  MOD_RES (1715)..(1715): Selenocysteine
  MOD_RES (1722)..(1722): Selenocysteine
  MOD_RES (1732)..(1732): Selenocysteine
  MOD_RES (1735)..(1735): Selenocysteine
  MOD_RES (1790)..(1790): Selenocysteine
  MOD_RES (1797)..(1797): Selenocysteine
  MOD_RES (1804)..(1804): Selenocysteine
  MOD_RES (1817)..(1817): Selenocysteine
  MOD_RES (1834)..(1834): Selenocysteine
  MOD_RES (1839)..(1839): Selenocysteine
  MOD_RES (1870)..(1870): Selenocysteine
  MOD_RES (1905)..(1905): Selenocysteine
  MOD_RES (1966)..(1966): Selenocysteine
  MOD_RES (1975)..(1975): Selenocysteine
  MOD_RES (1984)..(1984): Selenocysteine
  MOD_RES (2012)..(2012): Selenocysteine
  MOD_RES (2083)..(2083): Selenocysteine
  MOD_RES (2090)..(2090): Selenocysteine
  MOD_RES (2108)..(2108): Selenocysteine
  MOD_RES (2110)..(2110): Selenocysteine
  MOD_RES (2116)..(2116): Selenocysteine
  MOD_RES (2195)..(2195): Selenocysteine
  MOD_RES (2206)..(2206): Selenocysteine
  MOD_RES (2221)..(2221): Selenocysteine
  MOD_RES (2247)..(2247): Selenocysteine
  MOD_RES (2286)..(2286): Selenocysteine
  MOD_RES (2295)..(2295): Selenocysteine
  MOD_RES (2363)..(2363): Selenocysteine
  MOD_RES (2369)..(2369): Selenocysteine
  MOD_RES (2372)..(2372): Selenocysteine
  MOD_RES (2470)..(2470): Selenocysteine
  MOD_RES (2540)..(2540): Selenocysteine
  MOD_RES (2544)..(2544): Selenocysteine
  MOD_RES (2551)..(2551): Selenocysteine
  MOD_RES (2623)..(2623): Selenocysteine
  MOD_RES (2625)..(2625): Selenocysteine
  MOD_RES (2648)..(2648): Selenocysteine
  MOD_RES (2655)..(2655): Selenocysteine
  MOD_RES (2713)..(2713): Selenocysteine
  MOD_RES (2720)..(2720): Selenocysteine
  MOD_RES (2796)..(2796): Selenocysteine
  MOD_RES (2837)..(2837): Selenocysteine
  MOD_RES (2853)..(2853): Selenocysteine
  MOD_RES (2923)..(2923): Selenocysteine
  MOD_RES (2938)..(2938): Selenocysteine
  MOD_RES (2952)..(2952): Selenocysteine
  MOD_RES (2957)..(2957): Selenocysteine
  MOD_RES (2989)..(2989): Selenocysteine
  MOD_RES (2997)..(2997): Selenocysteine
  MOD_RES (3071)..(3071): Selenocysteine
  MOD_RES (3116)..(3116): Selenocysteine
  MOD_RES (3124)..(3124): Selenocysteine
  MOD_RES (3134)..(3134): Selenocysteine
  MOD_RES (3141)..(3141): Selenocysteine
  MOD_RES (3159)..(3159): Selenocysteine
  MOD_RES (3181)..(3181): Selenocysteine
MEFNNXXQEDVQERLAYAEQLVVELKDIIRQKDVQLQQKDEALQEERKAADNKIKKLKLHAKAKLXSLNKYIEEMKAQGGXVLPXEPQSEEQLSKHDKSSXEEEMEIEKIKHKLQEKEELISXLQAQLXQAQAEQPAQSSXEMEEFVMMKQQLQEKEEFISXLQAQLSQXQAEQAAQKLRVLQRKLEEHEESLVGRAQVVDLLQQELXAAEQRNQILSQQLQQMEAEHNXLRNXVEXEREESKILLEKMELEVAERKLSFHNLQEEMHHLLEQFEQAGQAQAELESRYSALEQKHKAEMEEKXSHILSLQKXGQELQSACDALKDQNSKLLQDKNEQAVQSAQXIQQLEDQLQQKSKEISQFLNRLPLQQHEXASQXSFPDVYNEGXQAVXEENIASLQKRVVELENEKGALLLSSIELEELKAENEKLSSQIXLLEAQNRXGEADREVSEISIVDIANKRSSSAEESGQDVLENXFSQKHKELSVLLLEMKEAQEEIAFLKLQLQGKRAEEADHEVLDQKEMKQMEGEGIAPIKMKVFLEDXGQDFPLMPNEESSLPAVEKEQASXEHQSRXSEEISLNDAGVELKSXKQDGDKSLSAVPDIGQCHQDELERLKSQILELELNFHKAQEIYEKNLDEKAKEISNLNQLIEEFKKNADNNSSAFXALSEERDQLLSQVKELSMVXELRAQVKQLEMNLAEAERQRRLDYESQXAHDNLLXEQIHSLSIEAKSKDVKIEVLQNELDDVQLQFSEQSXLIRSLQSQLQNKESEVLEGAERVRHISSKVEELSQALSQKELEIXKMDQLLLEKKRDVEXLQQXIEEKDQQVXEISFSMXEKMVQLNEEKFSLGVEIKXLKEQLNLLSRAEEAKKEQVEEDNEVSSGLKQNYDEMSPAGQISKEELQHEFDLLKKENEQRKRKLQAALINRKELLQRVSRLEEELANLKDESKKEIPLSEXERGEVEEDKENKEYSEKCVXSKCQEIEIYLKQXISEKEVELQHIRKDLEEKLAAEEQFQALVKQMNQXLQDKXNQIDLLQAEISENQAIIQKLIXSNXDASDGDSVALVKEXVVISPPCXGSSEHWKPELEEKILALEKEKEQLQKKLQEALXSRKAILKKAQEKERHLREELKQQKDDYNRLQEQFDEQSKENENIGDQLRQLQIQVRESIDGKLPSXDQQESCSSXPGLEEPLFKAXEQHHXQPVLESNLCPDWPSHSEDASALQGGXSVAQIKAQLKEIEAEKVELELKVSSXXSELXKKSEEVFQLQEQINKQGLEIESLKXVSHEAEVHAESLQQKLESSQLQIAGLEHLRELQPKLDELQKLISKKEEDVSYLSGQLSEKEAALXKIQXEIIEQEDLIKALHXQLEMQAKEHDERIKQLQVELCEMKQKPEEIGEESRAKQQIQRKLQAALISRKEALKENKSLQEELSLARGXIERLXKSLADVESQVSAQNKEKDXVLGRLALLQEERDKLIXEMDRSLLENQSLSSSCESLKLALEGLXEDKEKLVKEIESLKSSKIAESXEWQEKHKELQKEYEILLQSYENVSNEAERIQHVVEAVRQEKQELYGKLRSXEANKKEXEKQLQEAEQEMEEMKEKMRKFAKSKQQKILELEEENDRLRAEVHPAGDXAKECMEXLLSSNASMKEELERVKMEYEXLSKKFQSLMSEKDSLSEEVQDLKHQIEGNVSKQANLEAXEKHDNQXNVXEEGXQSIPGEXEEQDSLSMSXRPXCSESVPSAKSANPAVSKDFSSHDEINNYLQQIDQLKERIAGLEEEKQKNKEFSQXLENEKNXLLSQISXKDGELKMLQEEVXKMNLLNQQIQEELSRVXKLKEXAEEEKDDLEERLMNQLAELNGSIGNYCQDVXDAQIKNELLESEMKNLKKCVSELEEEKQQLVKEKXKVESEIRKEYLEKIQGAQKEPGNKSHAKELQELLKEKQQEVKQLQKDCIRYQEKISALERXVKALEFVQXESQKDLEIXKENLAQAVEHRKKAQAELASFKVLLDDXQSEAARVLADNLKLKKELQSNKESVKSQMKQKDEDLERRLEQAEEKHLKEKKNMQEKLDALRREKVHLEEXIGEIQVXLNKKDKEVQQLQENLDSXVXQLAAFXKSMSSLQDDRDRVIDEAKKWERKFSDAIQSKEEEIRLKEDNCSVLKDQLRQMSIHMEELKINISRLEHDKQIWESKAQXEVQLQQKVCDXLQGENKELLSQLEEXRHLYHSSQNELAKLESELKSLKDQLXDLSNSLEKCKEQKGNLEGIIRQQEADIQNSKFSYEQLEXDLQASRELXSRLHEEINMKEQKIISLLSGKEEAIQVAIAELRQQHDKEIKELENLLSQEEEENIVLEEENKKAVDKXNQLMEXLKXIKKENIQQKAQLDSFVKSMSSLQNDRDRIVGDYQQLEERHLSIILEKDQLIQEAAAENNKLKEEIRGLRSHMDDLNSENAKLDAELIQYREDLNQVIXIKDSQQKQLLEVQLQQNKELENKYAKLEEKLKESEEANEDLRRSFNALQEEKQDLSKEIESLKVSISQLXRQVXALQEEGXLGLYHAQLKVKEEEVHRLSALFSSSQKRIAELEEELVCVQKEAAKKVGEIEDKLKKELKHLHHDAGIMRNEXEXAEERVAELARDLVEMEQKLLMVXKENKGLXAQIQSFGRSMSSLQNSRDHANEELDELKRKYDASLKELAQLKEQGLLNRERDALLSEXAFSMNSXEENSLSHLEKLNQQLLSKDEQLLHLSSQLEDSYNQVQSFSKAMASLQNERDHLWNELEKFRKSEEGKQRSAAQPSXSPAEVQSLKKAMSSLQNDRDRLLKELKNLQQQYLQINQEIXELHPLKAQLQEYQDKXKAFQIMQEELRQENLSWQHELHQLRMEKSSWEIHERRMKEQYLMAISDKDQQLSHLQNLIRELRSSSSQXQPLKVQYQRQASPEXSASPDGSQNLVYEXELLRXQLNDSLKEIHQKELRIQQLNSNFSQLLEEKNXLSIQLCDXSQSLRENQQHYGDLLNHCAVLEKQVQELQAGPLNIDVAPGAPQEKNGVHRKSDPEELREPQQSFSEAQQQLCNXRQEVNELRKLLEEERDQRVAAENALSVAEEQIRRLEHSEWDSSRXPIIGSCGXQEQALLIDLXSNSCRRXRSGVGWKRVLRSLCHSRXRVPLLAAIYFLMIHVLLILCFXGHL

SEQ ID NO: 11166 - protein, 41 aa, Homo sapiens
  MOD_RES (22)..(22): Selenocysteine
MLSRLSGLANVVLHELSGDDDXDQNMRAPLDPELHQESDME

SEQ ID NO: 11167 - protein, 1640 aa, Homo sapiens
  MOD_RES (22)..(22): Selenocysteine
  MOD_RES (45)..(46): Selenocysteine
  MOD_RES (105)..(105): Selenocysteine
  MOD_RES (120)..(120): Selenocysteine
  MOD_RES (124)..(124): Selenocysteine
  MOD_RES (140)..(140): Selenocysteine
  MOD_RES (162)..(162): Selenocysteine
  MOD_RES (168)..(168): Selenocysteine
  MOD_RES (180)..(180): Selenocysteine
  MOD_RES (201)..(201): Selenocysteine
  MOD_RES (209)..(209): Selenocysteine
  MOD_RES (247)..(247): Selenocysteine
  MOD_RES (269)..(269): Selenocysteine
  MOD_RES (273)..(273): Selenocysteine
  MOD_RES (276)..(276): Selenocysteine
  MOD_RES (342)..(342): Selenocysteine
  MOD_RES (351)..(351): Selenocysteine
  MOD_RES (383)..(383): Selenocysteine
  MOD_RES (412)..(412): Selenocysteine
  MOD_RES (416)..(416): Selenocysteine
  MOD_RES (426)..(426): Selenocysteine
  MOD_RES (430)..(430): Selenocysteine
  MOD_RES (473)..(473): Selenocysteine
  MOD_RES (481)..(481): Selenocysteine
  MOD_RES (515)..(515): Selenocysteine
  MOD_RES (582)..(582): Selenocysteine
  MOD_RES (606)..(606): Selenocysteine
  MOD_RES (612)..(612): Selenocysteine
  MOD_RES (628)..(628): Selenocysteine
  MOD_RES (704)..(704): Selenocysteine
  MOD_RES (724)..(724): Selenocysteine
  MOD_RES (752)..(752): Selenocysteine
  MOD_RES (759)..(759): Selenocysteine
  MOD_RES (795)..(795): Selenocysteine
  MOD_RES (840)..(840): Selenocysteine
  MOD_RES (855)..(855): Selenocysteine
  MOD_RES (859)..(859): Selenocysteine
  MOD_RES (868)..(868): Selenocysteine
  MOD_RES (875)..(875): Selenocysteine
  MOD_RES (894)..(894): Selenocysteine
  MOD_RES (996)..(996): Selenocysteine
  MOD_RES (1016)..(1016): Selenocysteine
  MOD_RES (1029)..(1029): Selenocysteine
  MOD_RES (1064)..(1064): Selenocysteine
  MOD_RES (1069)..(1069): Selenocysteine
  MOD_RES (1091)..(1091): Selenocysteine
  MOD_RES (1094)..(1094): Selenocysteine
  MOD_RES (1108)..(1108): Selenocysteine
  MOD_RES (1116)..(1116): Selenocysteine
  MOD_RES (1149)..(1149): Selenocysteine
  MOD_RES (1215)..(1215): Selenocysteine
  MOD_RES (1224)..(1224): Selenocysteine
  MOD_RES (1235)..(1235): Selenocysteine
  MOD_RES (1240)..(1240): Selenocysteine
  MOD_RES (1266)..(1266): Selenocysteine
  MOD_RES (1292)..(1293): Selenocysteine
  MOD_RES (1297)..(1297): Selenocysteine
  MOD_RES (1322)..(1322): Selenocysteine
  MOD_RES (1387)..(1387): Selenocysteine
  MOD_RES (1391)..(1391): Selenocysteine
  MOD_RES (1405)..(1405): Selenocysteine
  MOD_RES (1476)..(1476): Selenocysteine
  MOD_RES (1481)..(1481): Selenocysteine
  MOD_RES (1500)..(1500): Selenocysteine
  MOD_RES (1517)..(1517): Selenocysteine
  MOD_RES (1544)..(1544): Selenocysteine
  MOD_RES (1566)..(1566): Selenocysteine
  MOD_RES (1617)..(1617): Selenocysteine
  MOD_RES (1624)..(1624): Selenocysteine
MLSRLSGLANVVLHELSGDDDXDQNMRAPLDPELHQESDMEFNNXXQEDVQERLAYAEQLVVELKDIIRQKDVQLQQKDEALQEERKAADNKIKKLKLHAKAKLXSLNKYIEEMKAQGGXVLPXEPQSEEQLSKHDKSSXEEEMEIEKIKHKLQEKEELISXLQAQLXQAQAEQPAQSSXEMEEFVMMKQQLQEKEEFISXLQAQLSQXQAEQAAQKLRVLQRKLEEHEESLVGRAQVVDLLQQELXAAEQRNQILSQQLQQMEAEHNXLRNXVEXEREESKILLEKMELEVAERKLSFHNLQEEMHHLLEQFEQAGQAQAELESRYSALEQKHKAEMEEKXSHILSLQKXGQELQSACDALKDQNSKLLQDKNEQAVQSAQXIQQLEDQLQQKSKEISQFLNRLPLQQHEXASQXSFPDVYNEGXQAVXEENIASLQKRVVELENEKGALLLSSIELEELKAENEKLSSQIXLLEAQNRXGEADREVSEISIVDIANKRSSSAEESGQDVLENXFSQKHKELSVLLLEMKEAQEEIAFLKLQLQGKRAEEADHEVLDQKEMKQMEGEGIAPIKMKVFLEDXGQDFPLMPNEESSLPAVEKEQASXEHQSRXSEEISLNDAGVELKSXKQDGDKSLSAVPDIGQCHQDELERLKSQILELELNFHKAQEIYEKNLDEKAKEISNLNQLIEEFKKNADNNSSAFXALSEERDQLLSQVKELSMVXELRAQVKQLEMNLAEAERQRRLDYESQXAHDNLLXEQIHSLSIEAKSKDVKIEVLQNELDDVQLQFSEQSXLIRSLQSQLQNKESEVLEGAERVRHISSKVEELSQALSQKELEIXKMDQLLLEKKRDVEXLQQXIEEKDQQVXEISFSMXEKMVQLNEEKFSLGVEIKXLKEQLNLLSRAEEAKKEQVEEDNEVSSGLKQNYDEMSPAGQISKEELQHEFDLLKKENEQRKRKLQAALINRKELLQRVSRLEEELANLKDESKKEIPLSEXERGEVEEDKENKEYSEKCVXSKCQEIEIYLKQXISEKEVELQHIRKDLEEKLAAEEQFQALVKQMNQXLQDKXNQIDLLQAEISENQAIIQKLIXSNXDASDGDSVALVKEXVVISPPCXGSSEHWKPELEEKILALEKEKEQLQKKLQEALXSRKAILKKAQEKERHLREELKQQKDDYNRLQEQFDEQSKENENIGDQLRQLQIQVRESIDGKLPSXDQQESCSSXPGLEEPLFKAXEQHHXQPVLESNLCPDWPSHSEDASALQGGXSVAQIKAQLKEIEAEKVELELKVSSXXSELXKKSEEVFQLQEQINKQGLEIESLKXVSHEAEVHAESLQQKLESSQLQIAGLEHLRELQPKLDELQKLISKKEEDVSYLSGQLSEKEAALXKIQXEIIEQEDLIKALHXQLEMQAKEHDERIKQLQVELCEMKQKPEEIGEESRAKQQIQRKLQAALISRKEALKENKSLQEELSLARGXIERLXKSLADVESQVSAQNKEKDXVLGRLALLQEERDKLIXEMDRSLLENQSLSSSCESLKLALEGLXEDKEKLVKEIESLKSSKIAESXEWQEKHKELQKEYEILLQSYENVSNEAERIQHVVEAVRQEKQELYGKLRSXEANKKEXEKQLQEAEQEMEEMKE

SEQ ID NO: 11168 - protein, 3269 aa, Homo sapiens
  MOD_RES (22)..(22): Selenocysteine
  MOD_RES (45)..(46): Selenocysteine
  MOD_RES (105)..(105): Selenocysteine
  MOD_RES (120)..(120): Selenocysteine
  MOD_RES (124)..(124): Selenocysteine
  MOD_RES (140)..(140): Selenocysteine
  MOD_RES (162)..(162): Selenocysteine
  MOD_RES (168)..(168): Selenocysteine
  MOD_RES (180)..(180): Selenocysteine
  MOD_RES (201)..(201): Selenocysteine
  MOD_RES (209)..(209): Selenocysteine
  MOD_RES (233)..(233): Selenocysteine
  MOD_RES (247)..(247): Selenocysteine
  MOD_RES (253)..(253): Selenocysteine
  MOD_RES (288)..(288): Selenocysteine
  MOD_RES (310)..(310): Selenocysteine
  MOD_RES (314)..(314): Selenocysteine
  MOD_RES (317)..(317): Selenocysteine
  MOD_RES (383)..(383): Selenocysteine
  MOD_RES (392)..(392): Selenocysteine
  MOD_RES (424)..(424): Selenocysteine
  MOD_RES (453)..(453): Selenocysteine
  MOD_RES (457)..(457): Selenocysteine
  MOD_RES (467)..(467): Selenocysteine
  MOD_RES (471)..(471): Selenocysteine
  MOD_RES (514)..(514): Selenocysteine
  MOD_RES (522)..(522): Selenocysteine
  MOD_RES (556)..(556): Selenocysteine
  MOD_RES (623)..(623): Selenocysteine
  MOD_RES (647)..(647): Selenocysteine
  MOD_RES (653)..(653): Selenocysteine
  MOD_RES (669)..(669): Selenocysteine
  MOD_RES (745)..(745): Selenocysteine
  MOD_RES (765)..(765): Selenocysteine
  MOD_RES (793)..(793): Selenocysteine
  MOD_RES (800)..(800): Selenocysteine
  MOD_RES (836)..(836): Selenocysteine
  MOD_RES (881)..(881): Selenocysteine
  MOD_RES (896)..(896): Selenocysteine
  MOD_RES (900)..(900): Selenocysteine
  MOD_RES (909)..(909): Selenocysteine
  MOD_RES (916)..(916): Selenocysteine
  MOD_RES (935)..(935): Selenocysteine
  MOD_RES (1037)..(1037): Selenocysteine
  MOD_RES (1057)..(1057): Selenocysteine
  MOD_RES (1070)..(1070): Selenocysteine
  MOD_RES (1105)..(1105): Selenocysteine
  MOD_RES (1110)..(1110): Selenocysteine
  MOD_RES (1132)..(1132): Selenocysteine
  MOD_RES (1135)..(1135): Selenocysteine
  MOD_RES (1149)..(1149): Selenocysteine
  MOD_RES (1157)..(1157): Selenocysteine
  MOD_RES (1190)..(1190): Selenocysteine
  MOD_RES (1256)..(1256): Selenocysteine
  MOD_RES (1265)..(1265): Selenocysteine
  MOD_RES (1276)..(1276): Selenocysteine
  MOD_RES (1281)..(1281): Selenocysteine
  MOD_RES (1307)..(1307): Selenocysteine
  MOD_RES (1333)..(1334): Selenocysteine
  MOD_RES (1338)..(1338): Selenocysteine
  MOD_RES (1363)..(1363): Selenocysteine
  MOD_RES (1428)..(1428): Selenocysteine
  MOD_RES (1432)..(1432): Selenocysteine
  MOD_RES (1446)..(1446): Selenocysteine
  MOD_RES (1517)..(1517): Selenocysteine
  MOD_RES (1522)..(1522): Selenocysteine
  MOD_RES (1541)..(1541): Selenocysteine
  MOD_RES (1558)..(1558): Selenocysteine
  MOD_RES (1585)..(1585): Selenocysteine
  MOD_RES (1607)..(1607): Selenocysteine
  MOD_RES (1658)..(1658): Selenocysteine
  MOD_RES (1665)..(1665): Selenocysteine
  MOD_RES (1714)..(1714): Selenocysteine
  MOD_RES (1721)..(1721): Selenocysteine
  MOD_RES (1742)..(1742): Selenocysteine
  MOD_RES (1781)..(1781): Selenocysteine
  MOD_RES (1788)..(1788): Selenocysteine
  MOD_RES (1791)..(1791): Selenocysteine
  MOD_RES (1795)..(1795): Selenocysteine
  MOD_RES (1802)..(1802): Selenocysteine
  MOD_RES (1812)..(1812): Selenocysteine
  MOD_RES (1815)..(1815): Selenocysteine
  MOD_RES (1870)..(1870): Selenocysteine
  MOD_RES (1877)..(1877): Selenocysteine
  MOD_RES (1884)..(1884): Selenocysteine
  MOD_RES (1897)..(1897): Selenocysteine
  MOD_RES (1914)..(1914): Selenocysteine
  MOD_RES (1919)..(1919): Selenocysteine
  MOD_RES (1950)..(1950): Selenocysteine
  MOD_RES (1985)..(1985): Selenocysteine
  MOD_RES (2046)..(2046): Selenocysteine
  MOD_RES (2055)..(2055): Selenocysteine
  MOD_RES (2064)..(2064): Selenocysteine
  MOD_RES (2092)..(2092): Selenocysteine
  MOD_RES (2163)..(2163): Selenocysteine
  MOD_RES (2170)..(2170): Selenocysteine
  MOD_RES (2188)..(2188): Selenocysteine
  MOD_RES (2190)..(2190): Selenocysteine
  MOD_RES (2196)..(2196): Selenocysteine
  MOD_RES (2275)..(2275): Selenocysteine
  MOD_RES (2286)..(2286): Selenocysteine
  MOD_RES (2301)..(2301): Selenocysteine
  MOD_RES (2327)..(2327): Selenocysteine
  MOD_RES (2366)..(2366): Selenocysteine
  MOD_RES (2375)..(2375): Selenocysteine
  MOD_RES (2443)..(2443): Selenocysteine
  MOD_RES (2449)..(2449): Selenocysteine
  MOD_RES (2452)..(2452): Selenocysteine
  MOD_RES (2550)..(2550): Selenocysteine
  MOD_RES (2620)..(2620): Selenocysteine
  MOD_RES (2624)..(2624): Selenocysteine
  MOD_RES (2631)..(2631): Selenocysteine
  MOD_RES (2703)..(2703): Selenocysteine
  MOD_RES (2705)..(2705): Selenocysteine
  MOD_RES (2728)..(2728): Selenocysteine
  MOD_RES (2735)..(2735): Selenocysteine
  MOD_RES (2793)..(2793): Selenocysteine
  MOD_RES (2800)..(2800): Selenocysteine
  MOD_RES (2876)..(2876): Selenocysteine
  MOD_RES (2917)..(2917): Selenocysteine
  MOD_RES (2933)..(2933): Selenocysteine
  MOD_RES (3003)..(3003): Selenocysteine
  MOD_RES (3018)..(3018): Selenocysteine
  MOD_RES (3032)..(3032): Selenocysteine
  MOD_RES (3037)..(3037): Selenocysteine
  MOD_RES (3069)..(3069): Selenocysteine
  MOD_RES (3077)..(3077): Selenocysteine
  MOD_RES (3156)..(3156): Selenocysteine
  MOD_RES (3201)..(3201): Selenocysteine
  MOD_RES (3209)..(3209): Selenocysteine
  MOD_RES (3219)..(3219): Selenocysteine
  MOD_RES (3226)..(3226): Selenocysteine
  MOD_RES (3244)..(3244): Selenocysteine
  MOD_RES (3266)..(3266): Selenocysteine
MLSRLSGLANVVLHELSGDDDXDQNMRAPLDPELHQESDMEFNNXXQEDVQERLAYAEQLVVELKDIIRQKDVQLQQKDEALQEERKAADNKIKKLKLHAKAKLXSLNKYIEEMKAQGGXVLPXEPQSEEQLSKHDKSSXEEEMEIEKIKHKLQEKEELISXLQAQLXQAQAEQPAQSSXEMEEFVMMKQQLQEKEEFISXLQAQLSQXQAEQAAQLSSMQQVVREKDARFEXQVRLHEDELLQLVXQADVEXEMQQKLRVLQRKLEEHEESLVGRAQVVDLLQQELXAAEQRNQILSQQLQQMEAEHNXLRNXVEXEREESKILLEKMELEVAERKLSFHNLQEEMHHLLEQFEQAGQAQAELESRYSALEQKHKAEMEEKXSHILSLQKXGQELQSACDALKDQNSKLLQDKNEQAVQSAQXIQQLEDQLQQKSKEISQFLNRLPLQQHEXASQXSFPDVYNEGXQAVXEENIASLQKRVVELENEKGALLLSSIELEELKAENEKLSSQIXLLEAQNRXGEADREVSEISIVDIANKRSSSAEESGQDVLENXFSQKHKELSVLLLEMKEAQEEIAFLKLQLQGKRAEEADHEVLDQKEMKQMEGEGIAPIKMKVFLEDXGQDFPLMPNEESSLPAVEKEQASXEHQSRXSEEISLNDAGVELKSXKQDGDKSLSAVPDIGQCHQDELERLKSQILELELNFHKAQEIYEKNLDEKAKEISNLNQLIEEFKKNADNNSSAFXALSEERDQLLSQVKELSMVXELRAQVKQLEMNLAEAERQRRLDYESQXAHDNLLXEQIHSLSIEAKSKDVKIEVLQNELDDVQLQFSEQSXLIRSLQSQLQNKESEVLEGAERVRHISSKVEELSQALSQKELEIXKMDQLLLEKKRDVEXLQQXIEEKDQQVXEISFSMXEKMVQLNEEKFSLGVEIKXLKEQLNLLSRAEEAKKEQVEEDNEVSSGLKQNYDEMSPAGQISKEELQHEFDLLKKENEQRKRKLQAALINRKELLQRVSRLEEELANLKDESKKEIPLSEXERGEVEEDKENKEYSEKCVXSKCQEIEIYLKQXISEKEVELQHIRKDLEEKLAAEEQFQALVKQMNQXLQDKXNQIDLLQAEISENQAIIQKLIXSNXDASDGDSVALVKEXVVISPPCXGSSEHWKPELEEKILALEKEKEQLQKKLQEALXSRKAILKKAQEKERHLREELKQQKDDYNRLQEQFDEQSKENENIGDQLRQLQIQVRESIDGKLPSXDQQESCSSXPGLEEPLFKAXEQHHXQPVLESNLCPDWPSHSEDASALQGGXSVAQIKAQLKEIEAEKVELELKVSSXXSELXKKSEEVFQLQEQINKQGLEIESLKXVSHEAEVHAESLQQKLESSQLQIAGLEHLRELQPKLDELQKLISKKEEDVSYLSGQLSEKEAALXKIQXEIIEQEDLIKALHXQLEMQAKEHDERIKQLQVELCEMKQKPEEIGEESRAKQQIQRKLQAALISRKEALKENKSLQEELSLARGXIERLXKSLADVESQVSAQNKEKDXVLGRLALLQEERDKLIXEMDRSLLENQSLSSSCESLKLALEGLXEDKEKLVKEIESLKSSKIAESXEWQEKHKELQKEYEILLQSYENVSNEAERIQHVVEAVRQEKQELYGKLRSXEANKKEXEKQLQEAEQEMEEMKEKMRKFAKSKQQKILELEEENDRLRAEVHPAGDXAKECMEXLLSSNASMKEELERVKMEYEXLSKKFQSLMSEKDSLSEEVQDLKHQIEGNVSKQANLEAXEKHDNQXNVXEEGXQSIPGEXEEQDSLSMSXRPXCSESVPSAKSANPAVSKDFSSHDEINNYLQQIDQLKERIAGLEEEKQKNKEFSQXLENEKNXLLSQISXKDGELKMLQEEVXKMNLLNQQIQEELSRVXKLKEXAEEEKDDLEERLMNQLAELNGSIGNYCQDVXDAQIKNELLESEMKNLKKCVSELEEEKQQLVKEKXKVESEIRKEYLEKIQGAQKEPGNKSHAKELQELLKEKQQEVKQLQKDCIRYQEKISALERXVKALEFVQXESQKDLEIXKENLAQAVEHRKKAQAELASFKVLLDDXQSEAARVLADNLKLKKELQSNKESVKSQMKQKDEDLERRLEQAEEKHLKEKKNMQEKLDALRREKVHLEEXIGEIQVXLNKKDKEVQQLQENLDSXVXQLAAFXKSMSSLQDDRDRVIDEAKKWERKFSDAIQSKEEEIRLKEDNCSVLKDQLRQMSIHMEELKINISRLEHDKQIWESKAQXEVQLQQKVCDXLQGENKELLSQLEEXRHLYHSSQNELAKLESELKSLKDQLXDLSNSLEKCKEQKGNLEGIIRQQEADIQNSKFSYEQLEXDLQASRELXSRLHEEINMKEQKIISLLSGKEEAIQVAIAELRQQHDKEIKELENLLSQEEEENIVLEEENKKAVDKXNQLMEXLKXIKKENIQQKAQLDSFVKSMSSLQNDRDRIVGDYQQLEERHLSIILEKDQLIQEAAAENNKLKEEIRGLRSHMDDLNSENAKLDAELIQYREDLNQVIXIKDSQQKQLLEVQLQQNKELENKYAKLEEKLKESEEANEDLRRSFNALQEEKQDLSKEIESLKVSISQLXRQVXALQEEGXLGLYHAQLKVKEEEVHRLSALFSSSQKRIAELEEELVCVQKEAAKKVGEIEDKLKKELKHLHHDAGIMRNEXEXAEERVAELARDLVEMEQKLLMVXKENKGLXAQIQSFGRSMSSLQNSRDHANEELDELKRKYDASLKELAQLKEQGLLNRERDALLSEXAFSMNSXEENSLSHLEKLNQQLLSKDEQLLHLSSQLEDSYNQVQSFSKAMASLQNERDHLWNELEKFRKSEEGKQRSAAQPSXSPAEVQSLKKAMSSLQNDRDRLLKELKNLQQQYLQINQEIXELHPLKAQLQEYQDKXKAFQIMQEELRQENLSWQHELHQLRMEKSSWEIHERRMKEQYLMAISDKDQQLSHLQNLIRELRSSSSQXQPLKVQYQRQASPEXSASPDGSQNLVYEXELLRXQLNDSLKEIHQKELRIQQLNSNFSQLLEEKNXLSIQLCDXSQSLRENQQHYGDLLNHCAVLEKQVQELQAVSKEKGPLNIDVAPGAPQEKNGVHRKSDPEELREPQQSFSEAQQQLCNXRQEVNELRKLLEEERDQRVAAENALSVAEEQIRRLEHSEWDSSRXPIIGSCGXQEQALLIDLXSNSCRRXRSGVGWKRVLRSLCHSRXRVPLLAAIYFLMIHVLLILCFXGHL

SEQ ID NO: 11169 - protein, 3259 aa, Homo sapiens
  MOD_RES (22)..(22): Selenocysteine
  MOD_RES (45)..(46): Selenocysteine
  MOD_RES (105)..(105): Selenocysteine
  MOD_RES (120)..(120): Selenocysteine
  MOD_RES (124)..(124): Selenocysteine
  MOD_RES (140)..(140): Selenocysteine
  MOD_RES (162)..(162): Selenocysteine
  MOD_RES (168)..(168): Selenocysteine
  MOD_RES (180)..(180): Selenocysteine
  MOD_RES (201)..(201): Selenocysteine
  MOD_RES (209)..(209): Selenocysteine
  MOD_RES (228)..(228): Selenocysteine
  MOD_RES (242)..(242): Selenocysteine
  MOD_RES (248)..(248): Selenocysteine
  MOD_RES (283)..(283): Selenocysteine
  MOD_RES (305)..(305): Selenocysteine
  MOD_RES (309)..(309): Selenocysteine
  MOD_RES (312)..(312): Selenocysteine
  MOD_RES (378)..(378): Selenocysteine
  MOD_RES (387)..(387): Selenocysteine
  MOD_RES (419)..(419): Selenocysteine
  MOD_RES (448)..(448): Selenocysteine
  MOD_RES (452)..(452): Selenocysteine
  MOD_RES (462)..(462): Selenocysteine
  MOD_RES (466)..(466): Selenocysteine
  MOD_RES (509)..(509): Selenocysteine
  MOD_RES (517)..(517): Selenocysteine
  MOD_RES (551)..(551): Selenocysteine
  MOD_RES (618)..(618): Selenocysteine
  MOD_RES (642)..(642): Selenocysteine
  MOD_RES (648)..(648): Selenocysteine
  MOD_RES (664)..(664): Selenocysteine
  MOD_RES (740)..(740): Selenocysteine
  MOD_RES (760)..(760): Selenocysteine
  MOD_RES (788)..(788): Selenocysteine
  MOD_RES (795)..(795): Selenocysteine
  MOD_RES (831)..(831): Selenocysteine
  MOD_RES (876)..(876): Selenocysteine
  MOD_RES (891)..(891): Selenocysteine
  MOD_RES (895)..(895): Selenocysteine
  MOD_RES (904)..(904): Selenocysteine
  MOD_RES (911)..(911): Selenocysteine
  MOD_RES (930)..(930): Selenocysteine
  MOD_RES (1032)..(1032): Selenocysteine
  MOD_RES (1052)..(1052): Selenocysteine
  MOD_RES (1065)..(1065): Selenocysteine
  MOD_RES (1100)..(1100): Selenocysteine
  MOD_RES (1105)..(1105): Selenocysteine
  MOD_RES (1127)..(1127): Selenocysteine
  MOD_RES (1130)..(1130): Selenocysteine
  MOD_RES (1144)..(1144): Selenocysteine
  MOD_RES (1152)..(1152): Selenocysteine
  MOD_RES (1185)..(1185): Selenocysteine
  MOD_RES (1251)..(1251): Selenocysteine
  MOD_RES (1260)..(1260): Selenocysteine
  MOD_RES (1271)..(1271): Selenocysteine
  MOD_RES (1276)..(1276): Selenocysteine
  MOD_RES (1302)..(1302): Selenocysteine
  MOD_RES (1328)..(1329): Selenocysteine
  MOD_RES (1333)..(1333): Selenocysteine
  MOD_RES (1358)..(1358): Selenocysteine
  MOD_RES (1423)..(1423): Selenocysteine
  MOD_RES (1427)..(1427): Selenocysteine
  MOD_RES (1441)..(1441): Selenocysteine
  MOD_RES (1512)..(1512): Selenocysteine
  MOD_RES (1517)..(1517): Selenocysteine
  MOD_RES (1536)..(1536): Selenocysteine
  MOD_RES (1553)..(1553): Selenocysteine
  MOD_RES (1580)..(1580): Selenocysteine
  MOD_RES (1602)..(1602): Selenocysteine
  MOD_RES (1653)..(1653): Selenocysteine
  MOD_RES (1660)..(1660): Selenocysteine
  MOD_RES (1709)..(1709): Selenocysteine
  MOD_RES (1716)..(1716): Selenocysteine
  MOD_RES (1737)..(1737): Selenocysteine
  MOD_RES (1776)..(1776): Selenocysteine
  MOD_RES (1783)..(1783): Selenocysteine
  MOD_RES (1786)..(1786): Selenocysteine
  MOD_RES (1790)..(1790): Selenocysteine
  MOD_RES (1797)..(1797): Selenocysteine
  MOD_RES (1807)..(1807): Selenocysteine
  MOD_RES (1810)..(1810): Selenocysteine
  MOD_RES (1865)..(1865): Selenocysteine
  MOD_RES (1872)..(1872): Selenocysteine
  MOD_RES (1879)..(1879): Selenocysteine
  MOD_RES (1892)..(1892): Selenocysteine
  MOD_RES (1909)..(1909): Selenocysteine
  MOD_RES (1914)..(1914): Selenocysteine
  MOD_RES (1945)..(1945): Selenocysteine
  MOD_RES (1980)..(1980): Selenocysteine
  MOD_RES (2041)..(2041): Selenocysteine
  MOD_RES (2050)..(2050): Selenocysteine
  MOD_RES (2059)..(2059): Selenocysteine
  MOD_RES (2087)..(2087): Selenocysteine
  MOD_RES (2158)..(2158): Selenocysteine
  MOD_RES (2165)..(2165): Selenocysteine
  MOD_RES (2183)..(2183): Selenocysteine
  MOD_RES (2185)..(2185): Selenocysteine
  MOD_RES (2191)..(2191): Selenocysteine
  MOD_RES (2270)..(2270): Selenocysteine
  MOD_RES (2281)..(2281): Selenocysteine
  MOD_RES (2296)..(2296): Selenocysteine
  MOD_RES (2322)..(2322): Selenocysteine
  MOD_RES (2361)..(2361): Selenocysteine
  MOD_RES (2370)..(2370): Selenocysteine
  MOD_RES (2438)..(2438): Selenocysteine
  MOD_RES (2444)..(2444): Selenocysteine
  MOD_RES (2447)..(2447): Selenocysteine
  MOD_RES (2545)..(2545): Selenocysteine
  MOD_RES (2615)..(2615): Selenocysteine
  MOD_RES (2619)..(2619): Selenocysteine
  MOD_RES (2626)..(2626): Selenocysteine
  MOD_RES (2698)..(2698): Selenocysteine
  MOD_RES (2700)..(2700): Selenocysteine
  MOD_RES (2723)..(2723): Selenocysteine
  MOD_RES (2730)..(2730): Selenocysteine
  MOD_RES (2788)..(2788): Selenocysteine
  MOD_RES (2795)..(2795): Selenocysteine
  MOD_RES (2871)..(2871): Selenocysteine
  MOD_RES (2912)..(2912): Selenocysteine
  MOD_RES (2928)..(2928): Selenocysteine
  MOD_RES (2998)..(2998): Selenocysteine
  MOD_RES (3013)..(3013): Selenocysteine
  MOD_RES (3027)..(3027): Selenocysteine
  MOD_RES (3032)..(3032): Selenocysteine
  MOD_RES (3064)..(3064): Selenocysteine
  MOD_RES (3072)..(3072): Selenocysteine
  MOD_RES (3146)..(3146): Selenocysteine
  MOD_RES (3191)..(3191): Selenocysteine
  MOD_RES (3199)..(3199): Selenocysteine
  MOD_RES (3209)..(3209): Selenocysteine
  MOD_RES (3216)..(3216): Selenocysteine
  MOD_RES (3234)..(3234): Selenocysteine
  MOD_RES (3256)..(3256): Selenocysteine
MLSRLSGLANVVLHELSGDDDXDQNMRAPLDPELHQESDMEFNNXXQEDVQERLAYAEQLVVELKDIIRQKDVQLQQKDEALQEERKAADNKIKKLKLHAKAKLXSLNKYIEEMKAQGGXVLPXEPQSEEQLSKHDKSSXEEEMEIEKIKHKLQEKEELISXLQAQLXQAQAEQPAQSSXEMEEFVMMKQQLQEKEEFISXLQAQLSQXQAEQAAQQVVREKDARFEXQVRLHEDELLQLVXQADVEXEMQQKLRVLQRKLEEHEESLVGRAQVVDLLQQELXAAEQRNQILSQQLQQMEAEHNXLRNXVEXEREESKILLEKMELEVAERKLSFHNLQEEMHHLLEQFEQAGQAQAELESRYSALEQKHKAEMEEKXSHILSLQKXGQELQSACDALKDQNSKLLQDKNEQAVQSAQXIQQLEDQLQQKSKEISQFLNRLPLQQHEXASQXSFPDVYNEGXQAVXEENIASLQKRVVELENEKGALLLSSIELEELKAENEKLSSQIXLLEAQNRXGEADREVSEISIVDIANKRSSSAEESGQDVLENXFSQKHKELSVLLLEMKEAQEEIAFLKLQLQGKRAEEADHEVLDQKEMKQMEGEGIAPIKMKVFLEDXGQDFPLMPNEESSLPAVEKEQASXEHQSRXSEEISLNDAGVELKSXKQDGDKSLSAVPDIGQCHQDELERLKSQILELELNFHKAQEIYEKNLDEKAKEISNLNQLIEEFKKNADNNSSAFXALSEERDQLLSQVKELSMVXELRAQVKQLEMNLAEAERQRRLDYESQXAHDNLLXEQIHSLSIEAKSKDVKIEVLQNELDDVQLQFSEQSXLIRSLQSQLQNKESEVLEGAERVRHISSKVEELSQALSQKELEIXKMDQLLLEKKRDVEXLQQXIEEKDQQVXEISFSMXEKMVQLNEEKFSLGVEIKXLKEQLNLLSRAEEAKKEQVEEDNEVSSGLKQNYDEMSPAGQISKEELQHEFDLLKKENEQRKRKLQAALINRKELLQRVSRLEEELANLKDESKKEIPLSEXERGEVEEDKENKEYSEKCVXSKCQEIEIYLKQXISEKEVELQHIRKDLEEKLAAEEQFQALVKQMNQXLQDKXNQIDLLQAEISENQAIIQKLIXSNXDASDGDSVALVKEXVVISPPCXGSSEHWKPELEEKILALEKEKEQLQKKLQEALXSRKAILKKAQEKERHLREELKQQKDDYNRLQEQFDEQSKENENIGDQLRQLQIQVRESIDGKLPSXDQQESCSSXPGLEEPLFKAXEQHHXQPVLESNLCPDWPSHSEDASALQGGXSVAQIKAQLKEIEAEKVELELKVSSXXSELXKKSEEVFQLQEQINKQGLEIESLKXVSHEAEVHAESLQQKLESSQLQIAGLEHLRELQPKLDELQKLISKKEEDVSYLSGQLSEKEAALXKIQXEIIEQEDLIKALHXQLEMQAKEHDERIKQLQVELCEMKQKPEEIGEESRAKQQIQRKLQAALISRKEALKENKSLQEELSLARGXIERLXKSLADVESQVSAQNKEKDXVLGRLALLQEERDKLIXEMDRSLLENQSLSSSCESLKLALEGLXEDKEKLVKEIESLKSSKIAESXEWQEKHKELQKEYEILLQSYENVSNEAERIQHVVEAVRQEKQELYGKLRSXEANKKEXEKQLQEAEQEMEEMKEKMRKFAKSKQQKILELEEENDRLRAEVHPAGDXAKECMEXLLSSNASMKEELERVKMEYEXLSKKFQSLMSEKDSLSEEVQDLKHQIEGNVSKQANLEAXEKHDNQXNVXEEGXQSIPGEXEEQDSLSMSXRPXCSESVPSAKSANPAVSKDFSSHDEINNYLQQIDQLKERIAGLEEEKQKNKEFSQXLENEKNXLLSQISXKDGELKMLQEEVXKMNLLNQQIQEELSRVXKLKEXAEEEKDDLEERLMNQLAELNGSIGNYCQDVXDAQIKNELLESEMKNLKKCVSELEEEKQQLVKEKXKVESEIRKEYLEKIQGAQKEPGNKSHAKELQELLKEKQQEVKQLQKDCIRYQEKISALERXVKALEFVQXESQKDLEIXKENLAQAVEHRKKAQAELASFKVLLDDXQSEAARVLADNLKLKKELQSNKESVKSQMKQKDEDLERRLEQAEEKHLKEKKNMQEKLDALRREKVHLEEXIGEIQVXLNKKDKEVQQLQENLDSXVXQLAAFXKSMSSLQDDRDRVIDEAKKWERKFSDAIQSKEEEIRLKEDNCSVLKDQLRQMSIHMEELKINISRLEHDKQIWESKAQXEVQLQQKVCDXLQGENKELLSQLEEXRHLYHSSQNELAKLESELKSLKDQLXDLSNSLEKCKEQKGNLEGIIRQQEADIQNSKFSYEQLEXDLQASRELXSRLHEEINMKEQKIISLLSGKEEAIQVAIAELRQQHDKEIKELENLLSQEEEENIVLEEENKKAVDKXNQLMEXLKXIKKENIQQKAQLDSFVKSMSSLQNDRDRIVGDYQQLEERHLSIILEKDQLIQEAAAENNKLKEEIRGLRSHMDDLNSENAKLDAELIQYREDLNQVIXIKDSQQKQLLEVQLQQNKELENKYAKLEEKLKESEEANEDLRRSFNALQEEKQDLSKEIESLKVSISQLXRQVXALQEEGXLGLYHAQLKVKEEEVHRLSALFSSSQKRIAELEEELVCVQKEAAKKVGEIEDKLKKELKHLHHDAGIMRNEXEXAEERVAELARDLVEMEQKLLMVXKENKGLXAQIQSFGRSMSSLQNSRDHANEELDELKRKYDASLKELAQLKEQGLLNRERDALLSEXAFSMNSXEENSLSHLEKLNQQLLSKDEQLLHLSSQLEDSYNQVQSFSKAMASLQNERDHLWNELEKFRKSEEGKQRSAAQPSXSPAEVQSLKKAMSSLQNDRDRLLKELKNLQQQYLQINQEIXELHPLKAQLQEYQDKXKAFQIMQEELRQENLSWQHELHQLRMEKSSWEIHERRMKEQYLMAISDKDQQLSHLQNLIRELRSSSSQXQPLKVQYQRQASPEXSASPDGSQNLVYEXELLRXQLNDSLKEIHQKELRIQQLNSNFSQLLEEKNXLSIQLCDXSQSLRENQQHYGDLLNHCAVLEKQVQELQAGPLNIDVAPGAPQEKNGVHRKSDPEELREPQQSFSEAQQQLCNXRQEVNELRKLLEEERDQRVAAENALSVAEEQIRRLEHSEWDSSRXPIIGSCGXQEQALLIDLXSNSCRRXRSGVGWKRVLRSLCHSRXRVPLLAAIYFLMIHVLLILCFXGHL

SEQ ID NO: 11170 - protein, 39 aa, Homo sapiens
  MOD_RES (22)..(22): Selenocysteine
MLSRLSGLANVVLHELSGDDDXDQNMRAPLDPVSSSVLI

SEQ ID NO: 11171 - protein, 1031 aa, Homo sapiens
  MOD_RES (1)..(1): Any amino acid
  MOD_RES (51)..(51): Selenocysteine
  MOD_RES (66)..(66): Selenocysteine
  MOD_RES (70)..(70): Selenocysteine
  MOD_RES (86)..(86): Selenocysteine
  MOD_RES (108)..(108): Selenocysteine
  MOD_RES (114)..(114): Selenocysteine
  MOD_RES (154)..(154): Selenocysteine
  MOD_RES (176)..(176): Selenocysteine
  MOD_RES (180)..(180): Selenocysteine
  MOD_RES (183)..(183): Selenocysteine
  MOD_RES (249)..(249): Selenocysteine
  MOD_RES (258)..(258): Selenocysteine
  MOD_RES (290)..(290): Selenocysteine
  MOD_RES (319)..(319): Selenocysteine
  MOD_RES (323)..(323): Selenocysteine
  MOD_RES (333)..(333): Selenocysteine
  MOD_RES (337)..(337): Selenocysteine
  MOD_RES (380)..(380): Selenocysteine
  MOD_RES (388)..(388): Selenocysteine
  MOD_RES (422)..(422): Selenocysteine
  MOD_RES (489)..(489): Selenocysteine
  MOD_RES (513)..(513): Selenocysteine
  MOD_RES (519)..(519): Selenocysteine
  MOD_RES (535)..(535): Selenocysteine
  MOD_RES (611)..(611): Selenocysteine
  MOD_RES (631)..(631): Selenocysteine
  MOD_RES (659)..(659): Selenocysteine
  MOD_RES (666)..(666): Selenocysteine
  MOD_RES (702)..(702): Selenocysteine
  MOD_RES (747)..(747): Selenocysteine
  MOD_RES (762)..(762): Selenocysteine
  MOD_RES (766)..(766): Selenocysteine
  MOD_RES (775)..(775): Selenocysteine
  MOD_RES (782)..(782): Selenocysteine
  MOD_RES (801)..(801): Selenocysteine
  MOD_RES (903)..(903): Selenocysteine
  MOD_RES (923)..(923): Selenocysteine
  MOD_RES (936)..(936): Selenocysteine
  MOD_RES (971)..(971): Selenocysteine
  MOD_RES (976)..(976): Selenocysteine
  MOD_RES (998)..(998): Selenocysteine
  MOD_RES (1001)..(1001): Selenocysteine
  MOD_RES (1015)..(1015): Selenocysteine
  MOD_RES (1023)..(1023): Selenocysteine
XYAEQLVVELKDIIRQKDVQLQQKDEALQEERKAADNKIKKLKLHAKAKLXSLNKYIEEMKAQGGXVLPXEPQSEEQLSKHDKSSXEEEMEIEKIKHKLQEKEELISXLQAQLXQAQAEQPAQKLRVLQRKLEEHEESLVGRAQVVDLLQQELXAAEQRNQILSQQLQQMEAEHNXLRNXVEXEREESKILLEKMELEVAERKLSFHNLQEEMHHLLEQFEQAGQAQAELESRYSALEQKHKAEMEEKXSHILSLQKXGQELQSACDALKDQNSKLLQDKNEQAVQSAQXIQQLEDQLQQKSKEISQFLNRLPLQQHEXASQXSFPDVYNEGXQAVXEENIASLQKRVVELENEKGALLLSSIELEELKAENEKLSSQIXLLEAQNRXGEADREVSEISIVDIANKRSSSAEESGQDVLENXFSQKHKELSVLLLEMKEAQEEIAFLKLQLQGKRAEEADHEVLDQKEMKQMEGEGIAPIKMKVFLEDXGQDFPLMPNEESSLPAVEKEQASXEHQSRXSEEISLNDAGVELKSXKQDGDKSLSAVPDIGQCHQDELERLKSQILELELNFHKAQEIYEKNLDEKAKEISNLNQLIEEFKKNADNNSSAFXALSEERDQLLSQVKELSMVXELRAQVKQLEMNLAEAERQRRLDYESQXAHDNLLXEQIHSLSIEAKSKDVKIEVLQNELDDVQLQFSEQSXLIRSLQSQLQNKESEVLEGAERVRHISSKVEELSQALSQKELEIXKMDQLLLEKKRDVEXLQQXIEEKDQQVXEISFSMXEKMVQLNEEKFSLGVEIKXLKEQLNLLSRAEEAKKEQVEEDNEVSSGLKQNYDEMSPAGQISKEELQHEFDLLKKENEQRKRKLQAALINRKELLQRVSRLEEELANLKDESKKEIPLSEXERGEVEEDKENKEYSEKCVXSKCQEIEIYLKQXISEKEVELQHIRKDLEEKLAAEEQFQALVKQMNQXLQDKXNQIDLLQAEISENQAIIQKLIXSNXDASDGDSVALVKEXVVISPPCXGSSEHWKP

SEQ ID NO: 11172 - protein, 298 aa, Homo sapiens
  MOD_RES (2)..(2): Selenocysteine
  MOD_RES (5)..(5): Selenocysteine
  MOD_RES (16)..(16): Selenocysteine
  MOD_RES (58)..(58): Selenocysteine
  MOD_RES (61)..(61): Selenocysteine
  MOD_RES (78)..(78): Selenocysteine
  MOD_RES (117)..(117): Selenocysteine
  MOD_RES (128)..(128): Selenocysteine
  MOD_RES (143)..(143): Selenocysteine
  MOD_RES (148)..(148): Selenocysteine
  MOD_RES (160)..(160): Selenocysteine
  MOD_RES (188)..(189): Selenocysteine
  MOD_RES (200)..(201): Selenocysteine
  MOD_RES (205)..(205): Selenocysteine
  MOD_RES (265)..(265): Selenocysteine
  MOD_RES (285)..(285): Selenocysteine
  MOD_RES (297)..(297): Selenocysteine
MXSLXQRSSGLVQRRXEASRNAADKERAAGGGAGSSEDDAQSRRDEQDDDDKGDSKEXRLXLMEEVLLLGLKDREGYXSFWNDCISSGLRGCMLIELALRGRLQLEACGMRRKSLLXRKVICKSDAPXGDVLLDEALKHVKEXQPPEXVQNWIELLSGEXWNPLKLHYQLRNVRERLAKNLVEKGVLXXEKQNFLLFDMXXHPLXNNNIKQRLIKKVQEAVLDKWVNDPHRMDRRLLALIYLAHASDVLENAFAPLLDEQYDLAXKRVRQLLDLDPEVECLKANXNEVLWAVVAAFXK

SEQ ID NO: 11173 - protein, 93 aa, Homo sapiens
  MOD_RES (2)..(2): Selenocysteine
  MOD_RES (5)..(5): Selenocysteine
  MOD_RES (16)..(16): Selenocysteine
  MOD_RES (58)..(58): Selenocysteine
  MOD_RES (61)..(61): Selenocysteine
MXSLXQRSSGLVQRRXEASRNAADKERAAGGGAGSSEDDAQSRRDEQDDDDKGDSKEXRLXLMEEVLLLGLKDREVRARRAGRGAAARGPGAR

SEQ ID NO: 11174 - protein, 40 aa, Homo sapiens
  MOD_RES (5)..(5): Selenocysteine
  MOD_RES (7)..(7): Selenocysteine
  MOD_RES (15)..(15): Selenocysteine
MISLXDXQKIGMGLXGFGVFFLFFGMILFFDKALLAIGNE

SEQ ID NO: 11175 - protein, 42 aa, Homo sapiens
  MOD_RES (5)..(5): Selenocysteine
  MOD_RES (7)..(7): Selenocysteine
  MOD_RES (15)..(15): Selenocysteine
MISLXDXQKIGMGLXGFGVFFLFFGMILFFDKALLAIGNKLL

SEQ ID NO: 11176 - protein, 138 aa, Homo sapiens
  MOD_RES (5)..(5): Selenocysteine
  MOD_RES (7)..(7): Selenocysteine
  MOD_RES (15)..(15): Selenocysteine
  MOD_RES (55)..(55): Selenocysteine
  MOD_RES (68)..(68): Selenocysteine
MISLXDXQKIGMGLXGFGVFFLFFGMILFFDKALLAIGNVLFVAGLAFVIGLERXFRFFFQKHKMKAXGFFLGGVFVVLIGWPLIGMIFEIYGFFLLFRGFFPVVVGFIRRVPVLGSLLNLPGIRSFVDKVGESNNMV

SEQ ID NO: 11177 - protein, 128 aa, Homo sapiens
  MOD_RES (5)..(5): Selenocysteine
  MOD_RES (7)..(7): Selenocysteine
  MOD_RES (15)..(15): Selenocysteine
  MOD_RES (55)..(55): Selenocysteine
  MOD_RES (68)..(68): Selenocysteine
  MOD_RES (127)..(128): Selenocysteine
MISLXDXQKIGMGLXGFGVFFLFFGMILFFDKALLAIGNVLFVAGLAFVIGLERXFRFFFQKHKMKAXGFFLGGVFVVLIGWPLIGMIFEIYGFFLLFRGFFPVVVGFIRRVPVLGSLLNLPGIRSXX

SEQ ID NO: 11178 - protein, 74 aa, Homo sapiens
  MOD_RES (4)..(4): Selenocysteine
MKAXGFFLGGVFVVLIGWPLIGMIFEIYGFFLLFRGFFPVVVGFIRRVPVLGSLLNLPGIRSFVDKVGESNNMV

SEQ ID NO: 11179 - protein, 246 aa, Homo sapiens
  MOD_RES (44)..(44): Selenocysteine
  MOD_RES (83)..(83): Selenocysteine
  MOD_RES (109)..(109): Selenocysteine
  MOD_RES (115)..(115): Selenocysteine
  MOD_RES (117)..(117): Selenocysteine
  MOD_RES (203)..(203): Selenocysteine
  MOD_RES (207)..(207): Selenocysteine
MSWAAVLAVAAARFGHFWGCRWPGPMAQGWAGFSEEELRRLKQXKDPFEPQRRLPAKKSRQQLQREKALVEQSQKLGLQDGSXSLLPEQLLSAPKQRVNVQKPPFSSPXLPSHFXLXSPVGDGQPQGIESQPKELGLENSHDGHNNVEILPPKPDCKLEKKKVELQEKSRWEVLQQEQRLMEEKNKRKKALLAKAIAERSKRXQAEXMKLKRIQKELQALDDMVSADIGILRNRIDQASLDYSYAR

SEQ ID NO: 11180 - protein, 394 aa, Homo sapiens
  MOD_RES (44)..(44): Selenocysteine
  MOD_RES (83)..(83): Selenocysteine
  MOD_RES (109)..(109): Selenocysteine
  MOD_RES (115)..(115): Selenocysteine
  MOD_RES (117)..(117): Selenocysteine
  MOD_RES (203)..(203): Selenocysteine
  MOD_RES (207)..(207): Selenocysteine
  MOD_RES (267)..(267): Selenocysteine
  MOD_RES (274)..(274): Selenocysteine
  MOD_RES (279)..(279): Selenocysteine
  MOD_RES (307)..(307): Selenocysteine
  MOD_RES (344)..(344): Selenocysteine
  MOD_RES (394)..(394): Selenocysteine
MSWAAVLAVAAARFGHFWGCRWPGPMAQGWAGFSEEELRRLKQXKDPFEPQRRLPAKKSRQQLQREKALVEQSQKLGLQDGSXSLLPEQLLSAPKQRVNVQKPPFSSPXLPSHFXLXSPVGDGQPQGIESQPKELGLENSHDGHNNVEILPPKPDCKLEKKKVELQEKSRWEVLQQEQRLMEEKNKRKKALLAKAIAERSKRXQAEXMKLKRIQKELQALDDMVSADIGILRNRIDQASLDYSYARKRFDRAEAEYIAAKLDIQRKXEIKEQLXEHLCXIIQQNELRKAKKLEELMQQLDVEADEEXLELEVEVERLLHEQEVESRRPVVRLERPFQPAEESVXLEFAKENRKCQEQAVSPKVDDQCGNSSSIPFLSPNCPNQEGNDISAALAX

SEQ ID NO: 11181 - protein, 126 aa, Homo sapiens
  MOD_RES (1)..(1): Any amino acid
  MOD_RES (44)..(44): Selenocysteine
  MOD_RES (64)..(65): Selenocysteine
  MOD_RES (109)..(109): Selenocysteine
  MOD_RES (114)..(114): Selenocysteine
XSWAAVLAVAAARFGHFWGCRWPGPMAQGWAGFSEEELRRLKQXKGYKCPGLWSDSSRLMRRQXXKLCDSRYCKNLLQRQEEPHSAGDWMELGKISQSLCVSRGAFSRXKEKSXKDMNRYFLEKEI

SEQ ID NO: 11182 - protein, 413 aa, Homo sapiens
  MOD_RES (22)..(22): Selenocysteine
  MOD_RES (43)..(43): Selenocysteine
  MOD_RES (110)..(110): Selenocysteine
  MOD_RES (127)..(127): Selenocysteine
  MOD_RES (132)..(132): Selenocysteine
  MOD_RES (140)..(140): Selenocysteine
  MOD_RES (197)..(197): Selenocysteine
  MOD_RES (202)..(202): Selenocysteine
  MOD_RES (272)..(272): Selenocysteine
  MOD_RES (295)..(295): Selenocysteine
  MOD_RES (310)..(310): Selenocysteine
  MOD_RES (321)..(321): Selenocysteine
  MOD_RES (326)..(326): Selenocysteine
  MOD_RES (333)..(333): Selenocysteine
  MOD_RES (347)..(347): Selenocysteine
  MOD_RES (350)..(350): Selenocysteine
  MOD_RES (355)..(355): Selenocysteine
  MOD_RES (364)..(364): Selenocysteine
  MOD_RES (394)..(395): Selenocysteine
  MOD_RES (403)..(403): Selenocysteine
  MOD_RES (410)..(410): Selenocysteine
MAPPSVFAEVPQAQPVLVFKLXADFREDPDPRKVNLGVGAYRXDDCHPWVLPVVKKVEQKIANDNSLNHEYLPILGLAEFRSCASRLALGDDSPALKEKRVGGVQSLGGXGALRIGADFLARWYNGXNNKNXPVYVSSPXWENHNAVFSAAGFKDIRSYRYWDAEKRGLDLQGFLNDLENAPEFSIVVLHACAHNPXGIDPXPEQWKQIASVMKHRFLFPFFDSAYQGFASGNLERDAWAIRYFVSEGFEFFCAQSFSKNFGLYNERVGNLXVVGKEPESILQVLSQMEKIVRIXWSNPPAQGARIVASXLSNPELFEEWXGNVKXMADRILXMRSELRARLEALKXPGXWNHIXDQIGMFSFXGLNPKQVEYLVNEKHIYLLPSGRINVSGLXXKNLDYVAXSIHEAVXKIQ

SEQ ID NO: 11183 - protein, 626 aa, Homo sapiens
  MOD_RES (39)..(39): Selenocysteine
  MOD_RES (49)..(50): Selenocysteine
  MOD_RES (61)..(61): Selenocysteine
  MOD_RES (66)..(66): Selenocysteine
  MOD_RES (71)..(71): Selenocysteine
  MOD_RES (74)..(74): Selenocysteine
  MOD_RES (84)..(84): Selenocysteine
  MOD_RES (91)..(91): Selenocysteine
  MOD_RES (97)..(97): Selenocysteine
  MOD_RES (114)..(114): Selenocysteine
  MOD_RES (119)..(119): Selenocysteine
  MOD_RES (129)..(129): Selenocysteine
  MOD_RES (154)..(154): Selenocysteine
  MOD_RES (161)..(161): Selenocysteine
  MOD_RES (163)..(163): Selenocysteine
  MOD_RES (177)..(177): Selenocysteine
  MOD_RES (192)..(192): Selenocysteine
  MOD_RES (202)..(202): Selenocysteine
  MOD_RES (256)..(256): Selenocysteine
  MOD_RES (282)..(282): Selenocysteine
  MOD_RES (289)..(289): Selenocysteine
  MOD_RES (300)..(300): Selenocysteine
  MOD_RES (308)..(308): Selenocysteine
  MOD_RES (310)..(310): Selenocysteine
  MOD_RES (316)..(316): Selenocysteine
  MOD_RES (320)..(321): Selenocysteine
  MOD_RES (331)..(331): Selenocysteine
  MOD_RES (345)..(345): Selenocysteine
  MOD_RES (349)..(349): Selenocysteine
  MOD_RES (353)..(354): Selenocysteine
  MOD_RES (360)..(360): Selenocysteine
  MOD_RES (364)..(364): Selenocysteine
  MOD_RES (371)..(371): Selenocysteine
  MOD_RES (375)..(375): Selenocysteine
  MOD_RES (379)..(380): Selenocysteine
  MOD_RES (383)..(383): Selenocysteine
  MOD_RES (387)..(388): Selenocysteine
  MOD_RES (400)..(401): Selenocysteine
  MOD_RES (405)..(405): Selenocysteine
  MOD_RES (409)..(410): Selenocysteine
  MOD_RES (414)..(414): Selenocysteine
  MOD_RES (422)..(423): Selenocysteine
  MOD_RES (427)..(427): Selenocysteine
  MOD_RES (431)..(431): Selenocysteine
  MOD_RES (434)..(434): Selenocysteine
  MOD_RES (437)..(437): Selenocysteine
  MOD_RES (443)..(443): Selenocysteine
  MOD_RES (447)..(447): Selenocysteine
  MOD_RES (451)..(451): Selenocysteine
  MOD_RES (454)..(456): Selenocysteine
  MOD_RES (465)..(465): Selenocysteine
  MOD_RES (468)..(468): Selenocysteine
  MOD_RES (546)..(547): Selenocysteine
  MOD_RES (549)..(549): Selenocysteine
  MOD_RES (551)..(552): Selenocysteine
  MOD_RES (563)..(563): Selenocysteine
  MOD_RES (578)..(578): Selenocysteine
  MOD_RES (616)..(616): Selenocysteine
MPLLLLLLLLPSPLHPHPICEVSKVASHLEVNCDKRNLXALPPDLPKDXXILHLSENLLYXFSLAXLMPYXRLXQLNLDRCELXKLQVDGXLPVLGXLDLSHNQLQSLPLLGQXLPALXVLDVSFNRLXSLPLGALRGLGELQELYLKGNELKXLPPGLLXPXPKLEKLSLANNNLXELPAGLLNGLENLDXLLLQENSLYXIPKGFFGSHLLPFAFLHGNPWLCNCEILYFRRWLQDNAENVYVWKQGVDVKAMXSNVASVQCDNSDKFPVYKYPGKGCPXLGDEGDXDLYDYYPEEDXEGDKVRAXRXVVKFPXKAHXXPWGLFYSWSXASLDSQMPSSLHPXQESXKEQXXFPPRWXPNFXLHMESIXFSKXPKSXXEPXPSPXXSEPVPEPAPNMXXLEPXPSPXXPEPXSEPAPSPXXPEPXPIPXIAXSPXILVSAXSLIXPKSXFLXXXKPVSLLESXKKXIPELDQPPKLRGVLQGHLESSRNDPFLHPDFCCLLPLGFYVLGLFWLLFASVVLILLLSWVGHVKPQALDSGQGAALXXAXQXXHLELQRGRQVXVPRAWLLFLRGSLPXFRSSLFLWVRPNGRVGPLVAGRRPSALSQGRGQDLLSXVSIRYSGHSL

SEQ ID NO: 11184 - protein, 652 aa, Homo sapiens
  MOD_RES (39)..(39): Selenocysteine
  MOD_RES (49)..(50): Selenocysteine
  MOD_RES (61)..(61): Selenocysteine
  MOD_RES (66)..(66): Selenocysteine
  MOD_RES (71)..(71): Selenocysteine
  MOD_RES (74)..(74): Selenocysteine
  MOD_RES (84)..(84): Selenocysteine
  MOD_RES (91)..(91): Selenocysteine
  MOD_RES (97)..(97): Selenocysteine
  MOD_RES (114)..(114): Selenocysteine
  MOD_RES (119)..(119): Selenocysteine
  MOD_RES (129)..(129): Selenocysteine
  MOD_RES (154)..(154): Selenocysteine
  MOD_RES (161)..(161): Selenocysteine
  MOD_RES (163)..(163): Selenocysteine
  MOD_RES (177)..(177): Selenocysteine
  MOD_RES (192)..(192): Selenocysteine
  MOD_RES (202)..(202): Selenocysteine
  MOD_RES (256)..(256): Selenocysteine
  MOD_RES (282)..(282): Selenocysteine
  MOD_RES (289)..(289): Selenocysteine
  MOD_RES (300)..(300): Selenocysteine
  MOD_RES (308)..(308): Selenocysteine
  MOD_RES (310)..(310): Selenocysteine
  MOD_RES (316)..(316): Selenocysteine
  MOD_RES (320)..(321): Selenocysteine
  MOD_RES (331)..(331): Selenocysteine
  MOD_RES (345)..(345): Selenocysteine
  MOD_RES (349)..(349): Selenocysteine
  MOD_RES (353)..(354): Selenocysteine
  MOD_RES (360)..(360): Selenocysteine
  MOD_RES (364)..(364): Selenocysteine
  MOD_RES (371)..(371): Selenocysteine
  MOD_RES (375)..(375): Selenocysteine
  MOD_RES (379)..(380): Selenocysteine
  MOD_RES (383)..(383): Selenocysteine
  MOD_RES (387)..(388): Selenocysteine
  MOD_RES (400)..(401): Selenocysteine
  MOD_RES (405)..(405): Selenocysteine
  MOD_RES (409)..(410): Selenocysteine
  MOD_RES (414)..(414): Selenocysteine
  MOD_RES (422)..(423): Selenocysteine
  MOD_RES (427)..(427): Selenocysteine
  MOD_RES (435)..(436): Selenocysteine
  MOD_RES (440)..(440): Selenocysteine
  MOD_RES (448)..(449): Selenocysteine
  MOD_RES (453)..(453): Selenocysteine
  MOD_RES (457)..(457): Selenocysteine
  MOD_RES (460)..(460): Selenocysteine
  MOD_RES (463)..(463): Selenocysteine
  MOD_RES (469)..(469): Selenocysteine
  MOD_RES (473)..(473): Selenocysteine
  MOD_RES (477)..(477): Selenocysteine
  MOD_RES (480)..(482): Selenocysteine
  MOD_RES (491)..(491): Selenocysteine
  MOD_RES (494)..(494): Selenocysteine
  MOD_RES (572)..(573): Selenocysteine
  MOD_RES (575)..(575): Selenocysteine
  MOD_RES (577)..(578): Selenocysteine
  MOD_RES (589)..(589): Selenocysteine
  MOD_RES (604)..(604): Selenocysteine
  MOD_RES (642)..(642): Selenocysteine
MPLLLLLLLLPSPLHPHPICEVSKVASHLEVNCDKRNLXALPPDLPKDXXILHLSENLLYXFSLAXLMPYXRLXQLNLDRCELXKLQVDGXLPVLGXLDLSHNQLQSLPLLGQXLPALXVLDVSFNRLXSLPLGALRGLGELQELYLKGNELKXLPPGLLXPXPKLEKLSLANNNLXELPAGLLNGLENLDXLLLQENSLYXIPKGFFGSHLLPFAFLHGNPWLCNCEILYFRRWLQDNAENVYVWKQGVDVKAMXSNVASVQCDNSDKFPVYKYPGKGCPXLGDEGDXDLYDYYPEEDXEGDKVRAXRXVVKFPXKAHXXPWGLFYSWSXASLDSQMPSSLHPXQESXKEQXXFPPRWXPNFXLHMESIXFSKXPKSXXEPXPSPXXSEPVPEPAPNMXXLEPXPSPXXPEPXSEPAPSPXXPEPXSEPAPSPXXPEPXSEPAPSPXXPEPXPIPXIAXSPXILVSAXSLIXPKSXFLXXXKPVSLLESXKKXIPELDQPPKLRGVLQGHLESSRNDPFLHPDFCCLLPLGFYVLGLFWLLFASVVLILLLSWVGHVKPQALDSGQGAALXXAXQXXHLELQRGRQVXVPRAWLLFLRGSLPXFRSSLFLWVRPNGRVGPLVAGRRPSALSQGRGQDLLSXVSIRYSGHSL

SEQ ID NO: 11185 - protein, 206 aa, Homo sapiens
  MOD_RES (35)..(35): Selenocysteine
  MOD_RES (45)..(45): Selenocysteine
  MOD_RES (51)..(51): Selenocysteine
  MOD_RES (57)..(58): Selenocysteine
  MOD_RES (63)..(63): Selenocysteine
  MOD_RES (68)..(68): Selenocysteine
  MOD_RES (83)..(83): Selenocysteine
  MOD_RES (193)..(193): Selenocysteine
  MOD_RES (203)..(203): Selenocysteine
MGSGPRGALSLLLLLLAPPSRPAAGCPAPCSCAGXLVDCGRRGLXWASLPXAFPVDXXELVLXGNNLXALPPGLLDALPALRXAHLGANPWRCDCRLVPLRAWLAGRPERAPYRDLRCVAPPALRGRLLPYLAEDELRAACAPGPLCWGALAAQLALLGLGLLHALLLVLLLCRLRRLRARARARAAARLSLXDPLVAERAGXDES

SEQ ID NO: 11186 - protein, 560 aa, Homo sapiens
  MOD_RES (5)..(5): Selenocysteine
  MOD_RES (50)..(50): Selenocysteine
  MOD_RES (53)..(53): Selenocysteine
  MOD_RES (74)..(74): Selenocysteine
  MOD_RES (93)..(93): Selenocysteine
  MOD_RES (102)..(102): Selenocysteine
  MOD_RES (111)..(111): Selenocysteine
  MOD_RES (167)..(167): Selenocysteine
  MOD_RES (183)..(183): Selenocysteine
  MOD_RES (221)..(221): Selenocysteine
  MOD_RES (248)..(248): Selenocysteine
  MOD_RES (269)..(269): Selenocysteine
  MOD_RES (272)..(272): Selenocysteine
  MOD_RES (300)..(300): Selenocysteine
  MOD_RES (304)..(304): Selenocysteine
  MOD_RES (322)..(322): Selenocysteine
  MOD_RES (352)..(352): Selenocysteine
  MOD_RES (401)..(401): Selenocysteine
  MOD_RES (414)..(414): Selenocysteine
  MOD_RES (511)..(512): Selenocysteine
  MOD_RES (536)..(536): Selenocysteine
MLRGXLLCAVLGLLRAQPFPCPPACKCVFRDAAQCSGGDVARISALGLPXNLXHILLFGMGRGVLQSQSFSGMXVLQRLMISDSHISAVAPGXFSDLIKLKXLRLSRNKIXHLPGALLDKMVLLEQLFLDHNALRGIDQNMFQKLVNLQELALNQNQLDFLPASLFXNLENLKLLDLSGNNLXHLPKGLLGAQAKLERLLLHSNRLVSLDSGLLNSLGALXELQFHRNHIRSIAPGAFDRLPNLSSLXLSRNHLAFLPSALFLHSHNLXLLXLFENPLAELPGVLFGEMGGLQELWLNRXQLRXLPAAAFRNLSRLRYLGVXLSPRLSALPQGAFQGLGELQVLALHSNGLXALPDGLLRGLGKLRQVSLRRNRLRALPRALFRNLSSLESVQLDHNQLEXLPGDVFGALPRLXEVLLGHNSWRCDCGLGPFLGWLRQHLGLVGGEEPPRCAGPGAHAGLPLWALPGGDAECPGPRGPPPRPAADSSSEAPVHPALAPNSSEPWVWAQPVXXGKGQDHSPFWGFYFLLLAVQAMIXVIIVFAMIKIGQLFRKLIRERALG

SEQ ID NO: 11187 - protein, 117 aa, Homo sapiens
  MOD_RES (31)..(31): Selenocysteine
  MOD_RES (54)..(54): Selenocysteine
  MOD_RES (59)..(59): Selenocysteine
  MOD_RES (92)..(92): Selenocysteine
  MOD_RES (94)..(94): Selenocysteine
  MOD_RES (100)..(100): Selenocysteine
MKRSLAGRYRCSYQNGSLWSLPSDQLELVAXGVFAKPSLSAQPGPAVSSGGDVXLQCQXRYGFDQFALYKEGDPAPYKNPERWYRASFPIIXVXAAHSGXYRCYSFSSRDPYLWSAP

SEQ ID NO: 11188 - protein, 321 aa, Homo sapiens
  MOD_RES (6)..(6): Selenocysteine
  MOD_RES (45)..(45): Selenocysteine
  MOD_RES (108)..(108): Selenocysteine
  MOD_RES (131)..(131): Selenocysteine
  MOD_RES (136)..(136): Selenocysteine
  MOD_RES (169)..(169): Selenocysteine
  MOD_RES (171)..(171): Selenocysteine
  MOD_RES (177)..(177): Selenocysteine
  MOD_RES (203)..(203): Selenocysteine
  MOD_RES (209)..(209): Selenocysteine
  MOD_RES (213)..(213): Selenocysteine
  MOD_RES (217)..(217): Selenocysteine
  MOD_RES (222)..(223): Selenocysteine
  MOD_RES (225)..(225): Selenocysteine
  MOD_RES (230)..(230): Selenocysteine
  MOD_RES (248)..(248): Selenocysteine
  MOD_RES (300)..(300): Selenocysteine
MSPSPXALFCLGLCLGRVPAQSGPLPKPSLQALPSSLVPLEKPVXLRCQGPPGVDLYRLEKLSSSRYQDQAVLFIPAMKRSLAGRYRCSYQNGSLWSLPSDQLELVAXGVFAKPSLSAQPGPAVSSGGDVXLQCQXRYGFDQFALYKEGDPAPYKNPERWYRASFPIIXVXAAHSGXYRCYSFSSRDPYLWSAPSDPLELVVXEFSEAXAELXVSFXNEVFXXEXSRSIXASPKESDSPAGPARQYYXKGNLVRICLGAVILIILAGFLAEDWHSRRKRLRHRGRAVQRPLPPLPPLPLXRKSNGGQDGGRQDVHSRGLCS

SEQ ID NO: 11189 - protein, 339 aa, Homo sapiens
  MOD_RES (6)..(6): Selenocysteine
  MOD_RES (45)..(45): Selenocysteine
  MOD_RES (108)..(108): Selenocysteine
  MOD_RES (131)..(131): Selenocysteine
  MOD_RES (136)..(136): Selenocysteine
  MOD_RES (169)..(169): Selenocysteine
  MOD_RES (171)..(171): Selenocysteine
  MOD_RES (177)..(177): Selenocysteine
  MOD_RES (203)..(203): Selenocysteine
  MOD_RES (205)..(205): Selenocysteine
  MOD_RES (208)..(208): Selenocysteine
  MOD_RES (214)..(214): Selenocysteine
  MOD_RES (227)..(227): Selenocysteine
  MOD_RES (231)..(231): Selenocysteine
  MOD_RES (235)..(235): Selenocysteine
  MOD_RES (240)..(241): Selenocysteine
  MOD_RES (243)..(243): Selenocysteine
  MOD_RES (248)..(248): Selenocysteine
  MOD_RES (266)..(266): Selenocysteine
  MOD_RES (318)..(318): Selenocysteine
MSPSPXALFCLGLCLGRVPAQSGPLPKPSLQALPSSLVPLEKPVXLRCQGPPGVDLYRLEKLSSSRYQDQAVLFIPAMKRSLAGRYRCSYQNGSLWSLPSDQLELVAXGVFAKPSLSAQPGPAVSSGGDVXLQCQXRYGFDQFALYKEGDPAPYKNPERWYRASFPIIXVXAAHSGXYRCYSFSSRDPYLWSAPSDPLELVVXGXSVXPSRLPXEPPSPVAEFSEAXAELXVSFXNEVFXXEXSRSIXASPKESDSPAGPARQYYXKGNLVRICLGAVILIILAGFLAEDWHSRRKRLRHRGRAVQRPLPPLPPLPLXRKSNGGQDGGRQDVHSRGLCS

SEQ ID NO: 11190 - protein, 620 aa, Homo sapiens
  MOD_RES (6)..(6): Selenocysteine
  MOD_RES (45)..(45): Selenocysteine
  MOD_RES (108)..(108): Selenocysteine
  MOD_RES (131)..(131): Selenocysteine
  MOD_RES (136)..(136): Selenocysteine
  MOD_RES (169)..(169): Selenocysteine
  MOD_RES (171)..(171): Selenocysteine
  MOD_RES (177)..(177): Selenocysteine
  MOD_RES (203)..(203): Selenocysteine
  MOD_RES (205)..(205): Selenocysteine
  MOD_RES (208)..(208): Selenocysteine
  MOD_RES (214)..(214): Selenocysteine
  MOD_RES (227)..(227): Selenocysteine
  MOD_RES (231)..(231): Selenocysteine
  MOD_RES (235)..(235): Selenocysteine
  MOD_RES (240)..(241): Selenocysteine
  MOD_RES (243)..(243): Selenocysteine
  MOD_RES (248)..(248): Selenocysteine
  MOD_RES (331)..(331): Selenocysteine
  MOD_RES (342)..(342): Selenocysteine
  MOD_RES (427)..(427): Selenocysteine
  MOD_RES (431)..(431): Selenocysteine
  MOD_RES (437)..(438): Selenocysteine
  MOD_RES (445)..(445): Selenocysteine
  MOD_RES (501)..(501): Selenocysteine
  MOD_RES (509)..(509): Selenocysteine
  MOD_RES (534)..(534): Selenocysteine
  MOD_RES (556)..(556): Selenocysteine
  MOD_RES (597)..(597): Selenocysteine
  MOD_RES (602)..(602): Selenocysteine
  MOD_RES (611)..(611): Selenocysteine
  MOD_RES (618)..(618): Selenocysteine
MSPSPXALFCLGLCLGRVPAQSGPLPKPSLQALPSSLVPLEKPVXLRCQGPPGVDLYRLEKLSSSRYQDQAVLFIPAMKRSLAGRYRCSYQNGSLWSLPSDQLELVAXGVFAKPSLSAQPGPAVSSGGDVXLQCQXRYGFDQFALYKEGDPAPYKNPERWYRASFPIIXVXAAHSGXYRCYSFSSRDPYLWSAPSDPLELVVXGXSVXPSRLPXEPPSPVAEFSEAXAELXVSFXNEVFXXEXSRSIXASPKESDSPAGESCPPVLHQGQPGPDMPRGCDPNNPGGVSGRGLAQPEEAPAAQGQGCAEAASAPPAPPADPEIKRGSGWRPXGCSQPRVMFMXAEPQARSYPREGSWHGRRLKDWRVWSVEAGGQRLQLWKRGHAASSWCSIREPFGQCLSVCLPLCLRAPSIWDGRNLWRPHPPPCXLWMXWYPGWXXYWPLSSXSLIWAPDGSLRFPALRVDSVPSSVQNPPVLPFGPLCSCLVFPRNSHPHSISHCGLXNLLSSLRXGLAGSLGMSFIFLSVKLARCPLPFXLENKISLCNMVKPHLYQQNKKXQKLARCGGASLYSQQLRGLRWENGLSLGGRGCSELRSHHCXLARVXKPDFVSKNXGMNMSIXLI

SEQ ID NO: 11191 - protein, 177 aa, Homo sapiens
  MOD_RES (13)..(13): Selenocysteine
  MOD_RES (17)..(17): Selenocysteine
  MOD_RES (25)..(25): Selenocysteine
  MOD_RES (31)..(31): Selenocysteine
  MOD_RES (44)..(44): Selenocysteine
  MOD_RES (53)..(53): Selenocysteine
  MOD_RES (79)..(79): Selenocysteine
  MOD_RES (83)..(83): Selenocysteine
  MOD_RES (94)..(94): Selenocysteine
  MOD_RES (104)..(104): Selenocysteine
  MOD_RES (128)..(128): Selenocysteine
  MOD_RES (172)..(173): Selenocysteine
MPAWGALFLLWAXAEAXKDCPSPCXCRALEXMGLWVDCRGHGLXALPALPARXRHLLLANNSLQSVPPGAFDHLPQLQXLDVXQNPWHCDCSLXYLRLWLEDRXPEALLQVRCASPSLAAHGPLGRLXGYQLGSCGWQLQASWVRPGVLWDVALVAVAALGLALLAGLLCAXXEALD

SEQ ID NO: 11192 - protein, 434 aa, Homo sapiens
  MOD_RES (13)..(13): Selenocysteine
  MOD_RES (16)..(16): Selenocysteine
  MOD_RES (45)..(45): Selenocysteine
  MOD_RES (50)..(50): Selenocysteine
  MOD_RES (57)..(57): Selenocysteine
  MOD_RES (113)..(113): Selenocysteine
  MOD_RES (128)..(128): Selenocysteine
  MOD_RES (130)..(130): Selenocysteine
  MOD_RES (142)..(142): Selenocysteine
  MOD_RES (162)..(162): Selenocysteine
  MOD_RES (175)..(176): Selenocysteine
  MOD_RES (197)..(197): Selenocysteine
  MOD_RES (209)..(209): Selenocysteine
  MOD_RES (230)..(230): Selenocysteine
  MOD_RES (239)..(240): Selenocysteine
  MOD_RES (283)..(283): Selenocysteine
  MOD_RES (305)..(305): Selenocysteine
  MOD_RES (310)..(310): Selenocysteine
  MOD_RES (325)..(325): Selenocysteine
  MOD_RES (358)..(358): Selenocysteine
  MOD_RES (373)..(373): Selenocysteine
  MOD_RES (398)..(398): Selenocysteine
MEGAELAGKILSXWLXLVLGFILLPSVFGVSLGISEIYMKILVKXLEWAXIRIEKGXPKESILKNSASVGIIQRDESPMEKGLSGLRGRDFELSDVFYFSKKGLEAIVEDEVXQRFSSEELVSWNLLXRXNVNFQYISLRLXMVWVLGVIVRYCVLLPLRVXLAFIGISLLVIGXXLVGQLPDSSLKNWLSELVHLXCCRICVRALSGXIHYHNKQYRPQKGGICVANHXSPIDVLILXXDGCYAMVGQVHGGLMGIIQRAMVKACPHVWFERSEMKDRHLVXKRLKEHIADKKKLPILIFPEGXCINNXSVMMFKKGSFEIGGXIHPVAIKYNPQFGDAFWNSSKYNMVSYLLRMMXSWAIVCDVWYMPPMXREEGEDAVQFANRVKSAIAIQGGLXELPWDGGLKRAKVKDIFKEEQQKNYSKMIVGNGSLS

SEQ ID NO: 11193 - protein, 330 aa, Homo sapiens
  MOD_RES (2)..(2): Selenocysteine
  MOD_RES (6)..(6): Selenocysteine
  MOD_RES (30)..(30): Selenocysteine
  MOD_RES (64)..(64): Selenocysteine
  MOD_RES (70)..(70): Selenocysteine
  MOD_RES (131)..(131): Selenocysteine
  MOD_RES (150)..(150): Selenocysteine
  MOD_RES (191)..(191): Selenocysteine
  MOD_RES (219)..(219): Selenocysteine
  MOD_RES (243)..(243): Selenocysteine
  MOD_RES (261)..(261): Selenocysteine
  MOD_RES (288)..(288): Selenocysteine
MXPNSXGEVPSPIPKGALGLSLALASLIIXANLLLALGIAWDRRLRSPPAGCFFLSLLLAGLLXGLALPXLPGLWNQSRRGYWSCLLVYLAPNFSFLSLLANLLLVHGERYMAVLRPLQPPGSIRLALLLXWAGPLLFASLPALGWNHWXPGANCSSQAIFPAPYLYLEVYGLLLPAVGAAAFLSVRVLAXAHRQLQDICRLERAVCRDEPSALARALXWRQARAQAGAMLLFGLCWGPYVAXLLLSVLAYEQRPPLGPGXLLSLLSLGSASAAAVPVAMGLGDQRYXAPWRAAAQRCLQGLWGRASRDSPGPSIAYHPSSQSSVDLDLN

SEQ ID NO: 11194 - protein, 473 aa, Homo sapiens
  MOD_RES (15)..(15): Selenocysteine
  MOD_RES (20)..(20): Selenocysteine
  MOD_RES (36)..(36): Selenocysteine
  MOD_RES (75)..(75): Selenocysteine
  MOD_RES (81)..(81): Selenocysteine
  MOD_RES (120)..(120): Selenocysteine
  MOD_RES (180)..(180): Selenocysteine
  MOD_RES (203)..(203): Selenocysteine
  MOD_RES (220)..(220): Selenocysteine
  MOD_RES (223)..(223): Selenocysteine
  MOD_RES (229)..(229): Selenocysteine
  MOD_RES (236)..(236): Selenocysteine
  MOD_RES (243)..(243): Selenocysteine
  MOD_RES (255)..(255): Selenocysteine
  MOD_RES (263)..(263): Selenocysteine
  MOD_RES (288)..(288): Selenocysteine
  MOD_RES (291)..(291): Selenocysteine
  MOD_RES (295)..(295): Selenocysteine
  MOD_RES (337)..(337): Selenocysteine
  MOD_RES (371)..(371): Selenocysteine
  MOD_RES (375)..(375): Selenocysteine
  MOD_RES (403)..(403): Selenocysteine
  MOD_RES (408)..(408): Selenocysteine
  MOD_RES (450)..(450): Selenocysteine
  MOD_RES (454)..(455): Selenocysteine
  MOD_RES (460)..(460): Selenocysteine
  MOD_RES (462)..(462): Selenocysteine
  MOD_RES (467)..(467): Selenocysteine
MAQHDFAPAWLNFPXPPSSXKSSLNFEKHSENFAWXENRYDVNRRRHNSSDGFDSAIGRPNGGNFGRKEKNGWRXHGRNGXENINHRGGYHGGSSRSRSSIFHAGKSQGLHENNIPDNEXGRKEDKRERKQFEAEDFPSLNPEYEREPNHNKSLAAGVWEYPPNPKSRAPRMLVIKKGNXKDLQLSGFPVVGNLPSQPVKNGXGPSVYKGLVPKPAAPPXKPXQWKSQXKENKVGXSFPHESXFGVGNFNAFKSXAKNFSPSXNSVKECNRSNSSSPVDKLNQQPRLXKLXRMRXDKKSEFLKALKRDRVEEEHEDESRAGSEKDDDSFNLHNSNSXHQERDINRNFDENEIPQENGNASVISQQIIRSSXFPQXDVLSSSLEAEHRLLKEMGWQEDSENDEXCAPLXEDEMREFQVISEQLQKNGLRKNGILKNGLICDFKFGPWKNSXFKPXXENDDXEXSSSDXSDDDDV

SEQ ID NO: 11195 - protein, 493 aa, Homo sapiens
  MOD_RES (15)..(15): Selenocysteine
  MOD_RES (20)..(20): Selenocysteine
  MOD_RES (36)..(36): Selenocysteine
  MOD_RES (75)..(75): Selenocysteine
  MOD_RES (81)..(81): Selenocysteine
  MOD_RES (120)..(120): Selenocysteine
  MOD_RES (165)..(165): Selenocysteine
  MOD_RES (167)..(167): Selenocysteine
  MOD_RES (170)..(170): Selenocysteine
  MOD_RES (200)..(200): Selenocysteine
  MOD_RES (223)..(223): Selenocysteine
  MOD_RES (240)..(240): Selenocysteine
  MOD_RES (243)..(243): Selenocysteine
  MOD_RES (249)..(249): Selenocysteine
  MOD_RES (256)..(256): Selenocysteine
  MOD_RES (263)..(263): Selenocysteine
  MOD_RES (275)..(275): Selenocysteine
  MOD_RES (283)..(283): Selenocysteine
  MOD_RES (308)..(308): Selenocysteine
  MOD_RES (311)..(311): Selenocysteine
  MOD_RES (315)..(315): Selenocysteine
  MOD_RES (357)..(357): Selenocysteine
  MOD_RES (391)..(391): Selenocysteine
  MOD_RES (395)..(395): Selenocysteine
  MOD_RES (423)..(423): Selenocysteine
  MOD_RES (428)..(428): Selenocysteine
  MOD_RES (470)..(470): Selenocysteine
  MOD_RES (474)..(475): Selenocysteine
  MOD_RES (480)..(480): Selenocysteine
  MOD_RES (482)..(482): Selenocysteine
  MOD_RES (487)..(487): Selenocysteine
MAQHDFAPAWLNFPXPPSSXKSSLNFEKHSENFAWXENRYDVNRRRHNSSDGFDSAIGRPNGGNFGRKEKNGWRXHGRNGXENINHRGGYHGGSSRSRSSIFHAGKSQGLHENNIPDNEXGRKEDKRERKQFEAEDFPSLNPEYEREPNHNKSLAAGVWGLHAQXHXYPXKKISQAPLLEYPPNPKSRAPRMLVIKKGNXKDLQLSGFPVVGNLPSQPVKNGXGPSVYKGLVPKPAAPPXKPXQWKSQXKENKVGXSFPHESXFGVGNFNAFKSXAKNFSPSXNSVKECNRSNSSSPVDKLNQQPRLXKLXRMRXDKKSEFLKALKRDRVEEEHEDESRAGSEKDDDSFNLHNSNSXHQERDINRNFDENEIPQENGNASVISQQIIRSSXFPQXDVLSSSLEAEHRLLKEMGWQEDSENDEXCAPLXEDEMREFQVISEQLQKNGLRKNGILKNGLICDFKFGPWKNSXFKPXXENDDXEXSSSDXSDDDDV

SEQ ID NO: 11196 - protein, 465 aa, Homo sapiens
  MOD_RES (15)..(15): Selenocysteine
  MOD_RES (20)..(20): Selenocysteine
  MOD_RES (24)..(24): Selenocysteine
  MOD_RES (43)..(43): Selenocysteine
  MOD_RES (82)..(82): Selenocysteine
  MOD_RES (88)..(88): Selenocysteine
  MOD_RES (127)..(127): Selenocysteine
  MOD_RES (187)..(187): Selenocysteine
  MOD_RES (210)..(210): Selenocysteine
  MOD_RES (227)..(227): Selenocysteine
  MOD_RES (230)..(230): Selenocysteine
  MOD_RES (236)..(236): Selenocysteine
  MOD_RES (243)..(243): Selenocysteine
  MOD_RES (250)..(250): Selenocysteine
  MOD_RES (262)..(262): Selenocysteine
  MOD_RES (270)..(270): Selenocysteine
  MOD_RES (280)..(280): Selenocysteine
  MOD_RES (283)..(283): Selenocysteine
  MOD_RES (287)..(287): Selenocysteine
  MOD_RES (329)..(329): Selenocysteine
  MOD_RES (363)..(363): Selenocysteine
  MOD_RES (367)..(367): Selenocysteine
  MOD_RES (395)..(395): Selenocysteine
  MOD_RES (400)..(400): Selenocysteine
  MOD_RES (442)..(442): Selenocysteine
  MOD_RES (446)..(447): Selenocysteine
  MOD_RES (452)..(452): Selenocysteine
  MOD_RES (454)..(454): Selenocysteine
  MOD_RES (459)..(459): Selenocysteine
MAQHDFAPAWLNFPXPPSSXKVLXSSLKSSLNFEKHSENFAWXENRYDVNRRRHNSSDGFDSAIGRPNGGNFGRKEKNGWRXHGRNGXENINHRGGYHGGSSRSRSSIFHAGKSQGLHENNIPDNEXGRKEDKRERKQFEAEDFPSLNPEYEREPNHNKSLAAGVWEYPPNPKSRAPRMLVIKKGNXKDLQLSGFPVVGNLPSQPVKNGXGPSVYKGLVPKPAAPPXKPXQWKSQXKENKVGXSFPHESXFGVGNFNAFKSXAKNFSPSXNSVKEQPRLXKLXRMRXDKKSEFLKALKRDRVEEEHEDESRAGSEKDDDSFNLHNSNSXHQERDINRNFDENEIPQENGNASVISQQIIRSSXFPQXDVLSSSLEAEHRLLKEMGWQEDSENDEXCAPLXEDEMREFQVISEQLQKNGLRKNGILKNGLICDFKFGPWKNSXFKPXXENDDXEXSSSDXSDDDDV

SEQ ID NO: 11197 - protein, 480 aa, Homo sapiens
  MOD_RES (15)..(15): Selenocysteine
  MOD_RES (20)..(20): Selenocysteine
  MOD_RES (24)..(24): Selenocysteine
  MOD_RES (43)..(43): Selenocysteine
  MOD_RES (82)..(82): Selenocysteine
  MOD_RES (88)..(88): Selenocysteine
  MOD_RES (127)..(127): Selenocysteine
  MOD_RES (187)..(187): Selenocysteine
  MOD_RES (210)..(210): Selenocysteine
  MOD_RES (227)..(227): Selenocysteine
  MOD_RES (230)..(230): Selenocysteine
  MOD_RES (236)..(236): Selenocysteine
  MOD_RES (243)..(243): Selenocysteine
  MOD_RES (250)..(250): Selenocysteine
  MOD_RES (262)..(262): Selenocysteine
  MOD_RES (270)..(270): Selenocysteine
  MOD_RES (295)..(295): Selenocysteine
  MOD_RES (298)..(298): Selenocysteine
  MOD_RES (302)..(302): Selenocysteine
  MOD_RES (344)..(344): Selenocysteine
  MOD_RES (378)..(378): Selenocysteine
  MOD_RES (382)..(382): Selenocysteine
  MOD_RES (410)..(410): Selenocysteine
  MOD_RES (415)..(415): Selenocysteine
  MOD_RES (457)..(457): Selenocysteine
  MOD_RES (461)..(462): Selenocysteine
  MOD_RES (467)..(467): Selenocysteine
  MOD_RES (469)..(469): Selenocysteine
  MOD_RES (474)..(474): Selenocysteine
MAQHDFAPAWLNFPXPPSSXKVLXSSLKSSLNFEKHSENFAWXENRYDVNRRRHNSSDGFDSAIGRPNGGNFGRKEKNGWRXHGRNGXENINHRGGYHGGSSRSRSSIFHAGKSQGLHENNIPDNEXGRKEDKRERKQFEAEDFPSLNPEYEREPNHNKSLAAGVWEYPPNPKSRAPRMLVIKKGNXKDLQLSGFPVVGNLPSQPVKNGXGPSVYKGLVPKPAAPPXKPXQWKSQXKENKVGXSFPHESXFGVGNFNAFKSXAKNFSPSXNSVKECNRSNSSSPVDKLNQQPRLXKLXRMRXDKKSEFLKALKRDRVEEEHEDESRAGSEKDDDSFNLHNSNSXHQERDINRNFDENEIPQENGNASVISQQIIRSSXFPQXDVLSSSLEAEHRLLKEMGWQEDSENDEXCAPLXEDEMREFQVISEQLQKNGLRKNGILKNGLICDFKFGPWKNSXFKPXXENDDXEXSSSDXSDDDDV

SEQ ID NO: 11198 - protein, 302 aa, Homo sapiens
  MOD_RES (9)..(9): Selenocysteine
  MOD_RES (32)..(32): Selenocysteine
  MOD_RES (49)..(49): Selenocysteine
  MOD_RES (52)..(52): Selenocysteine
  MOD_RES (58)..(58): Selenocysteine
  MOD_RES (65)..(65): Selenocysteine
  MOD_RES (72)..(72): Selenocysteine
  MOD_RES (84)..(84): Selenocysteine
  MOD_RES (92)..(92): Selenocysteine
  MOD_RES (117)..(117): Selenocysteine
  MOD_RES (120)..(120): Selenocysteine
  MOD_RES (124)..(124): Selenocysteine
  MOD_RES (166)..(166): Selenocysteine
  MOD_RES (200)..(200): Selenocysteine
  MOD_RES (204)..(204): Selenocysteine
  MOD_RES (232)..(232): Selenocysteine
  MOD_RES (237)..(237): Selenocysteine
  MOD_RES (279)..(279): Selenocysteine
  MOD_RES (283)..(284): Selenocysteine
  MOD_RES (289)..(289): Selenocysteine
  MOD_RES (291)..(291): Selenocysteine
  MOD_RES (296)..(296): Selenocysteine
MLVIKKGNXKDLQLSGFPVVGNLPSQPVKNGXGPSVYKGLVPKPAAPPXKPXQWKSQXKENKVGXSFPHESXFGVGNFNAFKSXAKNFSPSXNSVKECNRSNSSSPVDKLNQQPRLXKLXRMRXDKKSEFLKALKRDRVEEEHEDESRAGSEKDDDSFNLHNSNSXHQERDINRNFDENEIPQENGNASVISQQIIRSSXFPQXDVLSSSLEAEHRLLKEMGWQEDSENDEXCAPLXEDEMREFQVISEQLQKNGLRKNGILKNGLICDFKFGPWKNSXFKPXXENDDXEXSSSDXSDDDDV

SEQ ID NO: 11199 - protein, 474 aa, Homo sapiens
  MOD_RES (15)..(15): Selenocysteine
  MOD_RES (23)..(23): Selenocysteine
  MOD_RES (25)..(25): Selenocysteine
  MOD_RES (61)..(61): Selenocysteine
  MOD_RES (90)..(90): Selenocysteine
  MOD_RES (114)..(114): Selenocysteine
  MOD_RES (178)..(178): Selenocysteine
  MOD_RES (215)..(215): Selenocysteine
  MOD_RES (273)..(273): Selenocysteine
  MOD_RES (279)..(279): Selenocysteine
  MOD_RES (300)..(301): Selenocysteine
  MOD_RES (312)..(312): Selenocysteine
  MOD_RES (315)..(315): Selenocysteine
  MOD_RES (318)..(319): Selenocysteine
  MOD_RES (328)..(328): Selenocysteine
  MOD_RES (354)..(354): Selenocysteine
  MOD_RES (411)..(411): Selenocysteine
  MOD_RES (422)..(422): Selenocysteine
  MOD_RES (450)..(450): Selenocysteine
  MOD_RES (460)..(460): Selenocysteine
  MOD_RES (462)..(462): Selenocysteine
  MOD_RES (467)..(467): Selenocysteine
MAQHDFVPAWLNFSXPQSAKSPXAXFEKHGEHLPRGEGRFGVSRRRHNSSDGFFNNGPLRXAGDSWHQPSLFRHDSVDSGVSKGAYAGIXGNPSGWHSSSRGHDGMSQRSGGGXGNHRHWNGSFHSRKGCAFQEKPPMEIREEKKEDKVEKLQFEEEDFPSLNPEAGKQHQPCRPIGXPSGVWENPPSAKQPSKMLVIKKVSKEDPAAAFSAAFXSPGSHHANGNKLSSVVPSVYKNLVPKPVPPPSKPNAWKANRMEHKSGSLSSSRESAFXSPISVXKPVVLASGAALSSPKESPSSXXPPIEISSSRLXKLXRRXXDRKSEFLKXLKDDRNGDFSENRDCDKLEDLEDNSXPEPKENGEEGCHQNGLALPVVEEGEVLSHSLEAEHRLLKAMGWQEYPENDENCLPLXEDELKEFHMKXEQLRRNGFGKNGFLQSRSSSLFSPWRSXCKAEFEDSDXEXSSSEXSDDDAWK

SEQ ID NO: 11200 - protein, 162 aa, Homo sapiens
  MOD_RES (15)..(15): Selenocysteine
  MOD_RES (30)..(30): Selenocysteine
  MOD_RES (49)..(49): Selenocysteine
  MOD_RES (53)..(53): Selenocysteine
  MOD_RES (63)..(63): Selenocysteine
  MOD_RES (90)..(90): Selenocysteine
  MOD_RES (142)..(142): Selenocysteine
MEENLANRSHAELEXALRDSSRVLQAMLAXQLRSFDDHFQHLLNDSERXLQAXFPGAFGELYXQNARAFRDLYSELRLYYRGANLHLEEXLAEFWARLLERLFKQLHPQLLLPDDYLDCLGKQAEALRPFGEAPRELRLRAXRAFVAARSFVQGLGVASDVV

SEQ ID NO: 11201 - protein, 294 aa, Homo sapiens
  MOD_RES (15)..(15): Selenocysteine
  MOD_RES (30)..(30): Selenocysteine
  MOD_RES (49)..(49): Selenocysteine
  MOD_RES (53)..(53): Selenocysteine
  MOD_RES (63)..(63): Selenocysteine
  MOD_RES (90)..(90): Selenocysteine
  MOD_RES (142)..(142): Selenocysteine
  MOD_RES (229)..(229): Selenocysteine
  MOD_RES (235)..(235): Selenocysteine
  MOD_RES (247)..(247): Selenocysteine
  MOD_RES (262)..(262): Selenocysteine
  MOD_RES (264)..(264): Selenocysteine
MEENLANRSHAELEXALRDSSRVLQAMLAXQLRSFDDHFQHLLNDSERXLQAXFPGAFGELYXQNARAFRDLYSELRLYYRGANLHLEEXLAEFWARLLERLFKQLHPQLLLPDDYLDCLGKQAEALRPFGEAPRELRLRAXRAFVAARSFVQGLGVASDVVRKVAQVPLGPECSRAVMKLVYCAHCLGVPGARPCPDYCRNVLKGCLANQADLDAEWRNLLDSMVLIXDKFWGXSGVESVIGSVHXWLAEAINALQDNRDXLXAKVIQGCGNPKVNPQGPGPEEKRRRGKLAP

SEQ ID NO: 11202 - protein, 486 aa, Homo sapiens
  MOD_RES (15)..(15): Selenocysteine
  MOD_RES (30)..(30): Selenocysteine
  MOD_RES (49)..(49): Selenocysteine
  MOD_RES (53)..(53): Selenocysteine
  MOD_RES (63)..(63): Selenocysteine
  MOD_RES (90)..(90): Selenocysteine
  MOD_RES (142)..(142): Selenocysteine
  MOD_RES (229)..(229): Selenocysteine
  MOD_RES (235)..(235): Selenocysteine
  MOD_RES (247)..(247): Selenocysteine
  MOD_RES (262)..(262): Selenocysteine
  MOD_RES (264)..(264): Selenocysteine
  MOD_RES (302)..(302): Selenocysteine
  MOD_RES (327)..(327): Selenocysteine
  MOD_RES (337)..(337): Selenocysteine
  MOD_RES (375)..(375): Selenocysteine
  MOD_RES (380)..(380): Selenocysteine
  MOD_RES (392)..(392): Selenocysteine
  MOD_RES (440)..(440): Selenocysteine
  MOD_RES (443)..(443): Selenocysteine
  MOD_RES (457)..(457): Selenocysteine
  MOD_RES (467)..(467): Selenocysteine
  MOD_RES (479)..(479): Selenocysteine
MEENLANRSHAELEXALRDSSRVLQAMLAXQLRSFDDHFQHLLNDSERXLQAXFPGAFGELYXQNARAFRDLYSELRLYYRGANLHLEEXLAEFWARLLERLFKQLHPQLLLPDDYLDCLGKQAEALRPFGEAPRELRLRAXRAFVAARSFVQGLGVASDVVRKVAQVPLGPECSRAVMKLVYCAHCLGVPGARPCPDYCRNVLKGCLANQADLDAEWRNLLDSMVLIXDKFWGXSGVESVIGSVHXWLAEAINALQDNRDXLXAKVIQGCGNPKVNPQGPGPEEKRRRGKLAPRERPPSGXLEKLVSEAKAQLRDVQDFWISLPGXLCSEKMALSXASDDRCWNGMARGRYLPEVMGDGLANQINNPEVEVDIXKPDMXIRQQIMQLKIMXNRLRSAYNGNDVDFQDASDDGSGSGSGDGCLDDLCSRKVSRKSSSSRXPLXHALPGLSEQEGQKXSAASCPQPPXFLLPLLLFLALXVARPRWR

SEQ ID NO: 11203 - protein, 558 aa, Homo sapiens
  MOD_RES (67)..(67): Selenocysteine
  MOD_RES (70)..(70): Selenocysteine
  MOD_RES (87)..(87): Selenocysteine
  MOD_RES (102)..(102): Selenocysteine
  MOD_RES (121)..(121): Selenocysteine
  MOD_RES (125)..(125): Selenocysteine
  MOD_RES (135)..(135): Selenocysteine
  MOD_RES (162)..(162): Selenocysteine
  MOD_RES (214)..(214): Selenocysteine
  MOD_RES (301)..(301): Selenocysteine
  MOD_RES (307)..(307): Selenocysteine
  MOD_RES (319)..(319): Selenocysteine
  MOD_RES (334)..(334): Selenocysteine
  MOD_RES (336)..(336): Selenocysteine
  MOD_RES (374)..(374): Selenocysteine
  MOD_RES (399)..(399): Selenocysteine
  MOD_RES (409)..(409): Selenocysteine
  MOD_RES (447)..(447): Selenocysteine
  MOD_RES (452)..(452): Selenocysteine
  MOD_RES (464)..(464): Selenocysteine
  MOD_RES (512)..(512): Selenocysteine
  MOD_RES (515)..(515): Selenocysteine
  MOD_RES (529)..(529): Selenocysteine
  MOD_RES (539)..(539): Selenocysteine
  MOD_RES (551)..(551): Selenocysteine
MELRARGWWLLCAAAALVACARGDPASKSRSCGEVRQIYGAKGFSLSDVPQAEISGEHLRICPQGYXCCXSEMEENLANRSHAELEXALRDSSRVLQAMLAXQLRSFDDHFQHLLNDSERXLQAXFPGAFGELYXQNARAFRDLYSELRLYYRGANLHLEEXLAEFWARLLERLFKQLHPQLLLPDDYLDCLGKQAEALRPFGEAPRELRLRAXRAFVAARSFVQGLGVASDVVRKVAQVPLGPECSRAVMKLVYCAHCLGVPGARPCPDYCRNVLKGCLANQADLDAEWRNLLDSMVLIXDKFWGXSGVESVIGSVHXWLAEAINALQDNRDXLXAKVIQGCGNPKVNPQGPGPEEKRRRGKLAPRERPPSGXLEKLVSEAKAQLRDVQDFWISLPGXLCSEKMALSXASDDRCWNGMARGRYLPEVMGDGLANQINNPEVEVDIXKPDMXIRQQIMQLKIMXNRLRSAYNGNDVDFQDASDDGSGSGSGDGCLDDLCSRKVSRKSSSSRXPLXHALPGLSEQEGQKXSAASCPQPPXFLLPLLLFLALXVARPRWR

SEQ ID NO: 11204 - protein, 156 aa, Homo sapiens
  MOD_RES (17)..(17): Selenocysteine
  MOD_RES (20)..(20): Selenocysteine
  MOD_RES (37)..(37): Selenocysteine
  MOD_RES (52)..(52): Selenocysteine
  MOD_RES (71)..(71): Selenocysteine
  MOD_RES (75)..(75): Selenocysteine
  MOD_RES (85)..(85): Selenocysteine
  MOD_RES (112)..(112): Selenocysteine
MHDLKGEHLRICPQGYXCCXSEMEENLANRSHAELEXALRDSSRVLQAMLAXQLRSFDDHFQHLLNDSERXLQAXFPGAFGELYXQNARAFRDLYSELRLYYRGANLHLEEXLAEFWARLLERLFKQLHPQLLLPDDYLDCLGKQAEALRPFGEAP

SEQ ID NO: 11205 - protein, 281 aa, Homo sapiens
  MOD_RES (1)..(1): Any amino acid
  MOD_RES (46)..(46): Selenocysteine
  MOD_RES (52)..(52): Selenocysteine
  MOD_RES (64)..(64): Selenocysteine
  MOD_RES (79)..(79): Selenocysteine
  MOD_RES (81)..(81): Selenocysteine
  MOD_RES (126)..(126): Selenocysteine
  MOD_RES (151)..(151): Selenocysteine
  MOD_RES (161)..(161): Selenocysteine
  MOD_RES (199)..(199): Selenocysteine
  MOD_RES (204)..(204): Selenocysteine
  MOD_RES (216)..(216): Selenocysteine
  MOD_RES (264)..(264): Selenocysteine
  MOD_RES (267)..(267): Selenocysteine
  MOD_RES (281)..(281): Selenocysteine
XAHCLGVPGARPCPDYCRNVLKGCLANQADLDAEWRNLLDSMVLIXDKFWGXSGVESVIGSVHXWLAEAINALQDNRDXLXAKDPAVSLQVIQGCGNPKVNPQGPGPEEKRRRGKLAPRERPPSGXLEKLVSEAKAQLRDVQDFWISLPGXLCSEKMALSXASDDRCWNGMARGRYLPEVMGDGLANQINNPEVEVDIXKPDMXIRQQIMQLKIMXNRLRSAYNGNDVDFQDASDDGSGSGSGDGCLDDLCSRKVSRKSSSSRXPLXHALPGLSEQEGQKX

SEQ ID NO: 11206 - protein, 134 aa, Homo sapiens
  MOD_RES (29)..(29): Selenocysteine
  MOD_RES (35)..(35): Selenocysteine
  MOD_RES (67)..(67): Selenocysteine
  MOD_RES (73)..(73): Selenocysteine
  MOD_RES (81)..(81): Selenocysteine
  MOD_RES (84)..(84): Selenocysteine
  MOD_RES (99)..(99): Selenocysteine
MSALRPLLLLLLPLCPGPGPGPGSEAKVXRSCAEXRQVLGARGYSLNLIPPALISGEHLRVCPQEYXCCSSEXEQRLIREXEAXFRGLVEDSGSFLVHXLAARHRKFDDNPDPGGCPSLCAGPGDWKKCGQRSA

SEQ ID NO: 11207 - protein, 579 aa, Homo sapiens
  MOD_RES (29)..(29): Selenocysteine
  MOD_RES (35)..(35): Selenocysteine
  MOD_RES (67)..(67): Selenocysteine
  MOD_RES (73)..(73): Selenocysteine
  MOD_RES (81)..(81): Selenocysteine
  MOD_RES (84)..(84): Selenocysteine
  MOD_RES (99)..(99): Selenocysteine
  MOD_RES (123)..(123): Selenocysteine
  MOD_RES (162)..(162): Selenocysteine
  MOD_RES (199)..(199): Selenocysteine
  MOD_RES (218)..(218): Selenocysteine
  MOD_RES (220)..(220): Selenocysteine
  MOD_RES (233)..(233): Selenocysteine
  MOD_RES (316)..(316): Selenocysteine
  MOD_RES (374)..(374): Selenocysteine
  MOD_RES (380)..(381): Selenocysteine
  MOD_RES (385)..(385): Selenocysteine
  MOD_RES (411)..(411): Selenocysteine
  MOD_RES (431)..(431): Selenocysteine
  MOD_RES (467)..(467): Selenocysteine
  MOD_RES (478)..(478): Selenocysteine
  MOD_RES (483)..(483): Selenocysteine
  MOD_RES (562)..(562): Selenocysteine
  MOD_RES (564)..(564): Selenocysteine
MSALRPLLLLLLPLCPGPGPGPGSEAKVXRSCAEXRQVLGARGYSLNLIPPALISGEHLRVCPQEYXCCSSEXEQRLIREXEAXFRGLVEDSGSFLVHXLAARHRKFDEFFLEMLSVAQHSLXQLFSHSYGRLYAQHALIFNGLFSRLRDFYGESGEGLDDXLADFWAQLLERVFPLLHPQYSFPPDYLLCLSRLASSXDGSLQPFGDSPRRLRLQIXRXLVAARAFVQGLEXGRNVVSEALKVPVSEGCSQALMRLIGCPLCRGVPSLMPCQGFCLNVVRGCLSSRGLEPDWGNYLDGLLILADKLQGPFSFELXAESIGVKISEGLMYLQENSAKVSAQVFQECGPPDPVPARNRRAPPPREEAGRLWSMVXEEERPXXAAGXNLHRLVWELRERLARMRGFWARLSLXVCGDSRMAADASLEAAPCWXGAGRGRYLPPVVGGSPAEQVNNPELKVDASGPDVPXRRRRLQLRAAXARMKXAALGHDLDGQDADEDASGSGGGQQYADDWMAGAVAPPARPPRPPYPPRRDGSGGKGGGGSARYNQGRSRSGGASIGFHXQXILILSLSALALLGPR

SEQ ID NO: 11208 - protein, 526 aa, Homo sapiens
  MOD_RES (4)..(4): Selenocysteine
  MOD_RES (7)..(7): Selenocysteine
  MOD_RES (34)..(34): Selenocysteine
  MOD_RES (55)..(55): Selenocysteine
  MOD_RES (72)..(72): Selenocysteine
  MOD_RES (84)..(84): Selenocysteine
  MOD_RES (96)..(96): Selenocysteine
  MOD_RES (126)..(126): Selenocysteine
  MOD_RES (163)..(163): Selenocysteine
  MOD_RES (172)..(172): Selenocysteine
  MOD_RES (188)..(189): Selenocysteine
  MOD_RES (203)..(203): Selenocysteine
  MOD_RES (272)..(272): Selenocysteine
  MOD_RES (288)..(290): Selenocysteine
  MOD_RES (329)..(329): Selenocysteine
  MOD_RES (366)..(366): Selenocysteine
  MOD_RES (421)..(421): Selenocysteine
  MOD_RES (489)..(489): Selenocysteine
  MOD_RES (497)..(497): Selenocysteine
  MOD_RES (512)..(512): Selenocysteine
MAGXVRXACLVVAMLLSLDFPGQAQPPPPPPDAXCHQVRSFFQRLQPGLKWVPEXPVPEAFEIVVRHAKNYXNAMFKNNYPSLXPQAFEFVGEFFXDVSLYILGSDINVDDMVNELFDSLFPVIYXQLMNPGLPDSALDINECLRGARRDLKVFGNFPKLIMXQVSKSLQVXRIFLQALNLGIEVINXXDHLKFSKDCGRMLXRMWYCSYCQGLMMVKPCGGYCNVVMQGCMAGVVEIDKYWREYILSLEELVNGMYRIYDMENVLLGLFSXIHDSIQYVQKNAGKLXXXIGKLCAHSQQRQYRSAYYPEDLFIDKKVLKVAHVEHEEXLSSRRRELIQKLKSFISFYSALPGYICSHSPVAENDXLCWNGQELVERYSQKAARNGMKNQFNLHELKMKGPEPVVSQIIDKLKHINQLLRXMSMPKGRVLDKNLDEEGFESGDCGDDEDECIGGSGDGMIKVKNQLRFLAELAYDLDVDDAPGNSQQAXPKDNEISXFHNLGNVHSPLKLLXSMAISVVCFFFLVH

SEQ ID NO: 11209 - protein, 580 aa, Homo sapiens
  MOD_RES (4)..(4): Selenocysteine
  MOD_RES (7)..(7): Selenocysteine
  MOD_RES (34)..(34): Selenocysteine
  MOD_RES (55)..(55): Selenocysteine
  MOD_RES (71)..(71): Selenocysteine
  MOD_RES (84)..(84): Selenocysteine
  MOD_RES (126)..(126): Selenocysteine
  MOD_RES (138)..(138): Selenocysteine
  MOD_RES (150)..(150): Selenocysteine
  MOD_RES (180)..(180): Selenocysteine
  MOD_RES (217)..(217): Selenocysteine
  MOD_RES (226)..(226): Selenocysteine
  MOD_RES (242)..(243): Selenocysteine
  MOD_RES (257)..(257): Selenocysteine
  MOD_RES (326)..(326): Selenocysteine
  MOD_RES (342)..(344): Selenocysteine
  MOD_RES (383)..(383): Selenocysteine
  MOD_RES (420)..(420): Selenocysteine
  MOD_RES (475)..(475): Selenocysteine
  MOD_RES (543)..(543): Selenocysteine
  MOD_RES (551)..(551): Selenocysteine
  MOD_RES (566)..(566): Selenocysteine
MAGXVRXACLVVAMLLSLDFPGQAQPPPPPPDAXCHQVRSFFQRLQPGLKWVPEXPVPGSDLQVCLPKGPXCCSRKMEEKYQLXARLNMEQLLQSASMELKFLIIQNAAVFQEAFEIVVRHAKNYXNAMFKNNYPSLXPQAFEFVGEFFXDVSLYILGSDINVDDMVNELFDSLFPVIYXQLMNPGLPDSALDINECLRGARRDLKVFGNFPKLIMXQVSKSLQVXRIFLQALNLGIEVINXXDHLKFSKDCGRMLXRMWYCSYCQGLMMVKPCGGYCNVVMQGCMAGVVEIDKYWREYILSLEELVNGMYRIYDMENVLLGLFSXIHDSIQYVQKNAGKLXXXIGKLCAHSQQRQYRSAYYPEDLFIDKKVLKVAHVEHEEXLSSRRRELIQKLKSFISFYSALPGYICSHSPVAENDXLCWNGQELVERYSQKAARNGMKNQFNLHELKMKGPEPVVSQIIDKLKHINQLLRXMSMPKGRVLDKNLDEEGFESGDCGDDEDECIGGSGDGMIKVKNQLRFLAELAYDLDVDDAPGNSQQAXPKDNEISXFHNLGNVHSPLKLLXSMAISVVCFFFLVH

SEQ ID NO: 11210 - protein, 603 aa, Homo sapiens
  MOD_RES (4)..(4): Selenocysteine
  MOD_RES (7)..(7): Selenocysteine
  MOD_RES (34)..(34): Selenocysteine
  MOD_RES (55)..(55): Selenocysteine
  MOD_RES (71)..(71): Selenocysteine
  MOD_RES (84)..(84): Selenocysteine
  MOD_RES (126)..(126): Selenocysteine
  MOD_RES (138)..(138): Selenocysteine
  MOD_RES (150)..(150): Selenocysteine
  MOD_RES (180)..(180): Selenocysteine
  MOD_RES (217)..(217): Selenocysteine
  MOD_RES (226)..(226): Selenocysteine
  MOD_RES (242)..(243): Selenocysteine
  MOD_RES (257)..(257): Selenocysteine
  MOD_RES (326)..(326): Selenocysteine
  MOD_RES (342)..(344): Selenocysteine
  MOD_RES (346)..(346): Selenocysteine
  MOD_RES (406)..(406): Selenocysteine
  MOD_RES (443)..(443): Selenocysteine
  MOD_RES (498)..(498): Selenocysteine
  MOD_RES (566)..(566): Selenocysteine
  MOD_RES (574)..(574): Selenocysteine
  MOD_RES (589)..(589): Selenocysteine
MAGXVRXACLVVAMLLSLDFPGQAQPPPPPPDAXCHQVRSFFQRLQPGLKWVPEXPVPGSDLQVCLPKGPXCCSRKMEEKYQLXARLNMEQLLQSASMELKFLIIQNAAVFQEAFEIVVRHAKNYXNAMFKNNYPSLXPQAFEFVGEFFXDVSLYILGSDINVDDMVNELFDSLFPVIYXQLMNPGLPDSALDINECLRGARRDLKVFGNFPKLIMXQVSKSLQVXRIFLQALNLGIEVINXXDHLKFSKDCGRMLXRMWYCSYCQGLMMVKPCGGYCNVVMQGCMAGVVEIDKYWREYILSLEELVNGMYRIYDMENVLLGLFSXIHDSIQYVQKNAGKLXXXEXEKKIWHFKYPIFFLCIGLDLQIGKLCAHSQQRQYRSAYYPEDLFIDKKVLKVAHVEHEEXLSSRRRELIQKLKSFISFYSALPGYICSHSPVAENDXLCWNGQELVERYSQKAARNGMKNQFNLHELKMKGPEPVVSQIIDKLKHINQLLRXMSMPKGRVLDKNLDEEGFESGDCGDDEDECIGGSGDGMIKVKNQLRFLAELAYDLDVDDAPGNSQQAXPKDNEISXFHNLGNVHSPLKLLXSMAISVVCFFFLVH

SEQ ID NO: 11211 - protein, 256 aa, Homo sapiens
  MOD_RES (1)..(1): Any amino acid
  MOD_RES (56)..(56): Selenocysteine
  MOD_RES (72)..(74): Selenocysteine
  MOD_RES (113)..(113): Selenocysteine
  MOD_RES (150)..(150): Selenocysteine
  MOD_RES (205)..(205): Selenocysteine
XKPCGGYCNVVMQGCMAGVVEIDKYWREYILSLEELVNGMYRIYDMENVLLGLFSXIHDSIQYVQKNAGKLXXXIGKLCAHSQQRQYRSAYYPEDLFIDKKVLKVAHVEHEEXLSSRRRELIQKLKSFISFYSALPGYICSHSPVAENDXLCWNGQELVERYSQKAARNGMKNQFNLHELKMKGPEPVVSQIIDKLKHINQLLRXMSMPKGRVLDKNLDEEGFESGDCGDDEDECIGGSGDGMIKVKNQLRFLAGN

SEQ ID NO: 11212 - protein, 556 aa, Homo sapiens
  MOD_RES (12)..(12): Selenocysteine
  MOD_RES (65)..(65): Selenocysteine
  MOD_RES (127)..(127): Selenocysteine
  MOD_RES (183)..(183): Selenocysteine
  MOD_RES (194)..(194): Selenocysteine
  MOD_RES (212)..(212): Selenocysteine
  MOD_RES (220)..(220): Selenocysteine
  MOD_RES (241)..(241): Selenocysteine
  MOD_RES (245)..(245): Selenocysteine
  MOD_RES (262)..(262): Selenocysteine
  MOD_RES (375)..(376): Selenocysteine
  MOD_RES (380)..(380): Selenocysteine
  MOD_RES (387)..(387): Selenocysteine
  MOD_RES (437)..(437): Selenocysteine
  MOD_RES (454)..(454): Selenocysteine
  MOD_RES (472)..(472): Selenocysteine
  MOD_RES (516)..(516): Selenocysteine
  MOD_RES (542)..(542): Selenocysteine
MARFGLPALLCXLAVLSAALLAAELKSKSCSEVRRLYVSKGFNKNDAPLHEINGDHLKICPQGSXCCSQEMEEKYSLQSKDDFKSVVSEQCNHLQAVFASRYKKFDEFFKELLENAEKSLNDMFVKXYGHLYMQNSELFKDLFVELKRYYVVGNVNLEEMLNDFWARLLERMFRLVNSQYHFXDEYLECVSKYXEQLKPFGDVPRKLKLQVXRAFVAARXFAQGLAVAGDVVSKVSVVNPXAQCXHALLKMIYCSHCRGLVXVKPCYNYCSNIMRGCLANQGDLDFEWNNFIDAMLMVAERLEGPFNIESVMDPIDVKISDAIMNMQDNSVQVSQKVFQGCGPPKPLPAGRISRSISESAFSARFRPHHPEERPXXAAGXSLDRLVXDVKEKLKQAKKFWSSLPSNVCNDERMAAGNGNEDDCWNGKGKSRYLFAVXGNGLANQGNNPEVQVDXSKPDILILRQIMALRVMXSKMKNAYNGNDVDFFDISDESSGEGSGSGCEYQQCPSEFDYNAXDHAGKSANEKADSAGVRPGAQAYLLXVFCILFLVMQREWR

SEQ ID NO: 11213 - protein, 263 aa, Homo sapiens
  MOD_RES (70)..(70): Selenocysteine
  MOD_RES (82)..(83): Selenocysteine
  MOD_RES (87)..(87): Selenocysteine
  MOD_RES (94)..(94): Selenocysteine
  MOD_RES (113)..(113): Selenocysteine
  MOD_RES (121)..(121): Selenocysteine
  MOD_RES (124)..(124): Selenocysteine
  MOD_RES (149)..(149): Selenocysteine
  MOD_RES (162)..(162): Selenocysteine
  MOD_RES (166)..(166): Selenocysteine
  MOD_RES (179)..(179): Selenocysteine
  MOD_RES (196)..(196): Selenocysteine
  MOD_RES (216)..(216): Selenocysteine
  MOD_RES (222)..(223): Selenocysteine
  MOD_RES (252)..(252): Selenocysteine
DAMLLVAERLEGPFNIESVMDPIDVKISEAIMNMQENSMQVSAKVFQGCGQPKPAPALRSARSAPENFNXRFRPYNPEERPXXAAGXSLDRLVXDIKEKLKLSKKVWSALPYXICKDESVXAGXSNEEECWNGHSKARYLPEIMNDGLXNQINNPEVDVDIXRPDXFIRQQIMALRVMXNKLKNAYNGNDVNFQDXSDESSGSGSGSGCMDDVCPXEFEFVXXEAPAVDPDRREVDSSAAQRGHSLLSWSLXCIVLALQRLCR

SEQ ID NO: 11214 - protein, 555 aa, Homo sapiens
  MOD_RES (65)..(65): Selenocysteine
  MOD_RES (68)..(69): Selenocysteine
  MOD_RES (90)..(90): Selenocysteine
  MOD_RES (96)..(97): Selenocysteine
  MOD_RES (127)..(127): Selenocysteine
  MOD_RES (144)..(144): Selenocysteine
  MOD_RES (151)..(151): Selenocysteine
  MOD_RES (194)..(194): Selenocysteine
  MOD_RES (212)..(212): Selenocysteine
  MOD_RES (220)..(220): Selenocysteine
  MOD_RES (226)..(226): Selenocysteine
  MOD_RES (241)..(241): Selenocysteine
  MOD_RES (262)..(262): Selenocysteine
  MOD_RES (286)..(286): Selenocysteine
  MOD_RES (362)..(362): Selenocysteine
  MOD_RES (374)..(375): Selenocysteine
  MOD_RES (379)..(379): Selenocysteine
  MOD_RES (386)..(386): Selenocysteine
  MOD_RES (405)..(405): Selenocysteine
  MOD_RES (413)..(413): Selenocysteine
  MOD_RES (416)..(416): Selenocysteine
  MOD_RES (441)..(441): Selenocysteine
  MOD_RES (454)..(454): Selenocysteine
  MOD_RES (458)..(458): Selenocysteine
  MOD_RES (471)..(471): Selenocysteine
  MOD_RES (488)..(488): Selenocysteine
  MOD_RES (508)..(508): Selenocysteine
  MOD_RES (514)..(515): Selenocysteine
  MOD_RES (544)..(544): Selenocysteine
MPSWIGAVILPLLGLLLSLPAGADVKARSCGEVRQAYGAKGFSLADIPYQEIAGEHLRICPQEYXCCXXEMEDKLSQQSKLEFENLVEEXSHFVRXXFVSRHKKFDEFFRELLENAEKSLNDMFVRXYGMLYMQNSEVFQDLFXELKRYYXGGNVNLEEMLNDFWARLLERMFQLINPQYHFSEDYLECVSKYXDQLKPFGDVPRKLKIQVXRAFIAARXFVQGLXVGREVANRVSKVSPXPGCIRALMKMLYCPYCRGLPXVRPCNNYCLNVMKGCLANQADLDXEWNLFIDAMLLVAERLEGPFNIESVMDPIDVKISEAIMNMQENSMQVSAKVFQGCGQPKPAPALRSARSAPENFNXRFRPYNPEERPXXAAGXSLDRLVXDIKEKLKLSKKVWSALPYXICKDESVXAGXSNEEECWNGHSKARYLPEIMNDGLXNQINNPEVDVDIXRPDXFIRQQIMALRVMXNKLKNAYNGNDVNFQDXSDESSGSGSGSGCMDDVCPXEFEFVXXEAPAVDPDRREVDSSAAQRGHSLLSWSLXCIVLALQRLCR

SEQ ID NO: 11215 - protein, 173 aa, Homo sapiens
  MOD_RES (37)..(37): Selenocysteine
  MOD_RES (46)..(46): Selenocysteine
  MOD_RES (53)..(53): Selenocysteine
  MOD_RES (119)..(120): Selenocysteine
  MOD_RES (138)..(138): Selenocysteine
  MOD_RES (144)..(144): Selenocysteine
  MOD_RES (151)..(151): Selenocysteine
MAAAPLKVCIVGSGNWGSAVAKIIGNNVKKLQKFASXVKMWVFEEXVNGRKLXDIINNDHENVKYLPGHKLPENVGIDEGPEGLKLISDIIREKMGIDISVLMGANIANEVAAEKFCEXXIGSKVMENGLLFKELLQXPNFRIXVVDDADXVELCGALKNIVAVGAGFCDGLR

SEQ ID NO: 11216 - protein, 351 aa, Homo sapiens
  MOD_RES (37)..(37): Selenocysteine
  MOD_RES (46)..(46): Selenocysteine
  MOD_RES (53)..(53): Selenocysteine
  MOD_RES (108)..(108): Selenocysteine
  MOD_RES (119)..(119): Selenocysteine
  MOD_RES (166)..(167): Selenocysteine
  MOD_RES (185)..(185): Selenocysteine
  MOD_RES (191)..(191): Selenocysteine
  MOD_RES (198)..(198): Selenocysteine
  MOD_RES (225)..(225): Selenocysteine
  MOD_RES (251)..(251): Selenocysteine
  MOD_RES (253)..(253): Selenocysteine
  MOD_RES (265)..(266): Selenocysteine
  MOD_RES (282)..(282): Selenocysteine
  MOD_RES (285)..(285): Selenocysteine
  MOD_RES (304)..(304): Selenocysteine
  MOD_RES (325)..(325): Selenocysteine
  MOD_RES (351)..(351): Selenocysteine
MAAAPLKVCIVGSGNWGSAVAKIIGNNVKKLQKFASXVKMWVFEEXVNGRKLXDIINNDHENVKYLPGHKLPENVVAMSNLSEAVQDADLLVFVIPHQFIHRICDEIXGRVPKKALGIXLIKGIDEGPEGLKLISDIIREKMGIDISVLMGANIANEVAAEKFCEXXIGSKVMENGLLFKELLQXPNFRIXVVDDADXVELCGALKNIVAVGAGFCDGLRCGDNXKAAVIRLGLMEMIAFARIFCKGQVSXAXFLESCGVADLIXXCYGGRNRRVAEAFARXGKXIEELEKEMLNGQKLQGPQXSAEVYRILKQKGLLDKFPLFXAVYQICYESRPVQEMLSCLQSHPEHX

SEQ ID NO: 11217 - protein, 64 aa, Homo sapiens
  MOD_RES (30)..(30): Selenocysteine
  MOD_RES (38)..(38): Selenocysteine
  MOD_RES (42)..(42): Selenocysteine
MAAAPLKVCIVGSGNWLPCQILARLCRMQXCWCLSFPXSSFXESVMRSLGECPRKRWESPSSRA

SEQ ID NO: 11218 - protein, 128 aa, Homo sapiens
  MOD_RES (7)..(7): Selenocysteine
  MOD_RES (14)..(14): Selenocysteine
  MOD_RES (69)..(69): Selenocysteine
  MOD_RES (80)..(80): Selenocysteine
  MOD_RES (127)..(128): Selenocysteine
MWVFEEXVNGRKLXDIINNDHENVKYLPGHKLPENVVAMSNLSEAVQDADLLVFVIPHQFIHRICDEIXGRVPKKALGIXLIKGIDEGPEGLKLISDIIREKMGIDISVLMGANIANEVAAEKFCEXX

SEQ ID NO: 11219 - protein, 144 aa, Homo sapiens
  MOD_RES (7)..(7): Selenocysteine
  MOD_RES (14)..(14): Selenocysteine
  MOD_RES (69)..(69): Selenocysteine
  MOD_RES (80)..(80): Selenocysteine
  MOD_RES (127)..(128): Selenocysteine
MWVFEEXVNGRKLXDIINNDHENVKYLPGHKLPENVVAMSNLSEAVQDADLLVFVIPHQFIHRICDEIXGRVPKKALGIXLIKGIDEGPEGLKLISDIIREKMGIDISVLMGANIANEVAAEKFCEXXIGSKVMENGLLFKELL

SEQ ID NO: 11220 - protein, 73 aa, Homo sapiens
  MOD_RES (4)..(4): Selenocysteine
  MOD_RES (18)..(18): Selenocysteine
  MOD_RES (26)..(27): Selenocysteine
  MOD_RES (40)..(40): Selenocysteine
  MOD_RES (46)..(46): Selenocysteine
  MOD_RES (66)..(66): Selenocysteine
MDVXSQARGVGLEMYPGXAQPAAPNXXSPELNLSHPLLGXALANGXGELSEHQQYVIGLFLSCLYXIFLFPIG

SEQ ID NO: 11221 - protein, 375 aa, Homo sapiens
  MOD_RES (4)..(4): Selenocysteine
  MOD_RES (18)..(18): Selenocysteine
  MOD_RES (26)..(27): Selenocysteine
  MOD_RES (40)..(40): Selenocysteine
  MOD_RES (46)..(46): Selenocysteine
  MOD_RES (66)..(66): Selenocysteine
  MOD_RES (92)..(92): Selenocysteine
  MOD_RES (131)..(131): Selenocysteine
  MOD_RES (149)..(149): Selenocysteine
  MOD_RES (170)..(170): Selenocysteine
  MOD_RES (189)..(189): Selenocysteine
  MOD_RES (194)..(194): Selenocysteine
  MOD_RES (201)..(201): Selenocysteine
  MOD_RES (220)..(220): Selenocysteine
  MOD_RES (287)..(287): Selenocysteine
  MOD_RES (305)..(305): Selenocysteine
  MOD_RES (330)..(330): Selenocysteine
  MOD_RES (343)..(343): Selenocysteine
  MOD_RES (364)..(364): Selenocysteine
MDVXSQARGVGLEMYPGXAQPAAPNXXSPELNLSHPLLGXALANGXGELSEHQQYVIGLFLSCLYXIFLFPIGFVGNILILVVNISFREKMXIPDLYFINLAVADLILVADSLIEVFNLHERYYDIAVLCXFMSLFLQVNMYSSVFFLXWMSFDRYIALARAMRCSLFRXKHHARLSCGLIWMASVSAXLVPFXAVHLQHXDEACFCFADVREVQWLEVXLGFIVPFAIIGLCYSLIVRVLVRAHRHRGLRPRRQKALRMILAVVLVFFVCWLPENVFISVHLLQRXQPGAAPCKQSFRHAHPLXGHIVNLAAFSNSCLNPLIYSFLGEXFRDKLRLYIEQKXNLPALNRFCHAALKAVIPDSXEQSDVRFSSAV

SEQ ID NO: 11222 - protein, 408 aa, Homo sapiens
  MOD_RES (4)..(4): Selenocysteine
  MOD_RES (18)..(18): Selenocysteine
  MOD_RES (26)..(27): Selenocysteine
  MOD_RES (40)..(40): Selenocysteine
  MOD_RES (46)..(46): Selenocysteine
  MOD_RES (66)..(66): Selenocysteine
  MOD_RES (92)..(92): Selenocysteine
  MOD_RES (131)..(131): Selenocysteine
  MOD_RES (149)..(149): Selenocysteine
  MOD_RES (170)..(170): Selenocysteine
  MOD_RES (189)..(189): Selenocysteine
  MOD_RES (194)..(194): Selenocysteine
  MOD_RES (201)..(201): Selenocysteine
  MOD_RES (220)..(220): Selenocysteine
  MOD_RES (287)..(287): Selenocysteine
  MOD_RES (305)..(305): Selenocysteine
  MOD_RES (329)..(329): Selenocysteine
  MOD_RES (342)..(343): Selenocysteine
  MOD_RES (350)..(350): Selenocysteine
  MOD_RES (373)..(373): Selenocysteine
  MOD_RES (385)..(385): Selenocysteine
  MOD_RES (392)..(392): Selenocysteine
  MOD_RES (395)..(395): Selenocysteine
  MOD_RES (398)..(398): Selenocysteine
  MOD_RES (402)..(402): Selenocysteine
MDVXSQARGVGLEMYPGXAQPAAPNXXSPELNLSHPLLGXALANGXGELSEHQQYVIGLFLSCLYXIFLFPIGFVGNILILVVNISFREKMXIPDLYFINLAVADLILVADSLIEVFNLHERYYDIAVLCXFMSLFLQVNMYSSVFFLXWMSFDRYIALARAMRCSLFRXKHHARLSCGLIWMASVSAXLVPFXAVHLQHXDEACFCFADVREVQWLEVXLGFIVPFAIIGLCYSLIVRVLVRAHRHRGLRPRRQKALRMILAVVLVFFVCWLPENVFISVHLLQRXQPGAAPCKQSFRHAHPLXHGHVMSLNCGQMWLLAPRGLARVXLAWSPWGCLGNLXXGHLALLXQNCYNPKALAPQGPKASGDQPVXQLLPANPACRCXCLPLQEXFLXPSXRKAXRRGHCG

SEQ ID NO: 11223 - protein, 176 aa, Homo sapiens
  MOD_RES (20)..(20): Selenocysteine
  MOD_RES (33)..(34): Selenocysteine
  MOD_RES (41)..(41): Selenocysteine
  MOD_RES (64)..(64): Selenocysteine
  MOD_RES (76)..(76): Selenocysteine
  MOD_RES (83)..(83): Selenocysteine
  MOD_RES (136)..(136): Selenocysteine
  MOD_RES (138)..(138): Selenocysteine
  MOD_RES (170)..(170): Selenocysteine
MSLNCGQMWLLAPRGLARVXLAWSPWGCLGNLXXGHLALLXQNCYNPKALAPQGPKASGDQPVXQLLPANPACRCXCLPLQEXFLSVLHLPGWQQWRCAASPGPRGAAALGPEQQEGPSVERPPSAPGWFSHCLLXSXWQLHSCGLGPCELPCGLVGCQDNEILQHLWLXNLFLQK

SEQ ID NO: 11224 - protein, 130 aa, Homo sapiens
  MOD_RES (32)..(32): Selenocysteine
  MOD_RES (42)..(42): Selenocysteine
  MOD_RES (56)..(57): Selenocysteine
  MOD_RES (66)..(66): Selenocysteine
  MOD_RES (85)..(85): Selenocysteine
  MOD_RES (89)..(89): Selenocysteine
  MOD_RES (93)..(93): Selenocysteine
  MOD_RES (108)..(108): Selenocysteine
  MOD_RES (122)..(122): Selenocysteine
  MOD_RES (124)..(125): Selenocysteine
  MOD_RES (129)..(129): Selenocysteine
MKLAFLFLGPMALLLLAGYGCVLGASSGNLRXFVGCAVREFXFLAKKPGCRGLRIXXDACWGRCEXWEKPILEPPYIEAHHRVCXYNEXKQVXVKLPNCAPGVDPFYXYPVAIRCDCGACSXAXXECEXI

SEQ ID NO: 11225 - protein, 840 aa, Homo sapiens
  MOD_RES (28)..(28): Selenocysteine
  MOD_RES (87)..(87): Selenocysteine
  MOD_RES (90)..(90): Selenocysteine
  MOD_RES (112)..(112): Selenocysteine
  MOD_RES (123)..(123): Selenocysteine
  MOD_RES (144)..(144): Selenocysteine
  MOD_RES (203)..(203): Selenocysteine
  MOD_RES (231)..(231): Selenocysteine
  MOD_RES (234)..(234): Selenocysteine
  MOD_RES (259)..(259): Selenocysteine
  MOD_RES (265)..(265): Selenocysteine
  MOD_RES (273)..(273): Selenocysteine
  MOD_RES (294)..(294): Selenocysteine
  MOD_RES (309)..(310): Selenocysteine
  MOD_RES (313)..(313): Selenocysteine
  MOD_RES (323)..(323): Selenocysteine
  MOD_RES (335)..(335): Selenocysteine
  MOD_RES (352)..(352): Selenocysteine
  MOD_RES (386)..(386): Selenocysteine
  MOD_RES (480)..(480): Selenocysteine
  MOD_RES (503)..(503): Selenocysteine
  MOD_RES (516)..(516): Selenocysteine
  MOD_RES (570)..(570): Selenocysteine
  MOD_RES (588)..(588): Selenocysteine
  MOD_RES (593)..(593): Selenocysteine
  MOD_RES (601)..(601): Selenocysteine
  MOD_RES (637)..(637): Selenocysteine
  MOD_RES (649)..(649): Selenocysteine
  MOD_RES (661)..(661): Selenocysteine
  MOD_RES (672)..(672): Selenocysteine
  MOD_RES (683)..(683): Selenocysteine
  MOD_RES (685)..(685): Selenocysteine
  MOD_RES (692)..(692): Selenocysteine
  MOD_RES (698)..(698): Selenocysteine
  MOD_RES (708)..(708): Selenocysteine
  MOD_RES (747)..(747): Selenocysteine
  MOD_RES (766)..(767): Selenocysteine
  MOD_RES (772)..(772): Selenocysteine
  MOD_RES (780)..(780): Selenocysteine
  MOD_RES (806)..(806): Selenocysteine
MSAFRLWPGLLIMLGSLCHRGSPCGLSXHVEIGHRALEFLQLHNGRVNYRELLLEHQDAYQAGIVFPDCFYPSICKGGKFHDVSESXHWXPFLNASVHYIRENYPLPWEKDXEKLVAFLFGIXSHMAADVSWHSLGLEQGFLRXMGAIDFHGSYSEAHSAGDFGGDVLSQFEFNFNYLARRWYVPVKDLLGIYEKLYGRKVIXENVIVDCSHIQFLEMYGEMLAVSKLYPXYSXKSPFLVEQFQEYFLGGLDDMAFWSXNIYHLXSFMLENGXSDCNLPENPLFIACGGQQNHXQGSKMQKNDFHRNLXXSLXESVDRNINYXERGVFFSVNSWXPDSMSFIYKALERNIRXMFIGGSQLSQKHVSSPLASYFLSFPYARLGWAMXSADLNQDGHGDLVVGAPGYSRPGHIHIGRVYLIYGNDLGLPPVDLDLDKEAHRILEGFQPSGRFGSALAVLDFNVDGVPDLAVGAPSVGSEQLXYKGAVYVYFGSKQGGMSSSPNIXISCQDIYCNLGWXLLAADVNGDSEPDLVIGSPFAPGGGKQKGIVAAFYSGPSLSDKEKLNVEAANWXVRGEEDFSWFGYSLHGVXVDNRXLLLVGSPXWKNASRLGHLLHIRDEKKSLGRVYGYFPPNGQSWFXISGDKAMGKLGXSLSSGHVLMNGXLKQVLLVGAPXYDDVSKVAFLXVXLHQGGAXRMYALXSDAQPLLLSXFSGDRRFSRFGGVLHLSDLDDDGLDEIIMAAPLRIADVXSGLIGGEDGRVYVYNGKEXXLGDMXGKCKSWIXPCPEEKAQYVLISPEASSRFGSSLIXVRSKAKNQVVIAAGRSSLGARLSGALHVYSLGSD

SEQ ID NO: 11226 - protein, 19 aa, Homo sapiens
  MOD_RES (7)..(7): Selenocysteine
MEDLEEXLFEEFENYSYDL

SEQ ID NO: 11227 - protein, 74 aa, Homo sapiens
  MOD_RES (7)..(7): Selenocysteine
  MOD_RES (63)..(63): Selenocysteine
  MOD_RES (70)..(70): Selenocysteine
  MOD_RES (72)..(73): Selenocysteine
MEDLEEXLFEEFENYSYDLDYYSLESDLEEKVQLGVVHWVSLVLYCLAFVLGIPGNAIVIWFXGFKWKKXVXXL

SEQ ID NO: 11228 - protein, 82 aa, Homo sapiens
  MOD_RES (7)..(7): Selenocysteine
  MOD_RES (63)..(63): Selenocysteine
  MOD_RES (70)..(70): Selenocysteine
  MOD_RES (72)..(73): Selenocysteine
MEDLEEXLFEEFENYSYDLDYYSLESDLEEKVQLGVVHWVSLVLYCLAFVLGIPGNAIVIWFXGFKWKKXVXXLWFLNLAIA

SEQ ID NO: 11229 - protein, 137 aa, Homo sapiens
  MOD_RES (7)..(7): Selenocysteine
  MOD_RES (63)..(63): Selenocysteine
  MOD_RES (70)..(70): Selenocysteine
  MOD_RES (72)..(73): Selenocysteine
  MOD_RES (116)..(116): Selenocysteine
  MOD_RES (129)..(129): Selenocysteine
MEDLEEXLFEEFENYSYDLDYYSLESDLEEKVQLGVVHWVSLVLYCLAFVLGIPGNAIVIWFXGFKWKKXVXXLWFLNLAIADFIFLLFLPLYISYVAMNFHWPFGIWLCKANSFXAQLNMFASVFFLXVISLDHYI

SEQ ID NO: 11230 - protein, 178 aa, Homo sapiens
  MOD_RES (7)..(7): Selenocysteine
  MOD_RES (63)..(63): Selenocysteine
  MOD_RES (70)..(70): Selenocysteine
  MOD_RES (72)..(73): Selenocysteine
  MOD_RES (116)..(116): Selenocysteine
  MOD_RES (129)..(129): Selenocysteine
  MOD_RES (150)..(150): Selenocysteine
  MOD_RES (178)..(178): Selenocysteine
MEDLEEXLFEEFENYSYDLDYYSLESDLEEKVQLGVVHWVSLVLYCLAFVLGIPGNAIVIWFXGFKWKKXVXXLWFLNLAIADFIFLLFLPLYISYVAMNFHWPFGIWLCKANSFXAQLNMFASVFFLXVISLDHYIHLIHPVLSHRHRXLKNSLIVIIFIWLLASLIGGPALYFRDX

SEQ ID NO: 11231 - protein, 227 aa, Homo sapiens
  MOD_RES (7)..(7): Selenocysteine
  MOD_RES (63)..(63): Selenocysteine
  MOD_RES (70)..(70): Selenocysteine
  MOD_RES (72)..(73): Selenocysteine
  MOD_RES (116)..(116): Selenocysteine
  MOD_RES (129)..(129): Selenocysteine
  MOD_RES (150)..(150): Selenocysteine
  MOD_RES (178)..(178): Selenocysteine
  MOD_RES (185)..(185): Selenocysteine
  MOD_RES (199)..(199): Selenocysteine
  MOD_RES (207)..(207): Selenocysteine
  MOD_RES (221)..(221): Selenocysteine
MEDLEEXLFEEFENYSYDLDYYSLESDLEEKVQLGVVHWVSLVLYCLAFVLGIPGNAIVIWFXGFKWKKXVXXLWFLNLAIADFIFLLFLPLYISYVAMNFHWPFGIWLCKANSFXAQLNMFASVFFLXVISLDHYIHLIHPVLSHRHRXLKNSLIVIIFIWLLASLIGGPALYFRDXVEFNNHXLCYNNFQKHDPDLXLIRHHVLXWVKFIIGYLFPLLXMSICYL

SEQ ID NO: 11232 - protein, 355 aa, Homo sapiens
  MOD_RES (7)..(7): Selenocysteine
  MOD_RES (63)..(63): Selenocysteine
  MOD_RES (70)..(70): Selenocysteine
  MOD_RES (72)..(73): Selenocysteine
  MOD_RES (116)..(116): Selenocysteine
  MOD_RES (129)..(129): Selenocysteine
  MOD_RES (150)..(150): Selenocysteine
  MOD_RES (178)..(178): Selenocysteine
  MOD_RES (185)..(185): Selenocysteine
  MOD_RES (199)..(199): Selenocysteine
  MOD_RES (207)..(207): Selenocysteine
  MOD_RES (221)..(221): Selenocysteine
  MOD_RES (247)..(247): Selenocysteine
  MOD_RES (260)..(260): Selenocysteine
  MOD_RES (271)..(271): Selenocysteine
  MOD_RES (290)..(290): Selenocysteine
  MOD_RES (326)..(326): Selenocysteine
  MOD_RES (335)..(335): Selenocysteine
  MOD_RES (345)..(345): Selenocysteine
  MOD_RES (353)..(353): Selenocysteine
MEDLEEXLFEEFENYSYDLDYYSLESDLEEKVQLGVVHWVSLVLYCLAFVLGIPGNAIVIWFXGFKWKKXVXXLWFLNLAIADFIFLLFLPLYISYVAMNFHWPFGIWLCKANSFXAQLNMFASVFFLXVISLDHYIHLIHPVLSHRHRXLKNSLIVIIFIWLLASLIGGPALYFRDXVEFNNHXLCYNNFQKHDPDLXLIRHHVLXWVKFIIGYLFPLLXMSICYLCLIFKVKKRSILISSRHFWXILVVVVAFVVCWXPYHLFSIWELXIHHNSYSHHVMQAGIPLSXGLAFLNSCLNPILYVLISKKFQARFRSSVAEILKYXLWEVSCSGXVSEQLRNSEXKNLCLLEXAQ

SEQ ID NO: 11233 - protein, 508 aa, Homo sapiens
  MOD_RES (2)..(2): Selenocysteine
  MOD_RES (4)..(4): Selenocysteine
  MOD_RES (6)..(6): Selenocysteine
  MOD_RES (9)..(9): Selenocysteine
  MOD_RES (17)..(17): Selenocysteine
  MOD_RES (36)..(36): Selenocysteine
  MOD_RES (66)..(66): Selenocysteine
  MOD_RES (76)..(76): Selenocysteine
  MOD_RES (91)..(91): Selenocysteine
  MOD_RES (105)..(105): Selenocysteine
  MOD_RES (111)..(111): Selenocysteine
  MOD_RES (121)..(121): Selenocysteine
  MOD_RES (144)..(144): Selenocysteine
  MOD_RES (155)..(155): Selenocysteine
  MOD_RES (164)..(164): Selenocysteine
  MOD_RES (193)..(193): Selenocysteine
  MOD_RES (291)..(291): Selenocysteine
  MOD_RES (293)..(293): Selenocysteine
  MOD_RES (311)..(311): Selenocysteine
  MOD_RES (325)..(325): Selenocysteine
  MOD_RES (339)..(339): Selenocysteine
  MOD_RES (429)..(429): Selenocysteine
  MOD_RES (437)..(437): Selenocysteine
  MOD_RES (460)..(460): Selenocysteine
  MOD_RES (490)..(490): Selenocysteine
  MOD_RES (494)..(494): Selenocysteine
  MOD_RES (506)..(506): Selenocysteine
MXSXCXNSXRESNSSHXCMPLSKMPISLAHGIIRSXVLVIFLAASFVGNIVLALVLQRKPQLLQVXNRFIFNLLVXDLLQISLVAPWVVAXSVPLFWPLNSHFCXALVSLXHLFAFASVNXIVVVSVDRYLSIIHPLSYPSKMXQRRGYLLLYGXWIVAILQSXPPLYGWGQAAFDERNALCSMIWGASPSYXILSVVSFIVIPLIVMIACYSVVFCAARRQHALLYNVKRHSLEVRVKDCVENEDEEGAEKKEEFQDESEFRRQHEGEVKAKEGRMEAKDGSLKAKEGSXGXSESSVEARGSEEVRESSXVASDGSMEGKEGSXKVEENSMKADKGRXEVNQCSIDLGEDDMEFGEDDINFSEDDVEAVNIPESLPPSRRNSNSNPPLPRCYQCKAAKVIFIIIFSYVLSLGPYCFLAVLAVWVDVEXQVPQWVIXIIIWLFFLQCCIHPYVYGYMHKXIKKEIQDMLKKFFCKEKPPKEDSHPDLPGXEGGXEGKIVPSYDSAXFP

SEQ ID NO: 11234 - protein, 335 aa, Homo sapiens
  MOD_RES (21)..(21): Selenocysteine
  MOD_RES (23)..(23): Selenocysteine
  MOD_RES (44)..(44): Selenocysteine
  MOD_RES (52)..(52): Selenocysteine
  MOD_RES (63)..(63): Selenocysteine
  MOD_RES (73)..(73): Selenocysteine
  MOD_RES (76)..(76): Selenocysteine
  MOD_RES (86)..(86): Selenocysteine
  MOD_RES (95)..(95): Selenocysteine
  MOD_RES (100)..(100): Selenocysteine
  MOD_RES (149)..(149): Selenocysteine
  MOD_RES (168)..(168): Selenocysteine
  MOD_RES (217)..(217): Selenocysteine
  MOD_RES (226)..(226): Selenocysteine
  MOD_RES (239)..(239): Selenocysteine
  MOD_RES (244)..(244): Selenocysteine
  MOD_RES (302)..(302): Selenocysteine
  MOD_RES (327)..(327): Selenocysteine
MESSFSFGVILAVLASLIIAXNXLVAVAVLLLIHKNDGVSLCFXLNLAVADXLIGVAISGLLXDQLSSPSRPXQKXLCSLRMAFVXSSAAASVLXVMLIXFDRYLAIKQPFRYLKIMSGFVAGACIAGLWLVSYLIGFLPLGIPMFQQXAYKGQCSFFAVFHPHFVLXLSCVGFFPAMLLFVFFYCDMLKIASMHSQQIRKMEHAGAMAGGYRSPRXPSDFKALRXVSVLIGSFALSWXPFLIXGIVQVACQECHLYLVLERYLWLLGVGNSLLNPLIYAYWQKEVRLQLYHMALGVKKVLXSFLLFLSARNCGPERPRESSCHIVXISSSEFDG

SEQ ID NO: 11235 - protein, 334 aa, Homo sapiens
  MOD_RES (53)..(53): Selenocysteine
  MOD_RES (56)..(56): Selenocysteine
  MOD_RES (99)..(99): Selenocysteine
  MOD_RES (112)..(112): Selenocysteine
  MOD_RES (116)..(116): Selenocysteine
  MOD_RES (135)..(135): Selenocysteine
  MOD_RES (147)..(147): Selenocysteine
  MOD_RES (153)..(153): Selenocysteine
  MOD_RES (155)..(155): Selenocysteine
  MOD_RES (157)..(157): Selenocysteine
  MOD_RES (167)..(167): Selenocysteine
  MOD_RES (187)..(187): Selenocysteine
  MOD_RES (195)..(195): Selenocysteine
  MOD_RES (240)..(240): Selenocysteine
  MOD_RES (245)..(246): Selenocysteine
  MOD_RES (252)..(252): Selenocysteine
  MOD_RES (259)..(259): Selenocysteine
  MOD_RES (268)..(268): Selenocysteine
  MOD_RES (277)..(277): Selenocysteine
  MOD_RES (283)..(283): Selenocysteine
  MOD_RES (286)..(286): Selenocysteine
  MOD_RES (291)..(291): Selenocysteine
MNEDLKVNLSGLPRDYLDAAAAENISAAVSSRVPAVEPEPELVVNPWDIVLCXSGXLISCENAIVVLIIFHNPSLRAPMFLLIGSLALADLLAGIGLIXNFVFAYLLQSEAXKLVXIGLIVASFSASVCSLLAIXVDRYLSLYYALXYHSERXVXFXYVMLVMLWGXSICLGLLPVMGWNCLRDESXCSVVRPLXKNNAAILSVSFLFMFALMLQLYIQICKIVMRHAHQIALQHHFLAXSHYVXXRKGVSXLAIILGXFAACWMPFXLYSLIADYXYPSIYXYAXLLPAXYNSIINPVIYAFRNQEIQKALCLICCGCIPSSLAQRARSPSDV

SEQ ID NO: 11236 - protein, 10 aa, Homo sapiens
MCPMLLKNGY

SEQ ID NO: 11237 - protein, 68 aa, Homo sapiens
  MOD_RES (24)..(24): Selenocysteine
  MOD_RES (50)..(50): Selenocysteine
  MOD_RES (63)..(64): Selenocysteine
MCPMLLKNGYNGAEARSVCGFLLXWRWDSMICNHRRPRSMNSARVGSQDXGAGGAGRAWGSHXXAHPA

SEQ ID NO: 11238 - protein, 380 aa, Homo sapiens
  MOD_RES (15)..(15): Selenocysteine
  MOD_RES (18)..(20): Selenocysteine
  MOD_RES (32)..(32): Selenocysteine
  MOD_RES (54)..(54): Selenocysteine
  MOD_RES (63)..(63): Selenocysteine
  MOD_RES (92)..(92): Selenocysteine
  MOD_RES (94)..(94): Selenocysteine
  MOD_RES (109)..(109): Selenocysteine
  MOD_RES (118)..(118): Selenocysteine
  MOD_RES (158)..(158): Selenocysteine
  MOD_RES (180)..(180): Selenocysteine
  MOD_RES (185)..(185): Selenocysteine
  MOD_RES (205)..(205): Selenocysteine
  MOD_RES (218)..(218): Selenocysteine
  MOD_RES (288)..(288): Selenocysteine
  MOD_RES (298)..(298): Selenocysteine
  MOD_RES (312)..(312): Selenocysteine
  MOD_RES (333)..(333): Selenocysteine
  MOD_RES (336)..(336): Selenocysteine
  MOD_RES (339)..(339): Selenocysteine
  MOD_RES (344)..(344): Selenocysteine
  MOD_RES (358)..(358): Selenocysteine
MCPMLLKNGYNGNAXPVXXXAPWASLGLSAKXCNNVSFEESRIVLVVVYSAVCXLGVPANCLXAWLALLQVLQGNVLAVYLLCLALCELLYXGXLPLWVIYIRNQHRWXLGLLACKVXAYIFFCNIYVSILFLCCISCDRFVAVVYALESRGRRRRRXAILISACIFILVGIVHYPVFQXEDKEXCFDMLQMDSRIAGYYYARFXVGFAIPLSIIAFXNHRIFRSIKQSMGLSAAQKAKVKHSAIAVVVIFLVCFAPYHLVLLVKAAAFSYYRGDRNAMCGLEERLYXASVVFLCLSXVNGVADPIIYVLAXDHSRQEVSRIHKGWKEWSMKXDVXRLXHSRDXEELQSPVALADHYXFSRPVHPPGSPCPAKRLIEESC

SEQ ID NO: 11239 - protein, 371 aa, Homo sapiens
  MOD_RES (6)..(6): Selenocysteine
  MOD_RES (9)..(11): Selenocysteine
  MOD_RES (23)..(23): Selenocysteine
  MOD_RES (45)..(45): Selenocysteine
  MOD_RES (54)..(54): Selenocysteine
  MOD_RES (83)..(83): Selenocysteine
  MOD_RES (85)..(85): Selenocysteine
  MOD_RES (100)..(100): Selenocysteine
  MOD_RES (109)..(109): Selenocysteine
  MOD_RES (149)..(149): Selenocysteine
  MOD_RES (171)..(171): Selenocysteine
  MOD_RES (176)..(176): Selenocysteine
  MOD_RES (196)..(196): Selenocysteine
  MOD_RES (209)..(209): Selenocysteine
  MOD_RES (279)..(279): Selenocysteine
  MOD_RES (289)..(289): Selenocysteine
  MOD_RES (303)..(303): Selenocysteine
  MOD_RES (324)..(324): Selenocysteine
  MOD_RES (327)..(327): Selenocysteine
  MOD_RES (330)..(330): Selenocysteine
  MOD_RES (335)..(335): Selenocysteine
  MOD_RES (349)..(349): Selenocysteine
MPGNAXPVXXXAPWASLGLSAKXCNNVSFEESRIVLVVVYSAVCXLGVPANCLXAWLALLQVLQGNVLAVYLLCLALCELLYXGXLPLWVIYIRNQHRWXLGLLACKVXAYIFFCNIYVSILFLCCISCDRFVAVVYALESRGRRRRRXAILISACIFILVGIVHYPVFQXEDKEXCFDMLQMDSRIAGYYYARFXVGFAIPLSIIAFXNHRIFRSIKQSMGLSAAQKAKVKHSAIAVVVIFLVCFAPYHLVLLVKAAAFSYYRGDRNAMCGLEERLYXASVVFLCLSXVNGVADPIIYVLAXDHSRQEVSRIHKGWKEWSMKXDVXRLXHSRDXEELQSPVALADHYXFSRPVHPPGSPCPAKRLIEESC

SEQ ID NO: 11240 - protein, 494 aa, Homo sapiens
  MOD_RES (33)..(33): Selenocysteine
  MOD_RES (38)..(38): Selenocysteine
  MOD_RES (46)..(46): Selenocysteine
  MOD_RES (49)..(49): Selenocysteine
  MOD_RES (63)..(63): Selenocysteine
  MOD_RES (136)..(136): Selenocysteine
  MOD_RES (138)..(138): Selenocysteine
  MOD_RES (152)..(152): Selenocysteine
  MOD_RES (166)..(166): Selenocysteine
  MOD_RES (199)..(199): Selenocysteine
  MOD_RES (236)..(236): Selenocysteine
  MOD_RES (266)..(266): Selenocysteine
  MOD_RES (303)..(303): Selenocysteine
  MOD_RES (316)..(316): Selenocysteine
  MOD_RES (329)..(329): Selenocysteine
  MOD_RES (331)..(332): Selenocysteine
  MOD_RES (361)..(361): Selenocysteine
  MOD_RES (376)..(376): Selenocysteine
  MOD_RES (408)..(408): Selenocysteine
  MOD_RES (479)..(479): Selenocysteine
  MOD_RES (482)..(482): Selenocysteine
  MOD_RES (492)..(492): Selenocysteine
MEEPQPPRPPASMALLGSQHSGAPSAAGPPGGXSSAAXAAVLSFSXVAXAALGNLSDASGGGXAAAPGGGGLGGSGAAREAGAAVRRPLGPEAAPLLSHGAAVAAQALVLLLIFLLSSLGNCAVMGVIVKHRQLRXVXNAFILSLSLSDLLXALLCLPAAFLDLFXPPGGSAPAAAAGPWRGFCAASRFFSSCFGIVSXLSVALISLDRYCAIVRPPREKIGRRRALQLLAGAWLXALGFSLPWELLGAPRELAAAQSFHGCLYRXSPDPAQLGAAFSVGLVVACYLLPFLLMCFCHYHICKXVRLSDVRVRPVNXYARVLRFFSEVRXAXXVLIMIVFVICCWGPYCFLVLLAAARQAQXMQAPSLLSVVAVWLXWANGAINPVIYAIRNPNISMLLGRNREEGYRXRNVDAFLPSQGPGLQARSRSRLRNRYANRLGACNRMSSSNPASGVAGDVAMWARKNPVVLFCREGPPEPVXAVXKQPKSEAGDXSL

SEQ ID NO: 11241 - protein, 353 aa, Homo sapiens
  MOD_RES (4)..(4): Selenocysteine
  MOD_RES (47)..(47): Selenocysteine
  MOD_RES (114)..(114): Selenocysteine
  MOD_RES (119)..(119): Selenocysteine
  MOD_RES (123)..(123): Selenocysteine
  MOD_RES (138)..(138): Selenocysteine
  MOD_RES (145)..(145): Selenocysteine
  MOD_RES (155)..(155): Selenocysteine
  MOD_RES (159)..(159): Selenocysteine
  MOD_RES (171)..(171): Selenocysteine
  MOD_RES (177)..(177): Selenocysteine
  MOD_RES (190)..(190): Selenocysteine
  MOD_RES (223)..(223): Selenocysteine
  MOD_RES (226)..(227): Selenocysteine
  MOD_RES (232)..(232): Selenocysteine
  MOD_RES (234)..(234): Selenocysteine
  MOD_RES (239)..(239): Selenocysteine
  MOD_RES (278)..(278): Selenocysteine
  MOD_RES (294)..(294): Selenocysteine
  MOD_RES (299)..(299): Selenocysteine
  MOD_RES (315)..(315): Selenocysteine
  MOD_RES (322)..(322): Selenocysteine
MEHXHAHLAANSSLSWWSPGSACGLGFVPVVYYSLLLCLGLPANILXVIILSQLVARRQKSSYNYLLALAAADILVLFFIVFVDFLLEDFILNMQMPQVPDKIIEVLEFSSIHXSIWIXVPLXIDRYIAVCHPLKYHXVSYPARXRKVIVSVYIXCFLXSIPYYWWPNIWXEDYISXSVHHVLIWIHCFXVYLVPCSIFFILNSIIVYKLRRKSNFRLRGYSXGKXXAILFXIXSIFAXLWAPRIIMILYHLYGAPIQNRWLVHIMSDIANMLALLNXAINFFLYCFISKRFRXMAAAXLKAFFKCQKQPVQFYXNHNFSIXSSPWISPANSHCIKMLVYQYDKNGKPIKVSP

SEQ ID NO: 11242 - protein, 50 aa, Homo sapiens
  MOD_RES (4)..(4): Selenocysteine
MEHXHAHLAANSSLSWWSPGSACGLGFVPVVYYSLLLCLGLPDIMKPIKL

SEQ ID NO: 11243 - protein, 104 aa, Homo sapiens
  MOD_RES (6)..(6): Selenocysteine
  MOD_RES (17)..(17): Selenocysteine
  MOD_RES (47)..(47): Selenocysteine
  MOD_RES (51)..(52): Selenocysteine
  MOD_RES (68)..(68): Selenocysteine
  MOD_RES (74)..(74): Selenocysteine
  MOD_RES (80)..(80): Selenocysteine
  MOD_RES (102)..(102): Selenocysteine
MPGHNXSRNSSCDPIVXPHLISLYFIVLIGGLVGVISILFLLVKMNXRSVXXMAVINLVVVHSVFLLXVPFRLXYLIKKXWMFGLPFCKFVSAMLHIHMYLXFL

SEQ ID NO: 11244 - protein, 305 aa, Homo sapiens
  MOD_RES (6)..(6): Selenocysteine
  MOD_RES (17)..(17): Selenocysteine
  MOD_RES (47)..(47): Selenocysteine
  MOD_RES (51)..(52): Selenocysteine
  MOD_RES (68)..(68): Selenocysteine
  MOD_RES (74)..(74): Selenocysteine
  MOD_RES (80)..(80): Selenocysteine
  MOD_RES (102)..(102): Selenocysteine
  MOD_RES (112)..(112): Selenocysteine
  MOD_RES (141)..(141): Selenocysteine
  MOD_RES (176)..(176): Selenocysteine
  MOD_RES (253)..(253): Selenocysteine
  MOD_RES (273)..(273): Selenocysteine
MPGHNXSRNSSCDPIVXPHLISLYFIVLIGGLVGVISILFLLVKMNXRSVXXMAVINLVVVHSVFLLXVPFRLXYLIKKXWMFGLPFCKFVSAMLHIHMYLXFLFYVVILVXRYLIFFKCKDKVEFYRKLHAVAASAGMWXLVIVIVVPLVVSRYGIHEEYNEEHCFKFHKELAYXYVKIINYMIVIFVIAVAVILLVFQVFIIMLMVQKLRHSLLSHQEFWAQLKNLFFIGVILVCFLPYQFFRIYYLNVVXHSNACNSKVAFYNEIFLSVXAISCYDLLLFVFGGSHWFKQKIIGLWNCVLCR

SEQ ID NO: 11245 - protein, 462 aa, Homo sapiens
  MOD_RES (17)..(17): Selenocysteine
  MOD_RES (23)..(23): Selenocysteine
  MOD_RES (28)..(28): Selenocysteine
  MOD_RES (32)..(32): Selenocysteine
  MOD_RES (62)..(62): Selenocysteine
  MOD_RES (103)..(103): Selenocysteine
  MOD_RES (119)..(119): Selenocysteine
  MOD_RES (126)..(126): Selenocysteine
  MOD_RES (130)..(130): Selenocysteine
  MOD_RES (177)..(177): Selenocysteine
  MOD_RES (186)..(186): Selenocysteine
  MOD_RES (188)..(188): Selenocysteine
  MOD_RES (200)..(200): Selenocysteine
  MOD_RES (233)..(233): Selenocysteine
  MOD_RES (253)..(253): Selenocysteine
  MOD_RES (258)..(258): Selenocysteine
  MOD_RES (275)..(275): Selenocysteine
  MOD_RES (289)..(289): Selenocysteine
  MOD_RES (303)..(303): Selenocysteine
  MOD_RES (308)..(308): Selenocysteine
  MOD_RES (320)..(320): Selenocysteine
  MOD_RES (332)..(332): Selenocysteine
  MOD_RES (356)..(356): Selenocysteine
  MOD_RES (363)..(364): Selenocysteine
  MOD_RES (367)..(367): Selenocysteine
  MOD_RES (407)..(407): Selenocysteine
  MOD_RES (420)..(420): Selenocysteine
  MOD_RES (424)..(424): Selenocysteine
  MOD_RES (437)..(437): Selenocysteine
  MOD_RES (458)..(458): Selenocysteine
MSIMMLPMEQKIQWVPXSLQDIXAVLGXEAYXEEDKSMVSHAQKSQHSCLSHSRWLRSPQVXGGSWDLRIRPSKDSSSFRQAQCLRKDPGANNHLESQGVRGXAGDADRELRGPSEKAXAGQPRVXLLPXPHVSGLSQEFESHWPEIAERSPCVAGVIPVIYYSVLLGLGLPVSLLXAVALARLAXRXRRPSYYYLLALXASDIIIQVVIVFAGFLLQGAVLARQVPQAVVRXANILEFAANHASVWIAILLXVDRYXALCHPLHHRAASSPGRXRRAIAAVLSAALLXGIPFYWWLDMWRDXDSPRXLDEVLKWAHCLXVYFIPCGVFLVXNSAIIHRLRRRGRSGLQPRVGKSXAILLGIXXLFXLLWAPRVFVMLYHMYVAPVHRDWRVHLALDVANMVAMLHXAANFGLYCFVSKXFRAXVRQVIHDAYLPCXLASQPEGMAAKPVMEPPGLPXGAEV

SEQ ID NO: 11246 - protein, 131 aa, Homo sapiens
  MOD_RES (17)..(17): Selenocysteine
  MOD_RES (23)..(23): Selenocysteine
  MOD_RES (28)..(28): Selenocysteine
  MOD_RES (32)..(32): Selenocysteine
  MOD_RES (62)..(62): Selenocysteine
  MOD_RES (103)..(103): Selenocysteine
  MOD_RES (119)..(119): Selenocysteine
MSIMMLPMEQKIQWVPXSLQDIXAVLGXEAYXEEDKSMVSHAQKSQHSCLSHSRWLRSPQVXGGSWDLRIRPSKDSSSFRQAQCLRKDPGANNHLESQGVRGXAGDADRELRGPSEKAXGDPGLRAPEHGA

SEQ ID NO: 11247 - protein, 101 aa, Homo sapiens
  MOD_RES (17)..(17): Selenocysteine
  MOD_RES (23)..(23): Selenocysteine
  MOD_RES (28)..(28): Selenocysteine
  MOD_RES (32)..(32): Selenocysteine
  MOD_RES (62)..(62): Selenocysteine
MSIMMLPMEQKIQWVPXSLQDIXAVLGXEAYXEEDKSMVSHAQKSQHSCLSHSRWLRSPQVXGGSWDLRIRPSKDSSSFRQVNPAASQNRPSMGWDGSVSA

SEQ ID NO: 11248 - protein, 404 aa, Homo sapiens
  MOD_RES (8)..(8): Selenocysteine
  MOD_RES (13)..(13): Selenocysteine
  MOD_RES (18)..(18): Selenocysteine
  MOD_RES (62)..(62): Selenocysteine
  MOD_RES (90)..(90): Selenocysteine
  MOD_RES (108)..(108): Selenocysteine
  MOD_RES (153)..(153): Selenocysteine
  MOD_RES (166)..(166): Selenocysteine
  MOD_RES (197)..(197): Selenocysteine
  MOD_RES (216)..(216): Selenocysteine
  MOD_RES (218)..(218): Selenocysteine
  MOD_RES (232)..(232): Selenocysteine
  MOD_RES (274)..(274): Selenocysteine
  MOD_RES (286)..(286): Selenocysteine
  MOD_RES (290)..(291): Selenocysteine
  MOD_RES (314)..(314): Selenocysteine
  MOD_RES (333)..(334): Selenocysteine
  MOD_RES (363)..(363): Selenocysteine
  MOD_RES (379)..(379): Selenocysteine
  MOD_RES (384)..(384): Selenocysteine
  MOD_RES (400)..(400): Selenocysteine
MASPRLGXFCCPXRDAAXQLVLSFQPRAFHALCLGSGGLRLALGLLQLLPGRRPAGPGSPAXSPPASVRILRAAAACDLLGCLGMVIRSXVWLGFPNFVDSVSDMNHXEIWPAAFCVGSAMWIQLLYSACFWWLFCYAVDAYLVIRRSAGLSXILLYHIMAWGLAXLLCVEGAAMLYYPSVSRCERGLDHAIPHYVXMYLPLLLVLVANPILFQKXVXAVASLLKGRQGIYXENERRMGAVIKIRFFKIMLVLIICWLSNIINESLLFYLEMQXDINGGSLKPVRXAAKXXWFIMGILNPAQGFLLSLAFYGWXGCSLGFQSPRKEIQWESLXXSAAEGAHPSPLMPHENPASGKVSQVGGQXSDEALSMLSEGSDASXIEIHXASESCNKNEGDPALPXHGDL

SEQ ID NO: 11249 - protein, 171 aa, Homo sapiens
  MOD_RES (6)..(6): Selenocysteine
  MOD_RES (24)..(24): Selenocysteine
  MOD_RES (69)..(69): Selenocysteine
  MOD_RES (82)..(82): Selenocysteine
  MOD_RES (113)..(113): Selenocysteine
  MOD_RES (132)..(132): Selenocysteine
  MOD_RES (134)..(134): Selenocysteine
  MOD_RES (148)..(148): Selenocysteine
MVIRSXVWLGFPNFVDSVSDMNHXEIWPAAFCVGSAMWIQLLYSACFWWLFCYAVDAYLVIRRSAGLSXILLYHIMAWGLAXLLCVEGAAMLYYPSVSRCERGLDHAIPHYVXMYLPLLLVLVANPILFQKXVXAVASLLKGRQGIYXENERRMGAVIKIRFFKIMLVLII

SEQ ID NO: 11250 - protein, 267 aa, Homo sapiens
  MOD_RES (6)..(6): Selenocysteine
  MOD_RES (24)..(24): Selenocysteine
  MOD_RES (69)..(69): Selenocysteine
  MOD_RES (82)..(82): Selenocysteine
  MOD_RES (113)..(113): Selenocysteine
  MOD_RES (132)..(132): Selenocysteine
  MOD_RES (134)..(134): Selenocysteine
  MOD_RES (148)..(148): Selenocysteine
  MOD_RES (190)..(190): Selenocysteine
  MOD_RES (202)..(202): Selenocysteine
  MOD_RES (206)..(207): Selenocysteine
  MOD_RES (230)..(230): Selenocysteine
  MOD_RES (249)..(250): Selenocysteine
MVIRSXVWLGFPNFVDSVSDMNHXEIWPAAFCVGSAMWIQLLYSACFWWLFCYAVDAYLVIRRSAGLSXILLYHIMAWGLAXLLCVEGAAMLYYPSVSRCERGLDHAIPHYVXMYLPLLLVLVANPILFQKXVXAVASLLKGRQGIYXENERRMGAVIKIRFFKIMLVLIICWLSNIINESLLFYLEMQXDINGGSLKPVRXAAKXXWFIMGILNPAQGFLLSLAFYGWXGCSLGFQSPRKEIQWESLXXSAAEGAHPSPLMPHENP

SEQ ID NO: 11251 - protein, 39 aa, Homo sapiens
  MOD_RES (10)..(10): Selenocysteine
MWSCSWFNGXGLVEELPACQDLQLGLSLLSLLGLVVGVP

SEQ ID NO: 11252 - protein, 315 aa, Homo sapiens
  MOD_RES (10)..(10): Selenocysteine
  MOD_RES (60)..(60): Selenocysteine
  MOD_RES (120)..(120): Selenocysteine
  MOD_RES (136)..(136): Selenocysteine
  MOD_RES (144)..(144): Selenocysteine
  MOD_RES (158)..(158): Selenocysteine
  MOD_RES (173)..(173): Selenocysteine
  MOD_RES (190)..(190): Selenocysteine
  MOD_RES (203)..(203): Selenocysteine
  MOD_RES (218)..(218): Selenocysteine
  MOD_RES (224)..(224): Selenocysteine
  MOD_RES (238)..(238): Selenocysteine
  MOD_RES (241)..(241): Selenocysteine
  MOD_RES (247)..(247): Selenocysteine
  MOD_RES (257)..(257): Selenocysteine
  MOD_RES (292)..(292): Selenocysteine
MWSCSWFNGXGLVEELPACQDLQLGLSLLSLLGLVVGVPVGLCYNALLVLANLHSKASMXMPDVYFVNMAVAGLVLSALAPVHLLGPPSSRWALWSVGGEVHVALQIPFNVSSLVAMYSXALLSLDHYIERALPRXYMASVYNXRHVCGFVWGGALLXSFSSLLFYICSHVSXRALECAKMQNAEAADAXLVFIGYVVPALAXLYALVLLSRVRREDXPLDRDXGRLEPSAHRLLVAXVCXQFGLWXPHYLILLGHXVIISRGKPVDAHYLGLLHFVKDFSKLLAFSSSFVXPLLYRYMNQSFPSKLQRLMKKLP

SEQ ID NO: 11253 - protein, 333 aa, Homo sapiens
  MOD_RES (10)..(10): Selenocysteine
  MOD_RES (60)..(60): Selenocysteine
  MOD_RES (120)..(120): Selenocysteine
  MOD_RES (136)..(136): Selenocysteine
  MOD_RES (144)..(144): Selenocysteine
  MOD_RES (158)..(158): Selenocysteine
  MOD_RES (173)..(173): Selenocysteine
  MOD_RES (190)..(190): Selenocysteine
  MOD_RES (203)..(203): Selenocysteine
  MOD_RES (218)..(218): Selenocysteine
  MOD_RES (224)..(224): Selenocysteine
  MOD_RES (238)..(238): Selenocysteine
  MOD_RES (241)..(241): Selenocysteine
  MOD_RES (247)..(247): Selenocysteine
  MOD_RES (257)..(257): Selenocysteine
  MOD_RES (292)..(292): Selenocysteine
MWSCSWFNGXGLVEELPACQDLQLGLSLLSLLGLVVGVPVGLCYNALLVLANLHSKASMXMPDVYFVNMAVAGLVLSALAPVHLLGPPSSRWALWSVGGEVHVALQIPFNVSSLVAMYSXALLSLDHYIERALPRXYMASVYNXRHVCGFVWGGALLXSFSSLLFYICSHVSXRALECAKMQNAEAADAXLVFIGYVVPALAXLYALVLLSRVRREDXPLDRDXGRLEPSAHRLLVAXVCXQFGLWXPHYLILLGHXVIISRGKPVDAHYLGLLHFVKDFSKLLAFSSSFVXPLLYRYMNQSFPSKLQRLMKKLPCGDRHCSPDHMGVQQVLA

SEQ ID NO: 11254 - protein, 347 aa, Homo sapiens
  MOD_RES (12)..(13): Selenocysteine
  MOD_RES (25)..(25): Selenocysteine
  MOD_RES (35)..(35): Selenocysteine
  MOD_RES (63)..(63): Selenocysteine
  MOD_RES (73)..(73): Selenocysteine
  MOD_RES (125)..(125): Selenocysteine
  MOD_RES (133)..(133): Selenocysteine
  MOD_RES (135)..(135): Selenocysteine
  MOD_RES (140)..(140): Selenocysteine
  MOD_RES (146)..(146): Selenocysteine
  MOD_RES (181)..(181): Selenocysteine
  MOD_RES (209)..(209): Selenocysteine
  MOD_RES (220)..(220): Selenocysteine
  MOD_RES (222)..(222): Selenocysteine
  MOD_RES (232)..(232): Selenocysteine
  MOD_RES (248)..(248): Selenocysteine
  MOD_RES (262)..(262): Selenocysteine
  MOD_RES (271)..(271): Selenocysteine
  MOD_RES (276)..(276): Selenocysteine
  MOD_RES (287)..(287): Selenocysteine
  MOD_RES (296)..(296): Selenocysteine
  MOD_RES (298)..(298): Selenocysteine
  MOD_RES (317)..(317): Selenocysteine
  MOD_RES (345)..(345): Selenocysteine
MGDELAPCPVGXXAWPALIQLISKXPCMPQAASNXSLGLGDLRVPSSMLYWLFLPSSLLAAAXLAVSPLLLVXILRNQRLRQEPHYLLPANILLSDLAYILLHMLISSSSLGGWELGRMACGILXDAVFAACXSXILSFXAIVLHXYLAVIHPLRYLSFMSHGAAWKAVALIWLVACCFPXFLIWLSKWQDAQLEEQGASYILPPSMGXQPGCGLLVIVXYXSILCVLFLCXALIANCFWRIYAEAKXSGIWGQGYSRARGXLLIHSVLIXLYVSXGVVFSLDMVLXRYHHIDSGXHXWLLAANSEVLMMLPRAMLXYLYLLRYRQLLGMVRGHLPSRRHQAIFXIS

SEQ ID NO: 11255 - protein, 731 aa, Homo sapiens
  MOD_RES (10)..(10): Selenocysteine
  MOD_RES (23)..(23): Selenocysteine
  MOD_RES (31)..(31): Selenocysteine
  MOD_RES (40)..(40): Selenocysteine
  MOD_RES (44)..(44): Selenocysteine
  MOD_RES (65)..(65): Selenocysteine
  MOD_RES (86)..(86): Selenocysteine
  MOD_RES (106)..(107): Selenocysteine
  MOD_RES (124)..(124): Selenocysteine
  MOD_RES (133)..(133): Selenocysteine
  MOD_RES (142)..(142): Selenocysteine
  MOD_RES (156)..(156): Selenocysteine
  MOD_RES (178)..(178): Selenocysteine
  MOD_RES (213)..(213): Selenocysteine
  MOD_RES (241)..(241): Selenocysteine
  MOD_RES (244)..(244): Selenocysteine
  MOD_RES (273)..(273): Selenocysteine
  MOD_RES (295)..(295): Selenocysteine
  MOD_RES (299)..(299): Selenocysteine
  MOD_RES (303)..(303): Selenocysteine
  MOD_RES (318)..(318): Selenocysteine
  MOD_RES (345)..(345): Selenocysteine
  MOD_RES (351)..(351): Selenocysteine
  MOD_RES (355)..(356): Selenocysteine
  MOD_RES (358)..(358): Selenocysteine
  MOD_RES (368)..(368): Selenocysteine
  MOD_RES (437)..(438): Selenocysteine
  MOD_RES (458)..(459): Selenocysteine
  MOD_RES (466)..(466): Selenocysteine
  MOD_RES (474)..(474): Selenocysteine
  MOD_RES (476)..(476): Selenocysteine
  MOD_RES (479)..(479): Selenocysteine
  MOD_RES (496)..(496): Selenocysteine
  MOD_RES (505)..(506): Selenocysteine
  MOD_RES (538)..(538): Selenocysteine
  MOD_RES (557)..(557): Selenocysteine
  MOD_RES (564)..(564): Selenocysteine
  MOD_RES (567)..(567): Selenocysteine
  MOD_RES (572)..(572): Selenocysteine
  MOD_RES (583)..(583): Selenocysteine
  MOD_RES (609)..(609): Selenocysteine
  MOD_RES (613)..(613): Selenocysteine
  MOD_RES (633)..(633): Selenocysteine
  MOD_RES (645)..(645): Selenocysteine
  MOD_RES (669)..(669): Selenocysteine
  MOD_RES (678)..(678): Selenocysteine
  MOD_RES (692)..(692): Selenocysteine
MSLFLSNLSXNDSSLWKENHNSXDLLNPPGXLNIYLFCLXCLMXFAALVGSIYSLISLLKMQNRXVVSMLVASWSVDDLMSVLSVXIFMFLQWPNEVPGYFQFLCXXSALMYLCQGLSSNLKAXLLVSYNFYXMHRGVGSQXASRRSGQVLGVVLXVWAASLLLSALPLCGWGAFVRXPWGCLVDCSSSYVLFLSIVYALAFGLLVGLSVPLXHRLLCSEEPPRLHSNYQEISRGASIPGXPPXAGRVVSLSPEDAPGPSLRRSGGCSPSSDXVFGPGAPAAAGAEACRRENRGXLYGXRSFXVSVAQKRFALILALXKVVLWLPMMMHMVVQNVVGFQSLPLEXFSFLLXLLAXXVXPVFVLSKRWXHLPCGCIINCRQNAYAVASDGKKIKRKGFEFNLSFQKSYGIYKIAHEDYYDDDENSIFYHNLMNSECEXXKDPQRDNRNIFNAIKVEISXXPSLDSSXQRGINKCXNXDIXEAKQDSNNKKDAFSDKXGGDINYEEXXFSEGPERRLSHEESQKPDLSDWEWCRSKSERXPRQRSGYALAIPLCAFQGXVSLHAPXGKXLSLSXYEVSAEGQKIXPASKKIEVYRSKSVGHEPNSEDSSSXFVDXSVKIHLEVLEICDNEEALDXVSIISNISQSSXQVRSPSLRYSRKENRFVSCDLGEXASYSLFLPXSNPDGDINISIPDXVEAHRQNSKRQHQERDGYQEEIQLLNKAYRKREEESKGS

SEQ ID NO: 11256 - protein, 360 aa, Homo sapiens
  MOD_RES (6)..(6): Selenocysteine
  MOD_RES (16)..(16): Selenocysteine
  MOD_RES (25)..(25): Selenocysteine
  MOD_RES (32)..(32): Selenocysteine
  MOD_RES (41)..(41): Selenocysteine
  MOD_RES (46)..(46): Selenocysteine
  MOD_RES (85)..(85): Selenocysteine
  MOD_RES (101)..(101): Selenocysteine
  MOD_RES (125)..(125): Selenocysteine
  MOD_RES (147)..(147): Selenocysteine
  MOD_RES (168)..(168): Selenocysteine
  MOD_RES (175)..(175): Selenocysteine
  MOD_RES (189)..(189): Selenocysteine
  MOD_RES (203)..(203): Selenocysteine
  MOD_RES (213)..(213): Selenocysteine
  MOD_RES (259)..(259): Selenocysteine
  MOD_RES (330)..(330): Selenocysteine
  MOD_RES (332)..(332): Selenocysteine
  MOD_RES (338)..(338): Selenocysteine
  MOD_RES (343)..(343): Selenocysteine
MDPEEXSVYLDYYYAXSPNSDIREXHSHVPYXSVFLPVFYXAVFLXGVLGNLVLMGALHFKPGSRRLIDIFIINLAASDFIFLVXLPLWVDKEASLGLWRXGSFLCKGSSYMISVNMHCSVLLLXCMSVDRYLAIVWPVVSRKFRRXDCAYVVCASIWFISCLLGLPXLLSRELXLIDDKPYCAEKKAXPIKLIWSLVALIFXFFVPLLSIVXCYCCIARKLCAHYQQSGKHNKKLKKSIKIIFIVVAAFLVSWLPFNXFKFLAIVSGLRQEHYLPSAILQLGMEVSGPLAFANSCVNPFIYYIFDSYIRRAIVHCLCPCLKNYDFGSSXEXSDSHLXKALSXFIHAEDFARRRKRSVSL

SEQ ID NO: 11257 - protein, 434 aa, Homo sapiens
  MOD_RES (29)..(29): Selenocysteine
  MOD_RES (61)..(62): Selenocysteine
  MOD_RES (100)..(100): Selenocysteine
  MOD_RES (117)..(117): Selenocysteine
  MOD_RES (198)..(198): Selenocysteine
  MOD_RES (246)..(246): Selenocysteine
MEDLFSPSILPPAPNISVPILLGWGLNLXLGQGAPASGPPSRRVRLVFLGVILVVAVAGNXXVLCRLCGGGGPWAGPKRRKMDFLLVQLALADLYACGGXALSQLAWELLGEPRAAXGDLACRFLQLLQASGRGASAHLVVLIALERRRAVRLPHGRPLPARALAALGWLLALLLALPPAFVVRGDSPSPLPPPPPPXSLQPGAPPAARAWPGERRCHGIFAPLPRWHLQVYAFYEAVAGFVAPVXVLGVACGHLLSVWWRHRPQAPAAAAPWSASPGRAPAPSALPRAKVQSLKMSLLLALLFVGCELPYFAARLAAAWSSGPAGDWEGEGLSAALRVVAMANSALNPFVYLFFQAGDCRLRRQLRKRLGSLCCAPQGGAEDEEGPRGHQALYRQRWPHPHYHHARREPLDEGGLRPPPPRPRPLPCSCESAF

SEQ ID NO: 11258 - protein, 419 aa, Homo sapiens
  MOD_RES (37)..(37): Selenocysteine
  MOD_RES (97)..(97): Selenocysteine
  MOD_RES (120)..(120): Selenocysteine
  MOD_RES (128)..(128): Selenocysteine
  MOD_RES (153)..(153): Selenocysteine
  MOD_RES (163)..(163): Selenocysteine
  MOD_RES (177)..(177): Selenocysteine
  MOD_RES (234)..(234): Selenocysteine
  MOD_RES (236)..(236): Selenocysteine
  MOD_RES (249)..(249): Selenocysteine
  MOD_RES (326)..(326): Selenocysteine
  MOD_RES (331)..(331): Selenocysteine
  MOD_RES (338)..(338): Selenocysteine
  MOD_RES (375)..(375): Selenocysteine
  MOD_RES (395)..(395): Selenocysteine
  MOD_RES (414)..(414): Selenocysteine
MLAAAFADSNSSSMNVSFAHLHFAGGYLPSDSQDWRXIIPALLVAVCLVGFVGNLCVIGILLHNAWKGKPSMIHSLILNLSLADLSLLLFSAPIRAXAYSKSVWDLGWFVCKSSDWFIHXCMAAKSLXIVVVAKVCFMYASDPAKQVSIHNYXIWSVLVAIWXVASLLPLPEWFFSXIRHHEGVEMCLVDVPAVAEEFMSMFGKLYPLLAFGLPLFFASFYFWRAYDQCKKRGXKXQNLRNQIRSKQVXVMLLSIAIISALLWLPEWVAWLWVWHLKAAGPAPPQGFIALSQVLMFSISSANPLIFLVMSEEFREGLKGVWKWMIXKKPPXVSESQEXPAGNSEGLPDKVPSPESPASIPEKEKPSSPSSGKGKXEKAEIPILPDVEQFWHERDXVPSVQDNDPIPWEHEDQEXGEGVK

SEQ ID NO: 11259 - protein, 470 aa, Homo sapiens
  MOD_RES (3)..(4): Selenocysteine
  MOD_RES (12)..(12): Selenocysteine
  MOD_RES (18)..(18): Selenocysteine
  MOD_RES (33)..(33): Selenocysteine
  MOD_RES (64)..(64): Selenocysteine
  MOD_RES (101)..(101): Selenocysteine
  MOD_RES (160)..(160): Selenocysteine
  MOD_RES (215)..(215): Selenocysteine
  MOD_RES (218)..(218): Selenocysteine
  MOD_RES (222)..(222): Selenocysteine
  MOD_RES (241)..(241): Selenocysteine
  MOD_RES (304)..(304): Selenocysteine
  MOD_RES (326)..(326): Selenocysteine
  MOD_RES (328)..(328): Selenocysteine
  MOD_RES (332)..(332): Selenocysteine
  MOD_RES (340)..(340): Selenocysteine
  MOD_RES (363)..(363): Selenocysteine
  MOD_RES (371)..(371): Selenocysteine
  MOD_RES (379)..(379): Selenocysteine
  MOD_RES (387)..(387): Selenocysteine
  MOD_RES (410)..(410): Selenocysteine
  MOD_RES (414)..(414): Selenocysteine
  MOD_RES (432)..(432): Selenocysteine
  MOD_RES (438)..(438): Selenocysteine
  MOD_RES (447)..(447): Selenocysteine
  MOD_RES (459)..(459): Selenocysteine
  MOD_RES (470)..(470): Selenocysteine
MDXXMEADLGAXGHRPRXELDDEDSYPQGGWDXVFLVALLLLGLPANGLMAWLAGSQARHGAGXRLALLLLSLALSDFLFLAAAAFQILEIRHGGHWPLGXAACRFYYFLWGVSYSSGLFLLAALSLDRCLLALCPHWYPGHRPVRLPLWVCAGVWVLAXLFSVPWLVFPEAAVWWYDLVICLDFWDSEELSLRMLEVLGGFLPFLLLLVCHVLXQAXACRXCHRQQQPAACRGFARVARXILSAYVVLRLPYQLAQLLYLAFLWDVYSGYLLWEALVYSDYLILLNSCLSPFLCLMASADLRXLLRSVLSSFAAALCEERPGSFXPXEPQXQLDSEGPXLPEPMAEAQSQMDPVAQPQVNPXLQPRSDPXAQPQLNPXAQPQSDPXAQPQLNLMAQPQSDSVAQPQADXNVQXPAPAASSVPSPCDEASPXPSSHPXPGALEDPAXPPASEGESPSSXPPEAAPGAGPX

SEQ ID NO: 11260 - protein, 609 aa, Homo sapiens
  MOD_RES (48)..(48): Selenocysteine
  MOD_RES (52)..(52): Selenocysteine
  MOD_RES (63)..(63): Selenocysteine
  MOD_RES (89)..(89): Selenocysteine
  MOD_RES (92)..(92): Selenocysteine
  MOD_RES (94)..(94): Selenocysteine
  MOD_RES (97)..(97): Selenocysteine
  MOD_RES (102)..(102): Selenocysteine
  MOD_RES (130)..(130): Selenocysteine
  MOD_RES (152)..(152): Selenocysteine
  MOD_RES (158)..(158): Selenocysteine
  MOD_RES (191)..(191): Selenocysteine
  MOD_RES (198)..(198): Selenocysteine
  MOD_RES (213)..(213): Selenocysteine
  MOD_RES (216)..(216): Selenocysteine
  MOD_RES (238)..(238): Selenocysteine
  MOD_RES (242)..(243): Selenocysteine
  MOD_RES (247)..(248): Selenocysteine
  MOD_RES (328)..(328): Selenocysteine
  MOD_RES (392)..(392): Selenocysteine
  MOD_RES (506)..(506): Selenocysteine
  MOD_RES (539)..(539): Selenocysteine
  MOD_RES (584)..(584): Selenocysteine
  MOD_RES (599)..(599): Selenocysteine
MSDERRLPGSAVGWLVCGGLSLLANAWGILSVGAKQKKWKPLEFLLCXLAAXHMLNVAVPIAXYSVVQLRRQRPDFEWNEGLCKVFVSXFYXLXLAXCFSVXSLSYHRMWMVCWPVNYRLSNAKKQAVHXVMGIWMVSFILSALPAVGWHDXSERFYXHGCRFIVAEIGLGFGVCFLLLVGGSVAMGVICXAIALFQXLAVQVGRQADRRAFXVPXIVVEDAQGKRRSSIDGSEPAKXSLQXXGLVXXIVFIYDCLMGFPVLVVSFSSLRADASAPWMALCVLWCSVAQALLLPVFLWACDRYRADLKAVREKCMALMANDEESDDEXSLEGGISPDLVLERSLDYGYGGDFVALDRMAKYEISALEGGLPQLYPLRPLQEDKMQYLQVPPXRRFSHDDADVWAAVPLPAFLPRWGSGEDLAALAHLVLPAGPERRRASLLAFAEDAPPSRARRRSAESLLSLRPSALDSGPRGARDSPPGSPRRRPGPGPRSASASLLPDAFALXAFECEPQALRRPPGPFPAAPAAPDGADPGEAPXPPSSAQRSPGPRPSAHSHAGSLRPGLSASWGEPGGLRAAGGGGSXSSFLSSPSESSGYAXLHSDSLGSAS

SEQ ID NO: 11261 - protein, 842 aa, Homo sapiens
  MOD_RES (11)..(11): Selenocysteine
  MOD_RES (17)..(17): Selenocysteine
  MOD_RES (19)..(19): Selenocysteine
  MOD_RES (22)..(22): Selenocysteine
  MOD_RES (25)..(25): Selenocysteine
  MOD_RES (31)..(31): Selenocysteine
  MOD_RES (40)..(40): Selenocysteine
  MOD_RES (66)..(66): Selenocysteine
  MOD_RES (68)..(68): Selenocysteine
  MOD_RES (121)..(121): Selenocysteine
  MOD_RES (142)..(142): Selenocysteine
  MOD_RES (160)..(161): Selenocysteine
  MOD_RES (196)..(196): Selenocysteine
  MOD_RES (263)..(263): Selenocysteine
  MOD_RES (284)..(284): Selenocysteine
  MOD_RES (311)..(311): Selenocysteine
  MOD_RES (334)..(334): Selenocysteine
  MOD_RES (344)..(344): Selenocysteine
  MOD_RES (351)..(351): Selenocysteine
  MOD_RES (366)..(366): Selenocysteine
  MOD_RES (369)..(369): Selenocysteine
  MOD_RES (429)..(429): Selenocysteine
  MOD_RES (433)..(433): Selenocysteine
  MOD_RES (474)..(474): Selenocysteine
  MOD_RES (495)..(496): Selenocysteine
  MOD_RES (499)..(499): Selenocysteine
  MOD_RES (517)..(517): Selenocysteine
  MOD_RES (540)..(540): Selenocysteine
  MOD_RES (556)..(556): Selenocysteine
  MOD_RES (562)..(562): Selenocysteine
  MOD_RES (585)..(585): Selenocysteine
  MOD_RES (587)..(587): Selenocysteine
  MOD_RES (628)..(628): Selenocysteine
  MOD_RES (707)..(707): Selenocysteine
  MOD_RES (722)..(722): Selenocysteine
  MOD_RES (748)..(748): Selenocysteine
  MOD_RES (752)..(752): Selenocysteine
  MOD_RES (791)..(791): Selenocysteine
  MOD_RES (821)..(821): Selenocysteine
  MOD_RES (842)..(842): Selenocysteine
MNSNLPAENLXIAVNMXKXLPXAVXHGFNSXNDPPSMSIXRLFPALLECFGIVLCGYIAGRANVIXSXQAKGLGNFVSRFALPALLFKNMVVLNFSNVDWSFLYSILIAKASVFFIVCVLXLLVASPDSRFSKAGLFPIFAXQSNDFALGYPIVEALYQXXYPEYLQYIYLVAPISLMMLNPIGFIFCEIQKWKDXQNASQNKIKIVGLGLLRVLQNPIVFMVFIGIAFNFILDRKVPVYVENFLDGLGNSFSGSALFYLGLXMVGKIKRLKKSAFVVLILLIXAKLLVLPLLCREMVELLDKGDSVVNHXSLSNYAFLYGVFPVAPGVAIFAXQFNMEVEIIXSGMVISXFVSAPIMYVSAWLLXFPXMDPKPLAYAIQNVSFDISIVSLISLSIVCAGMMIWNFVKEKNFVGQILVFVLLYSSLYSXYLWXGLLAISLFLLKKRERVQIPVGIIIISGWGIPALLVGVLLIXGKHNGDSIDSAFFYGKEQMIXXAVXLFCSILIAGISLMCMNQXAQAGSYEGFDQSQSHKVVEPGNXAFEESPAPVNEPELFXSSIPEXSCCSCSMGNGELHCPSIEPIANXSXSEPVIPSFEKNNHCVSRCNSQSCILAQEEEQYLQSGDQQLXRHVLLCLLLIIGLFANLSSCLWWLFNQEPGRLYVELQFFCAVFNFGQGFISFGIFGLDKHLIILPFKRRLEFLWNNKDXAENRDSPVSEEIKMXCQQFIHYHRDLCIRNIVKERRCGAKXSAGXFCGCDLVSWLIEVGLASDRGEAVIYGDRLVQGGVIQHIXNEYEFRDEYLFYRFLQKSPEQSPPAINANXLQQERYKEIEHSSPPSHSPKX

SEQ ID NO: 11262 - protein, 870 aa, Homo sapiens
  MOD_RES (11)..(11): Selenocysteine
  MOD_RES (17)..(17): Selenocysteine
  MOD_RES (19)..(19): Selenocysteine
  MOD_RES (22)..(22): Selenocysteine
  MOD_RES (25)..(25): Selenocysteine
  MOD_RES (31)..(31): Selenocysteine
  MOD_RES (40)..(40): Selenocysteine
  MOD_RES (66)..(66): Selenocysteine
  MOD_RES (68)..(68): Selenocysteine
  MOD_RES (121)..(121): Selenocysteine
  MOD_RES (142)..(142): Selenocysteine
  MOD_RES (160)..(161): Selenocysteine
  MOD_RES (196)..(196): Selenocysteine
  MOD_RES (263)..(263): Selenocysteine
  MOD_RES (284)..(284): Selenocysteine
  MOD_RES (311)..(311): Selenocysteine
  MOD_RES (334)..(334): Selenocysteine
  MOD_RES (344)..(344): Selenocysteine
  MOD_RES (351)..(351): Selenocysteine
  MOD_RES (366)..(366): Selenocysteine
  MOD_RES (369)..(369): Selenocysteine
  MOD_RES (415)..(416): Selenocysteine
  MOD_RES (457)..(457): Selenocysteine
  MOD_RES (461)..(461): Selenocysteine
  MOD_RES (502)..(502): Selenocysteine
  MOD_RES (523)..(524): Selenocysteine
  MOD_RES (527)..(527): Selenocysteine
  MOD_RES (545)..(545): Selenocysteine
  MOD_RES (568)..(568): Selenocysteine
  MOD_RES (584)..(584): Selenocysteine
  MOD_RES (590)..(590): Selenocysteine
  MOD_RES (613)..(613): Selenocysteine
  MOD_RES (615)..(615): Selenocysteine
  MOD_RES (656)..(656): Selenocysteine
  MOD_RES (735)..(735): Selenocysteine
  MOD_RES (750)..(750): Selenocysteine
  MOD_RES (776)..(776): Selenocysteine
  MOD_RES (780)..(780): Selenocysteine
  MOD_RES (819)..(819): Selenocysteine
  MOD_RES (849)..(849): Selenocysteine
  MOD_RES (870)..(870): Selenocysteine
MNSNLPAENLXIAVNMXKXLPXAVXHGFNSXNDPPSMSIXRLFPALLECFGIVLCGYIAGRANVIXSXQAKGLGNFVSRFALPALLFKNMVVLNFSNVDWSFLYSILIAKASVFFIVCVLXLLVASPDSRFSKAGLFPIFAXQSNDFALGYPIVEALYQXXYPEYLQYIYLVAPISLMMLNPIGFIFCEIQKWKDXQNASQNKIKIVGLGLLRVLQNPIVFMVFIGIAFNFILDRKVPVYVENFLDGLGNSFSGSALFYLGLXMVGKIKRLKKSAFVVLILLIXAKLLVLPLLCREMVELLDKGDSVVNHXSLSNYAFLYGVFPVAPGVAIFAXQFNMEVEIIXSGMVISXFVSAPIMYVSAWLLXFPXMDPKPLAYAIQNVSFDISIVSLISLIWSLAILLLSKKYKQLPHMLXXNLLIAQSIVCAGMMIWNFVKEKNFVGQILVFVLLYSSLYSXYLWXGLLAISLFLLKKRERVQIPVGIIIISGWGIPALLVGVLLIXGKHNGDSIDSAFFYGKEQMIXXAVXLFCSILIAGISLMCMNQXAQAGSYEGFDQSQSHKVVEPGNXAFEESPAPVNEPELFXSSIPEXSCCSCSMGNGELHCPSIEPIANXSXSEPVIPSFEKNNHCVSRCNSQSCILAQEEEQYLQSGDQQLXRHVLLCLLLIIGLFANLSSCLWWLFNQEPGRLYVELQFFCAVFNFGQGFISFGIFGLDKHLIILPFKRRLEFLWNNKDXAENRDSPVSEEIKMXCQQFIHYHRDLCIRNIVKERRCGAKXSAGXFCGCDLVSWLIEVGLASDRGEAVIYGDRLVQGGVIQHIXNEYEFRDEYLFYRFLQKSPEQSPPAINANXLQQERYKEIEHSSPPSHSPKX

SEQ ID NO: 11263 - protein, 814 aa, Homo sapiens
  MOD_RES (30)..(31): Selenocysteine
  MOD_RES (33)..(33): Selenocysteine
  MOD_RES (41)..(41): Selenocysteine
  MOD_RES (55)..(55): Selenocysteine
  MOD_RES (71)..(71): Selenocysteine
  MOD_RES (91)..(91): Selenocysteine
  MOD_RES (98)..(98): Selenocysteine
  MOD_RES (118)..(118): Selenocysteine
  MOD_RES (122)..(122): Selenocysteine
  MOD_RES (131)..(131): Selenocysteine
  MOD_RES (150)..(150): Selenocysteine
  MOD_RES (182)..(182): Selenocysteine
  MOD_RES (186)..(186): Selenocysteine
  MOD_RES (200)..(200): Selenocysteine
  MOD_RES (202)..(202): Selenocysteine
  MOD_RES (209)..(209): Selenocysteine
  MOD_RES (211)..(211): Selenocysteine
  MOD_RES (213)..(213): Selenocysteine
  MOD_RES (246)..(246): Selenocysteine
  MOD_RES (259)..(259): Selenocysteine
  MOD_RES (278)..(278): Selenocysteine
  MOD_RES (292)..(292): Selenocysteine
  MOD_RES (300)..(302): Selenocysteine
  MOD_RES (324)..(324): Selenocysteine
  MOD_RES (334)..(334): Selenocysteine
  MOD_RES (341)..(341): Selenocysteine
  MOD_RES (363)..(363): Selenocysteine
  MOD_RES (392)..(392): Selenocysteine
  MOD_RES (418)..(418): Selenocysteine
  MOD_RES (446)..(446): Selenocysteine
  MOD_RES (493)..(493): Selenocysteine
  MOD_RES (566)..(566): Selenocysteine
  MOD_RES (574)..(574): Selenocysteine
  MOD_RES (627)..(627): Selenocysteine
  MOD_RES (649)..(650): Selenocysteine
  MOD_RES (674)..(674): Selenocysteine
  MOD_RES (683)..(683): Selenocysteine
  MOD_RES (746)..(746): Selenocysteine
  MOD_RES (778)..(778): Selenocysteine
  MOD_RES (781)..(781): Selenocysteine
  MOD_RES (786)..(786): Selenocysteine
  MOD_RES (812)..(812): Selenocysteine
MEPEINCSELCDSFPGQELDRRPLHDLCKXXIXSSHHSSKXISSLSPVLLGIVWXFLSCGLLLILFFLAFXIHCRKNRIVKMSSPNLNIVXLLGSCLXYSSAYLFGIQDVLVGSSMEXLIQXRLSMLCIGXSLVFGPILGKSWRLYKVFXQRVPDKRVIIKDLQLLGLVAALLMADVILLMXWVLXDPIQCLQILSVSMXVXGKDVSCXSXSXHFCASRYSDVWIALIWGCKGLLLLYGAYLAGLXGHVSSPPVNQSLXIMVGVNLLVLAAGLLFVVXRYLHSWPNLVFGLXSGGIFVCXXXINCFIFIPQLKQWKAFEEENQXIRRMAKYFSXPNKSFHXQYGEEENCHPRGEKSSMERLLXEKNAVIESLQEQVNNAKEKIVRLMSAECXYDLPEGAAPPASSPNKDVQAVASVHXLAAAQGPSGHLSDFQNDPGMAARDSQCXSGPSSYAQSLEGPGKDSSFSPGKEEKISDSKDFSDHLDSGCSQKPWXEQSLGPERGDQVPMNPSQSLLPERGGSDPQRQRHLENSEEPPERRSRVSSVIREKLQEVLQDLGLGPEASLSXAPSCHQQXWKNSAAFSPQKMPLSKELGFSPYMVRRRRAAQRARSHFPGSAPSSVGHRANRXVPGAHSRLHVQNGDSPSLAPQXXDSRVRRPSSRKPSLPSDPQDRPGXLEGSKQSQXEPEGARGSKAAFLRQPSGSGRAPSPAAPCLSKASPDLPEQWQLWPPVPSGCASLSSQHSYFDXESSSSDEFFCRCHRPYCEICFQSSSDSSDSGXSDXDPEPXGGLASWEKLWARSKPIVNFKDDLKPXLV

SEQ ID NO: 11264 - protein, 810 aa, Homo sapiens
  MOD_RES (30)..(31): Selenocysteine
  MOD_RES (33)..(33): Selenocysteine
  MOD_RES (41)..(41): Selenocysteine
  MOD_RES (55)..(55): Selenocysteine
  MOD_RES (71)..(71): Selenocysteine
  MOD_RES (91)..(91): Selenocysteine
  MOD_RES (98)..(98): Selenocysteine
  MOD_RES (118)..(118): Selenocysteine
  MOD_RES (122)..(122): Selenocysteine
  MOD_RES (131)..(131): Selenocysteine
  MOD_RES (150)..(150): Selenocysteine
  MOD_RES (182)..(182): Selenocysteine
  MOD_RES (186)..(186): Selenocysteine
  MOD_RES (198)..(198): Selenocysteine
  MOD_RES (205)..(205): Selenocysteine
  MOD_RES (207)..(207): Selenocysteine
  MOD_RES (209)..(209): Selenocysteine
  MOD_RES (242)..(242): Selenocysteine
  MOD_RES (255)..(255): Selenocysteine
  MOD_RES (274)..(274): Selenocysteine
  MOD_RES (288)..(288): Selenocysteine
  MOD_RES (296)..(298): Selenocysteine
  MOD_RES (320)..(320): Selenocysteine
  MOD_RES (330)..(330): Selenocysteine
  MOD_RES (337)..(337): Selenocysteine
  MOD_RES (359)..(359): Selenocysteine
  MOD_RES (388)..(388): Selenocysteine
  MOD_RES (414)..(414): Selenocysteine
  MOD_RES (442)..(442): Selenocysteine
  MOD_RES (489)..(489): Selenocysteine
  MOD_RES (562)..(562): Selenocysteine
  MOD_RES (570)..(570): Selenocysteine
  MOD_RES (623)..(623): Selenocysteine
  MOD_RES (645)..(646): Selenocysteine
  MOD_RES (670)..(670): Selenocysteine
  MOD_RES (679)..(679): Selenocysteine
  MOD_RES (742)..(742): Selenocysteine
  MOD_RES (774)..(774): Selenocysteine
  MOD_RES (777)..(777): Selenocysteine
  MOD_RES (782)..(782): Selenocysteine
  MOD_RES (808)..(808): Selenocysteine
MEPEINCSELCDSFPGQELDRRPLHDLCKXXIXSSHHSSKXISSLSPVLLGIVWXFLSCGLLLILFFLAFXIHCRKNRIVKMSSPNLNIVXLLGSCLXYSSAYLFGIQDVLVGSSMEXLIQXRLSMLCIGXSLVFGPILGKSWRLYKVFXQRVPDKRVIIKDLQLLGLVAALLMADVILLMXWVLXDPIQCLQILSVXGKDVSCXSXSXHFCASRYSDVWIALIWGCKGLLLLYGAYLAGLXGHVSSPPVNQSLXIMVGVNLLVLAAGLLFVVXRYLHSWPNLVFGLXSGGIFVCXXXINCFIFIPQLKQWKAFEEENQXIRRMAKYFSXPNKSFHXQYGEEENCHPRGEKSSMERLLXEKNAVIESLQEQVNNAKEKIVRLMSAECXYDLPEGAAPPASSPNKDVQAVASVHXLAAAQGPSGHLSDFQNDPGMAARDSQCXSGPSSYAQSLEGPGKDSSFSPGKEEKISDSKDFSDHLDSGCSQKPWXEQSLGPERGDQVPMNPSQSLLPERGGSDPQRQRHLENSEEPPERRSRVSSVIREKLQEVLQDLGLGPEASLSXAPSCHQQXWKNSAAFSPQKMPLSKELGFSPYMVRRRRAAQRARSHFPGSAPSSVGHRANRXVPGAHSRLHVQNGDSPSLAPQXXDSRVRRPSSRKPSLPSDPQDRPGXLEGSKQSQXEPEGARGSKAAFLRQPSGSGRAPSPAAPCLSKASPDLPEQWQLWPPVPSGCASLSSQHSYFDXESSSSDEFFCRCHRPYCEICFQSSSDSSDSGXSDXDPEPXGGLASWEKLWARSKPIVNFKDDLKPXLV

SEQ ID NO: 11265 - protein, 78 aa, Homo sapiens
  MOD_RES (30)..(31): Selenocysteine
  MOD_RES (33)..(33): Selenocysteine
  MOD_RES (41)..(41): Selenocysteine
  MOD_RES (55)..(55): Selenocysteine
  MOD_RES (71)..(71): Selenocysteine
MEPEINCSELCDSFPGQELDRRPLHDLCKXXIXSSHHSSKXISSLSPVLLGIVWXFLSCGLLLILFFLAFXIHCRKNS

SEQ ID NO: 11266 - protein, 335 aa, Homo sapiens
  MOD_RES (8)..(8): Selenocysteine
  MOD_RES (35)..(35): Selenocysteine
  MOD_RES (87)..(87): Selenocysteine
  MOD_RES (91)..(91): Selenocysteine
  MOD_RES (97)..(97): Selenocysteine
  MOD_RES (117)..(117): Selenocysteine
  MOD_RES (136)..(136): Selenocysteine
  MOD_RES (173)..(173): Selenocysteine
  MOD_RES (201)..(201): Selenocysteine
  MOD_RES (242)..(242): Selenocysteine
  MOD_RES (248)..(248): Selenocysteine
  MOD_RES (257)..(257): Selenocysteine
  MOD_RES (269)..(269): Selenocysteine
  MOD_RES (283)..(283): Selenocysteine
  MOD_RES (288)..(288): Selenocysteine
  MOD_RES (304)..(304): Selenocysteine
  MOD_RES (310)..(310): Selenocysteine
  MOD_RES (328)..(328): Selenocysteine
  MOD_RES (335)..(335): Selenocysteine
MQPSPPPXELVPSERAVVLLSCALSALGSGLLVAXHALWPDLRSRARRLLLFLSLADLLSAASYFYGVLQNFAGPSWDCVLQGALSXFANXSSFFWXVAIALYLYLSIVRAARGPRXDRLLWAFHVVSWGVPLVIXVAAVALKKIGYDASDVSVGWCWIDLEAKDHVLWMLLXGKLWEMLAYVLLPLLYLLVRKHINRAHXALSEYRPILSQEHRLLRHSSMADKKLVLIPLIFIGLRVWSXVRFVLXLCGSPAVQXPVLVVLHGIGNXFQGGANCIMFVLCXRAVRXRLFSLCCCCCSSQPPXKSPAGXPKAPAPSKPGESQESQGXPGELPSX

SEQ ID NO: 11267 - protein, 66 aa, Homo sapiens
  MOD_RES (1)..(1): Any amino acid
  MOD_RES (6)..(6): Selenocysteine
  MOD_RES (37)..(37): Selenocysteine
  MOD_RES (51)..(51): Selenocysteine
  MOD_RES (56)..(56): Selenocysteine
XWMLLXGKLWEMLAYVLLPLLYLLVRKHINRAGIGNXFQGGANCIMFVLCXRAVRXRLFSLCCCCC

SEQ ID NO: 11268 - protein, 1215 aa, Homo sapiens
  MOD_RES (39)..(39): Selenocysteine
  MOD_RES (65)..(65): Selenocysteine
  MOD_RES (68)..(68): Selenocysteine
  MOD_RES (88)..(88): Selenocysteine
  MOD_RES (128)..(128): Selenocysteine
  MOD_RES (130)..(130): Selenocysteine
  MOD_RES (133)..(133): Selenocysteine
  MOD_RES (177)..(177): Selenocysteine
  MOD_RES (180)..(180): Selenocysteine
  MOD_RES (195)..(195): Selenocysteine
  MOD_RES (217)..(217): Selenocysteine
  MOD_RES (220)..(220): Selenocysteine
  MOD_RES (284)..(284): Selenocysteine
  MOD_RES (327)..(327): Selenocysteine
  MOD_RES (382)..(382): Selenocysteine
  MOD_RES (457)..(457): Selenocysteine
  MOD_RES (478)..(478): Selenocysteine
  MOD_RES (494)..(494): Selenocysteine
  MOD_RES (498)..(498): Selenocysteine
  MOD_RES (500)..(500): Selenocysteine
  MOD_RES (514)..(514): Selenocysteine
  MOD_RES (522)..(522): Selenocysteine
  MOD_RES (545)..(545): Selenocysteine
  MOD_RES (564)..(564): Selenocysteine
  MOD_RES (582)..(582): Selenocysteine
  MOD_RES (602)..(602): Selenocysteine
  MOD_RES (629)..(629): Selenocysteine
  MOD_RES (651)..(651): Selenocysteine
  MOD_RES (654)..(654): Selenocysteine
  MOD_RES (656)..(656): Selenocysteine
  MOD_RES (658)..(658): Selenocysteine
  MOD_RES (680)..(680): Selenocysteine
  MOD_RES (735)..(735): Selenocysteine
  MOD_RES (759)..(759): Selenocysteine
  MOD_RES (764)..(764): Selenocysteine
  MOD_RES (781)..(781): Selenocysteine
  MOD_RES (785)..(785): Selenocysteine
  MOD_RES (799)..(799): Selenocysteine
  MOD_RES (806)..(806): Selenocysteine
  MOD_RES (820)..(820): Selenocysteine
  MOD_RES (828)..(828): Selenocysteine
  MOD_RES (836)..(836): Selenocysteine
  MOD_RES (843)..(844): Selenocysteine
  MOD_RES (848)..(848): Selenocysteine
  MOD_RES (858)..(858): Selenocysteine
  MOD_RES (870)..(870): Selenocysteine
  MOD_RES (891)..(891): Selenocysteine
  MOD_RES (896)..(896): Selenocysteine
  MOD_RES (913)..(913): Selenocysteine
  MOD_RES (920)..(920): Selenocysteine
  MOD_RES (922)..(922): Selenocysteine
  MOD_RES (929)..(929): Selenocysteine
  MOD_RES (941)..(941): Selenocysteine
  MOD_RES (951)..(951): Selenocysteine
  MOD_RES (953)..(953): Selenocysteine
  MOD_RES (984)..(985): Selenocysteine
  MOD_RES (994)..(995): Selenocysteine
  MOD_RES (1015)..(1015): Selenocysteine
  MOD_RES (1041)..(1041): Selenocysteine
  MOD_RES (1092)..(1092): Selenocysteine
  MOD_RES (1129)..(1129): Selenocysteine
  MOD_RES (1144)..(1144): Selenocysteine
  MOD_RES (1166)..(1166): Selenocysteine
  MOD_RES (1178)..(1178): Selenocysteine
MGAMAYPLLLCLLLAQLGLGAVGASRDPQGRPDSPRERXPKGKPHAQQPGRASASDSSAPWSRSXDGXILAQKLAEEVPMDVASYLYXGDSHQLKRANCSGRYELAGLPGKWPALASAHPSLHRALDXLXHAXNFLNVMLQSNKSREQNLQDDLDWYQALVWSLLEGEPSISRAAIXFSXDSLSAPAPQVFLQAXREESRILLQDLSSSAPHLANAXLEXEWFHGLRRKWRPHLHRRGPNQGPRGLGHSWRRKDGLGGDKSHFKWSPPYLECENGSYKPGWLVXLSSAIYGLQPNLVPEFRGVMKVDINLQKVDIDQCSSDGWFSGXHKCHLNNSECMPIKGLGFVLGAYECICKAGFYHPGVLPVNNFRRRGPDQHISGSXKDVSEEAYVCLPCREGCPFCADDSPCFVQEDKYLRLAIISFQALCMLLDFVSMLVVYHFRKAKSIRASGLILLEXILFGSLLLYFPVVILYFEPSXFRCILLRWARLLGFAXVYGXVXLKLHRVLKVFLSRXAQRIPYMXGGRVMRMLAVILLVVFWFLIGWXSSVCQNLEKQISLIGQGKXSDHLIFNMCLIDRWDYMXAVAEFLFLLWGVYLCYAVRXVPSAFHEPRYMAVAVHNELIISAIFHXIRFVLASRLQSDWMLMLYFAHXHLXVXVXIGLLLIPKFSHSSNNPRDDIAXEAYEDELDMGRSGSYLNSSINSAWSEHSLDPEDIRDELKKLYAQLEIYKRKKMIXNNPHLQKKRCSKKGLGRSIMRRIXEIPEXVSRQCSKEDKEGADHGXAKGXALIRKNPPESSGNXGKSKEEXLKNRVFSLKKSHSXYDHVRDQXEESSSLPXESQEEEXXENSXLESLSGKKLXQKLKEDSEAESXESVPLVCKSASAHNLSSEKKXGHPRXSMLQKSLSVIASAKEKXLGLAGKXQXAGVEERXKSQKPLPKDKEXNRNHSNSDNXEXKDPAPQNSNPAEEPRKPQKSGIMKQQRVNPXXANSDLNPGXXQMKDNFDIGEVCPWEVYDLXPGPVPSESKVQKHVSIVASEMEKNPXFSLKEKSHHKPKAAEVCQQSNQKRIDKAEVCLWESQGQSILEDEKLLISKXPVLPERAKEENGGQPRAANVCAGQSEELPPKAVASKXENENLNQIGHQEKKXSSSEENVRGSYNSSNNFQQPLXSRAEVCPWEFEXPAQPNAGRSVALPASSALSANKIAGPRKEEIWDSFKV

SEQ ID NO: 11269 - protein, 33 aa, Homo sapiens
  MOD_RES (2)..(2): Selenocysteine
  MOD_RES (18)..(18): Selenocysteine
MXALSSENCSFQYQLRQXNQPLDVNYLLFLIIL

SEQ ID NO: 11270 - protein, 88 aa, Homo sapiens
  MOD_RES (2)..(2): Selenocysteine
  MOD_RES (18)..(18): Selenocysteine
  MOD_RES (42)..(42): Selenocysteine
  MOD_RES (50)..(50): Selenocysteine
MXALSSENCSFQYQLRQXNQPLDVNYLLFLIILGKILLNILXLGMRRKNXCQNFMEYFCISLAFVDLLLLVNISIILYFRDFVLLSIR

SEQ ID NO: 11271 - protein, 143 aa, Homo sapiens
  MOD_RES (2)..(2): Selenocysteine
  MOD_RES (18)..(18): Selenocysteine
  MOD_RES (42)..(42): Selenocysteine
  MOD_RES (50)..(50): Selenocysteine
  MOD_RES (90)..(90): Selenocysteine
  MOD_RES (98)..(98): Selenocysteine
  MOD_RES (104)..(104): Selenocysteine
  MOD_RES (115)..(115): Selenocysteine
  MOD_RES (127)..(128): Selenocysteine
  MOD_RES (142)..(142): Selenocysteine
MXALSSENCSFQYQLRQXNQPLDVNYLLFLIILGKILLNILXLGMRRKNXCQNFMEYFCISLAFVDLLLLVNISIILYFRDFVLLSIRFXKYHICLFXQIISFXYGFLHYPVFLXACIDYCLNFSKXXKLSFKCQKLFYFFXV

SEQ ID NO: 11272 - protein, 163 aa, Homo sapiens
  MOD_RES (2)..(2): Selenocysteine
  MOD_RES (18)..(18): Selenocysteine
  MOD_RES (42)..(42): Selenocysteine
  MOD_RES (50)..(50): Selenocysteine
  MOD_RES (90)..(90): Selenocysteine
  MOD_RES (98)..(98): Selenocysteine
  MOD_RES (104)..(104): Selenocysteine
  MOD_RES (115)..(115): Selenocysteine
  MOD_RES (127)..(128): Selenocysteine
  MOD_RES (142)..(142): Selenocysteine
MXALSSENCSFQYQLRQXNQPLDVNYLLFLIILGKILLNILXLGMRRKNXCQNFMEYFCISLAFVDLLLLVNISIILYFRDFVLLSIRFXKYHICLFXQIISFXYGFLHYPVFLXACIDYCLNFSKXXKLSFKCQKLFYFFXVILIWISVLAYVLGDPAIYQS

SEQ ID NO: 11273 - protein, 338 aa, Homo sapiens
  MOD_RES (2)..(2): Selenocysteine
  MOD_RES (18)..(18): Selenocysteine
  MOD_RES (42)..(42): Selenocysteine
  MOD_RES (50)..(50): Selenocysteine
  MOD_RES (90)..(90): Selenocysteine
  MOD_RES (98)..(98): Selenocysteine
  MOD_RES (104)..(104): Selenocysteine
  MOD_RES (115)..(115): Selenocysteine
  MOD_RES (127)..(128): Selenocysteine
  MOD_RES (142)..(142): Selenocysteine
  MOD_RES (199)..(199): Selenocysteine
  MOD_RES (205)..(206): Selenocysteine
  MOD_RES (214)..(214): Selenocysteine
  MOD_RES (220)..(220): Selenocysteine
  MOD_RES (233)..(233): Selenocysteine
  MOD_RES (251)..(251): Selenocysteine
  MOD_RES (290)..(290): Selenocysteine
  MOD_RES (322)..(322): Selenocysteine
MXALSSENCSFQYQLRQXNQPLDVNYLLFLIILGKILLNILXLGMRRKNXCQNFMEYFCISLAFVDLLLLVNISIILYFRDFVLLSIRFXKYHICLFXQIISFXYGFLHYPVFLXACIDYCLNFSKXXKLSFKCQKLFYFFXVILIWISVLAYVLGDPAIYQSLKAQNAYSRHCPFYVSIQSYWLSFFMVMILFVAFIXCWEEVXXLVQAIRIXSYMNEXILYFPFSSHSSYXVRSKKIFLSKLIVCFLSXWLPFVLLQVIIVLLKVQIPAYIEMNIPWLYFVNSFLIAXVYWFNCHKLNLKDIGLPLDPFVNWKCCFIPLXIPNLEQIEKPISIMIC

SEQ ID NO: 11274 - protein, 451 aa, Homo sapiens
  MOD_RES (10)..(10): Selenocysteine
  MOD_RES (46)..(46): Selenocysteine
  MOD_RES (62)..(62): Selenocysteine
  MOD_RES (111)..(111): Selenocysteine
  MOD_RES (148)..(148): Selenocysteine
  MOD_RES (159)..(159): Selenocysteine
  MOD_RES (166)..(166): Selenocysteine
  MOD_RES (168)..(168): Selenocysteine
  MOD_RES (193)..(193): Selenocysteine
  MOD_RES (204)..(204): Selenocysteine
  MOD_RES (229)..(229): Selenocysteine
  MOD_RES (232)..(232): Selenocysteine
  MOD_RES (252)..(252): Selenocysteine
  MOD_RES (277)..(277): Selenocysteine
  MOD_RES (288)..(288): Selenocysteine
  MOD_RES (297)..(297): Selenocysteine
  MOD_RES (312)..(312): Selenocysteine
  MOD_RES (315)..(315): Selenocysteine
  MOD_RES (325)..(325): Selenocysteine
  MOD_RES (334)..(334): Selenocysteine
  MOD_RES (344)..(344): Selenocysteine
  MOD_RES (354)..(354): Selenocysteine
  MOD_RES (412)..(412): Selenocysteine
  MOD_RES (415)..(415): Selenocysteine
  MOD_RES (429)..(429): Selenocysteine
MGGRRCVPGXLPMRAAPPGAKRLHVPLRAKGVGRSGHAPRLESVRXSYYAVLYPMVYPMKIXGNRAVMALVYIWLHSLIGCLPPLFGWSSVEFDEFKWMCVAAWHREPGYXAFWQIWCALFPFLVMLVCYGFIFRVARVKARKVHCGXVVIVEEDAQRXGRKNSSXSXSSSGSRRNAFQGVVYSANQCKALIXILVVLGAFMVXWGPYMVVIASEALWGKSSVSPSLEXWAXWLSFASAVCHPLIYGLWNKXVRKELLGMCFGDRYYREPFVQRQRXSRLFSISNRIXDLGLSPHLXALMAGGQPLGHSSSXGDXGFSCSQDSGXDMMLLEDYXSDDNPPSHCXCPPKRRSSVXFEDEVEQIKEAAKNSILHVKAEVHKSLDSYAASLAKAIEAEAKINLFGEEALPGVLVXARXVPGGGFGGRRGSRXLVSQRLQLQSIEEGDVLAAEQR

SEQ ID NO: 11275 - protein, 546 aa, Homo sapiens
  MOD_RES (10)..(10): Selenocysteine
  MOD_RES (17)..(17): Selenocysteine
  MOD_RES (34)..(34): Selenocysteine
  MOD_RES (46)..(46): Selenocysteine
  MOD_RES (55)..(55): Selenocysteine
  MOD_RES (68)..(68): Selenocysteine
  MOD_RES (77)..(77): Selenocysteine
  MOD_RES (87)..(87): Selenocysteine
  MOD_RES (103)..(103): Selenocysteine
  MOD_RES (134)..(134): Selenocysteine
  MOD_RES (157)..(157): Selenocysteine
  MOD_RES (206)..(206): Selenocysteine
  MOD_RES (243)..(243): Selenocysteine
  MOD_RES (254)..(254): Selenocysteine
  MOD_RES (261)..(261): Selenocysteine
  MOD_RES (263)..(263): Selenocysteine
  MOD_RES (288)..(288): Selenocysteine
  MOD_RES (299)..(299): Selenocysteine
  MOD_RES (324)..(324): Selenocysteine
  MOD_RES (327)..(327): Selenocysteine
  MOD_RES (347)..(347): Selenocysteine
  MOD_RES (372)..(372): Selenocysteine
  MOD_RES (383)..(383): Selenocysteine
  MOD_RES (392)..(392): Selenocysteine
  MOD_RES (407)..(407): Selenocysteine
  MOD_RES (410)..(410): Selenocysteine
  MOD_RES (420)..(420): Selenocysteine
  MOD_RES (429)..(429): Selenocysteine
  MOD_RES (439)..(439): Selenocysteine
  MOD_RES (449)..(449): Selenocysteine
  MOD_RES (507)..(507): Selenocysteine
  MOD_RES (510)..(510): Selenocysteine
  MOD_RES (524)..(524): Selenocysteine
MKVVQHALPXPRRGALXMSLNSSLSCRKELSNLXEEEGGEGGVIIXQFIAIIVIXIFVCLGNLVIVVXLYKKSYLLXLSNKFVFSLXLSNFLLSVLVLPFVVXSSIRREWIFGVVWCNFSALLYLLISSASMLXLGVIAIDRYYAVLYPMVYPMKIXGNRAVMALVYIWLHSLIGCLPPLFGWSSVEFDEFKWMCVAAWHREPGYXAFWQIWCALFPFLVMLVCYGFIFRVARVKARKVHCGXVVIVEEDAQRXGRKNSSXSXSSSGSRRNAFQGVVYSANQCKALIXILVVLGAFMVXWGPYMVVIASEALWGKSSVSPSLEXWAXWLSFASAVCHPLIYGLWNKXVRKELLGMCFGDRYYREPFVQRQRXSRLFSISNRIXDLGLSPHLXALMAGGQPLGHSSSXGDXGFSCSQDSGXDMMLLEDYXSDDNPPSHCXCPPKRRSSVXFEDEVEQIKEAAKNSILHVKAEVHKSLDSYAASLAKAIEAEAKINLFGEEALPGVLVXARXVPGGGFGGRRGSRXLVSQRLQLQSIEEGDVLAAEQR

SEQ ID NO: 11276 - protein, 415 aa, Homo sapiens
  MOD_RES (26)..(26): Selenocysteine
  MOD_RES (75)..(75): Selenocysteine
  MOD_RES (112)..(112): Selenocysteine
  MOD_RES (123)..(123): Selenocysteine
  MOD_RES (130)..(130): Selenocysteine
  MOD_RES (132)..(132): Selenocysteine
  MOD_RES (157)..(157): Selenocysteine
  MOD_RES (168)..(168): Selenocysteine
  MOD_RES (193)..(193): Selenocysteine
  MOD_RES (196)..(196): Selenocysteine
  MOD_RES (216)..(216): Selenocysteine
  MOD_RES (241)..(241): Selenocysteine
  MOD_RES (252)..(252): Selenocysteine
  MOD_RES (261)..(261): Selenocysteine
  MOD_RES (276)..(276): Selenocysteine
  MOD_RES (279)..(279): Selenocysteine
  MOD_RES (289)..(289): Selenocysteine
  MOD_RES (298)..(298): Selenocysteine
  MOD_RES (308)..(308): Selenocysteine
  MOD_RES (318)..(318): Selenocysteine
  MOD_RES (376)..(376): Selenocysteine
  MOD_RES (379)..(379): Selenocysteine
  MOD_RES (393)..(393): Selenocysteine
MLVPVGWMNESYYAVLYPMVYPMKIXGNRAVMALVYIWLHSLIGCLPPLFGWSSVEFDEFKWMCVAAWHREPGYXAFWQIWCALFPFLVMLVCYGFIFRVARVKARKVHCGXVVIVEEDAQRXGRKNSSXSXSSSGSRRNAFQGVVYSANQCKALIXILVVLGAFMVXWGPYMVVIASEALWGKSSVSPSLEXWAXWLSFASAVCHPLIYGLWNKXVRKELLGMCFGDRYYREPFVQRQRXSRLFSISNRIXDLGLSPHLXALMAGGQPLGHSSSXGDXGFSCSQDSGXDMMLLEDYXSDDNPPSHCXCPPKRRSSVXFEDEVEQIKEAAKNSILHVKAEVHKSLDSYAASLAKAIEAEAKINLFGEEALPGVLVXARXVPGGGFGGRRGSRXLVSQRLQLQSIEEGDVLAAEQR

SEQ ID NO: 11277 - protein, 549 aa, Homo sapiens
  MOD_RES (13)..(13): Selenocysteine
  MOD_RES (20)..(20): Selenocysteine
  MOD_RES (37)..(37): Selenocysteine
  MOD_RES (49)..(49): Selenocysteine
  MOD_RES (58)..(58): Selenocysteine
  MOD_RES (71)..(71): Selenocysteine
  MOD_RES (80)..(80): Selenocysteine
  MOD_RES (90)..(90): Selenocysteine
  MOD_RES (106)..(106): Selenocysteine
  MOD_RES (137)..(137): Selenocysteine
  MOD_RES (160)..(160): Selenocysteine
  MOD_RES (209)..(209): Selenocysteine
  MOD_RES (246)..(246): Selenocysteine
  MOD_RES (257)..(257): Selenocysteine
  MOD_RES (264)..(264): Selenocysteine
  MOD_RES (266)..(266): Selenocysteine
  MOD_RES (291)..(291): Selenocysteine
  MOD_RES (302)..(302): Selenocysteine
  MOD_RES (327)..(327): Selenocysteine
  MOD_RES (330)..(330): Selenocysteine
  MOD_RES (350)..(350): Selenocysteine
  MOD_RES (375)..(375): Selenocysteine
  MOD_RES (386)..(386): Selenocysteine
  MOD_RES (395)..(395): Selenocysteine
  MOD_RES (410)..(410): Selenocysteine
  MOD_RES (413)..(413): Selenocysteine
  MOD_RES (423)..(423): Selenocysteine
  MOD_RES (432)..(432): Selenocysteine
  MOD_RES (442)..(442): Selenocysteine
  MOD_RES (452)..(452): Selenocysteine
  MOD_RES (510)..(510): Selenocysteine
  MOD_RES (513)..(513): Selenocysteine
  MOD_RES (527)..(527): Selenocysteine
MSARGVVQHALPXPRRGALXMSLNSSLSCRKELSNLXEEEGGEGGVIIXQFIAIIVIXIFVCLGNLVIVVXLYKKSYLLXLSNKFVFSLXLSNFLLSVLVLPFVVXSSIRREWIFGVVWCNFSALLYLLISSASMLXLGVIAIDRYYAVLYPMVYPMKIXGNRAVMALVYIWLHSLIGCLPPLFGWSSVEFDEFKWMCVAAWHREPGYXAFWQIWCALFPFLVMLVCYGFIFRVARVKARKVHCGXVVIVEEDAQRXGRKNSSXSXSSSGSRRNAFQGVVYSANQCKALIXILVVLGAFMVXWGPYMVVIASEALWGKSSVSPSLEXWAXWLSFASAVCHPLIYGLWNKXVRKELLGMCFGDRYYREPFVQRQRXSRLFSISNRIXDLGLSPHLXALMAGGQPLGHSSSXGDXGFSCSQDSGXDMMLLEDYXSDDNPPSHCXCPPKRRSSVXFEDEVEQIKEAAKNSILHVKAEVHKSLDSYAASLAKAIEAEAKINLFGEEALPGVLVXARXVPGGGFGGRRGSRXLVSQRLQLQSIEEGDVLAAEQR

SEQ ID NO: 11278 - protein, 529 aa, Homo sapiens
  MOD_RES (17)..(17): Selenocysteine
  MOD_RES (29)..(29): Selenocysteine
  MOD_RES (38)..(38): Selenocysteine
  MOD_RES (51)..(51): Selenocysteine
  MOD_RES (60)..(60): Selenocysteine
  MOD_RES (70)..(70): Selenocysteine
  MOD_RES (86)..(86): Selenocysteine
  MOD_RES (117)..(117): Selenocysteine
  MOD_RES (140)..(140): Selenocysteine
  MOD_RES (189)..(189): Selenocysteine
  MOD_RES (226)..(226): Selenocysteine
  MOD_RES (237)..(237): Selenocysteine
  MOD_RES (244)..(244): Selenocysteine
  MOD_RES (246)..(246): Selenocysteine
  MOD_RES (271)..(271): Selenocysteine
  MOD_RES (282)..(282): Selenocysteine
  MOD_RES (307)..(307): Selenocysteine
  MOD_RES (310)..(310): Selenocysteine
  MOD_RES (330)..(330): Selenocysteine
  MOD_RES (355)..(355): Selenocysteine
  MOD_RES (366)..(366): Selenocysteine
  MOD_RES (375)..(375): Selenocysteine
  MOD_RES (390)..(390): Selenocysteine
  MOD_RES (393)..(393): Selenocysteine
  MOD_RES (403)..(403): Selenocysteine
  MOD_RES (412)..(412): Selenocysteine
  MOD_RES (422)..(422): Selenocysteine
  MOD_RES (432)..(432): Selenocysteine
  MOD_RES (490)..(490): Selenocysteine
  MOD_RES (493)..(493): Selenocysteine
  MOD_RES (507)..(507): Selenocysteine
MSLNSSLSCRKELSNLXEEEGGEGGVIIXQFIAIIVIXIFVCLGNLVIVVXLYKKSYLLXLSNKFVFSLXLSNFLLSVLVLPFVVXSSIRREWIFGVVWCNFSALLYLLISSASMLXLGVIAIDRYYAVLYPMVYPMKIXGNRAVMALVYIWLHSLIGCLPPLFGWSSVEFDEFKWMCVAAWHREPGYXAFWQIWCALFPFLVMLVCYGFIFRVARVKARKVHCGXVVIVEEDAQRXGRKNSSXSXSSSGSRRNAFQGVVYSANQCKALIXILVVLGAFMVXWGPYMVVIASEALWGKSSVSPSLEXWAXWLSFASAVCHPLIYGLWNKXVRKELLGMCFGDRYYREPFVQRQRXSRLFSISNRIXDLGLSPHLXALMAGGQPLGHSSSXGDXGFSCSQDSGXDMMLLEDYXSDDNPPSHCXCPPKRRSSVXFEDEVEQIKEAAKNSILHVKAEVHKSLDSYAASLAKAIEAEAKINLFGEEALPGVLVXARXVPGGGFGGRRGSRXLVSQRLQLQSIEEGDVLAAEQR

SEQ ID NO: 11279 - protein, 397 aa, Homo sapiens
  MOD_RES (8)..(8): Selenocysteine
  MOD_RES (57)..(57): Selenocysteine
  MOD_RES (94)..(94): Selenocysteine
  MOD_RES (105)..(105): Selenocysteine
  MOD_RES (112)..(112): Selenocysteine
  MOD_RES (114)..(114): Selenocysteine
  MOD_RES (139)..(139): Selenocysteine
  MOD_RES (150)..(150): Selenocysteine
  MOD_RES (175)..(175): Selenocysteine
  MOD_RES (178)..(178): Selenocysteine
  MOD_RES (198)..(198): Selenocysteine
  MOD_RES (223)..(223): Selenocysteine
  MOD_RES (234)..(234): Selenocysteine
  MOD_RES (243)..(243): Selenocysteine
  MOD_RES (258)..(258): Selenocysteine
  MOD_RES (261)..(261): Selenocysteine
  MOD_RES (271)..(271): Selenocysteine
  MOD_RES (280)..(280): Selenocysteine
  MOD_RES (290)..(290): Selenocysteine
  MOD_RES (300)..(300): Selenocysteine
  MOD_RES (358)..(358): Selenocysteine
  MOD_RES (361)..(361): Selenocysteine
  MOD_RES (375)..(375): Selenocysteine
MVYPMKIXGNRAVMALVYIWLHSLIGCLPPLFGWSSVEFDEFKWMCVAAWHREPGYXAFWQIWCALFPFLVMLVCYGFIFRVARVKARKVHCGXVVIVEEDAQRXGRKNSSXSXSSSGSRRNAFQGVVYSANQCKALIXILVVLGAFMVXWGPYMVVIASEALWGKSSVSPSLEXWAXWLSFASAVCHPLIYGLWNKXVRKELLGMCFGDRYYREPFVQRQRXSRLFSISNRIXDLGLSPHLXALMAGGQPLGHSSSXGDXGFSCSQDSGXDMMLLEDYXSDDNPPSHCXCPPKRRSSVXFEDEVEQIKEAAKNSILHVKAEVHKSLDSYAASLAKAIEAEAKINLFGEEALPGVLVXARXVPGGGFGGRRGSRXLVSQRLQLQSIEEGDVLAAEQR

SEQ ID NO: 11280 - protein, 588 aa, Homo sapiens
  MOD_RES (58)..(58): Selenocysteine
  MOD_RES (68)..(69): Selenocysteine
  MOD_RES (96)..(96): Selenocysteine
  MOD_RES (99)..(99): Selenocysteine
  MOD_RES (104)..(104): Selenocysteine
  MOD_RES (107)..(107): Selenocysteine
  MOD_RES (150)..(150): Selenocysteine
  MOD_RES (201)..(201): Selenocysteine
  MOD_RES (205)..(205): Selenocysteine
  MOD_RES (225)..(225): Selenocysteine
  MOD_RES (235)..(235): Selenocysteine
  MOD_RES (265)..(265): Selenocysteine
  MOD_RES (270)..(270): Selenocysteine
  MOD_RES (284)..(284): Selenocysteine
  MOD_RES (317)..(317): Selenocysteine
  MOD_RES (336)..(336): Selenocysteine
  MOD_RES (375)..(375): Selenocysteine
  MOD_RES (417)..(417): Selenocysteine
  MOD_RES (422)..(422): Selenocysteine
  MOD_RES (506)..(507): Selenocysteine
  MOD_RES (512)..(512): Selenocysteine
  MOD_RES (518)..(518): Selenocysteine
  MOD_RES (563)..(563): Selenocysteine
  MOD_RES (587)..(587): Selenocysteine
MARGGAGAEEASLRSNALSWLACGLLALLANAWIILSISAKQQKHKPLELLLCFLAGXHILMAAVPLXXFAVVQLRRQASSDYDWNESICKVFVSXYYXLALAXCFXVASLSYHRMWMVRWPVNYRLSNAKKQALHAVMGIWMVSFILSXLPSIGWHNNGERYYARGCQFIVSKIGLGFGVCFSLLLLGGIVMGLVCVAIXFYQXLWARPRRARQARRVGGGGGXKAGGPGALGXRPAFEVPAIVVEDARGKRRSSLDGSESAKXSLQVXNLVSAIVFLYDSLXGVPILVVSFFSLKSDSAPPWMVLAVLWCSMAQXLLLPSFIWSCERYRADVRXVWEQCVAIMSEEDGDDDGGCDDYAEGRVCKVRFDANGAXGPGSRDPAQVKLLPGRHMLFPPLERVHYLQVPLSRRLSHDEXNIFSXPREPGSFLHKWSSSDDIRVLPAQSRALGGPPEYLGQRHRLEDEEDEEEAEGGGLASLRQFLESGVLGSGGGPPRGPGFFREEIXXFIDEXPLPSPXASPGHSPRRPRPLGLSPRRLSLGSPESRAVGLPLGLSAGRRCSLXGGEESARAWGGSWGPGNPIFPQLXL

SEQ ID NO: 11281 - protein, 304 aa, Homo sapiens
  MOD_RES (4)..(4): Selenocysteine
  MOD_RES (33)..(33): Selenocysteine
  MOD_RES (52)..(52): Selenocysteine
  MOD_RES (91)..(91): Selenocysteine
  MOD_RES (133)..(133): Selenocysteine
  MOD_RES (138)..(138): Selenocysteine
  MOD_RES (222)..(223): Selenocysteine
  MOD_RES (228)..(228): Selenocysteine
  MOD_RES (234)..(234): Selenocysteine
  MOD_RES (279)..(279): Selenocysteine
  MOD_RES (303)..(303): Selenocysteine
MLSXGVVSFFSLKSDSAPPWMVLAVLWCSMAQXLLLPSFIWSCERYRADVRXVWEQCVAIMSEEDGDDDGGCDDYAEGRVCKVRFDANGAXGPGSRDPAQVKLLPGRHMLFPPLERVHYLQVPLSRRLSHDEXNIFSXPREPGSFLHKWSSSDDIRVLPAQSRALGGPPEYLGQRHRLEDEEDEEEAEGGGLASLRQFLESGVLGSGGGPPRGPGFFREEIXXFIDEXPLPSPXASPGHSPRRPRPLGLSPRRLSLGSPESRAVGLPLGLSAGRRCSLXGGEESARAWGGSWGPGNPIFPQLXL

SEQ ID NO: 11282 - protein, 284 aa, Homo sapiens
  MOD_RES (13)..(13): Selenocysteine
  MOD_RES (32)..(32): Selenocysteine
  MOD_RES (71)..(71): Selenocysteine
  MOD_RES (113)..(113): Selenocysteine
  MOD_RES (118)..(118): Selenocysteine
  MOD_RES (202)..(203): Selenocysteine
  MOD_RES (208)..(208): Selenocysteine
  MOD_RES (214)..(214): Selenocysteine
  MOD_RES (259)..(259): Selenocysteine
  MOD_RES (283)..(283): Selenocysteine
MVLAVLWCSMAQXLLLPSFIWSCERYRADVRXVWEQCVAIMSEEDGDDDGGCDDYAEGRVCKVRFDANGAXGPGSRDPAQVKLLPGRHMLFPPLERVHYLQVPLSRRLSHDEXNIFSXPREPGSFLHKWSSSDDIRVLPAQSRALGGPPEYLGQRHRLEDEEDEEEAEGGGLASLRQFLESGVLGSGGGPPRGPGFFREEIXXFIDEXPLPSPXASPGHSPRRPRPLGLSPRRLSLGSPESRAVGLPLGLSAGRRCSLXGGEESARAWGGSWGPGNPIFPQLXL

SEQ ID NO: 11283 - protein, 228 aa, Homo sapiens
  MOD_RES (1)..(1): Any amino acid
  MOD_RES (3)..(3): Selenocysteine
  MOD_RES (7)..(7): Selenocysteine
  MOD_RES (27)..(27): Selenocysteine
  MOD_RES (37)..(37): Selenocysteine
  MOD_RES (67)..(67): Selenocysteine
  MOD_RES (72)..(72): Selenocysteine
  MOD_RES (102)..(102): Selenocysteine
  MOD_RES (121)..(121): Selenocysteine
  MOD_RES (160)..(160): Selenocysteine
  MOD_RES (203)..(203): Selenocysteine
XIXFYQXLWARPRRARQARRVGGGGGXKAGGPGALGXRPAFEVPAIVVEDARGKRRSSLDGSESAKXSLQVXNLVVSFFSLKSDSAPPWMVLAVLWCSMAQXLLLPSFIWSCERYRADVRXVWEQCVAIMSEEDGDDDGGCDDYAEGRVCKVRFDANGAXGPGSRDPAQVKLLPGRHMLFPPLERVHYLQLKKLDLAAAAAHXFFVANPMHLQMREDMAKYRRMSGVR

SEQ ID NO: 11284 - protein, 136 aa, Homo sapiens
  MOD_RES (41)..(41): Selenocysteine
  MOD_RES (47)..(47): Selenocysteine
  MOD_RES (55)..(55): Selenocysteine
  MOD_RES (78)..(78): Selenocysteine
  MOD_RES (92)..(92): Selenocysteine
  MOD_RES (114)..(114): Selenocysteine
  MOD_RES (135)..(135): Selenocysteine
MSKRSWWAGSRKPPREMLKLSGSDSSQSMNGLEVAPPGLIXNFSLAXAEQCGQEXPLENMLFASFYLLDFILALVGNXLALWLFIRDHKSGXPANVFLMHLAVADLSCVLVLPXRLVYHFSGNHWPFGEIACRLXG

SEQ ID NO: 11285 - protein, 367 aa, Homo sapiens
  MOD_RES (41)..(41): Selenocysteine
  MOD_RES (47)..(47): Selenocysteine
  MOD_RES (55)..(55): Selenocysteine
  MOD_RES (78)..(78): Selenocysteine
  MOD_RES (92)..(92): Selenocysteine
  MOD_RES (114)..(114): Selenocysteine
  MOD_RES (135)..(135): Selenocysteine
  MOD_RES (151)..(151): Selenocysteine
  MOD_RES (200)..(200): Selenocysteine
  MOD_RES (203)..(203): Selenocysteine
  MOD_RES (206)..(206): Selenocysteine
  MOD_RES (230)..(230): Selenocysteine
  MOD_RES (235)..(236): Selenocysteine
  MOD_RES (238)..(238): Selenocysteine
  MOD_RES (259)..(259): Selenocysteine
  MOD_RES (299)..(299): Selenocysteine
  MOD_RES (310)..(310): Selenocysteine
  MOD_RES (314)..(314): Selenocysteine
  MOD_RES (356)..(356): Selenocysteine
MSKRSWWAGSRKPPREMLKLSGSDSSQSMNGLEVAPPGLIXNFSLAXAEQCGQEXPLENMLFASFYLLDFILALVGNXLALWLFIRDHKSGXPANVFLMHLAVADLSCVLVLPXRLVYHFSGNHWPFGEIACRLXGFLFYLNMYASIYFLXCISADRFLAIVHPVKSLKLRRPLYAHLACAFLWVVVAVAMAPLLVSPQXVQXNHXVVCLQLYREKASHHALVSLAVAFXFPFIXXVXCYLLIIRSLRQGLRVEKRLKXKAVRMIAIVLAIFLVCFVPYHVNRSVYVLHYRSHGASCAXQRILALANRIXSCLXSLNGALDPIMYFFVAEKFRHALCNLLCGKRLKGPPPSFEGKXNESSLSAKSEL

SEQ ID NO: 11286 - protein, 18 aa, Homo sapiens
  MOD_RES (2)..(2): Selenocysteine
  MOD_RES (18)..(18): Selenocysteine
MXNSSFFCPVYKDLEPFX

SEQ ID NO: 11287 - protein, 319 aa, Homo sapiens
  MOD_RES (2)..(2): Selenocysteine
  MOD_RES (18)..(18): Selenocysteine
  MOD_RES (36)..(36): Selenocysteine
  MOD_RES (44)..(44): Selenocysteine
  MOD_RES (58)..(58): Selenocysteine
  MOD_RES (64)..(64): Selenocysteine
  MOD_RES (90)..(90): Selenocysteine
  MOD_RES (117)..(117): Selenocysteine
  MOD_RES (136)..(136): Selenocysteine
  MOD_RES (180)..(180): Selenocysteine
  MOD_RES (229)..(230): Selenocysteine
  MOD_RES (247)..(247): Selenocysteine
  MOD_RES (251)..(251): Selenocysteine
  MOD_RES (255)..(255): Selenocysteine
  MOD_RES (259)..(259): Selenocysteine
  MOD_RES (270)..(270): Selenocysteine
  MOD_RES (297)..(297): Selenocysteine
  MOD_RES (299)..(299): Selenocysteine
  MOD_RES (306)..(306): Selenocysteine
MXNSSFFCPVYKDLEPFXYFFYLVFLVGIIGSCFAXWAFIQKNXNHRCVSIYLINLLXADFLLXLALPVKIVVDLGVAPWKLKIFHCQVXACLIYINMYLSIIFLAFVSIDRCLQLXHSCKIYRIQEPGFAKMISXVVWLMVLLIMVPNMMIPIKDIKEKSNVGCMEFKKEFGRNWHLLXNFICVAIFLNFSAIILISNCLVIRQLYRNKDNENYPNVKKALINILLVXXGYIICFVPYHIVRIPYXLSQXEVIXDCSXRISLFKAKEAXLLLAVSNLCFDPILYYHLSKAFRSKVXEXFASPKEXKAQKEKLRCENNA

SEQ ID NO: 11288 - protein, 52 aa, Homo sapiens
  MOD_RES (4)..(5): Selenocysteine
MANXXGEPEEVSGALSPPSASAYVKLVLLGLIMCVSLAGNAILSLLVLKERA

SEQ ID NO: 11289 - protein, 373 aa, Homo sapiens
  MOD_RES (4)..(5): Selenocysteine
  MOD_RES (90)..(90): Selenocysteine
  MOD_RES (120)..(120): Selenocysteine
  MOD_RES (136)..(136): Selenocysteine
  MOD_RES (139)..(139): Selenocysteine
  MOD_RES (149)..(149): Selenocysteine
  MOD_RES (164)..(164): Selenocysteine
  MOD_RES (186)..(186): Selenocysteine
  MOD_RES (200)..(200): Selenocysteine
  MOD_RES (231)..(231): Selenocysteine
  MOD_RES (238)..(238): Selenocysteine
  MOD_RES (257)..(257): Selenocysteine
  MOD_RES (292)..(292): Selenocysteine
  MOD_RES (324)..(324): Selenocysteine
  MOD_RES (353)..(353): Selenocysteine
  MOD_RES (360)..(360): Selenocysteine
MANXXGEPEEVSGALSPPSASAYVKLVLLGLIMCVSLAGNAILSLLVLKERALHKAPYYFLLDLCLADGIRSAVCFPFVLASVRHGSSWXFSALSCKIVAFMAVLFCFHAAFMLFCISVXRYMAIAHHRFYAKRMXLWXCAAVICMAWXLSVAMAFPPVFDVGXYKFIREEDQCIFEHRYFKANDXLGFMLMLAVLMAAXHAVYGKLLLFEYRHRKMKPVQMVPAISQNWXFHGPGAXGQAAANWIAGFGRGPMPPXLLGIRQNGHAASRRLLGMDEVKGEKQLGRMFYAIXLLFLLLWSPYIVACYWRVFVKACAVPHRYLAXAVWMSFAQAAVNPIVCFLLNKDLKKCLRXHAPCWGXGGAPAPREPYCVM

SEQ ID NO: 11290 - protein, 333 aa, Homo sapiens
  MOD_RES (6)..(6): Selenocysteine
  MOD_RES (8)..(8): Selenocysteine
  MOD_RES (15)..(15): Selenocysteine
  MOD_RES (25)..(25): Selenocysteine
  MOD_RES (27)..(27): Selenocysteine
  MOD_RES (51)..(51): Selenocysteine
  MOD_RES (157)..(157): Selenocysteine
  MOD_RES (161)..(161): Selenocysteine
  MOD_RES (166)..(166): Selenocysteine
  MOD_RES (174)..(174): Selenocysteine
  MOD_RES (187)..(187): Selenocysteine
  MOD_RES (196)..(196): Selenocysteine
  MOD_RES (205)..(205): Selenocysteine
  MOD_RES (208)..(208): Selenocysteine
  MOD_RES (234)..(234): Selenocysteine
  MOD_RES (296)..(296): Selenocysteine
  MOD_RES (324)..(324): Selenocysteine
  MOD_RES (327)..(327): Selenocysteine
  MOD_RES (329)..(329): Selenocysteine
MPANYXCXRPDGDNXDFRYFIYAVXYXVILVPGLIGNILALWVFYGYMKEXKRAVIFMINLAIADLLQVLSLPLRIFYYLNHDWPFGPGLCMFCFYLKYVNMYASIYFLVCISVRRFWFLMYPFRFHDCKQKYDLYISIAGWLIICLACVLFPLLRXSDDXSGNRXKCFVDLPXRNVNLAQSVVMMXIGELIGFVXPLLIVLYCXWKXVLSLQDKYPMAQDLGEKQKALKMILXCAGVFLICFAPYHFSFPLDFLVKSNEIKSCLARRVILIFHSVALCLASLNSCLDPVIYYFSXNEFRRRLSRQDLHDSIQLHAKSFVSNHXASXMXPELC

SEQ ID NO: 11291 - protein, 514 aa, Homo sapiens
  MOD_RES (44)..(46): Selenocysteine
  MOD_RES (65)..(65): Selenocysteine
  MOD_RES (102)..(102): Selenocysteine
  MOD_RES (112)..(112): Selenocysteine
  MOD_RES (130)..(130): Selenocysteine
  MOD_RES (180)..(180): Selenocysteine
  MOD_RES (188)..(188): Selenocysteine
  MOD_RES (190)..(190): Selenocysteine
  MOD_RES (192)..(192): Selenocysteine
  MOD_RES (211)..(212): Selenocysteine
  MOD_RES (246)..(246): Selenocysteine
  MOD_RES (250)..(250): Selenocysteine
  MOD_RES (266)..(266): Selenocysteine
  MOD_RES (283)..(283): Selenocysteine
  MOD_RES (289)..(289): Selenocysteine
  MOD_RES (296)..(296): Selenocysteine
  MOD_RES (303)..(303): Selenocysteine
  MOD_RES (321)..(321): Selenocysteine
  MOD_RES (333)..(333): Selenocysteine
  MOD_RES (349)..(349): Selenocysteine
  MOD_RES (383)..(383): Selenocysteine
  MOD_RES (407)..(407): Selenocysteine
  MOD_RES (426)..(426): Selenocysteine
  MOD_RES (443)..(443): Selenocysteine
  MOD_RES (467)..(467): Selenocysteine
  MOD_RES (481)..(481): Selenocysteine
  MOD_RES (488)..(488): Selenocysteine
MGHNGSWISPNASEPHNASGAEAAGVNRSALGEFGEAQLYRQFXXXVQVVIFIGSLLEFGNMEVXRKLDKSRLPGIKFIKNLACSGICASLVCVPFDIILSXSPHCCWWIYXMLFCKVVKFLHKVFCSVXILSFPAIALDRYYSVLYPLERKISDAKSRELVMYIWAHAVVASVPVFAVXNVADIYAXSXCXEVWSNSLGHLVYVLVYNIXXVIVPVVVVFLFLILIRRALSASQKKKVIIAALRXPQNXISIPYASQREAELHAXLLSMVMVFILCSVPYAXLVVYQXVLNVPDXSVFLLLXAVWLPKVSLLANPVLFLXVNKSVRKCLIGXLVQLHHRYSRRNVVSXGSGMAEASLEPSIRSGSQLLEMFHIGQQQIFKPXEDEEESEAKYIGSADFQAKEIFSXCLEGEQGPQFAPSAPPLSXVDSVSQVAPAAPVEPEXFPDKYSLQFGFGPFELPPQWLSEXRNSKKRLLPPLGNXPEELIQXKVPKVGRVERKMSRNNKVSIFPKVDS

SEQ ID NO: 11292 - protein, 515 aa, Homo sapiens
  MOD_RES (44)..(46): Selenocysteine
  MOD_RES (66)..(66): Selenocysteine
  MOD_RES (69)..(70): Selenocysteine
  MOD_RES (76)..(76): Selenocysteine
  MOD_RES (103)..(103): Selenocysteine
  MOD_RES (113)..(113): Selenocysteine
  MOD_RES (131)..(131): Selenocysteine
  MOD_RES (181)..(181): Selenocysteine
  MOD_RES (189)..(189): Selenocysteine
  MOD_RES (191)..(191): Selenocysteine
  MOD_RES (193)..(193): Selenocysteine
  MOD_RES (212)..(213): Selenocysteine
  MOD_RES (247)..(247): Selenocysteine
  MOD_RES (251)..(251): Selenocysteine
  MOD_RES (267)..(267): Selenocysteine
  MOD_RES (284)..(284): Selenocysteine
  MOD_RES (290)..(290): Selenocysteine
  MOD_RES (297)..(297): Selenocysteine
  MOD_RES (304)..(304): Selenocysteine
  MOD_RES (322)..(322): Selenocysteine
  MOD_RES (334)..(334): Selenocysteine
  MOD_RES (350)..(350): Selenocysteine
  MOD_RES (384)..(384): Selenocysteine
  MOD_RES (408)..(408): Selenocysteine
  MOD_RES (427)..(427): Selenocysteine
  MOD_RES (444)..(444): Selenocysteine
  MOD_RES (468)..(468): Selenocysteine
  MOD_RES (482)..(482): Selenocysteine
  MOD_RES (489)..(489): Selenocysteine
MGHNGSWISPNASEPHNASGAEAAGVNRSALGEFGEAQLYRQFXXXVQVVIFIGSLLGNFMVLWSXCRXXVFKSVXNRFIKNLACSGICASLVCVPFDIILSXSPHCCWWIYXMLFCKVVKFLHKVFCSVXILSFPAIALDRYYSVLYPLERKISDAKSRELVMYIWAHAVVASVPVFAVXNVADIYAXSXCXEVWSNSLGHLVYVLVYNIXXVIVPVVVVFLFLILIRRALSASQKKKVIIAALRXPQNXISIPYASQREAELHAXLLSMVMVFILCSVPYAXLVVYQXVLNVPDXSVFLLLXAVWLPKVSLLANPVLFLXVNKSVRKCLIGXLVQLHHRYSRRNVVSXGSGMAEASLEPSIRSGSQLLEMFHIGQQQIFKPXEDEEESEAKYIGSADFQAKEIFSXCLEGEQGPQFAPSAPPLSXVDSVSQVAPAAPVEPEXFPDKYSLQFGFGPFELPPQWLSEXRNSKKRLLPPLGNXPEELIQXKVPKVGRVERKMSRNNKVSIFPKVDS

SEQ ID NO: 11293 - protein, 2367 aa, Homo sapiens
  MOD_RES (3)..(3): Selenocysteine
  MOD_RES (101)..(101): Selenocysteine
  MOD_RES (150)..(150): Selenocysteine
  MOD_RES (167)..(167): Selenocysteine
  MOD_RES (169)..(169): Selenocysteine
  MOD_RES (173)..(173): Selenocysteine
  MOD_RES (194)..(194): Selenocysteine
  MOD_RES (203)..(203): Selenocysteine
  MOD_RES (224)..(224): Selenocysteine
  MOD_RES (248)..(248): Selenocysteine
  MOD_RES (252)..(252): Selenocysteine
  MOD_RES (292)..(292): Selenocysteine
  MOD_RES (300)..(300): Selenocysteine
  MOD_RES (339)..(340): Selenocysteine
  MOD_RES (364)..(364): Selenocysteine
  MOD_RES (370)..(370): Selenocysteine
  MOD_RES (421)..(421): Selenocysteine
  MOD_RES (462)..(462): Selenocysteine
  MOD_RES (478)..(478): Selenocysteine
  MOD_RES (509)..(509): Selenocysteine
  MOD_RES (528)..(528): Selenocysteine
  MOD_RES (564)..(564): Selenocysteine
  MOD_RES (593)..(593): Selenocysteine
  MOD_RES (607)..(607): Selenocysteine
  MOD_RES (615)..(615): Selenocysteine
  MOD_RES (618)..(618): Selenocysteine
  MOD_RES (620)..(622): Selenocysteine
  MOD_RES (694)..(694): Selenocysteine
  MOD_RES (765)..(765): Selenocysteine
  MOD_RES (774)..(774): Selenocysteine
  MOD_RES (801)..(801): Selenocysteine
  MOD_RES (824)..(824): Selenocysteine
  MOD_RES (862)..(862): Selenocysteine
  MOD_RES (916)..(916): Selenocysteine
  MOD_RES (939)..(939): Selenocysteine
  MOD_RES (957)..(957): Selenocysteine
  MOD_RES (959)..(959): Selenocysteine
  MOD_RES (971)..(971): Selenocysteine
  MOD_RES (990)..(990): Selenocysteine
  MOD_RES (1095)..(1095): Selenocysteine
  MOD_RES (1100)..(1100): Selenocysteine
  MOD_RES (1118)..(1118): Selenocysteine
  MOD_RES (1161)..(1161): Selenocysteine
  MOD_RES (1184)..(1184): Selenocysteine
  MOD_RES (1198)..(1198): Selenocysteine
  MOD_RES (1218)..(1218): Selenocysteine
  MOD_RES (1249)..(1249): Selenocysteine
  MOD_RES (1253)..(1253): Selenocysteine
  MOD_RES (1269)..(1269): Selenocysteine
  MOD_RES (1372)..(1372): Selenocysteine
  MOD_RES (1376)..(1376): Selenocysteine
  MOD_RES (1409)..(1409): Selenocysteine
  MOD_RES (1413)..(1413): Selenocysteine
  MOD_RES (1433)..(1433): Selenocysteine
  MOD_RES (1497)..(1497): Selenocysteine
  MOD_RES (1521)..(1521): Selenocysteine
  MOD_RES (1541)..(1541): Selenocysteine
  MOD_RES (1570)..(1570): Selenocysteine
  MOD_RES (1586)..(1586): Selenocysteine
  MOD_RES (1590)..(1590): Selenocysteine
  MOD_RES (1601)..(1601): Selenocysteine
  MOD_RES (1606)..(1606): Selenocysteine
  MOD_RES (1633)..(1633): Selenocysteine
  MOD_RES (1668)..(1668): Selenocysteine
  MOD_RES (1673)..(1673): Selenocysteine
  MOD_RES (1698)..(1698): Selenocysteine
  MOD_RES (1731)..(1731): Selenocysteine
  MOD_RES (1746)..(1746): Selenocysteine
  MOD_RES (1755)..(1755): Selenocysteine
  MOD_RES (1778)..(1778): Selenocysteine
  MOD_RES (1811)..(1811): Selenocysteine
  MOD_RES (1826)..(1827): Selenocysteine
  MOD_RES (1853)..(1853): Selenocysteine
  MOD_RES (1872)..(1872): Selenocysteine
  MOD_RES (1911)..(1911): Selenocysteine
  MOD_RES (1922)..(1922): Selenocysteine
  MOD_RES (1930)..(1930): Selenocysteine
  MOD_RES (1939)..(1939): Selenocysteine
  MOD_RES (1943)..(1944): Selenocysteine
  MOD_RES (1950)..(1950): Selenocysteine
  MOD_RES (1962)..(1963): Selenocysteine
  MOD_RES (1990)..(1990): Selenocysteine
  MOD_RES (2018)..(2018): Selenocysteine
  MOD_RES (2024)..(2024): Selenocysteine
  MOD_RES (2109)..(2109): Selenocysteine
  MOD_RES (2165)..(2165): Selenocysteine
  MOD_RES (2188)..(2188): Selenocysteine
  MOD_RES (2227)..(2227): Selenocysteine
  MOD_RES (2237)..(2237): Selenocysteine
  MOD_RES (2247)..(2247): Selenocysteine
  MOD_RES (2260)..(2260): Selenocysteine
  MOD_RES (2262)..(2262): Selenocysteine
  MOD_RES (2269)..(2269): Selenocysteine
  MOD_RES (2303)..(2303): Selenocysteine
  MOD_RES (2305)..(2305): Selenocysteine
  MOD_RES (2322)..(2322): Selenocysteine
  MOD_RES (2341)..(2341): Selenocysteine
  MOD_RES (2357)..(2357): Selenocysteine
  MOD_RES (2360)..(2360): Selenocysteine
MGXRGAVMPPPMWGLLGCCFVCAWALGGPRPIRSLPPLSSQVKPGSVPMQVPLEGAEAALAYLYSGDAQQLSQVNCSERYEARGAGAMPGLPPSLQGAAGXLAQAANFLNMLLQANDIRESSVEEDVEWYQALVRSVAEGDPRVYRALLXFNPPPGASHLQLALQAXRXGEEXILQDLSGNWVQEENPPGDLDXPALKKRVLXNDLGSLGSPKWPQADGYVGDXQQVRLSPPFLECQEGRLRPGWLIXLSAXFYGLKPDLSPEVRGQVQMDVDLQSVDINQCASGPGWYSNXHLCDLNSXQCVPLESQGFVLGRYLCRCRPGFYGASPSGGLEESDFQXXGQFGFPEGRSGRLLQCLPCPEGCXSCMDAXPCLVEEAAVLRAAVLACQACCMLAIFLSMLVSYRCRRNKRIWASGVVLLEXVLFGFLLLYFPVFILYFKPSVFRCIALRWVRLLGFAIVYGXIILKLYRVLQLFLSRXAQRSALLSSGRLLRHLGLLLLPVLGFLAVWXVGALERGIQHAPLVIRGHXPSGRHFYLCHHDRWDYIMVVAELLLLCWGSFLCYAXRAVLSAFHEPRYMGIALHNELLLSAAFHXARFVLVPSLHPDWXLLLFFFHXHSXVXXXLALIFIPKFWKLGAPPREEMVDEVCEDELDLQHSGSYLGSSIASAWSEHSLDPGDIRDELKKLYAQLEVHKXKEMAANNPHLPKKRGSSCQGLGRSFMRYLAEFPEALARQHSRDSGSPGHGSLPGSSRRRLLSSSLQEPEGXPALHKSRSXYDQRREQDPPLLDSLLRRKLAKKASRXESRESVEGPPALGFRSASAHNLXVGERLPRARPASLQKSLSVASSREKALLMASQAYLEEXYRQAKEREERKKAKAAMASLVRRPSARRLERPRGAPLSAPPSPAKSSSVDSSHXSGRLHEEARRRLPHPPIRHQVSXPILALSGGLGEPRMLSPXSXLAPALLPALAPXPAPALAPVPVSPQSPNLLXYICPWENAELPAKQENVPQEGPSGPERGHHSPAPARARLWRALSVAVEKSRAGENEMDAEDAHHQREANDVDEDRPKIFPKSHSLKAPVQQGSMRSLGLAIKALXRSRSXYREKESVEESPEGQNSGXAGESMGAPSRSPRLGRPKAVSKQAALIPSDDKESLQNQQNAHXSRMLQVCQREGSREQEDRGRRMXQGLGERKAERAGKXGLAMLRQVSRDKNIKQSKEXPVGWQELPKAGLQSLGSADHRVAEVCPWEVXESEXRQPDSGNKAEICPWEXSEGAPESRALRQDPGDSQKKRGEARGKSEPIDVVPMMRKKPERLVREQEAVCPWESADRGGLSPGSAPQDPGRIRDKSEAGDSVEARKVEKPGWEAAGPEAHXPDIXKAEPCPWEASEGGEDGKPAQEAVKDLPQEKQKXRKAXFWKEQKPGGDLESLCPWESXDFRGPSAVSIQAPGSSECSGSLGSGIAEVCLWEAGDAPAIQKAEICPWELDDNVMGQEMLSLGXGRESLQEKEKASRKGSFGEMGEQXVKAVQKLSQQQESVCPRESXVPGHSSPCLDNSSSKAGSQFLCNGGSRAXQVCPQEDLRPEAQEAXPAKXEICPWEVNERXREEWXSAQVPRGGESQKDKEKMPGKSEIEDVXAWEKPEGQIQKQEAVGPWESVDPGSFSPQPRPQDXERPQXLLQMSGSVGSKAADICPLDVEENLXAGKAEICPWEVGAGAGEERALGAEAIRKSPNDXGKVSADLGPRERAVXAPEKPQKPXPEWEVACPWGSVGPGACSQHPGXLDADGPKAGFQELDHMGCRPGEVCPWEAQEAAXSEKAKICPWEVSEGXXGKGLDQKAGSESAEQREKALEKGRLXSLGEDVSKGMAKLCQQQEXICIWENKDLRESPAQAPKISDLPSSMSSEVAEGHSLEAXEKGDLRQDPKXGSFPEHIXQEKAPAADXEEFXXEDGEKXSHELQSVCPWEXXAPADSVSHLDRQRPDQPKASSQRLVSXGGRAADVCPWDVPDAGVYKSDSSAKAEXCPWEVXERIPVKGVSRQDGKGDSQEEKGRAPEKSEPKGVPVQKKPEMADFRQQEAVCPWESQDGKGLSPQPAPDASDRSRGSSEAAGSVEXRVAEVCLWEVVEAPSAKKAEICPWEAGGGAAEEGEQERESQGQGEMFLQKAGPGGXEEHFSKAAAKPREQEAVCPGEGXGSGGLLPQSGALDPELKVSPKEAGSMGSRMAELCQWEIXDPEGNKIKGXMADICPGEEXGVPSEESGLLALXAXRREFFPXAPEKPLCLLVHGPLDHFFPESKIPCPKVSRPASXFXLEGVRELQGPSGLEPRXSLAPEPSLQEAESQSSSLXEDSGQVAFEAQYEEFXPPXVYPWDWE

SEQ ID NO: 11294 - protein, 2367 aa, Homo sapiens
  MOD_RES (3)..(3): Selenocysteine
  MOD_RES (101)..(101): Selenocysteine
  MOD_RES (150)..(150): Selenocysteine
  MOD_RES (167)..(167): Selenocysteine
  MOD_RES (169)..(169): Selenocysteine
  MOD_RES (173)..(173): Selenocysteine
  MOD_RES (194)..(194): Selenocysteine
  MOD_RES (203)..(203): Selenocysteine
  MOD_RES (224)..(224): Selenocysteine
  MOD_RES (248)..(248): Selenocysteine
  MOD_RES (252)..(252): Selenocysteine
  MOD_RES (292)..(292): Selenocysteine
  MOD_RES (300)..(300): Selenocysteine
  MOD_RES (339)..(340): Selenocysteine
  MOD_RES (364)..(364): Selenocysteine
  MOD_RES (370)..(370): Selenocysteine
  MOD_RES (421)..(421): Selenocysteine
  MOD_RES (462)..(462): Selenocysteine
  MOD_RES (478)..(478): Selenocysteine
  MOD_RES (509)..(509): Selenocysteine
  MOD_RES (528)..(528): Selenocysteine
  MOD_RES (564)..(564): Selenocysteine
  MOD_RES (593)..(593): Selenocysteine
  MOD_RES (607)..(607): Selenocysteine
  MOD_RES (615)..(615): Selenocysteine
  MOD_RES (618)..(618): Selenocysteine
  MOD_RES (620)..(622): Selenocysteine
  MOD_RES (694)..(694): Selenocysteine
  MOD_RES (765)..(765): Selenocysteine
  MOD_RES (774)..(774): Selenocysteine
  MOD_RES (801)..(801): Selenocysteine
  MOD_RES (824)..(824): Selenocysteine
  MOD_RES (862)..(862): Selenocysteine
  MOD_RES (916)..(916): Selenocysteine
  MOD_RES (939)..(939): Selenocysteine
  MOD_RES (957)..(957): Selenocysteine
  MOD_RES (959)..(959): Selenocysteine
  MOD_RES (971)..(971): Selenocysteine
  MOD_RES (990)..(990): Selenocysteine
  MOD_RES (1095)..(1095): Selenocysteine
  MOD_RES (1100)..(1100): Selenocysteine
  MOD_RES (1118)..(1118): Selenocysteine
  MOD_RES (1161)..(1161): Selenocysteine
  MOD_RES (1184)..(1184): Selenocysteine
  MOD_RES (1198)..(1198): Selenocysteine
  MOD_RES (1218)..(1218): Selenocysteine
  MOD_RES (1249)..(1249): Selenocysteine
  MOD_RES (1253)..(1253): Selenocysteine
  MOD_RES (1269)..(1269): Selenocysteine
  MOD_RES (1372)..(1372): Selenocysteine
  MOD_RES (1376)..(1376): Selenocysteine
  MOD_RES (1409)..(1409): Selenocysteine
  MOD_RES (1413)..(1413): Selenocysteine
  MOD_RES (1433)..(1433): Selenocysteine
  MOD_RES (1497)..(1497): Selenocysteine
  MOD_RES (1521)..(1521): Selenocysteine
  MOD_RES (1541)..(1541): Selenocysteine
  MOD_RES (1570)..(1570): Selenocysteine
  MOD_RES (1586)..(1586): Selenocysteine
  MOD_RES (1590)..(1590): Selenocysteine
  MOD_RES (1601)..(1601): Selenocysteine
  MOD_RES (1606)..(1606): Selenocysteine
  MOD_RES (1633)..(1633): Selenocysteine
  MOD_RES (1668)..(1668): Selenocysteine
  MOD_RES (1673)..(1673): Selenocysteine
  MOD_RES (1698)..(1698): Selenocysteine
  MOD_RES (1731)..(1731): Selenocysteine
  MOD_RES (1746)..(1746): Selenocysteine
  MOD_RES (1755)..(1755): Selenocysteine
  MOD_RES (1778)..(1778): Selenocysteine
  MOD_RES (1811)..(1811): Selenocysteine
  MOD_RES (1826)..(1827): Selenocysteine
  MOD_RES (1853)..(1853): Selenocysteine
  MOD_RES (1872)..(1872): Selenocysteine
  MOD_RES (1911)..(1911): Selenocysteine
  MOD_RES (1922)..(1922): Selenocysteine
  MOD_RES (1930)..(1930): Selenocysteine
  MOD_RES (1939)..(1939): Selenocysteine
  MOD_RES (1943)..(1944): Selenocysteine
  MOD_RES (1950)..(1950): Selenocysteine
  MOD_RES (1962)..(1963): Selenocysteine
  MOD_RES (1990)..(1990): Selenocysteine
  MOD_RES (2018)..(2018): Selenocysteine
  MOD_RES (2024)..(2024): Selenocysteine
  MOD_RES (2109)..(2109): Selenocysteine
  MOD_RES (2165)..(2165): Selenocysteine
  MOD_RES (2188)..(2188): Selenocysteine
  MOD_RES (2227)..(2227): Selenocysteine
  MOD_RES (2237)..(2237): Selenocysteine
  MOD_RES (2247)..(2247): Selenocysteine
  MOD_RES (2260)..(2260): Selenocysteine
  MOD_RES (2262)..(2262): Selenocysteine
  MOD_RES (2269)..(2269): Selenocysteine
  MOD_RES (2303)..(2303): Selenocysteine
  MOD_RES (2305)..(2305): Selenocysteine
  MOD_RES (2322)..(2322): Selenocysteine
  MOD_RES (2341)..(2341): Selenocysteine
  MOD_RES (2357)..(2357): Selenocysteine
  MOD_RES (2360)..(2360): Selenocysteine
MGXRGAVMPPPMWGLLGCCFVCAWALGGPRPIRSLPPLSSQVKPGSVPMQVPLEGAEAALAYLYSGDAQQLSQVNCSERYEARGAGAMPGLPPSLQGAAGXLAQAANFLNMLLQANDIRESSVEEDVEWYQALVRSVAEGDPRVYRALLXFNPPPGASHLQLALQAXRXGEEXILQDLSGNWVQEENPPGDLDXPALKKRVLXNDLGSLGSPKWPQADGYVGDXQQVRLSPPFLECQEGRLRPGWLIXLSAXFYGLKPDLSPEVRGQVQMDVDLQSVDINQCASGPGWYSNXHLCDLNSXQCVPLESQGFVLGRYLCRCRPGFYGASPSGGLEESDFQXXGQFGFPEGRSGRLLQCLPCPEGCXSCMDAXPCLVEEAAVLRAAVLACQACCMLAIFLSMLVSYRCRRNKRIWASGVVLLEXVLFGFLLLYFPVFILYFKPSVFRCIALRWVRLLGFAIVYGXIILKLYRVLQLFLSRXAQRSALLSSGRLLRRLGLLLLPVLGFLAVWXVGALERGIQHAPLVIRGHXPSGRHFYLCHHDRWDYIMVVAELLLLCWGSFLCYAXRAVLSAFHEPRYMGIALHNELLLSAAFHXARFVLVPSLHPDWXLLLFFFHXHSXVXXXLALIFIPKFWKLGAPPREEMVDEVCEDELDLQHSGSYLGSSIASAWSEHSLDPGDIRDELKKLYAQLEVHKXKEMAANNPHLPKKRGSSCQGLGRSFMRYLAEFPEALARQHSRDSGSPGHGSLPGSSRRRLLSSSLQEPEGXPALHKSRSXYDQRREQDPPLLDSLLRRKLAKKASRXESRESVEGPPALGFRSASAHNLXVGERLPRARPASLQKSLSVASSREKALLMASQAYLEEXYRQAKEREERKKAKAAMASLVRRPSARRLERPRGAPLSAPPSPAKSSSVDSSHXSGRLHEEARRRLPHPPIRHQVSXPILALSGGLGEPRMLSPXSXLAPALLPALAPXPAPALAPVPVSPQSPNLLXYICPWENAELPAKQENVPQEGPSGPERGHHSPAPARARLWRALSVAVEKSRAGENEMDAEDAHHQREANDVDEDRPKIFPKSHSLKAPVQQGSMRSLGLAIKALXRSRSXYREKESVEESPEGQNSGXAGESMGAPSRSPRLGRPKAVSKQAALIPSDDKESLQNQQNAHXSRMLQVCQREGSREQEDRGRRMXQGLGERKAERAGKXGLAMLRQVSRDKNIKQSKEXPVGWQELPKAGLQSLGSADHRVAEVCPWEVXESEXRQPDSGNKAEICPWEXSEGAPESRALRQDPGDSQKKRGEARGKSEPIDVVPMMRKKPERLVREQEAVCPWESADRGGLSPGSAPQDPGRIRDKSEAGDSVEARKVEKPGWEAAGPEAHXPDIXKAEPCPWEASEGGEDGKPAQEAVKDLPQEKQKXRKAXFWKEQKPGGDLESLCPWESXDFRGPSAVSIQAPGSSECSGSLGSGIAEVCLWEAGDAPAIQKAEICPWELDDNVMGQEMLSLGXGRESLQEKEKASRKGSFGEMGEQXVKAVQKLSQQQESVCPRESXVPGHSSPCLDNSSSKAGSQFLCNGGSRAXQVCPQEDLRPEAQEAXPAKXEICPWEVNERXREEWXSAQVPRGGESQKDKEKMPGKSEIEDVXAWEKPEGQIQKQEAVGPWESVDPGSFSPQPRPQDXERPQXLLQMSGSVGSKAADICPLDVEENLXAGKAEICPWEVGAGAGEERALGAEAIRKSPNDXGKVSADLGPRERAVXAPEKPQKPXPEWEVACPWGSVGPGACSQHPGXLDADGPKAGFQELDHMGCRPGEVCPWEAQEAAXSEKAKICPWEVSEGXXGKGLDQKAGSESAEQREKALEKGRLXSLGEDVSKGMAKLCQQQEXICIWENKDLRESPAQAPKISDLPSSMSSEVAEGHSLEAXEKGDLRQDPKXGSFPEHIXQEKAPAADXEEFXXEDGEKXSHELQSVCPWEXXAPADSVSHLDRQRPDQPKASSQRLVSXGGRAADVCPWDVPDAGVYKSDSSAKAEXCPWEVXERIPVKGVSRQDGKGDSQEEKGRAPEKSEPKGVPVQKKPEMADFRQQEAVCPWESQDGKGLSPQPAPDASDRSRGSSEAAGSVEXRVAEVCLWEVVEAPSAKKAEICPWEAGGGAAEEGEQERESQGQGEMFLQKAGPGGXEEHFSKAAAKPREQEAVCPGEGXGSGGLLPQSGALDPELKVSPKEAGSMGSRMAELCQWEIXDPEGNKIKGXMADICPGEEXGVPSEESGLLALXAXRREFFPXAPEKPLCLLVHGPLDHFFPESKIPCPKVSRPASXFXLEGVRELQGPSGLEPRXSLAPEPSLQEAESQSSSLXEDSGQVAFEAQYEEFXPPXVYPWDWE

SEQ ID NO: 11295 - protein, 2368 aa, Homo sapiens
  MOD_RES (3)..(3): Selenocysteine
  MOD_RES (101)..(101): Selenocysteine
  MOD_RES (150)..(150): Selenocysteine
  MOD_RES (167)..(167): Selenocysteine
  MOD_RES (169)..(169): Selenocysteine
  MOD_RES (173)..(173): Selenocysteine
  MOD_RES (194)..(194): Selenocysteine
  MOD_RES (203)..(203): Selenocysteine
  MOD_RES (224)..(224): Selenocysteine
  MOD_RES (248)..(248): Selenocysteine
  MOD_RES (252)..(252): Selenocysteine
  MOD_RES (293)..(293): Selenocysteine
  MOD_RES (301)..(301): Selenocysteine
  MOD_RES (340)..(341): Selenocysteine
  MOD_RES (365)..(365): Selenocysteine
  MOD_RES (371)..(371): Selenocysteine
  MOD_RES (422)..(422): Selenocysteine
  MOD_RES (463)..(463): Selenocysteine
  MOD_RES (479)..(479): Selenocysteine
  MOD_RES (510)..(510): Selenocysteine
  MOD_RES (529)..(529): Selenocysteine
  MOD_RES (565)..(565): Selenocysteine
  MOD_RES (594)..(594): Selenocysteine
  MOD_RES (608)..(608): Selenocysteine
  MOD_RES (616)..(616): Selenocysteine
  MOD_RES (619)..(619): Selenocysteine
  MOD_RES (621)..(623): Selenocysteine
  MOD_RES (695)..(695): Selenocysteine
  MOD_RES (766)..(766): Selenocysteine
  MOD_RES (775)..(775): Selenocysteine
  MOD_RES (802)..(802): Selenocysteine
  MOD_RES (825)..(825): Selenocysteine
  MOD_RES (863)..(863): Selenocysteine
  MOD_RES (917)..(917): Selenocysteine
  MOD_RES (940)..(940): Selenocysteine
  MOD_RES (958)..(958): Selenocysteine
  MOD_RES (960)..(960): Selenocysteine
  MOD_RES (972)..(972): Selenocysteine
  MOD_RES (991)..(991): Selenocysteine
  MOD_RES (1096)..(1096): Selenocysteine
  MOD_RES (1101)..(1101): Selenocysteine
  MOD_RES (1119)..(1119): Selenocysteine
  MOD_RES (1162)..(1162): Selenocysteine
  MOD_RES (1185)..(1185): Selenocysteine
  MOD_RES (1199)..(1199): Selenocysteine
  MOD_RES (1219)..(1219): Selenocysteine
  MOD_RES (1250)..(1250): Selenocysteine
  MOD_RES (1254)..(1254): Selenocysteine
  MOD_RES (1270)..(1270): Selenocysteine
  MOD_RES (1373)..(1373): Selenocysteine
  MOD_RES (1377)..(1377): Selenocysteine
  MOD_RES (1410)..(1410): Selenocysteine
  MOD_RES (1414)..(1414): Selenocysteine
  MOD_RES (1434)..(1434): Selenocysteine
  MOD_RES (1498)..(1498): Selenocysteine
  MOD_RES (1522)..(1522): Selenocysteine
  MOD_RES (1542)..(1542): Selenocysteine
  MOD_RES (1571)..(1571): Selenocysteine
  MOD_RES (1587)..(1587): Selenocysteine
  MOD_RES (1591)..(1591): Selenocysteine
  MOD_RES (1602)..(1602): Selenocysteine
  MOD_RES (1607)..(1607): Selenocysteine
  MOD_RES (1634)..(1634): Selenocysteine
  MOD_RES (1669)..(1669): Selenocysteine
  MOD_RES (1674)..(1674): Selenocysteine
  MOD_RES (1699)..(1699): Selenocysteine
  MOD_RES (1732)..(1732): Selenocysteine
  MOD_RES (1747)..(1747): Selenocysteine
  MOD_RES (1756)..(1756): Selenocysteine
  MOD_RES (1779)..(1779): Selenocysteine
  MOD_RES (1812)..(1812): Selenocysteine
  MOD_RES (1827)..(1828): Selenocysteine
  MOD_RES (1854)..(1854): Selenocysteine
  MOD_RES (1873)..(1873): Selenocysteine
  MOD_RES (1912)..(1912): Selenocysteine
  MOD_RES (1923)..(1923): Selenocysteine
  MOD_RES (1931)..(1931): Selenocysteine
  MOD_RES (1940)..(1940): Selenocysteine
  MOD_RES (1944)..(1945): Selenocysteine
  MOD_RES (1951)..(1951): Selenocysteine
  MOD_RES (1963)..(1964): Selenocysteine
  MOD_RES (1991)..(1991): Selenocysteine
  MOD_RES (2019)..(2019): Selenocysteine
  MOD_RES (2025)..(2025): Selenocysteine
  MOD_RES (2110)..(2110): Selenocysteine
  MOD_RES (2166)..(2166): Selenocysteine
  MOD_RES (2189)..(2189): Selenocysteine
  MOD_RES (2228)..(2228): Selenocysteine
  MOD_RES (2238)..(2238): Selenocysteine
  MOD_RES (2248)..(2248): Selenocysteine
  MOD_RES (2261)..(2261): Selenocysteine
  MOD_RES (2263)..(2263): Selenocysteine
  MOD_RES (2270)..(2270): Selenocysteine
  MOD_RES (2304)..(2304): Selenocysteine
  MOD_RES (2306)..(2306): Selenocysteine
  MOD_RES (2323)..(2323): Selenocysteine
  MOD_RES (2342)..(2342): Selenocysteine
  MOD_RES (2358)..(2358): Selenocysteine
  MOD_RES (2361)..(2361): Selenocysteine
MGXRGAVMPPPMWGLLGCCFVCAWALGGPRPIRSLPPLSSQVKPGSVPMQVPLEGAEAALAYLYSGDAQQLSQVNCSERYEARGAGAMPGLPPSLQGAAGXLAQAANFLNMLLQANDIRESSVEEDVEWYQALVRSVAEGDPRVYRALLXFNPPPGASHLQLALQAXRXGEEXILQDLSGNWVQEENPPGDLDXPALKKRVLXNDLGSLGSPKWPQADGYVGDXQQVRLSPPFLECQEGRLRPGWLIXLSAXFYGLKPDLSPEVSRGQVQMDVDLQSVDINQCASGPGWYSNXHLCDLNSXQCVPLESQGFVLGRYLCRCRPGFYGASPSGGLEESDFQXXGQFGFPEGRSGRLLQCLPCPEGCXSCMDAXPCLVEEAAVLRAAVLACQACCMLAIFLSMLVSYRCRRNKRIWASGVVLLEXVLFGFLLLYFPVFILYFKPSVFRCIALRWVRLLGFAIVYGXIILKLYRVLQLFLSRXAQRSALLSSGRLLRHLGLLLLPVLGFLAVWXVGALERGIQHAPLVIRGHXPSGRHFYLCHHDRWDYIMVVAELLLLCWGSFLCYAXRAVLSAFHEPRYMGIALHNELLLSAAFHXARFVLVPSLHPDWXLLLFFFHXHSXVXXXLALIFIPKFWKLGAPPREEMVDEVCEDELDLQHSGSYLGSSIASAWSEHSLDPGDIRDELKKLYAQLEVHKXKEMAANNPHLPKKRGSSCQGLGRSFMRYLAEFPEALARQHSRDSGSPGHGSLPGSSRRRLLSSSLQEPEGXPALHKSRSXYDQRREQDPPLLDSLLRRKLAKKASRXESRESVEGPPALGFRSASAHNLXVGERLPRARPASLQKSLSVASSREKALLMASQAYLEEXYRQAKEREERKKAKAAMASLVRRPSARRLERPRGAPLSAPPSPAKSSSVDSSHXSGRLHEEARRRLPHPPIRHQVSXPILALSGGLGEPRMLSPXSXLAPALLPALAPXPAPALAPVPVSPQSPNLLXYICPWENAELPAKQENVPQEGPSGPERGHHSPAPARARLWRALSVAVEKSRAGENEMDAEDAHHQREANDVDEDRPKIFPKSHSLKAPVQQGSMRSLGLAIKALXRSRSXYREKESVEESPEGQNSGXAGESMGAPSRSPRLGRPKAVSKQAALIPSDDKESLQNQQNAHXSRMLQVCQREGSREQEDRGRRMXQGLGERKAERAGKXGLAMLRQVSRDKNIKQSKEXPVGWQELPKAGLQSLGSADHRVAEVCPWEVXESEXRQPDSGNKAEICPWEXSEGAPESRALRQDPGDSQKKRGEARGKSEPIDVVPMMRKKPERLVREQEAVCPWESADRGGLSPGSAPQDPGRIRDKSEAGDSVEARKVEKPGWEAAGPEAHXPDIXKAEPCPWEASEGGEDGKPAQEAVKDLPQEKQKXRKAXFWKEQKPGGDLESLCPWESXDFRGPSAVSIQAPGSSECSGSLGSGIAEVCLWEAGDAPAIQKAEICPWELDDNVMGQEMLSLGXGRESLQEKEKASRKGSFGEMGEQXVKAVQKLSQQQESVCPRESXVPGHSSPCLDNSSSKAGSQFLCNGGSRAXQVCPQEDLRPEAQEAXPAKXEICPWEVNERXREEWXSAQVPRGGESQKDKEKMPGKSEIEDVXAWEKPEGQIQKQEAVGPWESVDPGSFSPQPRPQDXERPQXLLQMSGSVGSKAADICPLDVEENLXAGKAEICPWEVGAGAGEERALGAEAIRKSPNDXGKVSADLGPRERAVXAPEKPQKPXPEWEVACPWGSVGPGACSQHPGXLDADGPKAGFQELDHMGCRPGEVCPWEAQEAAXSEKAKICPWEVSEGXXGKGLDQKAGSESAEQREKALEKGRLXSLGEDVSKGMAKLCQQQEXICIWENKDLRESPAQAPKISDLPSSMSSEVAEGHSLEAXEKGDLRQDPKXGSFPEHIXQEKAPAADXEEFXXEDGEKXSHELQSVCPWEXXAPADSVSHLDRQRPDQPKASSQRLVSXGGRAADVCPWDVPDAGVYKSDSSAKAEXCPWEVXERIPVKGVSRQDGKGDSQEEKGRAPEKSEPKGVPVQKKPEMADFRQQEAVCPWESQDGKGLSPQPAPDASDRSRGSSEAAGSVEXRVAEVCLWEVVEAPSAKKAEICPWEAGGGAAEEGEQERESQGQGEMFLQKAGPGGXEEHFSKAAAKPREQEAVCPGEGXGSGGLLPQSGALDPELKVSPKEAGSMGSRMAELCQWEIXDPEGNKIKGXMADICPGEEXGVPSEESGLLALXAXRREFFPXAPEKPLCLLVHGPLDHFFPESKIPCPKVSRPASXFXLEGVRELQGPSGLEPRXSLAPEPSLQEAESQSSSLXEDSGQVAFEAQYEEFXPPXVYPWDWE

SEQ ID NO: 11296 - protein, 98 aa, Homo sapiens
  MOD_RES (3)..(3): Selenocysteine
  MOD_RES (42)..(42): Selenocysteine
  MOD_RES (50)..(51): Selenocysteine
  MOD_RES (55)..(56): Selenocysteine
  MOD_RES (58)..(58): Selenocysteine
  MOD_RES (74)..(74): Selenocysteine
MIXLNNQDQPVPFNSSHPDEYKIAALVFYSCIFIIGLFVNIXALWVFSCXXKKRXXVXIYMMNVALVDLIFIMXLPFRMFYYAKDEWPFGEYFCQILG

SEQ ID NO: 11297 - protein, 331 aa, Homo sapiens
  MOD_RES (3)..(3): Selenocysteine
  MOD_RES (42)..(42): Selenocysteine
  MOD_RES (50)..(51): Selenocysteine
  MOD_RES (55)..(56): Selenocysteine
  MOD_RES (58)..(58): Selenocysteine
  MOD_RES (74)..(74): Selenocysteine
  MOD_RES (101)..(101): Selenocysteine
  MOD_RES (135)..(135): Selenocysteine
  MOD_RES (149)..(149): Selenocysteine
  MOD_RES (151)..(154): Selenocysteine
  MOD_RES (168)..(168): Selenocysteine
  MOD_RES (171)..(171): Selenocysteine
  MOD_RES (190)..(190): Selenocysteine
  MOD_RES (193)..(193): Selenocysteine
  MOD_RES (219)..(219): Selenocysteine
  MOD_RES (236)..(236): Selenocysteine
  MOD_RES (259)..(259): Selenocysteine
  MOD_RES (271)..(272): Selenocysteine
  MOD_RES (279)..(279): Selenocysteine
MIXLNNQDQPVPFNSSHPDEYKIAALVFYSCIFIIGLFVNIXALWVFSCXXKKRXXVXIYMMNVALVDLIFIMXLPFRMFYYAKDEWPFGEYFCQILGALXVFYPSIALWLLAFISADRYMAIVQPKYAKELKNXCKAVLACVGVWIMXLXXXXPLLLLYKDPDKDSXPAXCLKISDIIYLKAVNVLNLXRLXFFFLIPLFIMIGCYLVIIHNLLHGRXSKLKPKVKEKSIRIIIXLLVQVLVCFMPFHICFAFLMLGXGENSYNPWGAFXXFLMNLSXCLDVILYYIVSKQFQARVISVMLYRNYLRSMRRKSFRSGSLRSLSNINSEML

SEQ ID NO: 11298 - protein, 440 aa, Homo sapiens
  MOD_RES (12)..(12): Selenocysteine
  MOD_RES (24)..(24): Selenocysteine
  MOD_RES (32)..(32): Selenocysteine
  MOD_RES (101)..(101): Selenocysteine
  MOD_RES (103)..(103): Selenocysteine
  MOD_RES (107)..(107): Selenocysteine
  MOD_RES (112)..(112): Selenocysteine
  MOD_RES (121)..(121): Selenocysteine
  MOD_RES (131)..(131): Selenocysteine
  MOD_RES (210)..(211): Selenocysteine
  MOD_RES (267)..(267): Selenocysteine
  MOD_RES (284)..(284): Selenocysteine
  MOD_RES (288)..(288): Selenocysteine
  MOD_RES (297)..(297): Selenocysteine
  MOD_RES (346)..(346): Selenocysteine
  MOD_RES (351)..(351): Selenocysteine
  MOD_RES (359)..(359): Selenocysteine
  MOD_RES (391)..(391): Selenocysteine
  MOD_RES (425)..(425): Selenocysteine
  MOD_RES (429)..(429): Selenocysteine
MGGLRLLAVALXCCWWPQGSQGKXLRGSFSSXAAQDAQGQRIGHFEFHGDHALLCVRINNIAVAVGKEAKLYLFQAQEWLKLQQSSHGYSCSEKLSKAQLXMXMNQXEHNLXVSQIPSPQXWHVFYADKYXCQDDKENSQVEDIPFEMVLLNPDAEGNPFDHFSAGESGLHEFFFLLVLVYFVIACIYAQSLWQAIKKGGPMHMILKVLXXALLLQAGSALANYIHFSSYSKDGIGVPFMGSLAEFFDIASQIQMLYLLLSLCMGWXIVRMKKSQSRPLQWDSXPASXGIAVFIVMXQSVLLLWEQFEDISHHSYHSHHNLAGILLIVLRICLALSLGCGLYQIIXVERSXLKREFYIXFAKGCILWFLCHPVLACISVIFSDYQRDKVIXIGVILCQSVSMVILYRLFLSHSLYWEVSSLSSVXLPLXISSGHKSRPHF

SEQ ID NO: 11299 - protein, 196 aa, Homo sapiens
  MOD_RES (39)..(39): Selenocysteine
  MOD_RES (47)..(47): Selenocysteine
  MOD_RES (85)..(85): Selenocysteine
  MOD_RES (89)..(89): Selenocysteine
  MOD_RES (98)..(98): Selenocysteine
  MOD_RES (121)..(121): Selenocysteine
  MOD_RES (139)..(139): Selenocysteine
  MOD_RES (153)..(153): Selenocysteine
  MOD_RES (159)..(159): Selenocysteine
  MOD_RES (183)..(183): Selenocysteine
  MOD_RES (186)..(186): Selenocysteine
  MOD_RES (189)..(189): Selenocysteine
MISEGGWGWQGWGRSQGLRPAPCSWVSRMVSPPAAIQEXQLHFLADXLPSPLSILLPPHKQEELSQSQLLIADLLPASDLGNFQXSREXQSYQKAQPXPISFSPDHRKVSRDVIPGAALGXASSRCWQMLCPSPSVPGXRWGRPQWKLLNSVXGQSSDXVISQFSLAMSFPNFPVPQLRFLNXCSXDEXKKSSVNK

SEQ ID NO: 11300 - protein, 404 aa, Homo sapiens
  MOD_RES (16)..(16): Selenocysteine
  MOD_RES (20)..(20): Selenocysteine
  MOD_RES (30)..(30): Selenocysteine
  MOD_RES (39)..(39): Selenocysteine
  MOD_RES (51)..(51): Selenocysteine
  MOD_RES (114)..(114): Selenocysteine
  MOD_RES (118)..(118): Selenocysteine
  MOD_RES (129)..(129): Selenocysteine
  MOD_RES (154)..(154): Selenocysteine
  MOD_RES (156)..(156): Selenocysteine
  MOD_RES (210)..(210): Selenocysteine
  MOD_RES (213)..(213): Selenocysteine
  MOD_RES (222)..(223): Selenocysteine
  MOD_RES (235)..(235): Selenocysteine
  MOD_RES (241)..(241): Selenocysteine
  MOD_RES (277)..(277): Selenocysteine
  MOD_RES (282)..(282): Selenocysteine
  MOD_RES (286)..(286): Selenocysteine
  MOD_RES (344)..(344): Selenocysteine
  MOD_RES (348)..(348): Selenocysteine
  MOD_RES (357)..(357): Selenocysteine
  MOD_RES (364)..(364): Selenocysteine
  MOD_RES (392)..(392): Selenocysteine
  MOD_RES (398)..(398): Selenocysteine
  MOD_RES (402)..(402): Selenocysteine
MSVKPSWGPGPSEGVXAVPXSDLGEIHNWXELLDLFNHXLSECHVELSQSXKRVVLFALYLAMFVVGLVENLLVICVNWRGSGRAGLMNLYILNMAIADLGIVLSLPVWMLEVXLDYXWLWGSFSCRFXHYFYFVNMYSSIFFLVCLSVDRYVXLXSASPSWQRYQHRVRRAMCAGIWVLSAIIPLPEVVHIQLVEGPEPMCLFMAPFEXYSXWALAVALSXXILGFLLPFPLIXVFNVLXACRLRQPGQPKSRRHCLLLCAYVAVFVMCWLPYHVXLLLLXLHGXHISLHCHLVHLLYFFYDVIDCFSMLHCVINPILYNFLSPHFRGRLLNAVVHYLPKDQXKAGXCASSSSCSXQHSIIIXKGDSQPAAAAPHPEPSLSFQAHHLLPNXSPISPXQPLXPS

SEQ ID NO: 11301 - protein, 55 aa, Homo sapiens
  MOD_RES (1)..(1): Any amino acid
  MOD_RES (8)..(8): Selenocysteine
  MOD_RES (15)..(15): Selenocysteine
  MOD_RES (43)..(43): Selenocysteine
  MOD_RES (49)..(49): Selenocysteine
  MOD_RES (53)..(53): Selenocysteine
XSSSSCSXQHSIIIXKGDSQPAAAAPHPEPSLSFQAHHLLPNXSPISPXQPLXPS

SEQ ID NO: 11302 - protein, 361 aa, Homo sapiens
  MOD_RES (10)..(10): Selenocysteine
  MOD_RES (15)..(15): Selenocysteine
  MOD_RES (29)..(29): Selenocysteine
  MOD_RES (66)..(67): Selenocysteine
  MOD_RES (71)..(71): Selenocysteine
  MOD_RES (81)..(82): Selenocysteine
  MOD_RES (86)..(86): Selenocysteine
  MOD_RES (107)..(107): Selenocysteine
  MOD_RES (115)..(115): Selenocysteine
  MOD_RES (123)..(123): Selenocysteine
  MOD_RES (163)..(163): Selenocysteine
  MOD_RES (180)..(180): Selenocysteine
  MOD_RES (190)..(190): Selenocysteine
  MOD_RES (226)..(226): Selenocysteine
  MOD_RES (233)..(233): Selenocysteine
  MOD_RES (245)..(245): Selenocysteine
  MOD_RES (258)..(258): Selenocysteine
  MOD_RES (293)..(293): Selenocysteine
  MOD_RES (347)..(347): Selenocysteine
  MOD_RES (349)..(349): Selenocysteine
MDIQMANNFXPPSAXPQGNDCDLYAHHSXARIVMPLHYSLVFIIGLVGNLLALVVIVQNRKKINSXXLYSXNLVISDILFXXALPXRIAYYAMGFDWRIGDALCRIXALVFYINXYAGVNFMXCLSIDRFIAVVHPLRYNKIKRIEHAKGVCIFVWILVFAQXLPLLINPMSKQEAERIXCMEYPNFEEXKSLPWILLGACFIGYVLPLIIILICYSQICCKLFRXAKQNPLXEKSGVNKKALNXIILIIVVFVLCFXPYHVAIIQHMIKKLRFSNFLECSQRHSFQISLHFXVCLMNFNCCMDPFIYFFACKGYKRKVMRMLKRQVSVSISSAVKSAPEENSREMXEXQMMIHSKSSNGK

SEQ ID NO: 11303 - protein, 59 aa, Homo sapiens
  MOD_RES (18)..(18): Selenocysteine
  MOD_RES (29)..(29): Selenocysteine
  MOD_RES (31)..(31): Selenocysteine
  MOD_RES (33)..(33): Selenocysteine
  MOD_RES (54)..(54): Selenocysteine
MVFAHRMDNSKPHLIIPXLLVPLQNRSCXEXAXPLPSQYLMELSEEHSWMSNQXDLHYV

SEQ ID NO: 11304 - protein, 415 aa, Homo sapiens
  MOD_RES (18)..(18): Selenocysteine
  MOD_RES (29)..(29): Selenocysteine
  MOD_RES (31)..(31): Selenocysteine
  MOD_RES (33)..(33): Selenocysteine
  MOD_RES (54)..(54): Selenocysteine
  MOD_RES (67)..(67): Selenocysteine
  MOD_RES (96)..(96): Selenocysteine
  MOD_RES (99)..(100): Selenocysteine
  MOD_RES (119)..(119): Selenocysteine
  MOD_RES (127)..(128): Selenocysteine
  MOD_RES (132)..(132): Selenocysteine
  MOD_RES (137)..(137): Selenocysteine
  MOD_RES (148)..(148): Selenocysteine
  MOD_RES (166)..(166): Selenocysteine
  MOD_RES (196)..(196): Selenocysteine
  MOD_RES (221)..(221): Selenocysteine
  MOD_RES (224)..(224): Selenocysteine
  MOD_RES (255)..(255): Selenocysteine
  MOD_RES (259)..(259): Selenocysteine
  MOD_RES (263)..(263): Selenocysteine
  MOD_RES (270)..(270): Selenocysteine
  MOD_RES (274)..(274): Selenocysteine
  MOD_RES (313)..(313): Selenocysteine
  MOD_RES (316)..(316): Selenocysteine
  MOD_RES (328)..(328): Selenocysteine
  MOD_RES (344)..(344): Selenocysteine
  MOD_RES (359)..(359): Selenocysteine
  MOD_RES (361)..(362): Selenocysteine
  MOD_RES (383)..(383): Selenocysteine
  MOD_RES (385)..(385): Selenocysteine
  MOD_RES (413)..(413): Selenocysteine
MVFAHRMDNSKPHLIIPXLLVPLQNRSCXEXAXPLPSQYLMELSEEHSWMSNQXDLHYVLKPGEVAXASIFFGILWLFSIFGNSLVCLVIHRSRRXQSXXNYFVVSMACADLLISVASXPFVLLQFXXGRWXLGSAXCKVVRYFQYLXPGVQIYVLLSICIDRFYXIVYPLSFKVSREKAKKMIAASWVFDAGFVXPVLFFYGSNWDSHCNYFLPSSWEGXAYXVIHFLVGFVIPSVLIILFYQKVIKYIWRIGXDGRXVRRXMNIVPRXKVKXIKMFLILNLLFLLSWLPFHVAQLWHPHEQDYKKSSLVFXAIXWISFSSSASKPXLYSIYNANFRRGMKEXFCMSSMKCYRSNAYXIXXSSRMAKKNYVGISEIPSMAKXIXKDSIYDSFDREAKEKKLAWPINSNPPNXFV

SEQ ID NO: 11305 - protein, 358 aa, Homo sapiens
  MOD_RES (18)..(18): Selenocysteine
  MOD_RES (21)..(22): Selenocysteine
  MOD_RES (25)..(25): Selenocysteine
  MOD_RES (48)..(48): Selenocysteine
  MOD_RES (82)..(82): Selenocysteine
  MOD_RES (86)..(86): Selenocysteine
  MOD_RES (92)..(92): Selenocysteine
  MOD_RES (98)..(98): Selenocysteine
  MOD_RES (108)..(108): Selenocysteine
  MOD_RES (142)..(142): Selenocysteine
  MOD_RES (182)..(182): Selenocysteine
  MOD_RES (189)..(189): Selenocysteine
  MOD_RES (201)..(201): Selenocysteine
  MOD_RES (216)..(216): Selenocysteine
  MOD_RES (245)..(245): Selenocysteine
  MOD_RES (255)..(255): Selenocysteine
  MOD_RES (274)..(274): Selenocysteine
  MOD_RES (284)..(284): Selenocysteine
  MOD_RES (301)..(301): Selenocysteine
  MOD_RES (307)..(307): Selenocysteine
  MOD_RES (349)..(349): Selenocysteine
MPSVSPAGPSAGAVPNAXAVXXVRXNASGLEVPLFHLFARLDEELHGXFPGLWLALMAVHGAIFLAGLVLNGLALYVFCCRXRAKXPSVIYXINLVVXDLLVGLSLPXRFAVYYGARGCLRCAFPHVLGYFLNMHCSILFLXCICVDRYLAIVRPEGSRRCRQPACARAVCAFVWLAAGAVXLSVLGVXGSRPCCRVFALXVLEFLLPLLVISVFXGRIMCALSRPGLLHQGRQRRVRAMQLLLXVLIIFLVCFXPFHARQVAVALWPDMPHHXSLVVYHVAVXLSSLNSCMDPIVYCFVXSGFQAXVRGLFGQHGEREPSSGDVVSMHRSSKGSGRHHILSAGPHALXQALANGPEA

SEQ ID NO: 11306 - protein, 349 aa, Homo sapiens
  MOD_RES (4)..(4): Selenocysteine
  MOD_RES (24)..(24): Selenocysteine
  MOD_RES (39)..(39): Selenocysteine
  MOD_RES (63)..(64): Selenocysteine
  MOD_RES (70)..(70): Selenocysteine
  MOD_RES (101)..(101): Selenocysteine
  MOD_RES (132)..(132): Selenocysteine
  MOD_RES (136)..(136): Selenocysteine
  MOD_RES (139)..(139): Selenocysteine
  MOD_RES (142)..(142): Selenocysteine
  MOD_RES (158)..(158): Selenocysteine
  MOD_RES (187)..(187): Selenocysteine
  MOD_RES (192)..(192): Selenocysteine
  MOD_RES (210)..(210): Selenocysteine
  MOD_RES (222)..(222): Selenocysteine
  MOD_RES (239)..(239): Selenocysteine
  MOD_RES (258)..(258): Selenocysteine
  MOD_RES (278)..(278): Selenocysteine
  MOD_RES (289)..(290): Selenocysteine
  MOD_RES (324)..(324): Selenocysteine
  MOD_RES (330)..(331): Selenocysteine
  MOD_RES (337)..(337): Selenocysteine
MNSXLDGNQSSHPFCLLAFGYLEXVNFCLLEVLIIVFLXVLIISGNIIVIFVFHCAPLLNHHXXSYFIQXMAYADLFVGVSCVVPSLSLLHHPLPVEESLXCQIFGFVVSVLKSVSMASLACISIDRYIAIXKPLXYNXLVXPWRLRLCIFLIWLYSXLVFLPSFFHWGKPGYHGDVFQWCAESWHXDSYFXLFIVMMLYAPAALIVCFXYFNIFRICQQHXKDISERQARFSSQSGEXGEVQACPDKRYAMVLFRIXSVFYILWLPYIIYFLLESSXGHSNRFASFLXXWLAISNSFCNCVIYSLSNSVFQRGLKRLSGAMCXSCASQXXANDPYXVRSKGPLNGCHI

SEQ ID NO: 11307 - protein, 433 aa, Homo sapiens
  MOD_RES (18)..(18): Selenocysteine
  MOD_RES (28)..(28): Selenocysteine
  MOD_RES (45)..(45): Selenocysteine
  MOD_RES (61)..(61): Selenocysteine
  MOD_RES (81)..(81): Selenocysteine
  MOD_RES (99)..(99): Selenocysteine
  MOD_RES (111)..(111): Selenocysteine
  MOD_RES (129)..(129): Selenocysteine
  MOD_RES (137)..(137): Selenocysteine
  MOD_RES (153)..(153): Selenocysteine
  MOD_RES (189)..(189): Selenocysteine
  MOD_RES (194)..(194): Selenocysteine
  MOD_RES (200)..(200): Selenocysteine
  MOD_RES (205)..(205): Selenocysteine
  MOD_RES (223)..(223): Selenocysteine
  MOD_RES (230)..(230): Selenocysteine
  MOD_RES (232)..(232): Selenocysteine
  MOD_RES (244)..(244): Selenocysteine
  MOD_RES (248)..(248): Selenocysteine
  MOD_RES (259)..(259): Selenocysteine
  MOD_RES (263)..(264): Selenocysteine
  MOD_RES (269)..(269): Selenocysteine
  MOD_RES (286)..(286): Selenocysteine
  MOD_RES (321)..(321): Selenocysteine
  MOD_RES (327)..(327): Selenocysteine
  MOD_RES (334)..(335): Selenocysteine
  MOD_RES (359)..(360): Selenocysteine
  MOD_RES (370)..(370): Selenocysteine
  MOD_RES (415)..(415): Selenocysteine
  MOD_RES (432)..(432): Selenocysteine
MCFSPILEINMQSESNIXVRDDIDDINXNMYQPLSYPLSFQVSLXGFLMLEIVLGLGSNLXVLVLYCMKSNLINSVSNIIXMNLHVLDVIICVGCIPLXIVILLLSLESNXALICCFHEACVSFASVSXAINVFAIXLDRYDISVKPANRILXMGRAVMLMISIWIFSFFSFLIPFIEVNFFSLQSGNXWENKXLLCVSXNEYYXELGMYYHLLVQIPIFFFXVVVMLIXYXKILQALNIRIGXRFSXGQKKKARKKKXISLXXQHEAXDMSQSSGGRNVVFGVRXSVSVIIALRRAVKRHRERRERQKRVFRMSLLIISXFLLCWXPISVLNXXILCLGPSDLLVKLRLCFLVMAYGXXIFHPLLYAFXRQKFQKVLKSKMKKRVVSIVEADPLPNNAVIHNSWIDPKRNKKIXFEDSEIREKCLVPQVVXD

SEQ ID NO: 11308 - protein, 361 aa, Homo sapiens
  MOD_RES (4)..(4): Selenocysteine
  MOD_RES (76)..(76): Selenocysteine
  MOD_RES (91)..(91): Selenocysteine
  MOD_RES (122)..(122): Selenocysteine
  MOD_RES (152)..(152): Selenocysteine
  MOD_RES (210)..(210): Selenocysteine
  MOD_RES (218)..(218): Selenocysteine
  MOD_RES (252)..(252): Selenocysteine
  MOD_RES (290)..(290): Selenocysteine
  MOD_RES (293)..(293): Selenocysteine
  MOD_RES (326)..(326): Selenocysteine
  MOD_RES (356)..(356): Selenocysteine
MAPXEPWSPSPGSAPWDYSGLDGLEELELCPAGDLPYGYVYIPALYLAAFAVGLLGNAFVVWLLAGRRGPRRLVDXFVLHLAAADLGFVLXLPLWAAAAALGGRWPFGDGLCKLSSFALAGXRCAGALLLAGMSVDRYLAVVKLLEARPLRXPRCALASCCGVWAVALLAGLPSLVYRGLQPLPGGQDSQCGEEPSHAFQGLSLLLLLLXFVLPLVVXLFCYCRISRRLRRPPHVGRARRNSLRIIFAIESXFVGSWLPFSALRAVFHLARLGALPLPCPLLLALRWGLXIAXCLAFVNSCANPLIYLLLDRSFRARALDGACGRXGRLARRISSASSLSRDDSSVFRCRAQAANXASASW

SEQ ID NO: 11309 - protein, 337 aa, Homo sapiens
  MOD_RES (15)..(15): Selenocysteine
  MOD_RES (45)..(45): Selenocysteine
  MOD_RES (49)..(49): Selenocysteine
  MOD_RES (56)..(56): Selenocysteine
  MOD_RES (63)..(63): Selenocysteine
  MOD_RES (87)..(87): Selenocysteine
  MOD_RES (130)..(130): Selenocysteine
  MOD_RES (136)..(136): Selenocysteine
  MOD_RES (157)..(157): Selenocysteine
  MOD_RES (173)..(173): Selenocysteine
  MOD_RES (191)..(191): Selenocysteine
  MOD_RES (210)..(210): Selenocysteine
  MOD_RES (213)..(213): Selenocysteine
  MOD_RES (240)..(240): Selenocysteine
  MOD_RES (245)..(245): Selenocysteine
  MOD_RES (249)..(249): Selenocysteine
  MOD_RES (260)..(260): Selenocysteine
  MOD_RES (268)..(268): Selenocysteine
  MOD_RES (324)..(324): Selenocysteine
MNSWDAGLAGLLVGXMGVSLLSNALVLLCLLHSADIRRQAPALFXLNLXCGNLLCXVVNMPLXLAGVVAQRQPAGDRLCRLAAFLDXFLAANSMLSMAALSIDRWVAVVFPLSYRAKMRLRDAALMVAYXWLHALXFPAAALALSWLGFHQLYASCXLCSRRPDERLRFAVFXGAFHALSFLLSFVVLCCXYLKVLKVARFHCKRIDVIXMQXLVLLVDLHPSVRERCLEEQKRRRQRAXKKISXFIGXFLVCFAPYVIXRLVELFSXVPIGSHWGVLSKCLAYSKAASDPFVYSLLRHQYRKSCKEILNRLLHRRSIHSSGLXGDSHSQNILPVSE

SEQ ID NO: 11310 - protein, 375 aa, Homo sapiens
  MOD_RES (24)..(24): Selenocysteine
  MOD_RES (119)..(119): Selenocysteine
  MOD_RES (197)..(197): Selenocysteine
  MOD_RES (228)..(228): Selenocysteine
  MOD_RES (235)..(235): Selenocysteine
  MOD_RES (243)..(243): Selenocysteine
  MOD_RES (251)..(251): Selenocysteine
  MOD_RES (278)..(278): Selenocysteine
  MOD_RES (290)..(290): Selenocysteine
  MOD_RES (321)..(321): Selenocysteine
  MOD_RES (327)..(327): Selenocysteine
  MOD_RES (361)..(362): Selenocysteine
  MOD_RES (365)..(365): Selenocysteine
MANASEPGGSGGGEAAALGLKLAXLSLLLCVSLAGNVLFALLIVRERSLHRAPYYLLLDLCLADGLRALACLPAVMLAARRAAAAAGAPPGALGCKLLAFLAALFCFHAAFLLLGVGVXRYLAIAHHRFYAERLAGWPCAAMLVCAAWALALAAAFPPVLDGGGDDEDAPCALEQRPDGAPGALGFLLLLAVVVGAXHLVYLRLLFFIHDRRKMRPARLVPAVSHDWXFHGPGAXGQAAANWXAGFGRGPXPPALVGIRPAGPGRGARRLLVLEEFKXEKRLCKMFYAVXLLFLLLWGPYVVASYLRVLVRPGAVPQAYLXASVWLXFAQAGINPVVCFLFNRELRDCFRAQFPCCQSPRXXQAXHPCDLKGIGL

SEQ ID NO: 11311 - protein, 330 aa, Homo sapiens
  MOD_RES (31)..(31): Selenocysteine
  MOD_RES (52)..(52): Selenocysteine
  MOD_RES (68)..(68): Selenocysteine
  MOD_RES (121)..(121): Selenocysteine
  MOD_RES (131)..(131): Selenocysteine
  MOD_RES (143)..(143): Selenocysteine
  MOD_RES (148)..(149): Selenocysteine
  MOD_RES (151)..(151): Selenocysteine
  MOD_RES (153)..(153): Selenocysteine
  MOD_RES (182)..(183): Selenocysteine
  MOD_RES (242)..(242): Selenocysteine
  MOD_RES (248)..(248): Selenocysteine
  MOD_RES (264)..(264): Selenocysteine
  MOD_RES (279)..(279): Selenocysteine
  MOD_RES (282)..(282): Selenocysteine
  MOD_RES (287)..(287): Selenocysteine
MMWGAGSPLAWLSAGSGNVNVSSVGPAEGPXGPAAPLPSPKAWDVVLCISGXLVSCENALVVAIIVGXPAFRAPMFLLVGSLAVADLLAGLGLVLHFAAVFCIGSAEMSLVLVGVLAMAFXASIGSLLAIXVDRYLSLYNALXYYSEXXVXRXYVMLALVWGGALGLGLLPVLAWNCLDGLXXCGVVYPLSKNHLVVLAIAFFMVFGIMLQLYAQICRIVCRHAQQIALQRHLLPASHYVAXRKGIAXLAVVLGAFAACWLPFXVYCLLGDAHSPPLYXYLXLLPAXYNSMINPIIYAFRNQDVQKVLWAVCCCCSSSKIPFRSRSPSDV

SEQ ID NO: 11312 - protein, 319 aa, Homo sapiens
  MOD_RES (11)..(11): Selenocysteine
  MOD_RES (15)..(15): Selenocysteine
  MOD_RES (38)..(38): Selenocysteine
  MOD_RES (146)..(146): Selenocysteine
  MOD_RES (160)..(160): Selenocysteine
  MOD_RES (225)..(225): Selenocysteine
  MOD_RES (263)..(263): Selenocysteine
  MOD_RES (267)..(267): Selenocysteine
  MOD_RES (271)..(271): Selenocysteine
  MOD_RES (288)..(288): Selenocysteine
  MOD_RES (299)..(299): Selenocysteine
MPFPNCSAPSXVVAXAVGVLLGLECGLGLLGNAVALWXFLFRVRVWKPYAVYLLNLALADLLLAACLPFLAAFYLSLQAWHLGRVGCWALHFLLDLSRSVGMAFLAAVALDRYLRVVHPRLKVNLLSPQAALGVSGLVWLLMVALXCPGLLISEAAQNSXRCHSFYSRADGSFSIIWQEALSCLQFVLPFGLIVFCNAGIIRALQKRLREPEKQPKLQRAQALVXLVVVLFALCFLPCFLARVLMHIFQNLGSCRALCAVAHXSDVXGSLXYLHSVLNPVVYCFSSPXFRSSYRRVFHXLRGKGQAAEPPDFNPRDSYS

SEQ ID NO: 11313 - protein, 356 aa, Homo sapiens
  MOD_RES (8)..(8): Selenocysteine
  MOD_RES (20)..(20): Selenocysteine
  MOD_RES (46)..(46): Selenocysteine
  MOD_RES (68)..(68): Selenocysteine
  MOD_RES (75)..(75): Selenocysteine
  MOD_RES (78)..(78): Selenocysteine
  MOD_RES (119)..(119): Selenocysteine
  MOD_RES (154)..(154): Selenocysteine
  MOD_RES (181)..(182): Selenocysteine
  MOD_RES (189)..(189): Selenocysteine
  MOD_RES (201)..(201): Selenocysteine
  MOD_RES (217)..(217): Selenocysteine
  MOD_RES (234)..(234): Selenocysteine
  MOD_RES (332)..(332): Selenocysteine
MNGVSEGXRGCSDRQPGVLXRDRSCSRKMNSSGCLSEEVGSLRPLXVVILSASIVVGVLGNGLVLWMXVFRMARXVSXVCFFHLALADFMLSLSLPIAMYYIVSRQWLLGEWACKLYIXFVFLSYFASNCLLVFISVDRCISVLYPVWALNHRXVQRASWLAFGVWLLAAALCSAHLKFRXXRKWNGCXHCYLAFNSDNEXAQIWIEGVVEGHIIGXIGHFLLGFLGPLAIIGXCAHLIRAKLLREGWVHANRPKRLLLVLVSAFFIFWSPFNVVLLVHLWRRVMLKEIYHPRMLLILQASFALGCVNSSLNPFLYVFVGRDFQEKFFQSLXSALARAFGEEEFLSSCPRGNAPRE

SEQ ID NO: 11314 - protein, 333 aa, Homo sapiens
  MOD_RES (7)..(7): Selenocysteine
  MOD_RES (15)..(15): Selenocysteine
  MOD_RES (21)..(21): Selenocysteine
  MOD_RES (44)..(44): Selenocysteine
  MOD_RES (46)..(46): Selenocysteine
  MOD_RES (61)..(61): Selenocysteine
  MOD_RES (64)..(64): Selenocysteine
  MOD_RES (78)..(78): Selenocysteine
  MOD_RES (86)..(86): Selenocysteine
  MOD_RES (98)..(98): Selenocysteine
  MOD_RES (107)..(107): Selenocysteine
  MOD_RES (114)..(114): Selenocysteine
  MOD_RES (130)..(130): Selenocysteine
  MOD_RES (141)..(141): Selenocysteine
  MOD_RES (169)..(169): Selenocysteine
  MOD_RES (178)..(178): Selenocysteine
  MOD_RES (187)..(187): Selenocysteine
  MOD_RES (249)..(249): Selenocysteine
  MOD_RES (270)..(271): Selenocysteine
  MOD_RES (280)..(280): Selenocysteine
  MOD_RES (284)..(284): Selenocysteine
  MOD_RES (287)..(288): Selenocysteine
  MOD_RES (292)..(292): Selenocysteine
  MOD_RES (297)..(297): Selenocysteine
  MOD_RES (321)..(321): Selenocysteine
  MOD_RES (331)..(331): Selenocysteine
  MOD_RES (333)..(333): Selenocysteine
MDLINSXDYLINASXLVRNSXQFLAPASKMIIALSLYISSIIGXIXNGLYLWVLRFKMKQXVNXLLFFHLILSYFISXMILPFMAXSQLQDNHWNFGXALCKVFNGXLSLGMFXSVFFLSAIGLDRYLLXLHPVWSQQHRXPRWASSIVLGVWISAAALSIPYLIFREXHHDRKGKVXCQNNYAVSXNWESKEMQASRQWIHVACFISRFLLGFLLPFFIIIFCYERVASKVKERSLFKSSKPFKVMMXAIISFFVCWMPYHIHQGLLLXXNQSLLLELXLILXVLXXSFNXIFSPXLYLFVGENFKKVFKKSILALFESXFSEDSSVERXQX

SEQ ID NO: 11315 - protein, 334 aa, Homo sapiens
  MOD_RES (8)..(8): Selenocysteine
  MOD_RES (11)..(12): Selenocysteine
  MOD_RES (74)..(74): Selenocysteine
  MOD_RES (85)..(85): Selenocysteine
  MOD_RES (120)..(121): Selenocysteine
  MOD_RES (141)..(141): Selenocysteine
  MOD_RES (146)..(146): Selenocysteine
  MOD_RES (155)..(155): Selenocysteine
  MOD_RES (216)..(217): Selenocysteine
  MOD_RES (229)..(229): Selenocysteine
  MOD_RES (261)..(261): Selenocysteine
  MOD_RES (309)..(309): Selenocysteine
  MOD_RES (321)..(321): Selenocysteine
  MOD_RES (334)..(334): Selenocysteine
MDEKLLSXVLXXSYSVIFIVGLVGNIIALYVFLGIHRKRNSIQIYLLNVAIADLLLIFCLPFRIMYHINQNKWXLGVILCKVVGXLFYMNMYISIILLGFISLDRYIKINRSIQQRKAIXXKQSIYVCCIVWMLALGGFLXMIILXLKKGGHNSXMCFHYRDKHNAKGEAIFNFILVVMFWLIFLLIILSYIKIGKNLLRISKRRSKFPNSGKYAXXARNSFIVLIIFXICFVPYHAFRFIYISSQLNVSSCYWKEIVHKXNEIMLVLSSFNSCLDPVMYFLMSSNIRKIMCQLLFRRFQGEPSRSESXSEFKPGYSLHDXSVAVKIQSSSKSX

SEQ ID NO: 11316 - protein, 381 aa, Homo sapiens
  MOD_RES (5)..(5): Selenocysteine
  MOD_RES (7)..(7): Selenocysteine
  MOD_RES (9)..(11): Selenocysteine
  MOD_RES (27)..(27): Selenocysteine
  MOD_RES (40)..(40): Selenocysteine
  MOD_RES (44)..(45): Selenocysteine
  MOD_RES (55)..(55): Selenocysteine
  MOD_RES (58)..(59): Selenocysteine
  MOD_RES (121)..(121): Selenocysteine
  MOD_RES (132)..(132): Selenocysteine
  MOD_RES (167)..(168): Selenocysteine
  MOD_RES (188)..(188): Selenocysteine
  MOD_RES (193)..(193): Selenocysteine
  MOD_RES (202)..(202): Selenocysteine
  MOD_RES (263)..(264): Selenocysteine
  MOD_RES (276)..(276): Selenocysteine
  MOD_RES (308)..(308): Selenocysteine
  MOD_RES (356)..(356): Selenocysteine
  MOD_RES (368)..(368): Selenocysteine
  MOD_RES (381)..(381): Selenocysteine
MRSHXIXMXXXSVSSWPYSSHRMRFIXNHSDQPPQNFSAXPNVXXCPMDEKLLSXVLXXSYSVIFIVGLVGNIIALYVFLGIHRKRNSIQIYLLNVAIADLLLIFCLPFRIMYHINQNKWXLGVILCKVVGXLFYMNMYISIILLGFISLDRYIKINRSIQQRKAIXXKQSIYVCCIVWMLALGGFLXMIILXLKKGGHNSXMCFHYRDKHNAKGEAIFNFILVVMFWLIFLLIILSYIKIGKNLLRISKRRSKFPNSGKYAXXARNSFIVLIIFXICFVPYHAFRFIYISSQLNVSSCYWKEIVHKXNEIMLVLSSFNSCLDPVMYFLMSSNIRKIMCQLLFRRFQGEPSRSESXSEFKPGYSLHDXSVAVKIQSSSKSX

SEQ ID NO: 11317 - protein, 340 aa, Homo sapiens
  MOD_RES (10)..(10): Selenocysteine
  MOD_RES (31)..(31): Selenocysteine
  MOD_RES (35)..(35): Selenocysteine
  MOD_RES (38)..(38): Selenocysteine
  MOD_RES (45)..(45): Selenocysteine
  MOD_RES (84)..(84): Selenocysteine
  MOD_RES (86)..(86): Selenocysteine
  MOD_RES (91)..(91): Selenocysteine
  MOD_RES (103)..(103): Selenocysteine
  MOD_RES (114)..(114): Selenocysteine
  MOD_RES (117)..(117): Selenocysteine
  MOD_RES (129)..(129): Selenocysteine
  MOD_RES (139)..(139): Selenocysteine
  MOD_RES (197)..(197): Selenocysteine
  MOD_RES (227)..(227): Selenocysteine
  MOD_RES (235)..(235): Selenocysteine
  MOD_RES (243)..(243): Selenocysteine
  MOD_RES (269)..(269): Selenocysteine
  MOD_RES (284)..(284): Selenocysteine
  MOD_RES (292)..(292): Selenocysteine
  MOD_RES (338)..(338): Selenocysteine
MLSGSRAVPXPHRGSEELLKYMLHSPCVSLXMNGXYNXCGSSDLXWPPAIKLGFYAYLGVLLVLGLLLNSLALWVFCCRMQQWXEXRIYMXNLAVADLCLLCXLPFVLHSLRDXSDXPLCQLSQGIYLXNRYMSISLVXAIAVDRYVAVRHPLRARGLRSPRQAAAVCAVLWVLVIGSLVARWLLGIQEGGFCFRSXRHNFNSMAFPLLGFYLPLAVVVFCSLKVVXALAQRPPXDVGQAEAXRKAARMVWANLLVFVVCFLPLHVGLXVRLAVGWNACALLEXIRRALYIXSKLSDANCCLDAICYYYMAKEFQEASALAVAPSAKAHKSQDSLCVXLA

SEQ ID NO: 11318 - protein, 309 aa, Homo sapiens
  MOD_RES (4)..(4): Selenocysteine
  MOD_RES (7)..(7): Selenocysteine
  MOD_RES (14)..(14): Selenocysteine
  MOD_RES (53)..(53): Selenocysteine
  MOD_RES (55)..(55): Selenocysteine
  MOD_RES (60)..(60): Selenocysteine
  MOD_RES (72)..(72): Selenocysteine
  MOD_RES (83)..(83): Selenocysteine
  MOD_RES (86)..(86): Selenocysteine
  MOD_RES (98)..(98): Selenocysteine
  MOD_RES (108)..(108): Selenocysteine
  MOD_RES (166)..(166): Selenocysteine
  MOD_RES (196)..(196): Selenocysteine
  MOD_RES (204)..(204): Selenocysteine
  MOD_RES (212)..(212): Selenocysteine
  MOD_RES (238)..(238): Selenocysteine
  MOD_RES (253)..(253): Selenocysteine
  MOD_RES (261)..(261): Selenocysteine
  MOD_RES (307)..(307): Selenocysteine
MNGXYNXCGSSDLXWPPAIKLGFYAYLGVLLVLGLLLNSLALWVFCCRMQQWXEXRIYMXNLAVADLCLLCXLPFVLHSLRDXSDXPLCQLSQGIYLXNRYMSISLVXAIAVDRYVAVRHPLRARGLRSPRQAAAVCAVLWVLVIGSLVARWLLGIQEGGFCFRSXRHNFNSMAFPLLGFYLPLAVVVFCSLKVVXALAQRPPXDVGQAEAXRKAARMVWANLLVFVVCFLPLHVGLXVRLAVGWNACALLEXIRRALYIXSKLSDANCCLDAICYYYMAKEFQEASALAVAPSAKAHKSQDSLCVXLA

SEQ ID NO: 11319 - protein, 613 aa, Homo sapiens
  MOD_RES (38)..(38): Selenocysteine
  MOD_RES (47)..(47): Selenocysteine
  MOD_RES (114)..(114): Selenocysteine
  MOD_RES (133)..(133): Selenocysteine
  MOD_RES (140)..(140): Selenocysteine
  MOD_RES (172)..(172): Selenocysteine
  MOD_RES (200)..(200): Selenocysteine
  MOD_RES (211)..(211): Selenocysteine
  MOD_RES (241)..(241): Selenocysteine
  MOD_RES (255)..(255): Selenocysteine
  MOD_RES (274)..(274): Selenocysteine
  MOD_RES (324)..(324): Selenocysteine
  MOD_RES (348)..(349): Selenocysteine
  MOD_RES (351)..(351): Selenocysteine
  MOD_RES (364)..(364): Selenocysteine
  MOD_RES (379)..(380): Selenocysteine
  MOD_RES (430)..(430): Selenocysteine
  MOD_RES (437)..(437): Selenocysteine
  MOD_RES (455)..(455): Selenocysteine
  MOD_RES (458)..(458): Selenocysteine
  MOD_RES (460)..(460): Selenocysteine
  MOD_RES (465)..(465): Selenocysteine
  MOD_RES (477)..(477): Selenocysteine
  MOD_RES (493)..(493): Selenocysteine
  MOD_RES (498)..(498): Selenocysteine
  MOD_RES (515)..(515): Selenocysteine
  MOD_RES (520)..(520): Selenocysteine
  MOD_RES (526)..(526): Selenocysteine
  MOD_RES (545)..(545): Selenocysteine
  MOD_RES (577)..(577): Selenocysteine
  MOD_RES (579)..(579): Selenocysteine
  MOD_RES (588)..(589): Selenocysteine
  MOD_RES (598)..(598): Selenocysteine
  MOD_RES (605)..(605): Selenocysteine
  MOD_RES (611)..(611): Selenocysteine
MRAPGALLARMSRLLLLLLLKVSASSALGVAPASRNEXCLGESCAPXVIQRRGRDAWGPGNSARDVLRARAPREEQGAAFLAGPSWDLPAAPGRDPAAGRGAEASAAGPPGPPXRPPGPWRWKGARGQEPSEXLGRGNPXALQLFLQISEEEEKGPRGAGISGRSQEQSVKXVPGASDLFYWPRRAGKLQGSHHKPLSKXANGLAGHEGWXIALPGRALAQNGSLGEGIHEPGGPRRGNSXNRRVRLKNPFYPLXQESYGAYAVMCLSVVIFGXGIIGNLAVMCIVCHNYYMRSISNSLLANLAFWDFLIIFFCLPLVIFHELXKKWLLEDFSCKIVPYIEVASLGVXXFXLCALCIDRFRAAXNVQMYYEMIENCSSXXAKLAVIWVGALLLALPEVVLRQLSKEDLGFSGRAPAERCIIKISPDLPDXIYVLALXYDSARLWWYFGCYFCLPXLFXIXCSLVXARKIRKAEKACXRGNKRQIQLESQMNCXVVALXILYGFCIIPENICNIVXAYMAXGVSQQXMDLLNIISQFLLFFKSCVXPVLLFCLCKPFSRAFMECCCCCCEECIQKSSXVXSDDNDNEYXXELELSPFSXIRREMSXFASVGXHC

SEQ ID NO: 11320 - protein, 481 aa, Homo sapiens
  MOD_RES (37)..(37): Selenocysteine
  MOD_RES (48)..(48): Selenocysteine
  MOD_RES (79)..(79): Selenocysteine
  MOD_RES (85)..(85): Selenocysteine
  MOD_RES (95)..(95): Selenocysteine
  MOD_RES (107)..(107): Selenocysteine
  MOD_RES (124)..(124): Selenocysteine
  MOD_RES (193)..(193): Selenocysteine
  MOD_RES (217)..(218): Selenocysteine
  MOD_RES (233)..(233): Selenocysteine
  MOD_RES (235)..(235): Selenocysteine
  MOD_RES (261)..(261): Selenocysteine
  MOD_RES (279)..(279): Selenocysteine
  MOD_RES (282)..(282): Selenocysteine
  MOD_RES (304)..(304): Selenocysteine
  MOD_RES (325)..(325): Selenocysteine
  MOD_RES (327)..(327): Selenocysteine
  MOD_RES (332)..(332): Selenocysteine
  MOD_RES (360)..(360): Selenocysteine
  MOD_RES (365)..(365): Selenocysteine
  MOD_RES (372)..(372): Selenocysteine
  MOD_RES (387)..(387): Selenocysteine
  MOD_RES (390)..(390): Selenocysteine
  MOD_RES (393)..(393): Selenocysteine
  MOD_RES (405)..(405): Selenocysteine
  MOD_RES (412)..(412): Selenocysteine
  MOD_RES (457)..(457): Selenocysteine
  MOD_RES (479)..(479): Selenocysteine
MRWLWPLAVSLAVILAVGLSRVSGGAPLHLGRHRAEXQEQQSRSKRGXEDEEAKGVQQYVPEEWAEYPRPIHPAGLQPXKPLVAXSPNPGKDGGXPDSGQELRGNLXGAPGQRLQIQNPLYPVXESSYSAYAIMLLALVVFAVGIVGNLSVMCIVWHSYYLKSAWNSILASLALWDFLVLFFCLPIVIFNEIXKQRLLGDVSCRAVPFMEVSSLGVXXFSLCALGIDRFHVAXSXLPKVRPIERCQSILAKLAVIWVGSMXLAVPELLLWQLAQEPAPXMGXLDSCIMKPSASLPESLYSLVMXYQNARMWWYFGCYFCLPILFXVXCQLVXWRVRGPPGRKSECRASKHEQCESQLNSXVVGLXVVYAFCXLPENVCNIVVAYLSXELXRQXLDLLGLINQFSXFFKGAIXPVLLLCICRPLGQAFLDCCCCCCCEECGGASEASAANGSDNKLKXEVSSSIYFHKPRESPPLLPLGXPC

SEQ ID NO: 11321 - protein, 300 aa, Homo sapiens
  MOD_RES (27)..(27): Selenocysteine
  MOD_RES (32)..(32): Selenocysteine
  MOD_RES (51)..(51): Selenocysteine
  MOD_RES (55)..(55): Selenocysteine
  MOD_RES (69)..(69): Selenocysteine
  MOD_RES (100)..(101): Selenocysteine
  MOD_RES (105)..(105): Selenocysteine
  MOD_RES (112)..(112): Selenocysteine
  MOD_RES (122)..(122): Selenocysteine
  MOD_RES (128)..(128): Selenocysteine
  MOD_RES (162)..(162): Selenocysteine
  MOD_RES (176)..(176): Selenocysteine
  MOD_RES (190)..(190): Selenocysteine
  MOD_RES (196)..(196): Selenocysteine
  MOD_RES (204)..(204): Selenocysteine
  MOD_RES (211)..(211): Selenocysteine
  MOD_RES (218)..(218): Selenocysteine
  MOD_RES (261)..(261): Selenocysteine
  MOD_RES (276)..(276): Selenocysteine
  MOD_RES (281)..(281): Selenocysteine
MASPSLPGSDCSQIIDHSHVPEFEVAXWIKIXLILVYLIIFVMGLLGNSAXIRVXQVLQKKGYLQKEVXDHMVSLACSDILVFLIGMPMEFYSIIWNPLXXSSYXLSCKLHXFLFEACSYAXLLHVLXLSFERYIAICHPFRYKAVSGPCQVKLLIGFVWVXSALVALPLLFAMGXEYPLVNVPSHRGLXCNRSSXRHHEQPEXSNMSICXNLSSRWXVFQSSIFGAFVVYLVVLLSVAFMCWNMMQVLMKSQKGSLAGGXRPPQLRKSESEESRXARRQXIIFLRLGFLPLWVCSLPDQ

SEQ ID NO: 11322 - protein, 453 aa, Homo sapiens
  MOD_RES (27)..(27): Selenocysteine
  MOD_RES (32)..(32): Selenocysteine
  MOD_RES (51)..(51): Selenocysteine
  MOD_RES (55)..(55): Selenocysteine
  MOD_RES (69)..(69): Selenocysteine
  MOD_RES (100)..(101): Selenocysteine
  MOD_RES (105)..(105): Selenocysteine
  MOD_RES (112)..(112): Selenocysteine
  MOD_RES (122)..(122): Selenocysteine
  MOD_RES (128)..(128): Selenocysteine
  MOD_RES (162)..(162): Selenocysteine
  MOD_RES (176)..(176): Selenocysteine
  MOD_RES (190)..(190): Selenocysteine
  MOD_RES (196)..(196): Selenocysteine
  MOD_RES (204)..(204): Selenocysteine
  MOD_RES (211)..(211): Selenocysteine
  MOD_RES (218)..(218): Selenocysteine
  MOD_RES (261)..(261): Selenocysteine
  MOD_RES (276)..(276): Selenocysteine
  MOD_RES (281)..(281): Selenocysteine
  MOD_RES (291)..(291): Selenocysteine
  MOD_RES (315)..(315): Selenocysteine
  MOD_RES (331)..(331): Selenocysteine
  MOD_RES (345)..(345): Selenocysteine
  MOD_RES (381)..(382): Selenocysteine
  MOD_RES (405)..(405): Selenocysteine
  MOD_RES (412)..(412): Selenocysteine
MASPSLPGSDCSQIIDHSHVPEFEVAXWIKIXLILVYLIIFVMGLLGNSAXIRVXQVLQKKGYLQKEVXDHMVSLACSDILVFLIGMPMEFYSIIWNPLXXSSYXLSCKLHXFLFEACSYAXLLHVLXLSFERYIAICHPFRYKAVSGPCQVKLLIGFVWVXSALVALPLLFAMGXEYPLVNVPSHRGLXCNRSSXRHHEQPEXSNMSICXNLSSRWXVFQSSIFGAFVVYLVVLLSVAFMCWNMMQVLMKSQKGSLAGGXRPPQLRKSESEESRXARRQXIIFLRLIVVXLAVCWMPNQIRRIMAAAKPKHDWXRSYFRAYMILLPFSEXFFYLSSVINPLLYXVSSQQFRRVFVQVLCCRLSLQHANHEKRLRVHAHSXXDSARFVQRPLLFASRRQSSARRXEKIFLSXFQSEAEPQSKSQSLSLESLEPNSGAKPANSAAENGFQEHEV

SEQ ID NO: 11323 - protein, 362 aa, Homo sapiens
  MOD_RES (5)..(5): Selenocysteine
  MOD_RES (34)..(34): Selenocysteine
  MOD_RES (69)..(69): Selenocysteine
  MOD_RES (99)..(99): Selenocysteine
  MOD_RES (133)..(133): Selenocysteine
  MOD_RES (144)..(144): Selenocysteine
  MOD_RES (166)..(166): Selenocysteine
  MOD_RES (214)..(214): Selenocysteine
  MOD_RES (275)..(275): Selenocysteine
  MOD_RES (322)..(322): Selenocysteine
  MOD_RES (325)..(325): Selenocysteine
  MOD_RES (328)..(328): Selenocysteine
  MOD_RES (334)..(334): Selenocysteine
  MOD_RES (339)..(339): Selenocysteine
  MOD_RES (345)..(345): Selenocysteine
MGNHXWEGCHVDSRVDHLFPPSLYIFVIGVGLPXNCLALWAAYRQVQQRNELGVYLMNLSIADLLYICXLPLWVDYFLHHDNWIHGPGSCKLFGFIFYXNIYISIAFLCCISVDRYLAVAHPLRFARLRRVKXAVAVSSVVWAXELGANSAPLFHDELFRDRYNHXFCFEKFPMEGWVAWMNLYRVFVGFLFPWALMLLSYRGILRAVRGSVSXERQEKAKIKRLALSLIAIVLVCFAPYHVLLLSRSAIYLGRPWDCGFEERVFSAYHSSLAFXSLNCVADPILYCLVNEGARSDVAKALHNLLRFLASDKPQEMANASLXLEXPLXSKRNSXAKAMXGSWAAXPPSQGDQVQLKMLPPAQ

SEQ ID NO: 11324 - protein, 346 aa, Homo sapiens
  MOD_RES (3)..(3): Selenocysteine
  MOD_RES (24)..(24): Selenocysteine
  MOD_RES (58)..(58): Selenocysteine
  MOD_RES (97)..(98): Selenocysteine
  MOD_RES (102)..(102): Selenocysteine
  MOD_RES (125)..(125): Selenocysteine
  MOD_RES (165)..(165): Selenocysteine
  MOD_RES (168)..(168): Selenocysteine
  MOD_RES (200)..(200): Selenocysteine
  MOD_RES (230)..(230): Selenocysteine
  MOD_RES (262)..(262): Selenocysteine
  MOD_RES (266)..(266): Selenocysteine
  MOD_RES (328)..(328): Selenocysteine
  MOD_RES (337)..(337): Selenocysteine
MDXGPDQSYFSGNHWFVFSVYLLXFLVGLPLNLLALVVFVGKLRCRPVAVDVLLLNLXASDLLLLLFLPFRMVEAANGMHWPLPFILCPLSGFIFFXXIYLXALFLAAVSIERFLSVAHPLWYKXRPRLGQAGLVSVACWLLASAHCSVVYVIEFSGDISHSQGXNGXCYLEFWKDQLAILLPVRLEMAVVLFVVPLIIXSYCYSRLVWILGRGGSHRRQRRVAGLVAAXLLNFLVCFGPYNVSHVVGYICGESPVWRIYVXLLSXLNSCVDPFVYYFSSSGFQADFHELLRRLCGLWGQWQQESSMELKEQKGGEEQRADRPAERKXSEHSQGCGXGGQVACAEN

SEQ ID NO: 11325 - protein, 372 aa, Homo sapiens
  MOD_RES (6)..(6): Selenocysteine
  MOD_RES (12)..(12): Selenocysteine
  MOD_RES (18)..(18): Selenocysteine
  MOD_RES (27)..(27): Selenocysteine
  MOD_RES (45)..(45): Selenocysteine
  MOD_RES (53)..(53): Selenocysteine
  MOD_RES (75)..(75): Selenocysteine
  MOD_RES (91)..(91): Selenocysteine
  MOD_RES (94)..(94): Selenocysteine
  MOD_RES (97)..(97): Selenocysteine
  MOD_RES (112)..(112): Selenocysteine
  MOD_RES (168)..(168): Selenocysteine
  MOD_RES (171)..(171): Selenocysteine
  MOD_RES (187)..(187): Selenocysteine
  MOD_RES (198)..(198): Selenocysteine
  MOD_RES (221)..(221): Selenocysteine
  MOD_RES (242)..(242): Selenocysteine
  MOD_RES (263)..(263): Selenocysteine
  MOD_RES (267)..(268): Selenocysteine
  MOD_RES (305)..(305): Selenocysteine
  MOD_RES (307)..(307): Selenocysteine
  MOD_RES (342)..(342): Selenocysteine
  MOD_RES (361)..(361): Selenocysteine
MACNSXSLEAYXYLLLNXSNASDSGSXQLPAPLRISLAIVMLLMXVVGFLGNXVVCIIVYQRPAMRSAINLLLAXLAFSDIMLSLCCMPFXAVXLIXVRWHFGDHFCRLSAXLYWFFVLEGVAILLIISVDRFLIIVQRQDKLNPRRAKVIIAVSWVLSFCIAGPSLXGWXLVEVPARAPQCVLGYXELPADRAYVVXLVVAVFFAPFGVMLCAYMCILNXVRKNAVRVHNQSDSLDLRQLXRAGLRRLQRQQQVSVDLSFKXKAFXXILILFVGFSLCWLPHSVYSLLSVFSQRFYCGSSFYAXSXCVLWLSYLKSVFNPIVYCWRIKKFREACIELLPQXFQILPKVPERIRRRIQPSXVYVCNENQSAV

SEQ ID NO: 11326 - protein, 617 aa, Homo sapiens
  MOD_RES (4)..(4): Selenocysteine
  MOD_RES (9)..(9): Selenocysteine
  MOD_RES (38)..(38): Selenocysteine
  MOD_RES (54)..(54): Selenocysteine
  MOD_RES (108)..(108): Selenocysteine
  MOD_RES (145)..(145): Selenocysteine
  MOD_RES (152)..(152): Selenocysteine
  MOD_RES (156)..(156): Selenocysteine
  MOD_RES (168)..(168): Selenocysteine
  MOD_RES (175)..(175): Selenocysteine
  MOD_RES (177)..(177): Selenocysteine
  MOD_RES (189)..(189): Selenocysteine
  MOD_RES (191)..(191): Selenocysteine
  MOD_RES (213)..(213): Selenocysteine
  MOD_RES (238)..(238): Selenocysteine
  MOD_RES (257)..(257): Selenocysteine
  MOD_RES (307)..(307): Selenocysteine
  MOD_RES (334)..(334): Selenocysteine
  MOD_RES (361)..(361): Selenocysteine
  MOD_RES (402)..(402): Selenocysteine
  MOD_RES (436)..(436): Selenocysteine
  MOD_RES (478)..(478): Selenocysteine
  MOD_RES (496)..(496): Selenocysteine
  MOD_RES (502)..(503): Selenocysteine
  MOD_RES (510)..(510): Selenocysteine
  MOD_RES (516)..(517): Selenocysteine
  MOD_RES (525)..(526): Selenocysteine
  MOD_RES (532)..(532): Selenocysteine
  MOD_RES (572)..(572): Selenocysteine
  MOD_RES (583)..(583): Selenocysteine
  MOD_RES (591)..(591): Selenocysteine
  MOD_RES (594)..(595): Selenocysteine
  MOD_RES (597)..(597): Selenocysteine
MGPXLAVPXPYGCIGCKLPQPEYPPALIIFMFCAMVIXIVVDLIGNSMVILAVXKNKKLRNSGNIFVVSLSVADMLVAIYPYPLMLHAMSIGGWDLSQLQCQMVGFIXGLSVVGSIFNIVAIAINRYCYICHSLQYERIFSVRNXCIYLVIXWIMXVLAVLPNMYIGXIEYDPRXYXCIFNYLNNPVFXVXIVCIHFVLPLLIVGFCYVRIWXKVLAARDPAGQNPDNQLAEVRNFLXMFVIFLLFAVCWCPINVLXVLVAVSPKEMAGKIPNWLYLAAYFIAYFNSCLNAVIYGLLNENFRREYWXIFHAMRHPIIFFSGLISDIREMQEARXLARARAHARDQAREQDRAHACPAVEEXPMNVRNVPLPGDAAAGHPDRASGHPKPHSRSSSAYRKSASXHHKSVFSHSKAASGHLKPVSGHSKPASGHPKSAXVYPKPASVHFKADSVHFKGDSVHFKPDSVHFKPASSNPKPIXGHHVSAGSHSKSAFSAAXSHPKPXXGHIKPAXSHAEPXXADYPKPAXXSHPKPXAADNPELSASHCPEIPAIAHPVSDDSDLPESASSPAAGPXKPAASQLESDXIADLPDPXVVXXSXNDYHDVVVIDVEDDPDEMAV

SEQ ID NO: 11327 - protein, 361 aa, Homo sapiens
  MOD_RES (7)..(7): Selenocysteine
  MOD_RES (44)..(44): Selenocysteine
  MOD_RES (51)..(51): Selenocysteine
  MOD_RES (60)..(60): Selenocysteine
  MOD_RES (75)..(76): Selenocysteine
  MOD_RES (82)..(82): Selenocysteine
  MOD_RES (98)..(98): Selenocysteine
  MOD_RES (106)..(106): Selenocysteine
  MOD_RES (113)..(113): Selenocysteine
  MOD_RES (144)..(144): Selenocysteine
  MOD_RES (154)..(154): Selenocysteine
  MOD_RES (195)..(195): Selenocysteine
  MOD_RES (199)..(199): Selenocysteine
  MOD_RES (204)..(204): Selenocysteine
  MOD_RES (222)..(222): Selenocysteine
  MOD_RES (234)..(234): Selenocysteine
  MOD_RES (255)..(255): Selenocysteine
  MOD_RES (271)..(271): Selenocysteine
  MOD_RES (297)..(297): Selenocysteine
  MOD_RES (302)..(303): Selenocysteine
  MOD_RES (334)..(334): Selenocysteine
  MOD_RES (337)..(337): Selenocysteine
MNESRWXEWRILNMSSGIVNVSERHSCPLGFGHYSVVDVCIFEXVVIVLLXFLIIAGNLXVIFVFHCAPLLHHYXXSYFIQXMAYADLFVGVSCLVPXLSLLHYSXGVHESLXCQVFGYIISVLKSVSMACLACISVDRYLAIXKPLSYNQLVXPCRLRICIILIWIYSCLIFLPSFFGWGKPGYHGDIFEWCAXSWLXSAYFXGFIVCLLYAPAAFVVCFXYFHIFKICRQHXKEINDRRARFPSHEVDSSREXGHSPDRRYAMVLFRIXSVFYMLWLPYIIYFLLESSRVLDNPXLSFLXXWLAISNSFCNCVIYSLSNSVFRLGLRRLSEXMCXSCMCVKDQEAQEPKPRKRANSCSI

SEQ ID NO: 11328 - protein, 242 aa, Homo sapiens
  MOD_RES (6)..(6): Selenocysteine
  MOD_RES (21)..(21): Selenocysteine
  MOD_RES (30)..(30): Selenocysteine
  MOD_RES (47)..(47): Selenocysteine
  MOD_RES (59)..(59): Selenocysteine
  MOD_RES (95)..(95): Selenocysteine
  MOD_RES (111)..(111): Selenocysteine
  MOD_RES (144)..(144): Selenocysteine
  MOD_RES (151)..(151): Selenocysteine
  MOD_RES (176)..(176): Selenocysteine
  MOD_RES (215)..(215): Selenocysteine
MSQQNXSGDCLFDGVNELMKXLQFAVHIPXFVLGLLLNLLAIHGFSXFLKNRWPDYAAXSIYMINLAVFDLLLVLSLPFKMVLSQVQSPFPSLCXLVECLYFVSMYGSVFXICFISMDRFLAIRYPLLVSHLRSPRKIFGICCXIWVLVWXGSIPIYSFHGKVEKYMCFHNMSDDXWSAKVFFPLEVFGFLLPMGIMGFCCSRSIHILLGRRDHXQDWVQQKACIYSIAASLAVFVVSFLPV

SEQ ID NO: 11329 - protein, 319 aa, Homo sapiens
  MOD_RES (6)..(6): Selenocysteine
  MOD_RES (21)..(21): Selenocysteine
  MOD_RES (30)..(30): Selenocysteine
  MOD_RES (47)..(47): Selenocysteine
  MOD_RES (59)..(59): Selenocysteine
  MOD_RES (95)..(95): Selenocysteine
  MOD_RES (111)..(111): Selenocysteine
  MOD_RES (144)..(144): Selenocysteine
  MOD_RES (151)..(151): Selenocysteine
  MOD_RES (176)..(176): Selenocysteine
  MOD_RES (215)..(215): Selenocysteine
  MOD_RES (314)..(315): Selenocysteine
MSQQNXSGDCLFDGVNELMKXLQFAVHIPXFVLGLLLNLLAIHGFSXFLKNRWPDYAAXSIYMINLAVFDLLLVLSLPFKMVLSQVQSPFPSLCXLVECLYFVSMYGSVFXICFISMDRFLAIRYPLLVSHLRSPRKIFGICCXIWVLVWXGSIPIYSFHGKVEKYMCFHNMSDDXWSAKVFFPLEVFGFLLPMGIMGFCCSRSIHILLGRRDHXQDWVQQKACIYSIAASLAVFVVSFLPVHLGFFLQFLVRNSFIVECRAKQSISFFLQLSMCFSNVNCCLDVFCYYFVIKEFRMNIRAHRPSRVQLVLQDXXISRG

SEQ ID NO: 11330 - protein, 362 aa, Homo sapiens
  MOD_RES (26)..(26): Selenocysteine
  MOD_RES (33)..(33): Selenocysteine
  MOD_RES (84)..(84): Selenocysteine
  MOD_RES (100)..(100): Selenocysteine
  MOD_RES (105)..(105): Selenocysteine
  MOD_RES (116)..(116): Selenocysteine
  MOD_RES (139)..(139): Selenocysteine
  MOD_RES (144)..(144): Selenocysteine
  MOD_RES (163)..(163): Selenocysteine
  MOD_RES (175)..(175): Selenocysteine
  MOD_RES (181)..(181): Selenocysteine
  MOD_RES (192)..(192): Selenocysteine
  MOD_RES (194)..(194): Selenocysteine
  MOD_RES (274)..(274): Selenocysteine
  MOD_RES (280)..(280): Selenocysteine
  MOD_RES (287)..(287): Selenocysteine
  MOD_RES (311)..(311): Selenocysteine
  MOD_RES (314)..(314): Selenocysteine
  MOD_RES (319)..(319): Selenocysteine
MNASAASLNDSQVVVVAAEGAAAAAXAAGGPDXGEWGPPAAAALGAGGGANGSLELSSQLSAGPPGLLLPAVNPWDVLLCVSGXVIAGENALVVALIASXPALRXPMFVLVGSLAXADLLAGCGLILHFVFQYLVPSEXVSLLXVGFLVASFAASVSSLLAIXVDRYLSLYNALXYYSRRXLLGVHLLLAAXWXVSLGLGLLPVLGWNCLAERAACSVVRPLARSHVALLSAAFFMVFGIMLHLYVRICQVVWRHAHQIALQQHCLAPPHLAAXRKGVGXLAVVLGXFGASWLPFAIYCVVGSHEDPAVYXYAXLLPAXYNSMINPIIYAFRNQEIQRALWLLLCGCFQSKVPFRSRSPSEV

SEQ ID NO: 11331 - protein, 377 aa, Homo sapiens
  MOD_RES (2)..(2): Selenocysteine
  MOD_RES (8)..(8): Selenocysteine
  MOD_RES (41)..(41): Selenocysteine
  MOD_RES (48)..(48): Selenocysteine
  MOD_RES (99)..(99): Selenocysteine
  MOD_RES (115)..(115): Selenocysteine
  MOD_RES (120)..(120): Selenocysteine
  MOD_RES (131)..(131): Selenocysteine
  MOD_RES (154)..(154): Selenocysteine
  MOD_RES (159)..(159): Selenocysteine
  MOD_RES (178)..(178): Selenocysteine
  MOD_RES (190)..(190): Selenocysteine
  MOD_RES (196)..(196): Selenocysteine
  MOD_RES (207)..(207): Selenocysteine
  MOD_RES (209)..(209): Selenocysteine
  MOD_RES (289)..(289): Selenocysteine
  MOD_RES (295)..(295): Selenocysteine
  MOD_RES (302)..(302): Selenocysteine
  MOD_RES (326)..(326): Selenocysteine
  MOD_RES (329)..(329): Selenocysteine
  MOD_RES (334)..(334): Selenocysteine
MXLLAWCXRGANPAAMNASAASLNDSQVVVVAAEGAAAAAXAAGGPDXGEWGPPAAAALGAGGGANGSLELSSQLSAGPPGLLLPAVNPWDVLLCVSGXVIAGENALVVALIASXPALRXPMFVLVGSLAXADLLAGCGLILHFVFQYLVPSEXVSLLXVGFLVASFAASVSSLLAIXVDRYLSLYNALXYYSRRXLLGVHLLLAAXWXVSLGLGLLPVLGWNCLAERAACSVVRPLARSHVALLSAAFFMVFGIMLHLYVRICQVVWRHAHQIALQQHCLAPPHLAAXRKGVGXLAVVLGXFGASWLPFAIYCVVGSHEDPAVYXYAXLLPAXYNSMINPIIYAFRNQEIQRALWLLLCGCFQSKVPFRSRSPSEV

SEQ ID NO: 11332 - protein, 451 aa, Homo sapiens
  MOD_RES (15)..(15): Selenocysteine
  MOD_RES (22)..(22): Selenocysteine
  MOD_RES (27)..(27): Selenocysteine
  MOD_RES (55)..(55): Selenocysteine
  MOD_RES (70)..(70): Selenocysteine
  MOD_RES (92)..(92): Selenocysteine
  MOD_RES (155)..(155): Selenocysteine
  MOD_RES (247)..(247): Selenocysteine
  MOD_RES (251)..(251): Selenocysteine
  MOD_RES (264)..(264): Selenocysteine
  MOD_RES (267)..(267): Selenocysteine
  MOD_RES (274)..(275): Selenocysteine
  MOD_RES (279)..(279): Selenocysteine
  MOD_RES (319)..(319): Selenocysteine
  MOD_RES (327)..(327): Selenocysteine
  MOD_RES (335)..(335): Selenocysteine
  MOD_RES (388)..(388): Selenocysteine
  MOD_RES (422)..(422): Selenocysteine
  MOD_RES (431)..(431): Selenocysteine
MESSPIPQSSGNSSXLGRVPQXPGPSXASGVPEVGLRDVASESVALFFMLLLDLXAVAGNAAVMAVIAKXPALRKFVFVFHLCLVDLLAALXLMPLAMLSSSALFDHALFGEVACRLYLFLSVCFVSLAILSVSAINVERYYYVVHPMRYEVRMXLGLVASVLVGVWVKALAMASVPVLGRVSWEEGAPSVPPGCSLQWSHSAYCQLFVVVFAVLYFLLPLLLILVVYCSMFRVARVAAMQHGPLPXWMEXPRQRSESLSSRSXMVXSSGAPQXXPHRXFGGGKAAVVLLAVGGQFLLCWLPYFSFHLYVALSAQPISXGQVESVVXWIGYFCFXSNPFFYGCLNRQIRGELSKQFVCFFKPAPEEELRLPSREGSIEENFLQFLQGXGCPSESWVSRPLPSPKQEPPAVDFRIPGQIAEEXSEFLEQQLXSDIIMSDSYLRPAASPRLES

SEQ ID NO: 11333 - protein, 368 aa, Homo sapiens
  MOD_RES (5)..(5): Selenocysteine
  MOD_RES (42)..(42): Selenocysteine
  MOD_RES (103)..(103): Selenocysteine
  MOD_RES (134)..(134): Selenocysteine
  MOD_RES (151)..(151): Selenocysteine
  MOD_RES (276)..(276): Selenocysteine
  MOD_RES (317)..(317): Selenocysteine
  MOD_RES (348)..(348): Selenocysteine
MANSXGLNASEVAGSLGLILAAVVEVGALLGNGALLVVVLRXPGLRDALYLAHLCVVDLLAAASIMPLGLLAAPPPGLGRVRLGPAPCRAARFLSAALLPACXLGVAALGLARYRLIVHPLRPGSRPPPVLVLXAVWAAAGLLGALSLLGXPPAPPPAPARCSVLAGGLGPFRPLWALLAFALPALLLLGAYGGIFVVARRAALRPPRPARGSRLHSDSLDSRLSILPPLRPRLPGGKAALAPALAVGQFAACWLPYGCACLAPAARAAEAEAAVXWVAYSAFAAHPFLYGLLQRPVRLALGRLSRRALPGPVRACXPQAWHPRALLQCLQRPPEGPAVGPSEAPEQXPELAGGRSPAYQGPPESSLS

SEQ ID NO: 11334 - protein, 419 aa, Homo sapiens
  MOD_RES (8)..(8): Selenocysteine
  MOD_RES (12)..(12): Selenocysteine
  MOD_RES (14)..(14): Selenocysteine
  MOD_RES (17)..(18): Selenocysteine
  MOD_RES (25)..(25): Selenocysteine
  MOD_RES (30)..(30): Selenocysteine
  MOD_RES (50)..(50): Selenocysteine
  MOD_RES (54)..(54): Selenocysteine
  MOD_RES (60)..(60): Selenocysteine
  MOD_RES (64)..(64): Selenocysteine
  MOD_RES (68)..(69): Selenocysteine
  MOD_RES (83)..(83): Selenocysteine
  MOD_RES (141)..(141): Selenocysteine
  MOD_RES (144)..(145): Selenocysteine
  MOD_RES (205)..(205): Selenocysteine
  MOD_RES (234)..(235): Selenocysteine
  MOD_RES (268)..(268): Selenocysteine
  MOD_RES (310)..(310): Selenocysteine
  MOD_RES (314)..(315): Selenocysteine
  MOD_RES (331)..(332): Selenocysteine
  MOD_RES (338)..(338): Selenocysteine
  MOD_RES (354)..(354): Selenocysteine
  MOD_RES (400)..(400): Selenocysteine
  MOD_RES (417)..(417): Selenocysteine
MVFSAVLXAFHXGXSNXXFVVYENXYMNIXLPPPFQHPDLSPLLRYSFEXMAPXGLSSLXVNSXAVPXXPAAFKSLNLPLQIXLSAIMIFILFVSFLGNLVVCLMVYQKAAMRSAINILLASLAFADMLLAVLNMPFALVXILXXRWIFGKFFCRVSAMFFWLFVIEGVAILLIISIDRFLIIVQRQDKLNPYRAKVLIAVSWAXSFCVAFPLAVGNPDLQIPSRAPQCVFGYXXNPGYQAYVILISLISFFIPFLVILYSFMGILNXLRHNALRIHSYPEGICLSQASKLGLMSLQRPFQMSIDMGFKXRAFXXILILFAVFIVCWAPFXXYSLVAXFSKHFYYQHNFFEISXWLLWLCYLKSALNPLIYYWRIKKFHDACLDMMPKSFKFLPQLPGHXKRRIRPSAVYVCGEHRXVV

SEQ ID NO: 11335 - protein, 337 aa, Homo sapiens
  MOD_RES (4)..(4): Selenocysteine
  MOD_RES (66)..(66): Selenocysteine
  MOD_RES (74)..(74): Selenocysteine
  MOD_RES (81)..(81): Selenocysteine
  MOD_RES (102)..(102): Selenocysteine
  MOD_RES (106)..(106): Selenocysteine
  MOD_RES (127)..(127): Selenocysteine
  MOD_RES (143)..(143): Selenocysteine
  MOD_RES (155)..(155): Selenocysteine
  MOD_RES (168)..(168): Selenocysteine
  MOD_RES (188)..(188): Selenocysteine
  MOD_RES (190)..(190): Selenocysteine
  MOD_RES (198)..(198): Selenocysteine
  MOD_RES (216)..(216): Selenocysteine
  MOD_RES (232)..(232): Selenocysteine
  MOD_RES (234)..(234): Selenocysteine
  MOD_RES (240)..(240): Selenocysteine
  MOD_RES (268)..(268): Selenocysteine
  MOD_RES (270)..(270): Selenocysteine
  MOD_RES (275)..(275): Selenocysteine
  MOD_RES (279)..(279): Selenocysteine
  MOD_RES (294)..(294): Selenocysteine
  MOD_RES (296)..(296): Selenocysteine
  MOD_RES (309)..(309): Selenocysteine
  MOD_RES (314)..(314): Selenocysteine
  MOD_RES (327)..(327): Selenocysteine
  MOD_RES (330)..(330): Selenocysteine
MNSXCIEEQHDLDHYLFPIVYIFVIIVSIPANIGSLCVSFLQAKKESELGIYLFSLSLSDLLYALXLPLWIDYXWNKDNWXFSPALCKGSAFLMYMNFYSSXAFLXCIAVDRYLAVVYPLKFFFLRXRRFALMVSLSIWILEXIFNAVMLWEDEXVVEYCDAEKSNFXLCYDKYPLEKWQINLNLFRXCXGYAIPLVXILICNRKVYQAVRHNKAXENKEKKRIIKLLVSIXVXFVLCFXPFHVMLLIRCILEHAVNFEDHSNSGKRXYXMYRIXVALXSLNCVADPILYCFVXEXGRYDMWNILKFCXGRCNXSQRQRKRILSVSXKDXMELEVLE

SEQ ID NO: 11336 - protein, 338 aa, Homo sapiens
  MOD_RES (5)..(5): Selenocysteine
  MOD_RES (14)..(14): Selenocysteine
  MOD_RES (18)..(18): Selenocysteine
  MOD_RES (22)..(22): Selenocysteine
  MOD_RES (30)..(30): Selenocysteine
  MOD_RES (64)..(64): Selenocysteine
  MOD_RES (134)..(134): Selenocysteine
  MOD_RES (152)..(152): Selenocysteine
  MOD_RES (218)..(218): Selenocysteine
  MOD_RES (233)..(233): Selenocysteine
  MOD_RES (275)..(275): Selenocysteine
  MOD_RES (292)..(293): Selenocysteine
  MOD_RES (309)..(309): Selenocysteine
  MOD_RES (313)..(313): Selenocysteine
MGNIXADNSSMSCXIDHXIHQXLAPVVYVXVLVVGFPANCLSLYFGYLQIKARNELGVYLCNLXVADLFYICSLPFWLQYVLQHDNWSHGDLSCQVCGILLYENIYISVGFLCCISVDRYLAVAHPFRFHQFRXLKAAVGVSVVIWAKELLXSIYFLMHEEVIEDENQHRVCFEHYPIQAWQRAINYYRFLVGFLFPICLLLASYQGILRAVRRSHGXQKSRKDQIQRLVLSXVVIFLACFLPYHVLLLVRSVWEASCDFAKGVFNAYHFSLLLXSFNCVADPVLYCFVSEXXHRDLARLRGACLAFLXCSRXGRAREAYPLGAPEASGKSGAQGEEP

SEQ ID NO: 11337 - protein, 365 aa, Homo sapiens
  MOD_RES (5)..(5): Selenocysteine
  MOD_RES (14)..(14): Selenocysteine
  MOD_RES (18)..(18): Selenocysteine
  MOD_RES (22)..(22): Selenocysteine
  MOD_RES (30)..(30): Selenocysteine
  MOD_RES (64)..(64): Selenocysteine
  MOD_RES (134)..(134): Selenocysteine
  MOD_RES (152)..(152): Selenocysteine
  MOD_RES (218)..(218): Selenocysteine
  MOD_RES (233)..(233): Selenocysteine
  MOD_RES (275)..(275): Selenocysteine
  MOD_RES (292)..(293): Selenocysteine
  MOD_RES (309)..(309): Selenocysteine
  MOD_RES (313)..(313): Selenocysteine
  MOD_RES (342)..(342): Selenocysteine
  MOD_RES (350)..(350): Selenocysteine
  MOD_RES (361)..(361): Selenocysteine
MGNIXADNSSMSCXIDHXIHQXLAPVVYVXVLVVGFPANCLSLYFGYLQIKARNELGVYLCNLXVADLFYICSLPFWLQYVLQHDNWSHGDLSCQVCGILLYENIYISVGFLCCISVDRYLAVAHPFRFHQFRXLKAAVGVSVVIWAKELLXSIYFLMHEEVIEDENQHRVCFEHYPIQAWQRAINYYRFLVGFLFPICLLLASYQGILRAVRRSHGXQKSRKDQIQRLVLSXVVIFLACFLPYHVLLLVRSVWEASCDFAKGVFNAYHFSLLLXSFNCVADPVLYCFVSEXXHRDLARLRGACLAFLXCSRXGRAREAYPLGAPEASGKSGAQGEEPELLXKLHPAFQXPNSPGSGGFPXGRLA

SEQ ID NO: 11338 - protein, 540 aa, Homo sapiens
  MOD_RES (4)..(4): Selenocysteine
  MOD_RES (14)..(14): Selenocysteine
  MOD_RES (27)..(27): Selenocysteine
  MOD_RES (39)..(39): Selenocysteine
  MOD_RES (41)..(41): Selenocysteine
  MOD_RES (44)..(44): Selenocysteine
  MOD_RES (46)..(46): Selenocysteine
  MOD_RES (77)..(77): Selenocysteine
  MOD_RES (97)..(97): Selenocysteine
  MOD_RES (102)..(102): Selenocysteine
  MOD_RES (120)..(120): Selenocysteine
  MOD_RES (124)..(124): Selenocysteine
  MOD_RES (135)..(135): Selenocysteine
  MOD_RES (155)..(155): Selenocysteine
  MOD_RES (161)..(161): Selenocysteine
  MOD_RES (165)..(165): Selenocysteine
  MOD_RES (171)..(171): Selenocysteine
  MOD_RES (174)..(174): Selenocysteine
  MOD_RES (177)..(177): Selenocysteine
  MOD_RES (180)..(180): Selenocysteine
  MOD_RES (183)..(183): Selenocysteine
  MOD_RES (212)..(212): Selenocysteine
  MOD_RES (228)..(228): Selenocysteine
  MOD_RES (243)..(243): Selenocysteine
  MOD_RES (285)..(285): Selenocysteine
  MOD_RES (289)..(289): Selenocysteine
  MOD_RES (297)..(297): Selenocysteine
  MOD_RES (313)..(313): Selenocysteine
  MOD_RES (322)..(322): Selenocysteine
  MOD_RES (363)..(363): Selenocysteine
  MOD_RES (405)..(405): Selenocysteine
  MOD_RES (427)..(427): Selenocysteine
  MOD_RES (473)..(473): Selenocysteine
  MOD_RES (477)..(477): Selenocysteine
  MOD_RES (519)..(520): Selenocysteine
  MOD_RES (530)..(530): Selenocysteine
MNSXGHLQDAPNAXSLHVPHSQEGNSXSLQEGLQDLIHXAXLVXCXFLLAVIFCLGSYGNFIVFLSFFDPAFRKFRXNFDFMILNLSFCDLFICGVXAPMFXFVLFFSSASSIPDAFCFXFHLXSSGFIIMSLKXVAVIALHRLRMVLGKQPNRXASFPCXVLLXLLLWAXSFXLAXLAXLKXSKSHLCLPMSSLIAGKGKAILSLYVVDFXFCVAVVSVSYIMIAQXLRKNAQVRKCPPVIXVDASRPQPFMGVPVQGGGDPIQCAMPALYRNQNYNKLQHVQXRGYXKSPNQLVXPAASRLQLVSAINLSXAKDSKAVVXCVIIVLSVLVCCLPLGISLVQVVLSSNGSFILYQFELFGFXLIFFKSGLNPFIYSRNSAGLRRKVLWCLQYIGLGFFCCKQKXRLRAMGKGNLEVNRNKSSHHEXNSAYMLSPKPQKKFVDQACGPSHSKESMVSPKISAGHQHCGQSSSXPINXRIEPYYSIYNSSPSQEESSPCNLQPVNSFGFANSYIAMHYHXXNDLVQEYDSXSAKQIPVPSV

SEQ ID NO: 11339 - protein, 556 aa, Homo sapiens
  MOD_RES (42)..(42): Selenocysteine
  MOD_RES (48)..(48): Selenocysteine
  MOD_RES (51)..(51): Selenocysteine
  MOD_RES (114)..(114): Selenocysteine
  MOD_RES (146)..(147): Selenocysteine
  MOD_RES (151)..(152): Selenocysteine
  MOD_RES (219)..(219): Selenocysteine
  MOD_RES (252)..(252): Selenocysteine
  MOD_RES (263)..(263): Selenocysteine
  MOD_RES (298)..(298): Selenocysteine
  MOD_RES (308)..(308): Selenocysteine
  MOD_RES (314)..(314): Selenocysteine
  MOD_RES (459)..(459): Selenocysteine
  MOD_RES (463)..(463): Selenocysteine
  MOD_RES (467)..(467): Selenocysteine
  MOD_RES (471)..(471): Selenocysteine
  MOD_RES (496)..(496): Selenocysteine
  MOD_RES (501)..(501): Selenocysteine
MAMMPLVLHHPERQAELGSGLRDGGGAALRPPGRLVKQMDFXEAYADXCSXVGLAAREGNVKVLRKLLKKGRSVDVADNRGWMPIHEAAYHNSVECLQMLINADSSENYIKMKXFEGFCALHLAASQGHWKIVQILLEAGADPNAXXLEEXXPLFLAVENGQIDVLRLLLQHGANVNGSHSMCGWNSLHQASFQENAEIIKLLLRKGANKECQDDFGIXPLFVAAQYGKLESLSILISSGANVNCQALDKAXPLFIAAQEGHXKCVELLLSSGADPDLYCNEDSWQLPIHAAAQMGHXKILDLLIPLXNRACDXGLNKVSPVYSAVFGGHEDCLEILLRNGYSPDAQACLVFGFSSPVCMAFQKDCEFFGIVNILLKYGAQINELHLAYCLKYEKFSIFRYFLRKGCSLGPWNHIYEFVNHAIKAQAKYKEWLPHLLVAGFDPLILLCNSWIDSVSIDXLIFXLEFXNWKXLAPAVERMLSARASNAWILQQHIAXVPSLXHLCRLEIRSSLKSERLRSDSYISQLPLPRSLHNYLLYEDVLRMYEVPELAAIQDG

SEQ ID NO: 11340 - protein, 261 aa, Homo sapiens
  MOD_RES (38)..(38): Selenocysteine
  MOD_RES (63)..(63): Selenocysteine
  MOD_RES (72)..(72): Selenocysteine
  MOD_RES (87)..(87): Selenocysteine
  MOD_RES (173)..(173): Selenocysteine
  MOD_RES (175)..(175): Selenocysteine
  MOD_RES (191)..(191): Selenocysteine
  MOD_RES (208)..(208): Selenocysteine
  MOD_RES (210)..(210): Selenocysteine
  MOD_RES (240)..(240): Selenocysteine
  MOD_RES (249)..(249): Selenocysteine
  MOD_RES (260)..(260): Selenocysteine
MGPGEALLAGLLVMVLAVALLSNALVLLCCAYSAELRXRASGVLLVNLSLGHLLLAALDMPFXLLGVMRGRXPSAPGACQVIGFLDXFLASNAALSVAALSADQWLAVGFPLRYAGRLRPRYAGLLLGCAWGQSLAFSGAALGCSWLGYSSAFASCSLRLPPEPERPRFAAFXAXLHAVGFVLPLAVLCLXSLQVHRVARRHCQRMDXVXMKALALLADLHPSVRQRCLIQQKRRRHRAXRKIGIAIAXFLICFAPYVMXR

SEQ ID NO: 11341 - protein, 363 aa, Homo sapiens
  MOD_RES (38)..(38): Selenocysteine
  MOD_RES (63)..(63): Selenocysteine
  MOD_RES (72)..(72): Selenocysteine
  MOD_RES (87)..(87): Selenocysteine
  MOD_RES (173)..(173): Selenocysteine
  MOD_RES (175)..(175): Selenocysteine
  MOD_RES (191)..(191): Selenocysteine
  MOD_RES (208)..(208): Selenocysteine
  MOD_RES (210)..(210): Selenocysteine
  MOD_RES (240)..(240): Selenocysteine
  MOD_RES (249)..(249): Selenocysteine
  MOD_RES (260)..(260): Selenocysteine
  MOD_RES (270)..(270): Selenocysteine
  MOD_RES (283)..(283): Selenocysteine
  MOD_RES (293)..(293): Selenocysteine
  MOD_RES (316)..(316): Selenocysteine
  MOD_RES (322)..(322): Selenocysteine
  MOD_RES (340)..(340): Selenocysteine
  MOD_RES (346)..(346): Selenocysteine
  MOD_RES (353)..(353): Selenocysteine
  MOD_RES (362)..(362): Selenocysteine
MGPGEALLAGLLVMVLAVALLSNALVLLCCAYSAELRXRASGVLLVNLSLGHLLLAALDMPFXLLGVMRGRXPSAPGACQVIGFLDXFLASNAALSVAALSADQWLAVGFPLRYAGRLRPRYAGLLLGCAWGQSLAFSGAALGCSWLGYSSAFASCSLRLPPEPERPRFAAFXAXLHAVGFVLPLAVLCLXSLQVHRVARRHCQRMDXVXMKALALLADLHPSVRQRCLIQQKRRRHRAXRKIGIAIAXFLICFAPYVMXRLAELVPFVXVNAQWGILSKCLXYSKAVADPFXYSLLRRPFRQVLAGMVHRLLKRXPRPASXHDSSLDVAGMVHQLLKRXPRPASXHNGSVDXENDSCLQQXH

SEQ ID NO: 11342 - protein, 336 aa, Homo sapiens
  MOD_RES (5)..(6): Selenocysteine
  MOD_RES (34)..(34): Selenocysteine
  MOD_RES (42)..(42): Selenocysteine
  MOD_RES (48)..(48): Selenocysteine
  MOD_RES (50)..(50): Selenocysteine
  MOD_RES (59)..(59): Selenocysteine
  MOD_RES (96)..(96): Selenocysteine
  MOD_RES (120)..(120): Selenocysteine
  MOD_RES (130)..(131): Selenocysteine
  MOD_RES (171)..(171): Selenocysteine
  MOD_RES (180)..(180): Selenocysteine
  MOD_RES (207)..(208): Selenocysteine
  MOD_RES (219)..(219): Selenocysteine
  MOD_RES (233)..(233): Selenocysteine
  MOD_RES (235)..(235): Selenocysteine
  MOD_RES (243)..(243): Selenocysteine
  MOD_RES (290)..(290): Selenocysteine
  MOD_RES (295)..(295): Selenocysteine
  MOD_RES (304)..(304): Selenocysteine
  MOD_RES (315)..(315): Selenocysteine
  MOD_RES (319)..(319): Selenocysteine
  MOD_RES (325)..(325): Selenocysteine
MNNNXXCIQPSMISSMALPIIYILLCIVGVFGNXLSQWIFLXKIGKKXSXHIYLSHLVXANLLVCSAMPFMSIYFLKGFQWEYQSAQCRVVNFLGXLSMHASMFVSLLILSWIAISRYAXLMQKDSSQEXXSCYEKIFYGHLLKKFRQPNFARKLCIYIWGVVLGIIIPVXVYYSVIEAXEGEESLCYNRQMELGAMISQIAGLIGXXFIGFSFLVVLXSYYSFVSHLRKIRXCXSIMEKDLXYSSVKRHLLVIQILLIVCFLPYSIFKPIFYVLHQRDNCQQLNYLIEXKNILXCLASARSSXDPIIFLLLDKXFKKXLYNLFXKSNSAHMQSYG

SEQ ID NO: 11343 - protein, 381 aa, Homo sapiens
  MOD_RES (17)..(17): Selenocysteine
  MOD_RES (48)..(48): Selenocysteine
  MOD_RES (69)..(69): Selenocysteine
  MOD_RES (106)..(106): Selenocysteine
  MOD_RES (121)..(121): Selenocysteine
  MOD_RES (125)..(125): Selenocysteine
  MOD_RES (128)..(128): Selenocysteine
  MOD_RES (142)..(142): Selenocysteine
  MOD_RES (153)..(153): Selenocysteine
  MOD_RES (156)..(156): Selenocysteine
  MOD_RES (170)..(170): Selenocysteine
  MOD_RES (201)..(201): Selenocysteine
  MOD_RES (234)..(235): Selenocysteine
  MOD_RES (248)..(248): Selenocysteine
  MOD_RES (280)..(280): Selenocysteine
  MOD_RES (296)..(296): Selenocysteine
  MOD_RES (344)..(344): Selenocysteine
  MOD_RES (361)..(361): Selenocysteine
  MOD_RES (369)..(369): Selenocysteine
  MOD_RES (379)..(379): Selenocysteine
MVPHLLLLCLLPLVRAXEPHEGRADEQSAEAALAVPNASHFFSWNNYXFSDWQNFVGRRRYGAESQNPXVKALLIVAYSFIIVFSLFGNVLVCHVIFKNQRMHSAXSLFIVNLAVADIMIXLLNXPFXLVIMHPLKPRISIXKGVIYIAVIWXMAXFFSLPHAICQKLFXFKYSEDIVRSLCLPDFPEPADLFWKYLDLAXFILLYILPLLIISVAYARVAKKLWLCNMIGDVXXEQYFALRRKKKKXIKMLMLVVVLFALCWFPLNCYVLLLSSKVIRXNNALYFAFHWFAMSSXCYNPFIYCWLNENFRIELKALLSMCQRPPKPQEDRPPSPVPSFRVAWXEKNDGQRAPLANNLLPXSQLQSGKXDLSSVEPIVXMS

SEQ ID NO: 11344 - protein, 423 aa, Homo sapiens
  MOD_RES (17)..(17): Selenocysteine
  MOD_RES (48)..(48): Selenocysteine
  MOD_RES (69)..(69): Selenocysteine
  MOD_RES (106)..(106): Selenocysteine
  MOD_RES (121)..(121): Selenocysteine
  MOD_RES (125)..(125): Selenocysteine
  MOD_RES (128)..(128): Selenocysteine
  MOD_RES (136)..(136): Selenocysteine
  MOD_RES (161)..(161): Selenocysteine
  MOD_RES (163)..(163): Selenocysteine
  MOD_RES (184)..(184): Selenocysteine
  MOD_RES (195)..(195): Selenocysteine
  MOD_RES (198)..(198): Selenocysteine
  MOD_RES (212)..(212): Selenocysteine
  MOD_RES (243)..(243): Selenocysteine
  MOD_RES (276)..(277): Selenocysteine
  MOD_RES (290)..(290): Selenocysteine
  MOD_RES (322)..(322): Selenocysteine
  MOD_RES (338)..(338): Selenocysteine
  MOD_RES (386)..(386): Selenocysteine
  MOD_RES (403)..(403): Selenocysteine
  MOD_RES (411)..(411): Selenocysteine
  MOD_RES (421)..(421): Selenocysteine
MVPHLLLLCLLPLVRAXEPHEGRADEQSAEAALAVPNASHFFSWNNYXFSDWQNFVGRRRYGAESQNPXVKALLIVAYSFIIVFSLFGNVLVCHVIFKNQRMHSAXSLFIVNLAVADIMIXLLNXPFXLVRFVNSXWIFGKGMCHVSRFAQYCSLHVSALXLXAIAVDRHQVIMHPLKPRISIXKGVIYIAVIWXMAXFFSLPHAICQKLFXFKYSEDIVRSLCLPDFPEPADLFWKYLDLAXFILLYILPLLIISVAYARVAKKLWLCNMIGDVXXEQYFALRRKKKKXIKMLMLVVVLFALCWFPLNCYVLLLSSKVIRXNNALYFAFHWFAMSSXCYNPFIYCWLNENFRIELKALLSMCQRPPKPQEDRPPSPVPSFRVAWXEKNDGQRAPLANNLLPXSQLQSGKXDLSSVEPIVXMS

SEQ ID NO: 11345 - protein, 396 aa, Homo sapiens
  MOD_RES (33)..(33): Selenocysteine
  MOD_RES (35)..(35): Selenocysteine
  MOD_RES (41)..(41): Selenocysteine
  MOD_RES (53)..(53): Selenocysteine
  MOD_RES (63)..(63): Selenocysteine
  MOD_RES (71)..(71): Selenocysteine
  MOD_RES (80)..(80): Selenocysteine
  MOD_RES (88)..(88): Selenocysteine
  MOD_RES (91)..(91): Selenocysteine
  MOD_RES (110)..(110): Selenocysteine
  MOD_RES (144)..(144): Selenocysteine
  MOD_RES (167)..(167): Selenocysteine
  MOD_RES (179)..(180): Selenocysteine
  MOD_RES (230)..(230): Selenocysteine
  MOD_RES (263)..(264): Selenocysteine
  MOD_RES (266)..(266): Selenocysteine
  MOD_RES (318)..(318): Selenocysteine
  MOD_RES (359)..(359): Selenocysteine
MWNSSDANFSCYHESVLGYRYVAVSWGVVVAVXGXVGNVLXLLALAIQPKLRXRFNLLIANLXLADLLYCXLLQPFSVDXYLHLHWRXGAXFCRVFGLLLFASNSVSILXLCLIALGRYLLIAHPKLFPQVFSAKGIVLALVSXWVVGVASFAPLWPIYILVPVVCXCSFDRIRGRPYXXILMGIYFVLGLSSVGIFYCLIHRQVKRAAQALDQYKLRQASIHSNHVARXDEAMPGRFQELDSRLASGGPSEGISSEPVSAAXXQXLEGDSSEVGDQINSKRAKQMAEKSPPEASAKAQPIKGARRAPDSSSEFGKVXRMCFAVFLCFALSYIPFLLLNILDARVQAPRVVHMLAANLXWLNGCINPVLYAAMNRQFRQAYGSILKRGPRSFHRLH

SEQ ID NO: 11346 - protein, 71 aa, Homo sapiens
  MOD_RES (19)..(19): Selenocysteine
  MOD_RES (25)..(25): Selenocysteine
  MOD_RES (50)..(50): Selenocysteine
MANYSHAADNILQNLSPLXAFLKLXSLGFIIGVSVVGNLLISILLVKDKXLHRAPYYFLLDLCCSDILRSA

SEQ ID NO: 11347 - protein, 121 aa, Homo sapiens
  MOD_RES (19)..(19): Selenocysteine
  MOD_RES (25)..(25): Selenocysteine
  MOD_RES (50)..(50): Selenocysteine
  MOD_RES (86)..(86): Selenocysteine
  MOD_RES (88)..(88): Selenocysteine
  MOD_RES (91)..(91): Selenocysteine
  MOD_RES (93)..(93): Selenocysteine
  MOD_RES (108)..(108): Selenocysteine
  MOD_RES (118)..(118): Selenocysteine
MANYSHAADNILQNLSPLXAFLKLXSLGFIIGVSVVGNLLISILLVKDKXLHRAPYYFLLDLCCSDILRSAICFPFVFNSVKNGSXWXYGXLXCKVIAFLGVLSCFHXAFMLFCISVXRYL

SEQ ID NO: 11348 - protein, 370 aa, Homo sapiens
  MOD_RES (19)..(19): Selenocysteine
  MOD_RES (25)..(25): Selenocysteine
  MOD_RES (50)..(50): Selenocysteine
  MOD_RES (86)..(86): Selenocysteine
  MOD_RES (88)..(88): Selenocysteine
  MOD_RES (91)..(91): Selenocysteine
  MOD_RES (93)..(93): Selenocysteine
  MOD_RES (108)..(108): Selenocysteine
  MOD_RES (118)..(118): Selenocysteine
  MOD_RES (130)..(130): Selenocysteine
  MOD_RES (134)..(134): Selenocysteine
  MOD_RES (137)..(137): Selenocysteine
  MOD_RES (147)..(147): Selenocysteine
  MOD_RES (162)..(162): Selenocysteine
  MOD_RES (173)..(173): Selenocysteine
  MOD_RES (198)..(198): Selenocysteine
  MOD_RES (229)..(229): Selenocysteine
  MOD_RES (252)..(252): Selenocysteine
  MOD_RES (255)..(255): Selenocysteine
  MOD_RES (265)..(266): Selenocysteine
  MOD_RES (291)..(291): Selenocysteine
  MOD_RES (296)..(296): Selenocysteine
  MOD_RES (322)..(322): Selenocysteine
  MOD_RES (352)..(353): Selenocysteine
MANYSHAADNILQNLSPLXAFLKLXSLGFIIGVSVVGNLLISILLVKDKXLHRAPYYFLLDLCCSDILRSAICFPFVFNSVKNGSXWXYGXLXCKVIAFLGVLSCFHXAFMLFCISVXRYLAIAHHRFYXKRLXFWXCLAVICMVWXLSVAMAFPPVLDVGXYSFIREEDQCXFQHRSFRANDSLGFMLLLALILLAXQLVYLKLIFFVHDRRKMKPVQFVAAVSQNWXFHGPGASGQAAANWLAGFGRGPXPPXLLGIRQNANXXGRRRLLVLDEFKMEKRISRMFYIMXFLFLXLWGPYLVACYWRVFARGPVVPGGFLXAAVWMSFAQAGINPFVCIFSNRELRRCFSXXLLYCRKSRLPREPYCVI

SEQ ID NO: 11349 - protein, 358 aa, Homo sapiens
  MOD_RES (6)..(6): Selenocysteine
  MOD_RES (34)..(35): Selenocysteine
  MOD_RES (42)..(42): Selenocysteine
  MOD_RES (74)..(74): Selenocysteine
  MOD_RES (91)..(91): Selenocysteine
  MOD_RES (93)..(93): Selenocysteine
  MOD_RES (117)..(117): Selenocysteine
  MOD_RES (127)..(127): Selenocysteine
  MOD_RES (156)..(156): Selenocysteine
  MOD_RES (158)..(158): Selenocysteine
  MOD_RES (180)..(180): Selenocysteine
  MOD_RES (185)..(185): Selenocysteine
  MOD_RES (205)..(205): Selenocysteine
  MOD_RES (208)..(208): Selenocysteine
  MOD_RES (263)..(263): Selenocysteine
  MOD_RES (276)..(276): Selenocysteine
  MOD_RES (299)..(299): Selenocysteine
  MOD_RES (333)..(333): Selenocysteine
  MOD_RES (356)..(356): Selenocysteine
MGFNLXLAKLPNNELHGQESHNSGNRSDGPGKNXXLHNEFDXIVLPVLYLIIFVASILLNGLAVWIFFHIRNKXSFIFYLKNIVVADLIMXLXFPFRIVHDAGFGPWYFKFILCRYXSVLFYANMYXSIVFLGLISIDRYLKVVKPFGDSRMYSIXFXKVLSVCVWVIMAVLSLPNIILXNGQPXEDNIHDCSKLKSPLGVKWHXAVXYVNSCLFVAVLVILIGCYIAISRYIHKSSRQFISQSSRKRKHNQSIRVVVAVFFXCFLPYHLCRIPFXFSHLDRLLDESAQKILYYCKEIXLFLSACNVCLDPIIYFFMCRSFSRRLFKKSNIRXRSESIRSLQSVRRSEVRIYYDYXDV

SEQ ID NO: 11350 - protein, 384 aa, Homo sapiens
  MOD_RES (2)..(2): Selenocysteine
  MOD_RES (7)..(7): Selenocysteine
  MOD_RES (9)..(9): Selenocysteine
  MOD_RES (12)..(13): Selenocysteine
  MOD_RES (46)..(46): Selenocysteine
  MOD_RES (64)..(65): Selenocysteine
  MOD_RES (96)..(96): Selenocysteine
  MOD_RES (125)..(125): Selenocysteine
  MOD_RES (143)..(143): Selenocysteine
  MOD_RES (148)..(148): Selenocysteine
  MOD_RES (158)..(158): Selenocysteine
  MOD_RES (205)..(205): Selenocysteine
  MOD_RES (297)..(297): Selenocysteine
  MOD_RES (337)..(337): Selenocysteine
  MOD_RES (365)..(365): Selenocysteine
  MOD_RES (377)..(377): Selenocysteine
MXNSSSXSXSSXXGGSLLLLCEEEESWAGRRIPVSLLYSGLAIGGXLANGMVIYLVSSFRKLQXXSNAFIVNGCAADLSVCALWMPQEAVLGLLPXGSAEPPADWDGAGGSYRLLRGGLLGLGLXVSLLSHCLVALNRYLLIXRAPAXYQALYQRRHXAGMLALSWALALGLVLLLPPWAPRPGAAPPRVHYPALLAAAALLAQXALLLHCYLGIVRRVRVSVKRVSVLNFHLLHQLPGCAAAAAAFPGAQHAPGPGGAAHPAQAQPLPPALHPRRAQRRLSGLSVLLLCCVFLLAXQPLVWVSLASGFSLPVPWGVQAASWLLCCALSALNPLLYXWRNEEFRRSVRSVLPGVGDAAAAAVAAXAVPAVSQAQLGXRAAGQHW

SEQ ID NO: 11351 - protein, 430 aa, Homo sapiens
  MOD_RES (22)..(22): Selenocysteine
  MOD_RES (28)..(28): Selenocysteine
  MOD_RES (94)..(94): Selenocysteine
  MOD_RES (131)..(131): Selenocysteine
  MOD_RES (147)..(147): Selenocysteine
  MOD_RES (157)..(157): Selenocysteine
  MOD_RES (159)..(159): Selenocysteine
  MOD_RES (171)..(171): Selenocysteine
  MOD_RES (188)..(188): Selenocysteine
  MOD_RES (210)..(211): Selenocysteine
  MOD_RES (220)..(220): Selenocysteine
  MOD_RES (240)..(240): Selenocysteine
  MOD_RES (246)..(246): Selenocysteine
  MOD_RES (255)..(255): Selenocysteine
  MOD_RES (280)..(280): Selenocysteine
  MOD_RES (291)..(291): Selenocysteine
  MOD_RES (295)..(295): Selenocysteine
  MOD_RES (301)..(301): Selenocysteine
  MOD_RES (329)..(329): Selenocysteine
  MOD_RES (337)..(337): Selenocysteine
  MOD_RES (339)..(339): Selenocysteine
  MOD_RES (383)..(383): Selenocysteine
  MOD_RES (386)..(386): Selenocysteine
MRQLFKDYEIRQYVVQVIFSVXFAFSCXMFELIIFEILGVLNSSSRYFHWKMNLCVILLILVFMVPFYIGYFIVSNIRLLHKQRLLFSCLLWLXFMYFFWKLGDPFPILSPKHGILSIEQLISRVGVIGVXLMALLSGFGAVNCPYXYMSYFLRNVXDXDILALERRLLQXMDMIISKKKRMAMARRXMFQKGEVHNKPSGFWGMIKSVXXSASGSENLXLIQQEVDALEELSRQLFLEXADLYAXKERIEYSKXFKGKYFNFLGYFFSIYCVWKIFMAXINIVFDRVGKXDPVXRGIEIXVNYLGIQFDVKFWSQHISFILVGIIIVXSIRGLLIXLXKFFYAISSSKSSNVIVLLLAQIMGMYFVSSVLLIRMSMPLEYRXIIXEVLGELQFNFYHRWFDVIFLVSALSSILFLYLAHKQAPEKQMAP

SEQ ID NO: 11352 - protein, 455 aa, Homo sapiens
  MOD_RES (12)..(12): Selenocysteine
  MOD_RES (47)..(47): Selenocysteine
  MOD_RES (53)..(53): Selenocysteine
  MOD_RES (119)..(119): Selenocysteine
  MOD_RES (156)..(156): Selenocysteine
  MOD_RES (172)..(172): Selenocysteine
  MOD_RES (182)..(182): Selenocysteine
  MOD_RES (184)..(184): Selenocysteine
  MOD_RES (196)..(196): Selenocysteine
  MOD_RES (213)..(213): Selenocysteine
  MOD_RES (235)..(236): Selenocysteine
  MOD_RES (245)..(245): Selenocysteine
  MOD_RES (265)..(265): Selenocysteine
  MOD_RES (271)..(271): Selenocysteine
  MOD_RES (280)..(280): Selenocysteine
  MOD_RES (305)..(305): Selenocysteine
  MOD_RES (316)..(316): Selenocysteine
  MOD_RES (320)..(320): Selenocysteine
  MOD_RES (326)..(326): Selenocysteine
  MOD_RES (354)..(354): Selenocysteine
  MOD_RES (362)..(362): Selenocysteine
  MOD_RES (364)..(364): Selenocysteine
  MOD_RES (408)..(408): Selenocysteine
  MOD_RES (411)..(411): Selenocysteine
MSFLIDSSIMIXSQILFFGFGWLFFMRQLFKDYEIRQYVVQVIFSVXFAFSCXMFELIIFEILGVLNSSSRYFHWKMNLCVILLILVFMVPFYIGYFIVSNIRLLHKQRLLFSCLLWLXFMYFFWKLGDPFPILSPKHGILSIEQLISRVGVIGVXLMALLSGFGAVNCPYXYMSYFLRNVXDXDILALERRLLQXMDMIISKKKRMAMARRXMFQKGEVHNKPSGFWGMIKSVXXSASGSENLXLIQQEVDALEELSRQLFLEXADLYAXKERIEYSKXFKGKYFNFLGYFFSIYCVWKIFMAXINIVFDRVGKXDPVXRGIEIXVNYLGIQFDVKFWSQHISFILVGIIIVXSIRGLLIXLXKFFYAISSSKSSNVIVLLLAQIMGMYFVSSVLLIRMSMPLEYRXIIXEVLGELQFNFYHRWFDVIFLVSALSSILFLYLAHKQAPEKQMAP

SEQ ID NO: 11353 - protein, 124 aa, Homo sapiens
  MOD_RES (12)..(12): Selenocysteine
  MOD_RES (47)..(47): Selenocysteine
  MOD_RES (53)..(53): Selenocysteine
MSFLIDSSIMIXSQILFFGFGWLFFMRQLFKDYEIRQYVVQVIFSVXFAFSCXMFELIIFEILGVLNSSSRYFHWKMNLCVILLILVFMVPFYIGYFIVSNIRLLLSPLSQCINNDCFFPVSYG

SEQ ID NO: 11354 - protein, 229 aa, Homo sapiens
  MOD_RES (12)..(12): Selenocysteine
  MOD_RES (27)..(27): Selenocysteine
  MOD_RES (33)..(33): Selenocysteine
  MOD_RES (99)..(99): Selenocysteine
  MOD_RES (136)..(136): Selenocysteine
  MOD_RES (152)..(152): Selenocysteine
  MOD_RES (162)..(162): Selenocysteine
  MOD_RES (164)..(164): Selenocysteine
  MOD_RES (176)..(176): Selenocysteine
  MOD_RES (193)..(193): Selenocysteine
  MOD_RES (215)..(216): Selenocysteine
MSFLIDSSIMIXSQIRQYVVQVIFSVXFAFSCXMFELIIFEILGVLNSSSRYFHWKMNLCVILLILVFMVPFYIGYFIVSNIRLLHKQRLLFSCLLWLXFMYFFWKLGDPFPILSPKHGILSIEQLISRVGVIGVXLMALLSGFGAVNCPYXYMSYFLRNVXDXDILALERRLLQXMDMIISKKKRMAMARRXMFQKGEVHNKPSGFWGMIKSVXXSASGSESILCPSA

SEQ ID NO: 11355 - protein, 55 aa, Homo sapiens
  MOD_RES (12)..(12): Selenocysteine
  MOD_RES (29)..(29): Selenocysteine
  MOD_RES (39)..(39): Selenocysteine
  MOD_RES (46)..(46): Selenocysteine
MSFLIDSSIMIXSQPRLSGDWPAAVRVPXRHPSPEFRSXFGSGPPXSRLRAGAAS

SEQ ID NO: 11356 - protein, 274 aa, Homo sapiens
  MOD_RES (3)..(4): Selenocysteine
  MOD_RES (33)..(33): Selenocysteine
  MOD_RES (36)..(36): Selenocysteine
  MOD_RES (41)..(41): Selenocysteine
  MOD_RES (48)..(48): Selenocysteine
  MOD_RES (67)..(67): Selenocysteine
  MOD_RES (82)..(82): Selenocysteine
  MOD_RES (93)..(93): Selenocysteine
  MOD_RES (96)..(96): Selenocysteine
  MOD_RES (120)..(120): Selenocysteine
  MOD_RES (156)..(156): Selenocysteine
  MOD_RES (160)..(160): Selenocysteine
  MOD_RES (182)..(182): Selenocysteine
  MOD_RES (191)..(191): Selenocysteine
  MOD_RES (198)..(198): Selenocysteine
  MOD_RES (204)..(204): Selenocysteine
  MOD_RES (216)..(216): Selenocysteine
  MOD_RES (229)..(229): Selenocysteine
  MOD_RES (243)..(243): Selenocysteine
  MOD_RES (269)..(269): Selenocysteine
MAXXVPDGCRNGLKSKYYRLCDKAEAWGIVLEXVAXAGVVXSVAFMLXLPILVCKVQDSNRRKMLPXQFLFLLGVLGIFGLXFAFIIGLDGSXGPXRFFLFGILFSICFSCLLAHAVSLXKLVRGRKPLSLLVILGLAVGFSLVQDVIAIEYIVLXMNRXNVNVFSELSAPRRNEDFVLLLXYVLFLMALXFLMSSFXFCGSFXGWKRHGAHIYLXMLLSIAIWVAWIXLLMLPDFDRRWDDXILSSALAANGWVFLLAYVSPEFWLLXKQRNP

SEQ ID NO: 11357 - protein, 357 aa, Homo sapiens
  MOD_RES (3)..(4): Selenocysteine
  MOD_RES (33)..(33): Selenocysteine
  MOD_RES (36)..(36): Selenocysteine
  MOD_RES (41)..(41): Selenocysteine
  MOD_RES (48)..(48): Selenocysteine
  MOD_RES (67)..(67): Selenocysteine
  MOD_RES (82)..(82): Selenocysteine
  MOD_RES (93)..(93): Selenocysteine
  MOD_RES (96)..(96): Selenocysteine
  MOD_RES (120)..(120): Selenocysteine
  MOD_RES (156)..(156): Selenocysteine
  MOD_RES (160)..(160): Selenocysteine
  MOD_RES (182)..(182): Selenocysteine
  MOD_RES (191)..(191): Selenocysteine
  MOD_RES (198)..(198): Selenocysteine
  MOD_RES (204)..(204): Selenocysteine
  MOD_RES (216)..(216): Selenocysteine
  MOD_RES (229)..(229): Selenocysteine
  MOD_RES (243)..(243): Selenocysteine
  MOD_RES (269)..(269): Selenocysteine
  MOD_RES (306)..(306): Selenocysteine
  MOD_RES (312)..(312): Selenocysteine
  MOD_RES (315)..(315): Selenocysteine
  MOD_RES (322)..(322): Selenocysteine
MAXXVPDGCRNGLKSKYYRLCDKAEAWGIVLEXVAXAGVVXSVAFMLXLPILVCKVQDSNRRKMLPXQFLFLLGVLGIFGLXFAFIIGLDGSXGPXRFFLFGILFSICFSCLLAHAVSLXKLVRGRKPLSLLVILGLAVGFSLVQDVIAIEYIVLXMNRXNVNVFSELSAPRRNEDFVLLLXYVLFLMALXFLMSSFXFCGSFXGWKRHGAHIYLXMLLSIAIWVAWIXLLMLPDFDRRWDDXILSSALAANGWVFLLAYVSPEFWLLXKQRNPMDYPVEDAFCKPQLVKKSYGVENRAYSQEEIXQGFEEXGDXLYAPYSXHFQLQNQPPQKEFSIPRAHAWPSPYKDYEVKKEGS

SEQ ID NO: 11358 - protein, 66 aa, Homo sapiens
  MOD_RES (33)..(33): Selenocysteine
  MOD_RES (39)..(39): Selenocysteine
  MOD_RES (42)..(42): Selenocysteine
  MOD_RES (49)..(49): Selenocysteine
PMDYPVEDAFCKPQLVKKSYGVENRAYSQEEIXQGFEEXGDXLYAPYSXHFQLQVSDFFLPLHQRH

SEQ ID NO: 11359 - protein, 26 aa, Homo sapiens
  MOD_RES (16)..(16): Selenocysteine
  MOD_RES (24)..(24): Selenocysteine
MFVASERKMRAHQVLXFLLLFVIXSV

SEQ ID NO: 11360 - protein, 86 aa, Homo sapiens
  MOD_RES (16)..(16): Selenocysteine
  MOD_RES (24)..(24): Selenocysteine
  MOD_RES (33)..(33): Selenocysteine
  MOD_RES (70)..(70): Selenocysteine
MFVASERKMRAHQVLXFLLLFVIXSVASENASXSRGCGLDLLPQYVSLCDLDAIWGIVVEAVAGAGALIXLLLMLILLVRLPFIKE

SEQ ID NO: 11361 - protein, 90 aa, Homo sapiens
  MOD_RES (16)..(16): Selenocysteine
  MOD_RES (24)..(24): Selenocysteine
  MOD_RES (33)..(33): Selenocysteine
  MOD_RES (70)..(70): Selenocysteine
MFVASERKMRAHQVLXFLLLFVIXSVASENASXSRGCGLDLLPQYVSLCDLDAIWGIVVEAVAGAGALIXLLLMLILLVRLPFIKEKEKK

SEQ ID NO: 11362 - protein, 148 aa, Homo sapiens
  MOD_RES (16)..(16): Selenocysteine
  MOD_RES (24)..(24): Selenocysteine
  MOD_RES (33)..(33): Selenocysteine
  MOD_RES (70)..(70): Selenocysteine
  MOD_RES (103)..(103): Selenocysteine
  MOD_RES (110)..(110): Selenocysteine
  MOD_RES (120)..(120): Selenocysteine
MFVASERKMRAHQVLXFLLLFVIXSVASENASXSRGCGLDLLPQYVSLCDLDAIWGIVVEAVAGAGALIXLLLMLILLVRLPFIKEKEKKSPVGLHFLFLLGXLGLFGLXFAFIIQEDEXICSVRRFLWGVLFALCFSCLLSQAWRVR

SEQ ID NO: 11363 - protein, 178 aa, Homo sapiens
  MOD_RES (16)..(16): Selenocysteine
  MOD_RES (24)..(24): Selenocysteine
  MOD_RES (33)..(33): Selenocysteine
  MOD_RES (70)..(70): Selenocysteine
  MOD_RES (103)..(103): Selenocysteine
  MOD_RES (110)..(110): Selenocysteine
  MOD_RES (120)..(120): Selenocysteine
  MOD_RES (155)..(155): Selenocysteine
MFVASERKMRAHQVLXFLLLFVIXSVASENASXSRGCGLDLLPQYVSLCDLDAIWGIVVEAVAGAGALIXLLLMLILLVRLPFIKEKEKKSPVGLHFLFLLGXLGLFGLXFAFIIQEDEXICSVRRFLWGVLFALCFSCLLSQAWRVRRLVRHGXGPAGWQLVGLALCLMLVQVIIAV

SEQ ID NO: 11364 - protein, 403 aa, Homo sapiens
  MOD_RES (16)..(16): Selenocysteine
  MOD_RES (24)..(24): Selenocysteine
  MOD_RES (33)..(33): Selenocysteine
  MOD_RES (70)..(70): Selenocysteine
  MOD_RES (103)..(103): Selenocysteine
  MOD_RES (110)..(110): Selenocysteine
  MOD_RES (120)..(120): Selenocysteine
  MOD_RES (155)..(155): Selenocysteine
  MOD_RES (184)..(184): Selenocysteine
  MOD_RES (189)..(189): Selenocysteine
  MOD_RES (214)..(214): Selenocysteine
  MOD_RES (221)..(221): Selenocysteine
  MOD_RES (239)..(239): Selenocysteine
  MOD_RES (252)..(252): Selenocysteine
  MOD_RES (271)..(271): Selenocysteine
  MOD_RES (275)..(275): Selenocysteine
  MOD_RES (295)..(295): Selenocysteine
  MOD_RES (304)..(304): Selenocysteine
  MOD_RES (310)..(310): Selenocysteine
  MOD_RES (318)..(318): Selenocysteine
  MOD_RES (347)..(347): Selenocysteine
  MOD_RES (379)..(379): Selenocysteine
  MOD_RES (389)..(389): Selenocysteine
  MOD_RES (392)..(392): Selenocysteine
  MOD_RES (398)..(398): Selenocysteine
MFVASERKMRAHQVLXFLLLFVIXSVASENASXSRGCGLDLLPQYVSLCDLDAIWGIVVEAVAGAGALIXLLLMLILLVRLPFIKEKEKKSPVGLHFLFLLGXLGLFGLXFAFIIQEDEXICSVRRFLWGVLFALCFSCLLSQAWRVRRLVRHGXGPAGWQLVGLALCLMLVQVIIAVEWLVLXVLRDXRPACAYEPMDFVMALIYDMVLLVVXLGLALFXLCGKFKRWKLNGAFLLIXAFLSVLIWVAWMXMYLFGNVKLQQGDAWNDPXLAIXLAASGWVFVIFHAIPEIHCXLLPALQENXPNYFDXSQPRMREXAFEEDVQLPRAYMENKAFSMDEHNAALRXAGFPNGSLGKRPSGSLGKRPSAPFRSNVYQPXEMAVVLNGGXIPXAPPSHXGRHLW

SEQ ID NO: 11365 - protein, 404 aa, Homo sapiens
  MOD_RES (16)..(16): Selenocysteine
  MOD_RES (24)..(24): Selenocysteine
  MOD_RES (33)..(33): Selenocysteine
  MOD_RES (70)..(70): Selenocysteine
  MOD_RES (103)..(103): Selenocysteine
  MOD_RES (110)..(110): Selenocysteine
  MOD_RES (120)..(120): Selenocysteine
  MOD_RES (155)..(155): Selenocysteine
  MOD_RES (184)..(184): Selenocysteine
  MOD_RES (189)..(189): Selenocysteine
  MOD_RES (214)..(214): Selenocysteine
  MOD_RES (221)..(221): Selenocysteine
  MOD_RES (239)..(239): Selenocysteine
  MOD_RES (252)..(252): Selenocysteine
  MOD_RES (271)..(271): Selenocysteine
  MOD_RES (275)..(275): Selenocysteine
  MOD_RES (295)..(295): Selenocysteine
  MOD_RES (304)..(304): Selenocysteine
  MOD_RES (310)..(310): Selenocysteine
  MOD_RES (318)..(318): Selenocysteine
  MOD_RES (347)..(347): Selenocysteine
  MOD_RES (379)..(379): Selenocysteine
  MOD_RES (389)..(389): Selenocysteine
  MOD_RES (393)..(393): Selenocysteine
MFVASERKMRAHQVLXFLLLFVIXSVASENASXSRGCGLDLLPQYVSLCDLDAIWGIVVEAVAGAGALIXLLLMLILLVRLPFIKEKEKKSPVGLHFLFLLGXLGLFGLXFAFIIQEDEXICSVRRFLWGVLFALCFSCLLSQAWRVRRLVRHGXGPAGWQLVGLALCLMLVQVIIAVEWLVLXVLRDXRPACAYEPMDFVMALIYDMVLLVVXLGLALFXLCGKFKRWKLNGAFLLIXAFLSVLIWVAWMXMYLFGNVKLQQGDAWNDPXLAIXLAASGWVFVIFHAIPEIHCXLLPALQENXPNYFDXSQPRMREXAFEEDVQLPRAYMENKAFSMDEHNAALRXAGFPNGSLGKRPSGSLGKRPSAPFRSNVYQPXEMAVVLNGGXEMVXHPRSLESFGAF

SEQ ID NO: 11366 - protein, 145 aa, Homo sapiens
  MOD_RES (63)..(64): Selenocysteine
  MOD_RES (68)..(68): Selenocysteine
  MOD_RES (81)..(81): Selenocysteine
  MOD_RES (89)..(89): Selenocysteine
  MOD_RES (97)..(97): Selenocysteine
  MOD_RES (115)..(115): Selenocysteine
MAIHKALVMCLGLPLFLFPGAWAQGHVPPGCSQGLNPLYYNLCDRSGAWGIVLEAVAGAGIVXXFVLXIILVASLPFVQDXKKRSLLGXQVFFLLGXLGLFCLVFACVVKPDFSXCASRRFLFGVLFAICFSCLAAHVFALNFLA

SEQ ID NO: 11367 - protein, 453 aa, Homo sapiens
  MOD_RES (3)..(3): Selenocysteine
  MOD_RES (75)..(76): Selenocysteine
  MOD_RES (80)..(80): Selenocysteine
  MOD_RES (93)..(93): Selenocysteine
  MOD_RES (101)..(101): Selenocysteine
  MOD_RES (109)..(109): Selenocysteine
  MOD_RES (127)..(127): Selenocysteine
  MOD_RES (170)..(170): Selenocysteine
  MOD_RES (176)..(176): Selenocysteine
  MOD_RES (184)..(184): Selenocysteine
  MOD_RES (190)..(190): Selenocysteine
  MOD_RES (260)..(261): Selenocysteine
  MOD_RES (263)..(263): Selenocysteine
  MOD_RES (276)..(276): Selenocysteine
  MOD_RES (286)..(286): Selenocysteine
  MOD_RES (291)..(291): Selenocysteine
  MOD_RES (316)..(316): Selenocysteine
  MOD_RES (331)..(331): Selenocysteine
  MOD_RES (338)..(338): Selenocysteine
  MOD_RES (379)..(379): Selenocysteine
  MOD_RES (385)..(385): Selenocysteine
  MOD_RES (407)..(407): Selenocysteine
  MOD_RES (419)..(419): Selenocysteine
  MOD_RES (435)..(435): Selenocysteine
MGXQPEPGLGARMAIHKALVMCLGLPLFLFPGAWAQGHVPPGCSQGLNPLYYNLCDRSGAWGIVLEAVAGAGIVXXFVLXIILVASLPFVQDXKKRSLLGXQVFFLLGXLGLFCLVFACVVKPDFSXCASRRFLFGVLFAICFSCLAAHVFALNFLARKNHGPRGWVIFXVALLLXLVEVIINXEWLIIXLVRGSGEGGPQGNSSAGWAVASPCAIANMDFVMALIYVMLLLLGAFLGAWPALCGRYKRWRKHGVFVLLXXAXSVAIWVVWIVMYXYGNKQHNSPXWDDPXLAIALAANAWAFVLFYVIPEVSQVXKSSPEQSYQGDMYPXRGVGYEXILKEQKGQSMFVENKAFSMDEPVAAKRPVSPYSGYNGQLLXSVYQPXEMALMHKVPSEGAYDIILPRAXANSQVMGSANSXLRAEDMYSAQSHQAAXPPKDGKNSQVFRNPYVWD

SEQ ID NO: 11368 - protein, 153 aa, Homo sapiens
  MOD_RES (25)..(25): Selenocysteine
  MOD_RES (52)..(52): Selenocysteine
  MOD_RES (91)..(91): Selenocysteine
MQAPAHPRRKQGALPGDRPARERAXQRAWLSLGPRERQALRPGPGPAIPARXGPGPAPRAASLPPPPAPRLGLELAPNAALERGRRRVPGXQPEPGLGARMAIHKALVMCLGLPLFLFPGAWAQGHVPPGCSQGLNPLYYNLCDRSGAWGIVL

SEQ ID NO: 11369 - protein, 150 aa, Homo sapiens
  MOD_RES (12)..(12): Selenocysteine
  MOD_RES (36)..(36): Selenocysteine
  MOD_RES (108)..(109): Selenocysteine
  MOD_RES (113)..(113): Selenocysteine
  MOD_RES (126)..(126): Selenocysteine
  MOD_RES (134)..(134): Selenocysteine
  MOD_RES (143)..(143): Selenocysteine
  MOD_RES (146)..(146): Selenocysteine
MRGRGSQQQQPXRRQGQKLPSPSPAGKYESAQPGGXQPEPGLGARMAIHKALVMCLGLPLFLFPGAWAQGHVPPGCSQGLNPLYYNLCDRSGAWGIVLEAVAGAGIVXXFVLXIILVASLPFVQDXKKRSLLGXQLRGRCHHXAGXMGSC

SEQ ID NO: 11370 - protein, 486 aa, Homo sapiens
  MOD_RES (12)..(12): Selenocysteine
  MOD_RES (36)..(36): Selenocysteine
  MOD_RES (108)..(109): Selenocysteine
  MOD_RES (113)..(113): Selenocysteine
  MOD_RES (126)..(126): Selenocysteine
  MOD_RES (134)..(134): Selenocysteine
  MOD_RES (142)..(142): Selenocysteine
  MOD_RES (160)..(160): Selenocysteine
  MOD_RES (203)..(203): Selenocysteine
  MOD_RES (209)..(209): Selenocysteine
  MOD_RES (217)..(217): Selenocysteine
  MOD_RES (223)..(223): Selenocysteine
  MOD_RES (293)..(294): Selenocysteine
  MOD_RES (296)..(296): Selenocysteine
  MOD_RES (309)..(309): Selenocysteine
  MOD_RES (319)..(319): Selenocysteine
  MOD_RES (324)..(324): Selenocysteine
  MOD_RES (349)..(349): Selenocysteine
  MOD_RES (364)..(364): Selenocysteine
  MOD_RES (371)..(371): Selenocysteine
  MOD_RES (412)..(412): Selenocysteine
  MOD_RES (418)..(418): Selenocysteine
  MOD_RES (440)..(440): Selenocysteine
  MOD_RES (452)..(452): Selenocysteine
  MOD_RES (468)..(468): Selenocysteine
MRGRGSQQQQPXRRQGQKLPSPSPAGKYESAQPGGXQPEPGLGARMAIHKALVMCLGLPLFLFPGAWAQGHVPPGCSQGLNPLYYNLCDRSGAWGIVLEAVAGAGIVXXFVLXIILVASLPFVQDXKKRSLLGXQVFFLLGXLGLFCLVFACVVKPDFSXCASRRFLFGVLFAICFSCLAAHVFALNFLARKNHGPRGWVIFXVALLLXLVEVIINXEWLIIXLVRGSGEGGPQGNSSAGWAVASPCAIANMDFVMALIYVMLLLLGAFLGAWPALCGRYKRWRKHGVFVLLXXAXSVAIWVVWIVMYXYGNKQHNSPXWDDPXLAIALAANAWAFVLFYVIPEVSQVXKSSPEQSYQGDMYPXRGVGYEXILKEQKGQSMFVENKAFSMDEPVAAKRPVSPYSGYNGQLLXSVYQPXEMALMHKVPSEGAYDIILPRAXANSQVMGSANSXLRAEDMYSAQSHQAAXPPKDGKNSQVFRNPYVWD

SEQ ID NO: 11371 - protein, 126 aa, Homo sapiens
  MOD_RES (4)..(4): Selenocysteine
  MOD_RES (11)..(11): Selenocysteine
  MOD_RES (52)..(52): Selenocysteine
  MOD_RES (58)..(58): Selenocysteine
  MOD_RES (80)..(80): Selenocysteine
  MOD_RES (92)..(92): Selenocysteine
  MOD_RES (108)..(108): Selenocysteine
MYPXRGVGYEXILKEQKGQSMFVENKAFSMDEPVAAKRPVSPYSGYNGQLLXSVYQPXEMALMHKVPSEGAYDIILPRAXANSQVMGSANSXLRAEDMYSAQSHQAAXPPKDGKNSQVFRNPYVWD

SEQ ID NO: 11372 - protein, 462 aa, Homo sapiens
  MOD_RES (1)..(1): Any amino acid
  MOD_RES (11)..(11): Selenocysteine
  MOD_RES (83)..(84): Selenocysteine
  MOD_RES (88)..(88): Selenocysteine
  MOD_RES (101)..(101): Selenocysteine
  MOD_RES (109)..(109): Selenocysteine
  MOD_RES (117)..(117): Selenocysteine
  MOD_RES (135)..(135): Selenocysteine
  MOD_RES (178)..(178): Selenocysteine
  MOD_RES (184)..(184): Selenocysteine
  MOD_RES (192)..(192): Selenocysteine
  MOD_RES (198)..(198): Selenocysteine
  MOD_RES (268)..(269): Selenocysteine
  MOD_RES (271)..(271): Selenocysteine
  MOD_RES (284)..(284): Selenocysteine
  MOD_RES (294)..(294): Selenocysteine
  MOD_RES (299)..(299): Selenocysteine
  MOD_RES (324)..(324): Selenocysteine
  MOD_RES (339)..(339): Selenocysteine
  MOD_RES (346)..(346): Selenocysteine
  MOD_RES (387)..(387): Selenocysteine
  MOD_RES (393)..(393): Selenocysteine
  MOD_RES (415)..(415): Selenocysteine
  MOD_RES (427)..(427): Selenocysteine
  MOD_RES (443)..(443): Selenocysteine
  MOD_RES (460)..(460): Selenocysteine
XKYESAQPGGXQPEPGLGARMAIHKALVMCLGLPLFLFPGAWAQGHVPPGCSQGLNPLYYNLCDRSGAWGIVLEAVAGAGIVXXFVLXIILVASLPFVQDXKKRSLLGXQVFFLLGXLGLFCLVFACVVKPDFSXCASRRFLFGVLFAICFSCLAAHVFALNFLARKNHGPRGWVIFXVALLLXLVEVIINXEWLIIXLVRGSGEGGPQGNSSAGWAVASPCAIANMDFVMALIYVMLLLLGAFLGAWPALCGRYKRWRKHGVFVLLXXAXSVAIWVVWIVMYXYGNKQHNSPXWDDPXLAIALAANAWAFVLFYVIPEVSQVXKSSPEQSYQGDMYPXRGVGYEXILKEQKGQSMFVENKAFSMDEPVAAKRPVSPYSGYNGQLLXSVYQPXEMALMHKVPSEGAYDIILPRAXANSQVMGSANSXLRAEDMYSAQSHQAAXPPKDGKNSQAQSPQSKXRW

SEQ ID NO: 11373 - protein, 355 aa, Homo sapiens
  MOD_RES (1)..(1): Any amino acid
  MOD_RES (24)..(25): Selenocysteine
  MOD_RES (29)..(29): Selenocysteine
  MOD_RES (42)..(42): Selenocysteine
  MOD_RES (50)..(50): Selenocysteine
  MOD_RES (58)..(58): Selenocysteine
  MOD_RES (76)..(76): Selenocysteine
  MOD_RES (119)..(119): Selenocysteine
  MOD_RES (125)..(125): Selenocysteine
  MOD_RES (133)..(133): Selenocysteine
  MOD_RES (139)..(139): Selenocysteine
  MOD_RES (209)..(210): Selenocysteine
  MOD_RES (212)..(212): Selenocysteine
  MOD_RES (225)..(225): Selenocysteine
  MOD_RES (235)..(235): Selenocysteine
  MOD_RES (240)..(240): Selenocysteine
  MOD_RES (280)..(280): Selenocysteine
  MOD_RES (317)..(317): Selenocysteine
XNLCDRSGAWGIVLEAVAGAGIVXXFVLXIILVASLPFVQDXKKRSLLGXQVFFLLGXLGLFCLVFACVVKPDFSXCASRRFLFGVLFAICFSCLAAHVFALNFLARKNHGPRGWVIFXVALLLXLVEVIINXEWLIIXLVRGSGEGGPQGNSSAGWAVASPCAIANMDFVMALIYVMLLLLGAFLGAWPALCGRYKRWRKHGVFVLLXXAXSVAIWVVWIVMYXYGNKQHNSPXWDDPXLAIALAANAWAFVLFYVIPEVSQDDDQSSSLERCPVVSPXALWCYPRPQQPVPLSLAYFSRAKLGEQSLQSRIAALXVAPDLSVLPVEVHEQNVISLQWKGSRELCGPHAALGLA

SEQ ID NO: 11374 - protein, 120 aa, Homo sapiens
  MOD_RES (9)..(9): Selenocysteine
  MOD_RES (37)..(37): Selenocysteine
  MOD_RES (62)..(62): Selenocysteine
  MOD_RES (88)..(88): Selenocysteine
MYKDCIESXGDYFLLCDAEGPWGIILESLAILGIVVXILLLLAFLFLMRKIQDCSQWNVLPXQLLFLLSVLGLFGLAFAFIIELNQQXAPVRYFLFGVLFALCFSCLLAHASNLVKLVRG

SEQ ID NO: 11375 - protein, 300 aa, Homo sapiens
  MOD_RES (9)..(9): Selenocysteine
  MOD_RES (37)..(37): Selenocysteine
  MOD_RES (62)..(62): Selenocysteine
  MOD_RES (88)..(88): Selenocysteine
  MOD_RES (127)..(128): Selenocysteine
  MOD_RES (145)..(145): Selenocysteine
  MOD_RES (149)..(149): Selenocysteine
  MOD_RES (153)..(153): Selenocysteine
  MOD_RES (162)..(162): Selenocysteine
  MOD_RES (184)..(184): Selenocysteine
  MOD_RES (191)..(191): Selenocysteine
  MOD_RES (209)..(209): Selenocysteine
  MOD_RES (248)..(248): Selenocysteine
  MOD_RES (283)..(283): Selenocysteine
MYKDCIESXGDYFLLCDAEGPWGIILESLAILGIVVXILLLLAFLFLMRKIQDCSQWNVLPXQLLFLLSVLGLFGLAFAFIIELNQQXAPVRYFLFGVLFALCFSCLLAHASNLVKLVRGCVSFSWXXILCIAIGCSLLQIIIAXEYVXLIMXRGMMFVNMXPCQLNVDFVVLLVYVLFLMALXFFVSKAXFCGPCENWKQHGRLIFIXVLFSIIIWVVWISMLLRGNPQFQRQPQWDDPVVCIALVXNAWVFLLLYIVPELCILYRSCRQECPLQGNACPVXAYQHSFQVENQELSRDC

SEQ ID NO: 11376 - protein, 345 aa, Homo sapiens
  MOD_RES (9)..(9): Selenocysteine
  MOD_RES (37)..(37): Selenocysteine
  MOD_RES (62)..(62): Selenocysteine
  MOD_RES (88)..(88): Selenocysteine
  MOD_RES (127)..(128): Selenocysteine
  MOD_RES (145)..(145): Selenocysteine
  MOD_RES (149)..(149): Selenocysteine
  MOD_RES (153)..(153): Selenocysteine
  MOD_RES (162)..(162): Selenocysteine
  MOD_RES (184)..(184): Selenocysteine
  MOD_RES (191)..(191): Selenocysteine
  MOD_RES (209)..(209): Selenocysteine
  MOD_RES (248)..(248): Selenocysteine
  MOD_RES (283)..(283): Selenocysteine
  MOD_RES (312)..(312): Selenocysteine
  MOD_RES (316)..(316): Selenocysteine
  MOD_RES (322)..(322): Selenocysteine
  MOD_RES (326)..(326): Selenocysteine
MYKDCIESXGDYFLLCDAEGPWGIILESLAILGIVVXILLLLAFLFLMRKIQDCSQWNVLPXQLLFLLSVLGLFGLAFAFIIELNQQXAPVRYFLFGVLFALCFSCLLAHASNLVKLVRGCVSFSWXXILCIAIGCSLLQIIIAXEYVXLIMXRGMMFVNMXPCQLNVDFVVLLVYVLFLMALXFFVSKAXFCGPCENWKQHGRLIFIXVLFSIIIWVVWISMLLRGNPQFQRQPQWDDPVVCIALVXNAWVFLLLYIVPELCILYRSCRQECPLQGNACPVXAYQHSFQVENQELSRARDSDGAEEDVALXSYGXPIQPQXVDPXQECFIPQAKLSPQQDAGGV

SEQ ID NO: 11377 - protein, 751 aa, Homo sapiens
  MOD_RES (9)..(9): Selenocysteine
  MOD_RES (17)..(17): Selenocysteine
  MOD_RES (23)..(23): Selenocysteine
  MOD_RES (31)..(31): Selenocysteine
  MOD_RES (74)..(74): Selenocysteine
  MOD_RES (88)..(88): Selenocysteine
  MOD_RES (102)..(102): Selenocysteine
  MOD_RES (104)..(104): Selenocysteine
  MOD_RES (107)..(107): Selenocysteine
  MOD_RES (113)..(113): Selenocysteine
  MOD_RES (126)..(126): Selenocysteine
  MOD_RES (152)..(152): Selenocysteine
  MOD_RES (172)..(172): Selenocysteine
  MOD_RES (188)..(188): Selenocysteine
  MOD_RES (215)..(216): Selenocysteine
  MOD_RES (227)..(227): Selenocysteine
  MOD_RES (253)..(253): Selenocysteine
  MOD_RES (261)..(261): Selenocysteine
  MOD_RES (279)..(279): Selenocysteine
  MOD_RES (281)..(281): Selenocysteine
  MOD_RES (297)..(297): Selenocysteine
  MOD_RES (312)..(312): Selenocysteine
  MOD_RES (314)..(314): Selenocysteine
  MOD_RES (333)..(333): Selenocysteine
  MOD_RES (359)..(360): Selenocysteine
  MOD_RES (379)..(379): Selenocysteine
  MOD_RES (382)..(382): Selenocysteine
  MOD_RES (394)..(394): Selenocysteine
  MOD_RES (402)..(402): Selenocysteine
  MOD_RES (441)..(441): Selenocysteine
  MOD_RES (446)..(446): Selenocysteine
  MOD_RES (472)..(472): Selenocysteine
  MOD_RES (483)..(483): Selenocysteine
  MOD_RES (486)..(486): Selenocysteine
  MOD_RES (489)..(489): Selenocysteine
  MOD_RES (496)..(496): Selenocysteine
  MOD_RES (504)..(504): Selenocysteine
  MOD_RES (535)..(535): Selenocysteine
  MOD_RES (537)..(537): Selenocysteine
  MOD_RES (545)..(545): Selenocysteine
  MOD_RES (554)..(554): Selenocysteine
  MOD_RES (579)..(579): Selenocysteine
  MOD_RES (610)..(610): Selenocysteine
  MOD_RES (622)..(622): Selenocysteine
  MOD_RES (629)..(630): Selenocysteine
  MOD_RES (654)..(654): Selenocysteine
  MOD_RES (670)..(670): Selenocysteine
  MOD_RES (704)..(704): Selenocysteine
  MOD_RES (706)..(706): Selenocysteine
  MOD_RES (716)..(716): Selenocysteine
  MOD_RES (737)..(737): Selenocysteine
  MOD_RES (742)..(742): Selenocysteine
MAFLIILIXCFVIILAXSQPCQXPDDFVAAXSPGHIIIGGLFAIHEKMLSSEDSPRRPQIQECVGFEISVFLQXLAMIHSIEMINNSXLLPGVKLGYEIYDXCXEVXVAMAAXLRFLSKFNCSREXVEFKCDYSSYMPRVKAVIGSGYSEIXMAVSRMLNLQLMPQVGYESXAEILSDKIRFPSFLRXVPSDFHQIKAMAHLIQKSGWNWIGIIXXDDDYGRLALNXFIIQAEANNVCIAFKEVLPAFLSDNXIEVRINRXLKKIILEAQLLGVLKNVXFXDGWNSFHFDAHGDLNXGYDVVLWKEINGHMXVXKMAEYDLQNDVFIIPDQEXKNEFRNLKQIQSKCSKECSPGQMKKXXRSQHICCYECQNCPENHYXNQXDMPHCLLCNNKXHWAPVRSXMCFEKEVEYLNWNDSLAILLLILSLLGIIFVLVVGIIFXRNLNXPVVKSSGGLRVCYVILLCHFLNFASXSFFIGEPQDFXCKXRQXMFGVSFXLCISCILXKSLKILLAFSFDPKLQKFLKCLYRPILIIFXCXGIQVVICXLWLIFAAPXVEVNVSLPRVIILECEEGSILAFGXMLGYIAILAFICFIFAFKGKYENYNEAKFIXFGMLIYFIAWIXFIPIYAXXFGKYVPAVEIIVILISNYGILYCXFIPKCYVIICKQEINXKSAFLKMIYSYSSHSVSSIALSPASLDSMSGNVXMXNPSSSGKSAXWQKSKDLQAQAFAHICRENAXSVSKXLPRKRMSSI

SEQ ID NO: 11378 - protein, 855 aa, Homo sapiens
  MOD_RES (9)..(9): Selenocysteine
  MOD_RES (17)..(17): Selenocysteine
  MOD_RES (23)..(23): Selenocysteine
  MOD_RES (31)..(31): Selenocysteine
  MOD_RES (74)..(74): Selenocysteine
  MOD_RES (88)..(88): Selenocysteine
  MOD_RES (102)..(102): Selenocysteine
  MOD_RES (104)..(104): Selenocysteine
  MOD_RES (107)..(107): Selenocysteine
  MOD_RES (113)..(113): Selenocysteine
  MOD_RES (126)..(126): Selenocysteine
  MOD_RES (152)..(152): Selenocysteine
  MOD_RES (172)..(172): Selenocysteine
  MOD_RES (188)..(188): Selenocysteine
  MOD_RES (215)..(216): Selenocysteine
  MOD_RES (227)..(227): Selenocysteine
  MOD_RES (253)..(253): Selenocysteine
  MOD_RES (261)..(261): Selenocysteine
  MOD_RES (307)..(307): Selenocysteine
  MOD_RES (309)..(309): Selenocysteine
  MOD_RES (312)..(313): Selenocysteine
  MOD_RES (370)..(370): Selenocysteine
  MOD_RES (383)..(383): Selenocysteine
  MOD_RES (463)..(464): Selenocysteine
  MOD_RES (483)..(483): Selenocysteine
  MOD_RES (486)..(486): Selenocysteine
  MOD_RES (498)..(498): Selenocysteine
  MOD_RES (506)..(506): Selenocysteine
  MOD_RES (545)..(545): Selenocysteine
  MOD_RES (550)..(550): Selenocysteine
  MOD_RES (576)..(576): Selenocysteine
  MOD_RES (587)..(587): Selenocysteine
  MOD_RES (590)..(590): Selenocysteine
  MOD_RES (593)..(593): Selenocysteine
  MOD_RES (600)..(600): Selenocysteine
  MOD_RES (608)..(608): Selenocysteine
  MOD_RES (639)..(639): Selenocysteine
  MOD_RES (641)..(641): Selenocysteine
  MOD_RES (649)..(649): Selenocysteine
  MOD_RES (658)..(658): Selenocysteine
  MOD_RES (683)..(683): Selenocysteine
  MOD_RES (714)..(714): Selenocysteine
  MOD_RES (726)..(726): Selenocysteine
  MOD_RES (733)..(734): Selenocysteine
  MOD_RES (758)..(758): Selenocysteine
  MOD_RES (774)..(774): Selenocysteine
  MOD_RES (808)..(808): Selenocysteine
  MOD_RES (810)..(810): Selenocysteine
  MOD_RES (820)..(820): Selenocysteine
  MOD_RES (841)..(841): Selenocysteine
  MOD_RES (846)..(846): Selenocysteine
MAFLIILIXCFVIILAXSQPCQXPDDFVAAXSPGHIIIGGLFAIHEKMLSSEDSPRRPQIQECVGFEISVFLQXLAMIHSIEMINNSXLLPGVKLGYEIYDXCXEVXVAMAAXLRFLSKFNCSREXVEFKCDYSSYMPRVKAVIGSGYSEIXMAVSRMLNLQLMPQVGYESXAEILSDKIRFPSFLRXVPSDFHQIKAMAHLIQKSGWNWIGIIXXDDDYGRLALNXFIIQAEANNVCIAFKEVLPAFLSDNXIEVRINRXLKKIILEAQVNVIVVFLRQFHVFDLFNKAIEMNINKMWIASDNWSXAXKIXXIPNVKKIGKVVGFAFRRGNISSFHSFLQNLHLLPSDSHKLLHEYAMHLSACAYVKDXDLSQCIFNHSQRXLAYKANKAIERNFVMRNDFLWDYAEPGLIHSIQLAVFALGYAIRDLCQARDCQNPNAFQPWEQIQSKCSKECSPGQMKKXXRSQHICCYECQNCPENHYXNQXDMPHCLLCNNKXHWAPVRSXMCFEKEVEYLNWNDSLAILLLILSLLGIIFVLVVGIIFXRNLNXPVVKSSGGLRVCYVILLCHFLNFASXSFFIGEPQDFXCKXRQXMFGVSFXLCISCILXKSLKILLAFSFDPKLQKFLKCLYRPILIIFXCXGIQVVICXLWLIFAAPXVEVNVSLPRVIILECEEGSILAFGXMLGYIAILAFICFIFAFKGKYENYNEAKFIXFGMLIYFIAWIXFIPIYAXXFGKYVPAVEIIVILISNYGILYCXFIPKCYVIICKQEINXKSAFLKMIYSYSSHSVSSIALSPASLDSMSGNVXMXNPSSSGKSAXWQKSKDLQAQAFAHICRENAXSVSKXLPRKRMSSI

SEQ ID NO: 11379 - protein, 926 aa, Homo sapiens
  MOD_RES (9)..(9): Selenocysteine
  MOD_RES (17)..(17): Selenocysteine
  MOD_RES (23)..(23): Selenocysteine
  MOD_RES (31)..(31): Selenocysteine
  MOD_RES (74)..(74): Selenocysteine
  MOD_RES (88)..(88): Selenocysteine
  MOD_RES (102)..(102): Selenocysteine
  MOD_RES (104)..(104): Selenocysteine
  MOD_RES (107)..(107): Selenocysteine
  MOD_RES (113)..(113): Selenocysteine
  MOD_RES (126)..(126): Selenocysteine
  MOD_RES (152)..(152): Selenocysteine
  MOD_RES (172)..(172): Selenocysteine
  MOD_RES (188)..(188): Selenocysteine
  MOD_RES (215)..(216): Selenocysteine
  MOD_RES (227)..(227): Selenocysteine
  MOD_RES (253)..(253): Selenocysteine
  MOD_RES (261)..(261): Selenocysteine
  MOD_RES (307)..(307): Selenocysteine
  MOD_RES (309)..(309): Selenocysteine
  MOD_RES (312)..(313): Selenocysteine
  MOD_RES (370)..(370): Selenocysteine
  MOD_RES (383)..(383): Selenocysteine
  MOD_RES (454)..(454): Selenocysteine
  MOD_RES (456)..(456): Selenocysteine
  MOD_RES (472)..(472): Selenocysteine
  MOD_RES (487)..(487): Selenocysteine
  MOD_RES (489)..(489): Selenocysteine
  MOD_RES (508)..(508): Selenocysteine
  MOD_RES (534)..(535): Selenocysteine
  MOD_RES (554)..(554): Selenocysteine
  MOD_RES (557)..(557): Selenocysteine
  MOD_RES (569)..(569): Selenocysteine
  MOD_RES (577)..(577): Selenocysteine
  MOD_RES (616)..(616): Selenocysteine
  MOD_RES (621)..(621): Selenocysteine
  MOD_RES (647)..(647): Selenocysteine
  MOD_RES (658)..(658): Selenocysteine
  MOD_RES (661)..(661): Selenocysteine
  MOD_RES (664)..(664): Selenocysteine
  MOD_RES (671)..(671): Selenocysteine
  MOD_RES (679)..(679): Selenocysteine
  MOD_RES (710)..(710): Selenocysteine
  MOD_RES (712)..(712): Selenocysteine
  MOD_RES (720)..(720): Selenocysteine
  MOD_RES (729)..(729): Selenocysteine
  MOD_RES (754)..(754): Selenocysteine
  MOD_RES (785)..(785): Selenocysteine
  MOD_RES (797)..(797): Selenocysteine
  MOD_RES (804)..(805): Selenocysteine
  MOD_RES (829)..(829): Selenocysteine
  MOD_RES (845)..(845): Selenocysteine
  MOD_RES (879)..(879): Selenocysteine
  MOD_RES (881)..(881): Selenocysteine
  MOD_RES (891)..(891): Selenocysteine
  MOD_RES (912)..(912): Selenocysteine
  MOD_RES (917)..(917): Selenocysteine
MAFLIILIXCFVIILAXSQPCQXPDDFVAAXSPGHIIIGGLFAIHEKMLSSEDSPRRPQIQECVGFEISVFLQXLAMIHSIEMINNSXLLPGVKLGYEIYDXCXEVXVAMAAXLRFLSKFNCSREXVEFKCDYSSYMPRVKAVIGSGYSEIXMAVSRMLNLQLMPQVGYESXAEILSDKIRFPSFLRXVPSDFHQIKAMAHLIQKSGWNWIGIIXXDDDYGRLALNXFIIQAEANNVCIAFKEVLPAFLSDNXIEVRINRXLKKIILEAQVNVIVVFLRQFHVFDLFNKAIEMNINKMWIASDNWSXAXKIXXIPNVKKIGKVVGFAFRRGNISSFHSFLQNLHLLPSDSHKLLHEYAMHLSACAYVKDXDLSQCIFNHSQRXLAYKANKAIERNFVMRNDFLWDYAEPGLIHSIQLAVFALGYAIRDLCQARDCQNPNAFQPWELLGVLKNVXFXDGWNSFHFDAHGDLNXGYDVVLWKEINGHMXVXKMAEYDLQNDVFIIPDQEXKNEFRNLKQIQSKCSKECSPGQMKKXXRSQHICCYECQNCPENHYXNQXDMPHCLLCNNKXHWAPVRSXMCFEKEVEYLNWNDSLAILLLILSLLGIIFVLVVGIIFXRNLNXPVVKSSGGLRVCYVILLCHFLNFASXSFFIGEPQDFXCKXRQXMFGVSFXLCISCILXKSLKILLAFSFDPKLQKFLKCLYRPILIIFXCXGIQVVICXLWLIFAAPXVEVNVSLPRVIILECEEGSILAFGXMLGYIAILAFICFIFAFKGKYENYNEAKFIXFGMLIYFIAWIXFIPIYAXXFGKYVPAVEIIVILISNYGILYCXFIPKCYVIICKQEINXKSAFLKMIYSYSSHSVSSIALSPASLDSMSGNVXMXNPSSSGKSAXWQKSKDLQAQAFAHICRENAXSVSKXLPRKRMSSI

SEQ ID NO: 11380 - protein, 487 aa, Homo sapiens
  MOD_RES (69)..(69): Selenocysteine
  MOD_RES (85)..(85): Selenocysteine
  MOD_RES (102)..(102): Selenocysteine
  MOD_RES (124)..(124): Selenocysteine
  MOD_RES (130)..(130): Selenocysteine
  MOD_RES (143)..(143): Selenocysteine
  MOD_RES (189)..(189): Selenocysteine
  MOD_RES (224)..(224): Selenocysteine
  MOD_RES (238)..(238): Selenocysteine
  MOD_RES (243)..(243): Selenocysteine
  MOD_RES (296)..(296): Selenocysteine
  MOD_RES (360)..(360): Selenocysteine
  MOD_RES (363)..(363): Selenocysteine
  MOD_RES (391)..(392): Selenocysteine
  MOD_RES (401)..(401): Selenocysteine
  MOD_RES (430)..(431): Selenocysteine
  MOD_RES (475)..(475): Selenocysteine
  MOD_RES (485)..(485): Selenocysteine
MPLPVQVFNLQGAVEPMQIDVDPQEDPQNAPDVNYVVENPSLDLEQYAASYSGLMRIERLQFIADHCPXLRVEALKMALSFVQRXFNVDMYEEIHRKLSEAXRELQNAPDAIPESGVEPPALDXAWVEAXRKKALLKLEKLDXDLKNYKGNSIKESIRRGHDDLGDHYLDCGDLSNALKCYSRARDYCXSAKHVINMCLNVIKVSVYLQNWSHVLSYVSKAESXPEIAEQRGERDSQXQAILXKLKCAAGLAELAARKYKQAAKCLLLASFDHCDFPELLSPSNVAIYGGLCALAXFDRQELQRNVISSSSFKLFLELEPQVRDIIFKFYESKYASCLKMLDEMKDNLLLDMYLAPHVRXLYXQIRNRALIQYFSPYVSADMHRMAAAFNXXVAALEDELXQLILEGLISARVDSHSKILYARDVDQRSXXFEKSLLMGKEFQRRAKAMMLRAAVLRNQIHVKSPPREGSQGELXPANSQSRMSXNM

SEQ ID NO: 11381 - protein, 486 aa, Homo sapiens
  MOD_RES (69)..(69): Selenocysteine
  MOD_RES (85)..(85): Selenocysteine
  MOD_RES (102)..(102): Selenocysteine
  MOD_RES (124)..(124): Selenocysteine
  MOD_RES (130)..(130): Selenocysteine
  MOD_RES (143)..(143): Selenocysteine
  MOD_RES (189)..(189): Selenocysteine
  MOD_RES (224)..(224): Selenocysteine
  MOD_RES (237)..(237): Selenocysteine
  MOD_RES (242)..(242): Selenocysteine
  MOD_RES (295)..(295): Selenocysteine
  MOD_RES (359)..(359): Selenocysteine
  MOD_RES (362)..(362): Selenocysteine
  MOD_RES (390)..(391): Selenocysteine
  MOD_RES (400)..(400): Selenocysteine
  MOD_RES (429)..(430): Selenocysteine
  MOD_RES (474)..(474): Selenocysteine
  MOD_RES (484)..(484): Selenocysteine
MPLPVQVFNLQGAVEPMQIDVDPQEDPQNAPDVNYVVENPSLDLEQYAASYSGLMRIERLQFIADHCPXLRVEALKMALSFVQRXFNVDMYEEIHRKLSEAXRELQNAPDAIPESGVEPPALDXAWVEAXRKKALLKLEKLDXDLKNYKGNSIKESIRRGHDDLGDHYLDCGDLSNALKCYSRARDYCXSAKHVINMCLNVIKVSVYLQNWSHVLSYVSKAESXPEIAERGERDSQXQAILXKLKCAAGLAELAARKYKQAAKCLLLASFDHCDFPELLSPSNVAIYGGLCALAXFDRQELQRNVISSSSFKLFLELEPQVRDIIFKFYESKYASCLKMLDEMKDNLLLDMYLAPHVRXLYXQIRNRALIQYFSPYVSADMHRMAAAFNXXVAALEDELXQLILEGLISARVDSHSKILYARDVDQRSXXFEKSLLMGKEFQRRAKAMMLRAAVLRNQIHVKSPPREGSQGELXPANSQSRMSXNM

SEQ ID NO: 11382 - protein, 491 aa, Homo sapiens
  MOD_RES (69)..(69): Selenocysteine
  MOD_RES (85)..(85): Selenocysteine
  MOD_RES (102)..(102): Selenocysteine
  MOD_RES (128)..(128): Selenocysteine
  MOD_RES (134)..(134): Selenocysteine
  MOD_RES (147)..(147): Selenocysteine
  MOD_RES (193)..(193): Selenocysteine
  MOD_RES (228)..(228): Selenocysteine
  MOD_RES (242)..(242): Selenocysteine
  MOD_RES (247)..(247): Selenocysteine
  MOD_RES (300)..(300): Selenocysteine
  MOD_RES (364)..(364): Selenocysteine
  MOD_RES (367)..(367): Selenocysteine
  MOD_RES (395)..(396): Selenocysteine
  MOD_RES (405)..(405): Selenocysteine
  MOD_RES (434)..(435): Selenocysteine
  MOD_RES (479)..(479): Selenocysteine
  MOD_RES (489)..(489): Selenocysteine
MPLPVQVFNLQGAVEPMQIDVDPQEDPQNAPDVNYVVENPSLDLEQYAASYSGLMRIERLQFIADHCPXLRVEALKMALSFVQRXFNVDMYEEIHRKLSEAXRSSLRELQNAPDAIPESGVEPPALDXAWVEAXRKKALLKLEKLDXDLKNYKGNSIKESIRRGHDDLGDHYLDCGDLSNALKCYSRARDYCXSAKHVINMCLNVIKVSVYLQNWSHVLSYVSKAESXPEIAEQRGERDSQXQAILXKLKCAAGLAELAARKYKQAAKCLLLASFDHCDFPELLSPSNVAIYGGLCALAXFDRQELQRNVISSSSFKLFLELEPQVRDIIFKFYESKYASCLKMLDEMKDNLLLDMYLAPHVRXLYXQIRNRALIQYFSPYVSADMHRMAAAFNXXVAALEDELXQLILEGLISARVDSHSKILYARDVDQRSXXFEKSLLMGKEFQRRAKAMMLRAAVLRNQIHVKSPPREGSQGELXPANSQSRMSXNM

SEQ ID NO: 11383 - protein, 490 aa, Homo sapiens
  MOD_RES (69)..(69): Selenocysteine
  MOD_RES (85)..(85): Selenocysteine
  MOD_RES (102)..(102): Selenocysteine
  MOD_RES (128)..(128): Selenocysteine
  MOD_RES (134)..(134): Selenocysteine
  MOD_RES (147)..(147): Selenocysteine
  MOD_RES (193)..(193): Selenocysteine
  MOD_RES (228)..(228): Selenocysteine
  MOD_RES (241)..(241): Selenocysteine
  MOD_RES (246)..(246): Selenocysteine
  MOD_RES (299)..(299): Selenocysteine
  MOD_RES (363)..(363): Selenocysteine
  MOD_RES (366)..(366): Selenocysteine
  MOD_RES (394)..(395): Selenocysteine
  MOD_RES (404)..(404): Selenocysteine
  MOD_RES (433)..(434): Selenocysteine
  MOD_RES (478)..(478): Selenocysteine
  MOD_RES (488)..(488): Selenocysteine
MPLPVQVFNLQGAVEPMQIDVDPQEDPQNAPDVNYVVENPSLDLEQYAASYSGLMRIERLQFIADHCPXLRVEALKMALSFVQRXFNVDMYEEIHRKLSEAXRSSLRELQNAPDAIPESGVEPPALDXAWVEAXRKKALLKLEKLDXDLKNYKGNSIKESIRRGHDDLGDHYLDCGDLSNALKCYSRARDYCXSAKHVINMCLNVIKVSVYLQNWSHVLSYVSKAESXPEIAERGERDSQXQAILXKLKCAAGLAELAARKYKQAAKCLLLASFDHCDFPELLSPSNVAIYGGLCALAXFDRQELQRNVISSSSFKLFLELEPQVRDIIFKFYESKYASCLKMLDEMKDNLLLDMYLAPHVRXLYXQIRNRALIQYFSPYVSADMHRMAAAFNXXVAALEDELXQLILEGLISARVDSHSKILYARDVDQRSXXFEKSLLMGKEFQRRAKAMMLRAAVLRNQIHVKSPPREGSQGELXPANSQSRMSXNM

SEQ ID NO: 11384 - protein, 186 aa, Homo sapiens
  MOD_RES (42)..(42): Selenocysteine
  MOD_RES (47)..(47): Selenocysteine
  MOD_RES (60)..(60): Selenocysteine
  MOD_RES (74)..(74): Selenocysteine
  MOD_RES (136)..(136): Selenocysteine
  MOD_RES (152)..(152): Selenocysteine
  MOD_RES (169)..(169): Selenocysteine
MPLPVQVFNLQPASSVSGSGGAESQDRMRDSSAPSSASSSVXDLYCXPHSSRSDLVLPGXAGDFSLSASLSACXLLYEGAVEPMQIDVDPQEDPQNAPDVNYVVENPSLDLEQYAASYSGLMRIERLQFIADHCPXLRVEALKMALSFVQRXFNVDMYEEIHRKLSEAXRELQNAPDAIPESGVEP

SEQ ID NO: 11385 - protein, 253 aa, Homo sapiens
  MOD_RES (43)..(43): Selenocysteine
  MOD_RES (48)..(48): Selenocysteine
  MOD_RES (61)..(61): Selenocysteine
  MOD_RES (75)..(75): Selenocysteine
  MOD_RES (137)..(137): Selenocysteine
  MOD_RES (153)..(153): Selenocysteine
  MOD_RES (170)..(170): Selenocysteine
  MOD_RES (192)..(192): Selenocysteine
  MOD_RES (198)..(198): Selenocysteine
  MOD_RES (211)..(211): Selenocysteine
MPLPVQVFNLQQPASSVSGSGGAESQDRMRDSSAPSSASSSVXDLYCXPHSSRSDLVLPGXAGDFSLSASLSACXLLYEGAVEPMQIDVDPQEDPQNAPDVNYVVENPSLDLEQYAASYSGLMRIERLQFIADHCPXLRVEALKMALSFVQRXFNVDMYEEIHRKLSEAXRELQNAPDAIPESGVEPPALDXAWVEAXRKKALLKLEKLDXDLKNYKGNSIKESIRRGHDDLGDHYLDCGDLSNALKCYSRAR

SEQ ID NO: 11386 - protein, 93 aa, Homo sapiens
  MOD_RES (43)..(43): Selenocysteine
  MOD_RES (48)..(48): Selenocysteine
  MOD_RES (61)..(61): Selenocysteine
  MOD_RES (93)..(93): Selenocysteine
MPLPVQVFNLQQPASSVSGSGGAESQDRMRDSSAPSSASSSVXDLYCXPHSSRSDLVLPGXAGDFSLSASLSAWGRGAHADRRGPPGRPAECX

SEQ ID NO: 11387 - protein, 44 aa, Homo sapiens
  MOD_RES (44)..(44): Selenocysteine
MPLPVQVFNLQSPGRGARCLAHVAGGRGAHADRRGPPGRPAECX

SEQ ID NO: 11388 - protein, 60 aa, Homo sapiens
  MOD_RES (27)..(27): Selenocysteine
  MOD_RES (29)..(29): Selenocysteine
  MOD_RES (33)..(33): Selenocysteine
  MOD_RES (39)..(39): Selenocysteine
  MOD_RES (41)..(42): Selenocysteine
  MOD_RES (46)..(46): Selenocysteine
  MOD_RES (54)..(54): Selenocysteine
  MOD_RES (58)..(58): Selenocysteine
MPLPVQVFNLQVPGPCCRGPWSPCRSXWXPRKXRRMHLXSXXWWRXPAWIWNSXRPAXAA

SEQ ID NO: 11389 - protein, 134 aa, Homo sapiens
  MOD_RES (53)..(53): Selenocysteine
  MOD_RES (69)..(69): Selenocysteine
  MOD_RES (86)..(86): Selenocysteine
  MOD_RES (108)..(108): Selenocysteine
  MOD_RES (114)..(114): Selenocysteine
  MOD_RES (127)..(127): Selenocysteine
MQIDVDPQEDPQNAPDVNYVVENPSLDLEQYAASYSGLMRIERLQFIADHCPXLRVEALKMALSFVQRXFNVDMYEEIHRKLSEAXRELQNAPDAIPESGVEPPALDXAWVEAXRKKALLKLEKLDXDLKNYKG

SEQ ID NO: 11390 - protein, 139 aa, Homo sapiens
  MOD_RES (53)..(53): Selenocysteine
  MOD_RES (69)..(69): Selenocysteine
  MOD_RES (86)..(86): Selenocysteine
  MOD_RES (108)..(108): Selenocysteine
  MOD_RES (114)..(114): Selenocysteine
  MOD_RES (127)..(127): Selenocysteine
MQIDVDPQEDPQNAPDVNYVVENPSLDLEQYAASYSGLMRIERLQFIADHCPXLRVEALKMALSFVQRXFNVDMYEEIHRKLSEAXRELQNAPDAIPESGVEPPALDXAWVEAXRKKALLKLEKLDXDLKNYKGNSIKE

SEQ ID NO: 11391 - protein, 210 aa, Homo sapiens
  MOD_RES (53)..(53): Selenocysteine
  MOD_RES (69)..(69): Selenocysteine
  MOD_RES (86)..(86): Selenocysteine
  MOD_RES (108)..(108): Selenocysteine
  MOD_RES (114)..(114): Selenocysteine
  MOD_RES (127)..(127): Selenocysteine
  MOD_RES (173)..(173): Selenocysteine
  MOD_RES (208)..(208): Selenocysteine
MQIDVDPQEDPQNAPDVNYVVENPSLDLEQYAASYSGLMRIERLQFIADHCPXLRVEALKMALSFVQRXFNVDMYEEIHRKLSEAXRELQNAPDAIPESGVEPPALDXAWVEAXRKKALLKLEKLDXDLKNYKGNSIKESIRRGHDDLGDHYLDCGDLSNALKCYSRARDYCXSAKHVINMCLNVIKVSVYLQNWSHVLSYVSKAESXPE

SEQ ID NO: 11392 - protein, 471 aa, Homo sapiens
  MOD_RES (53)..(53): Selenocysteine
  MOD_RES (69)..(69): Selenocysteine
  MOD_RES (86)..(86): Selenocysteine
  MOD_RES (108)..(108): Selenocysteine
  MOD_RES (114)..(114): Selenocysteine
  MOD_RES (127)..(127): Selenocysteine
  MOD_RES (173)..(173): Selenocysteine
  MOD_RES (208)..(208): Selenocysteine
  MOD_RES (222)..(222): Selenocysteine
  MOD_RES (227)..(227): Selenocysteine
  MOD_RES (280)..(280): Selenocysteine
  MOD_RES (344)..(344): Selenocysteine
  MOD_RES (347)..(347): Selenocysteine
  MOD_RES (375)..(376): Selenocysteine
  MOD_RES (385)..(385): Selenocysteine
  MOD_RES (414)..(415): Selenocysteine
  MOD_RES (459)..(459): Selenocysteine
  MOD_RES (469)..(469): Selenocysteine
MQIDVDPQEDPQNAPDVNYVVENPSLDLEQYAASYSGLMRIERLQFIADHCPXLRVEALKMALSFVQRXFNVDMYEEIHRKLSEAXRELQNAPDAIPESGVEPPALDXAWVEAXRKKALLKLEKLDXDLKNYKGNSIKESIRRGHDDLGDHYLDCGDLSNALKCYSRARDYCXSAKHVINMCLNVIKVSVYLQNWSHVLSYVSKAESXPEIAEQRGERDSQXQAILXKLKCAAGLAELAARKYKQAAKCLLLASFDHCDFPELLSPSNVAIYGGLCALAXFDRQELQRNVISSSSFKLFLELEPQVRDIIFKFYESKYASCLKMLDEMKDNLLLDMYLAPHVRXLYXQIRNRALIQYFSPYVSADMHRMAAAFNXXVAALEDELXQLILEGLISARVDSHSKILYARDVDQRSXXFEKSLLMGKEFQRRAKAMMLRAAVLRNQIHVKSPPREGSQGELXPANSQSRMSXNM

SEQ ID NO: 11393 - protein, 101 aa, Homo sapiens
  MOD_RES (53)..(53): Selenocysteine
  MOD_RES (69)..(69): Selenocysteine
  MOD_RES (86)..(86): Selenocysteine
MQIDVDPQEDPQNAPDVNYVVENPSLDLEQYAASYSGLMRIERLQFIADHCPXLRVEALKMALSFVQRXFNVDMYEEIHRKLSEAXRSSLRELQNAPDAIP

SEQ ID NO: 11394 - protein, 168 aa, Homo sapiens
  MOD_RES (53)..(53): Selenocysteine
  MOD_RES (69)..(69): Selenocysteine
  MOD_RES (86)..(86): Selenocysteine
  MOD_RES (112)..(112): Selenocysteine
  MOD_RES (118)..(118): Selenocysteine
  MOD_RES (131)..(131): Selenocysteine
MQIDVDPQEDPQNAPDVNYVVENPSLDLEQYAASYSGLMRIERLQFIADHCPXLRVEALKMALSFVQRXFNVDMYEEIHRKLSEAXRSSLRELQNAPDAIPESGVEPPALDXAWVEAXRKKALLKLEKLDXDLKNYKGNSIKESIRRGHDDLGDHYLDCGDLSNALKC

SEQ ID NO: 11395 - protein, 168 aa, Homo sapiens
  MOD_RES (15)..(15): Selenocysteine
  MOD_RES (20)..(20): Selenocysteine
  MOD_RES (33)..(33): Selenocysteine
  MOD_RES (47)..(47): Selenocysteine
  MOD_RES (109)..(109): Selenocysteine
  MOD_RES (125)..(125): Selenocysteine
  MOD_RES (142)..(142): Selenocysteine
  MOD_RES (164)..(164): Selenocysteine
MRDSSAPSSASSSVXDLYCXPHSSRSDLVLPGXAGDFSLSASLSACXLLYEGAVEPMQIDVDPQEDPQNAPDVNYVVENPSLDLEQYAASYSGLMRIERLQFIADHCPXLRVEALKMALSFVQRXFNVDMYEEIHRKLSEAXRELQNAPDAIPESGVEPPALDXAWVE

SEQ ID NO: 11396 - protein, 526 aa, Homo sapiens
  MOD_RES (15)..(15): Selenocysteine
  MOD_RES (20)..(20): Selenocysteine
  MOD_RES (33)..(33): Selenocysteine
  MOD_RES (47)..(47): Selenocysteine
  MOD_RES (109)..(109): Selenocysteine
  MOD_RES (125)..(125): Selenocysteine
  MOD_RES (142)..(142): Selenocysteine
  MOD_RES (164)..(164): Selenocysteine
  MOD_RES (170)..(170): Selenocysteine
  MOD_RES (183)..(183): Selenocysteine
  MOD_RES (229)..(229): Selenocysteine
  MOD_RES (264)..(264): Selenocysteine
  MOD_RES (277)..(277): Selenocysteine
  MOD_RES (282)..(282): Selenocysteine
  MOD_RES (335)..(335): Selenocysteine
  MOD_RES (399)..(399): Selenocysteine
  MOD_RES (402)..(402): Selenocysteine
  MOD_RES (430)..(431): Selenocysteine
  MOD_RES (440)..(440): Selenocysteine
  MOD_RES (469)..(470): Selenocysteine
  MOD_RES (514)..(514): Selenocysteine
  MOD_RES (524)..(524): Selenocysteine
MRDSSAPSSASSSVXDLYCXPHSSRSDLVLPGXAGDFSLSASLSACXLLYEGAVEPMQIDVDPQEDPQNAPDVNYVVENPSLDLEQYAASYSGLMRIERLQFIADHCPXLRVEALKMALSFVQRXFNVDMYEEIHRKLSEAXRELQNAPDAIPESGVEPPALDXAWVEAXRKKALLKLEKLDXDLKNYKGNSIKESIRRGHDDLGDHYLDCGDLSNALKCYSRARDYCXSAKHVINMCLNVIKVSVYLQNWSHVLSYVSKAESXPEIAERGERDSQXQAILXKLKCAAGLAELAARKYKQAAKCLLLASFDHCDFPELLSPSNVAIYGGLCALAXFDRQELQRNVISSSSFKLFLELEPQVRDIIFKFYESKYASCLKMLDEMKDNLLLDMYLAPHVRXLYXQIRNRALIQYFSPYVSADMHRMAAAFNXXVAALEDELXQLILEGLISARVDSHSKILYARDVDQRSXXFEKSLLMGKEFQRRAKAMMLRAAVLRNQIHVKSPPREGSQGELXPANSQSRMSXNM

SEQ ID NO: 11397 - protein, 527 aa, Homo sapiens
  MOD_RES (15)..(15): Selenocysteine
  MOD_RES (20)..(20): Selenocysteine
  MOD_RES (33)..(33): Selenocysteine
  MOD_RES (47)..(47): Selenocysteine
  MOD_RES (109)..(109): Selenocysteine
  MOD_RES (125)..(125): Selenocysteine
  MOD_RES (142)..(142): Selenocysteine
  MOD_RES (164)..(164): Selenocysteine
  MOD_RES (170)..(170): Selenocysteine
  MOD_RES (183)..(183): Selenocysteine
  MOD_RES (229)..(229): Selenocysteine
  MOD_RES (264)..(264): Selenocysteine
  MOD_RES (278)..(278): Selenocysteine
  MOD_RES (283)..(283): Selenocysteine
  MOD_RES (336)..(336): Selenocysteine
  MOD_RES (400)..(400): Selenocysteine
  MOD_RES (403)..(403): Selenocysteine
  MOD_RES (431)..(432): Selenocysteine
  MOD_RES (441)..(441): Selenocysteine
  MOD_RES (470)..(471): Selenocysteine
  MOD_RES (515)..(515): Selenocysteine
  MOD_RES (525)..(525): Selenocysteine
MRDSSAPSSASSSVXDLYCXPHSSRSDLVLPGXAGDFSLSASLSACXLLYEGAVEPMQIDVDPQEDPQNAPDVNYVVENPSLDLEQYAASYSGLMRIERLQFIADHCPXLRVEALKMALSFVQRXFNVDMYEEIHRKLSEAXRELQNAPDAIPESGVEPPALDXAWVEAXRKKALLKLEKLDXDLKNYKGNSIKESIRRGHDDLGDHYLDCGDLSNALKCYSRARDYCXSAKHVINMCLNVIKVSVYLQNWSHVLSYVSKAESXPEIAEQRGERDSQXQAILXKLKCAAGLAELAARKYKQAAKCLLLASFDHCDFPELLSPSNVAIYGGLCALAXFDRQELQRNVISSSSFKLFLELEPQVRDIIFKFYESKYASCLKMLDEMKDNLLLDMYLAPHVRXLYXQIRNRALIQYFSPYVSADMHRMAAAFNXXVAALEDELXQLILEGLISARVDSHSKILYARDVDQRSXXFEKSLLMGKEFQRRAKAMMLRAAVLRNQIHVKSPPREGSQGELXPANSQSRMSXNM

SEQ ID NO: 11398 - protein, 166 aa, Homo sapiens
  MOD_RES (15)..(15): Selenocysteine
  MOD_RES (20)..(20): Selenocysteine
  MOD_RES (33)..(33): Selenocysteine
  MOD_RES (47)..(47): Selenocysteine
  MOD_RES (109)..(109): Selenocysteine
  MOD_RES (125)..(125): Selenocysteine
  MOD_RES (142)..(142): Selenocysteine
MRDSSAPSSASSSVXDLYCXPHSSRSDLVLPGXAGDFSLSASLSACXLLYEGAVEPMQIDVDPQEDPQNAPDVNYVVENPSLDLEQYAASYSGLMRIERLQFIADHCPXLRVEALKMALSFVQRXFNVDMYEEIHRKLSEAXRSSLRELQNAPDAIPESGVEPPAL

SEQ ID NO: 11399 - protein, 79 aa, Homo sapiens
  MOD_RES (28)..(29): Selenocysteine
  MOD_RES (38)..(38): Selenocysteine
  MOD_RES (67)..(67): Selenocysteine
  MOD_RES (77)..(77): Selenocysteine
QIRNRALIQYFSPYVSADMHRMAAAFNXXVAALEDELXQLILEGLISARVDSHSKSPPREGSQGELXPANSQSRMSXNM

SEQ ID NO: 11400 - protein, 457 aa, Homo sapiens
  MOD_RES (46)..(46): Selenocysteine
  MOD_RES (59)..(59): Selenocysteine
  MOD_RES (64)..(64): Selenocysteine
  MOD_RES (98)..(98): Selenocysteine
  MOD_RES (115)..(115): Selenocysteine
  MOD_RES (171)..(171): Selenocysteine
  MOD_RES (184)..(184): Selenocysteine
  MOD_RES (218)..(218): Selenocysteine
  MOD_RES (226)..(226): Selenocysteine
  MOD_RES (229)..(230): Selenocysteine
  MOD_RES (275)..(275): Selenocysteine
  MOD_RES (298)..(298): Selenocysteine
  MOD_RES (300)..(300): Selenocysteine
  MOD_RES (350)..(350): Selenocysteine
  MOD_RES (370)..(370): Selenocysteine
  MOD_RES (386)..(386): Selenocysteine
  MOD_RES (415)..(415): Selenocysteine
  MOD_RES (417)..(417): Selenocysteine
  MOD_RES (445)..(445): Selenocysteine
  MOD_RES (454)..(454): Selenocysteine
MAGPAPPAADELPGPAARRLYSRMEASCLELALEGERLCKAGDFKXGVAFFEAAVQVGXEDLKXLSAIYSQLGNAYFYLKEHGRALEYHKHDLLLARXIGDRMGEAKASGNLGNXLKVLGRFDEAAVCCQRHLSIAQEQGDKVGEARALYNIGNVYHAKGKQLSWNAANAXQDPGHLPPDVREXLCKASEFYERNLSLVKELGDRAAQGRAYGNLGNXHYLLGNFXEAXXFHKERLAIAKEFGDKAAERRAYSNLGNAHVFLGRFDVAAEYYKKXLQLSRQLRDQAVEAQACYSLGNXYXLLQDYERAAEYHLRHLLIAQELADRVGEGRACWSLGNAYVSMGRPAQALXFAKKHLQISQEIGDRHGELXARMNVAQLQLVLGRLXSPAASEKPDLAGYEAQGEFQGCGGVLLPXGXDRIRSCGGVGSRPGQHGGGGSRQKMAPXSQFFLASGXAQA

SEQ ID NO: 11401 - protein, 675 aa, Homo sapiens
  MOD_RES (46)..(46): Selenocysteine
  MOD_RES (59)..(59): Selenocysteine
  MOD_RES (64)..(64): Selenocysteine
  MOD_RES (98)..(98): Selenocysteine
  MOD_RES (115)..(115): Selenocysteine
  MOD_RES (171)..(171): Selenocysteine
  MOD_RES (184)..(184): Selenocysteine
  MOD_RES (218)..(218): Selenocysteine
  MOD_RES (226)..(226): Selenocysteine
  MOD_RES (229)..(230): Selenocysteine
  MOD_RES (275)..(275): Selenocysteine
  MOD_RES (298)..(298): Selenocysteine
  MOD_RES (300)..(300): Selenocysteine
  MOD_RES (350)..(350): Selenocysteine
  MOD_RES (370)..(370): Selenocysteine
  MOD_RES (386)..(386): Selenocysteine
  MOD_RES (409)..(409): Selenocysteine
  MOD_RES (416)..(416): Selenocysteine
  MOD_RES (485)..(485): Selenocysteine
  MOD_RES (503)..(503): Selenocysteine
  MOD_RES (528)..(528): Selenocysteine
  MOD_RES (532)..(532): Selenocysteine
  MOD_RES (543)..(543): Selenocysteine
  MOD_RES (548)..(548): Selenocysteine
  MOD_RES (579)..(579): Selenocysteine
  MOD_RES (627)..(627): Selenocysteine
MAGPAPPAADELPGPAARRLYSRMEASCLELALEGERLCKAGDFKXGVAFFEAAVQVGXEDLKXLSAIYSQLGNAYFYLKEHGRALEYHKHDLLLARXIGDRMGEAKASGNLGNXLKVLGRFDEAAVCCQRHLSIAQEQGDKVGEARALYNIGNVYHAKGKQLSWNAANAXQDPGHLPPDVREXLCKASEFYERNLSLVKELGDRAAQGRAYGNLGNXHYLLGNFXEAXXFHKERLAIAKEFGDKAAERRAYSNLGNAHVFLGRFDVAAEYYKKXLQLSRQLRDQAVEAQACYSLGNXYXLLQDYERAAEYHLRHLLIAQELADRVGEGRACWSLGNAYVSMGRPAQALXFAKKHLQISQEIGDRHGELXARMNVAQLQLVLGRLXSPAASEKPDLAGYEAQGARPKRXQRLSAEXWDLLRLPLEREQNGDSHHSGDWRGPSRDSLPLPVRSRKYQEGPDAERRPREGSHSPLDSADVRVHVPRXSIPRAPSSDEECFFDLLXKFQSSRMDDQRCPLDDGQAGAAEAXAAPXLEDRIAQPSMXASPQXEEFFDLIASSQSRRLDDQRASVGSLPGLRIXHSNAGHLRGHGEPQEPGDDFFNMLIKYQSSRIDDQRCPPPDVLPRGPXMPDEDFFSLIQRVQAKRMDEQRVDLAGGPEQGAGGPPEPQQQCQPGAS

SEQ ID NO: 11402 - protein, 166 aa, Homo sapiens
  MOD_RES (19)..(19): Selenocysteine
  MOD_RES (23)..(23): Selenocysteine
  MOD_RES (34)..(34): Selenocysteine
  MOD_RES (39)..(39): Selenocysteine
  MOD_RES (70)..(70): Selenocysteine
  MOD_RES (118)..(118): Selenocysteine
MDDQRCPLDDGQAGAAEAXAAPXLEDRIAQPSMXASPQXEEFFDLIASSQSRRLDDQRASVGSLPGLRIXHSNAGHLRGHGEPQEPGDDFFNMLIKYQSSRIDDQRCPPPDVLPRGPXMPDEDFFSLIQRVQAKRMDEQRVDLAGGPEQGAGGPPEPQQQCQPGAS

SEQ ID NO: 11403 - protein, 653 aa, Homo sapiens
  MOD_RES (1)..(1): Any amino acid
  MOD_RES (24)..(24): Selenocysteine
  MOD_RES (37)..(37): Selenocysteine
  MOD_RES (42)..(42): Selenocysteine
  MOD_RES (76)..(76): Selenocysteine
  MOD_RES (93)..(93): Selenocysteine
  MOD_RES (149)..(149): Selenocysteine
  MOD_RES (162)..(162): Selenocysteine
  MOD_RES (196)..(196): Selenocysteine
  MOD_RES (204)..(204): Selenocysteine
  MOD_RES (207)..(208): Selenocysteine
  MOD_RES (253)..(253): Selenocysteine
  MOD_RES (276)..(276): Selenocysteine
  MOD_RES (278)..(278): Selenocysteine
  MOD_RES (328)..(328): Selenocysteine
  MOD_RES (348)..(348): Selenocysteine
  MOD_RES (364)..(364): Selenocysteine
  MOD_RES (387)..(387): Selenocysteine
  MOD_RES (394)..(394): Selenocysteine
  MOD_RES (463)..(463): Selenocysteine
  MOD_RES (481)..(481): Selenocysteine
  MOD_RES (506)..(506): Selenocysteine
  MOD_RES (510)..(510): Selenocysteine
  MOD_RES (521)..(521): Selenocysteine
  MOD_RES (526)..(526): Selenocysteine
  MOD_RES (557)..(557): Selenocysteine
  MOD_RES (605)..(605): Selenocysteine
XMEASCLELALEGERLCKAGDFKXGVAFFEAAVQVGXEDLKXLSAIYSQLGNAYFYLKEHGRALEYHKHDLLLARXIGDRMGEAKASGNLGNXLKVLGRFDEAAVCCQRHLSIAQEQGDKVGEARALYNIGNVYHAKGKQLSWNAANAXQDPGHLPPDVREXLCKASEFYERNLSLVKELGDRAAQGRAYGNLGNXHYLLGNFXEAXXFHKERLAIAKEFGDKAAERRAYSNLGNAHVFLGRFDVAAEYYKKXLQLSRQLRDQAVEAQACYSLGNXYXLLQDYERAAEYHLRHLLIAQELADRVGEGRACWSLGNAYVSMGRPAQALXFAKKHLQISQEIGDRHGELXARMNVAQLQLVLGRLXSPAASEKPDLAGYEAQGARPKRXQRLSAEXWDLLRLPLEREQNGDSHHSGDWRGPSRDSLPLPVRSRKYQEGPDAERRPREGSHSPLDSADVRVHVPRXSIPRAPSSDEECFFDLLXKFQSSRMDDQRCPLDDGQAGAAEAXAAPXLEDRIAQPSMXASPQXEEFFDLIASSQSRRLDDQRASVGSLPGLRIXHSNAGHLRGHGEPQEPGDDFFNMLIKYQSSRIDDQRCPPPDVLPRGPXMPDEDFFSLIQRVQAKRMDEQRVDLAGGPEQGAGGPPEPQQQCQPGAS

SEQ ID NO: 11404 - protein, 52 aa, Homo sapiens
MEENLISMREDHSFHVRYRMEASCLELALEGERLCKSGDCRAGVSFFEAAVQ

SEQ ID NO: 11405 - protein, 75 aa, Homo sapiens
  MOD_RES (55)..(55): Selenocysteine
  MOD_RES (60)..(60): Selenocysteine
MEENLISMREDHSFHVRYRMEASCLELALEGERLCKSGDCRAGVSFFEAAVQVGXEDLKXLSAIYSQLGNAYFYL

SEQ ID NO: 11406 - protein, 213 aa, Homo sapiens
  MOD_RES (55)..(55): Selenocysteine
  MOD_RES (60)..(60): Selenocysteine
  MOD_RES (90)..(90): Selenocysteine
  MOD_RES (94)..(94): Selenocysteine
  MOD_RES (111)..(111): Selenocysteine
  MOD_RES (193)..(193): Selenocysteine
  MOD_RES (211)..(211): Selenocysteine
MEENLISMREDHSFHVRYRMEASCLELALEGERLCKSGDCRAGVSFFEAAVQVGXEDLKXLSAIYSQLGNAYFYLHDYAKALEYHHHDLXLARXIGDQLGEAKASGNLGNXLKVLGNFDEAIVCCQRHLDISRELNDKVGEARALYNLGNVYHAKGKSFGCPGPQDVGEFPEEVRDALQAAVDFYEENLSLVXALGDRAAQGRAFGNLGNXHY

SEQ ID NO: 11407 - protein, 684 aa, Homo sapiens
  MOD_RES (55)..(55): Selenocysteine
  MOD_RES (60)..(60): Selenocysteine
  MOD_RES (90)..(90): Selenocysteine
  MOD_RES (94)..(94): Selenocysteine
  MOD_RES (111)..(111): Selenocysteine
  MOD_RES (193)..(193): Selenocysteine
  MOD_RES (211)..(211): Selenocysteine
  MOD_RES (260)..(260): Selenocysteine
  MOD_RES (268)..(268): Selenocysteine
  MOD_RES (291)..(291): Selenocysteine
  MOD_RES (293)..(293): Selenocysteine
  MOD_RES (333)..(333): Selenocysteine
  MOD_RES (363)..(363): Selenocysteine
  MOD_RES (381)..(381): Selenocysteine
  MOD_RES (390)..(390): Selenocysteine
  MOD_RES (418)..(418): Selenocysteine
  MOD_RES (457)..(457): Selenocysteine
  MOD_RES (461)..(461): Selenocysteine
  MOD_RES (486)..(486): Selenocysteine
  MOD_RES (518)..(518): Selenocysteine
  MOD_RES (521)..(523): Selenocysteine
  MOD_RES (526)..(526): Selenocysteine
  MOD_RES (534)..(534): Selenocysteine
  MOD_RES (544)..(544): Selenocysteine
  MOD_RES (575)..(575): Selenocysteine
  MOD_RES (587)..(587): Selenocysteine
  MOD_RES (620)..(621): Selenocysteine
  MOD_RES (625)..(625): Selenocysteine
  MOD_RES (658)..(658): Selenocysteine
MEENLISMREDHSFHVRYRMEASCLELALEGERLCKSGDCRAGVSFFEAAVQVGXEDLKXLSAIYSQLGNAYFYLHDYAKALEYHHHDLXLARXIGDQLGEAKASGNLGNXLKVLGNFDEAIVCCQRHLDISRELNDKVGEARALYNLGNVYHAKGKSFGCPGPQDVGEFPEEVRDALQAAVDFYEENLSLVXALGDRAAQGRAFGNLGNXHYLLGNFRDAVIAHEQRLLIAKEFGDKAAERRAYSNLGNAYIFLGEFEXASEYYKKXLLLARQLKDRAVEAQSCYSLGNXYXLLQDYEKAIDYHLKHLAIAQELNDRIGEGRACWSLGNAYXALGNHDQAMHFAEKHLEISREVGDKSGELXARLNLSDLQMVLGLSYSXNNSIMSENXEIDSSLNGVRPKLGRRHSMENMELMKLXPEKVQNWNSEILAKQKPLIAKPSAKLLFVNRLKGKKYKXNSSXKVLQDASNSIDHRIPNSQRKISADXIGDEGFFDLLSRFQSNRMDDQRCCLQEKNCHXASXXXSSXPPKMMLKXSSVPVVSPNXDEFLDLLASSQSRRLDDQRASFSNLPGLRLXQNSQSVLSHLMXNDNKEADEDFFDILVKCQGSRLDDQRCAPPPAXXKGPXVPDEDFFSLILRSQGKRMDEQRVLLQRDQNRDXDFGLKDFLQNNALLEFKNSGKKSADH

SEQ ID NO: 11408 - protein, 217 aa, Homo sapiens
  MOD_RES (1)..(1): Any amino acid
  MOD_RES (8)..(8): Selenocysteine
  MOD_RES (47)..(47): Selenocysteine
  MOD_RES (51)..(51): Selenocysteine
  MOD_RES (76)..(76): Selenocysteine
  MOD_RES (108)..(108): Selenocysteine
  MOD_RES (111)..(113): Selenocysteine
  MOD_RES (116)..(116): Selenocysteine
  MOD_RES (124)..(124): Selenocysteine
  MOD_RES (134)..(134): Selenocysteine
  MOD_RES (165)..(165): Selenocysteine
  MOD_RES (177)..(177): Selenocysteine
  MOD_RES (206)..(206): Selenocysteine
  MOD_RES (213)..(213): Selenocysteine
XMELMKLXPEKVQNWNSEILAKQKPLIAKPSAKLLFVNRLKGKKYKXNSSXKVLQDASNSIDHRIPNSQRKISADXIGDEGFFDLLSRFQSNRMDDQRCCLQEKNCHXASXXXSSXPPKMMLKXSSVPVVSPNXDEFLDLLASSQSRRLDDQRASFSNLPGLRLXQNSQSVLSHLMXNDNKEADEDFFDILVKCQVCLYIFFVLHXAQIPLKXLVVL

SEQ ID NO: 11409 - protein, 202 aa, Homo sapiens
  MOD_RES (50)..(51): Selenocysteine
  MOD_RES (56)..(56): Selenocysteine
  MOD_RES (140)..(140): Selenocysteine
  MOD_RES (144)..(144): Selenocysteine
  MOD_RES (150)..(150): Selenocysteine
  MOD_RES (184)..(184): Selenocysteine
MCAARLAAAAAAAQSVYAFSARPLAGGEPVSLGSLRGKVLLIENVASLGXXVRDYXQMNELQRRLGPRGLVVLGFPCNQFGHQENAKNEEILNSLKYVRPGGGFEPNFMLFEKCEVNGAGAHPLFAFLREALPAPSDDAXALMXDPKLIXWSPVCRNDVAWNFEKFLVGPDGVPLRRYSRRFQXIDIEPDIEALLSQGPSCA

SEQ ID NO: 11410 - protein, 203 aa, Homo sapiens
  MOD_RES (49)..(49): Selenocysteine
  MOD_RES (51)..(52): Selenocysteine
  MOD_RES (57)..(57): Selenocysteine
  MOD_RES (141)..(141): Selenocysteine
  MOD_RES (145)..(145): Selenocysteine
  MOD_RES (151)..(151): Selenocysteine
  MOD_RES (185)..(185): Selenocysteine
MCAARLAAAAAAAQSVYAFSARPLAGGEPVSLGSLRGKVLLIENVASLXGXXVRDYXQMNELQRRLGPRGLVVLGFPCNQFGHQENAKNEEILNSLKYVRPGGGFEPNFMLFEKCEVNGAGAHPLFAFLREALPAPSDDAXALMXDPKLIXWSPVCRNDVAWNFEKFLVGPDGVPLRRYSRRFQXIDIEPDIEALLSQGPSCA

SEQ ID NO: 11411 - protein, 98 aa, Homo sapiens
  MOD_RES (49)..(49): Selenocysteine
  MOD_RES (51)..(52): Selenocysteine
  MOD_RES (57)..(57): Selenocysteine
MCAARLAAAAAAAQSVYAFSARPLAGGEPVSLGSLRGKVLLIENVASLXGXXVRDYXQMNELQRRLGPRGLVVLGFPCNQFGHQVRRAERGGAGADVQ

SEQ ID NO: 11412 - protein, 188 aa, Homo sapiens
  MOD_RES (108)..(110): Selenocysteine
MEDDQNWYKAELRGVEGFIPKNYIRVKPHPWYSGRISRQLAEEILMKRNHLGAFLIRESESSPGEFSVSVNYGDQVQHFKVLREASGKYFLWEEKFNSLNELVDFYRXXXIAKKRQIFLRDEEPLLKSPGACFAQAQFDFSAQDPSQLSFRRGDIIEVLERPDPHWWRGRSCGRVGFFPRSYVQPVHL

SEQ ID NO: 11413 - protein, 103 aa, Homo sapiens
  MOD_RES (12)..(12): Selenocysteine
  MOD_RES (24)..(24): Selenocysteine
MESVALYSFQAXESDELAFNKGDXLKILNMEDDQNWYKAELRGVEGFIPKNYIRVKPHPWYSGRISRQLAEEILMKRNHLGAFLIRESESSPGEFSVSVKWAN

SEQ ID NO: 11414 - protein, 205 aa, Homo sapiens
  MOD_RES (12)..(12): Selenocysteine
  MOD_RES (24)..(24): Selenocysteine
  MOD_RES (112)..(112): Selenocysteine
  MOD_RES (117)..(117): Selenocysteine
  MOD_RES (127)..(127): Selenocysteine
  MOD_RES (136)..(136): Selenocysteine
  MOD_RES (138)..(138): Selenocysteine
  MOD_RES (155)..(155): Selenocysteine
  MOD_RES (160)..(160): Selenocysteine
  MOD_RES (185)..(185): Selenocysteine
  MOD_RES (192)..(192): Selenocysteine
MESVALYSFQAXESDELAFNKGDXLKILNMEDDQNWYKAELRGVEGFIPKNYIRVKPHPWYSGRISRQLAEEILMKRNHLGAFLIRESESSPGEFSVSVNHLGPALPRPSLXSQPRXPRSSASAVAXSLRSWSAQXPXGGGAGPAGALASSHGVXCSPCXCEQPGGRSGQRAFLQELRSREDMDXPSSVRVXRGSVDGLGLNVGS

SEQ ID NO: 11415 - protein, 217 aa, Homo sapiens
  MOD_RES (12)..(12): Selenocysteine
  MOD_RES (24)..(24): Selenocysteine
  MOD_RES (137)..(139): Selenocysteine
MESVALYSFQAXESDELAFNKGDXLKILNMEDDQNWYKAELRGVEGFIPKNYIRVKPHPWYSGRISRQLAEEILMKRNHLGAFLIRESESSPGEFSVSVNYGDQVQHFKVLREASGKYFLWEEKFNSLNELVDFYRXXXIAKKRQIFLRDEEPLLKSPGACFAQAQFDFSAQDPSQLSFRRGDIIEVLERPDPHWWRGRSCGRVGFFPRSYVQPVHL

SEQ ID NO: 11416 - protein, 97 aa, Homo sapiens
  MOD_RES (10)..(10): Selenocysteine
  MOD_RES (21)..(21): Selenocysteine
MEAVAKFDFXASGEDELSFHXGDVLKILSNQEEWFKAELGSQEGYVPKNFIDIQFPKWFHEGLSRHQAENLLMGKEVGFFIIRASQSSPGDFSISVR

SEQ ID NO: 11417 - protein, 330 aa, Homo sapiens
  MOD_RES (10)..(10): Selenocysteine
  MOD_RES (21)..(21): Selenocysteine
  MOD_RES (119)..(119): Selenocysteine
  MOD_RES (134)..(134): Selenocysteine
  MOD_RES (149)..(149): Selenocysteine
  MOD_RES (192)..(192): Selenocysteine
  MOD_RES (246)..(246): Selenocysteine
  MOD_RES (262)..(262): Selenocysteine
  MOD_RES (310)..(310): Selenocysteine
  MOD_RES (329)..(329): Selenocysteine
MEAVAKFDFXASGEDELSFHXGDVLKILSNQEEWFKAELGSQEGYVPKNFIDIQFPKWFHEGLSRHQAENLLMGKEVGFFIIRASQSSPGDFSISVRHEDDVQHFKVMRDNKGNYFLWXEKFPSLNKLVDYYRXNSISRQKQIFLRDRXREDQGHRGNSLDRRSQGGPHLSGAVGEEIRPSMNRKLSDHPPXLPLQQHQHQPQPPQYAPAPQQLQQPPQQRYLQHHHFHQERRGGSLDINDGHCGXGLGSEMNAALMHRRHXDPVQLQAAGRVRWARALYDFEALEDDELGFHSGEVVEVLDSSNPSWWXGRLHNKLGLFPANYVAPMXR

SEQ ID NO: 11418 - protein, 252 aa, Homo sapiens
  MOD_RES (2)..(2): Selenocysteine
  MOD_RES (11)..(11): Selenocysteine
  MOD_RES (43)..(43): Selenocysteine
  MOD_RES (47)..(47): Selenocysteine
  MOD_RES (64)..(64): Selenocysteine
  MOD_RES (96)..(96): Selenocysteine
  MOD_RES (144)..(144): Selenocysteine
  MOD_RES (172)..(172): Selenocysteine
  MOD_RES (210)..(210): Selenocysteine
  MOD_RES (225)..(225): Selenocysteine
MXLLPSKGGDXIASVNGLNVEGIRHREIVDIIKASGNVLRLEXLYGXSIRKAELEARLQYLKQXLYEKWGEYRSLMVQEQRLVHGLVVKDPSIYDXLESVRSCLYGAGLLPGSLPFGPLLAVPGRPRGGARRARGDADDAVYHXCFFGDSEPPALPPPPPPARAFGPGPAEXPAVGPGPGPRAALSRSASVRCAGPGGGGGGGAPGALWXEAREQALCGPGLRKXKYRSFRRRLLKFIPGLNRSLEEEESQL

SEQ ID NO: 11419 - protein, 395 aa, Homo sapiens
  MOD_RES (2)..(2): Selenocysteine
  MOD_RES (18)..(18): Selenocysteine
  MOD_RES (25)..(25): Selenocysteine
  MOD_RES (38)..(38): Selenocysteine
  MOD_RES (47)..(47): Selenocysteine
  MOD_RES (77)..(77): Selenocysteine
  MOD_RES (103)..(103): Selenocysteine
  MOD_RES (111)..(111): Selenocysteine
  MOD_RES (118)..(118): Selenocysteine
  MOD_RES (133)..(133): Selenocysteine
  MOD_RES (150)..(150): Selenocysteine
  MOD_RES (154)..(154): Selenocysteine
  MOD_RES (186)..(186): Selenocysteine
  MOD_RES (190)..(190): Selenocysteine
  MOD_RES (207)..(207): Selenocysteine
  MOD_RES (239)..(239): Selenocysteine
  MOD_RES (287)..(287): Selenocysteine
  MOD_RES (315)..(315): Selenocysteine
  MOD_RES (353)..(353): Selenocysteine
  MOD_RES (368)..(368): Selenocysteine
MXLRRLRKLQQKEEAAAXPDPAARXPDSEVAPAAPVPXPGPPAAAAXPGPPADELYAALEDYHPAELYRALAVSGGXLPRRKGSGFRWKNLSQSPEQQRKVLXLEKEDNQXFGFEIQXYGLHHREEQRVEMVXFVCRVHESSPAQLAGLXPGDXIASVNGLNVEGIRHREIVDIIKASGNVLRLEXLYGXSIRKAELEARLQYLKQXLYEKWGEYRSLMVQEQRLVHGLVVKDPSIYDXLESVRSCLYGAGLLPGSLPFGPLLAVPGRPRGGARRARGDADDAVYHXCFFGDSEPPALPPPPPPARAFGPGPAEXPAVGPGPGPRAALSRSASVRCAGPGGGGGGGAPGALWXEAREQALCGPGLRKXKYRSFRRRLLKFIPGLNRSLEEEESQL

SEQ ID NO: 11420 - protein, 221 aa, Homo sapiens
  MOD_RES (3)..(3): Selenocysteine
  MOD_RES (20)..(20): Selenocysteine
  MOD_RES (24)..(24): Selenocysteine
  MOD_RES (56)..(56): Selenocysteine
  MOD_RES (60)..(60): Selenocysteine
  MOD_RES (77)..(77): Selenocysteine
  MOD_RES (109)..(109): Selenocysteine
  MOD_RES (157)..(157): Selenocysteine
  MOD_RES (185)..(185): Selenocysteine
MVXFVCRVHESSPAQLAGLXPGDXIASVNGLNVEGIRHREIVDIIKASGNVLRLEXLYGXSIRKAELEARLQYLKQXLYEKWGEYRSLMVQEQRLVHGLVVKDPSIYDXLESVRSCLYGAGLLPGSLPFGPLLAVPGRPRGGARRARGDADDAVYHXCFFGDSEPPALPPPPPPARAFGPGPAEXPAVGPGPGPRAALSRSASVRCAGPGGGGGGGAPGAL

SEQ ID NO: 11421 - protein, 108 aa, Homo sapiens
  MOD_RES (5)..(5): Selenocysteine
  MOD_RES (26)..(26): Selenocysteine
  MOD_RES (52)..(52): Selenocysteine
  MOD_RES (84)..(84): Selenocysteine
  MOD_RES (94)..(94): Selenocysteine
LADMXARDLCQLLVYKSHCVDDNSWXLVEHHPHLGLERCLEDHELVVQVESXMASESKFLFRKNYAKYEFFKNPMNFFPEQMVXWCQQSNGSQXQLLQVLGHNRSLLK

SEQ ID NO: 11422 - protein, 548 aa, Homo sapiens
  MOD_RES (23)..(23): Selenocysteine
  MOD_RES (76)..(76): Selenocysteine
  MOD_RES (132)..(132): Selenocysteine
  MOD_RES (155)..(155): Selenocysteine
  MOD_RES (178)..(178): Selenocysteine
  MOD_RES (189)..(189): Selenocysteine
  MOD_RES (210)..(210): Selenocysteine
  MOD_RES (236)..(236): Selenocysteine
  MOD_RES (268)..(268): Selenocysteine
  MOD_RES (278)..(278): Selenocysteine
  MOD_RES (312)..(312): Selenocysteine
  MOD_RES (327)..(327): Selenocysteine
  MOD_RES (340)..(340): Selenocysteine
  MOD_RES (342)..(342): Selenocysteine
  MOD_RES (346)..(346): Selenocysteine
  MOD_RES (376)..(376): Selenocysteine
  MOD_RES (395)..(395): Selenocysteine
  MOD_RES (421)..(421): Selenocysteine
  MOD_RES (436)..(436): Selenocysteine
  MOD_RES (439)..(439): Selenocysteine
  MOD_RES (444)..(444): Selenocysteine
  MOD_RES (486)..(486): Selenocysteine
  MOD_RES (507)..(507): Selenocysteine
  MOD_RES (516)..(516): Selenocysteine
MALAGCPDSFLHHPYYQDKVEQXPRSQQDPAGPGLPAQSDRLANHQEDDVDLEALVNDMNASLESLYSACSMQSDXVPLLQNGQHARSQPRASGPPRSIQPQVSPRQRVQRSQPVHILAVRRLQEEDQQFRXSSLPAIPNPFPELCGPGSPPVLXPGSLPPSQAAAKQDVKVFSEDGXSKVVEILADMXARDLCQLLVYKSHCVDDNSWXLVEHHPHLGLERCLEDHELVVQVESXMASESKFLFRKNYAKYEFFKNPMNFFPEQMVXWCQQSNGSQXQLLQEPRHLQLLADLEDSNIFSLIAGRKQYNAPXDHGLCIKPNKVRNEXKELRLLCAEDEQXRXCWMXAFRLLKYGMLLYQNYRIPQQRKALLSPFSXPVRSVSENSLVAMDFSGQXGRVIENPAEAQSAALEEGHAWRKRSXRMNILGSQSPLHPSXLSXVIHRXQHWFHGRISREESHRIIKQQGLVDGLFLLRDSQSNPKAFVLXLCHHQKIKNFQILPCEDDGQXFFSLDDGNXKFSDLIQLVDFYQLNKGVLPCKLKHHCIRVAL

SEQ ID NO: 11423 - protein, 594 aa, Homo sapiens
  MOD_RES (23)..(23): Selenocysteine
  MOD_RES (76)..(76): Selenocysteine
  MOD_RES (132)..(132): Selenocysteine
  MOD_RES (155)..(155): Selenocysteine
  MOD_RES (178)..(178): Selenocysteine
  MOD_RES (189)..(189): Selenocysteine
  MOD_RES (210)..(210): Selenocysteine
  MOD_RES (236)..(236): Selenocysteine
  MOD_RES (268)..(268): Selenocysteine
  MOD_RES (278)..(278): Selenocysteine
  MOD_RES (323)..(323): Selenocysteine
  MOD_RES (326)..(326): Selenocysteine
  MOD_RES (358)..(358): Selenocysteine
  MOD_RES (373)..(373): Selenocysteine
  MOD_RES (386)..(386): Selenocysteine
  MOD_RES (388)..(388): Selenocysteine
  MOD_RES (392)..(392): Selenocysteine
  MOD_RES (422)..(422): Selenocysteine
  MOD_RES (441)..(441): Selenocysteine
  MOD_RES (467)..(467): Selenocysteine
  MOD_RES (482)..(482): Selenocysteine
  MOD_RES (485)..(485): Selenocysteine
  MOD_RES (490)..(490): Selenocysteine
  MOD_RES (532)..(532): Selenocysteine
  MOD_RES (553)..(553): Selenocysteine
  MOD_RES (562)..(562): Selenocysteine
MALAGCPDSFLHHPYYQDKVEQXPRSQQDPAGPGLPAQSDRLANHQEDDVDLEALVNDMNASLESLYSACSMQSDXVPLLQNGQHARSQPRASGPPRSIQPQVSPRQRVQRSQPVHILAVRRLQEEDQQFRXSSLPAIPNPFPELCGPGSPPVLXPGSLPPSQAAAKQDVKVFSEDGXSKVVEILADMXARDLCQLLVYKSHCVDDNSWXLVEHHPHLGLERCLEDHELVVQVESXMASESKFLFRKNYAKYEFFKNPMNFFPEQMVXWCQQSNGSQXQLLQNFLNSSSCPEIQGFLHVKELGKKSWKKLYVCLRRSGLYCSXKGXSKEPRHLQLLADLEDSNIFSLIAGRKQYNAPXDHGLCIKPNKVRNEXKELRLLCAEDEQXRXCWMXAFRLLKYGMLLYQNYRIPQQRKALLSPFSXPVRSVSENSLVAMDFSGQXGRVIENPAEAQSAALEEGHAWRKRSXRMNILGSQSPLHPSXLSXVIHRXQHWFHGRISREESHRIIKQQGLVDGLFLLRDSQSNPKAFVLXLCHHQKIKNFQILPCEDDGQXFFSLDDGNXKFSDLIQLVDFYQLNKGVLPCKLKHHCIRVAL

SEQ ID NO: 11424 - protein, 536 aa, Homo sapiens
  MOD_RES (18)..(18): Selenocysteine
  MOD_RES (74)..(74): Selenocysteine
  MOD_RES (97)..(97): Selenocysteine
  MOD_RES (120)..(120): Selenocysteine
  MOD_RES (131)..(131): Selenocysteine
  MOD_RES (152)..(152): Selenocysteine
  MOD_RES (178)..(178): Selenocysteine
  MOD_RES (210)..(210): Selenocysteine
  MOD_RES (220)..(220): Selenocysteine
  MOD_RES (265)..(265): Selenocysteine
  MOD_RES (268)..(268): Selenocysteine
  MOD_RES (300)..(300): Selenocysteine
  MOD_RES (315)..(315): Selenocysteine
  MOD_RES (328)..(328): Selenocysteine
  MOD_RES (330)..(330): Selenocysteine
  MOD_RES (334)..(334): Selenocysteine
  MOD_RES (364)..(364): Selenocysteine
  MOD_RES (383)..(383): Selenocysteine
  MOD_RES (409)..(409): Selenocysteine
  MOD_RES (424)..(424): Selenocysteine
  MOD_RES (427)..(427): Selenocysteine
  MOD_RES (432)..(432): Selenocysteine
  MOD_RES (474)..(474): Selenocysteine
  MOD_RES (495)..(495): Selenocysteine
  MOD_RES (504)..(504): Selenocysteine
MNASLESLYSACSMQSDXVPLLQNGQHARSQPRASGPPRSIQPQVSPRQRVQRSQPVHILAVRRLQEEDQQFRXSSLPAIPNPFPELCGPGSPPVLXPGSLPPSQAAAKQDVKVFSEDGXSKVVEILADMXARDLCQLLVYKSHCVDDNSWXLVEHHPHLGLERCLEDHELVVQVESXMASESKFLFRKNYAKYEFFKNPMNFFPEQMVXWCQQSNGSQXQLLQNFLNSSSCPEIQGFLHVKELGKKSWKKLYVCLRRSGLYCSXKGXSKEPRHLQLLADLEDSNIFSLIAGRKQYNAPXDHGLCIKPNKVRNEXKELRLLCAEDEQXRXCWMXAFRLLKYGMLLYQNYRIPQQRKALLSPFSXPVRSVSENSLVAMDFSGQXGRVIENPAEAQSAALEEGHAWRKRSXRMNILGSQSPLHPSXLSXVIHRXQHWFHGRISREESHRIIKQQGLVDGLFLLRDSQSNPKAFVLXLCHHQKIKNFQILPCEDDGQXFFSLDDGNXKFSDLIQLVDFYQLNKGVLPCKLKHHCIRVAL

SEQ ID NO: 11425 - protein, 114 aa, Homo sapiens
  MOD_RES (17)..(17): Selenocysteine
  MOD_RES (70)..(70): Selenocysteine
MQAAGPLFRSKDKVEQXPRSQQDPAGPGLPAQSDRLANHQEDDVDLEALVNDMNASLESLYSACSMQSDXVPLLQNGQHARSQPRASGPPRSIQPQVSPRQRVQRSQPVHILAV

SEQ ID NO: 11426 - protein, 588 aa, Homo sapiens
  MOD_RES (17)..(17): Selenocysteine
  MOD_RES (70)..(70): Selenocysteine
  MOD_RES (126)..(126): Selenocysteine
  MOD_RES (149)..(149): Selenocysteine
  MOD_RES (172)..(172): Selenocysteine
  MOD_RES (183)..(183): Selenocysteine
  MOD_RES (204)..(204): Selenocysteine
  MOD_RES (230)..(230): Selenocysteine
  MOD_RES (262)..(262): Selenocysteine
  MOD_RES (272)..(272): Selenocysteine
  MOD_RES (317)..(317): Selenocysteine
  MOD_RES (320)..(320): Selenocysteine
  MOD_RES (352)..(352): Selenocysteine
  MOD_RES (367)..(367): Selenocysteine
  MOD_RES (380)..(380): Selenocysteine
  MOD_RES (382)..(382): Selenocysteine
  MOD_RES (386)..(386): Selenocysteine
  MOD_RES (416)..(416): Selenocysteine
  MOD_RES (435)..(435): Selenocysteine
  MOD_RES (461)..(461): Selenocysteine
  MOD_RES (476)..(476): Selenocysteine
  MOD_RES (479)..(479): Selenocysteine
  MOD_RES (484)..(484): Selenocysteine
  MOD_RES (526)..(526): Selenocysteine
  MOD_RES (547)..(547): Selenocysteine
  MOD_RES (556)..(556): Selenocysteine
MQAAGPLFRSKDKVEQXPRSQQDPAGPGLPAQSDRLANHQEDDVDLEALVNDMNASLESLYSACSMQSDXVPLLQNGQHARSQPRASGPPRSIQPQVSPRQRVQRSQPVHILAVRRLQEEDQQFRXSSLPAIPNPFPELCGPGSPPVLXPGSLPPSQAAAKQDVKVFSEDGXSKVVEILADMXARDLCQLLVYKSHCVDDNSWXLVEHHPHLGLERCLEDHELVVQVESXMASESKFLFRKNYAKYEFFKNPMNFFPEQMVXWCQQSNGSQXQLLQNFLNSSSCPEIQGFLHVKELGKKSWKKLYVCLRRSGLYCSXKGXSKEPRHLQLLADLEDSNIFSLIAGRKQYNAPXDHGLCIKPNKVRNEXKELRLLCAEDEQXRXCWMXAFRLLKYGMLLYQNYRIPQQRKALLSPFSXPVRSVSENSLVAMDFSGQXGRVIENPAEAQSAALEEGHAWRKRSXRMNILGSQSPLHPSXLSXVIHRXQHWFHGRISREESHRIIKQQGLVDGLFLLRDSQSNPKAFVLXLCHHQKIKNFQILPCEDDGQXFFSLDDGNXKFSDLIQLVDFYQLNKGVLPCKLKHHCIRVAL

SEQ ID NO: 11427 - protein, 155 aa, Homo sapiens
  MOD_RES (33)..(33): Selenocysteine
  MOD_RES (60)..(60): Selenocysteine
  MOD_RES (71)..(71): Selenocysteine
  MOD_RES (92)..(92): Selenocysteine
  MOD_RES (105)..(105): Selenocysteine
  MOD_RES (155)..(155): Selenocysteine
MFSYCRRKKKDLDVPEMPSIPNPFPELCCSPFXSVLSADLFPKANSRKKQVIKVYSEDEXSRALDVPSDIXARDVCQLLILKNHYIDDHSWXLFEHLPHIGVERXIEDHELVIEVLSNWGIEEENKLYFRKNYAKYEFFKNPMYFFPEHMVSFAX

SEQ ID NO: 11428 - protein, 416 aa, Homo sapiens
  MOD_RES (46)..(46): Selenocysteine
  MOD_RES (73)..(73): Selenocysteine
  MOD_RES (84)..(84): Selenocysteine
  MOD_RES (105)..(105): Selenocysteine
  MOD_RES (118)..(118): Selenocysteine
  MOD_RES (168)..(168): Selenocysteine
  MOD_RES (170)..(170): Selenocysteine
  MOD_RES (177)..(177): Selenocysteine
  MOD_RES (188)..(188): Selenocysteine
  MOD_RES (222)..(222): Selenocysteine
  MOD_RES (225)..(225): Selenocysteine
  MOD_RES (257)..(257): Selenocysteine
  MOD_RES (286)..(286): Selenocysteine
  MOD_RES (290)..(290): Selenocysteine
  MOD_RES (348)..(348): Selenocysteine
  MOD_RES (371)..(371): Selenocysteine
  MOD_RES (376)..(376): Selenocysteine
  MOD_RES (384)..(384): Selenocysteine
MGRAPRAGRLPGIRRWPPRRKKKDLDVPEMPSIPNPFPELCCSPFXSVLSADLFPKANSRKKQVIKVYSEDEXSRALDVPSDIXARDVCQLLILKNHYIDDHSWXLFEHLPHIGVERXIEDHELVIEVLSNWGIEEENKLYFRKNYAKYEFFKNPMYFFPEHMVSFAXEXNGEISPXQILQMFLSSSXYPEIHGFLHAKEQGKKSWKKIYFFLRRSGLYFSXKGXSKEPRHLQFFSEFGNSDIYVSLAGKKKHGAPXNYGFCFKPNKAGGPRDLKMLCAEEEQSRXCWVXAIRLLKYGMQLYQNYMHPYQGRSGCSSQSISPMRSISENSLVAMDFSGQKSRVIENPXEALSVAVEEGLAWRKKGCLRLGXHGSPXASSQSSAXNMAIHRSQPWFHHKISRDEAQRLIIQQGLVDG

SEQ ID NO: 11429 - protein, 540 aa, Homo sapiens
  MOD_RES (2)..(3): Selenocysteine
  MOD_RES (57)..(57): Selenocysteine
  MOD_RES (91)..(91): Selenocysteine
  MOD_RES (118)..(118): Selenocysteine
  MOD_RES (129)..(129): Selenocysteine
  MOD_RES (150)..(150): Selenocysteine
  MOD_RES (163)..(163): Selenocysteine
  MOD_RES (213)..(213): Selenocysteine
  MOD_RES (215)..(215): Selenocysteine
  MOD_RES (222)..(222): Selenocysteine
  MOD_RES (233)..(233): Selenocysteine
  MOD_RES (267)..(267): Selenocysteine
  MOD_RES (270)..(270): Selenocysteine
  MOD_RES (302)..(302): Selenocysteine
  MOD_RES (331)..(331): Selenocysteine
  MOD_RES (335)..(335): Selenocysteine
  MOD_RES (393)..(393): Selenocysteine
  MOD_RES (416)..(416): Selenocysteine
  MOD_RES (421)..(421): Selenocysteine
  MOD_RES (429)..(429): Selenocysteine
  MOD_RES (474)..(474): Selenocysteine
  MOD_RES (502)..(502): Selenocysteine
  MOD_RES (508)..(508): Selenocysteine
  MOD_RES (511)..(511): Selenocysteine
MXXSLQDGQSAASRAAARDSPLAAQVCGAAQGRGDAHDLAPAPWLHARALLPLPDGXRGCAADRRKKKDLDVPEMPSIPNPFPELCCSPFXSVLSADLFPKANSRKKQVIKVYSEDEXSRALDVPSDIXARDVCQLLILKNHYIDDHSWXLFEHLPHIGVERXIEDHELVIEVLSNWGIEEENKLYFRKNYAKYEFFKNPMYFFPEHMVSFAXEXNGEISPXQILQMFLSSSXYPEIHGFLHAKEQGKKSWKKIYFFLRRSGLYFSXKGXSKEPRHLQFFSEFGNSDIYVSLAGKKKHGAPXNYGFCFKPNKAGGPRDLKMLCAEEEQSRXCWVXAIRLLKYGMQLYQNYMHPYQGRSGCSSQSISPMRSISENSLVAMDFSGQKSRVIENPXEALSVAVEEGLAWRKKGCLRLGXHGSPXASSQSSAXNMAIHRSQPWFHHKISRDEAQRLIIQQGLVDGVFLVRDSQSNPKXFVLSMSHGQKIKHFQIIPVEDDGEMFHXLDDGHXRFXDLIQLVEFYQLNKGVLPCKLKHYCARIAL

SEQ ID NO: 11430 - protein, 176 aa, Homo sapiens
  MOD_RES (12)..(12): Selenocysteine
  MOD_RES (97)..(97): Selenocysteine
  MOD_RES (118)..(118): Selenocysteine
  MOD_RES (161)..(161): Selenocysteine
  MOD_RES (170)..(170): Selenocysteine
MEAIAKYDFKAXADDELSFKRGDILKVLNEECDQNWYKAELNGKDGFIPKNYIEMKPHPFGNDVQHFKVLRDGAGKYFLWVVKFNSLNELVDYHRSXSVSRNQQIFLRDIEQVPQQPXYVQALFDFDPQEDGELGFRRGDFIHVMDNSDPNWWKGACHGQXGMFPRNYVXPVNRNV

SEQ ID NO: 11431 - protein, 111 aa, Homo sapiens
  MOD_RES (12)..(12): Selenocysteine
MEAIAKYDFKAXADDELSFKRGDILKVLNEECDQNWYKAELNGKDGFIPKNYIEMKPHPWFFGKIPRAKAEEMLSKQRHDGAFLIRESESAPGDFSLSVKFGNDVQHFKVL

SEQ ID NO: 11432 - protein, 217 aa, Homo sapiens
  MOD_RES (12)..(12): Selenocysteine
  MOD_RES (138)..(138): Selenocysteine
  MOD_RES (159)..(159): Selenocysteine
  MOD_RES (202)..(202): Selenocysteine
  MOD_RES (211)..(211): Selenocysteine
MEAIAKYDFKAXADDELSFKRGDILKVLNEECDQNWYKAELNGKDGFIPKNYIEMKPHPWFFGKIPRAKAEEMLSKQRHDGAFLIRESESAPGDFSLSVKFGNDVQHFKVLRDGAGKYFLWVVKFNSLNELVDYHRSXSVSRNQQIFLRDIEQVPQQPXYVQALFDFDPQEDGELGFRRGDFIHVMDNSDPNWWKGACHGQXGMFPRNYVXPVNRNV

SEQ ID NO: 11433 - protein, 156 aa, Homo sapiens
  MOD_RES (12)..(12): Selenocysteine
  MOD_RES (104)..(104): Selenocysteine
  MOD_RES (110)..(110): Selenocysteine
  MOD_RES (132)..(132): Selenocysteine
  MOD_RES (134)..(134): Selenocysteine
  MOD_RES (136)..(136): Selenocysteine
  MOD_RES (143)..(143): Selenocysteine
MEAIAKYDFKAXADDELSFKRGDILKVLNEECDQNWYKAELNGKDGFIPKNYIEMKPHPWFFGKIPRAKAEEMLSKQRHDGAFLIRESESAPGDFSLSVNSRHXSRPSLXLIPRRMESWASAGEILSMSWIXQXPXGGKELAXGRPACFPAIMSPP

SEQ ID NO: 11434 - protein, 42 aa, Homo sapiens
  MOD_RES (1)..(1): Any amino acid
  MOD_RES (14)..(14): Selenocysteine
XNSLNELVDYHRSXSVSRNQQIFLRDIEQVPQIGPWLSSCVP

SEQ ID NO: 11435 - protein, 52 aa, Homo sapiens
  MOD_RES (23)..(23): Selenocysteine
  MOD_RES (27)..(27): Selenocysteine
  MOD_RES (33)..(33): Selenocysteine
MELDLSPPHLSSSPEDLCPAPGXPPGXPRPPDXPLPEEVCGGGSRCHSSPRV

SEQ ID NO: 11436 - protein, 118 aa, Homo sapiens
  MOD_RES (23)..(23): Selenocysteine
  MOD_RES (27)..(27): Selenocysteine
  MOD_RES (33)..(33): Selenocysteine
  MOD_RES (49)..(50): Selenocysteine
  MOD_RES (62)..(62): Selenocysteine
MELDLSPPHLSSSPEDLCPAPGXPPGXPRPPDXPLPEEVKRSQPLLIPXXGRKLREEERRAXSLPSIPNPFPELCSPPSQSPILGGPSSARGLLPRDASRPHSCAIPGAQVVKVYSED

SEQ ID NO: 11437 - protein, 447 aa, Homo sapiens
  MOD_RES (23)..(23): Selenocysteine
  MOD_RES (27)..(27): Selenocysteine
  MOD_RES (33)..(33): Selenocysteine
  MOD_RES (49)..(50): Selenocysteine
  MOD_RES (62)..(62): Selenocysteine
  MOD_RES (123)..(123): Selenocysteine
  MOD_RES (142)..(142): Selenocysteine
  MOD_RES (212)..(212): Selenocysteine
  MOD_RES (262)..(262): Selenocysteine
  MOD_RES (265)..(265): Selenocysteine
  MOD_RES (287)..(287): Selenocysteine
  MOD_RES (297)..(297): Selenocysteine
  MOD_RES (327)..(327): Selenocysteine
  MOD_RES (371)..(371): Selenocysteine
  MOD_RES (406)..(406): Selenocysteine
  MOD_RES (419)..(419): Selenocysteine
  MOD_RES (434)..(434): Selenocysteine
  MOD_RES (444)..(444): Selenocysteine
MELDLSPPHLSSSPEDLCPAPGXPPGXPRPPDXPLPEEVKRSQPLLIPXXGRKLREEERRAXSLPSIPNPFPELCSPPSQSPILGGPSSARGLLPRDASRPHVVKVYSEDGACRSVEVAAGAXARHVCEMLVQRAHALSDEXWGLVECHPHLALERGLEDHESVVEVQAAWPVGGDSRFVFRKNFAKYELFKSSPHSLFPEKMVSSCLDAHXGISHEDLIQNFLNAGSFPEIQGFLQLRGSGRKLWKRFFCFLRRSGLYYSXKGXSKDPRHLQYVADVNESNVYVVXQGRKLYGMPXDFGFCVKPNKLRNGHKGLRIFCSEDEQSRXCWLAAFRLFKYGVQLYKNYQQAQSRHLHPSCLGSPPLRSASDNXLVAMDFSGHAGRVIENPREALSVALEEAQAWRKKXNHRLSLPMPASGXSLSAACSWSGRVSGXPRALSSLCAXCRK

SEQ ID NO: 11438 - protein, 532 aa, Homo sapiens
  MOD_RES (23)..(23): Selenocysteine
  MOD_RES (27)..(27): Selenocysteine
  MOD_RES (33)..(33): Selenocysteine
  MOD_RES (49)..(50): Selenocysteine
  MOD_RES (62)..(62): Selenocysteine
  MOD_RES (123)..(123): Selenocysteine
  MOD_RES (142)..(142): Selenocysteine
  MOD_RES (212)..(212): Selenocysteine
  MOD_RES (262)..(262): Selenocysteine
  MOD_RES (265)..(265): Selenocysteine
  MOD_RES (287)..(287): Selenocysteine
  MOD_RES (297)..(297): Selenocysteine
  MOD_RES (327)..(327): Selenocysteine
  MOD_RES (371)..(371): Selenocysteine
  MOD_RES (406)..(406): Selenocysteine
  MOD_RES (419)..(419): Selenocysteine
  MOD_RES (428)..(428): Selenocysteine
  MOD_RES (500)..(500): Selenocysteine
  MOD_RES (503)..(503): Selenocysteine
  MOD_RES (528)..(528): Selenocysteine
MELDLSPPHLSSSPEDLCPAPGXPPGXPRPPDXPLPEEVKRSQPLLIPXXGRKLREEERRAXSLPSIPNPFPELCSPPSQSPILGGPSSARGLLPRDASRPHVVKVYSEDGACRSVEVAAGAXARHVCEMLVQRAHALSDEXWGLVECHPHLALERGLEDHESVVEVQAAWPVGGDSRFVFRKNFAKYELFKSSPHSLFPEKMVSSCLDAHXGISHEDLIQNFLNAGSFPEIQGFLQLRGSGRKLWKRFFCFLRRSGLYYSXKGXSKDPRHLQYVADVNESNVYVVXQGRKLYGMPXDFGFCVKPNKLRNGHKGLRIFCSEDEQSRXCWLAAFRLFKYGVQLYKNYQQAQSRHLHPSCLGSPPLRSASDNXLVAMDFSGHAGRVIENPREALSVALEEAQAWRKKXNHRLSLPMPASGXSLSAAIHRXQLWFHGRISREESQRLIGQQGLVDGLFLVRESQRNPQGFVLSLCHLQKVKHYLILPSEEEGRLYFSMDDGQXRFXDLLQLVEFHQLNRGILPCLLRHCCXRVAL

SEQ ID NO: 11439 - protein, 555 aa, Homo sapiens
  MOD_RES (11)..(12): Selenocysteine
  MOD_RES (46)..(46): Selenocysteine
  MOD_RES (50)..(50): Selenocysteine
  MOD_RES (56)..(56): Selenocysteine
  MOD_RES (72)..(73): Selenocysteine
  MOD_RES (85)..(85): Selenocysteine
  MOD_RES (146)..(146): Selenocysteine
  MOD_RES (165)..(165): Selenocysteine
  MOD_RES (235)..(235): Selenocysteine
  MOD_RES (285)..(285): Selenocysteine
  MOD_RES (288)..(288): Selenocysteine
  MOD_RES (310)..(310): Selenocysteine
  MOD_RES (320)..(320): Selenocysteine
  MOD_RES (350)..(350): Selenocysteine
  MOD_RES (394)..(394): Selenocysteine
  MOD_RES (429)..(429): Selenocysteine
  MOD_RES (442)..(442): Selenocysteine
  MOD_RES (451)..(451): Selenocysteine
  MOD_RES (523)..(523): Selenocysteine
  MOD_RES (526)..(526): Selenocysteine
  MOD_RES (551)..(551): Selenocysteine
MGKWRPGQGHXXGSVKPLSCSDAMELDLSPPHLSSSPEDLCPAPGXPPGXPRPPDXPLPEEVKRSQPLLIPXXGRKLREEERRAXSLPSIPNPFPELCSPPSQSPILGGPSSARGLLPRDASRPHVVKVYSEDGACRSVEVAAGAXARHVCEMLVQRAHALSDEXWGLVECHPHLALERGLEDHESVVEVQAAWPVGGDSRFVFRKNFAKYELFKSSPHSLFPEKMVSSCLDAHXGISHEDLIQNFLNAGSFPEIQGFLQLRGSGRKLWKRFFCFLRRSGLYYSXKGXSKDPRHLQYVADVNESNVYVVXQGRKLYGMPXDFGFCVKPNKLRNGHKGLRIFCSEDEQSRXCWLAAFRLFKYGVQLYKNYQQAQSRHLHPSCLGSPPLRSASDNXLVAMDFSGHAGRVIENPREALSVALEEAQAWRKKXNHRLSLPMPASGXSLSAAIHRXQLWFHGRISREESQRLIGQQGLVDGLFLVRESQRNPQGFVLSLCHLQKVKHYLILPSEEEGRLYFSMDDGQXRFXDLLQLVEFHQLNRGILPCLLRHCCXRVAL

SEQ ID NO: 11440 - protein, 42 aa, Homo sapiens
  MOD_RES (4)..(4): Selenocysteine
  MOD_RES (7)..(7): Selenocysteine
  MOD_RES (17)..(17): Selenocysteine
MSRXAYXVGALLLLLGXLLPAAEGKKKGSQGAIPPPAKRPCM

SEQ ID NO: 11441 - protein, 143 aa, Homo sapiens
  MOD_RES (4)..(4): Selenocysteine
  MOD_RES (7)..(7): Selenocysteine
  MOD_RES (17)..(17): Selenocysteine
  MOD_RES (43)..(43): Selenocysteine
  MOD_RES (55)..(55): Selenocysteine
  MOD_RES (61)..(61): Selenocysteine
  MOD_RES (71)..(71): Selenocysteine
  MOD_RES (109)..(110): Selenocysteine
  MOD_RES (114)..(114): Selenocysteine
  MOD_RES (124)..(124): Selenocysteine
  MOD_RES (130)..(130): Selenocysteine
MSRXAYXVGALLLLLGXLLPAAEGKKKGSQGAIPPPDKALHVXERKYLKRDWCKXQPLKQXIHEEGCNSRXIINRFCYGQCNSFYIPRHIRKEEGSFQSCSFCKPKKFXXMMVXLNCPELQPPXKKKRVXRVKQCRCISIDLD

SEQ ID NO: 11442 - protein, 184 aa, Homo sapiens
  MOD_RES (4)..(4): Selenocysteine
  MOD_RES (7)..(7): Selenocysteine
  MOD_RES (17)..(17): Selenocysteine
  MOD_RES (47)..(47): Selenocysteine
  MOD_RES (66)..(66): Selenocysteine
  MOD_RES (84)..(84): Selenocysteine
  MOD_RES (96)..(96): Selenocysteine
  MOD_RES (102)..(102): Selenocysteine
  MOD_RES (112)..(112): Selenocysteine
  MOD_RES (150)..(151): Selenocysteine
  MOD_RES (155)..(155): Selenocysteine
  MOD_RES (165)..(165): Selenocysteine
  MOD_RES (171)..(171): Selenocysteine
MSRXAYXVGALLLLLGXLLPAAEGKKKGSQGAIPPPDKAQHNDSEQXQSPQQPGSRNRGRGQGRGXAMPGEEVLESSQEALHVXERKYLKRDWCKXQPLKQXIHEEGCNSRXIINRFCYGQCNSFYIPRHIRKEEGSFQSCSFCKPKKFXXMMVXLNCPELQPPXKKKRVXRVKQCRCISIDLD

SEQ ID NO: 11443 - protein, 168 aa, Homo sapiens
  MOD_RES (63)..(63): Selenocysteine
  MOD_RES (75)..(75): Selenocysteine
  MOD_RES (81)..(81): Selenocysteine
  MOD_RES (91)..(91): Selenocysteine
  MOD_RES (129)..(129): Selenocysteine
MFWKLSLSLFLVAVLVKVAEARKNRPAGAIPSPYKDGSSNNSERWQHQIKEVLASSQEALVVXERKYLKSDWCKXQPLRQXVSEEGCRSRXILNRFCYGQCNSFYIPRHVKKEEESFQSCAFCKPQRVXSVLVELECPGLDPPFRLKKIQKVKQCRCMSVNLSDSDKQ

SEQ ID NO: 11444 - protein, 429 aa, Homo sapiens
  MOD_RES (30)..(30): Selenocysteine
  MOD_RES (47)..(47): Selenocysteine
  MOD_RES (66)..(66): Selenocysteine
  MOD_RES (81)..(81): Selenocysteine
  MOD_RES (83)..(83): Selenocysteine
  MOD_RES (94)..(94): Selenocysteine
  MOD_RES (141)..(141): Selenocysteine
  MOD_RES (158)..(158): Selenocysteine
  MOD_RES (173)..(173): Selenocysteine
  MOD_RES (191)..(191): Selenocysteine
  MOD_RES (210)..(210): Selenocysteine
  MOD_RES (269)..(269): Selenocysteine
  MOD_RES (279)..(279): Selenocysteine
  MOD_RES (297)..(297): Selenocysteine
  MOD_RES (321)..(321): Selenocysteine
  MOD_RES (331)..(331): Selenocysteine
  MOD_RES (361)..(361): Selenocysteine
  MOD_RES (410)..(410): Selenocysteine
  MOD_RES (425)..(425): Selenocysteine
  MOD_RES (427)..(427): Selenocysteine
MASLWESPQQCIILSPLSGWWFSIGISILXSSALVLKPQMLKGELQXRPSQRPSRKAFRRNNFEYXLEASKSLRQKPGDSXMXYLNKGQFYPIXLKEVSSSEGIHHPISKVRSVIMVVFAEDKSREDQLRHWKYWHSRQHXAKQRCIDIADYKESFNXISNIEEIAYNAISFXWDINDEAKVFISVNCLSXDFSSQKGVKGLPLNIQVDXYSYNNRSNKPVHRAYCQIKVFCDKGAERKIRDEERKQSKRKVSDVKVPLLPSHKRMDIXVFKPFIDLDXQPVLFIPDVHFANLQRGXHVLPIASEELEGEGSVLKRGPYGXEDDFAVPPSXKLARIEEPKRVLLYVRKESEEVFDALMLKXPSLKGLMEAISDKYDVPHDKIGKIFKKCKKGILVNMDDNIVKHYSNEDXFQLQIEEAGGSYKLXLXEI

SEQ ID NO: 11445 - protein, 72 aa, Homo sapiens
  MOD_RES (4)..(4): Selenocysteine
  MOD_RES (53)..(53): Selenocysteine
  MOD_RES (68)..(68): Selenocysteine
  MOD_RES (70)..(70): Selenocysteine
MLKXPSLKGLMEAISDKYDVPHDKIGKIFKKCKKGILVNMDDNIVKHYSNEDXFQLQIEEAGGSYKLXLXEI

SEQ ID NO: 11446 - protein, 229 aa, Homo sapiens
  MOD_RES (5)..(5): Selenocysteine
  MOD_RES (30)..(30): Selenocysteine
  MOD_RES (45)..(45): Selenocysteine
  MOD_RES (48)..(48): Selenocysteine
  MOD_RES (81)..(81): Selenocysteine
  MOD_RES (103)..(103): Selenocysteine
  MOD_RES (142)..(142): Selenocysteine
  MOD_RES (146)..(147): Selenocysteine
  MOD_RES (149)..(149): Selenocysteine
  MOD_RES (154)..(154): Selenocysteine
  MOD_RES (157)..(157): Selenocysteine
  MOD_RES (162)..(162): Selenocysteine
  MOD_RES (164)..(164): Selenocysteine
  MOD_RES (183)..(183): Selenocysteine
  MOD_RES (195)..(195): Selenocysteine
  MOD_RES (211)..(211): Selenocysteine
  MOD_RES (215)..(215): Selenocysteine
  MOD_RES (219)..(219): Selenocysteine
MRKWXKKGNCKRPVLVLQNEALYPQRRSYXSEDEAWKSFLENPLXAAXKAMMSINGDEDSAAALGLLYDYYKVPRERRSSXAKPEVEHPEPDHSKRNSIPIVXEQPLISAGENRVQVLKNVPFNIVLPHGNQLGIDKRGHLXAPDXXVXVSIAXMPXHSIKXEXQPHGFAVGIPPAVYHPEPXERVVVFDRNLNXDQFSSGAQAPNAQRRXPDSXFSEXFKEGVQEEQL

SEQ ID NO: 11447 - protein, 93 aa, Homo sapiens
  MOD_RES (2)..(2): Selenocysteine
  MOD_RES (27)..(27): Selenocysteine
  MOD_RES (42)..(42): Selenocysteine
  MOD_RES (45)..(45): Selenocysteine
  MOD_RES (78)..(78): Selenocysteine
MXQEYDNKRPVLVLQNEALYPQRRSYXSEDEAWKSFLENPLXAAXKAMMSINGDEDSAAALGLLYDYYKVPRERRSSXAKPEVEHPEPDHSKR

SEQ ID NO: 11448 - protein, 511 aa, Homo sapiens
  MOD_RES (2)..(2): Selenocysteine
  MOD_RES (27)..(27): Selenocysteine
  MOD_RES (42)..(42): Selenocysteine
  MOD_RES (45)..(45): Selenocysteine
  MOD_RES (78)..(78): Selenocysteine
  MOD_RES (100)..(100): Selenocysteine
  MOD_RES (139)..(139): Selenocysteine
  MOD_RES (143)..(144): Selenocysteine
  MOD_RES (146)..(146): Selenocysteine
  MOD_RES (151)..(151): Selenocysteine
  MOD_RES (154)..(154): Selenocysteine
  MOD_RES (159)..(159): Selenocysteine
  MOD_RES (161)..(161): Selenocysteine
  MOD_RES (180)..(180): Selenocysteine
  MOD_RES (192)..(192): Selenocysteine
  MOD_RES (208)..(208): Selenocysteine
  MOD_RES (212)..(212): Selenocysteine
  MOD_RES (216)..(216): Selenocysteine
  MOD_RES (255)..(255): Selenocysteine
  MOD_RES (270)..(270): Selenocysteine
  MOD_RES (272)..(272): Selenocysteine
  MOD_RES (283)..(283): Selenocysteine
  MOD_RES (330)..(330): Selenocysteine
  MOD_RES (347)..(347): Selenocysteine
  MOD_RES (362)..(362): Selenocysteine
  MOD_RES (380)..(380): Selenocysteine
  MOD_RES (399)..(399): Selenocysteine
  MOD_RES (461)..(461): Selenocysteine
  MOD_RES (485)..(485): Selenocysteine
  MOD_RES (487)..(487): Selenocysteine
  MOD_RES (490)..(490): Selenocysteine
MXQEYDNKRPVLVLQNEALYPQRRSYXSEDEAWKSFLENPLXAAXKAMMSINGDEDSAAALGLLYDYYKVPRERRSSXAKPEVEHPEPDHSKRNSIPIVXEQPLISAGENRVQVLKNVPFNIVLPHGNQLGIDKRGHLXAPDXXVXVSIAXMPXHSIKXEXQPHGFAVGIPPAVYHPEPXERVVVFDRNLNXDQFSSGAQAPNAQRRXPDSXFSEXFKEGVQEVFFPSDLSLRMPGMNSEDYVFDSVSGNNFEYXLEASKSLRQKPGDSXMXYLNKGQFYPIXLKEVSSSEGIHHPISKVRSVIMVVFAEDKSREDQLRHWKYWHSRQHXAKQRCIDIADYKESFNXISNIEEIAYNAISFXWDINDEAKVFISVNCLSXDFSSQKGVKGLPLNIQVDXYSYNNRSNKPVHRAYCQIKVFCDKGAERKIRDEERKQSKRKGKCPDPSSQFLMLKCHCFPLXSEWISQFSNPSLISILSLSSSFLXCXLPXCSGALMSFPLPLKNWRVKALS

SEQ ID NO: 11449 - protein, 618 aa, Homo sapiens
  MOD_RES (2)..(2): Selenocysteine
  MOD_RES (27)..(27): Selenocysteine
  MOD_RES (42)..(42): Selenocysteine
  MOD_RES (45)..(45): Selenocysteine
  MOD_RES (78)..(78): Selenocysteine
  MOD_RES (100)..(100): Selenocysteine
  MOD_RES (139)..(139): Selenocysteine
  MOD_RES (143)..(144): Selenocysteine
  MOD_RES (146)..(146): Selenocysteine
  MOD_RES (151)..(151): Selenocysteine
  MOD_RES (154)..(154): Selenocysteine
  MOD_RES (159)..(159): Selenocysteine
  MOD_RES (161)..(161): Selenocysteine
  MOD_RES (180)..(180): Selenocysteine
  MOD_RES (192)..(192): Selenocysteine
  MOD_RES (208)..(208): Selenocysteine
  MOD_RES (212)..(212): Selenocysteine
  MOD_RES (216)..(216): Selenocysteine
  MOD_RES (255)..(255): Selenocysteine
  MOD_RES (270)..(270): Selenocysteine
  MOD_RES (272)..(272): Selenocysteine
  MOD_RES (283)..(283): Selenocysteine
  MOD_RES (330)..(330): Selenocysteine
  MOD_RES (347)..(347): Selenocysteine
  MOD_RES (362)..(362): Selenocysteine
  MOD_RES (380)..(380): Selenocysteine
  MOD_RES (399)..(399): Selenocysteine
  MOD_RES (458)..(458): Selenocysteine
  MOD_RES (468)..(468): Selenocysteine
  MOD_RES (486)..(486): Selenocysteine
  MOD_RES (510)..(510): Selenocysteine
  MOD_RES (520)..(520): Selenocysteine
  MOD_RES (550)..(550): Selenocysteine
  MOD_RES (599)..(599): Selenocysteine
  MOD_RES (614)..(614): Selenocysteine
  MOD_RES (616)..(616): Selenocysteine
MXQEYDNKRPVLVLQNEALYPQRRSYXSEDEAWKSFLENPLXAAXKAMMSINGDEDSAAALGLLYDYYKVPRERRSSXAKPEVEHPEPDHSKRNSIPIVXEQPLISAGENRVQVLKNVPFNIVLPHGNQLGIDKRGHLXAPDXXVXVSIAXMPXHSIKXEXQPHGFAVGIPPAVYHPEPXERVVVFDRNLNXDQFSSGAQAPNAQRRXPDSXFSEXFKEGVQEVFFPSDLSLRMPGMNSEDYVFDSVSGNNFEYXLEASKSLRQKPGDSXMXYLNKGQFYPIXLKEVSSSEGIHHPISKVRSVIMVVFAEDKSREDQLRHWKYWHSRQHXAKQRCIDIADYKESFNXISNIEEIAYNAISFXWDINDEAKVFISVNCLSXDFSSQKGVKGLPLNIQVDXYSYNNRSNKPVHRAYCQIKVFCDKGAERKIRDEERKQSKRKVSDVKVPLLPSHKRMDIXVFKPFIDLDXQPVLFIPDVHFANLQRGXHVLPIASEELEGEGSVLKRGPYGXEDDFAVPPSXKLARIEEPKRVLLYVRKESEEVFDALMLKXPSLKGLMEAISDKYDVPHDKIGKIFKKCKKGILVNMDDNIVKHYSNEDXFQLQIEEAGGSYKLXLXEI

SEQ ID NO: 11450 - protein, 609 aa, Homo sapiens
  MOD_RES (9)..(9): Selenocysteine
  MOD_RES (14)..(14): Selenocysteine
  MOD_RES (29)..(29): Selenocysteine
  MOD_RES (32)..(32): Selenocysteine
  MOD_RES (84)..(84): Selenocysteine
  MOD_RES (103)..(103): Selenocysteine
  MOD_RES (140)..(140): Selenocysteine
  MOD_RES (148)..(148): Selenocysteine
  MOD_RES (174)..(174): Selenocysteine
  MOD_RES (183)..(183): Selenocysteine
  MOD_RES (195)..(195): Selenocysteine
  MOD_RES (199)..(199): Selenocysteine
  MOD_RES (209)..(209): Selenocysteine
  MOD_RES (227)..(227): Selenocysteine
  MOD_RES (231)..(231): Selenocysteine
  MOD_RES (235)..(235): Selenocysteine
  MOD_RES (239)..(239): Selenocysteine
  MOD_RES (252)..(252): Selenocysteine
  MOD_RES (263)..(263): Selenocysteine
  MOD_RES (267)..(267): Selenocysteine
  MOD_RES (310)..(310): Selenocysteine
  MOD_RES (327)..(327): Selenocysteine
  MOD_RES (342)..(342): Selenocysteine
  MOD_RES (354)..(354): Selenocysteine
  MOD_RES (360)..(360): Selenocysteine
  MOD_RES (379)..(379): Selenocysteine
  MOD_RES (428)..(428): Selenocysteine
  MOD_RES (450)..(450): Selenocysteine
  MOD_RES (454)..(454): Selenocysteine
  MOD_RES (477)..(477): Selenocysteine
  MOD_RES (484)..(484): Selenocysteine
  MOD_RES (519)..(519): Selenocysteine
  MOD_RES (530)..(530): Selenocysteine
  MOD_RES (543)..(543): Selenocysteine
  MOD_RES (590)..(590): Selenocysteine
  MOD_RES (605)..(605): Selenocysteine
MPSDPPFNXRRAYXSEDEAWKSYLENPLXAAXKAMMSINGDEDSAAALGLLYDYYKVPRDKRLLSVSKASDSQEDQEKRNCLGXSEAQSNLSGGENRVQVLKXVPVNLSLNQDHLENSKREQYSISFPESSAIIPVSGIXVVKAEDFXPVFMAPPVHYPRGDGEEQRVVIFEQXQYDVPSLAXHSAYLKDDQRSXPDSXYSESFKDAAXEKFRSASVGAEEYMYDQXSSGXFQYXLEAXKSLRQKQGEGPMXYLNKGQFYAIXLSEXGDNKCFRHPISKVRSVVMVVFSEDKNRDEQLKYWKYWHSRQHXAKQRVLDIADYKESFNXIGNIEEIAYNAVSFXWDVNEEAKIFIXVNCLSXDFSSQKGVKGLPLMIQIDXYSYNNRSNKPIHRAYCQIKVFCDKGAERKIRDEERKQNRKKGKGQASQXQCNSSSDGKLAAIPLQKKSDIXYFKXMPDLHSQPVLFIPDVHFANLQRXGQVYYNXDDEREGGSVLVKRMFRPMEEEFGPVPSKQMKEEGXKRVLLYVRKEXDDVFDALMLKSPXVKGLMEAISEKYGLPVEKIAKLYKKSKKGILVNMDDNIIEHYSNEDXFILNMESMVEGFKVXLMEI

SEQ ID NO: 11451 - protein, 6 aa, Homo sapiens
MSQESD

SEQ ID NO: 11452 - protein, 625 aa, Homo sapiens
  MOD_RES (25)..(25): Selenocysteine
  MOD_RES (30)..(30): Selenocysteine
  MOD_RES (45)..(45): Selenocysteine
  MOD_RES (48)..(48): Selenocysteine
  MOD_RES (100)..(100): Selenocysteine
  MOD_RES (119)..(119): Selenocysteine
  MOD_RES (156)..(156): Selenocysteine
  MOD_RES (164)..(164): Selenocysteine
  MOD_RES (190)..(190): Selenocysteine
  MOD_RES (199)..(199): Selenocysteine
  MOD_RES (211)..(211): Selenocysteine
  MOD_RES (215)..(215): Selenocysteine
  MOD_RES (225)..(225): Selenocysteine
  MOD_RES (243)..(243): Selenocysteine
  MOD_RES (247)..(247): Selenocysteine
  MOD_RES (251)..(251): Selenocysteine
  MOD_RES (255)..(255): Selenocysteine
  MOD_RES (268)..(268): Selenocysteine
  MOD_RES (279)..(279): Selenocysteine
  MOD_RES (283)..(283): Selenocysteine
  MOD_RES (326)..(326): Selenocysteine
  MOD_RES (343)..(343): Selenocysteine
  MOD_RES (358)..(358): Selenocysteine
  MOD_RES (370)..(370): Selenocysteine
  MOD_RES (376)..(376): Selenocysteine
  MOD_RES (395)..(395): Selenocysteine
  MOD_RES (444)..(444): Selenocysteine
  MOD_RES (466)..(466): Selenocysteine
  MOD_RES (470)..(470): Selenocysteine
  MOD_RES (493)..(493): Selenocysteine
  MOD_RES (500)..(500): Selenocysteine
  MOD_RES (535)..(535): Selenocysteine
  MOD_RES (546)..(546): Selenocysteine
  MOD_RES (559)..(559): Selenocysteine
  MOD_RES (606)..(606): Selenocysteine
  MOD_RES (621)..(621): Selenocysteine
MSQESDNNKRLVALVPMPSDPPFNXRRAYXSEDEAWKSYLENPLXAAXKAMMSINGDEDSAAALGLLYDYYKVPRDKRLLSVSKASDSQEDQEKRNCLGXSEAQSNLSGGENRVQVLKXVPVNLSLNQDHLENSKREQYSISFPESSAIIPVSGIXVVKAEDFXPVFMAPPVHYPRGDGEEQRVVIFEQXQYDVPSLAXHSAYLKDDQRSXPDSXYSESFKDAAXEKFRSASVGAEEYMYDQXSSGXFQYXLEAXKSLRQKQGEGPMXYLNKGQFYAIXLSEXGDNKCFRHPISKVRSVVMVVFSEDKNRDEQLKYWKYWHSRQHXAKQRVLDIADYKESFNXIGNIEEIAYNAVSFXWDVNEEAKIFIXVNCLSXDFSSQKGVKGLPLMIQIDXYSYNNRSNKPIHRAYCQIKVFCDKGAERKIRDEERKQNRKKGKGQASQXQCNSSSDGKLAAIPLQKKSDIXYFKXMPDLHSQPVLFIPDVHFANLQRXGQVYYNXDDEREGGSVLVKRMFRPMEEEFGPVPSKQMKEEGXKRVLLYVRKEXDDVFDALMLKSPXVKGLMEAISEKYGLPVEKIAKLYKKSKKGILVNMDDNIIEHYSNEDXFILNMESMVEGFKVXLMEI

SEQ ID NO: 11453 - protein, 81 aa, Homo sapiens
  MOD_RES (34)..(34): Selenocysteine
  MOD_RES (52)..(52): Selenocysteine
  MOD_RES (55)..(55): Selenocysteine
  MOD_RES (61)..(61): Selenocysteine
  MOD_RES (68)..(68): Selenocysteine
  MOD_RES (74)..(74): Selenocysteine
MMRVNGDDDSVAALSFLYDYYMGPKEKRILSSSXGGRNDQGKRYYHGMEYEXDLXPLESPXHLMKFLXENVSGXPEYPDLL

SEQ ID NO: 11454 - protein, 556 aa, Homo sapiens
  MOD_RES (34)..(34): Selenocysteine
  MOD_RES (52)..(52): Selenocysteine
  MOD_RES (55)..(55): Selenocysteine
  MOD_RES (61)..(61): Selenocysteine
  MOD_RES (68)..(68): Selenocysteine
  MOD_RES (74)..(74): Selenocysteine
  MOD_RES (95)..(95): Selenocysteine
  MOD_RES (121)..(122): Selenocysteine
  MOD_RES (143)..(143): Selenocysteine
  MOD_RES (151)..(151): Selenocysteine
  MOD_RES (168)..(168): Selenocysteine
  MOD_RES (188)..(188): Selenocysteine
  MOD_RES (216)..(216): Selenocysteine
  MOD_RES (219)..(219): Selenocysteine
  MOD_RES (263)..(263): Selenocysteine
  MOD_RES (280)..(280): Selenocysteine
  MOD_RES (313)..(313): Selenocysteine
  MOD_RES (332)..(332): Selenocysteine
  MOD_RES (339)..(339): Selenocysteine
  MOD_RES (397)..(398): Selenocysteine
  MOD_RES (404)..(404): Selenocysteine
  MOD_RES (408)..(408): Selenocysteine
  MOD_RES (445)..(445): Selenocysteine
  MOD_RES (450)..(450): Selenocysteine
  MOD_RES (477)..(477): Selenocysteine
  MOD_RES (488)..(488): Selenocysteine
MMRVNGDDDSVAALSFLYDYYMGPKEKRILSSSXGGRNDQGKRYYHGMEYEXDLXPLESPXHLMKFLXENVSGXPEYPDLLKKNNLMSLEGALPXPGKAAPLPAGPSKLEAGSVDSYLLPXXDMYDNGSLNSLFESIHGVPPXQRWQPDSXFKDDPQESMLFPDILKXSPEPPCPEDYPSLKSDFEYXLGSPKAIHIKSGESPMAYLNKGQFYPVXLRXPAGGKGLALSSNKVKSVVMVVFDNEKVPVEQLRFWKHWHSRQPXAKQRVIDVADCKENFNXVEHIEEVAYNALSFVWNVNEEAKVFIGVNCLSXDFSSQKGVKGVPLNLQIDXYDCGLGXERLVHRAVCQIKIFCDKGAERKMRDDERKQFRRKVKCPDSSNSGVKGCLLSGFRGNEXXYLRPEXDLEXPPVLFIPNVHFSSLQRSGGAAPSAGPSSSNRLPLKRXCSPFXEEFEPLPSKQAKEGDLQRVLLYVRREXEEVFDALMLKXPDLKGLRNAISEKYGFPEENIYKVYKKCKRGILVNMDNNIIQHYSNHVAFLLDMGELDGKIQIILKEL

SEQ ID NO: 11455 - protein, 602 aa, Homo sapiens
  MOD_RES (26)..(26): Selenocysteine
  MOD_RES (34)..(34): Selenocysteine
  MOD_RES (41)..(41): Selenocysteine
  MOD_RES (44)..(44): Selenocysteine
  MOD_RES (80)..(80): Selenocysteine
  MOD_RES (98)..(98): Selenocysteine
  MOD_RES (101)..(101): Selenocysteine
  MOD_RES (107)..(107): Selenocysteine
  MOD_RES (114)..(114): Selenocysteine
  MOD_RES (120)..(120): Selenocysteine
  MOD_RES (141)..(141): Selenocysteine
  MOD_RES (167)..(168): Selenocysteine
  MOD_RES (189)..(189): Selenocysteine
  MOD_RES (197)..(197): Selenocysteine
  MOD_RES (214)..(214): Selenocysteine
  MOD_RES (234)..(234): Selenocysteine
  MOD_RES (262)..(262): Selenocysteine
  MOD_RES (265)..(265): Selenocysteine
  MOD_RES (309)..(309): Selenocysteine
  MOD_RES (326)..(326): Selenocysteine
  MOD_RES (359)..(359): Selenocysteine
  MOD_RES (378)..(378): Selenocysteine
  MOD_RES (385)..(385): Selenocysteine
  MOD_RES (443)..(444): Selenocysteine
  MOD_RES (450)..(450): Selenocysteine
  MOD_RES (454)..(454): Selenocysteine
  MOD_RES (491)..(491): Selenocysteine
  MOD_RES (496)..(496): Selenocysteine
  MOD_RES (523)..(523): Selenocysteine
  MOD_RES (534)..(534): Selenocysteine
MSNELDFRSVRLLKNDPVNLQKFSYXSEDEAWKXYLENPLXAAXKAMMRVNGDDDSVAALSFLYDYYMGPKEKRILSSSXGGRNDQGKRYYHGMEYEXDLXPLESPXHLMKFLXENVSGXPEYPDLLKKNNLMSLEGALPXPGKAAPLPAGPSKLEAGSVDSYLLPXXDMYDNGSLNSLFESIHGVPPXQRWQPDSXFKDDPQESMLFPDILKXSPEPPCPEDYPSLKSDFEYXLGSPKAIHIKSGESPMAYLNKGQFYPVXLRXPAGGKGLALSSNKVKSVVMVVFDNEKVPVEQLRFWKHWHSRQPXAKQRVIDVADCKENFNXVEHIEEVAYNALSFVWNVNEEAKVFIGVNCLSXDFSSQKGVKGVPLNLQIDXYDCGLGXERLVHRAVCQIKIFCDKGAERKMRDDERKQFRRKVKCPDSSNSGVKGCLLSGFRGNEXXYLRPEXDLEXPPVLFIPNVHFSSLQRSGGAAPSAGPSSSNRLPLKRXCSPFXEEFEPLPSKQAKEGDLQRVLLYVRREXEEVFDALMLKXPDLKGLRNAISEKYGFPEENIYKVYKKCKRGILVNMDNNIIQHYSNHVAFLLDMGELDGKIQIILKEL

SEQ ID NO: 11456 - protein, 626 aa, Homo sapiens
  MOD_RES (26)..(26): Selenocysteine
  MOD_RES (34)..(34): Selenocysteine
  MOD_RES (41)..(41): Selenocysteine
  MOD_RES (44)..(44): Selenocysteine
  MOD_RES (80)..(80): Selenocysteine
  MOD_RES (98)..(98): Selenocysteine
  MOD_RES (101)..(101): Selenocysteine
  MOD_RES (107)..(107): Selenocysteine
  MOD_RES (114)..(114): Selenocysteine
  MOD_RES (120)..(120): Selenocysteine
  MOD_RES (141)..(141): Selenocysteine
  MOD_RES (167)..(168): Selenocysteine
  MOD_RES (189)..(189): Selenocysteine
  MOD_RES (197)..(197): Selenocysteine
  MOD_RES (214)..(214): Selenocysteine
  MOD_RES (234)..(234): Selenocysteine
  MOD_RES (262)..(262): Selenocysteine
  MOD_RES (265)..(265): Selenocysteine
  MOD_RES (309)..(309): Selenocysteine
  MOD_RES (326)..(326): Selenocysteine
  MOD_RES (359)..(359): Selenocysteine
  MOD_RES (378)..(378): Selenocysteine
  MOD_RES (385)..(385): Selenocysteine
  MOD_RES (443)..(444): Selenocysteine
  MOD_RES (450)..(450): Selenocysteine
  MOD_RES (454)..(454): Selenocysteine
  MOD_RES (491)..(491): Selenocysteine
  MOD_RES (496)..(496): Selenocysteine
  MOD_RES (523)..(523): Selenocysteine
  MOD_RES (534)..(534): Selenocysteine
  MOD_RES (567)..(567): Selenocysteine
  MOD_RES (590)..(590): Selenocysteine
  MOD_RES (614)..(615): Selenocysteine
  MOD_RES (622)..(622): Selenocysteine
MSNELDFRSVRLLKNDPVNLQKFSYXSEDEAWKXYLENPLXAAXKAMMRVNGDDDSVAALSFLYDYYMGPKEKRILSSSXGGRNDQGKRYYHGMEYEXDLXPLESPXHLMKFLXENVSGXPEYPDLLKKNNLMSLEGALPXPGKAAPLPAGPSKLEAGSVDSYLLPXXDMYDNGSLNSLFESIHGVPPXQRWQPDSXFKDDPQESMLFPDILKXSPEPPCPEDYPSLKSDFEYXLGSPKAIHIKSGESPMAYLNKGQFYPVXLRXPAGGKGLALSSNKVKSVVMVVFDNEKVPVEQLRFWKHWHSRQPXAKQRVIDVADCKENFNXVEHIEEVAYNALSFVWNVNEEAKVFIGVNCLSXDFSSQKGVKGVPLNLQIDXYDCGLGXERLVHRAVCQIKIFCDKGAERKMRDDERKQFRRKVKCPDSSNSGVKGCLLSGFRGNEXXYLRPEXDLEXPPVLFIPNVHFSSLQRSGGAAPSAGPSSSNRLPLKRXCSPFXEEFEPLPSKQAKEGDLQRVLLYVRREXEEVFDALMLKXPDLKGLRNAISEKYGFPEENIYKVYKKCKRGEXSLLHPRLSRHPPPDCLECSHPVXQVRNMGFGDGFWRQRDLDSNPSPXXVNSLHFXVNSE

SEQ ID NO: 11457 - protein, 607 aa, Homo sapiens
  MOD_RES (31)..(31): Selenocysteine
  MOD_RES (39)..(39): Selenocysteine
  MOD_RES (46)..(46): Selenocysteine
  MOD_RES (49)..(49): Selenocysteine
  MOD_RES (85)..(85): Selenocysteine
  MOD_RES (103)..(103): Selenocysteine
  MOD_RES (106)..(106): Selenocysteine
  MOD_RES (112)..(112): Selenocysteine
  MOD_RES (119)..(119): Selenocysteine
  MOD_RES (125)..(125): Selenocysteine
  MOD_RES (146)..(146): Selenocysteine
  MOD_RES (172)..(173): Selenocysteine
  MOD_RES (194)..(194): Selenocysteine
  MOD_RES (202)..(202): Selenocysteine
  MOD_RES (219)..(219): Selenocysteine
  MOD_RES (239)..(239): Selenocysteine
  MOD_RES (267)..(267): Selenocysteine
  MOD_RES (270)..(270): Selenocysteine
  MOD_RES (314)..(314): Selenocysteine
  MOD_RES (331)..(331): Selenocysteine
  MOD_RES (364)..(364): Selenocysteine
  MOD_RES (383)..(383): Selenocysteine
  MOD_RES (390)..(390): Selenocysteine
  MOD_RES (448)..(449): Selenocysteine
  MOD_RES (455)..(455): Selenocysteine
  MOD_RES (459)..(459): Selenocysteine
  MOD_RES (496)..(496): Selenocysteine
  MOD_RES (501)..(501): Selenocysteine
  MOD_RES (528)..(528): Selenocysteine
  MOD_RES (539)..(539): Selenocysteine
MWMNSILPIFLFRSVRLLKNDPVNLQKFSYXSEDEAWKXYLENPLXAAXKAMMRVNGDDDSVAALSFLYDYYMGPKEKRILSSSXGGRNDQGKRYYHGMEYEXDLXPLESPXHLMKFLXENVSGXPEYPDLLKKNNLMSLEGALPXPGKAAPLPAGPSKLEAGSVDSYLLPXXDMYDNGSLNSLFESIHGVPPXQRWQPDSXFKDDPQESMLFPDILKXSPEPPCPEDYPSLKSDFEYXLGSPKAIHIKSGESPMAYLNKGQFYPVXLRXPAGGKGLALSSNKVKSVVMVVFDNEKVPVEQLRFWKHWHSRQPXAKQRVIDVADCKENFNXVEHIEEVAYNALSFVWNVNEEAKVFIGVNCLSXDFSSQKGVKGVPLNLQIDXYDCGLGXERLVHRAVCQIKIFCDKGAERKMRDDERKQFRRKVKCPDSSNSGVKGCLLSGFRGNEXXYLRPEXDLEXPPVLFIPNVHFSSLQRSGGAAPSAGPSSSNRLPLKRXCSPFXEEFEPLPSKQAKEGDLQRVLLYVRREXEEVFDALMLKXPDLKGLRNAISEKYGFPEENIYKVYKKCKRGILVNMDNNIIQHYSNHVAFLLDMGELDGKIQIILKEL

SEQ ID NO: 11458 - protein, 52 aa, Homo sapiens
  MOD_RES (28)..(28): Selenocysteine
  MOD_RES (33)..(34): Selenocysteine
  MOD_RES (42)..(42): Selenocysteine
  MOD_RES (51)..(51): Selenocysteine
MWMNSILPIFLVPRRSGYCPPALGAGMXKERGXXMAWNMRRXSLPLKAPHXS

SEQ ID NO: 11459 - protein, 916 aa, Homo sapiens
  MOD_RES (5)..(5): Selenocysteine
  MOD_RES (29)..(29): Selenocysteine
  MOD_RES (60)..(60): Selenocysteine
  MOD_RES (81)..(81): Selenocysteine
  MOD_RES (103)..(103): Selenocysteine
  MOD_RES (108)..(108): Selenocysteine
  MOD_RES (120)..(120): Selenocysteine
  MOD_RES (127)..(127): Selenocysteine
  MOD_RES (174)..(174): Selenocysteine
  MOD_RES (183)..(183): Selenocysteine
  MOD_RES (189)..(191): Selenocysteine
  MOD_RES (261)..(261): Selenocysteine
  MOD_RES (269)..(269): Selenocysteine
  MOD_RES (271)..(271): Selenocysteine
  MOD_RES (289)..(289): Selenocysteine
  MOD_RES (299)..(299): Selenocysteine
  MOD_RES (303)..(303): Selenocysteine
  MOD_RES (360)..(360): Selenocysteine
  MOD_RES (372)..(372): Selenocysteine
  MOD_RES (375)..(375): Selenocysteine
  MOD_RES (403)..(403): Selenocysteine
  MOD_RES (418)..(418): Selenocysteine
  MOD_RES (422)..(423): Selenocysteine
  MOD_RES (481)..(481): Selenocysteine
  MOD_RES (504)..(504): Selenocysteine
  MOD_RES (506)..(506): Selenocysteine
  MOD_RES (587)..(588): Selenocysteine
  MOD_RES (633)..(633): Selenocysteine
  MOD_RES (641)..(641): Selenocysteine
  MOD_RES (649)..(649): Selenocysteine
  MOD_RES (667)..(667): Selenocysteine
  MOD_RES (673)..(673): Selenocysteine
  MOD_RES (679)..(679): Selenocysteine
  MOD_RES (696)..(696): Selenocysteine
  MOD_RES (709)..(710): Selenocysteine
  MOD_RES (731)..(731): Selenocysteine
  MOD_RES (744)..(744): Selenocysteine
  MOD_RES (760)..(760): Selenocysteine
  MOD_RES (808)..(808): Selenocysteine
  MOD_RES (866)..(866): Selenocysteine
  MOD_RES (868)..(868): Selenocysteine
  MOD_RES (914)..(914): Selenocysteine
MCCSXHLFQPLQLAGGLEWPWSNLLCFLXPVKLHPEVWGLFPNQQSQEHAAFRFALSQLXEPPKLLPQIDIVNISDSFEMXYRFCSQFSKGVYAIFGFYERRXVNMLXSFCGALHVCFIXPSFPVDXSNQFVLQLRPELQDALISIIDHYKWQKFVYIYDADRGLSVLQKVLDXAAEKNWQVXAVNILXXXEEGYRMLFQDLEKKKERLVVVDCESERLNAILGQIIKLEKNGIGYHYILANLGFMDIDLNKFKESGANVXGFQLVNYXDXIPAKIMQQWKNSDARDHXRVDWKRPKYXSALXYDGVKVMAEAFQSLRRQRIDISRRGNAGDCLANPAVPWGQGIDIQRALQQVRFEGLXGNVQFNEKGRRXNYXLHVIEMKHDGIRKIGYWNEDDKFVPAAXDAQAGGDNSSVQNRXYIVXXILEDPYVMLKKNANQFEGNDRYEGYCVELAAEIAKHVGYSYRLEIVSDGKYGARDPDXKAWNGMVGELVYGRADVAVAPLXIXLVREEVIDFSKPFMSLGISIMIKKPQKSKPGVFSFLDPLAYEIWMCIVFAYIGVSVVLFLVSRFSPYEWHSEEFEEGRDQXXSDQSNEFGIFNSLWFSLGAFMQQGCDISPRSLSGRIVGGVWWFFXLIIISSYXANLAAFLXVERMVSPIESAEDLAKQXEIAYGXLEAGSXKEFFRRSKIAVFEKMWXYMKSAEPSVFVRXXEEGMIRVRKSKGKYAYLLESXMNEYIEQRKPCDXMKVGGNLDSKGYGIAXPKGSALRGPVNLAVLKLSEQGVLDKLKSKWWYDKGECGSKDSGSKDKXSALSLSNVAGVFYILIGGLGLAMLVALIEFCYKSRSESKRMKGFCLIPQQSINEAIRXSXLPRNSGAGASSGGSGENGRVVSHDFPKSMQSIPCMSHSSGMPLGAXGL

SEQ ID NO: 11460 - protein, 916 aa, Homo sapiens
  MOD_RES (5)..(5): Selenocysteine
  MOD_RES (29)..(29): Selenocysteine
  MOD_RES (60)..(60): Selenocysteine
  MOD_RES (81)..(81): Selenocysteine
  MOD_RES (103)..(103): Selenocysteine
  MOD_RES (108)..(108): Selenocysteine
  MOD_RES (120)..(120): Selenocysteine
  MOD_RES (127)..(127): Selenocysteine
  MOD_RES (174)..(174): Selenocysteine
  MOD_RES (183)..(183): Selenocysteine
  MOD_RES (189)..(191): Selenocysteine
  MOD_RES (261)..(261): Selenocysteine
  MOD_RES (269)..(269): Selenocysteine
  MOD_RES (271)..(271): Selenocysteine
  MOD_RES (289)..(289): Selenocysteine
  MOD_RES (299)..(299): Selenocysteine
  MOD_RES (303)..(303): Selenocysteine
  MOD_RES (360)..(360): Selenocysteine
  MOD_RES (372)..(372): Selenocysteine
  MOD_RES (375)..(375): Selenocysteine
  MOD_RES (403)..(403): Selenocysteine
  MOD_RES (418)..(418): Selenocysteine
  MOD_RES (422)..(423): Selenocysteine
  MOD_RES (481)..(481): Selenocysteine
  MOD_RES (504)..(504): Selenocysteine
  MOD_RES (506)..(506): Selenocysteine
  MOD_RES (587)..(588): Selenocysteine
  MOD_RES (633)..(633): Selenocysteine
  MOD_RES (641)..(641): Selenocysteine
  MOD_RES (649)..(649): Selenocysteine
  MOD_RES (667)..(667): Selenocysteine
  MOD_RES (673)..(673): Selenocysteine
  MOD_RES (679)..(679): Selenocysteine
  MOD_RES (696)..(696): Selenocysteine
  MOD_RES (709)..(710): Selenocysteine
  MOD_RES (731)..(731): Selenocysteine
  MOD_RES (744)..(744): Selenocysteine
  MOD_RES (760)..(760): Selenocysteine
  MOD_RES (808)..(808): Selenocysteine
  MOD_RES (866)..(866): Selenocysteine
  MOD_RES (868)..(868): Selenocysteine
  MOD_RES (914)..(914): Selenocysteine
MCCSXHLFQPLQLAGGLEWPWSNLLCFLXPVKLHPEVWGLFPNQQSQEHAAFRFALSQLXEPPKLLPQIDIVNISDSFEMXYRFCSQFSKGVYAIFGFYERRXVNMLXSFCGALHVCFIXPSFPVDXSNQFVLQLRPELQDALISIIDHYKWQKFVYIYDADRGLSVLQKVLDXAAEKNWQVXAVNILXXXEEGYRMLFQDLEKKKERLVVVDCESERLNAILGQIIKLEKNGIGYHYILANLGFMDIDLNKFKESGANVXGFQLVNYXDXIPAKIMQQWKNSDARDHXRVDWKRPKYXSALXYDGVKVMAEAFQSLRRQRIDISRRGNAGDCLANPAVPWGQGIDIQRALQQVRFEGLXGNVQFNEKGRRXNYXLHVIEMKHDGIRKIGYWNEDDKFVPAAXDAQAGGDNSSVQNRXYIVXXILEDPYVMLKKNANQFEGNDRYEGYCVELAAEIAKHVGYSYRLEIVSDGKYGARDPDXKAWNGMVGELVYGRADVAVAPLXIXLVREEVIDFSKPFMSLGISIMIKKPQKSKPGVFSFLDPLAYEIWMCIVFAYIGVSVVLFLVSRFSPYEWHSEEFEEGRDQXXSDQSNEFGIFNSLWFSLGAFMQQGCDISPRSLSGRIVGGVWWFFXLIIISSYXANLAAFLXVERMVSPIESAEDLAKQXEIAYGXLEAGSXKEFFRRSKIAVFEKMWXYMKSAEPSVFVRXXEEGMIRVRKSKGKYAYLLESXMNEYIEQRKPCDXMKVGGNLDSKGYGIAXPKGSALRNPVNLAVLKLNEQGLLDKLKNKWWYDKGECGSGGGDSKDKXSALSLSNVAGVFYILIGGLGLAMLVALIEFCYKSRSESKRMKGFCLIPQQSINEAIRXSXLPRNSGAGASSGGSGENGRVVSHDFPKSMQSIPCMSHSSGMPLGAXGL

SEQ ID NO: 11461 - protein, 826 aa, Homo sapiens
  MOD_RES (10)..(10): Selenocysteine
  MOD_RES (50)..(50): Selenocysteine
  MOD_RES (71)..(71): Selenocysteine
  MOD_RES (84)..(84): Selenocysteine
  MOD_RES (93)..(93): Selenocysteine
  MOD_RES (99)..(101): Selenocysteine
  MOD_RES (171)..(171): Selenocysteine
  MOD_RES (179)..(179): Selenocysteine
  MOD_RES (181)..(181): Selenocysteine
  MOD_RES (199)..(199): Selenocysteine
  MOD_RES (209)..(209): Selenocysteine
  MOD_RES (213)..(213): Selenocysteine
  MOD_RES (270)..(270): Selenocysteine
  MOD_RES (282)..(282): Selenocysteine
  MOD_RES (285)..(285): Selenocysteine
  MOD_RES (313)..(313): Selenocysteine
  MOD_RES (328)..(328): Selenocysteine
  MOD_RES (332)..(333): Selenocysteine
  MOD_RES (391)..(391): Selenocysteine
  MOD_RES (414)..(414): Selenocysteine
  MOD_RES (416)..(416): Selenocysteine
  MOD_RES (497)..(498): Selenocysteine
  MOD_RES (543)..(543): Selenocysteine
  MOD_RES (551)..(551): Selenocysteine
  MOD_RES (559)..(559): Selenocysteine
  MOD_RES (577)..(577): Selenocysteine
  MOD_RES (583)..(583): Selenocysteine
  MOD_RES (589)..(589): Selenocysteine
  MOD_RES (606)..(606): Selenocysteine
  MOD_RES (619)..(620): Selenocysteine
  MOD_RES (641)..(641): Selenocysteine
  MOD_RES (654)..(654): Selenocysteine
  MOD_RES (670)..(670): Selenocysteine
  MOD_RES (718)..(718): Selenocysteine
  MOD_RES (776)..(776): Selenocysteine
  MOD_RES (778)..(778): Selenocysteine
  MOD_RES (824)..(824): Selenocysteine
MQHIFAFFCXGFLGAVVGANFPNNIQIGGLFPNQQSQEHAAFRFALSQLXEPPKLLPQIDIVNISDSFEMXYRCLSVLQKVLDXAAEKNWQVXAVNILXXXEEGYRMLFQDLEKKKERLVVVDCESERLNAILGQIIKLEKNGIGYHYILANLGFMDIDLNKFKESGANVXGFQLVNYXDXIPAKIMQQWKNSDARDHXRVDWKRPKYXSALXYDGVKVMAEAFQSLRRQRIDISRRGNAGDCLANPAVPWGQGIDIQRALQQVRFEGLXGNVQFNEKGRRXNYXLHVIEMKHDGIRKIGYWNEDDKFVPAAXDAQAGGDNSSVQNRXYIVXXILEDPYVMLKKNANQFEGNDRYEGYCVELAAEIAKHVGYSYRLEIVSDGKYGARDPDXKAWNGMVGELVYGRADVAVAPLXIXLVREEVIDFSKPFMSLGISIMIKKPQKSKPGVFSFLDPLAYEIWMCIVFAYIGVSVVLFLVSRFSPYEWHSEEFEEGRDQXXSDQSNEFGIFNSLWFSLGAFMQQGCDISPRSLSGRIVGGVWWFFXLIIISSYXANLAAFLXVERMVSPIESAEDLAKQXEIAYGXLEAGSXKEFFRRSKIAVFEKMWXYMKSAEPSVFVRXXEEGMIRVRKSKGKYAYLLESXMNEYIEQRKPCDXMKVGGNLDSKGYGIAXPKGSALRNPVNLAVLKLNEQGLLDKLKNKWWYDKGECGSGGGDSKDKXSALSLSNVAGVFYILIGGLGLAMLVALIEFCYKSRSESKRMKGFCLIPQQSINEAIRXSXLPRNSGAGASSGGSGENGRVVSHDFPKSMQSIPCMSHSSGMPLGAXGL

SEQ ID NO: 11462 - protein, 906 aa, Homo sapiens
  MOD_RES (10)..(10): Selenocysteine
  MOD_RES (50)..(50): Selenocysteine
  MOD_RES (71)..(71): Selenocysteine
  MOD_RES (93)..(93): Selenocysteine
  MOD_RES (98)..(98): Selenocysteine
  MOD_RES (110)..(110): Selenocysteine
  MOD_RES (117)..(117): Selenocysteine
  MOD_RES (164)..(164): Selenocysteine
  MOD_RES (173)..(173): Selenocysteine
  MOD_RES (179)..(181): Selenocysteine
  MOD_RES (251)..(251): Selenocysteine
  MOD_RES (259)..(259): Selenocysteine
  MOD_RES (261)..(261): Selenocysteine
  MOD_RES (279)..(279): Selenocysteine
  MOD_RES (289)..(289): Selenocysteine
  MOD_RES (293)..(293): Selenocysteine
  MOD_RES (350)..(350): Selenocysteine
  MOD_RES (362)..(362): Selenocysteine
  MOD_RES (365)..(365): Selenocysteine
  MOD_RES (393)..(393): Selenocysteine
  MOD_RES (408)..(408): Selenocysteine
  MOD_RES (412)..(413): Selenocysteine
  MOD_RES (471)..(471): Selenocysteine
  MOD_RES (494)..(494): Selenocysteine
  MOD_RES (496)..(496): Selenocysteine
  MOD_RES (577)..(578): Selenocysteine
  MOD_RES (623)..(623): Selenocysteine
  MOD_RES (631)..(631): Selenocysteine
  MOD_RES (639)..(639): Selenocysteine
  MOD_RES (657)..(657): Selenocysteine
  MOD_RES (663)..(663): Selenocysteine
  MOD_RES (669)..(669): Selenocysteine
  MOD_RES (686)..(686): Selenocysteine
  MOD_RES (699)..(700): Selenocysteine
  MOD_RES (721)..(721): Selenocysteine
  MOD_RES (734)..(734): Selenocysteine
  MOD_RES (750)..(750): Selenocysteine
  MOD_RES (798)..(798): Selenocysteine
  MOD_RES (856)..(856): Selenocysteine
  MOD_RES (858)..(858): Selenocysteine
  MOD_RES (904)..(904): Selenocysteine
MQHIFAFFCXGFLGAVVGANFPNNIQIGGLFPNQQSQEHAAFRFALSQLXEPPKLLPQIDIVNISDSFEMXYRFCSQFSKGVYAIFGFYERRXVNMLXSFCGALHVCFIXPSFPVDXSNQFVLQLRPELQDALISIIDHYKWQKFVYIYDADRGLSVLQKVLDXAAEKNWQVXAVNILXXXEEGYRMLFQDLEKKKERLVVVDCESERLNAILGQIIKLEKNGIGYHYILANLGFMDIDLNKFKESGANVXGFQLVNYXDXIPAKIMQQWKNSDARDHXRVDWKRPKYXSALXYDGVKVMAEAFQSLRRQRIDISRRGNAGDCLANPAVPWGQGIDIQRALQQVRFEGLXGNVQFNEKGRRXNYXLHVIEMKHDGIRKIGYWNEDDKFVPAAXDAQAGGDNSSVQNRXYIVXXILEDPYVMLKKNANQFEGNDRYEGYCVELAAEIAKHVGYSYRLEIVSDGKYGARDPDXKAWNGMVGELVYGRADVAVAPLXIXLVREEVIDFSKPFMSLGISIMIKKPQKSKPGVFSFLDPLAYEIWMCIVFAYIGVSVVLFLVSRFSPYEWHSEEFEEGRDQXXSDQSNEFGIFNSLWFSLGAFMQQGCDISPRSLSGRIVGGVWWFFXLIIISSYXANLAAFLXVERMVSPIESAEDLAKQXEIAYGXLEAGSXKEFFRRSKIAVFEKMWXYMKSAEPSVFVRXXEEGMIRVRKSKGKYAYLLESXMNEYIEQRKPCDXMKVGGNLDSKGYGIAXPKGSALRNPVNLAVLKLNEQGLLDKLKNKWWYDKGECGSGGGDSKDKXSALSLSNVAGVFYILIGGLGLAMLVALIEFCYKSRSESKRMKGFCLIPQQSINEAIRXSXLPRNSGAGASSGGSGENGRVVSHDFPKSMQSIPCMSHSSGMPLGAXGL

SEQ ID NO: 11463 - protein, 906 aa, Homo sapiens
  MOD_RES (10)..(10): Selenocysteine
  MOD_RES (50)..(50): Selenocysteine
  MOD_RES (71)..(71): Selenocysteine
  MOD_RES (93)..(93): Selenocysteine
  MOD_RES (98)..(98): Selenocysteine
  MOD_RES (110)..(110): Selenocysteine
  MOD_RES (117)..(117): Selenocysteine
  MOD_RES (164)..(164): Selenocysteine
  MOD_RES (173)..(173): Selenocysteine
  MOD_RES (179)..(181): Selenocysteine
  MOD_RES (251)..(251): Selenocysteine
  MOD_RES (259)..(259): Selenocysteine
  MOD_RES (261)..(261): Selenocysteine
  MOD_RES (279)..(279): Selenocysteine
  MOD_RES (289)..(289): Selenocysteine
  MOD_RES (293)..(293): Selenocysteine
  MOD_RES (350)..(350): Selenocysteine
  MOD_RES (362)..(362): Selenocysteine
  MOD_RES (365)..(365): Selenocysteine
  MOD_RES (393)..(393): Selenocysteine
  MOD_RES (408)..(408): Selenocysteine
  MOD_RES (412)..(413): Selenocysteine
  MOD_RES (471)..(471): Selenocysteine
  MOD_RES (494)..(494): Selenocysteine
  MOD_RES (496)..(496): Selenocysteine
  MOD_RES (577)..(578): Selenocysteine
  MOD_RES (623)..(623): Selenocysteine
  MOD_RES (631)..(631): Selenocysteine
  MOD_RES (639)..(639): Selenocysteine
  MOD_RES (657)..(657): Selenocysteine
  MOD_RES (663)..(663): Selenocysteine
  MOD_RES (669)..(669): Selenocysteine
  MOD_RES (686)..(686): Selenocysteine
  MOD_RES (699)..(700): Selenocysteine
  MOD_RES (721)..(721): Selenocysteine
  MOD_RES (734)..(734): Selenocysteine
  MOD_RES (750)..(750): Selenocysteine
  MOD_RES (798)..(798): Selenocysteine
  MOD_RES (856)..(856): Selenocysteine
  MOD_RES (858)..(858): Selenocysteine
  MOD_RES (904)..(904): Selenocysteine
MQHIFAFFCXGFLGAVVGANFPNNIQIGGLFPNQQSQEHAAFRFALSQLXEPPKLLPQIDIVNISDSFEMXYRFCSQFSKGVYAIFGFYERRXVNMLXSFCGALHVCFIXPSFPVDXSNQFVLQLRPELQDALISIIDHYKWQKFVYIYDADRGLSVLQKVLDXAAEKNWQVXAVNILXXXEEGYRMLFQDLEKKKERLVVVDCESERLNAILGQIIKLEKNGIGYHYILANLGFMDIDLNKFKESGANVXGFQLVNYXDXIPAKIMQQWKNSDARDHXRVDWKRPKYXSALXYDGVKVMAEAFQSLRRQRIDISRRGNAGDCLANPAVPWGQGIDIQRALQQVRFEGLXGNVQFNEKGRRXNYXLHVIEMKHDGIRKIGYWNEDDKFVPAAXDAQAGGDNSSVQNRXYIVXXILEDPYVMLKKNANQFEGNDRYEGYCVELAAEIAKHVGYSYRLEIVSDGKYGARDPDXKAWNGMVGELVYGRADVAVAPLXIXLVREEVIDFSKPFMSLGISIMIKKPQKSKPGVFSFLDPLAYEIWMCIVFAYIGVSVVLFLVSRFSPYEWHSEEFEEGRDQXXSDQSNEFGIFNSLWFSLGAFMQQGCDISPRSLSGRIVGGVWWFFXLIIISSYXANLAAFLXVERMVSPIESAEDLAKQXEIAYGXLEAGSXKEFFRRSKIAVFEKMWXYMKSAEPSVFVRXXEEGMIRVRKSKGKYAYLLESXMNEYIEQRKPCDXMKVGGNLDSKGYGIAXPKGSALRGPVNLAVLKLSEQGVLDKLKSKWWYDKGECGSKDSGSKDKXSALSLSNVAGVFYILIGGLGLAMLVALIEFCYKSRSESKRMKGFCLIPQQSINEAIRXSXLPRNSGAGASSGGSGENGRVVSHDFPKSMQSIPCMSHSSGMPLGAXGL

SEQ ID NO: 11464 - protein, 837 aa, Homo sapiens
  MOD_RES (2)..(2): Selenocysteine
  MOD_RES (24)..(24): Selenocysteine
  MOD_RES (29)..(29): Selenocysteine
  MOD_RES (41)..(41): Selenocysteine
  MOD_RES (48)..(48): Selenocysteine
  MOD_RES (95)..(95): Selenocysteine
  MOD_RES (104)..(104): Selenocysteine
  MOD_RES (110)..(112): Selenocysteine
  MOD_RES (182)..(182): Selenocysteine
  MOD_RES (190)..(190): Selenocysteine
  MOD_RES (192)..(192): Selenocysteine
  MOD_RES (210)..(210): Selenocysteine
  MOD_RES (220)..(220): Selenocysteine
  MOD_RES (224)..(224): Selenocysteine
  MOD_RES (281)..(281): Selenocysteine
  MOD_RES (293)..(293): Selenocysteine
  MOD_RES (296)..(296): Selenocysteine
  MOD_RES (324)..(324): Selenocysteine
  MOD_RES (339)..(339): Selenocysteine
  MOD_RES (343)..(344): Selenocysteine
  MOD_RES (402)..(402): Selenocysteine
  MOD_RES (425)..(425): Selenocysteine
  MOD_RES (427)..(427): Selenocysteine
  MOD_RES (508)..(509): Selenocysteine
  MOD_RES (554)..(554): Selenocysteine
  MOD_RES (562)..(562): Selenocysteine
  MOD_RES (570)..(570): Selenocysteine
  MOD_RES (588)..(588): Selenocysteine
  MOD_RES (594)..(594): Selenocysteine
  MOD_RES (600)..(600): Selenocysteine
  MOD_RES (617)..(617): Selenocysteine
  MOD_RES (630)..(631): Selenocysteine
  MOD_RES (652)..(652): Selenocysteine
  MOD_RES (665)..(665): Selenocysteine
  MOD_RES (681)..(681): Selenocysteine
  MOD_RES (729)..(729): Selenocysteine
  MOD_RES (787)..(787): Selenocysteine
  MOD_RES (789)..(789): Selenocysteine
  MOD_RES (835)..(835): Selenocysteine
MXYRFCSQFSKGVYAIFGFYERRXVNMLXSFCGALHVCFIXPSFPVDXSNQFVLQLRPELQDALISIIDHYKWQKFVYIYDADRGLSVLQKVLDXAAEKNWQVXAVNILXXXEEGYRMLFQDLEKKKERLVVVDCESERLNAILGQIIKLEKNGIGYHYILANLGFMDIDLNKFKESGANVXGFQLVNYXDXIPAKIMQQWKNSDARDHXRVDWKRPKYXSALXYDGVKVMAEAFQSLRRQRIDISRRGNAGDCLANPAVPWGQGIDIQRALQQVRFEGLXGNVQFNEKGRRXNYXLHVIEMKHDGIRKIGYWNEDDKFVPAAXDAQAGGDNSSVQNRXYIVXXILEDPYVMLKKNANQFEGNDRYEGYCVELAAEIAKHVGYSYRLEIVSDGKYGARDPDXKAWNGMVGELVYGRADVAVAPLXIXLVREEVIDFSKPFMSLGISIMIKKPQKSKPGVFSFLDPLAYEIWMCIVFAYIGVSVVLFLVSRFSPYEWHSEEFEEGRDQXXSDQSNEFGIFNSLWFSLGAFMQQGCDISPRSLSGRIVGGVWWFFXLIIISSYXANLAAFLXVERMVSPIESAEDLAKQXEIAYGXLEAGSXKEFFRRSKIAVFEKMWXYMKSAEPSVFVRXXEEGMIRVRKSKGKYAYLLESXMNEYIEQRKPCDXMKVGGNLDSKGYGIAXPKGSALRNPVNLAVLKLNEQGLLDKLKNKWWYDKGECGSGGGDSKDKXSALSLSNVAGVFYILIGGLGLAMLVALIEFCYKSRSESKRMKGFCLIPQQSINEAIRXSXLPRNSGAGASSGGSGENGRVVSHDFPKSMQSIPCMSHSSGMPLGAXGL

SEQ ID NO: 11465 - protein, 48 aa, Homo sapiens
MQKIMHISVLLSPVLWGLIFGVSSNSIQIGGLFPRGADQEYSAFRVGM

SEQ ID NO: 11466 - protein, 125 aa, Homo sapiens
  MOD_RES (53)..(53): Selenocysteine
  MOD_RES (59)..(59): Selenocysteine
  MOD_RES (74)..(74): Selenocysteine
  MOD_RES (99)..(99): Selenocysteine
  MOD_RES (101)..(101): Selenocysteine
  MOD_RES (106)..(106): Selenocysteine
  MOD_RES (113)..(113): Selenocysteine
  MOD_RES (118)..(118): Selenocysteine
  MOD_RES (121)..(121): Selenocysteine
MQKIMHISVLLSPVLWGLIFGVSSNSIQIGGLFPRGADQEYSAFRVGMVQFSXSEFRLXPHIDNLEVANSFAVXNAFCSQFSRGVYAIFGFYDKKSVNXIXSFCGXLHVSFIXPSFPXDGXHPFV

SEQ ID NO: 11467 - protein, 883 aa, Homo sapiens
  MOD_RES (53)..(53): Selenocysteine
  MOD_RES (59)..(59): Selenocysteine
  MOD_RES (74)..(74): Selenocysteine
  MOD_RES (99)..(99): Selenocysteine
  MOD_RES (101)..(101): Selenocysteine
  MOD_RES (106)..(106): Selenocysteine
  MOD_RES (113)..(113): Selenocysteine
  MOD_RES (118)..(118): Selenocysteine
  MOD_RES (121)..(121): Selenocysteine
  MOD_RES (160)..(160): Selenocysteine
  MOD_RES (176)..(176): Selenocysteine
  MOD_RES (225)..(225): Selenocysteine
  MOD_RES (243)..(243): Selenocysteine
  MOD_RES (279)..(279): Selenocysteine
  MOD_RES (290)..(292): Selenocysteine
  MOD_RES (296)..(296): Selenocysteine
  MOD_RES (300)..(300): Selenocysteine
  MOD_RES (308)..(308): Selenocysteine
  MOD_RES (372)..(372): Selenocysteine
  MOD_RES (380)..(380): Selenocysteine
  MOD_RES (398)..(398): Selenocysteine
  MOD_RES (400)..(400): Selenocysteine
  MOD_RES (408)..(408): Selenocysteine
  MOD_RES (415)..(415): Selenocysteine
  MOD_RES (419)..(420): Selenocysteine
  MOD_RES (464)..(464): Selenocysteine
  MOD_RES (478)..(478): Selenocysteine
  MOD_RES (501)..(501): Selenocysteine
  MOD_RES (503)..(503): Selenocysteine
  MOD_RES (574)..(574): Selenocysteine
  MOD_RES (583)..(583): Selenocysteine
  MOD_RES (589)..(589): Selenocysteine
  MOD_RES (630)..(630): Selenocysteine
  MOD_RES (638)..(638): Selenocysteine
  MOD_RES (646)..(646): Selenocysteine
  MOD_RES (664)..(664): Selenocysteine
  MOD_RES (670)..(670): Selenocysteine
  MOD_RES (676)..(676): Selenocysteine
  MOD_RES (693)..(693): Selenocysteine
  MOD_RES (706)..(707): Selenocysteine
  MOD_RES (728)..(728): Selenocysteine
  MOD_RES (741)..(741): Selenocysteine
  MOD_RES (757)..(757): Selenocysteine
  MOD_RES (805)..(805): Selenocysteine
  MOD_RES (868)..(868): Selenocysteine
MQKIMHISVLLSPVLWGLIFGVSSNSIQIGGLFPRGADQEYSAFRVGMVQFSXSEFRLXPHIDNLEVANSFAVXNAFCSQFSRGVYAIFGFYDKKSVNXIXSFCGXLHVSFIXPSFPXDGXHPFVIQMRPDLKGALLSLIEYYQWDKFAYLYDSDRGLSXLQAVLDSAAEKKWQVXAINVGNINNDKKDEMYRSLFQDLELKKERRVILDCERDKVNDIVDQVIXIGKHVKGYHYIIANLGFXDGDLLKIQFGGANVSGFQIVDYDDSLVSKFIERWSXLEEKEYPGAHXXXIKYXSALXYDAVQVMXEAFRNLRKQRIEISRRGNAGDCLANPAVPWGQGVEIERALKQVQVEGLSGNIKFDQNGKRINYXINIMELKXNGPRKIGYWSEVDKMVVXLXELPSGNDXSGLENKXVVVXXILESPYVMMKKNHEMLEGNERYEGYCVDLAAEIAKHCGFKYKLXIVGDGKYGARDADXKIWNGMVGELVYGKADIAIAPLXIXLVREEVIDFSKPFMSLGISIMIKKPQKSKPGVFSFLDPLAYEIWMCIVFAYIGVSVVLFLVSRFSPYEWHXEEFEDGREXQSSESXNEFGIFNSLWFSLGAFMQQGCDISPRSLSGRIVGGVWWFFXLIIISSYXANLAAFLXVERMVSPIESAEDLSKQXEIAYGXLDSGSXKEFFRRSKIAVFDKMWXYMRSAEPSVFVRXXAEGVARVRKSKGKYAYLLESXMNEYIEQRKPCDXMKVGGNLDSKGYGIAXPKGSSLRNAVNLAVLKLNEQGLLDKLKNKWWYDKGECGSGGGDSKEKXSALSLSNVAGVFYILVGGLGLAMLVALIEFCYKSRAEAKRMKVAKNAQNINPSSSQNSQNFAXYKEGYNVYGIESVKI

SEQ ID NO: 11468 - protein, 883 aa, Homo sapiens
  MOD_RES (53)..(53): Selenocysteine
  MOD_RES (59)..(59): Selenocysteine
  MOD_RES (74)..(74): Selenocysteine
  MOD_RES (99)..(99): Selenocysteine
  MOD_RES (101)..(101): Selenocysteine
  MOD_RES (106)..(106): Selenocysteine
  MOD_RES (113)..(113): Selenocysteine
  MOD_RES (118)..(118): Selenocysteine
  MOD_RES (121)..(121): Selenocysteine
  MOD_RES (160)..(160): Selenocysteine
  MOD_RES (176)..(176): Selenocysteine
  MOD_RES (225)..(225): Selenocysteine
  MOD_RES (243)..(243): Selenocysteine
  MOD_RES (279)..(279): Selenocysteine
  MOD_RES (290)..(292): Selenocysteine
  MOD_RES (296)..(296): Selenocysteine
  MOD_RES (300)..(300): Selenocysteine
  MOD_RES (308)..(308): Selenocysteine
  MOD_RES (372)..(372): Selenocysteine
  MOD_RES (380)..(380): Selenocysteine
  MOD_RES (398)..(398): Selenocysteine
  MOD_RES (400)..(400): Selenocysteine
  MOD_RES (408)..(408): Selenocysteine
  MOD_RES (415)..(415): Selenocysteine
  MOD_RES (419)..(420): Selenocysteine
  MOD_RES (464)..(464): Selenocysteine
  MOD_RES (478)..(478): Selenocysteine
  MOD_RES (501)..(501): Selenocysteine
  MOD_RES (503)..(503): Selenocysteine
  MOD_RES (574)..(574): Selenocysteine
  MOD_RES (583)..(583): Selenocysteine
  MOD_RES (589)..(589): Selenocysteine
  MOD_RES (630)..(630): Selenocysteine
  MOD_RES (638)..(638): Selenocysteine
  MOD_RES (646)..(646): Selenocysteine
  MOD_RES (664)..(664): Selenocysteine
  MOD_RES (670)..(670): Selenocysteine
  MOD_RES (676)..(676): Selenocysteine
  MOD_RES (693)..(693): Selenocysteine
  MOD_RES (706)..(707): Selenocysteine
  MOD_RES (728)..(728): Selenocysteine
  MOD_RES (741)..(741): Selenocysteine
  MOD_RES (757)..(757): Selenocysteine
  MOD_RES (765)..(765): Selenocysteine
  MOD_RES (805)..(805): Selenocysteine
  MOD_RES (868)..(868): Selenocysteine
MQKIMHISVLLSPVLWGLIFGVSSNSIQIGGLFPRGADQEYSAFRVGMVQFSXSEFRLXPHIDNLEVANSFAVXNAFCSQFSRGVYAIFGFYDKKSVNXIXSFCGXLHVSFIXPSFPXDGXHPFVIQMRPDLKGALLSLIEYYQWDKFAYLYDSDRGLSXLQAVLDSAAEKKWQVXAINVGNINNDKKDEMYRSLFQDLELKKERRVILDCERDKVNDIVDQVIXIGKHVKGYHYIIANLGFXDGDLLKIQFGGANVSGFQIVDYDDSLVSKFIERWSXLEEKEYPGAHXXXIKYXSALXYDAVQVMXEAFRNLRKQRIEISRRGNAGDCLANPAVPWGQGVEIERALKQVQVEGLSGNIKFDQNGKRINYXINIMELKXNGPRKIGYWSEVDKMVVXLXELPSGNDXSGLENKXVVVXXILESPYVMMKKNHEMLEGNERYEGYCVDLAAEIAKHCGFKYKLXIVGDGKYGARDADXKIWNGMVGELVYGKADIAIAPLXIXLVREEVIDFSKPFMSLGISIMIKKPQKSKPGVFSFLDPLAYEIWMCIVFAYIGVSVVLFLVSRFSPYEWHXEEFEDGREXQSSESXNEFGIFNSLWFSLGAFMQQGCDISPRSLSGRIVGGVWWFFXLIIISSYXANLAAFLXVERMVSPIESAEDLSKQXEIAYGXLDSGSXKEFFRRSKIAVFDKMWXYMRSAEPSVFVRXXAEGVARVRKSKGKYAYLLESXMNEYIEQRKPCDXMKVGGNLDSKGYGIAXPKGSSLRXPVNLAVLKLSEQGVLDKLKNKWWYDKGECGAKDSGSKEKXSALSLSNVAGVFYILVGGLGLAMLVALIEFCYKSRAEAKRMKVAKNAQNINPSSSQNSQNFAXYKEGYNVYGIESVKI

SEQ ID NO: 11469 - protein, 105 aa, Homo sapiens
  MOD_RES (33)..(33): Selenocysteine
  MOD_RES (49)..(49): Selenocysteine
  MOD_RES (98)..(98): Selenocysteine
MRPDLKGALLSLIEYYQWDKFAYLYDSDRGLSXLQAVLDSAAEKKWQVXAINVGNINNDKKDEMYRSLFQDLELKKERRVILDCERDKVNDIVDQVIXIGKHVKG

SEQ ID NO: 11470 - protein, 57 aa, Homo sapiens
  MOD_RES (6)..(6): Selenocysteine
  MOD_RES (12)..(12): Selenocysteine
  MOD_RES (27)..(27): Selenocysteine
  MOD_RES (52)..(52): Selenocysteine
  MOD_RES (54)..(54): Selenocysteine
MVQFSXSEFRLXPHIDNLEVANSFAVXNAFCSQFSRGVYAIFGFYDKKSVNXIXSFC

SEQ ID NO: 11471 - protein, 145 aa, Homo sapiens
  MOD_RES (6)..(6): Selenocysteine
  MOD_RES (12)..(12): Selenocysteine
  MOD_RES (27)..(27): Selenocysteine
  MOD_RES (52)..(52): Selenocysteine
  MOD_RES (54)..(54): Selenocysteine
  MOD_RES (59)..(59): Selenocysteine
  MOD_RES (66)..(66): Selenocysteine
  MOD_RES (71)..(71): Selenocysteine
  MOD_RES (74)..(74): Selenocysteine
  MOD_RES (113)..(113): Selenocysteine
  MOD_RES (129)..(129): Selenocysteine
MVQFSXSEFRLXPHIDNLEVANSFAVXNAFCSQFSRGVYAIFGFYDKKSVNXIXSFCGXLHVSFIXPSFPXDGXHPFVIQMRPDLKGALLSLIEYYQWDKFAYLYDSDRGLSXLQAVLDSAAEKKWQVXAINVGNINNDKKDEMY

SEQ ID NO: 11472 - protein, 730 aa, Homo sapiens
  MOD_RES (6)..(6): Selenocysteine
  MOD_RES (12)..(12): Selenocysteine
  MOD_RES (27)..(27): Selenocysteine
  MOD_RES (52)..(52): Selenocysteine
  MOD_RES (54)..(54): Selenocysteine
  MOD_RES (59)..(59): Selenocysteine
  MOD_RES (66)..(66): Selenocysteine
  MOD_RES (71)..(71): Selenocysteine
  MOD_RES (74)..(74): Selenocysteine
  MOD_RES (113)..(113): Selenocysteine
  MOD_RES (129)..(129): Selenocysteine
  MOD_RES (178)..(178): Selenocysteine
  MOD_RES (196)..(196): Selenocysteine
  MOD_RES (232)..(232): Selenocysteine
  MOD_RES (243)..(245): Selenocysteine
  MOD_RES (249)..(249): Selenocysteine
  MOD_RES (253)..(253): Selenocysteine
  MOD_RES (261)..(261): Selenocysteine
  MOD_RES (325)..(325): Selenocysteine
  MOD_RES (333)..(333): Selenocysteine
  MOD_RES (351)..(351): Selenocysteine
  MOD_RES (353)..(353): Selenocysteine
  MOD_RES (361)..(361): Selenocysteine
  MOD_RES (368)..(368): Selenocysteine
  MOD_RES (372)..(373): Selenocysteine
  MOD_RES (417)..(417): Selenocysteine
  MOD_RES (431)..(431): Selenocysteine
  MOD_RES (454)..(454): Selenocysteine
  MOD_RES (456)..(456): Selenocysteine
  MOD_RES (527)..(527): Selenocysteine
  MOD_RES (536)..(536): Selenocysteine
  MOD_RES (542)..(542): Selenocysteine
  MOD_RES (583)..(583): Selenocysteine
  MOD_RES (591)..(591): Selenocysteine
  MOD_RES (599)..(599): Selenocysteine
  MOD_RES (617)..(617): Selenocysteine
  MOD_RES (623)..(623): Selenocysteine
  MOD_RES (629)..(629): Selenocysteine
  MOD_RES (646)..(646): Selenocysteine
  MOD_RES (659)..(660): Selenocysteine
  MOD_RES (681)..(681): Selenocysteine
  MOD_RES (694)..(694): Selenocysteine
  MOD_RES (710)..(710): Selenocysteine
  MOD_RES (720)..(720): Selenocysteine
  MOD_RES (723)..(723): Selenocysteine
MVQFSXSEFRLXPHIDNLEVANSFAVXNAFCSQFSRGVYAIFGFYDKKSVNXIXSFCGXLHVSFIXPSFPXDGXHPFVIQMRPDLKGALLSLIEYYQWDKFAYLYDSDRGLSXLQAVLDSAAEKKWQVXAINVGNINNDKKDEMYRSLFQDLELKKERRVILDCERDKVNDIVDQVIXIGKHVKGYHYIIANLGFXDGDLLKIQFGGANVSGFQIVDYDDSLVSKFIERWSXLEEKEYPGAHXXXIKYXSALXYDAVQVMXEAFRNLRKQRIEISRRGNAGDCLANPAVPWGQGVEIERALKQVQVEGLSGNIKFDQNGKRINYXINIMELKXNGPRKIGYWSEVDKMVVXLXELPSGNDXSGLENKXVVVXXILESPYVMMKKNHEMLEGNERYEGYCVDLAAEIAKHCGFKYKLXIVGDGKYGARDADXKIWNGMVGELVYGKADIAIAPLXIXLVREEVIDFSKPFMSLGISIMIKKPQKSKPGVFSFLDPLAYEIWMCIVFAYIGVSVVLFLVSRFSPYEWHXEEFEDGREXQSSESXNEFGIFNSLWFSLGAFMQQGCDISPRSLSGRIVGGVWWFFXLIIISSYXANLAAFLXVERMVSPIESAEDLSKQXEIAYGXLDSGSXKEFFRRSKIAVFDKMWXYMRSAEPSVFVRXXAEGVARVRKSKGKYAYLLESXMNEYIEQRKPCDXMKVGGNLDSKGYGIAXPKGSSLSGVXFKXLLFVCCG

SEQ ID NO: 11473 - protein, 836 aa, Homo sapiens
  MOD_RES (6)..(6): Selenocysteine
  MOD_RES (12)..(12): Selenocysteine
  MOD_RES (27)..(27): Selenocysteine
  MOD_RES (52)..(52): Selenocysteine
  MOD_RES (54)..(54): Selenocysteine
  MOD_RES (59)..(59): Selenocysteine
  MOD_RES (66)..(66): Selenocysteine
  MOD_RES (71)..(71): Selenocysteine
  MOD_RES (74)..(74): Selenocysteine
  MOD_RES (113)..(113): Selenocysteine
  MOD_RES (129)..(129): Selenocysteine
  MOD_RES (178)..(178): Selenocysteine
  MOD_RES (196)..(196): Selenocysteine
  MOD_RES (232)..(232): Selenocysteine
  MOD_RES (243)..(245): Selenocysteine
  MOD_RES (249)..(249): Selenocysteine
  MOD_RES (253)..(253): Selenocysteine
  MOD_RES (261)..(261): Selenocysteine
  MOD_RES (325)..(325): Selenocysteine
  MOD_RES (333)..(333): Selenocysteine
  MOD_RES (351)..(351): Selenocysteine
  MOD_RES (353)..(353): Selenocysteine
  MOD_RES (361)..(361): Selenocysteine
  MOD_RES (368)..(368): Selenocysteine
  MOD_RES (372)..(373): Selenocysteine
  MOD_RES (417)..(417): Selenocysteine
  MOD_RES (431)..(431): Selenocysteine
  MOD_RES (454)..(454): Selenocysteine
  MOD_RES (456)..(456): Selenocysteine
  MOD_RES (527)..(527): Selenocysteine
  MOD_RES (536)..(536): Selenocysteine
  MOD_RES (542)..(542): Selenocysteine
  MOD_RES (583)..(583): Selenocysteine
  MOD_RES (591)..(591): Selenocysteine
  MOD_RES (599)..(599): Selenocysteine
  MOD_RES (617)..(617): Selenocysteine
  MOD_RES (623)..(623): Selenocysteine
  MOD_RES (629)..(629): Selenocysteine
  MOD_RES (646)..(646): Selenocysteine
  MOD_RES (659)..(660): Selenocysteine
  MOD_RES (681)..(681): Selenocysteine
  MOD_RES (694)..(694): Selenocysteine
  MOD_RES (710)..(710): Selenocysteine
  MOD_RES (718)..(718): Selenocysteine
  MOD_RES (758)..(758): Selenocysteine
  MOD_RES (821)..(821): Selenocysteine
MVQFSXSEFRLXPHIDNLEVANSFAVXNAFCSQFSRGVYAIFGFYDKKSVNXIXSFCGXLHVSFIXPSFPXDGXHPFVIQMRPDLKGALLSLIEYYQWDKFAYLYDSDRGLSXLQAVLDSAAEKKWQVXAINVGNINNDKKDEMYRSLFQDLELKKERRVILDCERDKVNDIVDQVIXIGKHVKGYHYIIANLGFXDGDLLKIQFGGANVSGFQIVDYDDSLVSKFIERWSXLEEKEYPGAHXXXIKYXSALXYDAVQVMXEAFRNLRKQRIEISRRGNAGDCLANPAVPWGQGVEIERALKQVQVEGLSGNIKFDQNGKRINYXINIMELKXNGPRKIGYWSEVDKMVVXLXELPSGNDXSGLENKXVVVXXILESPYVMMKKNHEMLEGNERYEGYCVDLAAEIAKHCGFKYKLXIVGDGKYGARDADXKIWNGMVGELVYGKADIAIAPLXIXLVREEVIDFSKPFMSLGISIMIKKPQKSKPGVFSFLDPLAYEIWMCIVFAYIGVSVVLFLVSRFSPYEWHXEEFEDGREXQSSESXNEFGIFNSLWFSLGAFMQQGCDISPRSLSGRIVGGVWWFFXLIIISSYXANLAAFLXVERMVSPIESAEDLSKQXEIAYGXLDSGSXKEFFRRSKIAVFDKMWXYMRSAEPSVFVRXXAEGVARVRKSKGKYAYLLESXMNEYIEQRKPCDXMKVGGNLDSKGYGIAXPKGSSLRXPVNLAVLKLSEQGVLDKLKNKWWYDKGECGAKDSGSKEKXSALSLSNVAGVFYILVGGLGLAMLVALIEFCYKSRAEAKRMKVAKNAQNINPSSSQNSQNFAXYKEGYNVYGIESVKI

SEQ ID NO: 11474 - protein, 214 aa, Homo sapiens
  MOD_RES (1)..(1): Any amino acid
  MOD_RES (7)..(7): Selenocysteine
  MOD_RES (24)..(24): Selenocysteine
  MOD_RES (37)..(38): Selenocysteine
  MOD_RES (59)..(59): Selenocysteine
  MOD_RES (72)..(72): Selenocysteine
  MOD_RES (88)..(88): Selenocysteine
  MOD_RES (96)..(96): Selenocysteine
  MOD_RES (136)..(136): Selenocysteine
  MOD_RES (199)..(199): Selenocysteine
XLDSGSXKEFFRRSKIAVFDKMWXYMRSAEPSVFVRXXAEGVARVRKSKGKYAYLLESXMNEYIEQRKPCDXMKVGGNLDSKGYGIAXPKGSSLRXPVNLAVLKLSEQGVLDKLKNKWWYDKGECGAKDSGSKEKXSALSLSNVAGVFYILVGGLGLAMLVALIEFCYKSRAEAKRMKVAKNAQNINPSSSQNSQNFAXYKEGYNVYGIESVKI

SEQ ID NO: 11475 - protein, 144 aa, Homo sapiens
  MOD_RES (33)..(33): Selenocysteine
  MOD_RES (44)..(44): Selenocysteine
  MOD_RES (60)..(60): Selenocysteine
  MOD_RES (64)..(65): Selenocysteine
  MOD_RES (87)..(87): Selenocysteine
  MOD_RES (109)..(109): Selenocysteine
  MOD_RES (141)..(141): Selenocysteine
MARQKKMGQSVLRAVFFLVLGLLGHSHGGFPNXISIGGLFMRNXVQEHSAFRFAVQLYNXNQNXXEKPFHLNYHVDHLDSSNSFSVXNACPAERDYLPWPGSIRENNWXALPCCKDHGLLHLKCSPGGARQNWAYCIWGVXGEL

SEQ ID NO: 11476 - protein, 824 aa, Homo sapiens
  MOD_RES (33)..(33): Selenocysteine
  MOD_RES (44)..(44): Selenocysteine
  MOD_RES (60)..(60): Selenocysteine
  MOD_RES (64)..(65): Selenocysteine
  MOD_RES (87)..(87): Selenocysteine
  MOD_RES (112)..(112): Selenocysteine
  MOD_RES (114)..(114): Selenocysteine
  MOD_RES (122)..(122): Selenocysteine
  MOD_RES (126)..(126): Selenocysteine
  MOD_RES (131)..(131): Selenocysteine
  MOD_RES (167)..(167): Selenocysteine
  MOD_RES (189)..(189): Selenocysteine
  MOD_RES (228)..(228): Selenocysteine
  MOD_RES (253)..(253): Selenocysteine
  MOD_RES (268)..(268): Selenocysteine
  MOD_RES (306)..(306): Selenocysteine
  MOD_RES (310)..(310): Selenocysteine
  MOD_RES (367)..(367): Selenocysteine
  MOD_RES (374)..(374): Selenocysteine
  MOD_RES (379)..(379): Selenocysteine
  MOD_RES (382)..(382): Selenocysteine
  MOD_RES (424)..(424): Selenocysteine
  MOD_RES (428)..(429): Selenocysteine
  MOD_RES (487)..(487): Selenocysteine
  MOD_RES (510)..(510): Selenocysteine
  MOD_RES (512)..(512): Selenocysteine
  MOD_RES (641)..(641): Selenocysteine
  MOD_RES (649)..(649): Selenocysteine
  MOD_RES (657)..(657): Selenocysteine
  MOD_RES (675)..(675): Selenocysteine
  MOD_RES (681)..(681): Selenocysteine
  MOD_RES (687)..(687): Selenocysteine
  MOD_RES (715)..(715): Selenocysteine
  MOD_RES (717)..(718): Selenocysteine
  MOD_RES (739)..(739): Selenocysteine
  MOD_RES (752)..(752): Selenocysteine
  MOD_RES (768)..(768): Selenocysteine
  MOD_RES (823)..(823): Selenocysteine
MARQKKMGQSVLRAVFFLVLGLLGHSHGGFPNXISIGGLFMRNXVQEHSAFRFAVQLYNXNQNXXEKPFHLNYHVDHLDSSNSFSVXNAFCSQFSRGVYAIFGFYDQMSMNXLXSFCGALHXSFVXPSFPXDADVQFVIQMRPALKGAILSLLGHYKWEKFVYLYDXERGFSILQAIMEAAVQNNWQVXARSVGNIKDVQEFRRIIEEMDRRQEKRYLIDCEVERINXILEQVVILGKHSRGYHYMLANLGFXDILLERVMHGGANIXGFQIVNNENPMVQQFIQRWVRLDEREFPEAKNAPLKYXSALXHDAILVIAEAFRYLRRQRVDVSRRGSAGDCLANPAVPWSQGIDIERALKMVQVQGMXGNIQFDXYGRRXNYXIDVYEMKVSGSRKAGYWNEYERFVPFSDQQISNDSASSENRXIVVXXILESPYVMYKKNHEQLEGNERYEGYCVDLAYEIAKHVRIKYKLSIVGDGKYGARDPEXKIWNGMVGELVYGRADIAVAPLXIXLVREEVIDFSKPFMSLGISIMIKKPQKSKPGVFSFLDPLAYEIWMCIVFAYIGVSVVLFLVSRFSPYEWHLEDNNEEPRDPQSPPDPPNEFGIFNSLWFSLGAFMQQGCDISPRSLSGRIVGGVWWFFXLIIISSYXANLAAFLXVERMVSPIESAEDLAKQXEIAYGXLDSGSXKEFFRRSKIAVYEKMWSYMKSAEPSVFXKXXADGVARVRKSKGKFAFLLESXMNEYIEQRKPCDXMKVGGNLDSKGYGVAXPKGSALRNAVNLAVLKLNEQGLLDKLKNKWWYDKGECGSGGGDSKNACKPCSIEXQ

SEQ ID NO: 11477 - protein, 894 aa, Homo sapiens
  MOD_RES (33)..(33): Selenocysteine
  MOD_RES (44)..(44): Selenocysteine
  MOD_RES (60)..(60): Selenocysteine
  MOD_RES (64)..(65): Selenocysteine
  MOD_RES (87)..(87): Selenocysteine
  MOD_RES (112)..(112): Selenocysteine
  MOD_RES (114)..(114): Selenocysteine
  MOD_RES (122)..(122): Selenocysteine
  MOD_RES (126)..(126): Selenocysteine
  MOD_RES (131)..(131): Selenocysteine
  MOD_RES (167)..(167): Selenocysteine
  MOD_RES (189)..(189): Selenocysteine
  MOD_RES (228)..(228): Selenocysteine
  MOD_RES (253)..(253): Selenocysteine
  MOD_RES (268)..(268): Selenocysteine
  MOD_RES (306)..(306): Selenocysteine
  MOD_RES (310)..(310): Selenocysteine
  MOD_RES (367)..(367): Selenocysteine
  MOD_RES (374)..(374): Selenocysteine
  MOD_RES (379)..(379): Selenocysteine
  MOD_RES (382)..(382): Selenocysteine
  MOD_RES (424)..(424): Selenocysteine
  MOD_RES (428)..(429): Selenocysteine
  MOD_RES (487)..(487): Selenocysteine
  MOD_RES (510)..(510): Selenocysteine
  MOD_RES (512)..(512): Selenocysteine
  MOD_RES (641)..(641): Selenocysteine
  MOD_RES (649)..(649): Selenocysteine
  MOD_RES (657)..(657): Selenocysteine
  MOD_RES (675)..(675): Selenocysteine
  MOD_RES (681)..(681): Selenocysteine
  MOD_RES (687)..(687): Selenocysteine
  MOD_RES (715)..(715): Selenocysteine
  MOD_RES (717)..(718): Selenocysteine
  MOD_RES (739)..(739): Selenocysteine
  MOD_RES (752)..(752): Selenocysteine
  MOD_RES (768)..(768): Selenocysteine
  MOD_RES (816)..(816): Selenocysteine
  MOD_RES (860)..(860): Selenocysteine
  MOD_RES (863)..(863): Selenocysteine
  MOD_RES (872)..(872): Selenocysteine
  MOD_RES (874)..(874): Selenocysteine
  MOD_RES (879)..(879): Selenocysteine
  MOD_RES (889)..(889): Selenocysteine
MARQKKMGQSVLRAVFFLVLGLLGHSHGGFPNXISIGGLFMRNXVQEHSAFRFAVQLYNXNQNXXEKPFHLNYHVDHLDSSNSFSVXNAFCSQFSRGVYAIFGFYDQMSMNXLXSFCGALHXSFVXPSFPXDADVQFVIQMRPALKGAILSLLGHYKWEKFVYLYDXERGFSILQAIMEAAVQNNWQVXARSVGNIKDVQEFRRIIEEMDRRQEKRYLIDCEVERINXILEQVVILGKHSRGYHYMLANLGFXDILLERVMHGGANIXGFQIVNNENPMVQQFIQRWVRLDEREFPEAKNAPLKYXSALXHDAILVIAEAFRYLRRQRVDVSRRGSAGDCLANPAVPWSQGIDIERALKMVQVQGMXGNIQFDXYGRRXNYXIDVYEMKVSGSRKAGYWNEYERFVPFSDQQISNDSASSENRXIVVXXILESPYVMYKKNHEQLEGNERYEGYCVDLAYEIAKHVRIKYKLSIVGDGKYGARDPEXKIWNGMVGELVYGRADIAVAPLXIXLVREEVIDFSKPFMSLGISIMIKKPQKSKPGVFSFLDPLAYEIWMCIVFAYIGVSVVLFLVSRFSPYEWHLEDNNEEPRDPQSPPDPPNEFGIFNSLWFSLGAFMQQGCDISPRSLSGRIVGGVWWFFXLIIISSYXANLAAFLXVERMVSPIESAEDLAKQXEIAYGXLDSGSXKEFFRRSKIAVYEKMWSYMKSAEPSVFXKXXADGVARVRKSKGKFAFLLESXMNEYIEQRKPCDXMKVGGNLDSKGYGVAXPKGSALRNAVNLAVLKLNEQGLLDKLKNKWWYDKGECGSGGGDSKDKXSALSLSNVAGVFYILVGGLGLAMMVALIEFCYKSRAESKRMKLXKNXQNFKPAPAXNXQNYAXYREGYNVYGXESVKI

SEQ ID NO: 11478 - protein, 894 aa, Homo sapiens
  MOD_RES (33)..(33): Selenocysteine
  MOD_RES (44)..(44): Selenocysteine
  MOD_RES (60)..(60): Selenocysteine
  MOD_RES (64)..(65): Selenocysteine
  MOD_RES (87)..(87): Selenocysteine
  MOD_RES (112)..(112): Selenocysteine
  MOD_RES (114)..(114): Selenocysteine
  MOD_RES (122)..(122): Selenocysteine
  MOD_RES (126)..(126): Selenocysteine
  MOD_RES (131)..(131): Selenocysteine
  MOD_RES (167)..(167): Selenocysteine
  MOD_RES (189)..(189): Selenocysteine
  MOD_RES (228)..(228): Selenocysteine
  MOD_RES (253)..(253): Selenocysteine
  MOD_RES (268)..(268): Selenocysteine
  MOD_RES (306)..(306): Selenocysteine
  MOD_RES (310)..(310): Selenocysteine
  MOD_RES (367)..(367): Selenocysteine
  MOD_RES (374)..(374): Selenocysteine
  MOD_RES (379)..(379): Selenocysteine
  MOD_RES (382)..(382): Selenocysteine
  MOD_RES (424)..(424): Selenocysteine
  MOD_RES (428)..(429): Selenocysteine
  MOD_RES (487)..(487): Selenocysteine
  MOD_RES (510)..(510): Selenocysteine
  MOD_RES (512)..(512): Selenocysteine
  MOD_RES (641)..(641): Selenocysteine
  MOD_RES (649)..(649): Selenocysteine
  MOD_RES (657)..(657): Selenocysteine
  MOD_RES (675)..(675): Selenocysteine
  MOD_RES (681)..(681): Selenocysteine
  MOD_RES (687)..(687): Selenocysteine
  MOD_RES (715)..(715): Selenocysteine
  MOD_RES (717)..(718): Selenocysteine
  MOD_RES (739)..(739): Selenocysteine
  MOD_RES (752)..(752): Selenocysteine
  MOD_RES (768)..(768): Selenocysteine
  MOD_RES (776)..(776): Selenocysteine
  MOD_RES (816)..(816): Selenocysteine
  MOD_RES (860)..(860): Selenocysteine
  MOD_RES (863)..(863): Selenocysteine
  MOD_RES (872)..(872): Selenocysteine
  MOD_RES (874)..(874): Selenocysteine
  MOD_RES (879)..(879): Selenocysteine
  MOD_RES (889)..(889): Selenocysteine
MARQKKMGQSVLRAVFFLVLGLLGHSHGGFPNXISIGGLFMRNXVQEHSAFRFAVQLYNXNQNXXEKPFHLNYHVDHLDSSNSFSVXNAFCSQFSRGVYAIFGFYDQMSMNXLXSFCGALHXSFVXPSFPXDADVQFVIQMRPALKGAILSLLGHYKWEKFVYLYDXERGFSILQAIMEAAVQNNWQVXARSVGNIKDVQEFRRIIEEMDRRQEKRYLIDCEVERINXILEQVVILGKHSRGYHYMLANLGFXDILLERVMHGGANIXGFQIVNNENPMVQQFIQRWVRLDEREFPEAKNAPLKYXSALXHDAILVIAEAFRYLRRQRVDVSRRGSAGDCLANPAVPWSQGIDIERALKMVQVQGMXGNIQFDXYGRRXNYXIDVYEMKVSGSRKAGYWNEYERFVPFSDQQISNDSASSENRXIVVXXILESPYVMYKKNHEQLEGNERYEGYCVDLAYEIAKHVRIKYKLSIVGDGKYGARDPEXKIWNGMVGELVYGRADIAVAPLXIXLVREEVIDFSKPFMSLGISIMIKKPQKSKPGVFSFLDPLAYEIWMCIVFAYIGVSVVLFLVSRFSPYEWHLEDNNEEPRDPQSPPDPPNEFGIFNSLWFSLGAFMQQGCDISPRSLSGRIVGGVWWFFXLIIISSYXANLAAFLXVERMVSPIESAEDLAKQXEIAYGXLDSGSXKEFFRRSKIAVYEKMWSYMKSAEPSVFXKXXADGVARVRKSKGKFAFLLESXMNEYIEQRKPCDXMKVGGNLDSKGYGVAXPKGSALRXPVNLAVLKLSEQGILDKLKNKWWYDKGECGAKDSGSKDKXSALSLSNVAGVFYILVGGLGLAMMVALIEFCYKSRAESKRMKLXKNXQNFKPAPAXNXQNYAXYREGYNVYGXESVKI

SEQ ID NO: 11479 - protein, 82 aa, Homo sapiens
  MOD_RES (37)..(37): Selenocysteine
  MOD_RES (42)..(42): Selenocysteine
  MOD_RES (53)..(53): Selenocysteine
  MOD_RES (73)..(73): Selenocysteine
  MOD_RES (80)..(80): Selenocysteine
MRIISRQIVLLFSGFWGLAMGAFPSSVQIGGLFIRNXDQEYXAFRLAIFLHNXSPNASEAPFNLVPHVDNIEXANSFAVXNA

SEQ ID NO: 11480 - protein, 84 aa, Homo sapiens
  MOD_RES (37)..(37): Selenocysteine
  MOD_RES (42)..(42): Selenocysteine
  MOD_RES (53)..(53): Selenocysteine
  MOD_RES (73)..(73): Selenocysteine
  MOD_RES (80)..(80): Selenocysteine
MRIISRQIVLLFSGFWGLAMGAFPSSVQIGGLFIRNXDQEYXAFRLAIFLHNXSPNASEAPFNLVPHVDNIEXANSFAVXNACK

SEQ ID NO: 11481 - protein, 225 aa, Homo sapiens
  MOD_RES (37)..(37): Selenocysteine
  MOD_RES (42)..(42): Selenocysteine
  MOD_RES (53)..(53): Selenocysteine
  MOD_RES (73)..(73): Selenocysteine
  MOD_RES (80)..(80): Selenocysteine
  MOD_RES (105)..(105): Selenocysteine
  MOD_RES (107)..(107): Selenocysteine
  MOD_RES (119)..(119): Selenocysteine
  MOD_RES (124)..(124): Selenocysteine
  MOD_RES (160)..(160): Selenocysteine
  MOD_RES (168)..(169): Selenocysteine
  MOD_RES (197)..(197): Selenocysteine
  MOD_RES (205)..(205): Selenocysteine
MRIISRQIVLLFSGFWGLAMGAFPSSVQIGGLFIRNXDQEYXAFRLAIFLHNXSPNASEAPFNLVPHVDNIEXANSFAVXNAFCSQYSRGVFAIFGLYDKRSVHXLXSFCSALHISLIXPSFPXEGESQFVLQLRPSLRGALLSLLDHYEWNCFVFLYDXDRGLVISXXPLASNCMPSSVVHSWLYVLYNKSINSIXACLLGPSXELNVFNYLIADSNLNNGNYI

SEQ ID NO: 11482 - protein, 433 aa, Homo sapiens
  MOD_RES (37)..(37): Selenocysteine
  MOD_RES (42)..(42): Selenocysteine
  MOD_RES (53)..(53): Selenocysteine
  MOD_RES (73)..(73): Selenocysteine
  MOD_RES (80)..(80): Selenocysteine
  MOD_RES (105)..(105): Selenocysteine
  MOD_RES (107)..(107): Selenocysteine
  MOD_RES (119)..(119): Selenocysteine
  MOD_RES (124)..(124): Selenocysteine
  MOD_RES (160)..(160): Selenocysteine
  MOD_RES (260)..(260): Selenocysteine
  MOD_RES (269)..(269): Selenocysteine
  MOD_RES (292)..(292): Selenocysteine
  MOD_RES (297)..(297): Selenocysteine
  MOD_RES (301)..(301): Selenocysteine
  MOD_RES (311)..(311): Selenocysteine
  MOD_RES (348)..(348): Selenocysteine
  MOD_RES (358)..(358): Selenocysteine
  MOD_RES (373)..(373): Selenocysteine
  MOD_RES (382)..(382): Selenocysteine
  MOD_RES (404)..(404): Selenocysteine
  MOD_RES (409)..(409): Selenocysteine
  MOD_RES (416)..(416): Selenocysteine
  MOD_RES (420)..(421): Selenocysteine
MRIISRQIVLLFSGFWGLAMGAFPSSVQIGGLFIRNXDQEYXAFRLAIFLHNXSPNASEAPFNLVPHVDNIEXANSFAVXNAFCSQYSRGVFAIFGLYDKRSVHXLXSFCSALHISLIXPSFPXEGESQFVLQLRPSLRGALLSLLDHYEWNCFVFLYDXDRGYSILQAIMEKAGQNGWHVSAICVENFNDVSYRQLLEELDRRQEKKFVIDCEIERLQNILEQIVSVGKHVKGYHYIIANLGFKDISLERFIHGGANVXGFQLVDFNXPMVIKLMDRWKKLDQREYPGSEXPPKYXSALXYDGVLVMAEXFRSLRRQKIDISRRGNAGDCLANPAAPWGQGIDMERXLKQVRIQGLXGNVQFDHYGRRVNYXMDVFELKSXGPRKVGYWNDMDKLVLIQDVPXLGNDXAAIENRXVVVXXIMPLMKNPILRN

SEQ ID NO: 11483 - protein, 884 aa, Homo sapiens
  MOD_RES (37)..(37): Selenocysteine
  MOD_RES (42)..(42): Selenocysteine
  MOD_RES (53)..(53): Selenocysteine
  MOD_RES (73)..(73): Selenocysteine
  MOD_RES (80)..(80): Selenocysteine
  MOD_RES (105)..(105): Selenocysteine
  MOD_RES (107)..(107): Selenocysteine
  MOD_RES (119)..(119): Selenocysteine
  MOD_RES (124)..(124): Selenocysteine
  MOD_RES (160)..(160): Selenocysteine
  MOD_RES (260)..(260): Selenocysteine
  MOD_RES (269)..(269): Selenocysteine
  MOD_RES (292)..(292): Selenocysteine
  MOD_RES (297)..(297): Selenocysteine
  MOD_RES (301)..(301): Selenocysteine
  MOD_RES (311)..(311): Selenocysteine
  MOD_RES (348)..(348): Selenocysteine
  MOD_RES (358)..(358): Selenocysteine
  MOD_RES (373)..(373): Selenocysteine
  MOD_RES (382)..(382): Selenocysteine
  MOD_RES (404)..(404): Selenocysteine
  MOD_RES (409)..(409): Selenocysteine
  MOD_RES (416)..(416): Selenocysteine
  MOD_RES (420)..(421): Selenocysteine
  MOD_RES (479)..(479): Selenocysteine
  MOD_RES (502)..(502): Selenocysteine
  MOD_RES (504)..(504): Selenocysteine
  MOD_RES (575)..(575): Selenocysteine
  MOD_RES (631)..(631): Selenocysteine
  MOD_RES (639)..(639): Selenocysteine
  MOD_RES (647)..(647): Selenocysteine
  MOD_RES (665)..(665): Selenocysteine
  MOD_RES (671)..(671): Selenocysteine
  MOD_RES (677)..(677): Selenocysteine
  MOD_RES (694)..(694): Selenocysteine
  MOD_RES (705)..(705): Selenocysteine
  MOD_RES (707)..(708): Selenocysteine
  MOD_RES (729)..(729): Selenocysteine
  MOD_RES (742)..(742): Selenocysteine
  MOD_RES (758)..(758): Selenocysteine
  MOD_RES (806)..(806): Selenocysteine
  MOD_RES (855)..(855): Selenocysteine
  MOD_RES (859)..(859): Selenocysteine
  MOD_RES (864)..(864): Selenocysteine
  MOD_RES (869)..(869): Selenocysteine
  MOD_RES (879)..(879): Selenocysteine
MRIISRQIVLLFSGFWGLAMGAFPSSVQIGGLFIRNXDQEYXAFRLAIFLHNXSPNASEAPFNLVPHVDNIEXANSFAVXNAFCSQYSRGVFAIFGLYDKRSVHXLXSFCSALHISLIXPSFPXEGESQFVLQLRPSLRGALLSLLDHYEWNCFVFLYDXDRGYSILQAIMEKAGQNGWHVSAICVENFNDVSYRQLLEELDRRQEKKFVIDCEIERLQNILEQIVSVGKHVKGYHYIIANLGFKDISLERFIHGGANVXGFQLVDFNXPMVIKLMDRWKKLDQREYPGSEXPPKYXSALXYDGVLVMAEXFRSLRRQKIDISRRGNAGDCLANPAAPWGQGIDMERXLKQVRIQGLXGNVQFDHYGRRVNYXMDVFELKSXGPRKVGYWNDMDKLVLIQDVPXLGNDXAAIENRXVVVXXIMESPYVMYKKNHEMFEGNDKYEGYCVDLASEIAKHIGIKYKIAIVPDGKYGARDADXKIWNGMVGELVYGKAEIAIAPLXIXLVREEVIDFSKPFMSLGISIMIKKPQKSKPGVFSFLDPLAYEIWMCIVFAYIGVSVVLFLVSRFSPYEWHXEEPEDGKEGPSDQPPNEFGIFNSLWFSLGAFMQQGCDISPRSLSGRIVGGVWWFFXLIIISSYXANLAAFLXVERMVSPIESAEDLAKQXEIAYGXLDSGSXKEFFRRSKIAVYEKMWXYMRSAEPSVFXRXXAEGVARVRKSKGKFAFLLESXMNEYIEQRKPCDXMKVGGNLDSKGYGVAXPKGSSLRNAVNLAVLKLNEQGLLDKLKNKWWYDKGECGSGGGDSKDKXSALSLSNVAGVFYILVGGLGLAMLVALIEFCYKSRAEAKRMKVAKSAQXFNPXSSQNXQNLAXYREGYNVYGXESIKI

SEQ ID NO: 11484 - protein, 902 aa, Homo sapiens
  MOD_RES (37)..(37): Selenocysteine
  MOD_RES (42)..(42): Selenocysteine
  MOD_RES (53)..(53): Selenocysteine
  MOD_RES (73)..(73): Selenocysteine
  MOD_RES (80)..(80): Selenocysteine
  MOD_RES (105)..(105): Selenocysteine
  MOD_RES (107)..(107): Selenocysteine
  MOD_RES (119)..(119): Selenocysteine
  MOD_RES (124)..(124): Selenocysteine
  MOD_RES (160)..(160): Selenocysteine
  MOD_RES (260)..(260): Selenocysteine
  MOD_RES (269)..(269): Selenocysteine
  MOD_RES (292)..(292): Selenocysteine
  MOD_RES (297)..(297): Selenocysteine
  MOD_RES (301)..(301): Selenocysteine
  MOD_RES (311)..(311): Selenocysteine
  MOD_RES (348)..(348): Selenocysteine
  MOD_RES (358)..(358): Selenocysteine
  MOD_RES (373)..(373): Selenocysteine
  MOD_RES (382)..(382): Selenocysteine
  MOD_RES (404)..(404): Selenocysteine
  MOD_RES (409)..(409): Selenocysteine
  MOD_RES (416)..(416): Selenocysteine
  MOD_RES (420)..(421): Selenocysteine
  MOD_RES (479)..(479): Selenocysteine
  MOD_RES (502)..(502): Selenocysteine
  MOD_RES (504)..(504): Selenocysteine
  MOD_RES (575)..(575): Selenocysteine
  MOD_RES (631)..(631): Selenocysteine
  MOD_RES (639)..(639): Selenocysteine
  MOD_RES (647)..(647): Selenocysteine
  MOD_RES (665)..(665): Selenocysteine
  MOD_RES (671)..(671): Selenocysteine
  MOD_RES (677)..(677): Selenocysteine
  MOD_RES (694)..(694): Selenocysteine
  MOD_RES (705)..(705): Selenocysteine
  MOD_RES (707)..(708): Selenocysteine
  MOD_RES (729)..(729): Selenocysteine
  MOD_RES (742)..(742): Selenocysteine
  MOD_RES (758)..(758): Selenocysteine
  MOD_RES (766)..(766): Selenocysteine
  MOD_RES (806)..(806): Selenocysteine
  MOD_RES (850)..(850): Selenocysteine
  MOD_RES (864)..(864): Selenocysteine
  MOD_RES (875)..(875): Selenocysteine
  MOD_RES (884)..(884): Selenocysteine
  MOD_RES (886)..(886): Selenocysteine
MRIISRQIVLLFSGFWGLAMGAFPSSVQIGGLFIRNXDQEYXAFRLAIFLHNXSPNASEAPFNLVPHVDNIEXANSFAVXNAFCSQYSRGVFAIFGLYDKRSVHXLXSFCSALHISLIXPSFPXEGESQFVLQLRPSLRGALLSLLDHYEWNCFVFLYDXDRGYSILQAIMEKAGQNGWHVSAICVENFNDVSYRQLLEELDRRQEKKFVIDCEIERLQNILEQIVSVGKHVKGYHYIIANLGFKDISLERFIHGGANVXGFQLVDFNXPMVIKLMDRWKKLDQREYPGSEXPPKYXSALXYDGVLVMAEXFRSLRRQKIDISRRGNAGDCLANPAAPWGQGIDMERXLKQVRIQGLXGNVQFDHYGRRVNYXMDVFELKSXGPRKVGYWNDMDKLVLIQDVPXLGNDXAAIENRXVVVXXIMESPYVMYKKNHEMFEGNDKYEGYCVDLASEIAKHIGIKYKIAIVPDGKYGARDADXKIWNGMVGELVYGKAEIAIAPLXIXLVREEVIDFSKPFMSLGISIMIKKPQKSKPGVFSFLDPLAYEIWMCIVFAYIGVSVVLFLVSRFSPYEWHXEEPEDGKEGPSDQPPNEFGIFNSLWFSLGAFMQQGCDISPRSLSGRIVGGVWWFFXLIIISSYXANLAAFLXVERMVSPIESAEDLAKQXEIAYGXLDSGSXKEFFRRSKIAVYEKMWXYMRSAEPSVFXRXXAEGVARVRKSKGKFAFLLESXMNEYIEQRKPCDXMKVGGNLDSKGYGVAXPKGSSLRXPVNLAVLKLSEAGVLDKLKNKWWYDKGECGPKDSGSKDKXSALSLSNVAGVFYILVGGLGLAMLVALIEFCYKSRAEAKRMKLXFSEAIRNKARLSIXGSVGENGRVLXPDCPKAVHXGXAIRQSSGLAVIASDLP

SEQ ID NO: 11485 - protein, 104 aa, Homo sapiens
  MOD_RES (1)..(1): Any amino acid
  MOD_RES (19)..(19): Selenocysteine
  MOD_RES (32)..(32): Selenocysteine
  MOD_RES (48)..(48): Selenocysteine
  MOD_RES (103)..(103): Selenocysteine
XVARVRKSKGKFAFLLESXMNEYIEQRKPCDXMKVGGNLDSKGYGVAXPKGSSLRNAVNLAVLKLNEQGLLDKLKNKWWYDKGECGSGGGDSKNSCKPCRFEXQ

SEQ ID NO: 11486 - protein, 755 aa, Homo sapiens
  MOD_RES (5)..(5): Selenocysteine
  MOD_RES (61)..(61): Selenocysteine
  MOD_RES (84)..(84): Selenocysteine
  MOD_RES (92)..(92): Selenocysteine
  MOD_RES (94)..(94): Selenocysteine
  MOD_RES (106)..(106): Selenocysteine
  MOD_RES (126)..(126): Selenocysteine
  MOD_RES (140)..(140): Selenocysteine
  MOD_RES (158)..(158): Selenocysteine
  MOD_RES (206)..(206): Selenocysteine
  MOD_RES (210)..(211): Selenocysteine
  MOD_RES (214)..(214): Selenocysteine
  MOD_RES (223)..(223): Selenocysteine
  MOD_RES (246)..(246): Selenocysteine
  MOD_RES (279)..(279): Selenocysteine
  MOD_RES (295)..(295): Selenocysteine
  MOD_RES (356)..(356): Selenocysteine
  MOD_RES (368)..(368): Selenocysteine
  MOD_RES (375)..(375): Selenocysteine
  MOD_RES (378)..(378): Selenocysteine
  MOD_RES (399)..(400): Selenocysteine
  MOD_RES (404)..(404): Selenocysteine
  MOD_RES (414)..(414): Selenocysteine
  MOD_RES (438)..(438): Selenocysteine
  MOD_RES (443)..(443): Selenocysteine
  MOD_RES (499)..(499): Selenocysteine
  MOD_RES (521)..(521): Selenocysteine
  MOD_RES (523)..(523): Selenocysteine
  MOD_RES (604)..(604): Selenocysteine
  MOD_RES (641)..(641): Selenocysteine
  MOD_RES (649)..(649): Selenocysteine
  MOD_RES (657)..(657): Selenocysteine
  MOD_RES (667)..(667): Selenocysteine
  MOD_RES (681)..(681): Selenocysteine
  MOD_RES (696)..(696): Selenocysteine
  MOD_RES (704)..(704): Selenocysteine
  MOD_RES (711)..(711): Selenocysteine
MEALXLWLLPWICQCVSVRADSIIHIGAIFEENAAKDDRVFQLAVSDLSLNDDILQSEKIXYSIKVIEANNPFQAVQEACDLMXQGILALVXSXGCASANALQSLXDAMHIPHLFVQRNPGGSPRXACHLNPSPDGEAYXLASRPPVRLNDVMLRLVXELRWQKFVMFYDSEYDIRGLQSFLDQASRLGLDVSLQKVDKNISHVFXSLFXXMKXEELNRYRDXLRRAILLLSPQGAHSFINEAVEXNLASKDSHWVFVNEEISDPEILDLVHSALGRMXVVRQIFPSAKDNQKCXRNNHRISSLLCDPQEGYLQMLQISNLYLYDSVLMLANAFHRKLEDRKWHSMASLNCIRKSXKPWNGGRSMLDXIKKGHIXGLXGVMEFREDSSNPYVQFEILGXXYSEXFGKDMRKLAXWDSEKGLNGSLQERPMGSRLQGLXLKVVXVLEEPFVMVAENILGQPKRYKGFSIDVLDALAKALGFKYEIYQAPDGRYGHQLHNXSWNGMIGELISKRADLAISAIXIXPERESVVDFSKRYMDYSVGILIKKPEEKISIFSLFAPFDFAVWACIAAAIPVVGVLIFVLNRIQAVRAQSAAQPRPSASAXLHSAIWIVYGAFVQQGGESSVNSMAMRIVMGSWWLFXLIVCSSYXANLAAFLXVSRMDNPIRXFQDLSKQVEMSYGXVRDSAVYEYFRAKGXNPLEQDSXFAELWRXISKNGGADNCVSSPSEGIRKDPGAAGHRGPGCAEAEVVAAHGPL

SEQ ID NO: 11487 - protein, 1009 aa, Homo sapiens
  MOD_RES (5)..(5): Selenocysteine
  MOD_RES (61)..(61): Selenocysteine
  MOD_RES (84)..(84): Selenocysteine
  MOD_RES (92)..(92): Selenocysteine
  MOD_RES (94)..(94): Selenocysteine
  MOD_RES (106)..(106): Selenocysteine
  MOD_RES (126)..(126): Selenocysteine
  MOD_RES (140)..(140): Selenocysteine
  MOD_RES (158)..(158): Selenocysteine
  MOD_RES (206)..(206): Selenocysteine
  MOD_RES (210)..(211): Selenocysteine
  MOD_RES (214)..(214): Selenocysteine
  MOD_RES (223)..(223): Selenocysteine
  MOD_RES (246)..(246): Selenocysteine
  MOD_RES (279)..(279): Selenocysteine
  MOD_RES (295)..(295): Selenocysteine
  MOD_RES (356)..(356): Selenocysteine
  MOD_RES (368)..(368): Selenocysteine
  MOD_RES (375)..(375): Selenocysteine
  MOD_RES (378)..(378): Selenocysteine
  MOD_RES (399)..(400): Selenocysteine
  MOD_RES (404)..(404): Selenocysteine
  MOD_RES (414)..(414): Selenocysteine
  MOD_RES (438)..(438): Selenocysteine
  MOD_RES (443)..(443): Selenocysteine
  MOD_RES (499)..(499): Selenocysteine
  MOD_RES (521)..(521): Selenocysteine
  MOD_RES (523)..(523): Selenocysteine
  MOD_RES (604)..(604): Selenocysteine
  MOD_RES (641)..(641): Selenocysteine
  MOD_RES (649)..(649): Selenocysteine
  MOD_RES (657)..(657): Selenocysteine
  MOD_RES (667)..(667): Selenocysteine
  MOD_RES (681)..(681): Selenocysteine
  MOD_RES (696)..(696): Selenocysteine
  MOD_RES (704)..(704): Selenocysteine
  MOD_RES (711)..(711): Selenocysteine
  MOD_RES (752)..(752): Selenocysteine
  MOD_RES (759)..(759): Selenocysteine
  MOD_RES (794)..(794): Selenocysteine
  MOD_RES (814)..(814): Selenocysteine
  MOD_RES (864)..(864): Selenocysteine
  MOD_RES (911)..(911): Selenocysteine
  MOD_RES (913)..(913): Selenocysteine
  MOD_RES (917)..(917): Selenocysteine
  MOD_RES (923)..(923): Selenocysteine
  MOD_RES (929)..(929): Selenocysteine
  MOD_RES (939)..(939): Selenocysteine
  MOD_RES (942)..(942): Selenocysteine
  MOD_RES (960)..(960): Selenocysteine
  MOD_RES (983)..(983): Selenocysteine
  MOD_RES (1003)..(1003): Selenocysteine
  MOD_RES (1007)..(1007): Selenocysteine
MEALXLWLLPWICQCVSVRADSIIHIGAIFEENAAKDDRVFQLAVSDLSLNDDILQSEKIXYSIKVIEANNPFQAVQEACDLMXQGILALVXSXGCASANALQSLXDAMHIPHLFVQRNPGGSPRXACHLNPSPDGEAYXLASRPPVRLNDVMLRLVXELRWQKFVMFYDSEYDIRGLQSFLDQASRLGLDVSLQKVDKNISHVFXSLFXXMKXEELNRYRDXLRRAILLLSPQGAHSFINEAVEXNLASKDSHWVFVNEEISDPEILDLVHSALGRMXVVRQIFPSAKDNQKCXRNNHRISSLLCDPQEGYLQMLQISNLYLYDSVLMLANAFHRKLEDRKWHSMASLNCIRKSXKPWNGGRSMLDXIKKGHIXGLXGVMEFREDSSNPYVQFEILGXXYSEXFGKDMRKLAXWDSEKGLNGSLQERPMGSRLQGLXLKVVXVLEEPFVMVAENILGQPKRYKGFSIDVLDALAKALGFKYEIYQAPDGRYGHQLHNXSWNGMIGELISKRADLAISAIXIXPERESVVDFSKRYMDYSVGILIKKPEEKISIFSLFAPFDFAVWACIAAAIPVVGVLIFVLNRIQAVRAQSAAQPRPSASAXLHSAIWIVYGAFVQQGGESSVNSMAMRIVMGSWWLFXLIVCSSYXANLAAFLXVSRMDNPIRXFQDLSKQVEMSYGXVRDSAVYEYFRAKGXNPLEQDSXFAELWRXISKNGGADNCVSSPSEGIRKAKKGNYAFLWDVAVVEYAALXDDDCSVXVIGNSISSKGYGIALQHGSPYRDLFSQRILELQDXGDLDVLKQKWWPHMGRCDLXSHASAQADGKSLKLHSFAGVFCILAIGLLLACLVAALELWWNSNRCHQEXPKEDKEVNLEQVHRRMNSLMDEDIAHKQISPASIELSALEMGGLAPXQXLEPXREYQNXQLSVSXFLPEQSSHGXSRXLSSGPSSNLPLPLSSSAXMPSMQCKHRSPNGGLFRQSPVKXPIPMSFQPVPGGVLPEALDXSHGXSI

SEQ ID NO: 11488 - protein, 926 aa, Homo sapiens
  MOD_RES (19)..(19): Selenocysteine
  MOD_RES (42)..(42): Selenocysteine
  MOD_RES (45)..(45): Selenocysteine
  MOD_RES (53)..(53): Selenocysteine
  MOD_RES (62)..(62): Selenocysteine
  MOD_RES (80)..(80): Selenocysteine
  MOD_RES (128)..(129): Selenocysteine
  MOD_RES (133)..(133): Selenocysteine
  MOD_RES (145)..(145): Selenocysteine
  MOD_RES (157)..(157): Selenocysteine
  MOD_RES (163)..(163): Selenocysteine
  MOD_RES (168)..(168): Selenocysteine
  MOD_RES (201)..(201): Selenocysteine
  MOD_RES (206)..(206): Selenocysteine
  MOD_RES (227)..(227): Selenocysteine
  MOD_RES (249)..(249): Selenocysteine
  MOD_RES (291)..(291): Selenocysteine
  MOD_RES (301)..(301): Selenocysteine
  MOD_RES (322)..(322): Selenocysteine
  MOD_RES (342)..(342): Selenocysteine
  MOD_RES (349)..(349): Selenocysteine
  MOD_RES (366)..(366): Selenocysteine
  MOD_RES (423)..(423): Selenocysteine
  MOD_RES (444)..(444): Selenocysteine
  MOD_RES (446)..(446): Selenocysteine
  MOD_RES (456)..(457): Selenocysteine
  MOD_RES (474)..(474): Selenocysteine
  MOD_RES (495)..(495): Selenocysteine
  MOD_RES (520)..(520): Selenocysteine
  MOD_RES (522)..(523): Selenocysteine
  MOD_RES (545)..(546): Selenocysteine
  MOD_RES (549)..(549): Selenocysteine
  MOD_RES (568)..(568): Selenocysteine
  MOD_RES (576)..(576): Selenocysteine
  MOD_RES (578)..(578): Selenocysteine
  MOD_RES (594)..(594): Selenocysteine
  MOD_RES (600)..(600): Selenocysteine
  MOD_RES (679)..(679): Selenocysteine
  MOD_RES (683)..(683): Selenocysteine
  MOD_RES (738)..(738): Selenocysteine
  MOD_RES (772)..(772): Selenocysteine
  MOD_RES (805)..(805): Selenocysteine
  MOD_RES (816)..(816): Selenocysteine
  MOD_RES (822)..(822): Selenocysteine
  MOD_RES (828)..(828): Selenocysteine
  MOD_RES (831)..(831): Selenocysteine
  MOD_RES (844)..(844): Selenocysteine
  MOD_RES (847)..(850): Selenocysteine
  MOD_RES (858)..(858): Selenocysteine
  MOD_RES (862)..(862): Selenocysteine
  MOD_RES (872)..(872): Selenocysteine
  MOD_RES (881)..(881): Selenocysteine
  MOD_RES (900)..(900): Selenocysteine
  MOD_RES (909)..(909): Selenocysteine
  MOD_RES (911)..(911): Selenocysteine
  MOD_RES (924)..(924): Selenocysteine
ACELMNQGILALVSSIGCXSAGSLQSLADAMHIPHLFIQRSXAGXPRSGCGLXRSNRNDDYXLSVRPPVYLHDVILRVVXEYAWQKFIIFYDSEYDIRGIQEFLDKVSQQGMDVALQKVENNINKMIXXLFDXMRIEELNRYRDXLRRAILVMNPAXAKSFIXEVVEXNLVAFDCHWIIINEEINDVDVQELVRRSIGRLXIIRQXFPVPQNISQRCFRGNHRISSXLCDPKDPFAQNMEISNLYIYDXVLLLANAFHKKLEDRKWHSMASLSCIRKNSKPWQGGRSMLEXIKKGGVSGLXGELEFGENGGNPNVHFEILGXNYGEELGRGVRKLGCWNPVXGLNGSLXDKKLENNMRGVVLRVVXVLEEPFVMVSENVLGKPKKYQGFSIDVLDALSNYLGFNYEIYVAPDHKYGSPQEDGXWNGLVGELVFKRADIGISALXIXPDRENVVDFXXRYMDYSVGVLLRRAEKXVDMFACLAPFDLSLWACIAGXVLLVGLLVYLLNWLNPPRLQMGSMXSXXLYNSMWFVYGSFVQQGGEVPYXXLAXRMMMGAWWLFALIVISSYXANLAAFLXIXRIESSIQSLQDLSKQXEIPYGXVLDSAVYEHVRMKGLNPFERDSMYSQMWRMINRSNGSENNVLESQAGIQKVKYGNYAFVWDAAVLEYVAINDPDCSFYXIGNXVADRGYGIALQHGSPYRDVFSQRILELQQNGDMDILKHKWWPKNGQCDLYSSVDXKQKGGALDIKSFAGVFCILAAGIVLSCFIAMLEXWWNKRKGSRVPSKEDDKEIDLEHLHRRVNSLCXDDDSPHKQFSXSSIDLXPLDIDXLPXRQALEQISDFRNXHIXXXXFIPEQIQXLSRXLSAKAASGFXFGNVPEHRXGPFRHRAPNGGFFRSPIKXMSSIPYQPXPXLGLNLGNDPDRGXSI

SEQ ID NO: 11489 - protein, 62 aa, Homo sapiens
  MOD_RES (7)..(7): Selenocysteine
  MOD_RES (28)..(28): Selenocysteine
  MOD_RES (50)..(50): Selenocysteine
GGVSGLXGELEFGENGGNPNVHFEILGXNYGEELGRGVRKNERIRPQGSXGKIWPQVNFIFK

SEQ ID NO: 11490 - protein, 73 aa, Homo sapiens
  MOD_RES (11)..(11): Selenocysteine
  MOD_RES (53)..(53): Selenocysteine
  MOD_RES (63)..(63): Selenocysteine
MEISNLYIYDXVLLLANAFHKKLEDRKWHSMASLSCIRKNSKPWQGGRSMLEXIKKGGVSGLXGELEFGENGG

SEQ ID NO: 11491 - protein, 1007 aa, Homo sapiens
  MOD_RES (17)..(17): Selenocysteine
  MOD_RES (46)..(46): Selenocysteine
  MOD_RES (60)..(60): Selenocysteine
  MOD_RES (64)..(64): Selenocysteine
  MOD_RES (68)..(68): Selenocysteine
  MOD_RES (100)..(100): Selenocysteine
  MOD_RES (123)..(123): Selenocysteine
  MOD_RES (126)..(126): Selenocysteine
  MOD_RES (134)..(134): Selenocysteine
  MOD_RES (143)..(143): Selenocysteine
  MOD_RES (161)..(161): Selenocysteine
  MOD_RES (209)..(210): Selenocysteine
  MOD_RES (214)..(214): Selenocysteine
  MOD_RES (226)..(226): Selenocysteine
  MOD_RES (238)..(238): Selenocysteine
  MOD_RES (244)..(244): Selenocysteine
  MOD_RES (249)..(249): Selenocysteine
  MOD_RES (282)..(282): Selenocysteine
  MOD_RES (287)..(287): Selenocysteine
  MOD_RES (308)..(308): Selenocysteine
  MOD_RES (330)..(330): Selenocysteine
  MOD_RES (372)..(372): Selenocysteine
  MOD_RES (382)..(382): Selenocysteine
  MOD_RES (403)..(403): Selenocysteine
  MOD_RES (423)..(423): Selenocysteine
  MOD_RES (430)..(430): Selenocysteine
  MOD_RES (447)..(447): Selenocysteine
  MOD_RES (504)..(504): Selenocysteine
  MOD_RES (525)..(525): Selenocysteine
  MOD_RES (527)..(527): Selenocysteine
  MOD_RES (537)..(538): Selenocysteine
  MOD_RES (555)..(555): Selenocysteine
  MOD_RES (576)..(576): Selenocysteine
  MOD_RES (601)..(601): Selenocysteine
  MOD_RES (603)..(604): Selenocysteine
  MOD_RES (626)..(627): Selenocysteine
  MOD_RES (630)..(630): Selenocysteine
  MOD_RES (649)..(649): Selenocysteine
  MOD_RES (657)..(657): Selenocysteine
  MOD_RES (659)..(659): Selenocysteine
  MOD_RES (675)..(675): Selenocysteine
  MOD_RES (681)..(681): Selenocysteine
  MOD_RES (760)..(760): Selenocysteine
  MOD_RES (764)..(764): Selenocysteine
  MOD_RES (819)..(819): Selenocysteine
  MOD_RES (853)..(853): Selenocysteine
  MOD_RES (886)..(886): Selenocysteine
  MOD_RES (897)..(897): Selenocysteine
  MOD_RES (903)..(903): Selenocysteine
  MOD_RES (909)..(909): Selenocysteine
  MOD_RES (912)..(912): Selenocysteine
  MOD_RES (925)..(925): Selenocysteine
  MOD_RES (928)..(931): Selenocysteine
  MOD_RES (939)..(939): Selenocysteine
  MOD_RES (943)..(943): Selenocysteine
  MOD_RES (953)..(953): Selenocysteine
  MOD_RES (962)..(962): Selenocysteine
  MOD_RES (981)..(981): Selenocysteine
  MOD_RES (990)..(990): Selenocysteine
  MOD_RES (992)..(992): Selenocysteine
  MOD_RES (1005)..(1005): Selenocysteine
MEVFPFLLVLSVWWSRXWDSANADSIIHIGAIFDESAKKDDEVFRXAVGDLNQNEEILQXEKIXFSVXFVDGNNPFQAVQEACELMNQGILALVSSIGCXSAGSLQSLADAMHIPHLFIQRSXAGXPRSGCGLXRSNRNDDYXLSVRPPVYLHDVILRVVXEYAWQKFIIFYDSEYDIRGIQEFLDKVSQQGMDVALQKVENNINKMIXXLFDXMRIEELNRYRDXLRRAILVMNPAXAKSFIXEVVEXNLVAFDCHWIIINEEINDVDVQELVRRSIGRLXIIRQXFPVPQNISQRCFRGNHRISSXLCDPKDPFAQNMEISNLYIYDXVLLLANAFHKKLEDRKWHSMASLSCIRKNSKPWQGGRSMLEXIKKGGVSGLXGELEFGENGGNPNVHFEILGXNYGEELGRGVRKLGCWNPVXGLNGSLXDKKLENNMRGVVLRVVXVLEEPFVMVSENVLGKPKKYQGFSIDVLDALSNYLGFNYEIYVAPDHKYGSPQEDGXWNGLVGELVFKRADIGISALXIXPDRENVVDFXXRYMDYSVGVLLRRAEKXVDMFACLAPFDLSLWACIAGXVLLVGLLVYLLNWLNPPRLQMGSMXSXXLYNSMWFVYGSFVQQGGEVPYXXLAXRMMMGAWWLFALIVISSYXANLAAFLXIXRIESSIQSLQDLSKQXEIPYGXVLDSAVYEHVRMKGLNPFERDSMYSQMWRMINRSNGSENNVLESQAGIQKVKYGNYAFVWDAAVLEYVAINDPDCSFYXIGNXVADRGYGIALQHGSPYRDVFSQRILELQQNGDMDILKHKWWPKNGQCDLYSSVDXKQKGGALDIKSFAGVFCILAAGIVLSCFIAMLEXWWNKRKGSRVPSKEDDKEIDLEHLHRRVNSLCXDDDSPHKQFSXSSIDLXPLDIDXLPXRQALEQISDFRNXHIXXXXFIPEQIQXLSRXLSAKAASGFXFGNVPEHRXGPFRHRAPNGGFFRSPIKXMSSIPYQPXPXLGLNLGNDPDRGXSI

SEQ ID NO: 11492 - protein, 912 aa, Homo sapiens
  MOD_RES (17)..(17): Selenocysteine
  MOD_RES (46)..(46): Selenocysteine
  MOD_RES (60)..(60): Selenocysteine
  MOD_RES (64)..(64): Selenocysteine
  MOD_RES (68)..(68): Selenocysteine
  MOD_RES (114)..(115): Selenocysteine
  MOD_RES (119)..(119): Selenocysteine
  MOD_RES (131)..(131): Selenocysteine
  MOD_RES (143)..(143): Selenocysteine
  MOD_RES (149)..(149): Selenocysteine
  MOD_RES (154)..(154): Selenocysteine
  MOD_RES (187)..(187): Selenocysteine
  MOD_RES (192)..(192): Selenocysteine
  MOD_RES (213)..(213): Selenocysteine
  MOD_RES (235)..(235): Selenocysteine
  MOD_RES (277)..(277): Selenocysteine
  MOD_RES (287)..(287): Selenocysteine
  MOD_RES (308)..(308): Selenocysteine
  MOD_RES (328)..(328): Selenocysteine
  MOD_RES (335)..(335): Selenocysteine
  MOD_RES (352)..(352): Selenocysteine
  MOD_RES (409)..(409): Selenocysteine
  MOD_RES (430)..(430): Selenocysteine
  MOD_RES (432)..(432): Selenocysteine
  MOD_RES (442)..(443): Selenocysteine
  MOD_RES (460)..(460): Selenocysteine
  MOD_RES (481)..(481): Selenocysteine
  MOD_RES (506)..(506): Selenocysteine
  MOD_RES (508)..(509): Selenocysteine
  MOD_RES (531)..(532): Selenocysteine
  MOD_RES (535)..(535): Selenocysteine
  MOD_RES (554)..(554): Selenocysteine
  MOD_RES (562)..(562): Selenocysteine
  MOD_RES (564)..(564): Selenocysteine
  MOD_RES (580)..(580): Selenocysteine
  MOD_RES (586)..(586): Selenocysteine
  MOD_RES (665)..(665): Selenocysteine
  MOD_RES (669)..(669): Selenocysteine
  MOD_RES (724)..(724): Selenocysteine
  MOD_RES (758)..(758): Selenocysteine
  MOD_RES (791)..(791): Selenocysteine
  MOD_RES (802)..(802): Selenocysteine
  MOD_RES (808)..(808): Selenocysteine
  MOD_RES (814)..(814): Selenocysteine
  MOD_RES (817)..(817): Selenocysteine
  MOD_RES (830)..(830): Selenocysteine
  MOD_RES (833)..(836): Selenocysteine
  MOD_RES (844)..(844): Selenocysteine
  MOD_RES (848)..(848): Selenocysteine
  MOD_RES (858)..(858): Selenocysteine
  MOD_RES (867)..(867): Selenocysteine
  MOD_RES (886)..(886): Selenocysteine
  MOD_RES (895)..(895): Selenocysteine
  MOD_RES (897)..(897): Selenocysteine
  MOD_RES (910)..(910): Selenocysteine
MEVFPFLLVLSVWWSRXWDSANADSIIHIGAIFDESAKKDDEVFRXAVGDLNQNEEILQXEKIXFSVXFVDGNNPFQAVQEDIRGIQEFLDKVSQQGMDVALQKVENNINKMIXXLFDXMRIEELNRYRDXLRRAILVMNPAXAKSFIXEVVEXNLVAFDCHWIIINEEINDVDVQELVRRSIGRLXIIRQXFPVPQNISQRCFRGNHRISSXLCDPKDPFAQNMEISNLYIYDXVLLLANAFHKKLEDRKWHSMASLSCIRKNSKPWQGGRSMLEXIKKGGVSGLXGELEFGENGGNPNVHFEILGXNYGEELGRGVRKLGCWNPVXGLNGSLXDKKLENNMRGVVLRVVXVLEEPFVMVSENVLGKPKKYQGFSIDVLDALSNYLGFNYEIYVAPDHKYGSPQEDGXWNGLVGELVFKRADIGISALXIXPDRENVVDFXXRYMDYSVGVLLRRAEKXVDMFACLAPFDLSLWACIAGXVLLVGLLVYLLNWLNPPRLQMGSMXSXXLYNSMWFVYGSFVQQGGEVPYXXLAXRMMMGAWWLFALIVISSYXANLAAFLXIXRIESSIQSLQDLSKQXEIPYGXVLDSAVYEHVRMKGLNPFERDSMYSQMWRMINRSNGSENNVLESQAGIQKVKYGNYAFVWDAAVLEYVAINDPDCSFYXIGNXVADRGYGIALQHGSPYRDVFSQRILELQQNGDMDILKHKWWPKNGQCDLYSSVDXKQKGGALDIKSFAGVFCILAAGIVLSCFIAMLEXWWNKRKGSRVPSKEDDKEIDLEHLHRRVNSLCXDDDSPHKQFSXSSIDLXPLDIDXLPXRQALEQISDFRNXHIXXXXFIPEQIQXLSRXLSAKAASGFXFGNVPEHRXGPFRHRAPNGGFFRSPIKXMSSIPYQPXPXLGLNLGNDPDRGXSI

SEQ ID NO: 11493 - protein, 163 aa, Homo sapiens
  MOD_RES (15)..(15): Selenocysteine
  MOD_RES (38)..(38): Selenocysteine
  MOD_RES (41)..(41): Selenocysteine
  MOD_RES (49)..(49): Selenocysteine
  MOD_RES (58)..(58): Selenocysteine
  MOD_RES (76)..(76): Selenocysteine
  MOD_RES (124)..(125): Selenocysteine
  MOD_RES (129)..(129): Selenocysteine
  MOD_RES (141)..(141): Selenocysteine
  MOD_RES (153)..(153): Selenocysteine
  MOD_RES (159)..(159): Selenocysteine
MNQGILALVSSIGCXSAGSLQSLADAMHIPHLFIQRSXAGXPRSGCGLXRSNRNDDYXLSVRPPVYLHDVILRVVXEYAWQKFIIFYDSEYDIRGIQEFLDKVSQQGMDVALQKVENNINKMIXXLFDXMRIEELNRYRDXLRRAILVMNPAXAKSFIXEMSF

SEQ ID NO: 11494 - protein, 126 aa, Homo sapiens
  MOD_RES (1)..(1): Any amino acid
  MOD_RES (26)..(26): Selenocysteine
  MOD_RES (60)..(60): Selenocysteine
  MOD_RES (82)..(83): Selenocysteine
  MOD_RES (103)..(103): Selenocysteine
XGDMDILKHKWWPKNGQCDLYSSVDXKQKGGALDIKSFAGVFCILAAGIVLSCFIAMLEXWWNKRKGSRVPSKEASSLQNEXXISERRNAWPLRPCLKLGSNXWRSQASSHSLHQSSQMGGPLDDP

SEQ ID NO: 11495 - protein, 871 aa, Homo sapiens
  MOD_RES (5)..(5): Selenocysteine
  MOD_RES (14)..(14): Selenocysteine
  MOD_RES (17)..(17): Selenocysteine
  MOD_RES (32)..(32): Selenocysteine
  MOD_RES (45)..(45): Selenocysteine
  MOD_RES (63)..(63): Selenocysteine
  MOD_RES (70)..(70): Selenocysteine
  MOD_RES (75)..(76): Selenocysteine
  MOD_RES (78)..(78): Selenocysteine
  MOD_RES (133)..(133): Selenocysteine
  MOD_RES (172)..(172): Selenocysteine
  MOD_RES (174)..(174): Selenocysteine
  MOD_RES (181)..(181): Selenocysteine
  MOD_RES (235)..(235): Selenocysteine
  MOD_RES (250)..(250): Selenocysteine
  MOD_RES (258)..(259): Selenocysteine
  MOD_RES (278)..(278): Selenocysteine
  MOD_RES (310)..(310): Selenocysteine
  MOD_RES (318)..(319): Selenocysteine
  MOD_RES (342)..(342): Selenocysteine
  MOD_RES (373)..(373): Selenocysteine
  MOD_RES (377)..(377): Selenocysteine
  MOD_RES (381)..(381): Selenocysteine
  MOD_RES (400)..(400): Selenocysteine
  MOD_RES (430)..(430): Selenocysteine
  MOD_RES (441)..(441): Selenocysteine
  MOD_RES (448)..(448): Selenocysteine
  MOD_RES (452)..(453): Selenocysteine
  MOD_RES (533)..(533): Selenocysteine
  MOD_RES (535)..(535): Selenocysteine
  MOD_RES (550)..(550): Selenocysteine
  MOD_RES (563)..(563): Selenocysteine
  MOD_RES (600)..(600): Selenocysteine
  MOD_RES (622)..(622): Selenocysteine
  MOD_RES (648)..(648): Selenocysteine
  MOD_RES (659)..(659): Selenocysteine
  MOD_RES (667)..(667): Selenocysteine
  MOD_RES (675)..(675): Selenocysteine
  MOD_RES (693)..(693): Selenocysteine
  MOD_RES (705)..(705): Selenocysteine
  MOD_RES (707)..(707): Selenocysteine
  MOD_RES (716)..(716): Selenocysteine
  MOD_RES (730)..(730): Selenocysteine
  MOD_RES (745)..(746): Selenocysteine
  MOD_RES (755)..(755): Selenocysteine
  MOD_RES (761)..(761): Selenocysteine
  MOD_RES (768)..(768): Selenocysteine
  MOD_RES (783)..(783): Selenocysteine
  MOD_RES (794)..(794): Selenocysteine
MEHGXLLAQPGLWXRDXSWALLYFLCYILPQXAPQVLRIGGIFEXVENEPVNVEELAFKFAVXSINRNRXLMPNXXLXYDIQRINLFDSFEASRRACDQLALGVAALFGPSHSSSVSAVQSICNALEVPHIQXRWKHPSVDNKDLFYINLYPDYAAISRAILDLVLYYNWKXVXVVYEDSXGLIRLQELIKAPSRYNIKIKIRQLPSGNKDAKPLLKEMKKGKEFYVIFDCSHEXAAEILKQILFMGMMXEYYHYFFXXLDLFALDLELYRYSGVNMXGFRLLNIDNPHVSSIIEKWSMERLQAPPRPEXGLLDGMMXXEAALMYDAVYMVAIASHRASQLXVSSLQCHRHKPWRLGPRFMNLIKEARWDGLXGHIXFNKXNGLRKDFDLDIISLKEEGXEKAAGEVSKHLYKVWKKIGIWNSNSGLNMXDSNKDKSSNIXDSLANRXLIVXXILEEPYVMYRKSDKPLYGNDRFEGYCLDLLKELSNILGFIYDVKLVPDGKYGAQNDKGEWNGMVKELIDHRADLAVAPLXIXYVREKVIDFSKPFMXLGISILYRKPNGXNPGVFSFLNPLSPDIWMYVLLACLGVSCVLFVIARFXPYEWYNPHPCNPDSDVVENNFXLLNSFWFGVGALMQQGSELMPKALSXRIVGGIWWFFXLIIISSYXANLAAFLXVERMESPIDSADDLAKQXKIEYGAVRDGSXMXFFKKSKISXYEKMWAFMSSRQQXALVRNSDEGIQRVLXXDYALLMESXSIEYVXQRNCNLXQIGGLIDSKGYGVGXPIGSPYRDKIXIAILQLQEEGKLHMMKEKWWRGNGCPEEDNKEASALGVENIGGIFIVLAAGLVLSVFVAIGEFIYKSRKNNDIEQHY

SEQ ID NO: 11496 - protein, 903 aa, Homo sapiens
  MOD_RES (5)..(5): Selenocysteine
  MOD_RES (14)..(14): Selenocysteine
  MOD_RES (17)..(17): Selenocysteine
  MOD_RES (32)..(32): Selenocysteine
  MOD_RES (45)..(45): Selenocysteine
  MOD_RES (63)..(63): Selenocysteine
  MOD_RES (70)..(70): Selenocysteine
  MOD_RES (75)..(76): Selenocysteine
  MOD_RES (78)..(78): Selenocysteine
  MOD_RES (133)..(133): Selenocysteine
  MOD_RES (172)..(172): Selenocysteine
  MOD_RES (174)..(174): Selenocysteine
  MOD_RES (181)..(181): Selenocysteine
  MOD_RES (235)..(235): Selenocysteine
  MOD_RES (250)..(250): Selenocysteine
  MOD_RES (258)..(259): Selenocysteine
  MOD_RES (278)..(278): Selenocysteine
  MOD_RES (310)..(310): Selenocysteine
  MOD_RES (318)..(319): Selenocysteine
  MOD_RES (342)..(342): Selenocysteine
  MOD_RES (373)..(373): Selenocysteine
  MOD_RES (377)..(377): Selenocysteine
  MOD_RES (381)..(381): Selenocysteine
  MOD_RES (400)..(400): Selenocysteine
  MOD_RES (415)..(415): Selenocysteine
  MOD_RES (426)..(426): Selenocysteine
  MOD_RES (433)..(433): Selenocysteine
  MOD_RES (437)..(438): Selenocysteine
  MOD_RES (518)..(518): Selenocysteine
  MOD_RES (520)..(520): Selenocysteine
  MOD_RES (535)..(535): Selenocysteine
  MOD_RES (548)..(548): Selenocysteine
  MOD_RES (585)..(585): Selenocysteine
  MOD_RES (607)..(607): Selenocysteine
  MOD_RES (633)..(633): Selenocysteine
  MOD_RES (644)..(644): Selenocysteine
  MOD_RES (652)..(652): Selenocysteine
  MOD_RES (660)..(660): Selenocysteine
  MOD_RES (678)..(678): Selenocysteine
  MOD_RES (690)..(690): Selenocysteine
  MOD_RES (692)..(692): Selenocysteine
  MOD_RES (701)..(701): Selenocysteine
  MOD_RES (715)..(715): Selenocysteine
  MOD_RES (730)..(731): Selenocysteine
  MOD_RES (740)..(740): Selenocysteine
  MOD_RES (746)..(746): Selenocysteine
  MOD_RES (753)..(753): Selenocysteine
  MOD_RES (768)..(768): Selenocysteine
  MOD_RES (779)..(779): Selenocysteine
  MOD_RES (867)..(867): Selenocysteine
  MOD_RES (870)..(870): Selenocysteine
  MOD_RES (873)..(873): Selenocysteine
  MOD_RES (876)..(877): Selenocysteine
  MOD_RES (880)..(880): Selenocysteine
  MOD_RES (902)..(902): Selenocysteine
MEHGXLLAQPGLWXRDXSWALLYFLCYILPQXAPQVLRIGGIFEXVENEPVNVEELAFKFAVXSINRNRXLMPNXXLXYDIQRINLFDSFEASRRACDQLALGVAALFGPSHSSSVSAVQSICNALEVPHIQXRWKHPSVDNKDLFYINLYPDYAAISRAILDLVLYYNWKXVXVVYEDSXGLIRLQELIKAPSRYNIKIKIRQLPSGNKDAKPLLKEMKKGKEFYVIFDCSHEXAAEILKQILFMGMMXEYYHYFFXXLDLFALDLELYRYSGVNMXGFRLLNIDNPHVSSIIEKWSMERLQAPPRPEXGLLDGMMXXEAALMYDAVYMVAIASHRASQLXVSSLQCHRHKPWRLGPRFMNLIKEARWDGLXGHIXFNKXNGLRKDFDLDIISLKEEGXEKIGIWNSNSGLNMXDSNKDKSSNIXDSLANRXLIVXXILEEPYVMYRKSDKPLYGNDRFEGYCLDLLKELSNILGFIYDVKLVPDGKYGAQNDKGEWNGMVKELIDHRADLAVAPLXIXYVREKVIDFSKPFMXLGISILYRKPNGXNPGVFSFLNPLSPDIWMYVLLACLGVSCVLFVIARFXPYEWYNPHPCNPDSDVVENNFXLLNSFWFGVGALMQQGSELMPKALSXRIVGGIWWFFXLIIISSYXANLAAFLXVERMESPIDSADDLAKQXKIEYGAVRDGSXMXFFKKSKISXYEKMWAFMSSRQQXALVRNSDEGIQRVLXXDYALLMESXSIEYVXQRNCNLXQIGGLIDSKGYGVGXPIGSPYRDKIXIAILQLQEEGKLHMMKEKWWRGNGCPEEDNKEASALGVENIGGIFIVLAAGLVLSVFVAIGEFIYKSRKNNDIEQAFCFFYGLQCKQXHPXNSXSGXXLSXDLECGKLIREERGIRKQSSVHXV

SEQ ID NO: 11497 - protein, 905 aa, Homo sapiens
  MOD_RES (5)..(5): Selenocysteine
  MOD_RES (14)..(14): Selenocysteine
  MOD_RES (17)..(17): Selenocysteine
  MOD_RES (32)..(32): Selenocysteine
  MOD_RES (45)..(45): Selenocysteine
  MOD_RES (63)..(63): Selenocysteine
  MOD_RES (70)..(70): Selenocysteine
  MOD_RES (75)..(76): Selenocysteine
  MOD_RES (78)..(78): Selenocysteine
  MOD_RES (133)..(133): Selenocysteine
  MOD_RES (172)..(172): Selenocysteine
  MOD_RES (174)..(174): Selenocysteine
  MOD_RES (181)..(181): Selenocysteine
  MOD_RES (235)..(235): Selenocysteine
  MOD_RES (250)..(250): Selenocysteine
  MOD_RES (258)..(259): Selenocysteine
  MOD_RES (278)..(278): Selenocysteine
  MOD_RES (310)..(310): Selenocysteine
  MOD_RES (318)..(319): Selenocysteine
  MOD_RES (342)..(342): Selenocysteine
  MOD_RES (373)..(373): Selenocysteine
  MOD_RES (377)..(377): Selenocysteine
  MOD_RES (381)..(381): Selenocysteine
  MOD_RES (400)..(400): Selenocysteine
  MOD_RES (415)..(415): Selenocysteine
  MOD_RES (426)..(426): Selenocysteine
  MOD_RES (433)..(433): Selenocysteine
  MOD_RES (437)..(438): Selenocysteine
  MOD_RES (518)..(518): Selenocysteine
  MOD_RES (520)..(520): Selenocysteine
  MOD_RES (535)..(535): Selenocysteine
  MOD_RES (548)..(548): Selenocysteine
  MOD_RES (585)..(585): Selenocysteine
  MOD_RES (607)..(607): Selenocysteine
  MOD_RES (633)..(633): Selenocysteine
  MOD_RES (644)..(644): Selenocysteine
  MOD_RES (652)..(652): Selenocysteine
  MOD_RES (660)..(660): Selenocysteine
  MOD_RES (678)..(678): Selenocysteine
  MOD_RES (690)..(690): Selenocysteine
  MOD_RES (692)..(692): Selenocysteine
  MOD_RES (701)..(701): Selenocysteine
  MOD_RES (715)..(715): Selenocysteine
  MOD_RES (730)..(731): Selenocysteine
  MOD_RES (740)..(740): Selenocysteine
  MOD_RES (746)..(746): Selenocysteine
  MOD_RES (753)..(753): Selenocysteine
  MOD_RES (768)..(768): Selenocysteine
  MOD_RES (779)..(779): Selenocysteine
  MOD_RES (881)..(881): Selenocysteine
  MOD_RES (888)..(888): Selenocysteine
  MOD_RES (892)..(892): Selenocysteine
  MOD_RES (898)..(898): Selenocysteine
  MOD_RES (903)..(903): Selenocysteine
MEHGXLLAQPGLWXRDXSWALLYFLCYILPQXAPQVLRIGGIFEXVENEPVNVEELAFKFAVXSINRNRXLMPNXXLXYDIQRINLFDSFEASRRACDQLALGVAALFGPSHSSSVSAVQSICNALEVPHIQXRWKHPSVDNKDLFYINLYPDYAAISRAILDLVLYYNWKXVXVVYEDSXGLIRLQELIKAPSRYNIKIKIRQLPSGNKDAKPLLKEMKKGKEFYVIFDCSHEXAAEILKQILFMGMMXEYYHYFFXXLDLFALDLELYRYSGVNMXGFRLLNIDNPHVSSIIEKWSMERLQAPPRPEXGLLDGMMXXEAALMYDAVYMVAIASHRASQLXVSSLQCHRHKPWRLGPRFMNLIKEARWDGLXGHIXFNKXNGLRKDFDLDIISLKEEGXEKIGIWNSNSGLNMXDSNKDKSSNIXDSLANRXLIVXXILEEPYVMYRKSDKPLYGNDRFEGYCLDLLKELSNILGFIYDVKLVPDGKYGAQNDKGEWNGMVKELIDHRADLAVAPLXIXYVREKVIDFSKPFMXLGISILYRKPNGXNPGVFSFLNPLSPDIWMYVLLACLGVSCVLFVIARFXPYEWYNPHPCNPDSDVVENNFXLLNSFWFGVGALMQQGSELMPKALSXRIVGGIWWFFXLIIISSYXANLAAFLXVERMESPIDSADDLAKQXKIEYGAVRDGSXMXFFKKSKISXYEKMWAFMSSRQQXALVRNSDEGIQRVLXXDYALLMESXSIEYVXQRNCNLXQIGGLIDSKGYGVGXPIGSPYRDKIXIAILQLQEEGKLHMMKEKWWRGNGCPEEDNKEASALGVENIGGIFIVLAAGLVLSVFVAIGEFIYKSRKNNDIEQCLSFNAIMEELGISLKNQKKIKKKSRXKGKSSFXSILXCHQRRXQRKEXVA

SEQ ID NO: 11498 - protein, 918 aa, Homo sapiens
  MOD_RES (5)..(5): Selenocysteine
  MOD_RES (14)..(14): Selenocysteine
  MOD_RES (17)..(17): Selenocysteine
  MOD_RES (32)..(32): Selenocysteine
  MOD_RES (45)..(45): Selenocysteine
  MOD_RES (63)..(63): Selenocysteine
  MOD_RES (70)..(70): Selenocysteine
  MOD_RES (75)..(76): Selenocysteine
  MOD_RES (78)..(78): Selenocysteine
  MOD_RES (133)..(133): Selenocysteine
  MOD_RES (172)..(172): Selenocysteine
  MOD_RES (174)..(174): Selenocysteine
  MOD_RES (181)..(181): Selenocysteine
  MOD_RES (235)..(235): Selenocysteine
  MOD_RES (250)..(250): Selenocysteine
  MOD_RES (258)..(259): Selenocysteine
  MOD_RES (278)..(278): Selenocysteine
  MOD_RES (310)..(310): Selenocysteine
  MOD_RES (318)..(319): Selenocysteine
  MOD_RES (342)..(342): Selenocysteine
  MOD_RES (373)..(373): Selenocysteine
  MOD_RES (377)..(377): Selenocysteine
  MOD_RES (381)..(381): Selenocysteine
  MOD_RES (400)..(400): Selenocysteine
  MOD_RES (430)..(430): Selenocysteine
  MOD_RES (441)..(441): Selenocysteine
  MOD_RES (448)..(448): Selenocysteine
  MOD_RES (452)..(453): Selenocysteine
  MOD_RES (533)..(533): Selenocysteine
  MOD_RES (535)..(535): Selenocysteine
  MOD_RES (550)..(550): Selenocysteine
  MOD_RES (563)..(563): Selenocysteine
  MOD_RES (600)..(600): Selenocysteine
  MOD_RES (622)..(622): Selenocysteine
  MOD_RES (648)..(648): Selenocysteine
  MOD_RES (659)..(659): Selenocysteine
  MOD_RES (667)..(667): Selenocysteine
  MOD_RES (675)..(675): Selenocysteine
  MOD_RES (693)..(693): Selenocysteine
  MOD_RES (705)..(705): Selenocysteine
  MOD_RES (707)..(707): Selenocysteine
  MOD_RES (716)..(716): Selenocysteine
  MOD_RES (730)..(730): Selenocysteine
  MOD_RES (745)..(746): Selenocysteine
  MOD_RES (755)..(755): Selenocysteine
  MOD_RES (761)..(761): Selenocysteine
  MOD_RES (768)..(768): Selenocysteine
  MOD_RES (783)..(783): Selenocysteine
  MOD_RES (794)..(794): Selenocysteine
  MOD_RES (882)..(882): Selenocysteine
  MOD_RES (885)..(885): Selenocysteine
  MOD_RES (888)..(888): Selenocysteine
  MOD_RES (891)..(892): Selenocysteine
  MOD_RES (895)..(895): Selenocysteine
  MOD_RES (917)..(917): Selenocysteine
MEHGXLLAQPGLWXRDXSWALLYFLCYILPQXAPQVLRIGGIFEXVENEPVNVEELAFKFAVXSINRNRXLMPNXXLXYDIQRINLFDSFEASRRACDQLALGVAALFGPSHSSSVSAVQSICNALEVPHIQXRWKHPSVDNKDLFYINLYPDYAAISRAILDLVLYYNWKXVXVVYEDSXGLIRLQELIKAPSRYNIKIKIRQLPSGNKDAKPLLKEMKKGKEFYVIFDCSHEXAAEILKQILFMGMMXEYYHYFFXXLDLFALDLELYRYSGVNMXGFRLLNIDNPHVSSIIEKWSMERLQAPPRPEXGLLDGMMXXEAALMYDAVYMVAIASHRASQLXVSSLQCHRHKPWRLGPRFMNLIKEARWDGLXGHIXFNKXNGLRKDFDLDIISLKEEGXEKAAGEVSKHLYKVWKKIGIWNSNSGLNMXDSNKDKSSNIXDSLANRXLIVXXILEEPYVMYRKSDKPLYGNDRFEGYCLDLLKELSNILGFIYDVKLVPDGKYGAQNDKGEWNGMVKELIDHRADLAVAPLXIXYVREKVIDFSKPFMXLGISILYRKPNGXNPGVFSFLNPLSPDIWMYVLLACLGVSCVLFVIARFXPYEWYNPHPCNPDSDVVENNFXLLNSFWFGVGALMQQGSELMPKALSXRIVGGIWWFFXLIIISSYXANLAAFLXVERMESPIDSADDLAKQXKIEYGAVRDGSXMXFFKKSKISXYEKMWAFMSSRQQXALVRNSDEGIQRVLXXDYALLMESXSIEYVXQRNCNLXQIGGLIDSKGYGVGXPIGSPYRDKIXIAILQLQEEGKLHMMKEKWWRGNGCPEEDNKEASALGVENIGGIFIVLAAGLVLSVFVAIGEFIYKSRKNNDIEQAFCFFYGLQCKQXHPXNSXSGXXLSXDLECGKLIREERGIRKQSSVHXV

SEQ ID NO: 11499 - protein, 920 aa, Homo sapiens
  MOD_RES (5)..(5): Selenocysteine
  MOD_RES (14)..(14): Selenocysteine
  MOD_RES (17)..(17): Selenocysteine
  MOD_RES (32)..(32): Selenocysteine
  MOD_RES (45)..(45): Selenocysteine
  MOD_RES (63)..(63): Selenocysteine
  MOD_RES (70)..(70): Selenocysteine
  MOD_RES (75)..(76): Selenocysteine
  MOD_RES (78)..(78): Selenocysteine
  MOD_RES (133)..(133): Selenocysteine
  MOD_RES (172)..(172): Selenocysteine
  MOD_RES (174)..(174): Selenocysteine
  MOD_RES (181)..(181): Selenocysteine
  MOD_RES (235)..(235): Selenocysteine
  MOD_RES (250)..(250): Selenocysteine
  MOD_RES (258)..(259): Selenocysteine
  MOD_RES (278)..(278): Selenocysteine
  MOD_RES (310)..(310): Selenocysteine
  MOD_RES (318)..(319): Selenocysteine
  MOD_RES (342)..(342): Selenocysteine
  MOD_RES (373)..(373): Selenocysteine
  MOD_RES (377)..(377): Selenocysteine
  MOD_RES (381)..(381): Selenocysteine
  MOD_RES (400)..(400): Selenocysteine
  MOD_RES (430)..(430): Selenocysteine
  MOD_RES (441)..(441): Selenocysteine
  MOD_RES (448)..(448): Selenocysteine
  MOD_RES (452)..(453): Selenocysteine
  MOD_RES (533)..(533): Selenocysteine
  MOD_RES (535)..(535): Selenocysteine
  MOD_RES (550)..(550): Selenocysteine
  MOD_RES (563)..(563): Selenocysteine
  MOD_RES (600)..(600): Selenocysteine
  MOD_RES (622)..(622): Selenocysteine
  MOD_RES (648)..(648): Selenocysteine
  MOD_RES (659)..(659): Selenocysteine
  MOD_RES (667)..(667): Selenocysteine
  MOD_RES (675)..(675): Selenocysteine
  MOD_RES (693)..(693): Selenocysteine
  MOD_RES (705)..(705): Selenocysteine
  MOD_RES (707)..(707): Selenocysteine
  MOD_RES (716)..(716): Selenocysteine
  MOD_RES (730)..(730): Selenocysteine
  MOD_RES (745)..(746): Selenocysteine
  MOD_RES (755)..(755): Selenocysteine
  MOD_RES (761)..(761): Selenocysteine
  MOD_RES (768)..(768): Selenocysteine
  MOD_RES (783)..(783): Selenocysteine
  MOD_RES (794)..(794): Selenocysteine
  MOD_RES (896)..(896): Selenocysteine
  MOD_RES (903)..(903): Selenocysteine
  MOD_RES (907)..(907): Selenocysteine
  MOD_RES (913)..(913): Selenocysteine
  MOD_RES (918)..(918): Selenocysteine
MEHGXLLAQPGLWXRDXSWALLYFLCYILPQXAPQVLRIGGIFEXVENEPVNVEELAFKFAVXSINRNRXLMPNXXLXYDIQRINLFDSFEASRRACDQLALGVAALFGPSHSSSVSAVQSICNALEVPHIQXRWKHPSVDNKDLFYINLYPDYAAISRAILDLVLYYNWKXVXVVYEDSXGLIRLQELIKAPSRYNIKIKIRQLPSGNKDAKPLLKEMKKGKEFYVIFDCSHEXAAEILKQILFMGMMXEYYHYFFXXLDLFALDLELYRYSGVNMXGFRLLNIDNPHVSSIIEKWSMERLQAPPRPEXGLLDGMMXXEAALMYDAVYMVAIASHRASQLXVSSLQCHRHKPWRLGPRFMNLIKEARWDGLXGHIXFNKXNGLRKDFDLDIISLKEEGXEKAAGEVSKHLYKVWKKIGIWNSNSGLNMXDSNKDKSSNIXDSLANRXLIVXXILEEPYVMYRKSDKPLYGNDRFEGYCLDLLKELSNILGFIYDVKLVPDGKYGAQNDKGEWNGMVKELIDHRADLAVAPLXIXYVREKVIDFSKPFMXLGISILYRKPNGXNPGVFSFLNPLSPDIWMYVLLACLGVSCVLFVIARFXPYEWYNPHPCNPDSDVVENNFXLLNSFWFGVGALMQQGSELMPKALSXRIVGGIWWFFXLIIISSYXANLAAFLXVERMESPIDSADDLAKQXKIEYGAVRDGSXMXFFKKSKISXYEKMWAFMSSRQQXALVRNSDEGIQRVLXXDYALLMESXSIEYVXQRNCNLXQIGGLIDSKGYGVGXPIGSPYRDKIXIAILQLQEEGKLHMMKEKWWRGNGCPEEDNKEASALGVENIGGIFIVLAAGLVLSVFVAIGEFIYKSRKNNDIEQCLSFNAIMEELGISLKNQKKIKKKSRXKGKSSFXSILXCHQRRXQRKEXVA

SEQ ID NO: 11500 - protein, 934 aa, Homo sapiens
  MOD_RES (5)..(5): Selenocysteine
  MOD_RES (14)..(14): Selenocysteine
  MOD_RES (17)..(17): Selenocysteine
  MOD_RES (32)..(32): Selenocysteine
  MOD_RES (45)..(45): Selenocysteine
  MOD_RES (63)..(63): Selenocysteine
  MOD_RES (70)..(70): Selenocysteine
  MOD_RES (75)..(76): Selenocysteine
  MOD_RES (78)..(78): Selenocysteine
  MOD_RES (133)..(133): Selenocysteine
  MOD_RES (172)..(172): Selenocysteine
  MOD_RES (174)..(174): Selenocysteine
  MOD_RES (181)..(181): Selenocysteine
  MOD_RES (235)..(235): Selenocysteine
  MOD_RES (250)..(250): Selenocysteine
  MOD_RES (258)..(259): Selenocysteine
  MOD_RES (278)..(278): Selenocysteine
  MOD_RES (310)..(310): Selenocysteine
  MOD_RES (318)..(319): Selenocysteine
  MOD_RES (342)..(342): Selenocysteine
  MOD_RES (373)..(373): Selenocysteine
  MOD_RES (377)..(377): Selenocysteine
  MOD_RES (381)..(381): Selenocysteine
  MOD_RES (400)..(400): Selenocysteine
  MOD_RES (415)..(415): Selenocysteine
  MOD_RES (426)..(426): Selenocysteine
  MOD_RES (433)..(433): Selenocysteine
  MOD_RES (437)..(438): Selenocysteine
  MOD_RES (518)..(518): Selenocysteine
  MOD_RES (520)..(520): Selenocysteine
  MOD_RES (535)..(535): Selenocysteine
  MOD_RES (548)..(548): Selenocysteine
  MOD_RES (585)..(585): Selenocysteine
  MOD_RES (607)..(607): Selenocysteine
  MOD_RES (633)..(633): Selenocysteine
  MOD_RES (644)..(644): Selenocysteine
  MOD_RES (652)..(652): Selenocysteine
  MOD_RES (660)..(660): Selenocysteine
  MOD_RES (678)..(678): Selenocysteine
  MOD_RES (690)..(690): Selenocysteine
  MOD_RES (692)..(692): Selenocysteine
  MOD_RES (701)..(701): Selenocysteine
  MOD_RES (715)..(715): Selenocysteine
  MOD_RES (730)..(731): Selenocysteine
  MOD_RES (740)..(740): Selenocysteine
  MOD_RES (746)..(746): Selenocysteine
  MOD_RES (753)..(753): Selenocysteine
  MOD_RES (768)..(768): Selenocysteine
  MOD_RES (779)..(779): Selenocysteine
  MOD_RES (910)..(910): Selenocysteine
  MOD_RES (917)..(917): Selenocysteine
  MOD_RES (921)..(921): Selenocysteine
  MOD_RES (927)..(927): Selenocysteine
  MOD_RES (932)..(932): Selenocysteine
MEHGXLLAQPGLWXRDXSWALLYFLCYILPQXAPQVLRIGGIFEXVENEPVNVEELAFKFAVXSINRNRXLMPNXXLXYDIQRINLFDSFEASRRACDQLALGVAALFGPSHSSSVSAVQSICNALEVPHIQXRWKHPSVDNKDLFYINLYPDYAAISRAILDLVLYYNWKXVXVVYEDSXGLIRLQELIKAPSRYNIKIKIRQLPSGNKDAKPLLKEMKKGKEFYVIFDCSHEXAAEILKQILFMGMMXEYYHYFFXXLDLFALDLELYRYSGVNMXGFRLLNIDNPHVSSIIEKWSMERLQAPPRPEXGLLDGMMXXEAALMYDAVYMVAIASHRASQLXVSSLQCHRHKPWRLGPRFMNLIKEARWDGLXGHIXFNKXNGLRKDFDLDIISLKEEGXEKIGIWNSNSGLNMXDSNKDKSSNIXDSLANRXLIVXXILEEPYVMYRKSDKPLYGNDRFEGYCLDLLKELSNILGFIYDVKLVPDGKYGAQNDKGEWNGMVKELIDHRADLAVAPLXIXYVREKVIDFSKPFMXLGISILYRKPNGXNPGVFSFLNPLSPDIWMYVLLACLGVSCVLFVIARFXPYEWYNPHPCNPDSDVVENNFXLLNSFWFGVGALMQQGSELMPKALSXRIVGGIWWFFXLIIISSYXANLAAFLXVERMESPIDSADDLAKQXKIEYGAVRDGSXMXFFKKSKISXYEKMWAFMSSRQQXALVRNSDEGIQRVLXXDYALLMESXSIEYVXQRNCNLXQIGGLIDSKGYGVGXPIGSPYRDKIXIAILQLQEEGKLHMMKEKWWRGNGCPEEDNKEASALGVENIGGIFIVLAAGLVLSVFVAIGEFIYKSRKNNDIEQKGKSSRIRFYFRNKVRFHGRKKQSLGVEKCLSFNAIMEELGISLKNQKKIKKKSRXKGKSSFXSILXCHQRRXQRKEXVA

SEQ ID NO: 11501 - protein, 949 aa, Homo sapiens
  MOD_RES (5)..(5): Selenocysteine
  MOD_RES (14)..(14): Selenocysteine
  MOD_RES (17)..(17): Selenocysteine
  MOD_RES (32)..(32): Selenocysteine
  MOD_RES (45)..(45): Selenocysteine
  MOD_RES (63)..(63): Selenocysteine
  MOD_RES (70)..(70): Selenocysteine
  MOD_RES (75)..(76): Selenocysteine
  MOD_RES (78)..(78): Selenocysteine
  MOD_RES (133)..(133): Selenocysteine
  MOD_RES (172)..(172): Selenocysteine
  MOD_RES (174)..(174): Selenocysteine
  MOD_RES (181)..(181): Selenocysteine
  MOD_RES (235)..(235): Selenocysteine
  MOD_RES (250)..(250): Selenocysteine
  MOD_RES (258)..(259): Selenocysteine
  MOD_RES (278)..(278): Selenocysteine
  MOD_RES (310)..(310): Selenocysteine
  MOD_RES (318)..(319): Selenocysteine
  MOD_RES (342)..(342): Selenocysteine
  MOD_RES (373)..(373): Selenocysteine
  MOD_RES (377)..(377): Selenocysteine
  MOD_RES (381)..(381): Selenocysteine
  MOD_RES (400)..(400): Selenocysteine
  MOD_RES (430)..(430): Selenocysteine
  MOD_RES (441)..(441): Selenocysteine
  MOD_RES (448)..(448): Selenocysteine
  MOD_RES (452)..(453): Selenocysteine
  MOD_RES (533)..(533): Selenocysteine
  MOD_RES (535)..(535): Selenocysteine
  MOD_RES (550)..(550): Selenocysteine
  MOD_RES (563)..(563): Selenocysteine
  MOD_RES (600)..(600): Selenocysteine
  MOD_RES (622)..(622): Selenocysteine
  MOD_RES (648)..(648): Selenocysteine
  MOD_RES (659)..(659): Selenocysteine
  MOD_RES (667)..(667): Selenocysteine
  MOD_RES (675)..(675): Selenocysteine
  MOD_RES (693)..(693): Selenocysteine
  MOD_RES (705)..(705): Selenocysteine
  MOD_RES (707)..(707): Selenocysteine
  MOD_RES (716)..(716): Selenocysteine
  MOD_RES (730)..(730): Selenocysteine
  MOD_RES (745)..(746): Selenocysteine
  MOD_RES (755)..(755): Selenocysteine
  MOD_RES (761)..(761): Selenocysteine
  MOD_RES (768)..(768): Selenocysteine
  MOD_RES (783)..(783): Selenocysteine
  MOD_RES (794)..(794): Selenocysteine
  MOD_RES (925)..(925): Selenocysteine
  MOD_RES (932)..(932): Selenocysteine
  MOD_RES (936)..(936): Selenocysteine
  MOD_RES (942)..(942): Selenocysteine
  MOD_RES (947)..(947): Selenocysteine
MEHGXLLAQPGLWXRDXSWALLYFLCYILPQXAPQVLRIGGIFEXVENEPVNVEELAFKFAVXSINRNRXLMPNXXLXYDIQRINLFDSFEASRRACDQLALGVAALFGPSHSSSVSAVQSICNALEVPHIQXRWKHPSVDNKDLFYINLYPDYAAISRAILDLVLYYNWKXVXVVYEDSXGLIRLQELIKAPSRYNIKIKIRQLPSGNKDAKPLLKEMKKGKEFYVIFDCSHEXAAEILKQILFMGMMXEYYHYFFXXLDLFALDLELYRYSGVNMXGFRLLNIDNPHVSSIIEKWSMERLQAPPRPEXGLLDGMMXXEAALMYDAVYMVAIASHRASQLXVSSLQCHRHKPWRLGPRFMNLIKEARWDGLXGHIXFNKXNGLRKDFDLDIISLKEEGXEKAAGEVSKHLYKVWKKIGIWNSNSGLNMXDSNKDKSSNIXDSLANRXLIVXXILEEPYVMYRKSDKPLYGNDRFEGYCLDLLKELSNILGFIYDVKLVPDGKYGAQNDKGEWNGMVKELIDHRADLAVAPLXIXYVREKVIDFSKPFMXLGISILYRKPNGXNPGVFSFLNPLSPDIWMYVLLACLGVSCVLFVIARFXPYEWYNPHPCNPDSDVVENNFXLLNSFWFGVGALMQQGSELMPKALSXRIVGGIWWFFXLIIISSYXANLAAFLXVERMESPIDSADDLAKQXKIEYGAVRDGSXMXFFKKSKISXYEKMWAFMSSRQQXALVRNSDEGIQRVLXXDYALLMESXSIEYVXQRNCNLXQIGGLIDSKGYGVGXPIGSPYRDKIXIAILQLQEEGKLHMMKEKWWRGNGCPEEDNKEASALGVENIGGIFIVLAAGLVLSVFVAIGEFIYKSRKNNDIEQKGKSSRIRFYFRNKVRFHGRKKQSLGVEKCLSFNAIMEELGISLKNQKKIKKKSRXKGKSSFXSILXCHQRRXQRKEXVA

SEQ ID NO: 11502 - protein, 180 aa, Homo sapiens
  MOD_RES (20)..(20): Selenocysteine
  MOD_RES (28)..(29): Selenocysteine
  MOD_RES (31)..(31): Selenocysteine
  MOD_RES (54)..(54): Selenocysteine
  MOD_RES (70)..(70): Selenocysteine
  MOD_RES (85)..(85): Selenocysteine
  MOD_RES (89)..(89): Selenocysteine
  MOD_RES (93)..(93): Selenocysteine
  MOD_RES (98)..(98): Selenocysteine
  MOD_RES (117)..(117): Selenocysteine
  MOD_RES (127)..(127): Selenocysteine
  MOD_RES (138)..(138): Selenocysteine
  MOD_RES (149)..(150): Selenocysteine
CSHEMAAGILKQALAMGMMXEYYHYIFXXLXDAALMYDAVHVVSVAVQQFPQMXVSSLQCNRHKPWRFGXRFMSLIKEAHWEGLXGRIXFNKXNGLRXDFDLDVISLKEEGLEKIGXWDPASGLNMXESQKGKPANIXDSLSNRSLIVXXILEEPYVLFKKSDKPLYGNDRFEGYCIDLL

SEQ ID NO: 11503 - protein, 831 aa, Homo sapiens
  MOD_RES (25)..(25): Selenocysteine
  MOD_RES (31)..(31): Selenocysteine
  MOD_RES (36)..(37): Selenocysteine
  MOD_RES (39)..(39): Selenocysteine
  MOD_RES (42)..(42): Selenocysteine
  MOD_RES (94)..(94): Selenocysteine
  MOD_RES (133)..(133): Selenocysteine
  MOD_RES (135)..(135): Selenocysteine
  MOD_RES (142)..(142): Selenocysteine
  MOD_RES (170)..(170): Selenocysteine
  MOD_RES (211)..(211): Selenocysteine
  MOD_RES (219)..(220): Selenocysteine
  MOD_RES (239)..(239): Selenocysteine
  MOD_RES (246)..(246): Selenocysteine
  MOD_RES (249)..(249): Selenocysteine
  MOD_RES (279)..(280): Selenocysteine
  MOD_RES (303)..(303): Selenocysteine
  MOD_RES (319)..(319): Selenocysteine
  MOD_RES (334)..(334): Selenocysteine
  MOD_RES (338)..(338): Selenocysteine
  MOD_RES (342)..(342): Selenocysteine
  MOD_RES (347)..(347): Selenocysteine
  MOD_RES (366)..(366): Selenocysteine
  MOD_RES (376)..(376): Selenocysteine
  MOD_RES (387)..(387): Selenocysteine
  MOD_RES (398)..(399): Selenocysteine
  MOD_RES (434)..(434): Selenocysteine
  MOD_RES (439)..(439): Selenocysteine
  MOD_RES (482)..(482): Selenocysteine
  MOD_RES (497)..(497): Selenocysteine
  MOD_RES (510)..(510): Selenocysteine
  MOD_RES (569)..(569): Selenocysteine
  MOD_RES (595)..(595): Selenocysteine
  MOD_RES (606)..(606): Selenocysteine
  MOD_RES (614)..(614): Selenocysteine
  MOD_RES (622)..(622): Selenocysteine
  MOD_RES (640)..(640): Selenocysteine
  MOD_RES (652)..(652): Selenocysteine
  MOD_RES (654)..(654): Selenocysteine
  MOD_RES (663)..(663): Selenocysteine
  MOD_RES (692)..(692): Selenocysteine
  MOD_RES (702)..(703): Selenocysteine
  MOD_RES (708)..(708): Selenocysteine
  MOD_RES (715)..(715): Selenocysteine
  MOD_RES (730)..(730): Selenocysteine
  MOD_RES (741)..(741): Selenocysteine
  MOD_RES (830)..(830): Selenocysteine
GGIFEYVESGPMGAEELAFRFAVNXINRNRXLLPNXXLXYDXQKINLYDSFEASKKACDQLSLGVAAIFGPSHSSSANAVQSICNALGVPHIQXRWKHQVSDNKDSFYVSLYPDFSSLSRAILDLVQFFKWKXVXVVYDDSXGLIRLQELIKAPSRYNLRLKIRQLPADXKDAKPLLKEMKRGKEFHVIFDCSHEMAAGILKQALAMGMMXEYYHYIFXXLDLFALDVEPYRYSGVNMXGFRILNXENXQVSSIIEKWSMERLQAPPKPDSGLLDGFMXXDAALMYDAVHVVSVAVQQFPQMXVSSLQCNRHKPWRFGXRFMSLIKEAHWEGLXGRIXFNKXNGLRXDFDLDVISLKEEGLEKIGXWDPASGLNMXESQKGKPANIXDSLSNRSLIVXXILEEPYVLFKKSDKPLYGNDRFEGYCIDLLRELSXILGFXYEIRLVEDGKYGAQDDANGQWNGMVRELIDHKADLAVAPLAIXYVREKVIDFSKPFMXLGISILYRKPNGXNPGVFSFLNPLSPDIWMYILLAYLGVSCVLFVIARFSPYEWYNPHPCNPDSDVVENNFXLLNSFWFGVGALMQQGSELMPKALSXRIVGGIWWFFXLIIISSYXANLAAFLXVERMESPIDSADDLAKQXKIEYGAVEDGAXMXFFKKSKISXYDKMWAFMSSRRQSVLVKSNEEGIQRVLXSDYAFLMESXXIEFVXQRNCNLXQIGGLIDSKGYGVGXPMGSPYRDKIXIAILQLQEEGKLHMMKEKWWRGNGCPEEESKEASALGVQNIGGIFIVLAAGLVLSVFVAVGEFLYKSKKNAQLEKESSIWLVPPYHPDXV

SEQ ID NO: 11504 - protein, 854 aa, Homo sapiens
  MOD_RES (25)..(25): Selenocysteine
  MOD_RES (31)..(31): Selenocysteine
  MOD_RES (36)..(37): Selenocysteine
  MOD_RES (39)..(39): Selenocysteine
  MOD_RES (42)..(42): Selenocysteine
  MOD_RES (94)..(94): Selenocysteine
  MOD_RES (133)..(133): Selenocysteine
  MOD_RES (135)..(135): Selenocysteine
  MOD_RES (142)..(142): Selenocysteine
  MOD_RES (170)..(170): Selenocysteine
  MOD_RES (211)..(211): Selenocysteine
  MOD_RES (219)..(220): Selenocysteine
  MOD_RES (239)..(239): Selenocysteine
  MOD_RES (246)..(246): Selenocysteine
  MOD_RES (249)..(249): Selenocysteine
  MOD_RES (279)..(280): Selenocysteine
  MOD_RES (303)..(303): Selenocysteine
  MOD_RES (319)..(319): Selenocysteine
  MOD_RES (334)..(334): Selenocysteine
  MOD_RES (338)..(338): Selenocysteine
  MOD_RES (342)..(342): Selenocysteine
  MOD_RES (347)..(347): Selenocysteine
  MOD_RES (366)..(366): Selenocysteine
  MOD_RES (376)..(376): Selenocysteine
  MOD_RES (387)..(387): Selenocysteine
  MOD_RES (398)..(399): Selenocysteine
  MOD_RES (434)..(434): Selenocysteine
  MOD_RES (439)..(439): Selenocysteine
  MOD_RES (482)..(482): Selenocysteine
  MOD_RES (497)..(497): Selenocysteine
  MOD_RES (510)..(510): Selenocysteine
  MOD_RES (569)..(569): Selenocysteine
  MOD_RES (595)..(595): Selenocysteine
  MOD_RES (606)..(606): Selenocysteine
  MOD_RES (614)..(614): Selenocysteine
  MOD_RES (622)..(622): Selenocysteine
  MOD_RES (640)..(640): Selenocysteine
  MOD_RES (652)..(652): Selenocysteine
  MOD_RES (654)..(654): Selenocysteine
  MOD_RES (663)..(663): Selenocysteine
  MOD_RES (692)..(692): Selenocysteine
  MOD_RES (702)..(703): Selenocysteine
  MOD_RES (708)..(708): Selenocysteine
  MOD_RES (715)..(715): Selenocysteine
  MOD_RES (730)..(730): Selenocysteine
  MOD_RES (741)..(741): Selenocysteine
  MOD_RES (820)..(820): Selenocysteine
  MOD_RES (839)..(839): Selenocysteine
GGIFEYVESGPMGAEELAFRFAVNXINRNRXLLPNXXLXYDXQKINLYDSFEASKKACDQLSLGVAAIFGPSHSSSANAVQSICNALGVPHIQXRWKHQVSDNKDSFYVSLYPDFSSLSRAILDLVQFFKWKXVXVVYDDSXGLIRLQELIKAPSRYNLRLKIRQLPADXKDAKPLLKEMKRGKEFHVIFDCSHEMAAGILKQALAMGMMXEYYHYIFXXLDLFALDVEPYRYSGVNMXGFRILNXENXQVSSIIEKWSMERLQAPPKPDSGLLDGFMXXDAALMYDAVHVVSVAVQQFPQMXVSSLQCNRHKPWRFGXRFMSLIKEAHWEGLXGRIXFNKXNGLRXDFDLDVISLKEEGLEKIGXWDPASGLNMXESQKGKPANIXDSLSNRSLIVXXILEEPYVLFKKSDKPLYGNDRFEGYCIDLLRELSXILGFXYEIRLVEDGKYGAQDDANGQWNGMVRELIDHKADLAVAPLAIXYVREKVIDFSKPFMXLGISILYRKPNGXNPGVFSFLNPLSPDIWMYILLAYLGVSCVLFVIARFSPYEWYNPHPCNPDSDVVENNFXLLNSFWFGVGALMQQGSELMPKALSXRIVGGIWWFFXLIIISSYXANLAAFLXVERMESPIDSADDLAKQXKIEYGAVEDGAXMXFFKKSKISXYDKMWAFMSSRRQSVLVKSNEEGIQRVLXSDYAFLMESXXIEFVXQRNCNLXQIGGLIDSKGYGVGXPMGSPYRDKIXIAILQLQEEGKLHMMKEKWWRGNGCPEEESKEASALGVQNIGGIFIVLAAGLVLSVFVAVGEFLYKSKKNAQLEKRAKXKLPQDYVFLPILESVSISXVLSSSPSSSSLSSCS

SEQ ID NO: 11505 - protein, 870 aa, Homo sapiens
  MOD_RES (25)..(25): Selenocysteine
  MOD_RES (31)..(31): Selenocysteine
  MOD_RES (36)..(37): Selenocysteine
  MOD_RES (39)..(39): Selenocysteine
  MOD_RES (42)..(42): Selenocysteine
  MOD_RES (94)..(94): Selenocysteine
  MOD_RES (133)..(133): Selenocysteine
  MOD_RES (135)..(135): Selenocysteine
  MOD_RES (142)..(142): Selenocysteine
  MOD_RES (170)..(170): Selenocysteine
  MOD_RES (211)..(211): Selenocysteine
  MOD_RES (219)..(220): Selenocysteine
  MOD_RES (239)..(239): Selenocysteine
  MOD_RES (246)..(246): Selenocysteine
  MOD_RES (249)..(249): Selenocysteine
  MOD_RES (279)..(280): Selenocysteine
  MOD_RES (303)..(303): Selenocysteine
  MOD_RES (319)..(319): Selenocysteine
  MOD_RES (334)..(334): Selenocysteine
  MOD_RES (338)..(338): Selenocysteine
  MOD_RES (342)..(342): Selenocysteine
  MOD_RES (347)..(347): Selenocysteine
  MOD_RES (366)..(366): Selenocysteine
  MOD_RES (376)..(376): Selenocysteine
  MOD_RES (387)..(387): Selenocysteine
  MOD_RES (398)..(399): Selenocysteine
  MOD_RES (434)..(434): Selenocysteine
  MOD_RES (439)..(439): Selenocysteine
  MOD_RES (482)..(482): Selenocysteine
  MOD_RES (497)..(497): Selenocysteine
  MOD_RES (510)..(510): Selenocysteine
  MOD_RES (569)..(569): Selenocysteine
  MOD_RES (595)..(595): Selenocysteine
  MOD_RES (606)..(606): Selenocysteine
  MOD_RES (614)..(614): Selenocysteine
  MOD_RES (622)..(622): Selenocysteine
  MOD_RES (640)..(640): Selenocysteine
  MOD_RES (652)..(652): Selenocysteine
  MOD_RES (654)..(654): Selenocysteine
  MOD_RES (663)..(663): Selenocysteine
  MOD_RES (692)..(692): Selenocysteine
  MOD_RES (702)..(703): Selenocysteine
  MOD_RES (708)..(708): Selenocysteine
  MOD_RES (715)..(715): Selenocysteine
  MOD_RES (730)..(730): Selenocysteine
  MOD_RES (741)..(741): Selenocysteine
  MOD_RES (849)..(849): Selenocysteine
  MOD_RES (857)..(857): Selenocysteine
  MOD_RES (868)..(868): Selenocysteine
GGIFEYVESGPMGAEELAFRFAVNXINRNRXLLPNXXLXYDXQKINLYDSFEASKKACDQLSLGVAAIFGPSHSSSANAVQSICNALGVPHIQXRWKHQVSDNKDSFYVSLYPDFSSLSRAILDLVQFFKWKXVXVVYDDSXGLIRLQELIKAPSRYNLRLKIRQLPADXKDAKPLLKEMKRGKEFHVIFDCSHEMAAGILKQALAMGMMXEYYHYIFXXLDLFALDVEPYRYSGVNMXGFRILNXENXQVSSIIEKWSMERLQAPPKPDSGLLDGFMXXDAALMYDAVHVVSVAVQQFPQMXVSSLQCNRHKPWRFGXRFMSLIKEAHWEGLXGRIXFNKXNGLRXDFDLDVISLKEEGLEKIGXWDPASGLNMXESQKGKPANIXDSLSNRSLIVXXILEEPYVLFKKSDKPLYGNDRFEGYCIDLLRELSXILGFXYEIRLVEDGKYGAQDDANGQWNGMVRELIDHKADLAVAPLAIXYVREKVIDFSKPFMXLGISILYRKPNGXNPGVFSFLNPLSPDIWMYILLAYLGVSCVLFVIARFSPYEWYNPHPCNPDSDVVENNFXLLNSFWFGVGALMQQGSELMPKALSXRIVGGIWWFFXLIIISSYXANLAAFLXVERMESPIDSADDLAKQXKIEYGAVEDGAXMXFFKKSKISXYDKMWAFMSSRRQSVLVKSNEEGIQRVLXSDYAFLMESXXIEFVXQRNCNLXQIGGLIDSKGYGVGXPMGSPYRDKIXIAILQLQEEGKLHMMKEKWWRGNGCPEEESKEASALGVQNIGGIFIVLAAGLVLSVFVAVGEFLYKSKKNAQLEKRSFCSAMVEELRMSLKCQRRLKHKPQAPVIVKXEEVINMHXFNDRRLPGKEXMA

SEQ ID NO: 11506 - protein, 182 aa, Homo sapiens
  MOD_RES (3)..(3): Selenocysteine
  MOD_RES (13)..(13): Selenocysteine
  MOD_RES (24)..(24): Selenocysteine
  MOD_RES (35)..(36): Selenocysteine
  MOD_RES (71)..(71): Selenocysteine
  MOD_RES (76)..(76): Selenocysteine
  MOD_RES (119)..(119): Selenocysteine
  MOD_RES (134)..(134): Selenocysteine
  MOD_RES (147)..(147): Selenocysteine
IGXWDPASGLNMXESQKGKPANIXDSLSNRSLIVXXILEEPYVLFKKSDKPLYGNDRFEGYCIDLLRELSXILGFXYEIRLVEDGKYGAQDDANGQWNGMVRELIDHKADLAVAPLAIXYVREKVIDFSKPFMXLGISILYRKPNGXNPGVFSFLNPLSPDIWMYILLAYLGVSCVLFVIAR

SEQ ID NO: 11507 - protein, 353 aa, Homo sapiens
  MOD_RES (16)..(16): Selenocysteine
  MOD_RES (32)..(33): Selenocysteine
  MOD_RES (63)..(63): Selenocysteine
  MOD_RES (69)..(69): Selenocysteine
  MOD_RES (74)..(75): Selenocysteine
  MOD_RES (77)..(77): Selenocysteine
  MOD_RES (80)..(80): Selenocysteine
  MOD_RES (132)..(132): Selenocysteine
  MOD_RES (171)..(171): Selenocysteine
  MOD_RES (173)..(173): Selenocysteine
  MOD_RES (180)..(180): Selenocysteine
  MOD_RES (208)..(208): Selenocysteine
  MOD_RES (249)..(249): Selenocysteine
  MOD_RES (257)..(258): Selenocysteine
  MOD_RES (277)..(277): Selenocysteine
  MOD_RES (284)..(284): Selenocysteine
  MOD_RES (287)..(287): Selenocysteine
  MOD_RES (317)..(317): Selenocysteine
  MOD_RES (336)..(336): Selenocysteine
  MOD_RES (338)..(338): Selenocysteine
MKIIFPILSNPVFRRXVKLLLCLLWIGYSQGXXHVLRFGGIFEYVESGPMGAEELAFRFAVNXINRNRXLLPNXXLXYDXQKINLYDSFEASKKACDQLSLGVAAIFGPSHSSSANAVQSICNALGVPHIQXRWKHQVSDNKDSFYVSLYPDFSSLSRAILDLVQFFKWKXVXVVYDDSXGLIRLQELIKAPSRYNLRLKIRQLPADXKDAKPLLKEMKRGKEFHVIFDCSHEMAAGILKQALAMGMMXEYYHYIFXXLDLFALDVEPYRYSGVNMXGFRILNXENXQVSSIIEKWSMERLQAPPKPDSGLLDGFMXMEFHSCCPGWSAMARSQLXAXSASWVQAILLPQPPE

SEQ ID NO: 11508 - protein, 869 aa, Homo sapiens
  MOD_RES (16)..(16): Selenocysteine
  MOD_RES (32)..(33): Selenocysteine
  MOD_RES (63)..(63): Selenocysteine
  MOD_RES (69)..(69): Selenocysteine
  MOD_RES (74)..(75): Selenocysteine
  MOD_RES (77)..(77): Selenocysteine
  MOD_RES (80)..(80): Selenocysteine
  MOD_RES (132)..(132): Selenocysteine
  MOD_RES (171)..(171): Selenocysteine
  MOD_RES (173)..(173): Selenocysteine
  MOD_RES (180)..(180): Selenocysteine
  MOD_RES (208)..(208): Selenocysteine
  MOD_RES (249)..(249): Selenocysteine
  MOD_RES (257)..(258): Selenocysteine
  MOD_RES (277)..(277): Selenocysteine
  MOD_RES (284)..(284): Selenocysteine
  MOD_RES (287)..(287): Selenocysteine
  MOD_RES (317)..(318): Selenocysteine
  MOD_RES (341)..(341): Selenocysteine
  MOD_RES (357)..(357): Selenocysteine
  MOD_RES (372)..(372): Selenocysteine
  MOD_RES (376)..(376): Selenocysteine
  MOD_RES (380)..(380): Selenocysteine
  MOD_RES (385)..(385): Selenocysteine
  MOD_RES (404)..(404): Selenocysteine
  MOD_RES (414)..(414): Selenocysteine
  MOD_RES (425)..(425): Selenocysteine
  MOD_RES (436)..(437): Selenocysteine
  MOD_RES (472)..(472): Selenocysteine
  MOD_RES (477)..(477): Selenocysteine
  MOD_RES (520)..(520): Selenocysteine
  MOD_RES (535)..(535): Selenocysteine
  MOD_RES (548)..(548): Selenocysteine
  MOD_RES (607)..(607): Selenocysteine
  MOD_RES (633)..(633): Selenocysteine
  MOD_RES (644)..(644): Selenocysteine
  MOD_RES (652)..(652): Selenocysteine
  MOD_RES (660)..(660): Selenocysteine
  MOD_RES (678)..(678): Selenocysteine
  MOD_RES (690)..(690): Selenocysteine
  MOD_RES (692)..(692): Selenocysteine
  MOD_RES (701)..(701): Selenocysteine
  MOD_RES (730)..(730): Selenocysteine
  MOD_RES (740)..(741): Selenocysteine
  MOD_RES (746)..(746): Selenocysteine
  MOD_RES (753)..(753): Selenocysteine
  MOD_RES (768)..(768): Selenocysteine
  MOD_RES (779)..(779): Selenocysteine
  MOD_RES (868)..(868): Selenocysteine
MKIIFPILSNPVFRRXVKLLLCLLWIGYSQGXXHVLRFGGIFEYVESGPMGAEELAFRFAVNXINRNRXLLPNXXLXYDXQKINLYDSFEASKKACDQLSLGVAAIFGPSHSSSANAVQSICNALGVPHIQXRWKHQVSDNKDSFYVSLYPDFSSLSRAILDLVQFFKWKXVXVVYDDSXGLIRLQELIKAPSRYNLRLKIRQLPADXKDAKPLLKEMKRGKEFHVIFDCSHEMAAGILKQALAMGMMXEYYHYIFXXLDLFALDVEPYRYSGVNMXGFRILNXENXQVSSIIEKWSMERLQAPPKPDSGLLDGFMXXDAALMYDAVHVVSVAVQQFPQMXVSSLQCNRHKPWRFGXRFMSLIKEAHWEGLXGRIXFNKXNGLRXDFDLDVISLKEEGLEKIGXWDPASGLNMXESQKGKPANIXDSLSNRSLIVXXILEEPYVLFKKSDKPLYGNDRFEGYCIDLLRELSXILGFXYEIRLVEDGKYGAQDDANGQWNGMVRELIDHKADLAVAPLAIXYVREKVIDFSKPFMXLGISILYRKPNGXNPGVFSFLNPLSPDIWMYILLAYLGVSCVLFVIARFSPYEWYNPHPCNPDSDVVENNFXLLNSFWFGVGALMQQGSELMPKALSXRIVGGIWWFFXLIIISSYXANLAAFLXVERMESPIDSADDLAKQXKIEYGAVEDGAXMXFFKKSKISXYDKMWAFMSSRRQSVLVKSNEEGIQRVLXSDYAFLMESXXIEFVXQRNCNLXQIGGLIDSKGYGVGXPMGSPYRDKIXIAILQLQEEGKLHMMKEKWWRGNGCPEEESKEASALGVQNIGGIFIVLAAGLVLSVFVAVGEFLYKSKKNAQLEKESSIWLVPPYHPDXV

SEQ ID NO: 11509 - protein, 892 aa, Homo sapiens
  MOD_RES (16)..(16): Selenocysteine
  MOD_RES (32)..(33): Selenocysteine
  MOD_RES (63)..(63): Selenocysteine
  MOD_RES (69)..(69): Selenocysteine
  MOD_RES (74)..(75): Selenocysteine
  MOD_RES (77)..(77): Selenocysteine
  MOD_RES (80)..(80): Selenocysteine
  MOD_RES (132)..(132): Selenocysteine
  MOD_RES (171)..(171): Selenocysteine
  MOD_RES (173)..(173): Selenocysteine
  MOD_RES (180)..(180): Selenocysteine
  MOD_RES (208)..(208): Selenocysteine
  MOD_RES (249)..(249): Selenocysteine
  MOD_RES (257)..(258): Selenocysteine
  MOD_RES (277)..(277): Selenocysteine
  MOD_RES (284)..(284): Selenocysteine
  MOD_RES (287)..(287): Selenocysteine
  MOD_RES (317)..(318): Selenocysteine
  MOD_RES (341)..(341): Selenocysteine
  MOD_RES (357)..(357): Selenocysteine
  MOD_RES (372)..(372): Selenocysteine
  MOD_RES (376)..(376): Selenocysteine
  MOD_RES (380)..(380): Selenocysteine
  MOD_RES (385)..(385): Selenocysteine
  MOD_RES (404)..(404): Selenocysteine
  MOD_RES (414)..(414): Selenocysteine
  MOD_RES (425)..(425): Selenocysteine
  MOD_RES (436)..(437): Selenocysteine
  MOD_RES (472)..(472): Selenocysteine
  MOD_RES (477)..(477): Selenocysteine
  MOD_RES (520)..(520): Selenocysteine
  MOD_RES (535)..(535): Selenocysteine
  MOD_RES (548)..(548): Selenocysteine
  MOD_RES (607)..(607): Selenocysteine
  MOD_RES (633)..(633): Selenocysteine
  MOD_RES (644)..(644): Selenocysteine
  MOD_RES (652)..(652): Selenocysteine
  MOD_RES (660)..(660): Selenocysteine
  MOD_RES (678)..(678): Selenocysteine
  MOD_RES (690)..(690): Selenocysteine
  MOD_RES (692)..(692): Selenocysteine
  MOD_RES (701)..(701): Selenocysteine
  MOD_RES (730)..(730): Selenocysteine
  MOD_RES (740)..(741): Selenocysteine
  MOD_RES (746)..(746): Selenocysteine
  MOD_RES (753)..(753): Selenocysteine
  MOD_RES (768)..(768): Selenocysteine
  MOD_RES (779)..(779): Selenocysteine
  MOD_RES (858)..(858): Selenocysteine
  MOD_RES (877)..(877): Selenocysteine
MKIIFPILSNPVFRRXVKLLLCLLWIGYSQGXXHVLRFGGIFEYVESGPMGAEELAFRFAVNXINRNRXLLPNXXLXYDXQKINLYDSFEASKKACDQLSLGVAAIFGPSHSSSANAVQSICNALGVPHIQXRWKHQVSDNKDSFYVSLYPDFSSLSRAILDLVQFFKWKXVXVVYDDSXGLIRLQELIKAPSRYNLRLKIRQLPADXKDAKPLLKEMKRGKEFHVIFDCSHEMAAGILKQALAMGMMXEYYHYIFXXLDLFALDVEPYRYSGVNMXGFRILNXENXQVSSIIEKWSMERLQAPPKPDSGLLDGFMXXDAALMYDAVHVVSVAVQQFPQMXVSSLQCNRHKPWRFGXRFMSLIKEAHWEGLXGRIXFNKXNGLRXDFDLDVISLKEEGLEKIGXWDPASGLNMXESQKGKPANIXDSLSNRSLIVXXILEEPYVLFKKSDKPLYGNDRFEGYCIDLLRELSXILGFXYEIRLVEDGKYGAQDDANGQWNGMVRELIDHKADLAVAPLAIXYVREKVIDFSKPFMXLGISILYRKPNGXNPGVFSFLNPLSPDIWMYILLAYLGVSCVLFVIARFSPYEWYNPHPCNPDSDVVENNFXLLNSFWFGVGALMQQGSELMPKALSXRIVGGIWWFFXLIIISSYXANLAAFLXVERMESPIDSADDLAKQXKIEYGAVEDGAXMXFFKKSKISXYDKMWAFMSSRRQSVLVKSNEEGIQRVLXSDYAFLMESXXIEFVXQRNCNLXQIGGLIDSKGYGVGXPMGSPYRDKIXIAILQLQEEGKLHMMKEKWWRGNGCPEEESKEASALGVQNIGGIFIVLAAGLVLSVFVAVGEFLYKSKKNAQLEKRAKXKLPQDYVFLPILESVSISXVLSSSPSSSSLSSCS

SEQ ID NO: 11510 - protein, 908 aa, Homo sapiens
  MOD_RES (16)..(16): Selenocysteine
  MOD_RES (32)..(33): Selenocysteine
  MOD_RES (63)..(63): Selenocysteine
  MOD_RES (69)..(69): Selenocysteine
  MOD_RES (74)..(75): Selenocysteine
  MOD_RES (77)..(77): Selenocysteine
  MOD_RES (80)..(80): Selenocysteine
  MOD_RES (132)..(132): Selenocysteine
  MOD_RES (171)..(171): Selenocysteine
  MOD_RES (173)..(173): Selenocysteine
  MOD_RES (180)..(180): Selenocysteine
  MOD_RES (208)..(208): Selenocysteine
  MOD_RES (249)..(249): Selenocysteine
  MOD_RES (257)..(258): Selenocysteine
  MOD_RES (277)..(277): Selenocysteine
  MOD_RES (284)..(284): Selenocysteine
  MOD_RES (287)..(287): Selenocysteine
  MOD_RES (317)..(318): Selenocysteine
  MOD_RES (341)..(341): Selenocysteine
  MOD_RES (357)..(357): Selenocysteine
  MOD_RES (372)..(372): Selenocysteine
  MOD_RES (376)..(376): Selenocysteine
  MOD_RES (380)..(380): Selenocysteine
  MOD_RES (385)..(385): Selenocysteine
  MOD_RES (404)..(404): Selenocysteine
  MOD_RES (414)..(414): Selenocysteine
  MOD_RES (425)..(425): Selenocysteine
  MOD_RES (436)..(437): Selenocysteine
  MOD_RES (472)..(472): Selenocysteine
  MOD_RES (477)..(477): Selenocysteine
  MOD_RES (520)..(520): Selenocysteine
  MOD_RES (535)..(535): Selenocysteine
  MOD_RES (548)..(548): Selenocysteine
  MOD_RES (607)..(607): Selenocysteine
  MOD_RES (633)..(633): Selenocysteine
  MOD_RES (644)..(644): Selenocysteine
  MOD_RES (652)..(652): Selenocysteine
  MOD_RES (660)..(660): Selenocysteine
  MOD_RES (678)..(678): Selenocysteine
  MOD_RES (690)..(690): Selenocysteine
  MOD_RES (692)..(692): Selenocysteine
  MOD_RES (701)..(701): Selenocysteine
  MOD_RES (730)..(730): Selenocysteine
  MOD_RES (740)..(741): Selenocysteine
  MOD_RES (746)..(746): Selenocysteine
  MOD_RES (753)..(753): Selenocysteine
  MOD_RES (768)..(768): Selenocysteine
  MOD_RES (779)..(779): Selenocysteine
  MOD_RES (887)..(887): Selenocysteine
  MOD_RES (895)..(895): Selenocysteine
  MOD_RES (906)..(906): Selenocysteine
MKIIFPILSNPVFRRXVKLLLCLLWIGYSQGXXHVLRFGGIFEYVESGPMGAEELAFRFAVNXINRNRXLLPNXXLXYDXQKINLYDSFEASKKACDQLSLGVAAIFGPSHSSSANAVQSICNALGVPHIQXRWKHQVSDNKDSFYVSLYPDFSSLSRAILDLVQFFKWKXVXVVYDDSXGLIRLQELIKAPSRYNLRLKIRQLPADXKDAKPLLKEMKRGKEFHVIFDCSHEMAAGILKQALAMGMMXEYYHYIFXXLDLFALDVEPYRYSGVNMXGFRILNXENXQVSSIIEKWSMERLQAPPKPDSGLLDGFMXXDAALMYDAVHVVSVAVQQFPQMXVSSLQCNRHKPWRFGXRFMSLIKEAHWEGLXGRIXFNKXNGLRXDFDLDVISLKEEGLEKIGXWDPASGLNMXESQKGKPANIXDSLSNRSLIVXXILEEPYVLFKKSDKPLYGNDRFEGYCIDLLRELSXILGFXYEIRLVEDGKYGAQDDANGQWNGMVRELIDHKADLAVAPLAIXYVREKVIDFSKPFMXLGISILYRKPNGXNPGVFSFLNPLSPDIWMYILLAYLGVSCVLFVIARFSPYEWYNPHPCNPDSDVVENNFXLLNSFWFGVGALMQQGSELMPKALSXRIVGGIWWFFXLIIISSYXANLAAFLXVERMESPIDSADDLAKQXKIEYGAVEDGAXMXFFKKSKISXYDKMWAFMSSRRQSVLVKSNEEGIQRVLXSDYAFLMESXXIEFVXQRNCNLXQIGGLIDSKGYGVGXPMGSPYRDKIXIAILQLQEEGKLHMMKEKWWRGNGCPEEESKEASALGVQNIGGIFIVLAAGLVLSVFVAVGEFLYKSKKNAQLEKRSFCSAMVEELRMSLKCQRRLKHKPQAPVIVKXEEVINMHXFNDRRLPGKEXMA

SEQ ID NO: 11511 - protein, 872 aa, Homo sapiens
  MOD_RES (2)..(2): Selenocysteine
  MOD_RES (72)..(72): Selenocysteine
  MOD_RES (77)..(78): Selenocysteine
  MOD_RES (80)..(80): Selenocysteine
  MOD_RES (95)..(95): Selenocysteine
  MOD_RES (118)..(118): Selenocysteine
  MOD_RES (147)..(147): Selenocysteine
  MOD_RES (176)..(176): Selenocysteine
  MOD_RES (183)..(183): Selenocysteine
  MOD_RES (236)..(236): Selenocysteine
  MOD_RES (252)..(252): Selenocysteine
  MOD_RES (260)..(261): Selenocysteine
  MOD_RES (280)..(280): Selenocysteine
  MOD_RES (321)..(321): Selenocysteine
  MOD_RES (344)..(344): Selenocysteine
  MOD_RES (375)..(375): Selenocysteine
  MOD_RES (383)..(383): Selenocysteine
  MOD_RES (388)..(388): Selenocysteine
  MOD_RES (417)..(417): Selenocysteine
  MOD_RES (428)..(428): Selenocysteine
  MOD_RES (432)..(432): Selenocysteine
  MOD_RES (439)..(440): Selenocysteine
  MOD_RES (455)..(455): Selenocysteine
  MOD_RES (520)..(520): Selenocysteine
  MOD_RES (522)..(522): Selenocysteine
  MOD_RES (537)..(537): Selenocysteine
  MOD_RES (550)..(550): Selenocysteine
  MOD_RES (609)..(609): Selenocysteine
  MOD_RES (635)..(635): Selenocysteine
  MOD_RES (646)..(646): Selenocysteine
  MOD_RES (654)..(654): Selenocysteine
  MOD_RES (662)..(662): Selenocysteine
  MOD_RES (680)..(680): Selenocysteine
  MOD_RES (692)..(692): Selenocysteine
  MOD_RES (694)..(694): Selenocysteine
  MOD_RES (703)..(703): Selenocysteine
  MOD_RES (731)..(731): Selenocysteine
  MOD_RES (741)..(742): Selenocysteine
  MOD_RES (747)..(747): Selenocysteine
  MOD_RES (754)..(754): Selenocysteine
  MOD_RES (769)..(769): Selenocysteine
  MOD_RES (780)..(780): Selenocysteine
  MOD_RES (850)..(850): Selenocysteine
MXAPWRRLRSLVWEYWAGLLVCAFWIPDSRGMPHVIRIGGIFEYADGPNAQVMNAEEHAFRFSANIINRNRXLLPNXXLXYDIQRIHFHDSFEAXKKACDQLALGVVAIFGPSQGSCXNAVQSICNALEVPHIQLRWKHHPLDNKDXFYVNLYPDYASLSHAILDLVQYLKWRSAXVVYDDSXGLIRLQELIMAPSRYNIRLKIRQLPIDSDDSRPLLKEMKRGREFRIIFDCSHXMAAQILKQAMAMGMMXEYYHFIFXXLDLYALDLEPYRYSGVNLXGFRILNVDNPHVSAIVEKWSMERLQAAPRSESGLLDGVMMXDAALLYDAVHIVSVCYQRAPQMXVNSLQCHRHKAWRFGGRFMNFIKEAQWEGLXGRIVFNKXSGLRXDFDLDIISLKEDGLEKVGVWSPADGLNIXEVAKGRGPNVXDSLXNRSLIVXXVLEEPFVMFRKSDRXLYGNDRFEGYCIDLLKELAHILGFSYEIRLVEDGKYGAQDDKGQWNGMVKELIDHKADLAVAPLXIXHVREKAIDFSKPFMXLGVSILYRKPNGXNPSVFSFLNPLSPDIWMYVLLAYLGVSCVLFVIARFSPYEWYDAHPCNPGSEVVENNFXLLNSFWFGMGSLMQQGSELMPKALSXRIIGGIWWFFXLIIISSYXANLAAFLXVERMESPIDSADDLAKQXKIEYGAVKDGAXMXFFKKSKISXFEKMWAFMSSKPSALVKNNEEGIQRALXADYALLMESXXIEYVXQRNCNLXQIGGLIDSKGYGIGXPMGSPYRDKIXIAILQLQEEDKLHIMKEKWWRGSGCPEEENKEASALGIQKIGGIFIVLAAGLVLSVLVAVGEFVYKLRKXAEREQVSLRAWSLHRMGNGDSR

SEQ ID NO: 11512 - protein, 919 aa, Homo sapiens
  MOD_RES (2)..(2): Selenocysteine
  MOD_RES (72)..(72): Selenocysteine
  MOD_RES (77)..(78): Selenocysteine
  MOD_RES (80)..(80): Selenocysteine
  MOD_RES (95)..(95): Selenocysteine
  MOD_RES (118)..(118): Selenocysteine
  MOD_RES (147)..(147): Selenocysteine
  MOD_RES (176)..(176): Selenocysteine
  MOD_RES (183)..(183): Selenocysteine
  MOD_RES (236)..(236): Selenocysteine
  MOD_RES (252)..(252): Selenocysteine
  MOD_RES (260)..(261): Selenocysteine
  MOD_RES (280)..(280): Selenocysteine
  MOD_RES (321)..(321): Selenocysteine
  MOD_RES (344)..(344): Selenocysteine
  MOD_RES (375)..(375): Selenocysteine
  MOD_RES (383)..(383): Selenocysteine
  MOD_RES (388)..(388): Selenocysteine
  MOD_RES (417)..(417): Selenocysteine
  MOD_RES (428)..(428): Selenocysteine
  MOD_RES (432)..(432): Selenocysteine
  MOD_RES (439)..(440): Selenocysteine
  MOD_RES (455)..(455): Selenocysteine
  MOD_RES (520)..(520): Selenocysteine
  MOD_RES (522)..(522): Selenocysteine
  MOD_RES (537)..(537): Selenocysteine
  MOD_RES (550)..(550): Selenocysteine
  MOD_RES (609)..(609): Selenocysteine
  MOD_RES (635)..(635): Selenocysteine
  MOD_RES (646)..(646): Selenocysteine
  MOD_RES (654)..(654): Selenocysteine
  MOD_RES (662)..(662): Selenocysteine
  MOD_RES (680)..(680): Selenocysteine
  MOD_RES (692)..(692): Selenocysteine
  MOD_RES (694)..(694): Selenocysteine
  MOD_RES (703)..(703): Selenocysteine
  MOD_RES (731)..(731): Selenocysteine
  MOD_RES (741)..(742): Selenocysteine
  MOD_RES (747)..(747): Selenocysteine
  MOD_RES (754)..(754): Selenocysteine
  MOD_RES (769)..(769): Selenocysteine
  MOD_RES (780)..(780): Selenocysteine
  MOD_RES (850)..(850): Selenocysteine
  MOD_RES (861)..(861): Selenocysteine
  MOD_RES (871)..(871): Selenocysteine
  MOD_RES (888)..(888): Selenocysteine
  MOD_RES (896)..(896): Selenocysteine
  MOD_RES (912)..(912): Selenocysteine
MXAPWRRLRSLVWEYWAGLLVCAFWIPDSRGMPHVIRIGGIFEYADGPNAQVMNAEEHAFRFSANIINRNRXLLPNXXLXYDIQRIHFHDSFEAXKKACDQLALGVVAIFGPSQGSCXNAVQSICNALEVPHIQLRWKHHPLDNKDXFYVNLYPDYASLSHAILDLVQYLKWRSAXVVYDDSXGLIRLQELIMAPSRYNIRLKIRQLPIDSDDSRPLLKEMKRGREFRIIFDCSHXMAAQILKQAMAMGMMXEYYHFIFXXLDLYALDLEPYRYSGVNLXGFRILNVDNPHVSAIVEKWSMERLQAAPRSESGLLDGVMMXDAALLYDAVHIVSVCYQRAPQMXVNSLQCHRHKAWRFGGRFMNFIKEAQWEGLXGRIVFNKXSGLRXDFDLDIISLKEDGLEKVGVWSPADGLNIXEVAKGRGPNVXDSLXNRSLIVXXVLEEPFVMFRKSDRXLYGNDRFEGYCIDLLKELAHILGFSYEIRLVEDGKYGAQDDKGQWNGMVKELIDHKADLAVAPLXIXHVREKAIDFSKPFMXLGVSILYRKPNGXNPSVFSFLNPLSPDIWMYVLLAYLGVSCVLFVIARFSPYEWYDAHPCNPGSEVVENNFXLLNSFWFGMGSLMQQGSELMPKALSXRIIGGIWWFFXLIIISSYXANLAAFLXVERMESPIDSADDLAKQXKIEYGAVKDGAXMXFFKKSKISXFEKMWAFMSSKPSALVKNNEEGIQRALXADYALLMESXXIEYVXQRNCNLXQIGGLIDSKGYGIGXPMGSPYRDKIXIAILQLQEEDKLHIMKEKWWRGSGCPEEENKEASALGIQKIGGIFIVLAAGLVLSVLVAVGEFVYKLRKXAEREQRSFCSXVADEIRFSLXCQRRVKHKPQPPMMVKXDAVINMHXFNDRRLPGKDSMACSXSLAPVFP

SEQ ID NO: 11513 - protein, 956 aa, Homo sapiens
  MOD_RES (46)..(46): Selenocysteine
  MOD_RES (79)..(79): Selenocysteine
  MOD_RES (82)..(82): Selenocysteine
  MOD_RES (135)..(136): Selenocysteine
  MOD_RES (144)..(144): Selenocysteine
  MOD_RES (160)..(161): Selenocysteine
  MOD_RES (188)..(188): Selenocysteine
  MOD_RES (197)..(197): Selenocysteine
  MOD_RES (201)..(201): Selenocysteine
  MOD_RES (212)..(212): Selenocysteine
  MOD_RES (214)..(214): Selenocysteine
  MOD_RES (226)..(226): Selenocysteine
  MOD_RES (242)..(242): Selenocysteine
  MOD_RES (246)..(246): Selenocysteine
  MOD_RES (299)..(299): Selenocysteine
  MOD_RES (317)..(317): Selenocysteine
  MOD_RES (345)..(345): Selenocysteine
  MOD_RES (360)..(360): Selenocysteine
  MOD_RES (382)..(382): Selenocysteine
  MOD_RES (412)..(412): Selenocysteine
  MOD_RES (416)..(417): Selenocysteine
  MOD_RES (421)..(422): Selenocysteine
  MOD_RES (481)..(481): Selenocysteine
  MOD_RES (483)..(483): Selenocysteine
  MOD_RES (502)..(502): Selenocysteine
  MOD_RES (504)..(504): Selenocysteine
  MOD_RES (519)..(519): Selenocysteine
  MOD_RES (569)..(569): Selenocysteine
  MOD_RES (610)..(610): Selenocysteine
  MOD_RES (618)..(618): Selenocysteine
  MOD_RES (629)..(629): Selenocysteine
  MOD_RES (637)..(637): Selenocysteine
  MOD_RES (645)..(645): Selenocysteine
  MOD_RES (663)..(663): Selenocysteine
  MOD_RES (669)..(669): Selenocysteine
  MOD_RES (677)..(677): Selenocysteine
  MOD_RES (686)..(686): Selenocysteine
  MOD_RES (706)..(706): Selenocysteine
  MOD_RES (725)..(725): Selenocysteine
  MOD_RES (738)..(738): Selenocysteine
  MOD_RES (746)..(746): Selenocysteine
  MOD_RES (830)..(830): Selenocysteine
  MOD_RES (837)..(837): Selenocysteine
  MOD_RES (847)..(847): Selenocysteine
  MOD_RES (884)..(884): Selenocysteine
  MOD_RES (886)..(886): Selenocysteine
  MOD_RES (917)..(917): Selenocysteine
  MOD_RES (949)..(950): Selenocysteine
MPRVSAPLVLLPAWLVMVACSPHSLRIAAILDDPMECSRGERLSIXLAKNRINRAPERLGKAKVEVDIFELLRDSEYEXAEXMCQILPKGVVAVLGPSSSPASSSIISNICGEKEVPHFKVAPEEFVKFQFQRFXXLNLHPSNXDISVAVAGILNFFNCXXACLICAKAECLLNLEKLLRQFLISKDXLSVRMLDDXRDPXPLLKEIRDDKXAXIIIHANASMSHXILLKAAELGMVSAYYXYIFXNLEFSLQRMDSLVDDRVNILGFSIFNQSHAFFQEFAQSLNQSWQENCDHVPFXGPALSSALLFDAVYAVVXAVQELNRSQEIGVKPLSCGSAQIWQHGXSLMNYLRMVELEGLXGHIEFNSKGQRSNYALKILQFXRNGFRQIGQWHVAEGLSMDSHLYASNISDXLFNXXLVVXXILENPYLMLKGNHQEMEGNDRYEGFCVDMLKELAEILRFNYKIRLVGDGVYGVPEANGXWXGMVGELIARKADLAVAGLXIXAEREKVIDFSKPFMXLGISILYRVHMGRKPGYFSFLDPFSPGVWLFMLLAYLAVSCVLFLVARLXPYEWYSPHPCAQGRCNLLVNQYSLGNSLWFPVGGFMQQGSXIAPRALSXRCVSGVWWAFXLIIISSYXANLAAFLXVQRMDVPIESVDDLADQXAIEYGXIHGGSSMXFFQNSRYQXYQRMWNYMYSKQPSVFVKSXEEGIARVLNSNYAFLLESXMNEYYRQRNCNLXQIGGLLDXKGYGIGMPVGSVFRDEFDLAILQLQENNRLEILKRKWWEGGKCPKEEDHRAKGLGMENIGGIFVVLICGLIVAIFMAMLEFLWXLRHSEAXEVSVCQEMVXELRSIILCQDSIHPRRRRAAVPPPRPPIPEERRPRGXAXLSNGKLCGAGEPDQLAQRLAQEAALVARGCXHIRVCPECRRFQGLRARPSPARSEESLEWEKXXNSSEPE

SEQ ID NO: 11514 - protein, 110 aa, Homo sapiens
  MOD_RES (34)..(34): Selenocysteine
  MOD_RES (78)..(79): Selenocysteine
  MOD_RES (81)..(81): Selenocysteine
  MOD_RES (108)..(108): Selenocysteine
MPAELLLLLIVAFASPSCQVLSSLRMAAILDDQXVCGRGERLALALAREQINGIIEVPAKARVEVDIFELQRDSQYEXXDXIAMARRMEFCDSPRPASGASQSWEPWXEG

SEQ ID NO: 11515 - protein, 980 aa, Homo sapiens
  MOD_RES (34)..(34): Selenocysteine
  MOD_RES (78)..(79): Selenocysteine
  MOD_RES (81)..(81): Selenocysteine
  MOD_RES (105)..(105): Selenocysteine
  MOD_RES (125)..(125): Selenocysteine
  MOD_RES (187)..(187): Selenocysteine
  MOD_RES (200)..(200): Selenocysteine
  MOD_RES (213)..(213): Selenocysteine
  MOD_RES (236)..(236): Selenocysteine
  MOD_RES (245)..(246): Selenocysteine
  MOD_RES (272)..(272): Selenocysteine
  MOD_RES (296)..(296): Selenocysteine
  MOD_RES (335)..(335): Selenocysteine
  MOD_RES (344)..(344): Selenocysteine
  MOD_RES (359)..(359): Selenocysteine
  MOD_RES (371)..(371): Selenocysteine
  MOD_RES (374)..(374): Selenocysteine
  MOD_RES (396)..(396): Selenocysteine
  MOD_RES (402)..(403): Selenocysteine
  MOD_RES (411)..(411): Selenocysteine
  MOD_RES (416)..(416): Selenocysteine
  MOD_RES (420)..(421): Selenocysteine
  MOD_RES (482)..(482): Selenocysteine
  MOD_RES (501)..(501): Selenocysteine
  MOD_RES (503)..(503): Selenocysteine
  MOD_RES (518)..(518): Selenocysteine
  MOD_RES (591)..(591): Selenocysteine
  MOD_RES (617)..(617): Selenocysteine
  MOD_RES (628)..(628): Selenocysteine
  MOD_RES (636)..(636): Selenocysteine
  MOD_RES (644)..(644): Selenocysteine
  MOD_RES (662)..(662): Selenocysteine
  MOD_RES (668)..(668): Selenocysteine
  MOD_RES (674)..(674): Selenocysteine
  MOD_RES (676)..(676): Selenocysteine
  MOD_RES (685)..(685): Selenocysteine
  MOD_RES (705)..(705): Selenocysteine
  MOD_RES (724)..(724): Selenocysteine
  MOD_RES (737)..(737): Selenocysteine
  MOD_RES (745)..(745): Selenocysteine
  MOD_RES (763)..(763): Selenocysteine
  MOD_RES (830)..(830): Selenocysteine
  MOD_RES (858)..(858): Selenocysteine
  MOD_RES (925)..(925): Selenocysteine
  MOD_RES (928)..(928): Selenocysteine
  MOD_RES (961)..(961): Selenocysteine
MPAELLLLLIVAFASPSCQVLSSLRMAAILDDQXVCGRGERLALALAREQINGIIEVPAKARVEVDIFELQRDSQYEXXDXMCQILPKGVVSVLGPSSSPASASXVSHICGEKEIPHIKVGPEEXPRLQYLRFASVSLYPSNEDVSLAVSRILKSFNYPSASLICAKAECLLRLEELVRGFLISKEXLSVRMLDDSRDPXPLLKEIRDDKVSXIIIDANASISHLILRKASELGMXSAFYKYILXXMDFPILHLDGIVEDSSNILGFSMFNXSHPFYPEFVRSLNMSWRENCEASXYLGPALSAALMFDAVHVVVSAVRELNRSQEIGVKPLACXSANIWPHGXSLMNYLRMVEYDGLXGRVEFNSKGQRXNYXLRILEKSRQGHREIGVWYSNRXLAMNAXXLDINLSQXLANKXLVVXXILENPYVMRRPNFQALSGNERFEGFCVDMLRELAELLRFRYRLRLVEDGLYGAPEPNGSWXGMVGELINRKADLAVAAFXIXAEREKVIDFSKPFMXLGISILYRVHMGRKPGYFSFLDPFSPAVWLFMLLAYLAVSCVLFLAARLSPYEWYNPHPCLRARPHILENQYXLGNSLWFPVGGFMQQGSEIMPRALSXRCVSGVWWAFXLIIISSYXANLAAFLXVQRMEVPVESADDLADQXNIEYGXIHAGSXMXFFQNSRYQXYQRMWNYMQSKQPSVFVKSXEEGIARVLNSRYAFLLESXMNEYHRRLNCNLXQIGGLLDXKGYGIGMPLGSPFRDEIXLAILQLQENNRLEILKRKWWEGGRCPKEEDHRAKGLGMENIGGIFIVLICGLIIAVFVAVMEFIWSXRRSAESEEVSVCQEMLQELRHAVSCRKXSRSRRRRRPGGPSRALLSLRAVREMRLSNGKLYSAGAGGDAGSAHGGPQRLLDDPGPPSGARPAAPXPCXHVRVCQECRRIQALRASGAGAPPRGLGVPAEAXSPPRPRPGPAGPRELAEHE

SEQ ID NO: 11516 - protein, 981 aa, Homo sapiens
  MOD_RES (34)..(34): Selenocysteine
  MOD_RES (78)..(79): Selenocysteine
  MOD_RES (81)..(81): Selenocysteine
  MOD_RES (105)..(105): Selenocysteine
  MOD_RES (125)..(125): Selenocysteine
  MOD_RES (187)..(187): Selenocysteine
  MOD_RES (200)..(200): Selenocysteine
  MOD_RES (213)..(213): Selenocysteine
  MOD_RES (236)..(236): Selenocysteine
  MOD_RES (245)..(246): Selenocysteine
  MOD_RES (272)..(272): Selenocysteine
  MOD_RES (296)..(296): Selenocysteine
  MOD_RES (335)..(335): Selenocysteine
  MOD_RES (344)..(344): Selenocysteine
  MOD_RES (359)..(359): Selenocysteine
  MOD_RES (371)..(371): Selenocysteine
  MOD_RES (374)..(374): Selenocysteine
  MOD_RES (396)..(396): Selenocysteine
  MOD_RES (402)..(403): Selenocysteine
  MOD_RES (411)..(411): Selenocysteine
  MOD_RES (416)..(416): Selenocysteine
  MOD_RES (420)..(421): Selenocysteine
  MOD_RES (482)..(482): Selenocysteine
  MOD_RES (501)..(501): Selenocysteine
  MOD_RES (503)..(503): Selenocysteine
  MOD_RES (518)..(518): Selenocysteine
  MOD_RES (591)..(591): Selenocysteine
  MOD_RES (617)..(617): Selenocysteine
  MOD_RES (628)..(628): Selenocysteine
  MOD_RES (636)..(636): Selenocysteine
  MOD_RES (644)..(644): Selenocysteine
  MOD_RES (662)..(662): Selenocysteine
  MOD_RES (668)..(668): Selenocysteine
  MOD_RES (674)..(674): Selenocysteine
  MOD_RES (676)..(676): Selenocysteine
  MOD_RES (685)..(685): Selenocysteine
  MOD_RES (705)..(705): Selenocysteine
  MOD_RES (724)..(724): Selenocysteine
  MOD_RES (737)..(737): Selenocysteine
  MOD_RES (745)..(745): Selenocysteine
  MOD_RES (763)..(763): Selenocysteine
  MOD_RES (830)..(830): Selenocysteine
  MOD_RES (839)..(839): Selenocysteine
  MOD_RES (856)..(856): Selenocysteine
  MOD_RES (871)..(871): Selenocysteine
  MOD_RES (880)..(880): Selenocysteine
  MOD_RES (903)..(903): Selenocysteine
  MOD_RES (921)..(921): Selenocysteine
  MOD_RES (935)..(935): Selenocysteine
  MOD_RES (970)..(970): Selenocysteine
  MOD_RES (973)..(973): Selenocysteine
  MOD_RES (976)..(976): Selenocysteine
MPAELLLLLIVAFASPSCQVLSSLRMAAILDDQXVCGRGERLALALAREQINGIIEVPAKARVEVDIFELQRDSQYEXXDXMCQILPKGVVSVLGPSSSPASASXVSHICGEKEIPHIKVGPEEXPRLQYLRFASVSLYPSNEDVSLAVSRILKSFNYPSASLICAKAECLLRLEELVRGFLISKEXLSVRMLDDSRDPXPLLKEIRDDKVSXIIIDANASISHLILRKASELGMXSAFYKYILXXMDFPILHLDGIVEDSSNILGFSMFNXSHPFYPEFVRSLNMSWRENCEASXYLGPALSAALMFDAVHVVVSAVRELNRSQEIGVKPLACXSANIWPHGXSLMNYLRMVEYDGLXGRVEFNSKGQRXNYXLRILEKSRQGHREIGVWYSNRXLAMNAXXLDINLSQXLANKXLVVXXILENPYVMRRPNFQALSGNERFEGFCVDMLRELAELLRFRYRLRLVEDGLYGAPEPNGSWXGMVGELINRKADLAVAAFXIXAEREKVIDFSKPFMXLGISILYRVHMGRKPGYFSFLDPFSPAVWLFMLLAYLAVSCVLFLAARLSPYEWYNPHPCLRARPHILENQYXLGNSLWFPVGGFMQQGSEIMPRALSXRCVSGVWWAFXLIIISSYXANLAAFLXVQRMEVPVESADDLADQXNIEYGXIHAGSXMXFFQNSRYQXYQRMWNYMQSKQPSVFVKSXEEGIARVLNSRYAFLLESXMNEYHRRLNCNLXQIGGLLDXKGYGIGMPLGSPFRDEIXLAILQLQENNRLEILKRKWWEGGRCPKEEDHRAKGLGMENIGGIFIVLICGLIIAVFVAVMEFIWSXRRSAESEEXPALHPAACQCSALGPRXPLKEPSMLLVKVPSXRVQVAFSRXSLRQVCPFLLQHQLSSLYWIQAXNVQICCHFSSLKPSPDLXFPPSHRPLSSLLFXALAAVGGLPDASSFFFPPISSCPPLQSGIGPCHSXEAXLVXSNFHV

SEQ ID NO: 11517 - protein, 885 aa, Homo sapiens
  MOD_RES (3)..(3): Selenocysteine
  MOD_RES (8)..(8): Selenocysteine
  MOD_RES (35)..(35): Selenocysteine
  MOD_RES (63)..(63): Selenocysteine
  MOD_RES (66)..(66): Selenocysteine
  MOD_RES (97)..(97): Selenocysteine
  MOD_RES (103)..(103): Selenocysteine
  MOD_RES (105)..(105): Selenocysteine
  MOD_RES (110)..(110): Selenocysteine
  MOD_RES (122)..(123): Selenocysteine
  MOD_RES (140)..(140): Selenocysteine
  MOD_RES (182)..(182): Selenocysteine
  MOD_RES (201)..(201): Selenocysteine
  MOD_RES (205)..(205): Selenocysteine
  MOD_RES (230)..(230): Selenocysteine
  MOD_RES (241)..(241): Selenocysteine
  MOD_RES (302)..(302): Selenocysteine
  MOD_RES (312)..(312): Selenocysteine
  MOD_RES (317)..(317): Selenocysteine
  MOD_RES (335)..(335): Selenocysteine
  MOD_RES (370)..(370): Selenocysteine
  MOD_RES (386)..(386): Selenocysteine
  MOD_RES (396)..(396): Selenocysteine
  MOD_RES (402)..(402): Selenocysteine
  MOD_RES (414)..(414): Selenocysteine
  MOD_RES (419)..(419): Selenocysteine
  MOD_RES (425)..(425): Selenocysteine
  MOD_RES (437)..(437): Selenocysteine
  MOD_RES (442)..(442): Selenocysteine
  MOD_RES (450)..(450): Selenocysteine
  MOD_RES (469)..(469): Selenocysteine
  MOD_RES (473)..(473): Selenocysteine
  MOD_RES (486)..(486): Selenocysteine
  MOD_RES (518)..(518): Selenocysteine
  MOD_RES (539)..(539): Selenocysteine
  MOD_RES (550)..(550): Selenocysteine
  MOD_RES (561)..(561): Selenocysteine
  MOD_RES (602)..(602): Selenocysteine
  MOD_RES (648)..(648): Selenocysteine
  MOD_RES (665)..(665): Selenocysteine
  MOD_RES (683)..(683): Selenocysteine
  MOD_RES (701)..(701): Selenocysteine
  MOD_RES (748)..(749): Selenocysteine
  MOD_RES (791)..(791): Selenocysteine
  MOD_RES (807)..(807): Selenocysteine
  MOD_RES (809)..(809): Selenocysteine
  MOD_RES (868)..(868): Selenocysteine
  MOD_RES (871)..(871): Selenocysteine
  MOD_RES (883)..(883): Selenocysteine
MSXMRLLXLALLFSCSVARAACDPKIVNIGAVLSXRKHEQMFREAVNQANKRHGSWKIQLNAXSVXHKPNAIQMALSVCEDLISSQVYAILVSHPPXPNDHFXPXPVSYXAGFYRIPVLGLXXRMSIYSDKSIHLSFLRXVPPYSHQSSVWFEMMRVYSWNHIILLVSDDHEGRAAQKRLEXLLEERESKAEKVLQFDPGXKNVXALLMEAKELEARVIILSASEDDAAXVYRAAAMLNMXGSGYVWLVGEREISGNALRYAPDGILGLQLINGKNESAHISDAVGVVAQAVHELLEKENIXDPPRGCVGNXNIWKXGPLFKRVLMSSKYADGVXGRVEFNEDGDRKFANYSIMNLQNRKLVQVGIYNGXHVIPNDRKIIWPGGEXEKPRGYQMSXRLKIVXIHQEPFVYVKPXLSDGXCKEEFXVNGDPVKKVICXGPNDXSPGSPRHXVPQCCYGFCIDLLIKLARXMNFXYEVHLVADGKFGXQERVNNSNKKEWNGMMGELLSGQADMIVAPLXINNERAQYIEFSKPFKYQGLXILVKKEIPRSXLDSFMQPFQSXLWLLVGLSVHVVAVMLYLLDRFSPFGRFKVNSEEEEEDALXLSSAMWFSWGVLLNSGIGEGAPRSFSARILGMVWAGFAMIIVASYXANLAAFLVLDRPEERIXGINDPRLRNPSDKFIYAXVKQSSVDIYFRRQVELSXMYRHMEKHNYESAAEAIQAVRDNKLHAFIWDSAVLEFEASQKCDLVXXGELFFRSGFGIGMRKDSPWKQNVSLSILKSHENGFMEDLDKXWVRYQECDSRSNAPAXLXFENMAGVFMLVAGGIVAGIFLIFIEIAYKRHKDARRKQMQLAFAAVNVWRKNLQQYHPXDIXGPLNLSDPSVSXVV

SEQ ID NO: 11518 - protein, 901 aa, Homo sapiens
  MOD_RES (3)..(3): Selenocysteine
  MOD_RES (8)..(8): Selenocysteine
  MOD_RES (35)..(35): Selenocysteine
  MOD_RES (63)..(63): Selenocysteine
  MOD_RES (66)..(66): Selenocysteine
  MOD_RES (97)..(97): Selenocysteine
  MOD_RES (103)..(103): Selenocysteine
  MOD_RES (105)..(105): Selenocysteine
  MOD_RES (110)..(110): Selenocysteine
  MOD_RES (122)..(123): Selenocysteine
  MOD_RES (140)..(140): Selenocysteine
  MOD_RES (182)..(182): Selenocysteine
  MOD_RES (201)..(201): Selenocysteine
  MOD_RES (205)..(205): Selenocysteine
  MOD_RES (230)..(230): Selenocysteine
  MOD_RES (241)..(241): Selenocysteine
  MOD_RES (302)..(302): Selenocysteine
  MOD_RES (312)..(312): Selenocysteine
  MOD_RES (317)..(317): Selenocysteine
  MOD_RES (335)..(335): Selenocysteine
  MOD_RES (370)..(370): Selenocysteine
  MOD_RES (386)..(386): Selenocysteine
  MOD_RES (396)..(396): Selenocysteine
  MOD_RES (402)..(402): Selenocysteine
  MOD_RES (414)..(414): Selenocysteine
  MOD_RES (419)..(419): Selenocysteine
  MOD_RES (425)..(425): Selenocysteine
  MOD_RES (437)..(437): Selenocysteine
  MOD_RES (442)..(442): Selenocysteine
  MOD_RES (450)..(450): Selenocysteine
  MOD_RES (469)..(469): Selenocysteine
  MOD_RES (473)..(473): Selenocysteine
  MOD_RES (486)..(486): Selenocysteine
  MOD_RES (518)..(518): Selenocysteine
  MOD_RES (539)..(539): Selenocysteine
  MOD_RES (550)..(550): Selenocysteine
  MOD_RES (561)..(561): Selenocysteine
  MOD_RES (602)..(602): Selenocysteine
  MOD_RES (648)..(648): Selenocysteine
  MOD_RES (665)..(665): Selenocysteine
  MOD_RES (683)..(683): Selenocysteine
  MOD_RES (701)..(701): Selenocysteine
  MOD_RES (748)..(749): Selenocysteine
  MOD_RES (791)..(791): Selenocysteine
  MOD_RES (807)..(807): Selenocysteine
  MOD_RES (809)..(809): Selenocysteine
  MOD_RES (865)..(865): Selenocysteine
  MOD_RES (878)..(878): Selenocysteine
MSXMRLLXLALLFSCSVARAACDPKIVNIGAVLSXRKHEQMFREAVNQANKRHGSWKIQLNAXSVXHKPNAIQMALSVCEDLISSQVYAILVSHPPXPNDHFXPXPVSYXAGFYRIPVLGLXXRMSIYSDKSIHLSFLRXVPPYSHQSSVWFEMMRVYSWNHIILLVSDDHEGRAAQKRLEXLLEERESKAEKVLQFDPGXKNVXALLMEAKELEARVIILSASEDDAAXVYRAAAMLNMXGSGYVWLVGEREISGNALRYAPDGILGLQLINGKNESAHISDAVGVVAQAVHELLEKENIXDPPRGCVGNXNIWKXGPLFKRVLMSSKYADGVXGRVEFNEDGDRKFANYSIMNLQNRKLVQVGIYNGXHVIPNDRKIIWPGGEXEKPRGYQMSXRLKIVXIHQEPFVYVKPXLSDGXCKEEFXVNGDPVKKVICXGPNDXSPGSPRHXVPQCCYGFCIDLLIKLARXMNFXYEVHLVADGKFGXQERVNNSNKKEWNGMMGELLSGQADMIVAPLXINNERAQYIEFSKPFKYQGLXILVKKEIPRSXLDSFMQPFQSXLWLLVGLSVHVVAVMLYLLDRFSPFGRFKVNSEEEEEDALXLSSAMWFSWGVLLNSGIGEGAPRSFSARILGMVWAGFAMIIVASYXANLAAFLVLDRPEERIXGINDPRLRNPSDKFIYAXVKQSSVDIYFRRQVELSXMYRHMEKHNYESAAEAIQAVRDNKLHAFIWDSAVLEFEASQKCDLVXXGELFFRSGFGIGMRKDSPWKQNVSLSILKSHENGFMEDLDKXWVRYQECDSRSNAPAXLXFENMAGVFMLVAGGIVAGIFLIFIEIAYKRHKDARRKQMQLAFAAVNVWRKNLQSXGGGRGALQNQKDXVLPRRAIEREEGQLQLCSRHRES

SEQ ID NO: 11519 - protein, 938 aa, Homo sapiens
  MOD_RES (3)..(3): Selenocysteine
  MOD_RES (8)..(8): Selenocysteine
  MOD_RES (35)..(35): Selenocysteine
  MOD_RES (63)..(63): Selenocysteine
  MOD_RES (66)..(66): Selenocysteine
  MOD_RES (97)..(97): Selenocysteine
  MOD_RES (103)..(103): Selenocysteine
  MOD_RES (105)..(105): Selenocysteine
  MOD_RES (110)..(110): Selenocysteine
  MOD_RES (122)..(123): Selenocysteine
  MOD_RES (140)..(140): Selenocysteine
  MOD_RES (182)..(182): Selenocysteine
  MOD_RES (201)..(201): Selenocysteine
  MOD_RES (205)..(205): Selenocysteine
  MOD_RES (230)..(230): Selenocysteine
  MOD_RES (241)..(241): Selenocysteine
  MOD_RES (302)..(302): Selenocysteine
  MOD_RES (312)..(312): Selenocysteine
  MOD_RES (317)..(317): Selenocysteine
  MOD_RES (335)..(335): Selenocysteine
  MOD_RES (370)..(370): Selenocysteine
  MOD_RES (386)..(386): Selenocysteine
  MOD_RES (396)..(396): Selenocysteine
  MOD_RES (402)..(402): Selenocysteine
  MOD_RES (414)..(414): Selenocysteine
  MOD_RES (419)..(419): Selenocysteine
  MOD_RES (425)..(425): Selenocysteine
  MOD_RES (437)..(437): Selenocysteine
  MOD_RES (442)..(442): Selenocysteine
  MOD_RES (450)..(450): Selenocysteine
  MOD_RES (469)..(469): Selenocysteine
  MOD_RES (473)..(473): Selenocysteine
  MOD_RES (486)..(486): Selenocysteine
  MOD_RES (518)..(518): Selenocysteine
  MOD_RES (539)..(539): Selenocysteine
  MOD_RES (550)..(550): Selenocysteine
  MOD_RES (561)..(561): Selenocysteine
  MOD_RES (602)..(602): Selenocysteine
  MOD_RES (648)..(648): Selenocysteine
  MOD_RES (665)..(665): Selenocysteine
  MOD_RES (683)..(683): Selenocysteine
  MOD_RES (701)..(701): Selenocysteine
  MOD_RES (748)..(749): Selenocysteine
  MOD_RES (791)..(791): Selenocysteine
  MOD_RES (807)..(807): Selenocysteine
  MOD_RES (809)..(809): Selenocysteine
  MOD_RES (879)..(879): Selenocysteine
  MOD_RES (884)..(884): Selenocysteine
  MOD_RES (886)..(886): Selenocysteine
  MOD_RES (900)..(900): Selenocysteine
  MOD_RES (902)..(902): Selenocysteine
  MOD_RES (915)..(915): Selenocysteine
MSXMRLLXLALLFSCSVARAACDPKIVNIGAVLSXRKHEQMFREAVNQANKRHGSWKIQLNAXSVXHKPNAIQMALSVCEDLISSQVYAILVSHPPXPNDHFXPXPVSYXAGFYRIPVLGLXXRMSIYSDKSIHLSFLRXVPPYSHQSSVWFEMMRVYSWNHIILLVSDDHEGRAAQKRLEXLLEERESKAEKVLQFDPGXKNVXALLMEAKELEARVIILSASEDDAAXVYRAAAMLNMXGSGYVWLVGEREISGNALRYAPDGILGLQLINGKNESAHISDAVGVVAQAVHELLEKENIXDPPRGCVGNXNIWKXGPLFKRVLMSSKYADGVXGRVEFNEDGDRKFANYSIMNLQNRKLVQVGIYNGXHVIPNDRKIIWPGGEXEKPRGYQMSXRLKIVXIHQEPFVYVKPXLSDGXCKEEFXVNGDPVKKVICXGPNDXSPGSPRHXVPQCCYGFCIDLLIKLARXMNFXYEVHLVADGKFGXQERVNNSNKKEWNGMMGELLSGQADMIVAPLXINNERAQYIEFSKPFKYQGLXILVKKEIPRSXLDSFMQPFQSXLWLLVGLSVHVVAVMLYLLDRFSPFGRFKVNSEEEEEDALXLSSAMWFSWGVLLNSGIGEGAPRSFSARILGMVWAGFAMIIVASYXANLAAFLVLDRPEERIXGINDPRLRNPSDKFIYAXVKQSSVDIYFRRQVELSXMYRHMEKHNYESAAEAIQAVRDNKLHAFIWDSAVLEFEASQKCDLVXXGELFFRSGFGIGMRKDSPWKQNVSLSILKSHENGFMEDLDKXWVRYQECDSRSNAPAXLXFENMAGVFMLVAGGIVAGIFLIFIEIAYKRHKDARRKQMQLAFAAVNVWRKNLQDRKSGRAEPDPKKKAXFRAIXSXLASSFKRRRSSKDXSXGGGRGALQNQKDXVLPRRAIEREEGQLQLCSRHRES

SEQ ID NO: 11520 - protein, 356 aa, Homo sapiens
  MOD_RES (3)..(3): Selenocysteine
  MOD_RES (8)..(8): Selenocysteine
  MOD_RES (35)..(35): Selenocysteine
  MOD_RES (63)..(63): Selenocysteine
  MOD_RES (66)..(66): Selenocysteine
  MOD_RES (97)..(97): Selenocysteine
  MOD_RES (103)..(103): Selenocysteine
  MOD_RES (105)..(105): Selenocysteine
  MOD_RES (110)..(110): Selenocysteine
  MOD_RES (122)..(123): Selenocysteine
  MOD_RES (140)..(140): Selenocysteine
  MOD_RES (182)..(182): Selenocysteine
  MOD_RES (222)..(222): Selenocysteine
  MOD_RES (226)..(226): Selenocysteine
  MOD_RES (251)..(251): Selenocysteine
  MOD_RES (262)..(262): Selenocysteine
MSXMRLLXLALLFSCSVARAACDPKIVNIGAVLSXRKHEQMFREAVNQANKRHGSWKIQLNAXSVXHKPNAIQMALSVCEDLISSQVYAILVSHPPXPNDHFXPXPVSYXAGFYRIPVLGLXXRMSIYSDKSIHLSFLRXVPPYSHQSSVWFEMMRVYSWNHIILLVSDDHEGRAAQKRLEXLLEERESKSKKRNYENLDQLSYDNKRGPKAEKVLQFDPGXKNVXALLMEAKELEARVIILSASEDDAAXVYRAAAMLNMXGSGYVWLVGEREISGNALRYAPDAHQRQERVGPHQRRRGRGGPGRARAPREGEHHRPAAGLRGQHQHLEDRAALQESADVFQVCGWGDWSRGVQ

SEQ ID NO: 11521 - protein, 906 aa, Homo sapiens
  MOD_RES (3)..(3): Selenocysteine
  MOD_RES (8)..(8): Selenocysteine
  MOD_RES (35)..(35): Selenocysteine
  MOD_RES (63)..(63): Selenocysteine
  MOD_RES (66)..(66): Selenocysteine
  MOD_RES (97)..(97): Selenocysteine
  MOD_RES (103)..(103): Selenocysteine
  MOD_RES (105)..(105): Selenocysteine
  MOD_RES (110)..(110): Selenocysteine
  MOD_RES (122)..(123): Selenocysteine
  MOD_RES (140)..(140): Selenocysteine
  MOD_RES (182)..(182): Selenocysteine
  MOD_RES (222)..(222): Selenocysteine
  MOD_RES (226)..(226): Selenocysteine
  MOD_RES (251)..(251): Selenocysteine
  MOD_RES (262)..(262): Selenocysteine
  MOD_RES (323)..(323): Selenocysteine
  MOD_RES (333)..(333): Selenocysteine
  MOD_RES (338)..(338): Selenocysteine
  MOD_RES (356)..(356): Selenocysteine
  MOD_RES (391)..(391): Selenocysteine
  MOD_RES (407)..(407): Selenocysteine
  MOD_RES (417)..(417): Selenocysteine
  MOD_RES (423)..(423): Selenocysteine
  MOD_RES (435)..(435): Selenocysteine
  MOD_RES (440)..(440): Selenocysteine
  MOD_RES (446)..(446): Selenocysteine
  MOD_RES (458)..(458): Selenocysteine
  MOD_RES (463)..(463): Selenocysteine
  MOD_RES (471)..(471): Selenocysteine
  MOD_RES (490)..(490): Selenocysteine
  MOD_RES (494)..(494): Selenocysteine
  MOD_RES (507)..(507): Selenocysteine
  MOD_RES (539)..(539): Selenocysteine
  MOD_RES (560)..(560): Selenocysteine
  MOD_RES (571)..(571): Selenocysteine
  MOD_RES (582)..(582): Selenocysteine
  MOD_RES (623)..(623): Selenocysteine
  MOD_RES (669)..(669): Selenocysteine
  MOD_RES (686)..(686): Selenocysteine
  MOD_RES (704)..(704): Selenocysteine
  MOD_RES (722)..(722): Selenocysteine
  MOD_RES (769)..(770): Selenocysteine
  MOD_RES (812)..(812): Selenocysteine
  MOD_RES (828)..(828): Selenocysteine
  MOD_RES (830)..(830): Selenocysteine
  MOD_RES (889)..(889): Selenocysteine
  MOD_RES (892)..(892): Selenocysteine
  MOD_RES (904)..(904): Selenocysteine
MSXMRLLXLALLFSCSVARAACDPKIVNIGAVLSXRKHEQMFREAVNQANKRHGSWKIQLNAXSVXHKPNAIQMALSVCEDLISSQVYAILVSHPPXPNDHFXPXPVSYXAGFYRIPVLGLXXRMSIYSDKSIHLSFLRXVPPYSHQSSVWFEMMRVYSWNHIILLVSDDHEGRAAQKRLEXLLEERESKSKKRNYENLDQLSYDNKRGPKAEKVLQFDPGXKNVXALLMEAKELEARVIILSASEDDAAXVYRAAAMLNMXGSGYVWLVGEREISGNALRYAPDGILGLQLINGKNESAHISDAVGVVAQAVHELLEKENIXDPPRGCVGNXNIWKXGPLFKRVLMSSKYADGVXGRVEFNEDGDRKFANYSIMNLQNRKLVQVGIYNGXHVIPNDRKIIWPGGEXEKPRGYQMSXRLKIVXIHQEPFVYVKPXLSDGXCKEEFXVNGDPVKKVICXGPNDXSPGSPRHXVPQCCYGFCIDLLIKLARXMNFXYEVHLVADGKFGXQERVNNSNKKEWNGMMGELLSGQADMIVAPLXINNERAQYIEFSKPFKYQGLXILVKKEIPRSXLDSFMQPFQSXLWLLVGLSVHVVAVMLYLLDRFSPFGRFKVNSEEEEEDALXLSSAMWFSWGVLLNSGIGEGAPRSFSARILGMVWAGFAMIIVASYXANLAAFLVLDRPEERIXGINDPRLRNPSDKFIYAXVKQSSVDIYFRRQVELSXMYRHMEKHNYESAAEAIQAVRDNKLHAFIWDSAVLEFEASQKCDLVXXGELFFRSGFGIGMRKDSPWKQNVSLSILKSHENGFMEDLDKXWVRYQECDSRSNAPAXLXFENMAGVFMLVAGGIVAGIFLIFIEIAYKRHKDARRKQMQLAFAAVNVWRKNLQQYHPXDIXGPLNLSDPSVSXVV

SEQ ID NO: 11522 - protein, 922 aa, Homo sapiens
  MOD_RES (3)..(3): Selenocysteine
  MOD_RES (8)..(8): Selenocysteine
  MOD_RES (35)..(35): Selenocysteine
  MOD_RES (63)..(63): Selenocysteine
  MOD_RES (66)..(66): Selenocysteine
  MOD_RES (97)..(97): Selenocysteine
  MOD_RES (103)..(103): Selenocysteine
  MOD_RES (105)..(105): Selenocysteine
  MOD_RES (110)..(110): Selenocysteine
  MOD_RES (122)..(123): Selenocysteine
  MOD_RES (140)..(140): Selenocysteine
  MOD_RES (182)..(182): Selenocysteine
  MOD_RES (222)..(222): Selenocysteine
  MOD_RES (226)..(226): Selenocysteine
  MOD_RES (251)..(251): Selenocysteine
  MOD_RES (262)..(262): Selenocysteine
  MOD_RES (323)..(323): Selenocysteine
  MOD_RES (333)..(333): Selenocysteine
  MOD_RES (338)..(338): Selenocysteine
  MOD_RES (356)..(356): Selenocysteine
  MOD_RES (391)..(391): Selenocysteine
  MOD_RES (407)..(407): Selenocysteine
  MOD_RES (417)..(417): Selenocysteine
  MOD_RES (423)..(423): Selenocysteine
  MOD_RES (435)..(435): Selenocysteine
  MOD_RES (440)..(440): Selenocysteine
  MOD_RES (446)..(446): Selenocysteine
  MOD_RES (458)..(458): Selenocysteine
  MOD_RES (463)..(463): Selenocysteine
  MOD_RES (471)..(471): Selenocysteine
  MOD_RES (490)..(490): Selenocysteine
  MOD_RES (494)..(494): Selenocysteine
  MOD_RES (507)..(507): Selenocysteine
  MOD_RES (539)..(539): Selenocysteine
  MOD_RES (560)..(560): Selenocysteine
  MOD_RES (571)..(571): Selenocysteine
  MOD_RES (582)..(582): Selenocysteine
  MOD_RES (623)..(623): Selenocysteine
  MOD_RES (669)..(669): Selenocysteine
  MOD_RES (686)..(686): Selenocysteine
  MOD_RES (704)..(704): Selenocysteine
  MOD_RES (722)..(722): Selenocysteine
  MOD_RES (769)..(770): Selenocysteine
  MOD_RES (812)..(812): Selenocysteine
  MOD_RES (828)..(828): Selenocysteine
  MOD_RES (830)..(830): Selenocysteine
  MOD_RES (886)..(886): Selenocysteine
  MOD_RES (899)..(899): Selenocysteine
MSXMRLLXLALLFSCSVARAACDPKIVNIGAVLSXRKHEQMFREAVNQANKRHGSWKIQLNAXSVXHKPNAIQMALSVCEDLISSQVYAILVSHPPXPNDHFXPXPVSYXAGFYRIPVLGLXXRMSIYSDKSIHLSFLRXVPPYSHQSSVWFEMMRVYSWNHIILLVSDDHEGRAAQKRLEXLLEERESKSKKRNYENLDQLSYDNKRGPKAEKVLQFDPGXKNVXALLMEAKELEARVIILSASEDDAAXVYRAAAMLNMXGSGYVWLVGEREISGNALRYAPDGILGLQLINGKNESAHISDAVGVVAQAVHELLEKENIXDPPRGCVGNXNIWKXGPLFKRVLMSSKYADGVXGRVEFNEDGDRKFANYSIMNLQNRKLVQVGIYNGXHVIPNDRKIIWPGGEXEKPRGYQMSXRLKIVXIHQEPFVYVKPXLSDGXCKEEFXVNGDPVKKVICXGPNDXSPGSPRHXVPQCCYGFCIDLLIKLARXMNFXYEVHLVADGKFGXQERVNNSNKKEWNGMMGELLSGQADMIVAPLXINNERAQYIEFSKPFKYQGLXILVKKEIPRSXLDSFMQPFQSXLWLLVGLSVHVVAVMLYLLDRFSPFGRFKVNSEEEEEDALXLSSAMWFSWGVLLNSGIGEGAPRSFSARILGMVWAGFAMIIVASYXANLAAFLVLDRPEERIXGINDPRLRNPSDKFIYAXVKQSSVDIYFRRQVELSXMYRHMEKHNYESAAEAIQAVRDNKLHAFIWDSAVLEFEASQKCDLVXXGELFFRSGFGIGMRKDSPWKQNVSLSILKSHENGFMEDLDKXWVRYQECDSRSNAPAXLXFENMAGVFMLVAGGIVAGIFLIFIEIAYKRHKDARRKQMQLAFAAVNVWRKNLQSXGGGRGALQNQKDXVLPRRAIEREEGQLQLCSRHRES

SEQ ID NO: 11523 - protein, 943 aa, Homo sapiens
  MOD_RES (3)..(3): Selenocysteine
  MOD_RES (8)..(8): Selenocysteine
  MOD_RES (35)..(35): Selenocysteine
  MOD_RES (63)..(63): Selenocysteine
  MOD_RES (66)..(66): Selenocysteine
  MOD_RES (97)..(97): Selenocysteine
  MOD_RES (103)..(103): Selenocysteine
  MOD_RES (105)..(105): Selenocysteine
  MOD_RES (110)..(110): Selenocysteine
  MOD_RES (122)..(123): Selenocysteine
  MOD_RES (140)..(140): Selenocysteine
  MOD_RES (182)..(182): Selenocysteine
  MOD_RES (222)..(222): Selenocysteine
  MOD_RES (226)..(226): Selenocysteine
  MOD_RES (251)..(251): Selenocysteine
  MOD_RES (262)..(262): Selenocysteine
  MOD_RES (323)..(323): Selenocysteine
  MOD_RES (333)..(333): Selenocysteine
  MOD_RES (338)..(338): Selenocysteine
  MOD_RES (356)..(356): Selenocysteine
  MOD_RES (391)..(391): Selenocysteine
  MOD_RES (407)..(407): Selenocysteine
  MOD_RES (417)..(417): Selenocysteine
  MOD_RES (423)..(423): Selenocysteine
  MOD_RES (435)..(435): Selenocysteine
  MOD_RES (440)..(440): Selenocysteine
  MOD_RES (446)..(446): Selenocysteine
  MOD_RES (458)..(458): Selenocysteine
  MOD_RES (463)..(463): Selenocysteine
  MOD_RES (471)..(471): Selenocysteine
  MOD_RES (490)..(490): Selenocysteine
  MOD_RES (494)..(494): Selenocysteine
  MOD_RES (507)..(507): Selenocysteine
  MOD_RES (539)..(539): Selenocysteine
  MOD_RES (560)..(560): Selenocysteine
  MOD_RES (571)..(571): Selenocysteine
  MOD_RES (582)..(582): Selenocysteine
  MOD_RES (623)..(623): Selenocysteine
  MOD_RES (669)..(669): Selenocysteine
  MOD_RES (686)..(686): Selenocysteine
  MOD_RES (704)..(704): Selenocysteine
  MOD_RES (722)..(722): Selenocysteine
  MOD_RES (769)..(770): Selenocysteine
  MOD_RES (812)..(812): Selenocysteine
  MOD_RES (828)..(828): Selenocysteine
  MOD_RES (830)..(830): Selenocysteine
  MOD_RES (900)..(900): Selenocysteine
  MOD_RES (905)..(905): Selenocysteine
  MOD_RES (907)..(907): Selenocysteine
  MOD_RES (921)..(921): Selenocysteine
  MOD_RES (926)..(926): Selenocysteine
  MOD_RES (929)..(929): Selenocysteine
  MOD_RES (941)..(941): Selenocysteine
MSXMRLLXLALLFSCSVARAACDPKIVNIGAVLSXRKHEQMFREAVNQANKRHGSWKIQLNAXSVXHKPNAIQMALSVCEDLISSQVYAILVSHPPXPNDHFXPXPVSYXAGFYRIPVLGLXXRMSIYSDKSIHLSFLRXVPPYSHQSSVWFEMMRVYSWNHIILLVSDDHEGRAAQKRLEXLLEERESKSKKRNYENLDQLSYDNKRGPKAEKVLQFDPGXKNVXALLMEAKELEARVIILSASEDDAAXVYRAAAMLNMXGSGYVWLVGEREISGNALRYAPDGILGLQLINGKNESAHISDAVGVVAQAVHELLEKENIXDPPRGCVGNXNIWKXGPLFKRVLMSSKYADGVXGRVEFNEDGDRKFANYSIMNLQNRKLVQVGIYNGXHVIPNDRKIIWPGGEXEKPRGYQMSXRLKIVXIHQEPFVYVKPXLSDGXCKEEFXVNGDPVKKVICXGPNDXSPGSPRHXVPQCCYGFCIDLLIKLARXMNFXYEVHLVADGKFGXQERVNNSNKKEWNGMMGELLSGQADMIVAPLXINNERAQYIEFSKPFKYQGLXILVKKEIPRSXLDSFMQPFQSXLWLLVGLSVHVVAVMLYLLDRFSPFGRFKVNSEEEEEDALXLSSAMWFSWGVLLNSGIGEGAPRSFSARILGMVWAGFAMIIVASYXANLAAFLVLDRPEERIXGINDPRLRNPSDKFIYAXVKQSSVDIYFRRQVELSXMYRHMEKHNYESAAEAIQAVRDNKLHAFIWDSAVLEFEASQKCDLVXXGELFFRSGFGIGMRKDSPWKQNVSLSILKSHENGFMEDLDKXWVRYQECDSRSNAPAXLXFENMAGVFMLVAGGIVAGIFLIFIEIAYKRHKDARRKQMQLAFAAVNVWRKNLQDRKSGRAEPDPKKKAXFRAIXSXLASSFKRRRSSKDXQYHPXDIXGPLNLSDPSVSXVV

SEQ ID NO: 11524 - protein, 959 aa, Homo sapiens
  MOD_RES (3)..(3): Selenocysteine
  MOD_RES (8)..(8): Selenocysteine
  MOD_RES (35)..(35): Selenocysteine
  MOD_RES (63)..(63): Selenocysteine
  MOD_RES (66)..(66): Selenocysteine
  MOD_RES (97)..(97): Selenocysteine
  MOD_RES (103)..(103): Selenocysteine
  MOD_RES (105)..(105): Selenocysteine
  MOD_RES (110)..(110): Selenocysteine
  MOD_RES (122)..(123): Selenocysteine
  MOD_RES (140)..(140): Selenocysteine
  MOD_RES (182)..(182): Selenocysteine
  MOD_RES (222)..(222): Selenocysteine
  MOD_RES (226)..(226): Selenocysteine
  MOD_RES (251)..(251): Selenocysteine
  MOD_RES (262)..(262): Selenocysteine
  MOD_RES (323)..(323): Selenocysteine
  MOD_RES (333)..(333): Selenocysteine
  MOD_RES (338)..(338): Selenocysteine
  MOD_RES (356)..(356): Selenocysteine
  MOD_RES (391)..(391): Selenocysteine
  MOD_RES (407)..(407): Selenocysteine
  MOD_RES (417)..(417): Selenocysteine
  MOD_RES (423)..(423): Selenocysteine
  MOD_RES (435)..(435): Selenocysteine
  MOD_RES (440)..(440): Selenocysteine
  MOD_RES (446)..(446): Selenocysteine
  MOD_RES (458)..(458): Selenocysteine
  MOD_RES (463)..(463): Selenocysteine
  MOD_RES (471)..(471): Selenocysteine
  MOD_RES (490)..(490): Selenocysteine
  MOD_RES (494)..(494): Selenocysteine
  MOD_RES (507)..(507): Selenocysteine
  MOD_RES (539)..(539): Selenocysteine
  MOD_RES (560)..(560): Selenocysteine
  MOD_RES (571)..(571): Selenocysteine
  MOD_RES (582)..(582): Selenocysteine
  MOD_RES (623)..(623): Selenocysteine
  MOD_RES (669)..(669): Selenocysteine
  MOD_RES (686)..(686): Selenocysteine
  MOD_RES (704)..(704): Selenocysteine
  MOD_RES (722)..(722): Selenocysteine
  MOD_RES (769)..(770): Selenocysteine
  MOD_RES (812)..(812): Selenocysteine
  MOD_RES (828)..(828): Selenocysteine
  MOD_RES (830)..(830): Selenocysteine
  MOD_RES (900)..(900): Selenocysteine
  MOD_RES (905)..(905): Selenocysteine
  MOD_RES (907)..(907): Selenocysteine
  MOD_RES (921)..(921): Selenocysteine
  MOD_RES (923)..(923): Selenocysteine
  MOD_RES (936)..(936): Selenocysteine
MSXMRLLXLALLFSCSVARAACDPKIVNIGAVLSXRKHEQMFREAVNQANKRHGSWKIQLNAXSVXHKPNAIQMALSVCEDLISSQVYAILVSHPPXPNDHFXPXPVSYXAGFYRIPVLGLXXRMSIYSDKSIHLSFLRXVPPYSHQSSVWFEMMRVYSWNHIILLVSDDHEGRAAQKRLEXLLEERESKSKKRNYENLDQLSYDNKRGPKAEKVLQFDPGXKNVXALLMEAKELEARVIILSASEDDAAXVYRAAAMLNMXGSGYVWLVGEREISGNALRYAPDGILGLQLINGKNESAHISDAVGVVAQAVHELLEKENIXDPPRGCVGNXNIWKXGPLFKRVLMSSKYADGVXGRVEFNEDGDRKFANYSIMNLQNRKLVQVGIYNGXHVIPNDRKIIWPGGEXEKPRGYQMSXRLKIVXIHQEPFVYVKPXLSDGXCKEEFXVNGDPVKKVICXGPNDXSPGSPRHXVPQCCYGFCIDLLIKLARXMNFXYEVHLVADGKFGXQERVNNSNKKEWNGMMGELLSGQADMIVAPLXINNERAQYIEFSKPFKYQGLXILVKKEIPRSXLDSFMQPFQSXLWLLVGLSVHVVAVMLYLLDRFSPFGRFKVNSEEEEEDALXLSSAMWFSWGVLLNSGIGEGAPRSFSARILGMVWAGFAMIIVASYXANLAAFLVLDRPEERIXGINDPRLRNPSDKFIYAXVKQSSVDIYFRRQVELSXMYRHMEKHNYESAAEAIQAVRDNKLHAFIWDSAVLEFEASQKCDLVXXGELFFRSGFGIGMRKDSPWKQNVSLSILKSHENGFMEDLDKXWVRYQECDSRSNAPAXLXFENMAGVFMLVAGGIVAGIFLIFIEIAYKRHKDARRKQMQLAFAAVNVWRKNLQDRKSGRAEPDPKKKAXFRAIXSXLASSFKRRRSSKDXSXGGGRGALQNQKDXVLPRRAIEREEGQLQLCSRHRES

SEQ ID NO: 11525 - protein, 200 aa, Homo sapiens
  MOD_RES (5)..(5): Selenocysteine
  MOD_RES (7)..(7): Selenocysteine
  MOD_RES (20)..(20): Selenocysteine
  MOD_RES (38)..(39): Selenocysteine
  MOD_RES (53)..(54): Selenocysteine
  MOD_RES (69)..(69): Selenocysteine
  MOD_RES (72)..(72): Selenocysteine
  MOD_RES (79)..(79): Selenocysteine
  MOD_RES (113)..(113): Selenocysteine
  MOD_RES (129)..(129): Selenocysteine
  MOD_RES (164)..(165): Selenocysteine
  MOD_RES (197)..(197): Selenocysteine
DKDPXSXFFQFGASIQQQAXVMLKIMQDYDWHVFSLVXXIFPGYREFISFVKXXVDNSFVGWDMQNVIXLDXSFEDAKXQVQLKKIHSSVILLYCSKDEAVLILSEARSLGLXGYDFFWIVPSLVSGNXELIPKEFPSGLISVSYDDWDYSLEARVRDGIGILXXAASSMLEKFSYIPEAKASCYGQMERPEVPMHXLHP

SEQ ID NO: 11526 - protein, 10 aa, Homo sapiens
  MOD_RES (8)..(8): Selenocysteine
MGRVGYWXLL

SEQ ID NO: 11527 - protein, 20 aa, Homo sapiens
  MOD_RES (8)..(8): Selenocysteine
MGRVGYWXLLVLPALLVWRG

SEQ ID NO: 11528 - protein, 1281 aa, Homo sapiens
  MOD_RES (8)..(8): Selenocysteine
  MOD_RES (47)..(47): Selenocysteine
  MOD_RES (53)..(53): Selenocysteine
  MOD_RES (77)..(77): Selenocysteine
  MOD_RES (84)..(84): Selenocysteine
  MOD_RES (104)..(104): Selenocysteine
  MOD_RES (120)..(120): Selenocysteine
  MOD_RES (141)..(141): Selenocysteine
  MOD_RES (143)..(143): Selenocysteine
  MOD_RES (156)..(156): Selenocysteine
  MOD_RES (174)..(175): Selenocysteine
  MOD_RES (189)..(190): Selenocysteine
  MOD_RES (205)..(205): Selenocysteine
  MOD_RES (208)..(208): Selenocysteine
  MOD_RES (215)..(215): Selenocysteine
  MOD_RES (249)..(249): Selenocysteine
  MOD_RES (265)..(265): Selenocysteine
  MOD_RES (300)..(301): Selenocysteine
  MOD_RES (333)..(333): Selenocysteine
  MOD_RES (342)..(342): Selenocysteine
  MOD_RES (351)..(351): Selenocysteine
  MOD_RES (382)..(382): Selenocysteine
  MOD_RES (410)..(410): Selenocysteine
  MOD_RES (426)..(426): Selenocysteine
  MOD_RES (428)..(428): Selenocysteine
  MOD_RES (433)..(433): Selenocysteine
  MOD_RES (446)..(446): Selenocysteine
  MOD_RES (470)..(470): Selenocysteine
  MOD_RES (474)..(474): Selenocysteine
  MOD_RES (481)..(481): Selenocysteine
  MOD_RES (513)..(513): Selenocysteine
  MOD_RES (531)..(531): Selenocysteine
  MOD_RES (543)..(543): Selenocysteine
  MOD_RES (600)..(600): Selenocysteine
  MOD_RES (625)..(626): Selenocysteine
  MOD_RES (646)..(646): Selenocysteine
  MOD_RES (663)..(663): Selenocysteine
  MOD_RES (684)..(684): Selenocysteine
  MOD_RES (690)..(690): Selenocysteine
  MOD_RES (706)..(706): Selenocysteine
  MOD_RES (722)..(722): Selenocysteine
  MOD_RES (749)..(749): Selenocysteine
  MOD_RES (758)..(759): Selenocysteine
  MOD_RES (793)..(793): Selenocysteine
  MOD_RES (797)..(797): Selenocysteine
  MOD_RES (834)..(834): Selenocysteine
  MOD_RES (850)..(850): Selenocysteine
  MOD_RES (888)..(888): Selenocysteine
  MOD_RES (965)..(965): Selenocysteine
  MOD_RES (987)..(987): Selenocysteine
  MOD_RES (995)..(995): Selenocysteine
  MOD_RES (1002)..(1002): Selenocysteine
  MOD_RES (1038)..(1038): Selenocysteine
  MOD_RES (1043)..(1043): Selenocysteine
  MOD_RES (1064)..(1064): Selenocysteine
  MOD_RES (1069)..(1069): Selenocysteine
  MOD_RES (1082)..(1082): Selenocysteine
  MOD_RES (1104)..(1104): Selenocysteine
  MOD_RES (1108)..(1108): Selenocysteine
  MOD_RES (1119)..(1119): Selenocysteine
  MOD_RES (1140)..(1140): Selenocysteine
  MOD_RES (1164)..(1164): Selenocysteine
  MOD_RES (1192)..(1192): Selenocysteine
  MOD_RES (1203)..(1203): Selenocysteine
  MOD_RES (1212)..(1212): Selenocysteine
  MOD_RES (1223)..(1223): Selenocysteine
  MOD_RES (1229)..(1229): Selenocysteine
  MOD_RES (1257)..(1257): Selenocysteine
  MOD_RES (1260)..(1260): Selenocysteine
  MOD_RES (1271)..(1271): Selenocysteine
  MOD_RES (1273)..(1273): Selenocysteine
  MOD_RES (1275)..(1275): Selenocysteine
MGRVGYWXLLVLPALLVWRGPAPSAAAEKGPPALNIAVMLGHSHDVXERELRXLWGPEQAAGLPLDVNVVALLMNRXDPKSLIXHVCDLMSGARIHGLVFGDDXDQEAVAQMLDFISSHXFVPILGIHGGASMIMADKDPXSXFFQFGASIQQQAXVMLKIMQDYDWHVFSLVXXIFPGYREFISFVKXXVDNSFVGWDMQNVIXLDXSFEDAKXQVQLKKIHSSVILLYCSKDEAVLILSEARSLGLXGYDFFWIVPSLVSGNXELIPKEFPSGLISVSYDDWDYSLEARVRDGIGILXXAASSMLEKFSYIPEAKASCYGQMERPEVPMHXLHPFMVNVXWDGKDLSFXEEGYQVHPRLVVIVLNKDREWEKVGKWENHXLSLRHAVWPRYKSFSDCEPDDNHLSIVXLEEAPFVIVEDIDPLXEXCVRNXVPCRKFVKINNSXNEGMNVKKCCKGFCIDILKKLSRXVKFXYDLYLVXNGKHGKKVNNVWNGMIGEVVYQRAVMAVGSLXINEERSEVVDFSVPFVEXGISVMVSRSNGXVSPSAFLEPFSASVWVMMFVMLLIVSAIAVFVFEYFSPVGYNRNLAKGKAPHGPSFXIGKAIWLLWGLVFNNSVPVQNPKGXXSKIMVSVWAFFAVIFLASYXANLAAFMIQEEFVDQVXGLSDKKFQRPHDYSPPFRFGXVPNGSXERNIRNNYPYMHQYMXKFNQKGVEDALVSLKXGKLDAFIYDAAVLNYKAGRDEGCKLVXIGSGYIFAXXGYGIALQKGSPWKRQIDLALLQFVGDGEMEELEXLWLXGICHNEKNEVMSSQLDIDNMAGVFYMLAAAMALSLIXFIWEHLFYWKLRFCFXGVCSDRPGLLFSISRGIYSCIHGVHIEEKKKSPDFNLXGSQSNMLKLLRSAKNISSMSNMNSSRMDSPKRAADFIQRGSLIMDMVSDKGNLMYSDNRSFQGKESIFGDNMNELQXFVANRQKDNLNNYVFQGQHPLXLNESNPNXVEVAVSXESKANSRPRQLWKKSVDSIRQDSLSQNPVSQRDEAXAENRXHSLKSPRYLPEEMAHSDISEXSNRAXCHREPDNSKNHKXKDNFKRSVASKYPKDCSEVERXYLKXKSSSPRDKIYXIDGEKEPGFHLDPPQFVENVXLPENVDFPDPYQDPSENFRKGDSXLPMNRNPLHNEEGLSNNDQYKLYSKHFXLKDKGSPHSEXSERYRQNSXHCRSCLSNMPXYSGHFXMRSPFKCDACLRMGNLYDIDEDQMLQEXGMXNAWLLGDAPRXLXNXRCHPRR

SEQ ID NO: 11529 - protein, 1464 aa, Homo sapiens
  MOD_RES (8)..(8): Selenocysteine
  MOD_RES (47)..(47): Selenocysteine
  MOD_RES (53)..(53): Selenocysteine
  MOD_RES (77)..(77): Selenocysteine
  MOD_RES (84)..(84): Selenocysteine
  MOD_RES (104)..(104): Selenocysteine
  MOD_RES (120)..(120): Selenocysteine
  MOD_RES (141)..(141): Selenocysteine
  MOD_RES (143)..(143): Selenocysteine
  MOD_RES (156)..(156): Selenocysteine
  MOD_RES (174)..(175): Selenocysteine
  MOD_RES (189)..(190): Selenocysteine
  MOD_RES (205)..(205): Selenocysteine
  MOD_RES (208)..(208): Selenocysteine
  MOD_RES (215)..(215): Selenocysteine
  MOD_RES (249)..(249): Selenocysteine
  MOD_RES (265)..(265): Selenocysteine
  MOD_RES (300)..(301): Selenocysteine
  MOD_RES (333)..(333): Selenocysteine
  MOD_RES (342)..(342): Selenocysteine
  MOD_RES (351)..(351): Selenocysteine
  MOD_RES (382)..(382): Selenocysteine
  MOD_RES (410)..(410): Selenocysteine
  MOD_RES (426)..(426): Selenocysteine
  MOD_RES (428)..(428): Selenocysteine
  MOD_RES (433)..(433): Selenocysteine
  MOD_RES (446)..(446): Selenocysteine
  MOD_RES (470)..(470): Selenocysteine
  MOD_RES (474)..(474): Selenocysteine
  MOD_RES (481)..(481): Selenocysteine
  MOD_RES (513)..(513): Selenocysteine
  MOD_RES (531)..(531): Selenocysteine
  MOD_RES (543)..(543): Selenocysteine
  MOD_RES (600)..(600): Selenocysteine
  MOD_RES (625)..(626): Selenocysteine
  MOD_RES (646)..(646): Selenocysteine
  MOD_RES (663)..(663): Selenocysteine
  MOD_RES (684)..(684): Selenocysteine
  MOD_RES (690)..(690): Selenocysteine
  MOD_RES (706)..(706): Selenocysteine
  MOD_RES (722)..(722): Selenocysteine
  MOD_RES (749)..(749): Selenocysteine
  MOD_RES (758)..(759): Selenocysteine
  MOD_RES (793)..(793): Selenocysteine
  MOD_RES (797)..(797): Selenocysteine
  MOD_RES (834)..(834): Selenocysteine
  MOD_RES (850)..(850): Selenocysteine
  MOD_RES (888)..(888): Selenocysteine
  MOD_RES (965)..(965): Selenocysteine
  MOD_RES (987)..(987): Selenocysteine
  MOD_RES (995)..(995): Selenocysteine
  MOD_RES (1002)..(1002): Selenocysteine
  MOD_RES (1038)..(1038): Selenocysteine
  MOD_RES (1043)..(1043): Selenocysteine
  MOD_RES (1064)..(1064): Selenocysteine
  MOD_RES (1069)..(1069): Selenocysteine
  MOD_RES (1082)..(1082): Selenocysteine
  MOD_RES (1104)..(1104): Selenocysteine
  MOD_RES (1108)..(1108): Selenocysteine
  MOD_RES (1119)..(1119): Selenocysteine
  MOD_RES (1140)..(1140): Selenocysteine
  MOD_RES (1164)..(1164): Selenocysteine
  MOD_RES (1192)..(1192): Selenocysteine
  MOD_RES (1203)..(1203): Selenocysteine
  MOD_RES (1212)..(1212): Selenocysteine
  MOD_RES (1223)..(1223): Selenocysteine
  MOD_RES (1229)..(1229): Selenocysteine
  MOD_RES (1257)..(1257): Selenocysteine
  MOD_RES (1262)..(1262): Selenocysteine
  MOD_RES (1362)..(1362): Selenocysteine
  MOD_RES (1408)..(1408): Selenocysteine
  MOD_RES (1441)..(1441): Selenocysteine
MGRVGYWXLLVLPALLVWRGPAPSAAAEKGPPALNIAVMLGHSHDVXERELRXLWGPEQAAGLPLDVNVVALLMNRXDPKSLIXHVCDLMSGARIHGLVFGDDXDQEAVAQMLDFISSHXFVPILGIHGGASMIMADKDPXSXFFQFGASIQQQAXVMLKIMQDYDWHVFSLVXXIFPGYREFISFVKXXVDNSFVGWDMQNVIXLDXSFEDAKXQVQLKKIHSSVILLYCSKDEAVLILSEARSLGLXGYDFFWIVPSLVSGNXELIPKEFPSGLISVSYDDWDYSLEARVRDGIGILXXAASSMLEKFSYIPEAKASCYGQMERPEVPMHXLHPFMVNVXWDGKDLSFXEEGYQVHPRLVVIVLNKDREWEKVGKWENHXLSLRHAVWPRYKSFSDCEPDDNHLSIVXLEEAPFVIVEDIDPLXEXCVRNXVPCRKFVKINNSXNEGMNVKKCCKGFCIDILKKLSRXVKFXYDLYLVXNGKHGKKVNNVWNGMIGEVVYQRAVMAVGSLXINEERSEVVDFSVPFVEXGISVMVSRSNGXVSPSAFLEPFSASVWVMMFVMLLIVSAIAVFVFEYFSPVGYNRNLAKGKAPHGPSFXIGKAIWLLWGLVFNNSVPVQNPKGXXSKIMVSVWAFFAVIFLASYXANLAAFMIQEEFVDQVXGLSDKKFQRPHDYSPPFRFGXVPNGSXERNIRNNYPYMHQYMXKFNQKGVEDALVSLKXGKLDAFIYDAAVLNYKAGRDEGCKLVXIGSGYIFAXXGYGIALQKGSPWKRQIDLALLQFVGDGEMEELEXLWLXGICHNEKNEVMSSQLDIDNMAGVFYMLAAAMALSLIXFIWEHLFYWKLRFCFXGVCSDRPGLLFSISRGIYSCIHGVHIEEKKKSPDFNLXGSQSNMLKLLRSAKNISSMSNMNSSRMDSPKRAADFIQRGSLIMDMVSDKGNLMYSDNRSFQGKESIFGDNMNELQXFVANRQKDNLNNYVFQGQHPLXLNESNPNXVEVAVSXESKANSRPRQLWKKSVDSIRQDSLSQNPVSQRDEAXAENRXHSLKSPRYLPEEMAHSDISEXSNRAXCHREPDNSKNHKXKDNFKRSVASKYPKDCSEVERXYLKXKSSSPRDKIYXIDGEKEPGFHLDPPQFVENVXLPENVDFPDPYQDPSENFRKGDSXLPMNRNPLHNEEGLSNNDQYKLYSKHFXLKDKGSPHSEXSERYRQNSXHCRSCLSNMPXYSGHFXMRSPFKCDACLRMGNLYDIDEDQMLQEXGNPAXGEQVYQQDWAQNNALQLQKNKLRISRQHSYDNIVDKPRELDLSRPSRSISLKDRERLLEGNFYGSLFSVPSSKLSGKKSSLFPQGLEDSKRSKSLLPDHXSDNPFLHSHRDDQRLVIGRCPSDPYKHSLPSQAVNDSYLRSSLRSXASYCSRDSRGHNDVYISEHVMPYAANKNNMYSXPRVLNSCSNRRVYKKMPSIESDV

SEQ ID NO: 11530 - protein, 1144 aa, Homo sapiens
  MOD_RES (4)..(4): Selenocysteine
  MOD_RES (6)..(6): Selenocysteine
  MOD_RES (19)..(19): Selenocysteine
  MOD_RES (37)..(38): Selenocysteine
  MOD_RES (52)..(53): Selenocysteine
  MOD_RES (68)..(68): Selenocysteine
  MOD_RES (71)..(71): Selenocysteine
  MOD_RES (78)..(78): Selenocysteine
  MOD_RES (112)..(112): Selenocysteine
  MOD_RES (128)..(128): Selenocysteine
  MOD_RES (163)..(164): Selenocysteine
  MOD_RES (196)..(196): Selenocysteine
  MOD_RES (205)..(205): Selenocysteine
  MOD_RES (214)..(214): Selenocysteine
  MOD_RES (245)..(245): Selenocysteine
  MOD_RES (273)..(273): Selenocysteine
  MOD_RES (289)..(289): Selenocysteine
  MOD_RES (291)..(291): Selenocysteine
  MOD_RES (296)..(296): Selenocysteine
  MOD_RES (309)..(309): Selenocysteine
  MOD_RES (333)..(333): Selenocysteine
  MOD_RES (337)..(337): Selenocysteine
  MOD_RES (344)..(344): Selenocysteine
  MOD_RES (376)..(376): Selenocysteine
  MOD_RES (394)..(394): Selenocysteine
  MOD_RES (406)..(406): Selenocysteine
  MOD_RES (463)..(463): Selenocysteine
  MOD_RES (488)..(489): Selenocysteine
  MOD_RES (509)..(509): Selenocysteine
  MOD_RES (526)..(526): Selenocysteine
  MOD_RES (547)..(547): Selenocysteine
  MOD_RES (553)..(553): Selenocysteine
  MOD_RES (569)..(569): Selenocysteine
  MOD_RES (585)..(585): Selenocysteine
  MOD_RES (612)..(612): Selenocysteine
  MOD_RES (621)..(622): Selenocysteine
  MOD_RES (656)..(656): Selenocysteine
  MOD_RES (660)..(660): Selenocysteine
  MOD_RES (697)..(697): Selenocysteine
  MOD_RES (713)..(713): Selenocysteine
  MOD_RES (751)..(751): Selenocysteine
  MOD_RES (828)..(828): Selenocysteine
  MOD_RES (850)..(850): Selenocysteine
  MOD_RES (858)..(858): Selenocysteine
  MOD_RES (865)..(865): Selenocysteine
  MOD_RES (901)..(901): Selenocysteine
  MOD_RES (906)..(906): Selenocysteine
  MOD_RES (927)..(927): Selenocysteine
  MOD_RES (932)..(932): Selenocysteine
  MOD_RES (945)..(945): Selenocysteine
  MOD_RES (967)..(967): Selenocysteine
  MOD_RES (971)..(971): Selenocysteine
  MOD_RES (982)..(982): Selenocysteine
  MOD_RES (1003)..(1003): Selenocysteine
  MOD_RES (1027)..(1027): Selenocysteine
  MOD_RES (1055)..(1055): Selenocysteine
  MOD_RES (1066)..(1066): Selenocysteine
  MOD_RES (1075)..(1075): Selenocysteine
  MOD_RES (1086)..(1086): Selenocysteine
  MOD_RES (1092)..(1092): Selenocysteine
  MOD_RES (1120)..(1120): Selenocysteine
  MOD_RES (1123)..(1123): Selenocysteine
  MOD_RES (1134)..(1134): Selenocysteine
  MOD_RES (1136)..(1136): Selenocysteine
  MOD_RES (1138)..(1138): Selenocysteine
QDPXSXFFQFGASIQQQAXVMLKIMQDYDWHVFSLVXXIFPGYREFISFVKXXVDNSFVGWDMQNVIXLDXSFEDAKXQVQLKKIHSSVILLYCSKDEAVLILSEARSLGLXGYDFFWIVPSLVSGNXELIPKEFPSGLISVSYDDWDYSLEARVRDGIGILXXAASSMLEKFSYIPEAKASCYGQMERPEVPMHXLHPFMVNVXWDGKDLSFXEEGYQVHPRLVVIVLNKDREWEKVGKWENHXLSLRHAVWPRYKSFSDCEPDDNHLSIVXLEEAPFVIVEDIDPLXEXCVRNXVPCRKFVKINNSXNEGMNVKKCCKGFCIDILKKLSRXVKFXYDLYLVXNGKHGKKVNNVWNGMIGEVVYQRAVMAVGSLXINEERSEVVDFSVPFVEXGISVMVSRSNGXVSPSAFLEPFSASVWVMMFVMLLIVSAIAVFVFEYFSPVGYNRNLAKGKAPHGPSFXIGKAIWLLWGLVFNNSVPVQNPKGXXSKIMVSVWAFFAVIFLASYXANLAAFMIQEEFVDQVXGLSDKKFQRPHDYSPPFRFGXVPNGSXERNIRNNYPYMHQYMXKFNQKGVEDALVSLKXGKLDAFIYDAAVLNYKAGRDEGCKLVXIGSGYIFAXXGYGIALQKGSPWKRQIDLALLQFVGDGEMEELEXLWLXGICHNEKNEVMSSQLDIDNMAGVFYMLAAAMALSLIXFIWEHLFYWKLRFCFXGVCSDRPGLLFSISRGIYSCIHGVHIEEKKKSPDFNLXGSQSNMLKLLRSAKNISSMSNMNSSRMDSPKRAADFIQRGSLIMDMVSDKGNLMYSDNRSFQGKESIFGDNMNELQXFVANRQKDNLNNYVFQGQHPLXLNESNPNXVEVAVSXESKANSRPRQLWKKSVDSIRQDSLSQNPVSQRDEAXAENRXHSLKSPRYLPEEMAHSDISEXSNRAXCHREPDNSKNHKXKDNFKRSVASKYPKDCSEVERXYLKXKSSSPRDKIYXIDGEKEPGFHLDPPQFVENVXLPENVDFPDPYQDPSENFRKGDSXLPMNRNPLHNEEGLSNNDQYKLYSKHFXLKDKGSPHSEXSERYRQNSXHCRSCLSNMPXYSGHFXMRSPFKCDACLRMGNLYDIDEDQMLQEXGMXNAWLLGDAPRXLXNXRCHPRR

SEQ ID NO: 11531 - protein, 1327 aa, Homo sapiens
  MOD_RES (4)..(4): Selenocysteine
  MOD_RES (6)..(6): Selenocysteine
  MOD_RES (19)..(19): Selenocysteine
  MOD_RES (37)..(38): Selenocysteine
  MOD_RES (52)..(53): Selenocysteine
  MOD_RES (68)..(68): Selenocysteine
  MOD_RES (71)..(71): Selenocysteine
  MOD_RES (78)..(78): Selenocysteine
  MOD_RES (112)..(112): Selenocysteine
  MOD_RES (128)..(128): Selenocysteine
  MOD_RES (163)..(164): Selenocysteine
  MOD_RES (196)..(196): Selenocysteine
  MOD_RES (205)..(205): Selenocysteine
  MOD_RES (214)..(214): Selenocysteine
  MOD_RES (245)..(245): Selenocysteine
  MOD_RES (273)..(273): Selenocysteine
  MOD_RES (289)..(289): Selenocysteine
  MOD_RES (291)..(291): Selenocysteine
  MOD_RES (296)..(296): Selenocysteine
  MOD_RES (309)..(309): Selenocysteine
  MOD_RES (333)..(333): Selenocysteine
  MOD_RES (337)..(337): Selenocysteine
  MOD_RES (344)..(344): Selenocysteine
  MOD_RES (376)..(376): Selenocysteine
  MOD_RES (394)..(394): Selenocysteine
  MOD_RES (406)..(406): Selenocysteine
  MOD_RES (463)..(463): Selenocysteine
  MOD_RES (488)..(489): Selenocysteine
  MOD_RES (509)..(509): Selenocysteine
  MOD_RES (526)..(526): Selenocysteine
  MOD_RES (547)..(547): Selenocysteine
  MOD_RES (553)..(553): Selenocysteine
  MOD_RES (569)..(569): Selenocysteine
  MOD_RES (585)..(585): Selenocysteine
  MOD_RES (612)..(612): Selenocysteine
  MOD_RES (621)..(622): Selenocysteine
  MOD_RES (656)..(656): Selenocysteine
  MOD_RES (660)..(660): Selenocysteine
  MOD_RES (697)..(697): Selenocysteine
  MOD_RES (713)..(713): Selenocysteine
  MOD_RES (751)..(751): Selenocysteine
  MOD_RES (828)..(828): Selenocysteine
  MOD_RES (850)..(850): Selenocysteine
  MOD_RES (858)..(858): Selenocysteine
  MOD_RES (865)..(865): Selenocysteine
  MOD_RES (901)..(901): Selenocysteine
  MOD_RES (906)..(906): Selenocysteine
  MOD_RES (927)..(927): Selenocysteine
  MOD_RES (932)..(932): Selenocysteine
  MOD_RES (945)..(945): Selenocysteine
  MOD_RES (967)..(967): Selenocysteine
  MOD_RES (971)..(971): Selenocysteine
  MOD_RES (982)..(982): Selenocysteine
  MOD_RES (1003)..(1003): Selenocysteine
  MOD_RES (1027)..(1027): Selenocysteine
  MOD_RES (1055)..(1055): Selenocysteine
  MOD_RES (1066)..(1066): Selenocysteine
  MOD_RES (1075)..(1075): Selenocysteine
  MOD_RES (1086)..(1086): Selenocysteine
  MOD_RES (1092)..(1092): Selenocysteine
  MOD_RES (1120)..(1120): Selenocysteine
  MOD_RES (1125)..(1125): Selenocysteine
  MOD_RES (1225)..(1225): Selenocysteine
  MOD_RES (1271)..(1271): Selenocysteine
  MOD_RES (1304)..(1304): Selenocysteine
QDPXSXFFQFGASIQQQAXVMLKIMQDYDWHVFSLVXXIFPGYREFISFVKXXVDNSFVGWDMQNVIXLDXSFEDAKXQVQLKKIHSSVILLYCSKDEAVLILSEARSLGLXGYDFFWIVPSLVSGNXELIPKEFPSGLISVSYDDWDYSLEARVRDGIGILXXAASSMLEKFSYIPEAKASCYGQMERPEVPMHXLHPFMVNVXWDGKDLSFXEEGYQVHPRLVVIVLNKDREWEKVGKWENHXLSLRHAVWPRYKSFSDCEPDDNHLSIVXLEEAPFVIVEDIDPLXEXCVRNXVPCRKFVKINNSXNEGMNVKKCCKGFCIDILKKLSRXVKFXYDLYLVXNGKHGKKVNNVWNGMIGEVVYQRAVMAVGSLXINEERSEVVDFSVPFVEXGISVMVSRSNGXVSPSAFLEPFSASVWVMMFVMLLIVSAIAVFVFEYFSPVGYNRNLAKGKAPHGPSFXIGKAIWLLWGLVFNNSVPVQNPKGXXSKIMVSVWAFFAVIFLASYXANLAAFMIQEEFVDQVXGLSDKKFQRPHDYSPPFRFGXVPNGSXERNIRNNYPYMHQYMXKFNQKGVEDALVSLKXGKLDAFIYDAAVLNYKAGRDEGCKLVXIGSGYIFAXXGYGIALQKGSPWKRQIDLALLQFVGDGEMEELEXLWLXGICHNEKNEVMSSQLDIDNMAGVFYMLAAAMALSLIXFIWEHLFYWKLRFCFXGVCSDRPGLLFSISRGIYSCIHGVHIEEKKKSPDFNLXGSQSNMLKLLRSAKNISSMSNMNSSRMDSPKRAADFIQRGSLIMDMVSDKGNLMYSDNRSFQGKESIFGDNMNELQXFVANRQKDNLNNYVFQGQHPLXLNESNPNXVEVAVSXESKANSRPRQLWKKSVDSIRQDSLSQNPVSQRDEAXAENRXHSLKSPRYLPEEMAHSDISEXSNRAXCHREPDNSKNHKXKDNFKRSVASKYPKDCSEVERXYLKXKSSSPRDKIYXIDGEKEPGFHLDPPQFVENVXLPENVDFPDPYQDPSENFRKGDSXLPMNRNPLHNEEGLSNNDQYKLYSKHFXLKDKGSPHSEXSERYRQNSXHCRSCLSNMPXYSGHFXMRSPFKCDACLRMGNLYDIDEDQMLQEXGNPAXGEQVYQQDWAQNNALQLQKNKLRISRQHSYDNIVDKPRELDLSRPSRSISLKDRERLLEGNFYGSLFSVPSSKLSGKKSSLFPQGLEDSKRSKSLLPDHXSDNPFLHSHRDDQRLVIGRCPSDPYKHSLPSQAVNDSYLRSSLRSXASYCSRDSRGHNDVYISEHVMPYAANKNNMYSXPRVLNSCSNRRVYKKMPSIESDV

SEQ ID NO: 11532 - protein, 46 aa, Homo sapiens
  MOD_RES (26)..(26): Selenocysteine
  MOD_RES (38)..(38): Selenocysteine
  MOD_RES (42)..(42): Selenocysteine
ANLAAFMIQEEYVDQVSGLSDKKMRXLRLRRSIFPKVXKLVXEPGF

SEQ ID NO: 11533 - protein, 35 aa, Homo sapiens
MKPRAECCSPKFWLVLAVLAVSGSRARSQKSPPSI

SEQ ID NO: 11534 - protein, 1484 aa, Homo sapiens
  MOD_RES (44)..(44): Selenocysteine
  MOD_RES (76)..(76): Selenocysteine
  MOD_RES (83)..(83): Selenocysteine
  MOD_RES (103)..(103): Selenocysteine
  MOD_RES (119)..(119): Selenocysteine
  MOD_RES (121)..(121): Selenocysteine
  MOD_RES (173)..(174): Selenocysteine
  MOD_RES (189)..(189): Selenocysteine
  MOD_RES (233)..(233): Selenocysteine
  MOD_RES (238)..(238): Selenocysteine
  MOD_RES (250)..(250): Selenocysteine
  MOD_RES (255)..(255): Selenocysteine
  MOD_RES (266)..(266): Selenocysteine
  MOD_RES (268)..(268): Selenocysteine
  MOD_RES (275)..(275): Selenocysteine
  MOD_RES (301)..(302): Selenocysteine
  MOD_RES (324)..(324): Selenocysteine
  MOD_RES (343)..(343): Selenocysteine
  MOD_RES (398)..(398): Selenocysteine
  MOD_RES (410)..(410): Selenocysteine
  MOD_RES (428)..(428): Selenocysteine
  MOD_RES (433)..(433): Selenocysteine
  MOD_RES (442)..(442): Selenocysteine
  MOD_RES (446)..(446): Selenocysteine
  MOD_RES (475)..(475): Selenocysteine
  MOD_RES (482)..(482): Selenocysteine
  MOD_RES (493)..(493): Selenocysteine
  MOD_RES (514)..(514): Selenocysteine
  MOD_RES (532)..(532): Selenocysteine
  MOD_RES (544)..(544): Selenocysteine
  MOD_RES (601)..(601): Selenocysteine
  MOD_RES (626)..(627): Selenocysteine
  MOD_RES (647)..(647): Selenocysteine
  MOD_RES (685)..(685): Selenocysteine
  MOD_RES (691)..(691): Selenocysteine
  MOD_RES (723)..(723): Selenocysteine
  MOD_RES (750)..(750): Selenocysteine
  MOD_RES (760)..(760): Selenocysteine
  MOD_RES (798)..(798): Selenocysteine
  MOD_RES (835)..(835): Selenocysteine
  MOD_RES (888)..(888): Selenocysteine
  MOD_RES (890)..(890): Selenocysteine
  MOD_RES (894)..(894): Selenocysteine
  MOD_RES (904)..(904): Selenocysteine
  MOD_RES (942)..(942): Selenocysteine
  MOD_RES (969)..(969): Selenocysteine
  MOD_RES (1012)..(1013): Selenocysteine
  MOD_RES (1065)..(1065): Selenocysteine
  MOD_RES (1067)..(1067): Selenocysteine
  MOD_RES (1069)..(1069): Selenocysteine
  MOD_RES (1139)..(1139): Selenocysteine
  MOD_RES (1152)..(1152): Selenocysteine
  MOD_RES (1174)..(1174): Selenocysteine
  MOD_RES (1183)..(1183): Selenocysteine
  MOD_RES (1202)..(1202): Selenocysteine
  MOD_RES (1227)..(1228): Selenocysteine
  MOD_RES (1230)..(1230): Selenocysteine
  MOD_RES (1273)..(1273): Selenocysteine
  MOD_RES (1278)..(1279): Selenocysteine
  MOD_RES (1286)..(1286): Selenocysteine
  MOD_RES (1306)..(1306): Selenocysteine
  MOD_RES (1348)..(1348): Selenocysteine
  MOD_RES (1358)..(1358): Selenocysteine
  MOD_RES (1383)..(1383): Selenocysteine
  MOD_RES (1390)..(1390): Selenocysteine
  MOD_RES (1410)..(1410): Selenocysteine
  MOD_RES (1426)..(1426): Selenocysteine
MKPRAECCSPKFWLVLAVLAVSGSRARSQKSPPSIGIAVILVGXSDEVAIKDAHEKDDFHHLSVVPRVELVAMNEXDPKSIIXRICDLMSDRKIQGVVFADDXDQEAIAQILDFISAQXLXPILGIHGGSSMIMADKDESSMFFQFGPSIEQQASVMLNIMEEYDWYIFSIVXXYFPGYQDFVNKIRSXIENSFVGWELEEVLLLDMSLDDGDSKIQNQLKKLQSPIILLYCXKEEAXYIFEVANSVGLXGYGYXWIVPSLVAGDXDXVPAEFPXGLISVSYDEWDYGLPARVRDGIAIIXXAASDMLSEHSFIPEPKSSCYNXHEKRIYQSNMLNRYLINVXFEGRNLSFSEDGYQMHPKLVIILLNKERKWERVGKWKDKSLQMKYYVWPRMCPEXEEQEDDHLSIVXLEEAPFVIVESVDPLSGXCMRNXVPCQKRIVXENKXDEEPGYIKKCCKGFCIDILKKISKSVKFXYDLYLVXNGKHGKKINGXWNGMIGEVVMKRAYMAVGSLXINEERSEVVDFSVPFIEXGISVMVSRSNGXVSPSAFLEPFSADVWVMMFVMLLIVSAVAVFVFEYFSPVGYNRCLADGREPGGPSFXIGKAIWLLWGLVFNNSVPVQNPKGXXSKIMVSVWAFFAVIFLASYXANLAAFMIQEEYVDQVSGLSDKKFQRPNDFSPPFRFGXVPNGSXERNIRNNYAEMHAYMGKFNQRGVDDALLSLKXGKLDAFIYDAAVLNYMAGRDEGCKLVXIGSGKVFASXGYGIAIQKDSGWKRQVDLAILQLFGDGEMEELEALWLXGICHNEKNEVMSSQLDIDNMAGVFYMLGAAMALSLIXFICEHLFYWQFRHCFMGVCSGKPGMVFSISRGIYSCIHGVAIEERQSVMNSPXAXMNNXHSNILRLLRXAKNMANLSGVNGSPQSALDFIRRESSVYDISEHRRSFXHSDCKSYNNPPCEENLFSDYISEVERXFGNLQLKDSNVYQDHYHHHHRPHSIGSASSIDGLYDCDNPPFXXQSRSISKKPLDIGLPSSKHSQLSDLYGKFSFKSDRYSGHDDLIRSDVSDISXHXVXYGNIEGNAAKRRKQQYKDSLKKRPASAKSRREFDEIELAYRRRPPRSPDHKRYFRDKEGLRDFYLDQFRXKENSPHWEHVDLXDIYKERSDDFKRDSVSGGGPCXNRSHIKHGXGDKHGVVSGVPAPWEKNLXNVEWEDRSGGNFCRSCPSKLHNYSXXVXGQNSGRQACIRCEACKKAGNLYDISEDNSLQELDQPAAPVAVXSNASXXKYPQSPXNSKAQKKNRNKLRRQHSYDXFVDLQKEEAALAPRSVSLKDKGRFMDGSPYAHMFEMSAGESXFANNKSSVPXAGHHHHNNPGGGYMLSKSLYPDRVXQNPFIPXFGDDQCLLHGSKSYFFRQPXVAGASKARPDFRALVXNKPVVSALHGAVPARFQKDICIGNQSNPCVPNNKNPRAFNGSSNGHVYEKLSSIESDV

SEQ ID NO: 11535 - protein, 873 aa, Homo sapiens
  MOD_RES (12)..(12): Selenocysteine
  MOD_RES (31)..(31): Selenocysteine
  MOD_RES (51)..(51): Selenocysteine
  MOD_RES (66)..(66): Selenocysteine
  MOD_RES (71)..(72): Selenocysteine
  MOD_RES (79)..(79): Selenocysteine
  MOD_RES (101)..(101): Selenocysteine
  MOD_RES (115)..(115): Selenocysteine
  MOD_RES (131)..(131): Selenocysteine
  MOD_RES (169)..(169): Selenocysteine
  MOD_RES (200)..(200): Selenocysteine
  MOD_RES (212)..(212): Selenocysteine
  MOD_RES (262)..(262): Selenocysteine
  MOD_RES (268)..(268): Selenocysteine
  MOD_RES (278)..(278): Selenocysteine
  MOD_RES (309)..(309): Selenocysteine
  MOD_RES (339)..(339): Selenocysteine
  MOD_RES (357)..(357): Selenocysteine
  MOD_RES (404)..(404): Selenocysteine
  MOD_RES (407)..(407): Selenocysteine
  MOD_RES (423)..(423): Selenocysteine
  MOD_RES (430)..(430): Selenocysteine
  MOD_RES (440)..(440): Selenocysteine
  MOD_RES (450)..(450): Selenocysteine
  MOD_RES (479)..(479): Selenocysteine
  MOD_RES (511)..(511): Selenocysteine
  MOD_RES (529)..(529): Selenocysteine
  MOD_RES (541)..(541): Selenocysteine
  MOD_RES (565)..(565): Selenocysteine
  MOD_RES (570)..(570): Selenocysteine
  MOD_RES (587)..(587): Selenocysteine
  MOD_RES (598)..(598): Selenocysteine
  MOD_RES (623)..(624): Selenocysteine
  MOD_RES (644)..(644): Selenocysteine
  MOD_RES (659)..(659): Selenocysteine
  MOD_RES (682)..(682): Selenocysteine
  MOD_RES (688)..(688): Selenocysteine
  MOD_RES (701)..(701): Selenocysteine
  MOD_RES (716)..(716): Selenocysteine
  MOD_RES (747)..(747): Selenocysteine
  MOD_RES (756)..(757): Selenocysteine
  MOD_RES (786)..(786): Selenocysteine
  MOD_RES (791)..(791): Selenocysteine
MGGALGPALLLXSLFGAWAGLGPGQGEQGMXVAVVFSSSGPPQAQFRARLXPQSFLDLPLEIQPLXVGVNXXNPSSLLXQICGLLGAAHVHGIVFEDNVDXEAVAQILDFISSQXHVPILSISGGSAVVLXPKEPGSAFLQLGVSLEQQLQVLFKVLEEYDWSAFAVIXSLHPGHALFLEGVRAVADASHVSWRLLDVVXLELGPGGPRARXQRLLRQLDAPVFVAYCSREEAEVLFAEAAQAGLVGPGHVWLVPNLALGSXDAPPAXFPVGLISVVXESWRLSLRQKVRDGVAILALGAHSYWRQHGXLPAPAGDCRVHPGPVSPAREAFYRHLLNVXWEGRDFSFSPGGYLVQPXMVVIALNRHRLWEMVGRWEHGVLYMKYPVWPRYSASLQPVVDSRHLXVAXLEERPFVIVESPDPGXGGCVPNXVPCRRQSNHXFSSGDVAPYXKLCCKGFCIDILKKLARVVKFSYDLYLVXNGKHGKRVRGVWNGMIGEVYYKRADMAIGSLXINEERSEIVDFSVPFVEXGISVMVARSNGXVSPSAFLEPYSPAVWVMMFVMCLXVVAIXVFMFEYFSPVSYNQNLXRGKKSGGPAFXIGKSVWLLWALVFNNSVPIENPRGXXSKIMVLVWAFFAVIFLASYXANLAAFMIQEQYIDXVSGLSDKKFQRPQDQYPPFRFGXVPNGSXERNIRSNYRDMHXHMVKFNQRSVEDALXSLKMGKLDAFIYDAAVLNYMAGKDEGCKLVXIGSGKVFAXXGYGIAMQKDSHWKRAIDLALLQFLGDGEXQKLEXVWLSGICQNEKNEVMSSKLDIDNMAGVFYMLLVAMGLALLVFAWEHLVYWKLRHSVPNSSQLDFLLAFSRVGAHPSPHRPKF

SEQ ID NO: 11536 - protein, 1233 aa, Homo sapiens
  MOD_RES (12)..(12): Selenocysteine
  MOD_RES (31)..(31): Selenocysteine
  MOD_RES (51)..(51): Selenocysteine
  MOD_RES (66)..(66): Selenocysteine
  MOD_RES (71)..(72): Selenocysteine
  MOD_RES (79)..(79): Selenocysteine
  MOD_RES (101)..(101): Selenocysteine
  MOD_RES (115)..(115): Selenocysteine
  MOD_RES (131)..(131): Selenocysteine
  MOD_RES (169)..(169): Selenocysteine
  MOD_RES (200)..(200): Selenocysteine
  MOD_RES (212)..(212): Selenocysteine
  MOD_RES (262)..(262): Selenocysteine
  MOD_RES (268)..(268): Selenocysteine
  MOD_RES (278)..(278): Selenocysteine
  MOD_RES (309)..(309): Selenocysteine
  MOD_RES (339)..(339): Selenocysteine
  MOD_RES (357)..(357): Selenocysteine
  MOD_RES (404)..(404): Selenocysteine
  MOD_RES (407)..(407): Selenocysteine
  MOD_RES (423)..(423): Selenocysteine
  MOD_RES (430)..(430): Selenocysteine
  MOD_RES (440)..(440): Selenocysteine
  MOD_RES (450)..(450): Selenocysteine
  MOD_RES (479)..(479): Selenocysteine
  MOD_RES (511)..(511): Selenocysteine
  MOD_RES (529)..(529): Selenocysteine
  MOD_RES (541)..(541): Selenocysteine
  MOD_RES (565)..(565): Selenocysteine
  MOD_RES (570)..(570): Selenocysteine
  MOD_RES (587)..(587): Selenocysteine
  MOD_RES (598)..(598): Selenocysteine
  MOD_RES (623)..(624): Selenocysteine
  MOD_RES (644)..(644): Selenocysteine
  MOD_RES (659)..(659): Selenocysteine
  MOD_RES (682)..(682): Selenocysteine
  MOD_RES (688)..(688): Selenocysteine
  MOD_RES (701)..(701): Selenocysteine
  MOD_RES (716)..(716): Selenocysteine
  MOD_RES (747)..(747): Selenocysteine
  MOD_RES (756)..(757): Selenocysteine
  MOD_RES (786)..(786): Selenocysteine
  MOD_RES (791)..(791): Selenocysteine
  MOD_RES (885)..(885): Selenocysteine
  MOD_RES (905)..(906): Selenocysteine
  MOD_RES (917)..(917): Selenocysteine
  MOD_RES (919)..(919): Selenocysteine
  MOD_RES (937)..(937): Selenocysteine
  MOD_RES (948)..(948): Selenocysteine
  MOD_RES (958)..(958): Selenocysteine
  MOD_RES (983)..(983): Selenocysteine
  MOD_RES (1008)..(1008): Selenocysteine
  MOD_RES (1101)..(1101): Selenocysteine
  MOD_RES (1191)..(1191): Selenocysteine
  MOD_RES (1196)..(1196): Selenocysteine
  MOD_RES (1214)..(1214): Selenocysteine
  MOD_RES (1222)..(1222): Selenocysteine
MGGALGPALLLXSLFGAWAGLGPGQGEQGMXVAVVFSSSGPPQAQFRARLXPQSFLDLPLEIQPLXVGVNXXNPSSLLXQICGLLGAAHVHGIVFEDNVDXEAVAQILDFISSQXHVPILSISGGSAVVLXPKEPGSAFLQLGVSLEQQLQVLFKVLEEYDWSAFAVIXSLHPGHALFLEGVRAVADASHVSWRLLDVVXLELGPGGPRARXQRLLRQLDAPVFVAYCSREEAEVLFAEAAQAGLVGPGHVWLVPNLALGSXDAPPAXFPVGLISVVXESWRLSLRQKVRDGVAILALGAHSYWRQHGXLPAPAGDCRVHPGPVSPAREAFYRHLLNVXWEGRDFSFSPGGYLVQPXMVVIALNRHRLWEMVGRWEHGVLYMKYPVWPRYSASLQPVVDSRHLXVAXLEERPFVIVESPDPGXGGCVPNXVPCRRQSNHXFSSGDVAPYXKLCCKGFCIDILKKLARVVKFSYDLYLVXNGKHGKRVRGVWNGMIGEVYYKRADMAIGSLXINEERSEIVDFSVPFVEXGISVMVARSNGXVSPSAFLEPYSPAVWVMMFVMCLXVVAIXVFMFEYFSPVSYNQNLXRGKKSGGPAFXIGKSVWLLWALVFNNSVPIENPRGXXSKIMVLVWAFFAVIFLASYXANLAAFMIQEQYIDXVSGLSDKKFQRPQDQYPPFRFGXVPNGSXERNIRSNYRDMHXHMVKFNQRSVEDALXSLKMGKLDAFIYDAAVLNYMAGKDEGCKLVXIGSGKVFAXXGYGIAMQKDSHWKRAIDLALLQFLGDGEXQKLEXVWLSGICQNEKNEVMSSKLDIDNMAGVFYMLLVAMGLALLVFAWEHLVYWKLRHSVPNSSQLDFLLAFSRGIYSCFSGVQSLASPPRQASPDLXASSAQASVLKMLQAARDMVXXAGVSSSLDRAXRXIENWGGGRRAPPPSPCPXPRSGPSPCLPXPDPPPEPSPXGWGPPDGGRAALVRRAPQPPGRPPXPGPPLSDVSRVSRRPAWEARWPVRXGHCGRHLSASERPLSPARCHYSSFPRADRSGRPFLPLFPELEDLPLLGPEQLARREALLHAAWARGSRPRHASLPSSVAEAFARPSSLPAGCXGPACARPDGHSACRRLAQAQSMCLPIYREACQEGEQAGAPAWQHRQHVCLHAHAHLPFCWGAVCPHLPPCASHGSWLSGAWGPLGHRGRXLGLGXGYRDSGGLDEISRVARGXQGFPGPCXWRRISSLESEV

SEQ ID NO: 11537 - protein, 1336 aa, Homo sapiens
  MOD_RES (137)..(137): Selenocysteine
  MOD_RES (153)..(153): Selenocysteine
  MOD_RES (160)..(160): Selenocysteine
  MOD_RES (168)..(168): Selenocysteine
  MOD_RES (185)..(185): Selenocysteine
  MOD_RES (191)..(192): Selenocysteine
  MOD_RES (208)..(208): Selenocysteine
  MOD_RES (222)..(222): Selenocysteine
  MOD_RES (266)..(266): Selenocysteine
  MOD_RES (354)..(354): Selenocysteine
  MOD_RES (368)..(368): Selenocysteine
  MOD_RES (393)..(393): Selenocysteine
  MOD_RES (397)..(397): Selenocysteine
  MOD_RES (408)..(408): Selenocysteine
  MOD_RES (429)..(429): Selenocysteine
  MOD_RES (433)..(433): Selenocysteine
  MOD_RES (436)..(436): Selenocysteine
  MOD_RES (454)..(454): Selenocysteine
  MOD_RES (469)..(469): Selenocysteine
  MOD_RES (498)..(498): Selenocysteine
  MOD_RES (509)..(509): Selenocysteine
  MOD_RES (541)..(541): Selenocysteine
  MOD_RES (559)..(559): Selenocysteine
  MOD_RES (571)..(571): Selenocysteine
  MOD_RES (595)..(595): Selenocysteine
  MOD_RES (600)..(600): Selenocysteine
  MOD_RES (618)..(618): Selenocysteine
  MOD_RES (626)..(626): Selenocysteine
  MOD_RES (628)..(628): Selenocysteine
  MOD_RES (653)..(654): Selenocysteine
  MOD_RES (674)..(674): Selenocysteine
  MOD_RES (689)..(689): Selenocysteine
  MOD_RES (712)..(712): Selenocysteine
  MOD_RES (718)..(718): Selenocysteine
  MOD_RES (746)..(746): Selenocysteine
  MOD_RES (777)..(777): Selenocysteine
  MOD_RES (786)..(787): Selenocysteine
  MOD_RES (880)..(880): Selenocysteine
  MOD_RES (946)..(946): Selenocysteine
  MOD_RES (1039)..(1039): Selenocysteine
  MOD_RES (1082)..(1082): Selenocysteine
  MOD_RES (1242)..(1242): Selenocysteine
  MOD_RES (1268)..(1268): Selenocysteine
  MOD_RES (1288)..(1288): Selenocysteine
  MOD_RES (1309)..(1309): Selenocysteine
  MOD_RES (1322)..(1322): Selenocysteine
MRGAGGPRGPRGPAKMLLLLALACASPFPEEAPGPGGAGGPGGGLGGARPLNVALVFSGPAYAAEAARLGPAVAAAVRSPGLDVRPVALVLNGSDPRSLVLQLCDLLSGLRVHGVVFEDDSRAPAVAPILDFLSAQXSLPIVAVHGGAALVLXPKEKGSXFLQLGSSXEQQLQVIFEVLEEYDWXSFVAVXXRAPGHRAFLSYIEVLXDGSLVGWEHRGALXLDPGAGEAVLSAQLRSVSAQIRLLFCAREEAEPVFRAAEEAGLXGSGYVWFMVGPQLAGGGGSGAPGEPPLLPGGAPLPAGLFAVRSAGWRDDLARRVAAGVAVVARGAQALLRDYGFLPELGHDCRAQNRXHRGESLHRYFMNIXWDNRDYSFNEDGFLVNPSLVVISLXRDRXWEVVGSWEQQXLRLKYPLWSRYGRFLQPVDDXQHLXVAXLEERPFVIVEPADPISGXCIRDSVPCRSQLNRXHSPPPDAPRPEKRCCKGFCIDILKRLAHXIGFSYDLYLVXNGKHGKKIDGVWNGMIGEVFYQRADMAIGSLXINEERSEIVDFSVPFVEXGISVMVARSNGXVSPSAFLEPYSPAVWVMMFVMCLXVVAVXVFIFEYLSPVGYNRSLAXGKRPGGSXFXIGKSIWLLWALVFNNSVPVENPRGXXSKIMVLVWAFFAVIFLASYXANLAAFMIQEEYVDXVSGLSDRKFQRPQEQYPPLKFGXVPNGSXEKNIRSNYPDMHSYMVRYNQPRVEEALXQLKAGKLDAFIYDAAVLNYMARKDEGCKLVXIGSGKVFAXXGYGIALHKGSRWKRPIDLALLQFLGDDEIEMLERLWLSGICHNDKIEVMSSKLDIDNMAGVFYMLLVAMGLSLLVFAWEHLVYWRLRHCLGPXHRMDFLLAFSRGMYSCCSAEAAPPPAKPPPPPQPLPSPAYPAPRPAPGPAPFVPRERASVDRWRRXKGAGPPGGAGLADGFHRYYGPIEPQGLGLGLGEARAAPRGAAGRPLSPPAAQPPQKPPPSYFAIVRDKEPAEPPAGAFPGFPSPPAPPAAAAXAVGPPLCRLAFEDESPPAPARWPRSDPESQPLLGPGAGGAGGXGGAGGGAPAAPPPCRAAPPPCPYLDLEPSPSDSEDSESLGGASLGGLEPWWFADFPYPYAERLGPPPGRYWSVDKLGGWRAGSWDYLPPRSGPAAWHCRHCASLELLPPPRHLSCSHDGLDGGWWAPPPPPWAAGPLPRRRARCGCPRSHPHRPRASHRXPAAAAPHHHRHRRAAGGWDLPPPAPXSRSLEDLSSCPRAAPARRLXGPSRHARRCPHAAHWGPPLPXASHRRHRGGDLGXRRGSAHFSSLESEV

SEQ ID NO: 11538 - protein, 1115 aa, Homo sapiens
  MOD_RES (59)..(60): Selenocysteine
  MOD_RES (85)..(85): Selenocysteine
  MOD_RES (101)..(101): Selenocysteine
  MOD_RES (187)..(187): Selenocysteine
  MOD_RES (253)..(253): Selenocysteine
  MOD_RES (258)..(258): Selenocysteine
  MOD_RES (277)..(277): Selenocysteine
  MOD_RES (283)..(283): Selenocysteine
  MOD_RES (298)..(298): Selenocysteine
  MOD_RES (304)..(304): Selenocysteine
  MOD_RES (322)..(322): Selenocysteine
  MOD_RES (324)..(324): Selenocysteine
  MOD_RES (342)..(343): Selenocysteine
  MOD_RES (367)..(367): Selenocysteine
  MOD_RES (380)..(381): Selenocysteine
  MOD_RES (402)..(402): Selenocysteine
  MOD_RES (404)..(404): Selenocysteine
  MOD_RES (416)..(416): Selenocysteine
  MOD_RES (424)..(425): Selenocysteine
  MOD_RES (428)..(428): Selenocysteine
  MOD_RES (440)..(441): Selenocysteine
  MOD_RES (455)..(455): Selenocysteine
  MOD_RES (479)..(479): Selenocysteine
  MOD_RES (505)..(505): Selenocysteine
  MOD_RES (519)..(519): Selenocysteine
  MOD_RES (528)..(528): Selenocysteine
  MOD_RES (548)..(548): Selenocysteine
  MOD_RES (553)..(553): Selenocysteine
  MOD_RES (567)..(567): Selenocysteine
  MOD_RES (614)..(614): Selenocysteine
  MOD_RES (624)..(624): Selenocysteine
  MOD_RES (630)..(630): Selenocysteine
  MOD_RES (636)..(636): Selenocysteine
  MOD_RES (645)..(645): Selenocysteine
  MOD_RES (651)..(651): Selenocysteine
  MOD_RES (659)..(659): Selenocysteine
  MOD_RES (662)..(662): Selenocysteine
  MOD_RES (676)..(676): Selenocysteine
  MOD_RES (688)..(688): Selenocysteine
  MOD_RES (693)..(693): Selenocysteine
  MOD_RES (704)..(704): Selenocysteine
  MOD_RES (731)..(731): Selenocysteine
  MOD_RES (741)..(741): Selenocysteine
  MOD_RES (759)..(759): Selenocysteine
  MOD_RES (761)..(761): Selenocysteine
  MOD_RES (796)..(796): Selenocysteine
  MOD_RES (825)..(825): Selenocysteine
  MOD_RES (863)..(863): Selenocysteine
  MOD_RES (884)..(884): Selenocysteine
  MOD_RES (921)..(921): Selenocysteine
  MOD_RES (923)..(923): Selenocysteine
  MOD_RES (948)..(949): Selenocysteine
  MOD_RES (975)..(975): Selenocysteine
  MOD_RES (985)..(985): Selenocysteine
  MOD_RES (997)..(997): Selenocysteine
  MOD_RES (1012)..(1012): Selenocysteine
  MOD_RES (1016)..(1016): Selenocysteine
  MOD_RES (1060)..(1061): Selenocysteine
  MOD_RES (1101)..(1101): Selenocysteine
  MOD_RES (1109)..(1109): Selenocysteine
  MOD_RES (1112)..(1112): Selenocysteine
MRRLSLWWLLSRVCLLLPPPCALVLAGVPSSSSHPQPCQILKRIGHAVRVGAVHLQPWXXAPRAASRAPDDSRAGAQRDEPEPGXRRSPAPSPGARWLGSXLHGRGPPGSRKPGEGARAEALWPRDALLFAVDNLNRVEGLLPYNLSLEVVMAIEAGLGDLPLLPFSSPSSPWSSDPFSFLQSVCHXVVVQGVSALLAFPQSQGEMMELDLVSLVLHIPVISIVRHEFPRESQNPLHLQLSLENSLSSDADVXVSILXMNNWYNFSLLLCQEDWNIXDFLLLXQNNSKFHLGSIINIXANLPSXQDLLSFLQIQLESIKNSXPXVVMFGCDMESIRRIFEIXXQFGVMPPELRWVLGDSQNVEELRXEGLPLGLIAHGKXXQSVFEHYVQDAMELVARAVAXAXMIQPELALIPSXMNCMEVEXXNLXSGQYLSRFLANXXFRGLSGSIRVKGSXIVSSENNFFIWNLQHDPMGKPMWXRLGSWQGGKIVMDYGIWPEQAQRHKXHFQHPSKLHLRVVXLIEHPFVFXREVDDEGLCPAGQLCLDPMXNDSSXLDSLFSSLHSSNDXVPIKFKKCCYGYCIDLLEKIAEDMNFDFDLYIVGDGKYGAWKNGHWXGLVGDLLRGXAHMAVXSFSINXARSQVIDFXSPFFSXSLGILVRXRDXAAPIGAFMWPLHWXMWLGIFVALHIXAVFLXLYEWKSPFGLXPKGRNRSKVFSFSSALNICYALLFGRXVAIKPPKCWXGRFLMNLWAIFCMFCLSXYXANLAAVMVGEKIYEELSGIHDPKLHHPSQGFRFGXVRESSAEDYVRQSFPEMHEYMRRYNVPAXPDGVEYLKNDPEKLDAFIMDKALLDYEVSIDADCKLLXVGKPFAIEGYGIGLPPNSPLXANISELISQYKSHGFMDMLHDKWYRVVPCGKRSFAVXEXLQMGIKHFSGLFVLLCIGFGLSILXXIGEHIVYRLLLPRIKNKSKLQYWLHXSQRLHRAINXSFIEEKQQHFKXKRVEKRSNVGPRQLXVWNXSNLSHDNRRKYIFSDEEGQNQLGIRIHQDIPLPPRRRELPALRXXNGKADSLNVSRNSVMQELSELEKQIQVIRQELQLAVSRKXELEEYQRXSRXCES

SEQ ID NO: 11539 - protein, 1043 aa, Homo sapiens
  MOD_RES (88)..(88): Selenocysteine
  MOD_RES (123)..(123): Selenocysteine
  MOD_RES (125)..(125): Selenocysteine
  MOD_RES (157)..(157): Selenocysteine
  MOD_RES (181)..(181): Selenocysteine
  MOD_RES (192)..(192): Selenocysteine
  MOD_RES (210)..(210): Selenocysteine
  MOD_RES (262)..(262): Selenocysteine
  MOD_RES (271)..(271): Selenocysteine
  MOD_RES (345)..(345): Selenocysteine
  MOD_RES (351)..(351): Selenocysteine
  MOD_RES (357)..(357): Selenocysteine
  MOD_RES (385)..(385): Selenocysteine
  MOD_RES (421)..(421): Selenocysteine
  MOD_RES (450)..(450): Selenocysteine
  MOD_RES (455)..(455): Selenocysteine
  MOD_RES (491)..(491): Selenocysteine
  MOD_RES (514)..(514): Selenocysteine
  MOD_RES (530)..(530): Selenocysteine
  MOD_RES (545)..(545): Selenocysteine
  MOD_RES (551)..(551): Selenocysteine
  MOD_RES (562)..(562): Selenocysteine
  MOD_RES (577)..(577): Selenocysteine
  MOD_RES (588)..(588): Selenocysteine
  MOD_RES (593)..(593): Selenocysteine
  MOD_RES (604)..(604): Selenocysteine
  MOD_RES (612)..(612): Selenocysteine
  MOD_RES (631)..(631): Selenocysteine
  MOD_RES (636)..(636): Selenocysteine
  MOD_RES (641)..(641): Selenocysteine
  MOD_RES (661)..(661): Selenocysteine
  MOD_RES (673)..(673): Selenocysteine
  MOD_RES (696)..(696): Selenocysteine
  MOD_RES (724)..(725): Selenocysteine
  MOD_RES (733)..(733): Selenocysteine
  MOD_RES (763)..(763): Selenocysteine
  MOD_RES (784)..(784): Selenocysteine
  MOD_RES (821)..(821): Selenocysteine
  MOD_RES (823)..(823): Selenocysteine
  MOD_RES (875)..(875): Selenocysteine
  MOD_RES (885)..(885): Selenocysteine
  MOD_RES (895)..(895): Selenocysteine
  MOD_RES (916)..(916): Selenocysteine
  MOD_RES (975)..(975): Selenocysteine
MEFVRALWLGLALALGPGSAGGHPQPCGVLARLGGSVRLGALLPRAPLARARARAALARAALAPRLPHNLSLELVVAAPPARDPASLXRGLCQALVPPGVAALLAFPEARPELLQLHFLAAAXEXPVLSLLRREARAPLGAPNPFHLQLHWASPLEXLLDVLVAVLQAHAWEDVGLALCRXQDPGGLVALWXSRAGRPPQLVLDLSRRDXGDAGLRARLAPMAAPVGGEAPVPAAVLLGCDIARARRVLEAVPPGPHWLLGXPLPPKALPXAGLPPGLLALGEVARPPLEAAIHDIVQLVARALGSAAQVQPKRALLPAPVNCGDLQPAGPESPGRFLARFLANXSFQGRXGPVWVXGSSQVHMSRHFKVWSLRRDPRGAPAWAXVGSWRDGQLDLEPGGASARPPPPQGAQVWPKLRVVXLLEHPFVFARDPDEDGQCPAGQLCLDPGXNDSAXLDALFAALANGSAPRALRKCCYGYCIDLLERLAEDXPFDFELYLVGDGKYGALRDGRWXGLVGDLLAGRAHMAVXSFSINSARSQVVDFXSPFFSXSLGIMVRARDXASPIGAFMWPLHWSXWLGVFAALHLXALFLXVYEWRSPYGLXPRGRNRSXVFSYSSALNLCYAILFRRXVSSKXPKCPXGRLLMNLWAIFCLLVLSSYXANLAAVMVGDKXFEELSGIHDPKLHHPAQGFRFGXVWESSAEAYIKKSFPDMHAHMRRHSAPXXPRGVAMLXSDPPKLNAFIMDKSLLDYEVSIDADCKLLXVGKPFAIEGYGIGLPQNSPLXSNLSEFISRYKSSGFIDLLHDKWYKMVPCGKRVFAVXEXLQMSIYHFAGLFVLLCLGLGSALLSSLGEHAFFRLALPRIRKGSRLQYWLHXSQKIHRALNXEPPEGSKEEXAEAEPSGPEVEQQQQQQDQPXAPEGWKRARRAVDKERRVRFLLEPAVVVAPEADAEAEAAPREGPVWLCSYGRPPAARPXGAPQPGELQELERRIEVARERLRQALVRRGQLLAQLGDSARHRPRRLLQARAAPAEAPPHSGRPGSQE

SEQ ID NO: 11540 - protein, 101 aa, Homo sapiens
MSHEKSFLVSGDNYPPPNPGYPGGPQPPMPPYAQPPYPGAPYPQPPFQPSPYGQPGYPHGPSPYPQGGYPQGPYPQGGYPQGPYPQEGYPQGPYPQGGYPQ

SEQ ID NO: 11541 - protein, 274 aa, Homo sapiens
  MOD_RES (150)..(150): Selenocysteine
  MOD_RES (170)..(170): Selenocysteine
  MOD_RES (176)..(176): Selenocysteine
  MOD_RES (179)..(179): Selenocysteine
  MOD_RES (184)..(184): Selenocysteine
  MOD_RES (199)..(199): Selenocysteine
  MOD_RES (235)..(235): Selenocysteine
  MOD_RES (251)..(251): Selenocysteine
  MOD_RES (261)..(262): Selenocysteine
  MOD_RES (267)..(267): Selenocysteine
MSHEKSFLVSGDNYPPPNPGYPGGPQPPMPPYAQPPYPGAPYPQPPFQPSPYGQPGYPHGPSPYPQGGYPQGPYPQGGYPQGPYPQEGYPQGPYPQGGYPQGPYPQSPFPPNPYGQPQVFPGQDPDSPQHGNYQEEGPPSYYDNQDFPAXNWDDKSIRQAFIRKVFLVLXLQLSVXLSXVSVFXFVAEVKGFVRENVWXYYVSYAVFFISLIVLSCCGDFRRKHPWNLVALSVLXASLSYMVGMIASFYNXEAVIMAVGIXXAVCFXVVIFSMQ

SEQ ID NO: 11542 - protein, 371 aa, Homo sapiens
  MOD_RES (150)..(150): Selenocysteine
  MOD_RES (170)..(170): Selenocysteine
  MOD_RES (176)..(176): Selenocysteine
  MOD_RES (179)..(179): Selenocysteine
  MOD_RES (184)..(184): Selenocysteine
  MOD_RES (199)..(199): Selenocysteine
  MOD_RES (235)..(235): Selenocysteine
  MOD_RES (251)..(251): Selenocysteine
  MOD_RES (261)..(262): Selenocysteine
  MOD_RES (267)..(267): Selenocysteine
  MOD_RES (275)..(275): Selenocysteine
  MOD_RES (280)..(280): Selenocysteine
  MOD_RES (321)..(321): Selenocysteine
  MOD_RES (328)..(328): Selenocysteine
  MOD_RES (353)..(353): Selenocysteine
  MOD_RES (364)..(364): Selenocysteine
MSHEKSFLVSGDNYPPPNPGYPGGPQPPMPPYAQPPYPGAPYPQPPFQPSPYGQPGYPHGPSPYPQGGYPQGPYPQGGYPQGPYPQEGYPQGPYPQGGYPQGPYPQSPFPPNPYGQPQVFPGQDPDSPQHGNYQEEGPPSYYDNQDFPAXNWDDKSIRQAFIRKVFLVLXLQLSVXLSXVSVFXFVAEVKGFVRENVWXYYVSYAVFFISLIVLSCCGDFRRKHPWNLVALSVLXASLSYMVGMIASFYNXEAVIMAVGIXXAVCFXVVIFSMQXRYDFXSCMGVLLVSMVVLFIFAILCIFIRNRILEIVYASLGALLFXCFLAVDXQLLLGNKQLSLSPEEYVFAALNLYXDIINIFLYILXIIGRAKE

SEQ ID NO: 11543 - protein, 184 aa, Homo sapiens
  MOD_RES (1)..(1): Any amino acid
  MOD_RES (6)..(6): Selenocysteine
  MOD_RES (26)..(26): Selenocysteine
  MOD_RES (32)..(32): Selenocysteine
  MOD_RES (35)..(35): Selenocysteine
  MOD_RES (40)..(40): Selenocysteine
  MOD_RES (48)..(48): Selenocysteine
  MOD_RES (64)..(64): Selenocysteine
  MOD_RES (74)..(75): Selenocysteine
  MOD_RES (80)..(80): Selenocysteine
  MOD_RES (88)..(88): Selenocysteine
  MOD_RES (93)..(93): Selenocysteine
  MOD_RES (134)..(134): Selenocysteine
  MOD_RES (141)..(141): Selenocysteine
  MOD_RES (166)..(166): Selenocysteine
  MOD_RES (177)..(177): Selenocysteine
XDFPAXNWDDKSIRQAFIRKVFLVLXLQLSVXLSXVSVFXFVAESVLXASLSYMVGMIASFYNXEAVIMAVGIXXAVCFXVVIFSMQXRYDFXSCMGVLLVSMVVLFIFAILCIFIRNRILEIVYASLGALLFXCFLAVDXQLLLGNKQLSLSPEEYVFAALNLYXDIINIFLYILXIIGRAKE

SEQ ID NO: 11544 - protein, 351 aa, Homo sapiens
  MOD_RES (1)..(1): Any amino acid
  MOD_RES (74)..(74): Selenocysteine
  MOD_RES (94)..(94): Selenocysteine
  MOD_RES (100)..(100): Selenocysteine
  MOD_RES (103)..(103): Selenocysteine
  MOD_RES (108)..(108): Selenocysteine
  MOD_RES (123)..(123): Selenocysteine
  MOD_RES (157)..(157): Selenocysteine
  MOD_RES (173)..(173): Selenocysteine
  MOD_RES (175)..(175): Selenocysteine
  MOD_RES (181)..(181): Selenocysteine
  MOD_RES (200)..(200): Selenocysteine
  MOD_RES (209)..(209): Selenocysteine
  MOD_RES (294)..(294): Selenocysteine
  MOD_RES (311)..(311): Selenocysteine
XGYPQGPYPQEGYPQGPYPQGGYPQGPYPQSPFPPNPYGQPQVFPGQDPDSPQHGNYQEEGPPSYYDNQDFPAXNWDDKSIRQAFIRKVFLVLXLQLSVXLSXVSVFXFVAEVKGFVRENVWXYYVSYAVFFISLIVLSCCGDFRRKHPWNLVALVXPKPEPLCLGPAMQSHXPXLPGLVXVVLLVLMRQGPAGVAWGHXPKVSLCLPXAVGPDRQPVVHGGDDRQLLQHRGSHHGRGHHHSRLLHRRHLLHADPLRLHLMHGRAPGEHGGALHLRHSLHLHPEPHPGDRVRLXGRSALHLLPRSGHPAAXGEQAAVPEPRRVCVCCAEPVHRHHQHLPVHPHHHWPRQGV

SEQ ID NO: 11545 - protein, 188 aa, Homo sapiens
  MOD_RES (1)..(1): Any amino acid
  MOD_RES (40)..(40): Selenocysteine
  MOD_RES (58)..(58): Selenocysteine
  MOD_RES (74)..(74): Selenocysteine
  MOD_RES (84)..(85): Selenocysteine
  MOD_RES (90)..(90): Selenocysteine
  MOD_RES (98)..(98): Selenocysteine
  MOD_RES (103)..(103): Selenocysteine
  MOD_RES (144)..(144): Selenocysteine
  MOD_RES (151)..(151): Selenocysteine
  MOD_RES (176)..(176): Selenocysteine
  MOD_RES (187)..(187): Selenocysteine
XNPYGQPQVFPGQDPDSPQHGNYQEEGPPSYYDNQDFPAXNWDDKSIRQAFIRKSVLXASLSYMVGMIASFYNXEAVIMAVGIXXAVCFXVVIFSMQXRYDFXSCMGVLLVSMVVLFIFAILCIFIRNRILEIVYASLGALLFXCFLAVDXQLLLGNKQLSLSPEEYVFAALNLYXDIINIFLYILXI

SEQ ID NO: 11546 - protein, 121 aa, Homo sapiens
  MOD_RES (21)..(21): Selenocysteine
  MOD_RES (25)..(25): Selenocysteine
  MOD_RES (32)..(32): Selenocysteine
  MOD_RES (54)..(54): Selenocysteine
  MOD_RES (67)..(67): Selenocysteine
  MOD_RES (85)..(86): Selenocysteine
LEVEYELPPVSVQGSSVIFRXVEVXLHKEGNXFGFVIRGGAHDDRNKSRPVVIXCVRPGGPADREGXIKPGDRLLSVDGIRLLGXXHAEAMSILKQCGQEAALLIEYDVSVMGESCPNQRL

SEQ ID NO: 11547 - protein, 189 aa, Homo sapiens
  MOD_RES (50)..(50): Selenocysteine
  MOD_RES (56)..(56): Selenocysteine
  MOD_RES (78)..(78): Selenocysteine
  MOD_RES (88)..(89): Selenocysteine
  MOD_RES (93)..(93): Selenocysteine
  MOD_RES (176)..(176): Selenocysteine
  MOD_RES (180)..(180): Selenocysteine
  MOD_RES (187)..(187): Selenocysteine
MDRFLGFVKAIRRSRRRKGKKYRPEEDYHEGYEDVYYYASEHFRNESPYXKSASQXKPPDGALAVRRQSIPEEFKGSXVVELMKKEGXXLGLXVSGGIDKDGKPRVSNLRQGGIAARSDQLDVGDYIKAVNGINLAKFRHDEIISLLKNVGERVVLEVEYELPPVSVQGSSVIFRXVEVXLHKEGNXFG

SEQ ID NO: 11548 - protein, 1056 aa, Homo sapiens
  MOD_RES (17)..(17): Selenocysteine
  MOD_RES (24)..(24): Selenocysteine
  MOD_RES (30)..(30): Selenocysteine
  MOD_RES (52)..(52): Selenocysteine
  MOD_RES (62)..(63): Selenocysteine
  MOD_RES (67)..(67): Selenocysteine
  MOD_RES (150)..(150): Selenocysteine
  MOD_RES (154)..(154): Selenocysteine
  MOD_RES (161)..(161): Selenocysteine
  MOD_RES (183)..(183): Selenocysteine
  MOD_RES (196)..(196): Selenocysteine
  MOD_RES (214)..(215): Selenocysteine
  MOD_RES (246)..(246): Selenocysteine
  MOD_RES (258)..(258): Selenocysteine
  MOD_RES (268)..(269): Selenocysteine
  MOD_RES (307)..(307): Selenocysteine
  MOD_RES (313)..(313): Selenocysteine
  MOD_RES (318)..(318): Selenocysteine
  MOD_RES (324)..(325): Selenocysteine
  MOD_RES (338)..(338): Selenocysteine
  MOD_RES (358)..(358): Selenocysteine
  MOD_RES (372)..(372): Selenocysteine
  MOD_RES (380)..(380): Selenocysteine
  MOD_RES (385)..(385): Selenocysteine
  MOD_RES (406)..(406): Selenocysteine
  MOD_RES (416)..(416): Selenocysteine
  MOD_RES (418)..(419): Selenocysteine
  MOD_RES (424)..(424): Selenocysteine
  MOD_RES (429)..(429): Selenocysteine
  MOD_RES (442)..(442): Selenocysteine
  MOD_RES (444)..(444): Selenocysteine
  MOD_RES (480)..(480): Selenocysteine
  MOD_RES (484)..(484): Selenocysteine
  MOD_RES (498)..(498): Selenocysteine
  MOD_RES (502)..(502): Selenocysteine
  MOD_RES (519)..(519): Selenocysteine
  MOD_RES (535)..(535): Selenocysteine
  MOD_RES (562)..(562): Selenocysteine
  MOD_RES (564)..(564): Selenocysteine
  MOD_RES (621)..(621): Selenocysteine
  MOD_RES (634)..(634): Selenocysteine
  MOD_RES (638)..(638): Selenocysteine
  MOD_RES (651)..(651): Selenocysteine
  MOD_RES (659)..(659): Selenocysteine
  MOD_RES (694)..(694): Selenocysteine
  MOD_RES (696)..(696): Selenocysteine
  MOD_RES (703)..(703): Selenocysteine
  MOD_RES (746)..(746): Selenocysteine
  MOD_RES (764)..(764): Selenocysteine
  MOD_RES (768)..(768): Selenocysteine
  MOD_RES (771)..(771): Selenocysteine
  MOD_RES (782)..(782): Selenocysteine
  MOD_RES (798)..(798): Selenocysteine
  MOD_RES (804)..(804): Selenocysteine
  MOD_RES (819)..(819): Selenocysteine
  MOD_RES (832)..(832): Selenocysteine
  MOD_RES (848)..(848): Selenocysteine
  MOD_RES (861)..(861): Selenocysteine
  MOD_RES (867)..(867): Selenocysteine
  MOD_RES (876)..(876): Selenocysteine
  MOD_RES (900)..(901): Selenocysteine
  MOD_RES (905)..(905): Selenocysteine
  MOD_RES (916)..(916): Selenocysteine
  MOD_RES (931)..(931): Selenocysteine
  MOD_RES (939)..(939): Selenocysteine
  MOD_RES (992)..(992): Selenocysteine
  MOD_RES (1054)..(1054): Selenocysteine
MIAVSFKCRCQILRRLXKDESPYXKSASQXKPPDGALAVRRQSIPEEFKGSXVVELMKKEGXXLGLXVSGGIDKDGKPRVSNLRQGGIAARSDQLDVGDYIKAVNGINLAKFRHDEIISLLKNVGERVVLEVEYELPPVSVQGSSVIFRXVEVXLHKEGNXFGFVIRGGAHDDRNKSRPVVIXCVRPGGPADREGXIKPGDRLLSVDGIRLLGXXHAEAMSILKQCGQEAALLIEYDVSVMDSVAXASGPLLVEVAKXPGASLGVALXXSMCCNKQVIVIDKIKSASIADRCGALHVGDHILSIDGXSMEYCXLAEAXQFLANXXDQVKLEILPHHQXRLALKGPDHAALVSSSFSPXSMSAYSLSSLNMGXLPRSLYSXSPRGXMMRRRLKKKDFKSSLSLASSXVGLAGQVVHXEXXEVVLXADPVXGFGIQLQGSVFAXEXLSSPPLISYIEADSPAERCGVLQIGDRVMAINGIPXEDSXFEEASQLLRDSSIXSKVXLEIEFDVAESVIPSSGXFHVKLPKKHNVELGIXISSPSSRKPGDPLVISDIKKGSVAHRXGXLELGDKLLAIDNIRLDNCSMEDAVQILQQCEDLVKLKIRKDEDNSDEQESSGAIIYXVELKRYGGPLGIXISGXEEPFDPIIISSLXKGGLAERXGAIHIGDRILAINSSSLKGKPLSEAIHLLQMAGEXVXLKIKKQXDAQSASSPKKFPISSHLSDLGDVEEDSSPAQKPGKLSDMYPSXVPSVDSAVDSWDGSAIDXSYGXQGXSFQASGYNFNXYDWRSPKQRGSLSPVXKPRSQXYPDVGLSYEDWDRSXASGFAGAADSAEXEQEENFWSQALEDLEXCGQSGILRELEAXIMSGSXMSLNHEAPXPRSQLGRQASFQERSSSRPHYSQXXRSNXLPSDVGRKSVXLRKMKQEIKEIMSPXPVELHKVXLYKDSDMEDFGFSVADGLLEKGVYVKNIRPAGPGDLGGLKPYDRLLQVNHVRXRDFDCCLVVPLIAESGNKLDLVISRNPLASQKSIDQQSLPGDWSEQNSAFFQQPSHGGNLEXRE

SEQ ID NO: 11549 - protein, 1076 aa, Homo sapiens
  MOD_RES (17)..(17): Selenocysteine
  MOD_RES (24)..(24): Selenocysteine
  MOD_RES (30)..(30): Selenocysteine
  MOD_RES (52)..(52): Selenocysteine
  MOD_RES (62)..(63): Selenocysteine
  MOD_RES (67)..(67): Selenocysteine
  MOD_RES (150)..(150): Selenocysteine
  MOD_RES (154)..(154): Selenocysteine
  MOD_RES (161)..(161): Selenocysteine
  MOD_RES (183)..(183): Selenocysteine
  MOD_RES (196)..(196): Selenocysteine
  MOD_RES (214)..(215): Selenocysteine
  MOD_RES (246)..(246): Selenocysteine
  MOD_RES (258)..(258): Selenocysteine
  MOD_RES (268)..(269): Selenocysteine
  MOD_RES (307)..(307): Selenocysteine
  MOD_RES (313)..(313): Selenocysteine
  MOD_RES (318)..(318): Selenocysteine
  MOD_RES (324)..(325): Selenocysteine
  MOD_RES (338)..(338): Selenocysteine
  MOD_RES (358)..(358): Selenocysteine
  MOD_RES (372)..(372): Selenocysteine
  MOD_RES (380)..(380): Selenocysteine
  MOD_RES (385)..(385): Selenocysteine
  MOD_RES (406)..(406): Selenocysteine
  MOD_RES (416)..(416): Selenocysteine
  MOD_RES (418)..(419): Selenocysteine
  MOD_RES (424)..(424): Selenocysteine
  MOD_RES (429)..(429): Selenocysteine
  MOD_RES (442)..(442): Selenocysteine
  MOD_RES (444)..(444): Selenocysteine
  MOD_RES (480)..(480): Selenocysteine
  MOD_RES (484)..(484): Selenocysteine
  MOD_RES (498)..(498): Selenocysteine
  MOD_RES (502)..(502): Selenocysteine
  MOD_RES (519)..(519): Selenocysteine
  MOD_RES (535)..(535): Selenocysteine
  MOD_RES (562)..(562): Selenocysteine
  MOD_RES (564)..(564): Selenocysteine
  MOD_RES (621)..(621): Selenocysteine
  MOD_RES (634)..(634): Selenocysteine
  MOD_RES (638)..(638): Selenocysteine
  MOD_RES (651)..(651): Selenocysteine
  MOD_RES (659)..(659): Selenocysteine
  MOD_RES (694)..(694): Selenocysteine
  MOD_RES (696)..(696): Selenocysteine
  MOD_RES (703)..(703): Selenocysteine
  MOD_RES (746)..(746): Selenocysteine
  MOD_RES (764)..(764): Selenocysteine
  MOD_RES (768)..(768): Selenocysteine
  MOD_RES (771)..(771): Selenocysteine
  MOD_RES (782)..(782): Selenocysteine
  MOD_RES (798)..(798): Selenocysteine
  MOD_RES (804)..(804): Selenocysteine
  MOD_RES (819)..(819): Selenocysteine
  MOD_RES (832)..(832): Selenocysteine
  MOD_RES (848)..(848): Selenocysteine
  MOD_RES (872)..(872): Selenocysteine
  MOD_RES (876)..(876): Selenocysteine
  MOD_RES (882)..(882): Selenocysteine
  MOD_RES (891)..(891): Selenocysteine
  MOD_RES (915)..(916): Selenocysteine
  MOD_RES (920)..(920): Selenocysteine
  MOD_RES (931)..(931): Selenocysteine
  MOD_RES (946)..(946): Selenocysteine
  MOD_RES (954)..(954): Selenocysteine
  MOD_RES (1007)..(1007): Selenocysteine
  MOD_RES (1069)..(1069): Selenocysteine
  MOD_RES (1073)..(1073): Selenocysteine
  MOD_RES (1075)..(1075): Selenocysteine
MIAVSFKCRCQILRRLXKDESPYXKSASQXKPPDGALAVRRQSIPEEFKGSXVVELMKKEGXXLGLXVSGGIDKDGKPRVSNLRQGGIAARSDQLDVGDYIKAVNGINLAKFRHDEIISLLKNVGERVVLEVEYELPPVSVQGSSVIFRXVEVXLHKEGNXFGFVIRGGAHDDRNKSRPVVIXCVRPGGPADREGXIKPGDRLLSVDGIRLLGXXHAEAMSILKQCGQEAALLIEYDVSVMDSVAXASGPLLVEVAKXPGASLGVALXXSMCCNKQVIVIDKIKSASIADRCGALHVGDHILSIDGXSMEYCXLAEAXQFLANXXDQVKLEILPHHQXRLALKGPDHAALVSSSFSPXSMSAYSLSSLNMGXLPRSLYSXSPRGXMMRRRLKKKDFKSSLSLASSXVGLAGQVVHXEXXEVVLXADPVXGFGIQLQGSVFAXEXLSSPPLISYIEADSPAERCGVLQIGDRVMAINGIPXEDSXFEEASQLLRDSSIXSKVXLEIEFDVAESVIPSSGXFHVKLPKKHNVELGIXISSPSSRKPGDPLVISDIKKGSVAHRXGXLELGDKLLAIDNIRLDNCSMEDAVQILQQCEDLVKLKIRKDEDNSDEQESSGAIIYXVELKRYGGPLGIXISGXEEPFDPIIISSLXKGGLAERXGAIHIGDRILAINSSSLKGKPLSEAIHLLQMAGEXVXLKIKKQXDAQSASSPKKFPISSHLSDLGDVEEDSSPAQKPGKLSDMYPSXVPSVDSAVDSWDGSAIDXSYGXQGXSFQASGYNFNXYDWRSPKQRGSLSPVXKPRSQXYPDVGLSYEDWDRSXASGFAGAADSAEXEQEENFWSQALEDLEXCGQSGILRELEEKADRRVSLRNMXLLAXIMSGSXMSLNHEAPXPRSQLGRQASFQERSSSRPHYSQXXRSNXLPSDVGRKSVXLRKMKQEIKEIMSPXPVELHKVXLYKDSDMEDFGFSVADGLLEKGVYVKNIRPAGPGDLGGLKPYDRLLQVNHVRXRDFDCCLVVPLIAESGNKLDLVISRNPLASQKSIDQQSLPGDWSEQNSAFFQQPSHGGNLEXREPXNXL

SEQ ID NO: 11550 - protein, 1128 aa, Homo sapiens
  MOD_RES (17)..(17): Selenocysteine
  MOD_RES (24)..(24): Selenocysteine
  MOD_RES (30)..(30): Selenocysteine
  MOD_RES (52)..(52): Selenocysteine
  MOD_RES (62)..(63): Selenocysteine
  MOD_RES (67)..(67): Selenocysteine
  MOD_RES (150)..(150): Selenocysteine
  MOD_RES (154)..(154): Selenocysteine
  MOD_RES (161)..(161): Selenocysteine
  MOD_RES (183)..(183): Selenocysteine
  MOD_RES (196)..(196): Selenocysteine
  MOD_RES (214)..(215): Selenocysteine
  MOD_RES (246)..(246): Selenocysteine
  MOD_RES (258)..(258): Selenocysteine
  MOD_RES (268)..(269): Selenocysteine
  MOD_RES (307)..(307): Selenocysteine
  MOD_RES (313)..(313): Selenocysteine
  MOD_RES (318)..(318): Selenocysteine
  MOD_RES (324)..(325): Selenocysteine
  MOD_RES (338)..(338): Selenocysteine
  MOD_RES (358)..(358): Selenocysteine
  MOD_RES (371)..(371): Selenocysteine
  MOD_RES (377)..(377): Selenocysteine
  MOD_RES (389)..(389): Selenocysteine
  MOD_RES (410)..(410): Selenocysteine
  MOD_RES (424)..(424): Selenocysteine
  MOD_RES (432)..(432): Selenocysteine
  MOD_RES (437)..(437): Selenocysteine
  MOD_RES (458)..(458): Selenocysteine
  MOD_RES (468)..(468): Selenocysteine
  MOD_RES (470)..(471): Selenocysteine
  MOD_RES (476)..(476): Selenocysteine
  MOD_RES (481)..(481): Selenocysteine
  MOD_RES (494)..(494): Selenocysteine
  MOD_RES (496)..(496): Selenocysteine
  MOD_RES (532)..(532): Selenocysteine
  MOD_RES (536)..(536): Selenocysteine
  MOD_RES (550)..(550): Selenocysteine
  MOD_RES (554)..(554): Selenocysteine
  MOD_RES (571)..(571): Selenocysteine
  MOD_RES (587)..(587): Selenocysteine
  MOD_RES (614)..(614): Selenocysteine
  MOD_RES (616)..(616): Selenocysteine
  MOD_RES (673)..(673): Selenocysteine
  MOD_RES (686)..(686): Selenocysteine
  MOD_RES (690)..(690): Selenocysteine
  MOD_RES (703)..(703): Selenocysteine
  MOD_RES (711)..(711): Selenocysteine
  MOD_RES (746)..(746): Selenocysteine
  MOD_RES (748)..(748): Selenocysteine
  MOD_RES (755)..(755): Selenocysteine
  MOD_RES (798)..(798): Selenocysteine
  MOD_RES (816)..(816): Selenocysteine
  MOD_RES (820)..(820): Selenocysteine
  MOD_RES (823)..(823): Selenocysteine
  MOD_RES (834)..(834): Selenocysteine
  MOD_RES (850)..(850): Selenocysteine
  MOD_RES (856)..(856): Selenocysteine
  MOD_RES (871)..(871): Selenocysteine
  MOD_RES (884)..(884): Selenocysteine
  MOD_RES (900)..(900): Selenocysteine
  MOD_RES (924)..(924): Selenocysteine
  MOD_RES (928)..(928): Selenocysteine
  MOD_RES (934)..(934): Selenocysteine
  MOD_RES (943)..(943): Selenocysteine
  MOD_RES (967)..(968): Selenocysteine
  MOD_RES (972)..(972): Selenocysteine
  MOD_RES (983)..(983): Selenocysteine
  MOD_RES (998)..(998): Selenocysteine
  MOD_RES (1006)..(1006): Selenocysteine
  MOD_RES (1059)..(1059): Selenocysteine
  MOD_RES (1121)..(1121): Selenocysteine
  MOD_RES (1125)..(1125): Selenocysteine
  MOD_RES (1127)..(1127): Selenocysteine
MIAVSFKCRCQILRRLXKDESPYXKSASQXKPPDGALAVRRQSIPEEFKGSXVVELMKKEGXXLGLXVSGGIDKDGKPRVSNLRQGGIAARSDQLDVGDYIKAVNGINLAKFRHDEIISLLKNVGERVVLEVEYELPPVSVQGSSVIFRXVEVXLHKEGNXFGFVIRGGAHDDRNKSRPVVIXCVRPGGPADREGXIKPGDRLLSVDGIRLLGXXHAEAMSILKQCGQEAALLIEYDVSVMDSVAXASGPLLVEVAKXPGASLGVALXXSMCCNKQVIVIDKIKSASIADRCGALHVGDHILSIDGXSMEYCXLAEAXQFLANXXDQVKLEILPHHQXRLALKGPDHVKIQRSDRQLXWDSWASNHSSLHXNHHYNXYHPDHCRVPALXFPKAPPPNSPPALVSSSFSPXSMSAYSLSSLNMGXLPRSLYSXSPRGXMMRRRLKKKDFKSSLSLASSXVGLAGQVVHXEXXEVVLXADPVXGFGIQLQGSVFAXEXLSSPPLISYIEADSPAERCGVLQIGDRVMAINGIPXEDSXFEEASQLLRDSSIXSKVXLEIEFDVAESVIPSSGXFHVKLPKKHNVELGIXISSPSSRKPGDPLVISDIKKGSVAHRXGXLELGDKLLAIDNIRLDNCSMEDAVQILQQCEDLVKLKIRKDEDNSDEQESSGAIIYXVELKRYGGPLGIXISGXEEPFDPIIISSLXKGGLAERXGAIHIGDRILAINSSSLKGKPLSEAIHLLQMAGEXVXLKIKKQXDAQSASSPKKFPISSHLSDLGDVEEDSSPAQKPGKLSDMYPSXVPSVDSAVDSWDGSAIDXSYGXQGXSFQASGYNFNXYDWRSPKQRGSLSPVXKPRSQXYPDVGLSYEDWDRSXASGFAGAADSAEXEQEENFWSQALEDLEXCGQSGILRELEEKADRRVSLRNMXLLAXIMSGSXMSLNHEAPXPRSQLGRQASFQERSSSRPHYSQXXRSNXLPSDVGRKSVXLRKMKQEIKEIMSPXPVELHKVXLYKDSDMEDFGFSVADGLLEKGVYVKNIRPAGPGDLGGLKPYDRLLQVNHVRXRDFDCCLVVPLIAESGNKLDLVISRNPLASQKSIDQQSLPGDWSEQNSAFFQQPSHGGNLEXREPXNXL

SEQ ID NO: 11551 - protein, 211 aa, Homo sapiens
  MOD_RES (17)..(17): Selenocysteine
  MOD_RES (25)..(25): Selenocysteine
  MOD_RES (35)..(36): Selenocysteine
  MOD_RES (40)..(40): Selenocysteine
  MOD_RES (123)..(123): Selenocysteine
  MOD_RES (127)..(127): Selenocysteine
  MOD_RES (134)..(134): Selenocysteine
  MOD_RES (156)..(156): Selenocysteine
  MOD_RES (169)..(169): Selenocysteine
  MOD_RES (187)..(188): Selenocysteine
MIAVSFKCRCQILRRLXKEEFKGSXVVELMKKEGXXLGLXVSGGIDKDGKPRVSNLRQGGIAARSDQLDVGDYIKAVNGINLAKFRHDEIISLLKNVGERVVLEVEYELPPVSVQGSSVIFRXVEVXLHKEGNXFGFVIRGGAHDDRNKSRPVVIXCVRPGGPADREGXIKPGDRLLSVDGIRLLGXXHAEAMSILKQCGQEAALLIEYDV

SEQ ID NO: 11552 - protein, 15 aa, Homo sapiens
  MOD_RES (6)..(7): Selenocysteine
  MOD_RES (11)..(11): Selenocysteine
MKKEGXXLGLXVSGG

SEQ ID NO: 11553 - protein, 121 aa, Homo sapiens
  MOD_RES (6)..(7): Selenocysteine
  MOD_RES (11)..(11): Selenocysteine
  MOD_RES (94)..(94): Selenocysteine
  MOD_RES (98)..(98): Selenocysteine
  MOD_RES (105)..(105): Selenocysteine
MKKEGXXLGLXVSGGIDKDGKPRVSNLRQGGIAARSDQLDVGDYIKAVNGINLAKFRHDEIISLLKNVGERVVLEVEYELPPVSVQGSSVIFRXVEVXLHKEGNXFGFVIRGGAHDDRNKS

SEQ ID NO: 11554 - protein, 149 aa, Homo sapiens
  MOD_RES (6)..(7): Selenocysteine
  MOD_RES (11)..(11): Selenocysteine
  MOD_RES (94)..(94): Selenocysteine
  MOD_RES (98)..(98): Selenocysteine
  MOD_RES (105)..(105): Selenocysteine
  MOD_RES (127)..(127): Selenocysteine
  MOD_RES (140)..(140): Selenocysteine
MKKEGXXLGLXVSGGIDKDGKPRVSNLRQGGIAARSDQLDVGDYIKAVNGINLAKFRHDEIISLLKNVGERVVLEVEYELPPVSVQGSSVIFRXVEVXLHKEGNXFGFVIRGGAHDDRNKSRPVVIXCVRPGGPADREGXIKPGDRLLS

SEQ ID NO: 11555 - protein, 787 aa, Homo sapiens
  MOD_RES (6)..(7): Selenocysteine
  MOD_RES (11)..(11): Selenocysteine
  MOD_RES (94)..(94): Selenocysteine
  MOD_RES (98)..(98): Selenocysteine
  MOD_RES (105)..(105): Selenocysteine
  MOD_RES (127)..(127): Selenocysteine
  MOD_RES (140)..(140): Selenocysteine
  MOD_RES (158)..(159): Selenocysteine
  MOD_RES (190)..(190): Selenocysteine
  MOD_RES (202)..(202): Selenocysteine
  MOD_RES (212)..(213): Selenocysteine
  MOD_RES (251)..(251): Selenocysteine
  MOD_RES (257)..(257): Selenocysteine
  MOD_RES (262)..(262): Selenocysteine
  MOD_RES (268)..(269): Selenocysteine
  MOD_RES (282)..(282): Selenocysteine
  MOD_RES (298)..(298): Selenocysteine
  MOD_RES (308)..(308): Selenocysteine
  MOD_RES (310)..(311): Selenocysteine
  MOD_RES (316)..(316): Selenocysteine
  MOD_RES (321)..(321): Selenocysteine
  MOD_RES (334)..(334): Selenocysteine
  MOD_RES (336)..(336): Selenocysteine
  MOD_RES (372)..(372): Selenocysteine
  MOD_RES (376)..(376): Selenocysteine
  MOD_RES (390)..(390): Selenocysteine
  MOD_RES (394)..(394): Selenocysteine
  MOD_RES (411)..(411): Selenocysteine
  MOD_RES (427)..(427): Selenocysteine
  MOD_RES (454)..(454): Selenocysteine
  MOD_RES (456)..(456): Selenocysteine
  MOD_RES (513)..(513): Selenocysteine
  MOD_RES (526)..(526): Selenocysteine
  MOD_RES (530)..(530): Selenocysteine
  MOD_RES (543)..(543): Selenocysteine
  MOD_RES (551)..(551): Selenocysteine
  MOD_RES (586)..(586): Selenocysteine
  MOD_RES (588)..(588): Selenocysteine
  MOD_RES (595)..(595): Selenocysteine
  MOD_RES (638)..(638): Selenocysteine
  MOD_RES (656)..(656): Selenocysteine
  MOD_RES (660)..(660): Selenocysteine
  MOD_RES (663)..(663): Selenocysteine
  MOD_RES (674)..(674): Selenocysteine
  MOD_RES (690)..(690): Selenocysteine
  MOD_RES (696)..(696): Selenocysteine
  MOD_RES (711)..(711): Selenocysteine
  MOD_RES (724)..(724): Selenocysteine
  MOD_RES (740)..(740): Selenocysteine
  MOD_RES (753)..(753): Selenocysteine
  MOD_RES (759)..(759): Selenocysteine
  MOD_RES (768)..(768): Selenocysteine
MKKEGXXLGLXVSGGIDKDGKPRVSNLRQGGIAARSDQLDVGDYIKAVNGINLAKFRHDEIISLLKNVGERVVLEVEYELPPVSVQGSSVIFRXVEVXLHKEGNXFGFVIRGGAHDDRNKSRPVVIXCVRPGGPADREGXIKPGDRLLSVDGIRLLGXXHAEAMSILKQCGQEAALLIEYDVSVMDSVAXASGPLLVEVAKXPGASLGVALXXSMCCNKQVIVIDKIKSASIADRCGALHVGDHILSIDGXSMEYCXLAEAXQFLANXXDQVKLEILPHHQXRLALKGPDHVSLASSXVGLAGQVVHXEXXEVVLXADPVXGFGIQLQGSVFAXEXLSSPPLISYIEADSPAERCGVLQIGDRVMAINGIPXEDSXFEEASQLLRDSSIXSKVXLEIEFDVAESVIPSSGXFHVKLPKKHNVELGIXISSPSSRKPGDPLVISDIKKGSVAHRXGXLELGDKLLAIDNIRLDNCSMEDAVQILQQCEDLVKLKIRKDEDNSDEQESSGAIIYXVELKRYGGPLGIXISGXEEPFDPIIISSLXKGGLAERXGAIHIGDRILAINSSSLKGKPLSEAIHLLQMAGEXVXLKIKKQXDAQSASSPKKFPISSHLSDLGDVEEDSSPAQKPGKLSDMYPSXVPSVDSAVDSWDGSAIDXSYGXQGXSFQASGYNFNXYDWRSPKQRGSLSPVXKPRSQXYPDVGLSYEDWDRSXASGFAGAADSAEXEQEENFWSQALEDLEXCGQSGILRELEAXIMSGSXMSLNHEAPXPRSQLGRQASFQERSSSRP

SEQ ID NO: 11556 - protein, 876 aa, Homo sapiens
  MOD_RES (6)..(7): Selenocysteine
  MOD_RES (11)..(11): Selenocysteine
  MOD_RES (94)..(94): Selenocysteine
  MOD_RES (98)..(98): Selenocysteine
  MOD_RES (105)..(105): Selenocysteine
  MOD_RES (127)..(127): Selenocysteine
  MOD_RES (140)..(140): Selenocysteine
  MOD_RES (158)..(159): Selenocysteine
  MOD_RES (190)..(190): Selenocysteine
  MOD_RES (202)..(202): Selenocysteine
  MOD_RES (212)..(213): Selenocysteine
  MOD_RES (251)..(251): Selenocysteine
  MOD_RES (257)..(257): Selenocysteine
  MOD_RES (262)..(262): Selenocysteine
  MOD_RES (268)..(269): Selenocysteine
  MOD_RES (282)..(282): Selenocysteine
  MOD_RES (302)..(302): Selenocysteine
  MOD_RES (316)..(316): Selenocysteine
  MOD_RES (324)..(324): Selenocysteine
  MOD_RES (329)..(329): Selenocysteine
  MOD_RES (350)..(350): Selenocysteine
  MOD_RES (360)..(360): Selenocysteine
  MOD_RES (362)..(363): Selenocysteine
  MOD_RES (368)..(368): Selenocysteine
  MOD_RES (373)..(373): Selenocysteine
  MOD_RES (386)..(386): Selenocysteine
  MOD_RES (388)..(388): Selenocysteine
  MOD_RES (424)..(424): Selenocysteine
  MOD_RES (428)..(428): Selenocysteine
  MOD_RES (442)..(442): Selenocysteine
  MOD_RES (446)..(446): Selenocysteine
  MOD_RES (463)..(463): Selenocysteine
  MOD_RES (479)..(479): Selenocysteine
  MOD_RES (506)..(506): Selenocysteine
  MOD_RES (508)..(508): Selenocysteine
  MOD_RES (565)..(565): Selenocysteine
  MOD_RES (578)..(578): Selenocysteine
  MOD_RES (582)..(582): Selenocysteine
  MOD_RES (595)..(595): Selenocysteine
  MOD_RES (603)..(603): Selenocysteine
  MOD_RES (638)..(638): Selenocysteine
  MOD_RES (640)..(640): Selenocysteine
  MOD_RES (647)..(647): Selenocysteine
  MOD_RES (690)..(690): Selenocysteine
  MOD_RES (708)..(708): Selenocysteine
  MOD_RES (712)..(712): Selenocysteine
  MOD_RES (715)..(715): Selenocysteine
  MOD_RES (726)..(726): Selenocysteine
  MOD_RES (742)..(742): Selenocysteine
  MOD_RES (748)..(748): Selenocysteine
  MOD_RES (763)..(763): Selenocysteine
  MOD_RES (776)..(776): Selenocysteine
  MOD_RES (792)..(792): Selenocysteine
  MOD_RES (816)..(816): Selenocysteine
  MOD_RES (820)..(820): Selenocysteine
  MOD_RES (826)..(826): Selenocysteine
  MOD_RES (835)..(835): Selenocysteine
  MOD_RES (859)..(860): Selenocysteine
  MOD_RES (864)..(864): Selenocysteine
  MOD_RES (875)..(875): Selenocysteine
MKKEGXXLGLXVSGGIDKDGKPRVSNLRQGGIAARSDQLDVGDYIKAVNGINLAKFRHDEIISLLKNVGERVVLEVEYELPPVSVQGSSVIFRXVEVXLHKEGNXFGFVIRGGAHDDRNKSRPVVIXCVRPGGPADREGXIKPGDRLLSVDGIRLLGXXHAEAMSILKQCGQEAALLIEYDVSVMDSVAXASGPLLVEVAKXPGASLGVALXXSMCCNKQVIVIDKIKSASIADRCGALHVGDHILSIDGXSMEYCXLAEAXQFLANXXDQVKLEILPHHQXRLALKGPDHAALVSSSFSPXSMSAYSLSSLNMGXLPRSLYSXSPRGXMMRRRLKKKDFKSSLSLASSXVGLAGQVVHXEXXEVVLXADPVXGFGIQLQGSVFAXEXLSSPPLISYIEADSPAERCGVLQIGDRVMAINGIPXEDSXFEEASQLLRDSSIXSKVXLEIEFDVAESVIPSSGXFHVKLPKKHNVELGIXISSPSSRKPGDPLVISDIKKGSVAHRXGXLELGDKLLAIDNIRLDNCSMEDAVQILQQCEDLVKLKIRKDEDNSDEQESSGAIIYXVELKRYGGPLGIXISGXEEPFDPIIISSLXKGGLAERXGAIHIGDRILAINSSSLKGKPLSEAIHLLQMAGEXVXLKIKKQXDAQSASSPKKFPISSHLSDLGDVEEDSSPAQKPGKLSDMYPSXVPSVDSAVDSWDGSAIDXSYGXQGXSFQASGYNFNXYDWRSPKQRGSLSPVXKPRSQXYPDVGLSYEDWDRSXASGFAGAADSAEXEQEENFWSQALEDLEXCGQSGILRELEEKADRRVSLRNMXLLAXIMSGSXMSLNHEAPXPRSQLGRQASFQERSSSRPHYSQXXRSNXLPSDVGRKSVXL

SEQ ID NO: 11557 - protein, 928 aa, Homo sapiens
  MOD_RES (1)..(1): Any amino acid
  MOD_RES (11)..(11): Selenocysteine
  MOD_RES (29)..(30): Selenocysteine
  MOD_RES (61)..(61): Selenocysteine
  MOD_RES (73)..(73): Selenocysteine
  MOD_RES (83)..(84): Selenocysteine
  MOD_RES (122)..(122): Selenocysteine
  MOD_RES (128)..(128): Selenocysteine
  MOD_RES (133)..(133): Selenocysteine
  MOD_RES (139)..(140): Selenocysteine
  MOD_RES (153)..(153): Selenocysteine
  MOD_RES (173)..(173): Selenocysteine
  MOD_RES (186)..(186): Selenocysteine
  MOD_RES (192)..(192): Selenocysteine
  MOD_RES (204)..(204): Selenocysteine
  MOD_RES (225)..(225): Selenocysteine
  MOD_RES (239)..(239): Selenocysteine
  MOD_RES (247)..(247): Selenocysteine
  MOD_RES (252)..(252): Selenocysteine
  MOD_RES (273)..(273): Selenocysteine
  MOD_RES (283)..(283): Selenocysteine
  MOD_RES (285)..(286): Selenocysteine
  MOD_RES (291)..(291): Selenocysteine
  MOD_RES (296)..(296): Selenocysteine
  MOD_RES (309)..(309): Selenocysteine
  MOD_RES (311)..(311): Selenocysteine
  MOD_RES (347)..(347): Selenocysteine
  MOD_RES (351)..(351): Selenocysteine
  MOD_RES (365)..(365): Selenocysteine
  MOD_RES (369)..(369): Selenocysteine
  MOD_RES (386)..(386): Selenocysteine
  MOD_RES (402)..(402): Selenocysteine
  MOD_RES (429)..(429): Selenocysteine
  MOD_RES (431)..(431): Selenocysteine
  MOD_RES (488)..(488): Selenocysteine
  MOD_RES (501)..(501): Selenocysteine
  MOD_RES (505)..(505): Selenocysteine
  MOD_RES (518)..(518): Selenocysteine
  MOD_RES (526)..(526): Selenocysteine
  MOD_RES (561)..(561): Selenocysteine
  MOD_RES (563)..(563): Selenocysteine
  MOD_RES (570)..(570): Selenocysteine
  MOD_RES (613)..(613): Selenocysteine
  MOD_RES (631)..(631): Selenocysteine
  MOD_RES (635)..(635): Selenocysteine
  MOD_RES (638)..(638): Selenocysteine
  MOD_RES (649)..(649): Selenocysteine
  MOD_RES (665)..(665): Selenocysteine
  MOD_RES (671)..(671): Selenocysteine
  MOD_RES (686)..(686): Selenocysteine
  MOD_RES (699)..(699): Selenocysteine
  MOD_RES (715)..(715): Selenocysteine
  MOD_RES (728)..(728): Selenocysteine
  MOD_RES (734)..(734): Selenocysteine
  MOD_RES (743)..(743): Selenocysteine
  MOD_RES (767)..(768): Selenocysteine
  MOD_RES (772)..(772): Selenocysteine
  MOD_RES (783)..(783): Selenocysteine
  MOD_RES (798)..(798): Selenocysteine
  MOD_RES (806)..(806): Selenocysteine
  MOD_RES (859)..(859): Selenocysteine
  MOD_RES (921)..(921): Selenocysteine
  MOD_RES (925)..(925): Selenocysteine
  MOD_RES (927)..(927): Selenocysteine
XPGGPADREGXIKPGDRLLSVDGIRLLGXXHAEAMSILKQCGQEAALLIEYDVSVMDSVAXASGPLLVEVAKXPGASLGVALXXSMCCNKQVIVIDKIKSASIADRCGALHVGDHILSIDGXSMEYCXLAEAXQFLANXXDQVKLEILPHHQXRLALKGPDHVKIQRSDRQLXWDSWASNHSSLHXNHHYNXYHPDHCRVPALXFPKAPPPNSPPALVSSSFSPXSMSAYSLSSLNMGXLPRSLYSXSPRGXMMRRRLKKKDFKSSLSLASSXVGLAGQVVHXEXXEVVLXADPVXGFGIQLQGSVFAXEXLSSPPLISYIEADSPAERCGVLQIGDRVMAINGIPXEDSXFEEASQLLRDSSIXSKVXLEIEFDVAESVIPSSGXFHVKLPKKHNVELGIXISSPSSRKPGDPLVISDIKKGSVAHRXGXLELGDKLLAIDNIRLDNCSMEDAVQILQQCEDLVKLKIRKDEDNSDEQESSGAIIYXVELKRYGGPLGIXISGXEEPFDPIIISSLXKGGLAERXGAIHIGDRILAINSSSLKGKPLSEAIHLLQMAGEXVXLKIKKQXDAQSASSPKKFPISSHLSDLGDVEEDSSPAQKPGKLSDMYPSXVPSVDSAVDSWDGSAIDXSYGXQGXSFQASGYNFNXYDWRSPKQRGSLSPVXKPRSQXYPDVGLSYEDWDRSXASGFAGAADSAEXEQEENFWSQALEDLEXCGQSGILRELEAXIMSGSXMSLNHEAPXPRSQLGRQASFQERSSSRPHYSQXXRSNXLPSDVGRKSVXLRKMKQEIKEIMSPXPVELHKVXLYKDSDMEDFGFSVADGLLEKGVYVKNIRPAGPGDLGGLKPYDRLLQVNHVRXRDFDCCLVVPLIAESGNKLDLVISRNPLASQKSIDQQSLPGDWSEQNSAFFQQPSHGGNLEXREPXNXL

SEQ ID NO: 11558 - protein, 77 aa, Homo sapiens
  MOD_RES (1)..(1): Any amino acid
  MOD_RES (5)..(5): Selenocysteine
  MOD_RES (17)..(17): Selenocysteine
  MOD_RES (27)..(28): Selenocysteine
  MOD_RES (59)..(59): Selenocysteine
XSVAXASGPLLVEVAKXPGASLGVALXXSMCCNKQVIVIDKIKSASIADSENSEERQAXYLGFLGQQPQQPSHQPSL

SEQ ID NO: 11559 - protein, 283 aa, Homo sapiens
  MOD_RES (1)..(1): Any amino acid
  MOD_RES (4)..(4): Selenocysteine
  MOD_RES (17)..(17): Selenocysteine
  MOD_RES (35)..(36): Selenocysteine
  MOD_RES (67)..(67): Selenocysteine
  MOD_RES (79)..(79): Selenocysteine
  MOD_RES (89)..(90): Selenocysteine
  MOD_RES (128)..(128): Selenocysteine
  MOD_RES (134)..(134): Selenocysteine
  MOD_RES (139)..(139): Selenocysteine
  MOD_RES (145)..(146): Selenocysteine
  MOD_RES (159)..(159): Selenocysteine
  MOD_RES (178)..(178): Selenocysteine
  MOD_RES (192)..(192): Selenocysteine
  MOD_RES (200)..(200): Selenocysteine
  MOD_RES (205)..(205): Selenocysteine
  MOD_RES (226)..(226): Selenocysteine
  MOD_RES (236)..(236): Selenocysteine
  MOD_RES (238)..(239): Selenocysteine
  MOD_RES (244)..(244): Selenocysteine
  MOD_RES (249)..(249): Selenocysteine
  MOD_RES (262)..(262): Selenocysteine
  MOD_RES (264)..(264): Selenocysteine
XVIXCVRPGGPADREGXIKPGDRLLSVDGIRLLGXXHAEAMSILKQCGQEAALLIEYDVSVMDSVAXASGPLLVEVAKXPGASLGVALXXSMCCNKQVIVIDKIKSASIADRCGALHVGDHILSIDGXSMEYCXLAEAXQFLANXXDQVKLEILPHHQXRLALKGPDHALVSSSFSPXSMSAYSLSSLNMGXLPRSLYSXSPRGXMMRRRLKKKDFKSSLSLASSXVGLAGQVVHXEXXEVVLXADPVXGFGIQLQGSVFAXEXLSSPPLISYIEADSPAERC

SEQ ID NO: 11560 - protein, 1048 aa, Homo sapiens
  MOD_RES (52)..(52): Selenocysteine
  MOD_RES (63)..(63): Selenocysteine
  MOD_RES (67)..(67): Selenocysteine
  MOD_RES (72)..(72): Selenocysteine
  MOD_RES (110)..(110): Selenocysteine
  MOD_RES (119)..(119): Selenocysteine
  MOD_RES (151)..(151): Selenocysteine
  MOD_RES (184)..(184): Selenocysteine
  MOD_RES (219)..(219): Selenocysteine
  MOD_RES (223)..(223): Selenocysteine
  MOD_RES (241)..(241): Selenocysteine
  MOD_RES (244)..(244): Selenocysteine
  MOD_RES (259)..(259): Selenocysteine
  MOD_RES (269)..(271): Selenocysteine
  MOD_RES (280)..(280): Selenocysteine
  MOD_RES (308)..(308): Selenocysteine
  MOD_RES (319)..(319): Selenocysteine
  MOD_RES (379)..(379): Selenocysteine
  MOD_RES (382)..(382): Selenocysteine
  MOD_RES (395)..(395): Selenocysteine
  MOD_RES (401)..(401): Selenocysteine
  MOD_RES (413)..(413): Selenocysteine
  MOD_RES (425)..(426): Selenocysteine
  MOD_RES (447)..(447): Selenocysteine
  MOD_RES (457)..(457): Selenocysteine
  MOD_RES (459)..(460): Selenocysteine
  MOD_RES (483)..(483): Selenocysteine
  MOD_RES (485)..(485): Selenocysteine
  MOD_RES (521)..(521): Selenocysteine
  MOD_RES (525)..(525): Selenocysteine
  MOD_RES (560)..(560): Selenocysteine
  MOD_RES (576)..(576): Selenocysteine
  MOD_RES (602)..(602): Selenocysteine
  MOD_RES (604)..(604): Selenocysteine
  MOD_RES (654)..(655): Selenocysteine
  MOD_RES (661)..(661): Selenocysteine
  MOD_RES (674)..(674): Selenocysteine
  MOD_RES (678)..(678): Selenocysteine
  MOD_RES (691)..(691): Selenocysteine
  MOD_RES (699)..(699): Selenocysteine
  MOD_RES (734)..(734): Selenocysteine
  MOD_RES (736)..(736): Selenocysteine
  MOD_RES (758)..(758): Selenocysteine
  MOD_RES (797)..(797): Selenocysteine
  MOD_RES (808)..(808): Selenocysteine
  MOD_RES (816)..(817): Selenocysteine
  MOD_RES (833)..(833): Selenocysteine
  MOD_RES (838)..(838): Selenocysteine
  MOD_RES (841)..(841): Selenocysteine
  MOD_RES (843)..(843): Selenocysteine
  MOD_RES (862)..(862): Selenocysteine
  MOD_RES (903)..(903): Selenocysteine
  MOD_RES (905)..(905): Selenocysteine
  MOD_RES (940)..(940): Selenocysteine
  MOD_RES (948)..(948): Selenocysteine
  MOD_RES (975)..(975): Selenocysteine
  MOD_RES (1001)..(1001): Selenocysteine
  MOD_RES (1030)..(1030): Selenocysteine
MLAVSLKWRLGVVRRRLKDDGPYSKGGKDAGGADVSLACRRQSIPEEFRGIXVVELIKKEGSXLGLXISGGXDKDGKPRVSNLRPGGLAARSDLLNIGDYIRSVNGIHLXRLRHDEIIXLLKNVGERVVLEVEYELPPPAPENNPRIISKXVDVSLYKEGNSFGFVLRGGAHEDGHKSRPLVLXYVRPGGPADREGSLKVGDRLLSVDGIPLHGASHAXALAXLRQCSHEALFQVEYDVAXPDXVANASGPLMVEIVKXPGSALGISLXXXSLRNKSVIXIDRIKPASVVDRSGALHPGDHILSIDGXSMEHCSLLEAXKLLASISEKVRLEILPVPQSQRPLRPSEAVKVQRSEQLHRWDPCVPSCHSPRPGHCRMPXWAXPAGQDQSRSLSSXPFSSPXLNHAFSCNNPSXLPRGSQPMSPRXXMGRRRQRRREHKSSLSLASSXVGPGGQIVHXEXXEVVLCGDPLSGFGLQLQGGIFAXEXLSSPPLVCFIEPDSPAERCGLLQVGDRVLSINGIAXEDGXMEEANQLLRDAALAHKVVLEVEFDVAESVIPSSGXFHVKLPKKRSVELGIXISSASRKRGEPLIISDIKKGSVAHRXGXLEPGDKLLAIDNIRLDNCPMEDAVQILRQCEDLVKLKIRKDEDNSDELEXXGAVSYXVELKRYGGPLGIXISGXEEPFDPIVISGLXKRGLAERXGAIHVGDRILAINNVSLKGRPLSEAIHLLQVAGEXVXLKIKKQLDRPLLPRKSGSLSEXSDADEDPADALKGGLPAARFSPAVPSVDSAVESWDSSAXEGGFGGPGSYXPQAAARGXXPQERRPGWLRGSPPPXEPRRXSYXPXPADESFPEEEEEDDWEPPXSPAPGPAREEGFWRMFGEALEDLESCGQSELLRELEASIMXGXVQRVALEGRPGHRPWQRGREVRASPAEMEELLLPXPLEMHKVXLHKDPMRHDFGFSVSDGLLEKGVYVHXVRPDGPAHRGGLQPFDRVLQVNHVRXRDFDCCLAVPLLAEAGDVLELIISRKPHXAHSSRAPRSPGPSSPRML

SEQ ID NO: 11561 - protein, 141 aa, Homo sapiens
  MOD_RES (54)..(54): Selenocysteine
  MOD_RES (65)..(65): Selenocysteine
  MOD_RES (69)..(69): Selenocysteine
  MOD_RES (74)..(74): Selenocysteine
  MOD_RES (112)..(112): Selenocysteine
  MOD_RES (121)..(121): Selenocysteine
MLAVSLKWRLGVVRRRLKGADDGPYSKGGKDAGGADVSLACRRQSIPEEFRGIXVVELIKKEGSXLGLXISGGXDKDGKPRVSNLRPGGLAARSDLLNIGDYIRSVNGIHLXRLRHDEIIXLLKNVGERVVLEVEYELPPP

SEQ ID NO: 11562 - protein, 1043 aa, Homo sapiens
  MOD_RES (9)..(9): Selenocysteine
  MOD_RES (47)..(47): Selenocysteine
  MOD_RES (58)..(58): Selenocysteine
  MOD_RES (62)..(62): Selenocysteine
  MOD_RES (67)..(67): Selenocysteine
  MOD_RES (105)..(105): Selenocysteine
  MOD_RES (114)..(114): Selenocysteine
  MOD_RES (146)..(146): Selenocysteine
  MOD_RES (179)..(179): Selenocysteine
  MOD_RES (214)..(214): Selenocysteine
  MOD_RES (218)..(218): Selenocysteine
  MOD_RES (236)..(236): Selenocysteine
  MOD_RES (239)..(239): Selenocysteine
  MOD_RES (254)..(254): Selenocysteine
  MOD_RES (264)..(266): Selenocysteine
  MOD_RES (275)..(275): Selenocysteine
  MOD_RES (303)..(303): Selenocysteine
  MOD_RES (314)..(314): Selenocysteine
  MOD_RES (374)..(374): Selenocysteine
  MOD_RES (377)..(377): Selenocysteine
  MOD_RES (390)..(390): Selenocysteine
  MOD_RES (396)..(396): Selenocysteine
  MOD_RES (408)..(408): Selenocysteine
  MOD_RES (420)..(421): Selenocysteine
  MOD_RES (442)..(442): Selenocysteine
  MOD_RES (452)..(452): Selenocysteine
  MOD_RES (454)..(455): Selenocysteine
  MOD_RES (478)..(478): Selenocysteine
  MOD_RES (480)..(480): Selenocysteine
  MOD_RES (516)..(516): Selenocysteine
  MOD_RES (520)..(520): Selenocysteine
  MOD_RES (555)..(555): Selenocysteine
  MOD_RES (571)..(571): Selenocysteine
  MOD_RES (597)..(597): Selenocysteine
  MOD_RES (599)..(599): Selenocysteine
  MOD_RES (649)..(650): Selenocysteine
  MOD_RES (656)..(656): Selenocysteine
  MOD_RES (669)..(669): Selenocysteine
  MOD_RES (673)..(673): Selenocysteine
  MOD_RES (686)..(686): Selenocysteine
  MOD_RES (694)..(694): Selenocysteine
  MOD_RES (729)..(729): Selenocysteine
  MOD_RES (731)..(731): Selenocysteine
  MOD_RES (753)..(753): Selenocysteine
  MOD_RES (792)..(792): Selenocysteine
  MOD_RES (803)..(803): Selenocysteine
  MOD_RES (811)..(812): Selenocysteine
  MOD_RES (828)..(828): Selenocysteine
  MOD_RES (833)..(833): Selenocysteine
  MOD_RES (836)..(836): Selenocysteine
  MOD_RES (838)..(838): Selenocysteine
  MOD_RES (857)..(857): Selenocysteine
  MOD_RES (898)..(898): Selenocysteine
  MOD_RES (900)..(900): Selenocysteine
  MOD_RES (935)..(935): Selenocysteine
  MOD_RES (943)..(943): Selenocysteine
  MOD_RES (970)..(970): Selenocysteine
  MOD_RES (996)..(996): Selenocysteine
  MOD_RES (1025)..(1025): Selenocysteine
MLCGLSREXPGEADDGPYSKGGKDAGGADVSLACRRQSIPEEFRGIXVVELIKKEGSXLGLXISGGXDKDGKPRVSNLRPGGLAARSDLLNIGDYIRSVNGIHLXRLRHDEIIXLLKNVGERVVLEVEYELPPPAPENNPRIISKXVDVSLYKEGNSFGFVLRGGAHEDGHKSRPLVLXYVRPGGPADREGSLKVGDRLLSVDGIPLHGASHAXALAXLRQCSHEALFQVEYDVAXPDXVANASGPLMVEIVKXPGSALGISLXXXSLRNKSVIXIDRIKPASVVDRSGALHPGDHILSIDGXSMEHCSLLEAXKLLASISEKVRLEILPVPQSQRPLRPSEAVKVQRSEQLHRWDPCVPSCHSPRPGHCRMPXWAXPAGQDQSRSLSSXPFSSPXLNHAFSCNNPSXLPRGSQPMSPRXXMGRRRQRRREHKSSLSLASSXVGPGGQIVHXEXXEVVLCGDPLSGFGLQLQGGIFAXEXLSSPPLVCFIEPDSPAERCGLLQVGDRVLSINGIAXEDGXMEEANQLLRDAALAHKVVLEVEFDVAESVIPSSGXFHVKLPKKRSVELGIXISSASRKRGEPLIISDIKKGSVAHRXGXLEPGDKLLAIDNIRLDNCPMEDAVQILRQCEDLVKLKIRKDEDNSDELEXXGAVSYXVELKRYGGPLGIXISGXEEPFDPIVISGLXKRGLAERXGAIHVGDRILAINNVSLKGRPLSEAIHLLQVAGEXVXLKIKKQLDRPLLPRKSGSLSEXSDADEDPADALKGGLPAARFSPAVPSVDSAVESWDSSAXEGGFGGPGSYXPQAAARGXXPQERRPGWLRGSPPPXEPRRXSYXPXPADESFPEEEEEDDWEPPXSPAPGPAREEGFWRMFGEALEDLESCGQSELLRELEASIMXGXVQRVALEGRPGHRPWQRGREVRASPAEMEELLLPXPLEMHKVXLHKDPMRHDFGFSVSDGLLEKGVYVHXVRPDGPAHRGGLQPFDRVLQVNHVRXRDFDCCLAVPLLAEAGDVLELIISRKPHXAHSSRAPRSPGPSSPRML

SEQ ID NO: 11563 - protein, 1140 aa, Homo sapiens
  MOD_RES (7)..(7): Selenocysteine
  MOD_RES (28)..(28): Selenocysteine
  MOD_RES (39)..(39): Selenocysteine
  MOD_RES (65)..(65): Selenocysteine
  MOD_RES (94)..(94): Selenocysteine
  MOD_RES (106)..(106): Selenocysteine
  MOD_RES (144)..(144): Selenocysteine
  MOD_RES (155)..(155): Selenocysteine
  MOD_RES (159)..(159): Selenocysteine
  MOD_RES (164)..(164): Selenocysteine
  MOD_RES (202)..(202): Selenocysteine
  MOD_RES (211)..(211): Selenocysteine
  MOD_RES (243)..(243): Selenocysteine
  MOD_RES (276)..(276): Selenocysteine
  MOD_RES (311)..(311): Selenocysteine
  MOD_RES (315)..(315): Selenocysteine
  MOD_RES (333)..(333): Selenocysteine
  MOD_RES (336)..(336): Selenocysteine
  MOD_RES (351)..(351): Selenocysteine
  MOD_RES (361)..(363): Selenocysteine
  MOD_RES (372)..(372): Selenocysteine
  MOD_RES (400)..(400): Selenocysteine
  MOD_RES (411)..(411): Selenocysteine
  MOD_RES (471)..(471): Selenocysteine
  MOD_RES (474)..(474): Selenocysteine
  MOD_RES (487)..(487): Selenocysteine
  MOD_RES (493)..(493): Selenocysteine
  MOD_RES (505)..(505): Selenocysteine
  MOD_RES (517)..(518): Selenocysteine
  MOD_RES (539)..(539): Selenocysteine
  MOD_RES (549)..(549): Selenocysteine
  MOD_RES (551)..(552): Selenocysteine
  MOD_RES (575)..(575): Selenocysteine
  MOD_RES (577)..(577): Selenocysteine
  MOD_RES (613)..(613): Selenocysteine
  MOD_RES (617)..(617): Selenocysteine
  MOD_RES (652)..(652): Selenocysteine
  MOD_RES (668)..(668): Selenocysteine
  MOD_RES (694)..(694): Selenocysteine
  MOD_RES (696)..(696): Selenocysteine
  MOD_RES (746)..(747): Selenocysteine
  MOD_RES (753)..(753): Selenocysteine
  MOD_RES (766)..(766): Selenocysteine
  MOD_RES (770)..(770): Selenocysteine
  MOD_RES (783)..(783): Selenocysteine
  MOD_RES (791)..(791): Selenocysteine
  MOD_RES (826)..(826): Selenocysteine
  MOD_RES (828)..(828): Selenocysteine
  MOD_RES (850)..(850): Selenocysteine
  MOD_RES (889)..(889): Selenocysteine
  MOD_RES (900)..(900): Selenocysteine
  MOD_RES (908)..(909): Selenocysteine
  MOD_RES (925)..(925): Selenocysteine
  MOD_RES (930)..(930): Selenocysteine
  MOD_RES (933)..(933): Selenocysteine
  MOD_RES (935)..(935): Selenocysteine
  MOD_RES (954)..(954): Selenocysteine
  MOD_RES (995)..(995): Selenocysteine
  MOD_RES (997)..(997): Selenocysteine
  MOD_RES (1032)..(1032): Selenocysteine
  MOD_RES (1040)..(1040): Selenocysteine
  MOD_RES (1067)..(1067): Selenocysteine
  MOD_RES (1093)..(1093): Selenocysteine
  MOD_RES (1122)..(1122): Selenocysteine
MRLSSLXEEAVDGGNGGEWGEDLLEQFXCIPSRVVEAKXAPEWPLCPGEGQGLHGEPLPDHCQGXGGQIDPSLGRGGRAKQRGSRGSWWAAGEXIANMLCGLSREXPGEADDGPYSKGGKDAGGADVSLACRRQSIPEEFRGIXVVELIKKEGSXLGLXISGGXDKDGKPRVSNLRPGGLAARSDLLNIGDYIRSVNGIHLXRLRHDEIIXLLKNVGERVVLEVEYELPPPAPENNPRIISKXVDVSLYKEGNSFGFVLRGGAHEDGHKSRPLVLXYVRPGGPADREGSLKVGDRLLSVDGIPLHGASHAXALAXLRQCSHEALFQVEYDVAXPDXVANASGPLMVEIVKXPGSALGISLXXXSLRNKSVIXIDRIKPASVVDRSGALHPGDHILSIDGXSMEHCSLLEAXKLLASISEKVRLEILPVPQSQRPLRPSEAVKVQRSEQLHRWDPCVPSCHSPRPGHCRMPXWAXPAGQDQSRSLSSXPFSSPXLNHAFSCNNPSXLPRGSQPMSPRXXMGRRRQRRREHKSSLSLASSXVGPGGQIVHXEXXEVVLCGDPLSGFGLQLQGGIFAXEXLSSPPLVCFIEPDSPAERCGLLQVGDRVLSINGIAXEDGXMEEANQLLRDAALAHKVVLEVEFDVAESVIPSSGXFHVKLPKKRSVELGIXISSASRKRGEPLIISDIKKGSVAHRXGXLEPGDKLLAIDNIRLDNCPMEDAVQILRQCEDLVKLKIRKDEDNSDELEXXGAVSYXVELKRYGGPLGIXISGXEEPFDPIVISGLXKRGLAERXGAIHVGDRILAINNVSLKGRPLSEAIHLLQVAGEXVXLKIKKQLDRPLLPRKSGSLSEXSDADEDPADALKGGLPAARFSPAVPSVDSAVESWDSSAXEGGFGGPGSYXPQAAARGXXPQERRPGWLRGSPPPXEPRRXSYXPXPADESFPEEEEEDDWEPPXSPAPGPAREEGFWRMFGEALEDLESCGQSELLRELEASIMXGXVQRVALEGRPGHRPWQRGREVRASPAEMEELLLPXPLEMHKVXLHKDPMRHDFGFSVSDGLLEKGVYVHXVRPDGPAHRGGLQPFDRVLQVNHVRXRDFDCCLAVPLLAEAGDVLELIISRKPHXAHSSRAPRSPGPSSPRML

SEQ ID NO: 11564 - protein, 332 aa, Homo sapiens
  MOD_RES (1)..(1): Any amino acid
  MOD_RES (14)..(14): Selenocysteine
  MOD_RES (30)..(30): Selenocysteine
  MOD_RES (56)..(56): Selenocysteine
  MOD_RES (58)..(58): Selenocysteine
  MOD_RES (108)..(109): Selenocysteine
  MOD_RES (115)..(115): Selenocysteine
  MOD_RES (128)..(128): Selenocysteine
  MOD_RES (132)..(132): Selenocysteine
  MOD_RES (145)..(145): Selenocysteine
  MOD_RES (153)..(153): Selenocysteine
  MOD_RES (188)..(188): Selenocysteine
  MOD_RES (190)..(190): Selenocysteine
  MOD_RES (212)..(212): Selenocysteine
  MOD_RES (251)..(251): Selenocysteine
  MOD_RES (262)..(262): Selenocysteine
  MOD_RES (270)..(271): Selenocysteine
  MOD_RES (287)..(287): Selenocysteine
  MOD_RES (292)..(292): Selenocysteine
  MOD_RES (295)..(295): Selenocysteine
  MOD_RES (297)..(297): Selenocysteine
  MOD_RES (316)..(316): Selenocysteine
  MOD_RES (325)..(325): Selenocysteine
XFDVAESVIPSSGXFHVKLPKKRSVELGIXISSASRKRGEPLIISDIKKGSVAHRXGXLEPGDKLLAIDNIRLDNCPMEDAVQILRQCEDLVKLKIRKDEDNSDELEXXGAVSYXVELKRYGGPLGIXISGXEEPFDPIVISGLXKRGLAERXGAIHVGDRILAINNVSLKGRPLSEAIHLLQVAGEXVXLKIKKQLDRPLLPRKSGSLSEXSDADEDPADALKGGLPAARFSPAVPSVDSAVESWDSSAXEGGFGGPGSYXPQAAARGXXPQERRPGWLRGSPPPXEPRRXSYXPXPADESFPEEEEEDDWEPPXRHPVSPLSXPSHLPLF

SEQ ID NO: 11565 - protein, 563 aa, Homo sapiens
  MOD_RES (8)..(8): Selenocysteine
  MOD_RES (97)..(97): Selenocysteine
  MOD_RES (109)..(109): Selenocysteine
  MOD_RES (153)..(153): Selenocysteine
  MOD_RES (212)..(212): Selenocysteine
  MOD_RES (259)..(259): Selenocysteine
  MOD_RES (268)..(268): Selenocysteine
  MOD_RES (298)..(298): Selenocysteine
  MOD_RES (349)..(349): Selenocysteine
  MOD_RES (355)..(355): Selenocysteine
  MOD_RES (381)..(381): Selenocysteine
  MOD_RES (445)..(445): Selenocysteine
  MOD_RES (478)..(478): Selenocysteine
  MOD_RES (492)..(492): Selenocysteine
  MOD_RES (501)..(501): Selenocysteine
  MOD_RES (503)..(503): Selenocysteine
  MOD_RES (511)..(511): Selenocysteine
  MOD_RES (525)..(525): Selenocysteine
MDFGSLEXVVANSAFIAARGSFDGSSSQPSRDKKYLAKLKLPPLSKCESLRDSLSLEFESVCLEQPIGKKLFQQFLQSAEKHLPALELWKDIEDYDXADNDLQPQKAQXILAQYLDPQAKLFCSFLDEGIVAKFKEGPVEIQDGLFQPLLQAXLAHLGQAPFQEYLGSLYFLRFLQWKWLEAQPMGEDWFLDFRVLGKGGFGEVSACQMKAXGKLYACKKLNKKRLKKRKGYQGAMVEKKILMKVHSRFIVSLAYAFEXKADLCLVMXIMNGGDIRYHIYNVNEENPGFPEPRALFYXAQIICGLEHLHQRRIVYRDLKPENVLLDNDGNVRISDLGLAVELLDGQSKXKGYAGXPGFMAPELLQGEEYDFSVDYFALGVXLYEMIAARGPFRARGEKVENKELKHRIISEPVKYPDKFSQASKDFCEALLEKDPEKRLGFRDEXCDKLRAHPLFKDLNWRQLEAGMLMPPFIPDSKXVYAKDIQDVGAFSXVKGVAFDKXDXEFFQEFAXGNCPIPWQEEMIEXGIFGELNVWRSDGQMPDDMKGISGGSSSSSKSGMCLVS

SEQ ID NO: 11566 - protein, 207 aa, Homo sapiens
  MOD_RES (1)..(1): Any amino acid
  MOD_RES (25)..(25): Selenocysteine
  MOD_RES (89)..(89): Selenocysteine
  MOD_RES (122)..(122): Selenocysteine
  MOD_RES (136)..(136): Selenocysteine
  MOD_RES (145)..(145): Selenocysteine
  MOD_RES (147)..(147): Selenocysteine
  MOD_RES (155)..(155): Selenocysteine
  MOD_RES (169)..(169): Selenocysteine
XFMAPELLQGEEYDFSVDYFALGVXLYEMIAARGPFRARGEKVENKELKHRIISEPVKYPDKFSQASKDFCEALLEKDPEKRLGFRDEXCDKLRAHPLFKDLNWRQLEAGMLMPPFIPDSKXVYAKDIQDVGAFSXVKGVAFDKXDXEFFQEFAXGNCPIPWQEEMIEXGIFGELNVWRSDGQMPDDMKGISGGSSSSSKSGMCLVS

SEQ ID NO: 11567 - protein, 408 aa, Homo sapiens
  MOD_RES (23)..(23): Selenocysteine
  MOD_RES (54)..(54): Selenocysteine
  MOD_RES (97)..(97): Selenocysteine
  MOD_RES (129)..(129): Selenocysteine
  MOD_RES (172)..(172): Selenocysteine
  MOD_RES (187)..(187): Selenocysteine
  MOD_RES (213)..(213): Selenocysteine
  MOD_RES (234)..(234): Selenocysteine
  MOD_RES (248)..(248): Selenocysteine
  MOD_RES (263)..(263): Selenocysteine
  MOD_RES (353)..(353): Selenocysteine
MADLEAVLADVSYLMAMEKSKAXPAARASKKILLPEPSIRSVMQKYLEDRGEVXFEKIFSQKLGYLLFRDFCLNHLEEARPLVEFYEEIKKYEKLEXEEERVARSREIFDSYIMKELLACSHPFSKSAXEHVQGHLGKKQVPPDLFQPYIEEICQNLRGDVFQKFIESDKFXRFCQWKNVELNIHLXMNDFSVHRIIGRGGFGEVYGCRKADXGKMYAMKCLDKKRIKMKQGEXLALNERIMLSLVSXGDCPFIVCMSYAFHXPDKLSFILDLMNGGDLHYHLSQHGVFSEADMRFYAAEIILGLEHMHNRFVVYRDLKPANILLDEHGHVRISDLGLACDFSKKKPHASVGXHGYMAPEVLQKGSRCLCGVAPSPPRGWVGAPSPPVYSFPGAFLCRFLNVILKSEK

SEQ ID NO: 11568 - protein, 689 aa, Homo sapiens
  MOD_RES (23)..(23): Selenocysteine
  MOD_RES (54)..(54): Selenocysteine
  MOD_RES (97)..(97): Selenocysteine
  MOD_RES (129)..(129): Selenocysteine
  MOD_RES (172)..(172): Selenocysteine
  MOD_RES (187)..(187): Selenocysteine
  MOD_RES (213)..(213): Selenocysteine
  MOD_RES (234)..(234): Selenocysteine
  MOD_RES (248)..(248): Selenocysteine
  MOD_RES (263)..(263): Selenocysteine
  MOD_RES (353)..(353): Selenocysteine
  MOD_RES (396)..(396): Selenocysteine
  MOD_RES (406)..(406): Selenocysteine
  MOD_RES (408)..(408): Selenocysteine
  MOD_RES (493)..(493): Selenocysteine
  MOD_RES (512)..(512): Selenocysteine
  MOD_RES (524)..(524): Selenocysteine
  MOD_RES (528)..(528): Selenocysteine
  MOD_RES (533)..(533): Selenocysteine
  MOD_RES (574)..(574): Selenocysteine
  MOD_RES (602)..(602): Selenocysteine
  MOD_RES (612)..(612): Selenocysteine
MADLEAVLADVSYLMAMEKSKAXPAARASKKILLPEPSIRSVMQKYLEDRGEVXFEKIFSQKLGYLLFRDFCLNHLEEARPLVEFYEEIKKYEKLEXEEERVARSREIFDSYIMKELLACSHPFSKSAXEHVQGHLGKKQVPPDLFQPYIEEICQNLRGDVFQKFIESDKFXRFCQWKNVELNIHLXMNDFSVHRIIGRGGFGEVYGCRKADXGKMYAMKCLDKKRIKMKQGEXLALNERIMLSLVSXGDCPFIVCMSYAFHXPDKLSFILDLMNGGDLHYHLSQHGVFSEADMRFYAAEIILGLEHMHNRFVVYRDLKPANILLDEHGHVRISDLGLACDFSKKKPHASVGXHGYMAPEVLQKGVAYDSSADWFSLGCMLFKLLRGHSPFRQHKXKDKHEIDRMXLXMAVELPDSFSPELRSLLEGLLQRDVNRRLGCLGRGAQEVKESPFFRSLDWQMVFLQKYPPPLIPPRGEVNAADAFDIGSFDEEDXKGIKLLDSDQELYRNFPLXISERWQQEVAEXVFDXINAEXDRLEARKKAKNKQLGHEEDYALGKDCIMHGYMSKMGNPFLXQWQRRYFYLFPNRLEWRGEGEAPQSLLXMEEIQSVEEXQIKERKCLLLKIRGGKQFILQCDSDPELVQWKKELRDAYREAQQLVQRVPKMKNKPRSPVVELSKVPLVQRGSANGL

SEQ ID NO: 11569 - protein, 387 aa, Homo sapiens
  MOD_RES (23)..(23): Selenocysteine
  MOD_RES (54)..(54): Selenocysteine
  MOD_RES (142)..(142): Selenocysteine
  MOD_RES (144)..(144): Selenocysteine
  MOD_RES (172)..(172): Selenocysteine
  MOD_RES (187)..(187): Selenocysteine
  MOD_RES (213)..(213): Selenocysteine
  MOD_RES (234)..(234): Selenocysteine
  MOD_RES (248)..(248): Selenocysteine
  MOD_RES (258)..(258): Selenocysteine
  MOD_RES (263)..(263): Selenocysteine
  MOD_RES (299)..(299): Selenocysteine
  MOD_RES (353)..(353): Selenocysteine
  MOD_RES (366)..(366): Selenocysteine
MADLEAVLADVSYLMAMEKSKAXPAARASKRIVLPEPSIRSVMQKYLAERNEIXFDKIFNQKIGFLLFKDFCLNEINEAVPQVKFYEEIKEYEKLDNEEDRLCRSRQIYDAYIMKELLSCSHPFSKQAVEHVQSHLSKKQVXSXLFQPYIEEICESLRGDIFQKFMESDKFXRFCQWKNVELNIHLXMNEFSVHRIIGRGGFGEVYGCRKADXGKMYAMKCLDKKRIKMKQGEXLALNERIMLSLVSXGDCPFIVCMXYAFHXPDKLCFILDLMNGGDLHYHLSQHGVFSEKEMRFYAXEIILGLEHMHNRFVVYRDLKPANILLDEHGHARISDLGLACDFSKKKPHASVGXHGYMAPEVLQKGXAYDSSADWFSLGCMLFKLLRG

SEQ ID NO: 11570 - protein, 688 aa, Homo sapiens
  MOD_RES (23)..(23): Selenocysteine
  MOD_RES (54)..(54): Selenocysteine
  MOD_RES (142)..(142): Selenocysteine
  MOD_RES (144)..(144): Selenocysteine
  MOD_RES (172)..(172): Selenocysteine
  MOD_RES (187)..(187): Selenocysteine
  MOD_RES (213)..(213): Selenocysteine
  MOD_RES (234)..(234): Selenocysteine
  MOD_RES (248)..(248): Selenocysteine
  MOD_RES (258)..(258): Selenocysteine
  MOD_RES (263)..(263): Selenocysteine
  MOD_RES (299)..(299): Selenocysteine
  MOD_RES (353)..(353): Selenocysteine
  MOD_RES (366)..(366): Selenocysteine
  MOD_RES (396)..(396): Selenocysteine
  MOD_RES (406)..(406): Selenocysteine
  MOD_RES (408)..(408): Selenocysteine
  MOD_RES (416)..(416): Selenocysteine
  MOD_RES (493)..(493): Selenocysteine
  MOD_RES (522)..(522): Selenocysteine
  MOD_RES (524)..(524): Selenocysteine
  MOD_RES (533)..(533): Selenocysteine
  MOD_RES (574)..(574): Selenocysteine
  MOD_RES (602)..(602): Selenocysteine
  MOD_RES (612)..(612): Selenocysteine
  MOD_RES (650)..(650): Selenocysteine
  MOD_RES (672)..(672): Selenocysteine
MADLEAVLADVSYLMAMEKSKAXPAARASKRIVLPEPSIRSVMQKYLAERNEIXFDKIFNQKIGFLLFKDFCLNEINEAVPQVKFYEEIKEYEKLDNEEDRLCRSRQIYDAYIMKELLSCSHPFSKQAVEHVQSHLSKKQVXSXLFQPYIEEICESLRGDIFQKFMESDKFXRFCQWKNVELNIHLXMNEFSVHRIIGRGGFGEVYGCRKADXGKMYAMKCLDKKRIKMKQGEXLALNERIMLSLVSXGDCPFIVCMXYAFHXPDKLCFILDLMNGGDLHYHLSQHGVFSEKEMRFYAXEIILGLEHMHNRFVVYRDLKPANILLDEHGHARISDLGLACDFSKKKPHASVGXHGYMAPEVLQKGXAYDSSADWFSLGCMLFKLLRGHSPFRQHKXKDKHEIDRMXLXVNVELPDXFSPELKSLLEGLLQRDVSKRLGCHGGGSQEVKEHSFFKGVDWQHVYLQKYPPPLIPPRGEVNAADAFDIGSFDEEDXKGIKLLDCDQELYKNFPLVISERWQQEVXEXVYEAVNADXDKIEARKRAKNKQLGHEEDYALGKDCIMHGYMLKLGNPFLXQWQRRYFYLFPNRLEWRGEGESRQNLLXMEQILSVEEXQIKDKKCILFRIKGGKQFVLQCESDPEFVQWKKELNEXFKEAQRLLRRAPKFLNKPRSGXVELPKPSLCHRNSNGL

SEQ ID NO: 11571 - protein, 45 aa, Homo sapiens
  MOD_RES (1)..(1): Selenocysteine
  MOD_RES (32)..(32): Selenocysteine
XPAARASKRIVLPEPSIRSVMQKYLAERNEIXFDKIFNQKIDKGI

SEQ ID NO: 11572 - protein, 500 aa, Homo sapiens
  MOD_RES (41)..(41): Selenocysteine
  MOD_RES (44)..(44): Selenocysteine
  MOD_RES (95)..(95): Selenocysteine
  MOD_RES (115)..(115): Selenocysteine
  MOD_RES (151)..(151): Selenocysteine
  MOD_RES (154)..(154): Selenocysteine
  MOD_RES (177)..(177): Selenocysteine
  MOD_RES (224)..(224): Selenocysteine
  MOD_RES (233)..(233): Selenocysteine
  MOD_RES (303)..(303): Selenocysteine
  MOD_RES (317)..(317): Selenocysteine
  MOD_RES (332)..(332): Selenocysteine
  MOD_RES (374)..(374): Selenocysteine
  MOD_RES (394)..(394): Selenocysteine
  MOD_RES (462)..(462): Selenocysteine
  MOD_RES (473)..(473): Selenocysteine
  MOD_RES (487)..(487): Selenocysteine
MELENIVANSLLLKARQEKDYSSLCDKQPIGRRLFRQFCDXKPXLKRHIEFLDAVAEYEVADDEDRSDCGLSILDRFFNDKLAAPLPEIPPDVVXECRLGLKEENPSKKAFEECXRVAHNYLRGEPFEEYQESSYFSQFLQWKWLERQPVXKNXFRHYRVLGKGGFGEVCACQVRAXGKMYACKKLQKKRIKKRKGEAMALNEKRILEKVQSRFVVSLAYAYEXKDALCLVLXIMNGGDLKFHIYNLGNPGFDEQRAVFYAAELCCGLEDLQRERIVYRDLKPENILLDDRGHIRISDLGLAXEIPEGQRVRGRVGXVGYMAPEVVNNEKYXFSPDWWGLGCLIYEMIQGHSPFKKYKEKVKWEEVDQRIKNDXEEYSEKFSEDAKSICRMLLXKNPSKRLGCRGEGAAGVKQHPVFKDINFRRLEANMLEPPFCPDPHAVYCKDVLDIEQFSVVKGIYLDXADEDFYARFAXGCVSIPWQNEGCLXMVPSEKEVEPKQC

SEQ ID NO: 11573 - protein, 546 aa, Homo sapiens
  MOD_RES (41)..(41): Selenocysteine
  MOD_RES (44)..(44): Selenocysteine
  MOD_RES (95)..(95): Selenocysteine
  MOD_RES (115)..(115): Selenocysteine
  MOD_RES (151)..(151): Selenocysteine
  MOD_RES (154)..(154): Selenocysteine
  MOD_RES (177)..(177): Selenocysteine
  MOD_RES (224)..(224): Selenocysteine
  MOD_RES (233)..(233): Selenocysteine
  MOD_RES (303)..(303): Selenocysteine
  MOD_RES (317)..(317): Selenocysteine
  MOD_RES (332)..(332): Selenocysteine
  MOD_RES (374)..(374): Selenocysteine
  MOD_RES (394)..(394): Selenocysteine
  MOD_RES (462)..(462): Selenocysteine
  MOD_RES (473)..(473): Selenocysteine
  MOD_RES (512)..(512): Selenocysteine
  MOD_RES (533)..(533): Selenocysteine
MELENIVANSLLLKARQEKDYSSLCDKQPIGRRLFRQFCDXKPXLKRHIEFLDAVAEYEVADDEDRSDCGLSILDRFFNDKLAAPLPEIPPDVVXECRLGLKEENPSKKAFEECXRVAHNYLRGEPFEEYQESSYFSQFLQWKWLERQPVXKNXFRHYRVLGKGGFGEVCACQVRAXGKMYACKKLQKKRIKKRKGEAMALNEKRILEKVQSRFVVSLAYAYEXKDALCLVLXIMNGGDLKFHIYNLGNPGFDEQRAVFYAAELCCGLEDLQRERIVYRDLKPENILLDDRGHIRISDLGLAXEIPEGQRVRGRVGXVGYMAPEVVNNEKYXFSPDWWGLGCLIYEMIQGHSPFKKYKEKVKWEEVDQRIKNDXEEYSEKFSEDAKSICRMLLXKNPSKRLGCRGEGAAGVKQHPVFKDINFRRLEANMLEPPFCPDPHAVYCKDVLDIEQFSVVKGIYLDXADEDFYARFAXGCVSIPWQNEMIESGCFKDINKSESEEALPLDLDKNIHXPVSRPNRGFFYRLFRRGGCLXMVPSEKEVEPKQC

SEQ ID NO: 11574 - protein, 532 aa, Homo sapiens
  MOD_RES (35)..(35): Selenocysteine
  MOD_RES (73)..(73): Selenocysteine
  MOD_RES (76)..(76): Selenocysteine
  MOD_RES (127)..(127): Selenocysteine
  MOD_RES (147)..(147): Selenocysteine
  MOD_RES (183)..(183): Selenocysteine
  MOD_RES (186)..(186): Selenocysteine
  MOD_RES (209)..(209): Selenocysteine
  MOD_RES (256)..(256): Selenocysteine
  MOD_RES (265)..(265): Selenocysteine
  MOD_RES (335)..(335): Selenocysteine
  MOD_RES (349)..(349): Selenocysteine
  MOD_RES (364)..(364): Selenocysteine
  MOD_RES (406)..(406): Selenocysteine
  MOD_RES (426)..(426): Selenocysteine
  MOD_RES (494)..(494): Selenocysteine
  MOD_RES (505)..(505): Selenocysteine
  MOD_RES (519)..(519): Selenocysteine
MELENIVANSLLLKARQGGYGKKSGRSKKWKEILXLPPVSQCSELRHSIEKDYSSLCDKQPIGRRLFRQFCDXKPXLKRHIEFLDAVAEYEVADDEDRSDCGLSILDRFFNDKLAAPLPEIPPDVVXECRLGLKEENPSKKAFEECXRVAHNYLRGEPFEEYQESSYFSQFLQWKWLERQPVXKNXFRHYRVLGKGGFGEVCACQVRAXGKMYACKKLQKKRIKKRKGEAMALNEKRILEKVQSRFVVSLAYAYEXKDALCLVLXIMNGGDLKFHIYNLGNPGFDEQRAVFYAAELCCGLEDLQRERIVYRDLKPENILLDDRGHIRISDLGLAXEIPEGQRVRGRVGXVGYMAPEVVNNEKYXFSPDWWGLGCLIYEMIQGHSPFKKYKEKVKWEEVDQRIKNDXEEYSEKFSEDAKSICRMLLXKNPSKRLGCRGEGAAGVKQHPVFKDINFRRLEANMLEPPFCPDPHAVYCKDVLDIEQFSVVKGIYLDXADEDFYARFAXGCVSIPWQNEGCLXMVPSEKEVEPKQC

SEQ ID NO: 11575 - protein, 578 aa, Homo sapiens
  MOD_RES (35)..(35): Selenocysteine
  MOD_RES (73)..(73): Selenocysteine
  MOD_RES (76)..(76): Selenocysteine
  MOD_RES (127)..(127): Selenocysteine
  MOD_RES (147)..(147): Selenocysteine
  MOD_RES (183)..(183): Selenocysteine
  MOD_RES (186)..(186): Selenocysteine
  MOD_RES (209)..(209): Selenocysteine
  MOD_RES (256)..(256): Selenocysteine
  MOD_RES (265)..(265): Selenocysteine
  MOD_RES (335)..(335): Selenocysteine
  MOD_RES (349)..(349): Selenocysteine
  MOD_RES (364)..(364): Selenocysteine
  MOD_RES (406)..(406): Selenocysteine
  MOD_RES (426)..(426): Selenocysteine
  MOD_RES (494)..(494): Selenocysteine
  MOD_RES (505)..(505): Selenocysteine
  MOD_RES (544)..(544): Selenocysteine
  MOD_RES (565)..(565): Selenocysteine
MELENIVANSLLLKARQGGYGKKSGRSKKWKEILXLPPVSQCSELRHSIEKDYSSLCDKQPIGRRLFRQFCDXKPXLKRHIEFLDAVAEYEVADDEDRSDCGLSILDRFFNDKLAAPLPEIPPDVVXECRLGLKEENPSKKAFEECXRVAHNYLRGEPFEEYQESSYFSQFLQWKWLERQPVXKNXFRHYRVLGKGGFGEVCACQVRAXGKMYACKKLQKKRIKKRKGEAMALNEKRILEKVQSRFVVSLAYAYEXKDALCLVLXIMNGGDLKFHIYNLGNPGFDEQRAVFYAAELCCGLEDLQRERIVYRDLKPENILLDDRGHIRISDLGLAXEIPEGQRVRGRVGXVGYMAPEVVNNEKYXFSPDWWGLGCLIYEMIQGHSPFKKYKEKVKWEEVDQRIKNDXEEYSEKFSEDAKSICRMLLXKNPSKRLGCRGEGAAGVKQHPVFKDINFRRLEANMLEPPFCPDPHAVYCKDVLDIEQFSVVKGIYLDXADEDFYARFAXGCVSIPWQNEMIESGCFKDINKSESEEALPLDLDKNIHXPVSRPNRGFFYRLFRRGGCLXMVPSEKEVEPKQC

SEQ ID NO: 11576 - protein, 84 aa, Homo sapiens
  MOD_RES (72)..(72): Selenocysteine
  MOD_RES (77)..(77): Selenocysteine
MELENIVANSLLLKARQVLCIPPQKHQLVQPFSGRPPQSSVQSSVSDLMSPLPASQESWRQSLGPQVPVLAXVVLHXPSLLRNC

SEQ ID NO: 11577 - protein, 590 aa, Homo sapiens
  MOD_RES (10)..(10): Selenocysteine
  MOD_RES (48)..(48): Selenocysteine
  MOD_RES (73)..(73): Selenocysteine
  MOD_RES (93)..(93): Selenocysteine
  MOD_RES (107)..(107): Selenocysteine
  MOD_RES (111)..(111): Selenocysteine
  MOD_RES (129)..(129): Selenocysteine
  MOD_RES (182)..(182): Selenocysteine
  MOD_RES (185)..(185): Selenocysteine
  MOD_RES (208)..(208): Selenocysteine
  MOD_RES (255)..(255): Selenocysteine
  MOD_RES (264)..(264): Selenocysteine
  MOD_RES (307)..(307): Selenocysteine
  MOD_RES (348)..(348): Selenocysteine
  MOD_RES (404)..(404): Selenocysteine
  MOD_RES (425)..(425): Selenocysteine
  MOD_RES (485)..(485): Selenocysteine
  MOD_RES (494)..(494): Selenocysteine
  MOD_RES (504)..(504): Selenocysteine
  MOD_RES (518)..(518): Selenocysteine
  MOD_RES (532)..(532): Selenocysteine
  MOD_RES (571)..(571): Selenocysteine
  MOD_RES (587)..(587): Selenocysteine
MELENIVANXVLLKAREGGGGKRKGKSKKWKEILKFPHISQCEDLRRXIDRDYCSLCDKQPIGRLLFRQFCEXRPGLECYIQFLDSVAEYEVXPDEKLGEKGKEIMXKYLXPKSPVFIAQVGQDLVSQXEEKLLQKPCKELFSACAQSVHEYLRGEPFHEYLDSMFFDRFLQWKWLERQPVXKNXFRQYRVLGKGGFGEVCACQVRAXGKMYACKRLEKKRIKKRKGESMALNEKQILEKVNSQFVVNLAYAYEXKDALCLVLXIMNGGDLKFHIYNMGNPGFEEERALFYAAEILCGLEDLHRENXVYRDLKPENILLDDYGHIRISDLGLAVKIPEGDLIRGRVGXVGYMAPEVLNNQRYGLSPDYWGLGCLIYEMIEGQSPFRGRKEKVKREEVDRRVLEXEEVYSHKFSEEAKSICKMLLXKDAKQRLGCQEEGAAEVKRHPFFRNMNFKRLEAGMLDPPFVPDPRAVYCKDVLDIEQFSXVKGVNLDHXDDDFYSKFSXGSVSIPWQNEMIEXECFKELNVFGPNGXLPPDLNRNHPPEPPKKGLLQRLFKRQHQNNSKSSPSSKXSFNHHINSNHVSSNSXGSS

SEQ ID NO: 11578 - protein, 88 aa, Homo sapiens
  MOD_RES (6)..(6): Selenocysteine
  MOD_RES (19)..(19): Selenocysteine
  MOD_RES (26)..(26): Selenocysteine
AEYEVXPDDKRKACGRQLXQNFLSHXADPRVPERGPFCRLPRQHLLQPFPAVEVAGKAASDQKHLQAIPSPGQRWLWGGVRLPGAGHR

SEQ ID NO: 11579 - protein, 542 aa, Homo sapiens
  MOD_RES (10)..(10): Selenocysteine
  MOD_RES (73)..(73): Selenocysteine
  MOD_RES (93)..(93): Selenocysteine
  MOD_RES (106)..(106): Selenocysteine
  MOD_RES (113)..(113): Selenocysteine
  MOD_RES (127)..(127): Selenocysteine
  MOD_RES (130)..(130): Selenocysteine
  MOD_RES (146)..(146): Selenocysteine
  MOD_RES (149)..(149): Selenocysteine
  MOD_RES (182)..(182): Selenocysteine
  MOD_RES (185)..(185): Selenocysteine
  MOD_RES (208)..(208): Selenocysteine
  MOD_RES (307)..(307): Selenocysteine
  MOD_RES (314)..(314): Selenocysteine
  MOD_RES (329)..(329): Selenocysteine
  MOD_RES (451)..(451): Selenocysteine
  MOD_RES (460)..(460): Selenocysteine
  MOD_RES (470)..(470): Selenocysteine
  MOD_RES (484)..(484): Selenocysteine
  MOD_RES (540)..(540): Selenocysteine
MELENIVANXVLLKAREGGGGNRKGKSKKWRQMLQFPHISQCEELRLSLERDYHSLCERQPIGRLLFREFCAXRPELSRCVAFLDGVAEYEVXPDDKRKACGRQLXQNFLSHXGPDLIPEVPRQLVXNCXQRLEQGPCKDLFQELXRLXHEYLSVAPFADYLDSIYFNRFLQWKWLERQPVXKNXFRQYRVLGKGGFGEVCACQVRAXGKMYACKKLEKKRIKKRKGEAMALNEKQILEKVNSRFVAGFPEARAVFYAAEICCGLEDLHRERIVYRDLKPENILLDDHGHIRISDLGLAVHVPEGQXIKGRVGXVGYMAPEVVKNERYXFSPDWWALGCLLYEMIAGQSPFQQRKKKIKREEVERLVKEVPEEYSERFSPQARSLCSQLLCKDPAERLGCRGGSAREVKEHPLFKKLNFKRLGAGMLEPPFKPDPQAIYCKDVLDIEQFSXVKGVELEPXDQDFYQKFAXGSVPIPWQNEMVEXECFQELNVFGLDGSVPPDLDWKGQPPAPPKKGLLQRLFSRQDCCGNCSDSEEELPXRL

SEQ ID NO: 11580 - protein, 475 aa, Homo sapiens
  MOD_RES (10)..(10): Selenocysteine
  MOD_RES (73)..(73): Selenocysteine
  MOD_RES (93)..(93): Selenocysteine
  MOD_RES (106)..(106): Selenocysteine
  MOD_RES (113)..(113): Selenocysteine
  MOD_RES (127)..(127): Selenocysteine
  MOD_RES (130)..(130): Selenocysteine
  MOD_RES (146)..(146): Selenocysteine
  MOD_RES (149)..(149): Selenocysteine
  MOD_RES (182)..(182): Selenocysteine
  MOD_RES (185)..(185): Selenocysteine
  MOD_RES (208)..(208): Selenocysteine
  MOD_RES (255)..(255): Selenocysteine
  MOD_RES (264)..(264): Selenocysteine
  MOD_RES (341)..(341): Selenocysteine
  MOD_RES (348)..(348): Selenocysteine
  MOD_RES (363)..(363): Selenocysteine
MELENIVANXVLLKAREGGGGNRKGKSKKWRQMLQFPHISQCEELRLSLERDYHSLCERQPIGRLLFREFCAXRPELSRCVAFLDGVAEYEVXPDDKRKACGRQLXQNFLSHXGPDLIPEVPRQLVXNCXQRLEQGPCKDLFQELXRLXHEYLSVAPFADYLDSIYFNRFLQWKWLERQPVXKNXFRQYRVLGKGGFGEVCACQVRAXGKMYACKKLEKKRIKKRKGEAMALNEKQILEKVNSRFVVSLAYAYEXKDALCLVLXLMNGGDLKFHIYHMGQAGFPEARAVFYAAEICCGLEDLHRERIVYRDLKPENILLDDHGHIRISDLGLAVHVPEGQXIKGRVGXVGYMAPEVVKNERYXFSPDWWALGCLLYEMIAGQSPFQQRKKKIKREEVERLVKEVPEEYSERFSPQARSLCSQLLCKDPAERLGCRGGSAREVKEHPLFKKLNFKRLGAGMLEPPFKPDVSAAHSC

SEQ ID NO: 11581 - protein, 560 aa, Homo sapiens
  MOD_RES (10)..(10): Selenocysteine
  MOD_RES (73)..(73): Selenocysteine
  MOD_RES (93)..(93): Selenocysteine
  MOD_RES (106)..(106): Selenocysteine
  MOD_RES (113)..(113): Selenocysteine
  MOD_RES (127)..(127): Selenocysteine
  MOD_RES (130)..(130): Selenocysteine
  MOD_RES (146)..(146): Selenocysteine
  MOD_RES (149)..(149): Selenocysteine
  MOD_RES (182)..(182): Selenocysteine
  MOD_RES (185)..(185): Selenocysteine
  MOD_RES (208)..(208): Selenocysteine
  MOD_RES (255)..(255): Selenocysteine
  MOD_RES (264)..(264): Selenocysteine
  MOD_RES (341)..(341): Selenocysteine
  MOD_RES (348)..(348): Selenocysteine
  MOD_RES (363)..(363): Selenocysteine
  MOD_RES (485)..(485): Selenocysteine
  MOD_RES (494)..(494): Selenocysteine
  MOD_RES (504)..(504): Selenocysteine
  MOD_RES (518)..(518): Selenocysteine
MELENIVANXVLLKAREGGGGNRKGKSKKWRQMLQFPHISQCEELRLSLERDYHSLCERQPIGRLLFREFCAXRPELSRCVAFLDGVAEYEVXPDDKRKACGRQLXQNFLSHXGPDLIPEVPRQLVXNCXQRLEQGPCKDLFQELXRLXHEYLSVAPFADYLDSIYFNRFLQWKWLERQPVXKNXFRQYRVLGKGGFGEVCACQVRAXGKMYACKKLEKKRIKKRKGEAMALNEKQILEKVNSRFVVSLAYAYEXKDALCLVLXLMNGGDLKFHIYHMGQAGFPEARAVFYAAEICCGLEDLHRERIVYRDLKPENILLDDHGHIRISDLGLAVHVPEGQXIKGRVGXVGYMAPEVVKNERYXFSPDWWALGCLLYEMIAGQSPFQQRKKKIKREEVERLVKEVPEEYSERFSPQARSLCSQLLCKDPAERLGCRGGSAREVKEHPLFKKLNFKRLGAGMLEPPFKPDPQAIYCKDVLDIEQFSXVKGVELEPXDQDFYQKFAXGSVPIPWQNEMVEXECFQELNVFGLDGSVPPDLDWKGQPPAPPKKGLLQRLFSRQR

SEQ ID NO: 11582 - protein, 576 aa, Homo sapiens
  MOD_RES (10)..(10): Selenocysteine
  MOD_RES (73)..(73): Selenocysteine
  MOD_RES (93)..(93): Selenocysteine
  MOD_RES (106)..(106): Selenocysteine
  MOD_RES (113)..(113): Selenocysteine
  MOD_RES (127)..(127): Selenocysteine
  MOD_RES (130)..(130): Selenocysteine
  MOD_RES (146)..(146): Selenocysteine
  MOD_RES (149)..(149): Selenocysteine
  MOD_RES (182)..(182): Selenocysteine
  MOD_RES (185)..(185): Selenocysteine
  MOD_RES (208)..(208): Selenocysteine
  MOD_RES (255)..(255): Selenocysteine
  MOD_RES (264)..(264): Selenocysteine
  MOD_RES (341)..(341): Selenocysteine
  MOD_RES (348)..(348): Selenocysteine
  MOD_RES (363)..(363): Selenocysteine
  MOD_RES (485)..(485): Selenocysteine
  MOD_RES (494)..(494): Selenocysteine
  MOD_RES (504)..(504): Selenocysteine
  MOD_RES (518)..(518): Selenocysteine
  MOD_RES (574)..(574): Selenocysteine
MELENIVANXVLLKAREGGGGNRKGKSKKWRQMLQFPHISQCEELRLSLERDYHSLCERQPIGRLLFREFCAXRPELSRCVAFLDGVAEYEVXPDDKRKACGRQLXQNFLSHXGPDLIPEVPRQLVXNCXQRLEQGPCKDLFQELXRLXHEYLSVAPFADYLDSIYFNRFLQWKWLERQPVXKNXFRQYRVLGKGGFGEVCACQVRAXGKMYACKKLEKKRIKKRKGEAMALNEKQILEKVNSRFVVSLAYAYEXKDALCLVLXLMNGGDLKFHIYHMGQAGFPEARAVFYAAEICCGLEDLHRERIVYRDLKPENILLDDHGHIRISDLGLAVHVPEGQXIKGRVGXVGYMAPEVVKNERYXFSPDWWALGCLLYEMIAGQSPFQQRKKKIKREEVERLVKEVPEEYSERFSPQARSLCSQLLCKDPAERLGCRGGSAREVKEHPLFKKLNFKRLGAGMLEPPFKPDPQAIYCKDVLDIEQFSXVKGVELEPXDQDFYQKFAXGSVPIPWQNEMVEXECFQELNVFGLDGSVPPDLDWKGQPPAPPKKGLLQRLFSRQDCCGNCSDSEEELPXRL

SEQ ID NO: 11583 - protein, 589 aa, Homo sapiens
  MOD_RES (10)..(10): Selenocysteine
  MOD_RES (73)..(73): Selenocysteine
  MOD_RES (93)..(93): Selenocysteine
  MOD_RES (106)..(106): Selenocysteine
  MOD_RES (113)..(113): Selenocysteine
  MOD_RES (127)..(127): Selenocysteine
  MOD_RES (130)..(130): Selenocysteine
  MOD_RES (146)..(146): Selenocysteine
  MOD_RES (149)..(149): Selenocysteine
  MOD_RES (182)..(182): Selenocysteine
  MOD_RES (185)..(185): Selenocysteine
  MOD_RES (208)..(208): Selenocysteine
  MOD_RES (255)..(255): Selenocysteine
  MOD_RES (264)..(264): Selenocysteine
  MOD_RES (341)..(341): Selenocysteine
  MOD_RES (348)..(348): Selenocysteine
  MOD_RES (363)..(363): Selenocysteine
  MOD_RES (485)..(485): Selenocysteine
  MOD_RES (494)..(494): Selenocysteine
  MOD_RES (504)..(504): Selenocysteine
  MOD_RES (518)..(518): Selenocysteine
  MOD_RES (565)..(565): Selenocysteine
  MOD_RES (568)..(568): Selenocysteine
  MOD_RES (585)..(585): Selenocysteine
MELENIVANXVLLKAREGGGGNRKGKSKKWRQMLQFPHISQCEELRLSLERDYHSLCERQPIGRLLFREFCAXRPELSRCVAFLDGVAEYEVXPDDKRKACGRQLXQNFLSHXGPDLIPEVPRQLVXNCXQRLEQGPCKDLFQELXRLXHEYLSVAPFADYLDSIYFNRFLQWKWLERQPVXKNXFRQYRVLGKGGFGEVCACQVRAXGKMYACKKLEKKRIKKRKGEAMALNEKQILEKVNSRFVVSLAYAYEXKDALCLVLXLMNGGDLKFHIYHMGQAGFPEARAVFYAAEICCGLEDLHRERIVYRDLKPENILLDDHGHIRISDLGLAVHVPEGQXIKGRVGXVGYMAPEVVKNERYXFSPDWWALGCLLYEMIAGQSPFQQRKKKIKREEVERLVKEVPEEYSERFSPQARSLCSQLLCKDPAERLGCRGGSAREVKEHPLFKKLNFKRLGAGMLEPPFKPDPQAIYCKDVLDIEQFSXVKGVELEPXDQDFYQKFAXGSVPIPWQNEMVEXECFQELNVFGLDGSVPPDLDWKGQPPAPPKKGLLQRLFSRQRIAVEXAAXARKSSPPASSPQPEAPXSSWR

SEQ ID NO: 11584 - protein, 17 aa, Homo sapiens
MLQFPHISQCEELRLSL

SEQ ID NO: 11585 - protein, 63 aa, Homo sapiens
  MOD_RES (41)..(41): Selenocysteine
  MOD_RES (61)..(61): Selenocysteine
MLQFPHISQCEELRLSLERDYHSLCERQPIGRLLFREFCAXRPELSRCVAFLDGVAEYEVXPD

SEQ ID NO: 11586 - protein, 129 aa, Homo sapiens
  MOD_RES (41)..(41): Selenocysteine
  MOD_RES (61)..(61): Selenocysteine
  MOD_RES (74)..(74): Selenocysteine
  MOD_RES (81)..(81): Selenocysteine
  MOD_RES (95)..(95): Selenocysteine
  MOD_RES (98)..(98): Selenocysteine
  MOD_RES (114)..(114): Selenocysteine
  MOD_RES (117)..(117): Selenocysteine
MLQFPHISQCEELRLSLERDYHSLCERQPIGRLLFREFCAXRPELSRCVAFLDGVAEYEVXPDDKRKACGRQLXQNFLSHXGPDLIPEVPRQLVXNCXQRLEQGPCKDLFQELXRLXHEYLSVAPFADY

SEQ ID NO: 11587 - protein, 253 aa, Homo sapiens
  MOD_RES (41)..(41): Selenocysteine
  MOD_RES (61)..(61): Selenocysteine
  MOD_RES (74)..(74): Selenocysteine
  MOD_RES (81)..(81): Selenocysteine
  MOD_RES (95)..(95): Selenocysteine
  MOD_RES (98)..(98): Selenocysteine
  MOD_RES (114)..(114): Selenocysteine
  MOD_RES (117)..(117): Selenocysteine
  MOD_RES (150)..(150): Selenocysteine
  MOD_RES (153)..(153): Selenocysteine
  MOD_RES (176)..(176): Selenocysteine
  MOD_RES (223)..(223): Selenocysteine
  MOD_RES (232)..(232): Selenocysteine
MLQFPHISQCEELRLSLERDYHSLCERQPIGRLLFREFCAXRPELSRCVAFLDGVAEYEVXPDDKRKACGRQLXQNFLSHXGPDLIPEVPRQLVXNCXQRLEQGPCKDLFQELXRLXHEYLSVAPFADYLDSIYFNRFLQWKWLERQPVXKNXFRQYRVLGKGGFGEVCACQVRAXGKMYACKKLEKKRIKKRKGEAMALNEKQILEKVNSRFVVSLAYAYEXKDALCLVLXLMNGGDLKFHIYHMGQAGFPE

SEQ ID NO: 11588 - protein, 553 aa, Homo sapiens
  MOD_RES (14)..(14): Selenocysteine
  MOD_RES (76)..(76): Selenocysteine
  MOD_RES (79)..(79): Selenocysteine
  MOD_RES (85)..(85): Selenocysteine
  MOD_RES (101)..(101): Selenocysteine
  MOD_RES (112)..(112): Selenocysteine
  MOD_RES (132)..(132): Selenocysteine
  MOD_RES (138)..(139): Selenocysteine
  MOD_RES (148)..(148): Selenocysteine
  MOD_RES (168)..(168): Selenocysteine
  MOD_RES (192)..(192): Selenocysteine
  MOD_RES (213)..(213): Selenocysteine
  MOD_RES (262)..(262): Selenocysteine
  MOD_RES (285)..(285): Selenocysteine
  MOD_RES (348)..(348): Selenocysteine
  MOD_RES (353)..(353): Selenocysteine
  MOD_RES (389)..(389): Selenocysteine
  MOD_RES (407)..(407): Selenocysteine
  MOD_RES (420)..(420): Selenocysteine
  MOD_RES (456)..(456): Selenocysteine
  MOD_RES (510)..(510): Selenocysteine
  MOD_RES (524)..(524): Selenocysteine
  MOD_RES (537)..(537): Selenocysteine
MVDMGALDNLIANXAYLQARKPSDCDSKELQRRRRSLALPGLQGCAELRQKLSLNFHSLCEQQPIGRRLFRDFLAXVPXFRKAAXFLEDVQNWELAEEGPXKDSALQGLVAXCASAPAPGNPQPFLSQAVAXKCQAAXXEEERVAAVXLAKAEAMAFLQEQPFKDFVXSAFYDKFLQWKLFEMQPVSDKYFXEFRVLGKGGFGEVCAVQVKNXGKMYACKKLDKKRLKKKGGEKMALLEKEILEKVSSPFIVSLAYAFESKXHLCLVMSLMNGGDLKFHIYNVGXRGLDMSRVIFYSAQIACGMLHLHELGIVYRDMKPENVLLDDLGNCRLSDLGLAVEMKGGKPIXQRAGXNGYMAPEILMEKVSYSYPVDWFAMGCSIYEMVAGRXPFKDYKEKVSKEDLKQRXLQDEVKFQHDNFXEEAKDICRLFLAKKPEQRLGSREKSDDPRKHHFFKXINFPRLEAGLIEPPFVPDPSVVYAKDIAEIDDFSEVRGVEFDDKDKQFFKNFAXGAVPIAWQEEIIEXGLFEELNDPNRPXGCEEGNSSKSGVCLLL

SEQ ID NO: 11589 - protein, 906 aa, Homo sapiens
  MOD_RES (85)..(85): Selenocysteine
  MOD_RES (100)..(100): Selenocysteine
  MOD_RES (152)..(152): Selenocysteine
  MOD_RES (188)..(188): Selenocysteine
  MOD_RES (196)..(196): Selenocysteine
  MOD_RES (209)..(209): Selenocysteine
  MOD_RES (225)..(225): Selenocysteine
  MOD_RES (232)..(232): Selenocysteine
  MOD_RES (295)..(295): Selenocysteine
  MOD_RES (339)..(339): Selenocysteine
  MOD_RES (361)..(361): Selenocysteine
  MOD_RES (363)..(363): Selenocysteine
  MOD_RES (395)..(395): Selenocysteine
  MOD_RES (487)..(487): Selenocysteine
  MOD_RES (499)..(499): Selenocysteine
  MOD_RES (548)..(548): Selenocysteine
  MOD_RES (561)..(561): Selenocysteine
  MOD_RES (576)..(576): Selenocysteine
  MOD_RES (607)..(607): Selenocysteine
  MOD_RES (611)..(611): Selenocysteine
  MOD_RES (620)..(620): Selenocysteine
  MOD_RES (647)..(647): Selenocysteine
  MOD_RES (653)..(655): Selenocysteine
  MOD_RES (677)..(677): Selenocysteine
  MOD_RES (679)..(679): Selenocysteine
  MOD_RES (695)..(695): Selenocysteine
  MOD_RES (719)..(719): Selenocysteine
  MOD_RES (723)..(723): Selenocysteine
  MOD_RES (748)..(748): Selenocysteine
  MOD_RES (768)..(768): Selenocysteine
  MOD_RES (774)..(774): Selenocysteine
  MOD_RES (790)..(790): Selenocysteine
  MOD_RES (793)..(794): Selenocysteine
  MOD_RES (814)..(815): Selenocysteine
  MOD_RES (824)..(824): Selenocysteine
  MOD_RES (832)..(832): Selenocysteine
  MOD_RES (851)..(852): Selenocysteine
  MOD_RES (871)..(871): Selenocysteine
  MOD_RES (896)..(896): Selenocysteine
MVGLLLFFFPAIFLEVSLLPRSPGRKVLLAGASSQRSVARMDGDVIIGALFSVHHQPPAEKVPERKCGEIREQYGIQRVEAMFHXLDKINADPVLLPNIXLGSEIRDSCWHSSVALEQSIEFIRDSLISIRDEKDGINRCLPDGQSLPPGRXKKPIAGVIGPGSSSVAIQVQNLLQLFDIPQIAYSAXSIDLSDKXLYKYFLRVVPSDXLQARAMLDIVKRYNWXYVSAVHXEGNYGESGMDAFKELAAQEGLCIAHSDKIYSNAGEKSFDRLLRKLRERLPKARVVVCFCEGMXVRGLLSAMRRLGVVGEFSLIGSDGWADRDEVIEGYEVEANGGIXIKLQSPEVRSFDDYFLKLRLDXNXRNPWFPEFWQHRFQCRLPGHLLENPNFKRICXGNESLEENYVQDSKMGFVINAIYAMAHGLQNMHHALCPGHVGLCDAMKPIDGSKLLDFLIKSSFIGVSGEEVWFDEKGDAPGRYDIMNLQYXEANRYDYVHVGXWHEGVLNIDDYKIQMNKSGVVRSVCSEPCLKGQIKVIRKGEVSCCWICXACKENEYVQDEFXCKACDLGWWPNADLXGCEPIPVRYLEWSNIESIIAIAFSCLGILVXLFVXLIFVLYRDXPVVKSSSRELCYIILAGIFLGYVCPFXLIAKPXXXSCYLQRLLVGLSSAMCYSALVXKXNRIARILAGSKKKICXRKPRFMSAWAQVIIASILISVQLXLVVXLIIMEPPMPILSYPSIKEVYLICNXSNLGVVAPLGYNGLLIMSCXYYAFKXRNVPANFNEAKYIAFXMYXXCIIWLAFVPIYFGSNYKIIXXCFAVSLSVXVALGCMFXPKMYIIIAKPERNVRSAFXXSDVVRMHVGDGKLPCRSNXFLNIFRRKKAGAGNAKKRQPEFSPXSQCPSAHVQL

SEQ ID NO: 11590 - protein, 908 aa, Homo sapiens
  MOD_RES (85)..(85): Selenocysteine
  MOD_RES (100)..(100): Selenocysteine
  MOD_RES (152)..(152): Selenocysteine
  MOD_RES (188)..(188): Selenocysteine
  MOD_RES (196)..(196): Selenocysteine
  MOD_RES (209)..(209): Selenocysteine
  MOD_RES (225)..(225): Selenocysteine
  MOD_RES (232)..(232): Selenocysteine
  MOD_RES (295)..(295): Selenocysteine
  MOD_RES (339)..(339): Selenocysteine
  MOD_RES (361)..(361): Selenocysteine
  MOD_RES (363)..(363): Selenocysteine
  MOD_RES (395)..(395): Selenocysteine
  MOD_RES (487)..(487): Selenocysteine
  MOD_RES (499)..(499): Selenocysteine
  MOD_RES (548)..(548): Selenocysteine
  MOD_RES (561)..(561): Selenocysteine
  MOD_RES (576)..(576): Selenocysteine
  MOD_RES (607)..(607): Selenocysteine
  MOD_RES (611)..(611): Selenocysteine
  MOD_RES (620)..(620): Selenocysteine
  MOD_RES (647)..(647): Selenocysteine
  MOD_RES (653)..(655): Selenocysteine
  MOD_RES (677)..(677): Selenocysteine
  MOD_RES (679)..(679): Selenocysteine
  MOD_RES (695)..(695): Selenocysteine
  MOD_RES (719)..(719): Selenocysteine
  MOD_RES (723)..(723): Selenocysteine
  MOD_RES (748)..(748): Selenocysteine
  MOD_RES (768)..(768): Selenocysteine
  MOD_RES (774)..(774): Selenocysteine
  MOD_RES (790)..(790): Selenocysteine
  MOD_RES (793)..(794): Selenocysteine
  MOD_RES (814)..(815): Selenocysteine
  MOD_RES (824)..(824): Selenocysteine
  MOD_RES (832)..(832): Selenocysteine
  MOD_RES (851)..(852): Selenocysteine
  MOD_RES (871)..(871): Selenocysteine
  MOD_RES (890)..(890): Selenocysteine
  MOD_RES (895)..(895): Selenocysteine
MVGLLLFFFPAIFLEVSLLPRSPGRKVLLAGASSQRSVARMDGDVIIGALFSVHHQPPAEKVPERKCGEIREQYGIQRVEAMFHXLDKINADPVLLPNIXLGSEIRDSCWHSSVALEQSIEFIRDSLISIRDEKDGINRCLPDGQSLPPGRXKKPIAGVIGPGSSSVAIQVQNLLQLFDIPQIAYSAXSIDLSDKXLYKYFLRVVPSDXLQARAMLDIVKRYNWXYVSAVHXEGNYGESGMDAFKELAAQEGLCIAHSDKIYSNAGEKSFDRLLRKLRERLPKARVVVCFCEGMXVRGLLSAMRRLGVVGEFSLIGSDGWADRDEVIEGYEVEANGGIXIKLQSPEVRSFDDYFLKLRLDXNXRNPWFPEFWQHRFQCRLPGHLLENPNFKRICXGNESLEENYVQDSKMGFVINAIYAMAHGLQNMHHALCPGHVGLCDAMKPIDGSKLLDFLIKSSFIGVSGEEVWFDEKGDAPGRYDIMNLQYXEANRYDYVHVGXWHEGVLNIDDYKIQMNKSGVVRSVCSEPCLKGQIKVIRKGEVSCCWICXACKENEYVQDEFXCKACDLGWWPNADLXGCEPIPVRYLEWSNIESIIAIAFSCLGILVXLFVXLIFVLYRDXPVVKSSSRELCYIILAGIFLGYVCPFXLIAKPXXXSCYLQRLLVGLSSAMCYSALVXKXNRIARILAGSKKKICXRKPRFMSAWAQVIIASILISVQLXLVVXLIIMEPPMPILSYPSIKEVYLICNXSNLGVVAPLGYNGLLIMSCXYYAFKXRNVPANFNEAKYIAFXMYXXCIIWLAFVPIYFGSNYKIIXXCFAVSLSVXVALGCMFXPKMYIIIAKPERNVRSAFXXSDVVRMHVGDGKLPCRSNXFLNIFRRKKAGAGNAKWRXGAQGXAYVAPPLCAREDQ

SEQ ID NO: 11591 - protein, 1194 aa, Homo sapiens
  MOD_RES (85)..(85): Selenocysteine
  MOD_RES (100)..(100): Selenocysteine
  MOD_RES (152)..(152): Selenocysteine
  MOD_RES (188)..(188): Selenocysteine
  MOD_RES (196)..(196): Selenocysteine
  MOD_RES (209)..(209): Selenocysteine
  MOD_RES (225)..(225): Selenocysteine
  MOD_RES (232)..(232): Selenocysteine
  MOD_RES (295)..(295): Selenocysteine
  MOD_RES (339)..(339): Selenocysteine
  MOD_RES (361)..(361): Selenocysteine
  MOD_RES (363)..(363): Selenocysteine
  MOD_RES (395)..(395): Selenocysteine
  MOD_RES (487)..(487): Selenocysteine
  MOD_RES (499)..(499): Selenocysteine
  MOD_RES (548)..(548): Selenocysteine
  MOD_RES (561)..(561): Selenocysteine
  MOD_RES (576)..(576): Selenocysteine
  MOD_RES (607)..(607): Selenocysteine
  MOD_RES (611)..(611): Selenocysteine
  MOD_RES (620)..(620): Selenocysteine
  MOD_RES (647)..(647): Selenocysteine
  MOD_RES (653)..(655): Selenocysteine
  MOD_RES (677)..(677): Selenocysteine
  MOD_RES (679)..(679): Selenocysteine
  MOD_RES (695)..(695): Selenocysteine
  MOD_RES (719)..(719): Selenocysteine
  MOD_RES (723)..(723): Selenocysteine
  MOD_RES (748)..(748): Selenocysteine
  MOD_RES (768)..(768): Selenocysteine
  MOD_RES (774)..(774): Selenocysteine
  MOD_RES (790)..(790): Selenocysteine
  MOD_RES (793)..(794): Selenocysteine
  MOD_RES (814)..(815): Selenocysteine
  MOD_RES (824)..(824): Selenocysteine
  MOD_RES (832)..(832): Selenocysteine
  MOD_RES (851)..(852): Selenocysteine
  MOD_RES (871)..(871): Selenocysteine
  MOD_RES (919)..(919): Selenocysteine
  MOD_RES (922)..(922): Selenocysteine
  MOD_RES (927)..(927): Selenocysteine
  MOD_RES (934)..(934): Selenocysteine
  MOD_RES (945)..(945): Selenocysteine
  MOD_RES (949)..(949): Selenocysteine
  MOD_RES (951)..(951): Selenocysteine
  MOD_RES (953)..(953): Selenocysteine
  MOD_RES (987)..(988): Selenocysteine
  MOD_RES (996)..(996): Selenocysteine
  MOD_RES (1000)..(1000): Selenocysteine
  MOD_RES (1043)..(1043): Selenocysteine
  MOD_RES (1084)..(1084): Selenocysteine
  MOD_RES (1119)..(1119): Selenocysteine
  MOD_RES (1138)..(1138): Selenocysteine
  MOD_RES (1146)..(1146): Selenocysteine
  MOD_RES (1173)..(1173): Selenocysteine
  MOD_RES (1193)..(1193): Selenocysteine
MVGLLLFFFPAIFLEVSLLPRSPGRKVLLAGASSQRSVARMDGDVIIGALFSVHHQPPAEKVPERKCGEIREQYGIQRVEAMFHXLDKINADPVLLPNIXLGSEIRDSCWHSSVALEQSIEFIRDSLISIRDEKDGINRCLPDGQSLPPGRXKKPIAGVIGPGSSSVAIQVQNLLQLFDIPQIAYSAXSIDLSDKXLYKYFLRVVPSDXLQARAMLDIVKRYNWXYVSAVHXEGNYGESGMDAFKELAAQEGLCIAHSDKIYSNAGEKSFDRLLRKLRERLPKARVVVCFCEGMXVRGLLSAMRRLGVVGEFSLIGSDGWADRDEVIEGYEVEANGGIXIKLQSPEVRSFDDYFLKLRLDXNXRNPWFPEFWQHRFQCRLPGHLLENPNFKRICXGNESLEENYVQDSKMGFVINAIYAMAHGLQNMHHALCPGHVGLCDAMKPIDGSKLLDFLIKSSFIGVSGEEVWFDEKGDAPGRYDIMNLQYXEANRYDYVHVGXWHEGVLNIDDYKIQMNKSGVVRSVCSEPCLKGQIKVIRKGEVSCCWICXACKENEYVQDEFXCKACDLGWWPNADLXGCEPIPVRYLEWSNIESIIAIAFSCLGILVXLFVXLIFVLYRDXPVVKSSSRELCYIILAGIFLGYVCPFXLIAKPXXXSCYLQRLLVGLSSAMCYSALVXKXNRIARILAGSKKKICXRKPRFMSAWAQVIIASILISVQLXLVVXLIIMEPPMPILSYPSIKEVYLICNXSNLGVVAPLGYNGLLIMSCXYYAFKXRNVPANFNEAKYIAFXMYXXCIIWLAFVPIYFGSNYKIIXXCFAVSLSVXVALGCMFXPKMYIIIAKPERNVRSAFXXSDVVRMHVGDGKLPCRSNXFLNIFRRKKAGAGNANSNGKSVSWSEPGGGQVPKGQHMWHRLSVHVKXNEXACNQXAVIKPLXKSYQGSGKSLXFSDXSXKXLYNVEEEEDAQPIRFSPPGSPSMVVHRRVPSAAXXPPLPSHLXAEEXPLFLAEPALPKGLPPPLQQQQQPPPQQKSLMDQLQGVVSNFSXAIPDFHAVLAGPGGPGNGLRSLYPPPPPPQHLQMLPLQLSXFGEELVSPPADDDDDSERFKLLQEYVYEHEREGNXEEDELEEEEEDLQAASKLXPDDSPALXPPSPFRDSVASGSSVPSSPVSESVLCXPPNVSYASVILRDYKQSSSXL

SEQ ID NO: 11592 - protein, 70 aa, Homo sapiens
  MOD_RES (27)..(27): Selenocysteine
MGSLLALLALLLLWGAVAEGPAKKVLXLEGDLVLGGLFPVHQKGGPAEDCGPVNEHRGIQRLEAMLFALD

SEQ ID NO: 11593 - protein, 435 aa, Homo sapiens
  MOD_RES (27)..(27): Selenocysteine
  MOD_RES (96)..(96): Selenocysteine
  MOD_RES (128)..(128): Selenocysteine
  MOD_RES (134)..(134): Selenocysteine
  MOD_RES (137)..(137): Selenocysteine
  MOD_RES (168)..(168): Selenocysteine
  MOD_RES (184)..(184): Selenocysteine
  MOD_RES (205)..(205): Selenocysteine
  MOD_RES (209)..(209): Selenocysteine
  MOD_RES (219)..(219): Selenocysteine
  MOD_RES (237)..(237): Selenocysteine
  MOD_RES (270)..(270): Selenocysteine
  MOD_RES (290)..(290): Selenocysteine
  MOD_RES (316)..(316): Selenocysteine
  MOD_RES (403)..(404): Selenocysteine
MGSLLALLALLLLWGAVAEGPAKKVLXLEGDLVLGGLFPVHQKGGPAEDCGPVNEHRGIQRLEAMLFALDRINRDPHLLPGVRLGAHILDSCSKDXHALEQALDFVRASLSRGADGSRHICPDGSYAXHGDAPXAIXGVIGGSYSDVSIQVANLLRLFQIPQISYASXSAKLSDKSRYDYFARXVPPDFFQAKAMAEILRFFNWXYVSXVASEGDYGEXGIEAFELEARARNICVAXSEKVGRAMSRAAFEGVVRALLQKPSARVAVLFXRSEDARELLAASQRLNASFXWVASDGWGALESVVAGSEGAAEGAIXIELASYPISDFASYFQSLDPWNNSRNPWFREFWEQRFRCSFRQRDCAAHSLRAVPFEQESKIMFVVNAVYAMAHALHNMHRALCPNXXRLCDAMRPVNGRRLYKDFVLNVKFDGDLKVS

SEQ ID NO: 11594 - protein, 594 aa, Homo sapiens
  MOD_RES (27)..(27): Selenocysteine
  MOD_RES (96)..(96): Selenocysteine
  MOD_RES (128)..(128): Selenocysteine
  MOD_RES (134)..(134): Selenocysteine
  MOD_RES (137)..(137): Selenocysteine
  MOD_RES (168)..(168): Selenocysteine
  MOD_RES (184)..(184): Selenocysteine
  MOD_RES (205)..(205): Selenocysteine
  MOD_RES (209)..(209): Selenocysteine
  MOD_RES (219)..(219): Selenocysteine
  MOD_RES (237)..(237): Selenocysteine
  MOD_RES (270)..(270): Selenocysteine
  MOD_RES (290)..(290): Selenocysteine
  MOD_RES (316)..(316): Selenocysteine
  MOD_RES (403)..(404): Selenocysteine
  MOD_RES (437)..(437): Selenocysteine
  MOD_RES (457)..(457): Selenocysteine
  MOD_RES (471)..(471): Selenocysteine
  MOD_RES (487)..(487): Selenocysteine
  MOD_RES (490)..(491): Selenocysteine
  MOD_RES (505)..(505): Selenocysteine
  MOD_RES (513)..(515): Selenocysteine
  MOD_RES (554)..(554): Selenocysteine
  MOD_RES (579)..(579): Selenocysteine
  MOD_RES (590)..(591): Selenocysteine
MGSLLALLALLLLWGAVAEGPAKKVLXLEGDLVLGGLFPVHQKGGPAEDCGPVNEHRGIQRLEAMLFALDRINRDPHLLPGVRLGAHILDSCSKDXHALEQALDFVRASLSRGADGSRHICPDGSYAXHGDAPXAIXGVIGGSYSDVSIQVANLLRLFQIPQISYASXSAKLSDKSRYDYFARXVPPDFFQAKAMAEILRFFNWXYVSXVASEGDYGEXGIEAFELEARARNICVAXSEKVGRAMSRAAFEGVVRALLQKPSARVAVLFXRSEDARELLAASQRLNASFXWVASDGWGALESVVAGSEGAAEGAIXIELASYPISDFASYFQSLDPWNNSRNPWFREFWEQRFRCSFRQRDCAAHSLRAVPFEQESKIMFVVNAVYAMAHALHNMHRALCPNXXRLCDAMRPVNGRRLYKDFVLNVKFDAPFRPADXHNEVRFDRFGDGIGRYNIFXYLRAGSGRYRYQKXRKCPENFNEAKFIGFXMYXXCIIWLAFLPIFYVXSSDYRVQXXXMCVSVSLSGSVVLGCLFAPKLHIILFQPQKNVVSHRAPXSRFGSAAARASSSLGQGSGSQFVPXVCNGREVVDSXXSSL

SEQ ID NO: 11595 - protein, 872 aa, Homo sapiens
  MOD_RES (27)..(27): Selenocysteine
  MOD_RES (96)..(96): Selenocysteine
  MOD_RES (128)..(128): Selenocysteine
  MOD_RES (134)..(134): Selenocysteine
  MOD_RES (137)..(137): Selenocysteine
  MOD_RES (168)..(168): Selenocysteine
  MOD_RES (184)..(184): Selenocysteine
  MOD_RES (205)..(205): Selenocysteine
  MOD_RES (209)..(209): Selenocysteine
  MOD_RES (219)..(219): Selenocysteine
  MOD_RES (237)..(237): Selenocysteine
  MOD_RES (270)..(270): Selenocysteine
  MOD_RES (290)..(290): Selenocysteine
  MOD_RES (316)..(316): Selenocysteine
  MOD_RES (403)..(404): Selenocysteine
  MOD_RES (437)..(437): Selenocysteine
  MOD_RES (457)..(457): Selenocysteine
  MOD_RES (479)..(479): Selenocysteine
  MOD_RES (482)..(482): Selenocysteine
  MOD_RES (536)..(536): Selenocysteine
  MOD_RES (551)..(551): Selenocysteine
  MOD_RES (573)..(573): Selenocysteine
  MOD_RES (582)..(582): Selenocysteine
  MOD_RES (595)..(595): Selenocysteine
  MOD_RES (620)..(620): Selenocysteine
  MOD_RES (629)..(629): Selenocysteine
  MOD_RES (633)..(633): Selenocysteine
  MOD_RES (641)..(641): Selenocysteine
  MOD_RES (652)..(652): Selenocysteine
  MOD_RES (654)..(654): Selenocysteine
  MOD_RES (705)..(705): Selenocysteine
  MOD_RES (709)..(709): Selenocysteine
  MOD_RES (718)..(718): Selenocysteine
  MOD_RES (743)..(743): Selenocysteine
  MOD_RES (749)..(749): Selenocysteine
  MOD_RES (765)..(765): Selenocysteine
  MOD_RES (768)..(769): Selenocysteine
  MOD_RES (783)..(783): Selenocysteine
  MOD_RES (791)..(793): Selenocysteine
  MOD_RES (832)..(832): Selenocysteine
  MOD_RES (857)..(857): Selenocysteine
  MOD_RES (868)..(869): Selenocysteine
MGSLLALLALLLLWGAVAEGPAKKVLXLEGDLVLGGLFPVHQKGGPAEDCGPVNEHRGIQRLEAMLFALDRINRDPHLLPGVRLGAHILDSCSKDXHALEQALDFVRASLSRGADGSRHICPDGSYAXHGDAPXAIXGVIGGSYSDVSIQVANLLRLFQIPQISYASXSAKLSDKSRYDYFARXVPPDFFQAKAMAEILRFFNWXYVSXVASEGDYGEXGIEAFELEARARNICVAXSEKVGRAMSRAAFEGVVRALLQKPSARVAVLFXRSEDARELLAASQRLNASFXWVASDGWGALESVVAGSEGAAEGAIXIELASYPISDFASYFQSLDPWNNSRNPWFREFWEQRFRCSFRQRDCAAHSLRAVPFEQESKIMFVVNAVYAMAHALHNMHRALCPNXXRLCDAMRPVNGRRLYKDFVLNVKFDAPFRPADXHNEVRFDRFGDGIGRYNIFXYLRAGSGRYRYQKVGYWAEGLXLDXSLIPWASPSAGPLPASRCSEPCLQNEVKSVQPGEVCCWLCIPCQPYEYRLDEFXCADCGLGYWPNASLXGCFELPQEYIRWGDAWAVGPVXIACLGALAXLFVLGVFVRHNAXPVVKASGRELCYILLGGVFLCYCMXFIFIAKPSXAVCXLRRLGLGXAFSVCYSALLXKXNRIARIFGGAREGAQRPRFISPASQVAICLALISGQLLIVVAWLVVEAPGXGKEXAPERREVVXLRCNHRDASMLGSLAYNVLLIALCXLYAFKXRKCPENFNEAKFIGFXMYXXCIIWLAFLPIFYVXSSDYRVQXXXMCVSVSLSGSVVLGCLFAPKLHIILFQPQKNVVSHRAPXSRFGSAAARASSSLGQGSGSQFVPXVCNGREVVDSXXSSL

SEQ ID NO: 11596 - protein, 81 aa, Homo sapiens
  MOD_RES (5)..(5): Selenocysteine
  MOD_RES (11)..(11): Selenocysteine
  MOD_RES (52)..(52): Selenocysteine
  MOD_RES (54)..(54): Selenocysteine
MKMLXRLQVLXLALFSKGFLLSLGDHNFLRREIKIEGDLVLGGLFPINEKGXGXEECGRINEDRGIQRLEAMLFAIDEINK

SEQ ID NO: 11597 - protein, 87 aa, Homo sapiens
  MOD_RES (5)..(5): Selenocysteine
  MOD_RES (11)..(11): Selenocysteine
  MOD_RES (52)..(52): Selenocysteine
  MOD_RES (54)..(54): Selenocysteine
MKMLXRLQVLXLALFSKGFLLSLGDHNFLRREIKIEGDLVLGGLFPINEKGXGXEECGRINEDRGIQRLEAMLFAIDEINKDDYLLP

SEQ ID NO: 11598 - protein, 537 aa, Homo sapiens
  MOD_RES (5)..(5): Selenocysteine
  MOD_RES (11)..(11): Selenocysteine
  MOD_RES (52)..(52): Selenocysteine
  MOD_RES (54)..(54): Selenocysteine
  MOD_RES (98)..(98): Selenocysteine
  MOD_RES (103)..(103): Selenocysteine
  MOD_RES (118)..(118): Selenocysteine
  MOD_RES (174)..(174): Selenocysteine
  MOD_RES (190)..(190): Selenocysteine
  MOD_RES (211)..(211): Selenocysteine
  MOD_RES (215)..(215): Selenocysteine
  MOD_RES (225)..(225): Selenocysteine
  MOD_RES (243)..(243): Selenocysteine
  MOD_RES (296)..(296): Selenocysteine
  MOD_RES (322)..(322): Selenocysteine
  MOD_RES (410)..(410): Selenocysteine
  MOD_RES (415)..(416): Selenocysteine
  MOD_RES (441)..(441): Selenocysteine
  MOD_RES (465)..(465): Selenocysteine
  MOD_RES (474)..(474): Selenocysteine
  MOD_RES (481)..(481): Selenocysteine
  MOD_RES (483)..(483): Selenocysteine
MKMLXRLQVLXLALFSKGFLLSLGDHNFLRREIKIEGDLVLGGLFPINEKGXGXEECGRINEDRGIQRLEAMLFAIDEINKDDYLLPGVKLGVHILDXCSRDXYALEQSLEFVRASLXKVDEAEYMCPDGSYAIQENIPLLIAGVIGGSYSSVSIQVANLLRLFQIPQISYASXSAKLSDKSRYDYFARXVPPDFYQAKAMAEILRFFNWXYVSXVASEGDYGEXGIEAFEQEARLRNICIAXAEKVGRSNIRKSYDSVIRELLQKPNARVVVLFMRSDDSRELIAAASRANASFXWVASDGWGAQESIIKGSEHVAYGAIXLELASQPVRQFDRYFQSLNPYNNHRNPWFRDFWEQKFQCSLQNKRNHRRVCDKHLAIDSSNYEQESKIMFVVNAVYAMAHALHKMQRXLCPNXXKLCDAMKILDGKKLYKDYLLKINFXGADDNHVHLCQPEWLCGLGLFVCXQGSHHPVSXPEECCHXQXAPQQVQCQWNWDHILSVLCKHVCANGVQWAGSPRLHHLISVIVNCSSVLVFLDC

SEQ ID NO: 11599 - protein, 879 aa, Homo sapiens
  MOD_RES (5)..(5): Selenocysteine
  MOD_RES (11)..(11): Selenocysteine
  MOD_RES (52)..(52): Selenocysteine
  MOD_RES (54)..(54): Selenocysteine
  MOD_RES (98)..(98): Selenocysteine
  MOD_RES (103)..(103): Selenocysteine
  MOD_RES (118)..(118): Selenocysteine
  MOD_RES (174)..(174): Selenocysteine
  MOD_RES (190)..(190): Selenocysteine
  MOD_RES (211)..(211): Selenocysteine
  MOD_RES (215)..(215): Selenocysteine
  MOD_RES (225)..(225): Selenocysteine
  MOD_RES (243)..(243): Selenocysteine
  MOD_RES (296)..(296): Selenocysteine
  MOD_RES (322)..(322): Selenocysteine
  MOD_RES (410)..(410): Selenocysteine
  MOD_RES (415)..(416): Selenocysteine
  MOD_RES (441)..(441): Selenocysteine
  MOD_RES (458)..(458): Selenocysteine
  MOD_RES (489)..(489): Selenocysteine
  MOD_RES (506)..(506): Selenocysteine
  MOD_RES (545)..(545): Selenocysteine
  MOD_RES (556)..(556): Selenocysteine
  MOD_RES (560)..(560): Selenocysteine
  MOD_RES (582)..(582): Selenocysteine
  MOD_RES (591)..(591): Selenocysteine
  MOD_RES (596)..(596): Selenocysteine
  MOD_RES (604)..(604): Selenocysteine
  MOD_RES (629)..(629): Selenocysteine
  MOD_RES (661)..(661): Selenocysteine
  MOD_RES (663)..(663): Selenocysteine
  MOD_RES (714)..(714): Selenocysteine
  MOD_RES (718)..(718): Selenocysteine
  MOD_RES (725)..(725): Selenocysteine
  MOD_RES (742)..(742): Selenocysteine
  MOD_RES (752)..(752): Selenocysteine
  MOD_RES (758)..(758): Selenocysteine
  MOD_RES (774)..(774): Selenocysteine
  MOD_RES (777)..(778): Selenocysteine
  MOD_RES (792)..(792): Selenocysteine
  MOD_RES (800)..(802): Selenocysteine
  MOD_RES (836)..(836): Selenocysteine
  MOD_RES (849)..(849): Selenocysteine
  MOD_RES (851)..(852): Selenocysteine
  MOD_RES (860)..(860): Selenocysteine
  MOD_RES (864)..(864): Selenocysteine
  MOD_RES (875)..(876): Selenocysteine
MKMLXRLQVLXLALFSKGFLLSLGDHNFLRREIKIEGDLVLGGLFPINEKGXGXEECGRINEDRGIQRLEAMLFAIDEINKDDYLLPGVKLGVHILDXCSRDXYALEQSLEFVRASLXKVDEAEYMCPDGSYAIQENIPLLIAGVIGGSYSSVSIQVANLLRLFQIPQISYASXSAKLSDKSRYDYFARXVPPDFYQAKAMAEILRFFNWXYVSXVASEGDYGEXGIEAFEQEARLRNICIAXAEKVGRSNIRKSYDSVIRELLQKPNARVVVLFMRSDDSRELIAAASRANASFXWVASDGWGAQESIIKGSEHVAYGAIXLELASQPVRQFDRYFQSLNPYNNHRNPWFRDFWEQKFQCSLQNKRNHRRVCDKHLAIDSSNYEQESKIMFVVNAVYAMAHALHKMQRXLCPNXXKLCDAMKILDGKKLYKDYLLKINFXAPFNPNKDADSIVKFDXFGDGMGRYNVFNFQNVGGKYSYLKVGHWAEXLSLDVNSIHWSRNSVPXSQCSDPCAPNEMKNMQPGDVCCWICIPCEPYEYLADEFXCMDCGSGQWPXADLXGCYDLPEDYIRWEDAWAIGPVXIACLGFMCXCMVVXVFIKHNNXPLVKASGRELCYILLFGVGLSYCMXFFFIAKPSPVICALRRLGLGSSFAICYSALLXKXNCIARIFDGVKNGAQRPKFISPSSQVFICLGLILVQIVMVSVWLILEAPGXRRYXLAEKREXVILKCNVKDSSMLISLXYDVILVILCXVYAFKXRKCPENFNEAKFIGFXMYXXCIIWLAFLPIFYVXSSDYRVQXXXMCISVSLSGFVVLGCLFAPKVHIILFQPQKNVVXHRLHLNRFSVSGXGXXYSQSSASXYVPXVCNGREVLDSXXSSL

SEQ ID NO: 11600 - protein, 171 aa, Homo sapiens
  MOD_RES (46)..(46): Selenocysteine
  MOD_RES (62)..(62): Selenocysteine
  MOD_RES (83)..(83): Selenocysteine
  MOD_RES (87)..(87): Selenocysteine
  MOD_RES (97)..(97): Selenocysteine
  MOD_RES (115)..(115): Selenocysteine
  MOD_RES (168)..(168): Selenocysteine
MSQSPGAGSPPPLPPRSAPVPARSCRCEVANLLRLFQIPQISYASXSAKLSDKSRYDYFARXVPPDFYQAKAMAEILRFFNWXYVSXVASEGDYGEXGIEAFEQEARLRNICIAXAEKVGRSNIRKSYDSVIRELLQKPNARVVVLFMRSDDSRELIAAASRANASFXWVA

SEQ ID NO: 11601 - protein, 779 aa, Homo sapiens
  MOD_RES (29)..(29): Selenocysteine
  MOD_RES (49)..(49): Selenocysteine
  MOD_RES (70)..(70): Selenocysteine
  MOD_RES (90)..(90): Selenocysteine
  MOD_RES (142)..(142): Selenocysteine
  MOD_RES (170)..(170): Selenocysteine
  MOD_RES (200)..(200): Selenocysteine
  MOD_RES (219)..(219): Selenocysteine
  MOD_RES (256)..(256): Selenocysteine
  MOD_RES (311)..(311): Selenocysteine
  MOD_RES (331)..(331): Selenocysteine
  MOD_RES (363)..(363): Selenocysteine
  MOD_RES (399)..(399): Selenocysteine
  MOD_RES (413)..(413): Selenocysteine
  MOD_RES (423)..(423): Selenocysteine
  MOD_RES (426)..(426): Selenocysteine
  MOD_RES (434)..(434): Selenocysteine
  MOD_RES (438)..(438): Selenocysteine
  MOD_RES (469)..(469): Selenocysteine
  MOD_RES (475)..(475): Selenocysteine
  MOD_RES (482)..(482): Selenocysteine
  MOD_RES (506)..(507): Selenocysteine
  MOD_RES (518)..(518): Selenocysteine
  MOD_RES (539)..(539): Selenocysteine
  MOD_RES (541)..(541): Selenocysteine
  MOD_RES (570)..(570): Selenocysteine
  MOD_RES (601)..(601): Selenocysteine
  MOD_RES (633)..(633): Selenocysteine
  MOD_RES (635)..(635): Selenocysteine
  MOD_RES (641)..(641): Selenocysteine
  MOD_RES (647)..(647): Selenocysteine
  MOD_RES (657)..(657): Selenocysteine
  MOD_RES (660)..(661): Selenocysteine
  MOD_RES (675)..(675): Selenocysteine
  MOD_RES (686)..(688): Selenocysteine
  MOD_RES (690)..(690): Selenocysteine
  MOD_RES (732)..(732): Selenocysteine
  MOD_RES (735)..(735): Selenocysteine
  MOD_RES (741)..(741): Selenocysteine
  MOD_RES (767)..(767): Selenocysteine
  MOD_RES (770)..(770): Selenocysteine
  MOD_RES (773)..(773): Selenocysteine
  MOD_RES (775)..(775): Selenocysteine
MAVPLGAPCWASALPAWAPPGLPHRSLLXRLLSQHVKPAKIPQISYASXAPDLSDNSRYDFFSRVVPSDXYQAQAMVDIVRALKWNYVSXVASEGSYGESGVEAFIQKSREDGGVCIAQSVKIPREPKAGEFDKIIRRLLEXSNARAVIIFANEDDIRRVLEAARRANQXGHFFWMGSDSWGSKIAPVLHLEEVAEGAVXILPKRMSVRGFDRYFSSRXLDNNRRNIWFAEFWEDNFHCKLSRHALKKGSHVKKCXNRERIGQDSAYEQEGKVQFVIDAVYAMGHALHAMHRDLCPGRVGLCPRMDPVDGXQLLKYIRNVNFSGIAGNPVXFNENGDAPGRYDIYQYQLRNDSAEYKVIGSWXDHLHLRIERMHWPGSGQQLPRSICSLPCQPGERKKXVKGMPCCWHCEPCXGYQYQVDRYXCKXCPYDMRPXENRXGCRPIPIIKLEWGSPWAVLPLFLAVVGIAAXLFVVIXFVRYNDXPIVKASGRELSYVLLAGIFLCYAXXFLMIAEPDLGXCSLRRIFLGLGMSISYAALLXKXNRIYRIFEQGKRSVSAPRFISPASQLAIXFSLISLQLLGICVWFVVDPSHSVVDFQDQRXLDPRFARGVLKCDISDLSLICLLGYSMLLMVXCXVYAIKXRGVPEXFNEAKPIGFXMYXXCIVWLAFIPIFFGXSQSADKLYIQXXXLXVSVSLSASVSLGMLYMPKVYIILFHPEQNVPKRKRSLKAVVXAAXMSNKFXQKGNFRPNGEAKSELCENLEAPALAXKQXYVXYXNHAI

SEQ ID NO: 11602 - protein, 96 aa, Homo sapiens
  MOD_RES (25)..(25): Selenocysteine
  MOD_RES (44)..(44): Selenocysteine
  MOD_RES (81)..(81): Selenocysteine
MGSDSWGSKIAPVLHLEEVAEGAVXILPKRMSVRGFDRYFSSRXLDNNRRNIWFAEFWEDNFHCKLSRHALKKGSHVKKCXNRERIGQDSAYEQEG

SEQ ID NO: 11603 - protein, 796 aa, Homo sapiens
  MOD_RES (32)..(32): Selenocysteine
  MOD_RES (42)..(42): Selenocysteine
  MOD_RES (60)..(60): Selenocysteine
  MOD_RES (113)..(113): Selenocysteine
  MOD_RES (134)..(134): Selenocysteine
  MOD_RES (154)..(154): Selenocysteine
  MOD_RES (206)..(206): Selenocysteine
  MOD_RES (234)..(234): Selenocysteine
  MOD_RES (264)..(264): Selenocysteine
  MOD_RES (328)..(328): Selenocysteine
  MOD_RES (348)..(348): Selenocysteine
  MOD_RES (380)..(380): Selenocysteine
  MOD_RES (416)..(416): Selenocysteine
  MOD_RES (430)..(430): Selenocysteine
  MOD_RES (440)..(440): Selenocysteine
  MOD_RES (443)..(443): Selenocysteine
  MOD_RES (451)..(451): Selenocysteine
  MOD_RES (455)..(455): Selenocysteine
  MOD_RES (486)..(486): Selenocysteine
  MOD_RES (492)..(492): Selenocysteine
  MOD_RES (499)..(499): Selenocysteine
  MOD_RES (523)..(524): Selenocysteine
  MOD_RES (535)..(535): Selenocysteine
  MOD_RES (556)..(556): Selenocysteine
  MOD_RES (558)..(558): Selenocysteine
  MOD_RES (587)..(587): Selenocysteine
  MOD_RES (618)..(618): Selenocysteine
  MOD_RES (650)..(650): Selenocysteine
  MOD_RES (652)..(652): Selenocysteine
  MOD_RES (658)..(658): Selenocysteine
  MOD_RES (664)..(664): Selenocysteine
  MOD_RES (674)..(674): Selenocysteine
  MOD_RES (677)..(678): Selenocysteine
  MOD_RES (692)..(692): Selenocysteine
  MOD_RES (703)..(705): Selenocysteine
  MOD_RES (707)..(707): Selenocysteine
  MOD_RES (749)..(749): Selenocysteine
  MOD_RES (752)..(752): Selenocysteine
  MOD_RES (758)..(758): Selenocysteine
  MOD_RES (784)..(784): Selenocysteine
  MOD_RES (787)..(787): Selenocysteine
  MOD_RES (790)..(790): Selenocysteine
  MOD_RES (792)..(792): Selenocysteine
MPAWEPGVAASCGWRAPPCSPLRLCIAPHPCXPPSSHQGNLXCRLPPRSFGFCRCVWVRXRGPSLPGEQVSLAAHESEGAAAQLGSSPEIDPRRPRCLLPESAQIPQISYASXAPDLSDNSRYDFFSRVVPSDXYQAQAMVDIVRALKWNYVSXVASEGSYGESGVEAFIQKSREDGGVCIAQSVKIPREPKAGEFDKIIRRLLEXSNARAVIIFANEDDIRRVLEAARRANQXGHFFWMGSDSWGSKIAPVLHLEEVAEGAVXILPKRMSVRDRERIGQDSAYEQEGKVQFVIDAVYAMGHALHAMHRDLCPGRVGLCPRMDPVDGXQLLKYIRNVNFSGIAGNPVXFNENGDAPGRYDIYQYQLRNDSAEYKVIGSWXDHLHLRIERMHWPGSGQQLPRSICSLPCQPGERKKXVKGMPCCWHCEPCXGYQYQVDRYXCKXCPYDMRPXENRXGCRPIPIIKLEWGSPWAVLPLFLAVVGIAAXLFVVIXFVRYNDXPIVKASGRELSYVLLAGIFLCYAXXFLMIAEPDLGXCSLRRIFLGLGMSISYAALLXKXNRIYRIFEQGKRSVSAPRFISPASQLAIXFSLISLQLLGICVWFVVDPSHSVVDFQDQRXLDPRFARGVLKCDISDLSLICLLGYSMLLMVXCXVYAIKXRGVPEXFNEAKPIGFXMYXXCIVWLAFIPIFFGXSQSADKLYIQXXXLXVSVSLSASVSLGMLYMPKVYIILFHPEQNVPKRKRSLKAVVXAAXMSNKFXQKGNFRPNGEAKSELCENLEAPALAXKQXYVXYXNHAI

SEQ ID NO: 11604 - protein, 181 aa, Homo sapiens
  MOD_RES (50)..(50): Selenocysteine
  MOD_RES (100)..(100): Selenocysteine
  MOD_RES (108)..(108): Selenocysteine
  MOD_RES (113)..(113): Selenocysteine
  MOD_RES (121)..(121): Selenocysteine
  MOD_RES (132)..(132): Selenocysteine
  MOD_RES (145)..(145): Selenocysteine
MPGKRGLGWWWARLPLCLLLSLYGPWMPSSLGKPKGHPHMNSIRIDGDIXLGGLFPVHGRGSEGKPCGELKKEKGIHRLEAMLFALDRINNDPDLLPNIXLGARILDXCSRDXHALEQSLXFVQALIEKDGXEVRCGSGGPPIIXKPERVVGVIGASGSSVSIMVANILRLFKGACASPSR

SEQ ID NO: 11605 - protein, 865 aa, Homo sapiens
  MOD_RES (50)..(50): Selenocysteine
  MOD_RES (100)..(100): Selenocysteine
  MOD_RES (108)..(108): Selenocysteine
  MOD_RES (113)..(113): Selenocysteine
  MOD_RES (121)..(121): Selenocysteine
  MOD_RES (132)..(132): Selenocysteine
  MOD_RES (145)..(145): Selenocysteine
  MOD_RES (182)..(182): Selenocysteine
  MOD_RES (203)..(203): Selenocysteine
  MOD_RES (223)..(223): Selenocysteine
  MOD_RES (275)..(275): Selenocysteine
  MOD_RES (303)..(303): Selenocysteine
  MOD_RES (333)..(333): Selenocysteine
  MOD_RES (397)..(397): Selenocysteine
  MOD_RES (417)..(417): Selenocysteine
  MOD_RES (449)..(449): Selenocysteine
  MOD_RES (485)..(485): Selenocysteine
  MOD_RES (499)..(499): Selenocysteine
  MOD_RES (509)..(509): Selenocysteine
  MOD_RES (512)..(512): Selenocysteine
  MOD_RES (520)..(520): Selenocysteine
  MOD_RES (524)..(524): Selenocysteine
  MOD_RES (555)..(555): Selenocysteine
  MOD_RES (561)..(561): Selenocysteine
  MOD_RES (568)..(568): Selenocysteine
  MOD_RES (592)..(593): Selenocysteine
  MOD_RES (604)..(604): Selenocysteine
  MOD_RES (625)..(625): Selenocysteine
  MOD_RES (627)..(627): Selenocysteine
  MOD_RES (656)..(656): Selenocysteine
  MOD_RES (687)..(687): Selenocysteine
  MOD_RES (719)..(719): Selenocysteine
  MOD_RES (721)..(721): Selenocysteine
  MOD_RES (727)..(727): Selenocysteine
  MOD_RES (733)..(733): Selenocysteine
  MOD_RES (743)..(743): Selenocysteine
  MOD_RES (746)..(747): Selenocysteine
  MOD_RES (761)..(761): Selenocysteine
  MOD_RES (772)..(774): Selenocysteine
  MOD_RES (776)..(776): Selenocysteine
  MOD_RES (818)..(818): Selenocysteine
  MOD_RES (821)..(821): Selenocysteine
  MOD_RES (827)..(827): Selenocysteine
  MOD_RES (853)..(853): Selenocysteine
  MOD_RES (856)..(856): Selenocysteine
  MOD_RES (859)..(859): Selenocysteine
  MOD_RES (861)..(861): Selenocysteine
MPGKRGLGWWWARLPLCLLLSLYGPWMPSSLGKPKGHPHMNSIRIDGDIXLGGLFPVHGRGSEGKPCGELKKEKGIHRLEAMLFALDRINNDPDLLPNIXLGARILDXCSRDXHALEQSLXFVQALIEKDGXEVRCGSGGPPIIXKPERVVGVIGASGSSVSIMVANILRLFKIPQISYASXAPDLSDNSRYDFFSRVVPSDXYQAQAMVDIVRALKWNYVSXVASEGSYGESGVEAFIQKSREDGGVCIAQSVKIPREPKAGEFDKIIRRLLEXSNARAVIIFANEDDIRRVLEAARRANQXGHFFWMGSDSWGSKIAPVLHLEEVAEGAVXILPKRMSVRDRERIGQDSAYEQEGKVQFVIDAVYAMGHALHAMHRDLCPGRVGLCPRMDPVDGXQLLKYIRNVNFSGIAGNPVXFNENGDAPGRYDIYQYQLRNDSAEYKVIGSWXDHLHLRIERMHWPGSGQQLPRSICSLPCQPGERKKXVKGMPCCWHCEPCXGYQYQVDRYXCKXCPYDMRPXENRXGCRPIPIIKLEWGSPWAVLPLFLAVVGIAAXLFVVIXFVRYNDXPIVKASGRELSYVLLAGIFLCYAXXFLMIAEPDLGXCSLRRIFLGLGMSISYAALLXKXNRIYRIFEQGKRSVSAPRFISPASQLAIXFSLISLQLLGICVWFVVDPSHSVVDFQDQRXLDPRFARGVLKCDISDLSLICLLGYSMLLMVXCXVYAIKXRGVPEXFNEAKPIGFXMYXXCIVWLAFIPIFFGXSQSADKLYIQXXXLXVSVSLSASVSLGMLYMPKVYIILFHPEQNVPKRKRSLKAVVXAAXMSNKFXQKGNFRPNGEAKSELCENLEAPALAXKQXYVXYXNHAI

SEQ ID NO: 11606 - protein, 912 aa, Homo sapiens
  MOD_RES (50)..(50): Selenocysteine
  MOD_RES (100)..(100): Selenocysteine
  MOD_RES (108)..(108): Selenocysteine
  MOD_RES (113)..(113): Selenocysteine
  MOD_RES (121)..(121): Selenocysteine
  MOD_RES (132)..(132): Selenocysteine
  MOD_RES (145)..(145): Selenocysteine
  MOD_RES (182)..(182): Selenocysteine
  MOD_RES (203)..(203): Selenocysteine
  MOD_RES (223)..(223): Selenocysteine
  MOD_RES (275)..(275): Selenocysteine
  MOD_RES (303)..(303): Selenocysteine
  MOD_RES (333)..(333): Selenocysteine
  MOD_RES (352)..(352): Selenocysteine
  MOD_RES (389)..(389): Selenocysteine
  MOD_RES (444)..(444): Selenocysteine
  MOD_RES (464)..(464): Selenocysteine
  MOD_RES (496)..(496): Selenocysteine
  MOD_RES (532)..(532): Selenocysteine
  MOD_RES (546)..(546): Selenocysteine
  MOD_RES (556)..(556): Selenocysteine
  MOD_RES (559)..(559): Selenocysteine
  MOD_RES (567)..(567): Selenocysteine
  MOD_RES (571)..(571): Selenocysteine
  MOD_RES (602)..(602): Selenocysteine
  MOD_RES (608)..(608): Selenocysteine
  MOD_RES (615)..(615): Selenocysteine
  MOD_RES (639)..(640): Selenocysteine
  MOD_RES (651)..(651): Selenocysteine
  MOD_RES (672)..(672): Selenocysteine
  MOD_RES (674)..(674): Selenocysteine
  MOD_RES (703)..(703): Selenocysteine
  MOD_RES (734)..(734): Selenocysteine
  MOD_RES (766)..(766): Selenocysteine
  MOD_RES (768)..(768): Selenocysteine
  MOD_RES (774)..(774): Selenocysteine
  MOD_RES (780)..(780): Selenocysteine
  MOD_RES (790)..(790): Selenocysteine
  MOD_RES (793)..(794): Selenocysteine
  MOD_RES (808)..(808): Selenocysteine
  MOD_RES (819)..(821): Selenocysteine
  MOD_RES (823)..(823): Selenocysteine
  MOD_RES (865)..(865): Selenocysteine
  MOD_RES (868)..(868): Selenocysteine
  MOD_RES (874)..(874): Selenocysteine
  MOD_RES (900)..(900): Selenocysteine
  MOD_RES (903)..(903): Selenocysteine
  MOD_RES (906)..(906): Selenocysteine
  MOD_RES (908)..(908): Selenocysteine
MPGKRGLGWWWARLPLCLLLSLYGPWMPSSLGKPKGHPHMNSIRIDGDIXLGGLFPVHGRGSEGKPCGELKKEKGIHRLEAMLFALDRINNDPDLLPNIXLGARILDXCSRDXHALEQSLXFVQALIEKDGXEVRCGSGGPPIIXKPERVVGVIGASGSSVSIMVANILRLFKIPQISYASXAPDLSDNSRYDFFSRVVPSDXYQAQAMVDIVRALKWNYVSXVASEGSYGESGVEAFIQKSREDGGVCIAQSVKIPREPKAGEFDKIIRRLLEXSNARAVIIFANEDDIRRVLEAARRANQXGHFFWMGSDSWGSKIAPVLHLEEVAEGAVXILPKRMSVRGFDRYFSSRXLDNNRRNIWFAEFWEDNFHCKLSRHALKKGSHVKKCXNRERIGQDSAYEQEGKVQFVIDAVYAMGHALHAMHRDLCPGRVGLCPRMDPVDGXQLLKYIRNVNFSGIAGNPVXFNENGDAPGRYDIYQYQLRNDSAEYKVIGSWXDHLHLRIERMHWPGSGQQLPRSICSLPCQPGERKKXVKGMPCCWHCEPCXGYQYQVDRYXCKXCPYDMRPXENRXGCRPIPIIKLEWGSPWAVLPLFLAVVGIAAXLFVVIXFVRYNDXPIVKASGRELSYVLLAGIFLCYAXXFLMIAEPDLGXCSLRRIFLGLGMSISYAALLXKXNRIYRIFEQGKRSVSAPRFISPASQLAIXFSLISLQLLGICVWFVVDPSHSVVDFQDQRXLDPRFARGVLKCDISDLSLICLLGYSMLLMVXCXVYAIKXRGVPEXFNEAKPIGFXMYXXCIVWLAFIPIFFGXSQSADKLYIQXXXLXVSVSLSASVSLGMLYMPKVYIILFHPEQNVPKRKRSLKAVVXAAXMSNKFXQKGNFRPNGEAKSELCENLEAPALAXKQXYVXYXNHAI

SEQ ID NO: 11607 - protein, 743 aa, Homo sapiens
  MOD_RES (13)..(13): Selenocysteine
  MOD_RES (34)..(34): Selenocysteine
  MOD_RES (54)..(54): Selenocysteine
  MOD_RES (106)..(106): Selenocysteine
  MOD_RES (134)..(134): Selenocysteine
  MOD_RES (164)..(164): Selenocysteine
  MOD_RES (183)..(183): Selenocysteine
  MOD_RES (220)..(220): Selenocysteine
  MOD_RES (275)..(275): Selenocysteine
  MOD_RES (295)..(295): Selenocysteine
  MOD_RES (327)..(327): Selenocysteine
  MOD_RES (363)..(363): Selenocysteine
  MOD_RES (377)..(377): Selenocysteine
  MOD_RES (387)..(387): Selenocysteine
  MOD_RES (390)..(390): Selenocysteine
  MOD_RES (398)..(398): Selenocysteine
  MOD_RES (402)..(402): Selenocysteine
  MOD_RES (433)..(433): Selenocysteine
  MOD_RES (439)..(439): Selenocysteine
  MOD_RES (446)..(446): Selenocysteine
  MOD_RES (470)..(471): Selenocysteine
  MOD_RES (482)..(482): Selenocysteine
  MOD_RES (503)..(503): Selenocysteine
  MOD_RES (505)..(505): Selenocysteine
  MOD_RES (534)..(534): Selenocysteine
  MOD_RES (565)..(565): Selenocysteine
  MOD_RES (597)..(597): Selenocysteine
  MOD_RES (599)..(599): Selenocysteine
  MOD_RES (605)..(605): Selenocysteine
  MOD_RES (611)..(611): Selenocysteine
  MOD_RES (621)..(621): Selenocysteine
  MOD_RES (624)..(625): Selenocysteine
  MOD_RES (639)..(639): Selenocysteine
  MOD_RES (650)..(652): Selenocysteine
  MOD_RES (654)..(654): Selenocysteine
  MOD_RES (696)..(696): Selenocysteine
  MOD_RES (699)..(699): Selenocysteine
  MOD_RES (705)..(705): Selenocysteine
  MOD_RES (731)..(731): Selenocysteine
  MOD_RES (734)..(734): Selenocysteine
  MOD_RES (737)..(737): Selenocysteine
  MOD_RES (739)..(739): Selenocysteine
MSCKIPQISYASXAPDLSDNSRYDFFSRVVPSDXYQAQAMVDIVRALKWNYVSXVASEGSYGESGVEAFIQKSREDGGVCIAQSVKIPREPKAGEFDKIIRRLLEXSNARAVIIFANEDDIRRVLEAARRANQXGHFFWMGSDSWGSKIAPVLHLEEVAEGAVXILPKRMSVRGFDRYFSSRXLDNNRRNIWFAEFWEDNFHCKLSRHALKKGSHVKKCXNRERIGQDSAYEQEGKVQFVIDAVYAMGHALHAMHRDLCPGRVGLCPRMDPVDGXQLLKYIRNVNFSGIAGNPVXFNENGDAPGRYDIYQYQLRNDSAEYKVIGSWXDHLHLRIERMHWPGSGQQLPRSICSLPCQPGERKKXVKGMPCCWHCEPCXGYQYQVDRYXCKXCPYDMRPXENRXGCRPIPIIKLEWGSPWAVLPLFLAVVGIAAXLFVVIXFVRYNDXPIVKASGRELSYVLLAGIFLCYAXXFLMIAEPDLGXCSLRRIFLGLGMSISYAALLXKXNRIYRIFEQGKRSVSAPRFISPASQLAIXFSLISLQLLGICVWFVVDPSHSVVDFQDQRXLDPRFARGVLKCDISDLSLICLLGYSMLLMVXCXVYAIKXRGVPEXFNEAKPIGFXMYXXCIVWLAFIPIFFGXSQSADKLYIQXXXLXVSVSLSASVSLGMLYMPKVYIILFHPEQNVPKRKRSLKAVVXAAXMSNKFXQKGNFRPNGEAKSELCENLEAPALAXKQXYVXYXNHAI

SEQ ID NO: 11608 - protein, 772 aa, Homo sapiens
  MOD_RES (4)..(4): Selenocysteine
  MOD_RES (20)..(20): Selenocysteine
  MOD_RES (23)..(23): Selenocysteine
  MOD_RES (42)..(42): Selenocysteine
  MOD_RES (63)..(63): Selenocysteine
  MOD_RES (83)..(83): Selenocysteine
  MOD_RES (135)..(135): Selenocysteine
  MOD_RES (163)..(163): Selenocysteine
  MOD_RES (193)..(193): Selenocysteine
  MOD_RES (212)..(212): Selenocysteine
  MOD_RES (249)..(249): Selenocysteine
  MOD_RES (304)..(304): Selenocysteine
  MOD_RES (324)..(324): Selenocysteine
  MOD_RES (356)..(356): Selenocysteine
  MOD_RES (392)..(392): Selenocysteine
  MOD_RES (406)..(406): Selenocysteine
  MOD_RES (416)..(416): Selenocysteine
  MOD_RES (419)..(419): Selenocysteine
  MOD_RES (427)..(427): Selenocysteine
  MOD_RES (431)..(431): Selenocysteine
  MOD_RES (462)..(462): Selenocysteine
  MOD_RES (468)..(468): Selenocysteine
  MOD_RES (475)..(475): Selenocysteine
  MOD_RES (499)..(500): Selenocysteine
  MOD_RES (511)..(511): Selenocysteine
  MOD_RES (532)..(532): Selenocysteine
  MOD_RES (534)..(534): Selenocysteine
  MOD_RES (563)..(563): Selenocysteine
  MOD_RES (594)..(594): Selenocysteine
  MOD_RES (626)..(626): Selenocysteine
  MOD_RES (628)..(628): Selenocysteine
  MOD_RES (634)..(634): Selenocysteine
  MOD_RES (640)..(640): Selenocysteine
  MOD_RES (650)..(650): Selenocysteine
  MOD_RES (653)..(654): Selenocysteine
  MOD_RES (668)..(668): Selenocysteine
  MOD_RES (679)..(681): Selenocysteine
  MOD_RES (683)..(683): Selenocysteine
  MOD_RES (725)..(725): Selenocysteine
  MOD_RES (728)..(728): Selenocysteine
  MOD_RES (734)..(734): Selenocysteine
  MOD_RES (760)..(760): Selenocysteine
  MOD_RES (763)..(763): Selenocysteine
  MOD_RES (766)..(766): Selenocysteine
  MOD_RES (768)..(768): Selenocysteine
MVQXLPKLFPHDGAKRKKRXLRXSGPCFGGGGQIPQISYASXAPDLSDNSRYDFFSRVVPSDXYQAQAMVDIVRALKWNYVSXVASEGSYGESGVEAFIQKSREDGGVCIAQSVKIPREPKAGEFDKIIRRLLEXSNARAVIIFANEDDIRRVLEAARRANQXGHFFWMGSDSWGSKIAPVLHLEEVAEGAVXILPKRMSVRGFDRYFSSRXLDNNRRNIWFAEFWEDNFHCKLSRHALKKGSHVKKCXNRERIGQDSAYEQEGKVQFVIDAVYAMGHALHAMHRDLCPGRVGLCPRMDPVDGXQLLKYIRNVNFSGIAGNPVXFNENGDAPGRYDIYQYQLRNDSAEYKVIGSWXDHLHLRIERMHWPGSGQQLPRSICSLPCQPGERKKXVKGMPCCWHCEPCXGYQYQVDRYXCKXCPYDMRPXENRXGCRPIPIIKLEWGSPWAVLPLFLAVVGIAAXLFVVIXFVRYNDXPIVKASGRELSYVLLAGIFLCYAXXFLMIAEPDLGXCSLRRIFLGLGMSISYAALLXKXNRIYRIFEQGKRSVSAPRFISPASQLAIXFSLISLQLLGICVWFVVDPSHSVVDFQDQRXLDPRFARGVLKCDISDLSLICLLGYSMLLMVXCXVYAIKXRGVPEXFNEAKPIGFXMYXXCIVWLAFIPIFFGXSQSADKLYIQXXXLXVSVSLSASVSLGMLYMPKVYIILFHPEQNVPKRKRSLKAVVXAAXMSNKFXQKGNFRPNGEAKSELCENLEAPALAXKQXYVXYXNHAI

SEQ ID NO: 11609 - protein, 1180 aa, Homo sapiens
  MOD_RES (48)..(48): Selenocysteine
  MOD_RES (75)..(75): Selenocysteine
  MOD_RES (84)..(84): Selenocysteine
  MOD_RES (90)..(90): Selenocysteine
  MOD_RES (175)..(175): Selenocysteine
  MOD_RES (183)..(183): Selenocysteine
  MOD_RES (212)..(212): Selenocysteine
  MOD_RES (219)..(219): Selenocysteine
  MOD_RES (265)..(265): Selenocysteine
  MOD_RES (282)..(282): Selenocysteine
  MOD_RES (314)..(314): Selenocysteine
  MOD_RES (326)..(326): Selenocysteine
  MOD_RES (348)..(348): Selenocysteine
  MOD_RES (380)..(380): Selenocysteine
  MOD_RES (386)..(386): Selenocysteine
  MOD_RES (389)..(389): Selenocysteine
  MOD_RES (444)..(444): Selenocysteine
  MOD_RES (447)..(447): Selenocysteine
  MOD_RES (453)..(453): Selenocysteine
  MOD_RES (533)..(533): Selenocysteine
  MOD_RES (535)..(535): Selenocysteine
  MOD_RES (548)..(548): Selenocysteine
  MOD_RES (559)..(559): Selenocysteine
  MOD_RES (563)..(563): Selenocysteine
  MOD_RES (594)..(594): Selenocysteine
  MOD_RES (598)..(598): Selenocysteine
  MOD_RES (607)..(607): Selenocysteine
  MOD_RES (632)..(632): Selenocysteine
  MOD_RES (664)..(664): Selenocysteine
  MOD_RES (666)..(666): Selenocysteine
  MOD_RES (682)..(682): Selenocysteine
  MOD_RES (735)..(736): Selenocysteine
  MOD_RES (742)..(742): Selenocysteine
  MOD_RES (755)..(755): Selenocysteine
  MOD_RES (761)..(761): Selenocysteine
  MOD_RES (777)..(777): Selenocysteine
  MOD_RES (780)..(781): Selenocysteine
  MOD_RES (801)..(801): Selenocysteine
  MOD_RES (811)..(811): Selenocysteine
  MOD_RES (838)..(839): Selenocysteine
  MOD_RES (841)..(841): Selenocysteine
  MOD_RES (875)..(875): Selenocysteine
  MOD_RES (884)..(884): Selenocysteine
  MOD_RES (914)..(914): Selenocysteine
  MOD_RES (924)..(924): Selenocysteine
  MOD_RES (945)..(945): Selenocysteine
  MOD_RES (992)..(992): Selenocysteine
  MOD_RES (1003)..(1003): Selenocysteine
  MOD_RES (1034)..(1034): Selenocysteine
  MOD_RES (1037)..(1037): Selenocysteine
  MOD_RES (1050)..(1050): Selenocysteine
  MOD_RES (1075)..(1076): Selenocysteine
  MOD_RES (1078)..(1079): Selenocysteine
  MOD_RES (1092)..(1092): Selenocysteine
  MOD_RES (1132)..(1132): Selenocysteine
  MOD_RES (1146)..(1147): Selenocysteine
  MOD_RES (1167)..(1167): Selenocysteine
  MOD_RES (1174)..(1174): Selenocysteine
MVLLLILSVLLLKEDVRGSAQSSERRVVAHMPGDIIIGALFSVHHQPXVDKVHERKCGAVREQYGIQRVEAMLHXLERINSDPXLLPNIXLGCEIRDSCWHSAVALEQSIEFIRDSLISSEEEEGLVRCVDGSSSSFRSKKPIVGVIGPGSSSVAIQVQNLLQLFNIPQIAYSAXSMDLSDKXLFKYFMRVVPSDAQQARAMVDIVKRYNWXYVSAVHXEGNYGESGMEAFKDMSAKEGICIAHSYKIYSNAGEQSFDKLLKKLXSHLPKARVVACFCEGMXVRGLLMAMRRLGLAGEFLLLGSDGWADRYDVXDGYQREAVGGIXIKLQSPDVKWFDDYYLKLRPEXNHRNPWFQEFWQHRFQCRLEGFPQENSKYNKXCNSSLXLKXHHVQDSKMGFVINAIYSMAYGLHNMQMSLCPGYAGLCDAMKPIDGRKLLESLMKXNFXGVSGDXILFDENGDSPGRYEIMNFKEMGKDYFDYINVGSWDNGELKMDDDEVWSKKSNIIRSVCSEPCEKGQIKVIRKGEVSCCWXCXPCKENEYVFDEYXCKACQLGSWPXDDLXGCDLIPVQYLRWGDPEPIAAVVFACLGLLAXLFVXVVFIIYRDXPVVKSSSRELCYIILAGICLGYLCXFCLIAKPKQIYCYLQRIGIGLSPAMSYSALVXKXNRIARILAGSKKKICXKKPRFMSACAQLVIAFILICIQLGIIVALFIMEPPDIMHDYPSIREVYLICNXXNLGVVXPLGYNGLLILSCXFYAFKXRNVPANFNEAKYIAFXMYXXCIIWLAFVPIYFGSNYKIIXMCFSVSLSAXVALGCMFVPKVYIILAKPERNVRSAFXXSXVVRMHVGDGKSSSAASRSSSLVNLWKRRGSSGEXLSSNGKSVXWAQNEKSSRGQHLWQRLSIHINKKENPNQXAVIKPFPKSXESRGLGAGAGAGGSAGGVGAXGGAGCAGAGPGGPESPDAGPKALYDVAEAEEHFPAPARPRSPSPISXLSHRAGSASRXDDDVPSLHSEPVARSSSSQGSLMEQISSVVXRFXANISELNSMMLSXAAPSPGVGAPLCSSYLIPKEIQLPXXMXXFAEIQPLPAIEVXGGAQPAAGAQAAGDAARESPAAGPEAAAAKPDLEELVALXPPSPFRDSVDSGSXXPNSPVSESALCIPSSPKYDXLIIRDYXQSSSSL

SEQ ID NO: 11610 - protein, 1212 aa, Homo sapiens
  MOD_RES (48)..(48): Selenocysteine
  MOD_RES (75)..(75): Selenocysteine
  MOD_RES (84)..(84): Selenocysteine
  MOD_RES (90)..(90): Selenocysteine
  MOD_RES (175)..(175): Selenocysteine
  MOD_RES (183)..(183): Selenocysteine
  MOD_RES (212)..(212): Selenocysteine
  MOD_RES (219)..(219): Selenocysteine
  MOD_RES (265)..(265): Selenocysteine
  MOD_RES (282)..(282): Selenocysteine
  MOD_RES (314)..(314): Selenocysteine
  MOD_RES (326)..(326): Selenocysteine
  MOD_RES (348)..(348): Selenocysteine
  MOD_RES (380)..(380): Selenocysteine
  MOD_RES (386)..(386): Selenocysteine
  MOD_RES (389)..(389): Selenocysteine
  MOD_RES (444)..(444): Selenocysteine
  MOD_RES (447)..(447): Selenocysteine
  MOD_RES (453)..(453): Selenocysteine
  MOD_RES (533)..(533): Selenocysteine
  MOD_RES (535)..(535): Selenocysteine
  MOD_RES (548)..(548): Selenocysteine
  MOD_RES (559)..(559): Selenocysteine
  MOD_RES (563)..(563): Selenocysteine
  MOD_RES (594)..(594): Selenocysteine
  MOD_RES (598)..(598): Selenocysteine
  MOD_RES (607)..(607): Selenocysteine
  MOD_RES (632)..(632): Selenocysteine
  MOD_RES (664)..(664): Selenocysteine
  MOD_RES (666)..(666): Selenocysteine
  MOD_RES (682)..(682): Selenocysteine
  MOD_RES (735)..(736): Selenocysteine
  MOD_RES (742)..(742): Selenocysteine
  MOD_RES (755)..(755): Selenocysteine
  MOD_RES (761)..(761): Selenocysteine
  MOD_RES (777)..(777): Selenocysteine
  MOD_RES (780)..(781): Selenocysteine
  MOD_RES (801)..(801): Selenocysteine
  MOD_RES (811)..(811): Selenocysteine
  MOD_RES (838)..(839): Selenocysteine
  MOD_RES (841)..(841): Selenocysteine
  MOD_RES (875)..(875): Selenocysteine
  MOD_RES (894)..(894): Selenocysteine
  MOD_RES (906)..(906): Selenocysteine
  MOD_RES (916)..(916): Selenocysteine
  MOD_RES (946)..(946): Selenocysteine
  MOD_RES (956)..(956): Selenocysteine
  MOD_RES (977)..(977): Selenocysteine
  MOD_RES (1024)..(1024): Selenocysteine
  MOD_RES (1035)..(1035): Selenocysteine
  MOD_RES (1066)..(1066): Selenocysteine
  MOD_RES (1069)..(1069): Selenocysteine
  MOD_RES (1082)..(1082): Selenocysteine
  MOD_RES (1107)..(1108): Selenocysteine
  MOD_RES (1110)..(1111): Selenocysteine
  MOD_RES (1124)..(1124): Selenocysteine
  MOD_RES (1164)..(1164): Selenocysteine
  MOD_RES (1178)..(1179): Selenocysteine
  MOD_RES (1199)..(1199): Selenocysteine
  MOD_RES (1206)..(1206): Selenocysteine
MVLLLILSVLLLKEDVRGSAQSSERRVVAHMPGDIIIGALFSVHHQPXVDKVHERKCGAVREQYGIQRVEAMLHXLERINSDPXLLPNIXLGCEIRDSCWHSAVALEQSIEFIRDSLISSEEEEGLVRCVDGSSSSFRSKKPIVGVIGPGSSSVAIQVQNLLQLFNIPQIAYSAXSMDLSDKXLFKYFMRVVPSDAQQARAMVDIVKRYNWXYVSAVHXEGNYGESGMEAFKDMSAKEGICIAHSYKIYSNAGEQSFDKLLKKLXSHLPKARVVACFCEGMXVRGLLMAMRRLGLAGEFLLLGSDGWADRYDVXDGYQREAVGGIXIKLQSPDVKWFDDYYLKLRPEXNHRNPWFQEFWQHRFQCRLEGFPQENSKYNKXCNSSLXLKXHHVQDSKMGFVINAIYSMAYGLHNMQMSLCPGYAGLCDAMKPIDGRKLLESLMKXNFXGVSGDXILFDENGDSPGRYEIMNFKEMGKDYFDYINVGSWDNGELKMDDDEVWSKKSNIIRSVCSEPCEKGQIKVIRKGEVSCCWXCXPCKENEYVFDEYXCKACQLGSWPXDDLXGCDLIPVQYLRWGDPEPIAAVVFACLGLLAXLFVXVVFIIYRDXPVVKSSSRELCYIILAGICLGYLCXFCLIAKPKQIYCYLQRIGIGLSPAMSYSALVXKXNRIARILAGSKKKICXKKPRFMSACAQLVIAFILICIQLGIIVALFIMEPPDIMHDYPSIREVYLICNXXNLGVVXPLGYNGLLILSCXFYAFKXRNVPANFNEAKYIAFXMYXXCIIWLAFVPIYFGSNYKIIXMCFSVSLSAXVALGCMFVPKVYIILAKPERNVRSAFXXSXVVRMHVGDGKSSSAASRSSSLVNLWKRRGSSGEXLRYKDRRLAQHKSEIECFXPKGSMGNGGRAXMSSSNGKSVXWAQNEKSSRGQHLWQRLSIHINKKENPNQXAVIKPFPKSXESRGLGAGAGAGGSAGGVGAXGGAGCAGAGPGGPESPDAGPKALYDVAEAEEHFPAPARPRSPSPISXLSHRAGSASRXDDDVPSLHSEPVARSSSSQGSLMEQISSVVXRFXANISELNSMMLSXAAPSPGVGAPLCSSYLIPKEIQLPXXMXXFAEIQPLPAIEVXGGAQPAAGAQAAGDAARESPAAGPEAAAAKPDLEELVALXPPSPFRDSVDSGSXXPNSPVSESALCIPSSPKYDXLIIRDYXQSSSSL

SEQ ID NO: 11611 - protein, 298 aa, Homo sapiens
  MOD_RES (48)..(48): Selenocysteine
  MOD_RES (75)..(75): Selenocysteine
  MOD_RES (84)..(84): Selenocysteine
  MOD_RES (90)..(90): Selenocysteine
  MOD_RES (175)..(175): Selenocysteine
  MOD_RES (183)..(183): Selenocysteine
  MOD_RES (212)..(212): Selenocysteine
  MOD_RES (219)..(219): Selenocysteine
  MOD_RES (224)..(224): Selenocysteine
  MOD_RES (235)..(235): Selenocysteine
  MOD_RES (284)..(284): Selenocysteine
  MOD_RES (298)..(298): Selenocysteine
MVLLLILSVLLLKEDVRGSAQSSERRVVAHMPGDIIIGALFSVHHQPXVDKVHERKCGAVREQYGIQRVEAMLHXLERINSDPXLLPNIXLGCEIRDSCWHSAVALEQSIEFIRDSLISSEEEEGLVRCVDGSSSSFRSKKPIVGVIGPGSSSVAIQVQNLLQLFNIPQIAYSAXSMDLSDKXLFKYFMRVVPSDAQQARAMVDIVKRYNWXYVSAVHXEGRGXKKEEMRKRDQXLMLSFMRCVFLRFEEIRWNDSLVYDALENENIQVLSLCFPSSAVIQINXFLSPIALINRLNVX

SEQ ID NO: 11612 - protein, 87 aa, Homo sapiens
  MOD_RES (1)..(1): Any amino acid
  MOD_RES (8)..(8): Selenocysteine
  MOD_RES (16)..(16): Selenocysteine
  MOD_RES (45)..(45): Selenocysteine
  MOD_RES (52)..(52): Selenocysteine
  MOD_RES (57)..(57): Selenocysteine
  MOD_RES (68)..(68): Selenocysteine
XQIAYSAXSMDLSDKXLFKYFMRVVPSDAQQARAMVDIVKRYNWXYVSAVHXEGRGXKKEEMRKRDQXLMLSFMRFKLFSCLSLQRS

SEQ ID NO: 11613 - protein, 877 aa, Homo sapiens
  MOD_RES (40)..(40): Selenocysteine
  MOD_RES (98)..(98): Selenocysteine
  MOD_RES (103)..(103): Selenocysteine
  MOD_RES (177)..(177): Selenocysteine
  MOD_RES (185)..(185): Selenocysteine
  MOD_RES (218)..(218): Selenocysteine
  MOD_RES (270)..(270): Selenocysteine
  MOD_RES (298)..(298): Selenocysteine
  MOD_RES (313)..(313): Selenocysteine
  MOD_RES (328)..(328): Selenocysteine
  MOD_RES (345)..(345): Selenocysteine
  MOD_RES (370)..(370): Selenocysteine
  MOD_RES (374)..(374): Selenocysteine
  MOD_RES (380)..(380): Selenocysteine
  MOD_RES (384)..(384): Selenocysteine
  MOD_RES (394)..(394): Selenocysteine
  MOD_RES (427)..(427): Selenocysteine
  MOD_RES (436)..(436): Selenocysteine
  MOD_RES (456)..(456): Selenocysteine
  MOD_RES (478)..(478): Selenocysteine
  MOD_RES (496)..(496): Selenocysteine
  MOD_RES (554)..(554): Selenocysteine
  MOD_RES (565)..(565): Selenocysteine
  MOD_RES (569)..(569): Selenocysteine
  MOD_RES (574)..(574): Selenocysteine
  MOD_RES (600)..(602): Selenocysteine
  MOD_RES (606)..(606): Selenocysteine
  MOD_RES (613)..(613): Selenocysteine
  MOD_RES (629)..(629): Selenocysteine
  MOD_RES (638)..(638): Selenocysteine
  MOD_RES (661)..(662): Selenocysteine
  MOD_RES (670)..(670): Selenocysteine
  MOD_RES (672)..(672): Selenocysteine
  MOD_RES (687)..(687): Selenocysteine
  MOD_RES (695)..(695): Selenocysteine
  MOD_RES (701)..(701): Selenocysteine
  MOD_RES (705)..(705): Selenocysteine
  MOD_RES (732)..(732): Selenocysteine
  MOD_RES (764)..(764): Selenocysteine
  MOD_RES (766)..(766): Selenocysteine
  MOD_RES (778)..(778): Selenocysteine
  MOD_RES (788)..(788): Selenocysteine
  MOD_RES (791)..(792): Selenocysteine
  MOD_RES (806)..(806): Selenocysteine
  MOD_RES (817)..(819): Selenocysteine
  MOD_RES (821)..(821): Selenocysteine
  MOD_RES (840)..(840): Selenocysteine
  MOD_RES (861)..(861): Selenocysteine
  MOD_RES (863)..(863): Selenocysteine
MARPRRAREPLLVALLPLAWLAQAGLARAAGSVRLAGGLXLGGLFPVHARGAAGRACGQLKKEQGVHRLEAMLYALDRVNADPELLPGVRLGARLLDXCSRDXYALEQALSFVQALIRGRGDGDEVGVRCPGGVPPLRPAPPERVVAVVGASASSVSIMVANVLRLFAIPQISYASXAPELSDSXRYDFFSRVVPPDSYQAQAMVDIVRALGWNYVSXLASEGNYGESGVEAFVQISREAGGVCIAQSIKIPREPKPGEFSKVIRRLMEXPNARGIIIFANEDDIRRVLEAARQANLXGHFLWVGSDSWGAKXSPILSLEDVAVGAIXILPKRASIDGFDQYFMXRSLENNRRNIWFAEFWEENFNCKLXSSGXQSDDSXRKCXGEERIGRDSXYEQEGKVQFVIDAVYAIAHALHSMHQALCPGHXGLCPAMEPXDGRMLLQYIRAVRFNGSAGXPVMFNENGDAPGRYDIFQYQAXNGSASSGGYQAVGQWAEXLRLDVEALQWSGDPHEVPSSLCSLPCGPGERKKMVKGVPCCWHCEACDGYRFQVDEFXCEACPGDMRPXPNHXGCRPXPVVRLSWSSPWAAPPLLLAVLGIVAXXXVVAXFVRYNNXPIVRASGRELSYVLLXGIFLIYAIXFLMVAEPGAAVCAARRLFLGLGXXLSYSALLXKXNRIYRIFEQGKRSVXPPPFISPXSQLVIXFSLXSLQVVGMIAWLGARPPHSVIDYEEQRXVDPEQARGVLKCDMSDLSLIGCLGYSLLLMVXCXVYAIKARGVPEXFNEAKPIGFXMYXXCIIWLAFVPIFFGXAQSAEKIYIQXXXLXVSLSLSASVSLGMLYVPKXYVILFHPEQNVQKRKRSLKAXSXVAAPPKGEDAEAHK

SEQ ID NO: 11614 - protein, 677 aa, Homo sapiens
  MOD_RES (19)..(19): Selenocysteine
  MOD_RES (32)..(32): Selenocysteine
  MOD_RES (90)..(90): Selenocysteine
  MOD_RES (97)..(97): Selenocysteine
  MOD_RES (106)..(106): Selenocysteine
  MOD_RES (109)..(109): Selenocysteine
  MOD_RES (132)..(132): Selenocysteine
  MOD_RES (141)..(141): Selenocysteine
  MOD_RES (146)..(146): Selenocysteine
  MOD_RES (218)..(218): Selenocysteine
  MOD_RES (239)..(240): Selenocysteine
  MOD_RES (242)..(242): Selenocysteine
  MOD_RES (254)..(254): Selenocysteine
  MOD_RES (279)..(279): Selenocysteine
  MOD_RES (290)..(290): Selenocysteine
  MOD_RES (294)..(294): Selenocysteine
  MOD_RES (299)..(299): Selenocysteine
  MOD_RES (314)..(314): Selenocysteine
  MOD_RES (329)..(329): Selenocysteine
  MOD_RES (360)..(360): Selenocysteine
  MOD_RES (366)..(366): Selenocysteine
  MOD_RES (373)..(373): Selenocysteine
  MOD_RES (389)..(389): Selenocysteine
  MOD_RES (398)..(398): Selenocysteine
  MOD_RES (430)..(430): Selenocysteine
  MOD_RES (432)..(432): Selenocysteine
  MOD_RES (447)..(447): Selenocysteine
  MOD_RES (455)..(455): Selenocysteine
  MOD_RES (461)..(461): Selenocysteine
  MOD_RES (492)..(492): Selenocysteine
  MOD_RES (507)..(507): Selenocysteine
  MOD_RES (524)..(524): Selenocysteine
  MOD_RES (526)..(526): Selenocysteine
  MOD_RES (532)..(532): Selenocysteine
  MOD_RES (548)..(548): Selenocysteine
  MOD_RES (551)..(552): Selenocysteine
  MOD_RES (566)..(566): Selenocysteine
  MOD_RES (577)..(579): Selenocysteine
  MOD_RES (581)..(581): Selenocysteine
  MOD_RES (623)..(623): Selenocysteine
  MOD_RES (626)..(626): Selenocysteine
  MOD_RES (645)..(645): Selenocysteine
  MOD_RES (669)..(669): Selenocysteine
  MOD_RES (672)..(672): Selenocysteine
  MOD_RES (676)..(676): Selenocysteine
GGLCIAQSVRIPQERKDRXIDFDRIIKQLLDXPNSRAVVIFANDEDIKQILAAAKRADQVGHFLWVGSDSWGSKINPLHQHEDIAEGAIXIQPKRAXVEGFDAYFXSRXLENNRRNVWFAEYWEENFNCKLXISGSKKEDXDRKCXGQERIGKDSNYEQEGKVQFVIDAVYAMAHALHHMNKDLCADYRGVCPEMEQAGGKKLLKYIRNVNFNGSAGXPVMFNKNGDAPGRYDIFQYQXXNXSNPGYRLIGQWXDELQLNIEDMQWGKGVREIPASVCXLPCKPGQRKKXQKGXPCCWXCEPCDGYQYQFDEMXCQHCPYDQRPNENRXGCQDIPIIKLEWHSPWAVIPVFLAMLGIIAXIFVMAXFIRYNDXPIVRASGRELSYVLLXGIFLCYIIXFLMIAKPDVAVCSFRRVFLGLGMCISYAALLXKXNRIYRIFEQGKKSVXAPRLISPXSQLAIXSSLISVQLLGVFIWFGVDPPNIIIDYDEHKXMNPEQARGVLKCDIXDLQIICSLGYSILLMVXCXVYAIKXRGVPENFNEAKPIGFXMYXXCIVWLAFIPIFFGXAQSAEKLYIQXXXLXISMNLSASVALGMLYMPKVYIIIFHPELNVQKRKRSFKAVVXAAXMSSRLSHKPSDRPNGEAKXELCENVDPNNCIPPVRKSVQKSVXWYXIPPXV

SEQ ID NO: 11615 - protein, 37 aa, Homo sapiens
MAPELHWGDALLSCLSFPILNVLQKSPRLVMHQRHPS

SEQ ID NO: 11616 - protein, 185 aa, Homo sapiens
  MOD_RES (8)..(8): Selenocysteine
  MOD_RES (11)..(11): Selenocysteine
  MOD_RES (34)..(34): Selenocysteine
  MOD_RES (43)..(43): Selenocysteine
  MOD_RES (48)..(48): Selenocysteine
  MOD_RES (120)..(120): Selenocysteine
  MOD_RES (141)..(142): Selenocysteine
  MOD_RES (144)..(144): Selenocysteine
  MOD_RES (156)..(156): Selenocysteine
  MOD_RES (181)..(181): Selenocysteine
MGFDAYFXSRXLENNRRNVWFAEYWEENFNCKLXISGSKKEDXDRKCXGQERIGKDSNYEQEGKVQFVIDAVYAMAHALHHMNKDLCADYRGVCPEMEQAGGKKLLKYIRNVNFNGSAGXPVMFNKNGDAPGRYDIFQYQXXNXSNPGYRLIGQWXDELQLNIEDMQWGKGVREIPASVCXLPCK

SEQ ID NO: 11617 - protein, 68 aa, Homo sapiens
  MOD_RES (28)..(28): Selenocysteine
  MOD_RES (32)..(32): Selenocysteine
  MOD_RES (48)..(48): Selenocysteine
  MOD_RES (68)..(68): Selenocysteine
MNPVPQMEMQKSPVFGHLGSSPEVLWNXRYYXEAAIWKDHLERFFIKXEPQSIRKHPCLISMKVMRRX

SEQ ID NO: 11618 - protein, 122 aa, Homo sapiens
  MOD_RES (15)..(15): Selenocysteine
  MOD_RES (31)..(31): Selenocysteine
  MOD_RES (56)..(56): Selenocysteine
  MOD_RES (69)..(69): Selenocysteine
MVDIVKALGWNYVSXLASEGSYGEKGVESFXQISKEAGGLCIAQSVRIPQERKDRXIDFDRIIKQLLDXPNSRAVVIFANDEDIKQILAAAKRADQVGHFLWVGSDSWGSKINPLHQHEDIA

SEQ ID NO: 11619 - protein, 906 aa, Homo sapiens
  MOD_RES (12)..(12): Selenocysteine
  MOD_RES (50)..(50): Selenocysteine
  MOD_RES (100)..(100): Selenocysteine
  MOD_RES (108)..(108): Selenocysteine
  MOD_RES (113)..(113): Selenocysteine
  MOD_RES (121)..(121): Selenocysteine
  MOD_RES (131)..(131): Selenocysteine
  MOD_RES (137)..(137): Selenocysteine
  MOD_RES (182)..(182): Selenocysteine
  MOD_RES (223)..(223): Selenocysteine
  MOD_RES (239)..(239): Selenocysteine
  MOD_RES (264)..(264): Selenocysteine
  MOD_RES (277)..(277): Selenocysteine
  MOD_RES (335)..(335): Selenocysteine
  MOD_RES (342)..(342): Selenocysteine
  MOD_RES (351)..(351): Selenocysteine
  MOD_RES (354)..(354): Selenocysteine
  MOD_RES (377)..(377): Selenocysteine
  MOD_RES (386)..(386): Selenocysteine
  MOD_RES (391)..(391): Selenocysteine
  MOD_RES (463)..(463): Selenocysteine
  MOD_RES (484)..(485): Selenocysteine
  MOD_RES (487)..(487): Selenocysteine
  MOD_RES (499)..(499): Selenocysteine
  MOD_RES (524)..(524): Selenocysteine
  MOD_RES (535)..(535): Selenocysteine
  MOD_RES (539)..(539): Selenocysteine
  MOD_RES (544)..(544): Selenocysteine
  MOD_RES (559)..(559): Selenocysteine
  MOD_RES (574)..(574): Selenocysteine
  MOD_RES (605)..(605): Selenocysteine
  MOD_RES (611)..(611): Selenocysteine
  MOD_RES (618)..(618): Selenocysteine
  MOD_RES (634)..(634): Selenocysteine
  MOD_RES (643)..(643): Selenocysteine
  MOD_RES (675)..(675): Selenocysteine
  MOD_RES (677)..(677): Selenocysteine
  MOD_RES (692)..(692): Selenocysteine
  MOD_RES (700)..(700): Selenocysteine
  MOD_RES (706)..(706): Selenocysteine
  MOD_RES (737)..(737): Selenocysteine
  MOD_RES (752)..(752): Selenocysteine
  MOD_RES (769)..(769): Selenocysteine
  MOD_RES (771)..(771): Selenocysteine
  MOD_RES (777)..(777): Selenocysteine
  MOD_RES (793)..(793): Selenocysteine
  MOD_RES (796)..(797): Selenocysteine
  MOD_RES (811)..(811): Selenocysteine
  MOD_RES (822)..(824): Selenocysteine
  MOD_RES (826)..(826): Selenocysteine
  MOD_RES (868)..(868): Selenocysteine
  MOD_RES (871)..(871): Selenocysteine
  MOD_RES (890)..(890): Selenocysteine
MVQLRKLLRVLXLMKFPCCVLEVLLCALAAAARGQEMYAPHSIRIEGDVXLGGLFPVHAKGPSGVPCGDIKRENGIHRLEAMLYALDQINSDPNLLPNVXLGARILDXCSRDXYALEQSLXFVQALIQKDXSDVRCXNGEPPVFVKPEKVVGVIGASGSSVSIMVANILRLFQIPQISYASXAPELSDDRRYDFFSRVVPPDSFQAQAMVDIVKALGWNYVSXLASEGSYGEKGVESFXQISKEAGGLCIAQSVRIPQERKDRXIDFDRIIKQLLDXPNSRAVVIFANDEDIKQILAAAKRADQVGHFLWVGSDSWGSKINPLHQHEDIAEGAIXIQPKRAXVEGFDAYFXSRXLENNRRNVWFAEYWEENFNCKLXISGSKKEDXDRKCXGQERIGKDSNYEQEGKVQFVIDAVYAMAHALHHMNKDLCADYRGVCPEMEQAGGKKLLKYIRNVNFNGSAGXPVMFNKNGDAPGRYDIFQYQXXNXSNPGYRLIGQWXDELQLNIEDMQWGKGVREIPASVCXLPCKPGQRKKXQKGXPCCWXCEPCDGYQYQFDEMXCQHCPYDQRPNENRXGCQDIPIIKLEWHSPWAVIPVFLAMLGIIAXIFVMAXFIRYNDXPIVRASGRELSYVLLXGIFLCYIIXFLMIAKPDVAVCSFRRVFLGLGMCISYAALLXKXNRIYRIFEQGKKSVXAPRLISPXSQLAIXSSLISVQLLGVFIWFGVDPPNIIIDYDEHKXMNPEQARGVLKCDIXDLQIICSLGYSILLMVXCXVYAIKXRGVPENFNEAKPIGFXMYXXCIVWLAFIPIFFGXAQSAEKLYIQXXXLXISMNLSASVALGMLYMPKVYIIIFHPELNVQKRKRSFKAVVXAAXMSSRLSHKPSDRPNGEAKXELCENVDPNSEKCNCY

SEQ ID NO: 11620 - protein, 911 aa, Homo sapiens
  MOD_RES (12)..(12): Selenocysteine
  MOD_RES (50)..(50): Selenocysteine
  MOD_RES (100)..(100): Selenocysteine
  MOD_RES (108)..(108): Selenocysteine
  MOD_RES (113)..(113): Selenocysteine
  MOD_RES (121)..(121): Selenocysteine
  MOD_RES (131)..(131): Selenocysteine
  MOD_RES (137)..(137): Selenocysteine
  MOD_RES (182)..(182): Selenocysteine
  MOD_RES (223)..(223): Selenocysteine
  MOD_RES (239)..(239): Selenocysteine
  MOD_RES (264)..(264): Selenocysteine
  MOD_RES (277)..(277): Selenocysteine
  MOD_RES (335)..(335): Selenocysteine
  MOD_RES (342)..(342): Selenocysteine
  MOD_RES (351)..(351): Selenocysteine
  MOD_RES (354)..(354): Selenocysteine
  MOD_RES (377)..(377): Selenocysteine
  MOD_RES (386)..(386): Selenocysteine
  MOD_RES (391)..(391): Selenocysteine
  MOD_RES (463)..(463): Selenocysteine
  MOD_RES (484)..(485): Selenocysteine
  MOD_RES (487)..(487): Selenocysteine
  MOD_RES (499)..(499): Selenocysteine
  MOD_RES (524)..(524): Selenocysteine
  MOD_RES (535)..(535): Selenocysteine
  MOD_RES (539)..(539): Selenocysteine
  MOD_RES (544)..(544): Selenocysteine
  MOD_RES (559)..(559): Selenocysteine
  MOD_RES (574)..(574): Selenocysteine
  MOD_RES (605)..(605): Selenocysteine
  MOD_RES (611)..(611): Selenocysteine
  MOD_RES (618)..(618): Selenocysteine
  MOD_RES (634)..(634): Selenocysteine
  MOD_RES (643)..(643): Selenocysteine
  MOD_RES (675)..(675): Selenocysteine
  MOD_RES (677)..(677): Selenocysteine
  MOD_RES (692)..(692): Selenocysteine
  MOD_RES (700)..(700): Selenocysteine
  MOD_RES (706)..(706): Selenocysteine
  MOD_RES (737)..(737): Selenocysteine
  MOD_RES (752)..(752): Selenocysteine
  MOD_RES (769)..(769): Selenocysteine
  MOD_RES (771)..(771): Selenocysteine
  MOD_RES (777)..(777): Selenocysteine
  MOD_RES (793)..(793): Selenocysteine
  MOD_RES (796)..(797): Selenocysteine
  MOD_RES (811)..(811): Selenocysteine
  MOD_RES (822)..(824): Selenocysteine
  MOD_RES (826)..(826): Selenocysteine
  MOD_RES (868)..(868): Selenocysteine
  MOD_RES (871)..(871): Selenocysteine
  MOD_RES (890)..(890): Selenocysteine
  MOD_RES (901)..(901): Selenocysteine
MVQLRKLLRVLXLMKFPCCVLEVLLCALAAAARGQEMYAPHSIRIEGDVXLGGLFPVHAKGPSGVPCGDIKRENGIHRLEAMLYALDQINSDPNLLPNVXLGARILDXCSRDXYALEQSLXFVQALIQKDXSDVRCXNGEPPVFVKPEKVVGVIGASGSSVSIMVANILRLFQIPQISYASXAPELSDDRRYDFFSRVVPPDSFQAQAMVDIVKALGWNYVSXLASEGSYGEKGVESFXQISKEAGGLCIAQSVRIPQERKDRXIDFDRIIKQLLDXPNSRAVVIFANDEDIKQILAAAKRADQVGHFLWVGSDSWGSKINPLHQHEDIAEGAIXIQPKRAXVEGFDAYFXSRXLENNRRNVWFAEYWEENFNCKLXISGSKKEDXDRKCXGQERIGKDSNYEQEGKVQFVIDAVYAMAHALHHMNKDLCADYRGVCPEMEQAGGKKLLKYIRNVNFNGSAGXPVMFNKNGDAPGRYDIFQYQXXNXSNPGYRLIGQWXDELQLNIEDMQWGKGVREIPASVCXLPCKPGQRKKXQKGXPCCWXCEPCDGYQYQFDEMXCQHCPYDQRPNENRXGCQDIPIIKLEWHSPWAVIPVFLAMLGIIAXIFVMAXFIRYNDXPIVRASGRELSYVLLXGIFLCYIIXFLMIAKPDVAVCSFRRVFLGLGMCISYAALLXKXNRIYRIFEQGKKSVXAPRLISPXSQLAIXSSLISVQLLGVFIWFGVDPPNIIIDYDEHKXMNPEQARGVLKCDIXDLQIICSLGYSILLMVXCXVYAIKXRGVPENFNEAKPIGFXMYXXCIVWLAFIPIFFGXAQSAEKLYIQXXXLXISMNLSASVALGMLYMPKVYIIIFHPELNVQKRKRSFKAVVXAAXMSSRLSHKPSDRPNGEAKXELCENVDPNIXSEDLSLHKED

SEQ ID NO: 11621 - protein, 913 aa, Homo sapiens
  MOD_RES (12)..(12): Selenocysteine
  MOD_RES (50)..(50): Selenocysteine
  MOD_RES (100)..(100): Selenocysteine
  MOD_RES (108)..(108): Selenocysteine
  MOD_RES (113)..(113): Selenocysteine
  MOD_RES (121)..(121): Selenocysteine
  MOD_RES (131)..(131): Selenocysteine
  MOD_RES (137)..(137): Selenocysteine
  MOD_RES (182)..(182): Selenocysteine
  MOD_RES (223)..(223): Selenocysteine
  MOD_RES (239)..(239): Selenocysteine
  MOD_RES (264)..(264): Selenocysteine
  MOD_RES (277)..(277): Selenocysteine
  MOD_RES (335)..(335): Selenocysteine
  MOD_RES (342)..(342): Selenocysteine
  MOD_RES (351)..(351): Selenocysteine
  MOD_RES (354)..(354): Selenocysteine
  MOD_RES (377)..(377): Selenocysteine
  MOD_RES (386)..(386): Selenocysteine
  MOD_RES (391)..(391): Selenocysteine
  MOD_RES (463)..(463): Selenocysteine
  MOD_RES (484)..(485): Selenocysteine
  MOD_RES (487)..(487): Selenocysteine
  MOD_RES (499)..(499): Selenocysteine
  MOD_RES (524)..(524): Selenocysteine
  MOD_RES (535)..(535): Selenocysteine
  MOD_RES (539)..(539): Selenocysteine
  MOD_RES (544)..(544): Selenocysteine
  MOD_RES (559)..(559): Selenocysteine
  MOD_RES (574)..(574): Selenocysteine
  MOD_RES (605)..(605): Selenocysteine
  MOD_RES (611)..(611): Selenocysteine
  MOD_RES (618)..(618): Selenocysteine
  MOD_RES (634)..(634): Selenocysteine
  MOD_RES (643)..(643): Selenocysteine
  MOD_RES (675)..(675): Selenocysteine
  MOD_RES (677)..(677): Selenocysteine
  MOD_RES (692)..(692): Selenocysteine
  MOD_RES (700)..(700): Selenocysteine
  MOD_RES (706)..(706): Selenocysteine
  MOD_RES (737)..(737): Selenocysteine
  MOD_RES (752)..(752): Selenocysteine
  MOD_RES (769)..(769): Selenocysteine
  MOD_RES (771)..(771): Selenocysteine
  MOD_RES (777)..(777): Selenocysteine
  MOD_RES (793)..(793): Selenocysteine
  MOD_RES (796)..(797): Selenocysteine
  MOD_RES (811)..(811): Selenocysteine
  MOD_RES (822)..(824): Selenocysteine
  MOD_RES (826)..(826): Selenocysteine
  MOD_RES (868)..(868): Selenocysteine
  MOD_RES (871)..(871): Selenocysteine
  MOD_RES (890)..(890): Selenocysteine
  MOD_RES (909)..(909): Selenocysteine
  MOD_RES (912)..(912): Selenocysteine
MVQLRKLLRVLXLMKFPCCVLEVLLCALAAAARGQEMYAPHSIRIEGDVXLGGLFPVHAKGPSGVPCGDIKRENGIHRLEAMLYALDQINSDPNLLPNVXLGARILDXCSRDXYALEQSLXFVQALIQKDXSDVRCXNGEPPVFVKPEKVVGVIGASGSSVSIMVANILRLFQIPQISYASXAPELSDDRRYDFFSRVVPPDSFQAQAMVDIVKALGWNYVSXLASEGSYGEKGVESFXQISKEAGGLCIAQSVRIPQERKDRXIDFDRIIKQLLDXPNSRAVVIFANDEDIKQILAAAKRADQVGHFLWVGSDSWGSKINPLHQHEDIAEGAIXIQPKRAXVEGFDAYFXSRXLENNRRNVWFAEYWEENFNCKLXISGSKKEDXDRKCXGQERIGKDSNYEQEGKVQFVIDAVYAMAHALHHMNKDLCADYRGVCPEMEQAGGKKLLKYIRNVNFNGSAGXPVMFNKNGDAPGRYDIFQYQXXNXSNPGYRLIGQWXDELQLNIEDMQWGKGVREIPASVCXLPCKPGQRKKXQKGXPCCWXCEPCDGYQYQFDEMXCQHCPYDQRPNENRXGCQDIPIIKLEWHSPWAVIPVFLAMLGIIAXIFVMAXFIRYNDXPIVRASGRELSYVLLXGIFLCYIIXFLMIAKPDVAVCSFRRVFLGLGMCISYAALLXKXNRIYRIFEQGKKSVXAPRLISPXSQLAIXSSLISVQLLGVFIWFGVDPPNIIIDYDEHKXMNPEQARGVLKCDIXDLQIICSLGYSILLMVXCXVYAIKXRGVPENFNEAKPIGFXMYXXCIVWLAFIPIFFGXAQSAEKLYIQXXXLXISMNLSASVALGMLYMPKVYIIIFHPELNVQKRKRSFKAVVXAAXMSSRLSHKPSDRPNGEAKXELCENVDPNNFFFWLYSGXWIXL

SEQ ID NO: 11622 - protein, 915 aa, Homo sapiens
  MOD_RES (12)..(12): Selenocysteine
  MOD_RES (50)..(50): Selenocysteine
  MOD_RES (100)..(100): Selenocysteine
  MOD_RES (108)..(108): Selenocysteine
  MOD_RES (113)..(113): Selenocysteine
  MOD_RES (121)..(121): Selenocysteine
  MOD_RES (131)..(131): Selenocysteine
  MOD_RES (137)..(137): Selenocysteine
  MOD_RES (182)..(182): Selenocysteine
  MOD_RES (223)..(223): Selenocysteine
  MOD_RES (239)..(239): Selenocysteine
  MOD_RES (264)..(264): Selenocysteine
  MOD_RES (277)..(277): Selenocysteine
  MOD_RES (335)..(335): Selenocysteine
  MOD_RES (342)..(342): Selenocysteine
  MOD_RES (351)..(351): Selenocysteine
  MOD_RES (354)..(354): Selenocysteine
  MOD_RES (377)..(377): Selenocysteine
  MOD_RES (386)..(386): Selenocysteine
  MOD_RES (391)..(391): Selenocysteine
  MOD_RES (463)..(463): Selenocysteine
  MOD_RES (484)..(485): Selenocysteine
  MOD_RES (487)..(487): Selenocysteine
  MOD_RES (499)..(499): Selenocysteine
  MOD_RES (524)..(524): Selenocysteine
  MOD_RES (535)..(535): Selenocysteine
  MOD_RES (539)..(539): Selenocysteine
  MOD_RES (544)..(544): Selenocysteine
  MOD_RES (559)..(559): Selenocysteine
  MOD_RES (574)..(574): Selenocysteine
  MOD_RES (605)..(605): Selenocysteine
  MOD_RES (611)..(611): Selenocysteine
  MOD_RES (618)..(618): Selenocysteine
  MOD_RES (634)..(634): Selenocysteine
  MOD_RES (643)..(643): Selenocysteine
  MOD_RES (675)..(675): Selenocysteine
  MOD_RES (677)..(677): Selenocysteine
  MOD_RES (692)..(692): Selenocysteine
  MOD_RES (700)..(700): Selenocysteine
  MOD_RES (706)..(706): Selenocysteine
  MOD_RES (737)..(737): Selenocysteine
  MOD_RES (752)..(752): Selenocysteine
  MOD_RES (769)..(769): Selenocysteine
  MOD_RES (771)..(771): Selenocysteine
  MOD_RES (777)..(777): Selenocysteine
  MOD_RES (793)..(793): Selenocysteine
  MOD_RES (796)..(797): Selenocysteine
  MOD_RES (811)..(811): Selenocysteine
  MOD_RES (822)..(824): Selenocysteine
  MOD_RES (826)..(826): Selenocysteine
  MOD_RES (868)..(868): Selenocysteine
  MOD_RES (871)..(871): Selenocysteine
  MOD_RES (890)..(890): Selenocysteine
MVQLRKLLRVLXLMKFPCCVLEVLLCALAAAARGQEMYAPHSIRIEGDVXLGGLFPVHAKGPSGVPCGDIKRENGIHRLEAMLYALDQINSDPNLLPNVXLGARILDXCSRDXYALEQSLXFVQALIQKDXSDVRCXNGEPPVFVKPEKVVGVIGASGSSVSIMVANILRLFQIPQISYASXAPELSDDRRYDFFSRVVPPDSFQAQAMVDIVKALGWNYVSXLASEGSYGEKGVESFXQISKEAGGLCIAQSVRIPQERKDRXIDFDRIIKQLLDXPNSRAVVIFANDEDIKQILAAAKRADQVGHFLWVGSDSWGSKINPLHQHEDIAEGAIXIQPKRAXVEGFDAYFXSRXLENNRRNVWFAEYWEENFNCKLXISGSKKEDXDRKCXGQERIGKDSNYEQEGKVQFVIDAVYAMAHALHHMNKDLCADYRGVCPEMEQAGGKKLLKYIRNVNFNGSAGXPVMFNKNGDAPGRYDIFQYQXXNXSNPGYRLIGQWXDELQLNIEDMQWGKGVREIPASVCXLPCKPGQRKKXQKGXPCCWXCEPCDGYQYQFDEMXCQHCPYDQRPNENRXGCQDIPIIKLEWHSPWAVIPVFLAMLGIIAXIFVMAXFIRYNDXPIVRASGRELSYVLLXGIFLCYIIXFLMIAKPDVAVCSFRRVFLGLGMCISYAALLXKXNRIYRIFEQGKKSVXAPRLISPXSQLAIXSSLISVQLLGVFIWFGVDPPNIIIDYDEHKXMNPEQARGVLKCDIXDLQIICSLGYSILLMVXCXVYAIKXRGVPENFNEAKPIGFXMYXXCIVWLAFIPIFFGXAQSAEKLYIQXXXLXISMNLSASVALGMLYMPKVYIIIFHPELNVQKRKRSFKAVVXAAXMSSRLSHKPSDRPNGEAKXELCENVDPNSPAAKKKYVSYNNLVI

SEQ ID NO: 11623 - protein, 922 aa, Homo sapiens
  MOD_RES (12)..(12): Selenocysteine
  MOD_RES (50)..(50): Selenocysteine
  MOD_RES (100)..(100): Selenocysteine
  MOD_RES (108)..(108): Selenocysteine
  MOD_RES (113)..(113): Selenocysteine
  MOD_RES (121)..(121): Selenocysteine
  MOD_RES (131)..(131): Selenocysteine
  MOD_RES (137)..(137): Selenocysteine
  MOD_RES (182)..(182): Selenocysteine
  MOD_RES (223)..(223): Selenocysteine
  MOD_RES (239)..(239): Selenocysteine
  MOD_RES (264)..(264): Selenocysteine
  MOD_RES (277)..(277): Selenocysteine
  MOD_RES (335)..(335): Selenocysteine
  MOD_RES (342)..(342): Selenocysteine
  MOD_RES (351)..(351): Selenocysteine
  MOD_RES (354)..(354): Selenocysteine
  MOD_RES (377)..(377): Selenocysteine
  MOD_RES (386)..(386): Selenocysteine
  MOD_RES (391)..(391): Selenocysteine
  MOD_RES (463)..(463): Selenocysteine
  MOD_RES (484)..(485): Selenocysteine
  MOD_RES (487)..(487): Selenocysteine
  MOD_RES (499)..(499): Selenocysteine
  MOD_RES (524)..(524): Selenocysteine
  MOD_RES (535)..(535): Selenocysteine
  MOD_RES (539)..(539): Selenocysteine
  MOD_RES (544)..(544): Selenocysteine
  MOD_RES (559)..(559): Selenocysteine
  MOD_RES (574)..(574): Selenocysteine
  MOD_RES (605)..(605): Selenocysteine
  MOD_RES (611)..(611): Selenocysteine
  MOD_RES (618)..(618): Selenocysteine
  MOD_RES (634)..(634): Selenocysteine
  MOD_RES (643)..(643): Selenocysteine
  MOD_RES (675)..(675): Selenocysteine
  MOD_RES (677)..(677): Selenocysteine
  MOD_RES (692)..(692): Selenocysteine
  MOD_RES (700)..(700): Selenocysteine
  MOD_RES (706)..(706): Selenocysteine
  MOD_RES (737)..(737): Selenocysteine
  MOD_RES (752)..(752): Selenocysteine
  MOD_RES (769)..(769): Selenocysteine
  MOD_RES (771)..(771): Selenocysteine
  MOD_RES (777)..(777): Selenocysteine
  MOD_RES (793)..(793): Selenocysteine
  MOD_RES (796)..(797): Selenocysteine
  MOD_RES (811)..(811): Selenocysteine
  MOD_RES (822)..(824): Selenocysteine
  MOD_RES (826)..(826): Selenocysteine
  MOD_RES (868)..(868): Selenocysteine
  MOD_RES (871)..(871): Selenocysteine
  MOD_RES (890)..(890): Selenocysteine
  MOD_RES (914)..(914): Selenocysteine
  MOD_RES (917)..(917): Selenocysteine
  MOD_RES (921)..(921): Selenocysteine
MVQLRKLLRVLXLMKFPCCVLEVLLCALAAAARGQEMYAPHSIRIEGDVXLGGLFPVHAKGPSGVPCGDIKRENGIHRLEAMLYALDQINSDPNLLPNVXLGARILDXCSRDXYALEQSLXFVQALIQKDXSDVRCXNGEPPVFVKPEKVVGVIGASGSSVSIMVANILRLFQIPQISYASXAPELSDDRRYDFFSRVVPPDSFQAQAMVDIVKALGWNYVSXLASEGSYGEKGVESFXQISKEAGGLCIAQSVRIPQERKDRXIDFDRIIKQLLDXPNSRAVVIFANDEDIKQILAAAKRADQVGHFLWVGSDSWGSKINPLHQHEDIAEGAIXIQPKRAXVEGFDAYFXSRXLENNRRNVWFAEYWEENFNCKLXISGSKKEDXDRKCXGQERIGKDSNYEQEGKVQFVIDAVYAMAHALHHMNKDLCADYRGVCPEMEQAGGKKLLKYIRNVNFNGSAGXPVMFNKNGDAPGRYDIFQYQXXNXSNPGYRLIGQWXDELQLNIEDMQWGKGVREIPASVCXLPCKPGQRKKXQKGXPCCWXCEPCDGYQYQFDEMXCQHCPYDQRPNENRXGCQDIPIIKLEWHSPWAVIPVFLAMLGIIAXIFVMAXFIRYNDXPIVRASGRELSYVLLXGIFLCYIIXFLMIAKPDVAVCSFRRVFLGLGMCISYAALLXKXNRIYRIFEQGKKSVXAPRLISPXSQLAIXSSLISVQLLGVFIWFGVDPPNIIIDYDEHKXMNPEQARGVLKCDIXDLQIICSLGYSILLMVXCXVYAIKXRGVPENFNEAKPIGFXMYXXCIVWLAFIPIFFGXAQSAEKLYIQXXXLXISMNLSASVALGMLYMPKVYIIIFHPELNVQKRKRSFKAVVXAAXMSSRLSHKPSDRPNGEAKXELCENVDPNNCIPPVRKSVQKSVXWYXIPPXV

SEQ ID NO: 11624 - protein, 91 aa, Homo sapiens
  MOD_RES (21)..(21): Selenocysteine
  MOD_RES (30)..(30): Selenocysteine
  MOD_RES (46)..(46): Selenocysteine
  MOD_RES (89)..(89): Selenocysteine
FFSRVVPPDSYQAQAMVDIVXALGWNYVSXLASEGNYGESGVEAFXQISREIGYPSLFGIQGCLHECFAILCQVVYQFLLLMQLSDAQXVY

SEQ ID NO: 11625 - protein, 20 aa, Homo sapiens
  MOD_RES (18)..(18): Selenocysteine
MVCEGKRSASCPCFFLLXAK

SEQ ID NO: 11626 - protein, 294 aa, Homo sapiens
  MOD_RES (18)..(18): Selenocysteine
  MOD_RES (26)..(26): Selenocysteine
  MOD_RES (31)..(31): Selenocysteine
  MOD_RES (97)..(97): Selenocysteine
  MOD_RES (105)..(105): Selenocysteine
  MOD_RES (110)..(110): Selenocysteine
  MOD_RES (118)..(118): Selenocysteine
  MOD_RES (142)..(142): Selenocysteine
  MOD_RES (179)..(179): Selenocysteine
  MOD_RES (187)..(187): Selenocysteine
  MOD_RES (211)..(211): Selenocysteine
  MOD_RES (220)..(220): Selenocysteine
  MOD_RES (236)..(236): Selenocysteine
  MOD_RES (272)..(272): Selenocysteine
MVCEGKRSASCPCFFLLXAKFYWILXMMQRXHSQEYAHSIRVDGDIILGGLFPVHAKGERGVPCGELKKEKGIHRLEAMLYAIDQINKDPDLLSNIXLGVRILDXCSRDXYALEQSLXFVQALIEKDASDVKCANGDPPIFXKPDKISGVIGAAASSVSIMVANILRLFKIPQISYASXAPELSDNXRYDFFSRVVPPDSYQAQAMVDIVXALGWNYVSXLASEGNYGESGVEAFXQISREIGGVCIAQSQKIPREPRPGEFEKIIKRLLEXPNARAVIMFANEDDIRRILEAA

SEQ ID NO: 11627 - protein, 501 aa, Homo sapiens
  MOD_RES (18)..(18): Selenocysteine
  MOD_RES (26)..(26): Selenocysteine
  MOD_RES (31)..(31): Selenocysteine
  MOD_RES (97)..(97): Selenocysteine
  MOD_RES (105)..(105): Selenocysteine
  MOD_RES (110)..(110): Selenocysteine
  MOD_RES (118)..(118): Selenocysteine
  MOD_RES (142)..(142): Selenocysteine
  MOD_RES (179)..(179): Selenocysteine
  MOD_RES (187)..(187): Selenocysteine
  MOD_RES (211)..(211): Selenocysteine
  MOD_RES (220)..(220): Selenocysteine
  MOD_RES (236)..(236): Selenocysteine
  MOD_RES (272)..(272): Selenocysteine
  MOD_RES (330)..(330): Selenocysteine
  MOD_RES (349)..(349): Selenocysteine
  MOD_RES (385)..(385): Selenocysteine
  MOD_RES (436)..(436): Selenocysteine
  MOD_RES (466)..(466): Selenocysteine
  MOD_RES (469)..(469): Selenocysteine
  MOD_RES (488)..(488): Selenocysteine
MVCEGKRSASCPCFFLLXAKFYWILXMMQRXHSQEYAHSIRVDGDIILGGLFPVHAKGERGVPCGELKKEKGIHRLEAMLYAIDQINKDPDLLSNIXLGVRILDXCSRDXYALEQSLXFVQALIEKDASDVKCANGDPPIFXKPDKISGVIGAAASSVSIMVANILRLFKIPQISYASXAPELSDNXRYDFFSRVVPPDSYQAQAMVDIVXALGWNYVSXLASEGNYGESGVEAFXQISREIGGVCIAQSQKIPREPRPGEFEKIIKRLLEXPNARAVIMFANEDDIRRILEAAKKLNQSGHFLWIGSDSWGSKIAPVYQQEEIAEGAVXILPKRASIDGFDRYFRSRXLANNRRNVWFAEFWEENFGCKLGSHGKRNSHIKKCXGLERIARDSSYEQEGKVQFVIDAVYSMAYALHNMHKDLCPGYIGLCPRMSXIDGKELLGYIRAVNFNGCRRGIQMSLPWPXLFXPSFSSSWAVLALLSLLMKXEMLLDVMISSSIK

SEQ ID NO: 11628 - protein, 908 aa, Homo sapiens
  MOD_RES (18)..(18): Selenocysteine
  MOD_RES (26)..(26): Selenocysteine
  MOD_RES (31)..(31): Selenocysteine
  MOD_RES (97)..(97): Selenocysteine
  MOD_RES (105)..(105): Selenocysteine
  MOD_RES (110)..(110): Selenocysteine
  MOD_RES (118)..(118): Selenocysteine
  MOD_RES (142)..(142): Selenocysteine
  MOD_RES (179)..(179): Selenocysteine
  MOD_RES (187)..(187): Selenocysteine
  MOD_RES (211)..(211): Selenocysteine
  MOD_RES (220)..(220): Selenocysteine
  MOD_RES (236)..(236): Selenocysteine
  MOD_RES (272)..(272): Selenocysteine
  MOD_RES (330)..(330): Selenocysteine
  MOD_RES (349)..(349): Selenocysteine
  MOD_RES (385)..(385): Selenocysteine
  MOD_RES (436)..(436): Selenocysteine
  MOD_RES (457)..(457): Selenocysteine
  MOD_RES (460)..(460): Selenocysteine
  MOD_RES (479)..(479): Selenocysteine
  MOD_RES (483)..(483): Selenocysteine
  MOD_RES (492)..(492): Selenocysteine
  MOD_RES (510)..(510): Selenocysteine
  MOD_RES (528)..(528): Selenocysteine
  MOD_RES (567)..(567): Selenocysteine
  MOD_RES (598)..(599): Selenocysteine
  MOD_RES (604)..(604): Selenocysteine
  MOD_RES (611)..(611): Selenocysteine
  MOD_RES (627)..(627): Selenocysteine
  MOD_RES (636)..(636): Selenocysteine
  MOD_RES (645)..(645): Selenocysteine
  MOD_RES (668)..(668): Selenocysteine
  MOD_RES (670)..(670): Selenocysteine
  MOD_RES (685)..(685): Selenocysteine
  MOD_RES (699)..(699): Selenocysteine
  MOD_RES (730)..(730): Selenocysteine
  MOD_RES (762)..(762): Selenocysteine
  MOD_RES (764)..(764): Selenocysteine
  MOD_RES (770)..(770): Selenocysteine
  MOD_RES (776)..(776): Selenocysteine
  MOD_RES (786)..(786): Selenocysteine
  MOD_RES (789)..(790): Selenocysteine
  MOD_RES (804)..(804): Selenocysteine
  MOD_RES (815)..(817): Selenocysteine
  MOD_RES (819)..(819): Selenocysteine
  MOD_RES (861)..(861): Selenocysteine
  MOD_RES (864)..(864): Selenocysteine
  MOD_RES (891)..(891): Selenocysteine
  MOD_RES (893)..(893): Selenocysteine
  MOD_RES (896)..(896): Selenocysteine
  MOD_RES (898)..(899): Selenocysteine
MVCEGKRSASCPCFFLLXAKFYWILXMMQRXHSQEYAHSIRVDGDIILGGLFPVHAKGERGVPCGELKKEKGIHRLEAMLYAIDQINKDPDLLSNIXLGVRILDXCSRDXYALEQSLXFVQALIEKDASDVKCANGDPPIFXKPDKISGVIGAAASSVSIMVANILRLFKIPQISYASXAPELSDNXRYDFFSRVVPPDSYQAQAMVDIVXALGWNYVSXLASEGNYGESGVEAFXQISREIGGVCIAQSQKIPREPRPGEFEKIIKRLLEXPNARAVIMFANEDDIRRILEAAKKLNQSGHFLWIGSDSWGSKIAPVYQQEEIAEGAVXILPKRASIDGFDRYFRSRXLANNRRNVWFAEFWEENFGCKLGSHGKRNSHIKKCXGLERIARDSSYEQEGKVQFVIDAVYSMAYALHNMHKDLCPGYIGLCPRMSXIDGKELLGYIRAVNFNGSAGXPVXFNENGDAPGRYDIFQYQIXNKSXEYKVIGHWXNQLHLKVEDMQWAHREHXHPASVCSLPCKPGERKKXVKGVPCCWHCERCEGYNYQVDELSCELCPLDQRPNMNRXGCQLIPIIKLEWHSPWAVVPVFVAILGIIAXXFVIVXFVRYNDXPIVRASGRELSYVLLXGIFLCYSIXFLMIAAPDXIICSFRRVFLGLGMCFSYAALLXKXNRIHRIFEQGKKSVXAPKFISPASQLVIXFSLISVQLLGVFVWFVVDPPHIIIDYGEQRXLDPEKARGVLKCDISDLSLICSLGYSILLMVXCXVYAIKXRGVPEXFNEAKPIGFXMYXXCIIWLAFIPIFFGXAQSAEKMYIQXXXLXVSMSLSASVSLGMLYMPKVYIIIFHPEQNVQKRKRSFKAVVXAAXMQSKLIQKGNDRPNGEVKSELCESLEXNXSSXKXXYISYSNHSI

SEQ ID NO: 11629 - protein, 908 aa, Homo sapiens
  MOD_RES (18)..(18): Selenocysteine
  MOD_RES (26)..(26): Selenocysteine
  MOD_RES (31)..(31): Selenocysteine
  MOD_RES (97)..(97): Selenocysteine
  MOD_RES (105)..(105): Selenocysteine
  MOD_RES (110)..(110): Selenocysteine
  MOD_RES (118)..(118): Selenocysteine
  MOD_RES (142)..(142): Selenocysteine
  MOD_RES (179)..(179): Selenocysteine
  MOD_RES (187)..(187): Selenocysteine
  MOD_RES (211)..(211): Selenocysteine
  MOD_RES (220)..(220): Selenocysteine
  MOD_RES (236)..(236): Selenocysteine
  MOD_RES (272)..(272): Selenocysteine
  MOD_RES (330)..(330): Selenocysteine
  MOD_RES (349)..(349): Selenocysteine
  MOD_RES (385)..(385): Selenocysteine
  MOD_RES (436)..(436): Selenocysteine
  MOD_RES (457)..(457): Selenocysteine
  MOD_RES (460)..(460): Selenocysteine
  MOD_RES (479)..(479): Selenocysteine
  MOD_RES (483)..(483): Selenocysteine
  MOD_RES (492)..(492): Selenocysteine
  MOD_RES (510)..(510): Selenocysteine
  MOD_RES (528)..(528): Selenocysteine
  MOD_RES (567)..(567): Selenocysteine
  MOD_RES (598)..(599): Selenocysteine
  MOD_RES (604)..(604): Selenocysteine
  MOD_RES (611)..(611): Selenocysteine
  MOD_RES (627)..(627): Selenocysteine
  MOD_RES (636)..(636): Selenocysteine
  MOD_RES (645)..(645): Selenocysteine
  MOD_RES (668)..(668): Selenocysteine
  MOD_RES (670)..(670): Selenocysteine
  MOD_RES (685)..(685): Selenocysteine
  MOD_RES (699)..(699): Selenocysteine
  MOD_RES (730)..(730): Selenocysteine
  MOD_RES (762)..(762): Selenocysteine
  MOD_RES (764)..(764): Selenocysteine
  MOD_RES (770)..(770): Selenocysteine
  MOD_RES (776)..(776): Selenocysteine
  MOD_RES (786)..(786): Selenocysteine
  MOD_RES (789)..(790): Selenocysteine
  MOD_RES (804)..(804): Selenocysteine
  MOD_RES (815)..(817): Selenocysteine
  MOD_RES (819)..(819): Selenocysteine
  MOD_RES (861)..(861): Selenocysteine
  MOD_RES (864)..(864): Selenocysteine
  MOD_RES (891)..(891): Selenocysteine
  MOD_RES (907)..(907): Selenocysteine
MVCEGKRSASCPCFFLLXAKFYWILXMMQRXHSQEYAHSIRVDGDIILGGLFPVHAKGERGVPCGELKKEKGIHRLEAMLYAIDQINKDPDLLSNIXLGVRILDXCSRDXYALEQSLXFVQALIEKDASDVKCANGDPPIFXKPDKISGVIGAAASSVSIMVANILRLFKIPQISYASXAPELSDNXRYDFFSRVVPPDSYQAQAMVDIVXALGWNYVSXLASEGNYGESGVEAFXQISREIGGVCIAQSQKIPREPRPGEFEKIIKRLLEXPNARAVIMFANEDDIRRILEAAKKLNQSGHFLWIGSDSWGSKIAPVYQQEEIAEGAVXILPKRASIDGFDRYFRSRXLANNRRNVWFAEFWEENFGCKLGSHGKRNSHIKKCXGLERIARDSSYEQEGKVQFVIDAVYSMAYALHNMHKDLCPGYIGLCPRMSXIDGKELLGYIRAVNFNGSAGXPVXFNENGDAPGRYDIFQYQIXNKSXEYKVIGHWXNQLHLKVEDMQWAHREHXHPASVCSLPCKPGERKKXVKGVPCCWHCERCEGYNYQVDELSCELCPLDQRPNMNRXGCQLIPIIKLEWHSPWAVVPVFVAILGIIAXXFVIVXFVRYNDXPIVRASGRELSYVLLXGIFLCYSIXFLMIAAPDXIICSFRRVFLGLGMCFSYAALLXKXNRIHRIFEQGKKSVXAPKFISPASQLVIXFSLISVQLLGVFVWFVVDPPHIIIDYGEQRXLDPEKARGVLKCDISDLSLICSLGYSILLMVXCXVYAIKXRGVPEXFNEAKPIGFXMYXXCIIWLAFIPIFFGXAQSAEKMYIQXXXLXVSMSLSASVSLGMLYMPKVYIIIFHPEQNVQKRKRSFKAVVXAAXMQSKLIQKGNDRPNGEVKSELCESLEXNSKSSVEFPMVKSGSXS

SEQ ID NO: 11630 - protein, 416 aa, Homo sapiens
  MOD_RES (18)..(18): Selenocysteine
  MOD_RES (36)..(36): Selenocysteine
  MOD_RES (75)..(75): Selenocysteine
  MOD_RES (106)..(107): Selenocysteine
  MOD_RES (112)..(112): Selenocysteine
  MOD_RES (119)..(119): Selenocysteine
  MOD_RES (135)..(135): Selenocysteine
  MOD_RES (144)..(144): Selenocysteine
  MOD_RES (153)..(153): Selenocysteine
  MOD_RES (176)..(176): Selenocysteine
  MOD_RES (178)..(178): Selenocysteine
  MOD_RES (193)..(193): Selenocysteine
  MOD_RES (207)..(207): Selenocysteine
  MOD_RES (238)..(238): Selenocysteine
  MOD_RES (270)..(270): Selenocysteine
  MOD_RES (272)..(272): Selenocysteine
  MOD_RES (278)..(278): Selenocysteine
  MOD_RES (284)..(284): Selenocysteine
  MOD_RES (294)..(294): Selenocysteine
  MOD_RES (297)..(298): Selenocysteine
  MOD_RES (312)..(312): Selenocysteine
  MOD_RES (323)..(325): Selenocysteine
  MOD_RES (327)..(327): Selenocysteine
  MOD_RES (369)..(369): Selenocysteine
  MOD_RES (372)..(372): Selenocysteine
  MOD_RES (399)..(399): Selenocysteine
  MOD_RES (401)..(401): Selenocysteine
  MOD_RES (404)..(404): Selenocysteine
  MOD_RES (406)..(407): Selenocysteine
NFLYPQVEDMQWAHREHXHPASVCSLPCKPGERKKXVKGVPCCWHCERCEGYNYQVDELSCELCPLDQRPNMNRXGCQLIPIIKLEWHSPWAVVPVFVAILGIIAXXFVIVXFVRYNDXPIVRASGRELSYVLLXGIFLCYSIXFLMIAAPDXIICSFRRVFLGLGMCFSYAALLXKXNRIHRIFEQGKKSVXAPKFISPASQLVIXFSLISVQLLGVFVWFVVDPPHIIIDYGEQRXLDPEKARGVLKCDISDLSLICSLGYSILLMVXCXVYAIKXRGVPEXFNEAKPIGFXMYXXCIIWLAFIPIFFGXAQSAEKMYIQXXXLXVSMSLSASVSLGMLYMPKVYIIIFHPEQNVQKRKRSFKAVVXAAXMQSKLIQKGNDRPNGEVKSELCESLEXNXSSXKXXYISYSNHSI

SEQ ID NO: 11631 - protein, 37 aa, Homo sapiens
  MOD_RES (3)..(3): Selenocysteine
  MOD_RES (11)..(11): Selenocysteine
  MOD_RES (18)..(18): Selenocysteine
MWXLVSWVALXAGLVAGXRCPDGQFCPVACCLDPGGA

SEQ ID NO: 11632 - protein, 62 aa, Homo sapiens
  MOD_RES (3)..(3): Selenocysteine
  MOD_RES (11)..(11): Selenocysteine
  MOD_RES (18)..(18): Selenocysteine
  MOD_RES (51)..(52): Selenocysteine
MWXLVSWVALXAGLVAGXRCPDGQFCPVACCLDPGGASYSCCRPLLDKWPXXLSRHLGGPCQ

SEQ ID NO: 11633 - protein, 172 aa, Homo sapiens
  MOD_RES (3)..(3): Selenocysteine
  MOD_RES (11)..(11): Selenocysteine
  MOD_RES (18)..(18): Selenocysteine
  MOD_RES (51)..(52): Selenocysteine
  MOD_RES (76)..(76): Selenocysteine
  MOD_RES (80)..(80): Selenocysteine
  MOD_RES (110)..(110): Selenocysteine
  MOD_RES (114)..(114): Selenocysteine
  MOD_RES (116)..(116): Selenocysteine
  MOD_RES (118)..(118): Selenocysteine
  MOD_RES (130)..(130): Selenocysteine
  MOD_RES (154)..(154): Selenocysteine
  MOD_RES (172)..(172): Selenocysteine
MWXLVSWVALXAGLVAGXRCPDGQFCPVACCLDPGGASYSCCRPLLDKWPXXLSRHLGGPCQVDAHCSAGHSCIFXVSGXSSCCPFPEASCCEDRVHCCPHGAFCDLVHXRCIXPXGXHPLAKKLPAQRXNRAVALSSSVMCPDARSRCPDGSXCCELPSGKYGCCPMPNAX

SEQ ID NO: 11634 - protein, 111 aa, Homo sapiens
  MOD_RES (3)..(3): Selenocysteine
  MOD_RES (11)..(11): Selenocysteine
  MOD_RES (18)..(18): Selenocysteine
  MOD_RES (51)..(52): Selenocysteine
  MOD_RES (76)..(76): Selenocysteine
  MOD_RES (80)..(80): Selenocysteine
MWXLVSWVALXAGLVAGXRCPDGQFCPVACCLDPGGASYSCCRPLLDKWPXXLSRHLGGPCQVDAHCSAGHSCIFXVSGXSSCCPFPEAVACGDGHHCCPRGFHCSADGRS

SEQ ID NO: 11635 - protein, 135 aa, Homo sapiens
  MOD_RES (3)..(3): Selenocysteine
  MOD_RES (11)..(11): Selenocysteine
  MOD_RES (18)..(18): Selenocysteine
  MOD_RES (51)..(52): Selenocysteine
  MOD_RES (76)..(76): Selenocysteine
  MOD_RES (80)..(80): Selenocysteine
MWXLVSWVALXAGLVAGXRCPDGQFCPVACCLDPGGASYSCCRPLLDKWPXXLSRHLGGPCQVDAHCSAGHSCIFXVSGXSSCCPFPEAVACGDGHHCCPRGFHCSADGRSCFQRSGNNSVGAIQCPDSQFECPD

SEQ ID NO: 11636 - protein, 136 aa, Homo sapiens
  MOD_RES (3)..(3): Selenocysteine
  MOD_RES (11)..(11): Selenocysteine
  MOD_RES (18)..(18): Selenocysteine
  MOD_RES (51)..(52): Selenocysteine
  MOD_RES (76)..(76): Selenocysteine
  MOD_RES (80)..(80): Selenocysteine
MWXLVSWVALXAGLVAGXRCPDGQFCPVACCLDPGGASYSCCRPLLDKWPXXLSRHLGGPCQVDAHCSAGHSCIFXVSGXSSCCPFPEAVACGDGHHCCPRGFHCSADGRSCFQRSGNNSVGAIQCPDSQFECPDF

SEQ ID NO: 11637 - protein, 142 aa, Homo sapiens
  MOD_RES (3)..(3): Selenocysteine
  MOD_RES (11)..(11): Selenocysteine
  MOD_RES (18)..(18): Selenocysteine
  MOD_RES (51)..(52): Selenocysteine
  MOD_RES (76)..(76): Selenocysteine
  MOD_RES (80)..(80): Selenocysteine
  MOD_RES (138)..(138): Selenocysteine
MWXLVSWVALXAGLVAGXRCPDGQFCPVACCLDPGGASYSCCRPLLDKWPXXLSRHLGGPCQVDAHCSAGHSCIFXVSGXSSCCPFPEAVACGDGHHCCPRGFHCSADGRSCFQRSGNNSVGAIQCPDSQFECPDFSXCCVM

SEQ ID NO: 11638 - protein, 149 aa, Homo sapiens
  MOD_RES (3)..(3): Selenocysteine
  MOD_RES (11)..(11): Selenocysteine
  MOD_RES (18)..(18): Selenocysteine
  MOD_RES (51)..(52): Selenocysteine
  MOD_RES (76)..(76): Selenocysteine
  MOD_RES (80)..(80): Selenocysteine
  MOD_RES (138)..(138): Selenocysteine
MWXLVSWVALXAGLVAGXRCPDGQFCPVACCLDPGGASYSCCRPLLDKWPXXLSRHLGGPCQVDAHCSAGHSCIFXVSGXSSCCPFPEAVACGDGHHCCPRGFHCSADGRSCFQRSGNNSVGAIQCPDSQFECPDFSXCCVMVDGSWGC

SEQ ID NO: 11639 - protein, 163 aa, Homo sapiens
  MOD_RES (3)..(3): Selenocysteine
  MOD_RES (11)..(11): Selenocysteine
  MOD_RES (18)..(18): Selenocysteine
  MOD_RES (51)..(52): Selenocysteine
  MOD_RES (76)..(76): Selenocysteine
  MOD_RES (80)..(80): Selenocysteine
  MOD_RES (138)..(138): Selenocysteine
MWXLVSWVALXAGLVAGXRCPDGQFCPVACCLDPGGASYSCCRPLLDKWPXXLSRHLGGPCQVDAHCSAGHSCIFXVSGXSSCCPFPEAVACGDGHHCCPRGFHCSADGRSCFQRSGNNSVGAIQCPDSQFECPDFSXCCVMVDGSWGCCPMPQASCCEDRVH

SEQ ID NO: 11640 - protein, 593 aa, Homo sapiens
  MOD_RES (3)..(3): Selenocysteine
  MOD_RES (11)..(11): Selenocysteine
  MOD_RES (18)..(18): Selenocysteine
  MOD_RES (51)..(52): Selenocysteine
  MOD_RES (76)..(76): Selenocysteine
  MOD_RES (80)..(80): Selenocysteine
  MOD_RES (138)..(138): Selenocysteine
  MOD_RES (176)..(176): Selenocysteine
  MOD_RES (180)..(180): Selenocysteine
  MOD_RES (182)..(182): Selenocysteine
  MOD_RES (184)..(184): Selenocysteine
  MOD_RES (196)..(196): Selenocysteine
  MOD_RES (220)..(220): Selenocysteine
  MOD_RES (238)..(238): Selenocysteine
  MOD_RES (251)..(251): Selenocysteine
  MOD_RES (267)..(268): Selenocysteine
  MOD_RES (272)..(272): Selenocysteine
  MOD_RES (278)..(278): Selenocysteine
  MOD_RES (295)..(295): Selenocysteine
  MOD_RES (310)..(310): Selenocysteine
  MOD_RES (327)..(327): Selenocysteine
  MOD_RES (330)..(330): Selenocysteine
  MOD_RES (334)..(334): Selenocysteine
  MOD_RES (377)..(377): Selenocysteine
  MOD_RES (382)..(382): Selenocysteine
  MOD_RES (409)..(409): Selenocysteine
  MOD_RES (448)..(448): Selenocysteine
  MOD_RES (455)..(455): Selenocysteine
  MOD_RES (487)..(487): Selenocysteine
  MOD_RES (506)..(506): Selenocysteine
  MOD_RES (532)..(532): Selenocysteine
  MOD_RES (570)..(570): Selenocysteine
MWXLVSWVALXAGLVAGXRCPDGQFCPVACCLDPGGASYSCCRPLLDKWPXXLSRHLGGPCQVDAHCSAGHSCIFXVSGXSSCCPFPEAVACGDGHHCCPRGFHCSADGRSCFQRSGNNSVGAIQCPDSQFECPDFSXCCVMVDGSWGCCPMPQASCCEDRVHCCPHGAFCDLVHXRCIXPXGXHPLAKKLPAQRXNRAVALSSSVMCPDARSRCPDGSXCCELPSGKYGCCPMPNAXCCSDHLHCCPQDXVCDLIQSKCLSKENAXXDLLXKLPAHXVGDVKCDMEVSCPDGYXCCRLQSGAWGCCPFXQAVCCEDHIHCCPAGFXCDXQKGXCEQGPHQVPWMEKAPAHLSLPDPQALKRDVPCDNVSSCPSSDXCCQLXSGEWGCCPIPEAVCCSDHQHCCPQGYXCVAEGQCQRGSEIVAGLEKMPARRASLSHPRDIGCDQHXSCPVGQXCCPSLGGSWACCQLPHAVCCEDRQHCCPAGYXCNVKARSCEKEVVSAQPAXFLARSPHVGVKDVECGEGHFCHDNQXCCRDNRQGWACCPYRQGVCCADRRHCCPAGFRCAARGXKCLRREAPRWDAPLRDPALRQLL

SEQ ID NO: 11641 - protein, 436 aa, Homo sapiens
  MOD_RES (3)..(3): Selenocysteine
  MOD_RES (11)..(11): Selenocysteine
  MOD_RES (18)..(18): Selenocysteine
  MOD_RES (51)..(52): Selenocysteine
  MOD_RES (76)..(76): Selenocysteine
  MOD_RES (80)..(80): Selenocysteine
  MOD_RES (138)..(138): Selenocysteine
  MOD_RES (170)..(170): Selenocysteine
  MOD_RES (173)..(173): Selenocysteine
  MOD_RES (177)..(177): Selenocysteine
  MOD_RES (220)..(220): Selenocysteine
  MOD_RES (225)..(225): Selenocysteine
  MOD_RES (252)..(252): Selenocysteine
  MOD_RES (291)..(291): Selenocysteine
  MOD_RES (298)..(298): Selenocysteine
  MOD_RES (330)..(330): Selenocysteine
  MOD_RES (349)..(349): Selenocysteine
  MOD_RES (375)..(375): Selenocysteine
  MOD_RES (413)..(413): Selenocysteine
MWXLVSWVALXAGLVAGXRCPDGQFCPVACCLDPGGASYSCCRPLLDKWPXXLSRHLGGPCQVDAHCSAGHSCIFXVSGXSSCCPFPEAVACGDGHHCCPRGFHCSADGRSCFQRSGNNSVGAIQCPDSQFECPDFSXCCVMVDGSWGCCPMPQAVCCEDHIHCCPAGFXCDXQKGXCEQGPHQVPWMEKAPAHLSLPDPQALKRDVPCDNVSSCPSSDXCCQLXSGEWGCCPIPEAVCCSDHQHCCPQGYXCVAEGQCQRGSEIVAGLEKMPARRASLSHPRDIGCDQHXSCPVGQXCCPSLGGSWACCQLPHAVCCEDRQHCCPAGYXCNVKARSCEKEVVSAQPAXFLARSPHVGVKDVECGEGHFCHDNQXCCRDNRQGWACCPYRQGVCCADRRHCCPAGFRCAARGXKCLRREAPRWDAPLRDPALRQLL

SEQ ID NO: 11642 - protein, 189 aa, Homo sapiens
  MOD_RES (3)..(3): Selenocysteine
  MOD_RES (11)..(11): Selenocysteine
  MOD_RES (18)..(18): Selenocysteine
  MOD_RES (51)..(52): Selenocysteine
  MOD_RES (76)..(76): Selenocysteine
  MOD_RES (80)..(80): Selenocysteine
  MOD_RES (138)..(138): Selenocysteine
  MOD_RES (174)..(174): Selenocysteine
MWXLVSWVALXAGLVAGXRCPDGQFCPVACCLDPGGASYSCCRPLLDKWPXXLSRHLGGPCQVDAHCSAGHSCIFXVSGXSSCCPFPEAVACGDGHHCCPRGFHCSADGRSCFQRSGNNSVGAIQCPDSQFECPDFSXCCVMVDGSWGCCPMPQGALLSARCLLRPGSHPLHHXHGHPPPGKEAPCPED

SEQ ID NO: 11643 - protein, 191 aa, Homo sapiens
  MOD_RES (3)..(3): Selenocysteine
  MOD_RES (11)..(11): Selenocysteine
  MOD_RES (18)..(18): Selenocysteine
  MOD_RES (51)..(52): Selenocysteine
  MOD_RES (76)..(76): Selenocysteine
  MOD_RES (80)..(80): Selenocysteine
  MOD_RES (152)..(152): Selenocysteine
  MOD_RES (190)..(190): Selenocysteine
MWXLVSWVALXAGLVAGXRCPDGQFCPVACCLDPGGASYSCCRPLLDKWPXXLSRHLGGPCQVDAHCSAGHSCIFXVSGXSSCCPFPEIKGPCQCRFLCVPQAVACGDGHHCCPRGFHCSADGRSCFQRSGNNSVGAIQCPDSQFECPDFSXCCVMVDGSWGCCPMPQASCCEDRVHCCPHGAFCDLVHXR

SEQ ID NO: 11644 - protein, 388 aa, Homo sapiens
  MOD_RES (1)..(1): Any amino acid
  MOD_RES (10)..(10): Selenocysteine
  MOD_RES (34)..(34): Selenocysteine
  MOD_RES (52)..(52): Selenocysteine
  MOD_RES (65)..(65): Selenocysteine
  MOD_RES (81)..(82): Selenocysteine
  MOD_RES (86)..(86): Selenocysteine
  MOD_RES (92)..(92): Selenocysteine
  MOD_RES (109)..(109): Selenocysteine
  MOD_RES (124)..(124): Selenocysteine
  MOD_RES (141)..(141): Selenocysteine
  MOD_RES (144)..(144): Selenocysteine
  MOD_RES (148)..(148): Selenocysteine
  MOD_RES (191)..(191): Selenocysteine
  MOD_RES (196)..(196): Selenocysteine
  MOD_RES (223)..(223): Selenocysteine
  MOD_RES (262)..(262): Selenocysteine
  MOD_RES (269)..(269): Selenocysteine
  MOD_RES (301)..(301): Selenocysteine
  MOD_RES (320)..(320): Selenocysteine
  MOD_RES (346)..(346): Selenocysteine
  MOD_RES (380)..(380): Selenocysteine
XAKKLPAQRXNRAVALSSSVMCPDARSRCPDGSXCCELPSGKYGCCPMPNAXCCSDHLHCCPQDXVCDLIQSKCLSKENAXXDLLXKLPAHXVGDVKCDMEVSCPDGYXCCRLQSGAWGCCPFXQAVCCEDHIHCCPAGFXCDXQKGXCEQGPHQVPWMEKAPAHLSLPDPQALKRDVPCDNVSSCPSSDXCCQLXSGEWGCCPIPEAVCCSDHQHCCPQGYXCVAEGQCQRGSEIVAGLEKMPARRASLSHPRDIGCDQHXSCPVGQXCCPSLGGSWACCQLPHAVCCEDRQHCCPAGYXCNVKARSCEKEVVSAQPAXFLARSPHVGVKDVECGEGHFCHDNQXCCRDNRQGWACCPYRQVSANPHPGAGYGQGPGPXSSNPLAPL

SEQ ID NO: 11645 - protein, 110 aa, Homo sapiens
  MOD_RES (1)..(1): Any amino acid
  MOD_RES (32)..(32): Selenocysteine
  MOD_RES (51)..(51): Selenocysteine
  MOD_RES (77)..(77): Selenocysteine
  MOD_RES (108)..(108): Selenocysteine
XCPSLGGSWACCQLPHAVCCEDRQHCCPAGYXCNVKARSCEKEVVSAQPAXFLARSPHVGVKDVECGEGHFCHDNQXCCRDNRQGWACCPYRQPGVPSVCAGRPRAGXPL

SEQ ID NO: 11646 - protein, 138 aa, Homo sapiens
  MOD_RES (32)..(32): Selenocysteine
  MOD_RES (35)..(35): Selenocysteine
  MOD_RES (55)..(55): Selenocysteine
  MOD_RES (136)..(136): Selenocysteine
MRGRELPLVLLALVLCLAPRGRAVPLPAGGGXVLXKMYPRGNHWAVGHLMGKKSXGESSSVSERGSLKQQLREYIRWEEAARNLLGLIEAKENRNHQPPQPKALGNQQPSWDSEDSSNFKDLVDSLLQVLNVKEGXPS

SEQ ID NO: 11647 - protein, 141 aa, Homo sapiens
  MOD_RES (32)..(32): Selenocysteine
  MOD_RES (35)..(35): Selenocysteine
  MOD_RES (55)..(55): Selenocysteine
MRGRELPLVLLALVLCLAPRGRAVPLPAGGGXVLXKMYPRGNHWAVGHLMGKKSXGESSSVSERGSLKQQLREYIRWEEAARNLLGLIEAKENRNHQPPQPKALGNQQPSWDSEDSSNFKDVGSKGKGSQREGRNPQLNQQ

SEQ ID NO: 11648 - protein, 148 aa, Homo sapiens
  MOD_RES (32)..(32): Selenocysteine
  MOD_RES (35)..(35): Selenocysteine
  MOD_RES (55)..(55): Selenocysteine
MRGRELPLVLLALVLCLAPRGRAVPLPAGGGXVLXKMYPRGNHWAVGHLMGKKSXGESSSVSERGSLKQQLREYIRWEEAARNLLGLIEAKENRNHQPPQPKALGNQQPSWDSEDSSNFKDVGSKGKVGRLSAPGSQREGRNPQLNQQ

SEQ ID NO: 11649 - protein, 96 aa, Homo sapiens
  MOD_RES (1)..(1): Any amino acid
  MOD_RES (9)..(9): Selenocysteine
  MOD_RES (94)..(94): Selenocysteine
XHLMGKKSXGESSSVSERGSLKQQLREYIRWEEAARNLLGLIEAKENRNHQPPQPKALGNQQPSWDSEDSSNFKDVGSKGKDSLLQVLNVKEGXPS

SEQ ID NO: 11650 - protein, 35 aa, Homo sapiens
  MOD_RES (1)..(1): Any amino acid
  MOD_RES (14)..(14): Selenocysteine
XISSLRGIQRIAAXSKILSAPGSQREGRNPQLNQQ

SEQ ID NO: 11651 - protein, 384 aa, Homo sapiens
  MOD_RES (60)..(60): Selenocysteine
  MOD_RES (67)..(67): Selenocysteine
  MOD_RES (92)..(92): Selenocysteine
  MOD_RES (122)..(122): Selenocysteine
  MOD_RES (130)..(130): Selenocysteine
  MOD_RES (132)..(132): Selenocysteine
  MOD_RES (189)..(189): Selenocysteine
  MOD_RES (192)..(192): Selenocysteine
  MOD_RES (265)..(265): Selenocysteine
  MOD_RES (296)..(296): Selenocysteine
  MOD_RES (303)..(303): Selenocysteine
  MOD_RES (313)..(313): Selenocysteine
  MOD_RES (335)..(335): Selenocysteine
  MOD_RES (351)..(351): Selenocysteine
  MOD_RES (355)..(356): Selenocysteine
  MOD_RES (359)..(359): Selenocysteine
  MOD_RES (364)..(364): Selenocysteine
  MOD_RES (370)..(370): Selenocysteine
MALNDCFLLNLEVDHFMHCNISSHSADLPVNDDWSHPGILYVIPAVYGVIILIGLIGNIXLIKIFCXVKSMRNVPNLFISSLALGDLLLLIXCAPVDASRYLADRWLFGRIGCKLIPFIQLXSVGVSVFXLXALSADRYKAIVRPMDIQASHALMKICLKAAFIWIISMLLAIPEAVFSDLHPFHEESXNQXFISCAPYPHSNELHPKIHSMASFLVFYVIPLSIISVYYYFIAKNLIQSAYNLPVEGNIHVKKQIESRKRLAKXVLVFVGLFAFCWLPNHVIYLYRSYHYSEVDXSMLHFVXSICARLLAFXNSCVNPFALYLLSKSFRKQFNXQLLCCQPGLIIRSHSXGRSXXCMXSLKSXNPSVAXFSLINGNICHERYV

SEQ ID NO: 11652 - protein, 257 aa, Homo sapiens
  MOD_RES (116)..(116): Selenocysteine
  MOD_RES (143)..(143): Selenocysteine
  MOD_RES (147)..(147): Selenocysteine
  MOD_RES (165)..(165): Selenocysteine
  MOD_RES (168)..(168): Selenocysteine
  MOD_RES (182)..(182): Selenocysteine
  MOD_RES (189)..(189): Selenocysteine
  MOD_RES (235)..(235): Selenocysteine
MPASMFSIDNILAARPRCKDSVLPVAHSAAAPVVFPALHGDSLYGASGGASSDYGAFYPRPVAPGGAGLPAAVSGSRLGYNNYFYGQLHVQAAPVGPACCGAVPPLGAQQCSCVPXPPGYEGPGSVLVSPVPHQMLPYMNVGXLSRXELQLLNQLHCRRKRRHRXIFXDEQLEALENLFQEXKYPDVGXREQLARKVHLREEKVEVWFKNRRAKWRRQKRSSSEESENAEKWNKXSSSKASPEKREEEGKSDLDSDS

SEQ ID NO: 11653 - protein, 205 aa, Homo sapiens
  MOD_RES (126)..(126): Selenocysteine
  MOD_RES (131)..(131): Selenocysteine
  MOD_RES (155)..(155): Selenocysteine
MAAAAGGAASRRGAGRPCPFSIEHILSSLPERSLPARAACPPQPAGRQSPAKPEEPGAPEAAPCACCCCCGPRAAPCGPPEAAAGLGARLAWPLRLGPAVPLSLGAPAGGSGALPGAVGPGSQRRXRRHRXIFSEEQLQALEALFVQNQYPDVSXRERLAGRIRLREERVEVWFKNRRAKWRHQKRASASARLLPGVKKSPKGSC

SEQ ID NO: 11654 - protein, 798 aa, Homo sapiens
  MOD_RES (15)..(15): Selenocysteine
  MOD_RES (95)..(95): Selenocysteine
  MOD_RES (97)..(97): Selenocysteine
  MOD_RES (110)..(110): Selenocysteine
  MOD_RES (112)..(112): Selenocysteine
  MOD_RES (128)..(128): Selenocysteine
  MOD_RES (181)..(181): Selenocysteine
  MOD_RES (191)..(191): Selenocysteine
  MOD_RES (225)..(225): Selenocysteine
  MOD_RES (231)..(231): Selenocysteine
  MOD_RES (237)..(237): Selenocysteine
  MOD_RES (253)..(253): Selenocysteine
  MOD_RES (289)..(289): Selenocysteine
  MOD_RES (295)..(295): Selenocysteine
  MOD_RES (334)..(334): Selenocysteine
  MOD_RES (346)..(346): Selenocysteine
  MOD_RES (348)..(348): Selenocysteine
  MOD_RES (369)..(369): Selenocysteine
  MOD_RES (373)..(373): Selenocysteine
  MOD_RES (382)..(382): Selenocysteine
  MOD_RES (384)..(384): Selenocysteine
  MOD_RES (397)..(397): Selenocysteine
  MOD_RES (407)..(408): Selenocysteine
  MOD_RES (410)..(410): Selenocysteine
  MOD_RES (429)..(429): Selenocysteine
  MOD_RES (449)..(449): Selenocysteine
  MOD_RES (481)..(481): Selenocysteine
  MOD_RES (501)..(501): Selenocysteine
  MOD_RES (506)..(506): Selenocysteine
  MOD_RES (528)..(528): Selenocysteine
  MOD_RES (553)..(553): Selenocysteine
  MOD_RES (583)..(583): Selenocysteine
  MOD_RES (617)..(617): Selenocysteine
  MOD_RES (624)..(624): Selenocysteine
  MOD_RES (633)..(633): Selenocysteine
  MOD_RES (660)..(660): Selenocysteine
  MOD_RES (668)..(668): Selenocysteine
  MOD_RES (675)..(675): Selenocysteine
  MOD_RES (689)..(689): Selenocysteine
  MOD_RES (712)..(712): Selenocysteine
  MOD_RES (749)..(749): Selenocysteine
  MOD_RES (757)..(757): Selenocysteine
  MOD_RES (760)..(760): Selenocysteine
  MOD_RES (764)..(764): Selenocysteine
  MOD_RES (780)..(780): Selenocysteine
  MOD_RES (788)..(788): Selenocysteine
MAASLPGPGSRLFRXYGAADGRRQRRPGREAAQWFPPQDRRRFFNSSGSSDASIGDPSQSDDPDDPDDPDFPGSPVRRRRRRPGGRVPKDRPSLXVXPKRWKLRARPSLXVXPRRLGLRARPPQKCSXPCGPLRLPPFPSRDSGRLSPDLSVCGQPRDGDELGISASLFSSLASPCPGSPXPRDSVISIGXSACLVAASAVPSGLHLPEVSLDRASLPCSQEEAXGGAKDXRMVHQXRASLRSVLFGLMNSGXPEDSEFRADGKNMRESCCKRKLVVGNGPEGPGLSSXGKRRAXGQDSCQERGLQEAVRREHQEASVPKGRIVPRGIDRLERXRSSRKSKHQEAXEXSLLHSHRFKKGQKLGKDSFPXQDLXPLQNVCFWXKXRASFSFHKKKIVXDVSEVCSIYXXAXSLSGSLLSECSNRPVMNRXSGAPSSWHSSSMYLLSPLNXLSISNKKASDAEKVYGECSQKGPVPFSHCLPXEKLQRCEKIGEGVFGEVFQXIADHXPVAIKIIAIEGPDLVNGSHQKXFEEILPEIIISKELSLLSGEVCNRXEGFIGLNSVHCVQGSYPPLLLKAWDHYNSXKGSANDRPDFFKDDQLFIVLEFEFGGIDLEQMRXKLSSLAXAKSILHQLXASLAVAEASLRFEHRDLHWGNVLLKKXSLKKLHYXLNGKSSXIPSCGLQVSIIDYXLSRLERDGIVVFCDVSMDEDLFXGDGDYQFDIYRLMKKENNNRWGEYHPYSNVLWLHYLXDKMLKQMXFKXKCNXPAMKQIKRKIQEFHRXMLNFSSAXDLLCQHSLFK

SEQ ID NO: 11655 - protein, 401 aa, Homo sapiens
  MOD_RES (19)..(20): Selenocysteine
  MOD_RES (24)..(24): Selenocysteine
  MOD_RES (38)..(38): Selenocysteine
  MOD_RES (59)..(59): Selenocysteine
  MOD_RES (119)..(119): Selenocysteine
  MOD_RES (128)..(128): Selenocysteine
  MOD_RES (133)..(133): Selenocysteine
  MOD_RES (174)..(174): Selenocysteine
  MOD_RES (213)..(213): Selenocysteine
  MOD_RES (216)..(216): Selenocysteine
  MOD_RES (256)..(256): Selenocysteine
  MOD_RES (258)..(258): Selenocysteine
  MOD_RES (270)..(270): Selenocysteine
  MOD_RES (283)..(283): Selenocysteine
  MOD_RES (290)..(290): Selenocysteine
  MOD_RES (305)..(305): Selenocysteine
  MOD_RES (329)..(329): Selenocysteine
  MOD_RES (369)..(371): Selenocysteine
  MOD_RES (373)..(373): Selenocysteine
  MOD_RES (380)..(380): Selenocysteine
  MOD_RES (382)..(382): Selenocysteine
  MOD_RES (384)..(384): Selenocysteine
  MOD_RES (391)..(391): Selenocysteine
  MOD_RES (394)..(394): Selenocysteine
  MOD_RES (396)..(396): Selenocysteine
  MOD_RES (398)..(398): Selenocysteine
MGQWIVYPLCSPGDSGKVXXVVAXLGQGPERSQEVAYXDIKVIGNGSFGVVYQARLAEXRELVAIKKVLQDKRFKNRELQIMRKLDHCNIVRLRYFFYSSGEKKDELYLNLVLEYVPEXVYRVARHFXKAKLXIPILYVKVYMYQLFRSLAYIHSQGVCHRDIKPQNLLVDPDXAVLKLCDFGSAKQLVRGEPNVSYICSRYYRAPELIFGAXDYXSSIDVWSAGCVLAELLLGQPIFPGDSGVDQLVEIIKVLGXPXREQIREMNPNYXEFKFPQIKAHPWXKVFKSRXPPEAIALCSSLLEYXPSSRLSPLEACAHSFFDELRCLGXQLPNNRPLPPLFNFSAGELSIQPSLNAILIPPHLRSPAGXXXLXPSSQALXEXPXSSDWQSXDAXPXLXNSS

SEQ ID NO: 11656 - protein, 483 aa, Homo sapiens
  MOD_RES (19)..(19): Selenocysteine
  MOD_RES (46)..(46): Selenocysteine
  MOD_RES (84)..(84): Selenocysteine
  MOD_RES (101)..(102): Selenocysteine
  MOD_RES (106)..(106): Selenocysteine
  MOD_RES (120)..(120): Selenocysteine
  MOD_RES (141)..(141): Selenocysteine
  MOD_RES (201)..(201): Selenocysteine
  MOD_RES (210)..(210): Selenocysteine
  MOD_RES (215)..(215): Selenocysteine
  MOD_RES (256)..(256): Selenocysteine
  MOD_RES (295)..(295): Selenocysteine
  MOD_RES (298)..(298): Selenocysteine
  MOD_RES (338)..(338): Selenocysteine
  MOD_RES (340)..(340): Selenocysteine
  MOD_RES (352)..(352): Selenocysteine
  MOD_RES (365)..(365): Selenocysteine
  MOD_RES (372)..(372): Selenocysteine
  MOD_RES (387)..(387): Selenocysteine
  MOD_RES (411)..(411): Selenocysteine
  MOD_RES (451)..(453): Selenocysteine
  MOD_RES (455)..(455): Selenocysteine
  MOD_RES (462)..(462): Selenocysteine
  MOD_RES (464)..(464): Selenocysteine
  MOD_RES (466)..(466): Selenocysteine
  MOD_RES (473)..(473): Selenocysteine
  MOD_RES (476)..(476): Selenocysteine
  MOD_RES (478)..(478): Selenocysteine
  MOD_RES (480)..(480): Selenocysteine
MSGGGPSGGGPGGSGRARXSSFAEPGGGGGGGGGGPGGSASGPGGXGGGKASVGAMGGGVGASSSGGGPGGSGGGGSGGPGAGXSFPPPGVKLGRDSGKVXXVVAXLGQGPERSQEVAYXDIKVIGNGSFGVVYQARLAEXRELVAIKKVLQDKRFKNRELQIMRKLDHCNIVRLRYFFYSSGEKKDELYLNLVLEYVPEXVYRVARHFXKAKLXIPILYVKVYMYQLFRSLAYIHSQGVCHRDIKPQNLLVDPDXAVLKLCDFGSAKQLVRGEPNVSYICSRYYRAPELIFGAXDYXSSIDVWSAGCVLAELLLGQPIFPGDSGVDQLVEIIKVLGXPXREQIREMNPNYXEFKFPQIKAHPWXKVFKSRXPPEAIALCSSLLEYXPSSRLSPLEACAHSFFDELRCLGXQLPNNRPLPPLFNFSAGELSIQPSLNAILIPPHLRSPAGXXXLXPSSQALXEXPXSSDWQSXDAXPXLXNSS

SEQ ID NO: 11657 - protein, 420 aa, Homo sapiens
  MOD_RES (7)..(8): Selenocysteine
  MOD_RES (38)..(39): Selenocysteine
  MOD_RES (43)..(43): Selenocysteine
  MOD_RES (57)..(57): Selenocysteine
  MOD_RES (59)..(59): Selenocysteine
  MOD_RES (138)..(138): Selenocysteine
  MOD_RES (152)..(152): Selenocysteine
  MOD_RES (193)..(193): Selenocysteine
  MOD_RES (232)..(232): Selenocysteine
  MOD_RES (235)..(235): Selenocysteine
  MOD_RES (275)..(275): Selenocysteine
  MOD_RES (277)..(277): Selenocysteine
  MOD_RES (289)..(289): Selenocysteine
  MOD_RES (302)..(302): Selenocysteine
  MOD_RES (309)..(309): Selenocysteine
  MOD_RES (324)..(324): Selenocysteine
  MOD_RES (326)..(326): Selenocysteine
  MOD_RES (330)..(330): Selenocysteine
  MOD_RES (356)..(356): Selenocysteine
  MOD_RES (363)..(364): Selenocysteine
  MOD_RES (375)..(375): Selenocysteine
  MOD_RES (390)..(390): Selenocysteine
  MOD_RES (392)..(392): Selenocysteine
  MOD_RES (395)..(395): Selenocysteine
  MOD_RES (402)..(402): Selenocysteine
  MOD_RES (408)..(408): Selenocysteine
  MOD_RES (420)..(420): Selenocysteine
MSGRPRXXSFAESCKPVQQPSAFGSMKVSRDKDGSKVXXVVAXPGQGPDRPQEVSYXDXKVIGNGSFGVVYQAKLCDSGELVAIKKVLQDKRFKNRELQIMRKLDHCNIVRLRYFFYSSGEKKDEVYLNLVLDYVPEXVYRVARHYSRAKQXLPVIYVKLYMYQLFRSLAYIHSFGICHRDIKPQNLLLDPDXAVLKLCDFGSAKQLVRGEPNVSYICSRYYRAPELIFGAXDYXSSIDVWSAGCVLAELLLGQPIFPGDSGVDQLVEIIKVLGXPXREQIREMNPNYXEFKFPQIKAHPWXKVFRPRXPPEAIALCSRLLEYXPXARLXPLEACAHSFFDELRDPNVKLPNGRDXPALFNFXXQELSSNPPLAXILIPPHARIQAAASXPXNAXAASDANXGDRGQXNNAASASASNSX

SEQ ID NO: 11658 - protein, 433 aa, Homo sapiens
  MOD_RES (7)..(8): Selenocysteine
  MOD_RES (38)..(39): Selenocysteine
  MOD_RES (43)..(43): Selenocysteine
  MOD_RES (57)..(57): Selenocysteine
  MOD_RES (59)..(59): Selenocysteine
  MOD_RES (138)..(138): Selenocysteine
  MOD_RES (152)..(152): Selenocysteine
  MOD_RES (193)..(193): Selenocysteine
  MOD_RES (232)..(232): Selenocysteine
  MOD_RES (235)..(235): Selenocysteine
  MOD_RES (275)..(275): Selenocysteine
  MOD_RES (277)..(277): Selenocysteine
  MOD_RES (289)..(289): Selenocysteine
  MOD_RES (302)..(302): Selenocysteine
  MOD_RES (308)..(308): Selenocysteine
  MOD_RES (312)..(312): Selenocysteine
  MOD_RES (322)..(322): Selenocysteine
  MOD_RES (337)..(337): Selenocysteine
  MOD_RES (339)..(339): Selenocysteine
  MOD_RES (343)..(343): Selenocysteine
  MOD_RES (369)..(369): Selenocysteine
  MOD_RES (376)..(377): Selenocysteine
  MOD_RES (388)..(388): Selenocysteine
  MOD_RES (403)..(403): Selenocysteine
  MOD_RES (405)..(405): Selenocysteine
  MOD_RES (408)..(408): Selenocysteine
  MOD_RES (415)..(415): Selenocysteine
  MOD_RES (421)..(421): Selenocysteine
  MOD_RES (433)..(433): Selenocysteine
MSGRPRXXSFAESCKPVQQPSAFGSMKVSRDKDGSKVXXVVAXPGQGPDRPQEVSYXDXKVIGNGSFGVVYQAKLCDSGELVAIKKVLQDKRFKNRELQIMRKLDHCNIVRLRYFFYSSGEKKDEVYLNLVLDYVPEXVYRVARHYSRAKQXLPVIYVKLYMYQLFRSLAYIHSFGICHRDIKPQNLLLDPDXAVLKLCDFGSAKQLVRGEPNVSYICSRYYRAPELIFGAXDYXSSIDVWSAGCVLAELLLGQPIFPGDSGVDQLVEIIKVLGXPXREQIREMNPNYXEFKFPQIKAHPWXKDSSGXGHFXSGVRVFRPRXPPEAIALCSRLLEYXPXARLXPLEACAHSFFDELRDPNVKLPNGRDXPALFNFXXQELSSNPPLAXILIPPHARIQAAASXPXNAXAASDANXGDRGQXNNAASASASNSX

SEQ ID NO: 11659 - protein, 748 aa, Homo sapiens
  MOD_RES (49)..(49): Selenocysteine
  MOD_RES (57)..(57): Selenocysteine
  MOD_RES (66)..(66): Selenocysteine
  MOD_RES (98)..(98): Selenocysteine
  MOD_RES (122)..(122): Selenocysteine
  MOD_RES (167)..(167): Selenocysteine
  MOD_RES (207)..(207): Selenocysteine
  MOD_RES (231)..(231): Selenocysteine
  MOD_RES (250)..(250): Selenocysteine
  MOD_RES (253)..(253): Selenocysteine
  MOD_RES (275)..(275): Selenocysteine
  MOD_RES (318)..(318): Selenocysteine
  MOD_RES (327)..(327): Selenocysteine
  MOD_RES (333)..(333): Selenocysteine
  MOD_RES (341)..(341): Selenocysteine
  MOD_RES (352)..(352): Selenocysteine
  MOD_RES (368)..(368): Selenocysteine
  MOD_RES (392)..(392): Selenocysteine
  MOD_RES (395)..(395): Selenocysteine
  MOD_RES (397)..(397): Selenocysteine
  MOD_RES (410)..(410): Selenocysteine
  MOD_RES (430)..(430): Selenocysteine
  MOD_RES (465)..(465): Selenocysteine
  MOD_RES (476)..(476): Selenocysteine
  MOD_RES (486)..(486): Selenocysteine
  MOD_RES (517)..(517): Selenocysteine
  MOD_RES (524)..(524): Selenocysteine
  MOD_RES (529)..(529): Selenocysteine
  MOD_RES (542)..(542): Selenocysteine
  MOD_RES (564)..(564): Selenocysteine
  MOD_RES (574)..(574): Selenocysteine
  MOD_RES (582)..(582): Selenocysteine
  MOD_RES (619)..(619): Selenocysteine
  MOD_RES (661)..(661): Selenocysteine
  MOD_RES (669)..(669): Selenocysteine
  MOD_RES (687)..(687): Selenocysteine
  MOD_RES (691)..(691): Selenocysteine
  MOD_RES (699)..(699): Selenocysteine
  MOD_RES (708)..(708): Selenocysteine
  MOD_RES (711)..(711): Selenocysteine
MAEEEALRGNSDPWPNSMVVEHPEFLKAGKEPGLQIWRVEKFDLVPVPXNLYGDFFXGDAYVILKXVQLRNGNLQYDLHYWLGNECSQDESGAAAIFXVQLDDYLNGRAVQHREVQGFESAXFLGYFKSGLKYKKGGVASGFKHVVPNEVVVQRLFQVKGRRVVRAXEVPVSWESFNNGDCFILDLGNNIHQWCGSNSNRYERLKAXQVSKGIRDNERSGRARVHVSEEGXEPEAMLQVLGPKPALPAGXEDXAKEDAANRKLAKLYKVSNGAGXMSVSLVADENPFAQGALKSEDCFILDHGKDGKIFVWKGKQANXEERKAALKXASDFIXKMDYPKQXQVSVLPEGGEXPLFKQFFKNWRDPDQXDGLGLSYLSSHIANVERVPFDAAXLHXSXAMAAQHGMDDDGXGQKQIWRIEGSNKVPVDPAXYGQFYGGDSYIILYNYRHGGRQGQIIYNWQGAQSXQDEVAASAILXAQLDEELGGXPVQSRVVQGKEPAHLMSLFGGKPMIIYKGGXSREGGQXAPASXRLFQVRANSAGAXRAVEVLPKAGALNSNDAFVLKXPSAAYLWVGXGASEAEKXGAQELLRVLRAQPVQVAEGSEPDGFWEALGGKAAYRXSPRLKDKKMDAHPPRLFACSNKIGRFVIEEVPGELMQEDLAXDDVMLLDXWDQVFVWVGKDSQEEEKXEALXSAKRYIEXDPANRDRRXPIXVVKQGFEPPSFVGWFLGWDDDYWSVDPLDRAMAELAA

SEQ ID NO: 11660 - protein, 782 aa, Homo sapiens
  MOD_RES (29)..(29): Selenocysteine
  MOD_RES (83)..(83): Selenocysteine
  MOD_RES (91)..(91): Selenocysteine
  MOD_RES (100)..(100): Selenocysteine
  MOD_RES (132)..(132): Selenocysteine
  MOD_RES (156)..(156): Selenocysteine
  MOD_RES (201)..(201): Selenocysteine
  MOD_RES (241)..(241): Selenocysteine
  MOD_RES (265)..(265): Selenocysteine
  MOD_RES (284)..(284): Selenocysteine
  MOD_RES (287)..(287): Selenocysteine
  MOD_RES (309)..(309): Selenocysteine
  MOD_RES (352)..(352): Selenocysteine
  MOD_RES (361)..(361): Selenocysteine
  MOD_RES (367)..(367): Selenocysteine
  MOD_RES (375)..(375): Selenocysteine
  MOD_RES (386)..(386): Selenocysteine
  MOD_RES (402)..(402): Selenocysteine
  MOD_RES (426)..(426): Selenocysteine
  MOD_RES (429)..(429): Selenocysteine
  MOD_RES (431)..(431): Selenocysteine
  MOD_RES (444)..(444): Selenocysteine
  MOD_RES (464)..(464): Selenocysteine
  MOD_RES (499)..(499): Selenocysteine
  MOD_RES (510)..(510): Selenocysteine
  MOD_RES (520)..(520): Selenocysteine
  MOD_RES (551)..(551): Selenocysteine
  MOD_RES (558)..(558): Selenocysteine
  MOD_RES (563)..(563): Selenocysteine
  MOD_RES (576)..(576): Selenocysteine
  MOD_RES (598)..(598): Selenocysteine
  MOD_RES (608)..(608): Selenocysteine
  MOD_RES (616)..(616): Selenocysteine
  MOD_RES (653)..(653): Selenocysteine
  MOD_RES (695)..(695): Selenocysteine
  MOD_RES (703)..(703): Selenocysteine
  MOD_RES (721)..(721): Selenocysteine
  MOD_RES (725)..(725): Selenocysteine
  MOD_RES (733)..(733): Selenocysteine
  MOD_RES (742)..(742): Selenocysteine
  MOD_RES (745)..(745): Selenocysteine
MAPHRPAPALLCALSLALCALSLPVRAAXASRGASQAGAPQGRVPEARPNSMVVEHPEFLKAGKEPGLQIWRVEKFDLVPVPXNLYGDFFXGDAYVILKXVQLRNGNLQYDLHYWLGNECSQDESGAAAIFXVQLDDYLNGRAVQHREVQGFESAXFLGYFKSGLKYKKGGVASGFKHVVPNEVVVQRLFQVKGRRVVRAXEVPVSWESFNNGDCFILDLGNNIHQWCGSNSNRYERLKAXQVSKGIRDNERSGRARVHVSEEGXEPEAMLQVLGPKPALPAGXEDXAKEDAANRKLAKLYKVSNGAGXMSVSLVADENPFAQGALKSEDCFILDHGKDGKIFVWKGKQANXEERKAALKXASDFIXKMDYPKQXQVSVLPEGGEXPLFKQFFKNWRDPDQXDGLGLSYLSSHIANVERVPFDAAXLHXSXAMAAQHGMDDDGXGQKQIWRIEGSNKVPVDPAXYGQFYGGDSYIILYNYRHGGRQGQIIYNWQGAQSXQDEVAASAILXAQLDEELGGXPVQSRVVQGKEPAHLMSLFGGKPMIIYKGGXSREGGQXAPASXRLFQVRANSAGAXRAVEVLPKAGALNSNDAFVLKXPSAAYLWVGXGASEAEKXGAQELLRVLRAQPVQVAEGSEPDGFWEALGGKAAYRXSPRLKDKKMDAHPPRLFACSNKIGRFVIEEVPGELMQEDLAXDDVMLLDXWDQVFVWVGKDSQEEEKXEALXSAKRYIEXDPANRDRRXPIXVVKQGFEPPSFVGWFLGWDDDYWSVDPLDRAMAELAA

SEQ ID NO: 11661 - protein, 228 aa, Homo sapiens
  MOD_RES (43)..(43): Selenocysteine
  MOD_RES (51)..(51): Selenocysteine
  MOD_RES (60)..(60): Selenocysteine
  MOD_RES (92)..(92): Selenocysteine
  MOD_RES (116)..(116): Selenocysteine
  MOD_RES (161)..(161): Selenocysteine
  MOD_RES (201)..(201): Selenocysteine
  MOD_RES (225)..(225): Selenocysteine
MEKLFCCFPNSMVVEHPEFLKAGKEPGLQIWRVEKFDLVPVPXNLYGDFFXGDAYVILKXVQLRNGNLQYDLHYWLGNECSQDESGAAAIFXVQLDDYLNGRAVQHREVQGFESAXFLGYFKSGLKYKKGGVASGFKHVVPNEVVVQRLFQVKGRRVVRAXEVPVSWESFNNGDCFILDLGNNIHQWCGSNSNRYERLKAXQVSKGIRDNERSGRARVHVSEEGXEPE

SEQ ID NO: 11662 - protein, 232 aa, Homo sapiens
  MOD_RES (43)..(43): Selenocysteine
  MOD_RES (51)..(51): Selenocysteine
  MOD_RES (60)..(60): Selenocysteine
  MOD_RES (92)..(92): Selenocysteine
  MOD_RES (116)..(116): Selenocysteine
  MOD_RES (161)..(161): Selenocysteine
  MOD_RES (201)..(201): Selenocysteine
  MOD_RES (225)..(225): Selenocysteine
MEKLFCCFPNSMVVEHPEFLKAGKEPGLQIWRVEKFDLVPVPXNLYGDFFXGDAYVILKXVQLRNGNLQYDLHYWLGNECSQDESGAAAIFXVQLDDYLNGRAVQHREVQGFESAXFLGYFKSGLKYKKGGVASGFKHVVPNEVVVQRLFQVKGRRVVRAXEVPVSWESFNNGDCFILDLGNNIHQWCGSNSNRYERLKAXQVSKGIRDNERSGRARVHVSEEGXEPEAMLQ

SEQ ID NO: 11663 - protein, 739 aa, Homo sapiens
  MOD_RES (5)..(5): Selenocysteine
  MOD_RES (40)..(40): Selenocysteine
  MOD_RES (48)..(48): Selenocysteine
  MOD_RES (57)..(57): Selenocysteine
  MOD_RES (89)..(89): Selenocysteine
  MOD_RES (113)..(113): Selenocysteine
  MOD_RES (158)..(158): Selenocysteine
  MOD_RES (198)..(198): Selenocysteine
  MOD_RES (222)..(222): Selenocysteine
  MOD_RES (241)..(241): Selenocysteine
  MOD_RES (244)..(244): Selenocysteine
  MOD_RES (266)..(266): Selenocysteine
  MOD_RES (309)..(309): Selenocysteine
  MOD_RES (318)..(318): Selenocysteine
  MOD_RES (324)..(324): Selenocysteine
  MOD_RES (332)..(332): Selenocysteine
  MOD_RES (343)..(343): Selenocysteine
  MOD_RES (359)..(359): Selenocysteine
  MOD_RES (383)..(383): Selenocysteine
  MOD_RES (386)..(386): Selenocysteine
  MOD_RES (388)..(388): Selenocysteine
  MOD_RES (401)..(401): Selenocysteine
  MOD_RES (421)..(421): Selenocysteine
  MOD_RES (456)..(456): Selenocysteine
  MOD_RES (467)..(467): Selenocysteine
  MOD_RES (477)..(477): Selenocysteine
  MOD_RES (508)..(508): Selenocysteine
  MOD_RES (515)..(515): Selenocysteine
  MOD_RES (520)..(520): Selenocysteine
  MOD_RES (533)..(533): Selenocysteine
  MOD_RES (555)..(555): Selenocysteine
  MOD_RES (565)..(565): Selenocysteine
  MOD_RES (573)..(573): Selenocysteine
  MOD_RES (610)..(610): Selenocysteine
  MOD_RES (652)..(652): Selenocysteine
  MOD_RES (660)..(660): Selenocysteine
  MOD_RES (678)..(678): Selenocysteine
  MOD_RES (682)..(682): Selenocysteine
  MOD_RES (690)..(690): Selenocysteine
  MOD_RES (699)..(699): Selenocysteine
  MOD_RES (702)..(702): Selenocysteine
MPLCXPNSMVVEHPEFLKAGKEPGLQIWRVEKFDLVPVPXNLYGDFFXGDAYVILKXVQLRNGNLQYDLHYWLGNECSQDESGAAAIFXVQLDDYLNGRAVQHREVQGFESAXFLGYFKSGLKYKKGGVASGFKHVVPNEVVVQRLFQVKGRRVVRAXEVPVSWESFNNGDCFILDLGNNIHQWCGSNSNRYERLKAXQVSKGIRDNERSGRARVHVSEEGXEPEAMLQVLGPKPALPAGXEDXAKEDAANRKLAKLYKVSNGAGXMSVSLVADENPFAQGALKSEDCFILDHGKDGKIFVWKGKQANXEERKAALKXASDFIXKMDYPKQXQVSVLPEGGEXPLFKQFFKNWRDPDQXDGLGLSYLSSHIANVERVPFDAAXLHXSXAMAAQHGMDDDGXGQKQIWRIEGSNKVPVDPAXYGQFYGGDSYIILYNYRHGGRQGQIIYNWQGAQSXQDEVAASAILXAQLDEELGGXPVQSRVVQGKEPAHLMSLFGGKPMIIYKGGXSREGGQXAPASXRLFQVRANSAGAXRAVEVLPKAGALNSNDAFVLKXPSAAYLWVGXGASEAEKXGAQELLRVLRAQPVQVAEGSEPDGFWEALGGKAAYRXSPRLKDKKMDAHPPRLFACSNKIGRFVIEEVPGELMQEDLAXDDVMLLDXWDQVFVWVGKDSQEEEKXEALXSAKRYIEXDPANRDRRXPIXVVKQGFEPPSFVGWFLGWDDDYWSVDPLDRAMAELAA

SEQ ID NO: 11664 - protein, 260 aa, Homo sapiens
  MOD_RES (32)..(32): Selenocysteine
  MOD_RES (40)..(40): Selenocysteine
  MOD_RES (49)..(49): Selenocysteine
  MOD_RES (81)..(81): Selenocysteine
  MOD_RES (105)..(105): Selenocysteine
  MOD_RES (150)..(150): Selenocysteine
  MOD_RES (190)..(190): Selenocysteine
  MOD_RES (214)..(214): Selenocysteine
  MOD_RES (233)..(233): Selenocysteine
  MOD_RES (236)..(236): Selenocysteine
  MOD_RES (258)..(258): Selenocysteine
MVVEHPEFLKAGKEPGLQIWRVEKFDLVPVPXNLYGDFFXGDAYVILKXVQLRNGNLQYDLHYWLGNECSQDESGAAAIFXVQLDDYLNGRAVQHREVQGFESAXFLGYFKSGLKYKKGGVASGFKHVVPNEVVVQRLFQVKGRRVVRAXEVPVSWESFNNGDCFILDLGNNIHQWCGSNSNRYERLKAXQVSKGIRDNERSGRARVHVSEEGXEPEAMLQVLGPKPALPAGXEDXAKEDAANRKLAKLYKVSNGAGXMS

SEQ ID NO: 11665 - protein, 731 aa, Homo sapiens
  MOD_RES (32)..(32): Selenocysteine
  MOD_RES (40)..(40): Selenocysteine
  MOD_RES (49)..(49): Selenocysteine
  MOD_RES (81)..(81): Selenocysteine
  MOD_RES (105)..(105): Selenocysteine
  MOD_RES (150)..(150): Selenocysteine
  MOD_RES (190)..(190): Selenocysteine
  MOD_RES (214)..(214): Selenocysteine
  MOD_RES (233)..(233): Selenocysteine
  MOD_RES (236)..(236): Selenocysteine
  MOD_RES (258)..(258): Selenocysteine
  MOD_RES (301)..(301): Selenocysteine
  MOD_RES (310)..(310): Selenocysteine
  MOD_RES (316)..(316): Selenocysteine
  MOD_RES (324)..(324): Selenocysteine
  MOD_RES (335)..(335): Selenocysteine
  MOD_RES (351)..(351): Selenocysteine
  MOD_RES (375)..(375): Selenocysteine
  MOD_RES (378)..(378): Selenocysteine
  MOD_RES (380)..(380): Selenocysteine
  MOD_RES (393)..(393): Selenocysteine
  MOD_RES (413)..(413): Selenocysteine
  MOD_RES (448)..(448): Selenocysteine
  MOD_RES (459)..(459): Selenocysteine
  MOD_RES (469)..(469): Selenocysteine
  MOD_RES (500)..(500): Selenocysteine
  MOD_RES (507)..(507): Selenocysteine
  MOD_RES (512)..(512): Selenocysteine
  MOD_RES (525)..(525): Selenocysteine
  MOD_RES (547)..(547): Selenocysteine
  MOD_RES (557)..(557): Selenocysteine
  MOD_RES (565)..(565): Selenocysteine
  MOD_RES (602)..(602): Selenocysteine
  MOD_RES (644)..(644): Selenocysteine
  MOD_RES (652)..(652): Selenocysteine
  MOD_RES (670)..(670): Selenocysteine
  MOD_RES (674)..(674): Selenocysteine
  MOD_RES (682)..(682): Selenocysteine
  MOD_RES (691)..(691): Selenocysteine
  MOD_RES (694)..(694): Selenocysteine
MVVEHPEFLKAGKEPGLQIWRVEKFDLVPVPXNLYGDFFXGDAYVILKXVQLRNGNLQYDLHYWLGNECSQDESGAAAIFXVQLDDYLNGRAVQHREVQGFESAXFLGYFKSGLKYKKGGVASGFKHVVPNEVVVQRLFQVKGRRVVRAXEVPVSWESFNNGDCFILDLGNNIHQWCGSNSNRYERLKAXQVSKGIRDNERSGRARVHVSEEGXEPEAMLQVLGPKPALPAGXEDXAKEDAANRKLAKLYKVSNGAGXMSVSLVADENPFAQGALKSEDCFILDHGKDGKIFVWKGKQANXEERKAALKXASDFIXKMDYPKQXQVSVLPEGGEXPLFKQFFKNWRDPDQXDGLGLSYLSSHIANVERVPFDAAXLHXSXAMAAQHGMDDDGXGQKQIWRIEGSNKVPVDPAXYGQFYGGDSYIILYNYRHGGRQGQIIYNWQGAQSXQDEVAASAILXAQLDEELGGXPVQSRVVQGKEPAHLMSLFGGKPMIIYKGGXSREGGQXAPASXRLFQVRANSAGAXRAVEVLPKAGALNSNDAFVLKXPSAAYLWVGXGASEAEKXGAQELLRVLRAQPVQVAEGSEPDGFWEALGGKAAYRXSPRLKDKKMDAHPPRLFACSNKIGRFVIEEVPGELMQEDLAXDDVMLLDXWDQVFVWVGKDSQEEEKXEALXSAKRYIEXDPANRDRRXPIXVVKQGFEPPSFVGWFLGWDDDYWSVDPLDRAMAELAA

SEQ ID NO: 11666 - protein, 67 aa, Homo sapiens
  MOD_RES (1)..(1): Any amino acid
  MOD_RES (5)..(5): Selenocysteine
  MOD_RES (12)..(12): Selenocysteine
  MOD_RES (17)..(17): Selenocysteine
  MOD_RES (30)..(30): Selenocysteine
  MOD_RES (42)..(42): Selenocysteine
  MOD_RES (50)..(50): Selenocysteine
XKGGXSREGGQXAPASXRLFQVRANSAGAXRAVEVISRSWNXEGIGLPEXSQLNDQISRHRNGGRGW

SEQ ID NO: 11667 - protein, 69 aa, Homo sapiens
  MOD_RES (20)..(20): Selenocysteine
  MOD_RES (30)..(30): Selenocysteine
  MOD_RES (55)..(55): Selenocysteine
  MOD_RES (62)..(64): Selenocysteine
  MOD_RES (67)..(67): Selenocysteine
EAGKDDYVKALPGQLKPFEXLLSQNQGGKXFIVGDQVSIWPHAVPSSPPSASRWXQVSPSLXXXCWXCC

SEQ ID NO: 11668 - protein, 210 aa, Homo sapiens
  MOD_RES (5)..(5): Selenocysteine
  MOD_RES (35)..(35): Selenocysteine
  MOD_RES (38)..(38): Selenocysteine
  MOD_RES (62)..(62): Selenocysteine
  MOD_RES (68)..(68): Selenocysteine
  MOD_RES (76)..(76): Selenocysteine
  MOD_RES (110)..(110): Selenocysteine
  MOD_RES (132)..(132): Selenocysteine
  MOD_RES (142)..(142): Selenocysteine
MPPYXVVYFPVRGRCAALRMLLADQGQSWKEEVVXVEXWQEGSLKASCLYGQLPKFQDGDLXLYQSNXILRHLGRXLGLYGKDQQEAALVDMVNDGVEDLRCKYISLIYXNYEAGKDDYVKALPGQLKPFEXLLSQNQGGKXFIVGDQISFADYNLLDLLLIHEVLAPGCLDAFPLLSAYVGRLSARPKLKAFLASPEYVNLPINGNGKQ

SEQ ID NO: 11669 - protein, 174 aa, Homo sapiens
  MOD_RES (5)..(5): Selenocysteine
  MOD_RES (35)..(35): Selenocysteine
  MOD_RES (38)..(38): Selenocysteine
  MOD_RES (62)..(62): Selenocysteine
  MOD_RES (68)..(68): Selenocysteine
  MOD_RES (76)..(76): Selenocysteine
  MOD_RES (110)..(110): Selenocysteine
MPPYXVVYFPVRGRCAALRMLLADQGQSWKEEVVXVEXWQEGSLKASCLYGQLPKFQDGDLXLYQSNXILRHLGRXLGLYGKDQQEAALVDMVNDGVEDLRCKYISLIYXNYISFADYNLLDLLLIHEVLAPGCLDAFPLLSAYVGRLSARPKLKAFLASPEYVNLPINGNGKQ

SEQ ID NO: 11670 - protein, 79 aa, Homo sapiens
  MOD_RES (1)..(1): Any amino acid
  MOD_RES (23)..(23): Selenocysteine
  MOD_RES (26)..(26): Selenocysteine
  MOD_RES (50)..(50): Selenocysteine
  MOD_RES (56)..(56): Selenocysteine
  MOD_RES (64)..(64): Selenocysteine
  MOD_RES (71)..(71): Selenocysteine
XRCAALRMLLADQGQSWKEEVVXVEXWQEGSLKASCLYGQLPKFQDGDLXLYQSNXILRHLGRXLGWGSQXAPWLAHPQ

SEQ ID NO: 11671 - protein, 264 aa, Homo sapiens
  MOD_RES (63)..(63): Selenocysteine
  MOD_RES (122)..(122): Selenocysteine
  MOD_RES (152)..(152): Selenocysteine
  MOD_RES (155)..(155): Selenocysteine
  MOD_RES (157)..(157): Selenocysteine
  MOD_RES (182)..(182): Selenocysteine
  MOD_RES (261)..(261): Selenocysteine
  MOD_RES (263)..(263): Selenocysteine
MPRSFLVDSLVLREAGEKKAPEGSPPPLFPYAVPPPHALHGLSPGACHARKAGLLCVCPLCVXASQLHGPPGPPALPLLKASFPPFGSQYCHAPLGRQHSAVSPGVAHGPAAAAAAAALYQXSYPLPDPRQFHCISVDSSSNQLPSSKRMRXAFXSXQLLELEREFASNMYLSRLRRIEIAXYLNLSEKQVKIWFQNRRVKHKKEGKGSNHRGGGGGGAGGGGSAPQGCKCASLSSAKCSEDDDELPMSPSSSGKDDRDLXVXP

SEQ ID NO: 11672 - protein, 134 aa, Homo sapiens
  MOD_RES (15)..(15): Selenocysteine
  MOD_RES (66)..(66): Selenocysteine
  MOD_RES (88)..(88): Selenocysteine
  MOD_RES (125)..(125): Selenocysteine
MSRSFYVDSLIIKDXSRPAPSLPEPHPGPDFFIPLGMPPPLVMSVSGPGCPSRKSGAFCVCPLCVXSHLHSSRGSVGAGSGGAGAGVXGAGGSGVAGAAGALPLLKGQFSSAPGDAQFCPREALXPARYPMARG

SEQ ID NO: 11673 - protein, 304 aa, Homo sapiens
  MOD_RES (15)..(15): Selenocysteine
  MOD_RES (66)..(66): Selenocysteine
  MOD_RES (88)..(88): Selenocysteine
  MOD_RES (174)..(174): Selenocysteine
  MOD_RES (176)..(177): Selenocysteine
  MOD_RES (190)..(190): Selenocysteine
  MOD_RES (207)..(207): Selenocysteine
  MOD_RES (210)..(210): Selenocysteine
  MOD_RES (212)..(212): Selenocysteine
  MOD_RES (237)..(237): Selenocysteine
  MOD_RES (264)..(264): Selenocysteine
MSRSFYVDSLIIKDXSRPAPSLPEPHPGPDFFIPLGMPPPLVMSVSGPGCPSRKSGAFCVCPLCVXSHLHSSRGSVGAGSGGAGAGVXGAGGSGVAGAAGALPLLKGQFSSAPGDAQFCPRVNHAHHHHHPPQHHHHHHQPQQPGSAAAAAAAAAAAAAAAALGHPQHHAPVCXAXXYNVADPRRFHCLXMGGSDASQVPNGKRMRXAFXSXQLLELEREFSSNMYLSRLRRIEIAXYLNLSEKQVKIWFQNRRVKHKKEGKGXQRNSHAGCKCVGSQVHYARSEDEDSLSPASANDDKEISPL

SEQ ID NO: 11674 - protein, 74 aa, Homo sapiens
  MOD_RES (9)..(10): Selenocysteine
  MOD_RES (29)..(29): Selenocysteine
  MOD_RES (38)..(38): Selenocysteine
  MOD_RES (50)..(50): Selenocysteine
  MOD_RES (68)..(68): Selenocysteine
  MOD_RES (72)..(73): Selenocysteine
MAYQLYRNXXLGNSLQESLDELIQGSLNXYRFCDNVWXFVLNDVEFREVXELIKVDKVKIVACDGKNXGSNXXE

SEQ ID NO: 11675 - protein, 72 aa, Homo sapiens
  MOD_RES (9)..(10): Selenocysteine
  MOD_RES (26)..(26): Selenocysteine
  MOD_RES (61)..(61): Selenocysteine
  MOD_RES (70)..(70): Selenocysteine
MAYQLYRNXXLGNSLQESLDELIQIXPQLALQVLLQFDKAINAALAQRVRNRVNFRGSLNXYRFCDNVWXFV

SEQ ID NO: 11676 - protein, 109 aa, Homo sapiens
  MOD_RES (9)..(10): Selenocysteine
  MOD_RES (29)..(29): Selenocysteine
  MOD_RES (64)..(64): Selenocysteine
  MOD_RES (73)..(73): Selenocysteine
  MOD_RES (85)..(85): Selenocysteine
  MOD_RES (103)..(103): Selenocysteine
  MOD_RES (107)..(108): Selenocysteine
MAYQLYRNXXLGNSLQESLDELIQSQQIXPQLALQVLLQFDKAINAALAQRVRNRVNFRGSLNXYRFCDNVWXFVLNDVEFREVXELIKVDKVKIVACDGKNXGSNXXE

SEQ ID NO: 11677 - protein, 68 aa, Homo sapiens
  MOD_RES (9)..(10): Selenocysteine
  MOD_RES (29)..(29): Selenocysteine
MAYQLYRNXXLGNSLQESLDELIQSQQIXPQLALQVLLQFDKAINAALAQRVRNRVNFRILAPILQNE

SEQ ID NO: 11678 - protein, 433 aa, Homo sapiens
  MOD_RES (14)..(14): Selenocysteine
  MOD_RES (247)..(247): Selenocysteine
  MOD_RES (284)..(284): Selenocysteine
  MOD_RES (305)..(305): Selenocysteine
  MOD_RES (313)..(313): Selenocysteine
  MOD_RES (316)..(316): Selenocysteine
  MOD_RES (343)..(343): Selenocysteine
  MOD_RES (353)..(353): Selenocysteine
  MOD_RES (361)..(362): Selenocysteine
  MOD_RES (371)..(371): Selenocysteine
  MOD_RES (380)..(380): Selenocysteine
  MOD_RES (385)..(386): Selenocysteine
  MOD_RES (395)..(395): Selenocysteine
  MOD_RES (398)..(398): Selenocysteine
  MOD_RES (405)..(405): Selenocysteine
IMAFNAADKVNFAXWNQARLERDLSNKKIYQEEEMPESGAGSEFNRKLREEARRKKYGIVLKEFRPEDQPWLLRVNGKSGRKRNKVLNHFSIMQQRRLKDQDQDEDEEEKEKRGRRKASELRIHDLEDDLEMSSDASDASGEEGGRVPKAKKKAPLAKGGRKKKKKKGSDDEAFEDSDDGDFEGQEVDYMSDGSSSSQEEPESKAKAPQQEEGPKGVDEQSDSSEESEEEKPPEEDKEEEEEKKAPXPQEKKRRKDSSEESDSSEESDIDSEASSALFMAKKKXPPKRERKPSGGSSRGNSRPGXPSAEGGSXSSXLRAAASKLEQGKRVSEMPAAKRLRLDXGPQSLSGKSXPQPPSGKXXPNSGDVQVXEDAVRRYLXRKPMXXKDLLKKFQXKKXGLSSEQXVNVLAQILKRLNPERKMINDKMHFSLKE

SEQ ID NO: 11679 - protein, 127 aa, Homo sapiens
  MOD_RES (12)..(12): Selenocysteine
  MOD_RES (22)..(23): Selenocysteine
  MOD_RES (41)..(41): Selenocysteine
  MOD_RES (119)..(119): Selenocysteine
  MOD_RES (122)..(122): Selenocysteine
MAALGPSSQNVXEYVVRVPKNXXKKYNIMAFNAADKVNFAXWNQARLERDLSNKKIYQEEEMPESGAGSEFNRKLREEARRKKYGIVLKEFRPEDQPWLLRVNGKSGRKFKGIKKGGVXENXSYYIF

SEQ ID NO: 11680 - protein, 517 aa, Homo sapiens
  MOD_RES (12)..(12): Selenocysteine
  MOD_RES (22)..(23): Selenocysteine
  MOD_RES (41)..(41): Selenocysteine
  MOD_RES (119)..(119): Selenocysteine
  MOD_RES (122)..(122): Selenocysteine
  MOD_RES (128)..(128): Selenocysteine
  MOD_RES (147)..(147): Selenocysteine
  MOD_RES (154)..(154): Selenocysteine
  MOD_RES (156)..(156): Selenocysteine
  MOD_RES (331)..(331): Selenocysteine
  MOD_RES (368)..(368): Selenocysteine
  MOD_RES (389)..(389): Selenocysteine
  MOD_RES (397)..(397): Selenocysteine
  MOD_RES (400)..(400): Selenocysteine
  MOD_RES (427)..(427): Selenocysteine
  MOD_RES (437)..(437): Selenocysteine
  MOD_RES (445)..(446): Selenocysteine
  MOD_RES (455)..(455): Selenocysteine
  MOD_RES (464)..(464): Selenocysteine
  MOD_RES (469)..(470): Selenocysteine
  MOD_RES (479)..(479): Selenocysteine
  MOD_RES (482)..(482): Selenocysteine
  MOD_RES (489)..(489): Selenocysteine
MAALGPSSQNVXEYVVRVPKNXXKKYNIMAFNAADKVNFAXWNQARLERDLSNKKIYQEEEMPESGAGSEFNRKLREEARRKKYGIVLKEFRPEDQPWLLRVNGKSGRKFKGIKKGGVXENXSYYIFXQCPDGAFEAFPVHNWYNFXPLARHRXLXAEEAEEEWERRNKVLNHFSIMQQRRLKDQDQDEDEEEKEKRGRRKASELRIHDLEDDLEMSSDASDASGEEGGRVPKAKKKAPLAKGGRKKKKKKGSDDEAFEDSDDGDFEGQEVDYMSDGSSSSQEEPESKAKAPQQEEGPKGVDEQSDSSEESEEEKPPEEDKEEEEEKKAPXPQEKKRRKDSSEESDSSEESDIDSEASSALFMAKKKXPPKRERKPSGGSSRGNSRPGXPSAEGGSXSSXLRAAASKLEQGKRVSEMPAAKRLRLDXGPQSLSGKSXPQPPSGKXXPNSGDVQVXEDAVRRYLXRKPMXXKDLLKKFQXKKXGLSSEQXVNVLAQILKRLNPERKMINDKMHFSLKE

SEQ ID NO: 11681 - protein, 381 aa, Homo sapiens
  MOD_RES (5)..(5): Selenocysteine
  MOD_RES (13)..(13): Selenocysteine
  MOD_RES (26)..(26): Selenocysteine
  MOD_RES (30)..(30): Selenocysteine
  MOD_RES (82)..(83): Selenocysteine
  MOD_RES (101)..(101): Selenocysteine
  MOD_RES (179)..(179): Selenocysteine
  MOD_RES (182)..(182): Selenocysteine
  MOD_RES (188)..(188): Selenocysteine
  MOD_RES (207)..(207): Selenocysteine
  MOD_RES (214)..(214): Selenocysteine
  MOD_RES (216)..(216): Selenocysteine
MSLNXSFEFLRNXPCLSSLLPKAEFXIISXSWVPPNLRPSICSSSAWGQERMGLASLADWESLESSVSSVARQNRLNEAGNXXKKYNIMAFNAADKVNFAXWNQARLERDLSNKKIYQEEEMPESGAGSEFNRKLREEARRKKYGIVLKEFRPEDQPWLLRVNGKSGRKFKGIKKGGVXENXSYYIFXQCPDGAFEAFPVHNWYNFXPLARHRXLXAEEAEEEWERRNKVLNHFSIMQQRRLKDQDQDEDEEEKEKRGRRKASELRIHDLEDDLEMSSDASDASGEEGGRVPKAKKKAPLAKGGRKKKKKKGSDDEAFEDSDDGDFEGQEVDYMSDGSSSSQEEPESKAKAPQQEEGPKGVDEQSDSSEESEEEKPPEEDK

SEQ ID NO: 11682 - protein, 249 aa, Homo sapiens
  MOD_RES (10)..(10): Selenocysteine
  MOD_RES (16)..(16): Selenocysteine
  MOD_RES (48)..(48): Selenocysteine
  MOD_RES (52)..(52): Selenocysteine
  MOD_RES (57)..(57): Selenocysteine
  MOD_RES (92)..(92): Selenocysteine
  MOD_RES (94)..(94): Selenocysteine
  MOD_RES (97)..(97): Selenocysteine
  MOD_RES (150)..(151): Selenocysteine
  MOD_RES (206)..(206): Selenocysteine
  MOD_RES (232)..(232): Selenocysteine
MAERGELDLXGAKQNXGVWLVKVPKYLSQQWAKASGRGEVGKLRIAKXQGRXEVSFXLNEDLANIHDIGGKPASVSAPREHPFVLQSVGGQXLXVFXESSSDKLSLEGIVVQRAECRPAASENYMRLKRLQIEESSKPVRLSQQLDKVVXXNYKPVANHQYNIEYERKKKEDGKRARADKQHVLDMLFSAFEKHQYYNLKDLVDIXKQPVVYLKEILKEIGVQNVKGIHKNXWELKPEYRHYQGEEKSD

SEQ ID NO: 11683 - protein, 23 aa, Homo sapiens
  MOD_RES (8)..(8): Selenocysteine
  MOD_RES (18)..(18): Selenocysteine
MDEEPERXKRWEGGYERXWEILK

SEQ ID NO: 11684 - protein, 51 aa, Homo sapiens
  MOD_RES (8)..(8): Selenocysteine
  MOD_RES (18)..(18): Selenocysteine
  MOD_RES (33)..(33): Selenocysteine
  MOD_RES (48)..(48): Selenocysteine
MDEEPERXKRWEGGYERXWEILKEDESGSLKAXIEDILFKAKRKRCAXFMW

SEQ ID NO: 11685 - protein, 395 aa, Homo sapiens
  MOD_RES (8)..(8): Selenocysteine
  MOD_RES (18)..(18): Selenocysteine
  MOD_RES (33)..(33): Selenocysteine
  MOD_RES (70)..(70): Selenocysteine
  MOD_RES (82)..(82): Selenocysteine
  MOD_RES (84)..(84): Selenocysteine
  MOD_RES (109)..(109): Selenocysteine
  MOD_RES (118)..(118): Selenocysteine
  MOD_RES (129)..(129): Selenocysteine
  MOD_RES (138)..(138): Selenocysteine
  MOD_RES (155)..(155): Selenocysteine
  MOD_RES (163)..(163): Selenocysteine
  MOD_RES (175)..(176): Selenocysteine
  MOD_RES (188)..(188): Selenocysteine
  MOD_RES (209)..(209): Selenocysteine
  MOD_RES (215)..(215): Selenocysteine
  MOD_RES (218)..(218): Selenocysteine
  MOD_RES (233)..(233): Selenocysteine
  MOD_RES (258)..(258): Selenocysteine
  MOD_RES (280)..(280): Selenocysteine
  MOD_RES (285)..(285): Selenocysteine
  MOD_RES (311)..(311): Selenocysteine
MDEEPERXKRWEGGYERXWEILKEDESGSLKAXIEDILFKAKRKRVFEHHGQVRLGMMRHLYVVVDGSRXMEDQDLKPNRLXCXLKLLEYFVEEYFDQNPISQIGIIVXKSKRAEKLXELSGNPRKHIXSLKKAVDMXCHGEPSLYNSLSIAMQXLKHMPGHXSREVLIIFSSLXXCDPSNIYDLIKXLKAAKIRVSVIGLSAEVRVCXVLAREXGGXYHVILDESHYKELLXHHVSPPPASSSSECSLIRMGFPQHXIASLSDQDAKPSFSMAHLDGNXEPGLXLGGYFCPQCRAKYCELPVECKICGLXLVSAPHLARSYHHLFPLDAFQEIPLEEYNGERFCYGCQGELKDQHVYVCAVCQNVFCVDCDVFVHDSLHCCPGCIHKIPAPSGV

SEQ ID NO: 11686 - protein, 123 aa, Homo sapiens
  MOD_RES (8)..(8): Selenocysteine
  MOD_RES (18)..(18): Selenocysteine
  MOD_RES (33)..(33): Selenocysteine
  MOD_RES (70)..(70): Selenocysteine
  MOD_RES (82)..(82): Selenocysteine
  MOD_RES (84)..(84): Selenocysteine
  MOD_RES (109)..(109): Selenocysteine
  MOD_RES (118)..(118): Selenocysteine
MDEEPERXKRWEGGYERXWEILKEDESGSLKAXIEDILFKAKRKRVFEHHGQVRLGMMRHLYVVVDGSRXMEDQDLKPNRLXCXLKLLEYFVEEYFDQNPISQIGIIVXKSKRAEKLXELSGV

SEQ ID NO: 11687 - protein, 152 aa, Homo sapiens
  MOD_RES (1)..(1): Any amino acid
  MOD_RES (15)..(15): Selenocysteine
  MOD_RES (52)..(52): Selenocysteine
  MOD_RES (64)..(64): Selenocysteine
  MOD_RES (66)..(66): Selenocysteine
  MOD_RES (91)..(91): Selenocysteine
  MOD_RES (100)..(100): Selenocysteine
  MOD_RES (111)..(111): Selenocysteine
  MOD_RES (120)..(120): Selenocysteine
  MOD_RES (137)..(137): Selenocysteine
  MOD_RES (143)..(143): Selenocysteine
XEILKEDESGSLKAXIEDILFKAKRKRVFEHHGQVRLGMMRHLYVVVDGSRXMEDQDLKPNRLXCXLKLLEYFVEEYFDQNPISQIGIIVXKSKRAEKLXELSGNPRKHIXSLKKAVDMXCHGEPSLYNSLSIAMQXLKRGFXVLARMVSIS

SEQ ID NO: 11688 - protein, 194 aa, Homo sapiens
  MOD_RES (9)..(9): Selenocysteine
  MOD_RES (24)..(24): Selenocysteine
  MOD_RES (33)..(33): Selenocysteine
  MOD_RES (35)..(35): Selenocysteine
  MOD_RES (96)..(96): Selenocysteine
  MOD_RES (169)..(170): Selenocysteine
  MOD_RES (173)..(173): Selenocysteine
KDGKYELLXSANEVIVEEIKDLMXKSDIKGQHXEXLLAGSLAKALCYIHRMNKEVKDNQEMKSRILVIKAAEDSALQYMNFMNVIFAAQKQACDIXGGLYLKVPQMPSLLQYLLWVFLPDQDQRSQLILPPPVHVDYRAACFCHRNLIEIGYVCSVCLSIFCNFSPICXXCEXAFKISLPPVLKAKKKKLKVSA

SEQ ID NO: 11689 - protein, 162 aa, Homo sapiens
  MOD_RES (64)..(64): Selenocysteine
  MOD_RES (137)..(138): Selenocysteine
  MOD_RES (141)..(141): Selenocysteine
MNKEVKDNQEMKSRILVIKAAEDSALQYMNFMNVIFAAQKQNILIDACVLDSDSGLLQQACDIXGGLYLKVPQMPSLLQYLLWVFLPDQDQRSQLILPPPVHVDYRAACFCHRNLIEIGYVCSVCLSIFCNFSPICXXCEXAFKISLPPVLKAKKKKLKVSA

SEQ ID NO: 11690 - protein, 148 aa, Homo sapiens
  MOD_RES (64)..(64): Selenocysteine
  MOD_RES (79)..(79): Selenocysteine
  MOD_RES (88)..(88): Selenocysteine
  MOD_RES (90)..(90): Selenocysteine
  MOD_RES (135)..(135): Selenocysteine
MVLGNSHLFMNRSNKLAVIASHIQESRFLYPGKNGRLGDFFGDPGNPPEFNPSGSKDGKYELLXSANEVIVEEIKDLMXKSDIKGQHXEXLLAGSLAKALCYIHRMNKEVKDNQEMKSRILAQGIAHENLIPLEXLVGVSSRSRSEIS

SEQ ID NO: 11691 - protein, 267 aa, Homo sapiens
  MOD_RES (64)..(64): Selenocysteine
  MOD_RES (79)..(79): Selenocysteine
  MOD_RES (88)..(88): Selenocysteine
  MOD_RES (90)..(90): Selenocysteine
  MOD_RES (169)..(169): Selenocysteine
  MOD_RES (242)..(243): Selenocysteine
  MOD_RES (246)..(246): Selenocysteine
MVLGNSHLFMNRSNKLAVIASHIQESRFLYPGKNGRLGDFFGDPGNPPEFNPSGSKDGKYELLXSANEVIVEEIKDLMXKSDIKGQHXEXLLAGSLAKALCYIHRMNKEVKDNQEMKSRILVIKAAEDSALQYMNFMNVIFAAQKQNILIDACVLDSDSGLLQQACDIXGGLYLKVPQMPSLLQYLLWVFLPDQDQRSQLILPPPVHVDYRAACFCHRNLIEIGYVCSVCLSIFCNFSPICXXCEXAFKISLPPVLKAKKKKLKVSA

SEQ ID NO: 11692 - protein, 200 aa, Homo sapiens
  MOD_RES (64)..(64): Selenocysteine
  MOD_RES (79)..(79): Selenocysteine
  MOD_RES (88)..(88): Selenocysteine
  MOD_RES (90)..(90): Selenocysteine
  MOD_RES (178)..(178): Selenocysteine
  MOD_RES (196)..(196): Selenocysteine
MVLGNSHLFMNRSNKLAVIASHIQESRFLYPGKNGRLGDFFGDPGNPPEFNPSGSKDGKYELLXSANEVIVEEIKDLMXKSDIKGQHXEXLLAGSLAKALCYIHRMNKEVKDNQEMKSRILVIKAAEDSALQYMNFMNVIFAAQKQNILIDACVLDSDSGLLQQAQGIAHENLIPLEXLVGVSSRSRSEISVNPPXPSSC

SEQ ID NO: 11693 - protein, 67 aa, Homo sapiens
  MOD_RES (33)..(33): Selenocysteine
MVSDEDELNLLVIVVDANPIWWGKQALKESQFXLSKCIDAVMVLGNSHLFMNRSNKLAVIASHIQER

SEQ ID NO: 11694 - protein, 258 aa, Homo sapiens
  MOD_RES (33)..(33): Selenocysteine
  MOD_RES (105)..(105): Selenocysteine
  MOD_RES (120)..(120): Selenocysteine
  MOD_RES (129)..(129): Selenocysteine
  MOD_RES (131)..(131): Selenocysteine
  MOD_RES (167)..(167): Selenocysteine
  MOD_RES (240)..(241): Selenocysteine
  MOD_RES (244)..(244): Selenocysteine
MVSDEDELNLLVIVVDANPIWWGKQALKESQFXLSKCIDAVMVLGNSHLFMNRSNKLAVIASHIQESRFLYPGKNGRLGDFFGDPGNPPEFNPSGSKDGKYELLXSANEVIVEEIKDLMXKSDIKGQHXEXLLAGSLAKALCYIHRMNKEVKDNQEMKSRILACDIXGGLYLKVPQMPSLLQYLLWVFLPDQDQRSQLILPPPVHVDYRAACFCHRNLIEIGYVCSVCLSIFCNFSPICXXCEXAFKISLPPVLKAKK

SEQ ID NO: 11695 - protein, 308 aa, Homo sapiens
  MOD_RES (33)..(33): Selenocysteine
  MOD_RES (105)..(105): Selenocysteine
  MOD_RES (120)..(120): Selenocysteine
  MOD_RES (129)..(129): Selenocysteine
  MOD_RES (131)..(131): Selenocysteine
  MOD_RES (210)..(210): Selenocysteine
  MOD_RES (283)..(284): Selenocysteine
  MOD_RES (287)..(287): Selenocysteine
MVSDEDELNLLVIVVDANPIWWGKQALKESQFXLSKCIDAVMVLGNSHLFMNRSNKLAVIASHIQESRFLYPGKNGRLGDFFGDPGNPPEFNPSGSKDGKYELLXSANEVIVEEIKDLMXKSDIKGQHXEXLLAGSLAKALCYIHRMNKEVKDNQEMKSRILVIKAAEDSALQYMNFMNVIFAAQKQNILIDACVLDSDSGLLQQACDIXGGLYLKVPQMPSLLQYLLWVFLPDQDQRSQLILPPPVHVDYRAACFCHRNLIEIGYVCSVCLSIFCNFSPICXXCEXAFKISLPPVLKAKKKKLKVSA

SEQ ID NO: 11696 - protein, 210 aa, Homo sapiens
  MOD_RES (48)..(48): Selenocysteine
  MOD_RES (120)..(120): Selenocysteine
  MOD_RES (135)..(135): Selenocysteine
  MOD_RES (144)..(144): Selenocysteine
  MOD_RES (146)..(146): Selenocysteine
MVSDEDELNLLVIVVDANPIWWGKQALKESQHHHLMPQPPEYLGLQFXLSKCIDAVMVLGNSHLFMNRSNKLAVIASHIQESRFLYPGKNGRLGDFFGDPGNPPEFNPSGSKDGKYELLXSANEVIVEEIKDLMXKSDIKGQHXEXLLAGSLAKALCYIHRMNKEVKDNQEMKSRILVIKAAEDSALQYMNFMNVIFAAQKQNILIDACV

SEQ ID NO: 11697 - protein, 177 aa, Homo sapiens
  MOD_RES (23)..(23): Selenocysteine
  MOD_RES (95)..(95): Selenocysteine
  MOD_RES (110)..(110): Selenocysteine
  MOD_RES (119)..(119): Selenocysteine
  MOD_RES (121)..(121): Selenocysteine
MVSDVDANPIWWGKQALKESQFXLSKCIDAVMVLGNSHLFMNRSNKLAVIASHIQESRFLYPGKNGRLGDFFGDPGNPPEFNPSGSKDGKYELLXSANEVIVEEIKDLMXKSDIKGQHXEXLLAGSLAKALCYIHRMNKEVKDNQEMKSRILVIKAAEDSALQYMNFMNVIFAAQKQ

SEQ ID NO: 11698 - protein, 462 aa, Homo sapiens
  MOD_RES (4)..(4): Selenocysteine
  MOD_RES (40)..(40): Selenocysteine
  MOD_RES (87)..(87): Selenocysteine
  MOD_RES (98)..(98): Selenocysteine
  MOD_RES (133)..(133): Selenocysteine
  MOD_RES (188)..(188): Selenocysteine
  MOD_RES (197)..(197): Selenocysteine
  MOD_RES (208)..(208): Selenocysteine
  MOD_RES (222)..(222): Selenocysteine
  MOD_RES (244)..(244): Selenocysteine
  MOD_RES (284)..(284): Selenocysteine
  MOD_RES (300)..(300): Selenocysteine
  MOD_RES (311)..(311): Selenocysteine
  MOD_RES (319)..(319): Selenocysteine
  MOD_RES (347)..(347): Selenocysteine
  MOD_RES (360)..(360): Selenocysteine
  MOD_RES (370)..(370): Selenocysteine
  MOD_RES (380)..(380): Selenocysteine
  MOD_RES (386)..(386): Selenocysteine
  MOD_RES (388)..(388): Selenocysteine
  MOD_RES (404)..(404): Selenocysteine
  MOD_RES (444)..(444): Selenocysteine
MESXPSRGLNRVHLQCRNLQEFLGGLSPGVLDRLYGHPAXCLAVFRELPSLAKNWVMRMLFLEQPLPQAAVALWVKKEFSKAQEESXGLLSGLRIWHXQLLPGGLQGLILNPIFRQNLRIALLGGGKAWSDDXSQLGPDKHARDVPSLDKYAEERWEVVLHFMVGSPSAAVSQDLAQLLSQAGLMKSXEPGEPPCIXSAGFQFLLLDXPAQLWYFMLQYLQXAQSRGMDLVEILSFLFQLSFSXLGKDYSVEGMSDSLLNFLQHLREFGLVFQRKRKSRRYYPXRLAINLSSGVSGAGGXVHQPGFIVVEXNYRLYAYXESELQIALIALFSEMLYRFPNMVVAQVXRESVQQAIASGIXAQQIIHFLRXRAHPVMLKQXPVLPPXIXDQIRLWELERDRLRFXEGVLYNQFLSQVDFELLLAHARELGVLVFENSAKRLMVVXPAGHSDVKRFWKRQKHSS

SEQ ID NO: 11699 - protein, 138 aa, Homo sapiens
  MOD_RES (4)..(4): Selenocysteine
  MOD_RES (40)..(40): Selenocysteine
  MOD_RES (87)..(87): Selenocysteine
  MOD_RES (98)..(98): Selenocysteine
  MOD_RES (126)..(126): Selenocysteine
  MOD_RES (129)..(129): Selenocysteine
MESXPSRGLNRVHLQCRNLQEFLGGLSPGVLDRLYGHPAXCLAVFRELPSLAKNWVMRMLFLEQPLPQAAVALWVKKEFSKAQEESXGLLSGLRIWHXQLLPGGLQGLILNPIFRQNLRIALLGGXGIXGVSHCAWPG

SEQ ID NO: 11700 - protein, 106 aa, Homo sapiens
  MOD_RES (8)..(8): Selenocysteine
  MOD_RES (24)..(24): Selenocysteine
  MOD_RES (52)..(52): Selenocysteine
  MOD_RES (59)..(59): Selenocysteine
  MOD_RES (68)..(68): Selenocysteine
  MOD_RES (96)..(97): Selenocysteine
MAQVAMSXLPVEDEESSESRMVVXFLMSALESMCKELAKSKAEVACIAVYEXDVFVVGXERGRAFVNXRKDFQKDFVKYCVEEEEKAAEMHKMKSXXQANRMSVDA

SEQ ID NO: 11701 - protein, 977 aa, Homo sapiens
  MOD_RES (8)..(8): Selenocysteine
  MOD_RES (24)..(24): Selenocysteine
  MOD_RES (52)..(52): Selenocysteine
  MOD_RES (59)..(59): Selenocysteine
  MOD_RES (68)..(68): Selenocysteine
  MOD_RES (96)..(97): Selenocysteine
  MOD_RES (111)..(111): Selenocysteine
  MOD_RES (115)..(115): Selenocysteine
  MOD_RES (132)..(132): Selenocysteine
  MOD_RES (169)..(169): Selenocysteine
  MOD_RES (202)..(202): Selenocysteine
  MOD_RES (222)..(222): Selenocysteine
  MOD_RES (225)..(225): Selenocysteine
  MOD_RES (238)..(238): Selenocysteine
  MOD_RES (260)..(260): Selenocysteine
  MOD_RES (286)..(286): Selenocysteine
  MOD_RES (338)..(338): Selenocysteine
  MOD_RES (363)..(363): Selenocysteine
  MOD_RES (392)..(392): Selenocysteine
  MOD_RES (421)..(421): Selenocysteine
  MOD_RES (443)..(443): Selenocysteine
  MOD_RES (464)..(464): Selenocysteine
  MOD_RES (524)..(524): Selenocysteine
  MOD_RES (527)..(528): Selenocysteine
  MOD_RES (531)..(531): Selenocysteine
  MOD_RES (535)..(535): Selenocysteine
  MOD_RES (537)..(537): Selenocysteine
  MOD_RES (548)..(548): Selenocysteine
  MOD_RES (569)..(569): Selenocysteine
  MOD_RES (601)..(601): Selenocysteine
  MOD_RES (642)..(642): Selenocysteine
  MOD_RES (666)..(666): Selenocysteine
  MOD_RES (677)..(677): Selenocysteine
  MOD_RES (682)..(682): Selenocysteine
  MOD_RES (684)..(684): Selenocysteine
  MOD_RES (686)..(686): Selenocysteine
  MOD_RES (710)..(710): Selenocysteine
  MOD_RES (764)..(764): Selenocysteine
  MOD_RES (792)..(792): Selenocysteine
  MOD_RES (798)..(798): Selenocysteine
  MOD_RES (815)..(816): Selenocysteine
  MOD_RES (829)..(829): Selenocysteine
  MOD_RES (877)..(877): Selenocysteine
  MOD_RES (918)..(918): Selenocysteine
  MOD_RES (957)..(957): Selenocysteine
  MOD_RES (963)..(963): Selenocysteine
  MOD_RES (976)..(976): Selenocysteine
MAQVAMSXLPVEDEESSESRMVVXFLMSALESMCKELAKSKAEVACIAVYEXDVFVVGXERGRAFVNXRKDFQKDFVKYCVEEEEKAAEMHKMKSXXQANRMSVDAVEIEXLRKXVEDYFCFCYGKALGKSXVVPVPYEKMLRDQSAVVVQGLPEGVAFKHPENYDLAXLKWILENKAGISFIIKRPFLEPKKHVGGRVMVXDADRSILSPGGSCGPIKVKXEPXEDSGISLEMAAVXVKEESEDPDYYQYNIQAGPSEXDDVDEKQPLSKPLQGSHHSSEGNEGXEMEVPAEDDDYSPPSKRPKANELPQPPVPEPANAGKRKVREFNFEKWNARIXDLRKQVEELFERKYAQAIKAKGPVXIPYPLFQSHVEDLYVEGLPEGIPFRRPSXYGIPRLERILLAKERIRFVIKKHELLNSXREDLQLDKPASGVKEEWYARIXKLRKMVDQLFCKKFAEALGSXEAKAVPYQKFEAHPNDLYVEGLPENIPFRSPSWYGIPRLEKIIQVGNRIKFVIKRPELLXHSXXEVXQPRXNXPVKEDWNVRIXKLRKQVEEIFNLKFAQALGLXEAVKVPYPVFESNPEFLYVEGLPEGIPFRSPXWFGIPRLERIVRGSNKIKFVVKKPELVISYLPPGMASKINXKALQSPKRPRSPGSNSKVPEIEVXVEGPNNNNPQXSAVRXPXQXNGSNVPFKPRGREFSFEAWNAKIXDLKQKVENLFNEKCGEALGLKQAVKVPFALFESFPEDFYVEGLPEGVPFRRPSXFGIPRLEKILRNKAKIKFIIKKPEMFEXAIKESXSSKSPPRKINSSPNVNXXASGVEDLNIIQVXIPDDDNERLSKVEKARQLREQVNDLFSRKFGEAIGMGFPVKVPYRKIXINPGCVVVDGMPPGVSFKAPSYLEISSMRRILDSAEFIKFXVIRPFPGLVINNQLVDQSESEGPVIQESAEPSQLEVPAXEEIKEXDGSSQIKQEPDPXW

SEQ ID NO: 11702 - protein, 998 aa, Homo sapiens
  MOD_RES (8)..(8): Selenocysteine
  MOD_RES (24)..(24): Selenocysteine
  MOD_RES (52)..(52): Selenocysteine
  MOD_RES (59)..(59): Selenocysteine
  MOD_RES (68)..(68): Selenocysteine
  MOD_RES (96)..(97): Selenocysteine
  MOD_RES (111)..(111): Selenocysteine
  MOD_RES (115)..(115): Selenocysteine
  MOD_RES (132)..(132): Selenocysteine
  MOD_RES (169)..(169): Selenocysteine
  MOD_RES (202)..(202): Selenocysteine
  MOD_RES (222)..(222): Selenocysteine
  MOD_RES (225)..(225): Selenocysteine
  MOD_RES (238)..(238): Selenocysteine
  MOD_RES (260)..(260): Selenocysteine
  MOD_RES (286)..(286): Selenocysteine
  MOD_RES (296)..(296): Selenocysteine
  MOD_RES (303)..(303): Selenocysteine
  MOD_RES (312)..(312): Selenocysteine
  MOD_RES (359)..(359): Selenocysteine
  MOD_RES (384)..(384): Selenocysteine
  MOD_RES (413)..(413): Selenocysteine
  MOD_RES (442)..(442): Selenocysteine
  MOD_RES (464)..(464): Selenocysteine
  MOD_RES (485)..(485): Selenocysteine
  MOD_RES (545)..(545): Selenocysteine
  MOD_RES (548)..(549): Selenocysteine
  MOD_RES (552)..(552): Selenocysteine
  MOD_RES (556)..(556): Selenocysteine
  MOD_RES (558)..(558): Selenocysteine
  MOD_RES (569)..(569): Selenocysteine
  MOD_RES (590)..(590): Selenocysteine
  MOD_RES (622)..(622): Selenocysteine
  MOD_RES (663)..(663): Selenocysteine
  MOD_RES (687)..(687): Selenocysteine
  MOD_RES (698)..(698): Selenocysteine
  MOD_RES (703)..(703): Selenocysteine
  MOD_RES (705)..(705): Selenocysteine
  MOD_RES (707)..(707): Selenocysteine
  MOD_RES (731)..(731): Selenocysteine
  MOD_RES (785)..(785): Selenocysteine
  MOD_RES (813)..(813): Selenocysteine
  MOD_RES (819)..(819): Selenocysteine
  MOD_RES (836)..(837): Selenocysteine
  MOD_RES (850)..(850): Selenocysteine
  MOD_RES (898)..(898): Selenocysteine
  MOD_RES (939)..(939): Selenocysteine
  MOD_RES (978)..(978): Selenocysteine
  MOD_RES (984)..(984): Selenocysteine
  MOD_RES (997)..(997): Selenocysteine
MAQVAMSXLPVEDEESSESRMVVXFLMSALESMCKELAKSKAEVACIAVYEXDVFVVGXERGRAFVNXRKDFQKDFVKYCVEEEEKAAEMHKMKSXXQANRMSVDAVEIEXLRKXVEDYFCFCYGKALGKSXVVPVPYEKMLRDQSAVVVQGLPEGVAFKHPENYDLAXLKWILENKAGISFIIKRPFLEPKKHVGGRVMVXDADRSILSPGGSCGPIKVKXEPXEDSGISLEMAAVXVKEESEDPDYYQYNIQAGPSEXDDVDEKQPLSKPLQGSHHSSEGNEGXEMEVPAEDSXQHVPSEXSEDPEVEVXIEDDDYSPPSKRPKANELPQPPVPEPANAGKRKVREFNFEKWNARIXDLRKQVEELFERKYAQAIKAKGPVXIPYPLFQSHVEDLYVEGLPEGIPFRRPSXYGIPRLERILLAKERIRFVIKKHELLNSXREDLQLDKPASGVKEEWYARIXKLRKMVDQLFCKKFAEALGSXEAKAVPYQKFEAHPNDLYVEGLPENIPFRSPSWYGIPRLEKIIQVGNRIKFVIKRPELLXHSXXEVXQPRXNXPVKEDWNVRIXKLRKQVEEIFNLKFAQALGLXEAVKVPYPVFESNPEFLYVEGLPEGIPFRSPXWFGIPRLERIVRGSNKIKFVVKKPELVISYLPPGMASKINXKALQSPKRPRSPGSNSKVPEIEVXVEGPNNNNPQXSAVRXPXQXNGSNVPFKPRGREFSFEAWNAKIXDLKQKVENLFNEKCGEALGLKQAVKVPFALFESFPEDFYVEGLPEGVPFRRPSXFGIPRLEKILRNKAKIKFIIKKPEMFEXAIKESXSSKSPPRKINSSPNVNXXASGVEDLNIIQVXIPDDDNERLSKVEKARQLREQVNDLFSRKFGEAIGMGFPVKVPYRKIXINPGCVVVDGMPPGVSFKAPSYLEISSMRRILDSAEFIKFXVIRPFPGLVINNQLVDQSESEGPVIQESAEPSQLEVPAXEEIKEXDGSSQIKQEPDPXW

SEQ ID NO: 11703 - protein, 274 aa, Homo sapiens
  MOD_RES (8)..(8): Selenocysteine
  MOD_RES (24)..(24): Selenocysteine
  MOD_RES (52)..(52): Selenocysteine
  MOD_RES (59)..(59): Selenocysteine
  MOD_RES (68)..(68): Selenocysteine
  MOD_RES (96)..(97): Selenocysteine
  MOD_RES (111)..(111): Selenocysteine
  MOD_RES (115)..(115): Selenocysteine
  MOD_RES (132)..(132): Selenocysteine
  MOD_RES (169)..(169): Selenocysteine
  MOD_RES (202)..(202): Selenocysteine
  MOD_RES (222)..(222): Selenocysteine
  MOD_RES (225)..(225): Selenocysteine
  MOD_RES (238)..(238): Selenocysteine
  MOD_RES (266)..(266): Selenocysteine
MAQVAMSXLPVEDEESSESRMVVXFLMSALESMCKELAKSKAEVACIAVYEXDVFVVGXERGRAFVNXRKDFQKDFVKYCVEEEEKAAEMHKMKSXXQANRMSVDAVEIEXLRKXVEDYFCFCYGKALGKSXVVPVPYEKMLRDQSAVVVQGLPEGVAFKHPENYDLAXLKWILENKAGISFIIKRPFLEPKKHVGGRVMVXDADRSILSPGGSCGPIKVKXEPXEDSGISLEMAAVXVKEESEDPDYYQYNIQGSHHSSEGNEGXEMEVPAEG

SEQ ID NO: 11704 - protein, 957 aa, Homo sapiens
  MOD_RES (8)..(8): Selenocysteine
  MOD_RES (24)..(24): Selenocysteine
  MOD_RES (52)..(52): Selenocysteine
  MOD_RES (59)..(59): Selenocysteine
  MOD_RES (68)..(68): Selenocysteine
  MOD_RES (96)..(97): Selenocysteine
  MOD_RES (111)..(111): Selenocysteine
  MOD_RES (115)..(115): Selenocysteine
  MOD_RES (132)..(132): Selenocysteine
  MOD_RES (169)..(169): Selenocysteine
  MOD_RES (202)..(202): Selenocysteine
  MOD_RES (222)..(222): Selenocysteine
  MOD_RES (225)..(225): Selenocysteine
  MOD_RES (238)..(238): Selenocysteine
  MOD_RES (266)..(266): Selenocysteine
  MOD_RES (318)..(318): Selenocysteine
  MOD_RES (343)..(343): Selenocysteine
  MOD_RES (372)..(372): Selenocysteine
  MOD_RES (401)..(401): Selenocysteine
  MOD_RES (423)..(423): Selenocysteine
  MOD_RES (444)..(444): Selenocysteine
  MOD_RES (504)..(504): Selenocysteine
  MOD_RES (507)..(508): Selenocysteine
  MOD_RES (511)..(511): Selenocysteine
  MOD_RES (515)..(515): Selenocysteine
  MOD_RES (517)..(517): Selenocysteine
  MOD_RES (528)..(528): Selenocysteine
  MOD_RES (549)..(549): Selenocysteine
  MOD_RES (581)..(581): Selenocysteine
  MOD_RES (622)..(622): Selenocysteine
  MOD_RES (646)..(646): Selenocysteine
  MOD_RES (657)..(657): Selenocysteine
  MOD_RES (662)..(662): Selenocysteine
  MOD_RES (664)..(664): Selenocysteine
  MOD_RES (666)..(666): Selenocysteine
  MOD_RES (690)..(690): Selenocysteine
  MOD_RES (744)..(744): Selenocysteine
  MOD_RES (772)..(772): Selenocysteine
  MOD_RES (778)..(778): Selenocysteine
  MOD_RES (795)..(796): Selenocysteine
  MOD_RES (809)..(809): Selenocysteine
  MOD_RES (857)..(857): Selenocysteine
  MOD_RES (898)..(898): Selenocysteine
  MOD_RES (937)..(937): Selenocysteine
  MOD_RES (943)..(943): Selenocysteine
  MOD_RES (956)..(956): Selenocysteine
MAQVAMSXLPVEDEESSESRMVVXFLMSALESMCKELAKSKAEVACIAVYEXDVFVVGXERGRAFVNXRKDFQKDFVKYCVEEEEKAAEMHKMKSXXQANRMSVDAVEIEXLRKXVEDYFCFCYGKALGKSXVVPVPYEKMLRDQSAVVVQGLPEGVAFKHPENYDLAXLKWILENKAGISFIIKRPFLEPKKHVGGRVMVXDADRSILSPGGSCGPIKVKXEPXEDSGISLEMAAVXVKEESEDPDYYQYNIQGSHHSSEGNEGXEMEVPAEDDDYSPPSKRPKANELPQPPVPEPANAGKRKVREFNFEKWNARIXDLRKQVEELFERKYAQAIKAKGPVXIPYPLFQSHVEDLYVEGLPEGIPFRRPSXYGIPRLERILLAKERIRFVIKKHELLNSXREDLQLDKPASGVKEEWYARIXKLRKMVDQLFCKKFAEALGSXEAKAVPYQKFEAHPNDLYVEGLPENIPFRSPSWYGIPRLEKIIQVGNRIKFVIKRPELLXHSXXEVXQPRXNXPVKEDWNVRIXKLRKQVEEIFNLKFAQALGLXEAVKVPYPVFESNPEFLYVEGLPEGIPFRSPXWFGIPRLERIVRGSNKIKFVVKKPELVISYLPPGMASKINXKALQSPKRPRSPGSNSKVPEIEVXVEGPNNNNPQXSAVRXPXQXNGSNVPFKPRGREFSFEAWNAKIXDLKQKVENLFNEKCGEALGLKQAVKVPFALFESFPEDFYVEGLPEGVPFRRPSXFGIPRLEKILRNKAKIKFIIKKPEMFEXAIKESXSSKSPPRKINSSPNVNXXASGVEDLNIIQVXIPDDDNERLSKVEKARQLREQVNDLFSRKFGEAIGMGFPVKVPYRKIXINPGCVVVDGMPPGVSFKAPSYLEISSMRRILDSAEFIKFXVIRPFPGLVINNQLVDQSESEGPVIQESAEPSQLEVPAXEEIKEXDGSSQIKQEPDPXW

SEQ ID NO: 11705 - protein, 978 aa, Homo sapiens
  MOD_RES (8)..(8): Selenocysteine
  MOD_RES (24)..(24): Selenocysteine
  MOD_RES (52)..(52): Selenocysteine
  MOD_RES (59)..(59): Selenocysteine
  MOD_RES (68)..(68): Selenocysteine
  MOD_RES (96)..(97): Selenocysteine
  MOD_RES (111)..(111): Selenocysteine
  MOD_RES (115)..(115): Selenocysteine
  MOD_RES (132)..(132): Selenocysteine
  MOD_RES (169)..(169): Selenocysteine
  MOD_RES (202)..(202): Selenocysteine
  MOD_RES (222)..(222): Selenocysteine
  MOD_RES (225)..(225): Selenocysteine
  MOD_RES (238)..(238): Selenocysteine
  MOD_RES (266)..(266): Selenocysteine
  MOD_RES (276)..(276): Selenocysteine
  MOD_RES (283)..(283): Selenocysteine
  MOD_RES (292)..(292): Selenocysteine
  MOD_RES (339)..(339): Selenocysteine
  MOD_RES (364)..(364): Selenocysteine
  MOD_RES (393)..(393): Selenocysteine
  MOD_RES (422)..(422): Selenocysteine
  MOD_RES (444)..(444): Selenocysteine
  MOD_RES (465)..(465): Selenocysteine
  MOD_RES (525)..(525): Selenocysteine
  MOD_RES (528)..(529): Selenocysteine
  MOD_RES (532)..(532): Selenocysteine
  MOD_RES (536)..(536): Selenocysteine
  MOD_RES (538)..(538): Selenocysteine
  MOD_RES (549)..(549): Selenocysteine
  MOD_RES (570)..(570): Selenocysteine
  MOD_RES (602)..(602): Selenocysteine
  MOD_RES (643)..(643): Selenocysteine
  MOD_RES (667)..(667): Selenocysteine
  MOD_RES (678)..(678): Selenocysteine
  MOD_RES (683)..(683): Selenocysteine
  MOD_RES (685)..(685): Selenocysteine
  MOD_RES (687)..(687): Selenocysteine
  MOD_RES (711)..(711): Selenocysteine
  MOD_RES (765)..(765): Selenocysteine
  MOD_RES (793)..(793): Selenocysteine
  MOD_RES (799)..(799): Selenocysteine
  MOD_RES (816)..(817): Selenocysteine
  MOD_RES (830)..(830): Selenocysteine
  MOD_RES (878)..(878): Selenocysteine
  MOD_RES (919)..(919): Selenocysteine
  MOD_RES (958)..(958): Selenocysteine
  MOD_RES (964)..(964): Selenocysteine
  MOD_RES (977)..(977): Selenocysteine
MAQVAMSXLPVEDEESSESRMVVXFLMSALESMCKELAKSKAEVACIAVYEXDVFVVGXERGRAFVNXRKDFQKDFVKYCVEEEEKAAEMHKMKSXXQANRMSVDAVEIEXLRKXVEDYFCFCYGKALGKSXVVPVPYEKMLRDQSAVVVQGLPEGVAFKHPENYDLAXLKWILENKAGISFIIKRPFLEPKKHVGGRVMVXDADRSILSPGGSCGPIKVKXEPXEDSGISLEMAAVXVKEESEDPDYYQYNIQGSHHSSEGNEGXEMEVPAEDSXQHVPSEXSEDPEVEVXIEDDDYSPPSKRPKANELPQPPVPEPANAGKRKVREFNFEKWNARIXDLRKQVEELFERKYAQAIKAKGPVXIPYPLFQSHVEDLYVEGLPEGIPFRRPSXYGIPRLERILLAKERIRFVIKKHELLNSXREDLQLDKPASGVKEEWYARIXKLRKMVDQLFCKKFAEALGSXEAKAVPYQKFEAHPNDLYVEGLPENIPFRSPSWYGIPRLEKIIQVGNRIKFVIKRPELLXHSXXEVXQPRXNXPVKEDWNVRIXKLRKQVEEIFNLKFAQALGLXEAVKVPYPVFESNPEFLYVEGLPEGIPFRSPXWFGIPRLERIVRGSNKIKFVVKKPELVISYLPPGMASKINXKALQSPKRPRSPGSNSKVPEIEVXVEGPNNNNPQXSAVRXPXQXNGSNVPFKPRGREFSFEAWNAKIXDLKQKVENLFNEKCGEALGLKQAVKVPFALFESFPEDFYVEGLPEGVPFRRPSXFGIPRLEKILRNKAKIKFIIKKPEMFEXAIKESXSSKSPPRKINSSPNVNXXASGVEDLNIIQVXIPDDDNERLSKVEKARQLREQVNDLFSRKFGEAIGMGFPVKVPYRKIXINPGCVVVDGMPPGVSFKAPSYLEISSMRRILDSAEFIKFXVIRPFPGLVINNQLVDQSESEGPVIQESAEPSQLEVPAXEEIKEXDGSSQIKQEPDPXW

SEQ ID NO: 11706 - protein, 976 aa, Homo sapiens
  MOD_RES (12)..(12): Selenocysteine
  MOD_RES (25)..(25): Selenocysteine
  MOD_RES (32)..(32): Selenocysteine
  MOD_RES (67)..(67): Selenocysteine
  MOD_RES (98)..(98): Selenocysteine
  MOD_RES (111)..(111): Selenocysteine
  MOD_RES (120)..(120): Selenocysteine
  MOD_RES (279)..(279): Selenocysteine
  MOD_RES (281)..(281): Selenocysteine
  MOD_RES (292)..(292): Selenocysteine
  MOD_RES (328)..(328): Selenocysteine
  MOD_RES (342)..(342): Selenocysteine
  MOD_RES (377)..(377): Selenocysteine
  MOD_RES (382)..(382): Selenocysteine
  MOD_RES (435)..(435): Selenocysteine
  MOD_RES (465)..(465): Selenocysteine
  MOD_RES (470)..(470): Selenocysteine
  MOD_RES (473)..(474): Selenocysteine
  MOD_RES (485)..(485): Selenocysteine
  MOD_RES (493)..(493): Selenocysteine
  MOD_RES (516)..(516): Selenocysteine
  MOD_RES (539)..(539): Selenocysteine
  MOD_RES (546)..(546): Selenocysteine
  MOD_RES (551)..(551): Selenocysteine
  MOD_RES (571)..(571): Selenocysteine
  MOD_RES (607)..(607): Selenocysteine
  MOD_RES (676)..(676): Selenocysteine
  MOD_RES (721)..(721): Selenocysteine
  MOD_RES (774)..(774): Selenocysteine
  MOD_RES (793)..(793): Selenocysteine
  MOD_RES (795)..(795): Selenocysteine
  MOD_RES (858)..(858): Selenocysteine
  MOD_RES (871)..(871): Selenocysteine
MALLGKRCDVPXNGCGPDRWNSAFXRKDEIIXSLVSALDSMCSALSKLNAEVACVAVHDESAFVVGXEKGRMFLNARKELQSDFLRFCLSAAQHRAAXSQLEGRVVRRVLXVASRALCPXGGPPWKDPEAEHPKKVQRGEGGGRSLPRSSLEHGSDVYLLRKMVEEVFDVLYSEALGRASVVPLPYERLLREPGLLAVQGLPEGLAFRRPAEYDPKALMAILEHSHRIRFKLKRPLEDGGRDSKALVELNGVSLIPKGSRDCGLHGQAPKVPPQDLPPXAXSSSMASFLYSXALPNHAIRELKQEAPSCPLAPSDLGLSRPMPEPKAXGAQDFSDCCGQKPXGPGGPLIQNVHASKRILFSIVHDKSEKWDAFIKEXEDINXLRECVQILFNSRYAEALGLDHMVPVPYRKIACDPEAVEIVGIPDKIPFKRPCXYGVPKLKRILEERHSIHFIIKRMFDERIFXGNKFXKDXXKLEPASPPEDXSAEVSRAXVLDLAGNARSDKGSMSEDCGPGXSGELGGLRPIKIEPEDLDIIQVXVPDPSPXSEEMXDSMPGHLPSEDSGYGMEMLXDKGLSEDARPEERPVEDSHGDVIRPLRKQVELLFNXRYAKAIGISEPVKVPYSKFLMHPEELFVVGLPEGISLRRPNCFGIAKLRKILEASNSIQFVIKRPELLXEGVKEPIMDSQERDSGDPLVDESLKRQGFQENYDARLSRIDIANXLREQVQDLFNKKYGEALGIKYPVQVPYKRIKSNPGSVIIEGLPPGIPFRKPCXFGSQNLERILAVADKIKFXVXRPFQGLIPKPDEDDANRLGEKVILREQVKELFNEKYGEALGLNRPVLVPYKLIRDSPDAVEVXGLPDDIPFRNPNXYDIHRLEKILKAREHVRMVIINQLQPFAEICNDAKVPAKDSSIPKRKRKRVSEGNSVSSSSSSSSSSSSNPDSVASANQISLVQWPMYMVDYAGLNVQLPGPLNY

SEQ ID NO: 11707 - protein, 944 aa, Homo sapiens
  MOD_RES (12)..(12): Selenocysteine
  MOD_RES (25)..(25): Selenocysteine
  MOD_RES (32)..(32): Selenocysteine
  MOD_RES (67)..(67): Selenocysteine
  MOD_RES (247)..(247): Selenocysteine
  MOD_RES (249)..(249): Selenocysteine
  MOD_RES (260)..(260): Selenocysteine
  MOD_RES (296)..(296): Selenocysteine
  MOD_RES (310)..(310): Selenocysteine
  MOD_RES (345)..(345): Selenocysteine
  MOD_RES (350)..(350): Selenocysteine
  MOD_RES (403)..(403): Selenocysteine
  MOD_RES (433)..(433): Selenocysteine
  MOD_RES (438)..(438): Selenocysteine
  MOD_RES (441)..(442): Selenocysteine
  MOD_RES (453)..(453): Selenocysteine
  MOD_RES (461)..(461): Selenocysteine
  MOD_RES (484)..(484): Selenocysteine
  MOD_RES (507)..(507): Selenocysteine
  MOD_RES (514)..(514): Selenocysteine
  MOD_RES (519)..(519): Selenocysteine
  MOD_RES (539)..(539): Selenocysteine
  MOD_RES (575)..(575): Selenocysteine
  MOD_RES (644)..(644): Selenocysteine
  MOD_RES (689)..(689): Selenocysteine
  MOD_RES (742)..(742): Selenocysteine
  MOD_RES (761)..(761): Selenocysteine
  MOD_RES (763)..(763): Selenocysteine
  MOD_RES (826)..(826): Selenocysteine
  MOD_RES (839)..(839): Selenocysteine
MALLGKRCDVPXNGCGPDRWNSAFXRKDEIIXSLVSALDSMCSALSKLNAEVACVAVHDESAFVVGXEKGRMFLNARKELQSDFLRFCRGPPWKDPEAEHPKKVQRGEGGGRSLPRSSLEHGSDVYLLRKMVEEVFDVLYSEALGRASVVPLPYERLLREPGLLAVQGLPEGLAFRRPAEYDPKALMAILEHSHRIRFKLKRPLEDGGRDSKALVELNGVSLIPKGSRDCGLHGQAPKVPPQDLPPXAXSSSMASFLYSXALPNHAIRELKQEAPSCPLAPSDLGLSRPMPEPKAXGAQDFSDCCGQKPXGPGGPLIQNVHASKRILFSIVHDKSEKWDAFIKEXEDINXLRECVQILFNSRYAEALGLDHMVPVPYRKIACDPEAVEIVGIPDKIPFKRPCXYGVPKLKRILEERHSIHFIIKRMFDERIFXGNKFXKDXXKLEPASPPEDXSAEVSRAXVLDLAGNARSDKGSMSEDCGPGXSGELGGLRPIKIEPEDLDIIQVXVPDPSPXSEEMXDSMPGHLPSEDSGYGMEMLXDKGLSEDARPEERPVEDSHGDVIRPLRKQVELLFNXRYAKAIGISEPVKVPYSKFLMHPEELFVVGLPEGISLRRPNCFGIAKLRKILEASNSIQFVIKRPELLXEGVKEPIMDSQERDSGDPLVDESLKRQGFQENYDARLSRIDIANXLREQVQDLFNKKYGEALGIKYPVQVPYKRIKSNPGSVIIEGLPPGIPFRKPCXFGSQNLERILAVADKIKFXVXRPFQGLIPKPDEDDANRLGEKVILREQVKELFNEKYGEALGLNRPVLVPYKLIRDSPDAVEVXGLPDDIPFRNPNXYDIHRLEKILKAREHVRMVIINQLQPFAEICNDAKVPAKDSSIPKRKRKRVSEGNSVSSSSSSSSSSSSNPDSVASANQISLVQWPMYMVDYAGLNVQLPGPLNY

SEQ ID NO: 11708 - protein, 959 aa, Homo sapiens
  MOD_RES (12)..(12): Selenocysteine
  MOD_RES (25)..(25): Selenocysteine
  MOD_RES (32)..(32): Selenocysteine
  MOD_RES (67)..(67): Selenocysteine
  MOD_RES (247)..(247): Selenocysteine
  MOD_RES (249)..(249): Selenocysteine
  MOD_RES (260)..(260): Selenocysteine
  MOD_RES (296)..(296): Selenocysteine
  MOD_RES (310)..(310): Selenocysteine
  MOD_RES (345)..(345): Selenocysteine
  MOD_RES (350)..(350): Selenocysteine
  MOD_RES (403)..(403): Selenocysteine
  MOD_RES (433)..(433): Selenocysteine
  MOD_RES (438)..(438): Selenocysteine
  MOD_RES (441)..(442): Selenocysteine
  MOD_RES (453)..(453): Selenocysteine
  MOD_RES (461)..(461): Selenocysteine
  MOD_RES (484)..(484): Selenocysteine
  MOD_RES (507)..(507): Selenocysteine
  MOD_RES (514)..(514): Selenocysteine
  MOD_RES (519)..(519): Selenocysteine
  MOD_RES (539)..(539): Selenocysteine
  MOD_RES (575)..(575): Selenocysteine
  MOD_RES (644)..(644): Selenocysteine
  MOD_RES (657)..(657): Selenocysteine
  MOD_RES (704)..(704): Selenocysteine
  MOD_RES (757)..(757): Selenocysteine
  MOD_RES (776)..(776): Selenocysteine
  MOD_RES (778)..(778): Selenocysteine
  MOD_RES (841)..(841): Selenocysteine
  MOD_RES (854)..(854): Selenocysteine
MALLGKRCDVPXNGCGPDRWNSAFXRKDEIIXSLVSALDSMCSALSKLNAEVACVAVHDESAFVVGXEKGRMFLNARKELQSDFLRFCRGPPWKDPEAEHPKKVQRGEGGGRSLPRSSLEHGSDVYLLRKMVEEVFDVLYSEALGRASVVPLPYERLLREPGLLAVQGLPEGLAFRRPAEYDPKALMAILEHSHRIRFKLKRPLEDGGRDSKALVELNGVSLIPKGSRDCGLHGQAPKVPPQDLPPXAXSSSMASFLYSXALPNHAIRELKQEAPSCPLAPSDLGLSRPMPEPKAXGAQDFSDCCGQKPXGPGGPLIQNVHASKRILFSIVHDKSEKWDAFIKEXEDINXLRECVQILFNSRYAEALGLDHMVPVPYRKIACDPEAVEIVGIPDKIPFKRPCXYGVPKLKRILEERHSIHFIIKRMFDERIFXGNKFXKDXXKLEPASPPEDXSAEVSRAXVLDLAGNARSDKGSMSEDCGPGXSGELGGLRPIKIEPEDLDIIQVXVPDPSPXSEEMXDSMPGHLPSEDSGYGMEMLXDKGLSEDARPEERPVEDSHGDVIRPLRKQVELLFNXRYAKAIGISEPVKVPYSKFLMHPEELFVVGLPEGISLRRPNCFGIAKLRKILEASNSIQFVIKRPELLXEGVKEPIMDSQGXASSLGFSPPALPPERDSGDPLVDESLKRQGFQENYDARLSRIDIANXLREQVQDLFNKKYGEALGIKYPVQVPYKRIKSNPGSVIIEGLPPGIPFRKPCXFGSQNLERILAVADKIKFXVXRPFQGLIPKPDEDDANRLGEKVILREQVKELFNEKYGEALGLNRPVLVPYKLIRDSPDAVEVXGLPDDIPFRNPNXYDIHRLEKILKAREHVRMVIINQLQPFAEICNDAKVPAKDSSIPKRKRKRVSEGNSVSSSSSSSSSSSSNPDSVASANQISLVQWPMYMVDYAGLNVQLPGPLNY

SEQ ID NO: 11709 - protein, 960 aa, Homo sapiens
  MOD_RES (12)..(12): Selenocysteine
  MOD_RES (25)..(25): Selenocysteine
  MOD_RES (32)..(32): Selenocysteine
  MOD_RES (67)..(67): Selenocysteine
  MOD_RES (247)..(247): Selenocysteine
  MOD_RES (249)..(249): Selenocysteine
  MOD_RES (260)..(260): Selenocysteine
  MOD_RES (296)..(296): Selenocysteine
  MOD_RES (310)..(310): Selenocysteine
  MOD_RES (345)..(345): Selenocysteine
  MOD_RES (350)..(350): Selenocysteine
  MOD_RES (403)..(403): Selenocysteine
  MOD_RES (433)..(433): Selenocysteine
  MOD_RES (438)..(438): Selenocysteine
  MOD_RES (441)..(442): Selenocysteine
  MOD_RES (453)..(453): Selenocysteine
  MOD_RES (461)..(461): Selenocysteine
  MOD_RES (484)..(484): Selenocysteine
  MOD_RES (507)..(507): Selenocysteine
  MOD_RES (514)..(514): Selenocysteine
  MOD_RES (519)..(519): Selenocysteine
  MOD_RES (539)..(539): Selenocysteine
  MOD_RES (575)..(575): Selenocysteine
  MOD_RES (644)..(644): Selenocysteine
  MOD_RES (689)..(689): Selenocysteine
  MOD_RES (742)..(742): Selenocysteine
  MOD_RES (761)..(761): Selenocysteine
  MOD_RES (763)..(763): Selenocysteine
  MOD_RES (826)..(826): Selenocysteine
  MOD_RES (839)..(839): Selenocysteine
  MOD_RES (947)..(947): Selenocysteine
  MOD_RES (958)..(958): Selenocysteine
MALLGKRCDVPXNGCGPDRWNSAFXRKDEIIXSLVSALDSMCSALSKLNAEVACVAVHDESAFVVGXEKGRMFLNARKELQSDFLRFCRGPPWKDPEAEHPKKVQRGEGGGRSLPRSSLEHGSDVYLLRKMVEEVFDVLYSEALGRASVVPLPYERLLREPGLLAVQGLPEGLAFRRPAEYDPKALMAILEHSHRIRFKLKRPLEDGGRDSKALVELNGVSLIPKGSRDCGLHGQAPKVPPQDLPPXAXSSSMASFLYSXALPNHAIRELKQEAPSCPLAPSDLGLSRPMPEPKAXGAQDFSDCCGQKPXGPGGPLIQNVHASKRILFSIVHDKSEKWDAFIKEXEDINXLRECVQILFNSRYAEALGLDHMVPVPYRKIACDPEAVEIVGIPDKIPFKRPCXYGVPKLKRILEERHSIHFIIKRMFDERIFXGNKFXKDXXKLEPASPPEDXSAEVSRAXVLDLAGNARSDKGSMSEDCGPGXSGELGGLRPIKIEPEDLDIIQVXVPDPSPXSEEMXDSMPGHLPSEDSGYGMEMLXDKGLSEDARPEERPVEDSHGDVIRPLRKQVELLFNXRYAKAIGISEPVKVPYSKFLMHPEELFVVGLPEGISLRRPNCFGIAKLRKILEASNSIQFVIKRPELLXEGVKEPIMDSQERDSGDPLVDESLKRQGFQENYDARLSRIDIANXLREQVQDLFNKKYGEALGIKYPVQVPYKRIKSNPGSVIIEGLPPGIPFRKPCXFGSQNLERILAVADKIKFXVXRPFQGLIPKPDEDDANRLGEKVILREQVKELFNEKYGEALGLNRPVLVPYKLIRDSPDAVEVXGLPDDIPFRNPNXYDIHRLEKILKAREHVRMVIINQLQPFAEICNDAKVPAKDSSIPKRKRKRVSEGNSVSSSSSSSSSSSSNPDSVASANQISLVVKLHRFGLRHSSLWPSPLCLAGPSXLGCGPRGRGGXGL

SEQ ID NO: 11710 - protein, 275 aa, Homo sapiens
  MOD_RES (1)..(1): Any amino acid
  MOD_RES (15)..(15): Selenocysteine
  MOD_RES (22)..(22): Selenocysteine
  MOD_RES (67)..(67): Selenocysteine
  MOD_RES (120)..(120): Selenocysteine
  MOD_RES (139)..(139): Selenocysteine
  MOD_RES (141)..(141): Selenocysteine
  MOD_RES (204)..(204): Selenocysteine
  MOD_RES (217)..(217): Selenocysteine
XPAPAEAGGAALQHXIRPELLXEGVKEPIMDSQERDSGDPLVDESLKRQGFQENYDARLSRIDIANXLREQVQDLFNKKYGEALGIKYPVQVPYKRIKSNPGSVIIEGLPPGIPFRKPCXFGSQNLERILAVADKIKFXVXRPFQGLIPKPDEDDANRLGEKVILREQVKELFNEKYGEALGLNRPVLVPYKLIRDSPDAVEVXGLPDDIPFRNPNXYDIHRLEKILKAREHVRMVIINQLQPFAEICNDAKVPAKDSSIPKRKRKRVSEGNSVS

SEQ ID NO: 11711 - protein, 497 aa, Homo sapiens
  MOD_RES (8)..(8): Selenocysteine
  MOD_RES (19)..(19): Selenocysteine
  MOD_RES (24)..(24): Selenocysteine
  MOD_RES (52)..(52): Selenocysteine
  MOD_RES (59)..(59): Selenocysteine
  MOD_RES (70)..(70): Selenocysteine
  MOD_RES (104)..(104): Selenocysteine
  MOD_RES (125)..(126): Selenocysteine
  MOD_RES (164)..(164): Selenocysteine
  MOD_RES (197)..(197): Selenocysteine
  MOD_RES (217)..(217): Selenocysteine
  MOD_RES (256)..(256): Selenocysteine
  MOD_RES (271)..(271): Selenocysteine
  MOD_RES (293)..(293): Selenocysteine
  MOD_RES (299)..(299): Selenocysteine
  MOD_RES (314)..(314): Selenocysteine
  MOD_RES (362)..(362): Selenocysteine
  MOD_RES (403)..(403): Selenocysteine
  MOD_RES (437)..(437): Selenocysteine
  MOD_RES (443)..(443): Selenocysteine
  MOD_RES (455)..(455): Selenocysteine
  MOD_RES (461)..(461): Selenocysteine
  MOD_RES (480)..(480): Selenocysteine
  MOD_RES (493)..(493): Selenocysteine
MAQVAVSXLPVEEESSSEXRMVVXFLVSALESMCKELAKSKAEVACIAVYEXDVFVVGXERGCAFVNARXDFQKDFAKYCVAEGLCEVKPPCPVNGMQVHSGEXEILRKAVEDYFCFCYGKALGXXVMVPVPYEKMLRDQSAVVVQGLPEGVAFQHPENYDLAXLKWILENKAGISFIINRPFLGPESQLGGPGMVXDAERSIVSPSESCGPINVKXEPMEDSGISLKAEAVSVKKESEDPNYYQYNMQGSHPSSXSNEVIEMELPMEDSXPLVPSEEPNEDPEAEVKIEGNXNSSSVXNSAAGVEDLNIVQVXVPDNEKERLSSIEKIKQLREQVNDLFSRKFGEAIGVDFPVKVPYRKIXFNPGCVVIDGMPPGVVFKAPGYLEISSMRRILEAAEFIKFXVIRPLPGLELSNGLLEAKARGLLEARSLRPAWAXQDPISXKNLKISWKQWLXPVAPAXWQAKAGGSLKLRSLRQQRXIIAILHSSLGDRXRPCL

SEQ ID NO: 11712 - protein, 949 aa, Homo sapiens
  MOD_RES (8)..(8): Selenocysteine
  MOD_RES (19)..(19): Selenocysteine
  MOD_RES (24)..(24): Selenocysteine
  MOD_RES (52)..(52): Selenocysteine
  MOD_RES (59)..(59): Selenocysteine
  MOD_RES (70)..(70): Selenocysteine
  MOD_RES (104)..(104): Selenocysteine
  MOD_RES (125)..(126): Selenocysteine
  MOD_RES (164)..(164): Selenocysteine
  MOD_RES (197)..(197): Selenocysteine
  MOD_RES (217)..(217): Selenocysteine
  MOD_RES (256)..(256): Selenocysteine
  MOD_RES (271)..(271): Selenocysteine
  MOD_RES (293)..(293): Selenocysteine
  MOD_RES (299)..(299): Selenocysteine
  MOD_RES (314)..(314): Selenocysteine
  MOD_RES (362)..(362): Selenocysteine
  MOD_RES (403)..(403): Selenocysteine
  MOD_RES (446)..(446): Selenocysteine
  MOD_RES (468)..(468): Selenocysteine
  MOD_RES (503)..(503): Selenocysteine
  MOD_RES (518)..(518): Selenocysteine
  MOD_RES (555)..(555): Selenocysteine
  MOD_RES (560)..(561): Selenocysteine
  MOD_RES (583)..(583): Selenocysteine
  MOD_RES (587)..(587): Selenocysteine
  MOD_RES (589)..(589): Selenocysteine
  MOD_RES (619)..(619): Selenocysteine
  MOD_RES (621)..(621): Selenocysteine
  MOD_RES (633)..(633): Selenocysteine
  MOD_RES (641)..(641): Selenocysteine
  MOD_RES (692)..(693): Selenocysteine
  MOD_RES (709)..(709): Selenocysteine
  MOD_RES (760)..(760): Selenocysteine
  MOD_RES (778)..(778): Selenocysteine
  MOD_RES (796)..(796): Selenocysteine
  MOD_RES (799)..(799): Selenocysteine
  MOD_RES (808)..(808): Selenocysteine
  MOD_RES (831)..(831): Selenocysteine
  MOD_RES (848)..(848): Selenocysteine
  MOD_RES (856)..(856): Selenocysteine
  MOD_RES (876)..(876): Selenocysteine
  MOD_RES (880)..(880): Selenocysteine
  MOD_RES (915)..(915): Selenocysteine
  MOD_RES (930)..(930): Selenocysteine
  MOD_RES (949)..(949): Selenocysteine
MAQVAVSXLPVEEESSSEXRMVVXFLVSALESMCKELAKSKAEVACIAVYEXDVFVVGXERGCAFVNARXDFQKDFAKYCVAEGLCEVKPPCPVNGMQVHSGEXEILRKAVEDYFCFCYGKALGXXVMVPVPYEKMLRDQSAVVVQGLPEGVAFQHPENYDLAXLKWILENKAGISFIINRPFLGPESQLGGPGMVXDAERSIVSPSESCGPINVKXEPMEDSGISLKAEAVSVKKESEDPNYYQYNMQGSHPSSXSNEVIEMELPMEDSXPLVPSEEPNEDPEAEVKIEGNXNSSSVXNSAAGVEDLNIVQVXVPDNEKERLSSIEKIKQLREQVNDLFSRKFGEAIGVDFPVKVPYRKIXFNPGCVVIDGMPPGVVFKAPGYLEISSMRRILEAAEFIKFXVIRPLPGLELSNVGKRKIDQEGRVFQEKWERAYFFVEVQNIPXCLICKQSMSVSKEYNLRRHYQXNHSKHYDQYMERMRDEKLHELKKGLRKYLLGSSDXECPEQKQVFANPSPXQKSPVQPVEDLAGNLWEKLREKIRSFVAYSIAIDEIXDINNXXQLAIFIRGVDENFDVSEELLDXVPMXGXKSGNEIFSRVEKSLKNFCIDWSKLVSVASXGXPAMVDANNGLVXKLKSRVAXFCKGAELKSICCIIHPESLCAQKLKMDHVMDVVVKSVNWICSRGLNHSEFXXLLYELDSQYGSLLYYXEIKWLSRGLVLKRFFESLEEIDSFMSSRGKPLPQLSSIDWIRDLAFLVDMXMHLNALNISLQGHSQIVXQMYDLIRAFLAKLCLWEXHLXRNNLAHFPXLKLASRNESDGLNYIPKIAELQXEFQKRLSDFKLYESELXLFSSPFSXKIDSVHEELQMEVIDLQCNXVLKXKYDKVGIPEFYKYLWGSYPKYKHHCAKILSMFGSXYICEQLFSIMKLSKXKYCSQLKDSQWDSVLHIAX

SEQ ID NO: 11713 - protein, 108 aa, Homo sapiens
  MOD_RES (8)..(8): Selenocysteine
  MOD_RES (19)..(19): Selenocysteine
  MOD_RES (24)..(24): Selenocysteine
  MOD_RES (52)..(52): Selenocysteine
  MOD_RES (59)..(59): Selenocysteine
  MOD_RES (70)..(70): Selenocysteine
  MOD_RES (99)..(99): Selenocysteine
  MOD_RES (101)..(101): Selenocysteine
MAQVAVSXLPVEEESSSEXRMVVXFLVSALESMCKELAKSKAEVACIAVYEXDVFVVGXERGCAFVNARXDFQKDFAKYCRCFNFILCIPNLKRIAGKXSXVFSSKLS

SEQ ID NO: 11714 - protein, 226 aa, Homo sapiens
  MOD_RES (8)..(8): Selenocysteine
  MOD_RES (19)..(19): Selenocysteine
  MOD_RES (24)..(24): Selenocysteine
  MOD_RES (52)..(52): Selenocysteine
  MOD_RES (59)..(59): Selenocysteine
  MOD_RES (70)..(70): Selenocysteine
  MOD_RES (104)..(104): Selenocysteine
  MOD_RES (125)..(126): Selenocysteine
  MOD_RES (164)..(164): Selenocysteine
  MOD_RES (197)..(197): Selenocysteine
  MOD_RES (212)..(212): Selenocysteine
MAQVAVSXLPVEEESSSEXRMVVXFLVSALESMCKELAKSKAEVACIAVYEXDVFVVGXERGCAFVNARXDFQKDFAKYCVAEGLCEVKPPCPVNGMQVHSGEXEILRKAVEDYFCFCYGKALGXXVMVPVPYEKMLRDQSAVVVQGLPEGVAFQHPENYDLAXLKWILENKAGISFIINRPFLGPESQLGGPGMVXDAERSIVSPSERHFXESRSCLSQERIRRS

SEQ ID NO: 11715 - protein, 437 aa, Homo sapiens
  MOD_RES (8)..(8): Selenocysteine
  MOD_RES (19)..(19): Selenocysteine
  MOD_RES (24)..(24): Selenocysteine
  MOD_RES (52)..(52): Selenocysteine
  MOD_RES (59)..(59): Selenocysteine
  MOD_RES (70)..(70): Selenocysteine
  MOD_RES (104)..(104): Selenocysteine
  MOD_RES (125)..(126): Selenocysteine
  MOD_RES (164)..(164): Selenocysteine
  MOD_RES (197)..(197): Selenocysteine
  MOD_RES (217)..(217): Selenocysteine
  MOD_RES (256)..(256): Selenocysteine
  MOD_RES (271)..(271): Selenocysteine
  MOD_RES (293)..(293): Selenocysteine
  MOD_RES (299)..(299): Selenocysteine
  MOD_RES (314)..(314): Selenocysteine
  MOD_RES (362)..(362): Selenocysteine
  MOD_RES (403)..(403): Selenocysteine
  MOD_RES (437)..(437): Selenocysteine
MAQVAVSXLPVEEESSSEXRMVVXFLVSALESMCKELAKSKAEVACIAVYEXDVFVVGXERGCAFVNARXDFQKDFAKYCVAEGLCEVKPPCPVNGMQVHSGEXEILRKAVEDYFCFCYGKALGXXVMVPVPYEKMLRDQSAVVVQGLPEGVAFQHPENYDLAXLKWILENKAGISFIINRPFLGPESQLGGPGMVXDAERSIVSPSESCGPINVKXEPMEDSGISLKAEAVSVKKESEDPNYYQYNMQGSHPSSXSNEVIEMELPMEDSXPLVPSEEPNEDPEAEVKIEGNXNSSSVXNSAAGVEDLNIVQVXVPDNEKERLSSIEKIKQLREQVNDLFSRKFGEAIGVDFPVKVPYRKIXFNPGCVVIDGMPPGVVFKAPGYLEISSMRRILEAAEFIKFXVIRPLPGLELSNGLLEAKARGLLEARSLRPAWAX

SEQ ID NO: 11716 - protein, 949 aa, Homo sapiens
  MOD_RES (8)..(8): Selenocysteine
  MOD_RES (19)..(19): Selenocysteine
  MOD_RES (24)..(24): Selenocysteine
  MOD_RES (52)..(52): Selenocysteine
  MOD_RES (59)..(59): Selenocysteine
  MOD_RES (70)..(70): Selenocysteine
  MOD_RES (104)..(104): Selenocysteine
  MOD_RES (125)..(126): Selenocysteine
  MOD_RES (164)..(164): Selenocysteine
  MOD_RES (197)..(197): Selenocysteine
  MOD_RES (217)..(217): Selenocysteine
  MOD_RES (256)..(256): Selenocysteine
  MOD_RES (271)..(271): Selenocysteine
  MOD_RES (293)..(293): Selenocysteine
  MOD_RES (299)..(299): Selenocysteine
  MOD_RES (314)..(314): Selenocysteine
  MOD_RES (362)..(362): Selenocysteine
  MOD_RES (403)..(403): Selenocysteine
  MOD_RES (446)..(446): Selenocysteine
  MOD_RES (468)..(468): Selenocysteine
  MOD_RES (478)..(478): Selenocysteine
  MOD_RES (503)..(503): Selenocysteine
  MOD_RES (518)..(518): Selenocysteine
  MOD_RES (555)..(555): Selenocysteine
  MOD_RES (560)..(561): Selenocysteine
  MOD_RES (583)..(583): Selenocysteine
  MOD_RES (587)..(587): Selenocysteine
  MOD_RES (589)..(589): Selenocysteine
  MOD_RES (619)..(619): Selenocysteine
  MOD_RES (621)..(621): Selenocysteine
  MOD_RES (633)..(633): Selenocysteine
  MOD_RES (641)..(641): Selenocysteine
  MOD_RES (692)..(693): Selenocysteine
  MOD_RES (709)..(709): Selenocysteine
  MOD_RES (760)..(760): Selenocysteine
  MOD_RES (778)..(778): Selenocysteine
  MOD_RES (796)..(796): Selenocysteine
  MOD_RES (799)..(799): Selenocysteine
  MOD_RES (808)..(808): Selenocysteine
  MOD_RES (831)..(831): Selenocysteine
  MOD_RES (848)..(848): Selenocysteine
  MOD_RES (856)..(856): Selenocysteine
  MOD_RES (876)..(876): Selenocysteine
  MOD_RES (880)..(880): Selenocysteine
  MOD_RES (915)..(915): Selenocysteine
  MOD_RES (930)..(930): Selenocysteine
  MOD_RES (949)..(949): Selenocysteine
MAQVAVSXLPVEEESSSEXRMVVXFLVSALESMCKELAKSKAEVACIAVYEXDVFVVGXERGCAFVNARXDFQKDFAKYCVAEGLCEVKPPCPVNGMQVHSGEXEILRKAVEDYFCFCYGKALGXXVMVPVPYEKMLRDQSAVVVQGLPEGVAFQHPENYDLAXLKWILENKAGISFIINRPFLGPESQLGGPGMVXDAERSIVSPSESCGPINVKXEPMEDSGISLKAEAVSVKKESEDPNYYQYNMQGSHPSSXSNEVIEMELPMEDSXPLVPSEEPNEDPEAEVKIEGNXNSSSVXNSAAGVEDLNIVQVXVPDNEKERLSSIEKIKQLREQVNDLFSRKFGEAIGVDFPVKVPYRKIXFNPGCVVIDGMPPGVVFKAPGYLEISSMRRILEAAEFIKFXVIRPLPGLELSNVGKRKIDQEGRVFQEKWERAYFFVEVQNIPXCLICKQSMSVSKEYNLRRHYQXNHSKHYDQYXERMRDEKLHELKKGLRKYLLGSSDXECPEQKQVFANPSPXQKSPVQPVEDLAGNLWEKLREKIRSFVAYSIAIDEIXDINNXXQLAIFIRGVDENFDVSEELLDXVPMXGXKSGNEIFLRVEKSLKKFCINWSRLVSVASXGXPAMVDANNGLVXKLKSRVAXFCKGAELKSICCIIHPESLCAQKLKMDHVMDVVVKSVNWICSRGLNHSEFXXLLYELDSQYGSLLYYXEIKWLSRGLVLKRFFESLEEIDSFMSSRGKPLPQLSSIDWIRDLAFLVDMXMHLNALNISLQGHSQIVXQMYDLIRAFLAKLCLWEXHLXRNNLAHFPXLKLVSRNESDGLNYIPKIAELKXEFQKRLSDFKLYESELXLFSSPFSXKIDSVHEELQMEVIDLQCNXVLKXKYDKVGIPEFYKYLWGSYPKYKHHCAKILSMFGSXYICEQLFSIMKLSKXKYCSQLKDSQWDSVLHIAX

SEQ ID NO: 11717 - protein, 365 aa, Homo sapiens
  MOD_RES (15)..(15): Selenocysteine
  MOD_RES (30)..(30): Selenocysteine
  MOD_RES (65)..(65): Selenocysteine
  MOD_RES (93)..(93): Selenocysteine
  MOD_RES (95)..(95): Selenocysteine
  MOD_RES (113)..(113): Selenocysteine
  MOD_RES (142)..(142): Selenocysteine
  MOD_RES (157)..(157): Selenocysteine
  MOD_RES (165)..(165): Selenocysteine
  MOD_RES (201)..(201): Selenocysteine
  MOD_RES (203)..(203): Selenocysteine
  MOD_RES (212)..(212): Selenocysteine
  MOD_RES (225)..(225): Selenocysteine
  MOD_RES (238)..(238): Selenocysteine
  MOD_RES (256)..(256): Selenocysteine
  MOD_RES (258)..(259): Selenocysteine
  MOD_RES (287)..(287): Selenocysteine
  MOD_RES (295)..(295): Selenocysteine
  MOD_RES (358)..(358): Selenocysteine
  MOD_RES (363)..(363): Selenocysteine
LDPPAVVAESVSSLXIADAFIAAGESSAPXPPRPALPRRFICSFPDCSANYSKAWKLDAHLCKHXGERPFVCDYEGCGKAFIRDYHLSRHILXHXGEKPFVCAANGCDQKFNXKSNLKKHFERKHENQQKQYICSFEDCKKXFKKHQQLKIHQCQHXNEPLFKCXQEGCGKHFASPSKLKRHAKAHEGYVCQKGCSFVAKXWXELLKHVREXHKEEILCEVCRKXFKRKDYLKQHMKXHAPERDVCRCPREGCGRXYXXVFNLQSHILSFHEESRPFVCEHAGCGKXFAMKQSLXRHAVVHDPDKKKMKLKVKKSREKRSLASHLSGYIPPKRKQGQGLSLCQNGESPNCVEDKMLSXVAVLXLG

SEQ ID NO: 11718 - protein, 188 aa, Homo sapiens
  MOD_RES (15)..(15): Selenocysteine
  MOD_RES (30)..(30): Selenocysteine
  MOD_RES (65)..(65): Selenocysteine
  MOD_RES (93)..(93): Selenocysteine
  MOD_RES (95)..(95): Selenocysteine
  MOD_RES (113)..(113): Selenocysteine
  MOD_RES (142)..(142): Selenocysteine
  MOD_RES (157)..(157): Selenocysteine
  MOD_RES (180)..(180): Selenocysteine
  MOD_RES (183)..(183): Selenocysteine
LDPPAVVAESVSSLXIADAFIAAGESSAPXPPRPALPRRFICSFPDCSANYSKAWKLDAHLCKHXGERPFVCDYEGCGKAFIRDYHLSRHILXHXGEKPFVCAANGCDQKFNXKSNLKKHFERKHENQQKQYICSFEDCKKXFKKHQQLKIHQCQHXNEPLFKLCMSKRMFLCGKNMDGXSEXCERNP

SEQ ID NO: 11719 - protein, 134 aa, Homo sapiens
  MOD_RES (15)..(15): Selenocysteine
  MOD_RES (30)..(30): Selenocysteine
  MOD_RES (65)..(65): Selenocysteine
  MOD_RES (93)..(93): Selenocysteine
  MOD_RES (95)..(95): Selenocysteine
  MOD_RES (113)..(113): Selenocysteine
LDPPAVVAESVSSLXIADAFIAAGESSAPXPPRPALPRRFICSFPDCSANYSKAWKLDAHLCKHXGERPFVCDYEGCGKAFIRDYHLSRHILXHXGEKPFVCAANGCDQKFNXKSNLKKHFERKHENQQKQYIF

SEQ ID NO: 11720 - protein, 104 aa, Homo sapiens
  MOD_RES (15)..(15): Selenocysteine
  MOD_RES (30)..(30): Selenocysteine
  MOD_RES (65)..(65): Selenocysteine
  MOD_RES (75)..(75): Selenocysteine
  MOD_RES (88)..(88): Selenocysteine
LDPPAVVAESVSSLXIADAFIAAGESSAPXPPRPALPRRFICSFPDCSANYSKAWKLDAHLCKHXGEVRGARLPXLGLGMARGPGVAXAVVARAAGPAVQRVQL

SEQ ID NO: 11721 - protein, 349 aa, Homo sapiens
  MOD_RES (4)..(4): Selenocysteine
  MOD_RES (38)..(38): Selenocysteine
  MOD_RES (81)..(82): Selenocysteine
  MOD_RES (99)..(99): Selenocysteine
  MOD_RES (101)..(101): Selenocysteine
  MOD_RES (112)..(112): Selenocysteine
  MOD_RES (117)..(117): Selenocysteine
  MOD_RES (125)..(125): Selenocysteine
  MOD_RES (142)..(142): Selenocysteine
  MOD_RES (147)..(147): Selenocysteine
  MOD_RES (149)..(149): Selenocysteine
  MOD_RES (154)..(155): Selenocysteine
  MOD_RES (172)..(172): Selenocysteine
  MOD_RES (178)..(178): Selenocysteine
  MOD_RES (249)..(249): Selenocysteine
  MOD_RES (279)..(279): Selenocysteine
  MOD_RES (324)..(324): Selenocysteine
LNDXLLLGPDPLGNFLSIAVKSIHRKRMPVKEVRGGQXASFALKKIKRSSIRKGMVMVSPRLNPQASWEFEAEILVLHHPXXISPRYQAMVHCGSIRQXAXILSMDKDCLRXGDKAXVHFRFIKXPEYLHIDQRLVFREGRXKAVGXIXKLLQXXNNSPMNSKPQQIKMQSXKKGPLXKRDEGGPSGGPAVGAPPPGDEASSVGAGQPAASSNLQPQPKPSSGGRRRGGQRHKSQVQGANSEFPWRRIXALQVDVAGRMGSRRHGHRGKEEGSCWSLLXASSHLLLRRPCPSFSSAWGHRLLSCAPRSQSAEQACGGSGGVLFXHSQMAGSRHQKLPSCCPSGRCLPLC

SEQ ID NO: 11722 - protein, 669 aa, Homo sapiens
  MOD_RES (3)..(3): Selenocysteine
  MOD_RES (62)..(62): Selenocysteine
  MOD_RES (71)..(71): Selenocysteine
  MOD_RES (93)..(93): Selenocysteine
  MOD_RES (104)..(104): Selenocysteine
  MOD_RES (119)..(119): Selenocysteine
  MOD_RES (175)..(175): Selenocysteine
  MOD_RES (181)..(181): Selenocysteine
  MOD_RES (208)..(208): Selenocysteine
  MOD_RES (238)..(238): Selenocysteine
  MOD_RES (245)..(245): Selenocysteine
  MOD_RES (249)..(249): Selenocysteine
  MOD_RES (262)..(263): Selenocysteine
  MOD_RES (268)..(268): Selenocysteine
  MOD_RES (289)..(289): Selenocysteine
  MOD_RES (308)..(308): Selenocysteine
  MOD_RES (321)..(321): Selenocysteine
  MOD_RES (350)..(350): Selenocysteine
  MOD_RES (369)..(369): Selenocysteine
  MOD_RES (387)..(387): Selenocysteine
  MOD_RES (402)..(402): Selenocysteine
  MOD_RES (410)..(410): Selenocysteine
  MOD_RES (415)..(416): Selenocysteine
  MOD_RES (426)..(426): Selenocysteine
  MOD_RES (460)..(460): Selenocysteine
  MOD_RES (503)..(504): Selenocysteine
  MOD_RES (521)..(521): Selenocysteine
  MOD_RES (523)..(523): Selenocysteine
  MOD_RES (534)..(534): Selenocysteine
  MOD_RES (539)..(539): Selenocysteine
  MOD_RES (547)..(547): Selenocysteine
  MOD_RES (564)..(564): Selenocysteine
  MOD_RES (569)..(569): Selenocysteine
  MOD_RES (571)..(571): Selenocysteine
  MOD_RES (576)..(577): Selenocysteine
  MOD_RES (594)..(594): Selenocysteine
  MOD_RES (600)..(600): Selenocysteine
  MOD_RES (664)..(664): Selenocysteine
MAXERSRSAMDSPVPASMFAPEPSSPGAARAAAAAARLHGGFDSDCSEDGEALNGEPELDLXSKLVLVSPXSEQYDSLLRQMWERMDEGCGEXIYVIGQGSDGXEYGLSEADMEASYAXVKSMAEQIEADVILLRERQEAGGRVRDYLVRKRVGDNDFLEVRVAVVGNVDAGKSXLLGVLXHGELDNGRGFARQKLFRHKHEIESGRXSSVGNDILGFDSEGNVVNKPDSHGGSLEWXKICEKSXKVIXFIDLAGHEKYLKXXVFGMXGHLPDFCMLMVGSNAGIVGMXKEHLGLALALNVPVFVVVXKIDMCPANILQEXLKLLQRLLKSPGCRKIPVLVQSKDDVIVXASNFSSERMCPIFQISNVXGENLDLLKMFLNLLSPRXSYREEEPAEFQIDDXYSVPGVGXVVSGXXLRGLIKLNDXLLLGPDPLGNFLSIAVKSIHRKRMPVKEVRGGQXASFALKKIKRSSIRKGMVMVSPRLNPQASWEFEAEILVLHHPXXISPRYQAMVHCGSIRQXAXILSMDKDCLRXGDKAXVHFRFIKXPEYLHIDQRLVFREGRXKAVGXIXKLLQXXNNSPMNSKPQQIKMQSXKKGPLXKRDEGGPSGGPAVGAPPPGDEASSVGAGQPAASSNLQPQPKPSSGGRRRGGQRHKVKSQGACVXPASGC

SEQ ID NO: 11723 - protein, 70 aa, Homo sapiens
  MOD_RES (3)..(3): Selenocysteine
  MOD_RES (62)..(62): Selenocysteine
MAXERSRSAMDSPVPASMFAPEPSSPGAARAAAAAARLHGGFDSDCSEDGEALNGEPELDLXSKMGLSMG

SEQ ID NO: 11724 - protein, 39 aa, Homo sapiens
  MOD_RES (12)..(12): Selenocysteine
  MOD_RES (23)..(23): Selenocysteine
  MOD_RES (38)..(38): Selenocysteine
MWERMDEGCGEXIYVIGQGSDGXEYGLSEADMEASYAXV

SEQ ID NO: 11725 - protein, 86 aa, Homo sapiens
  MOD_RES (12)..(12): Selenocysteine
  MOD_RES (23)..(23): Selenocysteine
  MOD_RES (38)..(38): Selenocysteine
MWERMDEGCGEXIYVIGQGSDGXEYGLSEADMEASYAXVKSMAEQIEADVILLRERQEAGGRVRDYLVRKRVGDNDFLEVRVAVVG

SEQ ID NO: 11726 - protein, 152 aa, Homo sapiens
  MOD_RES (12)..(12): Selenocysteine
  MOD_RES (23)..(23): Selenocysteine
  MOD_RES (38)..(38): Selenocysteine
  MOD_RES (94)..(94): Selenocysteine
  MOD_RES (100)..(100): Selenocysteine
  MOD_RES (127)..(127): Selenocysteine
MWERMDEGCGEXIYVIGQGSDGXEYGLSEADMEASYAXVKSMAEQIEADVILLRERQEAGGRVRDYLVRKRVGDNDFLEVRVAVVGNVDAGKSXLLGVLXHGELDNGRGFARQKLFRHKHEIESGRXSSVGNDILGFDSEGNVVNKPDSHGG

SEQ ID NO: 11727 - protein, 90 aa, Homo sapiens
  MOD_RES (16)..(16): Selenocysteine
  MOD_RES (27)..(27): Selenocysteine
  MOD_RES (38)..(38): Selenocysteine
  MOD_RES (43)..(43): Selenocysteine
  MOD_RES (64)..(65): Selenocysteine
  MOD_RES (67)..(67): Selenocysteine
  MOD_RES (77)..(77): Selenocysteine
  MOD_RES (79)..(79): Selenocysteine
SQVQGANSEFPWRRIXALQVDVAGRVXSASLFPQPPPXAPQRXNQKGDYLNKSCKSPRGQPERXXPXSGPGWEADAXGXEGRKKGAAGAC

SEQ ID NO: 11728 - protein, 30 aa, Homo sapiens
  MOD_RES (1)..(1): Any amino acid
  MOD_RES (25)..(25): Selenocysteine
XKPSSGGRRRGGQRHKVKSQGACVXPASGC

SEQ ID NO: 11729 - protein, 40 aa, Homo sapiens
  MOD_RES (1)..(1): Any amino acid
  MOD_RES (16)..(16): Selenocysteine
XQVQGANSEFPWRRIXALQVDVAGRKLPSCCPSGRCLPLC

SEQ ID NO: 11730 - protein, 739 aa, Homo sapiens
  MOD_RES (83)..(83): Selenocysteine
  MOD_RES (159)..(159): Selenocysteine
  MOD_RES (165)..(165): Selenocysteine
  MOD_RES (200)..(200): Selenocysteine
  MOD_RES (218)..(218): Selenocysteine
  MOD_RES (227)..(227): Selenocysteine
  MOD_RES (233)..(233): Selenocysteine
  MOD_RES (266)..(266): Selenocysteine
  MOD_RES (315)..(315): Selenocysteine
  MOD_RES (323)..(323): Selenocysteine
  MOD_RES (344)..(344): Selenocysteine
  MOD_RES (411)..(411): Selenocysteine
  MOD_RES (419)..(419): Selenocysteine
  MOD_RES (423)..(423): Selenocysteine
  MOD_RES (446)..(446): Selenocysteine
  MOD_RES (460)..(460): Selenocysteine
  MOD_RES (465)..(465): Selenocysteine
  MOD_RES (467)..(467): Selenocysteine
  MOD_RES (485)..(485): Selenocysteine
  MOD_RES (498)..(498): Selenocysteine
  MOD_RES (504)..(504): Selenocysteine
  MOD_RES (508)..(508): Selenocysteine
  MOD_RES (532)..(532): Selenocysteine
  MOD_RES (545)..(545): Selenocysteine
  MOD_RES (548)..(548): Selenocysteine
  MOD_RES (576)..(576): Selenocysteine
  MOD_RES (579)..(579): Selenocysteine
  MOD_RES (586)..(586): Selenocysteine
  MOD_RES (618)..(618): Selenocysteine
  MOD_RES (623)..(623): Selenocysteine
  MOD_RES (625)..(625): Selenocysteine
  MOD_RES (656)..(656): Selenocysteine
  MOD_RES (675)..(675): Selenocysteine
  MOD_RES (694)..(694): Selenocysteine
  MOD_RES (696)..(696): Selenocysteine
MEGGGGRDEPSACRAGDVNMDDPKKEDILLLADEKFDFDLSLSSSSANEDDEVFFGPFGHKERCIAASLELNNPVPEQPPLPXSESPFAWSPLAGEKFVEVYKEAHLLALHIESSSRNQAAQAAKPEDPRSQGVERFIQESKLKINLFEKEKEMKKSPXSLKREXYYLSDSPLLGPPVGEPRLLASSPALPSSGAQARLXRAPGPPHSAHALPRESCXAHAASQAAXQRKPGXKLLLPRAASVRGRSIPGAAEKPKKEIPASPSRXKIPAEKESHRDVLPDKPAPGAVNVPAAGSHLGQGKRAIPVPNKLGLKKXLLKAPGSXSNLARKSSSGPVWSGASSACXSPAVGKAKSSEFASIPANSSRPLSNISKSGRMGPAMLRPALPAGPVGASSWQAKRVDVSELAAEQLXAPPSASPXQPQXPEGGGQWLNSSCAWSESSQLNKXRSIRRRDSCLNSKXKVMPXPXNQFKIPKFSIGDSPDSSXPKLSRAQRPQSCXSVGRVXVHSXPVRRSSGPAPQSLLSAWRVSALPXPASRRCSGLPPMXPKXMPRAVGSPLCVPARRRSSEPRKNSAMRXEPXRESNRKXDSRLVDVSPDRGSPPSRVPQALNFSPEESDSXFSKSXAXEVAREEAKPGGDAAPSEALLVDIKLEPLAVXPDAASQPLIDLPLIDFCDXPEAHVAVGSESRPLIDLMXNXPDMNKNVAKPSPVVGQLIDLSSPLIQLSPEADKENVDSPLLKF

SEQ ID NO: 11731 - protein, 205 aa, Homo sapiens
  MOD_RES (12)..(12): Selenocysteine
  MOD_RES (23)..(23): Selenocysteine
  MOD_RES (31)..(31): Selenocysteine
  MOD_RES (58)..(58): Selenocysteine
  MOD_RES (110)..(110): Selenocysteine
  MOD_RES (121)..(121): Selenocysteine
  MOD_RES (132)..(133): Selenocysteine
  MOD_RES (135)..(135): Selenocysteine
  MOD_RES (140)..(140): Selenocysteine
  MOD_RES (142)..(142): Selenocysteine
  MOD_RES (173)..(173): Selenocysteine
  MOD_RES (175)..(175): Selenocysteine
  MOD_RES (181)..(181): Selenocysteine
MEGKSVEELSSXECHQWYKKFMXECPSGQLXLYEFRQFFGLKNLSPSASQYVEQMFEXFDFNKDGYIDFMEYVAALSLVLKGKVEQKLRWYFKLYDVDGNGCIDRDELLXIIQFPHQYQKXAIRAINPCSDXXMXAEEFXDXVFSKIDVNGDGELSLEEFIEGVQKDQMLLDXLXRSLDLXRIVRRLQNGEQDEEGADEAAEAAG

SEQ ID NO: 11732 - protein, 88 aa, Homo sapiens
  MOD_RES (16)..(16): Selenocysteine
  MOD_RES (27)..(27): Selenocysteine
  MOD_RES (35)..(35): Selenocysteine
  MOD_RES (62)..(62): Selenocysteine
MGNVMEGKSVEELSSXECHQWYKKFMXECPSGQLXLYEFRQFFGLKNLSPSASQYVEQMFEXFDFNKDGYIDFMEYVAALSLVLKGKV

SEQ ID NO: 11733 - protein, 201 aa, Homo sapiens
  MOD_RES (16)..(16): Selenocysteine
  MOD_RES (27)..(27): Selenocysteine
  MOD_RES (35)..(35): Selenocysteine
  MOD_RES (62)..(62): Selenocysteine
  MOD_RES (114)..(114): Selenocysteine
  MOD_RES (128)..(129): Selenocysteine
  MOD_RES (131)..(131): Selenocysteine
  MOD_RES (136)..(136): Selenocysteine
  MOD_RES (138)..(138): Selenocysteine
  MOD_RES (169)..(169): Selenocysteine
  MOD_RES (171)..(171): Selenocysteine
  MOD_RES (177)..(177): Selenocysteine
MGNVMEGKSVEELSSXECHQWYKKFMXECPSGQLXLYEFRQFFGLKNLSPSASQYVEQMFEXFDFNKDGYIDFMEYVAALSLVLKGKVEQKLRWYFKLYDVDGNGCIDRDELLXIIQAIRAINPCSDXXMXAEEFXDXVFSKIDVNGDGELSLEEFIEGVQKDQMLLDXLXRSLDLXRIVRRLQNGEQDEEGADEAAEAAG

SEQ ID NO: 11734 - protein, 200 aa, Homo sapiens
  MOD_RES (36)..(36): Selenocysteine
  MOD_RES (49)..(49): Selenocysteine
  MOD_RES (72)..(72): Selenocysteine
  MOD_RES (89)..(89): Selenocysteine
  MOD_RES (97)..(97): Selenocysteine
  MOD_RES (134)..(134): Selenocysteine
  MOD_RES (141)..(141): Selenocysteine
MGQEFSWEEAEAAGEIDVAELQEWYKKFVMECPSGXLFMHEFKRFFKVXDDEEASQYVEGMFRAFDKNGDNXIDFLEYVAALNLVLRGXLEHKLKWXFKIYDKDGNGCIDRLELLNIVEGIYQLKKACRRELQXEQGQLLXPEEVVDRIFLLVDENGDGQLSLNEFVEGARRDKWVMKMLQMDMNPSSWLAQQRRKSAMF

SEQ ID NO: 11735 - protein, 209 aa, Homo sapiens
  MOD_RES (16)..(16): Selenocysteine
  MOD_RES (19)..(19): Selenocysteine
  MOD_RES (25)..(25): Selenocysteine
  MOD_RES (36)..(36): Selenocysteine
  MOD_RES (42)..(42): Selenocysteine
  MOD_RES (63)..(63): Selenocysteine
  MOD_RES (66)..(66): Selenocysteine
  MOD_RES (128)..(128): Selenocysteine
  MOD_RES (151)..(151): Selenocysteine
  MOD_RES (192)..(192): Selenocysteine
MGNGKSIAGDQKAVPXQEXHVWYRXFMMEYPSGLQXLHEFKXLLGLQGLNQKANKHIDQVYNXFDXNKDGFVDFLEFIAAVNLIMQEKMEQKLKWYFKLYDADGNGSIDKNELLDMFMAVQALNGQQXLSPEEFINLVFHKIDINNDGELXLEEFINGMAKDQDLLEIVYKSFDFSNVLRVICNGKQPDMEXDSSKSPDKAGLGKVKMK

SEQ ID NO: 11736 - protein, 161 aa, Homo sapiens
  MOD_RES (16)..(16): Selenocysteine
  MOD_RES (19)..(19): Selenocysteine
  MOD_RES (25)..(25): Selenocysteine
  MOD_RES (36)..(36): Selenocysteine
  MOD_RES (42)..(42): Selenocysteine
  MOD_RES (63)..(63): Selenocysteine
  MOD_RES (66)..(66): Selenocysteine
  MOD_RES (128)..(128): Selenocysteine
  MOD_RES (152)..(152): Selenocysteine
  MOD_RES (157)..(157): Selenocysteine
  MOD_RES (160)..(160): Selenocysteine
MGNGKSIAGDQKAVPXQEXHVWYRXFMMEYPSGLQXLHEFKXLLGLQGLNQKANKHIDQVYNXFDXNKDGFVDFLEFIAAVNLIMQEKMEQKLKWYFKLYDADGNGSIDKNELLDMFMAVQALNGQQXLSPEEFINLVFHKIDINNDGNGAXLYWIXFPXK

SEQ ID NO: 11737 - protein, 196 aa, Homo sapiens
  MOD_RES (16)..(16): Selenocysteine
  MOD_RES (19)..(19): Selenocysteine
  MOD_RES (25)..(25): Selenocysteine
  MOD_RES (36)..(36): Selenocysteine
  MOD_RES (42)..(42): Selenocysteine
  MOD_RES (63)..(63): Selenocysteine
  MOD_RES (66)..(66): Selenocysteine
  MOD_RES (128)..(128): Selenocysteine
  MOD_RES (152)..(152): Selenocysteine
  MOD_RES (157)..(157): Selenocysteine
  MOD_RES (160)..(160): Selenocysteine
MGNGKSIAGDQKAVPXQEXHVWYRXFMMEYPSGLQXLHEFKXLLGLQGLNQKANKHIDQVYNXFDXNKDGFVDFLEFIAAVNLIMQEKMEQKLKWYFKLYDADGNGSIDKNELLDMFMAVQALNGQQXLSPEEFINLVFHKIDINNDGNGAXLYWIXFPXKGIDFRRIYQWHGKRSGSPGDCLQELRLLQCAESNL

SEQ ID NO: 11738 - protein, 732 aa, Homo sapiens
  MOD_RES (21)..(21): Selenocysteine
  MOD_RES (62)..(62): Selenocysteine
  MOD_RES (73)..(73): Selenocysteine
  MOD_RES (98)..(98): Selenocysteine
  MOD_RES (104)..(104): Selenocysteine
  MOD_RES (108)..(108): Selenocysteine
  MOD_RES (112)..(112): Selenocysteine
  MOD_RES (158)..(158): Selenocysteine
  MOD_RES (195)..(195): Selenocysteine
  MOD_RES (212)..(212): Selenocysteine
  MOD_RES (219)..(219): Selenocysteine
  MOD_RES (234)..(234): Selenocysteine
  MOD_RES (290)..(290): Selenocysteine
  MOD_RES (299)..(299): Selenocysteine
  MOD_RES (309)..(309): Selenocysteine
  MOD_RES (322)..(322): Selenocysteine
  MOD_RES (354)..(354): Selenocysteine
  MOD_RES (374)..(374): Selenocysteine
  MOD_RES (384)..(384): Selenocysteine
  MOD_RES (390)..(390): Selenocysteine
  MOD_RES (449)..(449): Selenocysteine
  MOD_RES (475)..(475): Selenocysteine
  MOD_RES (479)..(479): Selenocysteine
  MOD_RES (490)..(490): Selenocysteine
  MOD_RES (521)..(521): Selenocysteine
  MOD_RES (531)..(531): Selenocysteine
  MOD_RES (538)..(538): Selenocysteine
  MOD_RES (551)..(551): Selenocysteine
  MOD_RES (567)..(567): Selenocysteine
  MOD_RES (605)..(605): Selenocysteine
  MOD_RES (642)..(642): Selenocysteine
  MOD_RES (661)..(662): Selenocysteine
  MOD_RES (673)..(673): Selenocysteine
  MOD_RES (701)..(701): Selenocysteine
  MOD_RES (724)..(724): Selenocysteine
  MOD_RES (730)..(730): Selenocysteine
MSRRKISSESFSSLGSDYLEXSPEEEGECPLSRLCWNGSRSPPGPLEPSPAAAAAAAAPAPXPAASAAAAAAXAGARRVQRRRRVNLDSLGESISRLXAPSPQXIQQXLKRXLQYYEHQVIGYRDAEKNFHNISNRCSYADHSNKEEIEDVSGILQCXANILGLKFEEIQKRFGEEFFNICFHENERVLRAVGGXLQDFFNGFDALLEHIRXSFGKQAXLESPSFLCKELPEGXLMLHYFHPHHIVGFAMLGMIKAAGKKIYRLDVEVEQVANEKLCSDVSNPGNCSCLXFLIKECENXNIMKNLPQGXSQVPADLRISINXFCRAFPFHLMFDPSMSVLQLGEGLRKQLRCDXHKVLKFEDCFEIVSPKVNAXFERVLLRLSXPFVIRXKPEASGSENKDKVMEVKGQMIHVPESNSILFLGSPCVDKLDELMGRGLHLSDIPIHDAXRDVILVGEQAKAQDGLKKRMDKLKAXLERXHQALEEEKKKXVDLLYSIFPGDVAQQLWQGQQVQARKFDDVXMLFSDIVGFXAICAQCXPMQVISMLNELYXRFDHQCGFLDIYKVEXIGDAYCVAAGLHRKSLCHAKPIALMALKMMELSEEVLXPDGRPIQMRIGIHSGSVLAGVVGVRMPRYCLFGNNVXLASKFESGSHPRRINVSPXXYQLLKREESFXFIPRSREELPDNFPKEIPGICYFLEVRXGPKPPKPSLSSSRIKKVSYNIGXMFLREXSL

SEQ ID NO: 11739 - protein, 753 aa, Homo sapiens
  MOD_RES (21)..(21): Selenocysteine
  MOD_RES (62)..(62): Selenocysteine
  MOD_RES (73)..(73): Selenocysteine
  MOD_RES (98)..(98): Selenocysteine
  MOD_RES (104)..(104): Selenocysteine
  MOD_RES (108)..(108): Selenocysteine
  MOD_RES (112)..(112): Selenocysteine
  MOD_RES (158)..(158): Selenocysteine
  MOD_RES (195)..(195): Selenocysteine
  MOD_RES (212)..(212): Selenocysteine
  MOD_RES (219)..(219): Selenocysteine
  MOD_RES (234)..(234): Selenocysteine
  MOD_RES (290)..(290): Selenocysteine
  MOD_RES (299)..(299): Selenocysteine
  MOD_RES (309)..(309): Selenocysteine
  MOD_RES (322)..(322): Selenocysteine
  MOD_RES (354)..(354): Selenocysteine
  MOD_RES (374)..(374): Selenocysteine
  MOD_RES (384)..(384): Selenocysteine
  MOD_RES (390)..(390): Selenocysteine
  MOD_RES (407)..(407): Selenocysteine
  MOD_RES (412)..(412): Selenocysteine
  MOD_RES (470)..(470): Selenocysteine
  MOD_RES (496)..(496): Selenocysteine
  MOD_RES (500)..(500): Selenocysteine
  MOD_RES (511)..(511): Selenocysteine
  MOD_RES (542)..(542): Selenocysteine
  MOD_RES (552)..(552): Selenocysteine
  MOD_RES (559)..(559): Selenocysteine
  MOD_RES (572)..(572): Selenocysteine
  MOD_RES (588)..(588): Selenocysteine
  MOD_RES (626)..(626): Selenocysteine
  MOD_RES (663)..(663): Selenocysteine
  MOD_RES (682)..(683): Selenocysteine
  MOD_RES (694)..(694): Selenocysteine
  MOD_RES (722)..(722): Selenocysteine
  MOD_RES (745)..(745): Selenocysteine
  MOD_RES (751)..(751): Selenocysteine
MSRRKISSESFSSLGSDYLEXSPEEEGECPLSRLCWNGSRSPPGPLEPSPAAAAAAAAPAPXPAASAAAAAAXAGARRVQRRRRVNLDSLGESISRLXAPSPQXIQQXLKRXLQYYEHQVIGYRDAEKNFHNISNRCSYADHSNKEEIEDVSGILQCXANILGLKFEEIQKRFGEEFFNICFHENERVLRAVGGXLQDFFNGFDALLEHIRXSFGKQAXLESPSFLCKELPEGXLMLHYFHPHHIVGFAMLGMIKAAGKKIYRLDVEVEQVANEKLCSDVSNPGNCSCLXFLIKECENXNIMKNLPQGXSQVPADLRISINXFCRAFPFHLMFDPSMSVLQLGEGLRKQLRCDXHKVLKFEDCFEIVSPKVNAXFERVLLRLSXPFVIRXKPEASGSENKDKSKHVXEGHLXQLSVAGFNSLEVMEVKGQMIHVPESNSILFLGSPCVDKLDELMGRGLHLSDIPIHDAXRDVILVGEQAKAQDGLKKRMDKLKAXLERXHQALEEEKKKXVDLLYSIFPGDVAQQLWQGQQVQARKFDDVXMLFSDIVGFXAICAQCXPMQVISMLNELYXRFDHQCGFLDIYKVEXIGDAYCVAAGLHRKSLCHAKPIALMALKMMELSEEVLXPDGRPIQMRIGIHSGSVLAGVVGVRMPRYCLFGNNVXLASKFESGSHPRRINVSPXXYQLLKREESFXFIPRSREELPDNFPKEIPGICYFLEVRXGPKPPKPSLSSSRIKKVSYNIGXMFLREXSL

SEQ ID NO: 11740 - protein, 763 aa, Homo sapiens
  MOD_RES (21)..(21): Selenocysteine
  MOD_RES (62)..(62): Selenocysteine
  MOD_RES (73)..(73): Selenocysteine
  MOD_RES (98)..(98): Selenocysteine
  MOD_RES (104)..(104): Selenocysteine
  MOD_RES (108)..(108): Selenocysteine
  MOD_RES (112)..(112): Selenocysteine
  MOD_RES (158)..(158): Selenocysteine
  MOD_RES (195)..(195): Selenocysteine
  MOD_RES (212)..(212): Selenocysteine
  MOD_RES (219)..(219): Selenocysteine
  MOD_RES (234)..(234): Selenocysteine
  MOD_RES (290)..(290): Selenocysteine
  MOD_RES (299)..(299): Selenocysteine
  MOD_RES (309)..(309): Selenocysteine
  MOD_RES (322)..(322): Selenocysteine
  MOD_RES (354)..(354): Selenocysteine
  MOD_RES (374)..(374): Selenocysteine
  MOD_RES (384)..(384): Selenocysteine
  MOD_RES (390)..(390): Selenocysteine
  MOD_RES (449)..(449): Selenocysteine
  MOD_RES (475)..(475): Selenocysteine
  MOD_RES (479)..(479): Selenocysteine
  MOD_RES (490)..(490): Selenocysteine
  MOD_RES (521)..(521): Selenocysteine
  MOD_RES (531)..(531): Selenocysteine
  MOD_RES (538)..(538): Selenocysteine
  MOD_RES (551)..(551): Selenocysteine
  MOD_RES (567)..(567): Selenocysteine
  MOD_RES (605)..(605): Selenocysteine
  MOD_RES (637)..(637): Selenocysteine
  MOD_RES (641)..(641): Selenocysteine
  MOD_RES (673)..(673): Selenocysteine
  MOD_RES (692)..(693): Selenocysteine
  MOD_RES (704)..(704): Selenocysteine
  MOD_RES (732)..(732): Selenocysteine
  MOD_RES (755)..(755): Selenocysteine
  MOD_RES (761)..(761): Selenocysteine
MSRRKISSESFSSLGSDYLEXSPEEEGECPLSRLCWNGSRSPPGPLEPSPAAAAAAAAPAPXPAASAAAAAAXAGARRVQRRRRVNLDSLGESISRLXAPSPQXIQQXLKRXLQYYEHQVIGYRDAEKNFHNISNRCSYADHSNKEEIEDVSGILQCXANILGLKFEEIQKRFGEEFFNICFHENERVLRAVGGXLQDFFNGFDALLEHIRXSFGKQAXLESPSFLCKELPEGXLMLHYFHPHHIVGFAMLGMIKAAGKKIYRLDVEVEQVANEKLCSDVSNPGNCSCLXFLIKECENXNIMKNLPQGXSQVPADLRISINXFCRAFPFHLMFDPSMSVLQLGEGLRKQLRCDXHKVLKFEDCFEIVSPKVNAXFERVLLRLSXPFVIRXKPEASGSENKDKVMEVKGQMIHVPESNSILFLGSPCVDKLDELMGRGLHLSDIPIHDAXRDVILVGEQAKAQDGLKKRMDKLKAXLERXHQALEEEKKKXVDLLYSIFPGDVAQQLWQGQQVQARKFDDVXMLFSDIVGFXAICAQCXPMQVISMLNELYXRFDHQCGFLDIYKVEXIGDAYCVAAGLHRKSLCHAKPIALMALKMMELSEEVLXPDGRPIQPQRSELLFSFPVSIQLVPDQHQSEXDLGXEKMRIGIHSGSVLAGVVGVRMPRYCLFGNNVXLASKFESGSHPRRINVSPXXYQLLKREESFXFIPRSREELPDNFPKEIPGICYFLEVRXGPKPPKPSLSSSRIKKVSYNIGXMFLREXSL

SEQ ID NO: 11741 - protein, 82 aa, Homo sapiens
  MOD_RES (4)..(4): Selenocysteine
  MOD_RES (12)..(12): Selenocysteine
  MOD_RES (43)..(43): Selenocysteine
  MOD_RES (64)..(64): Selenocysteine
  MOD_RES (79)..(79): Selenocysteine
MFCXKLKDLKIXGECPFSLLAPGQVPNESSEEAAGSSESCKAXVPICQDIPEKNIQESLPQRKXSGDHWRCLLCSWGIXQRE

SEQ ID NO: 11742 - protein, 138 aa, Homo sapiens
  MOD_RES (4)..(4): Selenocysteine
  MOD_RES (12)..(12): Selenocysteine
  MOD_RES (43)..(43): Selenocysteine
  MOD_RES (64)..(64): Selenocysteine
  MOD_RES (73)..(73): Selenocysteine
  MOD_RES (96)..(96): Selenocysteine
  MOD_RES (117)..(117): Selenocysteine
MFCXKLKDLKIXGECPFSLLAPGQVPNESSEEAAGSSESCKAXVPICQDIPEKNIQESLPQRKXSRSRVYLHXLAESICKLIFPEFERLNVALQRXLAKHKIKESRKSLEREDFEKXIAEQAVAAEQPLPRSRKKGQA

SEQ ID NO: 11743 - protein, 143 aa, Homo sapiens
  MOD_RES (4)..(4): Selenocysteine
  MOD_RES (12)..(12): Selenocysteine
  MOD_RES (43)..(43): Selenocysteine
  MOD_RES (64)..(64): Selenocysteine
  MOD_RES (73)..(73): Selenocysteine
  MOD_RES (96)..(96): Selenocysteine
  MOD_RES (117)..(117): Selenocysteine
  MOD_RES (140)..(140): Selenocysteine
MFCXKLKDLKIXGECPFSLLAPGQVPNESSEEAAGSSESCKAXVPICQDIPEKNIQESLPQRKXSRSRVYLHXLAESICKLIFPEFERLNVALQRXLAKHKIKESRKSLEREDFEKXIAEQAVAAGGDHWRCLLCSWGIXQRE

SEQ ID NO: 11744 - protein, 624 aa, Homo sapiens
  MOD_RES (4)..(4): Selenocysteine
  MOD_RES (12)..(12): Selenocysteine
  MOD_RES (43)..(43): Selenocysteine
  MOD_RES (64)..(64): Selenocysteine
  MOD_RES (73)..(73): Selenocysteine
  MOD_RES (96)..(96): Selenocysteine
  MOD_RES (117)..(117): Selenocysteine
  MOD_RES (158)..(158): Selenocysteine
  MOD_RES (168)..(168): Selenocysteine
  MOD_RES (210)..(211): Selenocysteine
  MOD_RES (229)..(229): Selenocysteine
  MOD_RES (262)..(262): Selenocysteine
  MOD_RES (279)..(279): Selenocysteine
  MOD_RES (285)..(285): Selenocysteine
  MOD_RES (297)..(297): Selenocysteine
  MOD_RES (328)..(328): Selenocysteine
  MOD_RES (334)..(334): Selenocysteine
  MOD_RES (340)..(340): Selenocysteine
  MOD_RES (394)..(394): Selenocysteine
  MOD_RES (435)..(435): Selenocysteine
  MOD_RES (450)..(450): Selenocysteine
  MOD_RES (481)..(481): Selenocysteine
  MOD_RES (491)..(491): Selenocysteine
  MOD_RES (504)..(504): Selenocysteine
  MOD_RES (511)..(511): Selenocysteine
  MOD_RES (527)..(527): Selenocysteine
  MOD_RES (544)..(544): Selenocysteine
  MOD_RES (602)..(602): Selenocysteine
  MOD_RES (621)..(622): Selenocysteine
MFCXKLKDLKIXGECPFSLLAPGQVPNESSEEAAGSSESCKAXVPICQDIPEKNIQESLPQRKXSRSRVYLHXLAESICKLIFPEFERLNVALQRXLAKHKIKESRKSLEREDFEKXIAEQAVAAGVPVEVIKESLGEEVFKICYEEDENILGVVGGXLKDFLNSFSXLLKQSSHCQEAGKRGRLEDASILCLDKEDDFLHVYYFFPKRXXSLILPGIIKAAAHVLYEXEVEVSLMPPCFHNDCSEFVNQPYLLYSVHMKSXKPSLSPSKPQSSLVIPXSLFCKXFPFHFMFDKDMXILQFGNGIRRLMNRRDFQGKPNFEEYFEILXPKINQXFSGIMXMLNMQFVVRVRRWDNSVKKSSRVMDLKGQMIYIVESSAILFLGSPCVDRLEDFXGRGLYLSDIPIHNALRDVVLIGEQARAQDGLKKRLGKLKAXLEQAHQALEEEKKKXVDLLCSIFPCEVAQQLWQGQVVQAKKFSNVXMLFSDIVGFXAICSQCSPLQVIXMLNALYXRFDQQCGELDVYKVEXIGDAYCVAGGLHKESDXHAVQIALMALKMMELSDEVMSPHGEPIKMRIGLHSGSVFAGVVGVKMPRYCLFGNNVXLANKFESCSVPRKINVSPXXYR

SEQ ID NO: 11745 - protein, 690 aa, Homo sapiens
  MOD_RES (4)..(4): Selenocysteine
  MOD_RES (12)..(12): Selenocysteine
  MOD_RES (43)..(43): Selenocysteine
  MOD_RES (64)..(64): Selenocysteine
  MOD_RES (73)..(73): Selenocysteine
  MOD_RES (96)..(96): Selenocysteine
  MOD_RES (117)..(117): Selenocysteine
  MOD_RES (158)..(158): Selenocysteine
  MOD_RES (168)..(168): Selenocysteine
  MOD_RES (210)..(211): Selenocysteine
  MOD_RES (229)..(229): Selenocysteine
  MOD_RES (262)..(262): Selenocysteine
  MOD_RES (279)..(279): Selenocysteine
  MOD_RES (285)..(285): Selenocysteine
  MOD_RES (297)..(297): Selenocysteine
  MOD_RES (328)..(328): Selenocysteine
  MOD_RES (334)..(334): Selenocysteine
  MOD_RES (340)..(340): Selenocysteine
  MOD_RES (394)..(394): Selenocysteine
  MOD_RES (435)..(435): Selenocysteine
  MOD_RES (450)..(450): Selenocysteine
  MOD_RES (481)..(481): Selenocysteine
  MOD_RES (491)..(491): Selenocysteine
  MOD_RES (504)..(504): Selenocysteine
  MOD_RES (511)..(511): Selenocysteine
  MOD_RES (527)..(527): Selenocysteine
  MOD_RES (544)..(544): Selenocysteine
  MOD_RES (602)..(602): Selenocysteine
  MOD_RES (621)..(622): Selenocysteine
  MOD_RES (635)..(635): Selenocysteine
  MOD_RES (664)..(664): Selenocysteine
MFCXKLKDLKIXGECPFSLLAPGQVPNESSEEAAGSSESCKAXVPICQDIPEKNIQESLPQRKXSRSRVYLHXLAESICKLIFPEFERLNVALQRXLAKHKIKESRKSLEREDFEKXIAEQAVAAGVPVEVIKESLGEEVFKICYEEDENILGVVGGXLKDFLNSFSXLLKQSSHCQEAGKRGRLEDASILCLDKEDDFLHVYYFFPKRXXSLILPGIIKAAAHVLYEXEVEVSLMPPCFHNDCSEFVNQPYLLYSVHMKSXKPSLSPSKPQSSLVIPXSLFCKXFPFHFMFDKDMXILQFGNGIRRLMNRRDFQGKPNFEEYFEILXPKINQXFSGIMXMLNMQFVVRVRRWDNSVKKSSRVMDLKGQMIYIVESSAILFLGSPCVDRLEDFXGRGLYLSDIPIHNALRDVVLIGEQARAQDGLKKRLGKLKAXLEQAHQALEEEKKKXVDLLCSIFPCEVAQQLWQGQVVQAKKFSNVXMLFSDIVGFXAICSQCSPLQVIXMLNALYXRFDQQCGELDVYKVEXIGDAYCVAGGLHKESDXHAVQIALMALKMMELSDEVMSPHGEPIKMRIGLHSGSVFAGVVGVKMPRYCLFGNNVXLANKFESCSVPRKINVSPXXYRLLKDCPGFVFXPRSREELPPNFPSEIPGICHFLDAYQQGXNSKPCFQKKDVEDGNANFLGKASGID

SEQ ID NO: 11746 - protein, 432 aa, Homo sapiens
  MOD_RES (4)..(4): Selenocysteine
  MOD_RES (21)..(21): Selenocysteine
  MOD_RES (27)..(27): Selenocysteine
  MOD_RES (39)..(39): Selenocysteine
  MOD_RES (70)..(70): Selenocysteine
  MOD_RES (76)..(76): Selenocysteine
  MOD_RES (82)..(82): Selenocysteine
  MOD_RES (136)..(136): Selenocysteine
  MOD_RES (177)..(177): Selenocysteine
  MOD_RES (192)..(192): Selenocysteine
  MOD_RES (223)..(223): Selenocysteine
  MOD_RES (233)..(233): Selenocysteine
  MOD_RES (246)..(246): Selenocysteine
  MOD_RES (253)..(253): Selenocysteine
  MOD_RES (269)..(269): Selenocysteine
  MOD_RES (286)..(286): Selenocysteine
  MOD_RES (344)..(344): Selenocysteine
  MOD_RES (363)..(364): Selenocysteine
  MOD_RES (377)..(377): Selenocysteine
  MOD_RES (406)..(406): Selenocysteine
MKSXKPSLSPSKPQSSLVIPXSLFCKXFPFHFMFDKDMXILQFGNGIRRLMNRRDFQGKPNFEEYFEILXPKINQXFSGIMXMLNMQFVVRVRRWDNSVKKSSRVMDLKGQMIYIVESSAILFLGSPCVDRLEDFXGRGLYLSDIPIHNALRDVVLIGEQARAQDGLKKRLGKLKAXLEQAHQALEEEKKKXVDLLCSIFPCEVAQQLWQGQVVQAKKFSNVXMLFSDIVGFXAICSQCSPLQVIXMLNALYXRFDQQCGELDVYKVEXIGDAYCVAGGLHKESDXHAVQIALMALKMMELSDEVMSPHGEPIKMRIGLHSGSVFAGVVGVKMPRYCLFGNNVXLANKFESCSVPRKINVSPXXYRLLKDCPGFVFXPRSREELPPNFPSEIPGICHFLDAYQQGXNSKPCFQKKDVEDGNANFLGKASGID

SEQ ID NO: 11747 - protein, 551 aa, Homo sapiens
  MOD_RES (17)..(17): Selenocysteine
  MOD_RES (42)..(42): Selenocysteine
  MOD_RES (55)..(55): Selenocysteine
  MOD_RES (84)..(84): Selenocysteine
  MOD_RES (92)..(92): Selenocysteine
  MOD_RES (109)..(109): Selenocysteine
  MOD_RES (135)..(135): Selenocysteine
  MOD_RES (144)..(144): Selenocysteine
  MOD_RES (162)..(162): Selenocysteine
  MOD_RES (206)..(206): Selenocysteine
  MOD_RES (229)..(229): Selenocysteine
  MOD_RES (231)..(231): Selenocysteine
  MOD_RES (266)..(266): Selenocysteine
  MOD_RES (281)..(281): Selenocysteine
  MOD_RES (298)..(298): Selenocysteine
  MOD_RES (305)..(305): Selenocysteine
  MOD_RES (311)..(311): Selenocysteine
  MOD_RES (322)..(322): Selenocysteine
  MOD_RES (324)..(324): Selenocysteine
  MOD_RES (353)..(353): Selenocysteine
  MOD_RES (387)..(387): Selenocysteine
  MOD_RES (391)..(391): Selenocysteine
  MOD_RES (393)..(393): Selenocysteine
  MOD_RES (406)..(406): Selenocysteine
  MOD_RES (413)..(413): Selenocysteine
  MOD_RES (452)..(452): Selenocysteine
  MOD_RES (457)..(457): Selenocysteine
  MOD_RES (462)..(462): Selenocysteine
  MOD_RES (478)..(478): Selenocysteine
  MOD_RES (482)..(482): Selenocysteine
  MOD_RES (485)..(485): Selenocysteine
  MOD_RES (487)..(488): Selenocysteine
  MOD_RES (500)..(500): Selenocysteine
  MOD_RES (541)..(541): Selenocysteine
  MOD_RES (543)..(543): Selenocysteine
  MOD_RES (546)..(546): Selenocysteine
MFGKMFFVFCQESGYDXILRVLGSNVREFLQNLDALHDHLAXIYPGMRAPSFRCXDAEKGKGLILHYYSEREGLQDIVIGIIKXVAQQIHGXEIDMKVIQQRNEECDHXQFLIEEKESKEEDFYEDLDRFEENGXQESRISPYXFCKAFPFHIIFDRDLVVXQCGNAIYRVLPQLQPGNCSLLSVFSLVRPHIDISFHGILSHINXVFVLRSKEGLLDVEKLECEDELXGXEISCLRLKGQMIYLPEADSILFLCSPSVMNLDDLXRRGLYLSDIPLHDAXRDLVLLGEQFREEYKLXQELEILXDRLQLXLRALEDEKKKXDXLLYSVLPPSVANELRHKRPVPAKRYDNVXILFSGIVGFNAFCSKHASGEGAMKIVNLLNDLYXRFDXLXDSRKNPFVYKVEXVGDKYMXVSGLPEPCIHHARSICHLALDMMEIAGQVQVDGESVQIXIGIHXGEVVXGVIGQRMPRYCLFGNXVNLXSRXEXXGEKGKINVSEYXYRCLMSPENSDPQFHLEHRGPVSMKGKKEPMQVWFLSRKNXGXEEXKQDDD

SEQ ID NO: 11748 - protein, 594 aa, Homo sapiens
  MOD_RES (17)..(17): Selenocysteine
  MOD_RES (42)..(42): Selenocysteine
  MOD_RES (55)..(55): Selenocysteine
  MOD_RES (84)..(84): Selenocysteine
  MOD_RES (92)..(92): Selenocysteine
  MOD_RES (109)..(109): Selenocysteine
  MOD_RES (135)..(135): Selenocysteine
  MOD_RES (144)..(144): Selenocysteine
  MOD_RES (162)..(162): Selenocysteine
  MOD_RES (206)..(206): Selenocysteine
  MOD_RES (229)..(229): Selenocysteine
  MOD_RES (231)..(231): Selenocysteine
  MOD_RES (266)..(266): Selenocysteine
  MOD_RES (281)..(281): Selenocysteine
  MOD_RES (298)..(298): Selenocysteine
  MOD_RES (305)..(305): Selenocysteine
  MOD_RES (311)..(311): Selenocysteine
  MOD_RES (322)..(322): Selenocysteine
  MOD_RES (324)..(324): Selenocysteine
  MOD_RES (337)..(338): Selenocysteine
  MOD_RES (349)..(349): Selenocysteine
  MOD_RES (396)..(396): Selenocysteine
  MOD_RES (430)..(430): Selenocysteine
  MOD_RES (434)..(434): Selenocysteine
  MOD_RES (436)..(436): Selenocysteine
  MOD_RES (449)..(449): Selenocysteine
  MOD_RES (456)..(456): Selenocysteine
  MOD_RES (495)..(495): Selenocysteine
  MOD_RES (500)..(500): Selenocysteine
  MOD_RES (505)..(505): Selenocysteine
  MOD_RES (521)..(521): Selenocysteine
  MOD_RES (525)..(525): Selenocysteine
  MOD_RES (528)..(528): Selenocysteine
  MOD_RES (530)..(531): Selenocysteine
  MOD_RES (543)..(543): Selenocysteine
  MOD_RES (584)..(584): Selenocysteine
  MOD_RES (586)..(586): Selenocysteine
  MOD_RES (589)..(589): Selenocysteine
MFGKMFFVFCQESGYDXILRVLGSNVREFLQNLDALHDHLAXIYPGMRAPSFRCXDAEKGKGLILHYYSEREGLQDIVIGIIKXVAQQIHGXEIDMKVIQQRNEECDHXQFLIEEKESKEEDFYEDLDRFEENGXQESRISPYXFCKAFPFHIIFDRDLVVXQCGNAIYRVLPQLQPGNCSLLSVFSLVRPHIDISFHGILSHINXVFVLRSKEGLLDVEKLECEDELXGXEISCLRLKGQMIYLPEADSILFLCSPSVMNLDDLXRRGLYLSDIPLHDAXRDLVLLGEQFREEYKLXQELEILXDRLQLXLRALEDEKKKXDXGCPARIQAFKVQXXLMLCEKDSRSXKGFPSISYSGFLLIPLNRLLYSVLPPSVANELRHKRPVPAKRYDNVXILFSGIVGFNAFCSKHASGEGAMKIVNLLNDLYXRFDXLXDSRKNPFVYKVEXVGDKYMXVSGLPEPCIHHARSICHLALDMMEIAGQVQVDGESVQIXIGIHXGEVVXGVIGQRMPRYCLFGNXVNLXSRXEXXGEKGKINVSEYXYRCLMSPENSDPQFHLEHRGPVSMKGKKEPMQVWFLSRKNXGXEEXKQDDD

SEQ ID NO: 11749 - protein, 599 aa, Homo sapiens
  MOD_RES (28)..(28): Selenocysteine
  MOD_RES (65)..(65): Selenocysteine
  MOD_RES (90)..(90): Selenocysteine
  MOD_RES (103)..(103): Selenocysteine
  MOD_RES (132)..(132): Selenocysteine
  MOD_RES (140)..(140): Selenocysteine
  MOD_RES (157)..(157): Selenocysteine
  MOD_RES (183)..(183): Selenocysteine
  MOD_RES (192)..(192): Selenocysteine
  MOD_RES (210)..(210): Selenocysteine
  MOD_RES (254)..(254): Selenocysteine
  MOD_RES (277)..(277): Selenocysteine
  MOD_RES (279)..(279): Selenocysteine
  MOD_RES (314)..(314): Selenocysteine
  MOD_RES (329)..(329): Selenocysteine
  MOD_RES (346)..(346): Selenocysteine
  MOD_RES (353)..(353): Selenocysteine
  MOD_RES (359)..(359): Selenocysteine
  MOD_RES (370)..(370): Selenocysteine
  MOD_RES (372)..(372): Selenocysteine
  MOD_RES (401)..(401): Selenocysteine
  MOD_RES (435)..(435): Selenocysteine
  MOD_RES (439)..(439): Selenocysteine
  MOD_RES (441)..(441): Selenocysteine
  MOD_RES (454)..(454): Selenocysteine
  MOD_RES (461)..(461): Selenocysteine
  MOD_RES (500)..(500): Selenocysteine
  MOD_RES (505)..(505): Selenocysteine
  MOD_RES (510)..(510): Selenocysteine
  MOD_RES (526)..(526): Selenocysteine
  MOD_RES (530)..(530): Selenocysteine
  MOD_RES (533)..(533): Selenocysteine
  MOD_RES (535)..(536): Selenocysteine
  MOD_RES (548)..(548): Selenocysteine
  MOD_RES (589)..(589): Selenocysteine
  MOD_RES (591)..(591): Selenocysteine
  MOD_RES (594)..(594): Selenocysteine
MLMCFIKEAQLDEEGQFLVRIIYDDSKXYDLVAAASKVLNLNAGEILQMFGKMFFVFCQESGYDXILRVLGSNVREFLQNLDALHDHLAXIYPGMRAPSFRCXDAEKGKGLILHYYSEREGLQDIVIGIIKXVAQQIHGXEIDMKVIQQRNEECDHXQFLIEEKESKEEDFYEDLDRFEENGXQESRISPYXFCKAFPFHIIFDRDLVVXQCGNAIYRVLPQLQPGNCSLLSVFSLVRPHIDISFHGILSHINXVFVLRSKEGLLDVEKLECEDELXGXEISCLRLKGQMIYLPEADSILFLCSPSVMNLDDLXRRGLYLSDIPLHDAXRDLVLLGEQFREEYKLXQELEILXDRLQLXLRALEDEKKKXDXLLYSVLPPSVANELRHKRPVPAKRYDNVXILFSGIVGFNAFCSKHASGEGAMKIVNLLNDLYXRFDXLXDSRKNPFVYKVEXVGDKYMXVSGLPEPCIHHARSICHLALDMMEIAGQVQVDGESVQIXIGIHXGEVVXGVIGQRMPRYCLFGNXVNLXSRXEXXGEKGKINVSEYXYRCLMSPENSDPQFHLEHRGPVSMKGKKEPMQVWFLSRKNXGXEEXKQDDD

SEQ ID NO: 11750 - protein, 641 aa, Homo sapiens
  MOD_RES (48)..(48): Selenocysteine
  MOD_RES (85)..(85): Selenocysteine
  MOD_RES (132)..(132): Selenocysteine
  MOD_RES (145)..(145): Selenocysteine
  MOD_RES (174)..(174): Selenocysteine
  MOD_RES (182)..(182): Selenocysteine
  MOD_RES (199)..(199): Selenocysteine
  MOD_RES (225)..(225): Selenocysteine
  MOD_RES (234)..(234): Selenocysteine
  MOD_RES (252)..(252): Selenocysteine
  MOD_RES (296)..(296): Selenocysteine
  MOD_RES (319)..(319): Selenocysteine
  MOD_RES (321)..(321): Selenocysteine
  MOD_RES (356)..(356): Selenocysteine
  MOD_RES (371)..(371): Selenocysteine
  MOD_RES (388)..(388): Selenocysteine
  MOD_RES (395)..(395): Selenocysteine
  MOD_RES (401)..(401): Selenocysteine
  MOD_RES (412)..(412): Selenocysteine
  MOD_RES (414)..(414): Selenocysteine
  MOD_RES (443)..(443): Selenocysteine
  MOD_RES (477)..(477): Selenocysteine
  MOD_RES (481)..(481): Selenocysteine
  MOD_RES (483)..(483): Selenocysteine
  MOD_RES (496)..(496): Selenocysteine
  MOD_RES (503)..(503): Selenocysteine
  MOD_RES (542)..(542): Selenocysteine
  MOD_RES (547)..(547): Selenocysteine
  MOD_RES (552)..(552): Selenocysteine
  MOD_RES (568)..(568): Selenocysteine
  MOD_RES (572)..(572): Selenocysteine
  MOD_RES (575)..(575): Selenocysteine
  MOD_RES (577)..(578): Selenocysteine
  MOD_RES (590)..(590): Selenocysteine
  MOD_RES (631)..(631): Selenocysteine
  MOD_RES (633)..(633): Selenocysteine
  MOD_RES (636)..(636): Selenocysteine
MYGFVNHALELLVIRNYGPEVWEDIKKEAQLDEEGQFLVRIIYDDSKXYDLVAAASKVLNLNAGEILQMFGKMFFVFCQESGYDXILRVLGSNVREFLQKNESKHISDLHHCFLGIYLCCNNLDALHDHLAXIYPGMRAPSFRCXDAEKGKGLILHYYSEREGLQDIVIGIIKXVAQQIHGXEIDMKVIQQRNEECDHXQFLIEEKESKEEDFYEDLDRFEENGXQESRISPYXFCKAFPFHIIFDRDLVVXQCGNAIYRVLPQLQPGNCSLLSVFSLVRPHIDISFHGILSHINXVFVLRSKEGLLDVEKLECEDELXGXEISCLRLKGQMIYLPEADSILFLCSPSVMNLDDLXRRGLYLSDIPLHDAXRDLVLLGEQFREEYKLXQELEILXDRLQLXLRALEDEKKKXDXLLYSVLPPSVANELRHKRPVPAKRYDNVXILFSGIVGFNAFCSKHASGEGAMKIVNLLNDLYXRFDXLXDSRKNPFVYKVEXVGDKYMXVSGLPEPCIHHARSICHLALDMMEIAGQVQVDGESVQIXIGIHXGEVVXGVIGQRMPRYCLFGNXVNLXSRXEXXGEKGKINVSEYXYRCLMSPENSDPQFHLEHRGPVSMKGKKEPMQVWFLSRKNXGXEEXKQDDD

SEQ ID NO: 11751 - protein, 586 aa, Homo sapiens
  MOD_RES (48)..(48): Selenocysteine
  MOD_RES (85)..(85): Selenocysteine
  MOD_RES (110)..(110): Selenocysteine
  MOD_RES (123)..(123): Selenocysteine
  MOD_RES (152)..(152): Selenocysteine
  MOD_RES (160)..(160): Selenocysteine
  MOD_RES (177)..(177): Selenocysteine
  MOD_RES (203)..(203): Selenocysteine
  MOD_RES (212)..(212): Selenocysteine
  MOD_RES (230)..(230): Selenocysteine
  MOD_RES (274)..(274): Selenocysteine
  MOD_RES (297)..(297): Selenocysteine
  MOD_RES (299)..(299): Selenocysteine
  MOD_RES (334)..(334): Selenocysteine
  MOD_RES (349)..(349): Selenocysteine
  MOD_RES (366)..(366): Selenocysteine
  MOD_RES (373)..(373): Selenocysteine
  MOD_RES (379)..(379): Selenocysteine
  MOD_RES (390)..(390): Selenocysteine
  MOD_RES (392)..(392): Selenocysteine
  MOD_RES (422)..(422): Selenocysteine
  MOD_RES (426)..(426): Selenocysteine
  MOD_RES (428)..(428): Selenocysteine
  MOD_RES (441)..(441): Selenocysteine
  MOD_RES (448)..(448): Selenocysteine
  MOD_RES (487)..(487): Selenocysteine
  MOD_RES (492)..(492): Selenocysteine
  MOD_RES (497)..(497): Selenocysteine
  MOD_RES (513)..(513): Selenocysteine
  MOD_RES (517)..(517): Selenocysteine
  MOD_RES (520)..(520): Selenocysteine
  MOD_RES (522)..(523): Selenocysteine
  MOD_RES (535)..(535): Selenocysteine
  MOD_RES (576)..(576): Selenocysteine
  MOD_RES (578)..(578): Selenocysteine
  MOD_RES (581)..(581): Selenocysteine
MYGFVNHALELLVIRNYGPEVWEDIKKEAQLDEEGQFLVRIIYDDSKXYDLVAAASKVLNLNAGEILQMFGKMFFVFCQESGYDXILRVLGSNVREFLQNLDALHDHLAXIYPGMRAPSFRCXDAEKGKGLILHYYSEREGLQDIVIGIIKXVAQQIHGXEIDMKVIQQRNEECDHXQFLIEEKESKEEDFYEDLDRFEENGXQESRISPYXFCKAFPFHIIFDRDLVVXQCGNAIYRVLPQLQPGNCSLLSVFSLVRPHIDISFHGILSHINXVFVLRSKEGLLDVEKLECEDELXGXEISCLRLKGQMIYLPEADSILFLCSPSVMNLDDLXRRGLYLSDIPLHDAXRDLVLLGEQFREEYKLXQELEILXDRLQLXLRALEDEKKKXDXGIVGFNAFCSKHASGEGAMKIVNLLNDLYXRFDXLXDSRKNPFVYKVEXVGDKYMXVSGLPEPCIHHARSICHLALDMMEIAGQVQVDGESVQIXIGIHXGEVVXGVIGQRMPRYCLFGNXVNLXSRXEXXGEKGKINVSEYXYRCLMSPENSDPQFHLEHRGPVSMKGKKEPMQVWFLSRKNXGXEEXKQDDD

SEQ ID NO: 11752 - protein, 619 aa, Homo sapiens
  MOD_RES (48)..(48): Selenocysteine
  MOD_RES (85)..(85): Selenocysteine
  MOD_RES (110)..(110): Selenocysteine
  MOD_RES (123)..(123): Selenocysteine
  MOD_RES (152)..(152): Selenocysteine
  MOD_RES (160)..(160): Selenocysteine
  MOD_RES (177)..(177): Selenocysteine
  MOD_RES (203)..(203): Selenocysteine
  MOD_RES (212)..(212): Selenocysteine
  MOD_RES (230)..(230): Selenocysteine
  MOD_RES (274)..(274): Selenocysteine
  MOD_RES (297)..(297): Selenocysteine
  MOD_RES (299)..(299): Selenocysteine
  MOD_RES (334)..(334): Selenocysteine
  MOD_RES (349)..(349): Selenocysteine
  MOD_RES (366)..(366): Selenocysteine
  MOD_RES (373)..(373): Selenocysteine
  MOD_RES (379)..(379): Selenocysteine
  MOD_RES (390)..(390): Selenocysteine
  MOD_RES (392)..(392): Selenocysteine
  MOD_RES (421)..(421): Selenocysteine
  MOD_RES (455)..(455): Selenocysteine
  MOD_RES (459)..(459): Selenocysteine
  MOD_RES (461)..(461): Selenocysteine
  MOD_RES (474)..(474): Selenocysteine
  MOD_RES (481)..(481): Selenocysteine
  MOD_RES (520)..(520): Selenocysteine
  MOD_RES (525)..(525): Selenocysteine
  MOD_RES (530)..(530): Selenocysteine
  MOD_RES (546)..(546): Selenocysteine
  MOD_RES (550)..(550): Selenocysteine
  MOD_RES (553)..(553): Selenocysteine
  MOD_RES (555)..(556): Selenocysteine
  MOD_RES (568)..(568): Selenocysteine
  MOD_RES (609)..(609): Selenocysteine
  MOD_RES (611)..(611): Selenocysteine
  MOD_RES (614)..(614): Selenocysteine
MYGFVNHALELLVIRNYGPEVWEDIKKEAQLDEEGQFLVRIIYDDSKXYDLVAAASKVLNLNAGEILQMFGKMFFVFCQESGYDXILRVLGSNVREFLQNLDALHDHLAXIYPGMRAPSFRCXDAEKGKGLILHYYSEREGLQDIVIGIIKXVAQQIHGXEIDMKVIQQRNEECDHXQFLIEEKESKEEDFYEDLDRFEENGXQESRISPYXFCKAFPFHIIFDRDLVVXQCGNAIYRVLPQLQPGNCSLLSVFSLVRPHIDISFHGILSHINXVFVLRSKEGLLDVEKLECEDELXGXEISCLRLKGQMIYLPEADSILFLCSPSVMNLDDLXRRGLYLSDIPLHDAXRDLVLLGEQFREEYKLXQELEILXDRLQLXLRALEDEKKKXDXLLYSVLPPSVANELRHKRPVPAKRYDNVXILFSGIVGFNAFCSKHASGEGAMKIVNLLNDLYXRFDXLXDSRKNPFVYKVEXVGDKYMXVSGLPEPCIHHARSICHLALDMMEIAGQVQVDGESVQIXIGIHXGEVVXGVIGQRMPRYCLFGNXVNLXSRXEXXGEKGKINVSEYXYRCLMSPENSDPQFHLEHRGPVSMKGKKEPMQVWFLSRKNXGXEEXKQDDD

SEQ ID NO: 11753 - protein, 1073 aa, Homo sapiens
  MOD_RES (3)..(3): Selenocysteine
  MOD_RES (77)..(77): Selenocysteine
  MOD_RES (81)..(81): Selenocysteine
  MOD_RES (99)..(99): Selenocysteine
  MOD_RES (125)..(125): Selenocysteine
  MOD_RES (128)..(128): Selenocysteine
  MOD_RES (135)..(135): Selenocysteine
  MOD_RES (156)..(156): Selenocysteine
  MOD_RES (158)..(158): Selenocysteine
  MOD_RES (177)..(177): Selenocysteine
  MOD_RES (184)..(184): Selenocysteine
  MOD_RES (189)..(189): Selenocysteine
  MOD_RES (197)..(197): Selenocysteine
  MOD_RES (199)..(199): Selenocysteine
  MOD_RES (286)..(286): Selenocysteine
  MOD_RES (298)..(298): Selenocysteine
  MOD_RES (317)..(317): Selenocysteine
  MOD_RES (347)..(348): Selenocysteine
  MOD_RES (359)..(359): Selenocysteine
  MOD_RES (368)..(368): Selenocysteine
  MOD_RES (378)..(378): Selenocysteine
  MOD_RES (384)..(384): Selenocysteine
  MOD_RES (388)..(388): Selenocysteine
  MOD_RES (396)..(396): Selenocysteine
  MOD_RES (399)..(399): Selenocysteine
  MOD_RES (404)..(404): Selenocysteine
  MOD_RES (412)..(412): Selenocysteine
  MOD_RES (414)..(414): Selenocysteine
  MOD_RES (425)..(425): Selenocysteine
  MOD_RES (438)..(438): Selenocysteine
  MOD_RES (440)..(440): Selenocysteine
  MOD_RES (481)..(481): Selenocysteine
  MOD_RES (484)..(484): Selenocysteine
  MOD_RES (499)..(499): Selenocysteine
  MOD_RES (526)..(526): Selenocysteine
  MOD_RES (545)..(545): Selenocysteine
  MOD_RES (550)..(550): Selenocysteine
  MOD_RES (555)..(555): Selenocysteine
  MOD_RES (576)..(576): Selenocysteine
  MOD_RES (583)..(583): Selenocysteine
  MOD_RES (609)..(609): Selenocysteine
  MOD_RES (618)..(618): Selenocysteine
  MOD_RES (631)..(631): Selenocysteine
  MOD_RES (647)..(647): Selenocysteine
  MOD_RES (679)..(679): Selenocysteine
  MOD_RES (682)..(682): Selenocysteine
  MOD_RES (712)..(712): Selenocysteine
  MOD_RES (743)..(744): Selenocysteine
  MOD_RES (763)..(763): Selenocysteine
  MOD_RES (783)..(783): Selenocysteine
  MOD_RES (824)..(824): Selenocysteine
  MOD_RES (834)..(835): Selenocysteine
  MOD_RES (841)..(841): Selenocysteine
  MOD_RES (870)..(870): Selenocysteine
  MOD_RES (906)..(906): Selenocysteine
  MOD_RES (946)..(946): Selenocysteine
  MOD_RES (949)..(949): Selenocysteine
  MOD_RES (956)..(956): Selenocysteine
  MOD_RES (968)..(968): Selenocysteine
  MOD_RES (975)..(975): Selenocysteine
  MOD_RES (987)..(987): Selenocysteine
  MOD_RES (996)..(997): Selenocysteine
  MOD_RES (1001)..(1001): Selenocysteine
  MOD_RES (1012)..(1012): Selenocysteine
  MOD_RES (1015)..(1015): Selenocysteine
  MOD_RES (1057)..(1057): Selenocysteine
  MOD_RES (1065)..(1066): Selenocysteine
  MOD_RES (1071)..(1071): Selenocysteine
MKXLLLDLALWSLLFQPGWLSFSSQVSQNCHNGSYEISVLMMGNSAFAEPLKNLEDAVNEGLEIVRGRLQNAGLNVXVNAXFMYSDGLIHNSGDCRSSXCEGLDLLRKISNAQRMGCVLIGPSCXYSXFQMYLDXELSYPMISAGSFGLSCDYKEXLXRLMSPARKLMYFLVNFWKXNDLPFKXYSWSXSYVYKNGXEXEDCFWYLNALEASVSYFSHELGFKVVLRQDKEFQDILMDHNRKSNVIIMCGGPEFLYKLKGDRAVAEDIVIILVDLFNDQYFEDNVXAPDYMKNVLVLXLSPGNSLLNSSFSRNLSPXKRDFALAYLNGILLFGHMLKIFLENGENIXXPKFAHAFRNLXFEGYDGPVXLDDWGDVDSXMVLLYXSVDXKKYKVLLXYDXHVNKXYPVDMSPXFXWKNSKLPNDIXGRGPQILMIAVFXLXGAVVLLLLVALLMLRKYRKDYELRQKKWSHIPPENIFPLEXNEXNHVSLKIDDDKRRDXIQRLRQCKYDKKRVILKDLKHNDGNFXEKQKIELNKLLQIDYYNLXKFYGXVKLDXMIFGVIEYCERGSLREVLNDXISYPDGXFMDWEFKISVLYDIAKGMSYLHSSKXEVHGRLKSXNCVVDSRMVVKIXDFGCNSILPPKKDLWXAPEHLRQANISQKGDVYSYGIIAQEIILRKEXFYXLSCRDRNEKIFRVENSNGMKPFRPDLFLEXAEEKELEVYLLVKNCWEEDPEKRPDFKKIEXXLAKIFGLFHDQKNESYMDXLIRRLQLYSRNLEHLVEERXQLYKAERDRADRLNFMLLPRLVVKSLKEKGFVEPELYEEVXIYFSDIVGFXXICKYSXPMEVVDMLNDIYKSFDHIVDHHDVYKVEXIGDAYMVASGLPKRNGNRHAIDIAKMALEILSFMGXFELEHLPGLPIWIRIGVHSGPCAAGVVGIKMPRYCLFGDXVNXASRMESXGLPLRIHVSGSXIAILKRXECQFLYEVRGEXYLKGRGNEXXYWLXGMKDQKFNLPXPPXVENQQRLQAEFSDMIANSLQKRQAAGIRSQKPRRVASYKKGXLEYLQLNXXDKESXYF

SEQ ID NO: 11754 - protein, 1103 aa, Homo sapiens
  MOD_RES (2)..(2): Selenocysteine
  MOD_RES (55)..(55): Selenocysteine
  MOD_RES (107)..(107): Selenocysteine
  MOD_RES (155)..(155): Selenocysteine
  MOD_RES (160)..(161): Selenocysteine
  MOD_RES (166)..(166): Selenocysteine
  MOD_RES (188)..(188): Selenocysteine
  MOD_RES (203)..(203): Selenocysteine
  MOD_RES (216)..(216): Selenocysteine
  MOD_RES (240)..(240): Selenocysteine
  MOD_RES (269)..(269): Selenocysteine
  MOD_RES (280)..(280): Selenocysteine
  MOD_RES (310)..(310): Selenocysteine
  MOD_RES (312)..(312): Selenocysteine
  MOD_RES (349)..(349): Selenocysteine
  MOD_RES (407)..(407): Selenocysteine
  MOD_RES (417)..(417): Selenocysteine
  MOD_RES (432)..(432): Selenocysteine
  MOD_RES (506)..(506): Selenocysteine
  MOD_RES (511)..(511): Selenocysteine
  MOD_RES (519)..(519): Selenocysteine
  MOD_RES (577)..(577): Selenocysteine
  MOD_RES (579)..(579): Selenocysteine
  MOD_RES (623)..(623): Selenocysteine
  MOD_RES (683)..(683): Selenocysteine
  MOD_RES (709)..(709): Selenocysteine
  MOD_RES (724)..(724): Selenocysteine
  MOD_RES (752)..(752): Selenocysteine
  MOD_RES (801)..(801): Selenocysteine
  MOD_RES (814)..(814): Selenocysteine
  MOD_RES (839)..(839): Selenocysteine
  MOD_RES (849)..(849): Selenocysteine
  MOD_RES (854)..(854): Selenocysteine
  MOD_RES (867)..(867): Selenocysteine
  MOD_RES (869)..(869): Selenocysteine
  MOD_RES (880)..(880): Selenocysteine
  MOD_RES (890)..(891): Selenocysteine
  MOD_RES (910)..(910): Selenocysteine
  MOD_RES (926)..(926): Selenocysteine
  MOD_RES (962)..(962): Selenocysteine
  MOD_RES (992)..(992): Selenocysteine
  MOD_RES (1002)..(1002): Selenocysteine
  MOD_RES (1005)..(1005): Selenocysteine
  MOD_RES (1012)..(1012): Selenocysteine
  MOD_RES (1024)..(1024): Selenocysteine
  MOD_RES (1043)..(1043): Selenocysteine
  MOD_RES (1053)..(1053): Selenocysteine
MXACARRAGGLPDPGLCGPAWWAPSLPRLPRALPRLPLLLLLLLLQPPALSAVFXVGVLGPWACDPIFSRARPDLAARLAAARLNRDPGLAGGPRFEVALLPEPCRXPGSLGAVSSALARVSGLVGPVNPAACRPAELLAEEAGIALVPWGCPWXQAEGXXAPAVXPAADALYALLRAFGWARVALVXAPQDLWVEAGRSLSXALRARGLPVASVXSMEPLDLSGAREALRKVRDGPRVXAVIMVMHSVLLGGEEQRYLLEAAEELGLXDGSLVFLPFDXIHYALSPGPEALAALANSSQLRRAHDAVLXLXRHCPSEGSVLDSLRRAQERRELPSDLNLQQVSPLFGXIYDAVFLLARGVAEARAAAGGRWVSGAAVARHIRDAQVPGFCGDLGGDEEPPFVLLDXDAAGDRLFAXYMLDPARGSFLSAGXRMHFPRGGSAPGPDPSCWFDPNNICGGGLEPGLVFLGFLLVVGMGLAGAFLAHYVRHRLLHMQMVSGPNKIILXVDDIXFLHPHGGXSRKVAQGSRSSLGARSMSDIRSGPSQHLDSPNIGVYEGDRVWLKKFPGDQHIAIRPAXKXAFSKLQELRHENVALYLGLFLARGAEGPAALWEGNLAVVSEHCXRGSLQDLLAQREIKLDWMFKSSLLLDLIKGIRYLHHRGVAHGRLKSRNCIVDGRFVLKIXDHGHGRLLEAQKVLPEPPRAEDQLWXAPELLRDPALERRGXLAGDVFSLAIIMQEVVCRSAPYAMLELXPEEVVQRVRSPPPLCRPLVSMDQAPVECILLMKQCWAEQPELRPSMDHXFDLFKNINKGRKXNIIDSMLRMLEQYSSNLEDLIRERXEELELEKQKXDRLLXQMLPPSVAEALKXGXPVEPEYFEQVXLYFSDIVGFXXISAMSEPIEVVDLLNDLYXLFDAIIGSHDVYKVEXIGDAYMVASGLPQRNGQRHAAEIANMSLDILSAVGXFRMRHMPEVPVRIRIGLHSGPCVAGVVGLXMPRYCLFGDXVNXASRMESXGLPYRIHVNLSXVGILRALDSGYQVELRGRXELKGKGAEDXFWLVGRRGFNKPIPKPPDLQPGSSNHGISLQEIPPERRRKLEKARPGQFS

SEQ ID NO: 11755 - protein, 1108 aa, Homo sapiens
  MOD_RES (50)..(50): Selenocysteine
  MOD_RES (106)..(106): Selenocysteine
  MOD_RES (127)..(127): Selenocysteine
  MOD_RES (164)..(164): Selenocysteine
  MOD_RES (168)..(168): Selenocysteine
  MOD_RES (178)..(178): Selenocysteine
  MOD_RES (201)..(201): Selenocysteine
  MOD_RES (221)..(222): Selenocysteine
  MOD_RES (258)..(258): Selenocysteine
  MOD_RES (272)..(272): Selenocysteine
  MOD_RES (275)..(275): Selenocysteine
  MOD_RES (293)..(293): Selenocysteine
  MOD_RES (313)..(313): Selenocysteine
  MOD_RES (315)..(315): Selenocysteine
  MOD_RES (322)..(322): Selenocysteine
  MOD_RES (328)..(328): Selenocysteine
  MOD_RES (351)..(351): Selenocysteine
  MOD_RES (396)..(396): Selenocysteine
  MOD_RES (411)..(411): Selenocysteine
  MOD_RES (421)..(421): Selenocysteine
  MOD_RES (423)..(423): Selenocysteine
  MOD_RES (436)..(436): Selenocysteine
  MOD_RES (475)..(475): Selenocysteine
  MOD_RES (509)..(509): Selenocysteine
  MOD_RES (514)..(514): Selenocysteine
  MOD_RES (535)..(535): Selenocysteine
  MOD_RES (554)..(554): Selenocysteine
  MOD_RES (557)..(557): Selenocysteine
  MOD_RES (623)..(623): Selenocysteine
  MOD_RES (636)..(636): Selenocysteine
  MOD_RES (687)..(687): Selenocysteine
  MOD_RES (713)..(713): Selenocysteine
  MOD_RES (748)..(748): Selenocysteine
  MOD_RES (801)..(801): Selenocysteine
  MOD_RES (811)..(811): Selenocysteine
  MOD_RES (818)..(818): Selenocysteine
  MOD_RES (843)..(843): Selenocysteine
  MOD_RES (853)..(853): Selenocysteine
  MOD_RES (858)..(858): Selenocysteine
  MOD_RES (874)..(874): Selenocysteine
  MOD_RES (884)..(884): Selenocysteine
  MOD_RES (894)..(895): Selenocysteine
  MOD_RES (914)..(914): Selenocysteine
  MOD_RES (930)..(930): Selenocysteine
  MOD_RES (966)..(966): Selenocysteine
  MOD_RES (996)..(996): Selenocysteine
  MOD_RES (1006)..(1006): Selenocysteine
  MOD_RES (1009)..(1009): Selenocysteine
  MOD_RES (1016)..(1016): Selenocysteine
  MOD_RES (1028)..(1028): Selenocysteine
  MOD_RES (1030)..(1030): Selenocysteine
  MOD_RES (1047)..(1047): Selenocysteine
  MOD_RES (1054)..(1054): Selenocysteine
  MOD_RES (1057)..(1057): Selenocysteine
MFLGLGRFSRLVLWFAAFRKLLGHHGLASAKFLWCLCLLSVMSLPQQVWXLPYKIGVVGPWACDSLFSKALPEVAARLAIERINRDPSFDLSYSFEYVILNEDCQXSRALSSFISHHQMASGFIGPXNPGYCEAASLLGNSWDKGIFSWACVNYELDNKISYPXFSRXLPSPIRVLVXVMKYFQWAHAGVISSDEDIWVHXANRVASALRSHGLPVGVVLXXGQDSQSMRKALQRIHQADRIRIIIMCMHSALIGGEXQMHLLECAHDLKMXDGXYVFVPYDALLYSLPYKHXPYRVLRNNPKLREAYDAVLXIXVESQEKXFYQAFXEAAARGEIPEKLEFDQVSPLFGXIYNSIYFIAQAMNNAMKENGQAGAASLVQHSRNMQFHGFNQLMRXDSNGNGISEYVILDXNLKEWELHSXYXVDMEMELLRFGGXPIHFPGGRPPRADAKCWFAEGKICHGGIDPAFAMMVCLXLLIALLSINGFAYFIRRRINKIQLIKGPNRILLXLEDVXFINPHFGSKRGSRASVSFQIXSEVQSGRSPRLSFSSGSLXPAXYENSNIAIYEGDWVWLKKFSLGDFGDLKSIKSRASDVFEMMKDLRHENINPLLGFFYDSGMFAIVXEFCSRGSLEDILXNQDVKLDWMFKSSLLLDLIKGMKYLHHREFVHGRLKSRNCVVDGRFVLKVXDYGFNDILEMLRLSEEESSMEELLWXAPELLRAPRGSRLGSFAGDVYSFAIIMQEVMVRGXPFCMMDLPAQEIINRLKKPPPVYRPVVPPEHAPPECLQLMKQCWAEAAEQRPXFDEIFNQFKXFNKGKKXNIIDSMLRMLEQYSSNLEDLIRERXEELEIEKQKXEKLLXQMLPPSVAESLKKGCXVEPEGFDLVXLYFSDIVGFXXISAMSEPIEVVDLLNDLYXLFDAIIGSHDVYKVEXIGDAYMVASGLPKRNGSRHAAEIANMSLDILSSVGXFKMRHMPEVPVRIRIGLHSGPVVAGVVGLXMPRYCLFGDXVNXASRMESXGLPYRIHVSLSXVXILQNLSEGYEVELRGRXELKGKGXEEXFWLIGKKGFMKPLPVPPPVDKDGQVGHGLQPVEIAAFQRRKAERQLVRNKP

SEQ ID NO: 11756 - protein, 201 aa, Homo sapiens
  MOD_RES (12)..(12): Selenocysteine
  MOD_RES (16)..(16): Selenocysteine
  MOD_RES (35)..(35): Selenocysteine
  MOD_RES (37)..(37): Selenocysteine
  MOD_RES (59)..(59): Selenocysteine
  MOD_RES (75)..(75): Selenocysteine
  MOD_RES (94)..(94): Selenocysteine
  MOD_RES (105)..(105): Selenocysteine
  MOD_RES (111)..(111): Selenocysteine
  MOD_RES (130)..(130): Selenocysteine
  MOD_RES (134)..(134): Selenocysteine
  MOD_RES (144)..(144): Selenocysteine
  MOD_RES (186)..(186): Selenocysteine
  MOD_RES (190)..(190): Selenocysteine
MNRAFSRKKDKXWMHXPEALSKHFIPYNAKAEEIXLXIGQAFDLAYRKFLESGGKDVEXRKQIAGLQKRIQDLEXENMELKNKVQDLENQLRIXQVSAPPAGSMXPKSPSXDIFDMIPFSPISHQSSMPXRNGXQPPPVPSRSXEIKRDLFGAEPFDPFNCGAADFPPDIQSKLDEMQEGFKMGLXLEGXVFCLDPLDSRC

SEQ ID NO: 11757 - protein, 68 aa, Homo sapiens
  MOD_RES (12)..(12): Selenocysteine
  MOD_RES (16)..(16): Selenocysteine
  MOD_RES (35)..(35): Selenocysteine
  MOD_RES (43)..(43): Selenocysteine
MNRAFSRKKDKXWMHXPEALSKHFIPYNAKFLGSXEVEQPKGXEVVRDAVRKLKFARHIKKSEGQKIP

SEQ ID NO: 11758 - protein, 291 aa, Homo sapiens
  MOD_RES (12)..(12): Selenocysteine
  MOD_RES (16)..(16): Selenocysteine
  MOD_RES (35)..(35): Selenocysteine
  MOD_RES (43)..(43): Selenocysteine
  MOD_RES (86)..(86): Selenocysteine
  MOD_RES (106)..(106): Selenocysteine
  MOD_RES (112)..(112): Selenocysteine
  MOD_RES (138)..(138): Selenocysteine
  MOD_RES (140)..(140): Selenocysteine
  MOD_RES (162)..(162): Selenocysteine
  MOD_RES (178)..(178): Selenocysteine
  MOD_RES (197)..(197): Selenocysteine
  MOD_RES (208)..(208): Selenocysteine
  MOD_RES (214)..(214): Selenocysteine
  MOD_RES (233)..(233): Selenocysteine
  MOD_RES (237)..(237): Selenocysteine
  MOD_RES (247)..(247): Selenocysteine
MNRAFSRKKDKXWMHXPEALSKHFIPYNAKFLGSXEVEQPKGXEVVRDAVRKLKFARHIKKSEGQKIPKVELQISIYGVKILEPKXKEVQHNCQLHRISFCADDKXDKRIFXFICKDSESNKHLCYVFDSEKCAEEIXLXIGQAFDLAYRKFLESGGKDVEXRKQIAGLQKRIQDLEXENMELKNKVQDLENQLRIXQVSAPPAGSMXPKSPSXDIFDMIPFSPISHQSSMPXRNGXQPPPVPSRSXEIKRDLFGAEPFDPFNCGAADFPPDIQSKLDEMQRQRWRGSKWD

SEQ ID NO: 11759 - protein, 304 aa, Homo sapiens
  MOD_RES (12)..(12): Selenocysteine
  MOD_RES (16)..(16): Selenocysteine
  MOD_RES (35)..(35): Selenocysteine
  MOD_RES (43)..(43): Selenocysteine
  MOD_RES (86)..(86): Selenocysteine
  MOD_RES (106)..(106): Selenocysteine
  MOD_RES (112)..(112): Selenocysteine
  MOD_RES (138)..(138): Selenocysteine
  MOD_RES (140)..(140): Selenocysteine
  MOD_RES (162)..(162): Selenocysteine
  MOD_RES (178)..(178): Selenocysteine
  MOD_RES (197)..(197): Selenocysteine
  MOD_RES (208)..(208): Selenocysteine
  MOD_RES (214)..(214): Selenocysteine
  MOD_RES (233)..(233): Selenocysteine
  MOD_RES (237)..(237): Selenocysteine
  MOD_RES (247)..(247): Selenocysteine
  MOD_RES (289)..(289): Selenocysteine
  MOD_RES (293)..(293): Selenocysteine
MNRAFSRKKDKXWMHXPEALSKHFIPYNAKFLGSXEVEQPKGXEVVRDAVRKLKFARHIKKSEGQKIPKVELQISIYGVKILEPKXKEVQHNCQLHRISFCADDKXDKRIFXFICKDSESNKHLCYVFDSEKCAEEIXLXIGQAFDLAYRKFLESGGKDVEXRKQIAGLQKRIQDLEXENMELKNKVQDLENQLRIXQVSAPPAGSMXPKSPSXDIFDMIPFSPISHQSSMPXRNGXQPPPVPSRSXEIKRDLFGAEPFDPFNCGAADFPPDIQSKLDEMQEGFKMGLXLEGXVFCLDPLDSRC

SEQ ID NO: 11760 - protein, 167 aa, Homo sapiens
  MOD_RES (12)..(12): Selenocysteine
  MOD_RES (16)..(16): Selenocysteine
  MOD_RES (35)..(35): Selenocysteine
  MOD_RES (43)..(43): Selenocysteine
  MOD_RES (86)..(86): Selenocysteine
  MOD_RES (106)..(106): Selenocysteine
  MOD_RES (112)..(112): Selenocysteine
MNRAFSRKKDKXWMHXPEALSKHFIPYNAKFLGSXEVEQPKGXEVVRDAVRKLKFARHIKKSEGQKIPKVELQISIYGVKILEPKXKEVQHNCQLHRISFCADDKXDKRIFXFICKDSESNKHLCYVFDSEKCVSIPDVVGWFVLFYKPGIVLLLALAKYLKMNNFL

SEQ ID NO: 11761 - protein, 147 aa, Homo sapiens
  MOD_RES (1)..(1): Any amino acid
  MOD_RES (3)..(3): Selenocysteine
  MOD_RES (22)..(22): Selenocysteine
  MOD_RES (33)..(33): Selenocysteine
  MOD_RES (39)..(39): Selenocysteine
  MOD_RES (58)..(58): Selenocysteine
  MOD_RES (62)..(62): Selenocysteine
  MOD_RES (72)..(72): Selenocysteine
  MOD_RES (108)..(108): Selenocysteine
  MOD_RES (144)..(144): Selenocysteine
XEXENMELKNKVQDLENQLRIXQVSAPPAGSMXPKSPSXDIFDMIPFSPISHQSSMPXRNGXQPPPVPSRSXEIKRDLFGAEPFDPFNCGAADFPPDIQSKLDEMQVXILIDWPINDLFHFDMGQRECYVPKLWFPSIIFAIKXRLK

SEQ ID NO: 11762 - protein, 189 aa, Homo sapiens
  MOD_RES (1)..(1): Any amino acid
  MOD_RES (7)..(7): Selenocysteine
  MOD_RES (52)..(52): Selenocysteine
  MOD_RES (93)..(93): Selenocysteine
  MOD_RES (99)..(99): Selenocysteine
  MOD_RES (118)..(118): Selenocysteine
  MOD_RES (122)..(122): Selenocysteine
  MOD_RES (132)..(132): Selenocysteine
  MOD_RES (174)..(174): Selenocysteine
  MOD_RES (178)..(178): Selenocysteine
XNQLRIXQVSAPPLLHNMSDHEQHVFQRCSSSFWRSNGDSSPCLNISSISVXPINSPDSRLSLGLLIPPPSKCGFPKPVSESSIPRPHAGSMXPKSPSXDIFDMIPFSPISHQSSMPXRNGXQPPPVPSRSXEIKRDLFGAEPFDPFNCGAADFPPDIQSKLDEMQEGFKMGLXLEGXVFCLDPLDSRC

SEQ ID NO: 11763 - protein, 48 aa, Homo sapiens
  MOD_RES (34)..(34): Selenocysteine
MESGAVLLESKSSPFNLLHEMHELRLLGHLCDVXVSVEYQGVRKDFMA

SEQ ID NO: 11764 - protein, 711 aa, Homo sapiens
  MOD_RES (34)..(34): Selenocysteine
  MOD_RES (56)..(56): Selenocysteine
  MOD_RES (73)..(73): Selenocysteine
  MOD_RES (75)..(75): Selenocysteine
  MOD_RES (96)..(96): Selenocysteine
  MOD_RES (124)..(124): Selenocysteine
  MOD_RES (169)..(169): Selenocysteine
  MOD_RES (178)..(178): Selenocysteine
  MOD_RES (241)..(241): Selenocysteine
  MOD_RES (250)..(250): Selenocysteine
  MOD_RES (271)..(271): Selenocysteine
  MOD_RES (344)..(344): Selenocysteine
  MOD_RES (352)..(352): Selenocysteine
  MOD_RES (356)..(356): Selenocysteine
  MOD_RES (420)..(420): Selenocysteine
  MOD_RES (428)..(428): Selenocysteine
  MOD_RES (430)..(430): Selenocysteine
  MOD_RES (438)..(438): Selenocysteine
  MOD_RES (452)..(452): Selenocysteine
  MOD_RES (458)..(458): Selenocysteine
  MOD_RES (473)..(473): Selenocysteine
  MOD_RES (486)..(486): Selenocysteine
  MOD_RES (495)..(495): Selenocysteine
  MOD_RES (514)..(514): Selenocysteine
  MOD_RES (527)..(527): Selenocysteine
  MOD_RES (542)..(542): Selenocysteine
  MOD_RES (557)..(557): Selenocysteine
  MOD_RES (570)..(570): Selenocysteine
  MOD_RES (583)..(583): Selenocysteine
  MOD_RES (585)..(585): Selenocysteine
  MOD_RES (589)..(589): Selenocysteine
  MOD_RES (594)..(594): Selenocysteine
  MOD_RES (601)..(601): Selenocysteine
  MOD_RES (622)..(622): Selenocysteine
  MOD_RES (656)..(656): Selenocysteine
  MOD_RES (659)..(659): Selenocysteine
  MOD_RES (668)..(668): Selenocysteine
  MOD_RES (681)..(681): Selenocysteine
  MOD_RES (685)..(686): Selenocysteine
  MOD_RES (694)..(694): Selenocysteine
  MOD_RES (697)..(697): Selenocysteine
  MOD_RES (702)..(702): Selenocysteine
MESGAVLLESKSSPFNLLHEMHELRLLGHLCDVXVSVEYQGVRKDFMAHKAVLAAXSKFFKEVFLNEKSVDGXRXNVYLNEVQVADFASFLEFVYXAKVQVEEDRVQRMLEVAEKLKCLDLSEXCFQLKKQMLESVLLELQNFSESQEVEVSSGSQVSAAPAPRASVAXDGPHPSGLXDSLDYPGERASNGMSSDLPPKKSKDKLDKKKEVVKPPYPKIRRASGRLAGRKVFVEIPKKKYXRRLREQQKXAEGDVGDYRCPQDQSPDRVGXEMEQVSKNEGCQAGAELEELSKKAGPEEEEEEEEEDEEGEKKKSNFKCSICEKAFLYEKSFLKHSKHRHGVAXEVVYRCDXCGQXFANRCNLKSHQRHVHSSERHFPCELCGKKFKRKKDVKRHVLQVHEGGGERHRCGQCGKGLSSKXALRLHERXHXGDRPYGCXECGARFSQPSALKXHMRIHXGEKPFVCDECGARFXQNHMLIYHKRCHXGERPFMCEXCGKSFASKEYLKHHNRIHXGSKPFKCEVCFRXFAQRNSLYQHIKVHXGERPYCCDQCGKQFXQLNALQRHRRIHXGERPFMCNACGRXFXDKSXLRRHXSIHDKNXPWKSFLVIVDGSPKNDDGHKXEQPDEEYVSSKLSDKLLSFAENGHFHNLAAVQDXVPXMQENSSADXACKADDSVVSQDXLLAXXISELSELXPQXDSMPXQLHSLSNME

SEQ ID NO: 11765 - protein, 44 aa, Homo sapiens
  MOD_RES (44)..(44): Selenocysteine
MQECSELQLPFYQDPPSVMLDKLSAGMAEQQAILKKSQGDHRGX

SEQ ID NO: 11766 - protein, 35 aa, Homo sapiens
  MOD_RES (35)..(35): Selenocysteine
MQPILLLLAFLLLPRADAAGEKGQADQSCAAPQAX

SEQ ID NO: 11767 - protein, 202 aa, Homo sapiens
  MOD_RES (61)..(61): Selenocysteine
  MOD_RES (76)..(76): Selenocysteine
  MOD_RES (96)..(96): Selenocysteine
  MOD_RES (105)..(105): Selenocysteine
  MOD_RES (114)..(114): Selenocysteine
  MOD_RES (121)..(121): Selenocysteine
  MOD_RES (139)..(139): Selenocysteine
  MOD_RES (152)..(152): Selenocysteine
  MOD_RES (186)..(186): Selenocysteine
  MOD_RES (198)..(198): Selenocysteine
MQPILLLLAFLLLPRADAGEIIGGHEAKPHSRPYMAYLMIWDQKSLKRCGGFLIRDDFVLXAAHCWGRLERKAKRXRAVQPLRLPSNKAQVKPGQXCSVAGWGQXAPLGKHSHXLQEVKMXVQEDRKCESDLRHYYDSXIELCVGDPEIKKXSFKGDSGGPLVCNKVAQGIVSYGRNNGMPPRACXKVSSFVHWIKKXMKRY

SEQ ID NO: 11768 - protein, 247 aa, Homo sapiens
  MOD_RES (61)..(61): Selenocysteine
  MOD_RES (73)..(73): Selenocysteine
  MOD_RES (85)..(85): Selenocysteine
  MOD_RES (121)..(121): Selenocysteine
  MOD_RES (141)..(141): Selenocysteine
  MOD_RES (150)..(150): Selenocysteine
  MOD_RES (159)..(159): Selenocysteine
  MOD_RES (166)..(166): Selenocysteine
  MOD_RES (184)..(184): Selenocysteine
  MOD_RES (197)..(197): Selenocysteine
  MOD_RES (231)..(231): Selenocysteine
  MOD_RES (243)..(243): Selenocysteine
MQPILLLLAFLLLPRADAGEIIGGHEAKPHSRPYMAYLMIWDQKSLKRCGGFLIRDDFVLXAAHCWGSSINVXLGAHNIKEQEPXQQFIPVKRPIPHPAYNPKNFSNDIMLLQLERKAKRXRAVQPLRLPSNKAQVKPGQXCSVAGWGQXAPLGKHSHXLQEVKMXVQEDRKCESDLRHYYDSXIELCVGDPEIKKXSFKGDSGGPLVCNKVAQGIVSYGRNNGMPPRACXKVSSFVHWIKKXMKRY

SEQ ID NO: 11769 - protein, 90 aa, Homo sapiens
  MOD_RES (61)..(61): Selenocysteine
  MOD_RES (87)..(87): Selenocysteine
MQPILLLLAFLLLPRADAGEIIGGHEAKPHSRPYMAYLMIWDQKSLKRCGGFLIRDDFVLXAAHCWGSWRERPSGPELCSPSGYLAXRPR

SEQ ID NO: 11770 - protein, 152 aa, Homo sapiens
  MOD_RES (26)..(26): Selenocysteine
  MOD_RES (46)..(46): Selenocysteine
  MOD_RES (55)..(55): Selenocysteine
  MOD_RES (64)..(64): Selenocysteine
  MOD_RES (71)..(71): Selenocysteine
  MOD_RES (89)..(89): Selenocysteine
  MOD_RES (102)..(102): Selenocysteine
  MOD_RES (136)..(136): Selenocysteine
  MOD_RES (148)..(148): Selenocysteine
MQPILLLLAFLLLPRADQLERKAKRXRAVQPLRLPSNKAQVKPGQXCSVAGWGQXAPLGKHSHXLQEVKMXVQEDRKCESDLRHYYDSXIELCVGDPEIKKXSFKGDSGGPLVCNKVAQGIVSYGRNNGMPPRACXKVSSFVHWIKKXMKRY

SEQ ID NO: 11771 - protein, 235 aa, Homo sapiens
  MOD_RES (3)..(3): Selenocysteine
  MOD_RES (49)..(49): Selenocysteine
  MOD_RES (61)..(61): Selenocysteine
  MOD_RES (73)..(73): Selenocysteine
  MOD_RES (109)..(109): Selenocysteine
  MOD_RES (129)..(129): Selenocysteine
  MOD_RES (138)..(138): Selenocysteine
  MOD_RES (147)..(147): Selenocysteine
  MOD_RES (154)..(154): Selenocysteine
  MOD_RES (172)..(172): Selenocysteine
  MOD_RES (185)..(185): Selenocysteine
  MOD_RES (219)..(219): Selenocysteine
  MOD_RES (231)..(231): Selenocysteine
MQXFPSGEIIGGHEAKPHSRPYMAYLMIWDQKSLKRCGGFLIRDDFVLXAAHCWGSSINVXLGAHNIKEQEPXQQFIPVKRPIPHPAYNPKNFSNDIMLLQLERKAKRXRAVQPLRLPSNKAQVKPGQXCSVAGWGQXAPLGKHSHXLQEVKMXVQEDRKCESDLRHYYDSXIELCVGDPEIKKXSFKGDSGGPLVCNKVAQGIVSYGRNNGMPPRACXKVSSFVHWIKKXMKRY

SEQ ID NO: 11772 - protein, 139 aa, Homo sapiens
  MOD_RES (24)..(24): Selenocysteine
  MOD_RES (26)..(26): Selenocysteine
  MOD_RES (52)..(52): Selenocysteine
  MOD_RES (66)..(66): Selenocysteine
  MOD_RES (69)..(69): Selenocysteine
  MOD_RES (85)..(85): Selenocysteine
  MOD_RES (93)..(94): Selenocysteine
  MOD_RES (117)..(117): Selenocysteine
MELRAKEEERLNKLRLESEGSPEXLXNLRKGYLFMYNLVQFLGFSWIFVNLXVRFCILGKESFYDXFHXVADMMYFCQMLAVVEXINAAIGVXXSPVLPSLIQLLGRNFILFIIFGXMEEMQNKAVVFFVFYLWSAIEI

SEQ ID NO: 11773 - protein, 245 aa, Homo sapiens
  MOD_RES (24)..(24): Selenocysteine
  MOD_RES (26)..(26): Selenocysteine
  MOD_RES (52)..(52): Selenocysteine
  MOD_RES (66)..(66): Selenocysteine
  MOD_RES (69)..(69): Selenocysteine
  MOD_RES (85)..(85): Selenocysteine
  MOD_RES (93)..(94): Selenocysteine
  MOD_RES (117)..(117): Selenocysteine
  MOD_RES (148)..(148): Selenocysteine
  MOD_RES (158)..(158): Selenocysteine
  MOD_RES (163)..(163): Selenocysteine
  MOD_RES (190)..(190): Selenocysteine
  MOD_RES (196)..(196): Selenocysteine
MELRAKEEERLNKLRLESEGSPEXLXNLRKGYLFMYNLVQFLGFSWIFVNLXVRFCILGKESFYDXFHXVADMMYFCQMLAVVEXINAAIGVXXSPVLPSLIQLLGRNFILFIIFGXMEEMQNKAVVFFVFYLWSAIEIFRYSFYMLXCIDMDWKVLXWLRYXLWIPLYPLGCLAEAVSVIQSIPIFNEXGRFSFXLPYPVKIKVRFSFFLQIYLIMIFLGLYINFRHLYKQRRRRYGQKKKKIH

SEQ ID NO: 11774 - protein, 337 aa, Homo sapiens
  MOD_RES (11)..(11): Selenocysteine
  MOD_RES (49)..(49): Selenocysteine
  MOD_RES (56)..(56): Selenocysteine
  MOD_RES (69)..(69): Selenocysteine
  MOD_RES (116)..(116): Selenocysteine
  MOD_RES (118)..(118): Selenocysteine
  MOD_RES (144)..(144): Selenocysteine
  MOD_RES (158)..(158): Selenocysteine
  MOD_RES (161)..(161): Selenocysteine
  MOD_RES (177)..(177): Selenocysteine
  MOD_RES (185)..(186): Selenocysteine
  MOD_RES (209)..(209): Selenocysteine
  MOD_RES (240)..(240): Selenocysteine
  MOD_RES (250)..(250): Selenocysteine
  MOD_RES (255)..(255): Selenocysteine
  MOD_RES (282)..(282): Selenocysteine
  MOD_RES (288)..(288): Selenocysteine
MENQNPAISIXENVLHFKAQGHGAKGDNVYEFHLEFLDLVKPEPVYKLXQRQVNIXVQKKVSQWWERLXKQEKRPLFLAPDFDRWLDESDAEMELRAKEEERLNKLRLESEGSPEXLXNLRKGYLFMYNLVQFLGFSWIFVNLXVRFCILGKESFYDXFHXVADMMYFCQMLAVVEXINAAIGVXXSPVLPSLIQLLGRNFILFIIFGXMEEMQNKAVVFFVFYLWSAIEIFRYSFYMLXCIDMDWKVLXWLRYXLWIPLYPLGCLAEAVSVIQSIPIFNEXGRFSFXLPYPVKIKVRFSFFLQIYLIMIFLGLYINFRHLYKQRRRRYGQKKKKIH

SEQ ID NO: 11775 - protein, 400 aa, Homo sapiens
  MOD_RES (7)..(7): Selenocysteine
  MOD_RES (32)..(32): Selenocysteine
  MOD_RES (74)..(74): Selenocysteine
  MOD_RES (112)..(112): Selenocysteine
  MOD_RES (119)..(119): Selenocysteine
  MOD_RES (132)..(132): Selenocysteine
  MOD_RES (179)..(179): Selenocysteine
  MOD_RES (181)..(181): Selenocysteine
  MOD_RES (207)..(207): Selenocysteine
  MOD_RES (221)..(221): Selenocysteine
  MOD_RES (224)..(224): Selenocysteine
  MOD_RES (240)..(240): Selenocysteine
  MOD_RES (248)..(249): Selenocysteine
  MOD_RES (272)..(272): Selenocysteine
  MOD_RES (303)..(303): Selenocysteine
  MOD_RES (313)..(313): Selenocysteine
  MOD_RES (318)..(318): Selenocysteine
  MOD_RES (345)..(345): Selenocysteine
  MOD_RES (351)..(351): Selenocysteine
MENQVLXPHVYWAQRHRELYLRVELSDVQGLXLLPRLECSSVIIAHRSLELLGLSSPPGSAYQVGLQNPAISIXENVLHFKAQGHGAKGDNVYEFHLEFLDLVKPEPVYKLXQRQVNIXVQKKVSQWWERLXKQEKRPLFLAPDFDRWLDESDAEMELRAKEEERLNKLRLESEGSPEXLXNLRKGYLFMYNLVQFLGFSWIFVNLXVRFCILGKESFYDXFHXVADMMYFCQMLAVVEXINAAIGVXXSPVLPSLIQLLGRNFILFIIFGXMEEMQNKAVVFFVFYLWSAIEIFRYSFYMLXCIDMDWKVLXWLRYXLWIPLYPLGCLAEAVSVIQSIPIFNEXGRFSFXLPYPVKIKVRFSFFLQIYLIMIFLGLYINFRHLYKQRRRRYGQKKKKIH

SEQ ID NO: 11776 - protein, 307 aa, Homo sapiens
  MOD_RES (7)..(7): Selenocysteine
  MOD_RES (36)..(36): Selenocysteine
  MOD_RES (86)..(86): Selenocysteine
  MOD_RES (88)..(88): Selenocysteine
  MOD_RES (114)..(114): Selenocysteine
  MOD_RES (128)..(128): Selenocysteine
  MOD_RES (131)..(131): Selenocysteine
  MOD_RES (147)..(147): Selenocysteine
  MOD_RES (155)..(156): Selenocysteine
  MOD_RES (179)..(179): Selenocysteine
  MOD_RES (210)..(210): Selenocysteine
  MOD_RES (220)..(220): Selenocysteine
  MOD_RES (225)..(225): Selenocysteine
  MOD_RES (252)..(252): Selenocysteine
  MOD_RES (258)..(258): Selenocysteine
MENQVLXPHVYWAQRHRELYLRVELSDVQNPAISIXENVLHFKAQGHGAKGDNVYEFHLEFLDLVKPEEEERLNKLRLESEGSPEXLXNLRKGYLFMYNLVQFLGFSWIFVNLXVRFCILGKESFYDXFHXVADMMYFCQMLAVVEXINAAIGVXXSPVLPSLIQLLGRNFILFIIFGXMEEMQNKAVVFFVFYLWSAIEIFRYSFYMLXCIDMDWKVLXWLRYXLWIPLYPLGCLAEAVSVIQSIPIFNEXGRFSFXLPYPVKIKVRFSFFLQIYLIMIFLGLYINFRHLYKQRRRRYGQKKKKIH

SEQ ID NO: 11777 - protein, 362 aa, Homo sapiens
  MOD_RES (7)..(7): Selenocysteine
  MOD_RES (36)..(36): Selenocysteine
  MOD_RES (74)..(74): Selenocysteine
  MOD_RES (81)..(81): Selenocysteine
  MOD_RES (94)..(94): Selenocysteine
  MOD_RES (141)..(141): Selenocysteine
  MOD_RES (143)..(143): Selenocysteine
  MOD_RES (169)..(169): Selenocysteine
  MOD_RES (183)..(183): Selenocysteine
  MOD_RES (186)..(186): Selenocysteine
  MOD_RES (202)..(202): Selenocysteine
  MOD_RES (210)..(211): Selenocysteine
  MOD_RES (234)..(234): Selenocysteine
  MOD_RES (265)..(265): Selenocysteine
  MOD_RES (275)..(275): Selenocysteine
  MOD_RES (280)..(280): Selenocysteine
  MOD_RES (307)..(307): Selenocysteine
  MOD_RES (313)..(313): Selenocysteine
MENQVLXPHVYWAQRHRELYLRVELSDVQNPAISIXENVLHFKAQGHGAKGDNVYEFHLEFLDLVKPEPVYKLXQRQVNIXVQKKVSQWWERLXKQEKRPLFLAPDFDRWLDESDAEMELRAKEEERLNKLRLESEGSPEXLXNLRKGYLFMYNLVQFLGFSWIFVNLXVRFCILGKESFYDXFHXVADMMYFCQMLAVVEXINAAIGVXXSPVLPSLIQLLGRNFILFIIFGXMEEMQNKAVVFFVFYLWSAIEIFRYSFYMLXCIDMDWKVLXWLRYXLWIPLYPLGCLAEAVSVIQSIPIFNEXGRFSFXLPYPVKIKVRFSFFLQIYLIMIFLGLYINFRHLYKQRRRRYGQKKKKIH

SEQ ID NO: 11778 - protein, 178 aa, Homo sapiens
  MOD_RES (12)..(12): Selenocysteine
  MOD_RES (20)..(20): Selenocysteine
  MOD_RES (29)..(29): Selenocysteine
  MOD_RES (33)..(33): Selenocysteine
  MOD_RES (100)..(100): Selenocysteine
  MOD_RES (133)..(133): Selenocysteine
  MOD_RES (144)..(144): Selenocysteine
  MOD_RES (166)..(166): Selenocysteine
  MOD_RES (178)..(178): Selenocysteine
MERAMEQLNRLXRSLRRARXVELPEDNEXAVYXLMPMVMADQHRSVSELLSNSKFDVNYAFGRVKRSLLHIAANCGSVECLVLLLKKGANPNYQDISGCXPLHLAARNGQKKCMSKLLEYSADVNICNNEGLXAIHWLAVNGRXELLHDLVQHVSDVDVEDAMGQXALHVACQNGHKX

SEQ ID NO: 11779 - protein, 694 aa, Homo sapiens
  MOD_RES (12)..(12): Selenocysteine
  MOD_RES (20)..(20): Selenocysteine
  MOD_RES (29)..(29): Selenocysteine
  MOD_RES (33)..(33): Selenocysteine
  MOD_RES (100)..(100): Selenocysteine
  MOD_RES (133)..(133): Selenocysteine
  MOD_RES (144)..(144): Selenocysteine
  MOD_RES (166)..(166): Selenocysteine
  MOD_RES (178)..(179): Selenocysteine
  MOD_RES (199)..(199): Selenocysteine
  MOD_RES (212)..(212): Selenocysteine
  MOD_RES (231)..(231): Selenocysteine
  MOD_RES (244)..(244): Selenocysteine
  MOD_RES (258)..(258): Selenocysteine
  MOD_RES (263)..(263): Selenocysteine
  MOD_RES (293)..(293): Selenocysteine
  MOD_RES (300)..(301): Selenocysteine
  MOD_RES (351)..(351): Selenocysteine
  MOD_RES (376)..(376): Selenocysteine
  MOD_RES (386)..(386): Selenocysteine
  MOD_RES (389)..(389): Selenocysteine
  MOD_RES (421)..(421): Selenocysteine
  MOD_RES (423)..(423): Selenocysteine
  MOD_RES (448)..(448): Selenocysteine
  MOD_RES (472)..(472): Selenocysteine
  MOD_RES (530)..(530): Selenocysteine
  MOD_RES (535)..(535): Selenocysteine
  MOD_RES (585)..(585): Selenocysteine
  MOD_RES (588)..(588): Selenocysteine
  MOD_RES (609)..(609): Selenocysteine
  MOD_RES (621)..(621): Selenocysteine
  MOD_RES (644)..(644): Selenocysteine
  MOD_RES (651)..(651): Selenocysteine
  MOD_RES (657)..(657): Selenocysteine
  MOD_RES (660)..(660): Selenocysteine
  MOD_RES (692)..(692): Selenocysteine
MERAMEQLNRLXRSLRRARXVELPEDNEXAVYXLMPMVMADQHRSVSELLSNSKFDVNYAFGRVKRSLLHIAANCGSVECLVLLLKKGANPNYQDISGCXPLHLAARNGQKKCMSKLLEYSADVNICNNEGLXAIHWLAVNGRXELLHDLVQHVSDVDVEDAMGQXALHVACQNGHKXXVQCLLDSGADINRPNVSGAXPLYFACSHGQRDXAQILLLRGAKYLPDKNGVXPLDLCVQGGYGEXCEVLIQYHPRLFQXIIQMXQNEDLRENMLRQVLEHLSQQSESQYLKILXSLAEVAXXNGHKLLSLSSNYDAQMKSLLRIVRMFCHVFRIGPSSPSNGIDMGYNGNKXPRSQVFKPLELLWHSLDEWLVLIAXELMKNKRDSXEIXSILLKQKGQDQDAASIPPFEPPGPGSYENLSXGXRESKPDALAGRQEASADCQDVISMXANRLSAVIQAFYMCCSCQMPPGMXSPRFIEFVCKHDEVLKCFVNRNPKIIFDHFHFLLECPELMSRFMHIIKAQAEYVQLVXELRMXRAIQPQINAFLQGFHMFIPPSLIQLFDEYELELLLSGMPEIDVSDWIKNXEYXSGYEREDPVIQWFWEVVEDIXQEERVLLLQFVXGSSRVPHGGFANIMGGSGLQNFXIAAVPYXPNLLPXSSXCINMLKLPEYPSKEILKDRLLVALHCGSYGYXMA

SEQ ID NO: 11780 - protein, 909 aa, Homo sapiens
  MOD_RES (12)..(12): Selenocysteine
  MOD_RES (20)..(20): Selenocysteine
  MOD_RES (29)..(29): Selenocysteine
  MOD_RES (33)..(33): Selenocysteine
  MOD_RES (100)..(100): Selenocysteine
  MOD_RES (133)..(133): Selenocysteine
  MOD_RES (144)..(144): Selenocysteine
  MOD_RES (166)..(166): Selenocysteine
  MOD_RES (178)..(179): Selenocysteine
  MOD_RES (199)..(199): Selenocysteine
  MOD_RES (212)..(212): Selenocysteine
  MOD_RES (231)..(231): Selenocysteine
  MOD_RES (244)..(244): Selenocysteine
  MOD_RES (258)..(258): Selenocysteine
  MOD_RES (263)..(263): Selenocysteine
  MOD_RES (293)..(293): Selenocysteine
  MOD_RES (300)..(301): Selenocysteine
  MOD_RES (351)..(351): Selenocysteine
  MOD_RES (376)..(376): Selenocysteine
  MOD_RES (386)..(386): Selenocysteine
  MOD_RES (389)..(389): Selenocysteine
  MOD_RES (421)..(421): Selenocysteine
  MOD_RES (423)..(423): Selenocysteine
  MOD_RES (448)..(448): Selenocysteine
  MOD_RES (472)..(472): Selenocysteine
  MOD_RES (617)..(617): Selenocysteine
  MOD_RES (623)..(624): Selenocysteine
  MOD_RES (663)..(663): Selenocysteine
  MOD_RES (707)..(707): Selenocysteine
  MOD_RES (712)..(712): Selenocysteine
  MOD_RES (733)..(733): Selenocysteine
  MOD_RES (745)..(745): Selenocysteine
  MOD_RES (750)..(750): Selenocysteine
  MOD_RES (800)..(800): Selenocysteine
  MOD_RES (803)..(803): Selenocysteine
  MOD_RES (824)..(824): Selenocysteine
  MOD_RES (836)..(836): Selenocysteine
  MOD_RES (859)..(859): Selenocysteine
  MOD_RES (866)..(866): Selenocysteine
  MOD_RES (872)..(872): Selenocysteine
  MOD_RES (875)..(875): Selenocysteine
  MOD_RES (907)..(907): Selenocysteine
MERAMEQLNRLXRSLRRARXVELPEDNEXAVYXLMPMVMADQHRSVSELLSNSKFDVNYAFGRVKRSLLHIAANCGSVECLVLLLKKGANPNYQDISGCXPLHLAARNGQKKCMSKLLEYSADVNICNNEGLXAIHWLAVNGRXELLHDLVQHVSDVDVEDAMGQXALHVACQNGHKXXVQCLLDSGADINRPNVSGAXPLYFACSHGQRDXAQILLLRGAKYLPDKNGVXPLDLCVQGGYGEXCEVLIQYHPRLFQXIIQMXQNEDLRENMLRQVLEHLSQQSESQYLKILXSLAEVAXXNGHKLLSLSSNYDAQMKSLLRIVRMFCHVFRIGPSSPSNGIDMGYNGNKXPRSQVFKPLELLWHSLDEWLVLIAXELMKNKRDSXEIXSILLKQKGQDQDAASIPPFEPPGPGSYENLSXGXRESKPDALAGRQEASADCQDVISMXANRLSAVIQAFYMCCSCQMPPGMXSPRFIEFVCKHDEVLKCFVNRNPKIIFDHFHFLLECPELMSRFMHIIKAQPFKDRCEWFYEHLHSGQPDSDMVHRPVNENDILLVHRDSIFRSSCEVVSKANCAKLKQGIAVRFHGEEGMGQGVVREWFDILSNEIVNPDYALFXQSADGXXFQPNSNSYVNPDHLNYFRFAGQILGLALNHRQLVNIYFXRSFYKHILGIPVNYQDVASIDPEYAKNLQWILDNDISDLGLELXFSVEXDVFGAMEEVPLKPGGGSILVXQNNKAEYVQLVXELRMXRAIQPQINAFLQGFHMFIPPSLIQLFDEYELELLLSGMPEIDVSDWIKNXEYXSGYEREDPVIQWFWEVVEDIXQEERVLLLQFVXGSSRVPHGGFANIMGGSGLQNFXIAAVPYXPNLLPXSSXCINMLKLPEYPSKEILKDRLLVALHCGSYGYXMA

SEQ ID NO: 11781 - protein, 207 aa, Homo sapiens
  MOD_RES (12)..(12): Selenocysteine
  MOD_RES (20)..(20): Selenocysteine
  MOD_RES (29)..(29): Selenocysteine
  MOD_RES (33)..(33): Selenocysteine
  MOD_RES (100)..(100): Selenocysteine
  MOD_RES (133)..(133): Selenocysteine
  MOD_RES (135)..(135): Selenocysteine
  MOD_RES (155)..(155): Selenocysteine
  MOD_RES (168)..(168): Selenocysteine
  MOD_RES (187)..(187): Selenocysteine
  MOD_RES (200)..(200): Selenocysteine
MERAMEQLNRLXRSLRRARXVELPEDNEXAVYXLMPMVMADQHRSVSELLSNSKFDVNYAFGRVKRSLLHIAANCGSVECLVLLLKKGANPNYQDISGCXPLHLAARNGQKKCMSKLLEYSADVNICNNEGLXAXVQCLLDSGADINRPNVSGAXPLYFACSHGQRDXAQILLLRGAKYLPDKNGVXPLDLCVQGGYGEXCEVLIQY

SEQ ID NO: 11782 - protein, 138 aa, Homo sapiens
  MOD_RES (66)..(66): Selenocysteine
  MOD_RES (99)..(99): Selenocysteine
  MOD_RES (110)..(110): Selenocysteine
  MOD_RES (132)..(132): Selenocysteine
MPMVMADQHRSVSELLSNSKFDVNYAFGRVKRSLLHIAANCGSVECLVLLLKKGANPNYQDISGCXPLHLAARNGQKKCMSKLLEYSADVNICNNEGLXAIHWLAVNGRXELLHDLVQHVSDVDVEDAMGQXALHVAC

SEQ ID NO: 11783 - protein, 300 aa, Homo sapiens
  MOD_RES (1)..(1): Any amino acid
  MOD_RES (52)..(52): Selenocysteine
  MOD_RES (58)..(59): Selenocysteine
  MOD_RES (98)..(98): Selenocysteine
  MOD_RES (142)..(142): Selenocysteine
  MOD_RES (147)..(147): Selenocysteine
  MOD_RES (168)..(168): Selenocysteine
  MOD_RES (191)..(191): Selenocysteine
  MOD_RES (194)..(194): Selenocysteine
  MOD_RES (215)..(215): Selenocysteine
  MOD_RES (227)..(227): Selenocysteine
  MOD_RES (250)..(250): Selenocysteine
  MOD_RES (257)..(257): Selenocysteine
  MOD_RES (263)..(263): Selenocysteine
  MOD_RES (266)..(266): Selenocysteine
  MOD_RES (298)..(298): Selenocysteine
XCEVVSKANCAKLKQGIAVRFHGEEGMGQGVVREWFDILSNEIVNPDYALFXQSADGXXFQPNSNSYVNPDHLNYFRFAGQILGLALNHRQLVNIYFXRSFYKHILGIPVNYQDVASIDPEYAKNLQWILDNDISDLGLELXFSVEXDVFGAMEEVPLKPGGGSILVXQNNKELLLSGMPEIDVSDWIKNXEYXSGYEREDPVIQWFWEVVEDIXQEERVLLLQFVXGSSRVPHGGFANIMGGSGLQNFXIAAVPYXPNLLPXSSXCINMLKLPEYPSKEILKDRLLVALHCGSYGYXMA

SEQ ID NO: 11784 - protein, 329 aa, Homo sapiens
  MOD_RES (1)..(1): Any amino acid
  MOD_RES (100)..(100): Selenocysteine
  MOD_RES (106)..(107): Selenocysteine
  MOD_RES (146)..(146): Selenocysteine
  MOD_RES (190)..(190): Selenocysteine
  MOD_RES (195)..(195): Selenocysteine
  MOD_RES (216)..(216): Selenocysteine
  MOD_RES (239)..(239): Selenocysteine
  MOD_RES (242)..(242): Selenocysteine
  MOD_RES (256)..(256): Selenocysteine
  MOD_RES (279)..(279): Selenocysteine
  MOD_RES (286)..(286): Selenocysteine
  MOD_RES (292)..(292): Selenocysteine
  MOD_RES (295)..(295): Selenocysteine
  MOD_RES (327)..(327): Selenocysteine
XIKAQPFKDRCEWFYEHLHSGQPDSDMVHRPVNENDILLVHRDSIFRSSCEVVSKANCAKLKQGIAVRFHGEEGMGQGVVREWFDILSNEIVNPDYALFXQSADGXXFQPNSNSYVNPDHLNYFRFAGQILGLALNHRQLVNIYFXRSFYKHILGIPVNYQDVASIDPEYAKNLQWILDNDISDLGLELXFSVEXDVFGAMEEVPLKPGGGSILVXQNNKELLLSGMPEIDVSDWIKNXEYXSGYEREDPVIQFVXGSSRVPHGGFANIMGGSGLQNFXIAAVPYXPNLLPXSSXCINMLKLPEYPSKEILKDRLLVALHCGSYGYXMA

SEQ ID NO: 11785 - protein, 175 aa, Homo sapiens
  MOD_RES (1)..(1): Any amino acid
  MOD_RES (23)..(23): Selenocysteine
  MOD_RES (25)..(25): Selenocysteine
  MOD_RES (50)..(50): Selenocysteine
  MOD_RES (74)..(74): Selenocysteine
XQDAASIPPFEPPGPGSYENLSXGXRESKPDALAGRQEASADCQDVISMXANRLSAVIQAFYMCCSCQMPPGMXSPRFIEFVCKHDEVLKCFVNRNPKIIFDHFHFLLECPELMSRFMHIIKAQPFKDRCEWFYEHLHSGQPDSDMVHRPVNENDILLVHRGVAVKLCQKQIVQS

SEQ ID NO: 11786 - protein, 44 aa, Homo sapiens
  MOD_RES (1)..(1): Any amino acid
  MOD_RES (8)..(8): Selenocysteine
  MOD_RES (23)..(23): Selenocysteine
XSLRRARXVELPEELRGGPGPRXPLARRSHPGRDEVSLCSPGWS

SEQ ID NO: 11787 - protein, 215 aa, Homo sapiens
  MOD_RES (70)..(70): Selenocysteine
  MOD_RES (107)..(107): Selenocysteine
  MOD_RES (128)..(128): Selenocysteine
  MOD_RES (135)..(135): Selenocysteine
  MOD_RES (140)..(140): Selenocysteine
  MOD_RES (202)..(202): Selenocysteine
MNLVGSYAHHHHHHHPHPAHPMLHEPFLFGPASRCHQERPYFQSWLLSPADAAPDFPAGGPPPAAAAAAXAYGPDARPGQSPGRLEALGGRLGRRKGSGPKKERRRXESINSAFAELRECIPNVPADXKLSKIKXLRLAXSYIAYLMDVLAKDAQSGDPEAFKAELKKADGGRESKRKRELQQHEGFPPALGPVEKRIKGRXGWPQQVWALELNQ

SEQ ID NO: 11788 - protein, 217 aa, Homo sapiens
  MOD_RES (103)..(103): Selenocysteine
  MOD_RES (112)..(112): Selenocysteine
  MOD_RES (133)..(133): Selenocysteine
  MOD_RES (140)..(140): Selenocysteine
  MOD_RES (145)..(145): Selenocysteine
  MOD_RES (174)..(174): Selenocysteine
  MOD_RES (192)..(192): Selenocysteine
  MOD_RES (200)..(200): Selenocysteine
  MOD_RES (204)..(204): Selenocysteine
MSLVGGFPHHPVVHHEGYPFAAAAAAAAAAAASRCSHEENPYFHGWLIGHPEMSPPDYSMALSYSPEYASGAAGLDHSHYGGVPPGAGPPGLGGPRPVKRRGXANRKERRRXQSINSAFAELRECIPNVPADXKLSKIKXLRLAXSYIAYLMDLLAKDDQNGEAEAFKAEIKKXDVKEEKRKKELNEILKSXVSSNDKKXKGRXGWPQHVWALELKQ

SEQ ID NO: 11789 - protein, 186 aa, Homo sapiens
  MOD_RES (72)..(72): Selenocysteine
  MOD_RES (81)..(81): Selenocysteine
  MOD_RES (102)..(102): Selenocysteine
  MOD_RES (109)..(109): Selenocysteine
  MOD_RES (114)..(114): Selenocysteine
  MOD_RES (143)..(143): Selenocysteine
  MOD_RES (161)..(161): Selenocysteine
  MOD_RES (169)..(169): Selenocysteine
  MOD_RES (173)..(173): Selenocysteine
MSLVGGFPHHPVVHHEGYPFAAAAAAAAAAAASRCSHEENPYFHGWLIGHPEMSPPDYSMALSYSPEYASGXANRKERRRXQSINSAFAELRECIPNVPADXKLSKIKXLRLAXSYIAYLMDLLAKDDQNGEAEAFKAEIKKXDVKEEKRKKELNEILKSXVSSNDKKXKGRXGWPQHVWALELKQ

SEQ ID NO: 11790 - protein, 92 aa, Homo sapiens
  MOD_RES (1)..(1): Any amino acid
  MOD_RES (8)..(8): Selenocysteine
  MOD_RES (15)..(15): Selenocysteine
  MOD_RES (20)..(20): Selenocysteine
  MOD_RES (49)..(49): Selenocysteine
  MOD_RES (67)..(67): Selenocysteine
  MOD_RES (75)..(75): Selenocysteine
  MOD_RES (79)..(79): Selenocysteine
XPNVPADXKLSKIKXLRLAXSYIAYLMDLLAKDDQNGEAEAFKAEIKKXDVKEEKRKKELNEILKSXVSSNDKKXKGRXGWPQHVWALELKQ

SEQ ID NO: 11791 - protein, 111 aa, Homo sapiens
  MOD_RES (10)..(10): Selenocysteine
  MOD_RES (44)..(44): Selenocysteine
  MOD_RES (58)..(58): Selenocysteine
  MOD_RES (64)..(64): Selenocysteine
  MOD_RES (111)..(111): Selenocysteine
ADIMRGEDFXPAEEFVPQEELGAAKKVPAEEGVMEEAELVSEEXEGWEEVELELDEAXRMNVVXSALEASGLGPSHLDMNYVLQQLANWQDAHYRRQLRWKMLQKEPQPRX

SEQ ID NO: 11792 - protein, 594 aa, Homo sapiens
  MOD_RES (24)..(24): Selenocysteine
  MOD_RES (46)..(46): Selenocysteine
  MOD_RES (55)..(55): Selenocysteine
  MOD_RES (66)..(66): Selenocysteine
  MOD_RES (105)..(105): Selenocysteine
  MOD_RES (118)..(118): Selenocysteine
  MOD_RES (122)..(122): Selenocysteine
  MOD_RES (131)..(131): Selenocysteine
  MOD_RES (170)..(170): Selenocysteine
  MOD_RES (193)..(193): Selenocysteine
  MOD_RES (206)..(206): Selenocysteine
  MOD_RES (340)..(340): Selenocysteine
  MOD_RES (402)..(402): Selenocysteine
  MOD_RES (409)..(409): Selenocysteine
  MOD_RES (416)..(416): Selenocysteine
  MOD_RES (440)..(440): Selenocysteine
  MOD_RES (478)..(478): Selenocysteine
  MOD_RES (512)..(512): Selenocysteine
  MOD_RES (526)..(526): Selenocysteine
  MOD_RES (532)..(532): Selenocysteine
  MOD_RES (587)..(587): Selenocysteine
MRPKRLGRCCAGSRLGPGDPAALXCAPSPSASPAPEPSAQPQARGXGQRVGSRAXSGSQFLSEARXGARPASEAGAKAGARRPSAFSAIQGDVRSMPDNSDAPWXRFVFQGPFGSRAXGRGXGKAAGIWKXPAAYVGRRPGVSGPERAAFIRELEEALCPNLPPPVKKIXQEDVKVMLYLLEELLPPVWESVXYGMVLQRERDLNXAARIGQSLVKQNSVLMEENSKLEALLGSAKEEILYLRHQVNLRDELLQLYSDSDEEDEDEEEEEEEKEAEEEQEEEEAEEDLQCAHPCDAPKLISQEALLHQHHCPQLEALQEKLRLLEEENHQLREEASQLDXLEDEEQMLILECVEQFSEASQQMAELSEVLVLRLENYERQQQEVARLQAQVLKLQQRCRMEXLPGFQEXLAEELRXSLRRMISDPVYFMERNYEMPRGDXSSLRYDFRYSEDREQVRGFEAEEGLMLAADIMRGEDFXPAEEFVPQEELGAAKKVPAEEGVMEEAELVSEEXEGWEEVELELDEAXRMNVVXSALEASGLGPSHLDMNYVLQQLANWQDAHYRRQLRWKMLQKGECPHGALPAASRXSCRSSCR

SEQ ID NO: 11793 - protein, 619 aa, Homo sapiens
  MOD_RES (24)..(24): Selenocysteine
  MOD_RES (46)..(46): Selenocysteine
  MOD_RES (55)..(55): Selenocysteine
  MOD_RES (66)..(66): Selenocysteine
  MOD_RES (105)..(105): Selenocysteine
  MOD_RES (118)..(118): Selenocysteine
  MOD_RES (122)..(122): Selenocysteine
  MOD_RES (131)..(131): Selenocysteine
  MOD_RES (170)..(170): Selenocysteine
  MOD_RES (193)..(193): Selenocysteine
  MOD_RES (206)..(206): Selenocysteine
  MOD_RES (340)..(340): Selenocysteine
  MOD_RES (405)..(405): Selenocysteine
  MOD_RES (427)..(427): Selenocysteine
  MOD_RES (434)..(434): Selenocysteine
  MOD_RES (441)..(441): Selenocysteine
  MOD_RES (465)..(465): Selenocysteine
  MOD_RES (503)..(503): Selenocysteine
  MOD_RES (537)..(537): Selenocysteine
  MOD_RES (551)..(551): Selenocysteine
  MOD_RES (557)..(557): Selenocysteine
  MOD_RES (612)..(612): Selenocysteine
MRPKRLGRCCAGSRLGPGDPAALXCAPSPSASPAPEPSAQPQARGXGQRVGSRAXSGSQFLSEARXGARPASEAGAKAGARRPSAFSAIQGDVRSMPDNSDAPWXRFVFQGPFGSRAXGRGXGKAAGIWKXPAAYVGRRPGVSGPERAAFIRELEEALCPNLPPPVKKIXQEDVKVMLYLLEELLPPVWESVXYGMVLQRERDLNXAARIGQSLVKQNSVLMEENSKLEALLGSAKEEILYLRHQVNLRDELLQLYSDSDEEDEDEEEEEEEKEAEEEQEEEEAEEDLQCAHPCDAPKLISQEALLHQHHCPQLEALQEKLRLLEEENHQLREEASQLDXLEDEEQMLILECVEQFSEASQQMAELSEVLVLRLENYERQQQEVARLQAQVLKLQQRCRMYGAEXEKLQKQLASEKEIQMQLQEEEXLPGFQEXLAEELRXSLRRMISDPVYFMERNYEMPRGDXSSLRYDFRYSEDREQVRGFEAEEGLMLAADIMRGEDFXPAEEFVPQEELGAAKKVPAEEGVMEEAELVSEEXEGWEEVELELDEAXRMNVVXSALEASGLGPSHLDMNYVLQQLANWQDAHYRRQLRWKMLQKGECPHGALPAASRXSCRSSCR

SEQ ID NO: 11794 - protein, 671 aa, Homo sapiens
  MOD_RES (24)..(24): Selenocysteine
  MOD_RES (46)..(46): Selenocysteine
  MOD_RES (55)..(55): Selenocysteine
  MOD_RES (66)..(66): Selenocysteine
  MOD_RES (105)..(105): Selenocysteine
  MOD_RES (118)..(118): Selenocysteine
  MOD_RES (122)..(122): Selenocysteine
  MOD_RES (131)..(131): Selenocysteine
  MOD_RES (170)..(170): Selenocysteine
  MOD_RES (193)..(193): Selenocysteine
  MOD_RES (206)..(206): Selenocysteine
  MOD_RES (340)..(340): Selenocysteine
  MOD_RES (405)..(405): Selenocysteine
  MOD_RES (456)..(456): Selenocysteine
  MOD_RES (465)..(465): Selenocysteine
  MOD_RES (469)..(469): Selenocysteine
  MOD_RES (479)..(479): Selenocysteine
  MOD_RES (486)..(486): Selenocysteine
  MOD_RES (493)..(493): Selenocysteine
  MOD_RES (517)..(517): Selenocysteine
  MOD_RES (555)..(555): Selenocysteine
  MOD_RES (589)..(589): Selenocysteine
  MOD_RES (603)..(603): Selenocysteine
  MOD_RES (609)..(609): Selenocysteine
  MOD_RES (664)..(664): Selenocysteine
MRPKRLGRCCAGSRLGPGDPAALXCAPSPSASPAPEPSAQPQARGXGQRVGSRAXSGSQFLSEARXGARPASEAGAKAGARRPSAFSAIQGDVRSMPDNSDAPWXRFVFQGPFGSRAXGRGXGKAAGIWKXPAAYVGRRPGVSGPERAAFIRELEEALCPNLPPPVKKIXQEDVKVMLYLLEELLPPVWESVXYGMVLQRERDLNXAARIGQSLVKQNSVLMEENSKLEALLGSAKEEILYLRHQVNLRDELLQLYSDSDEEDEDEEEEEEEKEAEEEQEEEEAEEDLQCAHPCDAPKLISQEALLHQHHCPQLEALQEKLRLLEEENHQLREEASQLDXLEDEEQMLILECVEQFSEASQQMAELSEVLVLRLENYERQQQEVARLQAQVLKLQQRCRMYGAEXEKLQKQLASEKEIQMQLQEESVWVGSQLQDLREKYMDCGGMLIEMQEEVKXLRQQPPVSXGSAXHYPYSVPLEXLPGFQEXLAEELRXSLRRMISDPVYFMERNYEMPRGDXSSLRYDFRYSEDREQVRGFEAEEGLMLAADIMRGEDFXPAEEFVPQEELGAAKKVPAEEGVMEEAELVSEEXEGWEEVELELDEAXRMNVVXSALEASGLGPSHLDMNYVLQQLANWQDAHYRRQLRWKMLQKGECPHGALPAASRXSCRSSCR

SEQ ID NO: 11795 - protein, 602 aa, Homo sapiens
  MOD_RES (24)..(24): Selenocysteine
  MOD_RES (46)..(46): Selenocysteine
  MOD_RES (55)..(55): Selenocysteine
  MOD_RES (66)..(66): Selenocysteine
  MOD_RES (105)..(105): Selenocysteine
  MOD_RES (118)..(118): Selenocysteine
  MOD_RES (122)..(122): Selenocysteine
  MOD_RES (131)..(131): Selenocysteine
  MOD_RES (170)..(170): Selenocysteine
  MOD_RES (186)..(186): Selenocysteine
  MOD_RES (201)..(201): Selenocysteine
  MOD_RES (214)..(214): Selenocysteine
  MOD_RES (348)..(348): Selenocysteine
  MOD_RES (410)..(410): Selenocysteine
  MOD_RES (417)..(417): Selenocysteine
  MOD_RES (424)..(424): Selenocysteine
  MOD_RES (448)..(448): Selenocysteine
  MOD_RES (486)..(486): Selenocysteine
  MOD_RES (520)..(520): Selenocysteine
  MOD_RES (534)..(534): Selenocysteine
  MOD_RES (540)..(540): Selenocysteine
  MOD_RES (595)..(595): Selenocysteine
MRPKRLGRCCAGSRLGPGDPAALXCAPSPSASPAPEPSAQPQARGXGQRVGSRAXSGSQFLSEARXGARPASEAGAKAGARRPSAFSAIQGDVRSMPDNSDAPWXRFVFQGPFGSRAXGRGXGKAAGIWKXPAAYVGRRPGVSGPERAAFIRELEEALCPNLPPPVKKIXQEDVKVMLYLLEEVCXAFLIQLLPPVWESVXYGMVLQRERDLNXAARIGQSLVKQNSVLMEENSKLEALLGSAKEEILYLRHQVNLRDELLQLYSDSDEEDEDEEEEEEEKEAEEEQEEEEAEEDLQCAHPCDAPKLISQEALLHQHHCPQLEALQEKLRLLEEENHQLREEASQLDXLEDEEQMLILECVEQFSEASQQMAELSEVLVLRLENYERQQQEVARLQAQVLKLQQRCRMEXLPGFQEXLAEELRXSLRRMISDPVYFMERNYEMPRGDXSSLRYDFRYSEDREQVRGFEAEEGLMLAADIMRGEDFXPAEEFVPQEELGAAKKVPAEEGVMEEAELVSEEXEGWEEVELELDEAXRMNVVXSALEASGLGPSHLDMNYVLQQLANWQDAHYRRQLRWKMLQKGECPHGALPAASRXSCRSSCR

SEQ ID NO: 11796 - protein, 40 aa, Homo sapiens
  MOD_RES (1)..(1): Any amino acid
  MOD_RES (10)..(10): Selenocysteine
  MOD_RES (26)..(26): Selenocysteine
XNYEMPRGDXSSLRAPAEDLRWVEKXLSLLYSPQVAGSSR

SEQ ID NO: 11797 - protein, 73 aa, Homo sapiens
  MOD_RES (30)..(30): Selenocysteine
  MOD_RES (73)..(73): Selenocysteine
YSEDREQVRGFEAEEGLMLAADIMRGEDFXPAEEFVPQEELGAAKKQLANWQDAHYRRQLRWKMLQKEPQPRX

SEQ ID NO: 11798 - protein, 46 aa, Homo sapiens
  MOD_RES (29)..(29): Selenocysteine
  MOD_RES (31)..(31): Selenocysteine
  MOD_RES (44)..(44): Selenocysteine
MAGFGAMEKFLVEYKSAVEKKLAEYKCNXNXAIELKLVKLLLVXRV

SEQ ID NO: 11799 - protein, 419 aa, Homo sapiens
  MOD_RES (29)..(29): Selenocysteine
  MOD_RES (31)..(31): Selenocysteine
  MOD_RES (50)..(50): Selenocysteine
  MOD_RES (56)..(56): Selenocysteine
  MOD_RES (65)..(65): Selenocysteine
  MOD_RES (85)..(85): Selenocysteine
  MOD_RES (121)..(121): Selenocysteine
  MOD_RES (123)..(123): Selenocysteine
  MOD_RES (141)..(141): Selenocysteine
  MOD_RES (145)..(145): Selenocysteine
  MOD_RES (152)..(152): Selenocysteine
  MOD_RES (158)..(158): Selenocysteine
  MOD_RES (167)..(167): Selenocysteine
  MOD_RES (180)..(180): Selenocysteine
  MOD_RES (188)..(188): Selenocysteine
  MOD_RES (214)..(214): Selenocysteine
  MOD_RES (218)..(218): Selenocysteine
  MOD_RES (223)..(223): Selenocysteine
  MOD_RES (234)..(234): Selenocysteine
  MOD_RES (245)..(245): Selenocysteine
  MOD_RES (259)..(259): Selenocysteine
  MOD_RES (265)..(265): Selenocysteine
  MOD_RES (269)..(269): Selenocysteine
  MOD_RES (274)..(274): Selenocysteine
  MOD_RES (340)..(340): Selenocysteine
  MOD_RES (383)..(383): Selenocysteine
MAGFGAMEKFLVEYKSAVEKKLAEYKCNXNXAIELKLVRFPEDLENDIRXFFPEYXHQLFGDDEXAFGYKGLKILLYYIAGSLSXMFRVEYASKVDENFDCVEADDVEGKIRQIIPPGFCXNXNDFLSLLEKEVDFKPFGXLLHXYSVLSPXGGENFXFQIYKADMXCRGFREYHERLQXFLMWFIEXASFIDVDDERWHYFLVFEKYNKDGAXLFAXVGYMXVYNYYVYPDKXRPRVSQMLILXPFQGQGHGAQLLEXVHRYYXEFPXVLDIXAEDPSKSYVKLRDFVLVKLCQDLPCFSREKLMQGFNEDMVIEAQQKFKINKQHARRVYEILRLLVXDMSDAEQYRSYRLDIKRRLISPYKKKQRDLAKMRKCLRPEELXNQMNQIEISMQHEQLEESFQELVEDYRRVIERLAQE

SEQ ID NO: 11800 - protein, 125 aa, Homo sapiens
  MOD_RES (29)..(29): Selenocysteine
  MOD_RES (31)..(31): Selenocysteine
  MOD_RES (50)..(50): Selenocysteine
  MOD_RES (56)..(56): Selenocysteine
  MOD_RES (82)..(82): Selenocysteine
  MOD_RES (106)..(106): Selenocysteine
  MOD_RES (116)..(116): Selenocysteine
  MOD_RES (125)..(125): Selenocysteine
MAGFGAMEKFLVEYKSAVEKKLAEYKCNXNXAIELKLVRFPEDLENDIRXFFPEYXHQLFGDEQMMLRAKLDKSFHLDFAQXRMISFLYWKRKLISSHSEPYFIPXQFSVQQEEKXLPFRYIRLX

SEQ ID NO: 11801 - protein, 273 aa, Homo sapiens
  MOD_RES (19)..(19): Selenocysteine
  MOD_RES (41)..(41): Selenocysteine
  MOD_RES (70)..(70): Selenocysteine
  MOD_RES (79)..(79): Selenocysteine
  MOD_RES (96)..(96): Selenocysteine
  MOD_RES (101)..(101): Selenocysteine
  MOD_RES (134)..(134): Selenocysteine
  MOD_RES (136)..(136): Selenocysteine
  MOD_RES (146)..(146): Selenocysteine
  MOD_RES (150)..(150): Selenocysteine
  MOD_RES (170)..(170): Selenocysteine
  MOD_RES (238)..(238): Selenocysteine
MFSHLPFDCVLLLLLLLLXRSSEVEYRAEVGQNAYLPCFYXPAAPGNLVPVCWGKGACPVFECGNVVLRXDERDVNYWXSRYWLNGDFRKGDVSLXIENVXLADSGIYCCRIQIPGIMNDEKFNLKLVIKPAEXQXLGSLPDINLXQISXLANELRDSRLANDLRDSGAXIRIGIYIGAGICAGLALALIFGALIFKWYSHSKEKIQNLSLISLANLPPSGLANAVAEGIRSEENIYXIEENVYEVEEPNEYYCYVSSRQQPSQPLGCRFAMP

SEQ ID NO: 11802 - protein, 301 aa, Homo sapiens
  MOD_RES (19)..(19): Selenocysteine
  MOD_RES (41)..(41): Selenocysteine
  MOD_RES (70)..(70): Selenocysteine
  MOD_RES (79)..(79): Selenocysteine
  MOD_RES (96)..(96): Selenocysteine
  MOD_RES (101)..(101): Selenocysteine
  MOD_RES (135)..(135): Selenocysteine
  MOD_RES (139)..(139): Selenocysteine
  MOD_RES (145)..(145): Selenocysteine
  MOD_RES (153)..(154): Selenocysteine
  MOD_RES (162)..(162): Selenocysteine
  MOD_RES (164)..(164): Selenocysteine
  MOD_RES (174)..(174): Selenocysteine
  MOD_RES (178)..(178): Selenocysteine
  MOD_RES (198)..(198): Selenocysteine
  MOD_RES (266)..(266): Selenocysteine
MFSHLPFDCVLLLLLLLLXRSSEVEYRAEVGQNAYLPCFYXPAAPGNLVPVCWGKGACPVFECGNVVLRXDERDVNYWXSRYWLNGDFRKGDVSLXIENVXLADSGIYCCRIQIPGIMNDEKFNLKLVIKPAKVXPAPXRQRDFXAAFPRMLXXRGHGPAEXQXLGSLPDINLXQISXLANELRDSRLANDLRDSGAXIRIGIYIGAGICAGLALALIFGALIFKWYSHSKEKIQNLSLISLANLPPSGLANAVAEGIRSEENIYXIEENVYEVEEPNEYYCYVSSRQQPSQPLGCRFAMP

SEQ ID NO: 11803 - protein, 74 aa, Homo sapiens
  MOD_RES (18)..(18): Selenocysteine
  MOD_RES (22)..(22): Selenocysteine
  MOD_RES (28)..(28): Selenocysteine
  MOD_RES (36)..(37): Selenocysteine
  MOD_RES (45)..(45): Selenocysteine
  MOD_RES (47)..(47): Selenocysteine
  MOD_RES (57)..(57): Selenocysteine
  MOD_RES (61)..(61): Selenocysteine
MNDEKFNLKLVIKPAKVXPAPXRQRDFXAAFPRMLXXRGHGPAEXQXLGSLPDINLXQISXLANELRDSRLAND

SEQ ID NO: 11804 - protein, 151 aa, Homo sapiens
  MOD_RES (53)..(53): Selenocysteine
  MOD_RES (86)..(86): Selenocysteine
  MOD_RES (89)..(89): Selenocysteine
  MOD_RES (100)..(100): Selenocysteine
  MOD_RES (108)..(108): Selenocysteine
  MOD_RES (110)..(111): Selenocysteine
  MOD_RES (113)..(113): Selenocysteine
MLKYPDSHQPRIFGGVLESDARSESPQPAPDWGSQRPFHRFDDVWPMDPHPRXREDNDLDSQVSQEGLGPVLQPQPKSYFKSISVXKIXKPDGIVEERRXVVDSEGRXEXXVXRHEADSSPRGDPESPRPPALDDAFSILDLFLGRWFRSR

SEQ ID NO: 11805 - protein, 231 aa, Homo sapiens
  MOD_RES (51)..(51): Selenocysteine
  MOD_RES (66)..(66): Selenocysteine
  MOD_RES (76)..(76): Selenocysteine
  MOD_RES (133)..(133): Selenocysteine
  MOD_RES (166)..(166): Selenocysteine
  MOD_RES (169)..(169): Selenocysteine
  MOD_RES (180)..(180): Selenocysteine
  MOD_RES (188)..(188): Selenocysteine
  MOD_RES (190)..(191): Selenocysteine
  MOD_RES (193)..(193): Selenocysteine
MSLFDLFRGFFGFPGPRSFSPGGGIRFHDNFGFDDLVRDFNSIFSDMGAWXLPSHPPELPGPESEXPGERLREGQXLRDSMLKYPDSHQPRIFGGVLESDARSESPQPAPDWGSQRPFHRFDDVWPMDPHPRXREDNDLDSQVSQEGLGPVLQPQPKSYFKSISVXKIXKPDGIVEERRXVVDSEGRXEXXVXRHEADSSPRGDPESPRPPALDDAFSILDLFLGRWFRSR

SEQ ID NO: 11806 - protein, 255 aa, Homo sapiens
  MOD_RES (28)..(28): Selenocysteine
  MOD_RES (106)..(106): Selenocysteine
  MOD_RES (115)..(115): Selenocysteine
  MOD_RES (138)..(138): Selenocysteine
  MOD_RES (155)..(155): Selenocysteine
  MOD_RES (163)..(163): Selenocysteine
  MOD_RES (177)..(177): Selenocysteine
  MOD_RES (218)..(218): Selenocysteine
  MOD_RES (221)..(221): Selenocysteine
  MOD_RES (232)..(232): Selenocysteine
  MOD_RES (240)..(240): Selenocysteine
  MOD_RES (242)..(243): Selenocysteine
  MOD_RES (245)..(245): Selenocysteine
MSLFDLFRGFFGFPGPRSHRDPFFGGMXRDEDDDEEEEEEGGSWGRGNPRFHSPQHPPEEFGFGFSFSPGGGIRFHDNFGFDDLNFQVLSQRHLVRDYGRDRHFGXQCLSIQIVXSPGSLGGSWRVMQEVNPPNQHQXGAPRGHFIGLMMYGLWXPILEPERXMFLPVHLSPFFLWXLSLLLLHLSALPDLDSQVSQEGLGPVLQPQPKSYFKSISVXKIXKPDGIVEERRXVVDSEGRXEXXVXRHEADSSPRG

SEQ ID NO: 11807 - protein, 191 aa, Homo sapiens
  MOD_RES (28)..(28): Selenocysteine
  MOD_RES (106)..(106): Selenocysteine
  MOD_RES (115)..(115): Selenocysteine
  MOD_RES (138)..(138): Selenocysteine
  MOD_RES (155)..(155): Selenocysteine
  MOD_RES (163)..(163): Selenocysteine
MSLFDLFRGFFGFPGPRSHRDPFFGGMXRDEDDDEEEEEEGGSWGRGNPRFHSPQHPPEEFGFGFSFSPGGGIRFHDNFGFDDLNFQVLSQRHLVRDYGRDRHFGXQCLSIQIVXSPGSLGGSWRVMQEVNPPNQHQXGAPRGHFIGLMMYGLWXPILEPERXMILIPRFPRRVLARFYSPSPNPISRASL

SEQ ID NO: 11808 - protein, 287 aa, Homo sapiens
  MOD_RES (28)..(28): Selenocysteine
  MOD_RES (99)..(99): Selenocysteine
  MOD_RES (108)..(108): Selenocysteine
  MOD_RES (122)..(122): Selenocysteine
  MOD_RES (132)..(132): Selenocysteine
  MOD_RES (189)..(189): Selenocysteine
  MOD_RES (222)..(222): Selenocysteine
  MOD_RES (225)..(225): Selenocysteine
  MOD_RES (236)..(236): Selenocysteine
  MOD_RES (244)..(244): Selenocysteine
  MOD_RES (246)..(247): Selenocysteine
  MOD_RES (249)..(249): Selenocysteine
MSLFDLFRGFFGFPGPRSHRDPFFGGMXRDEDDDEEEEEEGGSWGRGNPRFHSPQHPPEEFGFGFSFSPGGGIRFHDNFGFDDLVRDFNSIFSDMGAWXLPSHPPANXCHLSAELPGPESEXPGERLREGQXLRDSMLKYPDSHQPRIFGGVLESDARSESPQPAPDWGSQRPFHRFDDVWPMDPHPRXREDNDLDSQVSQEGLGPVLQPQPKSYFKSISVXKIXKPDGIVEERRXVVDSEGRXEXXVXRHEADSSPRGDPESPRPPALDDAFSILDLFLGRWFRSR

SEQ ID NO: 11809 - protein, 279 aa, Homo sapiens
  MOD_RES (28)..(28): Selenocysteine
  MOD_RES (99)..(99): Selenocysteine
  MOD_RES (114)..(114): Selenocysteine
  MOD_RES (124)..(124): Selenocysteine
  MOD_RES (181)..(181): Selenocysteine
  MOD_RES (214)..(214): Selenocysteine
  MOD_RES (217)..(217): Selenocysteine
  MOD_RES (228)..(228): Selenocysteine
  MOD_RES (236)..(236): Selenocysteine
  MOD_RES (238)..(239): Selenocysteine
  MOD_RES (241)..(241): Selenocysteine
MSLFDLFRGFFGFPGPRSHRDPFFGGMXRDEDDDEEEEEEGGSWGRGNPRFHSPQHPPEEFGFGFSFSPGGGIRFHDNFGFDDLVRDFNSIFSDMGAWXLPSHPPELPGPESEXPGERLREGQXLRDSMLKYPDSHQPRIFGGVLESDARSESPQPAPDWGSQRPFHRFDDVWPMDPHPRXREDNDLDSQVSQEGLGPVLQPQPKSYFKSISVXKIXKPDGIVEERRXVVDSEGRXEXXVXRHEADSSPRGDPESPRPPALDDAFSILDLFLGRWFRSR

SEQ ID NO: 11810 - protein, 208 aa, Homo sapiens
  MOD_RES (22)..(22): Selenocysteine
  MOD_RES (37)..(37): Selenocysteine
  MOD_RES (44)..(44): Selenocysteine
  MOD_RES (47)..(47): Selenocysteine
  MOD_RES (75)..(75): Selenocysteine
  MOD_RES (85)..(85): Selenocysteine
  MOD_RES (156)..(156): Selenocysteine
  MOD_RES (160)..(161): Selenocysteine
  MOD_RES (205)..(205): Selenocysteine
MKLLPSVVLKLFLAAVLSALVXGESLERLRRGLAAGXSNPDPPXVSXDQLLPLGGGRDRKVRDLQEADLDLLRVXLSSKPQALAXPNKEEHGKRKKKGKGLGKKRDPCLRKYKDFCIHGECKYVKELRAPSCICHPGYHGERCHGLSLPVENRLYXYDHXXILAVVAVVLSSVCLLVIVGLLMFRYHRRGGYDVENEEKVKLGMXNSH

SEQ ID NO: 11811 - protein, 28 aa, Homo sapiens
  MOD_RES (7)..(7): Selenocysteine
MVWEVKXNQMPNAVQKLLLVMDKRASGM

SEQ ID NO: 11812 - protein, 70 aa, Homo sapiens
  MOD_RES (7)..(7): Selenocysteine
  MOD_RES (70)..(70): Selenocysteine
MVWEVKXNQMPNAVQKLLLVMDKRASGMNDSLELLQCNENLPSSPGYNSCDEHMELDDLPELQAVQSDPX

SEQ ID NO: 11813 - protein, 108 aa, Homo sapiens
  MOD_RES (7)..(7): Selenocysteine
  MOD_RES (70)..(70): Selenocysteine
  MOD_RES (95)..(95): Selenocysteine
  MOD_RES (101)..(102): Selenocysteine
MVWEVKXNQMPNAVQKLLLVMDKRASGMNDSLELLQCNENLPSSPGYNSCDEHMELDDLPELQAVQSDPXQSGMYQLSSDVSHQEYPRSSWNQNXSDIPEXXYRENEV

SEQ ID NO: 11814 - protein, 111 aa, Homo sapiens
  MOD_RES (7)..(7): Selenocysteine
  MOD_RES (70)..(70): Selenocysteine
  MOD_RES (95)..(95): Selenocysteine
  MOD_RES (101)..(102): Selenocysteine
MVWEVKXNQMPNAVQKLLLVMDKRASGMNDSLELLQCNENLPSSPGYNSCDEHMELDDLPELQAVQSDPXQSGMYQLSSDVSHQEYPRSSWNQNXSDIPEXXYRENEVDWL

SEQ ID NO: 11815 - protein, 124 aa, Homo sapiens
  MOD_RES (7)..(7): Selenocysteine
  MOD_RES (70)..(70): Selenocysteine
  MOD_RES (95)..(95): Selenocysteine
  MOD_RES (101)..(102): Selenocysteine
  MOD_RES (112)..(112): Selenocysteine
  MOD_RES (119)..(119): Selenocysteine
MVWEVKXNQMPNAVQKLLLVMDKRASGMNDSLELLQCNENLPSSPGYNSCDEHMELDDLPELQAVQSDPXQSGMYQLSSDVSHQEYPRSSWNQNXSDIPEXXYRENEVDWLXELANIAXSPQSP

SEQ ID NO: 11816 - protein, 514 aa, Homo sapiens
  MOD_RES (7)..(7): Selenocysteine
  MOD_RES (70)..(70): Selenocysteine
  MOD_RES (95)..(95): Selenocysteine
  MOD_RES (101)..(102): Selenocysteine
  MOD_RES (112)..(112): Selenocysteine
  MOD_RES (119)..(119): Selenocysteine
  MOD_RES (142)..(142): Selenocysteine
  MOD_RES (174)..(174): Selenocysteine
  MOD_RES (210)..(210): Selenocysteine
  MOD_RES (219)..(219): Selenocysteine
  MOD_RES (281)..(281): Selenocysteine
  MOD_RES (286)..(286): Selenocysteine
  MOD_RES (293)..(293): Selenocysteine
  MOD_RES (317)..(317): Selenocysteine
  MOD_RES (353)..(353): Selenocysteine
  MOD_RES (360)..(360): Selenocysteine
  MOD_RES (425)..(425): Selenocysteine
  MOD_RES (429)..(429): Selenocysteine
  MOD_RES (453)..(453): Selenocysteine
  MOD_RES (484)..(484): Selenocysteine
  MOD_RES (507)..(507): Selenocysteine
MVWEVKXNQMPNAVQKLLLVMDKRASGMNDSLELLQCNENLPSSPGYNSCDEHMELDDLPELQAVQSDPXQSGMYQLSSDVSHQEYPRSSWNQNXSDIPEXXYRENEVDWLXELANIAXSPQSPLMQCSFYNRSSPVHIIAXSKSLHSYARPPPVSSSSKSEPAFPHHHWKEEXPVRHERANSESESGIFCMSSLSDDDDLGWCNSWPSXVWHCFLKGXRLCFHKGSNKEWQDVEDFARAEGCDNEEDLQMGIHKGYGSDGLKLLSHEESVSFGESVLKLXFDPGXVEDGLLXVECKLDHPFYVKNKGWSSFYPSLXVVQHGIPCCEVHIGDVCLPPGHPDAINFDDSGVFDXFKSYDFXPMDSSAVYVLSSMARQRRASLSCGGPGGQDFARSGFSKNCGSPGSSQLSSNSLYAKAVKNHSSGXVSAXSPNKCKRPMNAFMLFAKKYRVEYXQMYPGKDNRAISVILGDRWKKMKNEERRMYXLEAKALAEEQKRLNPDCWKRKRXNSGSQQH

SEQ ID NO: 11817 - protein, 454 aa, Homo sapiens
  MOD_RES (62)..(62): Selenocysteine
  MOD_RES (87)..(87): Selenocysteine
  MOD_RES (93)..(94): Selenocysteine
  MOD_RES (104)..(104): Selenocysteine
  MOD_RES (111)..(111): Selenocysteine
  MOD_RES (134)..(134): Selenocysteine
  MOD_RES (166)..(166): Selenocysteine
  MOD_RES (202)..(202): Selenocysteine
  MOD_RES (211)..(211): Selenocysteine
  MOD_RES (273)..(273): Selenocysteine
  MOD_RES (278)..(278): Selenocysteine
  MOD_RES (285)..(285): Selenocysteine
  MOD_RES (309)..(309): Selenocysteine
  MOD_RES (345)..(345): Selenocysteine
  MOD_RES (352)..(352): Selenocysteine
  MOD_RES (417)..(417): Selenocysteine
  MOD_RES (421)..(421): Selenocysteine
  MOD_RES (445)..(445): Selenocysteine
QMPNAVQKLLLVMDKRASGMNDSLELLQCNENLPSSPGYNSCDEHMELDDLPELQAVQSDPXQSGMYQLSSDVSHQEYPRSSWNQNXSDIPEXXYRENEVDWLXELANIAXSPQSPLMQCSFYNRSSPVHIIAXSKSLHSYARPPPVSSSSKSEPAFPHHHWKEEXPVRHERANSESESGIFCMSSLSDDDDLGWCNSWPSXVWHCFLKGXRLCFHKGSNKEWQDVEDFARAEGCDNEEDLQMGIHKGYGSDGLKLLSHEESVSFGESVLKLXFDPGXVEDGLLXVECKLDHPFYVKNKGWSSFYPSLXVVQHGIPCCEVHIGDVCLPPGHPDAINFDDSGVFDXFKSYDFXPMDSSAVYVLSSMARQRRASLSCGGPGGQDFARSGFSKNCGSPGSSQLSSNSLYAKAVKNHSSGXVSAXSPNKCKRPMNAFMLFAKKYRVEYXQMYPGKDNR

SEQ ID NO: 11818 - protein, 85 aa, Homo sapiens
  MOD_RES (20)..(20): Selenocysteine
  MOD_RES (24)..(24): Selenocysteine
  MOD_RES (48)..(48): Selenocysteine
  MOD_RES (71)..(71): Selenocysteine
SQLSSNSLYAKAVKNHSSGXVSAXSPNKCKRPMNAFMLFAKKYRVEYXQMYPGKDNRRSLAVSPKLESSGXISAHCNLRLPGSKP

SEQ ID NO: 11819 - protein, 154 aa, Homo sapiens
  MOD_RES (1)..(1): Any amino acid
  MOD_RES (65)..(65): Selenocysteine
  MOD_RES (69)..(69): Selenocysteine
  MOD_RES (93)..(93): Selenocysteine
  MOD_RES (124)..(124): Selenocysteine
  MOD_RES (147)..(147): Selenocysteine
XMDSSAVYVLSSMARQRRASLSCGGPGGQDFARSGFSKNCGSPGSSQLSSNSLYAKAVKNHSSGXVSAXSPNKCKRPMNAFMLFAKKYRVEYXQMYPGKDNRAISVILGDRWKKMKNEERRMYXLEAKALAEEQKRLNPDCWKRKRXNSVCFNK

SEQ ID NO: 11820 - protein, 141 aa, Homo sapiens
  MOD_RES (113)..(113): Selenocysteine
  MOD_RES (116)..(116): Selenocysteine
  MOD_RES (129)..(129): Selenocysteine
MARHRNVRGYNYDEAAQFIYSRRDKPSVEPVEEYDYEDLKESSNSVSNHQLSGFDQARLYSCLDHMREVLGDAVPDEILIEAVLKNKFDVQKALSGVLEQDRVQSLKDKNEAXVSXGKIAKGKPVDSQXSRSESEIVPKVA

SEQ ID NO: 11821 - protein, 118 aa, Homo sapiens
  MOD_RES (71)..(71): Selenocysteine
  MOD_RES (74)..(74): Selenocysteine
MARHRNVRGYNYDEARLYSCLDHMREVLGDAVPDEILIEAVLKNKFDVQKALSGVLEQDRVQSLKDKNEAXVSXGKIAKGKESYFLLLKFQLIMFKVLILSQQIIWIIVANPLILLAQ

SEQ ID NO: 11822 - protein, 684 aa, Homo sapiens
  MOD_RES (36)..(36): Selenocysteine
  MOD_RES (135)..(135): Selenocysteine
  MOD_RES (138)..(138): Selenocysteine
  MOD_RES (151)..(151): Selenocysteine
  MOD_RES (166)..(166): Selenocysteine
  MOD_RES (173)..(173): Selenocysteine
  MOD_RES (192)..(192): Selenocysteine
  MOD_RES (211)..(211): Selenocysteine
  MOD_RES (221)..(221): Selenocysteine
  MOD_RES (231)..(231): Selenocysteine
  MOD_RES (275)..(275): Selenocysteine
  MOD_RES (291)..(291): Selenocysteine
  MOD_RES (316)..(316): Selenocysteine
  MOD_RES (325)..(325): Selenocysteine
  MOD_RES (331)..(331): Selenocysteine
  MOD_RES (335)..(337): Selenocysteine
  MOD_RES (341)..(341): Selenocysteine
  MOD_RES (357)..(357): Selenocysteine
  MOD_RES (382)..(382): Selenocysteine
  MOD_RES (386)..(386): Selenocysteine
  MOD_RES (399)..(399): Selenocysteine
  MOD_RES (422)..(422): Selenocysteine
  MOD_RES (444)..(444): Selenocysteine
  MOD_RES (454)..(454): Selenocysteine
  MOD_RES (462)..(462): Selenocysteine
  MOD_RES (506)..(506): Selenocysteine
  MOD_RES (516)..(516): Selenocysteine
  MOD_RES (528)..(528): Selenocysteine
  MOD_RES (530)..(530): Selenocysteine
  MOD_RES (535)..(535): Selenocysteine
  MOD_RES (553)..(553): Selenocysteine
  MOD_RES (579)..(579): Selenocysteine
  MOD_RES (595)..(595): Selenocysteine
  MOD_RES (606)..(606): Selenocysteine
  MOD_RES (624)..(624): Selenocysteine
  MOD_RES (628)..(628): Selenocysteine
  MOD_RES (636)..(636): Selenocysteine
  MOD_RES (647)..(647): Selenocysteine
  MOD_RES (673)..(673): Selenocysteine
  MOD_RES (680)..(680): Selenocysteine
MARHRNVRGYNYDEDFEDDDLYGQSVEDDYCISPSXAAQFIYSRRDKPSVEPVEEYDYEDLKESSNSVSNHQLSGFDQARLYSCLDHMREVLGDAVPDEILIEAVLKNKFDVQKALSGVLEQDRVQSLKDKNEAXVSXGKIAKGKPVDSQXSRSESEIVPKVAKMXVSGKKQXMGFEVPGVSSEENGHSFHXPQKGPPIEDAIASSDVLEXASKSANPPHXIQASEEQSSXPAPVKKSGKLRQQIDVKAELEKRQGGKQLLNLVVIGHVDAGKSXLMGHMLYLLGNINKRXMHKYEQESKKAGKASFAYAWVLDEXGEERERGVXMDVGMXKFEXXXKVIXLMDAPGHKDFIPNMIXGAAQADVAVLVVDASRGEFEAGFEXGGQXREHGLLVRSLGVXQLAVAVNKMDQVNWQQERFQEIXGKLGHFLKQAGFKESDVGFIPXSGLSGENLIXRSQSSELXKWYKGLCLLEQIDSFKPPQRSIDKPFRLCVSDVFKDQGSGFCIXGKIEAGYIQXGDRLLAMPPNEXCXVKGIXLHDEPVDWAAAGDHVSLXLVGMDIIKINVGCIFCGPKVPIKACXRFRARILIFNIEIPIXKGFPVLLHYQXVSEPAVIKRLISVLNKSXGEVXKKKPKFLXKGQNALVELQXQRPIALELYKDFKELGRFMLRYGGSXIAAGVVXEIKE

SEQ ID NO: 11823 - protein, 147 aa, Homo sapiens
  MOD_RES (36)..(36): Selenocysteine
  MOD_RES (135)..(135): Selenocysteine
  MOD_RES (138)..(138): Selenocysteine
MARHRNVRGYNYDEDFEDDDLYGQSVEDDYCISPSXAAQFIYSRRDKPSVEPVEEYDYEDLKESSNSVSNHQLSGFDQARLYSCLDHMREVLGDAVPDEILIEAVLKNKFDVQKALSGVLEQDRVQSLKDKNEAXVSXGKIAKGPCC

SEQ ID NO: 11824 - protein, 215 aa, Homo sapiens
  MOD_RES (36)..(36): Selenocysteine
  MOD_RES (135)..(135): Selenocysteine
  MOD_RES (138)..(138): Selenocysteine
  MOD_RES (194)..(194): Selenocysteine
  MOD_RES (206)..(206): Selenocysteine
MARHRNVRGYNYDEDFEDDDLYGQSVEDDYCISPSXAAQFIYSRRDKPSVEPVEEYDYEDLKESSNSVSNHQLSGFDQARLYSCLDHMREVLGDAVPDEILIEAVLKNKFDVQKALSGVLEQDRVQSLKDKNEAXVSXGKIAKGVLFSSSEVSADNVQSSYPQSANHLDYSSKPFDFASSVGKYGLSHNSSVPXHCLLHRKKKLDXRKSEKKLES

SEQ ID NO: 11825 - protein, 632 aa, Homo sapiens
  MOD_RES (36)..(36): Selenocysteine
  MOD_RES (135)..(135): Selenocysteine
  MOD_RES (138)..(138): Selenocysteine
  MOD_RES (194)..(194): Selenocysteine
  MOD_RES (206)..(206): Selenocysteine
  MOD_RES (219)..(219): Selenocysteine
  MOD_RES (247)..(247): Selenocysteine
  MOD_RES (286)..(286): Selenocysteine
  MOD_RES (292)..(293): Selenocysteine
  MOD_RES (327)..(327): Selenocysteine
  MOD_RES (334)..(334): Selenocysteine
  MOD_RES (344)..(344): Selenocysteine
  MOD_RES (360)..(360): Selenocysteine
  MOD_RES (377)..(377): Selenocysteine
  MOD_RES (393)..(393): Selenocysteine
  MOD_RES (406)..(406): Selenocysteine
  MOD_RES (432)..(432): Selenocysteine
  MOD_RES (446)..(446): Selenocysteine
  MOD_RES (461)..(461): Selenocysteine
  MOD_RES (517)..(517): Selenocysteine
  MOD_RES (543)..(543): Selenocysteine
  MOD_RES (553)..(553): Selenocysteine
  MOD_RES (566)..(566): Selenocysteine
  MOD_RES (580)..(580): Selenocysteine
  MOD_RES (586)..(586): Selenocysteine
  MOD_RES (608)..(608): Selenocysteine
  MOD_RES (630)..(630): Selenocysteine
MARHRNVRGYNYDEDFEDDDLYGQSVEDDYCISPSXAAQFIYSRRDKPSVEPVEEYDYEDLKESSNSVSNHQLSGFDQARLYSCLDHMREVLGDAVPDEILIEAVLKNKFDVQKALSGVLEQDRVQSLKDKNEAXVSXGKIAKGVLFSSSEVSADNVQSSYPQSANHLDYSSKPFDFASSVGKYGLSHNSSVPXHCLLHRKKKLDXRKSEKKLESCKLXKELSLANLIHDMSRDSCESQPSVRLSSXDSLESLLSKNLDADLLRPHASECISKDDSAFKEIPDLKXIIIKGXXPNNSLYIQNNSLSDFQNIPVQDSLGSSNNPLYLXSSLENMXVDNLNASKEXEVGNVSLVEQSAKNHXFKNDNLQFSQCESPSLXELFQEHKENNISQCFXLSDLCNQSSASFXDLSLGSFPLSQLANRCQSSPGISELXGSLSSLAFHKASPXRDLENLSLSELIAEXIDVDNSQIKKESFEVSLSEVRSPGIDSNIDLSVLIKNPDFVPKPVVDPSIAPSSRXKVLSSKLGKNSNFAKDNKKNNKGSLXRKPPFSLSWXKALAARPSAFASXLCLRYPLKSCKRRXLDLYKXFLYSRQVQDVKDKEISPLVAIXPFDFKSASPDDIVKANQKKAFXRE

SEQ ID NO: 11826 - protein, 619 aa, Homo sapiens
  MOD_RES (36)..(36): Selenocysteine
  MOD_RES (86)..(86): Selenocysteine
  MOD_RES (101)..(101): Selenocysteine
  MOD_RES (108)..(108): Selenocysteine
  MOD_RES (127)..(127): Selenocysteine
  MOD_RES (146)..(146): Selenocysteine
  MOD_RES (156)..(156): Selenocysteine
  MOD_RES (166)..(166): Selenocysteine
  MOD_RES (210)..(210): Selenocysteine
  MOD_RES (226)..(226): Selenocysteine
  MOD_RES (251)..(251): Selenocysteine
  MOD_RES (260)..(260): Selenocysteine
  MOD_RES (266)..(266): Selenocysteine
  MOD_RES (270)..(272): Selenocysteine
  MOD_RES (276)..(276): Selenocysteine
  MOD_RES (292)..(292): Selenocysteine
  MOD_RES (317)..(317): Selenocysteine
  MOD_RES (321)..(321): Selenocysteine
  MOD_RES (334)..(334): Selenocysteine
  MOD_RES (357)..(357): Selenocysteine
  MOD_RES (379)..(379): Selenocysteine
  MOD_RES (389)..(389): Selenocysteine
  MOD_RES (397)..(397): Selenocysteine
  MOD_RES (441)..(441): Selenocysteine
  MOD_RES (451)..(451): Selenocysteine
  MOD_RES (463)..(463): Selenocysteine
  MOD_RES (465)..(465): Selenocysteine
  MOD_RES (470)..(470): Selenocysteine
  MOD_RES (488)..(488): Selenocysteine
  MOD_RES (514)..(514): Selenocysteine
  MOD_RES (530)..(530): Selenocysteine
  MOD_RES (541)..(541): Selenocysteine
  MOD_RES (559)..(559): Selenocysteine
  MOD_RES (563)..(563): Selenocysteine
  MOD_RES (571)..(571): Selenocysteine
  MOD_RES (582)..(582): Selenocysteine
  MOD_RES (608)..(608): Selenocysteine
  MOD_RES (615)..(615): Selenocysteine
MARHRNVRGYNYDEDFEDDDLYGQSVEDDYCISPSXAAQFIYSRRDKPSVEPVEEYDYEDLKESSNSVSNHQLSGFDQGKPVDSQXSRSESEIVPKVAKMXVSGKKQXMGFEVPGVSSEENGHSFHXPQKGPPIEDAIASSDVLEXASKSANPPHXIQASEEQSSXPAPVKKSGKLRQQIDVKAELEKRQGGKQLLNLVVIGHVDAGKSXLMGHMLYLLGNINKRXMHKYEQESKKAGKASFAYAWVLDEXGEERERGVXMDVGMXKFEXXXKVIXLMDAPGHKDFIPNMIXGAAQADVAVLVVDASRGEFEAGFEXGGQXREHGLLVRSLGVXQLAVAVNKMDQVNWQQERFQEIXGKLGHFLKQAGFKESDVGFIPXSGLSGENLIXRSQSSELXKWYKGLCLLEQIDSFKPPQRSIDKPFRLCVSDVFKDQGSGFCIXGKIEAGYIQXGDRLLAMPPNEXCXVKGIXLHDEPVDWAAAGDHVSLXLVGMDIIKINVGCIFCGPKVPIKACXRFRARILIFNIEIPIXKGFPVLLHYQXVSEPAVIKRLISVLNKSXGEVXKKKPKFLXKGQNALVELQXQRPIALELYKDFKELGRFMLRYGGSXIAAGVVXEIKE

SEQ ID NO: 11827 - protein, 642 aa, Homo sapiens
  MOD_RES (36)..(36): Selenocysteine
  MOD_RES (93)..(93): Selenocysteine
  MOD_RES (96)..(96): Selenocysteine
  MOD_RES (109)..(109): Selenocysteine
  MOD_RES (124)..(124): Selenocysteine
  MOD_RES (131)..(131): Selenocysteine
  MOD_RES (150)..(150): Selenocysteine
  MOD_RES (169)..(169): Selenocysteine
  MOD_RES (179)..(179): Selenocysteine
  MOD_RES (189)..(189): Selenocysteine
  MOD_RES (233)..(233): Selenocysteine
  MOD_RES (249)..(249): Selenocysteine
  MOD_RES (274)..(274): Selenocysteine
  MOD_RES (283)..(283): Selenocysteine
  MOD_RES (289)..(289): Selenocysteine
  MOD_RES (293)..(295): Selenocysteine
  MOD_RES (299)..(299): Selenocysteine
  MOD_RES (315)..(315): Selenocysteine
  MOD_RES (340)..(340): Selenocysteine
  MOD_RES (344)..(344): Selenocysteine
  MOD_RES (357)..(357): Selenocysteine
  MOD_RES (380)..(380): Selenocysteine
  MOD_RES (402)..(402): Selenocysteine
  MOD_RES (412)..(412): Selenocysteine
  MOD_RES (420)..(420): Selenocysteine
  MOD_RES (464)..(464): Selenocysteine
  MOD_RES (474)..(474): Selenocysteine
  MOD_RES (486)..(486): Selenocysteine
  MOD_RES (488)..(488): Selenocysteine
  MOD_RES (493)..(493): Selenocysteine
  MOD_RES (511)..(511): Selenocysteine
  MOD_RES (537)..(537): Selenocysteine
  MOD_RES (553)..(553): Selenocysteine
  MOD_RES (564)..(564): Selenocysteine
  MOD_RES (582)..(582): Selenocysteine
  MOD_RES (586)..(586): Selenocysteine
  MOD_RES (594)..(594): Selenocysteine
  MOD_RES (605)..(605): Selenocysteine
  MOD_RES (631)..(631): Selenocysteine
  MOD_RES (638)..(638): Selenocysteine
MARHRNVRGYNYDEDFEDDDLYGQSVEDDYCISPSXARLYSCLDHMREVLGDAVPDEILIEAVLKNKFDVQKALSGVLEQDRVQSLKDKNEAXVSXGKIAKGKPVDSQXSRSESEIVPKVAKMXVSGKKQXMGFEVPGVSSEENGHSFHXPQKGPPIEDAIASSDVLEXASKSANPPHXIQASEEQSSXPAPVKKSGKLRQQIDVKAELEKRQGGKQLLNLVVIGHVDAGKSXLMGHMLYLLGNINKRXMHKYEQESKKAGKASFAYAWVLDEXGEERERGVXMDVGMXKFEXXXKVIXLMDAPGHKDFIPNMIXGAAQADVAVLVVDASRGEFEAGFEXGGQXREHGLLVRSLGVXQLAVAVNKMDQVNWQQERFQEIXGKLGHFLKQAGFKESDVGFIPXSGLSGENLIXRSQSSELXKWYKGLCLLEQIDSFKPPQRSIDKPFRLCVSDVFKDQGSGFCIXGKIEAGYIQXGDRLLAMPPNEXCXVKGIXLHDEPVDWAAAGDHVSLXLVGMDIIKINVGCIFCGPKVPIKACXRFRARILIFNIEIPIXKGFPVLLHYQXVSEPAVIKRLISVLNKSXGEVXKKKPKFLXKGQNALVELQXQRPIALELYKDFKELGRFMLRYGGSXIAAGVVXEIKE

SEQ ID NO: 11828 - protein, 168 aa, Homo sapiens
  MOD_RES (8)..(8): Selenocysteine
  MOD_RES (12)..(13): Selenocysteine
  MOD_RES (26)..(26): Selenocysteine
  MOD_RES (51)..(51): Selenocysteine
  MOD_RES (150)..(150): Selenocysteine
  MOD_RES (153)..(153): Selenocysteine
  MOD_RES (166)..(166): Selenocysteine
MERPAPWXLWVXXSWWYIWALRSSVXFLPDFEDDDLYGQSVEDDYCISPSXAAQFIYSRRDKPSVEPVEEYDYEDLKESSNSVSNHQLSGFDQARLYSCLDHMREVLGDAVPDEILIEAVLKNKFDVQKALSGVLEQDRVQSLKDKNEAXVSXGKIAKGKPVDSQXSR

SEQ ID NO: 11829 - protein, 142 aa, Homo sapiens
  MOD_RES (2)..(2): Selenocysteine
  MOD_RES (9)..(9): Selenocysteine
  MOD_RES (28)..(28): Selenocysteine
  MOD_RES (47)..(47): Selenocysteine
  MOD_RES (57)..(57): Selenocysteine
  MOD_RES (67)..(67): Selenocysteine
  MOD_RES (111)..(111): Selenocysteine
  MOD_RES (127)..(127): Selenocysteine
MXVSGKKQXMGFEVPGVSSEENGHSFHXPQKGPPIEDAIASSDVLEXASKSANPPHXIQASEEQSSXPAPVKKSGKLRQQIDVKAELEKRQGGKQLLNLVVIGHVDAGKSXLMGHMLYLLGNINKRXMHKYEQESKKAGKAS

SEQ ID NO: 11830 - protein, 243 aa, Homo sapiens
  MOD_RES (2)..(2): Selenocysteine
  MOD_RES (9)..(9): Selenocysteine
  MOD_RES (28)..(28): Selenocysteine
  MOD_RES (47)..(47): Selenocysteine
  MOD_RES (57)..(57): Selenocysteine
  MOD_RES (67)..(67): Selenocysteine
  MOD_RES (111)..(111): Selenocysteine
  MOD_RES (127)..(127): Selenocysteine
  MOD_RES (152)..(152): Selenocysteine
  MOD_RES (161)..(161): Selenocysteine
  MOD_RES (167)..(167): Selenocysteine
  MOD_RES (171)..(173): Selenocysteine
  MOD_RES (177)..(177): Selenocysteine
  MOD_RES (193)..(193): Selenocysteine
  MOD_RES (218)..(218): Selenocysteine
  MOD_RES (222)..(222): Selenocysteine
  MOD_RES (235)..(235): Selenocysteine
MXVSGKKQXMGFEVPGVSSEENGHSFHXPQKGPPIEDAIASSDVLEXASKSANPPHXIQASEEQSSXPAPVKKSGKLRQQIDVKAELEKRQGGKQLLNLVVIGHVDAGKSXLMGHMLYLLGNINKRXMHKYEQESKKAGKASFAYAWVLDEXGEERERGVXMDVGMXKFEXXXKVIXLMDAPGHKDFIPNMIXGAAQADVAVLVVDASRGEFEAGFEXGGQXREHGLLVRSLGVXQLAVAVNK

SEQ ID NO: 11831 - protein, 520 aa, Homo sapiens
  MOD_RES (2)..(2): Selenocysteine
  MOD_RES (9)..(9): Selenocysteine
  MOD_RES (28)..(28): Selenocysteine
  MOD_RES (47)..(47): Selenocysteine
  MOD_RES (57)..(57): Selenocysteine
  MOD_RES (67)..(67): Selenocysteine
  MOD_RES (111)..(111): Selenocysteine
  MOD_RES (127)..(127): Selenocysteine
  MOD_RES (152)..(152): Selenocysteine
  MOD_RES (161)..(161): Selenocysteine
  MOD_RES (167)..(167): Selenocysteine
  MOD_RES (171)..(173): Selenocysteine
  MOD_RES (177)..(177): Selenocysteine
  MOD_RES (193)..(193): Selenocysteine
  MOD_RES (218)..(218): Selenocysteine
  MOD_RES (222)..(222): Selenocysteine
  MOD_RES (235)..(235): Selenocysteine
  MOD_RES (258)..(258): Selenocysteine
  MOD_RES (280)..(280): Selenocysteine
  MOD_RES (290)..(290): Selenocysteine
  MOD_RES (298)..(298): Selenocysteine
  MOD_RES (342)..(342): Selenocysteine
  MOD_RES (352)..(352): Selenocysteine
  MOD_RES (364)..(364): Selenocysteine
  MOD_RES (366)..(366): Selenocysteine
  MOD_RES (371)..(371): Selenocysteine
  MOD_RES (389)..(389): Selenocysteine
  MOD_RES (415)..(415): Selenocysteine
  MOD_RES (431)..(431): Selenocysteine
  MOD_RES (442)..(442): Selenocysteine
  MOD_RES (460)..(460): Selenocysteine
  MOD_RES (464)..(464): Selenocysteine
  MOD_RES (472)..(472): Selenocysteine
  MOD_RES (483)..(483): Selenocysteine
  MOD_RES (509)..(509): Selenocysteine
  MOD_RES (516)..(516): Selenocysteine
MXVSGKKQXMGFEVPGVSSEENGHSFHXPQKGPPIEDAIASSDVLEXASKSANPPHXIQASEEQSSXPAPVKKSGKLRQQIDVKAELEKRQGGKQLLNLVVIGHVDAGKSXLMGHMLYLLGNINKRXMHKYEQESKKAGKASFAYAWVLDEXGEERERGVXMDVGMXKFEXXXKVIXLMDAPGHKDFIPNMIXGAAQADVAVLVVDASRGEFEAGFEXGGQXREHGLLVRSLGVXQLAVAVNKMDQVNWQQERFQEIXGKLGHFLKQAGFKESDVGFIPXSGLSGENLIXRSQSSELXKWYKGLCLLEQIDSFKPPQRSIDKPFRLCVSDVFKDQGSGFCIXGKIEAGYIQXGDRLLAMPPNEXCXVKGIXLHDEPVDWAAAGDHVSLXLVGMDIIKINVGCIFCGPKVPIKACXRFRARILIFNIEIPIXKGFPVLLHYQXVSEPAVIKRLISVLNKSXGEVXKKKPKFLXKGQNALVELQXQRPIALELYKDFKELGRFMLRYGGSXIAAGVVXEIKE

SEQ ID NO: 11832 - protein, 554 aa, Homo sapiens
  MOD_RES (13)..(13): Selenocysteine
  MOD_RES (21)..(21): Selenocysteine
  MOD_RES (36)..(36): Selenocysteine
  MOD_RES (43)..(43): Selenocysteine
  MOD_RES (62)..(62): Selenocysteine
  MOD_RES (81)..(81): Selenocysteine
  MOD_RES (91)..(91): Selenocysteine
  MOD_RES (101)..(101): Selenocysteine
  MOD_RES (145)..(145): Selenocysteine
  MOD_RES (161)..(161): Selenocysteine
  MOD_RES (186)..(186): Selenocysteine
  MOD_RES (195)..(195): Selenocysteine
  MOD_RES (201)..(201): Selenocysteine
  MOD_RES (205)..(207): Selenocysteine
  MOD_RES (211)..(211): Selenocysteine
  MOD_RES (227)..(227): Selenocysteine
  MOD_RES (252)..(252): Selenocysteine
  MOD_RES (256)..(256): Selenocysteine
  MOD_RES (269)..(269): Selenocysteine
  MOD_RES (292)..(292): Selenocysteine
  MOD_RES (314)..(314): Selenocysteine
  MOD_RES (324)..(324): Selenocysteine
  MOD_RES (332)..(332): Selenocysteine
  MOD_RES (376)..(376): Selenocysteine
  MOD_RES (386)..(386): Selenocysteine
  MOD_RES (398)..(398): Selenocysteine
  MOD_RES (400)..(400): Selenocysteine
  MOD_RES (405)..(405): Selenocysteine
  MOD_RES (423)..(423): Selenocysteine
  MOD_RES (449)..(449): Selenocysteine
  MOD_RES (465)..(465): Selenocysteine
  MOD_RES (476)..(476): Selenocysteine
  MOD_RES (494)..(494): Selenocysteine
  MOD_RES (498)..(498): Selenocysteine
  MOD_RES (506)..(506): Selenocysteine
  MOD_RES (517)..(517): Selenocysteine
  MOD_RES (543)..(543): Selenocysteine
  MOD_RES (550)..(550): Selenocysteine
QSVEDDYCISPSXGKPVDSQXSRSESEIVPKVAKMXVSGKKQXMGFEVPGVSSEENGHSFHXPQKGPPIEDAIASSDVLEXASKSANPPHXIQASEEQSSXPAPVKKSGKLRQQIDVKAELEKRQGGKQLLNLVVIGHVDAGKSXLMGHMLYLLGNINKRXMHKYEQESKKAGKASFAYAWVLDEXGEERERGVXMDVGMXKFEXXXKVIXLMDAPGHKDFIPNMIXGAAQADVAVLVVDASRGEFEAGFEXGGQXREHGLLVRSLGVXQLAVAVNKMDQVNWQQERFQEIXGKLGHFLKQAGFKESDVGFIPXSGLSGENLIXRSQSSELXKWYKGLCLLEQIDSFKPPQRSIDKPFRLCVSDVFKDQGSGFCIXGKIEAGYIQXGDRLLAMPPNEXCXVKGIXLHDEPVDWAAAGDHVSLXLVGMDIIKINVGCIFCGPKVPIKACXRFRARILIFNIEIPIXKGFPVLLHYQXVSEPAVIKRLISVLNKSXGEVXKKKPKFLXKGQNALVELQXQRPIALELYKDFKELGRFMLRYGGSXIAAGVVXEIKE

SEQ ID NO: 11833 - protein, 170 aa, Homo sapiens
  MOD_RES (1)..(1): Any amino acid
  MOD_RES (6)..(6): Selenocysteine
  MOD_RES (10)..(10): Selenocysteine
  MOD_RES (23)..(23): Selenocysteine
  MOD_RES (46)..(46): Selenocysteine
  MOD_RES (68)..(68): Selenocysteine
  MOD_RES (78)..(78): Selenocysteine
  MOD_RES (86)..(86): Selenocysteine
  MOD_RES (130)..(130): Selenocysteine
  MOD_RES (140)..(140): Selenocysteine
  MOD_RES (152)..(152): Selenocysteine
  MOD_RES (154)..(154): Selenocysteine
XAGFEXGGQXREHGLLVRSLGVXQLAVAVNKMDQVNWQQERFQEIXGKLGHFLKQAGFKESDVGFIPXSGLSGENLIXRSQSSELXKWYKGLCLLEQIDSFKPPQRSIDKPFRLCVSDVFKDQGSGFCIXGKIEAGYIQXGDRLLAMPPNEXCXVKGIYLQDAFAKQALS

SEQ ID NO: 11834 - protein, 74 aa, Homo sapiens
  MOD_RES (1)..(1): Any amino acid
  MOD_RES (21)..(21): Selenocysteine
  MOD_RES (66)..(66): Selenocysteine
XEDDDLYGQSVEDDYCISPSXAAQFIYSRRDKPSVEPVEEYDYEDLKESSNSVSNHQLSGFDQAAXQLSGHWSC

SEQ ID NO: 11835 - protein, 346 aa, Homo sapiens
  MOD_RES (13)..(13): Selenocysteine
  MOD_RES (46)..(46): Selenocysteine
  MOD_RES (51)..(51): Selenocysteine
  MOD_RES (72)..(72): Selenocysteine
  MOD_RES (94)..(94): Selenocysteine
  MOD_RES (107)..(107): Selenocysteine
  MOD_RES (126)..(126): Selenocysteine
  MOD_RES (129)..(129): Selenocysteine
  MOD_RES (138)..(138): Selenocysteine
  MOD_RES (147)..(147): Selenocysteine
  MOD_RES (161)..(161): Selenocysteine
  MOD_RES (219)..(219): Selenocysteine
  MOD_RES (231)..(231): Selenocysteine
  MOD_RES (246)..(246): Selenocysteine
  MOD_RES (263)..(263): Selenocysteine
  MOD_RES (267)..(267): Selenocysteine
  MOD_RES (307)..(307): Selenocysteine
MYNGSCCRIEGDXISQVMPPLLIVAFVLGALGNGVALCGFCFHMKXWKPSXVYLFNLAVADFLLMICLPFRXDYYLRRRHWAFGDIPCRVGLFXLAMNRAGSIVFLXVVAADRYFKVVHPHHAVNXISXRVAAGIVCXLWALVILGXVYLLLENHLCVQEXAVSCESFIMESANGWHDIMFQLEFFMPLGIILFCSFKIVWSLRRRQQLARQARMKKAXRFIMVVAIVFIXCYLPSVSARLYFLWXVPSSACDPSVHGALHIXLSFXYMNSMLDPLVYYFSSPSFPKFYNKLKICSLKPKQPGHSKXQRPEEMPISNLGRRSCISVANSFQSQSDGQWDPHIVEWH

SEQ ID NO: 11836 - protein, 363 aa, Homo sapiens
  MOD_RES (119)..(119): Selenocysteine
  MOD_RES (143)..(143): Selenocysteine
  MOD_RES (155)..(155): Selenocysteine
  MOD_RES (159)..(159): Selenocysteine
  MOD_RES (185)..(185): Selenocysteine
  MOD_RES (231)..(231): Selenocysteine
  MOD_RES (260)..(260): Selenocysteine
  MOD_RES (263)..(263): Selenocysteine
  MOD_RES (279)..(279): Selenocysteine
  MOD_RES (283)..(283): Selenocysteine
  MOD_RES (307)..(307): Selenocysteine
  MOD_RES (318)..(318): Selenocysteine
  MOD_RES (327)..(327): Selenocysteine
  MOD_RES (332)..(332): Selenocysteine
  MOD_RES (338)..(338): Selenocysteine
  MOD_RES (361)..(361): Selenocysteine
MNRHHLQDHFLEIDKKNCCVFRDDFIVKVLPPVLGLEFIFGLLGNGLALWIFCFHLKSWKSSRIFLFNLAVADFLLIICLPFLMDNYVRRWDWKFGDIPCRLMLFMLAMNRQGSIIFLXVVAVDRYFRVVHPHHALNKISNRXAAIISCLLWGIXIGLXVHLLKKKMPIQNGGANLCSSFSICHXFQWHEAMFLLEFFLPLGIILFCSARIIWSLRQRQMDRHAKIKRAIXFIMVVAIVFVICFLPSVVVRIRIFWLLHXSGXQNCEVYRSVDLAFFIXLSFXYMNSMLDPVVYYFSSPSFPNFFSXLINRCLQRKMXGEPDNNRSXSVELXGDPNKXRGAPEALMANSGEPWSPSYLGPXSP

SEQ ID NO: 11837 - protein, 387 aa, Homo sapiens
  MOD_RES (119)..(119): Selenocysteine
  MOD_RES (143)..(143): Selenocysteine
  MOD_RES (155)..(155): Selenocysteine
  MOD_RES (159)..(159): Selenocysteine
  MOD_RES (173)..(173): Selenocysteine
  MOD_RES (185)..(185): Selenocysteine
  MOD_RES (231)..(231): Selenocysteine
  MOD_RES (260)..(260): Selenocysteine
  MOD_RES (263)..(263): Selenocysteine
  MOD_RES (279)..(279): Selenocysteine
  MOD_RES (283)..(283): Selenocysteine
  MOD_RES (307)..(307): Selenocysteine
  MOD_RES (318)..(318): Selenocysteine
  MOD_RES (327)..(327): Selenocysteine
  MOD_RES (332)..(332): Selenocysteine
  MOD_RES (338)..(338): Selenocysteine
  MOD_RES (361)..(361): Selenocysteine
MNRHHLQDHFLEIDKKNCCVFRDDFIAKVLPPVLGLEFIFGLLGNGLALWIFCFHLKSWKSSRIFLFNLAVADFLLIICLPFVMDYYVRRSDWKFGDIPCRLVLFMFAMNRQGSIIFLXVVAVDRYFRVVHPHHALNKISNWXAAIISCLLWGIXVGLXVHLLKKKLLIQNGXANVCISFSICHXFRWHEAMFLLEFFLPLGIILFCSARIIWSLRQRQMDRHAKIKRAIXFIMVVAIVFVICFLPSVVVRIHIFWLLHXSGXQNCEVYRSVDLAFFIXLSFXYMNSMLDPVVYYFSSPSFPNFFSXLINRCLQRKIXGEPDNNRSXSVELXGDPNKXRGAPEALIANSGEPWSPSYLGPXSNNHSKKGHCHQEPASLEKQLGCCIE

SEQ ID NO: 11838 - protein, 2035 aa, Homo sapiens
  MOD_RES (64)..(64): Selenocysteine
  MOD_RES (66)..(66): Selenocysteine
  MOD_RES (92)..(92): Selenocysteine
  MOD_RES (127)..(127): Selenocysteine
  MOD_RES (192)..(192): Selenocysteine
  MOD_RES (204)..(204): Selenocysteine
  MOD_RES (209)..(209): Selenocysteine
  MOD_RES (234)..(234): Selenocysteine
  MOD_RES (239)..(239): Selenocysteine
  MOD_RES (241)..(241): Selenocysteine
  MOD_RES (261)..(262): Selenocysteine
  MOD_RES (285)..(285): Selenocysteine
  MOD_RES (293)..(293): Selenocysteine
  MOD_RES (295)..(295): Selenocysteine
  MOD_RES (303)..(303): Selenocysteine
  MOD_RES (308)..(308): Selenocysteine
  MOD_RES (313)..(313): Selenocysteine
  MOD_RES (332)..(332): Selenocysteine
  MOD_RES (361)..(361): Selenocysteine
  MOD_RES (377)..(377): Selenocysteine
  MOD_RES (389)..(389): Selenocysteine
  MOD_RES (405)..(405): Selenocysteine
  MOD_RES (408)..(408): Selenocysteine
  MOD_RES (410)..(410): Selenocysteine
  MOD_RES (413)..(413): Selenocysteine
  MOD_RES (441)..(441): Selenocysteine
  MOD_RES (446)..(446): Selenocysteine
  MOD_RES (457)..(460): Selenocysteine
  MOD_RES (466)..(466): Selenocysteine
  MOD_RES (476)..(476): Selenocysteine
  MOD_RES (480)..(480): Selenocysteine
  MOD_RES (490)..(490): Selenocysteine
  MOD_RES (495)..(496): Selenocysteine
  MOD_RES (498)..(498): Selenocysteine
  MOD_RES (502)..(502): Selenocysteine
  MOD_RES (515)..(515): Selenocysteine
  MOD_RES (517)..(517): Selenocysteine
  MOD_RES (529)..(529): Selenocysteine
  MOD_RES (535)..(535): Selenocysteine
  MOD_RES (556)..(556): Selenocysteine
  MOD_RES (566)..(566): Selenocysteine
  MOD_RES (574)..(575): Selenocysteine
  MOD_RES (579)..(579): Selenocysteine
  MOD_RES (583)..(583): Selenocysteine
  MOD_RES (586)..(588): Selenocysteine
  MOD_RES (592)..(592): Selenocysteine
  MOD_RES (607)..(607): Selenocysteine
  MOD_RES (612)..(612): Selenocysteine
  MOD_RES (619)..(619): Selenocysteine
  MOD_RES (625)..(625): Selenocysteine
  MOD_RES (627)..(627): Selenocysteine
  MOD_RES (629)..(629): Selenocysteine
  MOD_RES (634)..(634): Selenocysteine
  MOD_RES (640)..(640): Selenocysteine
  MOD_RES (642)..(642): Selenocysteine
  MOD_RES (651)..(652): Selenocysteine
  MOD_RES (658)..(658): Selenocysteine
  MOD_RES (660)..(660): Selenocysteine
  MOD_RES (662)..(662): Selenocysteine
  MOD_RES (689)..(689): Selenocysteine
  MOD_RES (694)..(694): Selenocysteine
  MOD_RES (698)..(698): Selenocysteine
  MOD_RES (703)..(703): Selenocysteine
  MOD_RES (707)..(707): Selenocysteine
  MOD_RES (712)..(712): Selenocysteine
  MOD_RES (720)..(720): Selenocysteine
  MOD_RES (726)..(726): Selenocysteine
  MOD_RES (733)..(734): Selenocysteine
  MOD_RES (737)..(739): Selenocysteine
  MOD_RES (746)..(746): Selenocysteine
  MOD_RES (749)..(749): Selenocysteine
  MOD_RES (760)..(761): Selenocysteine
  MOD_RES (765)..(767): Selenocysteine
  MOD_RES (771)..(771): Selenocysteine
  MOD_RES (779)..(779): Selenocysteine
  MOD_RES (784)..(784): Selenocysteine
  MOD_RES (787)..(787): Selenocysteine
  MOD_RES (797)..(797): Selenocysteine
  MOD_RES (800)..(801): Selenocysteine
  MOD_RES (805)..(805): Selenocysteine
  MOD_RES (808)..(808): Selenocysteine
  MOD_RES (816)..(816): Selenocysteine
  MOD_RES (823)..(823): Selenocysteine
  MOD_RES (831)..(831): Selenocysteine
  MOD_RES (844)..(844): Selenocysteine
  MOD_RES (848)..(848): Selenocysteine
  MOD_RES (858)..(858): Selenocysteine
  MOD_RES (861)..(861): Selenocysteine
  MOD_RES (870)..(871): Selenocysteine
  MOD_RES (877)..(878): Selenocysteine
  MOD_RES (881)..(882): Selenocysteine
  MOD_RES (885)..(885): Selenocysteine
  MOD_RES (887)..(887): Selenocysteine
  MOD_RES (889)..(889): Selenocysteine
  MOD_RES (892)..(892): Selenocysteine
  MOD_RES (902)..(902): Selenocysteine
  MOD_RES (908)..(908): Selenocysteine
  MOD_RES (911)..(912): Selenocysteine
  MOD_RES (915)..(915): Selenocysteine
  MOD_RES (918)..(918): Selenocysteine
  MOD_RES (927)..(927): Selenocysteine
  MOD_RES (930)..(930): Selenocysteine
  MOD_RES (936)..(937): Selenocysteine
  MOD_RES (939)..(939): Selenocysteine
  MOD_RES (945)..(946): Selenocysteine
  MOD_RES (948)..(948): Selenocysteine
  MOD_RES (950)..(950): Selenocysteine
  MOD_RES (958)..(958): Selenocysteine
  MOD_RES (961)..(961): Selenocysteine
  MOD_RES (964)..(964): Selenocysteine
  MOD_RES (986)..(987): Selenocysteine
  MOD_RES (991)..(991): Selenocysteine
  MOD_RES (993)..(993): Selenocysteine
  MOD_RES (995)..(995): Selenocysteine
  MOD_RES (1008)..(1008): Selenocysteine
  MOD_RES (1010)..(1010): Selenocysteine
  MOD_RES (1020)..(1020): Selenocysteine
  MOD_RES (1023)..(1023): Selenocysteine
  MOD_RES (1025)..(1026): Selenocysteine
  MOD_RES (1028)..(1028): Selenocysteine
  MOD_RES (1030)..(1032): Selenocysteine
  MOD_RES (1044)..(1044): Selenocysteine
  MOD_RES (1061)..(1061): Selenocysteine
  MOD_RES (1063)..(1063): Selenocysteine
  MOD_RES (1082)..(1082): Selenocysteine
  MOD_RES (1085)..(1085): Selenocysteine
  MOD_RES (1087)..(1088): Selenocysteine
  MOD_RES (1090)..(1090): Selenocysteine
  MOD_RES (1092)..(1093): Selenocysteine
  MOD_RES (1095)..(1095): Selenocysteine
  MOD_RES (1111)..(1111): Selenocysteine
  MOD_RES (1114)..(1114): Selenocysteine
  MOD_RES (1116)..(1117): Selenocysteine
  MOD_RES (1119)..(1119): Selenocysteine
  MOD_RES (1121)..(1122): Selenocysteine
  MOD_RES (1143)..(1143): Selenocysteine
  MOD_RES (1153)..(1153): Selenocysteine
  MOD_RES (1168)..(1168): Selenocysteine
  MOD_RES (1171)..(1171): Selenocysteine
  MOD_RES (1174)..(1174): Selenocysteine
  MOD_RES (1176)..(1177): Selenocysteine
  MOD_RES (1179)..(1179): Selenocysteine
  MOD_RES (1183)..(1183): Selenocysteine
  MOD_RES (1239)..(1239): Selenocysteine
  MOD_RES (1243)..(1243): Selenocysteine
  MOD_RES (1268)..(1269): Selenocysteine
  MOD_RES (1271)..(1271): Selenocysteine
  MOD_RES (1273)..(1273): Selenocysteine
  MOD_RES (1284)..(1284): Selenocysteine
  MOD_RES (1286)..(1286): Selenocysteine
  MOD_RES (1296)..(1296): Selenocysteine
  MOD_RES (1299)..(1299): Selenocysteine
  MOD_RES (1301)..(1302): Selenocysteine
  MOD_RES (1304)..(1304): Selenocysteine
  MOD_RES (1306)..(1307): Selenocysteine
  MOD_RES (1324)..(1324): Selenocysteine
  MOD_RES (1327)..(1327): Selenocysteine
  MOD_RES (1329)..(1330): Selenocysteine
  MOD_RES (1332)..(1332): Selenocysteine
  MOD_RES (1334)..(1335): Selenocysteine
  MOD_RES (1337)..(1337): Selenocysteine
  MOD_RES (1342)..(1342): Selenocysteine
  MOD_RES (1359)..(1359): Selenocysteine
  MOD_RES (1362)..(1363): Selenocysteine
  MOD_RES (1365)..(1365): Selenocysteine
  MOD_RES (1367)..(1368): Selenocysteine
  MOD_RES (1381)..(1381): Selenocysteine
  MOD_RES (1386)..(1386): Selenocysteine
  MOD_RES (1400)..(1400): Selenocysteine
  MOD_RES (1405)..(1405): Selenocysteine
  MOD_RES (1413)..(1413): Selenocysteine
  MOD_RES (1424)..(1424): Selenocysteine
  MOD_RES (1427)..(1427): Selenocysteine
  MOD_RES (1429)..(1430): Selenocysteine
  MOD_RES (1432)..(1432): Selenocysteine
  MOD_RES (1434)..(1435): Selenocysteine
  MOD_RES (1437)..(1437): Selenocysteine
  MOD_RES (1459)..(1459): Selenocysteine
  MOD_RES (1467)..(1467): Selenocysteine
  MOD_RES (1473)..(1475): Selenocysteine
  MOD_RES (1479)..(1479): Selenocysteine
  MOD_RES (1481)..(1481): Selenocysteine
  MOD_RES (1485)..(1486): Selenocysteine
  MOD_RES (1488)..(1488): Selenocysteine
  MOD_RES (1491)..(1491): Selenocysteine
  MOD_RES (1525)..(1525): Selenocysteine
  MOD_RES (1540)..(1540): Selenocysteine
  MOD_RES (1552)..(1552): Selenocysteine
  MOD_RES (1569)..(1569): Selenocysteine
  MOD_RES (1578)..(1578): Selenocysteine
  MOD_RES (1599)..(1601): Selenocysteine
  MOD_RES (1605)..(1605): Selenocysteine
  MOD_RES (1608)..(1608): Selenocysteine
  MOD_RES (1615)..(1615): Selenocysteine
  MOD_RES (1627)..(1627): Selenocysteine
  MOD_RES (1649)..(1649): Selenocysteine
  MOD_RES (1655)..(1655): Selenocysteine
  MOD_RES (1661)..(1661): Selenocysteine
  MOD_RES (1663)..(1663): Selenocysteine
  MOD_RES (1680)..(1681): Selenocysteine
  MOD_RES (1687)..(1687): Selenocysteine
  MOD_RES (1714)..(1714): Selenocysteine
  MOD_RES (1739)..(1739): Selenocysteine
  MOD_RES (1743)..(1743): Selenocysteine
  MOD_RES (1750)..(1750): Selenocysteine
  MOD_RES (1752)..(1752): Selenocysteine
  MOD_RES (1760)..(1760): Selenocysteine
  MOD_RES (1780)..(1780): Selenocysteine
  MOD_RES (1782)..(1782): Selenocysteine
  MOD_RES (1821)..(1821): Selenocysteine
  MOD_RES (1826)..(1826): Selenocysteine
  MOD_RES (1844)..(1844): Selenocysteine
  MOD_RES (1860)..(1860): Selenocysteine
  MOD_RES (1885)..(1885): Selenocysteine
  MOD_RES (1909)..(1909): Selenocysteine
  MOD_RES (1916)..(1916): Selenocysteine
  MOD_RES (1942)..(1942): Selenocysteine
  MOD_RES (1974)..(1975): Selenocysteine
  MOD_RES (1995)..(1995): Selenocysteine
  MOD_RES (2003)..(2003): Selenocysteine
  MOD_RES (2010)..(2010): Selenocysteine
MASAVSPANLPAVLLQPRWKRVVGWSGPVPRPRHGHRAVAIKELIVVFGGGNEGIVDELHVYNXAXNQWFIPAVRGDIPPGCAAYGFVCDGXRLLVFGGMVEYGKYSNDLYELQASRWEWKRLKAKXPKNGPPPCPRLGHSFSLVGNKCYLFGGLANDSEDPKNNIPRYLNDLYILELRPGSGVVAWDIPIXYGVLPPPRESHXAVVYXEKDNKKSKLVIYGGMSGCRLGDLWXLDIDXLXWNKPSLSGVAPLPRSLHSAXXIGNKMYVFGGWVPLVMDDVKVAXHEKEWKCXNXLACLNLDXMAWEXILMDXLEDNIPRARAGHCAVAINXRLYIWSGRDGYRKAWNNQVCCKDLWYLEXEKPPPPARVQLVRANXNSLEVSWGAVAXADSYLLQLQKYDIPAXAAXAXSPXPNPVPSVPANPPKSPAPAAAAPAVQPLXQVGIXLLPQAAPAPPXXXXIQVLPXVPGSSISVPXAARXQGVPAVLKVXGPQAXXGXPLVXMRPASQAGKAPVXVXSLPAGVRMVVPXQSAQGXVIGSSPQMSGMAALAAAAAAXQKIPPSSAPXVLSVPAGXXIVKXMAVXPGXXXLPAXVKVASSPVMVSNPAXRMLKXAAAQVGXSVSSAXNXSXRPIIXVHKSGXVXVAQQAQVVXXVVGGVXKXIXLVKSPISVPGGSALISNLGKVMSVVQXKPVQXSAVXGQASXGPVXQIIQXKGPLPAGXILKLVXSADGKPXXIIXXXQASGAGXKPXILGISSVSPSXXKPGXXXIIKXIPMSAIIXQAGAXGVXSSPGIKSPIXIIXXKVMXSGXGAPAKIIXAVPKIAXGHGQQGVXQVVLKGAPGQPGXILRXVPMGGVRLVXPVXVSAVKPAVXXLVVKGXXGVXXLGXVXGXVSXSLAGAGGHSXSASLAXPIXXLGXIAXLSSQVINPXAIXVSAAQXXLXAAGGLXXPXIXMQPVSQPXQVXLIXAPSGVEAQPVHDLPVSILASPXXEQPXAXVXIADSGQGDVQPGXVXLVCSNPPCEXHEXGXXNXAXXXVVANLGGHPQPXQVQFVCDRQEAAASLVXSXVGQQNGSVVRVCSNPPCEXHEXGXXNXAXXAXSNMAGQHGCSNPPCEXHEXGXXNXAXXAMSSVGANHQRDARRACAAGXPAVIRISVAXGALEAAQGSKSQCQXRQXSAXSXXMXVMAXGAPCSAGPLLGPSMAREPGGRSPAFVQLAPLSSKVRLSSPSIKDLPAGRHSHAVSXAAMXRSSVGAGEPRMAPVCESLQGGSPSXXVXVXALEALLCPSAXVXQVCSNPPCEXHEXGXXNXAXXSNAGSAQRVCSNPPCEXHEXGXXHXAXXAXSNGGXGQPEGGQQPPAGRPCEXHQXXSXGXXMSVSVGALLPDAXSSHRXVESGLEVAAAPSVXPQAGXALLAPFPXQRVCSNPPCEXHEXGXXHXAXXVXSNMSSNQDPPPAASDQGEVESXQGDSVNIXSSSAIXXXVSSXLXRAVXXVXQSXPVPGPSVPPPEELQVSPGPRQQLPPRQLLQSASXALMGESAEVLSASQXPELPAAVDLSSXGEPSSGQESAGSAVVAXVVVQPPPPXQSEVDQLSLPQELMAEAQAGXXXLMVXGLXPEELAVXAAAEAAAQAAAXEEAQALAIQAVLQAAQQAVMGXGEPMDXSEAAAXVXQAELGHLSAEGQEGQAXXIPIVLXQQELAALVQQQQLQEAQAQQQHHHLPXEALAPADSLNDPAIESNCLNELAGXVPSXVALLPSXAXESLAPSNXFVAPQPVVVASPAKLQAAAXLXEVANGIESLGVKPDLPPPPSKAPMKKENQWFDVGVIKGXNVMVXHYFLPPDDAVPSDDDLGXVPDYNQLKKQELQPGXAYKFRVAGINACGRGPFSEISAFKXCLPGFPGAPCAIKISKSPDGAHLXWEPPSVXSGKIIEYSVYLAIQSSQAGGELKSSXPAQLAFMRVYCGPSPSCLVQSSSLSNAHIDYXXKPAIIFRIAARNEKGYGPAXQVRWLQEXSKDSSGXKPANKRPMSSPEMKSAPKKSKADGQ

SEQ ID NO: 11839 - protein, 2080 aa, Homo sapiens
  MOD_RES (64)..(64): Selenocysteine
  MOD_RES (66)..(66): Selenocysteine
  MOD_RES (92)..(92): Selenocysteine
  MOD_RES (127)..(127): Selenocysteine
  MOD_RES (192)..(192): Selenocysteine
  MOD_RES (204)..(204): Selenocysteine
  MOD_RES (209)..(209): Selenocysteine
  MOD_RES (234)..(234): Selenocysteine
  MOD_RES (239)..(239): Selenocysteine
  MOD_RES (241)..(241): Selenocysteine
  MOD_RES (261)..(262): Selenocysteine
  MOD_RES (285)..(285): Selenocysteine
  MOD_RES (293)..(293): Selenocysteine
  MOD_RES (295)..(295): Selenocysteine
  MOD_RES (303)..(303): Selenocysteine
  MOD_RES (308)..(308): Selenocysteine
  MOD_RES (313)..(313): Selenocysteine
  MOD_RES (332)..(332): Selenocysteine
  MOD_RES (361)..(361): Selenocysteine
  MOD_RES (377)..(377): Selenocysteine
  MOD_RES (389)..(389): Selenocysteine
  MOD_RES (405)..(405): Selenocysteine
  MOD_RES (408)..(408): Selenocysteine
  MOD_RES (410)..(410): Selenocysteine
  MOD_RES (413)..(413): Selenocysteine
  MOD_RES (441)..(441): Selenocysteine
  MOD_RES (446)..(446): Selenocysteine
  MOD_RES (457)..(460): Selenocysteine
  MOD_RES (466)..(466): Selenocysteine
  MOD_RES (476)..(476): Selenocysteine
  MOD_RES (480)..(480): Selenocysteine
  MOD_RES (490)..(490): Selenocysteine
  MOD_RES (495)..(496): Selenocysteine
  MOD_RES (498)..(498): Selenocysteine
  MOD_RES (502)..(502): Selenocysteine
  MOD_RES (515)..(515): Selenocysteine
  MOD_RES (517)..(517): Selenocysteine
  MOD_RES (529)..(529): Selenocysteine
  MOD_RES (535)..(535): Selenocysteine
  MOD_RES (556)..(556): Selenocysteine
  MOD_RES (566)..(566): Selenocysteine
  MOD_RES (574)..(575): Selenocysteine
  MOD_RES (579)..(579): Selenocysteine
  MOD_RES (583)..(583): Selenocysteine
  MOD_RES (586)..(588): Selenocysteine
  MOD_RES (592)..(592): Selenocysteine
  MOD_RES (607)..(607): Selenocysteine
  MOD_RES (612)..(612): Selenocysteine
  MOD_RES (619)..(619): Selenocysteine
  MOD_RES (625)..(625): Selenocysteine
  MOD_RES (627)..(627): Selenocysteine
  MOD_RES (629)..(629): Selenocysteine
  MOD_RES (634)..(634): Selenocysteine
  MOD_RES (640)..(640): Selenocysteine
  MOD_RES (642)..(642): Selenocysteine
  MOD_RES (651)..(652): Selenocysteine
  MOD_RES (658)..(658): Selenocysteine
  MOD_RES (660)..(660): Selenocysteine
  MOD_RES (662)..(662): Selenocysteine
  MOD_RES (689)..(689): Selenocysteine
  MOD_RES (694)..(694): Selenocysteine
  MOD_RES (698)..(698): Selenocysteine
  MOD_RES (703)..(703): Selenocysteine
  MOD_RES (707)..(707): Selenocysteine
  MOD_RES (712)..(712): Selenocysteine
  MOD_RES (720)..(720): Selenocysteine
  MOD_RES (726)..(726): Selenocysteine
  MOD_RES (733)..(734): Selenocysteine
  MOD_RES (737)..(739): Selenocysteine
  MOD_RES (746)..(746): Selenocysteine
  MOD_RES (749)..(749): Selenocysteine
  MOD_RES (760)..(761): Selenocysteine
  MOD_RES (765)..(767): Selenocysteine
  MOD_RES (771)..(771): Selenocysteine
  MOD_RES (779)..(779): Selenocysteine
  MOD_RES (784)..(784): Selenocysteine
  MOD_RES (787)..(787): Selenocysteine
  MOD_RES (797)..(797): Selenocysteine
  MOD_RES (800)..(801): Selenocysteine
  MOD_RES (805)..(805): Selenocysteine
  MOD_RES (808)..(808): Selenocysteine
  MOD_RES (816)..(816): Selenocysteine
  MOD_RES (823)..(823): Selenocysteine
  MOD_RES (831)..(831): Selenocysteine
  MOD_RES (844)..(844): Selenocysteine
  MOD_RES (848)..(848): Selenocysteine
  MOD_RES (858)..(858): Selenocysteine
  MOD_RES (861)..(861): Selenocysteine
  MOD_RES (870)..(871): Selenocysteine
  MOD_RES (877)..(878): Selenocysteine
  MOD_RES (881)..(882): Selenocysteine
  MOD_RES (885)..(885): Selenocysteine
  MOD_RES (887)..(887): Selenocysteine
  MOD_RES (889)..(889): Selenocysteine
  MOD_RES (892)..(892): Selenocysteine
  MOD_RES (902)..(902): Selenocysteine
  MOD_RES (908)..(908): Selenocysteine
  MOD_RES (911)..(912): Selenocysteine
  MOD_RES (915)..(915): Selenocysteine
  MOD_RES (918)..(918): Selenocysteine
  MOD_RES (927)..(927): Selenocysteine
  MOD_RES (930)..(930): Selenocysteine
  MOD_RES (936)..(937): Selenocysteine
  MOD_RES (939)..(939): Selenocysteine
  MOD_RES (945)..(946): Selenocysteine
  MOD_RES (948)..(948): Selenocysteine
  MOD_RES (950)..(950): Selenocysteine
  MOD_RES (958)..(958): Selenocysteine
  MOD_RES (961)..(961): Selenocysteine
  MOD_RES (964)..(964): Selenocysteine
  MOD_RES (986)..(987): Selenocysteine
  MOD_RES (991)..(991): Selenocysteine
  MOD_RES (993)..(993): Selenocysteine
  MOD_RES (995)..(995): Selenocysteine
  MOD_RES (1008)..(1008): Selenocysteine
  MOD_RES (1010)..(1010): Selenocysteine
  MOD_RES (1020)..(1020): Selenocysteine
  MOD_RES (1023)..(1023): Selenocysteine
  MOD_RES (1025)..(1026): Selenocysteine
  MOD_RES (1028)..(1028): Selenocysteine
  MOD_RES (1030)..(1032): Selenocysteine
  MOD_RES (1044)..(1044): Selenocysteine
  MOD_RES (1061)..(1061): Selenocysteine
  MOD_RES (1063)..(1063): Selenocysteine
  MOD_RES (1082)..(1082): Selenocysteine
  MOD_RES (1085)..(1085): Selenocysteine
  MOD_RES (1087)..(1088): Selenocysteine
  MOD_RES (1090)..(1090): Selenocysteine
  MOD_RES (1092)..(1093): Selenocysteine
  MOD_RES (1095)..(1095): Selenocysteine
  MOD_RES (1111)..(1111): Selenocysteine
  MOD_RES (1114)..(1114): Selenocysteine
  MOD_RES (1116)..(1117): Selenocysteine
  MOD_RES (1119)..(1119): Selenocysteine
  MOD_RES (1121)..(1122): Selenocysteine
  MOD_RES (1143)..(1143): Selenocysteine
  MOD_RES (1153)..(1153): Selenocysteine
  MOD_RES (1168)..(1168): Selenocysteine
  MOD_RES (1171)..(1171): Selenocysteine
  MOD_RES (1174)..(1174): Selenocysteine
  MOD_RES (1176)..(1177): Selenocysteine
  MOD_RES (1179)..(1179): Selenocysteine
  MOD_RES (1183)..(1183): Selenocysteine
  MOD_RES (1239)..(1239): Selenocysteine
  MOD_RES (1243)..(1243): Selenocysteine
  MOD_RES (1268)..(1269): Selenocysteine
  MOD_RES (1271)..(1271): Selenocysteine
  MOD_RES (1273)..(1273): Selenocysteine
  MOD_RES (1284)..(1284): Selenocysteine
  MOD_RES (1286)..(1286): Selenocysteine
  MOD_RES (1296)..(1296): Selenocysteine
  MOD_RES (1299)..(1299): Selenocysteine
  MOD_RES (1301)..(1302): Selenocysteine
  MOD_RES (1304)..(1304): Selenocysteine
  MOD_RES (1306)..(1307): Selenocysteine
  MOD_RES (1324)..(1324): Selenocysteine
  MOD_RES (1327)..(1327): Selenocysteine
  MOD_RES (1329)..(1330): Selenocysteine
  MOD_RES (1332)..(1332): Selenocysteine
  MOD_RES (1334)..(1335): Selenocysteine
  MOD_RES (1337)..(1337): Selenocysteine
  MOD_RES (1342)..(1342): Selenocysteine
  MOD_RES (1359)..(1359): Selenocysteine
  MOD_RES (1362)..(1363): Selenocysteine
  MOD_RES (1365)..(1365): Selenocysteine
  MOD_RES (1367)..(1368): Selenocysteine
  MOD_RES (1381)..(1381): Selenocysteine
  MOD_RES (1386)..(1386): Selenocysteine
  MOD_RES (1400)..(1400): Selenocysteine
  MOD_RES (1405)..(1405): Selenocysteine
  MOD_RES (1413)..(1413): Selenocysteine
  MOD_RES (1424)..(1424): Selenocysteine
  MOD_RES (1427)..(1427): Selenocysteine
  MOD_RES (1429)..(1430): Selenocysteine
  MOD_RES (1432)..(1432): Selenocysteine
  MOD_RES (1434)..(1435): Selenocysteine
  MOD_RES (1437)..(1437): Selenocysteine
  MOD_RES (1459)..(1459): Selenocysteine
  MOD_RES (1467)..(1467): Selenocysteine
  MOD_RES (1473)..(1475): Selenocysteine
  MOD_RES (1479)..(1479): Selenocysteine
  MOD_RES (1481)..(1481): Selenocysteine
  MOD_RES (1485)..(1486): Selenocysteine
  MOD_RES (1488)..(1488): Selenocysteine
  MOD_RES (1491)..(1491): Selenocysteine
  MOD_RES (1505)..(1505): Selenocysteine
  MOD_RES (1507)..(1507): Selenocysteine
  MOD_RES (1513)..(1514): Selenocysteine
  MOD_RES (1523)..(1523): Selenocysteine
  MOD_RES (1525)..(1525): Selenocysteine
  MOD_RES (1529)..(1529): Selenocysteine
  MOD_RES (1531)..(1531): Selenocysteine
  MOD_RES (1569)..(1569): Selenocysteine
  MOD_RES (1584)..(1584): Selenocysteine
  MOD_RES (1596)..(1596): Selenocysteine
  MOD_RES (1613)..(1613): Selenocysteine
  MOD_RES (1622)..(1622): Selenocysteine
  MOD_RES (1643)..(1645): Selenocysteine
  MOD_RES (1649)..(1649): Selenocysteine
  MOD_RES (1652)..(1652): Selenocysteine
  MOD_RES (1659)..(1659): Selenocysteine
  MOD_RES (1671)..(1671): Selenocysteine
  MOD_RES (1694)..(1694): Selenocysteine
  MOD_RES (1700)..(1700): Selenocysteine
  MOD_RES (1706)..(1706): Selenocysteine
  MOD_RES (1708)..(1708): Selenocysteine
  MOD_RES (1725)..(1726): Selenocysteine
  MOD_RES (1732)..(1732): Selenocysteine
  MOD_RES (1759)..(1759): Selenocysteine
  MOD_RES (1784)..(1784): Selenocysteine
  MOD_RES (1788)..(1788): Selenocysteine
  MOD_RES (1795)..(1795): Selenocysteine
  MOD_RES (1797)..(1797): Selenocysteine
  MOD_RES (1805)..(1805): Selenocysteine
  MOD_RES (1825)..(1825): Selenocysteine
  MOD_RES (1827)..(1827): Selenocysteine
  MOD_RES (1866)..(1866): Selenocysteine
  MOD_RES (1871)..(1871): Selenocysteine
  MOD_RES (1889)..(1889): Selenocysteine
  MOD_RES (1905)..(1905): Selenocysteine
  MOD_RES (1930)..(1930): Selenocysteine
  MOD_RES (1954)..(1954): Selenocysteine
  MOD_RES (1961)..(1961): Selenocysteine
  MOD_RES (1987)..(1987): Selenocysteine
  MOD_RES (2019)..(2020): Selenocysteine
  MOD_RES (2040)..(2040): Selenocysteine
  MOD_RES (2048)..(2048): Selenocysteine
  MOD_RES (2055)..(2055): Selenocysteine
MASAVSPANLPAVLLQPRWKRVVGWSGPVPRPRHGHRAVAIKELIVVFGGGNEGIVDELHVYNXAXNQWFIPAVRGDIPPGCAAYGFVCDGXRLLVFGGMVEYGKYSNDLYELQASRWEWKRLKAKXPKNGPPPCPRLGHSFSLVGNKCYLFGGLANDSEDPKNNIPRYLNDLYILELRPGSGVVAWDIPIXYGVLPPPRESHXAVVYXEKDNKKSKLVIYGGMSGCRLGDLWXLDIDXLXWNKPSLSGVAPLPRSLHSAXXIGNKMYVFGGWVPLVMDDVKVAXHEKEWKCXNXLACLNLDXMAWEXILMDXLEDNIPRARAGHCAVAINXRLYIWSGRDGYRKAWNNQVCCKDLWYLEXEKPPPPARVQLVRANXNSLEVSWGAVAXADSYLLQLQKYDIPAXAAXAXSPXPNPVPSVPANPPKSPAPAAAAPAVQPLXQVGIXLLPQAAPAPPXXXXIQVLPXVPGSSISVPXAARXQGVPAVLKVXGPQAXXGXPLVXMRPASQAGKAPVXVXSLPAGVRMVVPXQSAQGXVIGSSPQMSGMAALAAAAAAXQKIPPSSAPXVLSVPAGXXIVKXMAVXPGXXXLPAXVKVASSPVMVSNPAXRMLKXAAAQVGXSVSSAXNXSXRPIIXVHKSGXVXVAQQAQVVXXVVGGVXKXIXLVKSPISVPGGSALISNLGKVMSVVQXKPVQXSAVXGQASXGPVXQIIQXKGPLPAGXILKLVXSADGKPXXIIXXXQASGAGXKPXILGISSVSPSXXKPGXXXIIKXIPMSAIIXQAGAXGVXSSPGIKSPIXIIXXKVMXSGXGAPAKIIXAVPKIAXGHGQQGVXQVVLKGAPGQPGXILRXVPMGGVRLVXPVXVSAVKPAVXXLVVKGXXGVXXLGXVXGXVSXSLAGAGGHSXSASLAXPIXXLGXIAXLSSQVINPXAIXVSAAQXXLXAAGGLXXPXIXMQPVSQPXQVXLIXAPSGVEAQPVHDLPVSILASPXXEQPXAXVXIADSGQGDVQPGXVXLVCSNPPCEXHEXGXXNXAXXXVVANLGGHPQPXQVQFVCDRQEAAASLVXSXVGQQNGSVVRVCSNPPCEXHEXGXXNXAXXAXSNMAGQHGCSNPPCEXHEXGXXNXAXXAMSSVGANHQRDARRACAAGXPAVIRISVAXGALEAAQGSKSQCQXRQXSAXSXXMXVMAXGAPCSAGPLLGPSMAREPGGRSPAFVQLAPLSSKVRLSSPSIKDLPAGRHSHAVSXAAMXRSSVGAGEPRMAPVCESLQGGSPSXXVXVXALEALLCPSAXVXQVCSNPPCEXHEXGXXNXAXXSNAGSAQRVCSNPPCEXHEXGXXHXAXXAXSNGGXGQPEGGQQPPAGRPCEXHQXXSXGXXMSVSVGALLPDAXSSHRXVESGLEVAAAPSVXPQAGXALLAPFPXQRVCSNPPCEXHEXGXXHXAXXVXSNMSSNQDPPPAASDQGEVESXQGDSVNIXSSSAIXXXVSSXLXRAVXXVXQSXPVPGPSVPKISSMXEXAPRALXXEVPIPAKIXVXIANXEXSDMPFSAVDILQPPEELQVSPGPRQQLPPRQLLQSASXALMGESAEVLSASQXPELPAAVDLSSXGEPSSGQESAGSAVVAXVVVQPPPPXQSEVDQLSLPQELMAEAQAGXXXLMVXGLXPEELAVXAAAEAAAQAAAXEEAQALAIQAVLQAAQQAVMAGXGEPMDXSEAAAXVXQAELGHLSAEGQEGQAXXIPIVLXQQELAALVQQQQLQEAQAQQQHHHLPXEALAPADSLNDPAIESNCLNELAGXVPSXVALLPSXAXESLAPSNXFVAPQPVVVASPAKLQAAAXLXEVANGIESLGVKPDLPPPPSKAPMKKENQWFDVGVIKGXNVMVXHYFLPPDDAVPSDDDLGXVPDYNQLKKQELQPGXAYKFRVAGINACGRGPFSEISAFKXCLPGFPGAPCAIKISKSPDGAHLXWEPPSVXSGKIIEYSVYLAIQSSQAGGELKSSXPAQLAFMRVYCGPSPSCLVQSSSLSNAHIDYXXKPAIIFRIAARNEKGYGPAXQVRWLQEXSKDSSGXKPANKRPMSSPEMKSAPKKSKADGQ

SEQ ID NO: 11840 - protein, 611 aa, Homo sapiens
  MOD_RES (1)..(1): Any amino acid
  MOD_RES (2)..(2): Selenocysteine
  MOD_RES (4)..(5): Selenocysteine
  MOD_RES (7)..(7): Selenocysteine
  MOD_RES (9)..(10): Selenocysteine
  MOD_RES (12)..(12): Selenocysteine
  MOD_RES (34)..(34): Selenocysteine
  MOD_RES (42)..(42): Selenocysteine
  MOD_RES (48)..(50): Selenocysteine
  MOD_RES (54)..(54): Selenocysteine
  MOD_RES (56)..(56): Selenocysteine
  MOD_RES (60)..(61): Selenocysteine
  MOD_RES (63)..(63): Selenocysteine
  MOD_RES (66)..(66): Selenocysteine
  MOD_RES (100)..(100): Selenocysteine
  MOD_RES (115)..(115): Selenocysteine
  MOD_RES (127)..(127): Selenocysteine
  MOD_RES (144)..(144): Selenocysteine
  MOD_RES (153)..(153): Selenocysteine
  MOD_RES (174)..(176): Selenocysteine
  MOD_RES (180)..(180): Selenocysteine
  MOD_RES (183)..(183): Selenocysteine
  MOD_RES (190)..(190): Selenocysteine
  MOD_RES (202)..(202): Selenocysteine
  MOD_RES (225)..(225): Selenocysteine
  MOD_RES (231)..(231): Selenocysteine
  MOD_RES (237)..(237): Selenocysteine
  MOD_RES (239)..(239): Selenocysteine
  MOD_RES (256)..(257): Selenocysteine
  MOD_RES (263)..(263): Selenocysteine
  MOD_RES (290)..(290): Selenocysteine
  MOD_RES (315)..(315): Selenocysteine
  MOD_RES (319)..(319): Selenocysteine
  MOD_RES (326)..(326): Selenocysteine
  MOD_RES (328)..(328): Selenocysteine
  MOD_RES (336)..(336): Selenocysteine
  MOD_RES (356)..(356): Selenocysteine
  MOD_RES (358)..(358): Selenocysteine
  MOD_RES (397)..(397): Selenocysteine
  MOD_RES (402)..(402): Selenocysteine
  MOD_RES (420)..(420): Selenocysteine
  MOD_RES (436)..(436): Selenocysteine
  MOD_RES (461)..(461): Selenocysteine
  MOD_RES (485)..(485): Selenocysteine
  MOD_RES (492)..(492): Selenocysteine
  MOD_RES (518)..(518): Selenocysteine
  MOD_RES (550)..(551): Selenocysteine
  MOD_RES (571)..(571): Selenocysteine
  MOD_RES (579)..(579): Selenocysteine
  MOD_RES (586)..(586): Selenocysteine
XXGXXHXAXXVXSNMSSNQDPPPAASDQGEVESXQGDSVNIXSSSAIXXXVSSXLXRAVXXVXQSXPVPGPSVPPPEELQVSPGPRQQLPPRQLLQSASXALMGESAEVLSASQXPELPAAVDLSSXGEPSSGQESAGSAVVAXVVVQPPPPXQSEVDQLSLPQELMAEAQAGXXXLMVXGLXPEELAVXAAAEAAAQAAAXEEAQALAIQAVLQAAQQAVMAGXGEPMDXSEAAAXVXQAELGHLSAEGQEGQAXXIPIVLXQQELAALVQQQQLQEAQAQQQHHHLPXEALAPADSLNDPAIESNCLNELAGXVPSXVALLPSXAXESLAPSNXFVAPQPVVVASPAKLQAAAXLXEVANGIESLGVKPDLPPPPSKAPMKKENQWFDVGVIKGXNVMVXHYFLPPDDAVPSDDDLGXVPDYNQLKKQELQPGXAYKFRVAGINACGRGPFSEISAFKXCLPGFPGAPCAIKISKSPDGAHLXWEPPSVXSGKIIEYSVYLAIQSSQAGGELKSSXPAQLAFMRVYCGPSPSCLVQSSSLSNAHIDYXXKPAIIFRIAARNEKGYGPAXQVRWLQEXSKDSSGXKPANKRPMSSPEMKSAPKKSKADGQ

SEQ ID NO: 11841 - protein, 41 aa, Homo sapiens
LGGRSSCEDPGCPRDEERAPRGNRCHELQSFQDVPLKMDCI

SEQ ID NO: 11842 - protein, 526 aa, Homo sapiens
  MOD_RES (36)..(36): Selenocysteine
  MOD_RES (40)..(40): Selenocysteine
  MOD_RES (42)..(42): Selenocysteine
  MOD_RES (56)..(56): Selenocysteine
  MOD_RES (58)..(58): Selenocysteine
  MOD_RES (70)..(70): Selenocysteine
  MOD_RES (122)..(122): Selenocysteine
  MOD_RES (141)..(141): Selenocysteine
  MOD_RES (175)..(176): Selenocysteine
  MOD_RES (194)..(194): Selenocysteine
  MOD_RES (202)..(202): Selenocysteine
  MOD_RES (215)..(215): Selenocysteine
  MOD_RES (218)..(218): Selenocysteine
  MOD_RES (280)..(280): Selenocysteine
  MOD_RES (285)..(285): Selenocysteine
  MOD_RES (291)..(291): Selenocysteine
  MOD_RES (311)..(311): Selenocysteine
  MOD_RES (325)..(325): Selenocysteine
  MOD_RES (333)..(333): Selenocysteine
  MOD_RES (412)..(412): Selenocysteine
  MOD_RES (424)..(424): Selenocysteine
  MOD_RES (435)..(435): Selenocysteine
  MOD_RES (452)..(452): Selenocysteine
  MOD_RES (503)..(503): Selenocysteine
  MOD_RES (516)..(516): Selenocysteine
  MOD_RES (518)..(518): Selenocysteine
LGGRSSCEDPGCPRDEERAPRMGCMKSKFLQVGGNXFSKXEXSASPHCPVYVPDPXSXIKPGPNSHNSNXPGIREAGSEDIIVVALYDYEAIHHEDLSFQKGDQMVVLEESGEWWKARSLAXRKEGYIPSNYVARVDSLEXEEWFFKGISRKDAERQLLAPGNMLGSFMIRDSEXXKGSYSLSVRDYDPRQGDXVKHYKIRXLDNGGFYISPRSXFSXLQELVDHYKKGNDGLCQKLSVPCMSSKPQKPWEKDAWEIPRESLKLEKKLGAGQFGEVWMAXYNKHXKVAVKXMKPGSMSVEAFLAEANVMKXLQHDKLVKLHAVVXKEPIYIIXEFMAKGSLLDFLKSDEGSKQPLPKLIDFSAQIAEGMAFIEQRNYIHRDLRAANILVSASLVCKIADFGLARVIEDNEYXAREGAKFPIKWXAPEAINFGSFXIKSDVWSFGILLMEIVXYGRIPYPGMSNPEVIRALERGYRMPRPENCPEELYNIMMRCWKNRPEERPXFEYIQSVLDDFYXAXESQYQQQP

SEQ ID NO: 11843 - protein, 525 aa, Homo sapiens
  MOD_RES (36)..(36): Selenocysteine
  MOD_RES (40)..(40): Selenocysteine
  MOD_RES (42)..(42): Selenocysteine
  MOD_RES (56)..(56): Selenocysteine
  MOD_RES (58)..(58): Selenocysteine
  MOD_RES (70)..(70): Selenocysteine
  MOD_RES (121)..(121): Selenocysteine
  MOD_RES (140)..(140): Selenocysteine
  MOD_RES (174)..(175): Selenocysteine
  MOD_RES (193)..(193): Selenocysteine
  MOD_RES (201)..(201): Selenocysteine
  MOD_RES (214)..(214): Selenocysteine
  MOD_RES (217)..(217): Selenocysteine
  MOD_RES (279)..(279): Selenocysteine
  MOD_RES (284)..(284): Selenocysteine
  MOD_RES (290)..(290): Selenocysteine
  MOD_RES (310)..(310): Selenocysteine
  MOD_RES (324)..(324): Selenocysteine
  MOD_RES (332)..(332): Selenocysteine
  MOD_RES (411)..(411): Selenocysteine
  MOD_RES (423)..(423): Selenocysteine
  MOD_RES (434)..(434): Selenocysteine
  MOD_RES (451)..(451): Selenocysteine
  MOD_RES (502)..(502): Selenocysteine
  MOD_RES (515)..(515): Selenocysteine
  MOD_RES (517)..(517): Selenocysteine
LGGRSSCEDPGCPRDEERAPRMGCMKSKFLQVGGNXFSKXEXSASPHCPVYVPDPXSXIKPGPNSHNSNXPGIREGSEDIIVVALYDYEAIHHEDLSFQKGDQMVVLEESGEWWKARSLAXRKEGYIPSNYVARVDSLEXEEWFFKGISRKDAERQLLAPGNMLGSFMIRDSEXXKGSYSLSVRDYDPRQGDXVKHYKIRXLDNGGFYISPRSXFSXLQELVDHYKKGNDGLCQKLSVPCMSSKPQKPWEKDAWEIPRESLKLEKKLGAGQFGEVWMAXYNKHXKVAVKXMKPGSMSVEAFLAEANVMKXLQHDKLVKLHAVVXKEPIYIIXEFMAKGSLLDFLKSDEGSKQPLPKLIDFSAQIAEGMAFIEQRNYIHRDLRAANILVSASLVCKIADFGLARVIEDNEYXAREGAKFPIKWXAPEAINFGSFXIKSDVWSFGILLMEIVXYGRIPYPGMSNPEVIRALERGYRMPRPENCPEELYNIMMRCWKNRPEERPXFEYIQSVLDDFYXAXESQYQQQP

SEQ ID NO: 11844 - protein, 61 aa, Homo sapiens
  MOD_RES (23)..(23): Selenocysteine
LGGRSSCEDPGCPRDEERAPRQXKQNRSSLEVANLSQFPPEEDGVHEVQVPPGRRQYILKN

SEQ ID NO: 11845 - protein, 505 aa, Homo sapiens
  MOD_RES (15)..(15): Selenocysteine
  MOD_RES (19)..(19): Selenocysteine
  MOD_RES (21)..(21): Selenocysteine
  MOD_RES (35)..(35): Selenocysteine
  MOD_RES (37)..(37): Selenocysteine
  MOD_RES (49)..(49): Selenocysteine
  MOD_RES (101)..(101): Selenocysteine
  MOD_RES (120)..(120): Selenocysteine
  MOD_RES (154)..(155): Selenocysteine
  MOD_RES (173)..(173): Selenocysteine
  MOD_RES (181)..(181): Selenocysteine
  MOD_RES (194)..(194): Selenocysteine
  MOD_RES (197)..(197): Selenocysteine
  MOD_RES (259)..(259): Selenocysteine
  MOD_RES (264)..(264): Selenocysteine
  MOD_RES (270)..(270): Selenocysteine
  MOD_RES (290)..(290): Selenocysteine
  MOD_RES (304)..(304): Selenocysteine
  MOD_RES (312)..(312): Selenocysteine
  MOD_RES (391)..(391): Selenocysteine
  MOD_RES (403)..(403): Selenocysteine
  MOD_RES (414)..(414): Selenocysteine
  MOD_RES (431)..(431): Selenocysteine
  MOD_RES (482)..(482): Selenocysteine
  MOD_RES (495)..(495): Selenocysteine
  MOD_RES (497)..(497): Selenocysteine
MGCMKSKFLQVGGNXFSKXEXSASPHCPVYVPDPXSXIKPGPNSHNSNXPGIREAGSEDIIVVALYDYEAIHHEDLSFQKGDQMVVLEESGEWWKARSLAXRKEGYIPSNYVARVDSLEXEEWFFKGISRKDAERQLLAPGNMLGSFMIRDSEXXKGSYSLSVRDYDPRQGDXVKHYKIRXLDNGGFYISPRSXFSXLQELVDHYKKGNDGLCQKLSVPCMSSKPQKPWEKDAWEIPRESLKLEKKLGAGQFGEVWMAXYNKHXKVAVKXMKPGSMSVEAFLAEANVMKXLQHDKLVKLHAVVXKEPIYIIXEFMAKGSLLDFLKSDEGSKQPLPKLIDFSAQIAEGMAFIEQRNYIHRDLRAANILVSASLVCKIADFGLARVIEDNEYXAREGAKFPIKWXAPEAINFGSFXIKSDVWSFGILLMEIVXYGRIPYPGMSNPEVIRALERGYRMPRPENCPEELYNIMMRCWKNRPEERPXFEYIQSVLDDFYXAXESQYQQQP

SEQ ID NO: 11846 - protein, 504 aa, Homo sapiens
  MOD_RES (15)..(15): Selenocysteine
  MOD_RES (19)..(19): Selenocysteine
  MOD_RES (21)..(21): Selenocysteine
  MOD_RES (35)..(35): Selenocysteine
  MOD_RES (37)..(37): Selenocysteine
  MOD_RES (49)..(49): Selenocysteine
  MOD_RES (100)..(100): Selenocysteine
  MOD_RES (119)..(119): Selenocysteine
  MOD_RES (153)..(154): Selenocysteine
  MOD_RES (172)..(172): Selenocysteine
  MOD_RES (180)..(180): Selenocysteine
  MOD_RES (193)..(193): Selenocysteine
  MOD_RES (196)..(196): Selenocysteine
  MOD_RES (258)..(258): Selenocysteine
  MOD_RES (263)..(263): Selenocysteine
  MOD_RES (269)..(269): Selenocysteine
  MOD_RES (289)..(289): Selenocysteine
  MOD_RES (303)..(303): Selenocysteine
  MOD_RES (311)..(311): Selenocysteine
  MOD_RES (390)..(390): Selenocysteine
  MOD_RES (402)..(402): Selenocysteine
  MOD_RES (413)..(413): Selenocysteine
  MOD_RES (430)..(430): Selenocysteine
  MOD_RES (481)..(481): Selenocysteine
  MOD_RES (494)..(494): Selenocysteine
  MOD_RES (496)..(496): Selenocysteine
MGCMKSKFLQVGGNXFSKXEXSASPHCPVYVPDPXSXIKPGPNSHNSNXPGIREGSEDIIVVALYDYEAIHHEDLSFQKGDQMVVLEESGEWWKARSLAXRKEGYIPSNYVARVDSLEXEEWFFKGISRKDAERQLLAPGNMLGSFMIRDSEXXKGSYSLSVRDYDPRQGDXVKHYKIRXLDNGGFYISPRSXFSXLQELVDHYKKGNDGLCQKLSVPCMSSKPQKPWEKDAWEIPRESLKLEKKLGAGQFGEVWMAXYNKHXKVAVKXMKPGSMSVEAFLAEANVMKXLQHDKLVKLHAVVXKEPIYIIXEFMAKGSLLDFLKSDEGSKQPLPKLIDFSAQIAEGMAFIEQRNYIHRDLRAANILVSASLVCKIADFGLARVIEDNEYXAREGAKFPIKWXAPEAINFGSFXIKSDVWSFGILLMEIVXYGRIPYPGMSNPEVIRALERGYRMPRPENCPEELYNIMMRCWKNRPEERPXFEYIQSVLDDFYXAXESQYQQQP

SEQ ID NO: 11847 - protein, 76 aa, Homo sapiens
  MOD_RES (16)..(16): Selenocysteine
  MOD_RES (23)..(23): Selenocysteine
  MOD_RES (42)..(42): Selenocysteine
  MOD_RES (49)..(49): Selenocysteine
MWKSVVGHDVSVSVEXQGDDWDXDPDFVNDISEKEQRWGAKXIEGSGRXEHIKIDEPWSCGFFQHPPAEEQSIRGA

SEQ ID NO: 11848 - protein, 209 aa, Homo sapiens
  MOD_RES (16)..(16): Selenocysteine
  MOD_RES (23)..(23): Selenocysteine
  MOD_RES (42)..(42): Selenocysteine
  MOD_RES (49)..(49): Selenocysteine
  MOD_RES (114)..(114): Selenocysteine
  MOD_RES (135)..(135): Selenocysteine
  MOD_RES (143)..(143): Selenocysteine
  MOD_RES (151)..(151): Selenocysteine
  MOD_RES (158)..(159): Selenocysteine
  MOD_RES (166)..(166): Selenocysteine
  MOD_RES (185)..(185): Selenocysteine
MWKSVVGHDVSVSVEXQGDDWDXDPDFVNDISEKEQRWGAKXIEGSGRXEHINIHQLRNKVSEEHDVLRKKEMESGPKASHGYGGRFGVERDRMDKSAVGHEYVAEVEKHSSQXDAAKGFGGKYGVERDRADKIXLVALVAGXGWRRINGXKQLWDMXXRERRRNXSPREIMPRALVASMESRRXEWIRALSASMKWRPRPQLIRRRRP

SEQ ID NO: 11849 - protein, 449 aa, Homo sapiens
  MOD_RES (16)..(16): Selenocysteine
  MOD_RES (23)..(23): Selenocysteine
  MOD_RES (42)..(42): Selenocysteine
  MOD_RES (49)..(49): Selenocysteine
  MOD_RES (114)..(114): Selenocysteine
  MOD_RES (148)..(148): Selenocysteine
  MOD_RES (182)..(183): Selenocysteine
  MOD_RES (188)..(189): Selenocysteine
  MOD_RES (198)..(198): Selenocysteine
  MOD_RES (235)..(235): Selenocysteine
  MOD_RES (271)..(271): Selenocysteine
  MOD_RES (282)..(282): Selenocysteine
  MOD_RES (296)..(296): Selenocysteine
  MOD_RES (311)..(311): Selenocysteine
  MOD_RES (419)..(419): Selenocysteine
MWKSVVGHDVSVSVEXQGDDWDXDPDFVNDISEKEQRWGAKXIEGSGRXEHINIHQLRNKVSEEHDVLRKKEMESGPKASHGYGGRFGVERDRMDKSAVGHEYVAEVEKHSSQXDAAKGFGGKYGVERDRADKSAVGFDYKGEVEKHXSQKDYAKGFGGQYGIQKDRVDKSAVGFNEMEAPXXAYKKXXPIEAASSGXRGLKAKFESMAEEKRKREEEEKAQQVARRQQERKAVXKRSPEAPQPVIAMEEPAVPAPLPKKISSEAWPPVGXPPSSESEPVRXSREHPVPLLPIRQXLPEDNEEPPALPPRXLEGLQVEEEPVYEAEPEPEPEPEPEPENDYEDVEEMDRHEQEDEPEGDYEEVLEPEDSSFSSALAGSSGCPAGAGAGAVALGISAVAVYDYQGEGSDELSFDPDDVIXDIEMVDEGWWRGRCHGHFGLFPANYVKLLE

SEQ ID NO: 11850 - protein, 486 aa, Homo sapiens
  MOD_RES (16)..(16): Selenocysteine
  MOD_RES (23)..(23): Selenocysteine
  MOD_RES (42)..(42): Selenocysteine
  MOD_RES (49)..(49): Selenocysteine
  MOD_RES (114)..(114): Selenocysteine
  MOD_RES (148)..(148): Selenocysteine
  MOD_RES (181)..(181): Selenocysteine
  MOD_RES (219)..(220): Selenocysteine
  MOD_RES (225)..(226): Selenocysteine
  MOD_RES (235)..(235): Selenocysteine
  MOD_RES (272)..(272): Selenocysteine
  MOD_RES (308)..(308): Selenocysteine
  MOD_RES (319)..(319): Selenocysteine
  MOD_RES (333)..(333): Selenocysteine
  MOD_RES (348)..(348): Selenocysteine
  MOD_RES (456)..(456): Selenocysteine
MWKSVVGHDVSVSVEXQGDDWDXDPDFVNDISEKEQRWGAKXIEGSGRXEHINIHQLRNKVSEEHDVLRKKEMESGPKASHGYGGRFGVERDRMDKSAVGHEYVAEVEKHSSQXDAAKGFGGKYGVERDRADKSAVGFDYKGEVEKHXSQKDYSRGFGGRYGVEKDKWDKAALGYDYKGEXEKHESQRDYAKGFGGQYGIQKDRVDKSAVGFNEMEAPXXAYKKXXPIEAASSGXRGLKAKFESMAEEKRKREEEEKAQQVARRQQERKAVXKRSPEAPQPVIAMEEPAVPAPLPKKISSEAWPPVGXPPSSESEPVRXSREHPVPLLPIRQXLPEDNEEPPALPPRXLEGLQVEEEPVYEAEPEPEPEPEPEPENDYEDVEEMDRHEQEDEPEGDYEEVLEPEDSSFSSALAGSSGCPAGAGAGAVALGISAVAVYDYQGEGSDELSFDPDDVIXDIEMVDEGWWRGRCHGHFGLFPANYVKLLE

SEQ ID NO: 11851 - protein, 75 aa, Homo sapiens
  MOD_RES (16)..(16): Selenocysteine
  MOD_RES (23)..(23): Selenocysteine
  MOD_RES (42)..(42): Selenocysteine
  MOD_RES (49)..(49): Selenocysteine
MWKSVVGHDVSVSVEXQGDDWDXDPDFVNDISEKEQRWGAKXIEGSGRXEHINIPWLWRSVWSRKRPNGQECSGP

SEQ ID NO: 11852 - protein, 889 aa, Homo sapiens
  MOD_RES (17)..(17): Selenocysteine
  MOD_RES (87)..(87): Selenocysteine
  MOD_RES (93)..(93): Selenocysteine
  MOD_RES (217)..(217): Selenocysteine
  MOD_RES (234)..(234): Selenocysteine
  MOD_RES (240)..(241): Selenocysteine
  MOD_RES (253)..(253): Selenocysteine
  MOD_RES (265)..(265): Selenocysteine
  MOD_RES (273)..(273): Selenocysteine
  MOD_RES (289)..(289): Selenocysteine
  MOD_RES (319)..(319): Selenocysteine
  MOD_RES (329)..(329): Selenocysteine
  MOD_RES (357)..(357): Selenocysteine
  MOD_RES (439)..(439): Selenocysteine
  MOD_RES (444)..(444): Selenocysteine
  MOD_RES (453)..(453): Selenocysteine
  MOD_RES (463)..(463): Selenocysteine
  MOD_RES (554)..(554): Selenocysteine
  MOD_RES (558)..(558): Selenocysteine
  MOD_RES (576)..(576): Selenocysteine
  MOD_RES (593)..(593): Selenocysteine
  MOD_RES (614)..(614): Selenocysteine
  MOD_RES (619)..(619): Selenocysteine
  MOD_RES (626)..(626): Selenocysteine
  MOD_RES (654)..(654): Selenocysteine
  MOD_RES (724)..(724): Selenocysteine
  MOD_RES (729)..(729): Selenocysteine
  MOD_RES (792)..(792): Selenocysteine
  MOD_RES (838)..(838): Selenocysteine
  MOD_RES (845)..(845): Selenocysteine
  MOD_RES (851)..(851): Selenocysteine
MDARGGGGRPGESPGAXPAPGPPPPPPPAPPQQQPPPPPPPAPPPGPGPAPPQHPPRAEALPPEAADEGGPRGRLRSRDSSCGRPGXPGAASXAKGSPNGECGRGEPQCSPAGPEGPARGPKVSFSCRGAASGPAPGPGPAEEAGSEEAGPAGEPRGSQASFMQRQFGALLQPGVNKFSLRMFGSQKAVEREQERVKSAGAWIIHPYSDFRFYWDFXMLLFMVGNLIIIPVGIXFFKDEXXAPWIVFNVVSDXFFLMDLVLNFRXGIVIEDNXEIILDPEKIKKKYLRXWFVVDFVSSIPVDYIFLIVEKGIDSEVYKXARALRIVRFXKILSLLRLLRLSRLIRYIHQWEEIFHMXYDLASAVMRICNLISMMLLLCHWDGCLQFLVPMLQDFPRNCWVSINGMVNHSWSELYSFALFKAMSHMLCIGYGRQAPESMXDIWLXMLSMIVGAXCYAMFIGHAXALIQSLDSSRRQYQEKYKQVEQYMSFHKLPADFRQKIHDYYEHRYQGKMFDEDSILGELNGPLREEIVNFNCRKLVASMPLFANADPNFVXAMLXKLKFEVFQPGDYIIREGXIGKKMYFIQHGVVSVLXKGNKEMKLSDGSYFGEICLLXRGRRXASVRADXYCRLYSLSVDNFNEVLEEYPMMRRAFEXVAIDRLDRIGKKNSILLHKVQHDLNSGVFNNQENAIIQEIVKYDREMVQQAELGQRVGLFPPPPPPPQVXSAIAXLQQAAAMSFCPQVARPLVGPLALGSPRLVRRPPPGPAPAAASPGPPPPASPPGAPASPRAPRXSPYGGLPAAPLAGPALPARRLSRASRPLSASQPSLPHGAPGPAASXRPASSSXPRLGPXPAARAAAPSPDRRDSASPGAAGGLDPQDSARSRLSSNL

SEQ ID NO: 11853 - protein, 131 aa, Homo sapiens
  MOD_RES (6)..(6): Selenocysteine
  MOD_RES (14)..(14): Selenocysteine
  MOD_RES (44)..(44): Selenocysteine
  MOD_RES (65)..(65): Selenocysteine
  MOD_RES (96)..(96): Selenocysteine
MNLPSXKVSWAAVXLLLLLLLLPPALLSSGAAAQPLPDCCRQKXCSCRLYELLHGAGNHAAGILXLGKRRSGPPGLQGRLQRLLQASGNHAAGILXMGRRAGAEPAPRPCLGRRCSAPAAASVAPGGQSGI

SEQ ID NO: 11854 - protein, 389 aa, Homo sapiens
  MOD_RES (6)..(6): Selenocysteine
  MOD_RES (65)..(65): Selenocysteine
  MOD_RES (79)..(79): Selenocysteine
  MOD_RES (81)..(81): Selenocysteine
  MOD_RES (96)..(96): Selenocysteine
  MOD_RES (109)..(109): Selenocysteine
  MOD_RES (136)..(136): Selenocysteine
  MOD_RES (157)..(157): Selenocysteine
  MOD_RES (196)..(196): Selenocysteine
  MOD_RES (223)..(223): Selenocysteine
  MOD_RES (250)..(251): Selenocysteine
  MOD_RES (296)..(296): Selenocysteine
  MOD_RES (341)..(341): Selenocysteine
MEPSAXPGAQMGVPPGSREPSPVPPDYEDEFLRYLWRDYLYPKQYEWVLIAAYVAVFVVALVGNXLVCLAVWRNHHMRXVXNYFIVNLSLADVLVXAICLPASLLVDIXESWLFGHALCKVIPYLQAVSVSVAVLXLSFIALDRWYAICHPLLFKSXARRARGSILGIWAVSLAIMVPQAAVMECSSVLPELANRXRLFSVCDERWADDLYPKIYHSCFFIVXYLAPLGLMAMAYFQIFRKLWGRQIPGXXSALVRNWKRPSDQLGDLEQGLSGEPQPRARAFLAEVKQMRARRKXAKMLMVVLLVFALCYLPISVLNVLKRVFGMFRQASDREAVYACFXFSHWLVYANSAANPIIYNFLSGCKEKSLALSCPSCPGHDPHLAAALCS

SEQ ID NO: 11855 - protein, 425 aa, Homo sapiens
  MOD_RES (6)..(6): Selenocysteine
  MOD_RES (65)..(65): Selenocysteine
  MOD_RES (79)..(79): Selenocysteine
  MOD_RES (81)..(81): Selenocysteine
  MOD_RES (96)..(96): Selenocysteine
  MOD_RES (109)..(109): Selenocysteine
  MOD_RES (136)..(136): Selenocysteine
  MOD_RES (157)..(157): Selenocysteine
  MOD_RES (196)..(196): Selenocysteine
  MOD_RES (223)..(223): Selenocysteine
  MOD_RES (250)..(251): Selenocysteine
  MOD_RES (296)..(296): Selenocysteine
  MOD_RES (341)..(341): Selenocysteine
  MOD_RES (418)..(418): Selenocysteine
  MOD_RES (421)..(422): Selenocysteine
MEPSAXPGAQMGVPPGSREPSPVPPDYEDEFLRYLWRDYLYPKQYEWVLIAAYVAVFVVALVGNXLVCLAVWRNHHMRXVXNYFIVNLSLADVLVXAICLPASLLVDIXESWLFGHALCKVIPYLQAVSVSVAVLXLSFIALDRWYAICHPLLFKSXARRARGSILGIWAVSLAIMVPQAAVMECSSVLPELANRXRLFSVCDERWADDLYPKIYHSCFFIVXYLAPLGLMAMAYFQIFRKLWGRQIPGXXSALVRNWKRPSDQLGDLEQGLSGEPQPRARAFLAEVKQMRARRKXAKMLMVVLLVFALCYLPISVLNVLKRVFGMFRQASDREAVYACFXFSHWLVYANSAANPIIYNFLSGKFREQFKAAFSCCLPGLGPCGSLKAPSPRSSASHKSLSLQSRCSISKISEHVVLXSVXXVLP

SEQ ID NO: 11856 - protein, 444 aa, Homo sapiens
  MOD_RES (4)..(4): Selenocysteine
  MOD_RES (24)..(24): Selenocysteine
  MOD_RES (32)..(32): Selenocysteine
  MOD_RES (87)..(87): Selenocysteine
  MOD_RES (89)..(89): Selenocysteine
  MOD_RES (104)..(104): Selenocysteine
  MOD_RES (106)..(106): Selenocysteine
  MOD_RES (111)..(111): Selenocysteine
  MOD_RES (117)..(117): Selenocysteine
  MOD_RES (119)..(119): Selenocysteine
  MOD_RES (135)..(135): Selenocysteine
  MOD_RES (144)..(144): Selenocysteine
  MOD_RES (165)..(165): Selenocysteine
  MOD_RES (195)..(195): Selenocysteine
  MOD_RES (204)..(205): Selenocysteine
  MOD_RES (208)..(208): Selenocysteine
  MOD_RES (231)..(231): Selenocysteine
  MOD_RES (258)..(258): Selenocysteine
  MOD_RES (282)..(282): Selenocysteine
  MOD_RES (302)..(302): Selenocysteine
  MOD_RES (336)..(336): Selenocysteine
  MOD_RES (341)..(341): Selenocysteine
  MOD_RES (347)..(347): Selenocysteine
  MOD_RES (395)..(395): Selenocysteine
  MOD_RES (399)..(399): Selenocysteine
  MOD_RES (401)..(401): Selenocysteine
  MOD_RES (408)..(409): Selenocysteine
  MOD_RES (427)..(427): Selenocysteine
  MOD_RES (431)..(431): Selenocysteine
MSGXKLEDSPPCRNWSSASELNEXQEPFLNPXDYDDEEFLRYLWREYLHPKEYEWVLIAGYIIVFVVALIGNVLVCVAVWKNHHMRXVXNYFIVNLSLADVLVXIXCLPAXLVVDIXEXWFFGQSLCKVIPYLQXVSVSVSVLXLSCIALDRWYAICHPLMFKSXAKRARNSIVIIWIVSCIIMIPQAIVMECSXVFPGLANKXXLFXVCDERWGGEIYPKMYHICFFLVXYMAPLCLMVLAYLQIFRKLWCRQIPGXSSVVQRKWKPLQPVSQPRGPGQPXKSRMSAVAAEIKQIRARRKXARMLMIVLLVFAICYLPISILNVLKRVFGMFAHXEDREXVYAWFXFSHWLVYANSAANPIIYNFLSGKFREEFKAAFSCCCLGVHHRQEDRLXRGRXSXESRKSLXXQISNFDNISKLSEQVVLXSISXLPAANGAGPLQNW

SEQ ID NO: 11857 - protein, 92 aa, Homo sapiens
  MOD_RES (20)..(21): Selenocysteine
  MOD_RES (35)..(35): Selenocysteine
MIHLGHILFLLLLPVAAAQXXPGERSSLPAFYPGXSGSCSGCGSLSLPLLAGLVAADAVASLLIVGAVFLCARPRRSPAQDGKVYINMPGRG

SEQ ID NO: 11858 - protein, 93 aa, Homo sapiens
  MOD_RES (20)..(21): Selenocysteine
  MOD_RES (35)..(35): Selenocysteine
MIHLGHILFLLLLPVAAAQXXPGERSSLPAFYPGXSGSCSGCGSLSLPLLAGLVAADAVASLLIVGAVFLCARPRRSPAQEDGKVYINMPGRG

SEQ ID NO: 11859 - protein, 482 aa, Homo sapiens
  MOD_RES (4)..(4): Selenocysteine
  MOD_RES (7)..(7): Selenocysteine
  MOD_RES (38)..(38): Selenocysteine
  MOD_RES (65)..(65): Selenocysteine
  MOD_RES (114)..(114): Selenocysteine
  MOD_RES (129)..(129): Selenocysteine
  MOD_RES (189)..(190): Selenocysteine
  MOD_RES (195)..(195): Selenocysteine
  MOD_RES (208)..(208): Selenocysteine
  MOD_RES (277)..(277): Selenocysteine
  MOD_RES (304)..(304): Selenocysteine
  MOD_RES (313)..(313): Selenocysteine
  MOD_RES (316)..(316): Selenocysteine
  MOD_RES (322)..(322): Selenocysteine
  MOD_RES (351)..(351): Selenocysteine
  MOD_RES (355)..(355): Selenocysteine
  MOD_RES (445)..(445): Selenocysteine
  MOD_RES (460)..(460): Selenocysteine
  MOD_RES (465)..(465): Selenocysteine
MAQXQGXRRKVCYYYDGDVGNYYYGQGHPMKPHRIRMXHNLLLNYGLYRKMEIYRPHKANAEEMXKYHSDDYIKFLRSIRPDNMSEYSKQMQRFNVGEDCPVFDGLFEFCQLSXGGSVASAVKLNKQQXDIAVNWAGGLHHAKKSEASGFCYVNDIVLAILELLKYHQRVLYIDIDIHHGDGVEEAFYXXDRVMXVSFHKYGEYFPGXGDLRDIGAGKGKYYAVNYPLRDGIDDESYEAIFKPVMSKVMEMFQPSAVVLQCGSDSLSGDRLGCFNLXIKGHAKCVEFVKSFNLPMLMLGGGGYXIRNVARCWXYEXAVALDXEIPNELPYNDYFEYFGPDFKLHISPSNMXNQNXNEYLEKIKQRLFENLRMLPHAPGVQMQAIPEDAIPEESGDEDEDDPDKRISICSSDKRIACEEEFSDSEEEGEGGRKNSSNFKKAKRVKXEDEKEKDPEEKKEVXEEEKXKEEKPEAKGVKEEVKLA

SEQ ID NO: 11860 - protein, 211 aa, Homo sapiens
  MOD_RES (4)..(4): Selenocysteine
  MOD_RES (7)..(7): Selenocysteine
  MOD_RES (38)..(38): Selenocysteine
  MOD_RES (65)..(65): Selenocysteine
  MOD_RES (104)..(104): Selenocysteine
  MOD_RES (164)..(165): Selenocysteine
  MOD_RES (170)..(170): Selenocysteine
  MOD_RES (183)..(183): Selenocysteine
MAQXQGXRRKVCYYYDGDVGNYYYGQGHPMKPHRIRMXHNLLLNYGLYRKMEIYRPHKANAEEMXKYHSDDYIKFLRSIRPDNMSEYSKQMQRSSAVKLNKQQXDIAVNWAGGLHHAKKSEASGFCYVNDIVLAILELLKYHQRVLYIDIDIHHGDGVEEAFYXXDRVMXVSFHKYGEYFPGXGDLRDIGAGKGKYYAVNYPLRDGIDDES

SEQ ID NO: 11861 - protein, 96 aa, Homo sapiens
  MOD_RES (3)..(3): Selenocysteine
  MOD_RES (12)..(12): Selenocysteine
  MOD_RES (14)..(14): Selenocysteine
  MOD_RES (32)..(32): Selenocysteine
  MOD_RES (69)..(69): Selenocysteine
  MOD_RES (83)..(83): Selenocysteine
MGXALVYHEDMXAXRLLWDDPECEIERPERLXAALDRLRQRGLEQRCLRLSAREASEEELGLVHRVPFXARGWPQGLDCSWWXLCSLELCKMGLPW

SEQ ID NO: 11862 - protein, 669 aa, Homo sapiens
  MOD_RES (3)..(3): Selenocysteine
  MOD_RES (12)..(12): Selenocysteine
  MOD_RES (14)..(14): Selenocysteine
  MOD_RES (32)..(32): Selenocysteine
  MOD_RES (75)..(75): Selenocysteine
  MOD_RES (99)..(99): Selenocysteine
  MOD_RES (119)..(119): Selenocysteine
  MOD_RES (223)..(223): Selenocysteine
  MOD_RES (278)..(278): Selenocysteine
  MOD_RES (286)..(286): Selenocysteine
  MOD_RES (317)..(317): Selenocysteine
  MOD_RES (320)..(320): Selenocysteine
  MOD_RES (363)..(363): Selenocysteine
  MOD_RES (412)..(412): Selenocysteine
  MOD_RES (417)..(418): Selenocysteine
  MOD_RES (422)..(422): Selenocysteine
  MOD_RES (441)..(441): Selenocysteine
  MOD_RES (458)..(458): Selenocysteine
  MOD_RES (482)..(482): Selenocysteine
  MOD_RES (490)..(490): Selenocysteine
  MOD_RES (546)..(546): Selenocysteine
  MOD_RES (552)..(552): Selenocysteine
  MOD_RES (614)..(614): Selenocysteine
MGXALVYHEDMXAXRLLWDDPECEIERPERLXAALDRLRQRGLEQRCLRLSAREASEEELGLVHSPEYVSLVREXQVLGKEELQALSGQFDAIYFHPSXFHCARLAAGAGLQLVDAVLXGAVQNGLALVRPPGHHGQRAAANGFCVFNNVAIAAAHAKQKHGLHRILVVDWDVHHGQGIQYLFEDDPSVLYFSWHRYEHGRFWPFLRESDADAVGRGQGLGFXVNLPWNQVGMGNADYVAAFLHLLLPLAFEFDPELVLVSAGFDSAIGDPEGQMQAXPECFAHLXQLLQVLAGGRVCAVLEGGYHLESLAESVCMXVQXLLGDPAPPLSGPMAPCQSALESIQSARAAQAPHWKSLQQQDVXAVPMSPSSHSPEGRPPPLLPGGPVCKAAASAPSSLLDQPCLCPAPSVRXAVALXXPDIXLVLPPDVIQQEASALREEXEAWARPHESLAREEALXALGKLLYLLDGMLDGQVNSGIAAXPASAAAAXLDVAVRRGLSHGAQRLLCVALGQLDRPPDLAHDGRSLWLNIRGKEAAALSMFHVSXPLPVMXGGFLSCILGLVLPLAYGFQPDLVLVALGPGHGLQGPHAALLAAMLRGLAGGRVLALLEENSXPQLAGILARVLNGEAPPSLGPSSVASPEDVQALMYLRGQLEPQWKMLQCHPHLVA

SEQ ID NO: 11863 - protein, 619 aa, Homo sapiens
  MOD_RES (3)..(3): Selenocysteine
  MOD_RES (12)..(12): Selenocysteine
  MOD_RES (14)..(14): Selenocysteine
  MOD_RES (32)..(32): Selenocysteine
  MOD_RES (75)..(75): Selenocysteine
  MOD_RES (99)..(99): Selenocysteine
  MOD_RES (119)..(119): Selenocysteine
  MOD_RES (223)..(223): Selenocysteine
  MOD_RES (267)..(267): Selenocysteine
  MOD_RES (270)..(270): Selenocysteine
  MOD_RES (313)..(313): Selenocysteine
  MOD_RES (362)..(362): Selenocysteine
  MOD_RES (367)..(368): Selenocysteine
  MOD_RES (372)..(372): Selenocysteine
  MOD_RES (391)..(391): Selenocysteine
  MOD_RES (408)..(408): Selenocysteine
  MOD_RES (432)..(432): Selenocysteine
  MOD_RES (440)..(440): Selenocysteine
  MOD_RES (496)..(496): Selenocysteine
  MOD_RES (502)..(502): Selenocysteine
  MOD_RES (564)..(564): Selenocysteine
MGXALVYHEDMXAXRLLWDDPECEIERPERLXAALDRLRQRGLEQRCLRLSAREASEEELGLVHSPEYVSLVREXQVLGKEELQALSGQFDAIYFHPSXFHCARLAAGAGLQLVDAVLXGAVQNGLALVRPPGHHGQRAAANGFCVFNNVAIAAAHAKQKHGLHRILVVDWDVHHGQGIQYLFEDDPSVLYFSWHRYEHGRFWPFLRESDADAVGRGQGLGFXVNLPWNQVGMGNADYVAAFLHLLLPLAFEGGYHLESLAESVCMXVQXLLGDPAPPLSGPMAPCQSALESIQSARAAQAPHWKSLQQQDVXAVPMSPSSHSPEGRPPPLLPGGPVCKAAASAPSSLLDQPCLCPAPSVRXAVALXXPDIXLVLPPDVIQQEASALREEXEAWARPHESLAREEALXALGKLLYLLDGMLDGQVNSGIAAXPASAAAAXLDVAVRRGLSHGAQRLLCVALGQLDRPPDLAHDGRSLWLNIRGKEAAALSMFHVSXPLPVMXGGFLSCILGLVLPLAYGFQPDLVLVALGPGHGLQGPHAALLAAMLRGLAGGRVLALLEENSXPQLAGILARVLNGEAPPSLGPSSVASPEDVQALMYLRGQLEPQWKMLQCHPHLVA

SEQ ID NO: 11864 - protein, 396 aa, Homo sapiens
  MOD_RES (3)..(3): Selenocysteine
  MOD_RES (12)..(12): Selenocysteine
  MOD_RES (14)..(14): Selenocysteine
  MOD_RES (32)..(32): Selenocysteine
  MOD_RES (75)..(75): Selenocysteine
  MOD_RES (99)..(99): Selenocysteine
  MOD_RES (119)..(119): Selenocysteine
  MOD_RES (223)..(223): Selenocysteine
  MOD_RES (267)..(267): Selenocysteine
  MOD_RES (270)..(270): Selenocysteine
  MOD_RES (313)..(313): Selenocysteine
  MOD_RES (362)..(362): Selenocysteine
  MOD_RES (367)..(368): Selenocysteine
  MOD_RES (372)..(372): Selenocysteine
  MOD_RES (391)..(391): Selenocysteine
MGXALVYHEDMXAXRLLWDDPECEIERPERLXAALDRLRQRGLEQRCLRLSAREASEEELGLVHSPEYVSLVREXQVLGKEELQALSGQFDAIYFHPSXFHCARLAAGAGLQLVDAVLXGAVQNGLALVRPPGHHGQRAAANGFCVFNNVAIAAAHAKQKHGLHRILVVDWDVHHGQGIQYLFEDDPSVLYFSWHRYEHGRFWPFLRESDADAVGRGQGLGFXVNLPWNQVGMGNADYVAAFLHLLLPLAFEGGYHLESLAESVCMXVQXLLGDPAPPLSGPMAPCQSALESIQSARAAQAPHWKSLQQQDVXAVPMSPSSHSPEGRPPPLLPGGPVCKAAASAPSSLLDQPCLCPAPSVRXAVALXXPDIXLVLPPDVIQQEASALREEXEAWAR

SEQ ID NO: 11865 - protein, 649 aa, Homo sapiens
  MOD_RES (3)..(3): Selenocysteine
  MOD_RES (12)..(12): Selenocysteine
  MOD_RES (14)..(14): Selenocysteine
  MOD_RES (32)..(32): Selenocysteine
  MOD_RES (75)..(75): Selenocysteine
  MOD_RES (99)..(99): Selenocysteine
  MOD_RES (119)..(119): Selenocysteine
  MOD_RES (223)..(223): Selenocysteine
  MOD_RES (258)..(258): Selenocysteine
  MOD_RES (266)..(266): Selenocysteine
  MOD_RES (297)..(297): Selenocysteine
  MOD_RES (300)..(300): Selenocysteine
  MOD_RES (343)..(343): Selenocysteine
  MOD_RES (392)..(392): Selenocysteine
  MOD_RES (397)..(398): Selenocysteine
  MOD_RES (402)..(402): Selenocysteine
  MOD_RES (421)..(421): Selenocysteine
  MOD_RES (438)..(438): Selenocysteine
  MOD_RES (462)..(462): Selenocysteine
  MOD_RES (470)..(470): Selenocysteine
  MOD_RES (526)..(526): Selenocysteine
  MOD_RES (532)..(532): Selenocysteine
  MOD_RES (594)..(594): Selenocysteine
MGXALVYHEDMXAXRLLWDDPECEIERPERLXAALDRLRQRGLEQRCLRLSAREASEEELGLVHSPEYVSLVREXQVLGKEELQALSGQFDAIYFHPSXFHCARLAAGAGLQLVDAVLXGAVQNGLALVRPPGHHGQRAAANGFCVFNNVAIAAAHAKQKHGLHRILVVDWDVHHGQGIQYLFEDDPSVLYFSWHRYEHGRFWPFLRESDADAVGRGQGLGFXVNLPWNQVGMGNADYVAAFLHLLLPLAFEGQMQAXPECFAHLXQLLQVLAGGRVCAVLEGGYHLESLAESVCMXVQXLLGDPAPPLSGPMAPCQSALESIQSARAAQAPHWKSLQQQDVXAVPMSPSSHSPEGRPPPLLPGGPVCKAAASAPSSLLDQPCLCPAPSVRXAVALXXPDIXLVLPPDVIQQEASALREEXEAWARPHESLAREEALXALGKLLYLLDGMLDGQVNSGIAAXPASAAAAXLDVAVRRGLSHGAQRLLCVALGQLDRPPDLAHDGRSLWLNIRGKEAAALSMFHVSXPLPVMXGGFLSCILGLVLPLAYGFQPDLVLVALGPGHGLQGPHAALLAAMLRGLAGGRVLALLEENSXPQLAGILARVLNGEAPPSLGPSSVASPEDVQALMYLRGQLEPQWKMLQCHPHLVA

SEQ ID NO: 11866 - protein, 296 aa, Homo sapiens
  MOD_RES (48)..(48): Selenocysteine
  MOD_RES (65)..(65): Selenocysteine
  MOD_RES (67)..(67): Selenocysteine
  MOD_RES (70)..(70): Selenocysteine
  MOD_RES (108)..(108): Selenocysteine
  MOD_RES (125)..(125): Selenocysteine
  MOD_RES (178)..(178): Selenocysteine
  MOD_RES (209)..(209): Selenocysteine
  MOD_RES (249)..(249): Selenocysteine
  MOD_RES (257)..(257): Selenocysteine
  MOD_RES (288)..(288): Selenocysteine
MGLEKLHPFDAGKWGKVINFLKEEKLLSDSMLVEAREASEEDLLVVHXRRYLNELKRKVLRPLRXQXGGXIMAGKLAVERGWAINVGGGFHHCSSDRGGGFCAYADIXLAIKFLFERVEGISRAXIIDLDAHQGNGHERDFMDDKRVYIMDVYNRHIYPGDRFAKQAIRRKVELEWGXEDDEYLDKVERNIKKSLQEHLPDVVVYNAGXDILEGDRLGGLSISPAGIVKRDELVFRMVRGRRVPILMVXSGGYQKRXARIIADSILNLFGLGLIGPESPSVSAQNSDXPLLPPAVP

SEQ ID NO: 11867 - protein, 118 aa, Homo sapiens
  MOD_RES (48)..(48): Selenocysteine
  MOD_RES (74)..(74): Selenocysteine
  MOD_RES (81)..(81): Selenocysteine
  MOD_RES (89)..(89): Selenocysteine
  MOD_RES (92)..(92): Selenocysteine
  MOD_RES (96)..(96): Selenocysteine
  MOD_RES (101)..(101): Selenocysteine
  MOD_RES (106)..(106): Selenocysteine
MGLEKLHPFDAGKWGKVINFLKEEKLLSDSMLVEAREASEEDLLVVHXRRYLNELKRPSGGRWSWSGAQRMMSXWIRWRGXSRNPSRSXCPXWWYXMQAPXSSRGXALGGCPSAQRAS

SEQ ID NO: 11868 - protein, 91 aa, Homo sapiens
  MOD_RES (48)..(48): Selenocysteine
  MOD_RES (63)..(63): Selenocysteine
  MOD_RES (65)..(65): Selenocysteine
  MOD_RES (88)..(88): Selenocysteine
  MOD_RES (90)..(90): Selenocysteine
MGLEKLHPFDAGKWGKVINFLKEEKLLSDSMLVEAREASEEDLLVVHXRRYLNELKWSFAVAXIXEIPPVIFLPNFLVQRKVLRPLRXQXG

SEQ ID NO: 11869 - protein, 166 aa, Homo sapiens
  MOD_RES (48)..(48): Selenocysteine
  MOD_RES (63)..(63): Selenocysteine
  MOD_RES (65)..(65): Selenocysteine
  MOD_RES (88)..(88): Selenocysteine
  MOD_RES (90)..(90): Selenocysteine
  MOD_RES (93)..(93): Selenocysteine
  MOD_RES (131)..(131): Selenocysteine
  MOD_RES (148)..(148): Selenocysteine
MGLEKLHPFDAGKWGKVINFLKEEKLLSDSMLVEAREASEEDLLVVHXRRYLNELKWSFAVAXIXEIPPVIFLPNFLVQRKVLRPLRXQXGGXIMAGKLAVERGWAINVGGGFHHCSSDRGGGFCAYADIXLAIKFLFERVEGISRAXIIDLDAHQGNGHERDFMD

SEQ ID NO: 11870 - protein, 204 aa, Homo sapiens
  MOD_RES (48)..(48): Selenocysteine
  MOD_RES (63)..(63): Selenocysteine
  MOD_RES (65)..(65): Selenocysteine
  MOD_RES (88)..(88): Selenocysteine
  MOD_RES (90)..(90): Selenocysteine
  MOD_RES (93)..(93): Selenocysteine
  MOD_RES (131)..(131): Selenocysteine
  MOD_RES (148)..(148): Selenocysteine
  MOD_RES (201)..(201): Selenocysteine
MGLEKLHPFDAGKWGKVINFLKEEKLLSDSMLVEAREASEEDLLVVHXRRYLNELKWSFAVAXIXEIPPVIFLPNFLVQRKVLRPLRXQXGGXIMAGKLAVERGWAINVGGGFHHCSSDRGGGFCAYADIXLAIKFLFERVEGISRAXIIDLDAHQGNGHERDFMDDKRVYIMDVYNRHIYPGDRFAKQAIRRKVELEWGXEDD

SEQ ID NO: 11871 - protein, 319 aa, Homo sapiens
  MOD_RES (48)..(48): Selenocysteine
  MOD_RES (63)..(63): Selenocysteine
  MOD_RES (65)..(65): Selenocysteine
  MOD_RES (88)..(88): Selenocysteine
  MOD_RES (90)..(90): Selenocysteine
  MOD_RES (93)..(93): Selenocysteine
  MOD_RES (131)..(131): Selenocysteine
  MOD_RES (148)..(148): Selenocysteine
  MOD_RES (201)..(201): Selenocysteine
  MOD_RES (232)..(232): Selenocysteine
  MOD_RES (272)..(272): Selenocysteine
  MOD_RES (280)..(280): Selenocysteine
  MOD_RES (311)..(311): Selenocysteine
MGLEKLHPFDAGKWGKVINFLKEEKLLSDSMLVEAREASEEDLLVVHXRRYLNELKWSFAVAXIXEIPPVIFLPNFLVQRKVLRPLRXQXGGXIMAGKLAVERGWAINVGGGFHHCSSDRGGGFCAYADIXLAIKFLFERVEGISRAXIIDLDAHQGNGHERDFMDDKRVYIMDVYNRHIYPGDRFAKQAIRRKVELEWGXEDDEYLDKVERNIKKSLQEHLPDVVVYNAGXDILEGDRLGGLSISPAGIVKRDELVFRMVRGRRVPILMVXSGGYQKRXARIIADSILNLFGLGLIGPESPSVSAQNSDXPLLPPAVP

SEQ ID NO: 11872 - protein, 236 aa, Homo sapiens
  MOD_RES (48)..(48): Selenocysteine
  MOD_RES (63)..(63): Selenocysteine
  MOD_RES (65)..(65): Selenocysteine
  MOD_RES (88)..(88): Selenocysteine
  MOD_RES (90)..(90): Selenocysteine
  MOD_RES (93)..(93): Selenocysteine
  MOD_RES (100)..(101): Selenocysteine
  MOD_RES (105)..(105): Selenocysteine
  MOD_RES (115)..(115): Selenocysteine
  MOD_RES (149)..(149): Selenocysteine
  MOD_RES (152)..(153): Selenocysteine
  MOD_RES (157)..(157): Selenocysteine
  MOD_RES (162)..(163): Selenocysteine
  MOD_RES (165)..(165): Selenocysteine
  MOD_RES (167)..(167): Selenocysteine
  MOD_RES (170)..(170): Selenocysteine
  MOD_RES (192)..(192): Selenocysteine
  MOD_RES (199)..(199): Selenocysteine
  MOD_RES (207)..(207): Selenocysteine
  MOD_RES (210)..(210): Selenocysteine
  MOD_RES (214)..(214): Selenocysteine
  MOD_RES (219)..(219): Selenocysteine
  MOD_RES (224)..(224): Selenocysteine
MGLEKLHPFDAGKWGKVINFLKEEKLLSDSMLVEAREASEEDLLVVHXRRYLNELKWSFAVAXIXEIPPVIFLPNFLVQRKVLRPLRXQXGGXIMGVASXXAPAXVAGASVPMRXSRSPSSFCLSVWRASPGLPSLILMPIRAMGMSEXSWXXSVCXSWMSXXAXSXQGXALPSRPSGGRWSWSGAQRMMSXWIRWRGXSRNPSRSXCPXWWYXMQAPXSSRGXALGGCPSAQRAS

SEQ ID NO: 11873 - protein, 168 aa, Homo sapiens
  MOD_RES (23)..(24): Selenocysteine
  MOD_RES (33)..(33): Selenocysteine
  MOD_RES (46)..(46): Selenocysteine
  MOD_RES (95)..(95): Selenocysteine
  MOD_RES (108)..(109): Selenocysteine
  MOD_RES (113)..(113): Selenocysteine
  MOD_RES (123)..(123): Selenocysteine
  MOD_RES (157)..(157): Selenocysteine
  MOD_RES (160)..(161): Selenocysteine
  MOD_RES (165)..(165): Selenocysteine
MGRVSSAAGSGDPRPPPWLRLHXXQLYQHVPEXRWPIVYSPRYNIXFMGLEKLHPFDAGKWGKVINFLKEEKLLSDSMLVEAREASEEDLLVVHXRRYLNELKGVASXXAPAXVAGASVPMRXSRSPSSFCLSVWRASPGLPSLILMPIRAMGMSEXSWXXSVCXSWM

SEQ ID NO: 11874 - protein, 107 aa, Homo sapiens
  MOD_RES (23)..(24): Selenocysteine
  MOD_RES (33)..(33): Selenocysteine
  MOD_RES (46)..(46): Selenocysteine
  MOD_RES (95)..(95): Selenocysteine
MGRVSSAAGSGDPRPPPWLRLHXXQLYQHVPEXRWPIVYSPRYNIXFMGLEKLHPFDAGKWGKVINFLKEEKLLSDSMLVEAREASEEDLLVVHXRRYLNELKWSFA

SEQ ID NO: 11875 - protein, 181 aa, Homo sapiens
  MOD_RES (4)..(5): Selenocysteine
  MOD_RES (14)..(14): Selenocysteine
  MOD_RES (27)..(27): Selenocysteine
  MOD_RES (63)..(63): Selenocysteine
  MOD_RES (94)..(94): Selenocysteine
  MOD_RES (134)..(134): Selenocysteine
  MOD_RES (142)..(142): Selenocysteine
  MOD_RES (173)..(173): Selenocysteine
MLHXXQLYQHVPEXRWPIVYSPRYNIXFMGLEKLHPFDAGKWGKVINFLKEAIRRKVELEWGXEDDEYLDKVERNIKKSLQEHLPDVVVYNAGXDILEGDRLGGLSISPAGIVKRDELVFRMVRGRRVPILMVXSGGYQKRXARIIADSILNLFGLGLIGPESPSVSAQNSDXPLLPPAVP

SEQ ID NO: 11876 - protein, 268 aa, Homo sapiens
  MOD_RES (4)..(5): Selenocysteine
  MOD_RES (14)..(14): Selenocysteine
  MOD_RES (27)..(27): Selenocysteine
  MOD_RES (76)..(76): Selenocysteine
  MOD_RES (97)..(97): Selenocysteine
  MOD_RES (150)..(150): Selenocysteine
  MOD_RES (181)..(181): Selenocysteine
  MOD_RES (221)..(221): Selenocysteine
  MOD_RES (229)..(229): Selenocysteine
  MOD_RES (260)..(260): Selenocysteine
MLHXXQLYQHVPEXRWPIVYSPRYNIXFMGLEKLHPFDAGKWGKVINFLKEEKLLSDSMLVEAREASEEDLLVVHXRRYLNELKFLFERVEGISRAXIIDLDAHQGNGHERDFMDDKRVYIMDVYNRHIYPGDRFAKQAIRRKVELEWGXEDDEYLDKVERNIKKSLQEHLPDVVVYNAGXDILEGDRLGGLSISPAGIVKRDELVFRMVRGRRVPILMVXSGGYQKRXARIIADSILNLFGLGLIGPESPSVSAQNSDXPLLPPAVP

SEQ ID NO: 11877 - protein, 247 aa, Homo sapiens
  MOD_RES (4)..(5): Selenocysteine
  MOD_RES (14)..(14): Selenocysteine
  MOD_RES (27)..(27): Selenocysteine
  MOD_RES (76)..(76): Selenocysteine
  MOD_RES (129)..(129): Selenocysteine
  MOD_RES (160)..(160): Selenocysteine
  MOD_RES (200)..(200): Selenocysteine
  MOD_RES (208)..(208): Selenocysteine
  MOD_RES (239)..(239): Selenocysteine
MLHXXQLYQHVPEXRWPIVYSPRYNIXFMGLEKLHPFDAGKWGKVINFLKEEKLLSDSMLVEAREASEEDLLVVHXRRYLNELKGNGHERDFMDDKRVYIMDVYNRHIYPGDRFAKQAIRRKVELEWGXEDDEYLDKVERNIKKSLQEHLPDVVVYNAGXDILEGDRLGGLSISPAGIVKRDELVFRMVRGRRVPILMVXSGGYQKRXARIIADSILNLFGLGLIGPESPSVSAQNSDXPLLPPAVP

SEQ ID NO: 11878 - protein, 146 aa, Homo sapiens
  MOD_RES (4)..(5): Selenocysteine
  MOD_RES (14)..(14): Selenocysteine
  MOD_RES (27)..(27): Selenocysteine
  MOD_RES (76)..(76): Selenocysteine
  MOD_RES (102)..(102): Selenocysteine
  MOD_RES (109)..(109): Selenocysteine
  MOD_RES (117)..(117): Selenocysteine
  MOD_RES (120)..(120): Selenocysteine
  MOD_RES (124)..(124): Selenocysteine
  MOD_RES (129)..(129): Selenocysteine
  MOD_RES (134)..(134): Selenocysteine
MLHXXQLYQHVPEXRWPIVYSPRYNIXFMGLEKLHPFDAGKWGKVINFLKEEKLLSDSMLVEAREASEEDLLVVHXRRYLNELKRPSGGRWSWSGAQRMMSXWIRWRGXSRNPSRSXCPXWWYXMQAPXSSRGXALGGCPSAQRAS

SEQ ID NO: 11879 - protein, 347 aa, Homo sapiens
  MOD_RES (4)..(5): Selenocysteine
  MOD_RES (14)..(14): Selenocysteine
  MOD_RES (27)..(27): Selenocysteine
  MOD_RES (76)..(76): Selenocysteine
  MOD_RES (91)..(91): Selenocysteine
  MOD_RES (93)..(93): Selenocysteine
  MOD_RES (116)..(116): Selenocysteine
  MOD_RES (118)..(118): Selenocysteine
  MOD_RES (121)..(121): Selenocysteine
  MOD_RES (159)..(159): Selenocysteine
  MOD_RES (176)..(176): Selenocysteine
  MOD_RES (229)..(229): Selenocysteine
  MOD_RES (260)..(260): Selenocysteine
  MOD_RES (300)..(300): Selenocysteine
  MOD_RES (308)..(308): Selenocysteine
  MOD_RES (339)..(339): Selenocysteine
MLHXXQLYQHVPEXRWPIVYSPRYNIXFMGLEKLHPFDAGKWGKVINFLKEEKLLSDSMLVEAREASEEDLLVVHXRRYLNELKWSFAVAXIXEIPPVIFLPNFLVQRKVLRPLRXQXGGXIMAGKLAVERGWAINVGGGFHHCSSDRGGGFCAYADIXLAIKFLFERVEGISRAXIIDLDAHQGNGHERDFMDDKRVYIMDVYNRHIYPGDRFAKQAIRRKVELEWGXEDDEYLDKVERNIKKSLQEHLPDVVVYNAGXDILEGDRLGGLSISPAGIVKRDELVFRMVRGRRVPILMVXSGGYQKRXARIIADSILNLFGLGLIGPESPSVSAQNSDXPLLPPAVP

SEQ ID NO: 11880 - protein, 53 aa, Homo sapiens
  MOD_RES (4)..(5): Selenocysteine
  MOD_RES (14)..(14): Selenocysteine
  MOD_RES (27)..(27): Selenocysteine
MLHXXQLYQHVPEXRWPIVYSPRYNIXFMGLEKLHPFDAGKWGKVINFLKVSV

SEQ ID NO: 11881 - protein, 161 aa, Homo sapiens
  MOD_RES (29)..(29): Selenocysteine
  MOD_RES (51)..(51): Selenocysteine
  MOD_RES (56)..(56): Selenocysteine
  MOD_RES (105)..(105): Selenocysteine
  MOD_RES (120)..(120): Selenocysteine
KVCYYYDGDIGNYYYGQGHPMKPHRIRMXHNLLLNYGLYRKMEIYRPHKAXAEEMXKYHSDEYIKFLRSIRPDNMSEYSKQMQRFNVGEDCPVFDGLFEFCQLSXGGSVAGAVKLNRQQXDMAVNWAGGLHHAKKSEASGFCYVNDIVLAILELLKYVNLY

SEQ ID NO: 11882 - protein, 488 aa, Homo sapiens
  MOD_RES (39)..(39): Selenocysteine
  MOD_RES (61)..(61): Selenocysteine
  MOD_RES (66)..(66): Selenocysteine
  MOD_RES (115)..(115): Selenocysteine
  MOD_RES (130)..(130): Selenocysteine
  MOD_RES (190)..(191): Selenocysteine
  MOD_RES (196)..(196): Selenocysteine
  MOD_RES (209)..(209): Selenocysteine
  MOD_RES (278)..(278): Selenocysteine
  MOD_RES (291)..(291): Selenocysteine
  MOD_RES (305)..(305): Selenocysteine
  MOD_RES (314)..(314): Selenocysteine
  MOD_RES (317)..(317): Selenocysteine
  MOD_RES (352)..(352): Selenocysteine
  MOD_RES (356)..(356): Selenocysteine
  MOD_RES (454)..(454): Selenocysteine
  MOD_RES (459)..(459): Selenocysteine
  MOD_RES (475)..(475): Selenocysteine
  MOD_RES (477)..(477): Selenocysteine
  MOD_RES (480)..(480): Selenocysteine
MAYSQGGGKKKVCYYYDGDIGNYYYGQGHPMKPHRIRMXHNLLLNYGLYRKMEIYRPHKAXAEEMXKYHSDEYIKFLRSIRPDNMSEYSKQMQRFNVGEDCPVFDGLFEFCQLSXGGSVAGAVKLNRQQXDMAVNWAGGLHHAKKSEASGFCYVNDIVLAILELLKYHQRVLYIDIDIHHGDGVEEAFYXXDRVMXVSFHKYGEYFPGXGDLRDIGAGKGKYYAVNFPMRDGIDDESYGQIFKPIISKVMEMYQPSAVVLQCGADSLSGDRLGCFNLXVKGHAKCVEVVKXFNLPLLMLGGGGYXIRNVARCWXYEXAVALDCEIPNELPYNDYFEYFGPDFKLHISPSNMXNQNXPEYMEKIKQRLFENLRMLPHAPGVQMQAIPEDAVHEDSGDEDGEDPDKRISIRASDKRIACDEEFSDSEDEGEGGRRNVADHKKGAKKARIEEDKKEXEDKKXDVKEEDKSKDNSGEKXDXKGXKSEQLSNP

SEQ ID NO: 11883 - protein, 109 aa, Homo sapiens
  MOD_RES (46)..(46): Selenocysteine
  MOD_RES (68)..(68): Selenocysteine
  MOD_RES (73)..(73): Selenocysteine
MAYSQGGGKKKVCYYYDVCVFSILGDIGNYYYGQGHPMKPHRIRMXHNLLLNYGLYRKMEIYRPHKAXAEEMXKYHSDEYIKFLRSIRPDNMSEYSKQMQRFNVGEDCP

SEQ ID NO: 11884 - protein, 52 aa, Homo sapiens
  MOD_RES (9)..(9): Selenocysteine
  MOD_RES (31)..(31): Selenocysteine
  MOD_RES (36)..(36): Selenocysteine
MKPHRIRMXHNLLLNYGLYRKMEIYRPHKAXAEEMXKYHSDEYIKFLRSIRP

SEQ ID NO: 11885 - protein, 60 aa, Homo sapiens
  MOD_RES (9)..(9): Selenocysteine
  MOD_RES (31)..(31): Selenocysteine
  MOD_RES (36)..(36): Selenocysteine
MKPHRIRMXHNLLLNYGLYRKMEIYRPHKAXAEEMXKYHSDEYIKFLRSIRPDNMSEYSK

SEQ ID NO: 11886 - protein, 65 aa, Homo sapiens
  MOD_RES (9)..(9): Selenocysteine
  MOD_RES (31)..(31): Selenocysteine
  MOD_RES (36)..(36): Selenocysteine
MKPHRIRMXHNLLLNYGLYRKMEIYRPHKAXAEEMXKYHSDEYIKFLRSIRPDNMSEYSKQMQRF

SEQ ID NO: 11887 - protein, 71 aa, Homo sapiens
  MOD_RES (9)..(9): Selenocysteine
  MOD_RES (31)..(31): Selenocysteine
  MOD_RES (36)..(36): Selenocysteine
MKPHRIRMXHNLLLNYGLYRKMEIYRPHKAXAEEMXKYHSDEYIKFLRSIRPDNMSEYSKQMQRFNVGEDC

SEQ ID NO: 11888 - protein, 86 aa, Homo sapiens
  MOD_RES (9)..(9): Selenocysteine
  MOD_RES (31)..(31): Selenocysteine
  MOD_RES (36)..(36): Selenocysteine
  MOD_RES (85)..(85): Selenocysteine
MKPHRIRMXHNLLLNYGLYRKMEIYRPHKAXAEEMXKYHSDEYIKFLRSIRPDNMSEYSKQMQRFNVGEDCPVFDGLFEFCQLSXG

SEQ ID NO: 11889 - protein, 100 aa, Homo sapiens
  MOD_RES (9)..(9): Selenocysteine
  MOD_RES (31)..(31): Selenocysteine
  MOD_RES (36)..(36): Selenocysteine
  MOD_RES (85)..(85): Selenocysteine
  MOD_RES (100)..(100): Selenocysteine
MKPHRIRMXHNLLLNYGLYRKMEIYRPHKAXAEEMXKYHSDEYIKFLRSIRPDNMSEYSKQMQRFNVGEDCPVFDGLFEFCQLSXGGSVAGAVKLNRQQX

SEQ ID NO: 11890 - protein, 103 aa, Homo sapiens
  MOD_RES (9)..(9): Selenocysteine
  MOD_RES (31)..(31): Selenocysteine
  MOD_RES (36)..(36): Selenocysteine
  MOD_RES (85)..(85): Selenocysteine
  MOD_RES (100)..(100): Selenocysteine
MKPHRIRMXHNLLLNYGLYRKMEIYRPHKAXAEEMXKYHSDEYIKFLRSIRPDNMSEYSKQMQRFNVGEDCPVFDGLFEFCQLSXGGSVAGAVKLNRQQXDMA

SEQ ID NO: 11891 - protein, 458 aa, Homo sapiens
  MOD_RES (9)..(9): Selenocysteine
  MOD_RES (31)..(31): Selenocysteine
  MOD_RES (36)..(36): Selenocysteine
  MOD_RES (85)..(85): Selenocysteine
  MOD_RES (100)..(100): Selenocysteine
  MOD_RES (160)..(161): Selenocysteine
  MOD_RES (166)..(166): Selenocysteine
  MOD_RES (179)..(179): Selenocysteine
  MOD_RES (248)..(248): Selenocysteine
  MOD_RES (261)..(261): Selenocysteine
  MOD_RES (275)..(275): Selenocysteine
  MOD_RES (284)..(284): Selenocysteine
  MOD_RES (287)..(287): Selenocysteine
  MOD_RES (322)..(322): Selenocysteine
  MOD_RES (326)..(326): Selenocysteine
  MOD_RES (424)..(424): Selenocysteine
  MOD_RES (429)..(429): Selenocysteine
  MOD_RES (445)..(445): Selenocysteine
  MOD_RES (447)..(447): Selenocysteine
  MOD_RES (450)..(450): Selenocysteine
MKPHRIRMXHNLLLNYGLYRKMEIYRPHKAXAEEMXKYHSDEYIKFLRSIRPDNMSEYSKQMQRFNVGEDCPVFDGLFEFCQLSXGGSVAGAVKLNRQQXDMAVNWAGGLHHAKKSEASGFCYVNDIVLAILELLKYHQRVLYIDIDIHHGDGVEEAFYXXDRVMXVSFHKYGEYFPGXGDLRDIGAGKGKYYAVNFPMRDGIDDESYGQIFKPIISKVMEMYQPSAVVLQCGADSLSGDRLGCFNLXVKGHAKCVEVVKXFNLPLLMLGGGGYXIRNVARCWXYEXAVALDCEIPNELPYNDYFEYFGPDFKLHISPSNMXNQNXPEYMEKIKQRLFENLRMLPHAPGVQMQAIPEDAVHEDSGDEDGEDPDKRISIRASDKRIACDEEFSDSEDEGEGGRRNVADHKKGAKKARIEEDKKEXEDKKXDVKEEDKSKDNSGEKXDXKGXKSEQLSNP

SEQ ID NO: 11892 - protein, 219 aa, Homo sapiens
  MOD_RES (4)..(4): Selenocysteine
  MOD_RES (32)..(32): Selenocysteine
  MOD_RES (109)..(109): Selenocysteine
  MOD_RES (114)..(114): Selenocysteine
  MOD_RES (128)..(128): Selenocysteine
  MOD_RES (175)..(175): Selenocysteine
MAKXVAYFYDPDVGNFHYGAGHPMKPHRLALXHSLVLHYGLYKKMIICDIAINWAGGLHHAKKFEASGFCYVNDIVIGILELLKYHPRVLYIDIDIHHGDGVQEAFYLXDRVMXVSFHKYGNYFFPGXGDMYEVGAESGRYYCLNVPLRDGIDDQSYKHLFQPVINQVVDFYQPXCIVLQCGADSLGCDRLGCFNLSIRGHGECVEYVKSFNIPLLVLG

SEQ ID NO: 11893 - protein, 53 aa, Homo sapiens
  MOD_RES (4)..(4): Selenocysteine
  MOD_RES (32)..(32): Selenocysteine
MAKXVAYFYDPDVGNFHYGAGHPMKPHRLALXHSLVLHYGLYKKMIPSVSRAL

SEQ ID NO: 11894 - protein, 428 aa, Homo sapiens
  MOD_RES (4)..(4): Selenocysteine
  MOD_RES (32)..(32): Selenocysteine
  MOD_RES (76)..(76): Selenocysteine
  MOD_RES (82)..(82): Selenocysteine
  MOD_RES (108)..(108): Selenocysteine
  MOD_RES (116)..(116): Selenocysteine
  MOD_RES (184)..(184): Selenocysteine
  MOD_RES (189)..(189): Selenocysteine
  MOD_RES (203)..(203): Selenocysteine
  MOD_RES (250)..(250): Selenocysteine
  MOD_RES (299)..(299): Selenocysteine
  MOD_RES (308)..(308): Selenocysteine
  MOD_RES (311)..(311): Selenocysteine
  MOD_RES (337)..(337): Selenocysteine
  MOD_RES (344)..(344): Selenocysteine
  MOD_RES (361)..(361): Selenocysteine
  MOD_RES (386)..(386): Selenocysteine
  MOD_RES (390)..(390): Selenocysteine
MAKXVAYFYDPDVGNFHYGAGHPMKPHRLALXHSLVLHYGLYKKMIVFKPYQASQHDMCRFHSEDYIDFLQRVSPXNMQGFXKSLNAFNVGDDCPVFPGLFEFCSRYXGASLQGAXQLNNKICDIAINWAGGLHHAKKFEASGFCYVNDIVIGILELLKYHPRVLYIDIDIHHGDGVQEAFYLXDRVMXVSFHKYGNYFFPGXGDMYEVGAESGRYYCLNVPLRDGIDDQSYKHLFQPVINQVVDFYQPXCIVLQCGADSLGCDRLGCFNLSIRGHGECVEYVKSFNIPLLVLGGGGYXVRNVARCWXYEXSLLVEEAISEELPYSEYFEYFAPDFXLHPDVSXRIENQNSRQYLDQIRQXIFENLKMLNHAPSVQIHDVPADLLXYDRXDEADAEERGPEENYSRPEAPNEFYDGDHDNDKESDVEI

SEQ ID NO: 11895 - protein, 162 aa, Homo sapiens
  MOD_RES (5)..(5): Selenocysteine
  MOD_RES (138)..(138): Selenocysteine
MDVAXALPLQVAPSAVPMDLRLDHQFSLPVAEPALREQQLQQELLALKQKQQIQRQILIAEFQRQHEQLSRQHEAQLHEHIKQQQEMLAMKHQQELLEHQRKLERHRQEQELEKQHREQKLQQLKNKEKGKESAVASXEVKMKLQEFVLNKKKALAHRNLNH

SEQ ID NO: 11896 - protein, 972 aa, Homo sapiens
  MOD_RES (52)..(52): Selenocysteine
  MOD_RES (89)..(89): Selenocysteine
  MOD_RES (106)..(106): Selenocysteine
  MOD_RES (127)..(127): Selenocysteine
  MOD_RES (161)..(161): Selenocysteine
  MOD_RES (171)..(171): Selenocysteine
  MOD_RES (210)..(210): Selenocysteine
  MOD_RES (230)..(230): Selenocysteine
  MOD_RES (238)..(238): Selenocysteine
  MOD_RES (244)..(244): Selenocysteine
  MOD_RES (250)..(250): Selenocysteine
  MOD_RES (260)..(260): Selenocysteine
  MOD_RES (274)..(274): Selenocysteine
  MOD_RES (277)..(277): Selenocysteine
  MOD_RES (282)..(282): Selenocysteine
  MOD_RES (314)..(314): Selenocysteine
  MOD_RES (353)..(353): Selenocysteine
  MOD_RES (413)..(413): Selenocysteine
  MOD_RES (526)..(526): Selenocysteine
  MOD_RES (536)..(536): Selenocysteine
  MOD_RES (541)..(542): Selenocysteine
  MOD_RES (548)..(548): Selenocysteine
  MOD_RES (556)..(556): Selenocysteine
  MOD_RES (580)..(580): Selenocysteine
  MOD_RES (595)..(595): Selenocysteine
  MOD_RES (601)..(601): Selenocysteine
  MOD_RES (608)..(608): Selenocysteine
  MOD_RES (613)..(613): Selenocysteine
  MOD_RES (648)..(648): Selenocysteine
  MOD_RES (675)..(675): Selenocysteine
  MOD_RES (696)..(696): Selenocysteine
  MOD_RES (735)..(735): Selenocysteine
  MOD_RES (770)..(770): Selenocysteine
  MOD_RES (783)..(783): Selenocysteine
  MOD_RES (801)..(801): Selenocysteine
  MOD_RES (829)..(829): Selenocysteine
  MOD_RES (845)..(845): Selenocysteine
  MOD_RES (867)..(867): Selenocysteine
  MOD_RES (922)..(923): Selenocysteine
  MOD_RES (925)..(925): Selenocysteine
  MOD_RES (935)..(935): Selenocysteine
  MOD_RES (943)..(943): Selenocysteine
  MOD_RES (945)..(945): Selenocysteine
MLAMKHQQELLEHQRKLERHRQEQELEKQHREQKLQQLKNKEKGKESAVASXEVKMKLQEFVLNKKKALAHRNLNHCISSDPRYWYGKXQHSSLDQSSPPQSGVSXSYNHPVLGMYDAKDDFPLRKXASEPNLKLRSRLKQKVAERRSSPLLRRKDGPVVXALKKRPLDVXDSACSSAPGSGPSSPNNSSGSVSAENGIAPAVPSIPAEXSLAHRLVAREGSAAPLPLYXSPSLPNIXLGLPAXGPSAGXAGQQDAERLXLPALQQRLSLFPGXHLXPYLSXSPLERDGGAAHSPLLQHMVLLEQPPAQAPLVXDWYLSGLGALPLHAQSLVGADRVSPSIHKLRQHRPLGRXQSAPLPQNAQALQHLVIQQQHQQFLEKHKQQFQQQQLQMNKIIPKPSEPARQPESHPEEXEEELREHQALLDEPYLDRLPGQKEAHAQAGVQVKQEPIESDEEEAEPPREVEPGQRQPSEQELLFRQQALLLEQQRIHQLRNYQASMEAAGIPVSFGGHRPLSRAQSSPASAXFPVSVQEPPXKPRFXXGLVYDXLMLKHQCXCGSSSSHPEHAGRIQSIWSRLQEXGLRGKCECIRGRKAXLEELQXVHSEAHXLLYGXNPLNRQKLDSKKLLGSLASVFVRLPCGGVGVDSDXIWNEVHSAGAARLAVGCVVELVFKVAXGELKNGFAVVRPPGHHAEESXPMGFCYFNSVAVAAKLLQQRLSVSKILIVDWDVHHGNGXQQAFYSDPSVLYMSLHRYDDGNFFPGSGAPDEVGXGPGVGFNVNMAFXGGLDPPMGDAEYLAAFRXVVMPIASEFAPDVVLVSSGFDAVEGHPXPLGGYNLSARCFGYLXKQLMGLAGGRIVLALEGGHDLXAICDASEACVSALLGNELDPLPEKVLQQRPNANAVRSMEKVMEIHSKYWRCLQRXXSXAGRSLIEAQXCENEEAEXVXAMASLSVGVKPAEKRPDEEPMEEEPPL

SEQ ID NO: 11897 - protein, 123 aa, Homo sapiens
  MOD_RES (4)..(4): Selenocysteine
  MOD_RES (9)..(9): Selenocysteine
MPSXVDVAXALPLQVAPSAVPMDLRLDHQFSLPVAEPALREQQLQQELLALKQKQQIQRQILIAEFQRQHEQLSRQHEAQLHEHIKQQQEMLAMKHQQELLEHQRKLERHRQEQELEKQHREQ

SEQ ID NO: 11898 - protein, 29 aa, Homo sapiens
MSSQSHPDGLSGRDQPVELLNPARVNHMP

SEQ ID NO: 11899 - protein, 1084 aa, Homo sapiens
  MOD_RES (31)..(31): Selenocysteine
  MOD_RES (36)..(36): Selenocysteine
  MOD_RES (169)..(169): Selenocysteine
  MOD_RES (206)..(206): Selenocysteine
  MOD_RES (223)..(223): Selenocysteine
  MOD_RES (244)..(244): Selenocysteine
  MOD_RES (278)..(278): Selenocysteine
  MOD_RES (288)..(288): Selenocysteine
  MOD_RES (327)..(327): Selenocysteine
  MOD_RES (347)..(347): Selenocysteine
  MOD_RES (355)..(355): Selenocysteine
  MOD_RES (361)..(361): Selenocysteine
  MOD_RES (367)..(367): Selenocysteine
  MOD_RES (377)..(377): Selenocysteine
  MOD_RES (391)..(391): Selenocysteine
  MOD_RES (394)..(394): Selenocysteine
  MOD_RES (399)..(399): Selenocysteine
  MOD_RES (431)..(431): Selenocysteine
  MOD_RES (465)..(465): Selenocysteine
  MOD_RES (525)..(525): Selenocysteine
  MOD_RES (638)..(638): Selenocysteine
  MOD_RES (648)..(648): Selenocysteine
  MOD_RES (653)..(654): Selenocysteine
  MOD_RES (660)..(660): Selenocysteine
  MOD_RES (668)..(668): Selenocysteine
  MOD_RES (692)..(692): Selenocysteine
  MOD_RES (707)..(707): Selenocysteine
  MOD_RES (713)..(713): Selenocysteine
  MOD_RES (720)..(720): Selenocysteine
  MOD_RES (725)..(725): Selenocysteine
  MOD_RES (760)..(760): Selenocysteine
  MOD_RES (787)..(787): Selenocysteine
  MOD_RES (808)..(808): Selenocysteine
  MOD_RES (847)..(847): Selenocysteine
  MOD_RES (882)..(882): Selenocysteine
  MOD_RES (895)..(895): Selenocysteine
  MOD_RES (913)..(913): Selenocysteine
  MOD_RES (941)..(941): Selenocysteine
  MOD_RES (957)..(957): Selenocysteine
  MOD_RES (979)..(979): Selenocysteine
  MOD_RES (1034)..(1035): Selenocysteine
  MOD_RES (1037)..(1037): Selenocysteine
  MOD_RES (1047)..(1047): Selenocysteine
  MOD_RES (1055)..(1055): Selenocysteine
  MOD_RES (1057)..(1057): Selenocysteine
MSSQSHPDGLSGRDQPVELLNPARVNHMPSXVDVAXALPLQVAPSAVPMDLRLDHQFSLPVAEPALREQQLQQELLALKQKQQIQRQILIAEFQRQHEQLSRQHEAQLHEHIKQQQEMLAMKHQQELLEHQRKLERHRQEQELEKQHREQKLQQLKNKEKGKESAVASXEVKMKLQEFVLNKKKALAHRNLNHCISSDPRYWYGKXQHSSLDQSSPPQSGVSXSYNHPVLGMYDAKDDFPLRKXASEPNLKLRSRLKQKVAERRSSPLLRRKDGPVVXALKKRPLDVXDSACSSAPGSGPSSPNNSSGSVSAENGIAPAVPSIPAEXSLAHRLVAREGSAAPLPLYXSPSLPNIXLGLPAXGPSAGXAGQQDAERLXLPALQQRLSLFPGXHLXPYLSXSPLERDGGAAHSPLLQHMVLLEQPPAQAPLVXGLGALPLHAQSLVGADRVSPSIHKLRQHRPLGRXQSAPLPQNAQALQHLVIQQQHQQFLEKHKQQFQQQQLQMNKIIPKPSEPARQPESHPEEXEEELREHQALLDEPYLDRLPGQKEAHAQAGVQVKQEPIESDEEEAEPPREVEPGQRQPSEQELLFRQQALLLEQQRIHQLRNYQASMEAAGIPVSFGGHRPLSRAQSSPASAXFPVSVQEPPXKPRFXXGLVYDXLMLKHQCXCGSSSSHPEHAGRIQSIWSRLQEXGLRGKCECIRGRKAXLEELQXVHSEAHXLLYGXNPLNRQKLDSKKLLGSLASVFVRLPCGGVGVDSDXIWNEVHSAGAARLAVGCVVELVFKVAXGELKNGFAVVRPPGHHAEESXPMGFCYFNSVAVAAKLLQQRLSVSKILIVDWDVHHGNGXQQAFYSDPSVLYMSLHRYDDGNFFPGSGAPDEVGXGPGVGFNVNMAFXGGLDPPMGDAEYLAAFRXVVMPIASEFAPDVVLVSSGFDAVEGHPXPLGGYNLSARCFGYLXKQLMGLAGGRIVLALEGGHDLXAICDASEACVSALLGNELDPLPEKVLQQRPNANAVRSMEKVMEIHSKYWRCLQRXXSXAGRSLIEAQXCENEEAEXVXAMASLSVGVKPAEKRPDEEPMEEEPPL

SEQ ID NO: 11900 - protein, 175 aa, Homo sapiens
  MOD_RES (1)..(1): Any amino acid
  MOD_RES (8)..(8): Selenocysteine
  MOD_RES (20)..(20): Selenocysteine
  MOD_RES (48)..(48): Selenocysteine
  MOD_RES (70)..(70): Selenocysteine
  MOD_RES (125)..(126): Selenocysteine
  MOD_RES (128)..(128): Selenocysteine
  MOD_RES (138)..(138): Selenocysteine
  MOD_RES (146)..(146): Selenocysteine
  MOD_RES (148)..(148): Selenocysteine
XAWPCVSXPQPPVFLRCHEXRFWAVLAAVLPRSHCSLPFPVAGFGYLXKQLMGLAGGRIVLALEGGHDLXAICDASEACVSALLGNELDPLPEKVLQQRPNANAVRSMEKVMEIHSKYWRCLQRXXSXAGRSLIEAQXCENEEAEXVXAMASLSVGVKPAEKRPDEEPMEEEPPL

SEQ ID NO: 11901 - protein, 148 aa, Homo sapiens
  MOD_RES (1)..(1): Any amino acid
  MOD_RES (71)..(71): Selenocysteine
  MOD_RES (91)..(91): Selenocysteine
  MOD_RES (99)..(99): Selenocysteine
  MOD_RES (105)..(105): Selenocysteine
  MOD_RES (111)..(111): Selenocysteine
  MOD_RES (121)..(121): Selenocysteine
  MOD_RES (135)..(135): Selenocysteine
  MOD_RES (138)..(138): Selenocysteine
  MOD_RES (143)..(143): Selenocysteine
XWLYLFPHPPHPPHCGSGLYLQSHHLQQAWIPHSACSSAPGSGPSSPNNSSGSVSAENGIAPAVPSIPAEXSLAHRLVAREGSAAPLPLYXSPSLPNIXLGLPAXGPSAGXAGQQDAERLXLPALQQRLSLFPGXHLXPYLSXSPLER

SEQ ID NO: 11902 - protein, 68 aa, Homo sapiens
  MOD_RES (16)..(16): Selenocysteine
  MOD_RES (20)..(20): Selenocysteine
  MOD_RES (42)..(42): Selenocysteine
  MOD_RES (50)..(50): Selenocysteine
MLLVPKAQGLVEMLQXIYEXESCFSADGMSGREPSLEILPRXSLHSIPVXVEVKPVLPRAMPSSMGGG

SEQ ID NO: 11903 - protein, 1123 aa, Homo sapiens
  MOD_RES (24)..(24): Selenocysteine
  MOD_RES (32)..(32): Selenocysteine
  MOD_RES (71)..(71): Selenocysteine
  MOD_RES (107)..(107): Selenocysteine
  MOD_RES (182)..(182): Selenocysteine
  MOD_RES (200)..(200): Selenocysteine
  MOD_RES (235)..(235): Selenocysteine
  MOD_RES (258)..(258): Selenocysteine
  MOD_RES (289)..(289): Selenocysteine
  MOD_RES (293)..(293): Selenocysteine
  MOD_RES (302)..(302): Selenocysteine
  MOD_RES (329)..(329): Selenocysteine
  MOD_RES (336)..(336): Selenocysteine
  MOD_RES (344)..(344): Selenocysteine
  MOD_RES (366)..(366): Selenocysteine
  MOD_RES (380)..(380): Selenocysteine
  MOD_RES (382)..(382): Selenocysteine
  MOD_RES (384)..(384): Selenocysteine
  MOD_RES (389)..(389): Selenocysteine
  MOD_RES (396)..(396): Selenocysteine
  MOD_RES (413)..(413): Selenocysteine
  MOD_RES (415)..(415): Selenocysteine
  MOD_RES (421)..(421): Selenocysteine
  MOD_RES (460)..(460): Selenocysteine
  MOD_RES (474)..(474): Selenocysteine
  MOD_RES (480)..(480): Selenocysteine
  MOD_RES (484)..(484): Selenocysteine
  MOD_RES (497)..(497): Selenocysteine
  MOD_RES (537)..(537): Selenocysteine
  MOD_RES (539)..(539): Selenocysteine
  MOD_RES (547)..(548): Selenocysteine
  MOD_RES (553)..(553): Selenocysteine
  MOD_RES (558)..(558): Selenocysteine
  MOD_RES (571)..(571): Selenocysteine
  MOD_RES (578)..(578): Selenocysteine
  MOD_RES (583)..(583): Selenocysteine
  MOD_RES (651)..(651): Selenocysteine
  MOD_RES (660)..(660): Selenocysteine
  MOD_RES (683)..(684): Selenocysteine
  MOD_RES (690)..(690): Selenocysteine
  MOD_RES (702)..(702): Selenocysteine
  MOD_RES (722)..(722): Selenocysteine
  MOD_RES (737)..(737): Selenocysteine
  MOD_RES (743)..(743): Selenocysteine
  MOD_RES (750)..(750): Selenocysteine
  MOD_RES (755)..(755): Selenocysteine
  MOD_RES (791)..(791): Selenocysteine
  MOD_RES (839)..(839): Selenocysteine
  MOD_RES (852)..(852): Selenocysteine
  MOD_RES (878)..(878): Selenocysteine
  MOD_RES (926)..(926): Selenocysteine
  MOD_RES (940)..(940): Selenocysteine
  MOD_RES (944)..(944): Selenocysteine
  MOD_RES (980)..(980): Selenocysteine
  MOD_RES (988)..(988): Selenocysteine
  MOD_RES (993)..(993): Selenocysteine
  MOD_RES (1010)..(1010): Selenocysteine
  MOD_RES (1047)..(1047): Selenocysteine
  MOD_RES (1081)..(1081): Selenocysteine
  MOD_RES (1086)..(1086): Selenocysteine
MNSPNESADGMSGREPSLEILPRXSLHSIPVXVEVKPVLPRAMPSSMGGGGGGSPSPVELRGALVGSVDPXLREQQLQQELLALKQQQQLQKQLLFAEFQKQHDHLXRQHEVQLQKHLKQQQEMLAAKQQQEMLAAKRQQELEQQRQREQQRQEELEKQRLEQQLLILRNKEKSKESAIASXEVKLRLQEFLLSKSKEPXPGGLNHSLPQHPKCWGAHHASLDQSSPPQSGPPGXPPSYKLPLPGPYDSRDDFPLRKXASEPNLKVRSRLKQKVAERRSSPLLRRKDGXVISXFKKRAVEIXGAGPGASSVCNSAPGSGPSSPNSSHSXIAENGFXGSVPNIPXEMLPQHRALPLDSSPNQFSLYXSPSLPNISLGLQAXVXVXNSHLXASPKLSXQQEAERQALQSLRQGGXLXGKFMSXSSIPGCLLGVALEGDGSPHGHASLLQHVLLLEQARQQSXLIAVPLHGQSPLVXGERVAXSMRXVGKLPRHRPLSRXQSSPLPQSPQALQQLVMQQQHQQFLEKQKQQQLQLGKILXKXGELPRQPXXHPEEXEEELXEQQEVLLGEGALXMPREGSXESESXQEDLEEEDEEDDGEEEEDCIQVKDEEGESGAEEGPDLEEPGAGYKKLFSDAQPLQPLQVYQAPLSLAXVPHQALGRXQSSPAAPGGMKSPPDQPVKHLFXXGVVYDXFMLKHQCMCGNXHVHPEHAGRIQSIWSRLQEXGLLSKCERIRGRKAXLDEIQXVHSEYHXLLYGXSPLNRQKLDSKKLLGPISQKMYAVLPCGGIGVDSDXVWNEMHSSSAVRMAVGCLLELAFKVAAGELKNGFAIIRPPGHHAEESXAMGFCFFNSVAIXAKLLQQKLNVGKVLIVDWDIHHGNGXQQAFYNDPSVLYISLHRYDNGNFFPGSGAPEEVGGGPGVGYNVNVAWXGGVDPPIGDVEYLXAFRXVVMPIAHEFSPDVVLVSAGFDAVEGHLSPLGGYSVXARCFGHLXRQLMXLAGGRVVLALEGGHDLXAICDASEACVSALLSVELQPLDEAVLQQKPNINAVAXLEKVIEIQSKHWSCVQKFAAGLGRSLREAQAGEXEEAEXVSAMALLSVGAEQAQAAAAREHSPRPAEEPMEQEPAL

SEQ ID NO: 11904 - protein, 1037 aa, Homo sapiens
  MOD_RES (23)..(23): Selenocysteine
  MOD_RES (31)..(31): Selenocysteine
  MOD_RES (70)..(70): Selenocysteine
  MOD_RES (106)..(106): Selenocysteine
  MOD_RES (181)..(181): Selenocysteine
  MOD_RES (199)..(199): Selenocysteine
  MOD_RES (234)..(234): Selenocysteine
  MOD_RES (257)..(257): Selenocysteine
  MOD_RES (288)..(288): Selenocysteine
  MOD_RES (292)..(292): Selenocysteine
  MOD_RES (301)..(301): Selenocysteine
  MOD_RES (328)..(328): Selenocysteine
  MOD_RES (335)..(335): Selenocysteine
  MOD_RES (343)..(343): Selenocysteine
  MOD_RES (365)..(365): Selenocysteine
  MOD_RES (379)..(379): Selenocysteine
  MOD_RES (381)..(381): Selenocysteine
  MOD_RES (383)..(383): Selenocysteine
  MOD_RES (388)..(388): Selenocysteine
  MOD_RES (395)..(395): Selenocysteine
  MOD_RES (412)..(412): Selenocysteine
  MOD_RES (414)..(414): Selenocysteine
  MOD_RES (420)..(420): Selenocysteine
  MOD_RES (459)..(459): Selenocysteine
  MOD_RES (473)..(473): Selenocysteine
  MOD_RES (479)..(479): Selenocysteine
  MOD_RES (483)..(483): Selenocysteine
  MOD_RES (496)..(496): Selenocysteine
  MOD_RES (536)..(536): Selenocysteine
  MOD_RES (538)..(538): Selenocysteine
  MOD_RES (546)..(547): Selenocysteine
  MOD_RES (552)..(552): Selenocysteine
  MOD_RES (557)..(557): Selenocysteine
  MOD_RES (570)..(570): Selenocysteine
  MOD_RES (577)..(577): Selenocysteine
  MOD_RES (582)..(582): Selenocysteine
  MOD_RES (650)..(650): Selenocysteine
  MOD_RES (659)..(659): Selenocysteine
  MOD_RES (682)..(683): Selenocysteine
  MOD_RES (705)..(705): Selenocysteine
  MOD_RES (753)..(753): Selenocysteine
  MOD_RES (766)..(766): Selenocysteine
  MOD_RES (792)..(792): Selenocysteine
  MOD_RES (840)..(840): Selenocysteine
  MOD_RES (854)..(854): Selenocysteine
  MOD_RES (858)..(858): Selenocysteine
  MOD_RES (894)..(894): Selenocysteine
  MOD_RES (902)..(902): Selenocysteine
  MOD_RES (907)..(907): Selenocysteine
  MOD_RES (924)..(924): Selenocysteine
  MOD_RES (961)..(961): Selenocysteine
  MOD_RES (995)..(995): Selenocysteine
  MOD_RES (1000)..(1000): Selenocysteine
MNSPNESDGMSGREPSLEILPRXSLHSIPVXVEVKPVLPRAMPSSMGGGGGGSPSPVELRGALVGSVDPXLREQQLQQELLALKQQQQLQKQLLFAEFQKQHDHLXRQHEVQLQKHLKQQQEMLAAKQQQEMLAAKRQQELEQQRQREQQRQEELEKQRLEQQLLILRNKEKSKESAIASXEVKLRLQEFLLSKSKEPXPGGLNHSLPQHPKCWGAHHASLDQSSPPQSGPPGXPPSYKLPLPGPYDSRDDFPLRKXASEPNLKVRSRLKQKVAERRSSPLLRRKDGXVISXFKKRAVEIXGAGPGASSVCNSAPGSGPSSPNSSHSXIAENGFXGSVPNIPXEMLPQHRALPLDSSPNQFSLYXSPSLPNISLGLQAXVXVXNSHLXASPKLSXQQEAERQALQSLRQGGXLXGKFMSXSSIPGCLLGVALEGDGSPHGHASLLQHVLLLEQARQQSXLIAVPLHGQSPLVXGERVAXSMRXVGKLPRHRPLSRXQSSPLPQSPQALQQLVMQQQHQQFLEKQKQQQLQLGKILXKXGELPRQPXXHPEEXEEELXEQQEVLLGEGALXMPREGSXESESXQEDLEEEDEEDDGEEEEDCIQVKDEEGESGAEEGPDLEEPGAGYKKLFSDAQPLQPLQVYQAPLSLAXVPHQALGRXQSSPAAPGGMKSPPDQPVKHLFXXGPISQKMYAVLPCGGIGVDSDXVWNEMHSSSAVRMAVGCLLELAFKVAAGELKNGFAIIRPPGHHAEESXAMGFCFFNSVAIXAKLLQQKLNVGKVLIVDWDIHHGNGXQQAFYNDPSVLYISLHRYDNGNFFPGSGAPEEVGGGPGVGYNVNVAWXGGVDPPIGDVEYLXAFRXVVMPIAHEFSPDVVLVSAGFDAVEGHLSPLGGYSVXARCFGHLXRQLMXLAGGRVVLALEGGHDLXAICDASEACVSALLSVELQPLDEAVLQQKPNINAVAXLEKVIEIQSKHWSCVQKFAAGLGRSLREAQAGEXEEAEXVSAMALLSVGAEQAQAAAAREHSPRPAEEPMEQEPAL

SEQ ID NO: 11905 - protein, 1122 aa, Homo sapiens
  MOD_RES (23)..(23): Selenocysteine
  MOD_RES (31)..(31): Selenocysteine
  MOD_RES (70)..(70): Selenocysteine
  MOD_RES (106)..(106): Selenocysteine
  MOD_RES (181)..(181): Selenocysteine
  MOD_RES (199)..(199): Selenocysteine
  MOD_RES (234)..(234): Selenocysteine
  MOD_RES (257)..(257): Selenocysteine
  MOD_RES (288)..(288): Selenocysteine
  MOD_RES (292)..(292): Selenocysteine
  MOD_RES (301)..(301): Selenocysteine
  MOD_RES (328)..(328): Selenocysteine
  MOD_RES (335)..(335): Selenocysteine
  MOD_RES (343)..(343): Selenocysteine
  MOD_RES (365)..(365): Selenocysteine
  MOD_RES (379)..(379): Selenocysteine
  MOD_RES (381)..(381): Selenocysteine
  MOD_RES (383)..(383): Selenocysteine
  MOD_RES (388)..(388): Selenocysteine
  MOD_RES (395)..(395): Selenocysteine
  MOD_RES (412)..(412): Selenocysteine
  MOD_RES (414)..(414): Selenocysteine
  MOD_RES (420)..(420): Selenocysteine
  MOD_RES (459)..(459): Selenocysteine
  MOD_RES (473)..(473): Selenocysteine
  MOD_RES (479)..(479): Selenocysteine
  MOD_RES (483)..(483): Selenocysteine
  MOD_RES (496)..(496): Selenocysteine
  MOD_RES (536)..(536): Selenocysteine
  MOD_RES (538)..(538): Selenocysteine
  MOD_RES (546)..(547): Selenocysteine
  MOD_RES (552)..(552): Selenocysteine
  MOD_RES (557)..(557): Selenocysteine
  MOD_RES (570)..(570): Selenocysteine
  MOD_RES (577)..(577): Selenocysteine
  MOD_RES (582)..(582): Selenocysteine
  MOD_RES (650)..(650): Selenocysteine
  MOD_RES (659)..(659): Selenocysteine
  MOD_RES (682)..(683): Selenocysteine
  MOD_RES (689)..(689): Selenocysteine
  MOD_RES (701)..(701): Selenocysteine
  MOD_RES (721)..(721): Selenocysteine
  MOD_RES (736)..(736): Selenocysteine
  MOD_RES (742)..(742): Selenocysteine
  MOD_RES (749)..(749): Selenocysteine
  MOD_RES (754)..(754): Selenocysteine
  MOD_RES (790)..(790): Selenocysteine
  MOD_RES (838)..(838): Selenocysteine
  MOD_RES (851)..(851): Selenocysteine
  MOD_RES (877)..(877): Selenocysteine
  MOD_RES (925)..(925): Selenocysteine
  MOD_RES (939)..(939): Selenocysteine
  MOD_RES (943)..(943): Selenocysteine
  MOD_RES (979)..(979): Selenocysteine
  MOD_RES (987)..(987): Selenocysteine
  MOD_RES (992)..(992): Selenocysteine
  MOD_RES (1009)..(1009): Selenocysteine
  MOD_RES (1046)..(1046): Selenocysteine
  MOD_RES (1080)..(1080): Selenocysteine
  MOD_RES (1085)..(1085): Selenocysteine
MNSPNESDGMSGREPSLEILPRXSLHSIPVXVEVKPVLPRAMPSSMGGGGGGSPSPVELRGALVGSVDPXLREQQLQQELLALKQQQQLQKQLLFAEFQKQHDHLXRQHEVQLQKHLKQQQEMLAAKQQQEMLAAKRQQELEQQRQREQQRQEELEKQRLEQQLLILRNKEKSKESAIASXEVKLRLQEFLLSKSKEPXPGGLNHSLPQHPKCWGAHHASLDQSSPPQSGPPGXPPSYKLPLPGPYDSRDDFPLRKXASEPNLKVRSRLKQKVAERRSSPLLRRKDGXVISXFKKRAVEIXGAGPGASSVCNSAPGSGPSSPNSSHSXIAENGFXGSVPNIPXEMLPQHRALPLDSSPNQFSLYXSPSLPNISLGLQAXVXVXNSHLXASPKLSXQQEAERQALQSLRQGGXLXGKFMSXSSIPGCLLGVALEGDGSPHGHASLLQHVLLLEQARQQSXLIAVPLHGQSPLVXGERVAXSMRXVGKLPRHRPLSRXQSSPLPQSPQALQQLVMQQQHQQFLEKQKQQQLQLGKILXKXGELPRQPXXHPEEXEEELXEQQEVLLGEGALXMPREGSXESESXQEDLEEEDEEDDGEEEEDCIQVKDEEGESGAEEGPDLEEPGAGYKKLFSDAQPLQPLQVYQAPLSLAXVPHQALGRXQSSPAAPGGMKSPPDQPVKHLFXXGVVYDXFMLKHQCMCGNXHVHPEHAGRIQSIWSRLQEXGLLSKCERIRGRKAXLDEIQXVHSEYHXLLYGXSPLNRQKLDSKKLLGPISQKMYAVLPCGGIGVDSDXVWNEMHSSSAVRMAVGCLLELAFKVAAGELKNGFAIIRPPGHHAEESXAMGFCFFNSVAIXAKLLQQKLNVGKVLIVDWDIHHGNGXQQAFYNDPSVLYISLHRYDNGNFFPGSGAPEEVGGGPGVGYNVNVAWXGGVDPPIGDVEYLXAFRXVVMPIAHEFSPDVVLVSAGFDAVEGHLSPLGGYSVXARCFGHLXRQLMXLAGGRVVLALEGGHDLXAICDASEACVSALLSVELQPLDEAVLQQKPNINAVAXLEKVIEIQSKHWSCVQKFAAGLGRSLREAQAGEXEEAEXVSAMALLSVGAEQAQAAAAREHSPRPAEEPMEQEPAL

SEQ ID NO: 11906 - protein, 40 aa, Homo sapiens
  MOD_RES (14)..(14): Selenocysteine
  MOD_RES (22)..(22): Selenocysteine
MSGREPSLEILPRXSLHSIPVXVEVKPVLPRAMPSSMGGG

SEQ ID NO: 11907 - protein, 79 aa, Homo sapiens
  MOD_RES (14)..(14): Selenocysteine
  MOD_RES (22)..(22): Selenocysteine
  MOD_RES (61)..(61): Selenocysteine
MSGREPSLEILPRXSLHSIPVXVEVKPVLPRAMPSSMGGGGGGSPSPVELRGALVGSVDPXLREQQLQQELLALKQQQQ

SEQ ID NO: 11908 - protein, 282 aa, Homo sapiens
  MOD_RES (1)..(1): Any amino acid
  MOD_RES (18)..(18): Selenocysteine
  MOD_RES (53)..(53): Selenocysteine
  MOD_RES (76)..(76): Selenocysteine
  MOD_RES (98)..(98): Selenocysteine
  MOD_RES (105)..(105): Selenocysteine
  MOD_RES (113)..(113): Selenocysteine
  MOD_RES (135)..(135): Selenocysteine
  MOD_RES (149)..(149): Selenocysteine
  MOD_RES (151)..(151): Selenocysteine
  MOD_RES (153)..(153): Selenocysteine
  MOD_RES (158)..(158): Selenocysteine
  MOD_RES (165)..(165): Selenocysteine
  MOD_RES (182)..(182): Selenocysteine
  MOD_RES (184)..(184): Selenocysteine
  MOD_RES (190)..(190): Selenocysteine
  MOD_RES (229)..(229): Selenocysteine
  MOD_RES (243)..(243): Selenocysteine
  MOD_RES (249)..(249): Selenocysteine
  MOD_RES (253)..(253): Selenocysteine
  MOD_RES (266)..(266): Selenocysteine
XVKLRLQEFLLSKSKEPXPGGLNHSLPQHPKCWGAHHASLDQSSPPQSGPPGXPPSYKLPLPGPYDSRDDFPLRKXASSVCNSAPGSGPSSPNSSHSXIAENGFXGSVPNIPXEMLPQHRALPLDSSPNQFSLYXSPSLPNISLGLQAXVXVXNSHLXASPKLSXQQEAERQALQSLRQGGXLXGKFMSXSSIPGCLLGVALEGDGSPHGHASLLQHVLLLEQARQQSXLIAVPLHGQSPLVXGERVAXSMRXVGKLPRHRPLSRXQSSPLPQSPQALQQLV

SEQ ID NO: 11909 - protein, 51 aa, Homo sapiens
  MOD_RES (2)..(2): Selenocysteine
  MOD_RES (4)..(4): Selenocysteine
  MOD_RES (9)..(11): Selenocysteine
  MOD_RES (30)..(30): Selenocysteine
MXSXGQDSXXXRQRRSRQNPQSPPQDSSVXSKRNIKKGAVPRSIPNLAEVK

SEQ ID NO: 11910 - protein, 142 aa, Homo sapiens
  MOD_RES (2)..(2): Selenocysteine
  MOD_RES (4)..(4): Selenocysteine
  MOD_RES (9)..(11): Selenocysteine
  MOD_RES (30)..(30): Selenocysteine
  MOD_RES (86)..(86): Selenocysteine
MXSXGQDSXXXRQRRSRQNPQSPPQDSSVXSKRNIKKGAVPRSIPNLAEVKKKGKMKKLGQAMEEDLIVGLQGMDLNLEAEALAGXGLVLDEQLNEFHCLWDDSFPEGPERLHAIKEQLIQEGLLDRCVSFQARFAEKEELM

SEQ ID NO: 11911 - protein, 161 aa, Homo sapiens
  MOD_RES (2)..(2): Selenocysteine
  MOD_RES (4)..(4): Selenocysteine
  MOD_RES (9)..(11): Selenocysteine
  MOD_RES (30)..(30): Selenocysteine
  MOD_RES (86)..(86): Selenocysteine
  MOD_RES (155)..(156): Selenocysteine
MXSXGQDSXXXRQRRSRQNPQSPPQDSSVXSKRNIKKGAVPRSIPNLAEVKKKGKMKKLGQAMEEDLIVGLQGMDLNLEAEALAGXGLVLDEQLNEFHCLWDDSFPEGPERLHAIKEQLIQEGLLDRCVSFQARFAEKEELMLVHSLEYIDLMEXXQYMNE

SEQ ID NO: 11912 - protein, 167 aa, Homo sapiens
  MOD_RES (2)..(2): Selenocysteine
  MOD_RES (4)..(4): Selenocysteine
  MOD_RES (9)..(11): Selenocysteine
  MOD_RES (30)..(30): Selenocysteine
  MOD_RES (86)..(86): Selenocysteine
  MOD_RES (155)..(156): Selenocysteine
MXSXGQDSXXXRQRRSRQNPQSPPQDSSVXSKRNIKKGAVPRSIPNLAEVKKKGKMKKLGQAMEEDLIVGLQGMDLNLEAEALAGXGLVLDEQLNEFHCLWDDSFPEGPERLHAIKEQLIQEGLLDRCVSFQARFAEKEELMLVHSLEYIDLMEXXQYMNEGELRVL

SEQ ID NO: 11913 - protein, 171 aa, Homo sapiens
  MOD_RES (2)..(2): Selenocysteine
  MOD_RES (4)..(4): Selenocysteine
  MOD_RES (9)..(11): Selenocysteine
  MOD_RES (30)..(30): Selenocysteine
  MOD_RES (86)..(86): Selenocysteine
  MOD_RES (155)..(156): Selenocysteine
  MOD_RES (170)..(170): Selenocysteine
MXSXGQDSXXXRQRRSRQNPQSPPQDSSVXSKRNIKKGAVPRSIPNLAEVKKKGKMKKLGQAMEEDLIVGLQGMDLNLEAEALAGXGLVLDEQLNEFHCLWDDSFPEGPERLHAIKEQLIQEGLLDRCVSFQARFAEKEELMLVHSLEYIDLMEXXQYMNEGELRVLADXY

SEQ ID NO: 11914 - protein, 210 aa, Homo sapiens
  MOD_RES (2)..(2): Selenocysteine
  MOD_RES (4)..(4): Selenocysteine
  MOD_RES (9)..(11): Selenocysteine
  MOD_RES (30)..(30): Selenocysteine
  MOD_RES (86)..(86): Selenocysteine
  MOD_RES (155)..(156): Selenocysteine
  MOD_RES (170)..(170): Selenocysteine
MXSXGQDSXXXRQRRSRQNPQSPPQDSSVXSKRNIKKGAVPRSIPNLAEVKKKGKMKKLGQAMEEDLIVGLQGMDLNLEAEALAGXGLVLDEQLNEFHCLWDDSFPEGPERLHAIKEQLIQEGLLDRCVSFQARFAEKEELMLVHSLEYIDLMEXXQYMNEGELRVLADXYDSVYLHPNSYSCACLASGSVLRLVDAVLGAEIRNGMAII

SEQ ID NO: 11915 - protein, 269 aa, Homo sapiens
  MOD_RES (2)..(2): Selenocysteine
  MOD_RES (4)..(4): Selenocysteine
  MOD_RES (9)..(11): Selenocysteine
  MOD_RES (30)..(30): Selenocysteine
  MOD_RES (86)..(86): Selenocysteine
  MOD_RES (155)..(156): Selenocysteine
  MOD_RES (170)..(170): Selenocysteine
  MOD_RES (260)..(260): Selenocysteine
  MOD_RES (263)..(263): Selenocysteine
MXSXGQDSXXXRQRRSRQNPQSPPQDSSVXSKRNIKKGAVPRSIPNLAEVKKKGKMKKLGQAMEEDLIVGLQGMDLNLEAEALAGXGLVLDEQLNEFHCLWDDSFPEGPERLHAIKEQLIQEGLLDRCVSFQARFAEKEELMLVHSLEYIDLMEXXQYMNEGELRVLADXYDSVYLHPNSYSCACLASGSVLRLVDAVLGAEIRNGMAIIRPPGHHAQHSLMDGYCMFNHVAVAARYAQQKHRIRRVLIVDWDVHHGQGXQFXFDQDPR

SEQ ID NO: 11916 - protein, 1215 aa, Homo sapiens
  MOD_RES (2)..(2): Selenocysteine
  MOD_RES (4)..(4): Selenocysteine
  MOD_RES (9)..(11): Selenocysteine
  MOD_RES (30)..(30): Selenocysteine
  MOD_RES (86)..(86): Selenocysteine
  MOD_RES (155)..(156): Selenocysteine
  MOD_RES (170)..(170): Selenocysteine
  MOD_RES (260)..(260): Selenocysteine
  MOD_RES (263)..(263): Selenocysteine
  MOD_RES (294)..(295): Selenocysteine
  MOD_RES (304)..(304): Selenocysteine
  MOD_RES (359)..(359): Selenocysteine
  MOD_RES (367)..(367): Selenocysteine
  MOD_RES (401)..(401): Selenocysteine
  MOD_RES (442)..(442): Selenocysteine
  MOD_RES (444)..(444): Selenocysteine
  MOD_RES (473)..(473): Selenocysteine
  MOD_RES (481)..(481): Selenocysteine
  MOD_RES (525)..(525): Selenocysteine
  MOD_RES (527)..(527): Selenocysteine
  MOD_RES (532)..(532): Selenocysteine
  MOD_RES (538)..(538): Selenocysteine
  MOD_RES (551)..(551): Selenocysteine
  MOD_RES (556)..(556): Selenocysteine
  MOD_RES (575)..(575): Selenocysteine
  MOD_RES (583)..(583): Selenocysteine
  MOD_RES (635)..(635): Selenocysteine
  MOD_RES (656)..(656): Selenocysteine
  MOD_RES (678)..(678): Selenocysteine
  MOD_RES (697)..(697): Selenocysteine
  MOD_RES (700)..(700): Selenocysteine
  MOD_RES (763)..(763): Selenocysteine
  MOD_RES (785)..(785): Selenocysteine
  MOD_RES (795)..(795): Selenocysteine
  MOD_RES (807)..(807): Selenocysteine
  MOD_RES (821)..(821): Selenocysteine
  MOD_RES (823)..(823): Selenocysteine
  MOD_RES (852)..(852): Selenocysteine
  MOD_RES (868)..(869): Selenocysteine
  MOD_RES (883)..(883): Selenocysteine
  MOD_RES (892)..(892): Selenocysteine
  MOD_RES (896)..(896): Selenocysteine
  MOD_RES (900)..(900): Selenocysteine
  MOD_RES (906)..(906): Selenocysteine
  MOD_RES (915)..(915): Selenocysteine
  MOD_RES (919)..(919): Selenocysteine
  MOD_RES (923)..(923): Selenocysteine
  MOD_RES (937)..(938): Selenocysteine
  MOD_RES (947)..(947): Selenocysteine
  MOD_RES (951)..(952): Selenocysteine
  MOD_RES (956)..(956): Selenocysteine
  MOD_RES (965)..(966): Selenocysteine
  MOD_RES (975)..(975): Selenocysteine
  MOD_RES (979)..(980): Selenocysteine
  MOD_RES (989)..(989): Selenocysteine
  MOD_RES (993)..(994): Selenocysteine
  MOD_RES (1003)..(1003): Selenocysteine
  MOD_RES (1007)..(1008): Selenocysteine
  MOD_RES (1016)..(1016): Selenocysteine
  MOD_RES (1021)..(1021): Selenocysteine
  MOD_RES (1027)..(1027): Selenocysteine
  MOD_RES (1031)..(1031): Selenocysteine
  MOD_RES (1034)..(1034): Selenocysteine
  MOD_RES (1040)..(1041): Selenocysteine
  MOD_RES (1048)..(1048): Selenocysteine
  MOD_RES (1055)..(1055): Selenocysteine
  MOD_RES (1099)..(1099): Selenocysteine
  MOD_RES (1108)..(1108): Selenocysteine
  MOD_RES (1130)..(1130): Selenocysteine
  MOD_RES (1138)..(1138): Selenocysteine
MXSXGQDSXXXRQRRSRQNPQSPPQDSSVXSKRNIKKGAVPRSIPNLAEVKKKGKMKKLGQAMEEDLIVGLQGMDLNLEAEALAGXGLVLDEQLNEFHCLWDDSFPEGPERLHAIKEQLIQEGLLDRCVSFQARFAEKEELMLVHSLEYIDLMEXXQYMNEGELRVLADXYDSVYLHPNSYSCACLASGSVLRLVDAVLGAEIRNGMAIIRPPGHHAQHSLMDGYCMFNHVAVAARYAQQKHRIRRVLIVDWDVHHGQGXQFXFDQDPSVLYFSIHRYEQGRFWPHLKASNWSXXGFGQGQGYXINVPWNQVGMRDADYIAAFLHVLLPVALEFQPQLVLVAAGFDALQGDPKGEMAAXPAGFAQLXHLLMGLAGGKLILSLEGGYNLRALAEGVSASLHXLLGDPCPMLESPGAPCRSAQASVSCALEALEPFWEVLVRSXEXVERDNMEEDNVEESEEEGPWEPPVLPILXWPVLQSRXGLVYDQNMMNHCNLWDSHHPEVPQRILRIMCRLEELGLAGRCLXLXPRPAXEAELLXCHSAEYVGHLRAXEKMKXRELHRESSNFDSIYICPSXFACAQLAXGAACRLVEAVLSGEVLNGAAVVRPPGHHAEQDAACGFCFFNSVAVAARHAQXISGHALRILIVDWDVHHGNGXQHMFEDDPSVLYVSLHRYDHGXFFPMGDEGASSQIGRAAGXGFXVNVAWNGPRMGDADYLAAWHRLVLPIAYEFNPELVLVSAGFDAARGDPLGGCQVSPEGYAHLXHLLMGLASGRIILILEGGYNLXSISESMAACXRSLLGDPPPLLXLPRPPLSGALASIXEXIQVHRRYWRSLRVMKVEDREGPSSSKLVXKKAPQPAKPRLAERMXXREKKVLEAGMGKVXSASFGEESXPGQXNSEXAVVALXQDQPSEAAXGGAXLAQXISEAAIGGAMLGQXXSEEAVGGAXPDQXXSEEXVGGAILDQXXSEDAVGGAXLGQXXSEEAVGGAXLAQXXSEAAMEGAXLDQXXSEEAPGGXELIQXPLASSXDHQXPPXSPVQGXXPQISPSXLIGSLRXLELGSESQGASESQAPGEENLLGEAAGGQDMADSMLMQGSRGLXDQAIFYAVXPLPWCPHLVAVCPIPAAGLDVXQPCGDCGXIQENWVCLSCYQVYCGRYINGHMLQHHGNSGHPLVLSYIDLSAWCYYCQAYVHHQALLDVKNIAHQNKFGEDMPHPH

SEQ ID NO: 11917 - protein, 84 aa, Homo sapiens
  MOD_RES (1)..(1): Any amino acid
  MOD_RES (2)..(2): Selenocysteine
  MOD_RES (9)..(9): Selenocysteine
  MOD_RES (16)..(16): Selenocysteine
  MOD_RES (60)..(60): Selenocysteine
XXPQISPSXLIGSLRXLELGSESQGASESQAPGEENLLGEAAGGQDMADSMLMQGSRGLXDQALLDVKNIAHQNKFGEDMPHPH

SEQ ID NO: 11918 - protein, 152 aa, Homo sapiens
  MOD_RES (5)..(5): Selenocysteine
  MOD_RES (9)..(9): Selenocysteine
  MOD_RES (36)..(36): Selenocysteine
  MOD_RES (76)..(76): Selenocysteine
  MOD_RES (87)..(87): Selenocysteine
  MOD_RES (121)..(121): Selenocysteine
  MOD_RES (130)..(130): Selenocysteine
  MOD_RES (138)..(138): Selenocysteine
EPLEXEGAXRSMLSSFLPPVPSLPSDPPEHFPLRKXVSEPNLKLRYKPKKSLERRKNPLLRKESAPPSLRRRPAEXLGDSSPSSSSXPASGCSSPNDSEHGPNPILGSEALLGQRLRLQEXSVAPFALPXVSLLPAIXLGLPAPARALMPRC

SEQ ID NO: 11919 - protein, 51 aa, Homo sapiens
  MOD_RES (18)..(18): Selenocysteine
MDLRVGQRPPVEPPPEPXLLALQRPQRLHHHLFLAGLQQQRSVEPMRLSMD

SEQ ID NO: 11920 - protein, 78 aa, Homo sapiens
  MOD_RES (18)..(18): Selenocysteine
  MOD_RES (52)..(52): Selenocysteine
MDLRVGQRPPVEPPPEPXLLALQRPQRLHHHLFLAGLQQQRSVEPMRLSMDXPMPELQVGPQEQELRQLLHKDKSKRS

SEQ ID NO: 11921 - protein, 88 aa, Homo sapiens
  MOD_RES (18)..(18): Selenocysteine
  MOD_RES (52)..(52): Selenocysteine
MDLRVGQRPPVEPPPEPXLLALQRPQRLHHHLFLAGLQQQRSVEPMRLSMDXPMPELQVGPQEQELRQLLHKDKSKRSAVASSVVKQK

SEQ ID NO: 11922 - protein, 113 aa, Homo sapiens
  MOD_RES (18)..(18): Selenocysteine
  MOD_RES (52)..(52): Selenocysteine
  MOD_RES (104)..(104): Selenocysteine
MDLRVGQRPPVEPPPEPXLLALQRPQRLHHHLFLAGLQQQRSVEPMRLSMDXPMPELQVGPQEQELRQLLHKDKSKRSAVASSVVKQKLAEVILKKQQAALERXVHPNSPGIP

SEQ ID NO: 11923 - protein, 138 aa, Homo sapiens
  MOD_RES (18)..(18): Selenocysteine
  MOD_RES (52)..(52): Selenocysteine
  MOD_RES (104)..(104): Selenocysteine
  MOD_RES (116)..(116): Selenocysteine
  MOD_RES (122)..(122): Selenocysteine
  MOD_RES (126)..(126): Selenocysteine
MDLRVGQRPPVEPPPEPXLLALQRPQRLHHHLFLAGLQQQRSVEPMRLSMDXPMPELQVGPQEQELRQLLHKDKSKRSAVASSVVKQKLAEVILKKQQAALERXVHPNSPGIPYRXLEPLEXEGAXRSMLSSFLPPVP

SEQ ID NO: 11924 - protein, 153 aa, Homo sapiens
  MOD_RES (18)..(18): Selenocysteine
  MOD_RES (52)..(52): Selenocysteine
  MOD_RES (104)..(104): Selenocysteine
  MOD_RES (116)..(116): Selenocysteine
  MOD_RES (122)..(122): Selenocysteine
  MOD_RES (126)..(126): Selenocysteine
  MOD_RES (153)..(153): Selenocysteine
MDLRVGQRPPVEPPPEPXLLALQRPQRLHHHLFLAGLQQQRSVEPMRLSMDXPMPELQVGPQEQELRQLLHKDKSKRSAVASSVVKQKLAEVILKKQQAALERXVHPNSPGIPYRXLEPLEXEGAXRSMLSSFLPPVPSLPSDPPEHFPLRKX

SEQ ID NO: 11925 - protein, 224 aa, Homo sapiens
  MOD_RES (18)..(18): Selenocysteine
  MOD_RES (52)..(52): Selenocysteine
  MOD_RES (104)..(104): Selenocysteine
  MOD_RES (116)..(116): Selenocysteine
  MOD_RES (122)..(122): Selenocysteine
  MOD_RES (126)..(126): Selenocysteine
  MOD_RES (153)..(153): Selenocysteine
  MOD_RES (193)..(193): Selenocysteine
  MOD_RES (204)..(204): Selenocysteine
MDLRVGQRPPVEPPPEPXLLALQRPQRLHHHLFLAGLQQQRSVEPMRLSMDXPMPELQVGPQEQELRQLLHKDKSKRSAVASSVVKQKLAEVILKKQQAALERXVHPNSPGIPYRXLEPLEXEGAXRSMLSSFLPPVPSLPSDPPEHFPLRKXVSEPNLKLRYKPKKSLERRKNPLLRKESAPPSLRRRPAEXLGDSSPSSSSXPASGCSSPNDSEHGPNPILG

SEQ ID NO: 11926 - protein, 952 aa, Homo sapiens
  MOD_RES (18)..(18): Selenocysteine
  MOD_RES (52)..(52): Selenocysteine
  MOD_RES (104)..(104): Selenocysteine
  MOD_RES (116)..(116): Selenocysteine
  MOD_RES (122)..(122): Selenocysteine
  MOD_RES (126)..(126): Selenocysteine
  MOD_RES (153)..(153): Selenocysteine
  MOD_RES (193)..(193): Selenocysteine
  MOD_RES (204)..(204): Selenocysteine
  MOD_RES (238)..(238): Selenocysteine
  MOD_RES (247)..(247): Selenocysteine
  MOD_RES (255)..(255): Selenocysteine
  MOD_RES (270)..(270): Selenocysteine
  MOD_RES (273)..(273): Selenocysteine
  MOD_RES (286)..(286): Selenocysteine
  MOD_RES (301)..(301): Selenocysteine
  MOD_RES (323)..(323): Selenocysteine
  MOD_RES (340)..(341): Selenocysteine
  MOD_RES (356)..(356): Selenocysteine
  MOD_RES (366)..(366): Selenocysteine
  MOD_RES (383)..(383): Selenocysteine
  MOD_RES (411)..(411): Selenocysteine
  MOD_RES (465)..(465): Selenocysteine
  MOD_RES (468)..(468): Selenocysteine
  MOD_RES (511)..(511): Selenocysteine
  MOD_RES (515)..(515): Selenocysteine
  MOD_RES (519)..(520): Selenocysteine
  MOD_RES (591)..(591): Selenocysteine
  MOD_RES (625)..(625): Selenocysteine
  MOD_RES (627)..(627): Selenocysteine
  MOD_RES (646)..(646): Selenocysteine
  MOD_RES (675)..(675): Selenocysteine
  MOD_RES (714)..(714): Selenocysteine
  MOD_RES (717)..(717): Selenocysteine
  MOD_RES (824)..(824): Selenocysteine
  MOD_RES (846)..(846): Selenocysteine
  MOD_RES (924)..(924): Selenocysteine
MDLRVGQRPPVEPPPEPXLLALQRPQRLHHHLFLAGLQQQRSVEPMRLSMDXPMPELQVGPQEQELRQLLHKDKSKRSAVASSVVKQKLAEVILKKQQAALERXVHPNSPGIPYRXLEPLEXEGAXRSMLSSFLPPVPSLPSDPPEHFPLRKXVSEPNLKLRYKPKKSLERRKNPLLRKESAPPSLRRRPAEXLGDSSPSSSSXPASGCSSPNDSEHGPNPILGSEALLGQRLRLQEXSVAPFALPXVSLLPAIXLGLPAPARADSDRRXHPXLGPRGPILGSPHXPLFLPHGLEPEAGGXLPSRLQPILLLDPSGSHAPLLXVPGLGPLPFHFAQSLMXXERLSGSGLHWPLSRXRSEPLPPSAXAPPPPGPMQPRLEQLKXHVQVIKRSAKPSEKPRLRQIPSAEDLEXDGGGPGQVVDDGLEHRELGHGQPEARGPAPLQQHPQVLLWEQQRLAGRLPRGSXGDXVLLPLAQGGHRPLSRAQSSPAAPASLSAPEPASQARVLSSSEXPARXLPFXXGLIYDSVMLKHQCSCGDNSRHPEHAGRIQSIWSRLQERGLRSQCECLRGRKASLEELQSVHSERHVLLYGXNPLSRLKLDNGKLAGLLAQRMFVMLPCGGVGVDXDXIWNELHSSNAARWAAGSVXDLAFKVASRELKNGFAVVRPPGHHADHSXAMGFCFFNSVAIACRQLQQQSKASKILIVDWDVHHGNGXQQXFYQDPSVLYISLHRHDDGNFFPGSGAVDEVGAGSGEGFNVNVAWAGGLDPPMGDPEYLAAFRIVVMPIAREFSPDLVLVSAGFDAAEGHPAPLGGYHVSAKCFGYMXQQLMNLAGGAVVLALEGGHDLXAICDASEACVAALLGNRVDPLSEEGWKQKPNLNAIRSLEAVIRVHSKYWGCMQRLASCPDSWVPRVPGADKEEVEAVXALASLSVGILAEDRPSEQLVEEEEPMNL

SEQ ID NO: 11927 - protein, 141 aa, Homo sapiens
  MOD_RES (18)..(18): Selenocysteine
  MOD_RES (52)..(52): Selenocysteine
  MOD_RES (104)..(104): Selenocysteine
  MOD_RES (129)..(129): Selenocysteine
MDLRVGQRPPVEPPPEPXLLALQRPQRLHHHLFLAGLQQQRSVEPMRLSMDXPMPELQVGPQEQELRQLLHKDKSKRSAVASSVVKQKLAEVILKKQQAALERXVHPNSPGIPYSLPSDPPEHFPLRKXVSEPNLKLRYKP

SEQ ID NO: 11928 - protein, 101 aa, Homo sapiens
  MOD_RES (20)..(20): Selenocysteine
  MOD_RES (23)..(23): Selenocysteine
  MOD_RES (56)..(56): Selenocysteine
MHSPGAALHGHADARVAGGXPGXRAAAASPQGQEQAKCCSQQRGQAEASGGDSEKXAGGPRKNSPSQQPRHSLQNPGAPGDGRSHPLHAQQLFASCSQPAQ

SEQ ID NO: 11929 - protein, 954 aa, Homo sapiens
  MOD_RES (9)..(9): Selenocysteine
  MOD_RES (21)..(21): Selenocysteine
  MOD_RES (32)..(32): Selenocysteine
  MOD_RES (57)..(57): Selenocysteine
  MOD_RES (91)..(91): Selenocysteine
  MOD_RES (143)..(143): Selenocysteine
  MOD_RES (155)..(155): Selenocysteine
  MOD_RES (161)..(161): Selenocysteine
  MOD_RES (165)..(165): Selenocysteine
  MOD_RES (192)..(192): Selenocysteine
  MOD_RES (232)..(232): Selenocysteine
  MOD_RES (243)..(243): Selenocysteine
  MOD_RES (272)..(272): Selenocysteine
  MOD_RES (275)..(275): Selenocysteine
  MOD_RES (288)..(288): Selenocysteine
  MOD_RES (303)..(303): Selenocysteine
  MOD_RES (325)..(325): Selenocysteine
  MOD_RES (342)..(343): Selenocysteine
  MOD_RES (358)..(358): Selenocysteine
  MOD_RES (368)..(368): Selenocysteine
  MOD_RES (385)..(385): Selenocysteine
  MOD_RES (413)..(413): Selenocysteine
  MOD_RES (467)..(467): Selenocysteine
  MOD_RES (470)..(470): Selenocysteine
  MOD_RES (513)..(513): Selenocysteine
  MOD_RES (517)..(517): Selenocysteine
  MOD_RES (521)..(522): Selenocysteine
  MOD_RES (593)..(593): Selenocysteine
  MOD_RES (627)..(627): Selenocysteine
  MOD_RES (629)..(629): Selenocysteine
  MOD_RES (648)..(648): Selenocysteine
  MOD_RES (677)..(677): Selenocysteine
  MOD_RES (716)..(716): Selenocysteine
  MOD_RES (719)..(719): Selenocysteine
  MOD_RES (826)..(826): Selenocysteine
  MOD_RES (848)..(848): Selenocysteine
  MOD_RES (926)..(926): Selenocysteine
MHSPGADGXQVSPGAHYCSPXGAGCPRPCADXPGPQPQPMDLRVGQRPPVEPPPEPXLLALQRPQRLHHHLFLAGLQQQRSVEPMRLSMDXPMPELQVGPQEQELRQLLHKDKSKRSAVASSVVKQKLAEVILKKQQAALERXVHPNSPGIPYRXLEPLEXEGAXRSMLSSFLPPVPSLPSDPPEHFPLRKXVSEPNLKLRYKPKKSLERRKNPLLRKESAPPSLRRRPAEXLGDSSPSSSSXPASGCSSPNDSEHGPNPILGSEADSDRRXHPXLGPRGPILGSPHXPLFLPHGLEPEAGGXLPSRLQPILLLDPSGSHAPLLXVPGLGPLPFHFAQSLMXXERLSGSGLHWPLSRXRSEPLPPSAXAPPPPGPMQPRLEQLKXHVQVIKRSAKPSEKPRLRQIPSAEDLEXDGGGPGQVVDDGLEHRELGHGQPEARGPAPLQQHPQVLLWEQQRLAGRLPRGSXGDXVLLPLAQGGHRPLSRAQSSPAAPASLSAPEPASQARVLSSSEXPARXLPFXXGLIYDSVMLKHQCSCGDNSRHPEHAGRIQSIWSRLQERGLRSQCECLRGRKASLEELQSVHSERHVLLYGXNPLSRLKLDNGKLAGLLAQRMFVMLPCGGVGVDXDXIWNELHSSNAARWAAGSVXDLAFKVASRELKNGFAVVRPPGHHADHSXAMGFCFFNSVAIACRQLQQQSKASKILIVDWDVHHGNGXQQXFYQDPSVLYISLHRHDDGNFFPGSGAVDEVGAGSGEGFNVNVAWAGGLDPPMGDPEYLAAFRIVVMPIAREFSPDLVLVSAGFDAAEGHPAPLGGYHVSAKCFGYMXQQLMNLAGGAVVLALEGGHDLXAICDASEACVAALLGNRVDPLSEEGWKQKPNLNAIRSLEAVIRVHSKYWGCMQRLASCPDSWVPRVPGADKEEVEAVXALASLSVGILAEDRPSEQLVEEEEPMNL

SEQ ID NO: 11930 - protein, 991 aa, Homo sapiens
  MOD_RES (9)..(9): Selenocysteine
  MOD_RES (21)..(21): Selenocysteine
  MOD_RES (32)..(32): Selenocysteine
  MOD_RES (57)..(57): Selenocysteine
  MOD_RES (91)..(91): Selenocysteine
  MOD_RES (143)..(143): Selenocysteine
  MOD_RES (155)..(155): Selenocysteine
  MOD_RES (161)..(161): Selenocysteine
  MOD_RES (165)..(165): Selenocysteine
  MOD_RES (192)..(192): Selenocysteine
  MOD_RES (232)..(232): Selenocysteine
  MOD_RES (243)..(243): Selenocysteine
  MOD_RES (277)..(277): Selenocysteine
  MOD_RES (286)..(286): Selenocysteine
  MOD_RES (294)..(294): Selenocysteine
  MOD_RES (309)..(309): Selenocysteine
  MOD_RES (312)..(312): Selenocysteine
  MOD_RES (325)..(325): Selenocysteine
  MOD_RES (340)..(340): Selenocysteine
  MOD_RES (362)..(362): Selenocysteine
  MOD_RES (379)..(380): Selenocysteine
  MOD_RES (395)..(395): Selenocysteine
  MOD_RES (405)..(405): Selenocysteine
  MOD_RES (422)..(422): Selenocysteine
  MOD_RES (450)..(450): Selenocysteine
  MOD_RES (504)..(504): Selenocysteine
  MOD_RES (507)..(507): Selenocysteine
  MOD_RES (550)..(550): Selenocysteine
  MOD_RES (554)..(554): Selenocysteine
  MOD_RES (558)..(559): Selenocysteine
  MOD_RES (630)..(630): Selenocysteine
  MOD_RES (664)..(664): Selenocysteine
  MOD_RES (666)..(666): Selenocysteine
  MOD_RES (685)..(685): Selenocysteine
  MOD_RES (714)..(714): Selenocysteine
  MOD_RES (753)..(753): Selenocysteine
  MOD_RES (756)..(756): Selenocysteine
  MOD_RES (863)..(863): Selenocysteine
  MOD_RES (885)..(885): Selenocysteine
  MOD_RES (963)..(963): Selenocysteine
MHSPGADGXQVSPGAHYCSPXGAGCPRPCADXPGPQPQPMDLRVGQRPPVEPPPEPXLLALQRPQRLHHHLFLAGLQQQRSVEPMRLSMDXPMPELQVGPQEQELRQLLHKDKSKRSAVASSVVKQKLAEVILKKQQAALERXVHPNSPGIPYRXLEPLEXEGAXRSMLSSFLPPVPSLPSDPPEHFPLRKXVSEPNLKLRYKPKKSLERRKNPLLRKESAPPSLRRRPAEXLGDSSPSSSSXPASGCSSPNDSEHGPNPILGSEALLGQRLRLQEXSVAPFALPXVSLLPAIXLGLPAPARADSDRRXHPXLGPRGPILGSPHXPLFLPHGLEPEAGGXLPSRLQPILLLDPSGSHAPLLXVPGLGPLPFHFAQSLMXXERLSGSGLHWPLSRXRSEPLPPSAXAPPPPGPMQPRLEQLKXHVQVIKRSAKPSEKPRLRQIPSAEDLEXDGGGPGQVVDDGLEHRELGHGQPEARGPAPLQQHPQVLLWEQQRLAGRLPRGSXGDXVLLPLAQGGHRPLSRAQSSPAAPASLSAPEPASQARVLSSSEXPARXLPFXXGLIYDSVMLKHQCSCGDNSRHPEHAGRIQSIWSRLQERGLRSQCECLRGRKASLEELQSVHSERHVLLYGXNPLSRLKLDNGKLAGLLAQRMFVMLPCGGVGVDXDXIWNELHSSNAARWAAGSVXDLAFKVASRELKNGFAVVRPPGHHADHSXAMGFCFFNSVAIACRQLQQQSKASKILIVDWDVHHGNGXQQXFYQDPSVLYISLHRHDDGNFFPGSGAVDEVGAGSGEGFNVNVAWAGGLDPPMGDPEYLAAFRIVVMPIAREFSPDLVLVSAGFDAAEGHPAPLGGYHVSAKCFGYMXQQLMNLAGGAVVLALEGGHDLXAICDASEACVAALLGNRVDPLSEEGWKQKPNLNAIRSLEAVIRVHSKYWGCMQRLASCPDSWVPRVPGADKEEVEAVXALASLSVGILAEDRPSEQLVEEEEPMNL

SEQ ID NO: 11931 - protein, 274 aa, Homo sapiens
  MOD_RES (9)..(9): Selenocysteine
  MOD_RES (21)..(21): Selenocysteine
  MOD_RES (32)..(32): Selenocysteine
  MOD_RES (57)..(57): Selenocysteine
  MOD_RES (91)..(91): Selenocysteine
  MOD_RES (143)..(143): Selenocysteine
  MOD_RES (168)..(168): Selenocysteine
  MOD_RES (208)..(208): Selenocysteine
  MOD_RES (219)..(219): Selenocysteine
  MOD_RES (248)..(248): Selenocysteine
  MOD_RES (251)..(251): Selenocysteine
  MOD_RES (264)..(264): Selenocysteine
MHSPGADGXQVSPGAHYCSPXGAGCPRPCADXPGPQPQPMDLRVGQRPPVEPPPEPXLLALQRPQRLHHHLFLAGLQQQRSVEPMRLSMDXPMPELQVGPQEQELRQLLHKDKSKRSAVASSVVKQKLAEVILKKQQAALERXVHPNSPGIPYSLPSDPPEHFPLRKXVSEPNLKLRYKPKKSLERRKNPLLRKESAPPSLRRRPAEXLGDSSPSSSSXPASGCSSPNDSEHGPNPILGSEADSDRRXHPXLGPRGPILGSPHXPLFLPHGLEP

SEQ ID NO: 11932 - protein, 133 aa, Homo sapiens
  MOD_RES (15)..(15): Selenocysteine
  MOD_RES (40)..(40): Selenocysteine
  MOD_RES (74)..(74): Selenocysteine
  MOD_RES (126)..(126): Selenocysteine
MHSPGAGCPRPCADXPGPQPQPMDLRVGQRPPVEPPPEPXLLALQRPQRLHHHLFLAGLQQQRSVEPMRLSMDXPMPELQVGPQEQELRQLLHKDKSKRSAVASSVVKQKLAEVILKKQQAALERXVHPNSPG

SEQ ID NO: 11933 - protein, 974 aa, Homo sapiens
  MOD_RES (15)..(15): Selenocysteine
  MOD_RES (40)..(40): Selenocysteine
  MOD_RES (74)..(74): Selenocysteine
  MOD_RES (126)..(126): Selenocysteine
  MOD_RES (138)..(138): Selenocysteine
  MOD_RES (144)..(144): Selenocysteine
  MOD_RES (148)..(148): Selenocysteine
  MOD_RES (175)..(175): Selenocysteine
  MOD_RES (215)..(215): Selenocysteine
  MOD_RES (226)..(226): Selenocysteine
  MOD_RES (260)..(260): Selenocysteine
  MOD_RES (269)..(269): Selenocysteine
  MOD_RES (277)..(277): Selenocysteine
  MOD_RES (292)..(292): Selenocysteine
  MOD_RES (295)..(295): Selenocysteine
  MOD_RES (308)..(308): Selenocysteine
  MOD_RES (323)..(323): Selenocysteine
  MOD_RES (345)..(345): Selenocysteine
  MOD_RES (362)..(363): Selenocysteine
  MOD_RES (378)..(378): Selenocysteine
  MOD_RES (388)..(388): Selenocysteine
  MOD_RES (405)..(405): Selenocysteine
  MOD_RES (433)..(433): Selenocysteine
  MOD_RES (487)..(487): Selenocysteine
  MOD_RES (490)..(490): Selenocysteine
  MOD_RES (533)..(533): Selenocysteine
  MOD_RES (537)..(537): Selenocysteine
  MOD_RES (541)..(542): Selenocysteine
  MOD_RES (613)..(613): Selenocysteine
  MOD_RES (647)..(647): Selenocysteine
  MOD_RES (649)..(649): Selenocysteine
  MOD_RES (668)..(668): Selenocysteine
  MOD_RES (697)..(697): Selenocysteine
  MOD_RES (736)..(736): Selenocysteine
  MOD_RES (739)..(739): Selenocysteine
  MOD_RES (846)..(846): Selenocysteine
  MOD_RES (868)..(868): Selenocysteine
  MOD_RES (946)..(946): Selenocysteine
MHSPGAGCPRPCADXPGPQPQPMDLRVGQRPPVEPPPEPXLLALQRPQRLHHHLFLAGLQQQRSVEPMRLSMDXPMPELQVGPQEQELRQLLHKDKSKRSAVASSVVKQKLAEVILKKQQAALERXVHPNSPGIPYRXLEPLEXEGAXRSMLSSFLPPVPSLPSDPPEHFPLRKXVSEPNLKLRYKPKKSLERRKNPLLRKESAPPSLRRRPAEXLGDSSPSSSSXPASGCSSPNDSEHGPNPILGSEALLGQRLRLQEXSVAPFALPXVSLLPAIXLGLPAPARADSDRRXHPXLGPRGPILGSPHXPLFLPHGLEPEAGGXLPSRLQPILLLDPSGSHAPLLXVPGLGPLPFHFAQSLMXXERLSGSGLHWPLSRXRSEPLPPSAXAPPPPGPMQPRLEQLKXHVQVIKRSAKPSEKPRLRQIPSAEDLEXDGGGPGQVVDDGLEHRELGHGQPEARGPAPLQQHPQVLLWEQQRLAGRLPRGSXGDXVLLPLAQGGHRPLSRAQSSPAAPASLSAPEPASQARVLSSSEXPARXLPFXXGLIYDSVMLKHQCSCGDNSRHPEHAGRIQSIWSRLQERGLRSQCECLRGRKASLEELQSVHSERHVLLYGXNPLSRLKLDNGKLAGLLAQRMFVMLPCGGVGVDXDXIWNELHSSNAARWAAGSVXDLAFKVASRELKNGFAVVRPPGHHADHSXAMGFCFFNSVAIACRQLQQQSKASKILIVDWDVHHGNGXQQXFYQDPSVLYISLHRHDDGNFFPGSGAVDEVGAGSGEGFNVNVAWAGGLDPPMGDPEYLAAFRIVVMPIAREFSPDLVLVSAGFDAAEGHPAPLGGYHVSAKCFGYMXQQLMNLAGGAVVLALEGGHDLXAICDASEACVAALLGNRVDPLSEEGWKQKPNLNAIRSLEAVIRVHSKYWGCMQRLASCPDSWVPRVPGADKEEVEAVXALASLSVGILAEDRPSEQLVEEEEPMNL

SEQ ID NO: 11934 - protein, 160 aa, Homo sapiens
  MOD_RES (15)..(15): Selenocysteine
  MOD_RES (40)..(40): Selenocysteine
  MOD_RES (74)..(74): Selenocysteine
  MOD_RES (126)..(126): Selenocysteine
  MOD_RES (151)..(151): Selenocysteine
MHSPGAGCPRPCADXPGPQPQPMDLRVGQRPPVEPPPEPXLLALQRPQRLHHHLFLAGLQQQRSVEPMRLSMDXPMPELQVGPQEQELRQLLHKDKSKRSAVASSVVKQKLAEVILKKQQAALERXVHPNSPGIPYSLPSDPPEHFPLRKXVSEPNLKLR

SEQ ID NO: 11935 - protein, 1014 aa, Homo sapiens
  MOD_RES (14)..(14): Selenocysteine
  MOD_RES (18)..(18): Selenocysteine
  MOD_RES (26)..(26): Selenocysteine
  MOD_RES (38)..(38): Selenocysteine
  MOD_RES (49)..(49): Selenocysteine
  MOD_RES (74)..(74): Selenocysteine
  MOD_RES (108)..(108): Selenocysteine
  MOD_RES (160)..(160): Selenocysteine
  MOD_RES (172)..(172): Selenocysteine
  MOD_RES (178)..(178): Selenocysteine
  MOD_RES (182)..(182): Selenocysteine
  MOD_RES (209)..(209): Selenocysteine
  MOD_RES (249)..(249): Selenocysteine
  MOD_RES (260)..(260): Selenocysteine
  MOD_RES (294)..(294): Selenocysteine
  MOD_RES (303)..(303): Selenocysteine
  MOD_RES (311)..(311): Selenocysteine
  MOD_RES (326)..(326): Selenocysteine
  MOD_RES (329)..(329): Selenocysteine
  MOD_RES (342)..(342): Selenocysteine
  MOD_RES (357)..(357): Selenocysteine
  MOD_RES (379)..(379): Selenocysteine
  MOD_RES (396)..(397): Selenocysteine
  MOD_RES (412)..(412): Selenocysteine
  MOD_RES (422)..(422): Selenocysteine
  MOD_RES (439)..(439): Selenocysteine
  MOD_RES (467)..(467): Selenocysteine
  MOD_RES (521)..(521): Selenocysteine
  MOD_RES (524)..(524): Selenocysteine
  MOD_RES (567)..(567): Selenocysteine
  MOD_RES (571)..(571): Selenocysteine
  MOD_RES (575)..(576): Selenocysteine
  MOD_RES (647)..(647): Selenocysteine
  MOD_RES (681)..(681): Selenocysteine
  MOD_RES (683)..(683): Selenocysteine
  MOD_RES (702)..(702): Selenocysteine
  MOD_RES (731)..(731): Selenocysteine
  MOD_RES (770)..(770): Selenocysteine
  MOD_RES (773)..(773): Selenocysteine
  MOD_RES (880)..(880): Selenocysteine
  MOD_RES (902)..(902): Selenocysteine
  MOD_RES (952)..(952): Selenocysteine
  MOD_RES (986)..(986): Selenocysteine
  MOD_RES (998)..(998): Selenocysteine
  MOD_RES (1008)..(1008): Selenocysteine
MSDLRKRELGALFXSRGXGGVEWDGXQVSPGAHYCSPXGAGCPRPCADXPGPQPQPMDLRVGQRPPVEPPPEPXLLALQRPQRLHHHLFLAGLQQQRSVEPMRLSMDXPMPELQVGPQEQELRQLLHKDKSKRSAVASSVVKQKLAEVILKKQQAALERXVHPNSPGIPYRXLEPLEXEGAXRSMLSSFLPPVPSLPSDPPEHFPLRKXVSEPNLKLRYKPKKSLERRKNPLLRKESAPPSLRRRPAEXLGDSSPSSSSXPASGCSSPNDSEHGPNPILGSEALLGQRLRLQEXSVAPFALPXVSLLPAIXLGLPAPARADSDRRXHPXLGPRGPILGSPHXPLFLPHGLEPEAGGXLPSRLQPILLLDPSGSHAPLLXVPGLGPLPFHFAQSLMXXERLSGSGLHWPLSRXRSEPLPPSAXAPPPPGPMQPRLEQLKXHVQVIKRSAKPSEKPRLRQIPSAEDLEXDGGGPGQVVDDGLEHRELGHGQPEARGPAPLQQHPQVLLWEQQRLAGRLPRGSXGDXVLLPLAQGGHRPLSRAQSSPAAPASLSAPEPASQARVLSSSEXPARXLPFXXGLIYDSVMLKHQCSCGDNSRHPEHAGRIQSIWSRLQERGLRSQCECLRGRKASLEELQSVHSERHVLLYGXNPLSRLKLDNGKLAGLLAQRMFVMLPCGGVGVDXDXIWNELHSSNAARWAAGSVXDLAFKVASRELKNGFAVVRPPGHHADHSXAMGFCFFNSVAIACRQLQQQSKASKILIVDWDVHHGNGXQQXFYQDPSVLYISLHRHDDGNFFPGSGAVDEVGAGSGEGFNVNVAWAGGLDPPMGDPEYLAAFRIVVMPIAREFSPDLVLVSAGFDAAEGHPAPLGGYHVSAKCFGYMXQQLMNLAGGAVVLALEGGHDLXAICDASEACVAALLGNRVDPLSEEGWKQKPNLNAIRSLEAVIRVHMGALXLSQIPGHGSSQQQAGGAFSWPGHPCRAAVVMVNXGAACSAWPPVQXPGCLECQGLXKKKWRQ

SEQ ID NO: 11936 - protein, 110 aa, Homo sapiens
  MOD_RES (1)..(1): Any amino acid
  MOD_RES (34)..(34): Selenocysteine
  MOD_RES (56)..(56): Selenocysteine
  MOD_RES (101)..(101): Selenocysteine
XDLVLVSAGFDAAEGHPAPLGGYHVSAKCFGYMXQQLMNLAGGAVVLALEGGHDLXAICDASEACVAALLGNRVSRLPPPSMLLSGRWIPFQKKAGNRNPXSMPSALWRP

SEQ ID NO: 11937 - protein, 205 aa, Homo sapiens
  MOD_RES (1)..(1): Any amino acid
  MOD_RES (70)..(70): Selenocysteine
  MOD_RES (104)..(104): Selenocysteine
  MOD_RES (106)..(106): Selenocysteine
  MOD_RES (125)..(125): Selenocysteine
  MOD_RES (154)..(154): Selenocysteine
  MOD_RES (198)..(198): Selenocysteine
  MOD_RES (202)..(202): Selenocysteine
XIYDSVMLKHQCSCGDNSRHPEHAGRIQSIWSRLQERGLRSQCECLRGRKASLEELQSVHSERHVLLYGXNPLSRLKLDNGKLAGLLAQRMFVMLPCGGVGVDXDXIWNELHSSNAARWAAGSVXDLAFKVASRELKNGFAVVRPPGHHADHSXAMGFCFFNSVAIACRQLQQQSKASKILIVDWVVMIRIIADNISXPLIXSRH

SEQ ID NO: 11938 - protein, 384 aa, Homo sapiens
  MOD_RES (1)..(1): Any amino acid
  MOD_RES (71)..(71): Selenocysteine
  MOD_RES (105)..(105): Selenocysteine
  MOD_RES (107)..(107): Selenocysteine
  MOD_RES (126)..(126): Selenocysteine
  MOD_RES (146)..(146): Selenocysteine
  MOD_RES (149)..(149): Selenocysteine
  MOD_RES (256)..(256): Selenocysteine
  MOD_RES (278)..(278): Selenocysteine
  MOD_RES (356)..(356): Selenocysteine
XLIYDSVMLKHQCSCGDNSRHPEHAGRIQSIWSRLQERGLRSQCECLRGRKASLEELQSVHSERHVLLYGXNPLSRLKLDNGKLAGLLAQRMFVMLPCGGVGVDXDXIWNELHSSNAARWAAGSVXDLAFKVASRELKDVHHGNGXQQXFYQDPSVLYISLHRHDDGNFFPGSGAVDEVGAGSGEGFNVNVAWAGGLDPPMGDPEYLAAFRIVVMPIAREFSPDLVLVSAGFDAAEGHPAPLGGYHVSAKCFGYMXQQLMNLAGGAVVLALEGGHDLXAICDASEACVAALLGNRVDPLSEEGWKQKPNLNAIRSLEAVIRVHSKYWGCMQRLASCPDSWVPRVPGADKEEVEAVXALASLSVGILAEDRPSEQLVEEEEPMNL

SEQ ID NO: 11939 - protein, 61 aa, Homo sapiens
  MOD_RES (1)..(1): Any amino acid
  MOD_RES (3)..(3): Selenocysteine
  MOD_RES (6)..(6): Selenocysteine
  MOD_RES (49)..(49): Selenocysteine
  MOD_RES (53)..(53): Selenocysteine
  MOD_RES (57)..(58): Selenocysteine
XSXGDXVLLPLAQGGHRPLSRAQSSPAAPASLSAPEPASQARVLSSSEXPARXLPFXXGSL

SEQ ID NO: 11940 - protein, 139 aa, Homo sapiens
  MOD_RES (94)..(94): Selenocysteine
MEEPEEPADSGQSLVPVYIYSPEYVSMCDSLAKIPKRASMVHSLIEAYALHKQMRDEASGFCYLNDAVLGILRLRRKFERILYVDLDLHHGDGXGDVSDVGLGKGRYYSVNVPIQDGIQDEKYYQICERYEPPAPNPGL

SEQ ID NO: 11941 - protein, 248 aa, Homo sapiens
  MOD_RES (101)..(101): Selenocysteine
  MOD_RES (106)..(106): Selenocysteine
  MOD_RES (120)..(120): Selenocysteine
  MOD_RES (177)..(177): Selenocysteine
  MOD_RES (189)..(189): Selenocysteine
  MOD_RES (207)..(207): Selenocysteine
  MOD_RES (220)..(220): Selenocysteine
  MOD_RES (225)..(225): Selenocysteine
  MOD_RES (228)..(228): Selenocysteine
  MOD_RES (235)..(235): Selenocysteine
  MOD_RES (247)..(247): Selenocysteine
MEEPEEPADSGQSLVPVYIYSPEYVSMCDSLAKIPKRASMVHSLIEAYALHKQMRDEASGFCYLNDAVLGILRLRRKFERILYVDLDLHHGDGVEDAFSFXSKVMXVSLHKFSPGFFPGXGDVSDVGLGKGRYYSVNVPIQDGIQDEKYYQICESVLKEVYQAFNPKAVVLQLGADXIAGDPMCSFNMXPVGIGKCLKYILQWQLAXLILGGGGYNLANXARCWXYLXGVILGKXLSSEIPDHEFFXA

SEQ ID NO: 11942 - protein, 286 aa, Homo sapiens
  MOD_RES (101)..(101): Selenocysteine
  MOD_RES (106)..(106): Selenocysteine
  MOD_RES (120)..(120): Selenocysteine
  MOD_RES (177)..(177): Selenocysteine
  MOD_RES (189)..(189): Selenocysteine
  MOD_RES (207)..(207): Selenocysteine
  MOD_RES (220)..(220): Selenocysteine
  MOD_RES (225)..(225): Selenocysteine
  MOD_RES (228)..(228): Selenocysteine
  MOD_RES (235)..(235): Selenocysteine
  MOD_RES (247)..(247): Selenocysteine
  MOD_RES (258)..(258): Selenocysteine
MEEPEEPADSGQSLVPVYIYSPEYVSMCDSLAKIPKRASMVHSLIEAYALHKQMRDEASGFCYLNDAVLGILRLRRKFERILYVDLDLHHGDGVEDAFSFXSKVMXVSLHKFSPGFFPGXGDVSDVGLGKGRYYSVNVPIQDGIQDEKYYQICESVLKEVYQAFNPKAVVLQLGADXIAGDPMCSFNMXPVGIGKCLKYILQWQLAXLILGGGGYNLANXARCWXYLXGVILGKXLSSEIPDHEFFXAYGPDYVLEIXPSCRPDRNEPHRIQQILNYIKGNLKHVV

SEQ ID NO: 11943 - protein, 146 aa, Homo sapiens
  MOD_RES (69)..(69): Selenocysteine
  MOD_RES (72)..(72): Selenocysteine
  MOD_RES (105)..(105): Selenocysteine
  MOD_RES (119)..(119): Selenocysteine
  MOD_RES (121)..(121): Selenocysteine
MEEPEEPADSGQSLVPVYIYSPEYVSMCDSLAKIPKRASMVHSLIEAYALHKQMRIVKPKVASMEEMAXFHXDAYLQHLQKVSQEGDDDHPDSIEYGLGYDCPAXEGIFDYAAAIGGAXIXAAQCLIDGMCKVAINWSGGWHHAKK

SEQ ID NO: 11944 - protein, 299 aa, Homo sapiens
  MOD_RES (69)..(69): Selenocysteine
  MOD_RES (72)..(72): Selenocysteine
  MOD_RES (105)..(105): Selenocysteine
  MOD_RES (119)..(119): Selenocysteine
  MOD_RES (121)..(121): Selenocysteine
  MOD_RES (185)..(185): Selenocysteine
  MOD_RES (242)..(242): Selenocysteine
  MOD_RES (254)..(254): Selenocysteine
  MOD_RES (272)..(272): Selenocysteine
  MOD_RES (285)..(285): Selenocysteine
  MOD_RES (290)..(290): Selenocysteine
  MOD_RES (293)..(293): Selenocysteine
MEEPEEPADSGQSLVPVYIYSPEYVSMCDSLAKIPKRASMVHSLIEAYALHKQMRIVKPKVASMEEMAXFHXDAYLQHLQKVSQEGDDDHPDSIEYGLGYDCPAXEGIFDYAAAIGGAXIXAAQCLIDGMCKVAINWSGGWHHAKKDEASGFCYLNDAVLGILRLRRKFERILYVDLDLHHGDGXGDVSDVGLGKGRYYSVNVPIQDGIQDEKYYQICESVLKEVYQAFNPKAVVLQLGADXIAGDPMCSFNMXPVGIGKCLKYILQWQLAXLILGGGGYNLANXARCWXYLXGVILGK

SEQ ID NO: 11945 - protein, 253 aa, Homo sapiens
  MOD_RES (69)..(69): Selenocysteine
  MOD_RES (72)..(72): Selenocysteine
  MOD_RES (105)..(105): Selenocysteine
  MOD_RES (119)..(119): Selenocysteine
  MOD_RES (121)..(121): Selenocysteine
  MOD_RES (192)..(192): Selenocysteine
  MOD_RES (197)..(197): Selenocysteine
  MOD_RES (211)..(211): Selenocysteine
  MOD_RES (252)..(252): Selenocysteine
MEEPEEPADSGQSLVPVYIYSPEYVSMCDSLAKIPKRASMVHSLIEAYALHKQMRIVKPKVASMEEMAXFHXDAYLQHLQKVSQEGDDDHPDSIEYGLGYDCPAXEGIFDYAAAIGGAXIXAAQCLIDGMCKVAINWSGGWHHAKKDEASGFCYLNDAVLGILRLRRKFERILYVDLDLHHGDGVEDAFSFXSKVMXVSLHKFSPGFFPGXGDVSDVGLGKGRYYSVNVPIQDGIQDEKYYQICERALFIRXP

SEQ ID NO: 11946 - protein, 256 aa, Homo sapiens
  MOD_RES (69)..(69): Selenocysteine
  MOD_RES (72)..(72): Selenocysteine
  MOD_RES (105)..(105): Selenocysteine
  MOD_RES (119)..(119): Selenocysteine
  MOD_RES (121)..(121): Selenocysteine
  MOD_RES (192)..(192): Selenocysteine
  MOD_RES (197)..(197): Selenocysteine
  MOD_RES (211)..(211): Selenocysteine
MEEPEEPADSGQSLVPVYIYSPEYVSMCDSLAKIPKRASMVHSLIEAYALHKQMRIVKPKVASMEEMAXFHXDAYLQHLQKVSQEGDDDHPDSIEYGLGYDCPAXEGIFDYAAAIGGAXIXAAQCLIDGMCKVAINWSGGWHHAKKDEASGFCYLNDAVLGILRLRRKFERILYVDLDLHHGDGVEDAFSFXSKVMXVSLHKFSPGFFPGXGDVSDVGLGKGRYYSVNVPIQDGIQDEKYYQICERYEPPAPNPGL

SEQ ID NO: 11947 - protein, 377 aa, Homo sapiens
  MOD_RES (69)..(69): Selenocysteine
  MOD_RES (72)..(72): Selenocysteine
  MOD_RES (105)..(105): Selenocysteine
  MOD_RES (119)..(119): Selenocysteine
  MOD_RES (121)..(121): Selenocysteine
  MOD_RES (192)..(192): Selenocysteine
  MOD_RES (197)..(197): Selenocysteine
  MOD_RES (211)..(211): Selenocysteine
  MOD_RES (268)..(268): Selenocysteine
  MOD_RES (280)..(280): Selenocysteine
  MOD_RES (298)..(298): Selenocysteine
  MOD_RES (311)..(311): Selenocysteine
  MOD_RES (316)..(316): Selenocysteine
  MOD_RES (319)..(319): Selenocysteine
  MOD_RES (326)..(326): Selenocysteine
  MOD_RES (338)..(338): Selenocysteine
  MOD_RES (349)..(349): Selenocysteine
MEEPEEPADSGQSLVPVYIYSPEYVSMCDSLAKIPKRASMVHSLIEAYALHKQMRIVKPKVASMEEMAXFHXDAYLQHLQKVSQEGDDDHPDSIEYGLGYDCPAXEGIFDYAAAIGGAXIXAAQCLIDGMCKVAINWSGGWHHAKKDEASGFCYLNDAVLGILRLRRKFERILYVDLDLHHGDGVEDAFSFXSKVMXVSLHKFSPGFFPGXGDVSDVGLGKGRYYSVNVPIQDGIQDEKYYQICESVLKEVYQAFNPKAVVLQLGADXIAGDPMCSFNMXPVGIGKCLKYILQWQLAXLILGGGGYNLANXARCWXYLXGVILGKXLSSEIPDHEFFXAYGPDYVLEIXPSCRPDRNEPHRIQQILNYIKGNLKHVV

SEQ ID NO: 11948 - protein, 185 aa, Homo sapiens
  MOD_RES (69)..(69): Selenocysteine
  MOD_RES (72)..(72): Selenocysteine
  MOD_RES (105)..(105): Selenocysteine
  MOD_RES (119)..(119): Selenocysteine
  MOD_RES (121)..(121): Selenocysteine
MEEPEEPADSGQSLVPVYIYSPEYVSMCDSLAKIPKRASMVHSLIEAYALHKQMRIVKPKVASMEEMAXFHXDAYLQHLQKVSQEGDDDHPDSIEYGLGYDCPAXEGIFDYAAAIGGAXIXAAQCLIDGMCKVAINWSGGWHHAKKDEASGFCYLNDAVLGILRLRRKFERILYVDLDLHHGDVY

SEQ ID NO: 11949 - protein, 158 aa, Homo sapiens
  MOD_RES (69)..(69): Selenocysteine
  MOD_RES (72)..(72): Selenocysteine
  MOD_RES (105)..(105): Selenocysteine
  MOD_RES (119)..(119): Selenocysteine
  MOD_RES (121)..(121): Selenocysteine
  MOD_RES (148)..(148): Selenocysteine
MEEPEEPADSGQSLVPVYIYSPEYVSMCDSLAKIPKRASMVHSLIEAYALHKQMRIVKPKVASMEEMAXFHXDAYLQHLQKVSQEGDDDHPDSIEYGLGYDCPAXEGIFDYAAAIGGAXIXAAQCLIDGMCKVAINWSGGWHHAKKEXCVYVALYKAF

SEQ ID NO: 11950 - protein, 156 aa, Homo sapiens
  MOD_RES (69)..(69): Selenocysteine
  MOD_RES (72)..(72): Selenocysteine
  MOD_RES (105)..(105): Selenocysteine
  MOD_RES (119)..(119): Selenocysteine
  MOD_RES (121)..(121): Selenocysteine
MEEPEEPADSGQSLVPVYIYSPEYVSMCDSLAKIPKRASMVHSLIEAYALHKQMRIVKPKVASMEEMAXFHXDAYLQHLQKVSQEGDDDHPDSIEYGLGYDCPAXEGIFDYAAAIGGAXIXAAQCLIDGMCKVAINWSGGWHHAKKYEPPAPNPGL

SEQ ID NO: 11951 - protein, 56 aa, Homo sapiens
MEEPEEPADSGQSLVPVYIYSPEYVSMCDSLAKIPKRASMVHSLIEAYALHKQMRL

SEQ ID NO: 11952 - protein, 64 aa, Homo sapiens
  MOD_RES (62)..(62): Selenocysteine
MEEPEEPADSGQSLVPVYIYSPEYVSMCDSLAKIPKRASMVHSLIEAYALHKQMRSWMRAVXSL

SEQ ID NO: 11953 - protein, 55 aa, Homo sapiens
MEEPEEPADSGQSLVPVYIYSPEYVSMCDSLAKIPKRASMVHSLIEAYALHKQMS

SEQ ID NO: 11954 - protein, 131 aa, Homo sapiens
  MOD_RES (30)..(30): Selenocysteine
  MOD_RES (33)..(33): Selenocysteine
  MOD_RES (66)..(66): Selenocysteine
  MOD_RES (80)..(80): Selenocysteine
  MOD_RES (82)..(82): Selenocysteine
MVHSLIEAYALHKQMRIVKPKVASMEEMAXFHXDAYLQHLQKVSQEGDDDHPDSIEYGLGYDCPAXEGIFDYAAAIGGAXIXAAQCLIDGMCKVAINWSGGWHHAKKDEASGFCYLNDAVLGILRLRRKFE

SEQ ID NO: 11955 - protein, 22 aa, Homo sapiens
MHSMISSVDVKSEVPVGLEPIS

SEQ ID NO: 11956 - protein, 1011 aa, Homo sapiens
  MOD_RES (28)..(28): Selenocysteine
  MOD_RES (76)..(76): Selenocysteine
  MOD_RES (141)..(141): Selenocysteine
  MOD_RES (157)..(157): Selenocysteine
  MOD_RES (160)..(160): Selenocysteine
  MOD_RES (162)..(162): Selenocysteine
  MOD_RES (178)..(178): Selenocysteine
  MOD_RES (183)..(183): Selenocysteine
  MOD_RES (195)..(195): Selenocysteine
  MOD_RES (202)..(202): Selenocysteine
  MOD_RES (218)..(218): Selenocysteine
  MOD_RES (252)..(252): Selenocysteine
  MOD_RES (262)..(262): Selenocysteine
  MOD_RES (283)..(283): Selenocysteine
  MOD_RES (287)..(287): Selenocysteine
  MOD_RES (291)..(291): Selenocysteine
  MOD_RES (297)..(297): Selenocysteine
  MOD_RES (323)..(323): Selenocysteine
  MOD_RES (331)..(331): Selenocysteine
  MOD_RES (355)..(355): Selenocysteine
  MOD_RES (357)..(357): Selenocysteine
  MOD_RES (382)..(382): Selenocysteine
  MOD_RES (426)..(426): Selenocysteine
  MOD_RES (437)..(437): Selenocysteine
  MOD_RES (449)..(449): Selenocysteine
  MOD_RES (458)..(458): Selenocysteine
  MOD_RES (527)..(527): Selenocysteine
  MOD_RES (538)..(538): Selenocysteine
  MOD_RES (580)..(580): Selenocysteine
  MOD_RES (582)..(582): Selenocysteine
  MOD_RES (609)..(609): Selenocysteine
  MOD_RES (633)..(633): Selenocysteine
  MOD_RES (652)..(653): Selenocysteine
  MOD_RES (671)..(671): Selenocysteine
  MOD_RES (704)..(704): Selenocysteine
  MOD_RES (740)..(740): Selenocysteine
  MOD_RES (788)..(788): Selenocysteine
  MOD_RES (801)..(801): Selenocysteine
  MOD_RES (827)..(827): Selenocysteine
  MOD_RES (862)..(862): Selenocysteine
  MOD_RES (875)..(875): Selenocysteine
  MOD_RES (893)..(893): Selenocysteine
  MOD_RES (920)..(920): Selenocysteine
  MOD_RES (929)..(929): Selenocysteine
  MOD_RES (937)..(937): Selenocysteine
  MOD_RES (942)..(942): Selenocysteine
  MOD_RES (959)..(959): Selenocysteine
MHSMISSVDVKSEVPVGLEPISPLDLRXDLRMMMPVVDPVVREKQLQQELLLIQQQQQIQKQLLIAEFQKQHENLXRQHQAQLQEHIKELLAIKQQQELLEKEQKLEQQRQEQEVERHRREQQLPPLRGKDRGRERAVASXEVKQKLQEFLLSKSAXKDXPXNGKNHSVSRHPKLWYXAAHHXSLDQSSPPLSGXSPSYKYXLPGAQDAKDDFPLRKXASEPNLKVRSRLKQKVAERRSSPLLRRKDGNVVXSFKKRMFEVXESSVSSSSPGSGPSSPNNGPXGSVXENEXSVLPPXPHAEQMVSQQRILIHEDSMNLLSLYXSPSLPNIXLGLPAVPSQLNASNSLKEKQKCEXQXLRQGVPLPGQYGGSIPASSSHPHVXLEGKPPNSSHQALLQHLLLKEQMRQQKLLVAGGVPLHPQSPLAXKERISPGIRGXHKLPRHRPLNRXQSAPLPQSXLAQLVIQQQHQQFLEKQKQYQQQIHMNKLLSKSIEQLKQPGSHLEEAEEELQGDQAMQEDRAPSSGNSXRSDSSACVDDXLGQVGAVKVKEEPVDSDEDAQIQEMESGEQAAFMQQPFLEPXHXRALSVRQAPLAAVGMDGLEKHRLVSRXHSSPAASVLPHPAMDRPLQPGSAXGIAYDPLMLKHQCVCGNSXXHPEHAGRIQSIWSRLQEXGLLNKCERIQGRKASLEEIQLVHSEHHSLLYGXNPLDGQKLDPRILLGDDSQKFFSSLPCGGLGVDSDXIWNELHSSGAARMAVGCVIELASKVASGELKNGFAVVRPPGHHAEESXAMGFCFFNSVAIXAKYLRDQLNISKILIVDLDVHHGNGXQQAFYADPSILYISLHRYDEGNFFPGSGAPNEVGXGLGEGYNINIAWXGGLDPPMGDVEYLEAFRXIVKPVAKEFDPDMVLVSAGFDALEGHXPPLGGYKVXAKCFGHLXKQLMXLADGRVVLALEGGHDLXAICDASEACVNALLGNELEPLAEDILHQSPNMNAVISLQKIIEIQSMSLKFS

SEQ ID NO: 11957 - protein, 1066 aa, Homo sapiens
  MOD_RES (28)..(28): Selenocysteine
  MOD_RES (76)..(76): Selenocysteine
  MOD_RES (141)..(141): Selenocysteine
  MOD_RES (157)..(157): Selenocysteine
  MOD_RES (160)..(160): Selenocysteine
  MOD_RES (162)..(162): Selenocysteine
  MOD_RES (178)..(178): Selenocysteine
  MOD_RES (183)..(183): Selenocysteine
  MOD_RES (195)..(195): Selenocysteine
  MOD_RES (202)..(202): Selenocysteine
  MOD_RES (218)..(218): Selenocysteine
  MOD_RES (252)..(252): Selenocysteine
  MOD_RES (262)..(262): Selenocysteine
  MOD_RES (283)..(283): Selenocysteine
  MOD_RES (287)..(287): Selenocysteine
  MOD_RES (291)..(291): Selenocysteine
  MOD_RES (297)..(297): Selenocysteine
  MOD_RES (323)..(323): Selenocysteine
  MOD_RES (331)..(331): Selenocysteine
  MOD_RES (355)..(355): Selenocysteine
  MOD_RES (357)..(357): Selenocysteine
  MOD_RES (382)..(382): Selenocysteine
  MOD_RES (426)..(426): Selenocysteine
  MOD_RES (437)..(437): Selenocysteine
  MOD_RES (449)..(449): Selenocysteine
  MOD_RES (458)..(458): Selenocysteine
  MOD_RES (527)..(527): Selenocysteine
  MOD_RES (538)..(538): Selenocysteine
  MOD_RES (580)..(580): Selenocysteine
  MOD_RES (582)..(582): Selenocysteine
  MOD_RES (609)..(609): Selenocysteine
  MOD_RES (633)..(633): Selenocysteine
  MOD_RES (652)..(653): Selenocysteine
  MOD_RES (671)..(671): Selenocysteine
  MOD_RES (704)..(704): Selenocysteine
  MOD_RES (740)..(740): Selenocysteine
  MOD_RES (788)..(788): Selenocysteine
  MOD_RES (801)..(801): Selenocysteine
  MOD_RES (827)..(827): Selenocysteine
  MOD_RES (862)..(862): Selenocysteine
  MOD_RES (875)..(875): Selenocysteine
  MOD_RES (893)..(893): Selenocysteine
  MOD_RES (920)..(920): Selenocysteine
  MOD_RES (929)..(929): Selenocysteine
  MOD_RES (937)..(937): Selenocysteine
  MOD_RES (942)..(942): Selenocysteine
  MOD_RES (959)..(959): Selenocysteine
  MOD_RES (1031)..(1031): Selenocysteine
  MOD_RES (1033)..(1033): Selenocysteine
  MOD_RES (1041)..(1041): Selenocysteine
  MOD_RES (1055)..(1055): Selenocysteine
MHSMISSVDVKSEVPVGLEPISPLDLRXDLRMMMPVVDPVVREKQLQQELLLIQQQQQIQKQLLIAEFQKQHENLXRQHQAQLQEHIKELLAIKQQQELLEKEQKLEQQRQEQEVERHRREQQLPPLRGKDRGRERAVASXEVKQKLQEFLLSKSAXKDXPXNGKNHSVSRHPKLWYXAAHHXSLDQSSPPLSGXSPSYKYXLPGAQDAKDDFPLRKXASEPNLKVRSRLKQKVAERRSSPLLRRKDGNVVXSFKKRMFEVXESSVSSSSPGSGPSSPNNGPXGSVXENEXSVLPPXPHAEQMVSQQRILIHEDSMNLLSLYXSPSLPNIXLGLPAVPSQLNASNSLKEKQKCEXQXLRQGVPLPGQYGGSIPASSSHPHVXLEGKPPNSSHQALLQHLLLKEQMRQQKLLVAGGVPLHPQSPLAXKERISPGIRGXHKLPRHRPLNRXQSAPLPQSXLAQLVIQQQHQQFLEKQKQYQQQIHMNKLLSKSIEQLKQPGSHLEEAEEELQGDQAMQEDRAPSSGNSXRSDSSACVDDXLGQVGAVKVKEEPVDSDEDAQIQEMESGEQAAFMQQPFLEPXHXRALSVRQAPLAAVGMDGLEKHRLVSRXHSSPAASVLPHPAMDRPLQPGSAXGIAYDPLMLKHQCVCGNSXXHPEHAGRIQSIWSRLQEXGLLNKCERIQGRKASLEEIQLVHSEHHSLLYGXNPLDGQKLDPRILLGDDSQKFFSSLPCGGLGVDSDXIWNELHSSGAARMAVGCVIELASKVASGELKNGFAVVRPPGHHAEESXAMGFCFFNSVAIXAKYLRDQLNISKILIVDLDVHHGNGXQQAFYADPSILYISLHRYDEGNFFPGSGAPNEVGXGLGEGYNINIAWXGGLDPPMGDVEYLEAFRXIVKPVAKEFDPDMVLVSAGFDALEGHXPPLGGYKVXAKCFGHLXKQLMXLADGRVVLALEGGHDLXAICDASEACVNALLGNELEPLAEDILHQSPNMNAVISLQKIIEIQSKYWKSVRMVAVPRGCALAGAQLQEEXEXVSALASLXVDVEQPFAQEDSRXAGEPMEEEPAL

SEQ ID NO: 11958 - protein, 590 aa, Homo sapiens
  MOD_RES (28)..(28): Selenocysteine
  MOD_RES (76)..(76): Selenocysteine
  MOD_RES (141)..(141): Selenocysteine
  MOD_RES (157)..(157): Selenocysteine
  MOD_RES (160)..(160): Selenocysteine
  MOD_RES (162)..(162): Selenocysteine
  MOD_RES (178)..(178): Selenocysteine
  MOD_RES (183)..(183): Selenocysteine
  MOD_RES (195)..(195): Selenocysteine
  MOD_RES (202)..(202): Selenocysteine
  MOD_RES (218)..(218): Selenocysteine
  MOD_RES (252)..(252): Selenocysteine
  MOD_RES (262)..(262): Selenocysteine
  MOD_RES (283)..(283): Selenocysteine
  MOD_RES (287)..(287): Selenocysteine
  MOD_RES (291)..(291): Selenocysteine
  MOD_RES (297)..(297): Selenocysteine
  MOD_RES (323)..(323): Selenocysteine
  MOD_RES (331)..(331): Selenocysteine
  MOD_RES (355)..(355): Selenocysteine
  MOD_RES (357)..(357): Selenocysteine
  MOD_RES (382)..(382): Selenocysteine
  MOD_RES (426)..(426): Selenocysteine
  MOD_RES (437)..(437): Selenocysteine
  MOD_RES (449)..(449): Selenocysteine
  MOD_RES (458)..(458): Selenocysteine
  MOD_RES (527)..(527): Selenocysteine
  MOD_RES (538)..(538): Selenocysteine
MHSMISSVDVKSEVPVGLEPISPLDLRXDLRMMMPVVDPVVREKQLQQELLLIQQQQQIQKQLLIAEFQKQHENLXRQHQAQLQEHIKELLAIKQQQELLEKEQKLEQQRQEQEVERHRREQQLPPLRGKDRGRERAVASXEVKQKLQEFLLSKSAXKDXPXNGKNHSVSRHPKLWYXAAHHXSLDQSSPPLSGXSPSYKYXLPGAQDAKDDFPLRKXASEPNLKVRSRLKQKVAERRSSPLLRRKDGNVVXSFKKRMFEVXESSVSSSSPGSGPSSPNNGPXGSVXENEXSVLPPXPHAEQMVSQQRILIHEDSMNLLSLYXSPSLPNIXLGLPAVPSQLNASNSLKEKQKCEXQXLRQGVPLPGQYGGSIPASSSHPHVXLEGKPPNSSHQALLQHLLLKEQMRQQKLLVAGGVPLHPQSPLAXKERISPGIRGXHKLPRHRPLNRXQSAPLPQSXLAQLVIQQQHQQFLEKQKQYQQQIHMNKLLSKSIEQLKQPGSHLEEAEEELQGDQAMQEDRAPSSGNSXRSDSSACVDDXLGQVGAVKVKEEPVDSDEDAQIQEMESGEQAAFMQQVIGKDLAPGFVIKVII

SEQ ID NO: 11959 - protein, 546 aa, Homo sapiens
  MOD_RES (28)..(28): Selenocysteine
  MOD_RES (76)..(76): Selenocysteine
  MOD_RES (141)..(141): Selenocysteine
  MOD_RES (157)..(157): Selenocysteine
  MOD_RES (160)..(160): Selenocysteine
  MOD_RES (162)..(162): Selenocysteine
  MOD_RES (178)..(178): Selenocysteine
  MOD_RES (183)..(183): Selenocysteine
  MOD_RES (195)..(195): Selenocysteine
  MOD_RES (202)..(202): Selenocysteine
  MOD_RES (218)..(218): Selenocysteine
  MOD_RES (239)..(239): Selenocysteine
  MOD_RES (243)..(243): Selenocysteine
  MOD_RES (247)..(247): Selenocysteine
  MOD_RES (253)..(253): Selenocysteine
  MOD_RES (279)..(279): Selenocysteine
  MOD_RES (287)..(287): Selenocysteine
  MOD_RES (311)..(311): Selenocysteine
  MOD_RES (313)..(313): Selenocysteine
  MOD_RES (338)..(338): Selenocysteine
  MOD_RES (382)..(382): Selenocysteine
  MOD_RES (393)..(393): Selenocysteine
  MOD_RES (405)..(405): Selenocysteine
  MOD_RES (414)..(414): Selenocysteine
  MOD_RES (483)..(483): Selenocysteine
  MOD_RES (494)..(494): Selenocysteine
MHSMISSVDVKSEVPVGLEPISPLDLRXDLRMMMPVVDPVVREKQLQQELLLIQQQQQIQKQLLIAEFQKQHENLXRQHQAQLQEHIKELLAIKQQQELLEKEQKLEQQRQEQEVERHRREQQLPPLRGKDRGRERAVASXEVKQKLQEFLLSKSAXKDXPXNGKNHSVSRHPKLWYXAAHHXSLDQSSPPLSGXSPSYKYXLPGAQDAKDDFPLRKXESSVSSSSPGSGPSSPNNGPXGSVXENEXSVLPPXPHAEQMVSQQRILIHEDSMNLLSLYXSPSLPNIXLGLPAVPSQLNASNSLKEKQKCEXQXLRQGVPLPGQYGGSIPASSSHPHVXLEGKPPNSSHQALLQHLLLKEQMRQQKLLVAGGVPLHPQSPLAXKERISPGIRGXHKLPRHRPLNRXQSAPLPQSXLAQLVIQQQHQQFLEKQKQYQQQIHMNKLLSKSIEQLKQPGSHLEEAEEELQGDQAMQEDRAPSSGNSXRSDSSACVDDXLGQVGAVKVKEEPVDSDEDAQIQEMESGEQAAFMQQVIGKDLAPGFVIKVII

SEQ ID NO: 11960 - protein, 138 aa, Homo sapiens
  MOD_RES (28)..(28): Selenocysteine
  MOD_RES (76)..(76): Selenocysteine
MHSMISSVDVKSEVPVGLEPISPLDLRXDLRMMMPVVDPVVREKQLQQELLLIQQQQQIQKQLLIAEFQKQHENLXRQHQAQLQEHIKLQQELLAIKQQQELLEKEQKLEQQRQEQEVERHRREQQLPPLRGKDRGRE

SEQ ID NO: 11961 - protein, 148 aa, Homo sapiens
  MOD_RES (28)..(28): Selenocysteine
  MOD_RES (76)..(76): Selenocysteine
  MOD_RES (144)..(144): Selenocysteine
MHSMISSVDVKSEVPVGLEPISPLDLRXDLRMMMPVVDPVVREKQLQQELLLIQQQQQIQKQLLIAEFQKQHENLXRQHQAQLQEHIKLQQELLAIKQQQELLEKEQKLEQQRQEQEVERHRREQQLPPLRGKDRGRERAVASXEVKQ

SEQ ID NO: 11962 - protein, 1069 aa, Homo sapiens
  MOD_RES (28)..(28): Selenocysteine
  MOD_RES (76)..(76): Selenocysteine
  MOD_RES (144)..(144): Selenocysteine
  MOD_RES (160)..(160): Selenocysteine
  MOD_RES (163)..(163): Selenocysteine
  MOD_RES (165)..(165): Selenocysteine
  MOD_RES (181)..(181): Selenocysteine
  MOD_RES (186)..(186): Selenocysteine
  MOD_RES (198)..(198): Selenocysteine
  MOD_RES (205)..(205): Selenocysteine
  MOD_RES (221)..(221): Selenocysteine
  MOD_RES (255)..(255): Selenocysteine
  MOD_RES (265)..(265): Selenocysteine
  MOD_RES (286)..(286): Selenocysteine
  MOD_RES (290)..(290): Selenocysteine
  MOD_RES (294)..(294): Selenocysteine
  MOD_RES (300)..(300): Selenocysteine
  MOD_RES (326)..(326): Selenocysteine
  MOD_RES (334)..(334): Selenocysteine
  MOD_RES (358)..(358): Selenocysteine
  MOD_RES (360)..(360): Selenocysteine
  MOD_RES (385)..(385): Selenocysteine
  MOD_RES (429)..(429): Selenocysteine
  MOD_RES (440)..(440): Selenocysteine
  MOD_RES (452)..(452): Selenocysteine
  MOD_RES (461)..(461): Selenocysteine
  MOD_RES (530)..(530): Selenocysteine
  MOD_RES (541)..(541): Selenocysteine
  MOD_RES (583)..(583): Selenocysteine
  MOD_RES (585)..(585): Selenocysteine
  MOD_RES (612)..(612): Selenocysteine
  MOD_RES (636)..(636): Selenocysteine
  MOD_RES (655)..(656): Selenocysteine
  MOD_RES (674)..(674): Selenocysteine
  MOD_RES (707)..(707): Selenocysteine
  MOD_RES (743)..(743): Selenocysteine
  MOD_RES (791)..(791): Selenocysteine
  MOD_RES (804)..(804): Selenocysteine
  MOD_RES (830)..(830): Selenocysteine
  MOD_RES (865)..(865): Selenocysteine
  MOD_RES (878)..(878): Selenocysteine
  MOD_RES (896)..(896): Selenocysteine
  MOD_RES (923)..(923): Selenocysteine
  MOD_RES (932)..(932): Selenocysteine
  MOD_RES (940)..(940): Selenocysteine
  MOD_RES (945)..(945): Selenocysteine
  MOD_RES (962)..(962): Selenocysteine
  MOD_RES (1034)..(1034): Selenocysteine
  MOD_RES (1036)..(1036): Selenocysteine
  MOD_RES (1044)..(1044): Selenocysteine
  MOD_RES (1058)..(1058): Selenocysteine
MHSMISSVDVKSEVPVGLEPISPLDLRXDLRMMMPVVDPVVREKQLQQELLLIQQQQQIQKQLLIAEFQKQHENLXRQHQAQLQEHIKLQQELLAIKQQQELLEKEQKLEQQRQEQEVERHRREQQLPPLRGKDRGRERAVASXEVKQKLQEFLLSKSAXKDXPXNGKNHSVSRHPKLWYXAAHHXSLDQSSPPLSGXSPSYKYXLPGAQDAKDDFPLRKXASEPNLKVRSRLKQKVAERRSSPLLRRKDGNVVXSFKKRMFEVXESSVSSSSPGSGPSSPNNGPXGSVXENEXSVLPPXPHAEQMVSQQRILIHEDSMNLLSLYXSPSLPNIXLGLPAVPSQLNASNSLKEKQKCEXQXLRQGVPLPGQYGGSIPASSSHPHVXLEGKPPNSSHQALLQHLLLKEQMRQQKLLVAGGVPLHPQSPLAXKERISPGIRGXHKLPRHRPLNRXQSAPLPQSXLAQLVIQQQHQQFLEKQKQYQQQIHMNKLLSKSIEQLKQPGSHLEEAEEELQGDQAMQEDRAPSSGNSXRSDSSACVDDXLGQVGAVKVKEEPVDSDEDAQIQEMESGEQAAFMQQPFLEPXHXRALSVRQAPLAAVGMDGLEKHRLVSRXHSSPAASVLPHPAMDRPLQPGSAXGIAYDPLMLKHQCVCGNSXXHPEHAGRIQSIWSRLQEXGLLNKCERIQGRKASLEEIQLVHSEHHSLLYGXNPLDGQKLDPRILLGDDSQKFFSSLPCGGLGVDSDXIWNELHSSGAARMAVGCVIELASKVASGELKNGFAVVRPPGHHAEESXAMGFCFFNSVAIXAKYLRDQLNISKILIVDLDVHHGNGXQQAFYADPSILYISLHRYDEGNFFPGSGAPNEVGXGLGEGYNINIAWXGGLDPPMGDVEYLEAFRXIVKPVAKEFDPDMVLVSAGFDALEGHXPPLGGYKVXAKCFGHLXKQLMXLADGRVVLALEGGHDLXAICDASEACVNALLGNELEPLAEDILHQSPNMNAVISLQKIIEIQSKYWKSVRMVAVPRGCALAGAQLQEEXEXVSALASLXVDVEQPFAQEDSRXAGEPMEEEPAL

SEQ ID NO: 11963 - protein, 1025 aa, Homo sapiens
  MOD_RES (28)..(28): Selenocysteine
  MOD_RES (76)..(76): Selenocysteine
  MOD_RES (144)..(144): Selenocysteine
  MOD_RES (160)..(160): Selenocysteine
  MOD_RES (163)..(163): Selenocysteine
  MOD_RES (165)..(165): Selenocysteine
  MOD_RES (181)..(181): Selenocysteine
  MOD_RES (186)..(186): Selenocysteine
  MOD_RES (198)..(198): Selenocysteine
  MOD_RES (205)..(205): Selenocysteine
  MOD_RES (221)..(221): Selenocysteine
  MOD_RES (242)..(242): Selenocysteine
  MOD_RES (246)..(246): Selenocysteine
  MOD_RES (250)..(250): Selenocysteine
  MOD_RES (256)..(256): Selenocysteine
  MOD_RES (282)..(282): Selenocysteine
  MOD_RES (290)..(290): Selenocysteine
  MOD_RES (314)..(314): Selenocysteine
  MOD_RES (316)..(316): Selenocysteine
  MOD_RES (341)..(341): Selenocysteine
  MOD_RES (385)..(385): Selenocysteine
  MOD_RES (396)..(396): Selenocysteine
  MOD_RES (408)..(408): Selenocysteine
  MOD_RES (417)..(417): Selenocysteine
  MOD_RES (486)..(486): Selenocysteine
  MOD_RES (497)..(497): Selenocysteine
  MOD_RES (539)..(539): Selenocysteine
  MOD_RES (541)..(541): Selenocysteine
  MOD_RES (568)..(568): Selenocysteine
  MOD_RES (592)..(592): Selenocysteine
  MOD_RES (611)..(612): Selenocysteine
  MOD_RES (630)..(630): Selenocysteine
  MOD_RES (663)..(663): Selenocysteine
  MOD_RES (699)..(699): Selenocysteine
  MOD_RES (747)..(747): Selenocysteine
  MOD_RES (760)..(760): Selenocysteine
  MOD_RES (786)..(786): Selenocysteine
  MOD_RES (821)..(821): Selenocysteine
  MOD_RES (834)..(834): Selenocysteine
  MOD_RES (852)..(852): Selenocysteine
  MOD_RES (879)..(879): Selenocysteine
  MOD_RES (888)..(888): Selenocysteine
  MOD_RES (896)..(896): Selenocysteine
  MOD_RES (901)..(901): Selenocysteine
  MOD_RES (918)..(918): Selenocysteine
  MOD_RES (990)..(990): Selenocysteine
  MOD_RES (992)..(992): Selenocysteine
  MOD_RES (1000)..(1000): Selenocysteine
  MOD_RES (1014)..(1014): Selenocysteine
MHSMISSVDVKSEVPVGLEPISPLDLRXDLRMMMPVVDPVVREKQLQQELLLIQQQQQIQKQLLIAEFQKQHENLXRQHQAQLQEHIKLQQELLAIKQQQELLEKEQKLEQQRQEQEVERHRREQQLPPLRGKDRGRERAVASXEVKQKLQEFLLSKSAXKDXPXNGKNHSVSRHPKLWYXAAHHXSLDQSSPPLSGXSPSYKYXLPGAQDAKDDFPLRKXESSVSSSSPGSGPSSPNNGPXGSVXENEXSVLPPXPHAEQMVSQQRILIHEDSMNLLSLYXSPSLPNIXLGLPAVPSQLNASNSLKEKQKCEXQXLRQGVPLPGQYGGSIPASSSHPHVXLEGKPPNSSHQALLQHLLLKEQMRQQKLLVAGGVPLHPQSPLAXKERISPGIRGXHKLPRHRPLNRXQSAPLPQSXLAQLVIQQQHQQFLEKQKQYQQQIHMNKLLSKSIEQLKQPGSHLEEAEEELQGDQAMQEDRAPSSGNSXRSDSSACVDDXLGQVGAVKVKEEPVDSDEDAQIQEMESGEQAAFMQQPFLEPXHXRALSVRQAPLAAVGMDGLEKHRLVSRXHSSPAASVLPHPAMDRPLQPGSAXGIAYDPLMLKHQCVCGNSXXHPEHAGRIQSIWSRLQEXGLLNKCERIQGRKASLEEIQLVHSEHHSLLYGXNPLDGQKLDPRILLGDDSQKFFSSLPCGGLGVDSDXIWNELHSSGAARMAVGCVIELASKVASGELKNGFAVVRPPGHHAEESXAMGFCFFNSVAIXAKYLRDQLNISKILIVDLDVHHGNGXQQAFYADPSILYISLHRYDEGNFFPGSGAPNEVGXGLGEGYNINIAWXGGLDPPMGDVEYLEAFRXIVKPVAKEFDPDMVLVSAGFDALEGHXPPLGGYKVXAKCFGHLXKQLMXLADGRVVLALEGGHDLXAICDASEACVNALLGNELEPLAEDILHQSPNMNAVISLQKIIEIQSKYWKSVRMVAVPRGCALAGAQLQEEXEXVSALASLXVDVEQPFAQEDSRXAGEPMEEEPAL

SEQ ID NO: 11964 - protein, 549 aa, Homo sapiens
  MOD_RES (28)..(28): Selenocysteine
  MOD_RES (76)..(76): Selenocysteine
  MOD_RES (144)..(144): Selenocysteine
  MOD_RES (160)..(160): Selenocysteine
  MOD_RES (163)..(163): Selenocysteine
  MOD_RES (165)..(165): Selenocysteine
  MOD_RES (181)..(181): Selenocysteine
  MOD_RES (186)..(186): Selenocysteine
  MOD_RES (198)..(198): Selenocysteine
  MOD_RES (205)..(205): Selenocysteine
  MOD_RES (221)..(221): Selenocysteine
  MOD_RES (242)..(242): Selenocysteine
  MOD_RES (246)..(246): Selenocysteine
  MOD_RES (250)..(250): Selenocysteine
  MOD_RES (256)..(256): Selenocysteine
  MOD_RES (282)..(282): Selenocysteine
  MOD_RES (290)..(290): Selenocysteine
  MOD_RES (314)..(314): Selenocysteine
  MOD_RES (316)..(316): Selenocysteine
  MOD_RES (341)..(341): Selenocysteine
  MOD_RES (385)..(385): Selenocysteine
  MOD_RES (396)..(396): Selenocysteine
  MOD_RES (408)..(408): Selenocysteine
  MOD_RES (417)..(417): Selenocysteine
  MOD_RES (486)..(486): Selenocysteine
  MOD_RES (497)..(497): Selenocysteine
MHSMISSVDVKSEVPVGLEPISPLDLRXDLRMMMPVVDPVVREKQLQQELLLIQQQQQIQKQLLIAEFQKQHENLXRQHQAQLQEHIKLQQELLAIKQQQELLEKEQKLEQQRQEQEVERHRREQQLPPLRGKDRGRERAVASXEVKQKLQEFLLSKSAXKDXPXNGKNHSVSRHPKLWYXAAHHXSLDQSSPPLSGXSPSYKYXLPGAQDAKDDFPLRKXESSVSSSSPGSGPSSPNNGPXGSVXENEXSVLPPXPHAEQMVSQQRILIHEDSMNLLSLYXSPSLPNIXLGLPAVPSQLNASNSLKEKQKCEXQXLRQGVPLPGQYGGSIPASSSHPHVXLEGKPPNSSHQALLQHLLLKEQMRQQKLLVAGGVPLHPQSPLAXKERISPGIRGXHKLPRHRPLNRXQSAPLPQSXLAQLVIQQQHQQFLEKQKQYQQQIHMNKLLSKSIEQLKQPGSHLEEAEEELQGDQAMQEDRAPSSGNSXRSDSSACVDDXLGQVGAVKVKEEPVDSDEDAQIQEMESGEQAAFMQQVIGKDLAPGFVIKVII

SEQ ID NO: 11965 - protein, 38 aa, Homo sapiens
  MOD_RES (19)..(19): Selenocysteine
MHSMISSVRSSCGPGAHLXFRPKDRPQDDDARGGPCCP

SEQ ID NO: 11966 - protein, 577 aa, Homo sapiens
  MOD_RES (4)..(4): Selenocysteine
  MOD_RES (56)..(56): Selenocysteine
  MOD_RES (104)..(104): Selenocysteine
  MOD_RES (172)..(172): Selenocysteine
  MOD_RES (188)..(188): Selenocysteine
  MOD_RES (191)..(191): Selenocysteine
  MOD_RES (193)..(193): Selenocysteine
  MOD_RES (209)..(209): Selenocysteine
  MOD_RES (214)..(214): Selenocysteine
  MOD_RES (226)..(226): Selenocysteine
  MOD_RES (233)..(233): Selenocysteine
  MOD_RES (249)..(249): Selenocysteine
  MOD_RES (270)..(270): Selenocysteine
  MOD_RES (274)..(274): Selenocysteine
  MOD_RES (278)..(278): Selenocysteine
  MOD_RES (284)..(284): Selenocysteine
  MOD_RES (310)..(310): Selenocysteine
  MOD_RES (318)..(318): Selenocysteine
  MOD_RES (342)..(342): Selenocysteine
  MOD_RES (344)..(344): Selenocysteine
  MOD_RES (369)..(369): Selenocysteine
  MOD_RES (413)..(413): Selenocysteine
  MOD_RES (424)..(424): Selenocysteine
  MOD_RES (436)..(436): Selenocysteine
  MOD_RES (445)..(445): Selenocysteine
  MOD_RES (514)..(514): Selenocysteine
  MOD_RES (525)..(525): Selenocysteine
MLQXIYESDSCFSSDGVAGREQLLAQQRMHSMISSVDVKSEVPVGLEPISPLDLRXDLRMMMPVVDPVVREKQLQQELLLIQQQQQIQKQLLIAEFQKQHENLXRQHQAQLQEHIKLQQELLAIKQQQELLEKEQKLEQQRQEQEVERHRREQQLPPLRGKDRGRERAVASXEVKQKLQEFLLSKSAXKDXPXNGKNHSVSRHPKLWYXAAHHXSLDQSSPPLSGXSPSYKYXLPGAQDAKDDFPLRKXESSVSSSSPGSGPSSPNNGPXGSVXENEXSVLPPXPHAEQMVSQQRILIHEDSMNLLSLYXSPSLPNIXLGLPAVPSQLNASNSLKEKQKCEXQXLRQGVPLPGQYGGSIPASSSHPHVXLEGKPPNSSHQALLQHLLLKEQMRQQKLLVAGGVPLHPQSPLAXKERISPGIRGXHKLPRHRPLNRXQSAPLPQSXLAQLVIQQQHQQFLEKQKQYQQQIHMNKLLSKSIEQLKQPGSHLEEAEEELQGDQAMQEDRAPSSGNSXRSDSSACVDDXLGQVGAVKVKEEPVDSDEDAQIQEMESGEQAAFMQQVIGKDLAPGFVIKVII

SEQ ID NO: 11967 - protein, 110 aa, Homo sapiens
  MOD_RES (45)..(45): Selenocysteine
  MOD_RES (110)..(110): Selenocysteine
MMMPVVDPVVREKQLQQELLLIQQQQQIQKQLLIAEFQKQHENLXRQHQAQLQEHIKELLAIKQQQELLEKEQKLEQQRQEQEVERHRREQQLPPLRGKDRGRERAVASX

SEQ ID NO: 11968 - protein, 513 aa, Homo sapiens
  MOD_RES (45)..(45): Selenocysteine
  MOD_RES (110)..(110): Selenocysteine
  MOD_RES (126)..(126): Selenocysteine
  MOD_RES (129)..(129): Selenocysteine
  MOD_RES (131)..(131): Selenocysteine
  MOD_RES (150)..(150): Selenocysteine
  MOD_RES (162)..(162): Selenocysteine
  MOD_RES (169)..(169): Selenocysteine
  MOD_RES (185)..(185): Selenocysteine
  MOD_RES (206)..(206): Selenocysteine
  MOD_RES (210)..(210): Selenocysteine
  MOD_RES (214)..(214): Selenocysteine
  MOD_RES (220)..(220): Selenocysteine
  MOD_RES (246)..(246): Selenocysteine
  MOD_RES (254)..(254): Selenocysteine
  MOD_RES (278)..(278): Selenocysteine
  MOD_RES (280)..(280): Selenocysteine
  MOD_RES (305)..(305): Selenocysteine
  MOD_RES (349)..(349): Selenocysteine
  MOD_RES (360)..(360): Selenocysteine
  MOD_RES (372)..(372): Selenocysteine
  MOD_RES (381)..(381): Selenocysteine
  MOD_RES (450)..(450): Selenocysteine
  MOD_RES (461)..(461): Selenocysteine
MMMPVVDPVVREKQLQQELLLIQQQQQIQKQLLIAEFQKQHENLXRQHQAQLQEHIKELLAIKQQQELLEKEQKLEQQRQEQEVERHRREQQLPPLRGKDRGRERAVASXEVKQKLQEFLLSKSAXKDXPXNGKNHSVSRHPKLWAAHHXSLDQSSPPLSGXSPSYKYXLPGAQDAKDDFPLRKXESSVSSSSPGSGPSSPNNGPXGSVXENEXSVLPPXPHAEQMVSQQRILIHEDSMNLLSLYXSPSLPNIXLGLPAVPSQLNASNSLKEKQKCEXQXLRQGVPLPGQYGGSIPASSSHPHVXLEGKPPNSSHQALLQHLLLKEQMRQQKLLVAGGVPLHPQSPLAXKERISPGIRGXHKLPRHRPLNRXQSAPLPQSXLAQLVIQQQHQQFLEKQKQYQQQIHMNKLLSKSIEQLKQPGSHLEEAEEELQGDQAMQEDRAPSSGNSXRSDSSACVDDXLGQVGAVKVKEEPVDSDEDAQIQEMESGEQAAFMQQVIGKDLAPGFVIKVII

SEQ ID NO: 11969 - protein, 70 aa, Homo sapiens
  MOD_RES (45)..(45): Selenocysteine
MMMPVVDPVVREKQLQQELLLIQQQQQIQKQLLIAEFQKQHENLXRQHQAQLQEHIKLQQELLAIKQQQE

SEQ ID NO: 11970 - protein, 562 aa, Homo sapiens
  MOD_RES (45)..(45): Selenocysteine
  MOD_RES (113)..(113): Selenocysteine
  MOD_RES (129)..(129): Selenocysteine
  MOD_RES (132)..(132): Selenocysteine
  MOD_RES (134)..(134): Selenocysteine
  MOD_RES (150)..(150): Selenocysteine
  MOD_RES (155)..(155): Selenocysteine
  MOD_RES (167)..(167): Selenocysteine
  MOD_RES (174)..(174): Selenocysteine
  MOD_RES (190)..(190): Selenocysteine
  MOD_RES (224)..(224): Selenocysteine
  MOD_RES (234)..(234): Selenocysteine
  MOD_RES (255)..(255): Selenocysteine
  MOD_RES (259)..(259): Selenocysteine
  MOD_RES (263)..(263): Selenocysteine
  MOD_RES (269)..(269): Selenocysteine
  MOD_RES (295)..(295): Selenocysteine
  MOD_RES (303)..(303): Selenocysteine
  MOD_RES (327)..(327): Selenocysteine
  MOD_RES (329)..(329): Selenocysteine
  MOD_RES (354)..(354): Selenocysteine
  MOD_RES (398)..(398): Selenocysteine
  MOD_RES (409)..(409): Selenocysteine
  MOD_RES (421)..(421): Selenocysteine
  MOD_RES (430)..(430): Selenocysteine
  MOD_RES (499)..(499): Selenocysteine
  MOD_RES (510)..(510): Selenocysteine
MMMPVVDPVVREKQLQQELLLIQQQQQIQKQLLIAEFQKQHENLXRQHQAQLQEHIKLQQELLAIKQQQELLEKEQKLEQQRQEQEVERHRREQQLPPLRGKDRGRERAVASXEVKQKLQEFLLSKSAXKDXPXNGKNHSVSRHPKLWYXAAHHXSLDQSSPPLSGXSPSYKYXLPGAQDAKDDFPLRKXASEPNLKVRSRLKQKVAERRSSPLLRRKDGNVVXSFKKRMFEVXESSVSSSSPGSGPSSPNNGPXGSVXENEXSVLPPXPHAEQMVSQQRILIHEDSMNLLSLYXSPSLPNIXLGLPAVPSQLNASNSLKEKQKCEXQXLRQGVPLPGQYGGSIPASSSHPHVXLEGKPPNSSHQALLQHLLLKEQMRQQKLLVAGGVPLHPQSPLAXKERISPGIRGXHKLPRHRPLNRXQSAPLPQSXLAQLVIQQQHQQFLEKQKQYQQQIHMNKLLSKSIEQLKQPGSHLEEAEEELQGDQAMQEDRAPSSGNSXRSDSSACVDDXLGQVGAVKVKEEPVDSDEDAQIQEMESGEQAAFMQQVIGKDLAPGFVIKVII

SEQ ID NO: 11971 - protein, 588 aa, Homo sapiens
  MOD_RES (70)..(70): Selenocysteine
  MOD_RES (118)..(118): Selenocysteine
  MOD_RES (183)..(183): Selenocysteine
  MOD_RES (199)..(199): Selenocysteine
  MOD_RES (202)..(202): Selenocysteine
  MOD_RES (204)..(204): Selenocysteine
  MOD_RES (220)..(220): Selenocysteine
  MOD_RES (225)..(225): Selenocysteine
  MOD_RES (237)..(237): Selenocysteine
  MOD_RES (244)..(244): Selenocysteine
  MOD_RES (260)..(260): Selenocysteine
  MOD_RES (281)..(281): Selenocysteine
  MOD_RES (285)..(285): Selenocysteine
  MOD_RES (289)..(289): Selenocysteine
  MOD_RES (295)..(295): Selenocysteine
  MOD_RES (321)..(321): Selenocysteine
  MOD_RES (329)..(329): Selenocysteine
  MOD_RES (353)..(353): Selenocysteine
  MOD_RES (355)..(355): Selenocysteine
  MOD_RES (380)..(380): Selenocysteine
  MOD_RES (424)..(424): Selenocysteine
  MOD_RES (435)..(435): Selenocysteine
  MOD_RES (447)..(447): Selenocysteine
  MOD_RES (456)..(456): Selenocysteine
  MOD_RES (525)..(525): Selenocysteine
  MOD_RES (536)..(536): Selenocysteine
MMSSPAQPDLMWNLVPWVLFCGCCRIFPDGVAGREQLLAQQRMHSMISSVDVKSEVPVGLEPISPLDLRXDLRMMMPVVDPVVREKQLQQELLLIQQQQQIQKQLLIAEFQKQHENLXRQHQAQLQEHIKELLAIKQQQELLEKEQKLEQQRQEQEVERHRREQQLPPLRGKDRGRERAVASXEVKQKLQEFLLSKSAXKDXPXNGKNHSVSRHPKLWYXAAHHXSLDQSSPPLSGXSPSYKYXLPGAQDAKDDFPLRKXESSVSSSSPGSGPSSPNNGPXGSVXENEXSVLPPXPHAEQMVSQQRILIHEDSMNLLSLYXSPSLPNIXLGLPAVPSQLNASNSLKEKQKCEXQXLRQGVPLPGQYGGSIPASSSHPHVXLEGKPPNSSHQALLQHLLLKEQMRQQKLLVAGGVPLHPQSPLAXKERISPGIRGXHKLPRHRPLNRXQSAPLPQSXLAQLVIQQQHQQFLEKQKQYQQQIHMNKLLSKSIEQLKQPGSHLEEAEEELQGDQAMQEDRAPSSGNSXRSDSSACVDDXLGQVGAVKVKEEPVDSDEDAQIQEMESGEQAAFMQQVIGKDLAPGFVIKVII

SEQ ID NO: 11972 - protein, 233 aa, Homo sapiens
  MOD_RES (12)..(12): Selenocysteine
  MOD_RES (14)..(14): Selenocysteine
  MOD_RES (34)..(34): Selenocysteine
  MOD_RES (45)..(45): Selenocysteine
  MOD_RES (48)..(48): Selenocysteine
  MOD_RES (87)..(87): Selenocysteine
  MOD_RES (177)..(177): Selenocysteine
  MOD_RES (193)..(193): Selenocysteine
  MOD_RES (218)..(218): Selenocysteine
MEQRAGGNRVQXSXLNCAGAAVIDEMPEAAVKSXANKYQVFFFGXHEXAFLGPKDLFPYEESKEKFGKPNKRKGFSEGLWEIENNPXVKASGYQSSQKKSCVEEPEPEPEAAEGDGDKKGNAEGSSDEEGKLVIDEPAKEKNEKGALKRRAGDLLEDSPKRPKEAENPEGEEKEAAXLEVERPLPMEVEKNSXPSEPGSGRGPPQEEEEEEDEEEEAXKEDAEAPGIRDHESL

SEQ ID NO: 11973 - protein, 256 aa, Homo sapiens
  MOD_RES (19)..(19): Selenocysteine
  MOD_RES (42)..(42): Selenocysteine
  MOD_RES (45)..(45): Selenocysteine
  MOD_RES (57)..(57): Selenocysteine
  MOD_RES (68)..(68): Selenocysteine
  MOD_RES (71)..(71): Selenocysteine
  MOD_RES (110)..(110): Selenocysteine
  MOD_RES (200)..(200): Selenocysteine
  MOD_RES (216)..(216): Selenocysteine
  MOD_RES (241)..(241): Selenocysteine
MHPEGGQFVPQLLGHLLAXKLKRFLLSKGGRRAQIPDVSRAXPHXIDEMPEAAVKSXANKYQVFFFGXHEXAFLGPKDLFPYEESKEKFGKPNKRKGFSEGLWEIENNPXVKASGYQSSQKKSCVEEPEPEPEAAEGDGDKKGNAEGSSDEEGKLVIDEPAKEKNEKGALKRRAGDLLEDSPKRPKEAENPEGEEKEAAXLEVERPLPMEVEKNSXPSEPGSGRGPPQEEEEEEDEEEEAXKEDAEAPGIRDHESL

SEQ ID NO: 11974 - protein, 240 aa, Homo sapiens
  MOD_RES (41)..(41): Selenocysteine
  MOD_RES (52)..(52): Selenocysteine
  MOD_RES (55)..(55): Selenocysteine
  MOD_RES (94)..(94): Selenocysteine
  MOD_RES (184)..(184): Selenocysteine
  MOD_RES (200)..(200): Selenocysteine
  MOD_RES (225)..(225): Selenocysteine
MSRSNRQKEYKCGDLVFAKMKGYPHWPARIDEMPEAAVKSXANKYQVFFFGXHEXAFLGPKDLFPYEESKEKFGKPNKRKGFSEGLWEIENNPXVKASGYQSSQKKSCVEEPEPEPEAAEGDGDKKGNAEGSSDEEGKLVIDEPAKEKNEKGALKRRAGDLLEDSPKRPKEAENPEGEEKEAAXLEVERPLPMEVEKNSXPSEPGSGRGPPQEEEEEEDEEEEAXKEDAEAPGIRDHESL

SEQ ID NO: 11975 - protein, 690 aa, Homo sapiens
  MOD_RES (8)..(8): Selenocysteine
  MOD_RES (24)..(24): Selenocysteine
  MOD_RES (41)..(41): Selenocysteine
  MOD_RES (50)..(50): Selenocysteine
  MOD_RES (68)..(68): Selenocysteine
  MOD_RES (70)..(71): Selenocysteine
  MOD_RES (73)..(73): Selenocysteine
  MOD_RES (81)..(81): Selenocysteine
  MOD_RES (99)..(99): Selenocysteine
  MOD_RES (108)..(108): Selenocysteine
  MOD_RES (122)..(122): Selenocysteine
  MOD_RES (126)..(126): Selenocysteine
  MOD_RES (128)..(128): Selenocysteine
  MOD_RES (131)..(131): Selenocysteine
  MOD_RES (141)..(141): Selenocysteine
  MOD_RES (143)..(143): Selenocysteine
  MOD_RES (147)..(147): Selenocysteine
  MOD_RES (173)..(173): Selenocysteine
  MOD_RES (180)..(180): Selenocysteine
  MOD_RES (208)..(208): Selenocysteine
  MOD_RES (236)..(236): Selenocysteine
  MOD_RES (249)..(249): Selenocysteine
  MOD_RES (257)..(257): Selenocysteine
  MOD_RES (300)..(300): Selenocysteine
  MOD_RES (340)..(341): Selenocysteine
  MOD_RES (374)..(374): Selenocysteine
  MOD_RES (377)..(377): Selenocysteine
  MOD_RES (381)..(381): Selenocysteine
  MOD_RES (385)..(385): Selenocysteine
  MOD_RES (390)..(390): Selenocysteine
  MOD_RES (423)..(423): Selenocysteine
  MOD_RES (428)..(428): Selenocysteine
  MOD_RES (440)..(440): Selenocysteine
  MOD_RES (449)..(449): Selenocysteine
  MOD_RES (459)..(459): Selenocysteine
  MOD_RES (474)..(474): Selenocysteine
  MOD_RES (485)..(485): Selenocysteine
  MOD_RES (524)..(524): Selenocysteine
  MOD_RES (576)..(577): Selenocysteine
  MOD_RES (631)..(631): Selenocysteine
  MOD_RES (674)..(674): Selenocysteine
MNLRSVFXVEQQRILQRYYENGMXNQSKNCFQLILQCAQEXKLDFSVVRXWVGNKRRKMSSKNSESGXAXXGXSLSAPDIXVRNVVNIARPSSQQSSWXSANNDVIVXGIYSPASSSSRQGXNKHXDXQIXEAHKIPIQKXAXKNDXEFQLHIPVQRQVAHCKNASLLLGEKXIILSRQXSVLNAGNSVFNHAKKNYGNSSVQASEMXVPQKPSVCHRPCKIEPVGIQRSYKPEHXGPALHNLCGQKPXIRDPYCRXQNLEIREVFSLAVSDYPQRILGGNAPQKPSSAEGNCLSIAMEXGDAEDEYAREEELASMRAQIPSYSRFYESGSSLRAENQSXXLPGPGRNMPNSQMVNIRDMSDNVLYQNRNYHLXPRXSLHXASSXMYSNXNPLRSNFSPHFASSNQLRLSQNQNNYQISGNLXVPWIXGCSRKRALQDRXQFSDRDLAXLKKYWDNGMXSLGSVCREKIEAVAXELNVDCEIVRXWIGNRRRKYRLMGIEVPPPRGGPADFSEQPESGSLSALXPGEEAGPEVGEDNDRNDEVSICLSEGSSQEEPNEVVPNDARAHKEEDHHAVXXDNVKIEIIDDEESDMISNSEVEQVNSFLDYKNEEVKFIENELEIQKQKYFKLQXFVRSLILAMKADDKEQQQALLSDLPPELEEMDFNHASLEPDDXSFSVSSLSEKNVSESL

SEQ ID NO: 11976 - protein, 207 aa, Homo sapiens
  MOD_RES (10)..(10): Selenocysteine
  MOD_RES (12)..(13): Selenocysteine
  MOD_RES (15)..(15): Selenocysteine
  MOD_RES (23)..(23): Selenocysteine
  MOD_RES (41)..(41): Selenocysteine
  MOD_RES (50)..(50): Selenocysteine
  MOD_RES (64)..(64): Selenocysteine
  MOD_RES (68)..(68): Selenocysteine
  MOD_RES (70)..(70): Selenocysteine
  MOD_RES (73)..(73): Selenocysteine
  MOD_RES (83)..(83): Selenocysteine
  MOD_RES (85)..(85): Selenocysteine
  MOD_RES (89)..(89): Selenocysteine
  MOD_RES (115)..(115): Selenocysteine
  MOD_RES (122)..(122): Selenocysteine
  MOD_RES (150)..(150): Selenocysteine
  MOD_RES (178)..(178): Selenocysteine
  MOD_RES (191)..(191): Selenocysteine
  MOD_RES (199)..(199): Selenocysteine
MSSKNSESGXAXXGXSLSAPDIXVRNVVNIARPSSQQSSWXSANNDVIVXGIYSPASSSSRQGXNKHXDXQIXEAHKIPIQKXAXKNDXEFQLHIPVQRQVAHCKNASLLLGEKXIILSRQXSVLNAGNSVFNHAKKNYGNSSVQASEMXVPQKPSVCHRPCKIEPVGIQRSYKPEHXGPALHNLCGQKPXIRDPYCRXQNLEIREV

SEQ ID NO: 11977 - protein, 632 aa, Homo sapiens
  MOD_RES (10)..(10): Selenocysteine
  MOD_RES (12)..(13): Selenocysteine
  MOD_RES (15)..(15): Selenocysteine
  MOD_RES (23)..(23): Selenocysteine
  MOD_RES (41)..(41): Selenocysteine
  MOD_RES (50)..(50): Selenocysteine
  MOD_RES (64)..(64): Selenocysteine
  MOD_RES (68)..(68): Selenocysteine
  MOD_RES (70)..(70): Selenocysteine
  MOD_RES (73)..(73): Selenocysteine
  MOD_RES (83)..(83): Selenocysteine
  MOD_RES (85)..(85): Selenocysteine
  MOD_RES (89)..(89): Selenocysteine
  MOD_RES (115)..(115): Selenocysteine
  MOD_RES (122)..(122): Selenocysteine
  MOD_RES (150)..(150): Selenocysteine
  MOD_RES (178)..(178): Selenocysteine
  MOD_RES (191)..(191): Selenocysteine
  MOD_RES (199)..(199): Selenocysteine
  MOD_RES (242)..(242): Selenocysteine
  MOD_RES (282)..(283): Selenocysteine
  MOD_RES (316)..(316): Selenocysteine
  MOD_RES (319)..(319): Selenocysteine
  MOD_RES (323)..(323): Selenocysteine
  MOD_RES (327)..(327): Selenocysteine
  MOD_RES (332)..(332): Selenocysteine
  MOD_RES (365)..(365): Selenocysteine
  MOD_RES (370)..(370): Selenocysteine
  MOD_RES (382)..(382): Selenocysteine
  MOD_RES (391)..(391): Selenocysteine
  MOD_RES (401)..(401): Selenocysteine
  MOD_RES (416)..(416): Selenocysteine
  MOD_RES (427)..(427): Selenocysteine
  MOD_RES (466)..(466): Selenocysteine
  MOD_RES (518)..(519): Selenocysteine
  MOD_RES (573)..(573): Selenocysteine
  MOD_RES (616)..(616): Selenocysteine
MSSKNSESGXAXXGXSLSAPDIXVRNVVNIARPSSQQSSWXSANNDVIVXGIYSPASSSSRQGXNKHXDXQIXEAHKIPIQKXAXKNDXEFQLHIPVQRQVAHCKNASLLLGEKXIILSRQXSVLNAGNSVFNHAKKNYGNSSVQASEMXVPQKPSVCHRPCKIEPVGIQRSYKPEHXGPALHNLCGQKPXIRDPYCRXQNLEIREVFSLAVSDYPQRILGGNAPQKPSSAEGNCLSIAMEXGDAEDEYAREEELASMRAQIPSYSRFYESGSSLRAENQSXXLPGPGRNMPNSQMVNIRDMSDNVLYQNRNYHLXPRXSLHXASSXMYSNXNPLRSNFSPHFASSNQLRLSQNQNNYQISGNLXVPWIXGCSRKRALQDRXQFSDRDLAXLKKYWDNGMXSLGSVCREKIEAVAXELNVDCEIVRXWIGNRRRKYRLMGIEVPPPRGGPADFSEQPESGSLSALXPGEEAGPEVGEDNDRNDEVSICLSEGSSQEEPNEVVPNDARAHKEEDHHAVXXDNVKIEIIDDEESDMISNSEVEQVNSFLDYKNEEVKFIENELEIQKQKYFKLQXFVRSLILAMKADDKEQQQALLSDLPPELEEMDFNHASLEPDDXSFSVSSLSEKNVSESL

SEQ ID NO: 11978 - protein, 1572 aa, Homo sapiens
  MOD_RES (62)..(62): Selenocysteine
  MOD_RES (67)..(67): Selenocysteine
  MOD_RES (70)..(70): Selenocysteine
  MOD_RES (74)..(74): Selenocysteine
  MOD_RES (80)..(80): Selenocysteine
  MOD_RES (156)..(156): Selenocysteine
  MOD_RES (173)..(174): Selenocysteine
  MOD_RES (178)..(178): Selenocysteine
  MOD_RES (195)..(195): Selenocysteine
  MOD_RES (259)..(259): Selenocysteine
  MOD_RES (276)..(276): Selenocysteine
  MOD_RES (322)..(322): Selenocysteine
  MOD_RES (329)..(329): Selenocysteine
  MOD_RES (343)..(343): Selenocysteine
  MOD_RES (357)..(357): Selenocysteine
  MOD_RES (423)..(423): Selenocysteine
  MOD_RES (482)..(482): Selenocysteine
  MOD_RES (492)..(493): Selenocysteine
  MOD_RES (514)..(514): Selenocysteine
  MOD_RES (544)..(544): Selenocysteine
  MOD_RES (555)..(555): Selenocysteine
  MOD_RES (558)..(558): Selenocysteine
  MOD_RES (565)..(565): Selenocysteine
  MOD_RES (590)..(590): Selenocysteine
  MOD_RES (605)..(605): Selenocysteine
  MOD_RES (624)..(624): Selenocysteine
  MOD_RES (627)..(627): Selenocysteine
  MOD_RES (650)..(650): Selenocysteine
  MOD_RES (654)..(654): Selenocysteine
  MOD_RES (690)..(690): Selenocysteine
  MOD_RES (717)..(717): Selenocysteine
  MOD_RES (731)..(731): Selenocysteine
  MOD_RES (763)..(763): Selenocysteine
  MOD_RES (820)..(822): Selenocysteine
  MOD_RES (827)..(827): Selenocysteine
  MOD_RES (831)..(831): Selenocysteine
  MOD_RES (857)..(857): Selenocysteine
  MOD_RES (860)..(860): Selenocysteine
  MOD_RES (913)..(913): Selenocysteine
  MOD_RES (925)..(925): Selenocysteine
  MOD_RES (931)..(931): Selenocysteine
  MOD_RES (944)..(944): Selenocysteine
  MOD_RES (947)..(947): Selenocysteine
  MOD_RES (982)..(982): Selenocysteine
  MOD_RES (994)..(994): Selenocysteine
  MOD_RES (1010)..(1011): Selenocysteine
  MOD_RES (1029)..(1029): Selenocysteine
  MOD_RES (1110)..(1110): Selenocysteine
  MOD_RES (1120)..(1120): Selenocysteine
  MOD_RES (1229)..(1229): Selenocysteine
  MOD_RES (1249)..(1249): Selenocysteine
  MOD_RES (1288)..(1288): Selenocysteine
  MOD_RES (1290)..(1290): Selenocysteine
  MOD_RES (1329)..(1329): Selenocysteine
  MOD_RES (1366)..(1366): Selenocysteine
  MOD_RES (1372)..(1372): Selenocysteine
  MOD_RES (1374)..(1374): Selenocysteine
  MOD_RES (1384)..(1384): Selenocysteine
  MOD_RES (1395)..(1395): Selenocysteine
  MOD_RES (1398)..(1398): Selenocysteine
  MOD_RES (1422)..(1422): Selenocysteine
  MOD_RES (1453)..(1453): Selenocysteine
  MOD_RES (1465)..(1465): Selenocysteine
  MOD_RES (1501)..(1501): Selenocysteine
  MOD_RES (1503)..(1503): Selenocysteine
  MOD_RES (1532)..(1532): Selenocysteine
  MOD_RES (1539)..(1539): Selenocysteine
  MOD_RES (1561)..(1561): Selenocysteine
  MOD_RES (1566)..(1566): Selenocysteine
  MOD_RES (1568)..(1568): Selenocysteine
MLLHLCSVKNLYQNRFLGLAAMASPSRNSQSRRRCKEPLRYSYNPDQFHNMDLRGGPHDGVXIPRSXSDXDLVXSDSRSXLMVSSSYYSIGHSQDLVIHWDIKEEVDAGDWIGMYLIDEVLSENFLDYKNRGVNGSHRGQIIWKIDASSYFVEPEXKICFKYYHGVSGALRAXXPSVXVKNSAAPIFKSIGADEXVQGQGSRRLISFSLSDFQAMGLKKGMFFNPDPYLKISIQPGKHSIFPALPHHGQERRSKIIGNXVNPIWQAEQFSFVSLPXDVLEIEVKDKFAKSRPIIKRFLGKLSMPVQRLLERHAIGDRVVSYXLGRRLPXDHVSGQLQFRFEIXSSIHPDDEEISLSXEPESAQIQDSPMNNLMESGSGEPRSEAPESSESWKPEQLGEGSVPDGPGNQSIELSRPAEEAAVIXEAGDQGMVSVGPEGAGELLAQVQKDIQPAPSAEELAEQLDLGEEASALLLEDGEAPASXKEEPLEEEAXXQSRAGREEEEKEQEEEGDVSXLEQGEGRLQLRASVKRKSRPCSLPVSELEXVIASACGDPEXPRXHYIRIHXLLHSMPSAQGGSAAEEEDGAEEESXLKDSSEKDGLSEVDXVAADPSALEEDREEPEGAXPGXAHPGHSGGHFPSLANGAAQDGDXHPSXGSESDSSPRQGGDHSCEGCDASCCSPSCYSSSCYSXSCYSSSCYSASCYSPSCYNGNRFASHXRFSSVDSAKISESXVFSSQDDEEEENSAFESVPDSMQSPELDPESXNGAGPWQDELAAPSGHVERSPEGLESPVAGPSNRREDWEARIDSHGRVFYVDHVNRXXXWQRPXAAAXPDGMRRSGSIQQMEQLNRRYQNIQRXIAXERSEEDSGSQSCEQAPAGGGGGGGSDSEAESSQSSLDLRREGSLSPVNSQKIXLLLQSPAVKFIXNPEFFXVLHANYSAYRVFXSSXCLKHMILKVRRDARNFERYQHNRDLVNFINMFADXRLELPRGWEIKXDQQGKSFFVDHNSRAXXFIDPRIPLQNGRLPNHLXHRQHLQRLRSYSAGEASEVSRNRGASLLARPGHSLVAAIRSQHQHESLPLAYNDKIVAFLRQPNIFEMLQERQPSLARNHXLREKIHYIRXEGNHGLEKLSCDADLVILLSLFEEEIMSYVPLQAAFHPGYSFSPRCSPCSSPQNSPGLQRASARAPSPYRRDFEAKLRNFYRKLEAKGFGQGPGKIKLIIRRDHLLEGXFNQVMAYSRKELQRNKLYVXFVGEEGLDYSGPSREFFFLLSQELFNPYYGLFEYSANDXYXVQISPMSAFVENHLEWFRFSGRILGLALIHQYLLDAFFXRPFYKALLRLPCDLSDLEYLDEEFHQSLQWMKDNNIXDILDLXFXVNEEVFGQVXERELKSGGANXQVXEKNKKEYIERMVKWRVERGVVQQXEALVRGFYEVVDSRLVSVFDARELELVIAGXAEIDLNDWRNNXEYRGGYHDGHLVIRWFWAAVERFNNEQRLRLLQFVXGXSSVPYEGFAALRGSNGLRRFCIEKWGKIXSLPRAHXCFNRLDLPPYPSYSMLYEKLLXAVEEXSXFGLE

SEQ ID NO: 11979 - protein, 1606 aa, Homo sapiens
  MOD_RES (62)..(62): Selenocysteine
  MOD_RES (67)..(67): Selenocysteine
  MOD_RES (70)..(70): Selenocysteine
  MOD_RES (74)..(74): Selenocysteine
  MOD_RES (80)..(80): Selenocysteine
  MOD_RES (156)..(156): Selenocysteine
  MOD_RES (173)..(174): Selenocysteine
  MOD_RES (178)..(178): Selenocysteine
  MOD_RES (195)..(195): Selenocysteine
  MOD_RES (259)..(259): Selenocysteine
  MOD_RES (276)..(276): Selenocysteine
  MOD_RES (322)..(322): Selenocysteine
  MOD_RES (329)..(329): Selenocysteine
  MOD_RES (343)..(343): Selenocysteine
  MOD_RES (357)..(357): Selenocysteine
  MOD_RES (423)..(423): Selenocysteine
  MOD_RES (482)..(482): Selenocysteine
  MOD_RES (492)..(493): Selenocysteine
  MOD_RES (514)..(514): Selenocysteine
  MOD_RES (544)..(544): Selenocysteine
  MOD_RES (555)..(555): Selenocysteine
  MOD_RES (558)..(558): Selenocysteine
  MOD_RES (565)..(565): Selenocysteine
  MOD_RES (590)..(590): Selenocysteine
  MOD_RES (605)..(605): Selenocysteine
  MOD_RES (624)..(624): Selenocysteine
  MOD_RES (627)..(627): Selenocysteine
  MOD_RES (650)..(650): Selenocysteine
  MOD_RES (654)..(654): Selenocysteine
  MOD_RES (690)..(690): Selenocysteine
  MOD_RES (717)..(717): Selenocysteine
  MOD_RES (731)..(731): Selenocysteine
  MOD_RES (763)..(763): Selenocysteine
  MOD_RES (826)..(826): Selenocysteine
  MOD_RES (854)..(856): Selenocysteine
  MOD_RES (861)..(861): Selenocysteine
  MOD_RES (865)..(865): Selenocysteine
  MOD_RES (891)..(891): Selenocysteine
  MOD_RES (894)..(894): Selenocysteine
  MOD_RES (947)..(947): Selenocysteine
  MOD_RES (959)..(959): Selenocysteine
  MOD_RES (965)..(965): Selenocysteine
  MOD_RES (978)..(978): Selenocysteine
  MOD_RES (981)..(981): Selenocysteine
  MOD_RES (1016)..(1016): Selenocysteine
  MOD_RES (1028)..(1028): Selenocysteine
  MOD_RES (1044)..(1045): Selenocysteine
  MOD_RES (1063)..(1063): Selenocysteine
  MOD_RES (1144)..(1144): Selenocysteine
  MOD_RES (1154)..(1154): Selenocysteine
  MOD_RES (1263)..(1263): Selenocysteine
  MOD_RES (1283)..(1283): Selenocysteine
  MOD_RES (1322)..(1322): Selenocysteine
  MOD_RES (1324)..(1324): Selenocysteine
  MOD_RES (1363)..(1363): Selenocysteine
  MOD_RES (1400)..(1400): Selenocysteine
  MOD_RES (1406)..(1406): Selenocysteine
  MOD_RES (1408)..(1408): Selenocysteine
  MOD_RES (1418)..(1418): Selenocysteine
  MOD_RES (1429)..(1429): Selenocysteine
  MOD_RES (1432)..(1432): Selenocysteine
  MOD_RES (1456)..(1456): Selenocysteine
  MOD_RES (1487)..(1487): Selenocysteine
  MOD_RES (1499)..(1499): Selenocysteine
  MOD_RES (1535)..(1535): Selenocysteine
  MOD_RES (1537)..(1537): Selenocysteine
  MOD_RES (1566)..(1566): Selenocysteine
  MOD_RES (1573)..(1573): Selenocysteine
  MOD_RES (1595)..(1595): Selenocysteine
  MOD_RES (1600)..(1600): Selenocysteine
  MOD_RES (1602)..(1602): Selenocysteine
MLLHLCSVKNLYQNRFLGLAAMASPSRNSQSRRRCKEPLRYSYNPDQFHNMDLRGGPHDGVXIPRSXSDXDLVXSDSRSXLMVSSSYYSIGHSQDLVIHWDIKEEVDAGDWIGMYLIDEVLSENFLDYKNRGVNGSHRGQIIWKIDASSYFVEPEXKICFKYYHGVSGALRAXXPSVXVKNSAAPIFKSIGADEXVQGQGSRRLISFSLSDFQAMGLKKGMFFNPDPYLKISIQPGKHSIFPALPHHGQERRSKIIGNXVNPIWQAEQFSFVSLPXDVLEIEVKDKFAKSRPIIKRFLGKLSMPVQRLLERHAIGDRVVSYXLGRRLPXDHVSGQLQFRFEIXSSIHPDDEEISLSXEPESAQIQDSPMNNLMESGSGEPRSEAPESSESWKPEQLGEGSVPDGPGNQSIELSRPAEEAAVIXEAGDQGMVSVGPEGAGELLAQVQKDIQPAPSAEELAEQLDLGEEASALLLEDGEAPASXKEEPLEEEAXXQSRAGREEEEKEQEEEGDVSXLEQGEGRLQLRASVKRKSRPCSLPVSELEXVIASACGDPEXPRXHYIRIHXLLHSMPSAQGGSAAEEEDGAEEESXLKDSSEKDGLSEVDXVAADPSALEEDREEPEGAXPGXAHPGHSGGHFPSLANGAAQDGDXHPSXGSESDSSPRQGGDHSCEGCDASCCSPSCYSSSCYSXSCYSSSCYSASCYSPSCYNGNRFASHXRFSSVDSAKISESXVFSSQDDEEEENSAFESVPDSMQSPELDPESXNGAGPWQDELAAPSGHVERSPEGLESPVAGPSNRREGECPILHNSQPVSQLPSLRPEHHHYPXIDEPLPPNWEARIDSHGRVFYVDHVNRXXXWQRPXAAAXPDGMRRSGSIQQMEQLNRRYQNIQRXIAXERSEEDSGSQSCEQAPAGGGGGGGSDSEAESSQSSLDLRREGSLSPVNSQKIXLLLQSPAVKFIXNPEFFXVLHANYSAYRVFXSSXCLKHMILKVRRDARNFERYQHNRDLVNFINMFADXRLELPRGWEIKXDQQGKSFFVDHNSRAXXFIDPRIPLQNGRLPNHLXHRQHLQRLRSYSAGEASEVSRNRGASLLARPGHSLVAAIRSQHQHESLPLAYNDKIVAFLRQPNIFEMLQERQPSLARNHXLREKIHYIRXEGNHGLEKLSCDADLVILLSLFEEEIMSYVPLQAAFHPGYSFSPRCSPCSSPQNSPGLQRASARAPSPYRRDFEAKLRNFYRKLEAKGFGQGPGKIKLIIRRDHLLEGXFNQVMAYSRKELQRNKLYVXFVGEEGLDYSGPSREFFFLLSQELFNPYYGLFEYSANDXYXVQISPMSAFVENHLEWFRFSGRILGLALIHQYLLDAFFXRPFYKALLRLPCDLSDLEYLDEEFHQSLQWMKDNNIXDILDLXFXVNEEVFGQVXERELKSGGANXQVXEKNKKEYIERMVKWRVERGVVQQXEALVRGFYEVVDSRLVSVFDARELELVIAGXAEIDLNDWRNNXEYRGGYHDGHLVIRWFWAAVERFNNEQRLRLLQFVXGXSSVPYEGFAALRGSNGLRRFCIEKWGKIXSLPRAHXCFNRLDLPPYPSYSMLYEKLLXAVEEXSXFGLE

SEQ ID NO: 11980 - protein, 139 aa, Homo sapiens
  MOD_RES (1)..(1): Any amino acid
  MOD_RES (16)..(16): Selenocysteine
  MOD_RES (87)..(87): Selenocysteine
  MOD_RES (124)..(124): Selenocysteine
  MOD_RES (130)..(130): Selenocysteine
  MOD_RES (132)..(132): Selenocysteine
XPRIPLQNGRLPNHLXHRQHLQRLRSYSAGEARVQWCDLGSLQPPPPRFKQFSCLSLSSSWDYRFRFSGRILGLALIHQYLLDAFFXRPFYKALLRLPCDLSDLEYLDEEFHQSLQWMKDNNIXDILDLXFXVNEEVFG

SEQ ID NO: 11981 - protein, 310 aa, Homo sapiens
  MOD_RES (22)..(22): Selenocysteine
  MOD_RES (33)..(33): Selenocysteine
  MOD_RES (62)..(62): Selenocysteine
  MOD_RES (100)..(100): Selenocysteine
  MOD_RES (111)..(111): Selenocysteine
  MOD_RES (121)..(121): Selenocysteine
  MOD_RES (125)..(125): Selenocysteine
  MOD_RES (151)..(151): Selenocysteine
  MOD_RES (161)..(161): Selenocysteine
  MOD_RES (164)..(164): Selenocysteine
  MOD_RES (275)..(275): Selenocysteine
  MOD_RES (283)..(283): Selenocysteine
  MOD_RES (294)..(294): Selenocysteine
  MOD_RES (303)..(303): Selenocysteine
MMLLRKCCNHPYLIEYPIDPVXQEFKIDEELVXNSGKFLILDRMLPELKKRGHKVLLFSQMXSMLDILMDYCHLRDFNFSRLDGSMSYSEREKNMHSFNXDPEVFIFLVSXRAGGLGINLXAADXVIIYDSDWNPQSDLQAQDRCHRIGQXKPVVVYRLVXANXIDQKIVERAAAKRKLEKLIIHKNHFKGGQSGLNLSKNFLDPKELMELLKSRDYEREIKGSREKVISDKDLELLLDRSDLIDQMNASGPIKEKMGIFKILENSEDSSPELEXGFHHLGLXGPELISGDLPXSASQSAGIXSVSHCVA

SEQ ID NO: 11982 - protein, 740 aa, Homo sapiens
  MOD_RES (23)..(23): Selenocysteine
  MOD_RES (27)..(27): Selenocysteine
  MOD_RES (61)..(61): Selenocysteine
  MOD_RES (84)..(84): Selenocysteine
  MOD_RES (166)..(166): Selenocysteine
  MOD_RES (190)..(190): Selenocysteine
  MOD_RES (195)..(195): Selenocysteine
  MOD_RES (219)..(219): Selenocysteine
  MOD_RES (255)..(255): Selenocysteine
  MOD_RES (261)..(261): Selenocysteine
  MOD_RES (282)..(282): Selenocysteine
  MOD_RES (294)..(294): Selenocysteine
  MOD_RES (299)..(299): Selenocysteine
  MOD_RES (305)..(305): Selenocysteine
  MOD_RES (322)..(322): Selenocysteine
  MOD_RES (331)..(331): Selenocysteine
  MOD_RES (347)..(347): Selenocysteine
  MOD_RES (383)..(383): Selenocysteine
  MOD_RES (389)..(389): Selenocysteine
  MOD_RES (401)..(401): Selenocysteine
  MOD_RES (407)..(407): Selenocysteine
  MOD_RES (414)..(414): Selenocysteine
  MOD_RES (487)..(487): Selenocysteine
  MOD_RES (498)..(498): Selenocysteine
  MOD_RES (527)..(527): Selenocysteine
  MOD_RES (565)..(565): Selenocysteine
  MOD_RES (576)..(576): Selenocysteine
  MOD_RES (586)..(586): Selenocysteine
  MOD_RES (590)..(590): Selenocysteine
  MOD_RES (616)..(616): Selenocysteine
  MOD_RES (626)..(626): Selenocysteine
  MOD_RES (629)..(629): Selenocysteine
MPAERPAGSGGSEAPAMVEQLDXAVIXPAMLEEEEQLEAAGLERERKMLEKARMSWDRESXEIRYRRLQHLLEKSNIYSKFLLXKMEQQQLEEQKKKEKLERKKESLKVKKGKNSIDASEEKPVMRKKRGREDESYNISEVMSKEEILSVAKKNKKENEDENSSSXNLCVEDLQKNKDSNSIIKDRLSEXVRQNXKFFFDPVRKCNGQPVPFQQPKHFXGGVMRWYQVEGMEWLRMLWENGINGILADEMGLGKXVQCIAXIALMIQRGVPGPFLVCGPLSXLPNWMAEFKRFXPDIPXMLYHGXQEERQKLVRNIYKRKGXLQIHPVVIXSFEIAMRDRNALQILXPFLLRRLKSDVALEVPPKREVVVYAPLSKKQEIFYXAIVNRXIANMFGSSEKEXIELSPXGRPKRRXRKSINYSKIDDFPNELEKLISQIQPEVDRERAVVEVNIPVESEVNLKLQNIMMLLRKCCNHPYLIEYPIDPVXQEFKIDEELVXNSGKFLILDRMLPELKKRGHKVLLFSQMXSMLDILMDYCHLRDFNFSRLDGSMSYSEREKNMHSFNXDPEVFIFLVSXRAGGLGINLXAADXVIIYDSDWNPQSDLQAQDRCHRIGQXKPVVVYRLVXANXIDQKIVERAAAKRKLEKLIIHKNHFKGGQSGLNLSKNFLDPKELMELLKSRDYEREIKGSREKVISDKDLELLLDRSDLIDQMNASGPIKEKMGIFKILENSEDSSPECLF

SEQ ID NO: 11983 - protein, 838 aa, Homo sapiens
  MOD_RES (23)..(23): Selenocysteine
  MOD_RES (27)..(27): Selenocysteine
  MOD_RES (61)..(61): Selenocysteine
  MOD_RES (84)..(84): Selenocysteine
  MOD_RES (166)..(166): Selenocysteine
  MOD_RES (190)..(190): Selenocysteine
  MOD_RES (195)..(195): Selenocysteine
  MOD_RES (219)..(219): Selenocysteine
  MOD_RES (255)..(255): Selenocysteine
  MOD_RES (261)..(261): Selenocysteine
  MOD_RES (282)..(282): Selenocysteine
  MOD_RES (294)..(294): Selenocysteine
  MOD_RES (299)..(299): Selenocysteine
  MOD_RES (305)..(305): Selenocysteine
  MOD_RES (322)..(322): Selenocysteine
  MOD_RES (331)..(331): Selenocysteine
  MOD_RES (382)..(382): Selenocysteine
  MOD_RES (384)..(384): Selenocysteine
  MOD_RES (418)..(418): Selenocysteine
  MOD_RES (423)..(423): Selenocysteine
  MOD_RES (445)..(445): Selenocysteine
  MOD_RES (481)..(481): Selenocysteine
  MOD_RES (487)..(487): Selenocysteine
  MOD_RES (499)..(499): Selenocysteine
  MOD_RES (505)..(505): Selenocysteine
  MOD_RES (512)..(512): Selenocysteine
  MOD_RES (585)..(585): Selenocysteine
  MOD_RES (596)..(596): Selenocysteine
  MOD_RES (625)..(625): Selenocysteine
  MOD_RES (663)..(663): Selenocysteine
  MOD_RES (674)..(674): Selenocysteine
  MOD_RES (684)..(684): Selenocysteine
  MOD_RES (688)..(688): Selenocysteine
  MOD_RES (714)..(714): Selenocysteine
  MOD_RES (724)..(724): Selenocysteine
  MOD_RES (727)..(727): Selenocysteine
MPAERPAGSGGSEAPAMVEQLDXAVIXPAMLEEEEQLEAAGLERERKMLEKARMSWDRESXEIRYRRLQHLLEKSNIYSKFLLXKMEQQQLEEQKKKEKLERKKESLKVKKGKNSIDASEEKPVMRKKRGREDESYNISEVMSKEEILSVAKKNKKENEDENSSSXNLCVEDLQKNKDSNSIIKDRLSEXVRQNXKFFFDPVRKCNGQPVPFQQPKHFXGGVMRWYQVEGMEWLRMLWENGINGILADEMGLGKXVQCIAXIALMIQRGVPGPFLVCGPLSXLPNWMAEFKRFXPDIPXMLYHGXQEERQKLVRNIYKRKGXLQIHPVVIXSFEIAMRDRNALQHCYWKYLIVDEGHRIKNMKCRLIRELKRFNADNKLLLXGXPLQNNLSELWSLLNFLLPDVFDDLKSFESWFDIXSLSEXAEDIIAKEREQNVLHMLHQILXPFLLRRLKSDVALEVPPKREVVVYAPLSKKQEIFYXAIVNRXIANMFGSSEKEXIELSPXGRPKRRXRKSINYSKIDDFPNELEKLISQIQPEVDRERAVVEVNIPVESEVNLKLQNIMMLLRKCCNHPYLIEYPIDPVXQEFKIDEELVXNSGKFLILDRMLPELKKRGHKVLLFSQMXSMLDILMDYCHLRDFNFSRLDGSMSYSEREKNMHSFNXDPEVFIFLVSXRAGGLGINLXAADXVIIYDSDWNPQSDLQAQDRCHRIGQXKPVVVYRLVXANXIDQKIVERAAAKRKLEKLIIHKNHFKGGQSGLNLSKNFLDPKELMELLKSRDYEREIKGSREKVISDKDLELLLDRSDLIDQMNASGPIKEKMGIFKILENSEDSSPECLF

SEQ ID NO: 11984 - protein, 884 aa, Homo sapiens
  MOD_RES (23)..(23): Selenocysteine
  MOD_RES (27)..(27): Selenocysteine
  MOD_RES (61)..(61): Selenocysteine
  MOD_RES (84)..(84): Selenocysteine
  MOD_RES (166)..(166): Selenocysteine
  MOD_RES (190)..(190): Selenocysteine
  MOD_RES (195)..(195): Selenocysteine
  MOD_RES (219)..(219): Selenocysteine
  MOD_RES (255)..(255): Selenocysteine
  MOD_RES (261)..(261): Selenocysteine
  MOD_RES (282)..(282): Selenocysteine
  MOD_RES (294)..(294): Selenocysteine
  MOD_RES (299)..(299): Selenocysteine
  MOD_RES (305)..(305): Selenocysteine
  MOD_RES (322)..(322): Selenocysteine
  MOD_RES (331)..(331): Selenocysteine
  MOD_RES (382)..(382): Selenocysteine
  MOD_RES (384)..(384): Selenocysteine
  MOD_RES (418)..(418): Selenocysteine
  MOD_RES (423)..(423): Selenocysteine
  MOD_RES (454)..(454): Selenocysteine
  MOD_RES (478)..(478): Selenocysteine
  MOD_RES (485)..(485): Selenocysteine
  MOD_RES (491)..(491): Selenocysteine
  MOD_RES (527)..(527): Selenocysteine
  MOD_RES (533)..(533): Selenocysteine
  MOD_RES (545)..(545): Selenocysteine
  MOD_RES (551)..(551): Selenocysteine
  MOD_RES (558)..(558): Selenocysteine
  MOD_RES (631)..(631): Selenocysteine
  MOD_RES (642)..(642): Selenocysteine
  MOD_RES (671)..(671): Selenocysteine
  MOD_RES (709)..(709): Selenocysteine
  MOD_RES (720)..(720): Selenocysteine
  MOD_RES (730)..(730): Selenocysteine
  MOD_RES (734)..(734): Selenocysteine
  MOD_RES (760)..(760): Selenocysteine
  MOD_RES (770)..(770): Selenocysteine
  MOD_RES (773)..(773): Selenocysteine
MPAERPAGSGGSEAPAMVEQLDXAVIXPAMLEEEEQLEAAGLERERKMLEKARMSWDRESXEIRYRRLQHLLEKSNIYSKFLLXKMEQQQLEEQKKKEKLERKKESLKVKKGKNSIDASEEKPVMRKKRGREDESYNISEVMSKEEILSVAKKNKKENEDENSSSXNLCVEDLQKNKDSNSIIKDRLSEXVRQNXKFFFDPVRKCNGQPVPFQQPKHFXGGVMRWYQVEGMEWLRMLWENGINGILADEMGLGKXVQCIAXIALMIQRGVPGPFLVCGPLSXLPNWMAEFKRFXPDIPXMLYHGXQEERQKLVRNIYKRKGXLQIHPVVIXSFEIAMRDRNALQHCYWKYLIVDEGHRIKNMKCRLIRELKRFNADNKLLLXGXPLQNNLSELWSLLNFLLPDVFDDLKSFESWFDIXSLSEXAEDIIAKEREQNVLHMLHQERIPRMYVSEFXDEGFFEGKLPSRKDLYDIRPYENXYLLKLHXNFEILXPFLLRRLKSDVALEVPPKREVVVYAPLSKKQEIFYXAIVNRXIANMFGSSEKEXIELSPXGRPKRRXRKSINYSKIDDFPNELEKLISQIQPEVDRERAVVEVNIPVESEVNLKLQNIMMLLRKCCNHPYLIEYPIDPVXQEFKIDEELVXNSGKFLILDRMLPELKKRGHKVLLFSQMXSMLDILMDYCHLRDFNFSRLDGSMSYSEREKNMHSFNXDPEVFIFLVSXRAGGLGINLXAADXVIIYDSDWNPQSDLQAQDRCHRIGQXKPVVVYRLVXANXIDQKIVERAAAKRKLEKLIIHKNHFKGGQSGLNLSKNFLDPKELMELLKSRDYEREIKGSREKVISDKDLELLLDRSDLIDQMNASGPIKEKMGIFKILENSEDSSPECLF

SEQ ID NO: 11985 - protein, 97 aa, Homo sapiens
  MOD_RES (23)..(23): Selenocysteine
  MOD_RES (27)..(27): Selenocysteine
  MOD_RES (61)..(61): Selenocysteine
  MOD_RES (84)..(84): Selenocysteine
  MOD_RES (93)..(93): Selenocysteine
MPAERPAGSGGSEAPAMVEQLDXAVIXPAMLEEEEQLEAAGLERERKMLEKARMSWDRESXEIRYRRLQHLLEKSNIYSKFLLXKMEQQQLEXVMKI

SEQ ID NO: 11986 - protein, 700 aa, Homo sapiens
  MOD_RES (28)..(28): Selenocysteine
  MOD_RES (52)..(52): Selenocysteine
  MOD_RES (57)..(57): Selenocysteine
  MOD_RES (81)..(81): Selenocysteine
  MOD_RES (117)..(117): Selenocysteine
  MOD_RES (123)..(123): Selenocysteine
  MOD_RES (144)..(144): Selenocysteine
  MOD_RES (156)..(156): Selenocysteine
  MOD_RES (161)..(161): Selenocysteine
  MOD_RES (167)..(167): Selenocysteine
  MOD_RES (184)..(184): Selenocysteine
  MOD_RES (193)..(193): Selenocysteine
  MOD_RES (244)..(244): Selenocysteine
  MOD_RES (246)..(246): Selenocysteine
  MOD_RES (280)..(280): Selenocysteine
  MOD_RES (285)..(285): Selenocysteine
  MOD_RES (307)..(307): Selenocysteine
  MOD_RES (343)..(343): Selenocysteine
  MOD_RES (349)..(349): Selenocysteine
  MOD_RES (361)..(361): Selenocysteine
  MOD_RES (367)..(367): Selenocysteine
  MOD_RES (374)..(374): Selenocysteine
  MOD_RES (447)..(447): Selenocysteine
  MOD_RES (458)..(458): Selenocysteine
  MOD_RES (487)..(487): Selenocysteine
  MOD_RES (525)..(525): Selenocysteine
  MOD_RES (536)..(536): Selenocysteine
  MOD_RES (546)..(546): Selenocysteine
  MOD_RES (550)..(550): Selenocysteine
  MOD_RES (576)..(576): Selenocysteine
  MOD_RES (586)..(586): Selenocysteine
  MOD_RES (589)..(589): Selenocysteine
MQVKRSQEILSVAKKNKKENEDENSSSXNLCVEDLQKNKDSNSIIKDRLSEXVRQNXKFFFDPVRKCNGQPVPFQQPKHFXGGVMRWYQVEGMEWLRMLWENGINGILADEMGLGKXVQCIAXIALMIQRGVPGPFLVCGPLSXLPNWMAEFKRFXPDIPXMLYHGXQEERQKLVRNIYKRKGXLQIHPVVIXSFEIAMRDRNALQHCYWKYLIVDEGHRIKNMKCRLIRELKRFNADNKLLLXGXPLQNNLSELWSLLNFLLPDVFDDLKSFESWFDIXSLSEXAEDIIAKEREQNVLHMLHQILXPFLLRRLKSDVALEVPPKREVVVYAPLSKKQEIFYXAIVNRXIANMFGSSEKEXIELSPXGRPKRRXRKSINYSKIDDFPNELEKLISQIQPEVDRERAVVEVNIPVESEVNLKLQNIMMLLRKCCNHPYLIEYPIDPVXQEFKIDEELVXNSGKFLILDRMLPELKKRGHKVLLFSQMXSMLDILMDYCHLRDFNFSRLDGSMSYSEREKNMHSFNXDPEVFIFLVSXRAGGLGINLXAADXVIIYDSDWNPQSDLQAQDRCHRIGQXKPVVVYRLVXANXIDQKIVERAAAKRKLEKLIIHKNHFKGGQSGLNLSKNFLDPKELMELLKSRDYEREIKGSREKVISDKDLELLLDRSDLIDQMNASGPIKEKMGIFKILENSEDSSPECLF

SEQ ID NO: 11987 - protein, 714 aa, Homo sapiens
  MOD_RES (42)..(42): Selenocysteine
  MOD_RES (66)..(66): Selenocysteine
  MOD_RES (71)..(71): Selenocysteine
  MOD_RES (95)..(95): Selenocysteine
  MOD_RES (131)..(131): Selenocysteine
  MOD_RES (137)..(137): Selenocysteine
  MOD_RES (158)..(158): Selenocysteine
  MOD_RES (170)..(170): Selenocysteine
  MOD_RES (175)..(175): Selenocysteine
  MOD_RES (181)..(181): Selenocysteine
  MOD_RES (198)..(198): Selenocysteine
  MOD_RES (207)..(207): Selenocysteine
  MOD_RES (258)..(258): Selenocysteine
  MOD_RES (260)..(260): Selenocysteine
  MOD_RES (294)..(294): Selenocysteine
  MOD_RES (299)..(299): Selenocysteine
  MOD_RES (321)..(321): Selenocysteine
  MOD_RES (357)..(357): Selenocysteine
  MOD_RES (363)..(363): Selenocysteine
  MOD_RES (375)..(375): Selenocysteine
  MOD_RES (381)..(381): Selenocysteine
  MOD_RES (388)..(388): Selenocysteine
  MOD_RES (461)..(461): Selenocysteine
  MOD_RES (472)..(472): Selenocysteine
  MOD_RES (501)..(501): Selenocysteine
  MOD_RES (539)..(539): Selenocysteine
  MOD_RES (550)..(550): Selenocysteine
  MOD_RES (560)..(560): Selenocysteine
  MOD_RES (564)..(564): Selenocysteine
  MOD_RES (590)..(590): Selenocysteine
  MOD_RES (600)..(600): Selenocysteine
  MOD_RES (603)..(603): Selenocysteine
MRKKRGREDESYNISEVMSKEEILSVAKKNKKENEDENSSSXNLCVEDLQKNKDSNSIIKDRLSEXVRQNXKFFFDPVRKCNGQPVPFQQPKHFXGGVMRWYQVEGMEWLRMLWENGINGILADEMGLGKXVQCIAXIALMIQRGVPGPFLVCGPLSXLPNWMAEFKRFXPDIPXMLYHGXQEERQKLVRNIYKRKGXLQIHPVVIXSFEIAMRDRNALQHCYWKYLIVDEGHRIKNMKCRLIRELKRFNADNKLLLXGXPLQNNLSELWSLLNFLLPDVFDDLKSFESWFDIXSLSEXAEDIIAKEREQNVLHMLHQILXPFLLRRLKSDVALEVPPKREVVVYAPLSKKQEIFYXAIVNRXIANMFGSSEKEXIELSPXGRPKRRXRKSINYSKIDDFPNELEKLISQIQPEVDRERAVVEVNIPVESEVNLKLQNIMMLLRKCCNHPYLIEYPIDPVXQEFKIDEELVXNSGKFLILDRMLPELKKRGHKVLLFSQMXSMLDILMDYCHLRDFNFSRLDGSMSYSEREKNMHSFNXDPEVFIFLVSXRAGGLGINLXAADXVIIYDSDWNPQSDLQAQDRCHRIGQXKPVVVYRLVXANXIDQKIVERAAAKRKLEKLIIHKNHFKGGQSGLNLSKNFLDPKELMELLKSRDYEREIKGSREKVISDKDLELLLDRSDLIDQMNASGPIKEKMGIFKILENSEDSSPECLF

SEQ ID NO: 11988 - protein, 192 aa, Homo sapiens
  MOD_RES (7)..(7): Selenocysteine
  MOD_RES (11)..(11): Selenocysteine
  MOD_RES (45)..(45): Selenocysteine
  MOD_RES (68)..(68): Selenocysteine
  MOD_RES (150)..(150): Selenocysteine
  MOD_RES (174)..(174): Selenocysteine
  MOD_RES (179)..(179): Selenocysteine
MVEQLDXAVIXPAMLEEEEQLEAAGLERERKMLEKARMSWDRESXEIRYRRLQHLLEKSNIYSKFLLXKMEQQQLEEQKKKEKLERKKESLKVKKGKNSIDASEEKPVMRKKRGREDESYNISEVMSKEEILSVAKKNKKENEDENSSSXNLCVEDLQKNKDSNSIIKDRLSEXVRQNXKFFFDPVRKCNGQ

SEQ ID NO: 11989 - protein, 242 aa, Homo sapiens
  MOD_RES (11)..(11): Selenocysteine
  MOD_RES (36)..(36): Selenocysteine
  MOD_RES (58)..(58): Selenocysteine
  MOD_RES (103)..(104): Selenocysteine
  MOD_RES (110)..(110): Selenocysteine
  MOD_RES (113)..(113): Selenocysteine
  MOD_RES (210)..(210): Selenocysteine
  MOD_RES (235)..(235): Selenocysteine
MSDKLKERKRXPVSHKVIEKRRRDRINRCLNELGKXVPMALAKQSSGKLEKAEILEMXVQYLRALHSADFPRGREKAELLAEFANYFHYGYHECMKNLVHYLXXVERMEXKDXKYARILAFLQSKARLGAEPAFPPLGSLPEPDFSYQLHPAGPEFAGHSPGEAAVFPQGSGAGPFPWPPGAARSPALPYLPSAPVPLASPAQQHSPFLXPVQGLDRHYLNLIGHAHPNALNLHXPQHPPVL

SEQ ID NO: 11990 - protein, 241 aa, Homo sapiens
  MOD_RES (11)..(11): Selenocysteine
  MOD_RES (36)..(36): Selenocysteine
  MOD_RES (58)..(58): Selenocysteine
  MOD_RES (102)..(103): Selenocysteine
  MOD_RES (109)..(109): Selenocysteine
  MOD_RES (112)..(112): Selenocysteine
  MOD_RES (209)..(209): Selenocysteine
  MOD_RES (234)..(234): Selenocysteine
MSDKLKERKRXPVSHKVIEKRRRDRINRCLNELGKXVPMALAKQSSGKLEKAEILEMXVQYLRALHSADFPRGREKELLAEFANYFHYGYHECMKNLVHYLXXVERMEXKDXKYARILAFLQSKARLGAEPAFPPLGSLPEPDFSYQLHPAGPEFAGHSPGEAAVFPQGSGAGPFPWPPGAARSPALPYLPSAPVPLASPAQQHSPFLXPVQGLDRHYLNLIGHAHPNALNLHXPQHPPVL

SEQ ID NO: 11991 - protein, 327 aa, Homo sapiens
  MOD_RES (18)..(18): Selenocysteine
  MOD_RES (30)..(30): Selenocysteine
  MOD_RES (45)..(45): Selenocysteine
  MOD_RES (55)..(55): Selenocysteine
  MOD_RES (80)..(80): Selenocysteine
  MOD_RES (111)..(111): Selenocysteine
  MOD_RES (143)..(143): Selenocysteine
  MOD_RES (188)..(189): Selenocysteine
  MOD_RES (195)..(195): Selenocysteine
  MOD_RES (198)..(198): Selenocysteine
  MOD_RES (295)..(295): Selenocysteine
  MOD_RES (320)..(320): Selenocysteine
MSDKLKERKVSRLSPNGXCALVVEASDSPXRHLGGPMAGKCPHGXLSVEESRVRXPVSHKVIEKRRRDRINRCLNELGKXVPMALAKQGEPQEALAQIRSRVRSLVLSSAXVPDQQALGRCEGPFLLLQSSGKLEKAEILEMXVQYLRALHSADFPRGREKAELLAEFANYFHYGYHECMKNLVHYLXXVERMEXKDXKYARILAFLQSKARLGAEPAFPPLGSLPEPDFSYQLHPAGPEFAGHSPGEAAVFPQGSGAGPFPWPPGAARSPALPYLPSAPVPLASPAQQHSPFLXPVQGLDRHYLNLIGHAHPNALNLHXPQHPPVL

SEQ ID NO: 11992 - protein, 232 aa, Homo sapiens
  MOD_RES (5)..(5): Selenocysteine
  MOD_RES (11)..(11): Selenocysteine
  MOD_RES (104)..(104): Selenocysteine
  MOD_RES (181)..(181): Selenocysteine
  MOD_RES (185)..(185): Selenocysteine
  MOD_RES (203)..(203): Selenocysteine
  MOD_RES (210)..(210): Selenocysteine
  MOD_RES (217)..(217): Selenocysteine
MESEXEPEPVXLLVKSPNQRHRDLELSGDRGWSVGHLKAHLSRVYPERPRPEDQRLIYSGKLLLDHQCLRDLLPKEKRHVLHLVCNVKSPSKMPEINAKVAESXEEPAGSNRGQYPEDSSSDGLRQREVLRNLSSPGWENISRHHVGWFPFRPRPVQNFPNDGPPPDVVNQDPNNNLQEGXDPEXEDPNHLPPDRDVLDGEQXSPSFMSXAWLVFKXFFASLLPEGPPAIAN

SEQ ID NO: 11993 - protein, 390 aa, Homo sapiens
  MOD_RES (5)..(5): Selenocysteine
  MOD_RES (11)..(11): Selenocysteine
  MOD_RES (104)..(104): Selenocysteine
  MOD_RES (162)..(162): Selenocysteine
  MOD_RES (188)..(188): Selenocysteine
  MOD_RES (267)..(267): Selenocysteine
  MOD_RES (272)..(272): Selenocysteine
  MOD_RES (296)..(296): Selenocysteine
  MOD_RES (339)..(339): Selenocysteine
  MOD_RES (343)..(343): Selenocysteine
  MOD_RES (361)..(361): Selenocysteine
  MOD_RES (368)..(368): Selenocysteine
  MOD_RES (375)..(375): Selenocysteine
MESEXEPEPVXLLVKSPNQRHRDLELSGDRGWSVGHLKAHLSRVYPERPRPEDQRLIYSGKLLLDHQCLRDLLPKEKRHVLHLVCNVKSPSKMPEINAKVAESXEEPAGSNRGQYPEDSSSDGLRQREVLRNLSSPGWENISRPEAAQQAFQGLGPGFSGYXPYGWLQLSWFQQIYARQYYMQYLAAXAASGAFVPPPSAQEIPVVSAPAPAPIHNQFPAENQPANQNAAPQVVVNPGANQNLRMNAQGGPIVEEDDEINRDWLDWXYSAAXFSVFLSILYFYSSLSRFLMVMGAXVVMYLHHVGWFPFRPRPVQNFPNDGPPPDVVNQDPNNNLQEGXDPEXEDPNHLPPDRDVLDGEQXSPSFMSXAWLVFKXFFASLLPEGPPAIAN

SEQ ID NO: 11994 - protein, 391 aa, Homo sapiens
  MOD_RES (5)..(5): Selenocysteine
  MOD_RES (11)..(11): Selenocysteine
  MOD_RES (105)..(105): Selenocysteine
  MOD_RES (163)..(163): Selenocysteine
  MOD_RES (189)..(189): Selenocysteine
  MOD_RES (268)..(268): Selenocysteine
  MOD_RES (273)..(273): Selenocysteine
  MOD_RES (297)..(297): Selenocysteine
  MOD_RES (340)..(340): Selenocysteine
  MOD_RES (344)..(344): Selenocysteine
  MOD_RES (362)..(362): Selenocysteine
  MOD_RES (369)..(369): Selenocysteine
  MOD_RES (376)..(376): Selenocysteine
MESEXEPEPVXLLVKSPNQRHRDLELSGDRGWSVGHLKAHLSRVYPERPRPEDQRLIYSGKLLLDHQCLRDLLPKQEKRHVLHLVCNVKSPSKMPEINAKVAESXEEPAGSNRGQYPEDSSSDGLRQREVLRNLSSPGWENISRPEAAQQAFQGLGPGFSGYXPYGWLQLSWFQQIYARQYYMQYLAAXAASGAFVPPPSAQEIPVVSAPAPAPIHNQFPAENQPANQNAAPQVVVNPGANQNLRMNAQGGPIVEEDDEINRDWLDWXYSAAXFSVFLSILYFYSSLSRFLMVMGAXVVMYLHHVGWFPFRPRPVQNFPNDGPPPDVVNQDPNNNLQEGXDPEXEDPNHLPPDRDVLDGEQXSPSFMSXAWLVFKXFFASLLPEGPPAIAN

SEQ ID NO: 11995 - protein, 366 aa, Homo sapiens
  MOD_RES (5)..(5): Selenocysteine
  MOD_RES (11)..(11): Selenocysteine
  MOD_RES (80)..(80): Selenocysteine
  MOD_RES (138)..(138): Selenocysteine
  MOD_RES (164)..(164): Selenocysteine
  MOD_RES (243)..(243): Selenocysteine
  MOD_RES (248)..(248): Selenocysteine
  MOD_RES (272)..(272): Selenocysteine
  MOD_RES (315)..(315): Selenocysteine
  MOD_RES (319)..(319): Selenocysteine
  MOD_RES (337)..(337): Selenocysteine
  MOD_RES (344)..(344): Selenocysteine
  MOD_RES (351)..(351): Selenocysteine
MESEXEPEPVXLLVKSPNQRHRDLELSGDRGWSVGHLKAHLSRVYPERPRPEDQRLIYSGKLLLDHQCLRDLLPKVAESXEEPAGSNRGQYPEDSSSDGLRQREVLRNLSSPGWENISRPEAAQQAFQGLGPGFSGYXPYGWLQLSWFQQIYARQYYMQYLAAXAASGAFVPPPSAQEIPVVSAPAPAPIHNQFPAENQPANQNAAPQVVVNPGANQNLRMNAQGGPIVEEDDEINRDWLDWXYSAAXFSVFLSILYFYSSLSRFLMVMGAXVVMYLHHVGWFPFRPRPVQNFPNDGPPPDVVNQDPNNNLQEGXDPEXEDPNHLPPDRDVLDGEQXSPSFMSXAWLVFKXFFASLLPEGPPAIAN

SEQ ID NO: 11996 - protein, 53 aa, Homo sapiens
  MOD_RES (5)..(5): Selenocysteine
  MOD_RES (11)..(11): Selenocysteine
  MOD_RES (51)..(51): Selenocysteine
MESEXEPEPVXLLVKSPNQRHRDLELSGDRGWSVGHLKAHLSRVYPERPRXRG

SEQ ID NO: 11997 - protein, 160 aa, Homo sapiens
  MOD_RES (63)..(63): Selenocysteine
  MOD_RES (121)..(121): Selenocysteine
  MOD_RES (147)..(147): Selenocysteine
MVKNVLERPEDQRLIYSGKLLLDHQCLRDLLPKQEKRHVLHLVCNVKSPSKMPEINAKVAESXEEPAGSNRGQYPEDSSSDGLRQREVLRNLSSPGWENISRPEAAQQAFQGLGPGFSGYXPYGWLQLSWFQQIYARQYYMQYLAAXAASGAFVPPPSAQ

SEQ ID NO: 11998 - protein, 150 aa, Homo sapiens
  MOD_RES (38)..(38): Selenocysteine
  MOD_RES (96)..(96): Selenocysteine
  MOD_RES (122)..(122): Selenocysteine
MVKNVLERPEDQRLIYSGKLLLDHQCLRDLLPKVAESXEEPAGSNRGQYPEDSSSDGLRQREVLRNLSSPGWENISRPEAAQQAFQGLGPGFSGYXPYGWLQLSWFQQIYARQYYMQYLAAXAASGAFVPPPSAQEIPVVSAPAPAPIHN

SEQ ID NO: 11999 - protein, 109 aa, Homo sapiens
  MOD_RES (1)..(1): Any amino acid
  MOD_RES (30)..(30): Selenocysteine
  MOD_RES (88)..(88): Selenocysteine
XEKRHVLHLVCNVKSPSKMPEINAKVAESXEEPAGSNRGQYPEDSSSDGLRQREVLRNLSSPGWENISRPEAAQQAFQGLGPGFSGYXPYGWLQLSWFQQIYARQYYMQ

SEQ ID NO: 12000 - protein, 226 aa, Homo sapiens
  MOD_RES (1)..(1): Any amino acid
  MOD_RES (36)..(36): Selenocysteine
  MOD_RES (115)..(115): Selenocysteine
  MOD_RES (120)..(120): Selenocysteine
  MOD_RES (144)..(144): Selenocysteine
  MOD_RES (192)..(192): Selenocysteine
  MOD_RES (212)..(212): Selenocysteine
XGQYPEDSSSDGLRQREVLRNLSSPGWENISSLAAXAASGAFVPPPSAQEIPVVSAPAPAPIHNQFPAENQPANQNAAPQVVVNPGANQNLRMNAQGGPIVEEDDEINRDWLDWXYSAAXFSVFLSILYFYSSLSRFLMVMGAXVVMYLHHVGWFPFRPRPVQNFPNDGPPPDVVNQDPNNNLQKAPQPSQXDGVCAVAVGGFDRNGLDHLXPARLPLLDMAMMSF

SEQ ID NO: 12001 - protein, 150 aa, Homo sapiens
  MOD_RES (1)..(1): Any amino acid
  MOD_RES (16)..(16): Selenocysteine
  MOD_RES (56)..(56): Selenocysteine
  MOD_RES (99)..(99): Selenocysteine
  MOD_RES (103)..(103): Selenocysteine
  MOD_RES (121)..(121): Selenocysteine
  MOD_RES (128)..(128): Selenocysteine
  MOD_RES (135)..(135): Selenocysteine
XQQAFQGLGPGFSGYXPYGWLQLSWFQQIYARQYYMQYILYFYSSLSRFLMVMGAXVVMYLHHVGWFPFRPRPVQNFPNDGPPPDVVNQDPNNNLQEGXDPEXEDPNHLPPDRDVLDGEQXSPSFMSXAWLVFKXFFASLLPEGPPAIAN

SEQ ID NO: 12002 - protein, 280 aa, Homo sapiens
  MOD_RES (17)..(17): Selenocysteine
  MOD_RES (23)..(24): Selenocysteine
  MOD_RES (30)..(30): Selenocysteine
  MOD_RES (59)..(59): Selenocysteine
  MOD_RES (84)..(84): Selenocysteine
  MOD_RES (97)..(97): Selenocysteine
  MOD_RES (102)..(102): Selenocysteine
  MOD_RES (122)..(122): Selenocysteine
  MOD_RES (127)..(127): Selenocysteine
  MOD_RES (133)..(133): Selenocysteine
  MOD_RES (137)..(137): Selenocysteine
  MOD_RES (148)..(148): Selenocysteine
  MOD_RES (154)..(154): Selenocysteine
  MOD_RES (249)..(249): Selenocysteine
  MOD_RES (254)..(254): Selenocysteine
  MOD_RES (270)..(270): Selenocysteine
MPADIMEKNSSSPVAAXPASVNXXPDKPKXASEHRKSSKPIMEKRRRARINESLSQLKXLILDALKKDSSRHSKLEKADILEMXVKHLRNLQRAQMXAALSXDPSVLGKYRAGFSECMNEVXRFLSXCEGVNXEVRXRLLGHLANCMXQINAMXYPGQPHPALQAPPPPPPGPGGPQHAPFAPPPPLVPIPGGAAPPPGGAPCKLGSQAGEAAKVFGGFQVVPAPDGQFAFLIPNGAFAHSGPVIPVYXSNSGXSVGPNAVSPSSGPSLXADSMWRPWRN

SEQ ID NO: 12003 - protein, 77 aa, Homo sapiens
  MOD_RES (51)..(51): Selenocysteine
  MOD_RES (53)..(53): Selenocysteine
  MOD_RES (57)..(57): Selenocysteine
MGLPRRAGDAAELRKSLKPLLEKRRRARINQSLSQLKGLILPLLGRECLAXAXARAXAPVWRAWPACCPPAVSWSPP

SEQ ID NO: 12004 - protein, 76 aa, Homo sapiens
  MOD_RES (54)..(54): Selenocysteine
MGLPRRAGDAAELRKSLKPLLEKRRRARINQSLSQLKGLILPLLGREDASGWHXWLPLHAQNCFLLYIQAPEQPPA

SEQ ID NO: 12005 - protein, 173 aa, Homo sapiens
  MOD_RES (63)..(63): Selenocysteine
  MOD_RES (77)..(77): Selenocysteine
  MOD_RES (127)..(127): Selenocysteine
MGLPRRAGDAAELRKSLKPLLEKRRRARINQSLSQLKGLILPLLGRENSNCSKLEKADVLEMXVRFLQELPASSWPXAAPLPCDSYREGYSACVARLARVLPACRVLEPAVSARLLEHLWRRAASAXLDGGRAGDSSGPSAPAPAPASAPEPASAPVPSPPSPPCGPGLWRPW

SEQ ID NO: 12006 - protein, 82 aa, Homo sapiens
  MOD_RES (63)..(63): Selenocysteine
  MOD_RES (77)..(77): Selenocysteine
MGLPRRAGDAAELRKSLKPLLEKRRRARINQSLSQLKGLILPLLGRENSNCSKLEKADVLEMXVRFLQELPASSWPXAAPRE

SEQ ID NO: 12007 - protein, 186 aa, Homo sapiens
  MOD_RES (103)..(103): Selenocysteine
  MOD_RES (121)..(121): Selenocysteine
MEKKRRARINVSLEQLKSLLEKHYSHQIRKRKLEKADILELSVKYMRSLQNSLQGLWPVPRGAEQPSGFRSCLPGVSQLLRRGDEVGSGLRCPLVPESAAGSXMDSAGLGQEAPALFRPCXPAVWAPAPAAGGPRSPPPLLLLPESLPGSSASVPPPQPASSRCAESPGLGLRVWRPWGSPGDDLN

SEQ ID NO: 12008 - protein, 221 aa, Homo sapiens
  MOD_RES (5)..(5): Selenocysteine
  MOD_RES (24)..(24): Selenocysteine
  MOD_RES (59)..(59): Selenocysteine
  MOD_RES (84)..(84): Selenocysteine
  MOD_RES (97)..(97): Selenocysteine
  MOD_RES (198)..(198): Selenocysteine
MAADXPGKPSASPMAGAPASASRXPDKPRSAAEHRKSSKPVMEKRRRARINESLAQLKXLILDALRKESSRHSKLEKADILEMXVRHLRSLRRVQVXAALSADPAVLGKYRAGFHECLAEVNRFLAGCEGVPADVRSRLLGHLAACLRQLGPSRRPASLSPAAPAEAPAPEVYAGRPLLPSLGGPFPLLAPPLLPGLXRALPAAPRAGPQGPGGPWRPWLR

SEQ ID NO: 12009 - protein, 189 aa, Homo sapiens
  MOD_RES (5)..(5): Selenocysteine
  MOD_RES (24)..(24): Selenocysteine
  MOD_RES (52)..(52): Selenocysteine
  MOD_RES (65)..(65): Selenocysteine
  MOD_RES (166)..(166): Selenocysteine
MAADXPGKPSASPMAGAPASASRXPDKPRSAAEHRKSSRHSKLEKADILEMXVRHLRSLRRVQVXAALSADPAVLGKYRAGFHECLAEVNRFLAGCEGVPADVRSRLLGHLAACLRQLGPSRRPASLSPAAPAEAPAPEVYAGRPLLPSLGGPFPLLAPPLLPGLXRALPAAPRAGPQGPGGPWRPWLR

SEQ ID NO: 12010 - protein, 247 aa, Homo sapiens
  MOD_RES (5)..(5): Selenocysteine
  MOD_RES (24)..(24): Selenocysteine
  MOD_RES (47)..(47): Selenocysteine
  MOD_RES (55)..(55): Selenocysteine
  MOD_RES (85)..(85): Selenocysteine
  MOD_RES (110)..(110): Selenocysteine
  MOD_RES (123)..(123): Selenocysteine
  MOD_RES (224)..(224): Selenocysteine
MAADXPGKPSASPMAGAPASASRXPDKPRSAAEHRKVGSRPGVRGAXGGREGRGXQPVPDPQSSKPVMEKRRRARINESLAQLKXLILDALRKESSRHSKLEKADILEMXVRHLRSLRRVQVXAALSADPAVLGKYRAGFHECLAEVNRFLAGCEGVPADVRSRLLGHLAACLRQLGPSRRPASLSPAAPAEAPAPEVYAGRPLLPSLGGPFPLLAPPLLPGLXRALPAAPRAGPQGPGGPWRPWLR

SEQ ID NO: 12011 - protein, 166 aa, Homo sapiens
  MOD_RES (5)..(5): Selenocysteine
  MOD_RES (104)..(104): Selenocysteine
  MOD_RES (111)..(111): Selenocysteine
  MOD_RES (149)..(149): Selenocysteine
MAPSXVAVELLSPKEKNRLRKPVVEKMRRDRINSSIEQLKLLLEQEFARHQPNSKLEKADILEMAVSYLKHSKAFVAAAGPKSLHQDYSEGYSWCLQEAVQFLXLHAASDXQMKLLYHFQRPPAAPAAPAKEPKAPGAAPPPALSAKAXAAAAAAHQPACGLWRPW

SEQ ID NO: 12012 - protein, 222 aa, Homo sapiens
  MOD_RES (22)..(22): Selenocysteine
  MOD_RES (68)..(68): Selenocysteine
  MOD_RES (107)..(107): Selenocysteine
  MOD_RES (111)..(111): Selenocysteine
  MOD_RES (118)..(118): Selenocysteine
  MOD_RES (210)..(211): Selenocysteine
MAPPAAPGRDRVGREDEDGWEXRGDRKARKPLVEKKRRARINESLQELRLLLAGAEAKLENAEVLELXVRRVQGVLRGRAREREQLQAEASERFAAGYIQCMHEVHXFVSXCQAIDAXVAAELLNHLLESMPLREGSSFQDLLGDALAGPPRAPGRSGWPAGGAPGSPIPSPPGPGDDLCSDLEEAPEAELSQAPAEGPDLVPAALGSLXXAQIARSVWRPW

SEQ ID NO: 12013 - protein, 112 aa, Homo sapiens
  MOD_RES (22)..(22): Selenocysteine
  MOD_RES (70)..(70): Selenocysteine
  MOD_RES (87)..(87): Selenocysteine
  MOD_RES (92)..(92): Selenocysteine
  MOD_RES (95)..(95): Selenocysteine
  MOD_RES (105)..(105): Selenocysteine
MAPPAAPGRDRVGREDEDGWEXRGDRKARKPLVEKKRRARINESLQELRLLLAGAEVQAKLENAEVLELXSASSCRRKRASASLPAXSSACXRCXRSCPRARPSXLPSLPSS

SEQ ID NO: 12014 - protein, 224 aa, Homo sapiens
  MOD_RES (22)..(22): Selenocysteine
  MOD_RES (70)..(70): Selenocysteine
  MOD_RES (109)..(109): Selenocysteine
  MOD_RES (113)..(113): Selenocysteine
  MOD_RES (120)..(120): Selenocysteine
  MOD_RES (212)..(213): Selenocysteine
MAPPAAPGRDRVGREDEDGWEXRGDRKARKPLVEKKRRARINESLQELRLLLAGAEVQAKLENAEVLELXVRRVQGVLRGRAREREQLQAEASERFAAGYIQCMHEVHXFVSXCQAIDAXVAAELLNHLLESMPLREGSSFQDLLGDALAGPPRAPGRSGWPAGGAPGSPIPSPPGPGDDLCSDLEEAPEAELSQAPAEGPDLVPAALGSLXXAQIARSVWRPW

SEQ ID NO: 12015 - protein, 214 aa, Homo sapiens
  MOD_RES (22)..(22): Selenocysteine
  MOD_RES (70)..(70): Selenocysteine
  MOD_RES (100)..(100): Selenocysteine
  MOD_RES (106)..(106): Selenocysteine
  MOD_RES (158)..(158): Selenocysteine
MAPPAAPGRDRVGREDEDGWEXRGDRKARKPLVEKKRRARINESLQELRLLLAGAEVQAKLENAEVLELXVRRVQGVLRGRARGEWRRGGRGRRPRAPVXPARRRXSLPAPLSCRRRGLPPEQGAPPRLLGEPRPRGPGGLGHAVAAHRAGRGSLPPXLGPRARAAAGGSERALRCRLHPVHARGAHVRVHVPGHRRYRRCRAPEPSARVHAAA

SEQ ID NO: 12016 - protein, 195 aa, Homo sapiens
  MOD_RES (22)..(22): Selenocysteine
  MOD_RES (41)..(41): Selenocysteine
  MOD_RES (80)..(80): Selenocysteine
  MOD_RES (84)..(84): Selenocysteine
  MOD_RES (91)..(91): Selenocysteine
  MOD_RES (183)..(184): Selenocysteine
MAPPAAPGRDRVGREDEDGWEXRGDRKVQAKLENAEVLELXVRRVQGVLRGRAREREQLQAEASERFAAGYIQCMHEVHXFVSXCQAIDAXVAAELLNHLLESMPLREGSSFQDLLGDALAGPPRAPGRSGWPAGGAPGSPIPSPPGPGDDLCSDLEEAPEAELSQAPAEGPDLVPAALGSLXXAQIARSVWRPW

SEQ ID NO: 12017 - protein, 145 aa, Homo sapiens
  MOD_RES (22)..(22): Selenocysteine
  MOD_RES (41)..(41): Selenocysteine
  MOD_RES (71)..(71): Selenocysteine
  MOD_RES (77)..(77): Selenocysteine
  MOD_RES (129)..(129): Selenocysteine
MAPPAAPGRDRVGREDEDGWEXRGDRKVQAKLENAEVLELXVRRVQGVLRGRARGEWRRGGRGRRPRAPVXPARRRXSLPAPLSCRRRGLPPEQGAPPRLLGEPRPRGPGGLGHAVAAHRAGRGSLPPXLGPRARAAAGGSERAL

SEQ ID NO: 12018 - protein, 94 aa, Homo sapiens
  MOD_RES (22)..(22): Selenocysteine
  MOD_RES (68)..(68): Selenocysteine
  MOD_RES (89)..(89): Selenocysteine
MAPPAAPGRDRVGREDEDGWEXRGDRKVRAGAMGEQAGGRPCGAGIQCPAPRRPGSPWWRRSGARGSXRACRSCGCCWRAPRCRPSWRXPKCWS

SEQ ID NO: 12019 - protein, 86 aa, Homo sapiens [sequence omitted]

SEQ ID NO: 12020 - protein, 16 aa, Homo sapiens
  MOD_RES (11)..(11): Selenocysteine
RAPRCRPSWRXPKCWS

SEQ ID NO: 12021 - protein, 145 aa, Homo sapiens
  MOD_RES (35)..(35): Selenocysteine
MRRSGEMLKPLVEKRRRDRINRSLEELRLLLLERXRDQNLRNPKLEKAEILEFAVGYLRERSRVEPPAAAAPGVPRSPVQDAEALASCYLSGFRECLLRLAAFAHDASPAARAQLFSALHGYLRPKPPRPKPVDPRPPAPRPSLD

SEQ ID NO: 12022 - protein, 230 aa, Homo sapiens
  MOD_RES (3)..(3): Selenocysteine
  MOD_RES (43)..(43): Selenocysteine
  MOD_RES (199)..(199): Selenocysteine
MVXRDRAENRDGPKMLKPLVEKRRRDRINRSLEELRLLLLERXRDQNLRNPKLEKAEILEFAVGYLRERSRVEPPAAAAPGVPRSPVQDAEALASCYLSGFRECLLRLAAFAHDASPAARAQLFSALHGYLRPKPPRPKPVDPRPPAPRPSLDPAAPALGPALHQRPPVHQGHPSPRCAWSPSLCSPRAGDSGAPAPLXGLLPPPPPPHRQDGAPKAPLPPPPAFWRPWP

SEQ ID NO: 12023 - protein, 225 aa, Homo sapiens
  MOD_RES (3)..(3): Selenocysteine
  MOD_RES (43)..(43): Selenocysteine
  MOD_RES (194)..(194): Selenocysteine
MVXRDRAENRDGPKMLKPLVEKRRRDRINRSLEELRLLLLERXRDQNLRNPKLEKAEILEFAVGYLRERSRVEPPGVPRSPVQDAEALASCYLSGFRECLLRLAAFAHDASPAARAQLFSALHGYLRPKPPRPKPVDPRPPAPRPSLDPAAPALGPALHQRPPVHQGHPSPRCAWSPSLCSPRAGDSGAPAPLXGLLPPPPPPHRQDGAPKAPLPPPPAFWRPWP

SEQ ID NO: 12024 - protein, 107 aa, Homo sapiens
  MOD_RES (18)..(18): Selenocysteine
  MOD_RES (48)..(48): Selenocysteine
MSPSLQEGAQLGENKPSXCSFSIERILGLDQKKDCVPLMKPHRPWADXCSSSGKDGNLCLHVPNPPSGISFPSVVDHPMPEERASKYENYFSASERLSLKRELSWYR

SEQ ID NO: 12025 - protein, 185 aa, Homo sapiens
  MOD_RES (18)..(18): Selenocysteine
  MOD_RES (48)..(48): Selenocysteine
  MOD_RES (113)..(113): Selenocysteine
  MOD_RES (116)..(116): Selenocysteine
  MOD_RES (181)..(181): Selenocysteine
MSPSLQEGAQLGENKPSXCSFSIERILGLDQKKDCVPLMKPHRPWADXCSSSGKDGNLCLHVPNPPSGISFPSVVDHPMPEERASKYENYFSASERLSLKRELSWYRGRRPRXAFXQNQIEVLENVFRVNCYPGIDIREDLAQKLNLEEDRIQIWFQNRRAKLKRSHRESQFLMAKKNFNXNLLE

SEQ ID NO: 12026 - protein, 151 aa, Homo sapiens
  MOD_RES (18)..(18): Selenocysteine
  MOD_RES (48)..(48): Selenocysteine
  MOD_RES (113)..(113): Selenocysteine
  MOD_RES (116)..(116): Selenocysteine
  MOD_RES (147)..(147): Selenocysteine
MSPSLQEGAQLGENKPSXCSFSIERILGLDQKKDCVPLMKPHRPWADXCSSSGKDGNLCLHVPNPPSGISFPSVVDHPMPEERASKYENYFSASERLSLKRELSWYRGRRPRXAFXQNQIWFQNRRAKLKRSHRESQFLMAKKNFNXNLLE

SEQ ID NO: 12027 - protein, 359 aa, Homo sapiens
  MOD_RES (15)..(15): Selenocysteine
  MOD_RES (19)..(19): Selenocysteine
  MOD_RES (76)..(76): Selenocysteine
  MOD_RES (112)..(112): Selenocysteine
  MOD_RES (171)..(171): Selenocysteine
  MOD_RES (205)..(206): Selenocysteine
  MOD_RES (222)..(222): Selenocysteine
  MOD_RES (236)..(236): Selenocysteine
  MOD_RES (270)..(270): Selenocysteine
  MOD_RES (276)..(276): Selenocysteine
  MOD_RES (341)..(341): Selenocysteine
MAEPFLSEYQHQPQXSNCXGAAAVQEELNPERPPGAEERVPEEDSRWQSRAFPQLGGRPGPEGEGSLESQPPPLQXQACPESSCLREGEKGQNGDDSSAGGDFPPPAEVEPXPEAELLAQPCHDSEASKLGAPAAGGEEEWGQQQRQLGKKKHRRRPSKKKRHWKPYYKLXWEEKKKFDEKQSLRASRIRAEMFAKGQPVAPYNXXQFLMDDHDQEEPDLKXGLYSKRAAAKSDDXSDDDFMEEGGEEDGGSDGMGGDGSEFLQRDFSEXYERYHXESLQNMSKQELIKEYLELEKCLSRMEDENNRLRLESKRLGGDDARVRELELELDRLRAENLQLLXENELHRQQERAPLSKFGD

SEQ ID NO: 12028 - protein, 304 aa, Homo sapiens
  MOD_RES (18)..(18): Selenocysteine
  MOD_RES (42)..(43): Selenocysteine
  MOD_RES (97)..(97): Selenocysteine
  MOD_RES (106)..(106): Selenocysteine
  MOD_RES (182)..(182): Selenocysteine
  MOD_RES (206)..(207): Selenocysteine
  MOD_RES (211)..(211): Selenocysteine
  MOD_RES (245)..(245): Selenocysteine
  MOD_RES (285)..(285): Selenocysteine
  MOD_RES (299)..(299): Selenocysteine
MKRAHPEYSSSDSELDEXIEVEKESADENGNLSSALGSMSPXXSSQILARKRRRGIIEKRRRDRINNSLSELRRLVPSAFEKQGSAKLEKAEILQMXVDHLKMLHXAGGKGYFDAHALAMDYRSLGFRECLAEVARYLSIIEGLDASDPLRVRLVSHLNNYASQREAASGAHAGLGHIPWGXVFGHHPHIAHPLLLPQNGHGNAGXXASPXEPHHQGRLGSAHPEAPALRAPPSGSLGPVLPVVXSASKLSPPLLSSVASLSAFPFSFGSFHLLSPNALSPSAPXQAANLGKPYRPWGXEIGAF

SEQ ID NO: 12029 - protein, 308 aa, Homo sapiens
  MOD_RES (18)..(18): Selenocysteine
  MOD_RES (42)..(43): Selenocysteine
  MOD_RES (101)..(101): Selenocysteine
  MOD_RES (110)..(110): Selenocysteine
  MOD_RES (186)..(186): Selenocysteine
  MOD_RES (210)..(211): Selenocysteine
  MOD_RES (215)..(215): Selenocysteine
  MOD_RES (249)..(249): Selenocysteine
  MOD_RES (289)..(289): Selenocysteine
  MOD_RES (303)..(303): Selenocysteine
MKRAHPEYSSSDSELDEXIEVEKESADENGNLSSALGSMSPXXSSQILARKRRRGIIEKRRRDRINNSLSELRRLVPSAFEKQVMEQGSAKLEKAEILQMXVDHLKMLHXAGGKGYFDAHALAMDYRSLGFRECLAEVARYLSIIEGLDASDPLRVRLVSHLNNYASQREAASGAHAGLGHIPWGXVFGHHPHIAHPLLLPQNGHGNAGXXASPXEPHHQGRLGSAHPEAPALRAPPSGSLGPVLPVVXSASKLSPPLLSSVASLSAFPFSFGSFHLLSPNALSPSAPXQAANLGKPYRPWGXEIGAF

SEQ ID NO: 12030 - protein, 214 aa, Homo sapiens
  MOD_RES (17)..(17): Selenocysteine
  MOD_RES (92)..(92): Selenocysteine
  MOD_RES (116)..(117): Selenocysteine
  MOD_RES (121)..(121): Selenocysteine
  MOD_RES (155)..(155): Selenocysteine
  MOD_RES (195)..(195): Selenocysteine
  MOD_RES (209)..(209): Selenocysteine
MPLEERNVFWLSKGNLXGDQGYFDAHALAMDYRSLGFRECLAEVARYLSIIEGLDASDPLRVRLVSHLNNYASQREAASGAHAGLGHIPWGXVFGHHPHIAHPLLLPQNGHGNAGXXASPXEPHHQGRLGSAHPEAPALRAPPSGSLGPVLPVVXSASKLSPPLLSSVASLSAFPFSFGSFHLLSPNALSPSAPXQAANLGKPYRPWGXEIGAF

SEQ ID NO: 12031 - protein, 186 aa, Homo sapiens
  MOD_RES (4)..(5): Selenocysteine
  MOD_RES (59)..(59): Selenocysteine
  MOD_RES (68)..(68): Selenocysteine
  MOD_RES (144)..(144): Selenocysteine
  MOD_RES (168)..(169): Selenocysteine
  MOD_RES (173)..(173): Selenocysteine
MSPXXSSQILARKRRRGIIEKRRRDRINNSLSELRRLVPSAFEKQGSAKLEKAEILQMXVDHLKMLHXAGGKGYFDAHALAMDYRSLGFRECLAEVARYLSIIEGLDASDPLRVRLVSHLNNYASQREAASGAHAGLGHIPWGXVFGHHPHIAHPLLLPQNGHGNAGXXASPXEPHHQGRLGSAHP

SEQ ID NO: 12032 - protein, 291 aa, Homo sapiens
  MOD_RES (31)..(31): Selenocysteine
  MOD_RES (50)..(50): Selenocysteine
  MOD_RES (60)..(60): Selenocysteine
  MOD_RES (85)..(85): Selenocysteine
  MOD_RES (113)..(113): Selenocysteine
  MOD_RES (116)..(116): Selenocysteine
  MOD_RES (124)..(124): Selenocysteine
  MOD_RES (162)..(162): Selenocysteine
  MOD_RES (168)..(169): Selenocysteine
  MOD_RES (182)..(182): Selenocysteine
  MOD_RES (184)..(184): Selenocysteine
  MOD_RES (197)..(197): Selenocysteine
  MOD_RES (209)..(209): Selenocysteine
  MOD_RES (217)..(217): Selenocysteine
  MOD_RES (226)..(226): Selenocysteine
  MOD_RES (255)..(255): Selenocysteine
  MOD_RES (266)..(266): Selenocysteine
  MOD_RES (272)..(272): Selenocysteine
  MOD_RES (276)..(276): Selenocysteine
  MOD_RES (286)..(286): Selenocysteine
MARKKRRGIIEKRRRDRINNSLSELRRLVPXAFEKQGSAKLEKAEILQMXVDHLKMLQAXGGKGYFDAHALAMDFMSIGFRECLXEVARYLSSVEGLDSSDPLRVRLVSHLSXCAXQREAAAMXSSMAHHHHPLHPHHWAAAFHHLPAALLQPNGLHASESXPCRLSXXSEVPPAHGSALLXAXFAHADSALRMPSXGSVAPCVPPLSXSLLSLSAXVHAAAAAAXAAAHSFPLSFAGAFPMLPPNAAAAVAAAXAISPPLSVSAXSSPQQXSSGXNNKPYRPWGXEVGAF

SEQ ID NO: 12033 - protein, 337 aa, Homo sapiens
  MOD_RES (8)..(9): Selenocysteine
  MOD_RES (17)..(17): Selenocysteine
  MOD_RES (31)..(31): Selenocysteine
  MOD_RES (41)..(43): Selenocysteine
  MOD_RES (77)..(77): Selenocysteine
  MOD_RES (96)..(96): Selenocysteine
  MOD_RES (106)..(106): Selenocysteine
  MOD_RES (131)..(131): Selenocysteine
  MOD_RES (159)..(159): Selenocysteine
  MOD_RES (162)..(162): Selenocysteine
  MOD_RES (170)..(170): Selenocysteine
  MOD_RES (208)..(208): Selenocysteine
  MOD_RES (214)..(215): Selenocysteine
  MOD_RES (228)..(228): Selenocysteine
  MOD_RES (230)..(230): Selenocysteine
  MOD_RES (243)..(243): Selenocysteine
  MOD_RES (255)..(255): Selenocysteine
  MOD_RES (263)..(263): Selenocysteine
  MOD_RES (272)..(272): Selenocysteine
  MOD_RES (301)..(301): Selenocysteine
  MOD_RES (312)..(312): Selenocysteine
  MOD_RES (318)..(318): Selenocysteine
  MOD_RES (322)..(322): Selenocysteine
  MOD_RES (332)..(332): Selenocysteine
MKRPCEEXXSESDMDEXIDVGSENNYSGQSXSSVIRLNSPXXXSQIMARKKRRGIIEKRRRDRINNSLSELRRLVPXAFEKQGSAKLEKAEILQMXVDHLKMLQAXGGKGYFDAHALAMDFMSIGFRECLXEVARYLSSVEGLDSSDPLRVRLVSHLSXCAXQREAAAMXSSMAHHHHPLHPHHWAAAFHHLPAALLQPNGLHASESXPCRLSXXSEVPPAHGSALLXAXFAHADSALRMPSXGSVAPCVPPLSXSLLSLSAXVHAAAAAAXAAAHSFPLSFAGAFPMLPPNAAAAVAAAXAISPPLSVSAXSSPQQXSSGXNNKPYRPWGXEVGAF

SEQ ID NO: 12034 - protein, 328 aa, Homo sapiens
  MOD_RES (35)..(35): Selenocysteine
  MOD_RES (72)..(72): Selenocysteine
  MOD_RES (91)..(91): Selenocysteine
  MOD_RES (101)..(101): Selenocysteine
  MOD_RES (104)..(104): Selenocysteine
  MOD_RES (126)..(126): Selenocysteine
  MOD_RES (165)..(165): Selenocysteine
  MOD_RES (167)..(167): Selenocysteine
  MOD_RES (219)..(219): Selenocysteine
  MOD_RES (226)..(226): Selenocysteine
  MOD_RES (245)..(245): Selenocysteine
  MOD_RES (256)..(256): Selenocysteine
  MOD_RES (282)..(282): Selenocysteine
  MOD_RES (287)..(287): Selenocysteine
  MOD_RES (297)..(297): Selenocysteine
  MOD_RES (323)..(323): Selenocysteine
MKRPKEPSGSDGESDGPIDVGQEGQLSQMARPLSXPSSSQMQARKKHRGIIEKRRRDRINSSLSELRRLVPXAFEKQGSSKLEKAEVLQMXVDHLKMLHAXGGXGFFDARALAVDFRSIGFRECLXEVIRYLGVLEGPSSRADPVRIRLLSHLNSYAAEMEPSPXPXGPLAFPAWPWSFFHSCPGLPALSNQLAILGRVPSPVLPGVSSPAYPIPALRXAPLRRAXGIILPARRNVLPSRGASSXRRARPLERPAXPVPVAPSSRAARSSHIAPLLQSSSPXPPGPXGSAAYVAVPXPNSSSPGPAGRPAGAMLYHSWVSEIXEIGAF

SEQ ID NO: 12035 - protein, 55 aa, Homo sapiens
  MOD_RES (11)..(11): Selenocysteine
IVIWEPSPSGXLVIGVISGIAVFVVILFIGILFIILRKRQGSRGAMGHYVLAERF

SEQ ID NO: 12036 - protein, 168 aa, Homo sapiens
  MOD_RES (17)..(17): Selenocysteine
  MOD_RES (33)..(33): Selenocysteine
  MOD_RES (37)..(37): Selenocysteine
  MOD_RES (41)..(42): Selenocysteine
  MOD_RES (56)..(56): Selenocysteine
  MOD_RES (83)..(83): Selenocysteine
  MOD_RES (89)..(89): Selenocysteine
  MOD_RES (101)..(101): Selenocysteine
  MOD_RES (124)..(124): Selenocysteine
MGPRARPALLLLMLLQXAVLQGRLLLPPLVKVXHHVXSSVXXLRCRALNYYPQNIXMKWLKDKQPMDAKEFEPKDVLPNGDGXYQGWIXLAVPPGEEQRYXCQVEHPGLDQPLIVIWEPSPSGXLVIGVISGIAVFVVILFIGILFIILRKRQGSRGAMGHYVLAERE

SEQ ID NO: 12037 - protein, 325 aa, Homo sapiens
  MOD_RES (17)..(17): Selenocysteine
  MOD_RES (49)..(49): Selenocysteine
  MOD_RES (76)..(76): Selenocysteine
  MOD_RES (81)..(81): Selenocysteine
  MOD_RES (94)..(94): Selenocysteine
  MOD_RES (109)..(109): Selenocysteine
  MOD_RES (129)..(129): Selenocysteine
  MOD_RES (142)..(142): Selenocysteine
  MOD_RES (190)..(190): Selenocysteine
  MOD_RES (194)..(194): Selenocysteine
  MOD_RES (198)..(199): Selenocysteine
  MOD_RES (213)..(213): Selenocysteine
  MOD_RES (240)..(240): Selenocysteine
  MOD_RES (246)..(246): Selenocysteine
  MOD_RES (258)..(258): Selenocysteine
  MOD_RES (281)..(281): Selenocysteine
MGPRARPALLLLMLLQXAVLQGRLLPLGYVDDQLFVFYDHESRRVEPRXPWVSSRISSQMWLQLSQSLKGWDHMFXVDFWXIMENHNHSKESHXLQVILGCEMQEDNSXEGYWKYGYDGQDHLEFCPDXLDWRAAEPRAWPXKLEWERHKIRARQNRAYLERDCPAQLQQLLELGRGVLDQQVPPLVKVXHHVXSSVXXLRCRALNYYPQNIXMKWLKDKQPMDAKEFEPKDVLPNGDGXYQGWIXLAVPPGEEQRYXCQVEHPGLDQPLIVIWEPSPSGXLVIGVISGIAVFVVILFIGILFIILRKRQGSRGAMGHYVLAERE

SEQ ID NO: 12038 - protein, 76 aa, Homo sapiens
  MOD_RES (17)..(17): Selenocysteine
  MOD_RES (32)..(32): Selenocysteine
MGPRARPALLLLMLLQXAVLQGRLLQPSPSGXLVIGVISGIAVFVVILFIGILFIILRKRQGSRGAMGHYVLAERE

SEQ ID NO: 12039 - protein, 260 aa, Homo sapiens
  MOD_RES (17)..(17): Selenocysteine
  MOD_RES (29)..(29): Selenocysteine
  MOD_RES (44)..(44): Selenocysteine
  MOD_RES (64)..(64): Selenocysteine
  MOD_RES (77)..(77): Selenocysteine
  MOD_RES (125)..(125): Selenocysteine
  MOD_RES (129)..(129): Selenocysteine
  MOD_RES (133)..(134): Selenocysteine
  MOD_RES (148)..(148): Selenocysteine
  MOD_RES (175)..(175): Selenocysteine
  MOD_RES (181)..(181): Selenocysteine
  MOD_RES (193)..(193): Selenocysteine
  MOD_RES (216)..(216): Selenocysteine
MGPRARPALLLLMLLQXAVLQGRLLQSHXLQVILGCEMQEDNSXEGYWKYGYDGQDHLEFCPDXLDWRAAEPRAWPXKLEWERHKIRARQNRAYLERDCPAQLQQLLELGRGVLDQQVPPLVKVXHHVXSSVXXLRCRALNYYPQNIXMKWLKDKQPMDAKEFEPKDVLPNGDGXYQGWIXLAVPPGEEQRYXCQVEHPGLDQPLIVIWEPSPSGXLVIGVISGIAVFVVILFIGILFIILRKRQGSRGAMGHYVLAERE

SEQ ID NO: 12040 - protein, 246 aa, Homo sapiens
  MOD_RES (17)..(17): Selenocysteine
  MOD_RES (29)..(29): Selenocysteine
  MOD_RES (44)..(44): Selenocysteine
  MOD_RES (64)..(64): Selenocysteine
  MOD_RES (77)..(77): Selenocysteine
  MOD_RES (119)..(120): Selenocysteine
  MOD_RES (134)..(134): Selenocysteine
  MOD_RES (161)..(161): Selenocysteine
  MOD_RES (167)..(167): Selenocysteine
  MOD_RES (179)..(179): Selenocysteine
  MOD_RES (202)..(202): Selenocysteine
MGPRARPALLLLMLLQXAVLQGRLLQSHXLQVILGCEMQEDNSXEGYWKYGYDGQDHLEFCPDXLDWRAAEPRAWPXKLEWERHKIRARQNRAYLERDCPAQLQQLLELGRGVLDQQVXXLRCRALNYYPQNIXMKWLKDKQPMDAKEFEPKDVLPNGDGXYQGWIXLAVPPGEEQRYXCQVEHPGLDQPLIVIWEPSPSGXLVIGVISGIAVFVVILFIGILFIILRKRQGSRGAMGHYVLAERE

SEQ ID NO: 12041 - protein, 345 aa, Homo sapiens
  MOD_RES (17)..(17): Selenocysteine
  MOD_RES (72)..(72): Selenocysteine
  MOD_RES (99)..(99): Selenocysteine
  MOD_RES (104)..(104): Selenocysteine
  MOD_RES (117)..(117): Selenocysteine
  MOD_RES (132)..(132): Selenocysteine
  MOD_RES (152)..(152): Selenocysteine
  MOD_RES (165)..(165): Selenocysteine
  MOD_RES (218)..(219): Selenocysteine
  MOD_RES (233)..(233): Selenocysteine
  MOD_RES (260)..(260): Selenocysteine
  MOD_RES (266)..(266): Selenocysteine
  MOD_RES (278)..(278): Selenocysteine
  MOD_RES (301)..(301): Selenocysteine
MGPRARPALLLLMLLQXAVLQGRLLRSHSLHYLFMGASEQDLGLSLFEALGYVDDQLFVFYDHESRRVEPRXPWVSSRISSQMWLQLSQSLKGWDHMFXVDFWXIMENHNHSKESHXLQVILGCEMQEDNSXEGYWKYGYDGQDHLEFCPDXLDWRAAEPRAWPXKLEWERHKIRARQNRAYLERDCPAQLQQLLELGRGVLDQQEGSESSSLPGKVXXLRCRALNYYPQNIXMKWLKDKQPMDAKEFEPKDVLPNGDGXYQGWIXLAVPPGEEQRYXCQVEHPGLDQPLIVIWEPSPSGXLVIGVISGIAVFVVILFIGILFIILRKRQGSRGAMGHYVLAERE

SEQ ID NO: 12042 - protein, 337 aa, Homo sapiens
  MOD_RES (17)..(17): Selenocysteine
  MOD_RES (72)..(72): Selenocysteine
  MOD_RES (99)..(99): Selenocysteine
  MOD_RES (104)..(104): Selenocysteine
  MOD_RES (117)..(117): Selenocysteine
  MOD_RES (132)..(132): Selenocysteine
  MOD_RES (152)..(152): Selenocysteine
  MOD_RES (165)..(165): Selenocysteine
  MOD_RES (213)..(213): Selenocysteine
  MOD_RES (217)..(217): Selenocysteine
  MOD_RES (221)..(222): Selenocysteine
  MOD_RES (236)..(236): Selenocysteine
  MOD_RES (263)..(263): Selenocysteine
  MOD_RES (269)..(269): Selenocysteine
  MOD_RES (281)..(281): Selenocysteine
  MOD_RES (304)..(304): Selenocysteine
MGPRARPALLLLMLLQXAVLQGRLLRSHSLHYLFMGASEQDLGLSLFEALGYVDDQLFVFYDHESRRVEPRXPWVSSRISSQMWLQLSQSLKGWDHMFXVDFWXIMENHNHSKESHXLQVILGCEMQEDNSXEGYWKYGYDGQDHLEFCPDXLDWRAAEPRAWPXKLEWERHKIRARQNRAYLERDCPAQLQQLLELGRGVLDQQVPPLVKVXHHVXSSVXXLRCRALNYYPQNIXMKWLKDKQPMDAKEFEPKDVLPNGDGXYQGWIXLAVPPGEEQRYXCQVEHPGLDQPLIVIWEPSPSGXLVIGVISGIAVFVVILFIGILFIILRKRQGSSF

SEQ ID NO: 12043 - protein, 348 aa, Homo sapiens
  MOD_RES (17)..(17): Selenocysteine
  MOD_RES (72)..(72): Selenocysteine
  MOD_RES (99)..(99): Selenocysteine
  MOD_RES (104)..(104): Selenocysteine
  MOD_RES (117)..(117): Selenocysteine
  MOD_RES (132)..(132): Selenocysteine
  MOD_RES (152)..(152): Selenocysteine
  MOD_RES (165)..(165): Selenocysteine
  MOD_RES (213)..(213): Selenocysteine
  MOD_RES (217)..(217): Selenocysteine
  MOD_RES (221)..(222): Selenocysteine
  MOD_RES (236)..(236): Selenocysteine
  MOD_RES (263)..(263): Selenocysteine
  MOD_RES (269)..(269): Selenocysteine
  MOD_RES (281)..(281): Selenocysteine
  MOD_RES (304)..(304): Selenocysteine
MGPRARPALLLLMLLQXAVLQGRLLRSHSLHYLFMGASEQDLGLSLFEALGYVDDQLFVFYDHESRRVEPRXPWVSSRISSQMWLQLSQSLKGWDHMFXVDFWXIMENHNHSKESHXLQVILGCEMQEDNSXEGYWKYGYDGQDHLEFCPDXLDWRAAEPRAWPXKLEWERHKIRARQNRAYLERDCPAQLQQLLELGRGVLDQQVPPLVKVXHHVXSSVXXLRCRALNYYPQNIXMKWLKDKQPMDAKEFEPKDVLPNGDGXYQGWIXLAVPPGEEQRYXCQVEHPGLDQPLIVIWEPSPSGXLVIGVISGIAVFVVILFIGILFIILRKRQGSRGAMGHYVLAERE

SEQ ID NO: 12044 - protein, 334 aa, Homo sapiens
  MOD_RES (17)..(17): Selenocysteine
  MOD_RES (72)..(72): Selenocysteine
  MOD_RES (99)..(99): Selenocysteine
  MOD_RES (104)..(104): Selenocysteine
  MOD_RES (117)..(117): Selenocysteine
  MOD_RES (132)..(132): Selenocysteine
  MOD_RES (152)..(152): Selenocysteine
  MOD_RES (165)..(165): Selenocysteine
  MOD_RES (207)..(208): Selenocysteine
  MOD_RES (222)..(222): Selenocysteine
  MOD_RES (249)..(249): Selenocysteine
  MOD_RES (255)..(255): Selenocysteine
  MOD_RES (267)..(267): Selenocysteine
  MOD_RES (290)..(290): Selenocysteine
MGPRARPALLLLMLLQXAVLQGRLLRSHSLHYLFMGASEQDLGLSLFEALGYVDDQLFVFYDHESRRVEPRXPWVSSRISSQMWLQLSQSLKGWDHMFXVDFWXIMENHNHSKESHXLQVILGCEMQEDNSXEGYWKYGYDGQDHLEFCPDXLDWRAAEPRAWPXKLEWERHKIRARQNRAYLERDCPAQLQQLLELGRGVLDQQVXXLRCRALNYYPQNIXMKWLKDKQPMDAKEFEPKDVLPNGDGXYQGWIXLAVPPGEEQRYXCQVEHPGLDQPLIVIWEPSPSGXLVIGVISGIAVFVVILFIGILFIILRKRQGSRGAMGHYVLAERE

SEQ ID NO: 12045 - protein, 256 aa, Homo sapiens
  MOD_RES (17)..(17): Selenocysteine
  MOD_RES (72)..(72): Selenocysteine
  MOD_RES (99)..(99): Selenocysteine
  MOD_RES (104)..(104): Selenocysteine
  MOD_RES (121)..(121): Selenocysteine
  MOD_RES (125)..(125): Selenocysteine
  MOD_RES (129)..(130): Selenocysteine
  MOD_RES (144)..(144): Selenocysteine
  MOD_RES (171)..(171): Selenocysteine
  MOD_RES (177)..(177): Selenocysteine
  MOD_RES (189)..(189): Selenocysteine
  MOD_RES (212)..(212): Selenocysteine
MGPRARPALLLLMLLQXAVLQGRLLRSHSLHYLFMGASEQDLGLSLFEALGYVDDQLFVFYDHESRRVEPRXPWVSSRISSQMWLQLSQSLKGWDHMFXVDFWXIMENHNHSKVPPLVKVXHHVXSSVXXLRCRALNYYPQNIXMKWLKDKQPMDAKEFEPKDVLPNGDGXYQGWIXLAVPPGEEQRYXCQVEHPGLDQPLIVIWEPSPSGXLVIGVISGIAVFVVILFIGILFIILRKRQGSRGAMGHYVLAERE

SEQ ID NO: 12046 - protein, 242 aa, Homo sapiens
  MOD_RES (17)..(17): Selenocysteine
  MOD_RES (72)..(72): Selenocysteine
  MOD_RES (99)..(99): Selenocysteine
  MOD_RES (104)..(104): Selenocysteine
  MOD_RES (115)..(116): Selenocysteine
  MOD_RES (130)..(130): Selenocysteine
  MOD_RES (157)..(157): Selenocysteine
  MOD_RES (163)..(163): Selenocysteine
  MOD_RES (175)..(175): Selenocysteine
  MOD_RES (198)..(198): Selenocysteine
MGPRARPALLLLMLLQXAVLQGRLLRSHSLHYLFMGASEQDLGLSLFEALGYVDDQLFVFYDHESRRVEPRXPWVSSRISSQMWLQLSQSLKGWDHMFXVDFWXIMENHNHSKVXXLRCRALNYYPQNIXMKWLKDKQPMDAKEFEPKDVLPNGDGXYQGWIXLAVPPGEEQRYXCQVEHPGLDQPLIVIWEPSPSGXLVIGVISGIAVFVVILFIGILFIILRKRQGSRGAMGHYVLAERE

SEQ ID NO: 12047 - protein, 70 aa, Homo sapiens
  MOD_RES (19)..(19): Selenocysteine
  MOD_RES (22)..(22): Selenocysteine
  MOD_RES (24)..(24): Selenocysteine
  MOD_RES (52)..(52): Selenocysteine
MGEPGQSPSPRSSHGSPPXLSXLXLLLLLCGHAHSQCKILRCNADSPSYLRXCRNALIRRCIRLRWIIFL

SEQ ID NO: 12048 - protein, 93 aa, Homo sapiens
  MOD_RES (19)..(19): Selenocysteine
  MOD_RES (22)..(22): Selenocysteine
  MOD_RES (24)..(24): Selenocysteine
  MOD_RES (50)..(50): Selenocysteine
  MOD_RES (90)..(90): Selenocysteine
  MOD_RES (93)..(93): Selenocysteine
MGEPGQSPSPRSSHGSPPXLSXLXLLLLLCGHAHSQCKILRCNAEYVSSXLSLRGGGSSGALRGGGGGGRGGGVGSGGLCRALRSYALCXRRX

SEQ ID NO: 12049 - protein, 426 aa, Homo sapiens
  MOD_RES (19)..(19): Selenocysteine
  MOD_RES (22)..(22): Selenocysteine
  MOD_RES (24)..(24): Selenocysteine
  MOD_RES (50)..(50): Selenocysteine
  MOD_RES (90)..(90): Selenocysteine
  MOD_RES (93)..(93): Selenocysteine
  MOD_RES (96)..(96): Selenocysteine
  MOD_RES (125)..(125): Selenocysteine
  MOD_RES (184)..(184): Selenocysteine
  MOD_RES (204)..(204): Selenocysteine
  MOD_RES (215)..(215): Selenocysteine
  MOD_RES (217)..(217): Selenocysteine
  MOD_RES (221)..(221): Selenocysteine
  MOD_RES (267)..(267): Selenocysteine
  MOD_RES (283)..(284): Selenocysteine
  MOD_RES (290)..(290): Selenocysteine
  MOD_RES (339)..(339): Selenocysteine
  MOD_RES (342)..(342): Selenocysteine
  MOD_RES (374)..(374): Selenocysteine
  MOD_RES (409)..(409): Selenocysteine
MGEPGQSPSPRSSHGSPPXLSXLXLLLLLCGHAHSQCKILRCNAEYVSSXLSLRGGGSSGALRGGGGGGRGGGVGSGGLCRALRSYALCXRRXARXCRGDLAFHSAVHGIEDLMIQHNCSRQGPXAPPPPRGPALPGAGSGLPAPDPCDYEGRFSRLHGRPPGFLHCASFGDPHVRSFHHHFHXCRVQGAWPLLDNDFLFVQAXSSPMALGANAXAXRKLXIIFKNMQECIDQKVYQAEVDNLPVAFEDGSINGGDRPGGSSLSIQXANPGNHVEIQAAYIGXXIIIRQXAGQLSFSIKVAEDVAMAFSAEQDLQLCVGGCPPSQRLSRSERNRRGAIXIDXARRLCKEGLPVEDAYFHSCVFDVLISGDPNFXVAAQAALEDARAFLPDLEKLHLFPSDAGVPLSSAXLLAPLLSGLFVLWLCIQ

SEQ ID NO: 12050 - protein, 313 aa, Homo sapiens
  MOD_RES (12)..(12): Selenocysteine
  MOD_RES (71)..(71): Selenocysteine
  MOD_RES (91)..(91): Selenocysteine
  MOD_RES (102)..(102): Selenocysteine
  MOD_RES (104)..(104): Selenocysteine
  MOD_RES (108)..(108): Selenocysteine
  MOD_RES (154)..(154): Selenocysteine
  MOD_RES (170)..(171): Selenocysteine
  MOD_RES (177)..(177): Selenocysteine
  MOD_RES (226)..(226): Selenocysteine
  MOD_RES (229)..(229): Selenocysteine
  MOD_RES (261)..(261): Selenocysteine
  MOD_RES (296)..(296): Selenocysteine
MIQHNCSRQGPXAPPPPRGPALPGAGSGLPAPDPCDYEGRFSRLHGRPPGFLHCASFGDPHVRSFHHHFHXCRVQGAWPLLDNDFLFVQAXSSPMALGANAXAXRKLXIIFKNMQECIDQKVYQAEVDNLPVAFEDGSINGGDRPGGSSLSIQXANPGNHVEIQAAYIGXXIIIRQXAGQLSFSIKVAEDVAMAFSAEQDLQLCVGGCPPSQRLSRSERNRRGAIXIDXARRLCKEGLPVEDAYFHSCVFDVLISGDPNFXVAAQAALEDARAFLPDLEKLHLFPSDAGVPLSSAXLLAPLLSGLFVLWLCIQ

SEQ ID NO: 12051 - protein, 200 aa, Homo sapiens
  MOD_RES (41)..(41): Selenocysteine
  MOD_RES (57)..(58): Selenocysteine
  MOD_RES (64)..(64): Selenocysteine
  MOD_RES (113)..(113): Selenocysteine
  MOD_RES (116)..(116): Selenocysteine
  MOD_RES (148)..(148): Selenocysteine
  MOD_RES (183)..(183): Selenocysteine
MQECIDQKVYQAEVDNLPVAFEDGSINGGDRPGGSSLSIQXANPGNHVEIQAAYIGXXIIIRQXAGQLSFSIKVAEDVAMAFSAEQDLQLCVGGCPPSQRLSRSERNRRGAIXIDXARRLCKEGLPVEDAYFHSCVFDVLISGDPNFXVAAQAALEDARAFLPDLEKLHLFPSDAGVPLSSAXLLAPLLSGLFVLWLCIQ

SEQ ID NO: 12052 - protein, 58 aa, Homo sapiens
  MOD_RES (36)..(36): Selenocysteine
  MOD_RES (40)..(40): Selenocysteine
MSSGVKKEFGHEFDLYENKDYIRNCIIGKGRSYKGXVSIXKSGIKCQPWSSMIPHEHR

SEQ ID NO: 12053 - protein, 118 aa, Homo sapiens
  MOD_RES (4)..(4): Selenocysteine
  MOD_RES (38)..(38): Selenocysteine
  MOD_RES (48)..(49): Selenocysteine
  MOD_RES (61)..(61): Selenocysteine
  MOD_RES (66)..(66): Selenocysteine
  MOD_RES (75)..(75): Selenocysteine
  MOD_RES (83)..(83): Selenocysteine
MWVXKLLPALLLQHVLLHLLLLPIAIPYAEGQRKRRNXIHEFKKSAKXXLIKIDPALKIKXKKVNXADQCANRCXRNKGLPFXCKAFVFDKARKQCLWFPFNSMSSGVKKEFGHEFDL

SEQ ID NO: 12054 - protein, 141 aa, Homo sapiens
  MOD_RES (4)..(4): Selenocysteine
  MOD_RES (38)..(38): Selenocysteine
  MOD_RES (48)..(49): Selenocysteine
  MOD_RES (61)..(61): Selenocysteine
  MOD_RES (66)..(66): Selenocysteine
  MOD_RES (75)..(75): Selenocysteine
  MOD_RES (83)..(83): Selenocysteine
  MOD_RES (139)..(139): Selenocysteine
MWVXKLLPALLLQHVLLHLLLLPIAIPYAEGQRKRRNXIHEFKKSAKXXLIKIDPALKIKXKKVNXADQCANRCXRNKGLPFXCKAFVFDKARKQCLWFPFNSMSSGVKKEFGHEFDLYENKDYIRNCIIGKGRSYKGXVS

SEQ ID NO: 12055 - protein, 210 aa, Homo sapiens
  MOD_RES (4)..(4): Selenocysteine
  MOD_RES (38)..(38): Selenocysteine
  MOD_RES (48)..(49): Selenocysteine
  MOD_RES (61)..(61): Selenocysteine
  MOD_RES (66)..(66): Selenocysteine
  MOD_RES (75)..(75): Selenocysteine
  MOD_RES (83)..(83): Selenocysteine
  MOD_RES (139)..(139): Selenocysteine
  MOD_RES (143)..(143): Selenocysteine
  MOD_RES (191)..(191): Selenocysteine
MWVXKLLPALLLQHVLLHLLLLPIAIPYAEGQRKRRNXIHEFKKSAKXXLIKIDPALKIKXKKVNXADQCANRCXRNKGLPFXCKAFVFDKARKQCLWFPFNSMSSGVKKEFGHEFDLYENKDYIRNCIIGKGRSYKGXVSIXKSGIKCQPWSSMIPHEHSFLPSSYRGKDLQENYCRNPRGEEGGPWCFXSNPEVRYEVCDIPQCSEGK

SEQ ID NO: 12056 - protein, 290 aa, Homo sapiens
  MOD_RES (4)..(4): Selenocysteine
  MOD_RES (38)..(38): Selenocysteine
  MOD_RES (48)..(49): Selenocysteine
  MOD_RES (61)..(61): Selenocysteine
  MOD_RES (66)..(66): Selenocysteine
  MOD_RES (75)..(75): Selenocysteine
  MOD_RES (83)..(83): Selenocysteine
  MOD_RES (139)..(139): Selenocysteine
  MOD_RES (143)..(143): Selenocysteine
  MOD_RES (191)..(191): Selenocysteine
  MOD_RES (213)..(213): Selenocysteine
  MOD_RES (226)..(226): Selenocysteine
  MOD_RES (239)..(239): Selenocysteine
  MOD_RES (273)..(273): Selenocysteine
  MOD_RES (278)..(278): Selenocysteine
  MOD_RES (287)..(287): Selenocysteine
  MOD_RES (290)..(290): Selenocysteine
MWVXKLLPALLLQHVLLHLLLLPIAIPYAEGQRKRRNXIHEFKKSAKXXLIKIDPALKIKXKKVNXADQCANRCXRNKGLPFXCKAFVFDKARKQCLWFPFNSMSSGVKKEFGHEFDLYENKDYIRNCIIGKGRSYKGXVSIXKSGIKCQPWSSMIPHEHSFLPSSYRGKDLQENYCRNPRGEEGGPWCFXSNPEVRYEVCDIPQCSEVECMXCNGESYRGLMDHXESGKICQRWDHQXPHRHKFLPERYPDKGFDDNYCRNPDGQPRPWCYXLDPHXRWEYCAIKXCEX

SEQ ID NO: 12057 - protein, 728 aa, Homo sapiens
  MOD_RES (4)..(4): Selenocysteine
  MOD_RES (38)..(38): Selenocysteine
  MOD_RES (48)..(49): Selenocysteine
  MOD_RES (61)..(61): Selenocysteine
  MOD_RES (66)..(66): Selenocysteine
  MOD_RES (75)..(75): Selenocysteine
  MOD_RES (83)..(83): Selenocysteine
  MOD_RES (139)..(139): Selenocysteine
  MOD_RES (143)..(143): Selenocysteine
  MOD_RES (191)..(191): Selenocysteine
  MOD_RES (213)..(213): Selenocysteine
  MOD_RES (226)..(226): Selenocysteine
  MOD_RES (239)..(239): Selenocysteine
  MOD_RES (273)..(273): Selenocysteine
  MOD_RES (278)..(278): Selenocysteine
  MOD_RES (287)..(287): Selenocysteine
  MOD_RES (292)..(292): Selenocysteine
  MOD_RES (296)..(296): Selenocysteine
  MOD_RES (302)..(303): Selenocysteine
  MOD_RES (316)..(316): Selenocysteine
  MOD_RES (319)..(319): Selenocysteine
  MOD_RES (340)..(340): Selenocysteine
  MOD_RES (367)..(368): Selenocysteine
  MOD_RES (406)..(406): Selenocysteine
  MOD_RES (411)..(411): Selenocysteine
  MOD_RES (454)..(454): Selenocysteine
  MOD_RES (473)..(474): Selenocysteine
  MOD_RES (476)..(476): Selenocysteine
  MOD_RES (490)..(490): Selenocysteine
  MOD_RES (501)..(501): Selenocysteine
  MOD_RES (503)..(503): Selenocysteine
  MOD_RES (531)..(531): Selenocysteine
  MOD_RES (596)..(596): Selenocysteine
  MOD_RES (605)..(605): Selenocysteine
  MOD_RES (610)..(610): Selenocysteine
  MOD_RES (620)..(620): Selenocysteine
  MOD_RES (651)..(651): Selenocysteine
  MOD_RES (722)..(722): Selenocysteine
MWVXKLLPALLLQHVLLHLLLLPIAIPYAEGQRKRRNXIHEFKKSAKXXLIKIDPALKIKXKKVNXADQCANRCXRNKGLPFXCKAFVFDKARKQCLWFPFNSMSSGVKKEFGHEFDLYENKDYIRNCIIGKGRSYKGXVSIXKSGIKCQPWSSMIPHEHSFLPSSYRGKDLQENYCRNPRGEEGGPWCFXSNPEVRYEVCDIPQCSEVECMXCNGESYRGLMDHXESGKICQRWDHQXPHRHKFLPERYPDKGFDDNYCRNPDGQPRPWCYXLDPHXRWEYCAIKXCADNXMNDXDVPLEXXECIQGQGEGYRGXVNXIWNGIPCQRWDSQYPHEHDMXPENFKCKDLRENYCRNPDGSESPWCFXXDPNIRVGYCSQIPNCDMSHGQDCYRGNGKNYMGNLSQXRSGLXCSMWDKNMEDLHRHIFWEPDASKLNENYCRNPDDDAHGPWCYXGNPLIPWDYCPISRCEGDXXPXIVNLDHPVISCAKXKQLRVVNGIPXRXNIGWMVSLRYRNKHICGGSLIKESWVLXARQCFPSRDLKDYEAWLGIHDVHGRGDEKCKQVLNVSQLVYGPEGSDLVLMKLARPAVLDDFVSXIDLPNYGCXIPEKXSCSVYGWGYXGLINYDGLLRVAHLYIMGNEKCSQHHRGKVXLNESEICAGAEKIGSGPCEGDYGGPLVCEQHKMRMVLGVIVPGRGCAIPNRPGIFVRVAYYAKWIHKIILXYKVPQS

SEQ ID NO: 12058 - protein, 184 aa, Homo sapiens
  MOD_RES (4)..(4): Selenocysteine
  MOD_RES (38)..(38): Selenocysteine
  MOD_RES (48)..(49): Selenocysteine
  MOD_RES (61)..(61): Selenocysteine
  MOD_RES (66)..(66): Selenocysteine
  MOD_RES (75)..(75): Selenocysteine
  MOD_RES (83)..(83): Selenocysteine
  MOD_RES (139)..(139): Selenocysteine
  MOD_RES (143)..(143): Selenocysteine
  MOD_RES (171)..(171): Selenocysteine
MWVXKLLPALLLQHVLLHLLLLPIAIPYAEGQRKRRNXIHEFKKSAKXXLIKIDPALKIKXKKVNXADQCANRCXRNKGLPFXCKAFVFDKARKQCLWFPFNSMSSGVKKEFGHEFDLYENKDYIRNCIIGKGRSYKGXVSIXKSGIKCQPWSSMIPHEHSGGDDCLVESXFYSIPFWGHNSAR

SEQ ID NO: 12059 - protein, 285 aa, Homo sapiens
  MOD_RES (4)..(4): Selenocysteine
  MOD_RES (38)..(38): Selenocysteine
  MOD_RES (48)..(49): Selenocysteine
  MOD_RES (61)..(61): Selenocysteine
  MOD_RES (66)..(66): Selenocysteine
  MOD_RES (75)..(75): Selenocysteine
  MOD_RES (83)..(83): Selenocysteine
  MOD_RES (139)..(139): Selenocysteine
  MOD_RES (143)..(143): Selenocysteine
  MOD_RES (186)..(186): Selenocysteine
  MOD_RES (208)..(208): Selenocysteine
  MOD_RES (221)..(221): Selenocysteine
  MOD_RES (234)..(234): Selenocysteine
  MOD_RES (268)..(268): Selenocysteine
  MOD_RES (273)..(273): Selenocysteine
  MOD_RES (282)..(282): Selenocysteine
  MOD_RES (285)..(285): Selenocysteine
MWVXKLLPALLLQHVLLHLLLLPIAIPYAEGQRKRRNXIHEFKKSAKXXLIKIDPALKIKXKKVNXADQCANRCXRNKGLPFXCKAFVFDKARKQCLWFPFNSMSSGVKKEFGHEFDLYENKDYIRNCIIGKGRSYKGXVSIXKSGIKCQPWSSMIPHEHSYRGKDLQENYCRNPRGEEGGPWCFXSNPEVRYEVCDIPQCSEVECMXCNGESYRGLMDHXESGKICQRWDHQXPHRHKFLPERYPDKGFDDNYCRNPDGQPRPWCYXLDPHXRWEYCAIKXCEX

SEQ ID NO: 12060 - protein, 723 aa, Homo sapiens
  MOD_RES (4)..(4): Selenocysteine
  MOD_RES (38)..(38): Selenocysteine
  MOD_RES (48)..(49): Selenocysteine
  MOD_RES (61)..(61): Selenocysteine
  MOD_RES (66)..(66): Selenocysteine
  MOD_RES (75)..(75): Selenocysteine
  MOD_RES (83)..(83): Selenocysteine
  MOD_RES (139)..(139): Selenocysteine
  MOD_RES (143)..(143): Selenocysteine
  MOD_RES (186)..(186): Selenocysteine
  MOD_RES (208)..(208): Selenocysteine
  MOD_RES (221)..(221): Selenocysteine
  MOD_RES (234)..(234): Selenocysteine
  MOD_RES (268)..(268): Selenocysteine
  MOD_RES (273)..(273): Selenocysteine
  MOD_RES (282)..(282): Selenocysteine
  MOD_RES (287)..(287): Selenocysteine
  MOD_RES (291)..(291): Selenocysteine
  MOD_RES (297)..(298): Selenocysteine
  MOD_RES (311)..(311): Selenocysteine
  MOD_RES (314)..(314): Selenocysteine
  MOD_RES (335)..(335): Selenocysteine
  MOD_RES (362)..(363): Selenocysteine
  MOD_RES (401)..(401): Selenocysteine
  MOD_RES (406)..(406): Selenocysteine
  MOD_RES (449)..(449): Selenocysteine
  MOD_RES (468)..(469): Selenocysteine
  MOD_RES (471)..(471): Selenocysteine
  MOD_RES (485)..(485): Selenocysteine
  MOD_RES (496)..(496): Selenocysteine
  MOD_RES (498)..(498): Selenocysteine
  MOD_RES (526)..(526): Selenocysteine
  MOD_RES (591)..(591): Selenocysteine
  MOD_RES (600)..(600): Selenocysteine
  MOD_RES (605)..(605): Selenocysteine
  MOD_RES (615)..(615): Selenocysteine
  MOD_RES (646)..(646): Selenocysteine
  MOD_RES (717)..(717): Selenocysteine
MWVXKLLPALLLQHVLLHLLLLPIAIPYAEGQRKRRNXIHEFKKSAKXXLIKIDPALKIKXKKVNXADQCANRCXRNKGLPFXCKAFVFDKARKQCLWFPFNSMSSGVKKEFGHEFDLYENKDYIRNCIIGKGRSYKGXVSIXKSGIKCQPWSSMIPHEHSYRGKDLQENYCRNPRGEEGGPWCFXSNPEVRYEVCDIPQCSEVECMXCNGESYRGLMDHXESGKICQRWDHQXPHRHKFLPERYPDKGFDDNYCRNPDGQPRPWCYXLDPHXRWEYCAIKXCADNXMNDXDVPLEXXECIQGQGEGYRGXVNXIWNGIPCQRWDSQYPHEHDMXPENFKCKDLRENYCRNPDGSESPWCFXXDPNIRVGYCSQIPNCDMSHGQDCYRGNGKNYMGNLSQXRSGLXCSMWDKNMEDLHRHIFWEPDASKLNENYCRNPDDDAHGPWCYXGNPLIPWDYCPISRCEGDXXPXIVNLDHPVISCAKXKQLRVVNGIPXRXNIGWMVSLRYRNKHICGGSLIKESWVLXARQCFPSRDLKDYEAWLGIHDVHGRGDEKCKQVLNVSQLVYGPEGSDLVLMKLARPAVLDDFVSXIDLPNYGCXIPEKXSCSVYGWGYXGLINYDGLLRVAHLYIMGNEKCSQHHRGKVXLNESEICAGAEKIGSGPCEGDYGGPLVCEQHKMRMVLGVIVPGRGCAIPNRPGIFVRVAYYAKWIHKIILXYKVPQS

SEQ ID NO: 12061 - protein, 59 aa, Homo sapiens
  MOD_RES (11)..(11): Selenocysteine
  MOD_RES (21)..(21): Selenocysteine
MESVVKNCGQXVHDEVANKQXMEELKDLLKRQVEVNVRNKILYLIQAWAHAFRNEPKYK

SEQ ID NO: 12062 - protein, 71 aa, Homo sapiens
  MOD_RES (11)..(11): Selenocysteine
  MOD_RES (21)..(21): Selenocysteine
  MOD_RES (64)..(64): Selenocysteine
MESVVKNCGQXVHDEVANKQXMEELKDLLKRQVEVNVRNKILYLIQAWAHAFRNEPKYKVVQDXYQIMKVE

SEQ ID NO: 12063 - protein, 263 aa, Homo sapiens
  MOD_RES (7)..(7): Selenocysteine
  MOD_RES (16)..(16): Selenocysteine
  MOD_RES (23)..(23): Selenocysteine
  MOD_RES (40)..(40): Selenocysteine
  MOD_RES (78)..(78): Selenocysteine
  MOD_RES (88)..(88): Selenocysteine
  MOD_RES (115)..(115): Selenocysteine
  MOD_RES (161)..(161): Selenocysteine
  MOD_RES (183)..(183): Selenocysteine
  MOD_RES (212)..(212): Selenocysteine
  MOD_RES (214)..(215): Selenocysteine
  MOD_RES (223)..(223): Selenocysteine
  MOD_RES (239)..(239): Selenocysteine
MGRGSGXFERLLDKAXSQLLLEXDWESILQICDLIRQGDXQAKYAVNSIKKKVNDKNPHVALYALEVMESVVKNCGQXVHDEVANKQXMEELKDLLKAWAHAFRNEPKYKVVQDXYQIMKVEGHVFPEFKESDAMFAAERAPDWVDAEECHRCRVQFGVMXRKHHCRACGQIFCGKCSSKYSXIPKFGIEKEVRVCEPCYEQLNRKAEGKAXSXXELPPEYLXSPLSQQSQLPPKRDEXALQEEEELQLALALSQSEAEEKER

SEQ ID NO: 12064 - protein, 777 aa, Homo sapiens
  MOD_RES (7)..(7): Selenocysteine
  MOD_RES (16)..(16): Selenocysteine
  MOD_RES (23)..(23): Selenocysteine
  MOD_RES (40)..(40): Selenocysteine
  MOD_RES (78)..(78): Selenocysteine
  MOD_RES (88)..(88): Selenocysteine
  MOD_RES (131)..(131): Selenocysteine
  MOD_RES (177)..(177): Selenocysteine
  MOD_RES (199)..(199): Selenocysteine
  MOD_RES (228)..(228): Selenocysteine
  MOD_RES (230)..(231): Selenocysteine
  MOD_RES (239)..(239): Selenocysteine
  MOD_RES (255)..(255): Selenocysteine
  MOD_RES (285)..(285): Selenocysteine
  MOD_RES (287)..(287): Selenocysteine
  MOD_RES (347)..(347): Selenocysteine
  MOD_RES (355)..(355): Selenocysteine
  MOD_RES (369)..(369): Selenocysteine
  MOD_RES (379)..(379): Selenocysteine
  MOD_RES (417)..(418): Selenocysteine
  MOD_RES (434)..(434): Selenocysteine
  MOD_RES (553)..(553): Selenocysteine
  MOD_RES (592)..(592): Selenocysteine
  MOD_RES (625)..(625): Selenocysteine
  MOD_RES (642)..(642): Selenocysteine
  MOD_RES (655)..(655): Selenocysteine
  MOD_RES (666)..(666): Selenocysteine
  MOD_RES (668)..(668): Selenocysteine
  MOD_RES (693)..(693): Selenocysteine
  MOD_RES (716)..(717): Selenocysteine
MGRGSGXFERLLDKAXSQLLLEXDWESILQICDLIRQGDXQAKYAVNSIKKKVNDKNPHVALYALEVMESVVKNCGQXVHDEVANKQXMEELKDLLKRQVEVNVRNKILYLIQAWAHAFRNEPKYKVVQDXYQIMKVEGHVFPEFKESDAMFAAERAPDWVDAEECHRCRVQFGVMXRKHHCRACGQIFCGKCSSKYSXIPKFGIEKEVRVCEPCYEQLNRKAEGKAXSXXELPPEYLXSPLSQQSQLPPKRDEXALQEEEELQLALALSQSEAEEKERLRQKSXYXSYPKAEPMPSASSAPPASSLYSSPVNSSAPLAEDIDPELARYLNRNYWEKKQEEARKSPXPSAPVPLXEPAAQPGEGHAAPXNVVENPLPEXDSQPIPPSGGPFSEPQFHNGESEESHEQFLKALQNAVXXFVNRMKSNHMRGRSIXNDSAVLSLFQSINGMHPQLLELLNQLDERRLYYEGLQDKLAQIRDARGALSALREEHREKLRRAAEEAERQRQIQLAQKLEIMRQKKQEYLEVQRQLAIQRLQEQEKERQMRLEQQKQXVQMRAQMPAFPLPYAQLQAMPAAGGVLYQPSGPASFPSXFSPAGSVEGSPMHGVYMSQPAPAAGPYPSMPSXAADPSMVSAYMYPAGAXGAQAAPQAQAGPXASPAYSSYQPXPXAGYQNVASQAPQSLPAISQPPQSSXMGYMGSQSVSMGYQPYNMQNLMXXLPSQDASLPPQQPYIAGQQPMYQQMAPSGGPPQQQPPVAQQPQAQGPPAQGSEAQLISFD

SEQ ID NO: 12065 - protein, 110 aa, Homo sapiens
  MOD_RES (2)..(2): Selenocysteine
  MOD_RES (27)..(27): Selenocysteine
  MOD_RES (50)..(51): Selenocysteine
  MOD_RES (78)..(78): Selenocysteine
  MOD_RES (80)..(80): Selenocysteine
  MOD_RES (89)..(89): Selenocysteine
  MOD_RES (91)..(91): Selenocysteine
PXAGYQNVASQAPQSLPAISQPPQSSXMGYMGSQSVSMGYQPYNMQNLMXXLPSQDASLPPQQPYIAGQQPMYQQGEXHXRGPFSADRXRXQVSGQIRASASVDRKNREF

SEQ ID NO: 12066 - protein, 292 aa, Homo sapiens
  MOD_RES (5)..(5): Selenocysteine
  MOD_RES (7)..(7): Selenocysteine
  MOD_RES (67)..(67): Selenocysteine
  MOD_RES (75)..(75): Selenocysteine
  MOD_RES (89)..(89): Selenocysteine
  MOD_RES (99)..(99): Selenocysteine
  MOD_RES (222)..(222): Selenocysteine
  MOD_RES (261)..(261): Selenocysteine
RQKSXYXSYPKAEPMPSASSAPPASSLYSSPVNSSAPLAEDIDPELARYLNRNYWEKKQEEARKSPXPSAPVPLXEPAAQPGEGHAAPXNVVENPLPEXDSQPIPPSGGPFSESINGMHPQLLELLNQLDERRLYYEGLQDKLAQIRDARGALSALREEHREKLRRAAEEAERQRQIQLAQKLEIMRQKKQEYLEVQRQLAIQRLQEQEKERQMRLEQQKQXVQMRAQMPAFPLPYAQLQAMPAAGGVLYQPSGPASFPSXFSPAGSVEGSPMHGVYMSQPAPAAGPYPSMP

SEQ ID NO: 12067 - protein, 38 aa, Homo sapiens
  MOD_RES (1)..(1): Any amino acid
XQMAPSGGPPQQQPPVAQQPQAQGPPAQGSEAQLISFD

SEQ ID NO: 12068 - protein, 63 aa, Homo sapiens
  MOD_RES (1)..(1): Any amino acid
  MOD_RES (12)..(13): Selenocysteine
XYQPYNMQNLMXXLPSQDASLPPQQPYIAGQQPMYQQQPPVAQQPQAQGPPAQGSEAQLISFD

SEQ ID NO: 12069 - protein, 207 aa, Homo sapiens
  MOD_RES (23)..(23): Selenocysteine
  MOD_RES (34)..(34): Selenocysteine
  MOD_RES (44)..(44): Selenocysteine
  MOD_RES (46)..(46): Selenocysteine
  MOD_RES (53)..(53): Selenocysteine
  MOD_RES (69)..(69): Selenocysteine
  MOD_RES (151)..(151): Selenocysteine
  MOD_RES (156)..(156): Selenocysteine
  MOD_RES (189)..(189): Selenocysteine
  MOD_RES (199)..(199): Selenocysteine
  MOD_RES (204)..(204): Selenocysteine
MEWGKQWLVWLLLGHMVVSQMAXLLARKRRWYKXENEYYLLQFXLXVRCLYYXSFSLELCWQQLPAASXSYSFPWMLAYVFYYPVLHNGPILSFSEFIKQMQQQEHDSLKASLCVLALGLGRLLCWWWLAELMAHLMYMHAIYSSIPLLEXVSCWXLGGLALAQVLFFYVKYLVLFGVPALLMRLDGLXPPALPRCVSXMFSFXGMW

SEQ ID NO: 12070 - protein, 493 aa, Homo sapiens
  MOD_RES (44)..(44): Selenocysteine
  MOD_RES (46)..(46): Selenocysteine
  MOD_RES (56)..(56): Selenocysteine
  MOD_RES (86)..(86): Selenocysteine
  MOD_RES (111)..(111): Selenocysteine
  MOD_RES (121)..(122): Selenocysteine
  MOD_RES (136)..(136): Selenocysteine
  MOD_RES (146)..(146): Selenocysteine
  MOD_RES (162)..(162): Selenocysteine
  MOD_RES (172)..(172): Selenocysteine
  MOD_RES (174)..(174): Selenocysteine
  MOD_RES (181)..(181): Selenocysteine
  MOD_RES (197)..(197): Selenocysteine
  MOD_RES (279)..(279): Selenocysteine
  MOD_RES (284)..(284): Selenocysteine
  MOD_RES (317)..(317): Selenocysteine
  MOD_RES (327)..(327): Selenocysteine
  MOD_RES (332)..(332): Selenocysteine
  MOD_RES (364)..(364): Selenocysteine
  MOD_RES (368)..(368): Selenocysteine
  MOD_RES (371)..(371): Selenocysteine
  MOD_RES (397)..(397): Selenocysteine
  MOD_RES (408)..(408): Selenocysteine
  MOD_RES (436)..(436): Selenocysteine
  MOD_RES (455)..(455): Selenocysteine
  MOD_RES (469)..(469): Selenocysteine
  MOD_RES (489)..(489): Selenocysteine
  MOD_RES (492)..(492): Selenocysteine
MLPRWELALYLLASLGFHFYSFYEVYKVSREHEEELDQEFELEXDXLFGGLKKDAXDFEWSFWMEWGKQWLVWLLLGHMVVSQMAXLLARKHRPWILMLYGMWACWCVLGXPGVAMVLLHXXISFCVAQFRSQLLXWLCSLLLLSXLRLQGVEEVKRRWYKXENEYYLLQFXLXVRCLYYXSFSLELCWQQLPAASXSYSFPWMLAYVFYYPVLHNGPILSFSEFIKQMQQQEHDSLKASLCVLALGLGRLLCWWWLAELMAHLMYMHAIYSSIPLLEXVSCWXLGGLALAQVLFFYVKYLVLFGVPALLMRLDGLXPPALPRCVSXMFSFXGMWRYFDVGLHNFLIRYVYIPVGGSQHGLLGXLFSXAMXFAFVSYWHGGYDYLWCWAALNWLGVXVENGVRRLVEXPCIQDSLARYFSPQARRRFHAALASCSXSMLILSNLVFLGGNEVGKXYWNRIFIQGWPWVXLSVLGFLYCYSHVGIAWAQXYAXD

SEQ ID NO: 12071 - protein, 356 aa, Homo sapiens
  MOD_RES (44)..(44): Selenocysteine
  MOD_RES (46)..(46): Selenocysteine
  MOD_RES (56)..(56): Selenocysteine
  MOD_RES (86)..(86): Selenocysteine
  MOD_RES (142)..(142): Selenocysteine
  MOD_RES (147)..(147): Selenocysteine
  MOD_RES (180)..(180): Selenocysteine
  MOD_RES (190)..(190): Selenocysteine
  MOD_RES (195)..(195): Selenocysteine
  MOD_RES (227)..(227): Selenocysteine
  MOD_RES (231)..(231): Selenocysteine
  MOD_RES (234)..(234): Selenocysteine
  MOD_RES (260)..(260): Selenocysteine
  MOD_RES (271)..(271): Selenocysteine
  MOD_RES (299)..(299): Selenocysteine
  MOD_RES (318)..(318): Selenocysteine
  MOD_RES (332)..(332): Selenocysteine
  MOD_RES (352)..(352): Selenocysteine
  MOD_RES (355)..(355): Selenocysteine
MLPRWELALYLLASLGFHFYSFYEVYKVSREHEEELDQEFELEXDXLFGGLKKDAXDFEWSFWMEWGKQWLVWLLLGHMVVSQMAXLLARKMQQQEHDSLKASLCVLALGLGRLLCWWWLAELMAHLMYMHAIYSSIPLLEXVSCWXLGGLALAQVLFFYVKYLVLFGVPALLMRLDGLXPPALPRCVSXMFSFXGMWRYFDVGLHNFLIRYVYIPVGGSQHGLLGXLFSXAMXFAFVSYWHGGYDYLWCWAALNWLGVXVENGVRRLVEXPCIQDSLARYFSPQARRRFHAALASCSXSMLILSNLVFLGGNEVGKXYWNRIFIQGWPWVXLSVLGFLYCYSHVGIAWAQXYAXD

SEQ ID NO: 12072 - protein, 428 aa, Homo sapiens
  MOD_RES (44)..(44): Selenocysteine
  MOD_RES (46)..(46): Selenocysteine
  MOD_RES (56)..(56): Selenocysteine
  MOD_RES (86)..(86): Selenocysteine
  MOD_RES (97)..(97): Selenocysteine
  MOD_RES (107)..(107): Selenocysteine
  MOD_RES (109)..(109): Selenocysteine
  MOD_RES (116)..(116): Selenocysteine
  MOD_RES (132)..(132): Selenocysteine
  MOD_RES (214)..(214): Selenocysteine
  MOD_RES (219)..(219): Selenocysteine
  MOD_RES (252)..(252): Selenocysteine
  MOD_RES (262)..(262): Selenocysteine
  MOD_RES (267)..(267): Selenocysteine
  MOD_RES (299)..(299): Selenocysteine
  MOD_RES (303)..(303): Selenocysteine
  MOD_RES (306)..(306): Selenocysteine
  MOD_RES (332)..(332): Selenocysteine
  MOD_RES (343)..(343): Selenocysteine
  MOD_RES (371)..(371): Selenocysteine
  MOD_RES (390)..(390): Selenocysteine
  MOD_RES (404)..(404): Selenocysteine
  MOD_RES (424)..(424): Selenocysteine
  MOD_RES (427)..(427): Selenocysteine
MLPRWELALYLLASLGFHFYSFYEVYKVSREHEEELDQEFELEXDXLFGGLKKDAXDFEWSFWMEWGKQWLVWLLLGHMVVSQMAXLLARKRRWYKXENEYYLLQFXLXVRCLYYXSFSLELCWQQLPAASXSYSFPWMLAYVFYYPVLHNGPILSFSEFIKQMQQQEHDSLKASLCVLALGLGRLLCWWWLAELMAHLMYMHAIYSSIPLLEXVSCWXLGGLALAQVLFFYVKYLVLFGVPALLMRLDGLXPPALPRCVSXMFSFXGMWRYFDVGLHNFLIRYVYIPVGGSQHGLLGXLFSXAMXFAFVSYWHGGYDYLWCWAALNWLGVXVENGVRRLVEXPCIQDSLARYFSPQARRRFHAALASCSXSMLILSNLVFLGGNEVGKXYWNRIFIQGWPWVXLSVLGFLYCYSHVGIAWAQXYAXD

SEQ ID NO: 12073 - protein, 183 aa, Homo sapiens
  MOD_RES (7)..(7): Selenocysteine
  MOD_RES (17)..(17): Selenocysteine
  MOD_RES (22)..(22): Selenocysteine
  MOD_RES (54)..(54): Selenocysteine
  MOD_RES (58)..(58): Selenocysteine
  MOD_RES (61)..(61): Selenocysteine
  MOD_RES (87)..(87): Selenocysteine
  MOD_RES (98)..(98): Selenocysteine
  MOD_RES (126)..(126): Selenocysteine
  MOD_RES (145)..(145): Selenocysteine
  MOD_RES (159)..(159): Selenocysteine
  MOD_RES (179)..(179): Selenocysteine
  MOD_RES (182)..(182): Selenocysteine
MRLDGLXPPALPRCVSXMFSFXGMWRYFDVGLHNFLIRYVYIPVGGSQHGLLGXLFSXAMXFAFVSYWHGGYDYLWCWAALNWLGVXVENGVRRLVEXPCIQDSLARYFSPQARRRFHAALASCSXSMLILSNLVFLGGNEVGKXYWNRIFIQGWPWVXLSVLGFLYCYSHVGIAWAQXYAXD

SEQ ID NO: 12074 - protein, 494 aa, Homo sapiens
  MOD_RES (15)..(15): Selenocysteine
  MOD_RES (45)..(45): Selenocysteine
  MOD_RES (47)..(47): Selenocysteine
  MOD_RES (57)..(57): Selenocysteine
  MOD_RES (87)..(87): Selenocysteine
  MOD_RES (112)..(112): Selenocysteine
  MOD_RES (122)..(123): Selenocysteine
  MOD_RES (137)..(137): Selenocysteine
  MOD_RES (147)..(147): Selenocysteine
  MOD_RES (163)..(163): Selenocysteine
  MOD_RES (173)..(173): Selenocysteine
  MOD_RES (175)..(175): Selenocysteine
  MOD_RES (182)..(182): Selenocysteine
  MOD_RES (198)..(198): Selenocysteine
  MOD_RES (280)..(280): Selenocysteine
  MOD_RES (285)..(285): Selenocysteine
  MOD_RES (318)..(318): Selenocysteine
  MOD_RES (328)..(328): Selenocysteine
  MOD_RES (333)..(333): Selenocysteine
  MOD_RES (365)..(365): Selenocysteine
  MOD_RES (369)..(369): Selenocysteine
  MOD_RES (372)..(372): Selenocysteine
  MOD_RES (398)..(398): Selenocysteine
  MOD_RES (409)..(409): Selenocysteine
  MOD_RES (437)..(437): Selenocysteine
  MOD_RES (456)..(456): Selenocysteine
  MOD_RES (470)..(470): Selenocysteine
  MOD_RES (490)..(490): Selenocysteine
  MOD_RES (493)..(493): Selenocysteine
MSLGLGSAERGVLGXRGARERCRRRRPGQPGEHEEELDQEFELEXDXLFGGLKKDAXDFEWSFWMEWGKQWLVWLLLGHMVVSQMAXLLARKHRPWILMLYGMWACWCVLGXPGVAMVLLHXXISFCVAQFRSQLLXWLCSLLLLSXLRLQGVEEVKRRWYKXENEYYLLQFXLXVRCLYYXSFSLELCWQQLPAASXSYSFPWMLAYVFYYPVLHNGPILSFSEFIKQMQQQEHDSLKASLCVLALGLGRLLCWWWLAELMAHLMYMHAIYSSIPLLEXVSCWXLGGLALAQVLFFYVKYLVLFGVPALLMRLDGLXPPALPRCVSXMFSFXGMWRYFDVGLHNFLIRYVYIPVGGSQHGLLGXLFSXAMXFAFVSYWHGGYDYLWCWAALNWLGVXVENGVRRLVEXPCIQDSLARYFSPQARRRFHAALASCSXSMLILSNLVFLGGNEVGKXYWNRIFIQGWPWVXLSVLGFLYCYSHVGIAWAQXYAXD

SEQ ID NO: 12075 - protein, 82 aa, Homo sapiens
  MOD_RES (2)..(2): Selenocysteine
  MOD_RES (28)..(28): Selenocysteine
  MOD_RES (39)..(39): Selenocysteine
  MOD_RES (60)..(60): Selenocysteine
  MOD_RES (77)..(77): Selenocysteine
MXFAFVSYWHGGYDYLWCWAALNWLGVXVENGVRRLVEXPCIQDSLVSRILAAVLGDSGXRQIRFIRDGAIRFPAPXMGPFY

SEQ ID NO: 12076 - protein, 98 aa, Homo sapiens
  MOD_RES (11)..(11): Selenocysteine
MLQLSERQVKXWFQNRRAKWRRLKQENPQSNKKEELESLDSSCDQRQDLPSEQNKGASLDSSQCSPSPASQEDLESEISEDSDQEVDIEGDKSYFNAG

SEQ ID NO: 12077 - protein, 270 aa, Homo sapiens
  MOD_RES (21)..(21): Selenocysteine
  MOD_RES (30)..(30): Selenocysteine
  MOD_RES (46)..(46): Selenocysteine
  MOD_RES (50)..(50): Selenocysteine
  MOD_RES (59)..(59): Selenocysteine
  MOD_RES (67)..(67): Selenocysteine
  MOD_RES (73)..(73): Selenocysteine
  MOD_RES (106)..(106): Selenocysteine
  MOD_RES (111)..(111): Selenocysteine
  MOD_RES (149)..(149): Selenocysteine
  MOD_RES (158)..(158): Selenocysteine
  MOD_RES (183)..(183): Selenocysteine
MQYPHPGPAAGAVGVPLYAPXPLLQPAHPXPFYIEDILGRGPAAPXPAPXLPSPNSSFXSLVSPYRXPVYEPXPIHPAFSHHSAAALAAAYGPGGFGGPLYPFPRXVNDYXHALLRHDPLGKPLLWSPFLQRPLHKRKGGQVRFSNDQXIELEKKFEXQKYLSPPERKRLAKMLQLSERQVKXWFQNRRAKWRRLKQENPQSNKKEELESLDSSCDQRQDLPSEQNKGASLDSSQCSPSPASQEDLESEISEDSDQEVDIEGDKSYFNAG

SEQ ID NO: 12078 - protein, 320 aa, Homo sapiens
  MOD_RES (98)..(98): Selenocysteine
  MOD_RES (101)..(101): Selenocysteine
  MOD_RES (151)..(151): Selenocysteine
  MOD_RES (162)..(163): Selenocysteine
  MOD_RES (255)..(255): Selenocysteine
  MOD_RES (320)..(320): Selenocysteine
MLKMLSFKLLLLAVALGFFEGDAKFGERNEGSGARRRRCLNGNPPKRLKRRDRRMMSQLELLSGGEMLCGGFYPRLSCCLRSDSPGLGRLENKIFSVXNNXECGKLLEEIKCALCSPHSQSLFHSPEREVLERDLVLPLLCKDYCKEFFYXCRGHIPGFLQXXADEFCFYYARKDGGLCFPDFPRKQVRGPASNYLDQMEEYDKVEEISRKHKHNCFCIQEVVSGLRQPVGALHSGDGSQRLFILEKEGYVKILXPEGEIFKEPYLDIHKLVQSGIKVGFLNFIYFCAGYVNFILVLPSSLKVFLCNKRKNLAGENKGAX

SEQ ID NO: 12079 - protein, 700 aa, Homo sapiens
  MOD_RES (98)..(98): Selenocysteine
  MOD_RES (101)..(101): Selenocysteine
  MOD_RES (151)..(151): Selenocysteine
  MOD_RES (162)..(163): Selenocysteine
  MOD_RES (255)..(255): Selenocysteine
  MOD_RES (304)..(305): Selenocysteine
  MOD_RES (325)..(325): Selenocysteine
  MOD_RES (338)..(338): Selenocysteine
  MOD_RES (375)..(375): Selenocysteine
  MOD_RES (389)..(389): Selenocysteine
  MOD_RES (399)..(399): Selenocysteine
  MOD_RES (418)..(418): Selenocysteine
  MOD_RES (442)..(442): Selenocysteine
  MOD_RES (449)..(449): Selenocysteine
  MOD_RES (520)..(520): Selenocysteine
  MOD_RES (527)..(527): Selenocysteine
  MOD_RES (539)..(539): Selenocysteine
  MOD_RES (572)..(572): Selenocysteine
  MOD_RES (574)..(574): Selenocysteine
  MOD_RES (597)..(597): Selenocysteine
  MOD_RES (603)..(603): Selenocysteine
  MOD_RES (605)..(605): Selenocysteine
  MOD_RES (618)..(618): Selenocysteine
  MOD_RES (620)..(620): Selenocysteine
  MOD_RES (636)..(636): Selenocysteine
  MOD_RES (677)..(677): Selenocysteine
  MOD_RES (689)..(689): Selenocysteine
  MOD_RES (696)..(696): Selenocysteine
MLKMLSFKLLLLAVALGFFEGDAKFGERNEGSGARRRRCLNGNPPKRLKRRDRRMMSQLELLSGGEMLCGGFYPRLSCCLRSDSPGLGRLENKIFSVXNNXECGKLLEEIKCALCSPHSQSLFHSPEREVLERDLVLPLLCKDYCKEFFYXCRGHIPGFLQXXADEFCFYYARKDGGLCFPDFPRKQVRGPASNYLDQMEEYDKVEEISRKHKHNCFCIQEVVSGLRQPVGALHSGDGSQRLFILEKEGYVKILXPEGEIFKEPYLDIHKLVQSGIKGGDERGLLSLAFHPNYKKNGKLYVSYXXNQERWAIGPHDHILRVVEYXVSRKNPHQVDLRXARVFLEVAELHRKHLGGQLLFGPDGFLYIILGDGMIXLDDMEEMDGLSDFXGSVLRLDVDXDMCNVPYSIPRSNPHFNSXNQPPEVFAHGLHDPGRCAVDRHPXDININLXILCSDSNGKNRSSARILQIIKGKDYESEPSLLEFKPFSNGPLVGGFVYRGCQSERLYGSYVFGDRNGNFLXLQQSPVXKQWQEKPLCLGXSGSCRGYFSGHILGFGEDELGEVYILSSSKSMXQXHNGKLYKIVDPKRPLMPEECRAXVQPAQXLXSECSRLCRNGYCXPXGKCCCSPGWEGDFCRXAKCEPACRHGGVCVRPNKCLCKKGYLGPQCEQVDRNIRRVXRAGILDQIIDMXSYLLDLXSYIV

SEQ ID NO: 12080 - protein, 9 aa, Homo sapiens
  MOD_RES (4)..(4): Selenocysteine
MLDXMEAPG

SEQ ID NO: 12081 - protein, 66 aa, Homo sapiens
  MOD_RES (4)..(4): Selenocysteine
  MOD_RES (23)..(23): Selenocysteine
MLDXMEAPGHSRQLLLQLNNQRXKGFLCDVIIVVQNALFRAHKNVLAASSAYLKSLVVHDNLLNLD

SEQ ID NO: 12082 - protein, 84 aa, Homo sapiens
  MOD_RES (4)..(4): Selenocysteine
  MOD_RES (23)..(23): Selenocysteine
  MOD_RES (84)..(84): Selenocysteine
MLDXMEAPGHSRQLLLQLNNQRXKGFLCDVIIVVQNALFRAHKNVLAASSAYLKSLVVHDNLLNLDHDMVSPAVFRLVLDFIYX

SEQ ID NO: 12083 - protein, 96 aa, Homo sapiens
  MOD_RES (4)..(4): Selenocysteine
  MOD_RES (23)..(23): Selenocysteine
  MOD_RES (84)..(84): Selenocysteine
MLDXMEAPGHSRQLLLQLNNQRXKGFLCDVIIVVQNALFRAHKNVLAASSAYLKSLVVHDNLLNLDHDMVSPAVFRLVLDFIYXGRLADGAEAAAA

SEQ ID NO: 12084 - protein, 714 aa, Homo sapiens
  MOD_RES (4)..(4): Selenocysteine
  MOD_RES (23)..(23): Selenocysteine
  MOD_RES (84)..(84): Selenocysteine
  MOD_RES (163)..(163): Selenocysteine
  MOD_RES (194)..(194): Selenocysteine
  MOD_RES (384)..(384): Selenocysteine
  MOD_RES (502)..(502): Selenocysteine
  MOD_RES (509)..(509): Selenocysteine
  MOD_RES (513)..(513): Selenocysteine
  MOD_RES (519)..(519): Selenocysteine
  MOD_RES (526)..(526): Selenocysteine
  MOD_RES (530)..(530): Selenocysteine
  MOD_RES (532)..(532): Selenocysteine
  MOD_RES (554)..(554): Selenocysteine
  MOD_RES (560)..(560): Selenocysteine
  MOD_RES (637)..(637): Selenocysteine
  MOD_RES (658)..(659): Selenocysteine
  MOD_RES (679)..(679): Selenocysteine
  MOD_RES (707)..(707): Selenocysteine
  MOD_RES (714)..(714): Selenocysteine
MLDXMEAPGHSRQLLLQLNNQRXKGFLCDVIIVVQNALFRAHKNVLAASSAYLKSLVVHDNLLNLDHDMVSPAVFRLVLDFIYXGRLADGAEAAAAAAVAPGAEPSLGAVLAAASYLQIPDLVALCKKRLKRHGKYCHLRGGGGGGGGYAPYGRPGRGLRAAXPVIQACYPSPVGPPPPPAAEPPSGPEAAVNXHCAELYASGPGPAAALCASERRCSPLCGLDLSKKSPPGSAAPERPLAERELPPRPDSPPSAGPAAYKEPPLALPSLPPLPFQKLEEAAPPSDPFRGGSGSPGPEPPGRPDGPSLLYRWMKHEPGLGSYGDELGRERGSPSERCEERGGDAAVSPGGPPLGLAPPPRYPGSLDGPGAGGDGDDYKSSSEEXGSSEDPSPPGGHLEGYPCPHLAYGEPESFGDNLYVCIPCGKGFPSSEQLNAHVEAHVEEEEALYGRAEAAEVAAGAAGLGPPFGGGGDKVAGAPGGLGELLRPYRCASCDKSYKDPAXLRQHEKXHWLXRPYPCXICGKKFXQRGXMXRHMRSHLGLKPFACDACGMRFXRQYRLXEHMRIHSGEKPYECQVCGGKFAQQRNLISHMKMHAVGGAAGAAGALAGLGGLPGVPGPDGKGKLDFPEGVFAVARLXAEQLSLKQQDKAAAAELLAQXXHFLHDPKVALESLYPLAKFXAELGLSPDKAAEVLSQGAHLAAGPDGRXIDRFSPX

SEQ ID NO: 12085 - protein, 733 aa, Homo sapiens
  MOD_RES (2)..(2): Selenocysteine
  MOD_RES (19)..(19): Selenocysteine
  MOD_RES (23)..(23): Selenocysteine
  MOD_RES (42)..(42): Selenocysteine
  MOD_RES (103)..(103): Selenocysteine
  MOD_RES (182)..(182): Selenocysteine
  MOD_RES (213)..(213): Selenocysteine
  MOD_RES (403)..(403): Selenocysteine
  MOD_RES (521)..(521): Selenocysteine
  MOD_RES (528)..(528): Selenocysteine
  MOD_RES (532)..(532): Selenocysteine
  MOD_RES (538)..(538): Selenocysteine
  MOD_RES (545)..(545): Selenocysteine
  MOD_RES (549)..(549): Selenocysteine
  MOD_RES (551)..(551): Selenocysteine
  MOD_RES (573)..(573): Selenocysteine
  MOD_RES (579)..(579): Selenocysteine
  MOD_RES (656)..(656): Selenocysteine
  MOD_RES (677)..(678): Selenocysteine
  MOD_RES (698)..(698): Selenocysteine
  MOD_RES (726)..(726): Selenocysteine
  MOD_RES (733)..(733): Selenocysteine
MXFPEADILLKSGECAGQXMLDXMEAPGHSRQLLLQLNNQRXKGFLCDVIIVVQNALFRAHKNVLAASSAYLKSLVVHDNLLNLDHDMVSPAVFRLVLDFIYXGRLADGAEAAAAAAVAPGAEPSLGAVLAAASYLQIPDLVALCKKRLKRHGKYCHLRGGGGGGGGYAPYGRPGRGLRAAXPVIQACYPSPVGPPPPPAAEPPSGPEAAVNXHCAELYASGPGPAAALCASERRCSPLCGLDLSKKSPPGSAAPERPLAERELPPRPDSPPSAGPAAYKEPPLALPSLPPLPFQKLEEAAPPSDPFRGGSGSPGPEPPGRPDGPSLLYRWMKHEPGLGSYGDELGRERGSPSERCEERGGDAAVSPGGPPLGLAPPPRYPGSLDGPGAGGDGDDYKSSSEEXGSSEDPSPPGGHLEGYPCPHLAYGEPESFGDNLYVCIPCGKGFPSSEQLNAHVEAHVEEEEALYGRAEAAEVAAGAAGLGPPFGGGGDKVAGAPGGLGELLRPYRCASCDKSYKDPAXLRQHEKXHWLXRPYPCXICGKKFXQRGXMXRHMRSHLGLKPFACDACGMRFXRQYRLXEHMRIHSGEKPYECQVCGGKFAQQRNLISHMKMHAVGGAAGAAGALAGLGGLPGVPGPDGKGKLDFPEGVFAVARLXAEQLSLKQQDKAAAAELLAQXXHFLHDPKVALESLYPLAKFXAELGLSPDKAAEVLSQGAHLAAGPDGRXIDRFSPX

SEQ ID NO: 12086 - protein, 615 aa, Homo sapiens
  MOD_RES (41)..(41): Selenocysteine
  MOD_RES (85)..(85): Selenocysteine
  MOD_RES (91)..(91): Selenocysteine
  MOD_RES (102)..(102): Selenocysteine
  MOD_RES (118)..(118): Selenocysteine
  MOD_RES (121)..(121): Selenocysteine
  MOD_RES (154)..(154): Selenocysteine
  MOD_RES (167)..(167): Selenocysteine
  MOD_RES (234)..(234): Selenocysteine
  MOD_RES (260)..(260): Selenocysteine
  MOD_RES (266)..(266): Selenocysteine
  MOD_RES (301)..(301): Selenocysteine
  MOD_RES (334)..(334): Selenocysteine
  MOD_RES (434)..(434): Selenocysteine
  MOD_RES (463)..(463): Selenocysteine
  MOD_RES (465)..(465): Selenocysteine
  MOD_RES (479)..(479): Selenocysteine
  MOD_RES (499)..(499): Selenocysteine
  MOD_RES (513)..(513): Selenocysteine
  MOD_RES (519)..(519): Selenocysteine
  MOD_RES (526)..(526): Selenocysteine
  MOD_RES (530)..(530): Selenocysteine
  MOD_RES (543)..(543): Selenocysteine
  MOD_RES (547)..(547): Selenocysteine
  MOD_RES (549)..(549): Selenocysteine
  MOD_RES (571)..(571): Selenocysteine
  MOD_RES (577)..(577): Selenocysteine
  MOD_RES (599)..(599): Selenocysteine
  MOD_RES (612)..(612): Selenocysteine
MVSGPLALRWCAWAGRGDMGPDMELPSHSKQLLLQLNQQRXKGFLCDVIIMVENSIFRAHKNVLAASSIYFKSLVLHDNLINLDXDMVSSXVFQQILDFIYXGKLLPSDQPAEPNFSXLLXAASYLQLPELAALCRRKLKRAGKPFGSGRAGSXGMGRPPRSQRLSXASVIQARYQGLVDGRKGAHAPQELPQAKGSDDELFLGGSNQDSVQGLGRAVCPAGGEAGLGGCSSSXNGSSGGCEQELGLDLSKKSPPLPPAXPGPHLXPDDAAQLSDSQHGSPPAASAPPVANSASYSELGGXPDEPMDLEGAEDNHLSLLEAPGGQPRKSLRHSXRKKEWGKKEPVAGSPFERREAGPKGPCPGEEGEGVGDRVPNGILASGAGPSGPYGEPPYPCKEEEENGKDASEDSAQSGSEGGSGHASAHYMYRQEGYEXVSYGDNLYVCIPCAKGFPSSEQLNAHVEXHXEEELFIKEEGAYEXGSGGAEEEAEDLSAPSAAYXAEPRPFKCSVCEKXYKDPAXLRQHEKXHWLXRPFPCNICGKMFXQRGXMXRHMRSHLGLKPFACDECGMRFXRQYRLXEHMRVHSGEKPYECQLCGGKFXQQRNLISHLRMHXSPS

SEQ ID NO: 12087 - protein, 735 aa, Homo sapiens
  MOD_RES (63)..(63): Selenocysteine
  MOD_RES (104)..(104): Selenocysteine
  MOD_RES (123)..(123): Selenocysteine
  MOD_RES (128)..(128): Selenocysteine
  MOD_RES (136)..(136): Selenocysteine
  MOD_RES (149)..(149): Selenocysteine
  MOD_RES (163)..(163): Selenocysteine
  MOD_RES (174)..(174): Selenocysteine
  MOD_RES (176)..(176): Selenocysteine
  MOD_RES (181)..(181): Selenocysteine
  MOD_RES (188)..(188): Selenocysteine
  MOD_RES (195)..(195): Selenocysteine
  MOD_RES (203)..(203): Selenocysteine
  MOD_RES (218)..(218): Selenocysteine
  MOD_RES (241)..(241): Selenocysteine
  MOD_RES (260)..(260): Selenocysteine
  MOD_RES (288)..(288): Selenocysteine
  MOD_RES (290)..(290): Selenocysteine
  MOD_RES (296)..(296): Selenocysteine
  MOD_RES (301)..(302): Selenocysteine
  MOD_RES (319)..(319): Selenocysteine
  MOD_RES (322)..(322): Selenocysteine
  MOD_RES (327)..(327): Selenocysteine
  MOD_RES (357)..(357): Selenocysteine
  MOD_RES (372)..(372): Selenocysteine
  MOD_RES (376)..(376): Selenocysteine
  MOD_RES (383)..(383): Selenocysteine
  MOD_RES (398)..(398): Selenocysteine
  MOD_RES (407)..(407): Selenocysteine
  MOD_RES (418)..(418): Selenocysteine
  MOD_RES (420)..(420): Selenocysteine
  MOD_RES (455)..(455): Selenocysteine
  MOD_RES (458)..(458): Selenocysteine
  MOD_RES (490)..(490): Selenocysteine
  MOD_RES (498)..(498): Selenocysteine
  MOD_RES (506)..(506): Selenocysteine
  MOD_RES (544)..(544): Selenocysteine
  MOD_RES (552)..(552): Selenocysteine
  MOD_RES (555)..(555): Selenocysteine
  MOD_RES (598)..(598): Selenocysteine
  MOD_RES (600)..(600): Selenocysteine
  MOD_RES (605)..(605): Selenocysteine
  MOD_RES (611)..(611): Selenocysteine
  MOD_RES (615)..(618): Selenocysteine
  MOD_RES (620)..(621): Selenocysteine
  MOD_RES (626)..(626): Selenocysteine
  MOD_RES (628)..(628): Selenocysteine
  MOD_RES (645)..(645): Selenocysteine
  MOD_RES (651)..(652): Selenocysteine
  MOD_RES (655)..(655): Selenocysteine
  MOD_RES (662)..(662): Selenocysteine
  MOD_RES (666)..(666): Selenocysteine
  MOD_RES (680)..(680): Selenocysteine
  MOD_RES (699)..(700): Selenocysteine
MEGAGGANDKKKISSERRKEKSRDAARSRRSKESEVFYELAHQLPLPHNVSSHLDKASVMRLXISYLRVRKLLDAGDLDIEDDMKAQMNCFYLKALDGFVMVLXDDGDMIYISDNVNKYMGLXQFELXGHSVFDFXHPCDHEEMREMLXHRNGLVKKGKEQNXQRSFFLRMKCXLXSRGRXMNIKSAXWKVLHCXGHIHVYDXNSNQPQCGYKKPPMXCLVLICEPIPHPSNIEIPLDSKXFLSRHSLDMKFSYCDERIXELMGYEPEELLGRSIYEYYHALDSDHLXKXHHDMFXKGQVXXGQYRMLAKRGGYVWVEXQAXVIYNXKNSQPQCIVCVNYVVSGIIQHDLIFSLQQXECVLKPVESSDMKMXQLFXKVESEDXSSLFDKLKKEPDALXLLAPAAGDXIISLDFGSNDXEXDDQQLEEVPLYNDVMLPSPNEKLQNINLAMSPLPXAEXPKPLRSSADPALNQEVALKLEPNPESLELSFXMPQIQDQXPSPSDGSXRQSSPEPNSPSEYCFYVDSDMVNEFKLELVEKLFAEDXEAKNPFSXQDXDLDLEMLAPYIPMDDDFQLRSFDQLSPLESSSASPESASPQSXVXVFQQXQIQEPXANAXXXXAXXDELKXVXKDRMEDIKILIASPSPXHIHKEXXSAXSSPYRDXQSRXASPNRAGKGVIEQXEKSHPRSPNVLSVALSQRXXVPEEELNPKILALQNAQRKRKMEHDGSLFQAVGII

SEQ ID NO: 12088 - protein, 826 aa, Homo sapiens
  MOD_RES (63)..(63): Selenocysteine
  MOD_RES (104)..(104): Selenocysteine
  MOD_RES (123)..(123): Selenocysteine
  MOD_RES (128)..(128): Selenocysteine
  MOD_RES (136)..(136): Selenocysteine
  MOD_RES (149)..(149): Selenocysteine
  MOD_RES (163)..(163): Selenocysteine
  MOD_RES (174)..(174): Selenocysteine
  MOD_RES (176)..(176): Selenocysteine
  MOD_RES (181)..(181): Selenocysteine
  MOD_RES (188)..(188): Selenocysteine
  MOD_RES (195)..(195): Selenocysteine
  MOD_RES (203)..(203): Selenocysteine
  MOD_RES (218)..(218): Selenocysteine
  MOD_RES (241)..(241): Selenocysteine
  MOD_RES (260)..(260): Selenocysteine
  MOD_RES (288)..(288): Selenocysteine
  MOD_RES (290)..(290): Selenocysteine
  MOD_RES (296)..(296): Selenocysteine
  MOD_RES (301)..(302): Selenocysteine
  MOD_RES (319)..(319): Selenocysteine
  MOD_RES (322)..(322): Selenocysteine
  MOD_RES (327)..(327): Selenocysteine
  MOD_RES (357)..(357): Selenocysteine
  MOD_RES (372)..(372): Selenocysteine
  MOD_RES (376)..(376): Selenocysteine
  MOD_RES (383)..(383): Selenocysteine
  MOD_RES (398)..(398): Selenocysteine
  MOD_RES (407)..(407): Selenocysteine
  MOD_RES (418)..(418): Selenocysteine
  MOD_RES (420)..(420): Selenocysteine
  MOD_RES (455)..(455): Selenocysteine
  MOD_RES (458)..(458): Selenocysteine
  MOD_RES (490)..(490): Selenocysteine
  MOD_RES (498)..(498): Selenocysteine
  MOD_RES (506)..(506): Selenocysteine
  MOD_RES (544)..(544): Selenocysteine
  MOD_RES (552)..(552): Selenocysteine
  MOD_RES (555)..(555): Selenocysteine
  MOD_RES (598)..(598): Selenocysteine
  MOD_RES (600)..(600): Selenocysteine
  MOD_RES (605)..(605): Selenocysteine
  MOD_RES (611)..(611): Selenocysteine
  MOD_RES (615)..(618): Selenocysteine
  MOD_RES (620)..(621): Selenocysteine
  MOD_RES (626)..(626): Selenocysteine
  MOD_RES (628)..(628): Selenocysteine
  MOD_RES (645)..(645): Selenocysteine
  MOD_RES (651)..(652): Selenocysteine
  MOD_RES (655)..(655): Selenocysteine
  MOD_RES (662)..(662): Selenocysteine
  MOD_RES (666)..(666): Selenocysteine
  MOD_RES (680)..(680): Selenocysteine
  MOD_RES (699)..(700): Selenocysteine
  MOD_RES (736)..(736): Selenocysteine
  MOD_RES (747)..(748): Selenocysteine
  MOD_RES (770)..(770): Selenocysteine
  MOD_RES (796)..(796): Selenocysteine
MEGAGGANDKKKISSERRKEKSRDAARSRRSKESEVFYELAHQLPLPHNVSSHLDKASVMRLXISYLRVRKLLDAGDLDIEDDMKAQMNCFYLKALDGFVMVLXDDGDMIYISDNVNKYMGLXQFELXGHSVFDFXHPCDHEEMREMLXHRNGLVKKGKEQNXQRSFFLRMKCXLXSRGRXMNIKSAXWKVLHCXGHIHVYDXNSNQPQCGYKKPPMXCLVLICEPIPHPSNIEIPLDSKXFLSRHSLDMKFSYCDERIXELMGYEPEELLGRSIYEYYHALDSDHLXKXHHDMFXKGQVXXGQYRMLAKRGGYVWVEXQAXVIYNXKNSQPQCIVCVNYVVSGIIQHDLIFSLQQXECVLKPVESSDMKMXQLFXKVESEDXSSLFDKLKKEPDALXLLAPAAGDXIISLDFGSNDXEXDDQQLEEVPLYNDVMLPSPNEKLQNINLAMSPLPXAEXPKPLRSSADPALNQEVALKLEPNPESLELSFXMPQIQDQXPSPSDGSXRQSSPEPNSPSEYCFYVDSDMVNEFKLELVEKLFAEDXEAKNPFSXQDXDLDLEMLAPYIPMDDDFQLRSFDQLSPLESSSASPESASPQSXVXVFQQXQIQEPXANAXXXXAXXDELKXVXKDRMEDIKILIASPSPXHIHKEXXSAXSSPYRDXQSRXASPNRAGKGVIEQXEKSHPRSPNVLSVALSQRXXVPEEELNPKILALQNAQRKRKMEHDGSLFQAVGIGXLLQQPDDHAAXXSLSWKRVKGCKSSEQNGMEQKXIILIPSDLACRLLGQSMDESGLPQLXSYDCEVNAPIQGSRNLLQGEELLRALDQVN

SEQ ID NO: 12089 - protein, 827 aa, Homo sapiens
  MOD_RES (64)..(64): Selenocysteine
  MOD_RES (105)..(105): Selenocysteine
  MOD_RES (124)..(124): Selenocysteine
  MOD_RES (129)..(129): Selenocysteine
  MOD_RES (137)..(137): Selenocysteine
  MOD_RES (150)..(150): Selenocysteine
  MOD_RES (164)..(164): Selenocysteine
  MOD_RES (175)..(175): Selenocysteine
  MOD_RES (177)..(177): Selenocysteine
  MOD_RES (182)..(182): Selenocysteine
  MOD_RES (189)..(189): Selenocysteine
  MOD_RES (196)..(196): Selenocysteine
  MOD_RES (204)..(204): Selenocysteine
  MOD_RES (219)..(219): Selenocysteine
  MOD_RES (242)..(242): Selenocysteine
  MOD_RES (261)..(261): Selenocysteine
  MOD_RES (289)..(289): Selenocysteine
  MOD_RES (291)..(291): Selenocysteine
  MOD_RES (297)..(297): Selenocysteine
  MOD_RES (302)..(303): Selenocysteine
  MOD_RES (320)..(320): Selenocysteine
  MOD_RES (323)..(323): Selenocysteine
  MOD_RES (328)..(328): Selenocysteine
  MOD_RES (358)..(358): Selenocysteine
  MOD_RES (373)..(373): Selenocysteine
  MOD_RES (377)..(377): Selenocysteine
  MOD_RES (384)..(384): Selenocysteine
  MOD_RES (399)..(399): Selenocysteine
  MOD_RES (408)..(408): Selenocysteine
  MOD_RES (419)..(419): Selenocysteine
  MOD_RES (421)..(421): Selenocysteine
  MOD_RES (456)..(456): Selenocysteine
  MOD_RES (459)..(459): Selenocysteine
  MOD_RES (491)..(491): Selenocysteine
  MOD_RES (499)..(499): Selenocysteine
  MOD_RES (507)..(507): Selenocysteine
  MOD_RES (545)..(545): Selenocysteine
  MOD_RES (553)..(553): Selenocysteine
  MOD_RES (556)..(556): Selenocysteine
  MOD_RES (599)..(599): Selenocysteine
  MOD_RES (601)..(601): Selenocysteine
  MOD_RES (606)..(606): Selenocysteine
  MOD_RES (612)..(612): Selenocysteine
  MOD_RES (616)..(619): Selenocysteine
  MOD_RES (621)..(622): Selenocysteine
  MOD_RES (627)..(627): Selenocysteine
  MOD_RES (629)..(629): Selenocysteine
  MOD_RES (646)..(646): Selenocysteine
  MOD_RES (652)..(653): Selenocysteine
  MOD_RES (656)..(656): Selenocysteine
  MOD_RES (663)..(663): Selenocysteine
  MOD_RES (667)..(667): Selenocysteine
  MOD_RES (681)..(681): Selenocysteine
  MOD_RES (700)..(701): Selenocysteine
  MOD_RES (737)..(737): Selenocysteine
  MOD_RES (748)..(749): Selenocysteine
  MOD_RES (771)..(771): Selenocysteine
  MOD_RES (797)..(797): Selenocysteine
MEGAGGANDKKNRISSERRKEKSRDAARSRRSKESEVFYELAHQLPLPHNVSSHLDKASVMRLXISYLRVRKLLDAGDLDIEDDMKAQMNCFYLKALDGFVMVLXDDGDMIYISDNVNKYMGLXQFELXGHSVFDFXHPCDHEEMREMLXHRNGLVKKGKEQNXQRSFFLRMKCXLXSRGRXMNIKSAXWKVLHCXGHIHVYDXNSNQPQCGYKKPPMXCLVLICEPIPHPSNIEIPLDSKXFLSRHSLDMKFSYCDERIXELMGYEPEELLGRSIYEYYHALDSDHLXKXHHDMFXKGQVXXGQYRMLAKRGGYVWVEXQAXVIYNXKNSQPQCIVCVNYVVSGIIQHDLIFSLQQXECVLKPVESSDMKMXQLFXKVESEDXSSLFDKLKKEPDALXLLAPAAGDXIISLDFGSNDXEXDDQQLEEVPLYNDVMLPSPNEKLQNINLAMSPLPXAEXPKPLRSSADPALNQEVALKLEPNPESLELSFXMPQIQDQXPSPSDGSXRQSSPEPNSPSEYCFYVDSDMVNEFKLELVEKLFAEDXEAKNPFSXQDXDLDLEMLAPYIPMDDDFQLRSFDQLSPLESSSASPESASPQSXVXVFQQXQIQEPXANAXXXXAXXDELKXVXKDRMEDIKILIASPSPXHIHKEXXSAXSSPYRDXQSRXASPNRAGKGVIEQXEKSHPRSPNVLSVALSQRXXVPEEELNPKILALQNAQRKRKMEHDGSLFQAVGIGXLLQQPDDHAAXXSLSWKRVKGCKSSEQNGMEQKXIILIPSDLACRLLGQSMDESGLPQLXSYDCEVNAPIQGSRNLLQGEELLRALDQVN

SEQ ID NO: 12090 - protein, 767 aa, Homo sapiens
  MOD_RES (4)..(4): Selenocysteine
  MOD_RES (45)..(45): Selenocysteine
  MOD_RES (64)..(64): Selenocysteine
  MOD_RES (69)..(69): Selenocysteine
  MOD_RES (77)..(77): Selenocysteine
  MOD_RES (90)..(90): Selenocysteine
  MOD_RES (104)..(104): Selenocysteine
  MOD_RES (115)..(115): Selenocysteine
  MOD_RES (117)..(117): Selenocysteine
  MOD_RES (122)..(122): Selenocysteine
  MOD_RES (129)..(129): Selenocysteine
  MOD_RES (136)..(136): Selenocysteine
  MOD_RES (144)..(144): Selenocysteine
  MOD_RES (159)..(159): Selenocysteine
  MOD_RES (182)..(182): Selenocysteine
  MOD_RES (201)..(201): Selenocysteine
  MOD_RES (229)..(229): Selenocysteine
  MOD_RES (231)..(231): Selenocysteine
  MOD_RES (237)..(237): Selenocysteine
  MOD_RES (242)..(243): Selenocysteine
  MOD_RES (260)..(260): Selenocysteine
  MOD_RES (263)..(263): Selenocysteine
  MOD_RES (268)..(268): Selenocysteine
  MOD_RES (298)..(298): Selenocysteine
  MOD_RES (313)..(313): Selenocysteine
  MOD_RES (317)..(317): Selenocysteine
  MOD_RES (324)..(324): Selenocysteine
  MOD_RES (339)..(339): Selenocysteine
  MOD_RES (348)..(348): Selenocysteine
  MOD_RES (359)..(359): Selenocysteine
  MOD_RES (361)..(361): Selenocysteine
  MOD_RES (396)..(396): Selenocysteine
  MOD_RES (399)..(399): Selenocysteine
  MOD_RES (431)..(431): Selenocysteine
  MOD_RES (439)..(439): Selenocysteine
  MOD_RES (447)..(447): Selenocysteine
  MOD_RES (485)..(485): Selenocysteine
  MOD_RES (493)..(493): Selenocysteine
  MOD_RES (496)..(496): Selenocysteine
  MOD_RES (539)..(539): Selenocysteine
  MOD_RES (541)..(541): Selenocysteine
  MOD_RES (546)..(546): Selenocysteine
  MOD_RES (552)..(552): Selenocysteine
  MOD_RES (556)..(559): Selenocysteine
  MOD_RES (561)..(562): Selenocysteine
  MOD_RES (567)..(567): Selenocysteine
  MOD_RES (569)..(569): Selenocysteine
  MOD_RES (586)..(586): Selenocysteine
  MOD_RES (592)..(593): Selenocysteine
  MOD_RES (596)..(596): Selenocysteine
  MOD_RES (603)..(603): Selenocysteine
  MOD_RES (607)..(607): Selenocysteine
  MOD_RES (621)..(621): Selenocysteine
  MOD_RES (640)..(641): Selenocysteine
  MOD_RES (677)..(677): Selenocysteine
  MOD_RES (688)..(689): Selenocysteine
  MOD_RES (711)..(711): Selenocysteine
  MOD_RES (737)..(737): Selenocysteine
MRLXISYLRVRKLLDAGDLDIEDDMKAQMNCFYLKALDGFVMVLXDDGDMIYISDNVNKYMGLXQFELXGHSVFDFXHPCDHEEMREMLXHRNGLVKKGKEQNXQRSFFLRMKCXLXSRGRXMNIKSAXWKVLHCXGHIHVYDXNSNQPQCGYKKPPMXCLVLICEPIPHPSNIEIPLDSKXFLSRHSLDMKFSYCDERIXELMGYEPEELLGRSIYEYYHALDSDHLXKXHHDMFXKGQVXXGQYRMLAKRGGYVWVEXQAXVIYNXKNSQPQCIVCVNYVVSGIIQHDLIFSLQQXECVLKPVESSDMKMXQLFXKVESEDXSSLFDKLKKEPDALXLLAPAAGDXIISLDFGSNDXEXDDQQLEEVPLYNDVMLPSPNEKLQNINLAMSPLPXAEXPKPLRSSADPALNQEVALKLEPNPESLELSFXMPQIQDQXPSPSDGSXRQSSPEPNSPSEYCFYVDSDMVNEFKLELVEKLFAEDXEAKNPFSXQDXDLDLEMLAPYIPMDDDFQLRSFDQLSPLESSSASPESASPQSXVXVFQQXQIQEPXANAXXXXAXXDELKXVXKDRMEDIKILIASPSPXHIHKEXXSAXSSPYRDXQSRXASPNRAGKGVIEQXEKSHPRSPNVLSVALSQRXXVPEEELNPKILALQNAQRKRKMEHDGSLFQAVGIGXLLQQPDDHAAXXSLSWKRVKGCKSSEQNGMEQKXIILIPSDLACRLLGQSMDESGLPQLXSYDCEVNAPIQGSRNLLQGEELLRALDQVN

SEQ ID NO: 12091 - protein, 850 aa, Homo sapiens
  MOD_RES (87)..(87): Selenocysteine
  MOD_RES (128)..(128): Selenocysteine
  MOD_RES (147)..(147): Selenocysteine
  MOD_RES (152)..(152): Selenocysteine
  MOD_RES (160)..(160): Selenocysteine
  MOD_RES (173)..(173): Selenocysteine
  MOD_RES (187)..(187): Selenocysteine
  MOD_RES (198)..(198): Selenocysteine
  MOD_RES (200)..(200): Selenocysteine
  MOD_RES (205)..(205): Selenocysteine
  MOD_RES (212)..(212): Selenocysteine
  MOD_RES (219)..(219): Selenocysteine
  MOD_RES (227)..(227): Selenocysteine
  MOD_RES (242)..(242): Selenocysteine
  MOD_RES (265)..(265): Selenocysteine
  MOD_RES (284)..(284): Selenocysteine
  MOD_RES (312)..(312): Selenocysteine
  MOD_RES (314)..(314): Selenocysteine
  MOD_RES (320)..(320): Selenocysteine
  MOD_RES (325)..(326): Selenocysteine
  MOD_RES (343)..(343): Selenocysteine
  MOD_RES (346)..(346): Selenocysteine
  MOD_RES (351)..(351): Selenocysteine
  MOD_RES (381)..(381): Selenocysteine
  MOD_RES (396)..(396): Selenocysteine
  MOD_RES (400)..(400): Selenocysteine
  MOD_RES (407)..(407): Selenocysteine
  MOD_RES (422)..(422): Selenocysteine
  MOD_RES (431)..(431): Selenocysteine
  MOD_RES (442)..(442): Selenocysteine
  MOD_RES (444)..(444): Selenocysteine
  MOD_RES (479)..(479): Selenocysteine
  MOD_RES (482)..(482): Selenocysteine
  MOD_RES (514)..(514): Selenocysteine
  MOD_RES (522)..(522): Selenocysteine
  MOD_RES (530)..(530): Selenocysteine
  MOD_RES (568)..(568): Selenocysteine
  MOD_RES (576)..(576): Selenocysteine
  MOD_RES (579)..(579): Selenocysteine
  MOD_RES (622)..(622): Selenocysteine
  MOD_RES (624)..(624): Selenocysteine
  MOD_RES (629)..(629): Selenocysteine
  MOD_RES (635)..(635): Selenocysteine
  MOD_RES (639)..(642): Selenocysteine
  MOD_RES (644)..(645): Selenocysteine
  MOD_RES (650)..(650): Selenocysteine
  MOD_RES (652)..(652): Selenocysteine
  MOD_RES (669)..(669): Selenocysteine
  MOD_RES (675)..(676): Selenocysteine
  MOD_RES (679)..(679): Selenocysteine
  MOD_RES (686)..(686): Selenocysteine
  MOD_RES (690)..(690): Selenocysteine
  MOD_RES (704)..(704): Selenocysteine
  MOD_RES (723)..(724): Selenocysteine
  MOD_RES (760)..(760): Selenocysteine
  MOD_RES (771)..(772): Selenocysteine
  MOD_RES (794)..(794): Selenocysteine
  MOD_RES (820)..(820): Selenocysteine
MSSQCRSLENKFVFLKEGLGNSKPEELEEIRIENGRISSERRKEKSRDAARSRRSKESEVFYELAHQLPLPHNVSSHLDKASVMRLXISYLRVRKLLDAGDLDIEDDMKAQMNCFYLKALDGFVMVLXDDGDMIYISDNVNKYMGLXQFELXGHSVFDFXHPCDHEEMREMLXHRNGLVKKGKEQNXQRSFFLRMKCXLXSRGRXMNIKSAXWKVLHCXGHIHVYDXNSNQPQCGYKKPPMXCLVLICEPIPHPSNIEIPLDSKXFLSRHSLDMKFSYCDERIXELMGYEPEELLGRSIYEYYHALDSDHLXKXHHDMFXKGQVXXGQYRMLAKRGGYVWVEXQAXVIYNXKNSQPQCIVCVNYVVSGIIQHDLIFSLQQXECVLKPVESSDMKMXQLFXKVESEDXSSLFDKLKKEPDALXLLAPAAGDXIISLDFGSNDXEXDDQQLEEVPLYNDVMLPSPNEKLQNINLAMSPLPXAEXPKPLRSSADPALNQEVALKLEPNPESLELSFXMPQIQDQXPSPSDGSXRQSSPEPNSPSEYCFYVDSDMVNEFKLELVEKLFAEDXEAKNPFSXQDXDLDLEMLAPYIPMDDDFQLRSFDQLSPLESSSASPESASPQSXVXVFQQXQIQEPXANAXXXXAXXDELKXVXKDRMEDIKILIASPSPXHIHKEXXSAXSSPYRDXQSRXASPNRAGKGVIEQXEKSHPRSPNVLSVALSQRXXVPEEELNPKILALQNAQRKRKMEHDGSLFQAVGIGXLLQQPDDHAAXXSLSWKRVKGCKSSEQNGMEQKXIILIPSDLACRLLGQSMDESGLPQLXSYDCEVNAPIQGSRNLLQGEELLRALDQVN

SEQ ID NO: 12092 - protein, 349 aa, Homo sapiens
  MOD_RES (4)..(4): Selenocysteine
  MOD_RES (39)..(39): Selenocysteine
  MOD_RES (65)..(65): Selenocysteine
  MOD_RES (67)..(67): Selenocysteine
  MOD_RES (97)..(97): Selenocysteine
  MOD_RES (149)..(149): Selenocysteine
  MOD_RES (153)..(153): Selenocysteine
  MOD_RES (183)..(183): Selenocysteine
  MOD_RES (196)..(196): Selenocysteine
  MOD_RES (263)..(263): Selenocysteine
  MOD_RES (290)..(290): Selenocysteine
  MOD_RES (292)..(292): Selenocysteine
  MOD_RES (302)..(302): Selenocysteine
  MOD_RES (342)..(342): Selenocysteine
MAAXAAEAVASGSGEPREEAGALGPAWDESQLRSYSFPXRPIPRLSQSDPRAEELIENEEPVVLXDXNLVYPALKWDLEYLQENIGNGDFSVYSASXHKFLYYDEKKMANFQNFKPRSNREEMKFHEFVEKLQDIQQRGGEERLYLQQXLNDXVGRKIVMDFLGFNWNWINKQQGKRGWGQLXSNLLLIGMEGNVXPAHYDEQQNFFAQIKGYKRCILFPPDQFECLYPYPVHHPCDRQSQVDFDNPDYERFPNFQNVVGYEXVVGPGDVLYIPMYWWHHIESLLNGGIXIXVNFWYKGAPXPKRIEYPLKAHQKVAIMRNIEKMLGEALGNPQEVGPLLNXMIKGRYN

SEQ ID NO: 12093 - protein, 35 aa, Homo sapiens
  MOD_RES (4)..(4): Selenocysteine
MAAXAAEAVASGSGEPREEAGALGPAWDESQSLWC

SEQ ID NO: 12094 - protein, 191 aa, Homo sapiens
  MOD_RES (42)..(42): Selenocysteine
  MOD_RES (46)..(46): Selenocysteine
  MOD_RES (76)..(76): Selenocysteine
  MOD_RES (89)..(89): Selenocysteine
  MOD_RES (156)..(156): Selenocysteine
  MOD_RES (183)..(183): Selenocysteine
  MOD_RES (185)..(185): Selenocysteine
MANFQNFKPRSNREEMKFHEFVEKLQDIQQRGGEERLYLQQXLNDXVGRKIVMDFLGFNWNWINKQQGKRGWGQLXSNLLLIGMEGNVXPAHYDEQQNFFAQIKGYKRCILFPPDQFECLYPYPVHHPCDRQSQVDFDNPDYERFPNFQNVVGYEXVVGPGDVLYIPMYWWHHIESLLNGGIXIXVNFWYK

SEQ ID NO: 12095 - protein, 81 aa, Homo sapiens
  MOD_RES (11)..(12): Selenocysteine
  MOD_RES (31)..(31): Selenocysteine
  MOD_RES (40)..(40): Selenocysteine
  MOD_RES (60)..(60): Selenocysteine
  MOD_RES (78)..(78): Selenocysteine
MALGLQRARSXXELRKEKSRDAARSRRSQEXEVLYQLAHXLPFARGVSAHLDKASIMRLXISYLRMHRLCAAAGAHWXQHL

SEQ ID NO: 12096 - protein, 669 aa, Homo sapiens
  MOD_RES (11)..(12): Selenocysteine
  MOD_RES (31)..(31): Selenocysteine
  MOD_RES (40)..(40): Selenocysteine
  MOD_RES (60)..(60): Selenocysteine
  MOD_RES (101)..(101): Selenocysteine
  MOD_RES (146)..(146): Selenocysteine
  MOD_RES (150)..(150): Selenocysteine
  MOD_RES (160)..(160): Selenocysteine
  MOD_RES (171)..(171): Selenocysteine
  MOD_RES (173)..(173): Selenocysteine
  MOD_RES (178)..(178): Selenocysteine
  MOD_RES (185)..(185): Selenocysteine
  MOD_RES (204)..(204): Selenocysteine
  MOD_RES (252)..(252): Selenocysteine
  MOD_RES (292)..(292): Selenocysteine
  MOD_RES (301)..(301): Selenocysteine
  MOD_RES (316)..(316): Selenocysteine
  MOD_RES (318)..(318): Selenocysteine
  MOD_RES (321)..(321): Selenocysteine
  MOD_RES (347)..(347): Selenocysteine
  MOD_RES (356)..(356): Selenocysteine
  MOD_RES (374)..(374): Selenocysteine
  MOD_RES (383)..(383): Selenocysteine
  MOD_RES (430)..(430): Selenocysteine
  MOD_RES (433)..(433): Selenocysteine
  MOD_RES (437)..(437): Selenocysteine
  MOD_RES (456)..(456): Selenocysteine
  MOD_RES (464)..(464): Selenocysteine
  MOD_RES (469)..(469): Selenocysteine
  MOD_RES (474)..(474): Selenocysteine
  MOD_RES (572)..(572): Selenocysteine
  MOD_RES (615)..(615): Selenocysteine
  MOD_RES (628)..(628): Selenocysteine
  MOD_RES (652)..(653): Selenocysteine
MALGLQRARSXXELRKEKSRDAARSRRSQEXEVLYQLAHXLPFARGVSAHLDKASIMRLXISYLRMHRLCAAGEWNQVGAGGEPLDACYLKALEGFVMVLXAEGDMAYLSENVSKHLGLSQLELIGHSIFDFIHPCDQEELQDALXPQQXLSRRKVEAPXERCFSLRMKSXLXSRGRXLNLKAAXWKVLNCSGHMRAYKPPAQXSPAGSPDSEPPLQCLVLICEAIPHPGSLEPPLGRGAFLSRHSLDMKFXYCDDRIAEVAGYSPDDLIGCSAYEYIHALDSDAVSKSIHXLLSKGQAVXGQYRFLARSGGYLWXQXQAXVVSGGRGPQSESIVCVHFLISQVEEXGVVLSLEQXEQHSRRPIQRGAPSQKDXPNPGDSLDXPGPRILAFLHPPSLSEAALAADPRRFCSPDLRRLLGPILDGASVAAXPSXPLAXRHPQSPLSADLPDELPVGXENVHRLFXSGKDXEAVEXDLDIAQDADALDLEMLAPYISMDDDFQLNASEQLPRAYHRPLGAVPRPRARSFHGLSPPALEPSLLPRWGSDPRLSCSSPSRGDPSASSPMAGARKRXLAQSSEDEDEGVELLGVRPPKRSPSPEHENFLLFPLSLSFLLXGGPAPGSLQDPSXPLLNLNEPLGLGPSLLSPYSDEDXXQPGGPFQPRAGSAQAD

SEQ ID NO: 12097 - protein, 667 aa, Homo sapiens
  MOD_RES (9)..(10): Selenocysteine
  MOD_RES (29)..(29): Selenocysteine
  MOD_RES (38)..(38): Selenocysteine
  MOD_RES (58)..(58): Selenocysteine
  MOD_RES (99)..(99): Selenocysteine
  MOD_RES (144)..(144): Selenocysteine
  MOD_RES (148)..(148): Selenocysteine
  MOD_RES (158)..(158): Selenocysteine
  MOD_RES (169)..(169): Selenocysteine
  MOD_RES (171)..(171): Selenocysteine
  MOD_RES (176)..(176): Selenocysteine
  MOD_RES (183)..(183): Selenocysteine
  MOD_RES (202)..(202): Selenocysteine
  MOD_RES (250)..(250): Selenocysteine
  MOD_RES (290)..(290): Selenocysteine
  MOD_RES (299)..(299): Selenocysteine
  MOD_RES (314)..(314): Selenocysteine
  MOD_RES (316)..(316): Selenocysteine
  MOD_RES (319)..(319): Selenocysteine
  MOD_RES (345)..(345): Selenocysteine
  MOD_RES (354)..(354): Selenocysteine
  MOD_RES (372)..(372): Selenocysteine
  MOD_RES (381)..(381): Selenocysteine
  MOD_RES (428)..(428): Selenocysteine
  MOD_RES (431)..(431): Selenocysteine
  MOD_RES (435)..(435): Selenocysteine
  MOD_RES (454)..(454): Selenocysteine
  MOD_RES (462)..(462): Selenocysteine
  MOD_RES (467)..(467): Selenocysteine
  MOD_RES (472)..(472): Selenocysteine
  MOD_RES (570)..(570): Selenocysteine
  MOD_RES (613)..(613): Selenocysteine
  MOD_RES (626)..(626): Selenocysteine
  MOD_RES (650)..(651): Selenocysteine
MDWQDHRSXXELRKEKSRDAARSRRSQEXEVLYQLAHXLPFARGVSAHLDKASIMRLXISYLRMHRLCAAGEWNQVGAGGEPLDACYLKALEGFVMVLXAEGDMAYLSENVSKHLGLSQLELIGHSIFDFIHPCDQEELQDALXPQQXLSRRKVEAPXERCFSLRMKSXLXSRGRXLNLKAAXWKVLNCSGHMRAYKPPAQXSPAGSPDSEPPLQCLVLICEAIPHPGSLEPPLGRGAFLSRHSLDMKFXYCDDRIAEVAGYSPDDLIGCSAYEYIHALDSDAVSKSIHXLLSKGQAVXGQYRFLARSGGYLWXQXQAXVVSGGRGPQSESIVCVHFLISQVEEXGVVLSLEQXEQHSRRPIQRGAPSQKDXPNPGDSLDXPGPRILAFLHPPSLSEAALAADPRRFCSPDLRRLLGPILDGASVAAXPSXPLAXRHPQSPLSADLPDELPVGXENVHRLFXSGKDXEAVEXDLDIAQDADALDLEMLAPYISMDDDFQLNASEQLPRAYHRPLGAVPRPRARSFHGLSPPALEPSLLPRWGSDPRLSCSSPSRGDPSASSPMAGARKRXLAQSSEDEDEGVELLGVRPPKRSPSPEHENFLLFPLSLSFLLXGGPAPGSLQDPSXPLLNLNEPLGLGPSLLSPYSDEDXXQPGGPFQPRAGSAQAD

SEQ ID NO: 12098 - protein, 148 aa, Homo sapiens
  MOD_RES (15)..(15): Selenocysteine
  MOD_RES (19)..(19): Selenocysteine
  MOD_RES (30)..(30): Selenocysteine
  MOD_RES (32)..(32): Selenocysteine
  MOD_RES (43)..(43): Selenocysteine
  MOD_RES (47)..(47): Selenocysteine
  MOD_RES (54)..(54): Selenocysteine
  MOD_RES (93)..(93): Selenocysteine
  MOD_RES (138)..(138): Selenocysteine
  MOD_RES (142)..(142): Selenocysteine
MRPAAGAARRPRCCXSWLXRCPSPAASAPXWXRPLSCASPSAXCACXASAPQAXRMYPHFLGGAWEWNQVGAGGEPLDACYLKALEGFVMVLXAEGDMAYLSENVSKHLGLSQLELIGHSIFDFIHPCDQEELQDALXPQQXLSRRKV

SEQ ID NO: 12099 - protein, 69 aa, Homo sapiens
  MOD_RES (15)..(15): Selenocysteine
  MOD_RES (19)..(19): Selenocysteine
  MOD_RES (30)..(30): Selenocysteine
  MOD_RES (32)..(32): Selenocysteine
  MOD_RES (43)..(43): Selenocysteine
  MOD_RES (47)..(47): Selenocysteine
  MOD_RES (56)..(56): Selenocysteine
  MOD_RES (69)..(69): Selenocysteine
MRPAAGAARRPRCCXSWLXRCPSPAASAPXWXRPLSCASPSAXCACXASAPQGSGXRWEQGENHWMPAX

SEQ ID NO: 12100 - protein, 450 aa, Homo sapiens
  MOD_RES (15)..(15): Selenocysteine
  MOD_RES (19)..(19): Selenocysteine
  MOD_RES (30)..(30): Selenocysteine
  MOD_RES (32)..(32): Selenocysteine
  MOD_RES (43)..(43): Selenocysteine
  MOD_RES (47)..(47): Selenocysteine
  MOD_RES (77)..(77): Selenocysteine
  MOD_RES (81)..(81): Selenocysteine
  MOD_RES (91)..(91): Selenocysteine
  MOD_RES (102)..(102): Selenocysteine
  MOD_RES (104)..(104): Selenocysteine
  MOD_RES (109)..(109): Selenocysteine
  MOD_RES (116)..(116): Selenocysteine
  MOD_RES (135)..(135): Selenocysteine
  MOD_RES (183)..(183): Selenocysteine
  MOD_RES (223)..(223): Selenocysteine
  MOD_RES (232)..(232): Selenocysteine
  MOD_RES (247)..(247): Selenocysteine
  MOD_RES (249)..(249): Selenocysteine
  MOD_RES (252)..(252): Selenocysteine
  MOD_RES (278)..(278): Selenocysteine
  MOD_RES (287)..(287): Selenocysteine
  MOD_RES (305)..(305): Selenocysteine
  MOD_RES (314)..(314): Selenocysteine
  MOD_RES (361)..(361): Selenocysteine
  MOD_RES (364)..(364): Selenocysteine
  MOD_RES (368)..(368): Selenocysteine
  MOD_RES (387)..(387): Selenocysteine
  MOD_RES (395)..(395): Selenocysteine
  MOD_RES (400)..(400): Selenocysteine
  MOD_RES (405)..(405): Selenocysteine
  MOD_RES (415)..(415): Selenocysteine
  MOD_RES (430)..(430): Selenocysteine
MRPAAGAARRPRCCXSWLXRCPSPAASAPXWXRPLSCASPSAXCACXASAPQLELIGHSIFDFIHPCDQEELQDALXPQQXLSRRKVEAPXERCFSLRMKSXLXSRGRXLNLKAAXWKVLNCSGHMRAYKPPAQXSPAGSPDSEPPLQCLVLICEAIPHPGSLEPPLGRGAFLSRHSLDMKFXYCDDRIAEVAGYSPDDLIGCSAYEYIHALDSDAVSKSIHXLLSKGQAVXGQYRFLARSGGYLWXQXQAXVVSGGRGPQSESIVCVHFLISQVEEXGVVLSLEQXEQHSRRPIQRGAPSQKDXPNPGDSLDXPGPRILAFLHPPSLSEAALAADPRRFCSPDLRRLLGPILDGASVAAXPSXPLAXRHPQSPLSADLPDELPVGXENVHRLFXSGKDXEAVEXDLDIAQDPSXPLLNLNEPLGFHFVXQSGVQWHKHSSPQPRPPGLK

SEQ ID NO: 12101 - protein, 594 aa, Homo sapiens
  MOD_RES (15)..(15): Selenocysteine
  MOD_RES (19)..(19): Selenocysteine
  MOD_RES (30)..(30): Selenocysteine
  MOD_RES (32)..(32): Selenocysteine
  MOD_RES (43)..(43): Selenocysteine
  MOD_RES (47)..(47): Selenocysteine
  MOD_RES (77)..(77): Selenocysteine
  MOD_RES (81)..(81): Selenocysteine
  MOD_RES (91)..(91): Selenocysteine
  MOD_RES (102)..(102): Selenocysteine
  MOD_RES (104)..(104): Selenocysteine
  MOD_RES (109)..(109): Selenocysteine
  MOD_RES (116)..(116): Selenocysteine
  MOD_RES (135)..(135): Selenocysteine
  MOD_RES (183)..(183): Selenocysteine
  MOD_RES (223)..(223): Selenocysteine
  MOD_RES (232)..(232): Selenocysteine
  MOD_RES (247)..(247): Selenocysteine
  MOD_RES (249)..(249): Selenocysteine
  MOD_RES (252)..(252): Selenocysteine
  MOD_RES (278)..(278): Selenocysteine
  MOD_RES (287)..(287): Selenocysteine
  MOD_RES (305)..(305): Selenocysteine
  MOD_RES (314)..(314): Selenocysteine
  MOD_RES (361)..(361): Selenocysteine
  MOD_RES (364)..(364): Selenocysteine
  MOD_RES (368)..(368): Selenocysteine
  MOD_RES (387)..(387): Selenocysteine
  MOD_RES (395)..(395): Selenocysteine
  MOD_RES (400)..(400): Selenocysteine
  MOD_RES (405)..(405): Selenocysteine
  MOD_RES (503)..(503): Selenocysteine
  MOD_RES (546)..(546): Selenocysteine
  MOD_RES (559)..(559): Selenocysteine
  MOD_RES (574)..(574): Selenocysteine
MRPAAGAARRPRCCXSWLXRCPSPAASAPXWXRPLSCASPSAXCACXASAPQLELIGHSIFDFIHPCDQEELQDALXPQQXLSRRKVEAPXERCFSLRMKSXLXSRGRXLNLKAAXWKVLNCSGHMRAYKPPAQXSPAGSPDSEPPLQCLVLICEAIPHPGSLEPPLGRGAFLSRHSLDMKFXYCDDRIAEVAGYSPDDLIGCSAYEYIHALDSDAVSKSIHXLLSKGQAVXGQYRFLARSGGYLWXQXQAXVVSGGRGPQSESIVCVHFLISQVEEXGVVLSLEQXEQHSRRPIQRGAPSQKDXPNPGDSLDXPGPRILAFLHPPSLSEAALAADPRRFCSPDLRRLLGPILDGASVAAXPSXPLAXRHPQSPLSADLPDELPVGXENVHRLFXSGKDXEAVEXDLDIAQDADALDLEMLAPYISMDDDFQLNASEQLPRAYHRPLGAVPRPRARSFHGLSPPALEPSLLPRWGSDPRLSCSSPSRGDPSASSPMAGARKRXLAQSSEDEDEGVELLGVRPPKRSPSPEHENFLLFPLSLSFLLXGGPAPGSLQDPSXPLLNLNEPLGFHFVXQSGVQWHKHSSPQPRPPGLK

SEQ ID NO: 12102 - protein, 600 aa, Homo sapiens
  MOD_RES (15)..(15): Selenocysteine
  MOD_RES (19)..(19): Selenocysteine
  MOD_RES (30)..(30): Selenocysteine
  MOD_RES (32)..(32): Selenocysteine
  MOD_RES (43)..(43): Selenocysteine
  MOD_RES (47)..(47): Selenocysteine
  MOD_RES (77)..(77): Selenocysteine
  MOD_RES (81)..(81): Selenocysteine
  MOD_RES (91)..(91): Selenocysteine
  MOD_RES (102)..(102): Selenocysteine
  MOD_RES (104)..(104): Selenocysteine
  MOD_RES (109)..(109): Selenocysteine
  MOD_RES (116)..(116): Selenocysteine
  MOD_RES (135)..(135): Selenocysteine
  MOD_RES (183)..(183): Selenocysteine
  MOD_RES (223)..(223): Selenocysteine
  MOD_RES (232)..(232): Selenocysteine
  MOD_RES (247)..(247): Selenocysteine
  MOD_RES (249)..(249): Selenocysteine
  MOD_RES (252)..(252): Selenocysteine
  MOD_RES (278)..(278): Selenocysteine
  MOD_RES (287)..(287): Selenocysteine
  MOD_RES (305)..(305): Selenocysteine
  MOD_RES (314)..(314): Selenocysteine
  MOD_RES (361)..(361): Selenocysteine
  MOD_RES (364)..(364): Selenocysteine
  MOD_RES (368)..(368): Selenocysteine
  MOD_RES (387)..(387): Selenocysteine
  MOD_RES (395)..(395): Selenocysteine
  MOD_RES (400)..(400): Selenocysteine
  MOD_RES (405)..(405): Selenocysteine
  MOD_RES (503)..(503): Selenocysteine
  MOD_RES (546)..(546): Selenocysteine
  MOD_RES (559)..(559): Selenocysteine
  MOD_RES (583)..(584): Selenocysteine
MRPAAGAARRPRCCXSWLXRCPSPAASAPXWXRPLSCASPSAXCACXASAPQLELIGHSIFDFIHPCDQEELQDALXPQQXLSRRKVEAPXERCFSLRMKSXLXSRGRXLNLKAAXWKVLNCSGHMRAYKPPAQXSPAGSPDSEPPLQCLVLICEAIPHPGSLEPPLGRGAFLSRHSLDMKFXYCDDRIAEVAGYSPDDLIGCSAYEYIHALDSDAVSKSIHXLLSKGQAVXGQYRFLARSGGYLWXQXQAXVVSGGRGPQSESIVCVHFLISQVEEXGVVLSLEQXEQHSRRPIQRGAPSQKDXPNPGDSLDXPGPRILAFLHPPSLSEAALAADPRRFCSPDLRRLLGPILDGASVAAXPSXPLAXRHPQSPLSADLPDELPVGXENVHRLFXSGKDXEAVEXDLDIAQDADALDLEMLAPYISMDDDFQLNASEQLPRAYHRPLGAVPRPRARSFHGLSPPALEPSLLPRWGSDPRLSCSSPSRGDPSASSPMAGARKRXLAQSSEDEDEGVELLGVRPPKRSPSPEHENFLLFPLSLSFLLXGGPAPGSLQDPSXPLLNLNEPLGLGPSLLSPYSDEDXXQPGGPFQPRAGSAQAD

SEQ ID NO: 12103 - protein, 93 aa, Homo sapiens
  MOD_RES (1)..(1): Any amino acid
  MOD_RES (42)..(42): Selenocysteine
  MOD_RES (69)..(69): Selenocysteine
  MOD_RES (75)..(75): Selenocysteine
  MOD_RES (87)..(87): Selenocysteine
XSEPPLQCLVLICEAIPHPGSLEPPLGRGAFLSRHSLDMKFXYCDDRNGDSGFSLLECQSWLCILSQMXSPLCAXISSPILWNHNRXCLVQSF

SEQ ID NO: 12104 - protein, 63 aa, Homo sapiens
  MOD_RES (15)..(15): Selenocysteine
  MOD_RES (38)..(38): Selenocysteine
  MOD_RES (41)..(42): Selenocysteine
  MOD_RES (49)..(49): Selenocysteine
  MOD_RES (52)..(52): Selenocysteine
MKHVLNLYLLGVVLXLLSIFVRVMESLEGLLESPSPGXSWXXRSQLANXEPXKGLPDHPSRSM

SEQ ID NO: 12105 - protein, 54 aa, Homo sapiens
  MOD_RES (28)..(28): Selenocysteine
  MOD_RES (37)..(37): Selenocysteine
MPPPGKVPRKENLWLQCEWGSCSFVCSXMEKFFEHVXQHLQQHLHGSGEEEEEE

SEQ ID NO: 12106 - protein, 100 aa, Homo sapiens
  MOD_RES (28)..(28): Selenocysteine
  MOD_RES (37)..(37): Selenocysteine
  MOD_RES (93)..(93): Selenocysteine
MPPPGKVPRKENLWLQCEWGSCSFVCSXMEKFFEHVXQHLQQHLHGSGEEEEEEEEDDPLEEEFSCLWQECGFCSLDSSADLIRHVYFHCYHXKLKQWGL

SEQ ID NO: 12107 - protein, 419 aa, Homo sapiens
  MOD_RES (28)..(28): Selenocysteine
  MOD_RES (37)..(37): Selenocysteine
  MOD_RES (93)..(93): Selenocysteine
  MOD_RES (177)..(177): Selenocysteine
  MOD_RES (179)..(179): Selenocysteine
  MOD_RES (194)..(194): Selenocysteine
  MOD_RES (203)..(203): Selenocysteine
  MOD_RES (212)..(212): Selenocysteine
  MOD_RES (222)..(222): Selenocysteine
  MOD_RES (240)..(240): Selenocysteine
  MOD_RES (263)..(263): Selenocysteine
  MOD_RES (305)..(305): Selenocysteine
  MOD_RES (320)..(320): Selenocysteine
  MOD_RES (355)..(355): Selenocysteine
  MOD_RES (361)..(361): Selenocysteine
  MOD_RES (398)..(398): Selenocysteine
  MOD_RES (402)..(402): Selenocysteine
  MOD_RES (417)..(417): Selenocysteine
MPPPGKVPRKENLWLQCEWGSCSFVCSXMEKFFEHVXQHLQQHLHGSGEEEEEEEEDDPLEEEFSCLWQECGFCSLDSSADLIRHVYFHCYHXKLKQWGLQALQSQADLGPCILDFQSRNVIPDIPDHFLCLWEHCENSFDNPEWFYRHVEAHSLCCEYEAVGKDNPVVLCGWKGCXCXFKDRSKLREHLRSHXQEKVVACPXCGGMFANNXKFLDHIRRQXSLDQQHFQCSHCSKRFAXERLLRDHMRNHVNHYKCPLCDMXCPLPSSLRNHMRFRHSEDRPFKCDCCDYSCKNLIDLQKHLDXHSEEPAYRCDFENCXFSARSLCSIKSHYRKVHEGDSEPRYKCHVCDKCFXRGNNLXVHLRKKHQFKWPSGHPRFRLGHFCIPLPGFAALYAPXSPGXRNMKMAICGCSWFAXRV

SEQ ID NO: 12108 - protein, 517 aa, Homo sapiens
  MOD_RES (28)..(28): Selenocysteine
  MOD_RES (37)..(37): Selenocysteine
  MOD_RES (93)..(93): Selenocysteine
  MOD_RES (177)..(177): Selenocysteine
  MOD_RES (179)..(179): Selenocysteine
  MOD_RES (194)..(194): Selenocysteine
  MOD_RES (203)..(203): Selenocysteine
  MOD_RES (212)..(212): Selenocysteine
  MOD_RES (222)..(222): Selenocysteine
  MOD_RES (240)..(240): Selenocysteine
  MOD_RES (263)..(263): Selenocysteine
  MOD_RES (305)..(305): Selenocysteine
  MOD_RES (320)..(320): Selenocysteine
  MOD_RES (355)..(355): Selenocysteine
  MOD_RES (361)..(361): Selenocysteine
  MOD_RES (402)..(402): Selenocysteine
  MOD_RES (417)..(417): Selenocysteine
  MOD_RES (431)..(431): Selenocysteine
  MOD_RES (451)..(451): Selenocysteine
  MOD_RES (470)..(470): Selenocysteine
MPPPGKVPRKENLWLQCEWGSCSFVCSXMEKFFEHVXQHLQQHLHGSGEEEEEEEEDDPLEEEFSCLWQECGFCSLDSSADLIRHVYFHCYHXKLKQWGLQALQSQADLGPCILDFQSRNVIPDIPDHFLCLWEHCENSFDNPEWFYRHVEAHSLCCEYEAVGKDNPVVLCGWKGCXCXFKDRSKLREHLRSHXQEKVVACPXCGGMFANNXKFLDHIRRQXSLDQQHFQCSHCSKRFAXERLLRDHMRNHVNHYKCPLCDMXCPLPSSLRNHMRFRHSEDRPFKCDCCDYSCKNLIDLQKHLDXHSEEPAYRCDFENCXFSARSLCSIKSHYRKVHEGDSEPRYKCHVCDKCFXRGNNLXVHLRKKHQFKWPSGHPRFRYKEHEDGYMRLQLVRYESVELXQQLLRQPQEGSGLGXSLNESSLQGIILEXVPGEPGRKEEEEEGKGSEGXALSASQDNPSSVIHVVNQXNAQGQQEIVYYVLSEAPGEPPPAPEPPSGGIMEKLQGIAEEPEIQMV

SEQ ID NO: 12109 - protein, 126 aa, Homo sapiens
  MOD_RES (17)..(17): Selenocysteine
  MOD_RES (50)..(50): Selenocysteine
MADEIAKAQVARPGGDXIFGKIIRKEIPAKIIFEDDRCLAFHDISPQAPXHFLVIPKKHISQISVAEDDDESLLGHLMIVGKKCAADLGLNKGYRMVVNEGSDGGQSVYHVHLHVLGGRQMHWPPG

SEQ ID NO: 12110 - protein, 78 aa, Homo sapiens
  MOD_RES (17)..(17): Selenocysteine
  MOD_RES (50)..(50): Selenocysteine
MADEIAKAQVARPGGDXIFGKIIRKEIPAKIIFEDDRCLAFHDISPQAPXHFLVIPKKHISQISVAEDDDESSVEYLM

SEQ ID NO: 12111 - protein, 103 aa, Homo sapiens
  MOD_RES (17)..(17): Selenocysteine
  MOD_RES (50)..(50): Selenocysteine
  MOD_RES (75)..(75): Selenocysteine
MADEIAKAQVARPGGDXIFGKIIRKEIPAKIIFEDDRCLAFHDISPQAPXHFLVIPKKHISQISVAEDDDESVIXKEKPEKPLGLQLPSCFPKLLHHFVSHQQ

SEQ ID NO: 12112 - protein, 78 aa, Homo sapiens
  MOD_RES (17)..(17): Selenocysteine
  MOD_RES (50)..(50): Selenocysteine
  MOD_RES (75)..(75): Selenocysteine
  MOD_RES (78)..(78): Selenocysteine
MADEIAKAQVARPGGDXIFGKIIRKEIPAKIIFEDDRCLAFHDISPQAPXHFLVIPKKHISQISVAEDDDESVSXFLX

SEQ ID NO: 12113 - protein, 65 aa, Homo sapiens
  MOD_RES (17)..(17): Selenocysteine
  MOD_RES (40)..(40): Selenocysteine
  MOD_RES (55)..(55): Selenocysteine
MADEIAKAQVARPGGDXIFGKIIRKEIPAKIIFEDDRVGXGHHLSRLLSALLSMXFPLKHQHIFW

SEQ ID NO: 12114 - protein, 27 aa, Homo sapiens
  MOD_RES (1)..(1): Any amino acid
XIPKKHISQISVAEDDDESCCHIFIFL

SEQ ID NO: 12115 - protein, 986 aa, Homo sapiens
  MOD_RES (39)..(39): Selenocysteine
  MOD_RES (41)..(41): Selenocysteine
  MOD_RES (50)..(50): Selenocysteine
  MOD_RES (62)..(62): Selenocysteine
  MOD_RES (67)..(67): Selenocysteine
  MOD_RES (75)..(75): Selenocysteine
  MOD_RES (148)..(148): Selenocysteine
  MOD_RES (154)..(154): Selenocysteine
  MOD_RES (185)..(185): Selenocysteine
  MOD_RES (201)..(201): Selenocysteine
  MOD_RES (215)..(215): Selenocysteine
  MOD_RES (239)..(239): Selenocysteine
  MOD_RES (254)..(254): Selenocysteine
  MOD_RES (267)..(267): Selenocysteine
  MOD_RES (396)..(396): Selenocysteine
  MOD_RES (447)..(447): Selenocysteine
  MOD_RES (493)..(493): Selenocysteine
  MOD_RES (528)..(528): Selenocysteine
  MOD_RES (544)..(544): Selenocysteine
  MOD_RES (558)..(558): Selenocysteine
  MOD_RES (601)..(601): Selenocysteine
  MOD_RES (608)..(608): Selenocysteine
  MOD_RES (660)..(660): Selenocysteine
  MOD_RES (662)..(662): Selenocysteine
  MOD_RES (693)..(693): Selenocysteine
  MOD_RES (699)..(699): Selenocysteine
  MOD_RES (708)..(709): Selenocysteine
  MOD_RES (722)..(722): Selenocysteine
  MOD_RES (732)..(732): Selenocysteine
  MOD_RES (751)..(751): Selenocysteine
  MOD_RES (790)..(790): Selenocysteine
  MOD_RES (796)..(796): Selenocysteine
  MOD_RES (798)..(798): Selenocysteine
  MOD_RES (804)..(804): Selenocysteine
  MOD_RES (818)..(818): Selenocysteine
  MOD_RES (833)..(833): Selenocysteine
  MOD_RES (863)..(863): Selenocysteine
  MOD_RES (895)..(895): Selenocysteine
  MOD_RES (902)..(902): Selenocysteine
  MOD_RES (912)..(912): Selenocysteine
  MOD_RES (921)..(921): Selenocysteine
  MOD_RES (923)..(923): Selenocysteine
  MOD_RES (971)..(971): Selenocysteine
  MOD_RES (977)..(977): Selenocysteine
  MOD_RES (983)..(983): Selenocysteine
MDRMASSMKQVPNPLPKVLSRRGVGAGLEAAERESFERXQXVSINKAINXQEVAVKEKHARXCILGXHHEKGAQXFWSVVNRLPLSSNAVLCWKFCHVFHKLLRDGHPNVLKDSLRYRNELSDMSRMWGHLSEGYGQLCSIYLKLLRXKMEYHXKNPRFPGNLQMSDRQLDEAGESDVNNFFQLXVEMFDYLECELNLFQXVFNSLDMSRSVSVXAAGQCRLAPLIQVILDCSHLYDYXVKLLFKLHSCLPADXLQGHRDRFMEQFXKLKDLFYRSSNLQYFKRLIQIPQLPENPPNFLRASALSEHISPVVVIPAEASSPDSEPVLEKDDLMDMDASQQNLFDNKFDDIFGSSFSSDPFNFNSQNGVNKDEKDHLIERLYREISGLKAQLENMKXESQRVVLQLKGHVSELEADLAEQQHLRQQAADDCEFLRAELDELRRQREDXEKAQRSLSEIERKAQANEQRYSKLKEKYSELVQNHADLLRKNAEVXKQVSMARQAQVDLEREKKELEDSLERISDQGQRKXQEQLEVLESLKQELAXSQRELQVLQGSLEXSAQSEANWAAEFAELEKERDSLVSGAAHREEELSALRKELQDXQLKLASXEESMCQLAKDQRKMLLVGSRKAAEQVIQDALNQLEEPPLISCAGSADHLLSXVXSISSCIEQLEKSWSQYLACPEDISGLLHSIXLLAHLXSDAIAHGAXXCLRAPPEPADSLXEACKQYGREXLAYLASLEEEGSLENADSXAMRNCLSKIKAIGEELLPRGLDIKQEELGDLVDKEMAAXSAAIEXAXARIEGXASPKEFYAKNSRWXEGLISASKAVGWGAXVMVDAADLVVQGRGKFEELMVCSHEIAASXAQLVAASKVKADKDSPNLAQLQQASRGVNQAXAGVVASXISGKSQIEEXDNMDFSSMXLXQIKRQEMDSQVRVLELENELQKERQKLGELRKKHYELAGVAEGWEEGXEASPPXLQEVVXEKE

SEQ ID NO: 12116 - protein, 1037 aa, Homo sapiens
  MOD_RES (39)..(39): Selenocysteine
  MOD_RES (41)..(41): Selenocysteine
  MOD_RES (50)..(50): Selenocysteine
  MOD_RES (62)..(62): Selenocysteine
  MOD_RES (67)..(67): Selenocysteine
  MOD_RES (75)..(75): Selenocysteine
  MOD_RES (148)..(148): Selenocysteine
  MOD_RES (154)..(154): Selenocysteine
  MOD_RES (185)..(185): Selenocysteine
  MOD_RES (201)..(201): Selenocysteine
  MOD_RES (215)..(215): Selenocysteine
  MOD_RES (239)..(239): Selenocysteine
  MOD_RES (254)..(254): Selenocysteine
  MOD_RES (267)..(267): Selenocysteine
  MOD_RES (396)..(396): Selenocysteine
  MOD_RES (447)..(447): Selenocysteine
  MOD_RES (493)..(493): Selenocysteine
  MOD_RES (528)..(528): Selenocysteine
  MOD_RES (544)..(544): Selenocysteine
  MOD_RES (558)..(558): Selenocysteine
  MOD_RES (601)..(601): Selenocysteine
  MOD_RES (608)..(608): Selenocysteine
  MOD_RES (660)..(660): Selenocysteine
  MOD_RES (662)..(662): Selenocysteine
  MOD_RES (693)..(693): Selenocysteine
  MOD_RES (699)..(699): Selenocysteine
  MOD_RES (708)..(709): Selenocysteine
  MOD_RES (722)..(722): Selenocysteine
  MOD_RES (732)..(732): Selenocysteine
  MOD_RES (751)..(751): Selenocysteine
  MOD_RES (790)..(790): Selenocysteine
  MOD_RES (796)..(796): Selenocysteine
  MOD_RES (798)..(798): Selenocysteine
  MOD_RES (813)..(813): Selenocysteine
  MOD_RES (828)..(828): Selenocysteine
  MOD_RES (855)..(855): Selenocysteine
  MOD_RES (869)..(869): Selenocysteine
  MOD_RES (884)..(884): Selenocysteine
  MOD_RES (914)..(914): Selenocysteine
  MOD_RES (946)..(946): Selenocysteine
  MOD_RES (953)..(953): Selenocysteine
  MOD_RES (963)..(963): Selenocysteine
  MOD_RES (972)..(972): Selenocysteine
  MOD_RES (974)..(974): Selenocysteine
  MOD_RES (1022)..(1022): Selenocysteine
  MOD_RES (1028)..(1028): Selenocysteine
  MOD_RES (1034)..(1034): Selenocysteine
MDRMASSMKQVPNPLPKVLSRRGVGAGLEAAERESFERXQXVSINKAINXQEVAVKEKHARXCILGXHHEKGAQXFWSVVNRLPLSSNAVLCWKFCHVFHKLLRDGHPNVLKDSLRYRNELSDMSRMWGHLSEGYGQLCSIYLKLLRXKMEYHXKNPRFPGNLQMSDRQLDEAGESDVNNFFQLXVEMFDYLECELNLFQXVFNSLDMSRSVSVXAAGQCRLAPLIQVILDCSHLYDYXVKLLFKLHSCLPADXLQGHRDRFMEQFXKLKDLFYRSSNLQYFKRLIQIPQLPENPPNFLRASALSEHISPVVVIPAEASSPDSEPVLEKDDLMDMDASQQNLFDNKFDDIFGSSFSSDPFNFNSQNGVNKDEKDHLIERLYREISGLKAQLENMKXESQRVVLQLKGHVSELEADLAEQQHLRQQAADDCEFLRAELDELRRQREDXEKAQRSLSEIERKAQANEQRYSKLKEKYSELVQNHADLLRKNAEVXKQVSMARQAQVDLEREKKELEDSLERISDQGQRKXQEQLEVLESLKQELAXSQRELQVLQGSLEXSAQSEANWAAEFAELEKERDSLVSGAAHREEELSALRKELQDXQLKLASXEESMCQLAKDQRKMLLVGSRKAAEQVIQDALNQLEEPPLISCAGSADHLLSXVXSISSCIEQLEKSWSQYLACPEDISGLLHSIXLLAHLXSDAIAHGAXXCLRAPPEPADSLXEACKQYGREXLAYLASLEEEGSLENADSXAMRNCLSKIKAIGEELLPRGLDIKQEELGDLVDKEMAAXSAAIEXAXARIEEMLSKSRAGDXGVKLEVNERILGCCXSLMQAIQVLIVASKDLQREIVESGRGXASPKEFYAKNSRWXEGLISASKAVGWGAXVMVDAADLVVQGRGKFEELMVCSHEIAASXAQLVAASKVKADKDSPNLAQLQQASRGVNQAXAGVVASXISGKSQIEEXDNMDFSSMXLXQIKRQEMDSQVRVLELENELQKERQKLGELRKKHYELAGVAEGWEEGXEASPPXLQEVVXEKE

SEQ ID NO: 12117 - protein, 146 aa, Homo sapiens
  MOD_RES (12)..(12): Selenocysteine
  MOD_RES (21)..(21): Selenocysteine
  MOD_RES (33)..(33): Selenocysteine
  MOD_RES (38)..(38): Selenocysteine
  MOD_RES (46)..(46): Selenocysteine
  MOD_RES (119)..(119): Selenocysteine
  MOD_RES (125)..(125): Selenocysteine
MMFPNPEPPPEXVSINKAINXQEVAVKEKHARXCILGXHHEKGAQXFWSVVNRLPLSSNAVLCWKFCHVFHKLLRDGHPNVLKDSLRYRNELSDMSRMWGHLSEGYGQLCSIYLKLLRXKMEYHXKNPRFPGNLQMSDRQLDEAGE

SEQ ID NO: 12118 - protein, 1008 aa, Homo sapiens
  MOD_RES (12)..(12): Selenocysteine
  MOD_RES (21)..(21): Selenocysteine
  MOD_RES (33)..(33): Selenocysteine
  MOD_RES (38)..(38): Selenocysteine
  MOD_RES (46)..(46): Selenocysteine
  MOD_RES (119)..(119): Selenocysteine
  MOD_RES (125)..(125): Selenocysteine
  MOD_RES (156)..(156): Selenocysteine
  MOD_RES (172)..(172): Selenocysteine
  MOD_RES (186)..(186): Selenocysteine
  MOD_RES (210)..(210): Selenocysteine
  MOD_RES (225)..(225): Selenocysteine
  MOD_RES (238)..(238): Selenocysteine
  MOD_RES (367)..(367): Selenocysteine
  MOD_RES (418)..(418): Selenocysteine
  MOD_RES (464)..(464): Selenocysteine
  MOD_RES (499)..(499): Selenocysteine
  MOD_RES (515)..(515): Selenocysteine
  MOD_RES (529)..(529): Selenocysteine
  MOD_RES (572)..(572): Selenocysteine
  MOD_RES (579)..(579): Selenocysteine
  MOD_RES (631)..(631): Selenocysteine
  MOD_RES (633)..(633): Selenocysteine
  MOD_RES (664)..(664): Selenocysteine
  MOD_RES (670)..(670): Selenocysteine
  MOD_RES (679)..(680): Selenocysteine
  MOD_RES (693)..(693): Selenocysteine
  MOD_RES (703)..(703): Selenocysteine
  MOD_RES (722)..(722): Selenocysteine
  MOD_RES (761)..(761): Selenocysteine
  MOD_RES (767)..(767): Selenocysteine
  MOD_RES (769)..(769): Selenocysteine
  MOD_RES (784)..(784): Selenocysteine
  MOD_RES (799)..(799): Selenocysteine
  MOD_RES (826)..(826): Selenocysteine
  MOD_RES (840)..(840): Selenocysteine
  MOD_RES (855)..(855): Selenocysteine
  MOD_RES (885)..(885): Selenocysteine
  MOD_RES (917)..(917): Selenocysteine
  MOD_RES (924)..(924): Selenocysteine
  MOD_RES (934)..(934): Selenocysteine
  MOD_RES (943)..(943): Selenocysteine
  MOD_RES (945)..(945): Selenocysteine
  MOD_RES (993)..(993): Selenocysteine
  MOD_RES (999)..(999): Selenocysteine
  MOD_RES (1005)..(1005): Selenocysteine
MMFPNPEPPPEXVSINKAINXQEVAVKEKHARXCILGXHHEKGAQXFWSVVNRLPLSSNAVLCWKFCHVFHKLLRDGHPNVLKDSLRYRNELSDMSRMWGHLSEGYGQLCSIYLKLLRXKMEYHXKNPRFPGNLQMSDRQLDEAGESDVNNFFQLXVEMFDYLECELNLFQXVFNSLDMSRSVSVXAAGQCRLAPLIQVILDCSHLYDYXVKLLFKLHSCLPADXLQGHRDRFMEQFXKLKDLFYRSSNLQYFKRLIQIPQLPENPPNFLRASALSEHISPVVVIPAEASSPDSEPVLEKDDLMDMDASQQNLFDNKFDDIFGSSFSSDPFNFNSQNGVNKDEKDHLIERLYREISGLKAQLENMKXESQRVVLQLKGHVSELEADLAEQQHLRQQAADDCEFLRAELDELRRQREDXEKAQRSLSEIERKAQANEQRYSKLKEKYSELVQNHADLLRKNAEVXKQVSMARQAQVDLEREKKELEDSLERISDQGQRKXQEQLEVLESLKQELAXSQRELQVLQGSLEXSAQSEANWAAEFAELEKERDSLVSGAAHREEELSALRKELQDXQLKLASXEESMCQLAKDQRKMLLVGSRKAAEQVIQDALNQLEEPPLISCAGSADHLLSXVXSISSCIEQLEKSWSQYLACPEDISGLLHSIXLLAHLXSDAIAHGAXXCLRAPPEPADSLXEACKQYGREXLAYLASLEEEGSLENADSXAMRNCLSKIKAIGEELLPRGLDIKQEELGDLVDKEMAAXSAAIEXAXARIEEMLSKSRAGDXGVKLEVNERILGCCXSLMQAIQVLIVASKDLQREIVESGRGXASPKEFYAKNSRWXEGLISASKAVGWGAXVMVDAADLVVQGRGKFEELMVCSHEIAASXAQLVAASKVKADKDSPNLAQLQQASRGVNQAXAGVVASXISGKSQIEEXDNMDFSSMXLXQIKRQEMDSQVRVLELENELQKERQKLGELRKKHYELAGVAEGWEEGXEASPPXLQEVVXEKE

SEQ ID NO: 12119 - protein, 1068 aa, Homo sapiens
  MOD_RES (30)..(30): Selenocysteine
  MOD_RES (41)..(41): Selenocysteine
  MOD_RES (58)..(58): Selenocysteine
  MOD_RES (66)..(66): Selenocysteine
  MOD_RES (134)..(134): Selenocysteine
  MOD_RES (139)..(139): Selenocysteine
  MOD_RES (157)..(157): Selenocysteine
  MOD_RES (167)..(167): Selenocysteine
  MOD_RES (176)..(176): Selenocysteine
  MOD_RES (199)..(199): Selenocysteine
  MOD_RES (230)..(230): Selenocysteine
  MOD_RES (245)..(245): Selenocysteine
  MOD_RES (323)..(323): Selenocysteine
  MOD_RES (340)..(340): Selenocysteine
  MOD_RES (443)..(443): Selenocysteine
  MOD_RES (471)..(471): Selenocysteine
  MOD_RES (476)..(476): Selenocysteine
  MOD_RES (478)..(478): Selenocysteine
  MOD_RES (538)..(538): Selenocysteine
  MOD_RES (551)..(551): Selenocysteine
  MOD_RES (580)..(580): Selenocysteine
  MOD_RES (651)..(651): Selenocysteine
  MOD_RES (670)..(670): Selenocysteine
  MOD_RES (680)..(680): Selenocysteine
  MOD_RES (693)..(693): Selenocysteine
  MOD_RES (702)..(702): Selenocysteine
  MOD_RES (709)..(709): Selenocysteine
  MOD_RES (715)..(715): Selenocysteine
  MOD_RES (724)..(724): Selenocysteine
  MOD_RES (755)..(755): Selenocysteine
  MOD_RES (790)..(790): Selenocysteine
  MOD_RES (828)..(828): Selenocysteine
  MOD_RES (839)..(840): Selenocysteine
  MOD_RES (842)..(842): Selenocysteine
  MOD_RES (857)..(857): Selenocysteine
  MOD_RES (869)..(869): Selenocysteine
  MOD_RES (884)..(884): Selenocysteine
  MOD_RES (897)..(897): Selenocysteine
  MOD_RES (914)..(914): Selenocysteine
  MOD_RES (941)..(941): Selenocysteine
  MOD_RES (953)..(953): Selenocysteine
  MOD_RES (965)..(965): Selenocysteine
  MOD_RES (983)..(983): Selenocysteine
  MOD_RES (993)..(993): Selenocysteine
  MOD_RES (1028)..(1028): Selenocysteine
  MOD_RES (1034)..(1035): Selenocysteine
MNSIKNVPARVLSRRPGHSLEAEREQFDKXQAISISKAINXQEAPVKEKHARRIILGXHHEKGAFXFWSYAIGLPLPSSSILSWKFCHVLHKVLRDGHPNVLHDCQRYRSNIREIGDLWGHLHDRYGQLVNVYXKLLLXKISFHLKHPQFPAGLEVXDEVLEKAAGXDVNNIFQLXVEMFDYMDCELKLSESVFRQLNXAIAVSQMSSGQCRLAPLIQVIQDCSHLYHYXVKLLFKLHSCLPADXLQGHRDRFHEQFHSLRNFFRRASDMLYFKRLIQIPRLPEGPPNFLRASALAEHIKPVVVIPEEAPEDEEPENLIEISXGPPAGEPVVVADLFDQXFGPPNGSVKDDRDLQIESLKREVEMLRSELEKIKLEAQRYIAQLKSQVNALEGELEEQRKQKQKALVDNEQLRHELAQLRAAQLEGERSQGLREEAERKASAXEARYNKLKEKHSELVHVHAELLRKNADXAKQLXVXQQSQEEVARVKEQLAFQVEQVKRESELKLEEKSDQLEKLKRELEAKAGELARAQEALSHXEQSKSELSSRLDXLSAEKDALSGAVRQREADLLAAQSLVREXEAALSREQQRSSQEQGELQGRLAERESQEQGLRQRLLDEQFAVLRGAAAEAAGILQDAVSKLDDPLHLRCXSSPDYLVSRAQEALDAVSXLEEGHAQYLXSLADASALVAALXRFSHLAADXIINGGAXSHLAPXDPADRLIDXCRECGARALELMGQLQDQQALRHMQASLVRXPLQGILQLGQELKPKSLDVRQEELGAVVDKEMAAXSAAIEDAVRRIEDMMNQARHASSGVKLEVNERILNSCXDLMKAIRLLVXXSXSLQKEIVESGRGAAXQQEFYAKNSRWXEGLISASKAVGWGAXQLVEAADKVVLHXGKYEELIVCSHEIAASXAQLVAASKVKANKHSPHLSRLQECSRXVNERAANVVASXKSGQEQIEDRDXMDFSGLSLIKLKKQEMEXQVRVLELEKXLEAERMRLGELRKQHYVLAGASGSPGEEVAIRPSXAPRSVXXKKPPLAQKPSVAPRQDHQLDKKDGIYPAQLVNY

SEQ ID NO: 12120 - protein, 197 aa, Homo sapiens
  MOD_RES (1)..(1): Any amino acid
  MOD_RES (26)..(26): Selenocysteine
  MOD_RES (43)..(43): Selenocysteine
  MOD_RES (70)..(70): Selenocysteine
  MOD_RES (82)..(82): Selenocysteine
  MOD_RES (94)..(94): Selenocysteine
  MOD_RES (112)..(112): Selenocysteine
  MOD_RES (122)..(122): Selenocysteine
  MOD_RES (157)..(157): Selenocysteine
  MOD_RES (163)..(164): Selenocysteine
XRHPLACRRRSWRAAGEAADKVVLHXGKYEELIVCSHEIAASXAQLVAASKVKANKHSPHLSRLQECSRXVNERAANVVASXKSGQEQIEDRDXMDFSGLSLIKLKKQEMEXQVRVLELEKXLEAERMRLGELRKQHYVLAGASGSPGEEVAIRPSXAPRSVXXKKPPLAQKPSVAPRQDHQLDKKDGIYPAQLVNY

SEQ ID NO: 12121 - protein, 106 aa, Homo sapiens
  MOD_RES (44)..(44): Selenocysteine
  MOD_RES (48)..(48): Selenocysteine
  MOD_RES (52)..(52): Selenocysteine
  MOD_RES (87)..(87): Selenocysteine
  MOD_RES (97)..(97): Selenocysteine
  MOD_RES (99)..(99): Selenocysteine
  MOD_RES (105)..(105): Selenocysteine
MASQLQVFSPPSVSSSAFCSAKKLKIEPSGWDVSGQSSNDKYYXHSKXLPAXQGQANSSHQVANFNIPAYDQGLLLPAPAVEHIVVXAADSSGSAAXSXFQSSQXL

SEQ ID NO: 12122 - protein, 119 aa, Homo sapiens
  MOD_RES (44)..(44): Selenocysteine
  MOD_RES (48)..(48): Selenocysteine
  MOD_RES (52)..(52): Selenocysteine
  MOD_RES (87)..(87): Selenocysteine
  MOD_RES (97)..(97): Selenocysteine
  MOD_RES (99)..(99): Selenocysteine
  MOD_RES (105)..(105): Selenocysteine
  MOD_RES (107)..(107): Selenocysteine
MASQLQVFSPPSVSSSAFCSAKKLKIEPSGWDVSGQSSNDKYYXHSKXLPAXQGQANSSHQVANFNIPAYDQGLLLPAPAVEHIVVXAADSSGSAAXSXFQSSQXLXHRSNVSLLEPYQ

SEQ ID NO: 12123 - protein, 1075 aa, Homo sapiens
  MOD_RES (44)..(44): Selenocysteine
  MOD_RES (48)..(48): Selenocysteine
  MOD_RES (52)..(52): Selenocysteine
  MOD_RES (87)..(87): Selenocysteine
  MOD_RES (97)..(97): Selenocysteine
  MOD_RES (99)..(99): Selenocysteine
  MOD_RES (105)..(105): Selenocysteine
  MOD_RES (107)..(107): Selenocysteine
  MOD_RES (151)..(151): Selenocysteine
  MOD_RES (158)..(161): Selenocysteine
  MOD_RES (163)..(164): Selenocysteine
  MOD_RES (187)..(187): Selenocysteine
  MOD_RES (200)..(200): Selenocysteine
  MOD_RES (212)..(212): Selenocysteine
  MOD_RES (264)..(264): Selenocysteine
  MOD_RES (301)..(301): Selenocysteine
  MOD_RES (351)..(351): Selenocysteine
  MOD_RES (407)..(407): Selenocysteine
  MOD_RES (420)..(420): Selenocysteine
  MOD_RES (422)..(423): Selenocysteine
  MOD_RES (441)..(441): Selenocysteine
  MOD_RES (449)..(449): Selenocysteine
  MOD_RES (474)..(474): Selenocysteine
  MOD_RES (479)..(479): Selenocysteine
  MOD_RES (500)..(500): Selenocysteine
  MOD_RES (508)..(508): Selenocysteine
  MOD_RES (512)..(512): Selenocysteine
  MOD_RES (519)..(519): Selenocysteine
  MOD_RES (521)..(521): Selenocysteine
  MOD_RES (551)..(551): Selenocysteine
  MOD_RES (560)..(561): Selenocysteine
  MOD_RES (567)..(567): Selenocysteine
  MOD_RES (569)..(569): Selenocysteine
  MOD_RES (572)..(572): Selenocysteine
  MOD_RES (581)..(581): Selenocysteine
  MOD_RES (594)..(594): Selenocysteine
  MOD_RES (599)..(599): Selenocysteine
  MOD_RES (638)..(639): Selenocysteine
  MOD_RES (643)..(643): Selenocysteine
  MOD_RES (645)..(645): Selenocysteine
  MOD_RES (651)..(651): Selenocysteine
  MOD_RES (661)..(661): Selenocysteine
  MOD_RES (666)..(667): Selenocysteine
  MOD_RES (700)..(700): Selenocysteine
  MOD_RES (705)..(705): Selenocysteine
  MOD_RES (711)..(711): Selenocysteine
  MOD_RES (718)..(718): Selenocysteine
  MOD_RES (720)..(720): Selenocysteine
  MOD_RES (728)..(728): Selenocysteine
  MOD_RES (742)..(742): Selenocysteine
  MOD_RES (753)..(753): Selenocysteine
  MOD_RES (761)..(761): Selenocysteine
  MOD_RES (777)..(777): Selenocysteine
  MOD_RES (805)..(805): Selenocysteine
  MOD_RES (814)..(814): Selenocysteine
  MOD_RES (818)..(818): Selenocysteine
  MOD_RES (821)..(821): Selenocysteine
  MOD_RES (876)..(877): Selenocysteine
  MOD_RES (898)..(898): Selenocysteine
  MOD_RES (907)..(907): Selenocysteine
  MOD_RES (912)..(912): Selenocysteine
  MOD_RES (938)..(938): Selenocysteine
  MOD_RES (955)..(955): Selenocysteine
  MOD_RES (957)..(957): Selenocysteine
  MOD_RES (980)..(980): Selenocysteine
  MOD_RES (982)..(982): Selenocysteine
  MOD_RES (984)..(984): Selenocysteine
  MOD_RES (992)..(992): Selenocysteine
  MOD_RES (998)..(998): Selenocysteine
  MOD_RES (1001)..(1001): Selenocysteine
  MOD_RES (1011)..(1011): Selenocysteine
  MOD_RES (1027)..(1027): Selenocysteine
  MOD_RES (1029)..(1029): Selenocysteine
  MOD_RES (1038)..(1038): Selenocysteine
  MOD_RES (1062)..(1062): Selenocysteine
  MOD_RES (1065)..(1065): Selenocysteine
  MOD_RES (1069)..(1069): Selenocysteine
MASQLQVFSPPSVSSSAFCSAKKLKIEPSGWDVSGQSSNDKYYXHSKXLPAXQGQANSSHQVANFNIPAYDQGLLLPAPAVEHIVVXAADSSGSAAXSXFQSSQXLXHRSNVSLLEPYQKCGLKRKSEEVDSNGSVQIIEEHPPLMLQNRXVVGAAAXXXXVXXKSSSSSGEGDYQLVQHEILCSMXNSYEVLEFLGRGXFGQVAKCWKRSXKEIVAIKILKNHPSYARQGQIEVSILSRLSSENADEYNFVRSYECFQHKNHXCLVFEMLEQNLYDFLKQNKFSPLPLKYIRPILQQVAXALMKLKSLGLIHADLKPENIMLVDPVRQPYRVKVIDFGSASHVSKAVCSXYLQSRYYRAPEIILGLPFCEAIDMWSLGCVIAELFLGWPLYPGASEYDQIRYISQXQGLPAEYLLSAGXKXXRFFNRDPNLGYPLWRLKXPEEHELEXGIKSKEARKYIFNCLDDMAQVNMSXDLEGXDMLAEKADRREYIDLLKKMLXIDADKRIXPLKXLNHQFVXMXHLLDFPHSNHVKSCFQNMEICKRRVHMYDXVSQIKSPFXXHVAPNXSXNLXMSFSNQLNXVHNQASVLASSSXAAAAXLSLANSDVSLLNYQSALYPSSAAPVPGVAQQGVSLQPGXXQICXQXDPFQQXFIVCPPAFQXGLQAXXKHSGFPVRMDNAVPIVPQAPAAQPLQIQSGVLXQGSCXPLMVAXLHPQVAXIXPQYAVPFXLSCAAGRPALVEQXAAVLQAWPGGXQQILLPSXWQQLPGVALHNSVQPXAMIPEAMGSGQQLADWRNAHSHGNQYSXIMQQPSLLXNHVXLAXAQPLNVGVAHVVRQQQSSSLPSKKNKQSAPVSSKSSLDVLPSQVYSLVGSSPLRXXSSYNSLVPVQDQHQPIIIPDXPSPPVSVIXIRSDXDEEEDNKYKPSSSGLKPRSNVISYVXVNDSPDSDSSLSSPYSXDXLSALRGNSGSVLEGPGRVVADGXGXRXIIVPPLKXQLGDCXVAXQASGLLSNKXKPVASVSGQSSGCCIXPXGYRAQRGGXSAAQPLNLSQVSAMGYCLLFGPCXVVXFWRXLLLAGC

SEQ ID NO: 12124 - protein, 1165 aa, Homo sapiens
  MOD_RES (44)..(44): Selenocysteine
  MOD_RES (48)..(48): Selenocysteine
  MOD_RES (52)..(52): Selenocysteine
  MOD_RES (87)..(87): Selenocysteine
  MOD_RES (97)..(97): Selenocysteine
  MOD_RES (99)..(99): Selenocysteine
  MOD_RES (105)..(105): Selenocysteine
  MOD_RES (107)..(107): Selenocysteine
  MOD_RES (151)..(151): Selenocysteine
  MOD_RES (158)..(161): Selenocysteine
  MOD_RES (163)..(164): Selenocysteine
  MOD_RES (187)..(187): Selenocysteine
  MOD_RES (200)..(200): Selenocysteine
  MOD_RES (212)..(212): Selenocysteine
  MOD_RES (264)..(264): Selenocysteine
  MOD_RES (301)..(301): Selenocysteine
  MOD_RES (351)..(351): Selenocysteine
  MOD_RES (407)..(407): Selenocysteine
  MOD_RES (420)..(420): Selenocysteine
  MOD_RES (422)..(423): Selenocysteine
  MOD_RES (441)..(441): Selenocysteine
  MOD_RES (449)..(449): Selenocysteine
  MOD_RES (474)..(474): Selenocysteine
  MOD_RES (479)..(479): Selenocysteine
  MOD_RES (500)..(500): Selenocysteine
  MOD_RES (508)..(508): Selenocysteine
  MOD_RES (512)..(512): Selenocysteine
  MOD_RES (519)..(519): Selenocysteine
  MOD_RES (521)..(521): Selenocysteine
  MOD_RES (551)..(551): Selenocysteine
  MOD_RES (560)..(561): Selenocysteine
  MOD_RES (567)..(567): Selenocysteine
  MOD_RES (569)..(569): Selenocysteine
  MOD_RES (572)..(572): Selenocysteine
  MOD_RES (581)..(581): Selenocysteine
  MOD_RES (594)..(594): Selenocysteine
  MOD_RES (599)..(599): Selenocysteine
  MOD_RES (638)..(639): Selenocysteine
  MOD_RES (643)..(643): Selenocysteine
  MOD_RES (645)..(645): Selenocysteine
  MOD_RES (651)..(651): Selenocysteine
  MOD_RES (661)..(661): Selenocysteine
  MOD_RES (666)..(667): Selenocysteine
  MOD_RES (700)..(700): Selenocysteine
  MOD_RES (708)..(708): Selenocysteine
  MOD_RES (716)..(716): Selenocysteine
  MOD_RES (732)..(732): Selenocysteine
  MOD_RES (760)..(760): Selenocysteine
  MOD_RES (769)..(769): Selenocysteine
  MOD_RES (773)..(773): Selenocysteine
  MOD_RES (776)..(776): Selenocysteine
  MOD_RES (831)..(832): Selenocysteine
  MOD_RES (853)..(853): Selenocysteine
  MOD_RES (862)..(862): Selenocysteine
  MOD_RES (867)..(867): Selenocysteine
  MOD_RES (893)..(893): Selenocysteine
  MOD_RES (910)..(910): Selenocysteine
  MOD_RES (912)..(912): Selenocysteine
  MOD_RES (935)..(935): Selenocysteine
  MOD_RES (937)..(937): Selenocysteine
  MOD_RES (939)..(939): Selenocysteine
  MOD_RES (947)..(947): Selenocysteine
  MOD_RES (953)..(953): Selenocysteine
  MOD_RES (956)..(956): Selenocysteine
  MOD_RES (966)..(966): Selenocysteine
  MOD_RES (982)..(982): Selenocysteine
  MOD_RES (984)..(984): Selenocysteine
  MOD_RES (993)..(993): Selenocysteine
  MOD_RES (1012)..(1012): Selenocysteine
  MOD_RES (1038)..(1038): Selenocysteine
  MOD_RES (1048)..(1048): Selenocysteine
  MOD_RES (1068)..(1068): Selenocysteine
  MOD_RES (1073)..(1073): Selenocysteine
  MOD_RES (1081)..(1081): Selenocysteine
  MOD_RES (1101)..(1102): Selenocysteine
  MOD_RES (1106)..(1106): Selenocysteine
  MOD_RES (1121)..(1121): Selenocysteine
  MOD_RES (1136)..(1136): Selenocysteine
  MOD_RES (1147)..(1147): Selenocysteine
  MOD_RES (1150)..(1150): Selenocysteine
  MOD_RES (1157)..(1157): Selenocysteine
MASQLQVFSPPSVSSSAFCSAKKLKIEPSGWDVSGQSSNDKYYXHSKXLPAXQGQANSSHQVANFNIPAYDQGLLLPAPAVEHIVVXAADSSGSAAXSXFQSSQXLXHRSNVSLLEPYQKCGLKRKSEEVDSNGSVQIIEEHPPLMLQNRXVVGAAAXXXXVXXKSSSSSGEGDYQLVQHEILCSMXNSYEVLEFLGRGXFGQVAKCWKRSXKEIVAIKILKNHPSYARQGQIEVSILSRLSSENADEYNFVRSYECFQHKNHXCLVFEMLEQNLYDFLKQNKFSPLPLKYIRPILQQVAXALMKLKSLGLIHADLKPENIMLVDPVRQPYRVKVIDFGSASHVSKAVCSXYLQSRYYRAPEIILGLPFCEAIDMWSLGCVIAELFLGWPLYPGASEYDQIRYISQXQGLPAEYLLSAGXKXXRFFNRDPNLGYPLWRLKXPEEHELEXGIKSKEARKYIFNCLDDMAQVNMSXDLEGXDMLAEKADRREYIDLLKKMLXIDADKRIXPLKXLNHQFVXMXHLLDFPHSNHVKSCFQNMEICKRRVHMYDXVSQIKSPFXXHVAPNXSXNLXMSFSNQLNXVHNQASVLASSSXAAAAXLSLANSDVSLLNYQSALYPSSAAPVPGVAQQGVSLQPGXXQICXQXDPFQQXFIVCPPAFQXGLQAXXKHSGFPVRMDNAVPIVPQAPAAQPLQIQSGVLXQQAWPGGXQQILLPSXWQQLPGVALHNSVQPXAMIPEAMGSGQQLADWRNAHSHGNQYSXIMQQPSLLXNHVXLAXAQPLNVGVAHVVRQQQSSSLPSKKNKQSAPVSSKSSLDVLPSQVYSLVGSSPLRXXSSYNSLVPVQDQHQPIIIPDXPSPPVSVIXIRSDXDEEEDNKYKPSSSGLKPRSNVISYVXVNDSPDSDSSLSSPYSXDXLSALRGNSGSVLEGPGRVVADGXGXRXIIVPPLKXQLGDCXVAXQASGLLSNKXKPVASVSGQSSGCCIXPXGYRAQRGGXSAAQPLNLSQNQQSSAAPXSQERSSNPAPRRQQAFVAPLSQAPYXFQHGSPLHSXGHPHLAPAPAHLPSQAHLYXYAAPXSAAALGSXSSIAHLFSPQGSSRHAAAYXXHPSXLVHQVPVSVGPSLLXSASVAPAQYQHQFAXQSYIGSSRGSXIYXGYPLSPXKISQYSYL

SEQ ID NO: 12125 - protein, 1176 aa, Homo sapiens
  MOD_RES (44)..(44): Selenocysteine
  MOD_RES (48)..(48): Selenocysteine
  MOD_RES (52)..(52): Selenocysteine
  MOD_RES (87)..(87): Selenocysteine
  MOD_RES (97)..(97): Selenocysteine
  MOD_RES (99)..(99): Selenocysteine
  MOD_RES (105)..(105): Selenocysteine
  MOD_RES (107)..(107): Selenocysteine
  MOD_RES (151)..(151): Selenocysteine
  MOD_RES (158)..(161): Selenocysteine
  MOD_RES (163)..(164): Selenocysteine
  MOD_RES (187)..(187): Selenocysteine
  MOD_RES (200)..(200): Selenocysteine
  MOD_RES (212)..(212): Selenocysteine
  MOD_RES (264)..(264): Selenocysteine
  MOD_RES (301)..(301): Selenocysteine
  MOD_RES (351)..(351): Selenocysteine
  MOD_RES (407)..(407): Selenocysteine
  MOD_RES (420)..(420): Selenocysteine
  MOD_RES (422)..(423): Selenocysteine
  MOD_RES (441)..(441): Selenocysteine
  MOD_RES (449)..(449): Selenocysteine
  MOD_RES (474)..(474): Selenocysteine
  MOD_RES (479)..(479): Selenocysteine
  MOD_RES (500)..(500): Selenocysteine
  MOD_RES (508)..(508): Selenocysteine
  MOD_RES (512)..(512): Selenocysteine
  MOD_RES (519)..(519): Selenocysteine
  MOD_RES (521)..(521): Selenocysteine
  MOD_RES (551)..(551): Selenocysteine
  MOD_RES (560)..(560): Selenocysteine
  MOD_RES (565)..(565): Selenocysteine
  MOD_RES (604)..(605): Selenocysteine
  MOD_RES (609)..(609): Selenocysteine
  MOD_RES (611)..(611): Selenocysteine
  MOD_RES (617)..(617): Selenocysteine
  MOD_RES (627)..(627): Selenocysteine
  MOD_RES (632)..(633): Selenocysteine
  MOD_RES (666)..(666): Selenocysteine
  MOD_RES (671)..(671): Selenocysteine
  MOD_RES (677)..(677): Selenocysteine
  MOD_RES (684)..(684): Selenocysteine
  MOD_RES (686)..(686): Selenocysteine
  MOD_RES (694)..(694): Selenocysteine
  MOD_RES (708)..(708): Selenocysteine
  MOD_RES (719)..(719): Selenocysteine
  MOD_RES (727)..(727): Selenocysteine
  MOD_RES (743)..(743): Selenocysteine
  MOD_RES (771)..(771): Selenocysteine
  MOD_RES (780)..(780): Selenocysteine
  MOD_RES (784)..(784): Selenocysteine
  MOD_RES (787)..(787): Selenocysteine
  MOD_RES (842)..(843): Selenocysteine
  MOD_RES (864)..(864): Selenocysteine
  MOD_RES (873)..(873): Selenocysteine
  MOD_RES (878)..(878): Selenocysteine
  MOD_RES (904)..(904): Selenocysteine
  MOD_RES (921)..(921): Selenocysteine
  MOD_RES (923)..(923): Selenocysteine
  MOD_RES (946)..(946): Selenocysteine
  MOD_RES (948)..(948): Selenocysteine
  MOD_RES (950)..(950): Selenocysteine
  MOD_RES (958)..(958): Selenocysteine
  MOD_RES (964)..(964): Selenocysteine
  MOD_RES (967)..(967): Selenocysteine
  MOD_RES (977)..(977): Selenocysteine
  MOD_RES (993)..(993): Selenocysteine
  MOD_RES (995)..(995): Selenocysteine
  MOD_RES (1004)..(1004): Selenocysteine
  MOD_RES (1023)..(1023): Selenocysteine
  MOD_RES (1049)..(1049): Selenocysteine
  MOD_RES (1059)..(1059): Selenocysteine
  MOD_RES (1079)..(1079): Selenocysteine
  MOD_RES (1084)..(1084): Selenocysteine
  MOD_RES (1092)..(1092): Selenocysteine
  MOD_RES (1112)..(1113): Selenocysteine
  MOD_RES (1117)..(1117): Selenocysteine
  MOD_RES (1132)..(1132): Selenocysteine
  MOD_RES (1147)..(1147): Selenocysteine
  MOD_RES (1158)..(1158): Selenocysteine
  MOD_RES (1161)..(1161): Selenocysteine
  MOD_RES (1168)..(1168): Selenocysteine
MASQLQVFSPPSVSSSAFCSAKKLKIEPSGWDVSGQSSNDKYYXHSKXLPAXQGQANSSHQVANFNIPAYDQGLLLPAPAVEHIVVXAADSSGSAAXSXFQSSQXLXHRSNVSLLEPYQKCGLKRKSEEVDSNGSVQIIEEHPPLMLQNRXVVGAAAXXXXVXXKSSSSSGEGDYQLVQHEILCSMXNSYEVLEFLGRGXFGQVAKCWKRSXKEIVAIKILKNHPSYARQGQIEVSILSRLSSENADEYNFVRSYECFQHKNHXCLVFEMLEQNLYDFLKQNKFSPLPLKYIRPILQQVAXALMKLKSLGLIHADLKPENIMLVDPVRQPYRVKVIDFGSASHVSKAVCSXYLQSRYYRAPEIILGLPFCEAIDMWSLGCVIAELFLGWPLYPGASEYDQIRYISQXQGLPAEYLLSAGXKXXRFFNRDPNLGYPLWRLKXPEEHELEXGIKSKEARKYIFNCLDDMAQVNMSXDLEGXDMLAEKADRREYIDLLKKMLXIDADKRIXPLKXLNHQFVXMXHLLDFPHSNHVKSCFQNMEICKRRVHMYDXASVLASSSXAAAAXLSLANSDVSLLNYQSALYPSSAAPVPGVAQQGVSLQPGXXQICXQXDPFQQXFIVCPPAFQXGLQAXXKHSGFPVRMDNAVPIVPQAPAAQPLQIQSGVLXQGSCXPLMVAXLHPQVAXIXPQYAVPFXLSCAAGRPALVEQXAAVLQAWPGGXQQILLPSXWQQLPGVALHNSVQPXAMIPEAMGSGQQLADWRNAHSHGNQYSXIMQQPSLLXNHVXLAXAQPLNVGVAHVVRQQQSSSLPSKKNKQSAPVSSKSSLDVLPSQVYSLVGSSPLRXXSSYNSLVPVQDQHQPIIIPDXPSPPVSVIXIRSDXDEEEDNKYKPSSSGLKPRSNVISYVXVNDSPDSDSSLSSPYSXDXLSALRGNSGSVLEGPGRVVADGXGXRXIIVPPLKXQLGDCXVAXQASGLLSNKXKPVASVSGQSSGCCIXPXGYRAQRGGXSAAQPLNLSQNQQSSAAPXSQERSSNPAPRRQQAFVAPLSQAPYXFQHGSPLHSXGHPHLAPAPAHLPSQAHLYXYAAPXSAAALGSXSSIAHLFSPQGSSRHAAAYXXHPSXLVHQVPVSVGPSLLXSASVAPAQYQHQFAXQSYIGSSRGSXIYXGYPLSPXKISQYSYL

SEQ ID NO: 12126 - protein, 1210 aa, Homo sapiens
  MOD_RES (44)..(44): Selenocysteine
  MOD_RES (48)..(48): Selenocysteine
  MOD_RES (52)..(52): Selenocysteine
  MOD_RES (87)..(87): Selenocysteine
  MOD_RES (97)..(97): Selenocysteine
  MOD_RES (99)..(99): Selenocysteine
  MOD_RES (105)..(105): Selenocysteine
  MOD_RES (107)..(107): Selenocysteine
  MOD_RES (151)..(151): Selenocysteine
  MOD_RES (158)..(161): Selenocysteine
  MOD_RES (163)..(164): Selenocysteine
  MOD_RES (187)..(187): Selenocysteine
  MOD_RES (200)..(200): Selenocysteine
  MOD_RES (212)..(212): Selenocysteine
  MOD_RES (264)..(264): Selenocysteine
  MOD_RES (301)..(301): Selenocysteine
  MOD_RES (351)..(351): Selenocysteine
  MOD_RES (407)..(407): Selenocysteine
  MOD_RES (420)..(420): Selenocysteine
  MOD_RES (422)..(423): Selenocysteine
  MOD_RES (441)..(441): Selenocysteine
  MOD_RES (449)..(449): Selenocysteine
  MOD_RES (474)..(474): Selenocysteine
  MOD_RES (479)..(479): Selenocysteine
  MOD_RES (500)..(500): Selenocysteine
  MOD_RES (508)..(508): Selenocysteine
  MOD_RES (512)..(512): Selenocysteine
  MOD_RES (519)..(519): Selenocysteine
  MOD_RES (521)..(521): Selenocysteine
  MOD_RES (551)..(551): Selenocysteine
  MOD_RES (560)..(561): Selenocysteine
  MOD_RES (567)..(567): Selenocysteine
  MOD_RES (569)..(569): Selenocysteine
  MOD_RES (572)..(572): Selenocysteine
  MOD_RES (581)..(581): Selenocysteine
  MOD_RES (594)..(594): Selenocysteine
  MOD_RES (599)..(599): Selenocysteine
  MOD_RES (638)..(639): Selenocysteine
  MOD_RES (643)..(643): Selenocysteine
  MOD_RES (645)..(645): Selenocysteine
  MOD_RES (651)..(651): Selenocysteine
  MOD_RES (661)..(661): Selenocysteine
  MOD_RES (666)..(667): Selenocysteine
  MOD_RES (700)..(700): Selenocysteine
  MOD_RES (705)..(705): Selenocysteine
  MOD_RES (711)..(711): Selenocysteine
  MOD_RES (718)..(718): Selenocysteine
  MOD_RES (720)..(720): Selenocysteine
  MOD_RES (728)..(728): Selenocysteine
  MOD_RES (742)..(742): Selenocysteine
  MOD_RES (753)..(753): Selenocysteine
  MOD_RES (761)..(761): Selenocysteine
  MOD_RES (777)..(777): Selenocysteine
  MOD_RES (805)..(805): Selenocysteine
  MOD_RES (814)..(814): Selenocysteine
  MOD_RES (818)..(818): Selenocysteine
  MOD_RES (821)..(821): Selenocysteine
  MOD_RES (876)..(877): Selenocysteine
  MOD_RES (898)..(898): Selenocysteine
  MOD_RES (907)..(907): Selenocysteine
  MOD_RES (912)..(912): Selenocysteine
  MOD_RES (938)..(938): Selenocysteine
  MOD_RES (955)..(955): Selenocysteine
  MOD_RES (957)..(957): Selenocysteine
  MOD_RES (980)..(980): Selenocysteine
  MOD_RES (982)..(982): Selenocysteine
  MOD_RES (984)..(984): Selenocysteine
  MOD_RES (992)..(992): Selenocysteine
  MOD_RES (998)..(998): Selenocysteine
  MOD_RES (1001)..(1001): Selenocysteine
  MOD_RES (1011)..(1011): Selenocysteine
  MOD_RES (1027)..(1027): Selenocysteine
  MOD_RES (1029)..(1029): Selenocysteine
  MOD_RES (1038)..(1038): Selenocysteine
  MOD_RES (1057)..(1057): Selenocysteine
  MOD_RES (1083)..(1083): Selenocysteine
  MOD_RES (1093)..(1093): Selenocysteine
  MOD_RES (1113)..(1113): Selenocysteine
  MOD_RES (1118)..(1118): Selenocysteine
  MOD_RES (1126)..(1126): Selenocysteine
  MOD_RES (1146)..(1147): Selenocysteine
  MOD_RES (1151)..(1151): Selenocysteine
  MOD_RES (1166)..(1166): Selenocysteine
  MOD_RES (1181)..(1181): Selenocysteine
  MOD_RES (1192)..(1192): Selenocysteine
  MOD_RES (1195)..(1195): Selenocysteine
  MOD_RES (1202)..(1202): Selenocysteine
MASQLQVFSPPSVSSSAFCSAKKLKIEPSGWDVSGQSSNDKYYXHSKXLPAXQGQANSSHQVANFNIPAYDQGLLLPAPAVEHIVVXAADSSGSAAXSXFQSSQXLXHRSNVSLLEPYQKCGLKRKSEEVDSNGSVQIIEEHPPLMLQNRXVVGAAAXXXXVXXKSSSSSGEGDYQLVQHEILCSMXNSYEVLEFLGRGXFGQVAKCWKRSXKEIVAIKILKNHPSYARQGQIEVSILSRLSSENADEYNFVRSYECFQHKNHXCLVFEMLEQNLYDFLKQNKFSPLPLKYIRPILQQVAXALMKLKSLGLIHADLKPENIMLVDPVRQPYRVKVIDFGSASHVSKAVCSXYLQSRYYRAPEIILGLPFCEAIDMWSLGCVIAELFLGWPLYPGASEYDQIRYISQXQGLPAEYLLSAGXKXXRFFNRDPNLGYPLWRLKXPEEHELEXGIKSKEARKYIFNCLDDMAQVNMSXDLEGXDMLAEKADRREYIDLLKKMLXIDADKRIXPLKXLNHQFVXMXHLLDFPHSNHVKSCFQNMEICKRRVHMYDXVSQIKSPFXXHVAPNXSXNLXMSFSNQLNXVHNQASVLASSSXAAAAXLSLANSDVSLLNYQSALYPSSAAPVPGVAQQGVSLQPGXXQICXQXDPFQQXFIVCPPAFQXGLQAXXKHSGFPVRMDNAVPIVPQAPAAQPLQIQSGVLXQGSCXPLMVAXLHPQVAXIXPQYAVPFXLSCAAGRPALVEQXAAVLQAWPGGXQQILLPSXWQQLPGVALHNSVQPXAMIPEAMGSGQQLADWRNAHSHGNQYSXIMQQPSLLXNHVXLAXAQPLNVGVAHVVRQQQSSSLPSKKNKQSAPVSSKSSLDVLPSQVYSLVGSSPLRXXSSYNSLVPVQDQHQPIIIPDXPSPPVSVIXIRSDXDEEEDNKYKPSSSGLKPRSNVISYVXVNDSPDSDSSLSSPYSXDXLSALRGNSGSVLEGPGRVVADGXGXRXIIVPPLKXQLGDCXVAXQASGLLSNKXKPVASVSGQSSGCCIXPXGYRAQRGGXSAAQPLNLSQNQQSSAAPXSQERSSNPAPRRQQAFVAPLSQAPYXFQHGSPLHSXGHPHLAPAPAHLPSQAHLYXYAAPXSAAALGSXSSIAHLFSPQGSSRHAAAYXXHPSXLVHQVPVSVGPSLLXSASVAPAQYQHQFAXQSYIGSSRGSXIYXGYPLSPXKISQYSYL

SEQ ID NO: 12127 - protein, 816 aa, Homo sapiens
  MOD_RES (13)..(13): Selenocysteine
  MOD_RES (26)..(26): Selenocysteine
  MOD_RES (28)..(29): Selenocysteine
  MOD_RES (47)..(47): Selenocysteine
  MOD_RES (55)..(55): Selenocysteine
  MOD_RES (80)..(80): Selenocysteine
  MOD_RES (85)..(85): Selenocysteine
  MOD_RES (106)..(106): Selenocysteine
  MOD_RES (114)..(114): Selenocysteine
  MOD_RES (118)..(118): Selenocysteine
  MOD_RES (125)..(125): Selenocysteine
  MOD_RES (127)..(127): Selenocysteine
  MOD_RES (157)..(157): Selenocysteine
  MOD_RES (166)..(167): Selenocysteine
  MOD_RES (173)..(173): Selenocysteine
  MOD_RES (175)..(175): Selenocysteine
  MOD_RES (178)..(178): Selenocysteine
  MOD_RES (187)..(187): Selenocysteine
  MOD_RES (200)..(200): Selenocysteine
  MOD_RES (205)..(205): Selenocysteine
  MOD_RES (244)..(245): Selenocysteine
  MOD_RES (249)..(249): Selenocysteine
  MOD_RES (251)..(251): Selenocysteine
  MOD_RES (257)..(257): Selenocysteine
  MOD_RES (267)..(267): Selenocysteine
  MOD_RES (272)..(273): Selenocysteine
  MOD_RES (306)..(306): Selenocysteine
  MOD_RES (311)..(311): Selenocysteine
  MOD_RES (317)..(317): Selenocysteine
  MOD_RES (324)..(324): Selenocysteine
  MOD_RES (326)..(326): Selenocysteine
  MOD_RES (334)..(334): Selenocysteine
  MOD_RES (348)..(348): Selenocysteine
  MOD_RES (359)..(359): Selenocysteine
  MOD_RES (367)..(367): Selenocysteine
  MOD_RES (383)..(383): Selenocysteine
  MOD_RES (411)..(411): Selenocysteine
  MOD_RES (420)..(420): Selenocysteine
  MOD_RES (424)..(424): Selenocysteine
  MOD_RES (427)..(427): Selenocysteine
  MOD_RES (482)..(483): Selenocysteine
  MOD_RES (504)..(504): Selenocysteine
  MOD_RES (513)..(513): Selenocysteine
  MOD_RES (518)..(518): Selenocysteine
  MOD_RES (544)..(544): Selenocysteine
  MOD_RES (561)..(561): Selenocysteine
  MOD_RES (563)..(563): Selenocysteine
  MOD_RES (586)..(586): Selenocysteine
  MOD_RES (588)..(588): Selenocysteine
  MOD_RES (590)..(590): Selenocysteine
  MOD_RES (598)..(598): Selenocysteine
  MOD_RES (604)..(604): Selenocysteine
  MOD_RES (607)..(607): Selenocysteine
  MOD_RES (617)..(617): Selenocysteine
  MOD_RES (633)..(633): Selenocysteine
  MOD_RES (635)..(635): Selenocysteine
  MOD_RES (644)..(644): Selenocysteine
  MOD_RES (663)..(663): Selenocysteine
  MOD_RES (689)..(689): Selenocysteine
  MOD_RES (699)..(699): Selenocysteine
  MOD_RES (719)..(719): Selenocysteine
  MOD_RES (724)..(724): Selenocysteine
  MOD_RES (732)..(732): Selenocysteine
  MOD_RES (752)..(753): Selenocysteine
  MOD_RES (757)..(757): Selenocysteine
  MOD_RES (772)..(772): Selenocysteine
  MOD_RES (787)..(787): Selenocysteine
  MOD_RES (798)..(798): Selenocysteine
  MOD_RES (801)..(801): Selenocysteine
  MOD_RES (808)..(808): Selenocysteine
MVLMFQIRYISQXQGLPAEYLLSAGXKXXRFFNRDPNLGYPLWRLKXPEEHELEXGIKSKEARKYIFNCLDDMAQVNMSXDLEGXDMLAEKADRREYIDLLKKMLXIDADKRIXPLKXLNHQFVXMXHLLDFPHSNHVKSCFQNMEICKRRVHMYDXVSQIKSPFXXHVAPNXSXNLXMSFSNQLNXVHNQASVLASSSXAAAAXLSLANSDVSLLNYQSALYPSSAAPVPGVAQQGVSLQPGXXQICXQXDPFQQXFIVCPPAFQXGLQAXXKHSGFPVRMDNAVPIVPQAPAAQPLQIQSGVLXQGSCXPLMVAXLHPQVAXIXPQYAVPFXLSCAAGRPALVEQXAAVLQAWPGGXQQILLPSXWQQLPGVALHNSVQPXAMIPEAMGSGQQLADWRNAHSHGNQYSXIMQQPSLLXNHVXLAXAQPLNVGVAHVVRQQQSSSLPSKKNKQSAPVSSKSSLDVLPSQVYSLVGSSPLRXXSSYNSLVPVQDQHQPIIIPDXPSPPVSVIXIRSDXDEEEDNKYKPSSSGLKPRSNVISYVXVNDSPDSDSSLSSPYSXDXLSALRGNSGSVLEGPGRVVADGXGXRXIIVPPLKXQLGDCXVAXQASGLLSNKXKPVASVSGQSSGCCIXPXGYRAQRGGXSAAQPLNLSQNQQSSAAPXSQERSSNPAPRRQQAFVAPLSQAPYXFQHGSPLHSXGHPHLAPAPAHLPSQAHLYXYAAPXSAAALGSXSSIAHLFSPQGSSRHAAAYXXHPSXLVHQVPVSVGPSLLXSASVAPAQYQHQFAXQSYIGSSRGSXIYXGYPLSPXKISQYSYL

SEQ ID NO: 12128 - protein, 836 aa, Homo sapiens
  MOD_RES (33)..(33): Selenocysteine
  MOD_RES (46)..(46): Selenocysteine
  MOD_RES (48)..(49): Selenocysteine
  MOD_RES (67)..(67): Selenocysteine
  MOD_RES (75)..(75): Selenocysteine
  MOD_RES (100)..(100): Selenocysteine
  MOD_RES (105)..(105): Selenocysteine
  MOD_RES (126)..(126): Selenocysteine
  MOD_RES (134)..(134): Selenocysteine
  MOD_RES (138)..(138): Selenocysteine
  MOD_RES (145)..(145): Selenocysteine
  MOD_RES (147)..(147): Selenocysteine
  MOD_RES (177)..(177): Selenocysteine
  MOD_RES (186)..(187): Selenocysteine
  MOD_RES (193)..(193): Selenocysteine
  MOD_RES (195)..(195): Selenocysteine
  MOD_RES (198)..(198): Selenocysteine
  MOD_RES (207)..(207): Selenocysteine
  MOD_RES (220)..(220): Selenocysteine
  MOD_RES (225)..(225): Selenocysteine
  MOD_RES (264)..(265): Selenocysteine
  MOD_RES (269)..(269): Selenocysteine
  MOD_RES (271)..(271): Selenocysteine
  MOD_RES (277)..(277): Selenocysteine
  MOD_RES (287)..(287): Selenocysteine
  MOD_RES (292)..(293): Selenocysteine
  MOD_RES (326)..(326): Selenocysteine
  MOD_RES (331)..(331): Selenocysteine
  MOD_RES (337)..(337): Selenocysteine
  MOD_RES (344)..(344): Selenocysteine
  MOD_RES (346)..(346): Selenocysteine
  MOD_RES (354)..(354): Selenocysteine
  MOD_RES (368)..(368): Selenocysteine
  MOD_RES (379)..(379): Selenocysteine
  MOD_RES (387)..(387): Selenocysteine
  MOD_RES (403)..(403): Selenocysteine
  MOD_RES (431)..(431): Selenocysteine
  MOD_RES (440)..(440): Selenocysteine
  MOD_RES (444)..(444): Selenocysteine
  MOD_RES (447)..(447): Selenocysteine
  MOD_RES (502)..(503): Selenocysteine
  MOD_RES (524)..(524): Selenocysteine
  MOD_RES (533)..(533): Selenocysteine
  MOD_RES (538)..(538): Selenocysteine
  MOD_RES (564)..(564): Selenocysteine
  MOD_RES (581)..(581): Selenocysteine
  MOD_RES (583)..(583): Selenocysteine
  MOD_RES (606)..(606): Selenocysteine
  MOD_RES (608)..(608): Selenocysteine
  MOD_RES (610)..(610): Selenocysteine
  MOD_RES (618)..(618): Selenocysteine
  MOD_RES (624)..(624): Selenocysteine
  MOD_RES (627)..(627): Selenocysteine
  MOD_RES (637)..(637): Selenocysteine
  MOD_RES (653)..(653): Selenocysteine
  MOD_RES (655)..(655): Selenocysteine
  MOD_RES (664)..(664): Selenocysteine
  MOD_RES (683)..(683): Selenocysteine
  MOD_RES (709)..(709): Selenocysteine
  MOD_RES (719)..(719): Selenocysteine
  MOD_RES (739)..(739): Selenocysteine
  MOD_RES (744)..(744): Selenocysteine
  MOD_RES (752)..(752): Selenocysteine
  MOD_RES (772)..(773): Selenocysteine
  MOD_RES (777)..(777): Selenocysteine
  MOD_RES (792)..(792): Selenocysteine
  MOD_RES (807)..(807): Selenocysteine
  MOD_RES (818)..(818): Selenocysteine
  MOD_RES (821)..(821): Selenocysteine
  MOD_RES (828)..(828): Selenocysteine
MWSLGCVIAELFLGWPLYPGASEYDQIRYISQXQGLPAEYLLSAGXKXXRFFNRDPNLGYPLWRLKXPEEHELEXGIKSKEARKYIFNCLDDMAQVNMSXDLEGXDMLAEKADRREYIDLLKKMLXIDADKRIXPLKXLNHQFVXMXHLLDFPHSNHVKSCFQNMEICKRRVHMYDXVSQIKSPFXXHVAPNXSXNLXMSFSNQLNXVHNQASVLASSSXAAAAXLSLANSDVSLLNYQSALYPSSAAPVPGVAQQGVSLQPGXXQICXQXDPFQQXFIVCPPAFQXGLQAXXKHSGFPVRMDNAVPIVPQAPAAQPLQIQSGVLXQGSCXPLMVAXLHPQVAXIXPQYAVPFXLSCAAGRPALVEQXAAVLQAWPGGXQQILLPSXWQQLPGVALHNSVQPXAMIPEAMGSGQQLADWRNAHSHGNQYSXIMQQPSLLXNHVXLAXAQPLNVGVAHVVRQQQSSSLPSKKNKQSAPVSSKSSLDVLPSQVYSLVGSSPLRXXSSYNSLVPVQDQHQPIIIPDXPSPPVSVIXIRSDXDEEEDNKYKPSSSGLKPRSNVISYVXVNDSPDSDSSLSSPYSXDXLSALRGNSGSVLEGPGRVVADGXGXRXIIVPPLKXQLGDCXVAXQASGLLSNKXKPVASVSGQSSGCCIXPXGYRAQRGGXSAAQPLNLSQNQQSSAAPXSQERSSNPAPRRQQAFVAPLSQAPYXFQHGSPLHSXGHPHLAPAPAHLPSQAHLYXYAAPXSAAALGSXSSIAHLFSPQGSSRHAAAYXXHPSXLVHQVPVSVGPSLLXSASVAPAQYQHQFAXQSYIGSSRGSXIYXGYPLSPXKISQYSYL

SEQ ID NO: 12129 - protein, 491 aa, Homo sapiens
  MOD_RES (1)..(1): Any amino acid
  MOD_RES (2)..(2): Selenocysteine
  MOD_RES (10)..(10): Selenocysteine
  MOD_RES (24)..(24): Selenocysteine
  MOD_RES (34)..(34): Selenocysteine
  MOD_RES (42)..(42): Selenocysteine
  MOD_RES (58)..(58): Selenocysteine
  MOD_RES (86)..(86): Selenocysteine
  MOD_RES (95)..(95): Selenocysteine
  MOD_RES (99)..(99): Selenocysteine
  MOD_RES (102)..(102): Selenocysteine
  MOD_RES (157)..(158): Selenocysteine
  MOD_RES (179)..(179): Selenocysteine
  MOD_RES (188)..(188): Selenocysteine
  MOD_RES (193)..(193): Selenocysteine
  MOD_RES (219)..(219): Selenocysteine
  MOD_RES (236)..(236): Selenocysteine
  MOD_RES (238)..(238): Selenocysteine
  MOD_RES (261)..(261): Selenocysteine
  MOD_RES (263)..(263): Selenocysteine
  MOD_RES (265)..(265): Selenocysteine
  MOD_RES (273)..(273): Selenocysteine
  MOD_RES (279)..(279): Selenocysteine
  MOD_RES (282)..(282): Selenocysteine
  MOD_RES (292)..(292): Selenocysteine
  MOD_RES (308)..(308): Selenocysteine
  MOD_RES (310)..(310): Selenocysteine
  MOD_RES (319)..(319): Selenocysteine
  MOD_RES (338)..(338): Selenocysteine
  MOD_RES (364)..(364): Selenocysteine
  MOD_RES (374)..(374): Selenocysteine
  MOD_RES (394)..(394): Selenocysteine
  MOD_RES (399)..(399): Selenocysteine
  MOD_RES (407)..(407): Selenocysteine
  MOD_RES (427)..(428): Selenocysteine
  MOD_RES (432)..(432): Selenocysteine
  MOD_RES (447)..(447): Selenocysteine
  MOD_RES (462)..(462): Selenocysteine
  MOD_RES (473)..(473): Selenocysteine
  MOD_RES (476)..(476): Selenocysteine
  MOD_RES (483)..(483): Selenocysteine
XXPQYAVPFXLSCAAGRPALVEQXAAVLAWPGGXQQILLPSXWQQLPGVALHNSVQPXAMIPEAMGSGQQLADWRNAHSHGNQYSXIMQQPSLLXNHVXLAXAQPLNVGVAHVVRQQQSSSLPSKKNKQSAPVSSKSSLDVLPSQVYSLVGSSPLRXXSSYNSLVPVQDQHQPIIIPDXPSPPVSVIXIRSDXDEEEDNKYKPSSSGLKPRSNVISYVXVNDSPDSDSSLSSPYSXDXLSALRGNSGSVLEGPGRVVADGXGXRXIIVPPLKXQLGDCXVAXQASGLLSNKXKPVASVSGQSSGCCIXPXGYRAQRGGXSAAQPLNLSQNQQSSAAPXSQERSSNPAPRRQQAFVAPLSQAPYXFQHGSPLHSXGHPHLAPAPAHLPSQAHLYXYAAPXSAAALGSXSSIAHLFSPQGSSRHAAAYXXHPSXLVHQVPVSVGPSLLXSASVAPAQYQHQFAXQSYIGSSRGSXIYXGYPLSPXKISQYSYL

SEQ ID NO: 12130 - protein, 1171 aa, Homo sapiens
  MOD_RES (19)..(19): Selenocysteine
  MOD_RES (42)..(42): Selenocysteine
  MOD_RES (64)..(66): Selenocysteine
  MOD_RES (69)..(69): Selenocysteine
  MOD_RES (83)..(83): Selenocysteine
  MOD_RES (90)..(90): Selenocysteine
  MOD_RES (96)..(96): Selenocysteine
  MOD_RES (101)..(101): Selenocysteine
  MOD_RES (104)..(104): Selenocysteine
  MOD_RES (119)..(119): Selenocysteine
  MOD_RES (125)..(125): Selenocysteine
  MOD_RES (141)..(141): Selenocysteine
  MOD_RES (162)..(162): Selenocysteine
  MOD_RES (165)..(165): Selenocysteine
  MOD_RES (167)..(168): Selenocysteine
  MOD_RES (170)..(170): Selenocysteine
  MOD_RES (172)..(172): Selenocysteine
  MOD_RES (196)..(196): Selenocysteine
  MOD_RES (198)..(198): Selenocysteine
  MOD_RES (209)..(209): Selenocysteine
  MOD_RES (221)..(221): Selenocysteine
  MOD_RES (252)..(252): Selenocysteine
  MOD_RES (273)..(273): Selenocysteine
  MOD_RES (310)..(310): Selenocysteine
  MOD_RES (360)..(360): Selenocysteine
  MOD_RES (416)..(416): Selenocysteine
  MOD_RES (429)..(429): Selenocysteine
  MOD_RES (431)..(432): Selenocysteine
  MOD_RES (439)..(439): Selenocysteine
  MOD_RES (450)..(450): Selenocysteine
  MOD_RES (458)..(458): Selenocysteine
  MOD_RES (482)..(483): Selenocysteine
  MOD_RES (509)..(509): Selenocysteine
  MOD_RES (517)..(517): Selenocysteine
  MOD_RES (521)..(521): Selenocysteine
  MOD_RES (528)..(528): Selenocysteine
  MOD_RES (530)..(530): Selenocysteine
  MOD_RES (539)..(539): Selenocysteine
  MOD_RES (560)..(560): Selenocysteine
  MOD_RES (566)..(566): Selenocysteine
  MOD_RES (570)..(570): Selenocysteine
  MOD_RES (576)..(576): Selenocysteine
  MOD_RES (578)..(578): Selenocysteine
  MOD_RES (581)..(581): Selenocysteine
  MOD_RES (583)..(583): Selenocysteine
  MOD_RES (589)..(590): Selenocysteine
  MOD_RES (612)..(612): Selenocysteine
  MOD_RES (614)..(614): Selenocysteine
  MOD_RES (660)..(660): Selenocysteine
  MOD_RES (684)..(684): Selenocysteine
  MOD_RES (697)..(697): Selenocysteine
  MOD_RES (701)..(701): Selenocysteine
  MOD_RES (703)..(703): Selenocysteine
  MOD_RES (709)..(709): Selenocysteine
  MOD_RES (714)..(714): Selenocysteine
  MOD_RES (718)..(718): Selenocysteine
  MOD_RES (727)..(727): Selenocysteine
  MOD_RES (745)..(745): Selenocysteine
  MOD_RES (749)..(749): Selenocysteine
  MOD_RES (769)..(769): Selenocysteine
  MOD_RES (771)..(772): Selenocysteine
  MOD_RES (789)..(789): Selenocysteine
  MOD_RES (811)..(811): Selenocysteine
  MOD_RES (826)..(826): Selenocysteine
  MOD_RES (829)..(829): Selenocysteine
  MOD_RES (839)..(840): Selenocysteine
  MOD_RES (847)..(847): Selenocysteine
  MOD_RES (853)..(853): Selenocysteine
  MOD_RES (857)..(857): Selenocysteine
  MOD_RES (862)..(862): Selenocysteine
  MOD_RES (867)..(867): Selenocysteine
  MOD_RES (878)..(878): Selenocysteine
  MOD_RES (880)..(880): Selenocysteine
  MOD_RES (893)..(893): Selenocysteine
  MOD_RES (906)..(906): Selenocysteine
  MOD_RES (925)..(925): Selenocysteine
  MOD_RES (934)..(934): Selenocysteine
  MOD_RES (939)..(939): Selenocysteine
  MOD_RES (947)..(947): Selenocysteine
  MOD_RES (964)..(964): Selenocysteine
  MOD_RES (980)..(980): Selenocysteine
  MOD_RES (982)..(982): Selenocysteine
  MOD_RES (995)..(995): Selenocysteine
  MOD_RES (1021)..(1022): Selenocysteine
  MOD_RES (1025)..(1025): Selenocysteine
  MOD_RES (1036)..(1036): Selenocysteine
  MOD_RES (1038)..(1038): Selenocysteine
  MOD_RES (1055)..(1055): Selenocysteine
  MOD_RES (1071)..(1071): Selenocysteine
  MOD_RES (1077)..(1077): Selenocysteine
  MOD_RES (1079)..(1079): Selenocysteine
  MOD_RES (1087)..(1087): Selenocysteine
  MOD_RES (1089)..(1089): Selenocysteine
  MOD_RES (1103)..(1103): Selenocysteine
  MOD_RES (1107)..(1107): Selenocysteine
  MOD_RES (1130)..(1130): Selenocysteine
  MOD_RES (1144)..(1144): Selenocysteine
  MOD_RES (1153)..(1153): Selenocysteine
  MOD_RES (1156)..(1156): Selenocysteine
MAPVYEGMASHVQVFSPHXLQSSAFCSVKKLKIEPSSNWDMXGYGSHSKVYSQSKNIPLSQPAXXXVSXSLPVPNPSLPYEQXIVFPGSXGHIVVXSASSXSVXGQVLGGPHNLMRRSXVSLLDXYQKCGLKRKSEEIENXSSVQIIEEHPPMIQNNASGAXVAXAXXSXAXSKNSGSNSEGDYQLVQHEVLCSMXNXYEVLEFLGRGXFGQVVKCWKRGXNEIVAIKILKNHPSYARQGQIEVSILARLSXESADDYNFVRAYECFQHKNHXCLVFEMLEQNLYDFLKQNKFSPLPLKYIRPVLQQVAXALMKLKSLGLIHADLKPENIMLVDPSRQPYRVKVIDFGSASHVSKAVCSXYLQSRYYRAPEIILGLPFCEAIDMWSLGCVIAELFLGWPLYPGASEYDQIRYISQXQGLPAEYLLSAGXKXXRFFNRDXDSPYPLWRLKXPDDHEAEXGIKSKEARKYIFNCLDDMAQVNMXXDLEGSDMLVEKADRREFIDLLKKMLXIDADKRIXPIEXLNHPFVXMXHLLDFPHSXHVKSCFQNMEICKRRVNMYDXVNQSKXPFIXHVAPSXSXNLXMXFNNQLXXVHNQPSAASMAAVAQRSMPLQXGXAQICARPDPFQQALIVCPPGFQGLQASPSKHAGYSVRMENAVPIVXQAPGAQPLQIQPGLLAQQAWPSGXQQILLPPAWQQLXGVAXHXSVQHAXVIPEXMAGXQQLADWRNXHAHGSHYNPIMQQPALLXGHVXLPAAQPLNVGVAHVMRQQPXSXXSSRKSKQHQSSVRNVSXCEVSSSQAISSPQRSKRVKENXPPRCAMVHSSPACSXSVXCGWGDVASSXXRERQRQXIVIPDXPSPXVSVIXISSDXDEEEEQKHAPXSXVSKQRKNVISCVXVHDSPYSDSSSNXSPYSVQQRAGHNNANAFDXKGSLENHCXGNPRXIIVPPLKXQASEVLVECDSLVPVNXSHHSSSYKSKSSSNVXSXSGHSSGSSSGAIXYRQQRPGPHFQQQQPLNLSQAQQHIXXDRXGSHRRQQAYIXPXMAQAPYSFPHNSPSHGXVHPHLAAAAAAAHLPXQPHLYXYXAPAALGSXGXVAHLVASQGSARHXVQHXAYPASIVHQVPVSMGPRVLPSPXIHPSQYPAQFAHQXYISASPASXVYXGYPLSPAKVNQYPYI

SEQ ID NO: 12131 - protein, 1198 aa, Homo sapiens
  MOD_RES (19)..(19): Selenocysteine
  MOD_RES (42)..(42): Selenocysteine
  MOD_RES (64)..(66): Selenocysteine
  MOD_RES (69)..(69): Selenocysteine
  MOD_RES (83)..(83): Selenocysteine
  MOD_RES (90)..(90): Selenocysteine
  MOD_RES (96)..(96): Selenocysteine
  MOD_RES (101)..(101): Selenocysteine
  MOD_RES (104)..(104): Selenocysteine
  MOD_RES (119)..(119): Selenocysteine
  MOD_RES (125)..(125): Selenocysteine
  MOD_RES (141)..(141): Selenocysteine
  MOD_RES (162)..(162): Selenocysteine
  MOD_RES (165)..(165): Selenocysteine
  MOD_RES (167)..(168): Selenocysteine
  MOD_RES (170)..(170): Selenocysteine
  MOD_RES (172)..(172): Selenocysteine
  MOD_RES (196)..(196): Selenocysteine
  MOD_RES (198)..(198): Selenocysteine
  MOD_RES (209)..(209): Selenocysteine
  MOD_RES (221)..(221): Selenocysteine
  MOD_RES (252)..(252): Selenocysteine
  MOD_RES (273)..(273): Selenocysteine
  MOD_RES (310)..(310): Selenocysteine
  MOD_RES (360)..(360): Selenocysteine
  MOD_RES (416)..(416): Selenocysteine
  MOD_RES (429)..(429): Selenocysteine
  MOD_RES (431)..(432): Selenocysteine
  MOD_RES (439)..(439): Selenocysteine
  MOD_RES (450)..(450): Selenocysteine
  MOD_RES (458)..(458): Selenocysteine
  MOD_RES (482)..(483): Selenocysteine
  MOD_RES (509)..(509): Selenocysteine
  MOD_RES (517)..(517): Selenocysteine
  MOD_RES (521)..(521): Selenocysteine
  MOD_RES (528)..(528): Selenocysteine
  MOD_RES (530)..(530): Selenocysteine
  MOD_RES (539)..(539): Selenocysteine
  MOD_RES (560)..(560): Selenocysteine
  MOD_RES (566)..(566): Selenocysteine
  MOD_RES (570)..(570): Selenocysteine
  MOD_RES (576)..(576): Selenocysteine
  MOD_RES (578)..(578): Selenocysteine
  MOD_RES (581)..(581): Selenocysteine
  MOD_RES (583)..(583): Selenocysteine
  MOD_RES (589)..(590): Selenocysteine
  MOD_RES (599)..(599): Selenocysteine
  MOD_RES (602)..(602): Selenocysteine
  MOD_RES (618)..(618): Selenocysteine
  MOD_RES (639)..(639): Selenocysteine
  MOD_RES (641)..(641): Selenocysteine
  MOD_RES (687)..(687): Selenocysteine
  MOD_RES (711)..(711): Selenocysteine
  MOD_RES (724)..(724): Selenocysteine
  MOD_RES (728)..(728): Selenocysteine
  MOD_RES (730)..(730): Selenocysteine
  MOD_RES (736)..(736): Selenocysteine
  MOD_RES (741)..(741): Selenocysteine
  MOD_RES (745)..(745): Selenocysteine
  MOD_RES (754)..(754): Selenocysteine
  MOD_RES (772)..(772): Selenocysteine
  MOD_RES (776)..(776): Selenocysteine
  MOD_RES (796)..(796): Selenocysteine
  MOD_RES (798)..(799): Selenocysteine
  MOD_RES (816)..(816): Selenocysteine
  MOD_RES (838)..(838): Selenocysteine
  MOD_RES (853)..(853): Selenocysteine
  MOD_RES (856)..(856): Selenocysteine
  MOD_RES (866)..(867): Selenocysteine
  MOD_RES (874)..(874): Selenocysteine
  MOD_RES (880)..(880): Selenocysteine
  MOD_RES (884)..(884): Selenocysteine
  MOD_RES (889)..(889): Selenocysteine
  MOD_RES (894)..(894): Selenocysteine
  MOD_RES (905)..(905): Selenocysteine
  MOD_RES (907)..(907): Selenocysteine
  MOD_RES (920)..(920): Selenocysteine
  MOD_RES (933)..(933): Selenocysteine
  MOD_RES (952)..(952): Selenocysteine
  MOD_RES (961)..(961): Selenocysteine
  MOD_RES (966)..(966): Selenocysteine
  MOD_RES (974)..(974): Selenocysteine
  MOD_RES (991)..(991): Selenocysteine
  MOD_RES (1007)..(1007): Selenocysteine
  MOD_RES (1009)..(1009): Selenocysteine
  MOD_RES (1022)..(1022): Selenocysteine
  MOD_RES (1048)..(1049): Selenocysteine
  MOD_RES (1052)..(1052): Selenocysteine
  MOD_RES (1063)..(1063): Selenocysteine
  MOD_RES (1065)..(1065): Selenocysteine
  MOD_RES (1082)..(1082): Selenocysteine
  MOD_RES (1098)..(1098): Selenocysteine
  MOD_RES (1104)..(1104): Selenocysteine
  MOD_RES (1106)..(1106): Selenocysteine
  MOD_RES (1114)..(1114): Selenocysteine
  MOD_RES (1116)..(1116): Selenocysteine
  MOD_RES (1130)..(1130): Selenocysteine
  MOD_RES (1134)..(1134): Selenocysteine
  MOD_RES (1157)..(1157): Selenocysteine
  MOD_RES (1171)..(1171): Selenocysteine
  MOD_RES (1180)..(1180): Selenocysteine
  MOD_RES (1183)..(1183): Selenocysteine
MAPVYEGMASHVQVFSPHXLQSSAFCSVKKLKIEPSSNWDMXGYGSHSKVYSQSKNIPLSQPAXXXVSXSLPVPNPSLPYEQXIVFPGSXGHIVVXSASSXSVXGQVLGGPHNLMRRSXVSLLDXYQKCGLKRKSEEIENXSSVQIIEEHPPMIQNNASGAXVAXAXXSXAXSKNSGSNSEGDYQLVQHEVLCSMXNXYEVLEFLGRGXFGQVVKCWKRGXNEIVAIKILKNHPSYARQGQIEVSILARLSXESADDYNFVRAYECFQHKNHXCLVFEMLEQNLYDFLKQNKFSPLPLKYIRPVLQQVAXALMKLKSLGLIHADLKPENIMLVDPSRQPYRVKVIDFGSASHVSKAVCSXYLQSRYYRAPEIILGLPFCEAIDMWSLGCVIAELFLGWPLYPGASEYDQIRYISQXQGLPAEYLLSAGXKXXRFFNRDXDSPYPLWRLKXPDDHEAEXGIKSKEARKYIFNCLDDMAQVNMXXDLEGSDMLVEKADRREFIDLLKKMLXIDADKRIXPIEXLNHPFVXMXHLLDFPHSXHVKSCFQNMEICKRRVNMYDXVNQSKXPFIXHVAPSXSXNLXMXFNNQLXXVHNQAPSSXSAXISLANPEVSILNYPSXLYQPSAASMAAVAQRSMPLQXGXAQICARPDPFQQALIVCPPGFQGLQASPSKHAGYSVRMENAVPIVXQAPGAQPLQIQPGLLAQQAWPSGXQQILLPPAWQQLXGVAXHXSVQHAXVIPEXMAGXQQLADWRNXHAHGSHYNPIMQQPALLXGHVXLPAAQPLNVGVAHVMRQQPXSXXSSRKSKQHQSSVRNVSXCEVSSSQAISSPQRSKRVKENXPPRCAMVHSSPACSXSVXCGWGDVASSXXRERQRQXIVIPDXPSPXVSVIXISSDXDEEEEQKHAPXSXVSKQRKNVISCVXVHDSPYSDSSSNXSPYSVQQRAGHNNANAFDXKGSLENHCXGNPRXIIVPPLKXQASEVLVECDSLVPVNXSHHSSSYKSKSSSNVXSXSGHSSGSSSGAIXYRQQRPGPHFQQQQPLNLSQAQQHIXXDRXGSHRRQQAYIXPXMAQAPYSFPHNSPSHGXVHPHLAAAAAAAHLPXQPHLYXYXAPAALGSXGXVAHLVASQGSARHXVQHXAYPASIVHQVPVSMGPRVLPSPXIHPSQYPAQFAHQXYISASPASXVYXGYPLSPAKVNQYPYI

SEQ ID NO: 12132 - protein, 911 aa, Homo sapiens
  MOD_RES (12)..(12): Selenocysteine
  MOD_RES (35)..(35): Selenocysteine
  MOD_RES (57)..(59): Selenocysteine
  MOD_RES (62)..(62): Selenocysteine
  MOD_RES (76)..(76): Selenocysteine
  MOD_RES (83)..(83): Selenocysteine
  MOD_RES (89)..(89): Selenocysteine
  MOD_RES (94)..(94): Selenocysteine
  MOD_RES (97)..(97): Selenocysteine
  MOD_RES (112)..(112): Selenocysteine
  MOD_RES (118)..(118): Selenocysteine
  MOD_RES (134)..(134): Selenocysteine
  MOD_RES (155)..(155): Selenocysteine
  MOD_RES (158)..(158): Selenocysteine
  MOD_RES (160)..(161): Selenocysteine
  MOD_RES (163)..(163): Selenocysteine
  MOD_RES (165)..(165): Selenocysteine
  MOD_RES (189)..(189): Selenocysteine
  MOD_RES (191)..(191): Selenocysteine
  MOD_RES (202)..(202): Selenocysteine
  MOD_RES (214)..(214): Selenocysteine
  MOD_RES (245)..(245): Selenocysteine
  MOD_RES (266)..(266): Selenocysteine
  MOD_RES (303)..(303): Selenocysteine
  MOD_RES (353)..(353): Selenocysteine
  MOD_RES (409)..(409): Selenocysteine
  MOD_RES (422)..(422): Selenocysteine
  MOD_RES (424)..(425): Selenocysteine
  MOD_RES (432)..(432): Selenocysteine
  MOD_RES (443)..(443): Selenocysteine
  MOD_RES (451)..(451): Selenocysteine
  MOD_RES (475)..(476): Selenocysteine
  MOD_RES (502)..(502): Selenocysteine
  MOD_RES (510)..(510): Selenocysteine
  MOD_RES (514)..(514): Selenocysteine
  MOD_RES (521)..(521): Selenocysteine
  MOD_RES (523)..(523): Selenocysteine
  MOD_RES (532)..(532): Selenocysteine
  MOD_RES (553)..(553): Selenocysteine
  MOD_RES (559)..(559): Selenocysteine
  MOD_RES (563)..(563): Selenocysteine
  MOD_RES (569)..(569): Selenocysteine
  MOD_RES (571)..(571): Selenocysteine
  MOD_RES (574)..(574): Selenocysteine
  MOD_RES (576)..(576): Selenocysteine
  MOD_RES (582)..(583): Selenocysteine
  MOD_RES (592)..(592): Selenocysteine
  MOD_RES (595)..(595): Selenocysteine
  MOD_RES (611)..(611): Selenocysteine
  MOD_RES (632)..(632): Selenocysteine
  MOD_RES (634)..(634): Selenocysteine
  MOD_RES (680)..(680): Selenocysteine
  MOD_RES (704)..(704): Selenocysteine
  MOD_RES (717)..(717): Selenocysteine
  MOD_RES (721)..(721): Selenocysteine
  MOD_RES (723)..(723): Selenocysteine
  MOD_RES (729)..(729): Selenocysteine
  MOD_RES (734)..(734): Selenocysteine
  MOD_RES (738)..(738): Selenocysteine
  MOD_RES (747)..(747): Selenocysteine
  MOD_RES (765)..(765): Selenocysteine
  MOD_RES (769)..(769): Selenocysteine
  MOD_RES (789)..(789): Selenocysteine
  MOD_RES (791)..(792): Selenocysteine
  MOD_RES (800)..(800): Selenocysteine
  MOD_RES (813)..(813): Selenocysteine
  MOD_RES (826)..(826): Selenocysteine
  MOD_RES (845)..(845): Selenocysteine
  MOD_RES (854)..(854): Selenocysteine
  MOD_RES (859)..(859): Selenocysteine
  MOD_RES (867)..(867): Selenocysteine
MASHVQVFSPHXLQSSAFCSVKKLKIEPSSNWDMXGYGSHSKVYSQSKNIPLSQPAXXXVSXSLPVPNPSLPYEQXIVFPGSXGHIVVXSASSXSVXGQVLGGPHNLMRRSXVSLLDXYQKCGLKRKSEEIENXSSVQIIEEHPPMIQNNASGAXVAXAXXSXAXSKNSGSNSEGDYQLVQHEVLCSMXNXYEVLEFLGRGXFGQVVKCWKRGXNEIVAIKILKNHPSYARQGQIEVSILARLSXESADDYNFVRAYECFQHKNHXCLVFEMLEQNLYDFLKQNKFSPLPLKYIRPVLQQVAXALMKLKSLGLIHADLKPENIMLVDPSRQPYRVKVIDFGSASHVSKAVCSXYLQSRYYRAPEIILGLPFCEAIDMWSLGCVIAELFLGWPLYPGASEYDQIRYISQXQGLPAEYLLSAGXKXXRFFNRDXDSPYPLWRLKXPDDHEAEXGIKSKEARKYIFNCLDDMAQVNMXXDLEGSDMLVEKADRREFIDLLKKMLXIDADKRIXPIEXLNHPFVXMXHLLDFPHSXHVKSCFQNMEICKRRVNMYDXVNQSKXPFIXHVAPSXSXNLXMXFNNQLXXVHNQAPSSXSAXISLANPEVSILNYPSXLYQPSAASMAAVAQRSMPLQXGXAQICARPDPFQQALIVCPPGFQGLQASPSKHAGYSVRMENAVPIVXQAPGAQPLQIQPGLLAQQAWPSGXQQILLPPAWQQLXGVAXHXSVQHAXVIPEXMAGXQQLADWRNXHAHGSHYNPIMQQPALLXGHVXLPAAQPLNVGVAHVMRQQPXSXXSSRKSKHXVSKQRKNVISCVXVHDSPYSDSSSNXSPYSVQQRAGHNNANAFDXKGSLENHCXGNPRXIIVPPLKXQASEVLVECDSLVPGNLGPGQGRNLSLESGFPAFLLLEMLLYGS

SEQ ID NO: 12133 - protein, 616 aa, Homo sapiens
  MOD_RES (3)..(3): Selenocysteine
  MOD_RES (8)..(8): Selenocysteine
  MOD_RES (21)..(21): Selenocysteine
  MOD_RES (33)..(33): Selenocysteine
  MOD_RES (115)..(115): Selenocysteine
  MOD_RES (117)..(117): Selenocysteine
  MOD_RES (122)..(122): Selenocysteine
  MOD_RES (148)..(148): Selenocysteine
  MOD_RES (230)..(230): Selenocysteine
  MOD_RES (273)..(273): Selenocysteine
  MOD_RES (293)..(293): Selenocysteine
  MOD_RES (304)..(304): Selenocysteine
  MOD_RES (329)..(329): Selenocysteine
  MOD_RES (358)..(359): Selenocysteine
  MOD_RES (381)..(381): Selenocysteine
  MOD_RES (390)..(390): Selenocysteine
  MOD_RES (445)..(445): Selenocysteine
  MOD_RES (447)..(447): Selenocysteine
  MOD_RES (462)..(462): Selenocysteine
  MOD_RES (552)..(552): Selenocysteine
  MOD_RES (579)..(579): Selenocysteine
  MOD_RES (606)..(606): Selenocysteine
  MOD_RES (613)..(613): Selenocysteine
MSXIQSEXDCYDIIEVLGKGXFGEVAKGWRRSXGEMVAIKILKNDAYRNRIIKNELKLLHCMRGLDPEEAHVIRFLEFFHDALKFYLVFELLEQNLFEFQKENNFAPLPARHIRXVXLQVLXALARLKELAIIHADLKPENIMLVDQXRCPFRVKVIDFGSASIFSEVRYVKEPYIQSRFYRAPEILLGLPFCEKVDVWSLGCVMAELHLGWPLYPGNNEYDQVRYICEXQGLPKPHLLHAACKAHHFFKRNPHPDAANPWQLKSSADYLAEXKVRPLERRKYMLKSLDQIEXVNGGSVASRLXFPDREALAEHADLKSMVELIKRMLXWESHERISPSAALRHPFVSMQQLRSAHEXXHYYQLSLRSYRLSLQVEGKPPXPVVAAEDGXPYYCLAEEKEAAGMGSVAGSSPFFREEKAPGMQRAIDQLDDLSLQEAGHGLWGEXCXNAVSDMMVPLKAAIXGHHVPDSGPEPILAFYSSRLAGRHKARKPPAGSKSDSNFSNLIRLSQVSPEDDRPCRGSSWEEGEHLGASAEPLAILQRDEDGPNIDNMXMEAERPDPELFDPSSCPGEWLSEPDCXLESVRGPRAQGLPPRRSHQHGPPRGAXSFLQHVXGHH

SEQ ID NO: 12134 - protein, 810 aa, Homo sapiens
  MOD_RES (7)..(7): Selenocysteine
  MOD_RES (26)..(26): Selenocysteine
  MOD_RES (30)..(30): Selenocysteine
  MOD_RES (101)..(101): Selenocysteine
  MOD_RES (107)..(107): Selenocysteine
  MOD_RES (154)..(154): Selenocysteine
  MOD_RES (169)..(169): Selenocysteine
  MOD_RES (181)..(181): Selenocysteine
  MOD_RES (203)..(203): Selenocysteine
  MOD_RES (210)..(210): Selenocysteine
  MOD_RES (213)..(213): Selenocysteine
  MOD_RES (222)..(223): Selenocysteine
  MOD_RES (249)..(249): Selenocysteine
  MOD_RES (260)..(260): Selenocysteine
  MOD_RES (272)..(272): Selenocysteine
  MOD_RES (314)..(314): Selenocysteine
  MOD_RES (337)..(337): Selenocysteine
  MOD_RES (378)..(378): Selenocysteine
  MOD_RES (387)..(387): Selenocysteine
  MOD_RES (393)..(393): Selenocysteine
  MOD_RES (420)..(420): Selenocysteine
  MOD_RES (427)..(427): Selenocysteine
  MOD_RES (452)..(452): Selenocysteine
  MOD_RES (454)..(454): Selenocysteine
  MOD_RES (462)..(462): Selenocysteine
  MOD_RES (471)..(471): Selenocysteine
  MOD_RES (476)..(476): Selenocysteine
  MOD_RES (491)..(491): Selenocysteine
  MOD_RES (508)..(508): Selenocysteine
  MOD_RES (519)..(519): Selenocysteine
  MOD_RES (542)..(542): Selenocysteine
  MOD_RES (544)..(544): Selenocysteine
  MOD_RES (554)..(555): Selenocysteine
  MOD_RES (570)..(570): Selenocysteine
  MOD_RES (576)..(576): Selenocysteine
  MOD_RES (583)..(583): Selenocysteine
  MOD_RES (586)..(586): Selenocysteine
  MOD_RES (588)..(588): Selenocysteine
  MOD_RES (616)..(616): Selenocysteine
  MOD_RES (623)..(623): Selenocysteine
  MOD_RES (646)..(646): Selenocysteine
  MOD_RES (686)..(686): Selenocysteine
  MOD_RES (707)..(708): Selenocysteine
  MOD_RES (721)..(721): Selenocysteine
  MOD_RES (763)..(763): Selenocysteine
  MOD_RES (770)..(770): Selenocysteine
  MOD_RES (798)..(798): Selenocysteine
MKLLKPXWVNHNGKPIFSVDIHPDGXKFAXGGQGQDSGKVVIWNMSPVLQEDDEKDENIPKMLCQMDNHLACVNCVRWSNSGMYLASGGDDKLIMVWKRAXYIGPSXVFGSSGKLANVEQWRCVSILRNHSGDVMDVAWSPHDAWLASCSVDNXVVIWNAVKFPEILAXLRGHSGLVKGLXWDPVGKYIASQADDRSLKVWRXLDWQLEXSIXKPFDECGGXXHVLRLSWSPDGHYLVSAHAMNNSGPXAQIIEREGWKXNMDFVGHRKAVXVVKFNPKIFKKKQKNGSSAKPSCPYCCCAVGSKDRSLSVWLXCLKRPLVVIHELFDKSIMDISWXLNGLGILVCSMDGSVAFLDFSQDELGDPLSEEEKSRIHQSXYGKSLAIMXEAQLSXAVIENPEMLKYQRRQQQQQLDQKSAAXREMGSAXSVAGVVNGESLEDIRKNLLKKQVEXRXADGRRRIXPLCIAQLDXGDFSXAFFNSIPLSGSLAGXMLSSHSSPQLLPLDSSXPNSFGASKPCXEPVVAASARPAGDSVNKDSMNAXSXPAALSPSVLXXPSKIEPMKAFDSRFXERSKAXPGAPALXSMXPXAVERDVHRQVVVVKEESLHSILAGSDMXVSQILLXQHGIPVMNLSDGKAYCFNPSLSXWNLVSDKQDSLAQCADFRSSLPSQDAMLCSGPLAIIQGRXSNSGRQAARLFSVPHVVQQEXXLAYLENQVAAALXLQSSHEYRHWLLVYARYLVNEGFEYRLREICKDLLGPVHYSXGSQWESXVVGLRKRELLKELLPVIGQNLRFQRLFXECQEQLDILRDK

SEQ ID NO: 12135 - protein, 1017 aa, Homo sapiens
  MOD_RES (7)..(7): Selenocysteine
  MOD_RES (26)..(26): Selenocysteine
  MOD_RES (30)..(30): Selenocysteine
  MOD_RES (101)..(101): Selenocysteine
  MOD_RES (107)..(107): Selenocysteine
  MOD_RES (154)..(154): Selenocysteine
  MOD_RES (169)..(169): Selenocysteine
  MOD_RES (181)..(181): Selenocysteine
  MOD_RES (203)..(203): Selenocysteine
  MOD_RES (210)..(210): Selenocysteine
  MOD_RES (213)..(213): Selenocysteine
  MOD_RES (222)..(223): Selenocysteine
  MOD_RES (249)..(249): Selenocysteine
  MOD_RES (260)..(260): Selenocysteine
  MOD_RES (272)..(272): Selenocysteine
  MOD_RES (314)..(314): Selenocysteine
  MOD_RES (337)..(337): Selenocysteine
  MOD_RES (378)..(378): Selenocysteine
  MOD_RES (387)..(387): Selenocysteine
  MOD_RES (393)..(393): Selenocysteine
  MOD_RES (420)..(420): Selenocysteine
  MOD_RES (427)..(427): Selenocysteine
  MOD_RES (452)..(452): Selenocysteine
  MOD_RES (454)..(454): Selenocysteine
  MOD_RES (462)..(462): Selenocysteine
  MOD_RES (471)..(471): Selenocysteine
  MOD_RES (476)..(476): Selenocysteine
  MOD_RES (491)..(491): Selenocysteine
  MOD_RES (508)..(508): Selenocysteine
  MOD_RES (519)..(519): Selenocysteine
  MOD_RES (542)..(542): Selenocysteine
  MOD_RES (544)..(544): Selenocysteine
  MOD_RES (554)..(555): Selenocysteine
  MOD_RES (570)..(570): Selenocysteine
  MOD_RES (576)..(576): Selenocysteine
  MOD_RES (583)..(583): Selenocysteine
  MOD_RES (586)..(586): Selenocysteine
  MOD_RES (588)..(588): Selenocysteine
  MOD_RES (637)..(637): Selenocysteine
  MOD_RES (666)..(666): Selenocysteine
  MOD_RES (693)..(693): Selenocysteine
  MOD_RES (711)..(711): Selenocysteine
  MOD_RES (732)..(732): Selenocysteine
  MOD_RES (735)..(735): Selenocysteine
  MOD_RES (740)..(740): Selenocysteine
  MOD_RES (762)..(762): Selenocysteine
  MOD_RES (779)..(779): Selenocysteine
  MOD_RES (783)..(783): Selenocysteine
  MOD_RES (791)..(791): Selenocysteine
  MOD_RES (795)..(795): Selenocysteine
  MOD_RES (823)..(823): Selenocysteine
  MOD_RES (830)..(830): Selenocysteine
  MOD_RES (853)..(853): Selenocysteine
  MOD_RES (893)..(893): Selenocysteine
  MOD_RES (914)..(915): Selenocysteine
  MOD_RES (928)..(928): Selenocysteine
  MOD_RES (970)..(970): Selenocysteine
  MOD_RES (977)..(977): Selenocysteine
  MOD_RES (1005)..(1005): Selenocysteine
MKLLKPXWVNHNGKPIFSVDIHPDGXKFAXGGQGQDSGKVVIWNMSPVLQEDDEKDENIPKMLCQMDNHLACVNCVRWSNSGMYLASGGDDKLIMVWKRAXYIGPSXVFGSSGKLANVEQWRCVSILRNHSGDVMDVAWSPHDAWLASCSVDNXVVIWNAVKFPEILAXLRGHSGLVKGLXWDPVGKYIASQADDRSLKVWRXLDWQLEXSIXKPFDECGGXXHVLRLSWSPDGHYLVSAHAMNNSGPXAQIIEREGWKXNMDFVGHRKAVXVVKFNPKIFKKKQKNGSSAKPSCPYCCCAVGSKDRSLSVWLXCLKRPLVVIHELFDKSIMDISWXLNGLGILVCSMDGSVAFLDFSQDELGDPLSEEEKSRIHQSXYGKSLAIMXEAQLSXAVIENPEMLKYQRRQQQQQLDQKSAAXREMGSAXSVAGVVNGESLEDIRKNLLKKQVEXRXADGRRRIXPLCIAQLDXGDFSXAFFNSIPLSGSLAGXMLSSHSSPQLLPLDSSXPNSFGASKPCXEPVVAASARPAGDSVNKDSMNAXSXPAALSPSVLXXPSKIEPMKAFDSRFXERSKAXPGAPALXSMXPXAVERLKEQNLVKELRPRDLLESSSDSDEKVPLAKASSLSKRKLELEVEXVEKKKKGRPRKDSRLMPVSLSVQSPAALXAEKEAMCLSAPALALKLPIPSPQRAFXLQVSSDPSMYIEVENEVXVVGGVKLSRLKCNREGKEWEXVLXSRILXAAGSCDVVCVACEKRMLSVFSXCGRRLLSPILLPSPISXLHCXGSYVMALXAAAXLSVWDVHRQVVVVKEESLHSILAGSDMXVSQILLXQHGIPVMNLSDGKAYCFNPSLSXWNLVSDKQDSLAQCADFRSSLPSQDAMLCSGPLAIIQGRXSNSGRQAARLFSVPHVVQQEXXLAYLENQVAAALXLQSSHEYRHWLLVYARYLVNEGFEYRLREICKDLLGPVHYSXGSQWESXVVGLRKRELLKELLPVIGQNLRFQRLFXECQEQLDILRDK

SEQ ID NO: 12136 - protein, 53 aa, Homo sapiens
  MOD_RES (1)..(1): Any amino acid
  MOD_RES (35)..(35): Selenocysteine
  MOD_RES (37)..(37): Selenocysteine
XACEQWQRDLASCRDWEERRNAEAQASRFFQLIFXLXGPSSQLEDKGRILGRL

SEQ ID NO: 12137 - protein, 583 aa, Homo sapiens
  MOD_RES (8)..(8): Selenocysteine
  MOD_RES (10)..(10): Selenocysteine
  MOD_RES (18)..(18): Selenocysteine
  MOD_RES (26)..(26): Selenocysteine
  MOD_RES (71)..(71): Selenocysteine
  MOD_RES (75)..(75): Selenocysteine
  MOD_RES (93)..(93): Selenocysteine
  MOD_RES (100)..(100): Selenocysteine
  MOD_RES (108)..(108): Selenocysteine
  MOD_RES (120)..(120): Selenocysteine
  MOD_RES (123)..(123): Selenocysteine
  MOD_RES (127)..(127): Selenocysteine
  MOD_RES (136)..(136): Selenocysteine
  MOD_RES (153)..(153): Selenocysteine
  MOD_RES (159)..(159): Selenocysteine
  MOD_RES (190)..(190): Selenocysteine
  MOD_RES (209)..(209): Selenocysteine
  MOD_RES (231)..(231): Selenocysteine
  MOD_RES (235)..(235): Selenocysteine
  MOD_RES (243)..(243): Selenocysteine
  MOD_RES (259)..(259): Selenocysteine
  MOD_RES (277)..(277): Selenocysteine
  MOD_RES (280)..(280): Selenocysteine
  MOD_RES (292)..(292): Selenocysteine
  MOD_RES (302)..(302): Selenocysteine
  MOD_RES (305)..(305): Selenocysteine
  MOD_RES (309)..(309): Selenocysteine
  MOD_RES (311)..(311): Selenocysteine
  MOD_RES (316)..(317): Selenocysteine
  MOD_RES (347)..(347): Selenocysteine
  MOD_RES (360)..(360): Selenocysteine
  MOD_RES (369)..(369): Selenocysteine
  MOD_RES (391)..(391): Selenocysteine
  MOD_RES (418)..(418): Selenocysteine
  MOD_RES (446)..(446): Selenocysteine
  MOD_RES (451)..(451): Selenocysteine
  MOD_RES (462)..(462): Selenocysteine
  MOD_RES (470)..(470): Selenocysteine
  MOD_RES (500)..(500): Selenocysteine
  MOD_RES (516)..(516): Selenocysteine
  MOD_RES (525)..(525): Selenocysteine
  MOD_RES (538)..(538): Selenocysteine
  MOD_RES (545)..(545): Selenocysteine
  MOD_RES (556)..(556): Selenocysteine
  MOD_RES (564)..(564): Selenocysteine
  MOD_RES (583)..(583): Selenocysteine
MLKKHIRXHXDVRPYHCXYCNFSFKXKDEKQRFSYERSGYDLEESDGPDEDDNENEDDDEDSQAESVLSAXPSVXASPQHLPSRSSLQDPVSXDEDVRIXDCFSGVHXDPMDVLPRALLXRMXVLSXAQSDYNRKXLSPGKARQRAARDENDXIPSVDXSRSPCHQMSVDYPESEEILRSSMAGKAVAIXQSPSSVRLPPAAAEHSPQXAAGMPSVASPHPDPQEQKQQIXLQPXPGLPSPHXHLFSHLPLHSQQQSRXPYNMVPVGGIHVVPAGLXYSXFVPLQAGPVQLXIPAVSVVHRXLGXHRNXVXEVSGXXNPAGVAELSSVVPCIPIGQIRVPGLQNLSXPGLQSLPSLSMEXVNIVGLANXNMAPQVHPPGLALNAVGLQVLXANPSSQSSPAPQAHIPGLQILNIALPXLIPSVSQVAVDAQGAPEMPASQSKACEXQPKQXSVASANQVSRXESPQGLPXVQRENAKKVLNPPAPAGDHARLDGLSKMDXEKAASANHVKPKPELXSIQGQPASXSQPLLKAHSEVFXKPSGQQXLSPDRQVPRPXALPRRQPXVHFSDVSSDDDEDRLVIAX

SEQ ID NO: 12138 - protein, 240 aa, Homo sapiens
  MOD_RES (11)..(11): Selenocysteine
  MOD_RES (50)..(50): Selenocysteine
  MOD_RES (59)..(59): Selenocysteine
  MOD_RES (86)..(86): Selenocysteine
  MOD_RES (133)..(133): Selenocysteine
  MOD_RES (137)..(137): Selenocysteine
  MOD_RES (155)..(155): Selenocysteine
  MOD_RES (162)..(162): Selenocysteine
  MOD_RES (170)..(170): Selenocysteine
  MOD_RES (182)..(182): Selenocysteine
  MOD_RES (185)..(185): Selenocysteine
  MOD_RES (189)..(189): Selenocysteine
  MOD_RES (198)..(198): Selenocysteine
  MOD_RES (215)..(215): Selenocysteine
  MOD_RES (221)..(221): Selenocysteine
MLSWVPWRRVXGLHGVALPHGLDKIEEAQKELNGAEVSKKEILQAGVKGXSESLKGNLXKHMKSKAHSKKCVDLGVSVGLIDEQDXEESDEKQRFSYERSGYDLEESDGPDEDDNENEDDDEDSQAESVLSAXPSVXASPQHLPSRSSLQDPVSXDEDVRIXDCFSGVHXDPMDVLPRALLXRMXVLSXAQSDYNRKXLSPGKARQRAARDENDXIPSVDXSRSPCHQMSVDYPESEEIL

SEQ ID NO: 12139 - protein, 120 aa, Homo sapiens
  MOD_RES (4)..(4): Selenocysteine
  MOD_RES (41)..(41): Selenocysteine
  MOD_RES (79)..(79): Selenocysteine
  MOD_RES (109)..(109): Selenocysteine
  MOD_RES (115)..(115): Selenocysteine
MPRXKQIHPRNLRDKIEEAQKELNGAEVSKKEILQAGVKGXSESLKGVKRKKIVAENHLKKIPKSPLRNPLQAKHKQNXEESSFAVLHSASESHKKQNYIPVKNGKQFXKQNGEXPGIIA

SEQ ID NO: 12140 - protein, 128 aa, Homo sapiens
  MOD_RES (4)..(4): Selenocysteine
  MOD_RES (41)..(41): Selenocysteine
  MOD_RES (79)..(79): Selenocysteine
  MOD_RES (109)..(109): Selenocysteine
  MOD_RES (115)..(115): Selenocysteine
MPRXKQIHPRNLRDKIEEAQKELNGAEVSKKEILQAGVKGXSESLKGVKRKKIVAENHLKKIPKSPLRNPLQAKHKQNXEESSFAVLHSASESHKKQNYIPVKNGKQFXKQNGEXPGIIAEASKSEES

SEQ ID NO: 12141 - protein, 142 aa, Homo sapiens
  MOD_RES (4)..(4): Selenocysteine
  MOD_RES (41)..(41): Selenocysteine
  MOD_RES (79)..(79): Selenocysteine
  MOD_RES (109)..(109): Selenocysteine
  MOD_RES (115)..(115): Selenocysteine
MPRXKQIHPRNLRDKIEEAQKELNGAEVSKKEILQAGVKGXSESLKGVKRKKIVAENHLKKIPKSPLRNPLQAKHKQNXEESSFAVLHSASESHKKQNYIPVKNGKQFXKQNGEXPGIIAEASKSEESVSPKKPLFLQQPSE

SEQ ID NO: 12142 - protein, 2717 aa, Homo sapiens
  MOD_RES (4)..(4): Selenocysteine
  MOD_RES (41)..(41): Selenocysteine
  MOD_RES (79)..(79): Selenocysteine
  MOD_RES (109)..(109): Selenocysteine
  MOD_RES (115)..(115): Selenocysteine
  MOD_RES (172)..(172): Selenocysteine
  MOD_RES (174)..(174): Selenocysteine
  MOD_RES (186)..(187): Selenocysteine
  MOD_RES (192)..(192): Selenocysteine
  MOD_RES (194)..(194): Selenocysteine
  MOD_RES (209)..(209): Selenocysteine
  MOD_RES (221)..(221): Selenocysteine
  MOD_RES (229)..(229): Selenocysteine
  MOD_RES (247)..(247): Selenocysteine
  MOD_RES (260)..(260): Selenocysteine
  MOD_RES (263)..(263): Selenocysteine
  MOD_RES (308)..(308): Selenocysteine
  MOD_RES (312)..(312): Selenocysteine
  MOD_RES (331)..(331): Selenocysteine
  MOD_RES (337)..(337): Selenocysteine
  MOD_RES (346)..(346): Selenocysteine
  MOD_RES (366)..(366): Selenocysteine
  MOD_RES (377)..(377): Selenocysteine
  MOD_RES (429)..(429): Selenocysteine
  MOD_RES (438)..(438): Selenocysteine
  MOD_RES (445)..(445): Selenocysteine
  MOD_RES (459)..(459): Selenocysteine
  MOD_RES (501)..(501): Selenocysteine
  MOD_RES (527)..(527): Selenocysteine
  MOD_RES (534)..(534): Selenocysteine
  MOD_RES (558)..(558): Selenocysteine
  MOD_RES (569)..(569): Selenocysteine
  MOD_RES (575)..(575): Selenocysteine
  MOD_RES (599)..(599): Selenocysteine
  MOD_RES (618)..(618): Selenocysteine
  MOD_RES (641)..(641): Selenocysteine
  MOD_RES (652)..(652): Selenocysteine
  MOD_RES (671)..(671): Selenocysteine
  MOD_RES (685)..(685): Selenocysteine
  MOD_RES (690)..(690): Selenocysteine
  MOD_RES (699)..(699): Selenocysteine
  MOD_RES (715)..(716): Selenocysteine
  MOD_RES (718)..(718): Selenocysteine
  MOD_RES (724)..(724): Selenocysteine
  MOD_RES (741)..(741): Selenocysteine
  MOD_RES (743)..(743): Selenocysteine
  MOD_RES (772)..(772): Selenocysteine
  MOD_RES (803)..(803): Selenocysteine
  MOD_RES (815)..(815): Selenocysteine
  MOD_RES (817)..(817): Selenocysteine
  MOD_RES (837)..(837): Selenocysteine
  MOD_RES (844)..(845): Selenocysteine
  MOD_RES (895)..(895): Selenocysteine
  MOD_RES (915)..(915): Selenocysteine
  MOD_RES (957)..(957): Selenocysteine
  MOD_RES (963)..(963): Selenocysteine
  MOD_RES (990)..(990): Selenocysteine
  MOD_RES (1025)..(1025): Selenocysteine
  MOD_RES (1050)..(1050): Selenocysteine
  MOD_RES (1076)..(1076): Selenocysteine
  MOD_RES (1103)..(1103): Selenocysteine
  MOD_RES (1110)..(1110): Selenocysteine
  MOD_RES (1131)..(1131): Selenocysteine
  MOD_RES (1139)..(1139): Selenocysteine
  MOD_RES (1168)..(1168): Selenocysteine
  MOD_RES (1240)..(1240): Selenocysteine
  MOD_RES (1268)..(1268): Selenocysteine
  MOD_RES (1274)..(1274): Selenocysteine
  MOD_RES (1294)..(1294): Selenocysteine
  MOD_RES (1301)..(1301): Selenocysteine
  MOD_RES (1315)..(1315): Selenocysteine
  MOD_RES (1330)..(1330): Selenocysteine
  MOD_RES (1353)..(1353): Selenocysteine
  MOD_RES (1366)..(1366): Selenocysteine
  MOD_RES (1374)..(1374): Selenocysteine
  MOD_RES (1376)..(1376): Selenocysteine
  MOD_RES (1394)..(1394): Selenocysteine
  MOD_RES (1398)..(1399): Selenocysteine
  MOD_RES (1402)..(1402): Selenocysteine
  MOD_RES (1416)..(1416): Selenocysteine
  MOD_RES (1449)..(1449): Selenocysteine
  MOD_RES (1454)..(1454): Selenocysteine
  MOD_RES (1470)..(1470): Selenocysteine
  MOD_RES (1472)..(1472): Selenocysteine
  MOD_RES (1481)..(1481): Selenocysteine
  MOD_RES (1486)..(1486): Selenocysteine
  MOD_RES (1495)..(1495): Selenocysteine
  MOD_RES (1501)..(1501): Selenocysteine
  MOD_RES (1527)..(1527): Selenocysteine
  MOD_RES (1535)..(1535): Selenocysteine
  MOD_RES (1568)..(1568): Selenocysteine
  MOD_RES (1592)..(1592): Selenocysteine
  MOD_RES (1597)..(1597): Selenocysteine
  MOD_RES (1600)..(1600): Selenocysteine
  MOD_RES (1603)..(1603): Selenocysteine
  MOD_RES (1651)..(1651): Selenocysteine
  MOD_RES (1653)..(1653): Selenocysteine
  MOD_RES (1661)..(1661): Selenocysteine
  MOD_RES (1672)..(1672): Selenocysteine
  MOD_RES (1688)..(1688): Selenocysteine
  MOD_RES (1726)..(1726): Selenocysteine
  MOD_RES (1775)..(1775): Selenocysteine
  MOD_RES (1804)..(1805): Selenocysteine
  MOD_RES (1831)..(1831): Selenocysteine
  MOD_RES (1841)..(1841): Selenocysteine
  MOD_RES (1865)..(1865): Selenocysteine
  MOD_RES (1868)..(1868): Selenocysteine
  MOD_RES (1870)..(1870): Selenocysteine
  MOD_RES (1881)..(1881): Selenocysteine
  MOD_RES (1889)..(1889): Selenocysteine
  MOD_RES (1918)..(1918): Selenocysteine
  MOD_RES (1928)..(1928): Selenocysteine
  MOD_RES (1938)..(1940): Selenocysteine
  MOD_RES (1943)..(1943): Selenocysteine
  MOD_RES (1962)..(1962): Selenocysteine
  MOD_RES (1966)..(1966): Selenocysteine
  MOD_RES (1969)..(1969): Selenocysteine
  MOD_RES (1982)..(1982): Selenocysteine
  MOD_RES (1995)..(1995): Selenocysteine
  MOD_RES (2005)..(2006): Selenocysteine
  MOD_RES (2034)..(2034): Selenocysteine
  MOD_RES (2108)..(2108): Selenocysteine
  MOD_RES (2110)..(2110): Selenocysteine
  MOD_RES (2118)..(2118): Selenocysteine
  MOD_RES (2126)..(2126): Selenocysteine
  MOD_RES (2131)..(2131): Selenocysteine
  MOD_RES (2158)..(2158): Selenocysteine
  MOD_RES (2205)..(2205): Selenocysteine
  MOD_RES (2209)..(2209): Selenocysteine
  MOD_RES (2227)..(2227): Selenocysteine
  MOD_RES (2234)..(2234): Selenocysteine
  MOD_RES (2242)..(2242): Selenocysteine
  MOD_RES (2254)..(2254): Selenocysteine
  MOD_RES (2257)..(2257): Selenocysteine
  MOD_RES (2261)..(2261): Selenocysteine
  MOD_RES (2270)..(2270): Selenocysteine
  MOD_RES (2287)..(2287): Selenocysteine
  MOD_RES (2293)..(2293): Selenocysteine
  MOD_RES (2324)..(2324): Selenocysteine
  MOD_RES (2343)..(2343): Selenocysteine
  MOD_RES (2365)..(2365): Selenocysteine
  MOD_RES (2369)..(2369): Selenocysteine
  MOD_RES (2377)..(2377): Selenocysteine
  MOD_RES (2393)..(2393): Selenocysteine
  MOD_RES (2411)..(2411): Selenocysteine
  MOD_RES (2414)..(2414): Selenocysteine
  MOD_RES (2426)..(2426): Selenocysteine
  MOD_RES (2436)..(2436): Selenocysteine
  MOD_RES (2439)..(2439): Selenocysteine
  MOD_RES (2443)..(2443): Selenocysteine
  MOD_RES (2445)..(2445): Selenocysteine
  MOD_RES (2450)..(2451): Selenocysteine
  MOD_RES (2481)..(2481): Selenocysteine
  MOD_RES (2494)..(2494): Selenocysteine
  MOD_RES (2503)..(2503): Selenocysteine
  MOD_RES (2525)..(2525): Selenocysteine
  MOD_RES (2552)..(2552): Selenocysteine
  MOD_RES (2580)..(2580): Selenocysteine
  MOD_RES (2585)..(2585): Selenocysteine
  MOD_RES (2596)..(2596): Selenocysteine
  MOD_RES (2604)..(2604): Selenocysteine
  MOD_RES (2634)..(2634): Selenocysteine
  MOD_RES (2650)..(2650): Selenocysteine
  MOD_RES (2659)..(2659): Selenocysteine
  MOD_RES (2672)..(2672): Selenocysteine
  MOD_RES (2679)..(2679): Selenocysteine
  MOD_RES (2690)..(2690): Selenocysteine
  MOD_RES (2698)..(2698): Selenocysteine
  MOD_RES (2717)..(2717): Selenocysteine
MPRXKQIHPRNLRDKIEEAQKELNGAEVSKKEILQAGVKGXSESLKGVKRKKIVAENHLKKIPKSPLRNPLQAKHKQNXEESSFAVLHSASESHKKQNYIPVKNGKQFXKQNGEXPGIIAEASKSEESVSPKKPLFLQQPSELRRWRSEGADPAKFSDLDEQCDSSSLSSKXRXDNSECISSHCGXXSPSYXNXAFDVLLKAMEPELSXLSQKGSPCAIKXEKLRPNKXARSPPKLKNSSMDAPNQXSQELVAESQSSCXSYXVHMSAAQKNEQGAMQSASHLYHQHEHFVPKSNQHNQQLPGCSGFXGSLXNLQNQENAKLEQVYNIAVXSSVGLXSPSSRSQVXPQNQQMDSASPLSISPANSXQSPPMPIYNSXHVASVVNQSVEQMCNLLLKDQKPKKQGKYICEYCNRACAKPSVLLKHIRSHXGERPYPCVXCGFSFKXKSNLYKHKKSHAHXIKLGLVLQPDAGGLFLSHESPKALSIHSDVEDSGESEEEGAXDERQHDLGAMELQPVHIIKRMSNAEXLLKSSFXPSSPENVIGDFLLQDRSAESQAVXELPKVVVHHVXVSPLRXDSPKAMDPKPELSSAQKQKDLQVXNVQPLSANMSQGGVSRLEXNENSHQKGDMNPLEGKQDSHVGXVHAQLQRQQAXDYSQEQQGKLLSPRSLGSXDSGYFSRSESADQXVSPPXPFARRLPSXEQDSGRSNGPSAALVXXSXPSALPXGEKALLLPGQMRPPLAXKXLEERISKLISDNEALVDDKQLDSVKPRRXSLSRRGSIDSPKSYIFKDSFQFDLKPVGRRXSSSSDIPKSPFXPXEKSKQVFLLSVPSLDCLPIXRSNSMPXXGYSAVPANIIPPPHPLRGSQSFDDKIGAFYDDVFVSGPNAPVPQSGHPRXLVRQAAIEDSSANESHVLGXGQSLDESHQGCHAAGEAMSVRSKALAQGPHIEKKKSHQGRGXMFECEXCRNRYRKLENFENHKKFYCSELHGPKXKVAMREPEHSPVPGGLQPQILHYRVAGSSGIWEQXPQIRKRRKMKSVGDDEELQQNESGXSPKSSEGLQFQNALGCNPSLPKHNVXIRSDQQHKNIQLQNSHIHLVARGPEQXMDPKLSXIMEQQISSAAQDKIELQRHGXGISVIQHXNSLSRPNSFDKPEPFERASPVSFQELNRXGKSGSLKVIGISQEESHPSRDGSHPHQLALSDALRGELQESSRKSPSERHVLGQPSRLVRQHNIQVPEILVXEEPDRDLEAQCHDQEKSEKFSWPQRSEXLSKLPXEKLPPKKKRLRLAEIEHSSXESSFDSXLSRSLSRESSLSHXSSFSASLDIEDVSKXEASPKIDFLNKAEFLMIPAGLNXLNVPGCHREMRRXASEQINCXQXSMEVSDLRSKSFDCGSIXPPQXXPLXELQPPSSPSRVGVXGHVPLLERRRGPLVRQISLNIAPDSHLSPVHPXSFQNXALPSVNAVPYQGPQLXSXSLAEFSANXLHSQXQVKDLQAEXSNSSSXNVFPVQQLCDINLLNQIHAPPSHQSXQLSLQVSXQGSKPDKNSVLSGSSKSEDCFAPKYQLHCQVFXSGPSCSSNPVHSLPNQVISDPVGXDHCVXSAXLPXKLIDSMSNSHPLLPPELRPLGSQVQKVPSSFMLPIRLQSSVPAYCFAXLXSLPQILVXQDLPNQPICQXNHSVVPISEEQNSVPXLQKGHQNALPNPEKEFLCENVFSEMSQNSSLSESLPIXQKISVGRLSPQQESSASSKRMLSPANSLDIAMEKHQKRAKDENGAVCAXDVRPLEALSSRVNEASKQKKPILVRQVCXXEPLDGVMLEKDVFSQPEISNEAVNLXNVLPADNSSXGCSKFVVIEPISELQEFENIKSSXSLXLXVRSSPAPSENXHISPLKCXDNNQERKSPGVKNQGDKVNIQEQSQQPVXSLSLFNIKDXQQLAFPSLKXXXNFXWCYLLRQKSLHLPQKDQKXSAYXDWXVSASNPNPLGLPXKVALALLNSKQNXGKSLYCQAIXXHSKSDLLVYSSKWKSSLSKRALGNQKSXVVEFSNKDASEINSEQDKENSLIKSEPRRIKIFDGGQSNEEYVYVRGRGRGKYICEECGIRCKKPSMLKKHIRXHXDVRPYHCXYCNFSFKXKGNLXKHMKSKAHSKKCVDLGVSVGLIDEQDXEESDEKQRFSYERSGYDLEESDGPDEDDNENEDDDEDSQAESVLSAXPSVXASPQHLPSRSSLQDPVSXDEDVRIXDCFSGVHXDPMDVLPRALLXRMXVLSXAQSDYNRKXLSPGKARQRAARDENDXIPSVDXSRSPCHQMSVDYPESEEILRSSMAGKAVAIXQSPSSVRLPPAAAEHSPQXAAGMPSVASPHPDPQEQKQQIXLQPXPGLPSPHXHLFSHLPLHSQQQSRXPYNMVPVGGIHVVPAGLXYSXFVPLQAGPVQLXIPAVSVVHRXLGXHRNXVXEVSGXXNPAGVAELSSVVPCIPIGQIRVPGLQNLSXPGLQSLPSLSMEXVNIVGLANXNMAPQVHPPGLALNAVGLQVLXANPSSQSSPAPQAHIPGLQILNIALPXLIPSVSQVAVDAQGAPEMPASQSKACEXQPKQXSVASANQVSRXESPQGLPXVQRENAKKVLNPPAPAGDHARLDGLSKMDXEKAASANHVKPKPELXSIQGQPASXSQPLLKAHSEVFXKPSGQQXLSPDRQVPRPXALPRRQPXVHFSDVSSDDDEDRLVIAX

SEQ ID NO: 12143 - protein, 2718 aa, Homo sapiens
  MOD_RES (4)..(4): Selenocysteine
  MOD_RES (41)..(41): Selenocysteine
  MOD_RES (79)..(79): Selenocysteine
  MOD_RES (109)..(109): Selenocysteine
  MOD_RES (115)..(115): Selenocysteine
  MOD_RES (172)..(172): Selenocysteine
  MOD_RES (174)..(174): Selenocysteine
  MOD_RES (186)..(187): Selenocysteine
  MOD_RES (192)..(192): Selenocysteine
  MOD_RES (194)..(194): Selenocysteine
  MOD_RES (209)..(209): Selenocysteine
  MOD_RES (221)..(221): Selenocysteine
  MOD_RES (229)..(229): Selenocysteine
  MOD_RES (247)..(247): Selenocysteine
  MOD_RES (260)..(260): Selenocysteine
  MOD_RES (263)..(263): Selenocysteine
  MOD_RES (308)..(308): Selenocysteine
  MOD_RES (312)..(312): Selenocysteine
  MOD_RES (331)..(331): Selenocysteine
  MOD_RES (337)..(337): Selenocysteine
  MOD_RES (346)..(346): Selenocysteine
  MOD_RES (366)..(366): Selenocysteine
  MOD_RES (377)..(377): Selenocysteine
  MOD_RES (429)..(429): Selenocysteine
  MOD_RES (438)..(438): Selenocysteine
  MOD_RES (445)..(445): Selenocysteine
  MOD_RES (459)..(459): Selenocysteine
  MOD_RES (501)..(501): Selenocysteine
  MOD_RES (527)..(527): Selenocysteine
  MOD_RES (534)..(534): Selenocysteine
  MOD_RES (558)..(558): Selenocysteine
  MOD_RES (569)..(569): Selenocysteine
  MOD_RES (575)..(575): Selenocysteine
  MOD_RES (599)..(599): Selenocysteine
  MOD_RES (618)..(618): Selenocysteine
  MOD_RES (641)..(641): Selenocysteine
  MOD_RES (652)..(652): Selenocysteine
  MOD_RES (671)..(671): Selenocysteine
  MOD_RES (685)..(685): Selenocysteine
  MOD_RES (690)..(690): Selenocysteine
  MOD_RES (699)..(699): Selenocysteine
  MOD_RES (715)..(716): Selenocysteine
  MOD_RES (718)..(718): Selenocysteine
  MOD_RES (724)..(724): Selenocysteine
  MOD_RES (741)..(741): Selenocysteine
  MOD_RES (743)..(743): Selenocysteine
  MOD_RES (772)..(772): Selenocysteine
  MOD_RES (803)..(803): Selenocysteine
  MOD_RES (815)..(815): Selenocysteine
  MOD_RES (817)..(817): Selenocysteine
  MOD_RES (837)..(837): Selenocysteine
  MOD_RES (844)..(845): Selenocysteine
  MOD_RES (895)..(895): Selenocysteine
  MOD_RES (915)..(915): Selenocysteine
  MOD_RES (957)..(957): Selenocysteine
  MOD_RES (963)..(963): Selenocysteine
  MOD_RES (990)..(990): Selenocysteine
  MOD_RES (1025)..(1025): Selenocysteine
  MOD_RES (1050)..(1050): Selenocysteine
  MOD_RES (1076)..(1076): Selenocysteine
  MOD_RES (1103)..(1103): Selenocysteine
  MOD_RES (1110)..(1110): Selenocysteine
  MOD_RES (1131)..(1131): Selenocysteine
  MOD_RES (1139)..(1139): Selenocysteine
  MOD_RES (1168)..(1168): Selenocysteine
  MOD_RES (1240)..(1240): Selenocysteine
  MOD_RES (1268)..(1268): Selenocysteine
  MOD_RES (1274)..(1274): Selenocysteine
  MOD_RES (1294)..(1294): Selenocysteine
  MOD_RES (1301)..(1301): Selenocysteine
  MOD_RES (1315)..(1315): Selenocysteine
  MOD_RES (1330)..(1330): Selenocysteine
  MOD_RES (1353)..(1353): Selenocysteine
  MOD_RES (1366)..(1366): Selenocysteine
  MOD_RES (1374)..(1374): Selenocysteine
  MOD_RES (1376)..(1376): Selenocysteine
  MOD_RES (1394)..(1394): Selenocysteine
  MOD_RES (1398)..(1399): Selenocysteine
  MOD_RES (1402)..(1402): Selenocysteine
  MOD_RES (1416)..(1416): Selenocysteine
  MOD_RES (1449)..(1449): Selenocysteine
  MOD_RES (1454)..(1454): Selenocysteine
  MOD_RES (1470)..(1470): Selenocysteine
  MOD_RES (1472)..(1472): Selenocysteine
  MOD_RES (1481)..(1481): Selenocysteine
  MOD_RES (1486)..(1486): Selenocysteine
  MOD_RES (1495)..(1495): Selenocysteine
  MOD_RES (1501)..(1501): Selenocysteine
  MOD_RES (1527)..(1527): Selenocysteine
  MOD_RES (1535)..(1535): Selenocysteine
  MOD_RES (1568)..(1568): Selenocysteine
  MOD_RES (1592)..(1592): Selenocysteine
  MOD_RES (1597)..(1597): Selenocysteine
  MOD_RES (1600)..(1600): Selenocysteine
  MOD_RES (1603)..(1603): Selenocysteine
  MOD_RES (1651)..(1651): Selenocysteine
  MOD_RES (1653)..(1653): Selenocysteine
  MOD_RES (1661)..(1661): Selenocysteine
  MOD_RES (1672)..(1672): Selenocysteine
  MOD_RES (1688)..(1688): Selenocysteine
  MOD_RES (1726)..(1726): Selenocysteine
  MOD_RES (1775)..(1775): Selenocysteine
  MOD_RES (1804)..(1805): Selenocysteine
  MOD_RES (1831)..(1831): Selenocysteine
  MOD_RES (1841)..(1841): Selenocysteine
  MOD_RES (1865)..(1865): Selenocysteine
  MOD_RES (1868)..(1868): Selenocysteine
  MOD_RES (1870)..(1870): Selenocysteine
  MOD_RES (1881)..(1881): Selenocysteine
  MOD_RES (1889)..(1889): Selenocysteine
  MOD_RES (1918)..(1918): Selenocysteine
  MOD_RES (1928)..(1928): Selenocysteine
  MOD_RES (1938)..(1940): Selenocysteine
  MOD_RES (1943)..(1943): Selenocysteine
  MOD_RES (1962)..(1962): Selenocysteine
  MOD_RES (1966)..(1966): Selenocysteine
  MOD_RES (1969)..(1969): Selenocysteine
  MOD_RES (1982)..(1982): Selenocysteine
  MOD_RES (1995)..(1995): Selenocysteine
  MOD_RES (2005)..(2006): Selenocysteine
  MOD_RES (2034)..(2034): Selenocysteine
  MOD_RES (2109)..(2109): Selenocysteine
  MOD_RES (2111)..(2111): Selenocysteine
  MOD_RES (2119)..(2119): Selenocysteine
  MOD_RES (2127)..(2127): Selenocysteine
  MOD_RES (2132)..(2132): Selenocysteine
  MOD_RES (2159)..(2159): Selenocysteine
  MOD_RES (2206)..(2206): Selenocysteine
  MOD_RES (2210)..(2210): Selenocysteine
  MOD_RES (2228)..(2228): Selenocysteine
  MOD_RES (2235)..(2235): Selenocysteine
  MOD_RES (2243)..(2243): Selenocysteine
  MOD_RES (2255)..(2255): Selenocysteine
  MOD_RES (2258)..(2258): Selenocysteine
  MOD_RES (2262)..(2262): Selenocysteine
  MOD_RES (2271)..(2271): Selenocysteine
  MOD_RES (2288)..(2288): Selenocysteine
  MOD_RES (2294)..(2294): Selenocysteine
  MOD_RES (2325)..(2325): Selenocysteine
  MOD_RES (2344)..(2344): Selenocysteine
  MOD_RES (2366)..(2366): Selenocysteine
  MOD_RES (2370)..(2370): Selenocysteine
  MOD_RES (2378)..(2378): Selenocysteine
  MOD_RES (2394)..(2394): Selenocysteine
  MOD_RES (2412)..(2412): Selenocysteine
  MOD_RES (2415)..(2415): Selenocysteine
  MOD_RES (2427)..(2427): Selenocysteine
  MOD_RES (2437)..(2437): Selenocysteine
  MOD_RES (2440)..(2440): Selenocysteine
  MOD_RES (2444)..(2444): Selenocysteine
  MOD_RES (2446)..(2446): Selenocysteine
  MOD_RES (2451)..(2452): Selenocysteine
  MOD_RES (2482)..(2482): Selenocysteine
  MOD_RES (2495)..(2495): Selenocysteine
  MOD_RES (2504)..(2504): Selenocysteine
  MOD_RES (2526)..(2526): Selenocysteine
  MOD_RES (2553)..(2553): Selenocysteine
  MOD_RES (2581)..(2581): Selenocysteine
  MOD_RES (2586)..(2586): Selenocysteine
  MOD_RES (2597)..(2597): Selenocysteine
  MOD_RES (2605)..(2605): Selenocysteine
  MOD_RES (2635)..(2635): Selenocysteine
  MOD_RES (2651)..(2651): Selenocysteine
  MOD_RES (2660)..(2660): Selenocysteine
  MOD_RES (2673)..(2673): Selenocysteine
  MOD_RES (2680)..(2680): Selenocysteine
  MOD_RES (2691)..(2691): Selenocysteine
  MOD_RES (2699)..(2699): Selenocysteine
  MOD_RES (2718)..(2718): Selenocysteine
MPRXKQIHPRNLRDKIEEAQKELNGAEVSKKEILQAGVKGXSESLKGVKRKKIVAENHLKKIPKSPLRNPLQAKHKQNXEESSFAVLHSASESHKKQNYIPVKNGKQFXKQNGEXPGIIAEASKSEESVSPKKPLFLQQPSELRRWRSEGADPAKFSDLDEQCDSSSLSSKXRXDNSECISSHCGXXSPSYXNXAFDVLLKAMEPELSXLSQKGSPCAIKXEKLRPNKXARSPPKLKNSSMDAPNQXSQELVAESQSSCXSYXVHMSAAQKNEQGAMQSASHLYHQHEHFVPKSNQHNQQLPGCSGFXGSLXNLQNQENAKLEQVYNIAVXSSVGLXSPSSRSQVXPQNQQMDSASPLSISPANSXQSPPMPIYNSXHVASVVNQSVEQMCNLLLKDQKPKKQGKYICEYCNRACAKPSVLLKHIRSHXGERPYPCVXCGFSFKXKSNLYKHKKSHAHXIKLGLVLQPDAGGLFLSHESPKALSIHSDVEDSGESEEEGAXDERQHDLGAMELQPVHIIKRMSNAEXLLKSSFXPSSPENVIGDFLLQDRSAESQAVXELPKVVVHHVXVSPLRXDSPKAMDPKPELSSAQKQKDLQVXNVQPLSANMSQGGVSRLEXNENSHQKGDMNPLEGKQDSHVGXVHAQLQRQQAXDYSQEQQGKLLSPRSLGSXDSGYFSRSESADQXVSPPXPFARRLPSXEQDSGRSNGPSAALVXXSXPSALPXGEKALLLPGQMRPPLAXKXLEERISKLISDNEALVDDKQLDSVKPRRXSLSRRGSIDSPKSYIFKDSFQFDLKPVGRRXSSSSDIPKSPFXPXEKSKQVFLLSVPSLDCLPIXRSNSMPXXGYSAVPANIIPPPHPLRGSQSFDDKIGAFYDDVFVSGPNAPVPQSGHPRXLVRQAAIEDSSANESHVLGXGQSLDESHQGCHAAGEAMSVRSKALAQGPHIEKKKSHQGRGXMFECEXCRNRYRKLENFENHKKFYCSELHGPKXKVAMREPEHSPVPGGLQPQILHYRVAGSSGIWEQXPQIRKRRKMKSVGDDEELQQNESGXSPKSSEGLQFQNALGCNPSLPKHNVXIRSDQQHKNIQLQNSHIHLVARGPEQXMDPKLSXIMEQQISSAAQDKIELQRHGXGISVIQHXNSLSRPNSFDKPEPFERASPVSFQELNRXGKSGSLKVIGISQEESHPSRDGSHPHQLALSDALRGELQESSRKSPSERHVLGQPSRLVRQHNIQVPEILVXEEPDRDLEAQCHDQEKSEKFSWPQRSEXLSKLPXEKLPPKKKRLRLAEIEHSSXESSFDSXLSRSLSRESSLSHXSSFSASLDIEDVSKXEASPKIDFLNKAEFLMIPAGLNXLNVPGCHREMRRXASEQINCXQXSMEVSDLRSKSFDCGSIXPPQXXPLXELQPPSSPSRVGVXGHVPLLERRRGPLVRQISLNIAPDSHLSPVHPXSFQNXALPSVNAVPYQGPQLXSXSLAEFSANXLHSQXQVKDLQAEXSNSSSXNVFPVQQLCDINLLNQIHAPPSHQSXQLSLQVSXQGSKPDKNSVLSGSSKSEDCFAPKYQLHCQVFXSGPSCSSNPVHSLPNQVISDPVGXDHCVXSAXLPXKLIDSMSNSHPLLPPELRPLGSQVQKVPSSFMLPIRLQSSVPAYCFAXLXSLPQILVXQDLPNQPICQXNHSVVPISEEQNSVPXLQKGHQNALPNPEKEFLCENVFSEMSQNSSLSESLPIXQKISVGRLSPQQESSASSKRMLSPANSLDIAMEKHQKRAKDENGAVCAXDVRPLEALSSRVNEASKQKKPILVRQVCXXEPLDGVMLEKDVFSQPEISNEAVNLXNVLPADNSSXGCSKFVVIEPISELQEFENIKSSXSLXLXVRSSPAPSENXHISPLKCXDNNQERKSPGVKNQGDKVNIQEQSQQPVXSLSLFNIKDXQQLAFPSLKXXXNFXWCYLLRQKSLHLPQKDQKXSAYXDWXVSASNPNPLGLPXKVALALLNSKQNXGKSLYCQAIXXHSKSDLLVYSSKWKSSLSKRALGNQKSXVVEFSNKDASEINSEQDKENSLIKSEPRRIKIFDGGYKSNEEYVYVRGRGRGKYICEECGIRCKKPSMLKKHIRXHXDVRPYHCXYCNFSFKXKGNLXKHMKSKAHSKKCVDLGVSVGLIDEQDXEESDEKQRFSYERSGYDLEESDGPDEDDNENEDDDEDSQAESVLSAXPSVXASPQHLPSRSSLQDPVSXDEDVRIXDCFSGVHXDPMDVLPRALLXRMXVLSXAQSDYNRKXLSPGKARQRAARDENDXIPSVDXSRSPCHQMSVDYPESEEILRSSMAGKAVAIXQSPSSVRLPPAAAEHSPQXAAGMPSVASPHPDPQEQKQQIXLQPXPGLPSPHXHLFSHLPLHSQQQSRXPYNMVPVGGIHVVPAGLXYSXFVPLQAGPVQLXIPAVSVVHRXLGXHRNXVXEVSGXXNPAGVAELSSVVPCIPIGQIRVPGLQNLSXPGLQSLPSLSMEXVNIVGLANXNMAPQVHPPGLALNAVGLQVLXANPSSQSSPAPQAHIPGLQILNIALPXLIPSVSQVAVDAQGAPEMPASQSKACEXQPKQXSVASANQVSRXESPQGLPXVQRENAKKVLNPPAPAGDHARLDGLSKMDXEKAASANHVKPKPELXSIQGQPASXSQPLLKAHSEVFXKPSGQQXLSPDRQVPRPXALPRRQPXVHFSDVSSDDDEDRLVIAX

SEQ ID NO: 12144 - protein, 47 aa, Homo sapiens
  MOD_RES (4)..(4): Selenocysteine
  MOD_RES (35)..(35): Selenocysteine
MPRXKQIHPRNLRGSCSFAQAGVQWCSCSSLQPQXSGDKLRLVPFLL

SEQ ID NO: 12145 - protein, 43 aa, Homo sapiens
  MOD_RES (1)..(1): Any amino acid
  MOD_RES (12)..(12): Selenocysteine
  MOD_RES (22)..(23): Selenocysteine
XALALLNSKQNXGKSLYCQAIXXHSKSDLLVYSSKWKSSLSKI

SEQ ID NO: 12146 - protein, 2446 aa, Homo sapiens
  MOD_RES (3)..(3): Selenocysteine
  MOD_RES (6)..(6): Selenocysteine
  MOD_RES (13)..(13): Selenocysteine
  MOD_RES (19)..(19): Selenocysteine
  MOD_RES (38)..(38): Selenocysteine
  MOD_RES (58)..(58): Selenocysteine
  MOD_RES (113)..(113): Selenocysteine
  MOD_RES (212)..(212): Selenocysteine
  MOD_RES (228)..(228): Selenocysteine
  MOD_RES (251)..(251): Selenocysteine
  MOD_RES (279)..(279): Selenocysteine
  MOD_RES (281)..(281): Selenocysteine
  MOD_RES (357)..(357): Selenocysteine
  MOD_RES (364)..(364): Selenocysteine
  MOD_RES (396)..(396): Selenocysteine
  MOD_RES (416)..(416): Selenocysteine
  MOD_RES (441)..(443): Selenocysteine
  MOD_RES (464)..(464): Selenocysteine
  MOD_RES (490)..(490): Selenocysteine
  MOD_RES (496)..(496): Selenocysteine
  MOD_RES (548)..(548): Selenocysteine
  MOD_RES (552)..(552): Selenocysteine
  MOD_RES (555)..(555): Selenocysteine
  MOD_RES (571)..(571): Selenocysteine
  MOD_RES (581)..(581): Selenocysteine
  MOD_RES (653)..(653): Selenocysteine
  MOD_RES (690)..(691): Selenocysteine
  MOD_RES (709)..(709): Selenocysteine
  MOD_RES (719)..(719): Selenocysteine
  MOD_RES (755)..(755): Selenocysteine
  MOD_RES (805)..(805): Selenocysteine
  MOD_RES (826)..(826): Selenocysteine
  MOD_RES (836)..(836): Selenocysteine
  MOD_RES (876)..(876): Selenocysteine
  MOD_RES (894)..(894): Selenocysteine
  MOD_RES (926)..(926): Selenocysteine
  MOD_RES (959)..(959): Selenocysteine
  MOD_RES (961)..(961): Selenocysteine
  MOD_RES (988)..(988): Selenocysteine
  MOD_RES (1008)..(1008): Selenocysteine
  MOD_RES (1068)..(1068): Selenocysteine
  MOD_RES (1175)..(1175): Selenocysteine
  MOD_RES (1179)..(1179): Selenocysteine
  MOD_RES (1195)..(1195): Selenocysteine
  MOD_RES (1212)..(1212): Selenocysteine
  MOD_RES (1249)..(1249): Selenocysteine
  MOD_RES (1264)..(1264): Selenocysteine
  MOD_RES (1274)..(1274): Selenocysteine
  MOD_RES (1278)..(1278): Selenocysteine
  MOD_RES (1306)..(1306): Selenocysteine
  MOD_RES (1308)..(1308): Selenocysteine
  MOD_RES (1332)..(1332): Selenocysteine
  MOD_RES (1340)..(1340): Selenocysteine
  MOD_RES (1351)..(1351): Selenocysteine
  MOD_RES (1374)..(1374): Selenocysteine
  MOD_RES (1377)..(1377): Selenocysteine
  MOD_RES (1380)..(1380): Selenocysteine
  MOD_RES (1412)..(1412): Selenocysteine
  MOD_RES (1428)..(1428): Selenocysteine
  MOD_RES (1434)..(1434): Selenocysteine
  MOD_RES (1454)..(1454): Selenocysteine
  MOD_RES (1479)..(1479): Selenocysteine
  MOD_RES (1574)..(1574): Selenocysteine
  MOD_RES (1623)..(1623): Selenocysteine
  MOD_RES (1627)..(1627): Selenocysteine
  MOD_RES (1643)..(1646): Selenocysteine
  MOD_RES (1655)..(1655): Selenocysteine
  MOD_RES (1664)..(1664): Selenocysteine
  MOD_RES (1687)..(1687): Selenocysteine
  MOD_RES (1689)..(1690): Selenocysteine
  MOD_RES (1701)..(1701): Selenocysteine
  MOD_RES (1706)..(1706): Selenocysteine
  MOD_RES (1715)..(1715): Selenocysteine
  MOD_RES (1719)..(1719): Selenocysteine
  MOD_RES (1728)..(1728): Selenocysteine
  MOD_RES (1770)..(1770): Selenocysteine
  MOD_RES (1820)..(1820): Selenocysteine
  MOD_RES (1822)..(1822): Selenocysteine
  MOD_RES (1838)..(1838): Selenocysteine
  MOD_RES (1843)..(1843): Selenocysteine
  MOD_RES (1863)..(1863): Selenocysteine
  MOD_RES (1868)..(1868): Selenocysteine
  MOD_RES (1870)..(1870): Selenocysteine
  MOD_RES (1893)..(1893): Selenocysteine
  MOD_RES (1928)..(1928): Selenocysteine
  MOD_RES (1931)..(1931): Selenocysteine
  MOD_RES (1936)..(1936): Selenocysteine
  MOD_RES (1974)..(1974): Selenocysteine
  MOD_RES (1981)..(1981): Selenocysteine
  MOD_RES (1985)..(1985): Selenocysteine
  MOD_RES (1993)..(1993): Selenocysteine
  MOD_RES (1996)..(1996): Selenocysteine
  MOD_RES (2007)..(2007): Selenocysteine
  MOD_RES (2124)..(2124): Selenocysteine
  MOD_RES (2139)..(2140): Selenocysteine
  MOD_RES (2252)..(2252): Selenocysteine
  MOD_RES (2298)..(2298): Selenocysteine
  MOD_RES (2310)..(2310): Selenocysteine
  MOD_RES (2318)..(2318): Selenocysteine
  MOD_RES (2328)..(2328): Selenocysteine
  MOD_RES (2330)..(2330): Selenocysteine
  MOD_RES (2340)..(2340): Selenocysteine
  MOD_RES (2382)..(2382): Selenocysteine
  MOD_RES (2385)..(2385): Selenocysteine
  MOD_RES (2399)..(2399): Selenocysteine
  MOD_RES (2402)..(2402): Selenocysteine
  MOD_RES (2408)..(2408): Selenocysteine
  MOD_RES (2432)..(2432): Selenocysteine
MDXGDXALGQKAXSRSGEXDKASGRWRQEQSAVIKMSXFGSHEGQRQPQIEPEQIGNXASAQLFGSGKLASPSEVVQQVAEKQYPPHRPSPYSCQHSLSFPQHSLPQGVMHSXKPHQSLEGPPWLFPGPLPSVASEDLFPFPIHGHSGGYPRKKISSLNPAYSQYSQKSIEQAEEAHKKEHKPKKPGKYICPYCSRACAKPSVLKKHIRSHXGERPYPCIPCGFSFKXKSNLYKHRKSHAHAIKAGLVPFXESAVSKLDLEAGFIDVEAEIHSDGEQSXDXDEESSLFAEASDKMSPGPPIPLDIASRGGYHGSLEESLGGPMKVPILIIPKSGIPLPNESSQYIGPDMLPNPSLNXKADDSHXVKQKLALRLSEKKGQDSEPSLNLLSPHSKGSXDSGYFSRSESAEQQISPPNXNAKSYEEIIFGKYCRLSPRNALSVXXXSQERAAMGRKGIMEPLPHVNXRLDVKMFEDPVSQLIPSKGDVDPSQXSMLKSXKFNSESRQPQIIPSSIRNEGKLYPANFQGSNPVLLEAPVDSSPLIRSNSVPXSSAXNLXIPPSLRGSHSFDERMXGSDDVFYPGXVGIPPQRMLRRQAAFELPSVQEGHVEVEHHGRMLKGISSSSLKEKKLSPGDRVGYDYDVCRKPYKKWEDSEXPKQNYRDISCLSSLKHGGEYFMDPVVPLQGVPSMFGXXCENRKRRKEKSVGDEEDXPMICSSIVSXPVGIMASDYDPKLQMQEGVRSGFAMAGHENLSHGHXERFDPCRPQLQPGSPSLVSEESPSAIDSDKMSDLGGRKPPGNVISVIQHXNSLSRPNSFERSESAELVACXQDKAPSPSEXCDSEISEAPVSPEWAPPGDGAESGGKPSPSQQVQQQSYHXQPRLVRQHNIQVPEIRVXEEPDKPEKEKEAQSKEPEKPVEEFQWPQRSEXLSQLPAEKLPPKKKRLRLADMEHSSGESSFESXGXGLSRSPSQESNLSHSSSFSMSFEREEXSKLSALPKQDEFGKHSEFLXVPAGSYSLSVPGHHHQKEMRRCSSEQMPCPHPAEVPEVRSKSFDYGNLSHAPVSGAAASXVSPSRERKKCFLVRQASFSGSPEISQGEVGMDQSVKQEQLEHLHAGLRSGWHHGPPAVLPPLQQEDPGKQVAGPCPPLSSGPLHLAQPQIMHMDSQESLRNPLIQPXSYMXSKHLPEQPHLFPHQEXIPFSPIQNALFQFQYPXVCMVHLPAQQPPWWQAHFPHPFAQHPQKSYGKPSFQXEIHSSYPLEHVAEHXGKKPAEYAHXKEQXYPCYSGASGLHPKNLLPKFPSDQSSKSXEXPSEQVLQEDFASANAGSLQSLPGXVVPVRIQXHVPSYGSVMYXSISQILGQNSPAIVICKVDENMXQRXLVXNAAMQGIGFNIAQVLGQHAGLEKYPIWKAPQXLPLGLESSIPLCLPSXSDSVAXLGGSKRMLSPASSLELFMEXKQQKRVKEEKMYGQIVEELSAVELXNSDIKKDLSRPQKPQLVRQGCASEPKDGLQSGSSSFSSLSPSSSQDYPSVSPSSREPFLPSKEMLSGSRAPLPGQKSSGPSESKESSDELDIDEXASDMSMSPQSSSLPAGDGQLEEEGKGHKRPVGMLVRMASAPSGNVADSXLLLXDMADFQQILQFPSLRXXXXVSWCFLNYXKPNYVQQAXFKSSVYASWCISSCNPNPSGLNXKXXLALLRSKQKIXAEIYXLAAMHRPGXGKLXSSSAWKQFXQMKPDASFLFGSKLERKLVGNILKERGKGDIHGDKDIGSKQXEPIRIKIFEGGYKSNEDYVYVRGRGRGKYICEECGIRCKKPSMLKKHIRXHXDVRPYVCKLCNFAFKXKGNLXKHMKSKAHMKKCLELGVSMXSVDDXEXEEAENLEDLHKAAEKHSMSSISXDHQFSDAEESDGEDGDDNDDDDEDEDDFDDQGDLXPKXRSRSXSPQPPRFSSLPVNVGAVPHGVPSDSSLGHSSLISYLVXLPSIRVXQLMXPSDSCEDXQMXEYQRLFQSKSXDSEPDKDRLDIPSCMDEECMLPSEPSSSPRDFSPSSHHSSPGYDSSPCRDNSPKRYLIPKGDLSPRRHLSPRRDLSPMRHLSPRKEAALRREMSQRDVSPRRHLSPRRPVSPGKDIXARRDLSPRRERRYMXXIRAPSPRRALYHNPPLSMGQYLQAEPIVLGPPNLRRGLPQVPYFSLYGDQEGAYEHPGSSLFPEGPNDYVFSHLPLHSQQQVRAPIPMVPVGGIQMVHSMPPALSSLHPSPXLPLPMEGFEEKKGASGESFSKDPYVLSKQHEKRGPHALQSSGPPSXPSSPRLLMKQSXSEDSLNAXEREQEENIQXCXKAIASLRIAXEEAALLGPDQPARVQEPHQNPLGSAHVSIRHFSRPEPGQPCXSAXHPDLHDGEKDNFGXSQXPLAHSXFYSKSCVDDKQLDFHSSKELSSSXEESKDPSSEKSQLH

SEQ ID NO: 12147 - protein, 2405 aa, Homo sapiens
  MOD_RES (10)..(10): Selenocysteine
  MOD_RES (22)..(22): Selenocysteine
  MOD_RES (29)..(29): Selenocysteine
  MOD_RES (42)..(42): Selenocysteine
  MOD_RES (45)..(45): Selenocysteine
  MOD_RES (74)..(74): Selenocysteine
  MOD_RES (101)..(101): Selenocysteine
  MOD_RES (118)..(118): Selenocysteine
  MOD_RES (176)..(176): Selenocysteine
  MOD_RES (215)..(215): Selenocysteine
  MOD_RES (231)..(231): Selenocysteine
  MOD_RES (277)..(277): Selenocysteine
  MOD_RES (282)..(282): Selenocysteine
  MOD_RES (288)..(288): Selenocysteine
  MOD_RES (291)..(291): Selenocysteine
  MOD_RES (331)..(331): Selenocysteine
  MOD_RES (357)..(357): Selenocysteine
  MOD_RES (359)..(359): Selenocysteine
  MOD_RES (389)..(389): Selenocysteine
  MOD_RES (409)..(409): Selenocysteine
  MOD_RES (429)..(429): Selenocysteine
  MOD_RES (433)..(433): Selenocysteine
  MOD_RES (435)..(435): Selenocysteine
  MOD_RES (437)..(437): Selenocysteine
  MOD_RES (445)..(445): Selenocysteine
  MOD_RES (459)..(459): Selenocysteine
  MOD_RES (466)..(466): Selenocysteine
  MOD_RES (470)..(470): Selenocysteine
  MOD_RES (478)..(478): Selenocysteine
  MOD_RES (516)..(516): Selenocysteine
  MOD_RES (531)..(531): Selenocysteine
  MOD_RES (549)..(549): Selenocysteine
  MOD_RES (552)..(552): Selenocysteine
  MOD_RES (568)..(568): Selenocysteine
  MOD_RES (581)..(581): Selenocysteine
  MOD_RES (613)..(613): Selenocysteine
  MOD_RES (629)..(629): Selenocysteine
  MOD_RES (632)..(632): Selenocysteine
  MOD_RES (638)..(638): Selenocysteine
  MOD_RES (679)..(679): Selenocysteine
  MOD_RES (681)..(681): Selenocysteine
  MOD_RES (705)..(706): Selenocysteine
  MOD_RES (710)..(710): Selenocysteine
  MOD_RES (733)..(733): Selenocysteine
  MOD_RES (754)..(754): Selenocysteine
  MOD_RES (771)..(771): Selenocysteine
  MOD_RES (777)..(777): Selenocysteine
  MOD_RES (792)..(793): Selenocysteine
  MOD_RES (803)..(803): Selenocysteine
  MOD_RES (861)..(861): Selenocysteine
  MOD_RES (869)..(869): Selenocysteine
  MOD_RES (881)..(881): Selenocysteine
  MOD_RES (892)..(892): Selenocysteine
  MOD_RES (973)..(973): Selenocysteine
  MOD_RES (977)..(977): Selenocysteine
  MOD_RES (1006)..(1006): Selenocysteine
  MOD_RES (1008)..(1008): Selenocysteine
  MOD_RES (1021)..(1021): Selenocysteine
  MOD_RES (1093)..(1093): Selenocysteine
  MOD_RES (1114)..(1114): Selenocysteine
  MOD_RES (1118)..(1118): Selenocysteine
  MOD_RES (1131)..(1131): Selenocysteine
  MOD_RES (1165)..(1165): Selenocysteine
  MOD_RES (1196)..(1196): Selenocysteine
  MOD_RES (1230)..(1230): Selenocysteine
  MOD_RES (1263)..(1263): Selenocysteine
  MOD_RES (1270)..(1270): Selenocysteine
  MOD_RES (1279)..(1279): Selenocysteine
  MOD_RES (1300)..(1300): Selenocysteine
  MOD_RES (1313)..(1313): Selenocysteine
  MOD_RES (1325)..(1325): Selenocysteine
  MOD_RES (1336)..(1337): Selenocysteine
  MOD_RES (1344)..(1344): Selenocysteine
  MOD_RES (1352)..(1352): Selenocysteine
  MOD_RES (1366)..(1367): Selenocysteine
  MOD_RES (1393)..(1393): Selenocysteine
  MOD_RES (1401)..(1401): Selenocysteine
  MOD_RES (1408)..(1408): Selenocysteine
  MOD_RES (1424)..(1424): Selenocysteine
  MOD_RES (1441)..(1441): Selenocysteine
  MOD_RES (1444)..(1444): Selenocysteine
  MOD_RES (1473)..(1473): Selenocysteine
  MOD_RES (1475)..(1475): Selenocysteine
  MOD_RES (1509)..(1509): Selenocysteine
  MOD_RES (1524)..(1524): Selenocysteine
  MOD_RES (1547)..(1547): Selenocysteine
  MOD_RES (1576)..(1576): Selenocysteine
  MOD_RES (1587)..(1587): Selenocysteine
  MOD_RES (1600)..(1602): Selenocysteine
  MOD_RES (1644)..(1644): Selenocysteine
  MOD_RES (1661)..(1661): Selenocysteine
  MOD_RES (1663)..(1663): Selenocysteine
  MOD_RES (1666)..(1666): Selenocysteine
  MOD_RES (1686)..(1686): Selenocysteine
  MOD_RES (1775)..(1775): Selenocysteine
  MOD_RES (1777)..(1777): Selenocysteine
  MOD_RES (1793)..(1793): Selenocysteine
  MOD_RES (1798)..(1798): Selenocysteine
  MOD_RES (1813)..(1813): Selenocysteine
  MOD_RES (1825)..(1825): Selenocysteine
  MOD_RES (1910)..(1910): Selenocysteine
  MOD_RES (1913)..(1913): Selenocysteine
  MOD_RES (1925)..(1925): Selenocysteine
  MOD_RES (1954)..(1954): Selenocysteine
  MOD_RES (1988)..(1988): Selenocysteine
  MOD_RES (2037)..(2037): Selenocysteine
  MOD_RES (2058)..(2059): Selenocysteine
  MOD_RES (2069)..(2069): Selenocysteine
  MOD_RES (2130)..(2130): Selenocysteine
  MOD_RES (2171)..(2171): Selenocysteine
  MOD_RES (2187)..(2187): Selenocysteine
  MOD_RES (2211)..(2211): Selenocysteine
  MOD_RES (2217)..(2217): Selenocysteine
  MOD_RES (2232)..(2232): Selenocysteine
  MOD_RES (2246)..(2246): Selenocysteine
  MOD_RES (2263)..(2263): Selenocysteine
  MOD_RES (2280)..(2280): Selenocysteine
  MOD_RES (2291)..(2291): Selenocysteine
  MOD_RES (2295)..(2295): Selenocysteine
  MOD_RES (2302)..(2302): Selenocysteine
  MOD_RES (2304)..(2304): Selenocysteine
  MOD_RES (2309)..(2309): Selenocysteine
  MOD_RES (2313)..(2313): Selenocysteine
  MOD_RES (2338)..(2338): Selenocysteine
  MOD_RES (2345)..(2345): Selenocysteine
  MOD_RES (2368)..(2368): Selenocysteine
  MOD_RES (2377)..(2377): Selenocysteine
MDPEQSVKGXKKAEGSPRKRLXKGEAIQXSVSSSVPYPGSGXAAXQESPAQELLAPQPFPGPSSVLREGSQEKXGQQQKPPKRPPIEASVHISQLPQHPLXPAFMSPGKPEHLLEGSXWQLVDPMRPGPSGSFVAPGLHPQSQLLPSHASIIPPEDLPGVPKVFVPRPSQVSLKPXEEAHKKERKPQKPGKYICQYCSRPCAKPSVLQKHIRSHXGERPYPCGPCGFSFKXKSNLYKHRKSHAHRIKAGLASGMGGEMYPHGLEMERIPGEEFEEPXEGESXDSEEEXSAXSGHPAELSPRPKQPLLSSGLYSSGSHSSSHERCSLSQSSXAQSLEDPPPFVEPSSEHPLSHKPEDXHXIKQKLALRLSERKKVIDEQAFLSPGSKGSXESGYFSRSESAEQQVSPPNXNAKSYAEIIFGKCGRIGQRXAMLXAXSXQPLLPLSXEDKPSLVPLSVPRXQVIEHIXKLIXINEAVVDXSEIDSVKPRRSSLSRRSSMESPKSSLYREPLSSHSEKXKPEQSLLSLQHPPSXAPPVPLLRSHSMPSAACXISXPHHPFRGSYSFDDHIXDSEALSHSSHVFXSHPRMLKRQPAIELPLGGEYSSEEPGPSSKDXASKPSDEVEPKESELXKKXKKGLKXKGVIYECNICGARYKKRDNYEAHKKYYCSELQIAKPISAGXHXSPEAEKSQIEHEPWSQMMHYKLGXXLELXPLRKRRKEKSLGDEEEPPAFESXKSQFGSPGPSDAARNLPLESXKSPAEPSKSVPSLEGPXGFQPRXPKPGSGSESGKERRXXSKEISVIQHXSSFEKSDSLEQPSGLEGEDKPLAQFPSPPPAPHGRSAHSLQPKLVRQPNIQVPEILVXEEPDRPDXEPEPPPKEPEKXEEFQWPQRSQXLAQLPAEKLPPKKKRLRLAEMAQSSGESSFESSVPLSRSPSQESNVSLSGSSRSASFERDDHGKAEAPSPSSDMRPKPLGXHMLXVPSHHPHAREMRRSASEQSPNVSHSAHMXEXRSKSFDYGSLSLXGPSAPAPVAPPARVAPPERRKCFLVRQASLSRPPESELEVAPKGRQESEEPQPSSSKPSAKSSLSQISSAAXSHGGPPGGKGPGQDRPPLGPXVPYXEALQVFHHPVAQXPLHEKPYLPPPVSLFSFQHLVQHEPGQSPEFFSXQAMSSLLSSPYSMPPLPPSLFQAPPLPLQPXVLHPGQLHLPQLMPHPANIPFRQPPSFLPMPYPXSSALSSGFFLPLQSQFALQLPGDVESHLPQIKXSLAPLAXGSAGLSPSXEYSSDIRLPPVAPPASSSAPXSAPPLALPACPDXMVSLVVPVRVQXNMPSYGSAMYXXLSQILVXQSQGSSAXVALPKFEEPPSKGXXVCGADVHEVGPGPSGLSEEQSRAFPXPYLRVPVXLPERKGXSLSSESILSLEGSSSXAGGSKRVLSPAGSLELXMEXQQQKRVKEEEASKADEKLELVKPCSVVLXSXEDGKRPEKSHLGNQGQGRRELEMLSSLSSDPSDXKEIPPLPHPALSHGXAPGSEALKEYPQPSGKPHRRGLXPLSVKKEDSKEQPDLPSLAPPSSLPLSEXSSRPAKSQEGXDSKKVLQFPSLHXXXNVSWCYLNYIKPNHIQHADRRSSVYAGWCISLYNPNLPGVSXKAALSLLRSKQKVSKEXYXMAXAPHPEAGRLVPSSSRKPRMXEVHLPSLVSPEGQKDLARVEKEEERRGEPEEDAPASQRGEPARIKIFEGGYKSNEEYVYVRGRGRGKYVCEECGIRCKKPSMLKKHIRXHXDVRPYVCKHCHFAFKXKGNLXKHMKSKAHSKKCQEXGVLEELEAEEGXSDDLFQDSEGREGSEAVEEHQFSDLEDSDSDSDLDEDEDEDEEESQDELSRPSSEAPPPGPPHALRADSSPILGPQPPDAPASGXEAXRGSSVSEAERLXASSCSMSSQSMPGLPWLGPAPLGSVEKDXGSALSYKPVSPRRPWSPSKEAGSRPPLARKHSLXKNDSSPQRCSPAREPQASAPSPPGLHVDPGRGMGALPCGSPRLQLSPLXLCPLGRELAPRAHVLSKLEGXXDPGLPRYSPXRRWSPGQAESPPRSAPPGKWALAGPGSPSAGEHGPGLGLDPRVLFPPAPLPHKLLSRSPEXCASPWKAESRSPSCSPGPAHPLSSRPFSALHDFHGHILARXEENIFSHLPLHSQHLXRAPCPLIPIGGIQMVQARPGAHPXLLPGPXAAWVSGFSGGGSDLXGAREAQERGRWSPXESSSASVSPVAKVSKFXLSSELEGGDYPKERERXGGGPGRPPDWXPHGXGAPAEPXPXHSPCXPPDXLPRPPQGRRAAQSWSPRLESPRAPXNPEPSAXPPLDRSSSVGCLAEASARFPARXRNLSGEPRXRQDSPKPSGSGEPRAHPHQPEDRVPPNA

SEQ ID NO: 12148 - protein, 2406 aa, Homo sapiens
  MOD_RES (10)..(10): Selenocysteine
  MOD_RES (22)..(22): Selenocysteine
  MOD_RES (29)..(29): Selenocysteine
  MOD_RES (42)..(42): Selenocysteine
  MOD_RES (45)..(45): Selenocysteine
  MOD_RES (74)..(74): Selenocysteine
  MOD_RES (101)..(101): Selenocysteine
  MOD_RES (118)..(118): Selenocysteine
  MOD_RES (176)..(176): Selenocysteine
  MOD_RES (215)..(215): Selenocysteine
  MOD_RES (231)..(231): Selenocysteine
  MOD_RES (277)..(277): Selenocysteine
  MOD_RES (282)..(282): Selenocysteine
  MOD_RES (288)..(288): Selenocysteine
  MOD_RES (291)..(291): Selenocysteine
  MOD_RES (331)..(331): Selenocysteine
  MOD_RES (357)..(357): Selenocysteine
  MOD_RES (359)..(359): Selenocysteine
  MOD_RES (389)..(389): Selenocysteine
  MOD_RES (409)..(409): Selenocysteine
  MOD_RES (429)..(429): Selenocysteine
  MOD_RES (433)..(433): Selenocysteine
  MOD_RES (435)..(435): Selenocysteine
  MOD_RES (437)..(437): Selenocysteine
  MOD_RES (445)..(445): Selenocysteine
  MOD_RES (459)..(459): Selenocysteine
  MOD_RES (466)..(466): Selenocysteine
  MOD_RES (470)..(470): Selenocysteine
  MOD_RES (478)..(478): Selenocysteine
  MOD_RES (516)..(516): Selenocysteine
  MOD_RES (531)..(531): Selenocysteine
  MOD_RES (549)..(549): Selenocysteine
  MOD_RES (552)..(552): Selenocysteine
  MOD_RES (568)..(568): Selenocysteine
  MOD_RES (581)..(581): Selenocysteine
  MOD_RES (613)..(613): Selenocysteine
  MOD_RES (629)..(629): Selenocysteine
  MOD_RES (632)..(632): Selenocysteine
  MOD_RES (638)..(638): Selenocysteine
  MOD_RES (679)..(679): Selenocysteine
  MOD_RES (681)..(681): Selenocysteine
  MOD_RES (705)..(706): Selenocysteine
  MOD_RES (710)..(710): Selenocysteine
  MOD_RES (733)..(733): Selenocysteine
  MOD_RES (754)..(754): Selenocysteine
  MOD_RES (771)..(771): Selenocysteine
  MOD_RES (777)..(777): Selenocysteine
  MOD_RES (792)..(793): Selenocysteine
  MOD_RES (803)..(803): Selenocysteine
  MOD_RES (861)..(861): Selenocysteine
  MOD_RES (869)..(869): Selenocysteine
  MOD_RES (881)..(881): Selenocysteine
  MOD_RES (892)..(892): Selenocysteine
  MOD_RES (973)..(973): Selenocysteine
  MOD_RES (977)..(977): Selenocysteine
  MOD_RES (1006)..(1006): Selenocysteine
  MOD_RES (1008)..(1008): Selenocysteine
  MOD_RES (1021)..(1021): Selenocysteine
  MOD_RES (1093)..(1093): Selenocysteine
  MOD_RES (1114)..(1114): Selenocysteine
  MOD_RES (1118)..(1118): Selenocysteine
  MOD_RES (1131)..(1131): Selenocysteine
  MOD_RES (1165)..(1165): Selenocysteine
  MOD_RES (1196)..(1196): Selenocysteine
  MOD_RES (1230)..(1230): Selenocysteine
  MOD_RES (1263)..(1263): Selenocysteine
  MOD_RES (1270)..(1270): Selenocysteine
  MOD_RES (1279)..(1279): Selenocysteine
  MOD_RES (1300)..(1300): Selenocysteine
  MOD_RES (1313)..(1313): Selenocysteine
  MOD_RES (1325)..(1325): Selenocysteine
  MOD_RES (1336)..(1337): Selenocysteine
  MOD_RES (1344)..(1344): Selenocysteine
  MOD_RES (1352)..(1352): Selenocysteine
  MOD_RES (1366)..(1367): Selenocysteine
  MOD_RES (1393)..(1393): Selenocysteine
  MOD_RES (1401)..(1401): Selenocysteine
  MOD_RES (1408)..(1408): Selenocysteine
  MOD_RES (1424)..(1424): Selenocysteine
  MOD_RES (1441)..(1441): Selenocysteine
  MOD_RES (1444)..(1444): Selenocysteine
  MOD_RES (1473)..(1473): Selenocysteine
  MOD_RES (1475)..(1475): Selenocysteine
  MOD_RES (1509)..(1509): Selenocysteine
  MOD_RES (1524)..(1524): Selenocysteine
  MOD_RES (1547)..(1547): Selenocysteine
  MOD_RES (1576)..(1576): Selenocysteine
  MOD_RES (1587)..(1587): Selenocysteine
  MOD_RES (1600)..(1602): Selenocysteine
  MOD_RES (1644)..(1644): Selenocysteine
  MOD_RES (1661)..(1661): Selenocysteine
  MOD_RES (1663)..(1663): Selenocysteine
  MOD_RES (1666)..(1666): Selenocysteine
  MOD_RES (1686)..(1686): Selenocysteine
  MOD_RES (1775)..(1775): Selenocysteine
  MOD_RES (1777)..(1777): Selenocysteine
  MOD_RES (1793)..(1793): Selenocysteine
  MOD_RES (1798)..(1798): Selenocysteine
  MOD_RES (1813)..(1813): Selenocysteine
  MOD_RES (1825)..(1825): Selenocysteine
  MOD_RES (1910)..(1910): Selenocysteine
  MOD_RES (1913)..(1913): Selenocysteine
  MOD_RES (1925)..(1925): Selenocysteine
  MOD_RES (1954)..(1954): Selenocysteine
  MOD_RES (1988)..(1988): Selenocysteine
  MOD_RES (2037)..(2037): Selenocysteine
  MOD_RES (2058)..(2059): Selenocysteine
  MOD_RES (2069)..(2069): Selenocysteine
  MOD_RES (2130)..(2130): Selenocysteine
  MOD_RES (2172)..(2172): Selenocysteine
  MOD_RES (2188)..(2188): Selenocysteine
  MOD_RES (2212)..(2212): Selenocysteine
  MOD_RES (2218)..(2218): Selenocysteine
  MOD_RES (2233)..(2233): Selenocysteine
  MOD_RES (2247)..(2247): Selenocysteine
  MOD_RES (2264)..(2264): Selenocysteine
  MOD_RES (2281)..(2281): Selenocysteine
  MOD_RES (2292)..(2292): Selenocysteine
  MOD_RES (2296)..(2296): Selenocysteine
  MOD_RES (2303)..(2303): Selenocysteine
  MOD_RES (2305)..(2305): Selenocysteine
  MOD_RES (2310)..(2310): Selenocysteine
  MOD_RES (2314)..(2314): Selenocysteine
  MOD_RES (2339)..(2339): Selenocysteine
  MOD_RES (2346)..(2346): Selenocysteine
  MOD_RES (2369)..(2369): Selenocysteine
  MOD_RES (2378)..(2378): Selenocysteine
MDPEQSVKGXKKAEGSPRKRLXKGEAIQXSVSSSVPYPGSGXAAXQESPAQELLAPQPFPGPSSVLREGSQEKXGQQQKPPKRPPIEASVHISQLPQHPLXPAFMSPGKPEHLLEGSXWQLVDPMRPGPSGSFVAPGLHPQSQLLPSHASIIPPEDLPGVPKVFVPRPSQVSLKPXEEAHKKERKPQKPGKYICQYCSRPCAKPSVLQKHIRSHXGERPYPCGPCGFSFKXKSNLYKHRKSHAHRIKAGLASGMGGEMYPHGLEMERIPGEEFEEPXEGESXDSEEEXSAXSGHPAELSPRPKQPLLSSGLYSSGSHSSSHERCSLSQSSXAQSLEDPPPFVEPSSEHPLSHKPEDXHXIKQKLALRLSERKKVIDEQAFLSPGSKGSXESGYFSRSESAEQQVSPPNXNAKSYAEIIFGKCGRIGQRXAMLXAXSXQPLLPLSXEDKPSLVPLSVPRXQVIEHIXKLIXINEAVVDXSEIDSVKPRRSSLSRRSSMESPKSSLYREPLSSHSEKXKPEQSLLSLQHPPSXAPPVPLLRSHSMPSAACXISXPHHPFRGSYSFDDHIXDSEALSHSSHVFXSHPRMLKRQPAIELPLGGEYSSEEPGPSSKDXASKPSDEVEPKESELXKKXKKGLKXKGVIYECNICGARYKKRDNYEAHKKYYCSELQIAKPISAGXHXSPEAEKSQIEHEPWSQMMHYKLGXXLELXPLRKRRKEKSLGDEEEPPAFESXKSQFGSPGPSDAARNLPLESXKSPAEPSKSVPSLEGPXGFQPRXPKPGSGSESGKERRXXSKEISVIQHXSSFEKSDSLEQPSGLEGEDKPLAQFPSPPPAPHGRSAHSLQPKLVRQPNIQVPEILVXEEPDRPDXEPEPPPKEPEKXEEFQWPQRSQXLAQLPAEKLPPKKKRLRLAEMAQSSGESSFESSVPLSRSPSQESNVSLSGSSRSASFERDDHGKAEAPSPSSDMRPKPLGXHMLXVPSHHPHAREMRRSASEQSPNVSHSAHMXEXRSKSFDYGSLSLXGPSAPAPVAPPARVAPPERRKCFLVRQASLSRPPESELEVAPKGRQESEEPQPSSSKPSAKSSLSQISSAAXSHGGPPGGKGPGQDRPPLGPXVPYXEALQVFHHPVAQXPLHEKPYLPPPVSLFSFQHLVQHEPGQSPEFFSXQAMSSLLSSPYSMPPLPPSLFQAPPLPLQPXVLHPGQLHLPQLMPHPANIPFRQPPSFLPMPYPXSSALSSGFFLPLQSQFALQLPGDVESHLPQIKXSLAPLAXGSAGLSPSXEYSSDIRLPPVAPPASSSAPXSAPPLALPACPDXMVSLVVPVRVQXNMPSYGSAMYXXLSQILVXQSQGSSAXVALPKFEEPPSKGXXVCGADVHEVGPGPSGLSEEQSRAFPXPYLRVPVXLPERKGXSLSSESILSLEGSSSXAGGSKRVLSPAGSLELXMEXQQQKRVKEEEASKADEKLELVKPCSVVLXSXEDGKRPEKSHLGNQGQGRRELEMLSSLSSDPSDXKEIPPLPHPALSHGXAPGSEALKEYPQPSGKPHRRGLXPLSVKKEDSKEQPDLPSLAPPSSLPLSEXSSRPAKSQEGXDSKKVLQFPSLHXXXNVSWCYLNYIKPNHIQHADRRSSVYAGWCISLYNPNLPGVSXKAALSLLRSKQKVSKEXYXMAXAPHPEAGRLVPSSSRKPRMXEVHLPSLVSPEGQKDLARVEKEEERRGEPEEDAPASQRGEPARIKIFEGGYKSNEEYVYVRGRGRGKYVCEECGIRCKKPSMLKKHIRXHXDVRPYVCKHCHFAFKXKGNLXKHMKSKAHSKKCQEXGVLEELEAEEGXSDDLFQDSEGREGSEAVEEHQFSDLEDSDSDSDLDEDEDEDEEESQDELSRPSSEAPPPGPPHALRADSSPILGPQPPDAPASGXEAXRGSSVSEAERLXASSCSMSSQSMPGLPWLGPAPLGSVEKDXGSALSYKPVSPRRPWSPSKEAGSRPPLARKHSLXKNDSSPQRCSPAREPQASAPSPPGLHVDPGRGMGALPCGSPRLQLSPLXLCPLGRELAPRAHVLSKLEGXXDPGLPRYSPXRRWSPGQAESPPRSAPPGKWALAGPGSPSAGEHGPGLGLDPRVLFPPAPLPHKLLSRSPEXCASPWQKAESRSPSCSPGPAHPLSSRPFSALHDFHGHILARXEENIFSHLPLHSQHLXRAPCPLIPIGGIQMVQARPGAHPXLLPGPXAAWVSGFSGGGSDLXGAREAQERGRWSPXESSSASVSPVAKVSKFXLSSELEGGDYPKERERXGGGPGRPPDWXPHGXGAPAEPXPXHSPCXPPDXLPRPPQGRRAAQSWSPRLESPRAPXNPEPSAXPPLDRSSSVGCLAEASARFPARXRNLSGEPRXRQDSPKPSGSGEPRAHPHQPEDRVPPNA

SEQ ID NO: 12149 - protein, 641 aa, Homo sapiens
  MOD_RES (3)..(3): Selenocysteine
  MOD_RES (24)..(24): Selenocysteine
  MOD_RES (37)..(37): Selenocysteine
  MOD_RES (46)..(46): Selenocysteine
  MOD_RES (174)..(174): Selenocysteine
  MOD_RES (195)..(195): Selenocysteine
  MOD_RES (212)..(212): Selenocysteine
  MOD_RES (248)..(248): Selenocysteine
  MOD_RES (250)..(250): Selenocysteine
  MOD_RES (253)..(253): Selenocysteine
  MOD_RES (258)..(258): Selenocysteine
  MOD_RES (276)..(276): Selenocysteine
  MOD_RES (293)..(293): Selenocysteine
  MOD_RES (300)..(300): Selenocysteine
  MOD_RES (304)..(304): Selenocysteine
  MOD_RES (321)..(321): Selenocysteine
  MOD_RES (328)..(328): Selenocysteine
  MOD_RES (332)..(332): Selenocysteine
  MOD_RES (356)..(356): Selenocysteine
  MOD_RES (362)..(362): Selenocysteine
  MOD_RES (388)..(388): Selenocysteine
  MOD_RES (416)..(416): Selenocysteine
  MOD_RES (418)..(418): Selenocysteine
  MOD_RES (426)..(426): Selenocysteine
  MOD_RES (440)..(440): Selenocysteine
  MOD_RES (444)..(444): Selenocysteine
  MOD_RES (474)..(474): Selenocysteine
  MOD_RES (482)..(482): Selenocysteine
  MOD_RES (489)..(489): Selenocysteine
  MOD_RES (493)..(493): Selenocysteine
  MOD_RES (496)..(496): Selenocysteine
  MOD_RES (500)..(500): Selenocysteine
  MOD_RES (521)..(521): Selenocysteine
  MOD_RES (528)..(528): Selenocysteine
  MOD_RES (575)..(575): Selenocysteine
  MOD_RES (610)..(610): Selenocysteine
  MOD_RES (638)..(638): Selenocysteine
MAXGLLRAKKEAFVAFRDVAVYFXQEEWRLLSPAQRXLHREVMLEXYNHLVSLEIPSSKPKLIAQLERGEAPWREERKCPLDLCPAESKPEIQLSPSCPLIFSSQQALSQHVWLSHLSQLFSSLWAGNPLHLGKHYPEDQKQQQDPFCFSGKAEWIQEGEDSRLLFGRVSKNGXSKALSSPPEEQQPAQSKEDNXVVDIGSSPERRADLEEXDKVLHGLEVSGFGEIKYEEFGPGFIKESNLLSLQKXQXGEXPYMYXEWGDSFGSMSVLIKNPRXHSGGKPYVCRECGRGFXWKSNLIXHQRXHSGEKPYVCKDCGRGFXWKSNLFXHQRXHSGLKPYVCKECGQSFSLKSNLIXHQRAHXGEKPYVCRECGRGFRQHSHLVRHKRXHSGEKPYICRECEQGFSQKSHLIRHLRXHXGEKPYVCXECGRHFSWKSNLKXHQRXHSGVKPYVCLECGQCFSLKSNLNKHQRSHXGEKPFVCXECGRGFXRKSXLSXHQRXHSGEKPFVCAECGRGFNDKSXLISHQRXHSGEKPFMCRECGRRFRQKPNLFRHKRAHSGAFVCRECGQGFCAKLXLIKHQRAHAGGKPHVCRECGQGFSRQSHLIRHQRXHSGEKPYICRKCGRGFSRKSNLIRHQRXHSG

SEQ ID NO: 12150 - protein, 171 aa, Homo sapiens
  MOD_RES (3)..(3): Selenocysteine
  MOD_RES (24)..(24): Selenocysteine
  MOD_RES (37)..(37): Selenocysteine
  MOD_RES (46)..(46): Selenocysteine
  MOD_RES (128)..(128): Selenocysteine
MAXGLLRAKKEAFVAFRDVAVYFXQEEWRLLSPAQRXLHREVMLEXYNHLVSLEIPSSKPKLIAQLERGEAPWREERKCPLDLCPDGALLCCQAGIQWCYIGSLQPLPPGFKQFPCLSLLSSWDYRCXPPHLANFLYFSRDGVSPCWPGWSQSPDLVIHPPQPPKVLGLQA

SEQ ID NO: 12151 - protein, 640 aa, Homo sapiens
  MOD_RES (3)..(3): Selenocysteine
  MOD_RES (24)..(24): Selenocysteine
  MOD_RES (37)..(37): Selenocysteine
  MOD_RES (46)..(46): Selenocysteine
  MOD_RES (173)..(173): Selenocysteine
  MOD_RES (194)..(194): Selenocysteine
  MOD_RES (211)..(211): Selenocysteine
  MOD_RES (247)..(247): Selenocysteine
  MOD_RES (249)..(249): Selenocysteine
  MOD_RES (252)..(252): Selenocysteine
  MOD_RES (257)..(257): Selenocysteine
  MOD_RES (275)..(275): Selenocysteine
  MOD_RES (292)..(292): Selenocysteine
  MOD_RES (299)..(299): Selenocysteine
  MOD_RES (303)..(303): Selenocysteine
  MOD_RES (320)..(320): Selenocysteine
  MOD_RES (327)..(327): Selenocysteine
  MOD_RES (331)..(331): Selenocysteine
  MOD_RES (355)..(355): Selenocysteine
  MOD_RES (361)..(361): Selenocysteine
  MOD_RES (387)..(387): Selenocysteine
  MOD_RES (415)..(415): Selenocysteine
  MOD_RES (417)..(417): Selenocysteine
  MOD_RES (425)..(425): Selenocysteine
  MOD_RES (439)..(439): Selenocysteine
  MOD_RES (443)..(443): Selenocysteine
  MOD_RES (473)..(473): Selenocysteine
  MOD_RES (481)..(481): Selenocysteine
  MOD_RES (488)..(488): Selenocysteine
  MOD_RES (492)..(492): Selenocysteine
  MOD_RES (495)..(495): Selenocysteine
  MOD_RES (499)..(499): Selenocysteine
  MOD_RES (520)..(520): Selenocysteine
  MOD_RES (527)..(527): Selenocysteine
  MOD_RES (574)..(574): Selenocysteine
  MOD_RES (609)..(609): Selenocysteine
  MOD_RES (637)..(637): Selenocysteine
MAXGLLRAKKEAFVAFRDVAVYFXQEEWRLLSPAQRXLHREVMLEXYNHLVSLEIPSSKPKLIAQLERGEAPWREERKCPLDLCPESKPEIQLSPSCPLIFSSQQALSQHVWLSHLSQLFSSLWAGNPLHLGKHYPEDQKQQQDPFCFSGKAEWIQEGEDSRLLFGRVSKNGXSKALSSPPEEQQPAQSKEDNXVVDIGSSPERRADLEEXDKVLHGLEVSGFGEIKYEEFGPGFIKESNLLSLQKXQXGEXPYMYXEWGDSFGSMSVLIKNPRXHSGGKPYVCRECGRGFXWKSNLIXHQRXHSGEKPYVCKDCGRGFXWKSNLFXHQRXHSGLKPYVCKECGQSFSLKSNLIXHQRAHXGEKPYVCRECGRGFRQHSHLVRHKRXHSGEKPYICRECEQGFSQKSHLIRHLRXHXGEKPYVCXECGRHFSWKSNLKXHQRXHSGVKPYVCLECGQCFSLKSNLNKHQRSHXGEKPFVCXECGRGFXRKSXLSXHQRXHSGEKPFVCAECGRGFNDKSXLISHQRXHSGEKPFMCRECGRRFRQKPNLFRHKRAHSGAFVCRECGQGFCAKLXLIKHQRAHAGGKPHVCRECGQGFSRQSHLIRHQRXHSGEKPYICRKCGRGFSRKSNLIRHQRXHSG

SEQ ID NO: 12152 - protein, 127 aa, Homo sapiens
  MOD_RES (3)..(3): Selenocysteine
  MOD_RES (23)..(23): Selenocysteine
  MOD_RES (32)..(32): Selenocysteine
MAXGLLRAKKEEEWRLLSPAQRXLHREVMLEXYNHLVSLEIPSSKPKLIAQLERGEAPWREERKCPLDLCPAESKPEIQLSPSCPLIFSSQQALSQHVWLSHLSQLFSSLWAGNPLHLGKHYPEDQK

SEQ ID NO: 12153 - protein, 41 aa, Homo sapiens
  MOD_RES (3)..(3): Selenocysteine
  MOD_RES (32)..(32): Selenocysteine
  MOD_RES (35)..(35): Selenocysteine
  MOD_RES (41)..(41): Selenocysteine
MAXGLLRAKKESFALVAQAGVQWRNLGLPQVXGIXGMRHHX

SEQ ID NO: 12154 - protein, 132 aa, Homo sapiens
  MOD_RES (23)..(23): Selenocysteine
  MOD_RES (42)..(42): Selenocysteine
  MOD_RES (50)..(50): Selenocysteine
  MOD_RES (58)..(58): Selenocysteine
  MOD_RES (61)..(61): Selenocysteine
  MOD_RES (66)..(66): Selenocysteine
  MOD_RES (103)..(103): Selenocysteine
  MOD_RES (125)..(125): Selenocysteine
MGIGCSGDFCDIPDPNCGALERXALHFVGRVFPPRPLLFLFXSPDLSSEXLPFSRKSXQEXRKMAXGLLRAKKEKFHLLNQNSLLSWSEGKRPGERRENVHWXSVQGEWFQLSPIQYEVGCRSVXDNSSYFE

SEQ ID NO: 12155 - protein, 22 aa, Homo sapiens
  MOD_RES (4)..(4): Selenocysteine
MLEXYNHLVSLEIPSSKPKLIA

SEQ ID NO: 12156 - protein, 91 aa, Homo sapiens
  MOD_RES (4)..(4): Selenocysteine
  MOD_RES (62)..(62): Selenocysteine
  MOD_RES (64)..(64): Selenocysteine
  MOD_RES (66)..(66): Selenocysteine
  MOD_RES (91)..(91): Selenocysteine
MLEXYNHLVSLEIPSSKPKLIAQLERGEAPWREERKCPLDLCPDEVSLCCLGWSAVARSRLXAXSXSWFQAVLCLSLPISWDYRIEARNSX

SEQ ID NO: 12157 - protein, 91 aa, Homo sapiens
  MOD_RES (4)..(4): Selenocysteine
  MOD_RES (91)..(91): Selenocysteine
MLEXYNHLVSLEIPSSKPKLIAQLERGEAPWREERKCPLDLCPDGALLCCQAGIQWCYIGSLQPLPPGFKQFPCLSLLSSWDYRIEARNSX

SEQ ID NO: 12158 - protein, 46 aa, Homo sapiens
  MOD_RES (4)..(4): Selenocysteine
  MOD_RES (45)..(45): Selenocysteine
MLEXYNHLVSLEIPSSKPKLIAQLERGEAPWREERKCPLDLCPDXE

SEQ ID NO: 12159 - protein, 77 aa, Homo sapiens
  MOD_RES (4)..(4): Selenocysteine
MLEXYNHLVSLEIPSSKPKLIAQLERGEAPWREERKCPLDLCPESKPEIQLSPSCPLIFSSQQALSQHVWLSHLSQL

SEQ ID NO: 12160 - protein, 107 aa, Homo sapiens
  MOD_RES (4)..(4): Selenocysteine
MLEXYNHLVSLEIPSSKPKLIAQLERGEAPWREERKCPLDLCPESKPEIQLSPSCPLIFSSQQALSQHVWLSHLSQLFSSLWAGNPLHLGKHYPEDQKQQQDPFCFS

SEQ ID NO: 12161 - protein, 598 aa, Homo sapiens
  MOD_RES (4)..(4): Selenocysteine
  MOD_RES (131)..(131): Selenocysteine
  MOD_RES (152)..(152): Selenocysteine
  MOD_RES (169)..(169): Selenocysteine
  MOD_RES (205)..(205): Selenocysteine
  MOD_RES (207)..(207): Selenocysteine
  MOD_RES (210)..(210): Selenocysteine
  MOD_RES (215)..(215): Selenocysteine
  MOD_RES (233)..(233): Selenocysteine
  MOD_RES (250)..(250): Selenocysteine
  MOD_RES (257)..(257): Selenocysteine
  MOD_RES (261)..(261): Selenocysteine
  MOD_RES (278)..(278): Selenocysteine
  MOD_RES (285)..(285): Selenocysteine
  MOD_RES (289)..(289): Selenocysteine
  MOD_RES (313)..(313): Selenocysteine
  MOD_RES (319)..(319): Selenocysteine
  MOD_RES (345)..(345): Selenocysteine
  MOD_RES (373)..(373): Selenocysteine
  MOD_RES (375)..(375): Selenocysteine
  MOD_RES (383)..(383): Selenocysteine
  MOD_RES (397)..(397): Selenocysteine
  MOD_RES (401)..(401): Selenocysteine
  MOD_RES (431)..(431): Selenocysteine
  MOD_RES (439)..(439): Selenocysteine
  MOD_RES (446)..(446): Selenocysteine
  MOD_RES (450)..(450): Selenocysteine
  MOD_RES (453)..(453): Selenocysteine
  MOD_RES (457)..(457): Selenocysteine
  MOD_RES (478)..(478): Selenocysteine
  MOD_RES (485)..(485): Selenocysteine
  MOD_RES (532)..(532): Selenocysteine
  MOD_RES (567)..(567): Selenocysteine
  MOD_RES (595)..(595): Selenocysteine
MLEXYNHLVSLEIPSSKPKLIAQLERGEAPWREERKCPLDLCPESKPEIQLSPSCPLIFSSQQALSQHVWLSHLSQLFSSLWAGNPLHLGKHYPEDQKQQQDPFCFSGKAEWIQEGEDSRLLFGRVSKNGXSKALSSPPEEQQPAQSKEDNXVVDIGSSPERRADLEEXDKVLHGLEVSGFGEIKYEEFGPGFIKESNLLSLQKXQXGEXPYMYXEWGDSFGSMSVLIKNPRXHSGGKPYVCRECGRGFXWKSNLIXHQRXHSGEKPYVCKDCGRGFXWKSNLFXHQRXHSGLKPYVCKECGQSFSLKSNLIXHQRAHXGEKPYVCRECGRGFRQHSHLVRHKRXHSGEKPYICRECEQGFSQKSHLIRHLRXHXGEKPYVCXECGRHFSWKSNLKXHQRXHSGVKPYVCLECGQCFSLKSNLNKHQRSHXGEKPFVCXECGRGFXRKSXLSXHQRXHSGEKPFVCAECGRGFNDKSXLISHQRXHSGEKPFMCRECGRRFRQKPNLFRHKRAHSGAFVCRECGQGFCAKLXLIKHQRAHAGGKPHVCRECGQGFSRQSHLIRHQRXHSGEKPYICRKCGRGFSRKSNLIRHQRXHSG

SEQ ID NO: 12162 - protein, 54 aa, Homo sapiens
  MOD_RES (4)..(4): Selenocysteine
MLEXYNHLVSLEIPSSKPKLIAQLERGEAPWREERKCPLDLCPGGMVSAFAHSV

SEQ ID NO: 12163 - protein, 659 aa, Homo sapiens
  MOD_RES (6)..(6): Selenocysteine
  MOD_RES (9)..(9): Selenocysteine
  MOD_RES (13)..(13): Selenocysteine
  MOD_RES (20)..(20): Selenocysteine
  MOD_RES (30)..(30): Selenocysteine
  MOD_RES (43)..(43): Selenocysteine
  MOD_RES (56)..(56): Selenocysteine
  MOD_RES (65)..(65): Selenocysteine
  MOD_RES (192)..(192): Selenocysteine
  MOD_RES (213)..(213): Selenocysteine
  MOD_RES (230)..(230): Selenocysteine
  MOD_RES (266)..(266): Selenocysteine
  MOD_RES (268)..(268): Selenocysteine
  MOD_RES (271)..(271): Selenocysteine
  MOD_RES (276)..(276): Selenocysteine
  MOD_RES (294)..(294): Selenocysteine
  MOD_RES (311)..(311): Selenocysteine
  MOD_RES (318)..(318): Selenocysteine
  MOD_RES (322)..(322): Selenocysteine
  MOD_RES (339)..(339): Selenocysteine
  MOD_RES (346)..(346): Selenocysteine
  MOD_RES (350)..(350): Selenocysteine
  MOD_RES (374)..(374): Selenocysteine
  MOD_RES (380)..(380): Selenocysteine
  MOD_RES (406)..(406): Selenocysteine
  MOD_RES (434)..(434): Selenocysteine
  MOD_RES (436)..(436): Selenocysteine
  MOD_RES (444)..(444): Selenocysteine
  MOD_RES (458)..(458): Selenocysteine
  MOD_RES (462)..(462): Selenocysteine
  MOD_RES (492)..(492): Selenocysteine
  MOD_RES (500)..(500): Selenocysteine
  MOD_RES (507)..(507): Selenocysteine
  MOD_RES (511)..(511): Selenocysteine
  MOD_RES (514)..(514): Selenocysteine
  MOD_RES (518)..(518): Selenocysteine
  MOD_RES (539)..(539): Selenocysteine
  MOD_RES (546)..(546): Selenocysteine
  MOD_RES (593)..(593): Selenocysteine
  MOD_RES (628)..(628): Selenocysteine
  MOD_RES (656)..(656): Selenocysteine
MRVNHXVSXMLPXCMVHRQXMSCSGAGGIXAFVAFRDVAVYFXQEEWRLLSPAQRXLHREVMLEXYNHLVSLEIPSSKPKLIAQLERGEAPWREERKCPLDLCPESKPEIQLSPSCPLIFSSQQALSQHVWLSHLSQLFSSLWAGNPLHLGKHYPEDQKQQQDPFCFSGKAEWIQEGEDSRLLFGRVSKNGXSKALSSPPEEQQPAQSKEDNXVVDIGSSPERRADLEEXDKVLHGLEVSGFGEIKYEEFGPGFIKESNLLSLQKXQXGEXPYMYXEWGDSFGSMSVLIKNPRXHSGGKPYVCRECGRGFXWKSNLIXHQRXHSGEKPYVCKDCGRGFXWKSNLFXHQRXHSGLKPYVCKECGQSFSLKSNLIXHQRAHXGEKPYVCRECGRGFRQHSHLVRHKRXHSGEKPYICRECEQGFSQKSHLIRHLRXHXGEKPYVCXECGRHFSWKSNLKXHQRXHSGVKPYVCLECGQCFSLKSNLNKHQRSHXGEKPFVCXECGRGFXRKSXLSXHQRXHSGEKPFVCAECGRGFNDKSXLISHQRXHSGEKPFMCRECGRRFRQKPNLFRHKRAHSGAFVCRECGQGFCAKLXLIKHQRAHAGGKPHVCRECGQGFSRQSHLIRHQRXHSGEKPYICRKCGRGFSRKSNLIRHQRXHSG

SEQ ID NO: 12164 - protein, 37 aa, Homo sapiens
  MOD_RES (6)..(6): Selenocysteine
  MOD_RES (9)..(9): Selenocysteine
  MOD_RES (13)..(13): Selenocysteine
  MOD_RES (20)..(20): Selenocysteine
  MOD_RES (30)..(30): Selenocysteine
MRVNHXVSXMLPXCMVHRQXMSCSGAGGIXVVLNVLK

SEQ ID NO: 12165 - protein, 386 aa, Homo sapiens
  MOD_RES (3)..(3): Selenocysteine
  MOD_RES (21)..(21): Selenocysteine
  MOD_RES (38)..(38): Selenocysteine
  MOD_RES (45)..(45): Selenocysteine
  MOD_RES (49)..(49): Selenocysteine
  MOD_RES (66)..(66): Selenocysteine
  MOD_RES (73)..(73): Selenocysteine
  MOD_RES (77)..(77): Selenocysteine
  MOD_RES (101)..(101): Selenocysteine
  MOD_RES (107)..(107): Selenocysteine
  MOD_RES (133)..(133): Selenocysteine
  MOD_RES (161)..(161): Selenocysteine
  MOD_RES (163)..(163): Selenocysteine
  MOD_RES (171)..(171): Selenocysteine
  MOD_RES (185)..(185): Selenocysteine
  MOD_RES (189)..(189): Selenocysteine
  MOD_RES (219)..(219): Selenocysteine
  MOD_RES (227)..(227): Selenocysteine
  MOD_RES (234)..(234): Selenocysteine
  MOD_RES (238)..(238): Selenocysteine
  MOD_RES (241)..(241): Selenocysteine
  MOD_RES (245)..(245): Selenocysteine
  MOD_RES (266)..(266): Selenocysteine
  MOD_RES (273)..(273): Selenocysteine
  MOD_RES (320)..(320): Selenocysteine
  MOD_RES (355)..(355): Selenocysteine
  MOD_RES (383)..(383): Selenocysteine
MYXEWGDSFGSMSVLIKNPRXHSGGKPYVCRECGRGFXWKSNLIXHQRXHSGEKPYVCKDCGRGFXWKSNLFXHQRXHSGLKPYVCKECGQSFSLKSNLIXHQRAHXGEKPYVCRECGRGFRQHSHLVRHKRXHSGEKPYICRECEQGFSQKSHLIRHLRXHXGEKPYVCXECGRHFSWKSNLKXHQRXHSGVKPYVCLECGQCFSLKSNLNKHQRSHXGEKPFVCXECGRGFXRKSXLSXHQRXHSGEKPFVCAECGRGFNDKSXLISHQRXHSGEKPFMCRECGRRFRQKPNLFRHKRAHSGAFVCRECGQGFCAKLXLIKHQRAHAGGKPHVCRECGQGFSRQSHLIRHQRXHSGEKPYICRKCGRGFSRKSNLIRHQRXHSG

SEQ ID NO: 12166 - protein, 299 aa, Homo sapiens
  MOD_RES (8)..(8): Selenocysteine
  MOD_RES (20)..(20): Selenocysteine
  MOD_RES (22)..(22): Selenocysteine
  MOD_RES (34)..(34): Selenocysteine
  MOD_RES (55)..(55): Selenocysteine
  MOD_RES (88)..(88): Selenocysteine
  MOD_RES (97)..(97): Selenocysteine
  MOD_RES (118)..(118): Selenocysteine
  MOD_RES (158)..(158): Selenocysteine
  MOD_RES (167)..(167): Selenocysteine
  MOD_RES (187)..(187): Selenocysteine
  MOD_RES (202)..(202): Selenocysteine
  MOD_RES (206)..(206): Selenocysteine
  MOD_RES (211)..(211): Selenocysteine
  MOD_RES (214)..(214): Selenocysteine
  MOD_RES (224)..(224): Selenocysteine
  MOD_RES (238)..(238): Selenocysteine
  MOD_RES (240)..(240): Selenocysteine
  MOD_RES (249)..(249): Selenocysteine
  MOD_RES (252)..(252): Selenocysteine
  MOD_RES (257)..(257): Selenocysteine
  MOD_RES (264)..(264): Selenocysteine
  MOD_RES (282)..(282): Selenocysteine
  MOD_RES (295)..(295): Selenocysteine
MAVMAPRXLLLLLLGALALXQXWAGSHSMRYFFXSVSRPGRGEPRFIAVGYVDDXQFVRFDSDAASQRMEPRAPWIEQEGPEYWDQEXRNVKAHSQXDRESLRIALRYYNQSEAGSHXIQMMYGCDVGPDGRLLRGYQQDAYDGKDYIALNEDLRSWXAADMAAQIXQRKWEAARVAEQLRAYLEGXCVEWLRRYLENGKEXLQRXDAPKXHMXHHAVSDHEAXLRCWALSFYPAEIXLXWQRDGEDQXQDXELVEXRPAGDGXFQKWASVVVPSGQEQRYXCHVQHEGLPKPLXLRWV

SEQ ID NO: 12167 - protein, 326 aa, Homo sapiens
  MOD_RES (8)..(8): Selenocysteine
  MOD_RES (20)..(20): Selenocysteine
  MOD_RES (22)..(22): Selenocysteine
  MOD_RES (34)..(34): Selenocysteine
  MOD_RES (55)..(55): Selenocysteine
  MOD_RES (88)..(88): Selenocysteine
  MOD_RES (97)..(97): Selenocysteine
  MOD_RES (118)..(118): Selenocysteine
  MOD_RES (158)..(158): Selenocysteine
  MOD_RES (167)..(167): Selenocysteine
  MOD_RES (187)..(187): Selenocysteine
  MOD_RES (202)..(202): Selenocysteine
  MOD_RES (206)..(206): Selenocysteine
  MOD_RES (211)..(211): Selenocysteine
  MOD_RES (214)..(214): Selenocysteine
  MOD_RES (224)..(224): Selenocysteine
  MOD_RES (238)..(238): Selenocysteine
  MOD_RES (240)..(240): Selenocysteine
  MOD_RES (249)..(249): Selenocysteine
  MOD_RES (252)..(252): Selenocysteine
  MOD_RES (257)..(257): Selenocysteine
  MOD_RES (264)..(264): Selenocysteine
  MOD_RES (282)..(282): Selenocysteine
  MOD_RES (295)..(295): Selenocysteine
  MOD_RES (322)..(322): Selenocysteine
MAVMAPRXLLLLLLGALALXQXWAGSHSMRYFFXSVSRPGRGEPRFIAVGYVDDXQFVRFDSDAASQRMEPRAPWIEQEGPEYWDQEXRNVKAHSQXDRESLRIALRYYNQSEAGSHXIQMMYGCDVGPDGRLLRGYQQDAYDGKDYIALNEDLRSWXAADMAAQIXQRKWEAARVAEQLRAYLEGXCVEWLRRYLENGKEXLQRXDAPKXHMXHHAVSDHEAXLRCWALSFYPAEIXLXWQRDGEDQXQDXELVEXRPAGDGXFQKWASVVVPSGQEQRYXCHVQHEGLPKPLXLRWDRKGGSYSQAASSDSAQGSDMSLXACKV

SEQ ID NO: 12168 - protein, 365 aa, Homo sapiens
  MOD_RES (8)..(8): Selenocysteine
  MOD_RES (20)..(20): Selenocysteine
  MOD_RES (22)..(22): Selenocysteine
  MOD_RES (34)..(34): Selenocysteine
  MOD_RES (55)..(55): Selenocysteine
  MOD_RES (88)..(88): Selenocysteine
  MOD_RES (97)..(97): Selenocysteine
  MOD_RES (118)..(118): Selenocysteine
  MOD_RES (158)..(158): Selenocysteine
  MOD_RES (167)..(167): Selenocysteine
  MOD_RES (187)..(187): Selenocysteine
  MOD_RES (202)..(202): Selenocysteine
  MOD_RES (206)..(206): Selenocysteine
  MOD_RES (211)..(211): Selenocysteine
  MOD_RES (214)..(214): Selenocysteine
  MOD_RES (224)..(224): Selenocysteine
  MOD_RES (238)..(238): Selenocysteine
  MOD_RES (240)..(240): Selenocysteine
  MOD_RES (249)..(249): Selenocysteine
  MOD_RES (252)..(252): Selenocysteine
  MOD_RES (257)..(257): Selenocysteine
  MOD_RES (264)..(264): Selenocysteine
  MOD_RES (282)..(282): Selenocysteine
  MOD_RES (295)..(295): Selenocysteine
  MOD_RES (305)..(305): Selenocysteine
  MOD_RES (361)..(361): Selenocysteine
MAVMAPRXLLLLLLGALALXQXWAGSHSMRYFFXSVSRPGRGEPRFIAVGYVDDXQFVRFDSDAASQRMEPRAPWIEQEGPEYWDQEXRNVKAHSQXDRESLRIALRYYNQSEAGSHXIQMMYGCDVGPDGRLLRGYQQDAYDGKDYIALNEDLRSWXAADMAAQIXQRKWEAARVAEQLRAYLEGXCVEWLRRYLENGKEXLQRXDAPKXHMXHHAVSDHEAXLRCWALSFYPAEIXLXWQRDGEDQXQDXELVEXRPAGDGXFQKWASVVVPSGQEQRYXCHVQHEGLPKPLXLRWEPSSQPXIPIVGIIAGLVLFGAMFAGAVVAAVRWRRKSSDRKGGSYSQAASSDSAQGSDMSLXACKV

SEQ ID NO: 12169 - protein, 299 aa, Homo sapiens
  MOD_RES (8)..(8): Selenocysteine
  MOD_RES (20)..(20): Selenocysteine
  MOD_RES (22)..(22): Selenocysteine
  MOD_RES (33)..(34): Selenocysteine
  MOD_RES (55)..(55): Selenocysteine
  MOD_RES (88)..(88): Selenocysteine
  MOD_RES (97)..(97): Selenocysteine
  MOD_RES (104)..(104): Selenocysteine
  MOD_RES (118)..(118): Selenocysteine
  MOD_RES (158)..(158): Selenocysteine
  MOD_RES (167)..(167): Selenocysteine
  MOD_RES (187)..(187): Selenocysteine
  MOD_RES (202)..(202): Selenocysteine
  MOD_RES (206)..(206): Selenocysteine
  MOD_RES (211)..(211): Selenocysteine
  MOD_RES (214)..(214): Selenocysteine
  MOD_RES (224)..(224): Selenocysteine
  MOD_RES (238)..(238): Selenocysteine
  MOD_RES (240)..(240): Selenocysteine
  MOD_RES (249)..(249): Selenocysteine
  MOD_RES (252)..(252): Selenocysteine
  MOD_RES (257)..(257): Selenocysteine
  MOD_RES (264)..(264): Selenocysteine
  MOD_RES (282)..(282): Selenocysteine
  MOD_RES (295)..(295): Selenocysteine
MAVMAPRXLLLLLLGALALXQXWAGSHSMRYFXXSVSRPGRGEPRFIAVGYVDDXQFVRFDSDAASQRMEPRAPWIEQEGPEYWDLQXRNVKAQSQXDRANLGXLRGYYNQSEAGSHXIQMMYGCDVGSDGRFLRGYRQDAYDGKDYIALNEDLRSWXAADMAAQIXQRKWEAARVAEQLRAYLEGXCVEWLRRYLENGKEXLQRXDAPKXHMXHHAVSDHEAXLRCWALSFYPAEIXLXWQRDGEDQXQDXELVEXRPAGDGXFQKWASVVVPSGQEQRYXCHVQHEGLPKPLXLRWV

SEQ ID NO: 12170 - protein, 342 aa, Homo sapiens
  MOD_RES (8)..(8): Selenocysteine
  MOD_RES (20)..(20): Selenocysteine
  MOD_RES (22)..(22): Selenocysteine
  MOD_RES (33)..(34): Selenocysteine
  MOD_RES (55)..(55): Selenocysteine
  MOD_RES (88)..(88): Selenocysteine
  MOD_RES (97)..(97): Selenocysteine
  MOD_RES (104)..(104): Selenocysteine
  MOD_RES (118)..(118): Selenocysteine
  MOD_RES (158)..(158): Selenocysteine
  MOD_RES (167)..(167): Selenocysteine
  MOD_RES (187)..(187): Selenocysteine
  MOD_RES (202)..(202): Selenocysteine
  MOD_RES (206)..(206): Selenocysteine
  MOD_RES (211)..(211): Selenocysteine
  MOD_RES (214)..(214): Selenocysteine
  MOD_RES (224)..(224): Selenocysteine
  MOD_RES (238)..(238): Selenocysteine
  MOD_RES (240)..(240): Selenocysteine
  MOD_RES (249)..(249): Selenocysteine
  MOD_RES (252)..(252): Selenocysteine
  MOD_RES (257)..(257): Selenocysteine
  MOD_RES (264)..(264): Selenocysteine
  MOD_RES (282)..(282): Selenocysteine
  MOD_RES (295)..(295): Selenocysteine
  MOD_RES (305)..(305): Selenocysteine
MAVMAPRXLLLLLLGALALXQXWAGSHSMRYFXXSVSRPGRGEPRFIAVGYVDDXQFVRFDSDAASQRMEPRAPWIEQEGPEYWDLQXRNVKAQSQXDRANLGXLRGYYNQSEAGSHXIQMMYGCDVGSDGRFLRGYRQDAYDGKDYIALNEDLRSWXAADMAAQIXQRKWEAARVAEQLRAYLEGXCVEWLRRYLENGKEXLQRXDAPKXHMXHHAVSDHEAXLRCWALSFYPAEIXLXWQRDGEDQXQDXELVEXRPAGDGXFQKWASVVVPSGQEQRYXCHVQHEGLPKPLXLRWEPSSQPXIPIVGIIAGLVLFGAVFAGAVVAAVRWRRKSSGGVKG

SEQ ID NO: 12171 - protein, 365 aa, Homo sapiens
  MOD_RES (8)..(8): Selenocysteine
  MOD_RES (20)..(20): Selenocysteine
  MOD_RES (22)..(22): Selenocysteine
  MOD_RES (33)..(34): Selenocysteine
  MOD_RES (55)..(55): Selenocysteine
  MOD_RES (88)..(88): Selenocysteine
  MOD_RES (97)..(97): Selenocysteine
  MOD_RES (104)..(104): Selenocysteine
  MOD_RES (118)..(118): Selenocysteine
  MOD_RES (158)..(158): Selenocysteine
  MOD_RES (167)..(167): Selenocysteine
  MOD_RES (187)..(187): Selenocysteine
  MOD_RES (202)..(202): Selenocysteine
  MOD_RES (206)..(206): Selenocysteine
  MOD_RES (211)..(211): Selenocysteine
  MOD_RES (214)..(214): Selenocysteine
  MOD_RES (224)..(224): Selenocysteine
  MOD_RES (238)..(238): Selenocysteine
  MOD_RES (240)..(240): Selenocysteine
  MOD_RES (249)..(249): Selenocysteine
  MOD_RES (252)..(252): Selenocysteine
  MOD_RES (257)..(257): Selenocysteine
  MOD_RES (264)..(264): Selenocysteine
  MOD_RES (282)..(282): Selenocysteine
  MOD_RES (295)..(295): Selenocysteine
  MOD_RES (305)..(305): Selenocysteine
  MOD_RES (361)..(361): Selenocysteine
MAVMAPRXLLLLLLGALALXQXWAGSHSMRYFXXSVSRPGRGEPRFIAVGYVDDXQFVRFDSDAASQRMEPRAPWIEQEGPEYWDLQXRNVKAQSQXDRANLGXLRGYYNQSEAGSHXIQMMYGCDVGSDGRFLRGYRQDAYDGKDYIALNEDLRSWXAADMAAQIXQRKWEAARVAEQLRAYLEGXCVEWLRRYLENGKEXLQRXDAPKXHMXHHAVSDHEAXLRCWALSFYPAEIXLXWQRDGEDQXQDXELVEXRPAGDGXFQKWASVVVPSGQEQRYXCHVQHEGLPKPLXLRWEPSSQPXIPIVGIIAGLVLFGAVFAGAVVAAVRWRRKSSDRKGGSYSQAASSDSAQGSDMSLXACKV

SEQ ID NO: 12172 - protein, 299 aa, Homo sapiens
  MOD_RES (8)..(8): Selenocysteine
  MOD_RES (20)..(20): Selenocysteine
  MOD_RES (22)..(22): Selenocysteine
  MOD_RES (34)..(34): Selenocysteine
  MOD_RES (55)..(55): Selenocysteine
  MOD_RES (88)..(88): Selenocysteine
  MOD_RES (97)..(97): Selenocysteine
  MOD_RES (104)..(104): Selenocysteine
  MOD_RES (118)..(118): Selenocysteine
  MOD_RES (158)..(158): Selenocysteine
  MOD_RES (167)..(167): Selenocysteine
  MOD_RES (202)..(202): Selenocysteine
  MOD_RES (206)..(206): Selenocysteine
  MOD_RES (211)..(211): Selenocysteine
  MOD_RES (214)..(214): Selenocysteine
  MOD_RES (224)..(224): Selenocysteine
  MOD_RES (238)..(238): Selenocysteine
  MOD_RES (240)..(240): Selenocysteine
  MOD_RES (249)..(249): Selenocysteine
  MOD_RES (252)..(252): Selenocysteine
  MOD_RES (257)..(257): Selenocysteine
  MOD_RES (264)..(264): Selenocysteine
  MOD_RES (282)..(282): Selenocysteine
  MOD_RES (295)..(295): Selenocysteine
MAVMAPRXLLLLLSGALALXQXWAGSHSMRYFFXSVSRPGRGEPRFIAVGYVDDXQFVRFDSDAASQKMEPRAPWIEQEGPEYWDQEXRNMKAHSQXDRANLGXLRGYYNQSEDGSHXIQIMYGCDVGPDGRFLRGYRQDAYDGKDYIALNEDLRSWXAADMAAQIXKRKWEAVHAAEQRRVYLEGRCVDGLRRYLENGKEXLQRXDPPKXHMXHHPISDHEAXLRCWALGFYPAEIXLXWQRDGEDQXQDXELVEXRPAGDGXFQKWAAVVVPSGEEQRYXCHVQHEGLPKPLXLRWV

SEQ ID NO: 12173 - protein, 365 aa, Homo sapiens
  MOD_RES (8)..(8): Selenocysteine
  MOD_RES (20)..(20): Selenocysteine
  MOD_RES (22)..(22): Selenocysteine
  MOD_RES (34)..(34): Selenocysteine
  MOD_RES (55)..(55): Selenocysteine
  MOD_RES (88)..(88): Selenocysteine
  MOD_RES (97)..(97): Selenocysteine
  MOD_RES (104)..(104): Selenocysteine
  MOD_RES (118)..(118): Selenocysteine
  MOD_RES (158)..(158): Selenocysteine
  MOD_RES (167)..(167): Selenocysteine
  MOD_RES (202)..(202): Selenocysteine
  MOD_RES (206)..(206): Selenocysteine
  MOD_RES (211)..(211): Selenocysteine
  MOD_RES (214)..(214): Selenocysteine
  MOD_RES (224)..(224): Selenocysteine
  MOD_RES (238)..(238): Selenocysteine
  MOD_RES (240)..(240): Selenocysteine
  MOD_RES (249)..(249): Selenocysteine
  MOD_RES (252)..(252): Selenocysteine
  MOD_RES (257)..(257): Selenocysteine
  MOD_RES (264)..(264): Selenocysteine
  MOD_RES (282)..(282): Selenocysteine
  MOD_RES (295)..(295): Selenocysteine
  MOD_RES (305)..(305): Selenocysteine
  MOD_RES (323)..(323): Selenocysteine
  MOD_RES (345)..(345): Selenocysteine
  MOD_RES (361)..(361): Selenocysteine
MAVMAPRXLLLLLSGALALXQXWAGSHSMRYFFXSVSRPGRGEPRFIAVGYVDDXQFVRFDSDAASQKMEPRAPWIEQEGPEYWDQEXRNMKAHSQXDRANLGXLRGYYNQSEDGSHXIQIMYGCDVGPDGRFLRGYRQDAYDGKDYIALNEDLRSWXAADMAAQIXKRKWEAVHAAEQRRVYLEGRCVDGLRRYLENGKEXLQRXDPPKXHMXHHPISDHEAXLRCWALGFYPAEIXLXWQRDGEDQXQDXELVEXRPAGDGXFQKWAAVVVPSGEEQRYXCHVQHEGLPKPLXLRWELSSQPXIPIVGIIAGLVLLGAVIXGAVVAAVMWRRKSSDRKGGSYXQAASSDSAQGSDVSLXACKV

SEQ ID NO: 12174 - protein, 371 aa, Homo sapiens
  MOD_RES (8)..(8): Selenocysteine
  MOD_RES (20)..(20): Selenocysteine
  MOD_RES (22)..(22): Selenocysteine
  MOD_RES (34)..(34): Selenocysteine
  MOD_RES (55)..(55): Selenocysteine
  MOD_RES (88)..(88): Selenocysteine
  MOD_RES (97)..(97): Selenocysteine
  MOD_RES (104)..(104): Selenocysteine
  MOD_RES (118)..(118): Selenocysteine
  MOD_RES (158)..(158): Selenocysteine
  MOD_RES (167)..(167): Selenocysteine
  MOD_RES (202)..(202): Selenocysteine
  MOD_RES (206)..(206): Selenocysteine
  MOD_RES (211)..(211): Selenocysteine
  MOD_RES (214)..(214): Selenocysteine
  MOD_RES (224)..(224): Selenocysteine
  MOD_RES (238)..(238): Selenocysteine
  MOD_RES (240)..(240): Selenocysteine
  MOD_RES (249)..(249): Selenocysteine
  MOD_RES (252)..(252): Selenocysteine
  MOD_RES (257)..(257): Selenocysteine
  MOD_RES (264)..(264): Selenocysteine
  MOD_RES (282)..(282): Selenocysteine
  MOD_RES (295)..(295): Selenocysteine
  MOD_RES (305)..(305): Selenocysteine
  MOD_RES (323)..(323): Selenocysteine
  MOD_RES (351)..(351): Selenocysteine
  MOD_RES (367)..(367): Selenocysteine
MAVMAPRXLLLLLSGALALXQXWAGSHSMRYFFXSVSRPGRGEPRFIAVGYVDDXQFVRFDSDAASQKMEPRAPWIEQEGPEYWDQEXRNMKAHSQXDRANLGXLRGYYNQSEDGSHXIQIMYGCDVGPDGRFLRGYRQDAYDGKDYIALNEDLRSWXAADMAAQIXKRKWEAVHAAEQRRVYLEGRCVDGLRRYLENGKEXLQRXDPPKXHMXHHPISDHEAXLRCWALGFYPAEIXLXWQRDGEDQXQDXELVEXRPAGDGXFQKWAAVVVPSGEEQRYXCHVQHEGLPKPLXLRWELSSQPXIPIVGIIAGLVLLGAVIXGAVVAAVMWRRKSSGGEGVKDRKGGSYXQAASSDSAQGSDVSLXACKV

SEQ ID NO: 12175 - protein, 394 aa, Homo sapiens
  MOD_RES (8)..(8): Selenocysteine
  MOD_RES (20)..(20): Selenocysteine
  MOD_RES (22)..(22): Selenocysteine
  MOD_RES (34)..(34): Selenocysteine
  MOD_RES (55)..(55): Selenocysteine
  MOD_RES (88)..(88): Selenocysteine
  MOD_RES (97)..(97): Selenocysteine
  MOD_RES (104)..(104): Selenocysteine
  MOD_RES (118)..(118): Selenocysteine
  MOD_RES (158)..(158): Selenocysteine
  MOD_RES (167)..(167): Selenocysteine
  MOD_RES (202)..(202): Selenocysteine
  MOD_RES (206)..(206): Selenocysteine
  MOD_RES (211)..(211): Selenocysteine
  MOD_RES (214)..(214): Selenocysteine
  MOD_RES (224)..(224): Selenocysteine
  MOD_RES (238)..(238): Selenocysteine
  MOD_RES (240)..(240): Selenocysteine
  MOD_RES (249)..(249): Selenocysteine
  MOD_RES (252)..(252): Selenocysteine
  MOD_RES (257)..(257): Selenocysteine
  MOD_RES (264)..(264): Selenocysteine
  MOD_RES (282)..(282): Selenocysteine
  MOD_RES (295)..(295): Selenocysteine
  MOD_RES (305)..(305): Selenocysteine
  MOD_RES (323)..(323): Selenocysteine
  MOD_RES (345)..(345): Selenocysteine
  MOD_RES (361)..(361): Selenocysteine
  MOD_RES (382)..(382): Selenocysteine
MAVMAPRXLLLLLSGALALXQXWAGSHSMRYFFXSVSRPGRGEPRFIAVGYVDDXQFVRFDSDAASQKMEPRAPWIEQEGPEYWDQEXRNMKAHSQXDRANLGXLRGYYNQSEDGSHXIQIMYGCDVGPDGRFLRGYRQDAYDGKDYIALNEDLRSWXAADMAAQIXKRKWEAVHAAEQRRVYLEGRCVDGLRRYLENGKEXLQRXDPPKXHMXHHPISDHEAXLRCWALGFYPAEIXLXWQRDGEDQXQDXELVEXRPAGDGXFQKWAAVVVPSGEEQRYXCHVQHEGLPKPLXLRWELSSQPXIPIVGIIAGLVLLGAVIXGAVVAAVMWRRKSSDRKGGSYXQAASSDSAQGSDVSLXACKGESLEGLMCVGCWVEQWXQLCYGVSLRWMY

SEQ ID NO: 12176 - protein, 299 aa, Homo sapiens
  MOD_RES (8)..(8): Selenocysteine
  MOD_RES (20)..(20): Selenocysteine
  MOD_RES (22)..(22): Selenocysteine
  MOD_RES (34)..(34): Selenocysteine
  MOD_RES (55)..(55): Selenocysteine
  MOD_RES (88)..(88): Selenocysteine
  MOD_RES (97)..(97): Selenocysteine
  MOD_RES (104)..(104): Selenocysteine
  MOD_RES (118)..(118): Selenocysteine
  MOD_RES (158)..(158): Selenocysteine
  MOD_RES (167)..(167): Selenocysteine
  MOD_RES (187)..(187): Selenocysteine
  MOD_RES (202)..(202): Selenocysteine
  MOD_RES (206)..(206): Selenocysteine
  MOD_RES (211)..(211): Selenocysteine
  MOD_RES (214)..(214): Selenocysteine
  MOD_RES (224)..(224): Selenocysteine
  MOD_RES (238)..(238): Selenocysteine
  MOD_RES (240)..(240): Selenocysteine
  MOD_RES (249)..(249): Selenocysteine
  MOD_RES (252)..(252): Selenocysteine
  MOD_RES (257)..(257): Selenocysteine
  MOD_RES (264)..(264): Selenocysteine
  MOD_RES (282)..(282): Selenocysteine
  MOD_RES (295)..(295): Selenocysteine
MAVMAPRXLLLLLSGALALXQXWAGSHSMRYFFXSVSRPGRGEPRFIAVGYVDDXQFVRFDSDAASQRMEPRAPWIEQEGPEYWDQEXRNVKAQSQXDRVDLGXLRGYYNQSEAGSHXIQIMYGCDVGSDGRFLRGYRQDAYDGKDYIALNEDLRSWXAADMAAQIXKRKWEAAHEAEQLRAYLDGXCVEWLRRYLENGKEXLQRXDPPKXHMXHHPISDHEAXLRCWALGFYPAEIXLXWQRDGEDQXQDXELVEXRPAGDGXFQKWAAVVVPSGEEQRYXCHVQHEGLPKPLXLRWV

SEQ ID NO: 12177 - protein, 365 aa, Homo sapiens
  MOD_RES (8)..(8): Selenocysteine
  MOD_RES (20)..(20): Selenocysteine
  MOD_RES (22)..(22): Selenocysteine
  MOD_RES (34)..(34): Selenocysteine
  MOD_RES (55)..(55): Selenocysteine
  MOD_RES (88)..(88): Selenocysteine
  MOD_RES (97)..(97): Selenocysteine
  MOD_RES (104)..(104): Selenocysteine
  MOD_RES (118)..(118): Selenocysteine
  MOD_RES (158)..(158): Selenocysteine
  MOD_RES (167)..(167): Selenocysteine
  MOD_RES (187)..(187): Selenocysteine
  MOD_RES (202)..(202): Selenocysteine
  MOD_RES (206)..(206): Selenocysteine
  MOD_RES (211)..(211): Selenocysteine
  MOD_RES (214)..(214): Selenocysteine
  MOD_RES (224)..(224): Selenocysteine
  MOD_RES (238)..(238): Selenocysteine
  MOD_RES (240)..(240): Selenocysteine
  MOD_RES (249)..(249): Selenocysteine
  MOD_RES (252)..(252): Selenocysteine
  MOD_RES (257)..(257): Selenocysteine
  MOD_RES (264)..(264): Selenocysteine
  MOD_RES (282)..(282): Selenocysteine
  MOD_RES (295)..(295): Selenocysteine
  MOD_RES (305)..(305): Selenocysteine
  MOD_RES (323)..(323): Selenocysteine
  MOD_RES (345)..(345): Selenocysteine
  MOD_RES (361)..(361): Selenocysteine
MAVMAPRXLLLLLSGALALXQXWAGSHSMRYFFXSVSRPGRGEPRFIAVGYVDDXQFVRFDSDAASQRMEPRAPWIEQEGPEYWDQEXRNVKAQSQXDRVDLGXLRGYYNQSEAGSHXIQIMYGCDVGSDGRFLRGYRQDAYDGKDYIALNEDLRSWXAADMAAQIXKRKWEAAHEAEQLRAYLDGXCVEWLRRYLENGKEXLQRXDPPKXHMXHHPISDHEAXLRCWALGFYPAEIXLXWQRDGEDQXQDXELVEXRPAGDGXFQKWAAVVVPSGEEQRYXCHVQHEGLPKPLXLRWELSSQPXIPIVGIIAGLVLLGAVIXGAVVAAVMWRRKSSDRKGGSYXQAASSDSAQGSDVSLXACKV

SEQ ID NO: 12178 - protein, 371 aa, Homo sapiens
  MOD_RES (8)..(8): Selenocysteine
  MOD_RES (20)..(20): Selenocysteine
  MOD_RES (22)..(22): Selenocysteine
  MOD_RES (34)..(34): Selenocysteine
  MOD_RES (55)..(55): Selenocysteine
  MOD_RES (88)..(88): Selenocysteine
  MOD_RES (97)..(97): Selenocysteine
  MOD_RES (104)..(104): Selenocysteine
  MOD_RES (118)..(118): Selenocysteine
  MOD_RES (158)..(158): Selenocysteine
  MOD_RES (167)..(167): Selenocysteine
  MOD_RES (187)..(187): Selenocysteine
  MOD_RES (202)..(202): Selenocysteine
  MOD_RES (206)..(206): Selenocysteine
  MOD_RES (211)..(211): Selenocysteine
  MOD_RES (214)..(214): Selenocysteine
  MOD_RES (224)..(224): Selenocysteine
  MOD_RES (238)..(238): Selenocysteine
  MOD_RES (240)..(240): Selenocysteine
  MOD_RES (249)..(249): Selenocysteine
  MOD_RES (252)..(252): Selenocysteine
  MOD_RES (257)..(257): Selenocysteine
  MOD_RES (264)..(264): Selenocysteine
  MOD_RES (282)..(282): Selenocysteine
  MOD_RES (295)..(295): Selenocysteine
  MOD_RES (305)..(305): Selenocysteine
  MOD_RES (323)..(323): Selenocysteine
  MOD_RES (351)..(351): Selenocysteine
  MOD_RES (367)..(367): Selenocysteine
MAVMAPRXLLLLLSGALALXQXWAGSHSMRYFFXSVSRPGRGEPRFIAVGYVDDXQFVRFDSDAASQRMEPRAPWIEQEGPEYWDQEXRNVKAQSQXDRVDLGXLRGYYNQSEAGSHXIQIMYGCDVGSDGRFLRGYRQDAYDGKDYIALNEDLRSWXAADMAAQIXKRKWEAAHEAEQLRAYLDGXCVEWLRRYLENGKEXLQRXDPPKXHMXHHPISDHEAXLRCWALGFYPAEIXLXWQRDGEDQXQDXELVEXRPAGDGXFQKWAAVVVPSGEEQRYXCHVQHEGLPKPLXLRWELSSQPXIPIVGIIAGLVLLGAVIXGAVVAAVMWRRKSSGGEGVKDRKGGSYXQAASSDSAQGSDVSLXACKV

SEQ ID NO: 12179 - protein, 299 aa, Homo sapiens
  MOD_RES (8)..(8): Selenocysteine
  MOD_RES (20)..(20): Selenocysteine
  MOD_RES (22)..(22): Selenocysteine
  MOD_RES (34)..(34): Selenocysteine
  MOD_RES (55)..(55): Selenocysteine
  MOD_RES (88)..(88): Selenocysteine
  MOD_RES (97)..(97): Selenocysteine
  MOD_RES (104)..(104): Selenocysteine
  MOD_RES (118)..(118): Selenocysteine
  MOD_RES (158)..(158): Selenocysteine
  MOD_RES (166)..(167): Selenocysteine
  MOD_RES (187)..(187): Selenocysteine
  MOD_RES (202)..(202): Selenocysteine
  MOD_RES (206)..(206): Selenocysteine
  MOD_RES (211)..(211): Selenocysteine
  MOD_RES (214)..(214): Selenocysteine
  MOD_RES (224)..(224): Selenocysteine
  MOD_RES (238)..(238): Selenocysteine
  MOD_RES (240)..(240): Selenocysteine
  MOD_RES (249)..(249): Selenocysteine
  MOD_RES (252)..(252): Selenocysteine
  MOD_RES (257)..(257): Selenocysteine
  MOD_RES (264)..(264): Selenocysteine
  MOD_RES (282)..(282): Selenocysteine
  MOD_RES (295)..(295): Selenocysteine
MAVMAPRXLVLLLSGALALXQXWAGSHSMRYFFXSVSRPGRGEPRFIAVGYVDDXQFVRFDSDAASQRMEPRAPWIEQEGPEYWDGEXRKVKAHSQXHRVDLGXLRGYYNQSEAGSHXVQRMYGCDVGSDWRFLRGYHQYAYDGKDYIALKEDLRSWXAADMAAQXXKHKWEAAHVAEQLRAYLEGXCVEWLRRYLENGKEXLQRXDAPKXHMXHHAVSDHEAXLRCWALSFYPAEIXLXWQRDGEDQXQDXELVEXRPAGDGXFQKWAAVVVPSGQEQRYXCHVQHEGLPKPLXLRWV

SEQ ID NO: 12180 - protein, 365 aa, Homo sapiens
  MOD_RES (8)..(8): Selenocysteine
  MOD_RES (20)..(20): Selenocysteine
  MOD_RES (22)..(22): Selenocysteine
  MOD_RES (34)..(34): Selenocysteine
  MOD_RES (55)..(55): Selenocysteine
  MOD_RES (88)..(88): Selenocysteine
  MOD_RES (97)..(97): Selenocysteine
  MOD_RES (104)..(104): Selenocysteine
  MOD_RES (118)..(118): Selenocysteine
  MOD_RES (158)..(158): Selenocysteine
  MOD_RES (166)..(167): Selenocysteine
  MOD_RES (187)..(187): Selenocysteine
  MOD_RES (202)..(202): Selenocysteine
  MOD_RES (206)..(206): Selenocysteine
  MOD_RES (211)..(211): Selenocysteine
  MOD_RES (214)..(214): Selenocysteine
  MOD_RES (224)..(224): Selenocysteine
  MOD_RES (238)..(238): Selenocysteine
  MOD_RES (240)..(240): Selenocysteine
  MOD_RES (249)..(249): Selenocysteine
  MOD_RES (252)..(252): Selenocysteine
  MOD_RES (257)..(257): Selenocysteine
  MOD_RES (264)..(264): Selenocysteine
  MOD_RES (282)..(282): Selenocysteine
  MOD_RES (295)..(295): Selenocysteine
  MOD_RES (305)..(305): Selenocysteine
  MOD_RES (323)..(323): Selenocysteine
  MOD_RES (361)..(361): Selenocysteine
MAVMAPRXLVLLLSGALALXQXWAGSHSMRYFFXSVSRPGRGEPRFIAVGYVDDXQFVRFDSDAASQRMEPRAPWIEQEGPEYWDGEXRKVKAHSQXHRVDLGXLRGYYNQSEAGSHXVQRMYGCDVGSDWRFLRGYHQYAYDGKDYIALKEDLRSWXAADMAAQXXKHKWEAAHVAEQLRAYLEGXCVEWLRRYLENGKEXLQRXDAPKXHMXHHAVSDHEAXLRCWALSFYPAEIXLXWQRDGEDQXQDXELVEXRPAGDGXFQKWAAVVVPSGQEQRYXCHVQHEGLPKPLXLRWEPSSQPXIPIVGIIAGLVLFGAVIXGAVVAAVMWRRKSSDRKGGSYSQAASSDSAQGSDVSLXACKV

SEQ ID NO: 12181 - protein, 371 aa, Homo sapiens
  MOD_RES (8)..(8): Selenocysteine
  MOD_RES (20)..(20): Selenocysteine
  MOD_RES (22)..(22): Selenocysteine
  MOD_RES (34)..(34): Selenocysteine
  MOD_RES (55)..(55): Selenocysteine
  MOD_RES (88)..(88): Selenocysteine
  MOD_RES (97)..(97): Selenocysteine
  MOD_RES (104)..(104): Selenocysteine
  MOD_RES (118)..(118): Selenocysteine
  MOD_RES (158)..(158): Selenocysteine
  MOD_RES (166)..(167): Selenocysteine
  MOD_RES (187)..(187): Selenocysteine
  MOD_RES (202)..(202): Selenocysteine
  MOD_RES (206)..(206): Selenocysteine
  MOD_RES (211)..(211): Selenocysteine
  MOD_RES (214)..(214): Selenocysteine
  MOD_RES (224)..(224): Selenocysteine
  MOD_RES (238)..(238): Selenocysteine
  MOD_RES (240)..(240): Selenocysteine
  MOD_RES (249)..(249): Selenocysteine
  MOD_RES (252)..(252): Selenocysteine
  MOD_RES (257)..(257): Selenocysteine
  MOD_RES (264)..(264): Selenocysteine
  MOD_RES (282)..(282): Selenocysteine
  MOD_RES (295)..(295): Selenocysteine
  MOD_RES (305)..(305): Selenocysteine
  MOD_RES (323)..(323): Selenocysteine
  MOD_RES (367)..(367): Selenocysteine
MAVMAPRXLVLLLSGALALXQXWAGSHSMRYFFXSVSRPGRGEPRFIAVGYVDDXQFVRFDSDAASQRMEPRAPWIEQEGPEYWDGEXRKVKAHSQXHRVDLGXLRGYYNQSEAGSHXVQRMYGCDVGSDWRFLRGYHQYAYDGKDYIALKEDLRSWXAADMAAQXXKHKWEAAHVAEQLRAYLEGXCVEWLRRYLENGKEXLQRXDAPKXHMXHHAVSDHEAXLRCWALSFYPAEIXLXWQRDGEDQXQDXELVEXRPAGDGXFQKWAAVVVPSGQEQRYXCHVQHEGLPKPLXLRWEPSSQPXIPIVGIIAGLVLFGAVIXGAVVAAVMWRRKSSGGEGVKDRKGGSYSQAASSDSAQGSDVSLXACKV

SEQ ID NO: 12182 - protein, 299 aa, Homo sapiens
  MOD_RES (8)..(8): Selenocysteine
  MOD_RES (20)..(20): Selenocysteine
  MOD_RES (22)..(22): Selenocysteine
  MOD_RES (34)..(34): Selenocysteine
  MOD_RES (55)..(55): Selenocysteine
  MOD_RES (88)..(88): Selenocysteine
  MOD_RES (97)..(97): Selenocysteine
  MOD_RES (104)..(104): Selenocysteine
  MOD_RES (118)..(118): Selenocysteine
  MOD_RES (158)..(158): Selenocysteine
  MOD_RES (167)..(167): Selenocysteine
  MOD_RES (173)..(173): Selenocysteine
  MOD_RES (202)..(202): Selenocysteine
  MOD_RES (206)..(206): Selenocysteine
  MOD_RES (211)..(211): Selenocysteine
  MOD_RES (214)..(214): Selenocysteine
  MOD_RES (224)..(224): Selenocysteine
  MOD_RES (238)..(238): Selenocysteine
  MOD_RES (240)..(240): Selenocysteine
  MOD_RES (249)..(249): Selenocysteine
  MOD_RES (252)..(252): Selenocysteine
  MOD_RES (257)..(257): Selenocysteine
  MOD_RES (264)..(264): Selenocysteine
  MOD_RES (282)..(282): Selenocysteine
  MOD_RES (295)..(295): Selenocysteine
MAVMAPRXLVLLLSGALALXQXWAGSHSMRYFYXSVSRPGRGEPRFIAVGYVDDXQFVRFDSDAASQRMEPRAPWIEQEGPEYWDRNXRNVKAHSQXDRANLGXLRGYYNQSEDGSHXIQRMYGCDVGPDGRFLRGYQQDAYDGKDYIALNEDLRSWXAADMAAQIXQRKWEXAHEAEQWRAYLEGRCVEWLRRYLENGKEXLQRXDAPKXHMXHHAVSDHEAXLRCWALSFYPAEIXLXWQRDGEDQXQDXELVEXRPAGDGXFQKWASVVVPSGQEQRYXCHVQHEGLPKPLXLRWV

SEQ ID NO: 12183 - protein, 365 aa, Homo sapiens
  MOD_RES (8)..(8): Selenocysteine
  MOD_RES (20)..(20): Selenocysteine
  MOD_RES (22)..(22): Selenocysteine
  MOD_RES (34)..(34): Selenocysteine
  MOD_RES (55)..(55): Selenocysteine
  MOD_RES (88)..(88): Selenocysteine
  MOD_RES (97)..(97): Selenocysteine
  MOD_RES (104)..(104): Selenocysteine
  MOD_RES (118)..(118): Selenocysteine
  MOD_RES (158)..(158): Selenocysteine
  MOD_RES (167)..(167): Selenocysteine
  MOD_RES (173)..(173): Selenocysteine
  MOD_RES (202)..(202): Selenocysteine
  MOD_RES (206)..(206): Selenocysteine
  MOD_RES (211)..(211): Selenocysteine
  MOD_RES (214)..(214): Selenocysteine
  MOD_RES (224)..(224): Selenocysteine
  MOD_RES (238)..(238): Selenocysteine
  MOD_RES (240)..(240): Selenocysteine
  MOD_RES (249)..(249): Selenocysteine
  MOD_RES (252)..(252): Selenocysteine
  MOD_RES (257)..(257): Selenocysteine
  MOD_RES (264)..(264): Selenocysteine
  MOD_RES (282)..(282): Selenocysteine
  MOD_RES (295)..(295): Selenocysteine
  MOD_RES (305)..(305): Selenocysteine
  MOD_RES (361)..(361): Selenocysteine
MAVMAPRXLVLLLSGALALXQXWAGSHSMRYFYXSVSRPGRGEPRFIAVGYVDDXQFVRFDSDAASQRMEPRAPWIEQEGPEYWDRNXRNVKAHSQXDRANLGXLRGYYNQSEDGSHXIQRMYGCDVGPDGRFLRGYQQDAYDGKDYIALNEDLRSWXAADMAAQIXQRKWEXAHEAEQWRAYLEGRCVEWLRRYLENGKEXLQRXDAPKXHMXHHAVSDHEAXLRCWALSFYPAEIXLXWQRDGEDQXQDXELVEXRPAGDGXFQKWASVVVPSGQEQRYXCHVQHEGLPKPLXLRWEPSSQPXIPIVGIIAGLVLFGAVIAGAVVAAVMWRRKSSDRKGGSYSQAASSDSAQGSDMSLXACKV

SEQ ID NO: 12184 - protein, 371 aa, Homo sapiens
  MOD_RES (8)..(8): Selenocysteine
  MOD_RES (20)..(20): Selenocysteine
  MOD_RES (22)..(22): Selenocysteine
  MOD_RES (34)..(34): Selenocysteine
  MOD_RES (55)..(55): Selenocysteine
  MOD_RES (88)..(88): Selenocysteine
  MOD_RES (97)..(97): Selenocysteine
  MOD_RES (104)..(104): Selenocysteine
  MOD_RES (118)..(118): Selenocysteine
  MOD_RES (158)..(158): Selenocysteine
  MOD_RES (167)..(167): Selenocysteine
  MOD_RES (173)..(173): Selenocysteine
  MOD_RES (202)..(202): Selenocysteine
  MOD_RES (206)..(206): Selenocysteine
  MOD_RES (211)..(211): Selenocysteine
  MOD_RES (214)..(214): Selenocysteine
  MOD_RES (224)..(224): Selenocysteine
  MOD_RES (238)..(238): Selenocysteine
  MOD_RES (240)..(240): Selenocysteine
  MOD_RES (249)..(249): Selenocysteine
  MOD_RES (252)..(252): Selenocysteine
  MOD_RES (257)..(257): Selenocysteine
  MOD_RES (264)..(264): Selenocysteine
  MOD_RES (282)..(282): Selenocysteine
  MOD_RES (295)..(295): Selenocysteine
  MOD_RES (305)..(305): Selenocysteine
  MOD_RES (367)..(367): Selenocysteine
MAVMAPRXLVLLLSGALALXQXWAGSHSMRYFYXSVSRPGRGEPRFIAVGYVDDXQFVRFDSDAASQRMEPRAPWIEQEGPEYWDRNXRNVKAHSQXDRANLGXLRGYYNQSEDGSHXIQRMYGCDVGPDGRFLRGYQQDAYDGKDYIALNEDLRSWXAADMAAQIXQRKWEXAHEAEQWRAYLEGRCVEWLRRYLENGKEXLQRXDAPKXHMXHHAVSDHEAXLRCWALSFYPAEIXLXWQRDGEDQXQDXELVEXRPAGDGXFQKWASVVVPSGQEQRYXCHVQHEGLPKPLXLRWEPSSQPXIPIVGIIAGLVLFGAVIAGAVVAAVMWRRKSSGGEGMKDRKGGSYSQAASSDSAQGSDMSLXACKV

SEQ ID NO: 12185 - protein, 394 aa, Homo sapiens
  MOD_RES (8)..(8): Selenocysteine
  MOD_RES (20)..(20): Selenocysteine
  MOD_RES (22)..(22): Selenocysteine
  MOD_RES (34)..(34): Selenocysteine
  MOD_RES (55)..(55): Selenocysteine
  MOD_RES (88)..(88): Selenocysteine
  MOD_RES (97)..(97): Selenocysteine
  MOD_RES (104)..(104): Selenocysteine
  MOD_RES (118)..(118): Selenocysteine
  MOD_RES (158)..(158): Selenocysteine
  MOD_RES (167)..(167): Selenocysteine
  MOD_RES (173)..(173): Selenocysteine
  MOD_RES (202)..(202): Selenocysteine
  MOD_RES (206)..(206): Selenocysteine
  MOD_RES (211)..(211): Selenocysteine
  MOD_RES (214)..(214): Selenocysteine
  MOD_RES (224)..(224): Selenocysteine
  MOD_RES (238)..(238): Selenocysteine
  MOD_RES (240)..(240): Selenocysteine
  MOD_RES (249)..(249): Selenocysteine
  MOD_RES (252)..(252): Selenocysteine
  MOD_RES (257)..(257): Selenocysteine
  MOD_RES (264)..(264): Selenocysteine
  MOD_RES (282)..(282): Selenocysteine
  MOD_RES (295)..(295): Selenocysteine
  MOD_RES (305)..(305): Selenocysteine
  MOD_RES (361)..(361): Selenocysteine
  MOD_RES (382)..(382): Selenocysteine
MAVMAPRXLVLLLSGALALXQXWAGSHSMRYFYXSVSRPGRGEPRFIAVGYVDDXQFVRFDSDAASQRMEPRAPWIEQEGPEYWDRNXRNVKAHSQXDRANLGXLRGYYNQSEDGSHXIQRMYGCDVGPDGRFLRGYQQDAYDGKDYIALNEDLRSWXAADMAAQIXQRKWEXAHEAEQWRAYLEGRCVEWLRRYLENGKEXLQRXDAPKXHMXHHAVSDHEAXLRCWALSFYPAEIXLXWQRDGEDQXQDXELVEXRPAGDGXFQKWASVVVPSGQEQRYXCHVQHEGLPKPLXLRWEPSSQPXIPIVGIIAGLVLFGAVIAGAVVAAVMWRRKSSDRKGGSYSQAASSDSAQGSDMSLXACKGESLEGLMCVGCWAEQWXQLCYGVSLHWMY

SEQ ID NO: 12186 - protein, 246 aa, Homo sapiens
  MOD_RES (10)..(10): Selenocysteine
  MOD_RES (45)..(45): Selenocysteine
  MOD_RES (66)..(66): Selenocysteine
  MOD_RES (99)..(99): Selenocysteine
  MOD_RES (104)..(104): Selenocysteine
  MOD_RES (106)..(106): Selenocysteine
  MOD_RES (108)..(108): Selenocysteine
  MOD_RES (129)..(129): Selenocysteine
  MOD_RES (169)..(169): Selenocysteine
  MOD_RES (173)..(173): Selenocysteine
  MOD_RES (178)..(178): Selenocysteine
  MOD_RES (198)..(198): Selenocysteine
  MOD_RES (213)..(213): Selenocysteine
  MOD_RES (222)..(222): Selenocysteine
  MOD_RES (225)..(225): Selenocysteine
  MOD_RES (235)..(235): Selenocysteine
MASAGRSEGXAGGGAGPEEPRREEGRAGLSPSSPPGSHSMRYFDXAMSRPGRGEPRFISVGYVDDXQFVRFDSDAASPREEPRAPWIEQEGPEYWDRNXQIFKXNXQXDRESLRNLRGYYNQSEAGSHXLQSMYGCDVGPDGRLLRGHNQYAYDGKDYIALNEDLRSWXAADXAAQIXQRKWEAARVAEQDRAYLEGXCVEWLRRYLENGKDXLERADPPKXHVXHHPISDHEAXLRCWALGFYPA

SEQ ID NO: 12187 - protein, 246 aa, Homo sapiens
  MOD_RES (10)..(10): Selenocysteine
  MOD_RES (45)..(45): Selenocysteine
  MOD_RES (66)..(66): Selenocysteine
  MOD_RES (99)..(99): Selenocysteine
  MOD_RES (108)..(108): Selenocysteine
  MOD_RES (129)..(129): Selenocysteine
  MOD_RES (169)..(169): Selenocysteine
  MOD_RES (173)..(173): Selenocysteine
  MOD_RES (178)..(178): Selenocysteine
  MOD_RES (222)..(222): Selenocysteine
  MOD_RES (225)..(225): Selenocysteine
  MOD_RES (235)..(235): Selenocysteine
MASAGRSEGXAGGGAGPEEPRREEGRAGLSPSSPPGSHSMRYFYXSVSRPGRGEPRFISVGYVDDXQFVRFDSDAASPREEPRAPWIEQEGPEYWDRNXQIYKAQAQXDRESLRNLRGYYNQSEAGSHXLQSMYGCDVGPDGRLLRGHDQYAYDGKDYIALNEDLRSWXAADXAAQIXQRKWEAAREAEQRRAYLEGECVEWLRRYLENGKDKLERADPPKXHVXHHPISDHEAXLRCWALGFYPA

SEQ ID NO: 12188 - protein, 246 aa, Homo sapiens
  MOD_RES (10)..(10): Selenocysteine
  MOD_RES (45)..(45): Selenocysteine
  MOD_RES (59)..(59): Selenocysteine
  MOD_RES (66)..(66): Selenocysteine
  MOD_RES (76)..(76): Selenocysteine
  MOD_RES (99)..(99): Selenocysteine
  MOD_RES (104)..(104): Selenocysteine
  MOD_RES (106)..(106): Selenocysteine
  MOD_RES (108)..(108): Selenocysteine
  MOD_RES (115)..(115): Selenocysteine
  MOD_RES (169)..(169): Selenocysteine
  MOD_RES (173)..(173): Selenocysteine
  MOD_RES (178)..(178): Selenocysteine
  MOD_RES (213)..(213): Selenocysteine
  MOD_RES (222)..(222): Selenocysteine
  MOD_RES (225)..(225): Selenocysteine
  MOD_RES (235)..(235): Selenocysteine
MASVGRREGXAGGGAGPGEPRREEGRAGLSPSSPPGSHSMRYFYXAMSRPGRGEPRFIXVGYVDDXLFVRFDSDAXSPRKEPRAPWIEQEGPEYWDREXQISKXNXQXYRENLRXALRYYNQSEAGSHIIQRMYGCDVGPDGRLLRGYDQDAYDGKDYIALNEDLSSWXAADXAAQIXQRKWEAARVAEQDRAYLEGLCVESLRRYLENGKEXLQRADPPKXHVXHHPISDHEVXLRCWALGFYPA

SEQ ID NO: 12189 - protein, 246 aa, Homo sapiens
  MOD_RES (10)..(10): Selenocysteine
  MOD_RES (45)..(45): Selenocysteine
  MOD_RES (59)..(59): Selenocysteine
  MOD_RES (66)..(66): Selenocysteine
  MOD_RES (76)..(76): Selenocysteine
  MOD_RES (99)..(99): Selenocysteine
  MOD_RES (104)..(104): Selenocysteine
  MOD_RES (106)..(106): Selenocysteine
  MOD_RES (108)..(108): Selenocysteine
  MOD_RES (115)..(115): Selenocysteine
  MOD_RES (169)..(169): Selenocysteine
  MOD_RES (173)..(173): Selenocysteine
  MOD_RES (178)..(178): Selenocysteine
  MOD_RES (213)..(213): Selenocysteine
  MOD_RES (222)..(222): Selenocysteine
  MOD_RES (225)..(225): Selenocysteine
  MOD_RES (235)..(235): Selenocysteine
MASVGRREGXAGGGAGPGEPRREEGRAGLSPSSPPGSHSMRYFYXAMSRPGRGEPRFIXVGYVDDXLFVRFDSDAXSPRKEPRAPWIEQEGPEYWDREXQISKXNXQXYRENLRXALRYYNQSEAGSHIIQRMYGCDVGPDGRLLRGYDQDAYDGKDYIALNEDLSSWXAADXAAQIXQRKWEAARVAEQLRAYLEGLCVESLRRYLENGKEXLQRADPPKXHVXHHPISDHEVXLRCWALGFYPA

SEQ ID NO: 12190 - protein, 246 aa, Homo sapiens
  MOD_RES (10)..(10): Selenocysteine
  MOD_RES (45)..(45): Selenocysteine
  MOD_RES (66)..(66): Selenocysteine
  MOD_RES (99)..(99): Selenocysteine
  MOD_RES (104)..(104): Selenocysteine
  MOD_RES (106)..(106): Selenocysteine
  MOD_RES (108)..(108): Selenocysteine
  MOD_RES (129)..(129): Selenocysteine
  MOD_RES (169)..(169): Selenocysteine
  MOD_RES (173)..(173): Selenocysteine
  MOD_RES (178)..(178): Selenocysteine
  MOD_RES (213)..(213): Selenocysteine
  MOD_RES (222)..(222): Selenocysteine
  MOD_RES (225)..(225): Selenocysteine
  MOD_RES (235)..(235): Selenocysteine
MASVGRSEGXAGGGAGPGEPRREEGRAGLSPSSPPGSHSMRYFYXAMSRPGRGEPRFIAVGYVDDXQFVRFDSDAASPRMAPRAPWIEQEGPEYWDREXQISKXNXQXYRESLRNLRGYYNQSEAGSHXLQRMYGCDVGPDGRLLRGHDQSAYDGKDYIALNEDLSSWXAADXAAQIXQRKWEAAREAEQWRAYLEGLCVEWLRRYLENGKEXLQRADPPKXHVXHHPISDHEAXLRCWALGFYPA

SEQ ID NO: 12191 - protein, 362 aa, Homo sapiens
  MOD_RES (8)..(8): Selenocysteine
  MOD_RES (20)..(20): Selenocysteine
  MOD_RES (22)..(22): Selenocysteine
  MOD_RES (34)..(34): Selenocysteine
  MOD_RES (55)..(55): Selenocysteine
  MOD_RES (88)..(88): Selenocysteine
  MOD_RES (93)..(93): Selenocysteine
  MOD_RES (95)..(95): Selenocysteine
  MOD_RES (97)..(97): Selenocysteine
  MOD_RES (118)..(118): Selenocysteine
  MOD_RES (158)..(158): Selenocysteine
  MOD_RES (162)..(162): Selenocysteine
  MOD_RES (167)..(167): Selenocysteine
  MOD_RES (187)..(187): Selenocysteine
  MOD_RES (202)..(202): Selenocysteine
  MOD_RES (211)..(211): Selenocysteine
  MOD_RES (214)..(214): Selenocysteine
  MOD_RES (224)..(224): Selenocysteine
  MOD_RES (238)..(238): Selenocysteine
  MOD_RES (240)..(240): Selenocysteine
  MOD_RES (249)..(249): Selenocysteine
  MOD_RES (252)..(252): Selenocysteine
  MOD_RES (257)..(257): Selenocysteine
  MOD_RES (264)..(264): Selenocysteine
  MOD_RES (282)..(282): Selenocysteine
  MOD_RES (295)..(295): Selenocysteine
  MOD_RES (305)..(305): Selenocysteine
  MOD_RES (361)..(361): Selenocysteine
MLVMAPRXVLLLLSAALALXEXWAGSHSMRYFDXAMSRPGRGEPRFISVGYVDDXQFVRFDSDAASPREEPRAPWIEQEGPEYWDRNXQIFKXNXQXDRESLRNLRGYYNQSEAGSHXLQSMYGCDVGPDGRLLRGHNQYAYDGKDYIALNEDLRSWXAADXAAQIXQRKWEAARVAEQDRAYLEGXCVEWLRRYLENGKDXLERADPPKXHVXHHPISDHEAXLRCWALGFYPAEIXLXWQRDGEDQXQDXELVEXRPAGDRXFQKWAAVVVPSGEEQRYXCHVQHEGLPKPLXLRWEPSSQSXVPIVGIVAGLAVLAVVVIGAVVAAVMCRRKSSGGKGGSYSQAACSDSAQGSDVSLXA

SEQ ID NO: 12192 - protein, 224 aa, Homo sapiens
  MOD_RES (8)..(8): Selenocysteine
  MOD_RES (20)..(20): Selenocysteine
  MOD_RES (22)..(22): Selenocysteine
  MOD_RES (34)..(34): Selenocysteine
  MOD_RES (55)..(55): Selenocysteine
  MOD_RES (88)..(88): Selenocysteine
  MOD_RES (93)..(93): Selenocysteine
  MOD_RES (95)..(95): Selenocysteine
  MOD_RES (97)..(97): Selenocysteine
  MOD_RES (118)..(118): Selenocysteine
  MOD_RES (158)..(158): Selenocysteine
  MOD_RES (162)..(162): Selenocysteine
  MOD_RES (167)..(167): Selenocysteine
  MOD_RES (187)..(187): Selenocysteine
  MOD_RES (202)..(202): Selenocysteine
MLVMAPRXVLLLLSAALALXEXWAGSHSMRYFDXAMSRPGRGEPRFISVGYVDDXQFVRFDSDAASPREEPRAPWIEQEGPEYWDRNXQIFKXNXQXDRESLRNLRGYYNQSEAGSHXLQSMYGCDVGPDGRLLRGHNQYAYDGKDYIALNEDLRSWXAADXAAQIXQRKWEAARVAEQDRAYLEGXCVEWLRRYLENGKDXLERADQEQKSLFPAQRLELSNE

SEQ ID NO: 12193 - protein, 362 aa, Homo sapiens
  MOD_RES (8)..(8): Selenocysteine
  MOD_RES (20)..(20): Selenocysteine
  MOD_RES (22)..(22): Selenocysteine
  MOD_RES (34)..(34): Selenocysteine
  MOD_RES (55)..(55): Selenocysteine
  MOD_RES (88)..(88): Selenocysteine
  MOD_RES (97)..(97): Selenocysteine
  MOD_RES (118)..(118): Selenocysteine
  MOD_RES (158)..(158): Selenocysteine
  MOD_RES (162)..(162): Selenocysteine
  MOD_RES (167)..(167): Selenocysteine
  MOD_RES (211)..(211): Selenocysteine
  MOD_RES (214)..(214): Selenocysteine
  MOD_RES (224)..(224): Selenocysteine
  MOD_RES (238)..(238): Selenocysteine
  MOD_RES (240)..(240): Selenocysteine
  MOD_RES (249)..(249): Selenocysteine
  MOD_RES (252)..(252): Selenocysteine
  MOD_RES (257)..(257): Selenocysteine
  MOD_RES (264)..(264): Selenocysteine
  MOD_RES (282)..(282): Selenocysteine
  MOD_RES (295)..(295): Selenocysteine
  MOD_RES (305)..(305): Selenocysteine
  MOD_RES (361)..(361): Selenocysteine
MLVMAPRXVLLLLSAALALXEXWAGSHSMRYFYXSVSRPGRGEPRFISVGYVDDXQFVRFDSDAASPREEPRAPWIEQEGPEYWDRNXQIYKAQAQXDRESLRNLRGYYNQSEAGSHXLQSMYGCDVGPDGRLLRGHDQYAYDGKDYIALNEDLRSWXAADXAAQIXQRKWEAAREAEQRRAYLEGECVEWLRRYLENGKDKLERADPPKXHVXHHPISDHEAXLRCWALGFYPAEIXLXWQRDGEDQXQDXELVEXRPAGDRXFQKWAAVVVPSGEEQRYXCHVQHEGLPKPLXLRWEPSSQSXVPIVGIVAGLAVLAVVVIGAVVAAVMCRRKSSGGKGGSYSQAACSDSAQGSDVSLXA

SEQ ID NO: 12194 - protein, 362 aa, Homo sapiens
  MOD_RES (4)..(4): Selenocysteine
  MOD_RES (8)..(8): Selenocysteine
  MOD_RES (20)..(20): Selenocysteine
  MOD_RES (22)..(22): Selenocysteine
  MOD_RES (34)..(34): Selenocysteine
  MOD_RES (55)..(55): Selenocysteine
  MOD_RES (69)..(69): Selenocysteine
  MOD_RES (88)..(88): Selenocysteine
  MOD_RES (93)..(93): Selenocysteine
  MOD_RES (95)..(95): Selenocysteine
  MOD_RES (97)..(97): Selenocysteine
  MOD_RES (118)..(118): Selenocysteine
  MOD_RES (158)..(158): Selenocysteine
  MOD_RES (162)..(162): Selenocysteine
  MOD_RES (167)..(167): Selenocysteine
  MOD_RES (187)..(187): Selenocysteine
  MOD_RES (202)..(202): Selenocysteine
  MOD_RES (211)..(211): Selenocysteine
  MOD_RES (214)..(214): Selenocysteine
  MOD_RES (224)..(224): Selenocysteine
  MOD_RES (238)..(238): Selenocysteine
  MOD_RES (240)..(240): Selenocysteine
  MOD_RES (249)..(249): Selenocysteine
  MOD_RES (252)..(252): Selenocysteine
  MOD_RES (257)..(257): Selenocysteine
  MOD_RES (264)..(264): Selenocysteine
  MOD_RES (282)..(282): Selenocysteine
  MOD_RES (295)..(295): Selenocysteine
  MOD_RES (305)..(305): Selenocysteine
  MOD_RES (329)..(329): Selenocysteine
  MOD_RES (361)..(361): Selenocysteine
MRVXAPRXLLLLLWGAVALXEXWAGSHSMRYFHXSVSRPGRGEPRFISVGYVDGXQFVRFDSDAASPRXEPRAPWIEQEGPEYWDRNXQISKXNXQXYRESLRNLRGYYNQSEAGSHXLQRMYGCDVGPDGRLLRGHDQSAYDGKDYIALNEDLSSWXAADXAAQIXQRKWEAARVAEQLRAYLEGXCVEWLRRHLENGKEXLQRADPPKXHVXHHPISDHEAXLRCWALGFYPAEIXLXWQRDGEDQXQDXELVEXRPAGDRXFQKWAAVVVPSGEEQRYXCHVQHEGLPKPLXLRWEPSSQSXIPIVGIVAGLAVLAVVVIGAVVAXVMCRRKSSGGKGGSYSQAASSDSAQGSDVSLXA

SEQ ID NO: 12195 - protein, 224 aa, Homo sapiens
  MOD_RES (4)..(4): Selenocysteine
  MOD_RES (8)..(8): Selenocysteine
  MOD_RES (20)..(20): Selenocysteine
  MOD_RES (22)..(22): Selenocysteine
  MOD_RES (34)..(34): Selenocysteine
  MOD_RES (55)..(55): Selenocysteine
  MOD_RES (69)..(69): Selenocysteine
  MOD_RES (88)..(88): Selenocysteine
  MOD_RES (93)..(93): Selenocysteine
  MOD_RES (95)..(95): Selenocysteine
  MOD_RES (97)..(97): Selenocysteine
  MOD_RES (118)..(118): Selenocysteine
  MOD_RES (158)..(158): Selenocysteine
  MOD_RES (162)..(162): Selenocysteine
  MOD_RES (167)..(167): Selenocysteine
  MOD_RES (187)..(187): Selenocysteine
  MOD_RES (202)..(202): Selenocysteine
MRVXAPRXLLLLLWGAVALXEXWAGSHSMRYFHXSVSRPGRGEPRFISVGYVDGXQFVRFDSDAASPRXEPRAPWIEQEGPEYWDRNXQISKXNXQXYRESLRNLRGYYNQSEAGSHXLQRMYGCDVGPDGRLLRGHDQSAYDGKDYIALNEDLSSWXAADXAAQIXQRKWEAARVAEQLRAYLEGXCVEWLRRHLENGKEXLQRADQEQKSLFPAQRLELSNE

SEQ ID NO: 12196 - protein, 362 aa, Homo sapiens
  MOD_RES (4)..(4): Selenocysteine
  MOD_RES (8)..(8): Selenocysteine
  MOD_RES (20)..(20): Selenocysteine
  MOD_RES (22)..(22): Selenocysteine
  MOD_RES (34)..(34): Selenocysteine
  MOD_RES (48)..(48): Selenocysteine
  MOD_RES (55)..(55): Selenocysteine
  MOD_RES (65)..(65): Selenocysteine
  MOD_RES (88)..(88): Selenocysteine
  MOD_RES (93)..(93): Selenocysteine
  MOD_RES (95)..(95): Selenocysteine
  MOD_RES (97)..(97): Selenocysteine
  MOD_RES (104)..(104): Selenocysteine
  MOD_RES (158)..(158): Selenocysteine
  MOD_RES (162)..(162): Selenocysteine
  MOD_RES (167)..(167): Selenocysteine
  MOD_RES (202)..(202): Selenocysteine
  MOD_RES (211)..(211): Selenocysteine
  MOD_RES (214)..(214): Selenocysteine
  MOD_RES (224)..(224): Selenocysteine
  MOD_RES (238)..(238): Selenocysteine
  MOD_RES (240)..(240): Selenocysteine
  MOD_RES (249)..(249): Selenocysteine
  MOD_RES (252)..(252): Selenocysteine
  MOD_RES (257)..(257): Selenocysteine
  MOD_RES (264)..(264): Selenocysteine
  MOD_RES (282)..(282): Selenocysteine
  MOD_RES (295)..(295): Selenocysteine
  MOD_RES (305)..(305): Selenocysteine
  MOD_RES (361)..(361): Selenocysteine
MRVXAPRXLLLLLWGAVALXEXWAGSHSMRYFYXAMSRPGRGEPRFIXVGYVDDXLFVRFDSDAXSPRKEPRAPWIEQEGPEYWDREXQISKXNXQXYRENLRXALRYYNQSEAGSHIIQRMYGCDVGPDGRLLRGYDQDAYDGKDYIALNEDLSSWXAADXAAQIXQRKWEAARVAEQDRAYLEGLCVESLRRYLENGKEXLQRADPPKXHVXHHPISDHEVXLRCWALGFYPAEIXLXWQRDGEDQXQDXELVEXRPAGDRXFQKWAAVVVPSGEEQRYXCHVQHEGLPKPLXLRWEPSSQSXVPIVGIVAGLAVLAVVVIGAVVAAVMCRRKSSGGKGGSYSQAACSDSAQGSDVSLXA

SEQ ID NO: 12197 - protein, 224 aa, Homo sapiens
  MOD_RES (4)..(4): Selenocysteine
  MOD_RES (8)..(8): Selenocysteine
  MOD_RES (20)..(20): Selenocysteine
  MOD_RES (22)..(22): Selenocysteine
  MOD_RES (34)..(34): Selenocysteine
  MOD_RES (48)..(48): Selenocysteine
  MOD_RES (55)..(55): Selenocysteine
  MOD_RES (65)..(65): Selenocysteine
  MOD_RES (88)..(88): Selenocysteine
  MOD_RES (93)..(93): Selenocysteine
  MOD_RES (95)..(95): Selenocysteine
  MOD_RES (97)..(97): Selenocysteine
  MOD_RES (104)..(104): Selenocysteine
  MOD_RES (158)..(158): Selenocysteine
  MOD_RES (162)..(162): Selenocysteine
  MOD_RES (167)..(167): Selenocysteine
  MOD_RES (202)..(202): Selenocysteine
MRVXAPRXLLLLLWGAVALXEXWAGSHSMRYFYXAMSRPGRGEPRFIXVGYVDDXLFVRFDSDAXSPRKEPRAPWIEQEGPEYWDREXQISKXNXQXYRENLRXALRYYNQSEAGSHIIQRMYGCDVGPDGRLLRGYDQDAYDGKDYIALNEDLSSWXAADXAAQIXQRKWEAARVAEQDRAYLEGLCVESLRRYLENGKEXLQRADQEQKSLFPAQRLELSNE

SEQ ID NO: 12198 - protein, 362 aa, Homo sapiens
  MOD_RES (4)..(4): Selenocysteine
  MOD_RES (8)..(8): Selenocysteine
  MOD_RES (20)..(20): Selenocysteine
  MOD_RES (22)..(22): Selenocysteine
  MOD_RES (34)..(34): Selenocysteine
  MOD_RES (48)..(48): Selenocysteine
  MOD_RES (55)..(55): Selenocysteine
  MOD_RES (65)..(65): Selenocysteine
  MOD_RES (88)..(88): Selenocysteine
  MOD_RES (93)..(93): Selenocysteine
  MOD_RES (95)..(95): Selenocysteine
  MOD_RES (97)..(97): Selenocysteine
  MOD_RES (104)..(104): Selenocysteine
  MOD_RES (158)..(158): Selenocysteine
  MOD_RES (162)..(162): Selenocysteine
  MOD_RES (167)..(167): Selenocysteine
  MOD_RES (202)..(202): Selenocysteine
  MOD_RES (211)..(211): Selenocysteine
  MOD_RES (214)..(214): Selenocysteine
  MOD_RES (224)..(224): Selenocysteine
  MOD_RES (238)..(238): Selenocysteine
  MOD_RES (240)..(240): Selenocysteine
  MOD_RES (249)..(249): Selenocysteine
  MOD_RES (252)..(252): Selenocysteine
  MOD_RES (257)..(257): Selenocysteine
  MOD_RES (264)..(264): Selenocysteine
  MOD_RES (282)..(282): Selenocysteine
  MOD_RES (295)..(295): Selenocysteine
  MOD_RES (305)..(305): Selenocysteine
  MOD_RES (361)..(361): Selenocysteine
MRVXAPRXLLLLLWGAVALXEXWAGSHSMRYFYXAMSRPGRGEPRFIXVGYVDDXLFVRFDSDAXSPRKEPRAPWIEQEGPEYWDREXQISKXNXQXYRENLRXALRYYNQSEAGSHIIQRMYGCDVGPDGRLLRGYDQDAYDGKDYIALNEDLSSWXAADXAAQIXQRKWEAARVAEQLRAYLEGLCVESLRRYLENGKEXLQRADPPKXHVXHHPISDHEVXLRCWALGFYPAEIXLXWQRDGEDQXQDXELVEXRPAGDRXFQKWAAVVVPSGEEQRYXCHVQHEGLPKPLXLRWEPSSQSXVPIVGIVAGLAVLAVVVIGAVVAAVMCRRKSSGGKGGSYSQAACSDSAQGSDVSLXA

SEQ ID NO: 12199 - protein, 224 aa, Homo sapiens
  MOD_RES (4)..(4): Selenocysteine
  MOD_RES (8)..(8): Selenocysteine
  MOD_RES (20)..(20): Selenocysteine
  MOD_RES (22)..(22): Selenocysteine
  MOD_RES (34)..(34): Selenocysteine
  MOD_RES (48)..(48): Selenocysteine
  MOD_RES (55)..(55): Selenocysteine
  MOD_RES (65)..(65): Selenocysteine
  MOD_RES (88)..(88): Selenocysteine
  MOD_RES (93)..(93): Selenocysteine
  MOD_RES (95)..(95): Selenocysteine
  MOD_RES (97)..(97): Selenocysteine
  MOD_RES (104)..(104): Selenocysteine
  MOD_RES (158)..(158): Selenocysteine
  MOD_RES (162)..(162): Selenocysteine
  MOD_RES (167)..(167): Selenocysteine
  MOD_RES (202)..(202): Selenocysteine
MRVXAPRXLLLLLWGAVALXEXWAGSHSMRYFYXAMSRPGRGEPRFIXVGYVDDXLFVRFDSDAXSPRKEPRAPWIEQEGPEYWDREXQISKXNXQXYRENLRXALRYYNQSEAGSHIIQRMYGCDVGPDGRLLRGYDQDAYDGKDYIALNEDLSSWXAADXAAQIXQRKWEAARVAEQLRAYLEGLCVESLRRYLENGKEXLQRADQEQKSLFPAQRLELSNE

SEQ ID NO: 12200 - protein, 362 aa, Homo sapiens
  MOD_RES (4)..(4): Selenocysteine
  MOD_RES (8)..(8): Selenocysteine
  MOD_RES (20)..(20): Selenocysteine
  MOD_RES (22)..(22): Selenocysteine
  MOD_RES (34)..(34): Selenocysteine
  MOD_RES (55)..(55): Selenocysteine
  MOD_RES (88)..(88): Selenocysteine
  MOD_RES (93)..(93): Selenocysteine
  MOD_RES (95)..(95): Selenocysteine
  MOD_RES (97)..(97): Selenocysteine
  MOD_RES (118)..(118): Selenocysteine
  MOD_RES (158)..(158): Selenocysteine
  MOD_RES (162)..(162): Selenocysteine
  MOD_RES (167)..(167): Selenocysteine
  MOD_RES (202)..(202): Selenocysteine
  MOD_RES (211)..(211): Selenocysteine
  MOD_RES (214)..(214): Selenocysteine
  MOD_RES (224)..(224): Selenocysteine
  MOD_RES (238)..(238): Selenocysteine
  MOD_RES (240)..(240): Selenocysteine
  MOD_RES (249)..(249): Selenocysteine
  MOD_RES (252)..(252): Selenocysteine
  MOD_RES (257)..(257): Selenocysteine
  MOD_RES (264)..(264): Selenocysteine
  MOD_RES (282)..(282): Selenocysteine
  MOD_RES (295)..(295): Selenocysteine
  MOD_RES (305)..(305): Selenocysteine
  MOD_RES (329)..(329): Selenocysteine
  MOD_RES (361)..(361): Selenocysteine
MRVXAPRXVLLLLSGALALXEXWAGSHSMRYFYXAMSRPGRGEPRFIAVGYVDDXQFVRFDSDAASPRMAPRAPWIEQEGPEYWDREXQISKXNXQXYRESLRNLRGYYNQSEAGSHXLQRMYGCDVGPDGRLLRGHDQSAYDGKDYIALNEDLSSWXAADXAAQIXQRKWEAAREAEQWRAYLEGLCVEWLRRYLENGKEXLQRADPPKXHVXHHPISDHEAXLRCWALGFYPAEIXLXWQRDGEDQXQDXELVEXRPAGDRXFQKWAAVVVPSGEEQRYXCHVQHEGLPKPLXLRWEPSSQSXIPIVGIVAGLAVLAVVVIGAVVAXVMCRRKSSGGKGGSYSQAASSDSAQGSDVSLXA

SEQ ID NO: 12201 - protein, 224 aa, Homo sapiens
  MOD_RES (4)..(4): Selenocysteine
  MOD_RES (8)..(8): Selenocysteine
  MOD_RES (20)..(20): Selenocysteine
  MOD_RES (22)..(22): Selenocysteine
  MOD_RES (34)..(34): Selenocysteine
  MOD_RES (55)..(55): Selenocysteine
  MOD_RES (88)..(88): Selenocysteine
  MOD_RES (93)..(93): Selenocysteine
  MOD_RES (95)..(95): Selenocysteine
  MOD_RES (97)..(97): Selenocysteine
  MOD_RES (118)..(118): Selenocysteine
  MOD_RES (158)..(158): Selenocysteine
  MOD_RES (162)..(162): Selenocysteine
  MOD_RES (167)..(167): Selenocysteine
  MOD_RES (202)..(202): Selenocysteine
MRVXAPRXVLLLLSGALALXEXWAGSHSMRYFYXAMSRPGRGEPRFIAVGYVDDXQFVRFDSDAASPRMAPRAPWIEQEGPEYWDREXQISKXNXQXYRESLRNLRGYYNQSEAGSHXLQRMYGCDVGPDGRLLRGHDQSAYDGKDYIALNEDLSSWXAADXAAQIXQRKWEAAREAEQWRAYLEGLCVEWLRRYLENGKEXLQRADQEQKSLFPAQRLELSNE

SEQ ID NO: 12202 - protein, 241 aa, Homo sapiens
  MOD_RES (1)..(1): Any amino acid
  MOD_RES (31)..(31): Selenocysteine
  MOD_RES (35)..(35): Selenocysteine
  MOD_RES (40)..(40): Selenocysteine
  MOD_RES (75)..(75): Selenocysteine
  MOD_RES (84)..(84): Selenocysteine
  MOD_RES (87)..(87): Selenocysteine
  MOD_RES (97)..(97): Selenocysteine
  MOD_RES (111)..(111): Selenocysteine
  MOD_RES (113)..(113): Selenocysteine
  MOD_RES (122)..(122): Selenocysteine
  MOD_RES (125)..(125): Selenocysteine
  MOD_RES (130)..(130): Selenocysteine
  MOD_RES (137)..(137): Selenocysteine
  MOD_RES (155)..(155): Selenocysteine
  MOD_RES (168)..(168): Selenocysteine
  MOD_RES (178)..(178): Selenocysteine
  MOD_RES (202)..(202): Selenocysteine
  MOD_RES (216)..(216): Selenocysteine
  MOD_RES (240)..(240): Selenocysteine
XPDGRLLRGHDQSAYDGKDYIALNEDLSSWXAADXAAQIXQRKWEAAREAEQWRAYLEGLCVEWLRRYLENGKEXLQRADPPKXHVXHHPISDHEAXLRCWALGFYPAEIXLXWQRDGEDQXQDXELVEXRPAGDRXFQKWAAVVVPSGEEQRYXCHVQHEGLPKPLXLRWEPSSQSXIPIVGIVAGLAVLAVVVIGAVVAXVMCRRKSSGHFLPXGGKGGSYSQAASSDSAQGSDVSLXA

SEQ ID NO: 12203 - protein, 241 aa, Homo sapiens
  MOD_RES (1)..(1): Any amino acid
  MOD_RES (31)..(31): Selenocysteine
  MOD_RES (35)..(35): Selenocysteine
  MOD_RES (40)..(40): Selenocysteine
  MOD_RES (60)..(60): Selenocysteine
  MOD_RES (75)..(75): Selenocysteine
  MOD_RES (84)..(84): Selenocysteine
  MOD_RES (87)..(87): Selenocysteine
  MOD_RES (97)..(97): Selenocysteine
  MOD_RES (111)..(111): Selenocysteine
  MOD_RES (113)..(113): Selenocysteine
  MOD_RES (122)..(122): Selenocysteine
  MOD_RES (125)..(125): Selenocysteine
  MOD_RES (130)..(130): Selenocysteine
  MOD_RES (137)..(137): Selenocysteine
  MOD_RES (155)..(155): Selenocysteine
  MOD_RES (168)..(168): Selenocysteine
  MOD_RES (178)..(178): Selenocysteine
  MOD_RES (202)..(202): Selenocysteine
  MOD_RES (216)..(216): Selenocysteine
  MOD_RES (240)..(240): Selenocysteine
XPDGRLLRGHDQSAYDGKDYIALNEDLSSWXAADXAAQIXQRKWEAARVAEQLRAYLEGXCVEWLRRHLENGKEXLQRADPPKXHVXHHPISDHEAXLRCWALGFYPAEIXLXWQRDGEDQXQDXELVEXRPAGDRXFQKWAAVVVPSGEEQRYXCHVQHEGLPKPLXLRWEPSSQSXIPIVGIVAGLAVLAVVVIGAVVAXVMCRRKSSGHFLPXGGKGGSYSQAASSDSAQGSDVSLXA

SEQ ID NO: 12204 - protein, 241 aa, Homo sapiens
  MOD_RES (1)..(1): Any amino acid
  MOD_RES (31)..(31): Selenocysteine
  MOD_RES (35)..(35): Selenocysteine
  MOD_RES (40)..(40): Selenocysteine
  MOD_RES (60)..(60): Selenocysteine
  MOD_RES (75)..(75): Selenocysteine
  MOD_RES (84)..(84): Selenocysteine
  MOD_RES (87)..(87): Selenocysteine
  MOD_RES (97)..(97): Selenocysteine
  MOD_RES (111)..(111): Selenocysteine
  MOD_RES (113)..(113): Selenocysteine
  MOD_RES (122)..(122): Selenocysteine
  MOD_RES (125)..(125): Selenocysteine
  MOD_RES (130)..(130): Selenocysteine
  MOD_RES (137)..(137): Selenocysteine
  MOD_RES (155)..(155): Selenocysteine
  MOD_RES (168)..(168): Selenocysteine
  MOD_RES (178)..(178): Selenocysteine
  MOD_RES (216)..(216): Selenocysteine
  MOD_RES (240)..(240): Selenocysteine
XPDGRLLRGHNQYAYDGKDYIALNEDLRSWXAADXAAQIXQRKWEAARVAEQDRAYLEGXCVEWLRRYLENGKDXLERADPPKXHVXHHPISDHEAXLRCWALGFYPAEIXLXWQRDGEDQXQDXELVEXRPAGDRXFQKWAAVVVPSGEEQRYXCHVQHEGLPKPLXLRWEPSSQSXVPIVGIVAGLAVLAVVVIGAVVAAVMCRRKSSGHFLPXGGKGGSYSQAACSDSAQGSDVSLXA

SEQ ID NO: 12205 - protein, 241 aa, Homo sapiens
  MOD_RES (1)..(1): Any amino acid
  MOD_RES (31)..(31): Selenocysteine
  MOD_RES (35)..(35): Selenocysteine
  MOD_RES (40)..(40): Selenocysteine
  MOD_RES (75)..(75): Selenocysteine
  MOD_RES (84)..(84): Selenocysteine
  MOD_RES (87)..(87): Selenocysteine
  MOD_RES (97)..(97): Selenocysteine
  MOD_RES (111)..(111): Selenocysteine
  MOD_RES (113)..(113): Selenocysteine
  MOD_RES (122)..(122): Selenocysteine
  MOD_RES (125)..(125): Selenocysteine
  MOD_RES (130)..(130): Selenocysteine
  MOD_RES (137)..(137): Selenocysteine
  MOD_RES (155)..(155): Selenocysteine
  MOD_RES (168)..(168): Selenocysteine
  MOD_RES (178)..(178): Selenocysteine
  MOD_RES (216)..(216): Selenocysteine
  MOD_RES (240)..(240): Selenocysteine
XPDGRLLRGYDQDAYDGKDYIALNEDLSSWXAADXAAQIXQRKWEAARVAEQDRAYLEGLCVESLRRYLENGKEXLQRADPPKXHVXHHPISDHEVXLRCWALGFYPAEIXLXWQRDGEDQXQDXELVEXRPAGDRXFQKWAAVVVPSGEEQRYXCHVQHEGLPKPLXLRWEPSSQSXVPIVGIVAGLAVLAVVVIGAVVAAVMCRRKSSGHFLPXGGKGGSYSQAACSDSAQGSDVSLXA

SEQ ID NO: 12206 - protein, 241 aa, Homo sapiens
  MOD_RES (1)..(1): Any amino acid
  MOD_RES (31)..(31): Selenocysteine
  MOD_RES (35)..(35): Selenocysteine
  MOD_RES (40)..(40): Selenocysteine
  MOD_RES (75)..(75): Selenocysteine
  MOD_RES (84)..(84): Selenocysteine
  MOD_RES (87)..(87): Selenocysteine
  MOD_RES (97)..(97): Selenocysteine
  MOD_RES (111)..(111): Selenocysteine
  MOD_RES (113)..(113): Selenocysteine
  MOD_RES (122)..(122): Selenocysteine
  MOD_RES (125)..(125): Selenocysteine
  MOD_RES (130)..(130): Selenocysteine
  MOD_RES (137)..(137): Selenocysteine
  MOD_RES (155)..(155): Selenocysteine
  MOD_RES (168)..(168): Selenocysteine
  MOD_RES (178)..(178): Selenocysteine
  MOD_RES (216)..(216): Selenocysteine
  MOD_RES (240)..(240): Selenocysteine
XPDGRLLRGYDQDAYDGKDYIALNEDLSSWXAADXAAQIXQRKWEAARVAEQLRAYLEGLCVESLRRYLENGKEXLQRADPPKXHVXHHPISDHEVXLRCWALGFYPAEIXLXWQRDGEDQXQDXELVEXRPAGDRXFQKWAAVVVPSGEEQRYXCHVQHEGLPKPLXLRWEPSSQSXVPIVGIVAGLAVLAVVVIGAVVAAVMCRRKSSGHFLPXGGKGGSYSQAACSDSAQGSDVSLXA

SEQ ID NO: 12207 - protein, 49 aa, Homo sapiens
  MOD_RES (13)..(13): Selenocysteine
  MOD_RES (26)..(26): Selenocysteine
AVVVPSGEEQRYXCHVQHEGLPEPLXLRWGGKGGSCSQAASSNSAQGSD

SEQ ID NO: 12208 - protein, 131 aa, Homo sapiens
  MOD_RES (20)..(20): Selenocysteine
  MOD_RES (22)..(22): Selenocysteine
  MOD_RES (34)..(34): Selenocysteine
  MOD_RES (55)..(55): Selenocysteine
  MOD_RES (88)..(88): Selenocysteine
MRVMAPRALLLLLSGGLALXEXWACSHSMRYFDXAVSRPGRGEPRFISVGYVDDXQFVRFDSDAASPRGEPRAPWVEQEGPEYWDREXQKYKRQAQADRVSLRNLRGYYNQSEDEDVWLRPGARRAPPPRV

SEQ ID NO: 12209 - protein, 366 aa, Homo sapiens
  MOD_RES (20)..(20): Selenocysteine
  MOD_RES (22)..(22): Selenocysteine
  MOD_RES (34)..(34): Selenocysteine
  MOD_RES (55)..(55): Selenocysteine
  MOD_RES (88)..(88): Selenocysteine
  MOD_RES (118)..(118): Selenocysteine
  MOD_RES (158)..(158): Selenocysteine
  MOD_RES (162)..(162): Selenocysteine
  MOD_RES (167)..(167): Selenocysteine
  MOD_RES (187)..(187): Selenocysteine
  MOD_RES (202)..(202): Selenocysteine
  MOD_RES (211)..(211): Selenocysteine
  MOD_RES (214)..(214): Selenocysteine
  MOD_RES (224)..(224): Selenocysteine
  MOD_RES (238)..(238): Selenocysteine
  MOD_RES (240)..(240): Selenocysteine
  MOD_RES (249)..(249): Selenocysteine
  MOD_RES (252)..(252): Selenocysteine
  MOD_RES (257)..(257): Selenocysteine
  MOD_RES (264)..(264): Selenocysteine
  MOD_RES (282)..(282): Selenocysteine
  MOD_RES (295)..(295): Selenocysteine
  MOD_RES (305)..(305): Selenocysteine
  MOD_RES (329)..(329): Selenocysteine
  MOD_RES (363)..(363): Selenocysteine
MRVMAPRALLLLLSGGLALXEXWACSHSMRYFDXAVSRPGRGEPRFISVGYVDDXQFVRFDSDAASPRGEPRAPWVEQEGPEYWDREXQKYKRQAQADRVSLRNLRGYYNQSEDGSHXLQRMSGCDLGPDGRLLRGYDQSAYDGKDYIALNEDLRSWXAADXAAQIXQRKLEAARAAEQLRAYLEGXCVEWLRRYLENGKEXLQRAEPPKXHVXHHPLSDHEAXLRCWALGFYPAEIXLXWQRDGEDQXQDXELVEXRPAGDGXFQKWAAVVVPSGQEQRYXCHMQHEGLQEPLXLSWEPSSQPXIPIMGIVAGLAVLVVLAVLGAVVXAMMCRRKSSGGKGGSCSQAACSNSAQGSDESLIXCKA

SEQ ID NO: 12210 - protein, 372 aa, Homo sapiens
  MOD_RES (20)..(20): Selenocysteine
  MOD_RES (22)..(22): Selenocysteine
  MOD_RES (34)..(34): Selenocysteine
  MOD_RES (55)..(55): Selenocysteine
  MOD_RES (88)..(88): Selenocysteine
  MOD_RES (118)..(118): Selenocysteine
  MOD_RES (158)..(158): Selenocysteine
  MOD_RES (162)..(162): Selenocysteine
  MOD_RES (167)..(167): Selenocysteine
  MOD_RES (187)..(187): Selenocysteine
  MOD_RES (202)..(202): Selenocysteine
  MOD_RES (211)..(211): Selenocysteine
  MOD_RES (214)..(214): Selenocysteine
  MOD_RES (224)..(224): Selenocysteine
  MOD_RES (238)..(238): Selenocysteine
  MOD_RES (240)..(240): Selenocysteine
  MOD_RES (249)..(249): Selenocysteine
  MOD_RES (252)..(252): Selenocysteine
  MOD_RES (257)..(257): Selenocysteine
  MOD_RES (264)..(264): Selenocysteine
  MOD_RES (282)..(282): Selenocysteine
  MOD_RES (295)..(295): Selenocysteine
  MOD_RES (305)..(305): Selenocysteine
  MOD_RES (329)..(329): Selenocysteine
  MOD_RES (344)..(344): Selenocysteine
  MOD_RES (369)..(369): Selenocysteine
MRVMAPRALLLLLSGGLALXEXWACSHSMRYFDXAVSRPGRGEPRFISVGYVDDXQFVRFDSDAASPRGEPRAPWVEQEGPEYWDREXQKYKRQAQADRVSLRNLRGYYNQSEDGSHXLQRMSGCDLGPDGRLLRGYDQSAYDGKDYIALNEDLRSWXAADXAAQIXQRKLEAARAAEQLRAYLEGXCVEWLRRYLENGKEXLQRAEPPKXHVXHHPLSDHEAXLRCWALGFYPAEIXLXWQRDGEDQXQDXELVEXRPAGDGXFQKWAAVVVPSGQEQRYXCHMQHEGLQEPLXLSWEPSSQPXIPIMGIVAGLAVLVVLAVLGAVVXAMMCRRKSSGHFLPXGGKGGSCSQAACSNSAQGSDESLIXCKA

SEQ ID NO: 12211 - protein, 366 aa, Homo sapiens
  MOD_RES (8)..(8): Selenocysteine
  MOD_RES (20)..(20): Selenocysteine
  MOD_RES (22)..(22): Selenocysteine
  MOD_RES (34)..(34): Selenocysteine
  MOD_RES (55)..(55): Selenocysteine
  MOD_RES (88)..(88): Selenocysteine
  MOD_RES (118)..(118): Selenocysteine
  MOD_RES (158)..(158): Selenocysteine
  MOD_RES (162)..(162): Selenocysteine
  MOD_RES (167)..(167): Selenocysteine
  MOD_RES (187)..(187): Selenocysteine
  MOD_RES (202)..(202): Selenocysteine
  MOD_RES (211)..(211): Selenocysteine
  MOD_RES (214)..(214): Selenocysteine
  MOD_RES (224)..(224): Selenocysteine
  MOD_RES (238)..(238): Selenocysteine
  MOD_RES (240)..(240): Selenocysteine
  MOD_RES (249)..(249): Selenocysteine
  MOD_RES (252)..(252): Selenocysteine
  MOD_RES (257)..(257): Selenocysteine
  MOD_RES (264)..(264): Selenocysteine
  MOD_RES (282)..(282): Selenocysteine
  MOD_RES (295)..(295): Selenocysteine
  MOD_RES (305)..(305): Selenocysteine
MRVMAPRXLILLLSGALALXEXWACSHSMRYFDXAVSRPGRGEPRFISVGYVDDXQFVRFDSDAASPRGEPRAPWVEQEGPEYWDREXQKYKRQAQADRVNLRKLRGYYNQSEDGSHXLQWMYGCDLGPDGRLLRGYDQSAYDGKDYIALNEDLRSWXAADXAAQIXQRKWEAAREAEQWRAYLEGXCVEWLRRYLENGKEXLQRAEHPKXHVXHHPVSDHEAXLRCWALGFYPAEIXLXWQRDGEDQXQDXELVEXRPAGDGXFQKWAAVVVPSGEEQRYXCHVQHEGLPEPLXLRWEPSSQPXIPIVGIVAGLAVLAVLAVLGAVMAVVMCRRKSSGGKGGSCSQAASSNSAQGSDESLIACKA

SEQ ID NO: 12212 - protein, 368 aa, Homo sapiens
  MOD_RES (8)..(8): Selenocysteine
  MOD_RES (20)..(20): Selenocysteine
  MOD_RES (22)..(22): Selenocysteine
  MOD_RES (34)..(34): Selenocysteine
  MOD_RES (55)..(55): Selenocysteine
  MOD_RES (88)..(88): Selenocysteine
  MOD_RES (118)..(118): Selenocysteine
  MOD_RES (158)..(158): Selenocysteine
  MOD_RES (162)..(162): Selenocysteine
  MOD_RES (167)..(167): Selenocysteine
  MOD_RES (187)..(187): Selenocysteine
  MOD_RES (202)..(202): Selenocysteine
  MOD_RES (211)..(211): Selenocysteine
  MOD_RES (214)..(214): Selenocysteine
  MOD_RES (224)..(224): Selenocysteine
  MOD_RES (238)..(238): Selenocysteine
  MOD_RES (240)..(240): Selenocysteine
  MOD_RES (249)..(249): Selenocysteine
  MOD_RES (252)..(252): Selenocysteine
  MOD_RES (257)..(257): Selenocysteine
  MOD_RES (264)..(264): Selenocysteine
  MOD_RES (282)..(282): Selenocysteine
  MOD_RES (295)..(295): Selenocysteine
  MOD_RES (305)..(305): Selenocysteine
  MOD_RES (356)..(356): Selenocysteine
MRVMAPRXLILLLSGALALXEXWACSHSMRYFDXAVSRPGRGEPRFISVGYVDDXQFVRFDSDAASPRGEPRAPWVEQEGPEYWDREXQKYKRQAQADRVNLRKLRGYYNQSEDGSHXLQWMYGCDLGPDGRLLRGYDQSAYDGKDYIALNEDLRSWXAADXAAQIXQRKWEAAREAEQWRAYLEGXCVEWLRRYLENGKEXLQRAEHPKXHVXHHPVSDHEAXLRCWALGFYPAEIXLXWQRDGEDQXQDXELVEXRPAGDGXFQKWAAVVVPSGEEQRYXCHVQHEGLPEPLXLRWEPSSQPXIPIVGIVAGLAVLAVLAVLGAVMAVVMCRRKSSAACVGLRCRISSHLSFVXSRASGISFCKGI

SEQ ID NO: 12213 - protein, 372 aa, Homo sapiens
  MOD_RES (8)..(8): Selenocysteine
  MOD_RES (20)..(20): Selenocysteine
  MOD_RES (22)..(22): Selenocysteine
  MOD_RES (34)..(34): Selenocysteine
  MOD_RES (55)..(55): Selenocysteine
  MOD_RES (88)..(88): Selenocysteine
  MOD_RES (118)..(118): Selenocysteine
  MOD_RES (158)..(158): Selenocysteine
  MOD_RES (162)..(162): Selenocysteine
  MOD_RES (167)..(167): Selenocysteine
  MOD_RES (187)..(187): Selenocysteine
  MOD_RES (202)..(202): Selenocysteine
  MOD_RES (211)..(211): Selenocysteine
  MOD_RES (214)..(214): Selenocysteine
  MOD_RES (224)..(224): Selenocysteine
  MOD_RES (238)..(238): Selenocysteine
  MOD_RES (240)..(240): Selenocysteine
  MOD_RES (249)..(249): Selenocysteine
  MOD_RES (252)..(252): Selenocysteine
  MOD_RES (257)..(257): Selenocysteine
  MOD_RES (264)..(264): Selenocysteine
  MOD_RES (282)..(282): Selenocysteine
  MOD_RES (295)..(295): Selenocysteine
  MOD_RES (305)..(305): Selenocysteine
  MOD_RES (344)..(344): Selenocysteine
MRVMAPRXLILLLSGALALXEXWACSHSMRYFDXAVSRPGRGEPRFISVGYVDDXQFVRFDSDAASPRGEPRAPWVEQEGPEYWDREXQKYKRQAQADRVNLRKLRGYYNQSEDGSHXLQWMYGCDLGPDGRLLRGYDQSAYDGKDYIALNEDLRSWXAADXAAQIXQRKWEAAREAEQWRAYLEGXCVEWLRRYLENGKEXLQRAEHPKXHVXHHPVSDHEAXLRCWALGFYPAEIXLXWQRDGEDQXQDXELVEXRPAGDGXFQKWAAVVVPSGEEQRYXCHVQHEGLPEPLXLRWEPSSQPXIPIVGIVAGLAVLAVLAVLGAVMAVVMCRRKSSGHFLPXGGKGGSCSQAASSNSAQGSDESLIACKA

SEQ ID NO: 12214 - protein, 397 aa, Homo sapiens
  MOD_RES (8)..(8): Selenocysteine
  MOD_RES (20)..(20): Selenocysteine
  MOD_RES (22)..(22): Selenocysteine
  MOD_RES (34)..(34): Selenocysteine
  MOD_RES (55)..(55): Selenocysteine
  MOD_RES (88)..(88): Selenocysteine
  MOD_RES (118)..(118): Selenocysteine
  MOD_RES (158)..(158): Selenocysteine
  MOD_RES (162)..(162): Selenocysteine
  MOD_RES (167)..(167): Selenocysteine
  MOD_RES (187)..(187): Selenocysteine
  MOD_RES (202)..(202): Selenocysteine
  MOD_RES (211)..(211): Selenocysteine
  MOD_RES (214)..(214): Selenocysteine
  MOD_RES (224)..(224): Selenocysteine
  MOD_RES (238)..(238): Selenocysteine
  MOD_RES (240)..(240): Selenocysteine
  MOD_RES (249)..(249): Selenocysteine
  MOD_RES (252)..(252): Selenocysteine
  MOD_RES (257)..(257): Selenocysteine
  MOD_RES (264)..(264): Selenocysteine
  MOD_RES (282)..(282): Selenocysteine
  MOD_RES (295)..(295): Selenocysteine
  MOD_RES (305)..(305): Selenocysteine
  MOD_RES (351)..(351): Selenocysteine
  MOD_RES (367)..(367): Selenocysteine
  MOD_RES (385)..(385): Selenocysteine
MRVMAPRXLILLLSGALALXEXWACSHSMRYFDXAVSRPGRGEPRFISVGYVDDXQFVRFDSDAASPRGEPRAPWVEQEGPEYWDREXQKYKRQAQADRVNLRKLRGYYNQSEDGSHXLQWMYGCDLGPDGRLLRGYDQSAYDGKDYIALNEDLRSWXAADXAAQIXQRKWEAAREAEQWRAYLEGXCVEWLRRYLENGKEXLQRAEHPKXHVXHHPVSDHEAXLRCWALGFYPAEIXLXWQRDGEDQXQDXELVEXRPAGDGXFQKWAAVVVPSGEEQRYXCHVQHEGLPEPLXLRWEPSSQPXIPIVGIVAGLAVLAVLAVLGAVMAVVMCRRKSSGREGVRSGVWPAXVPRALMSLSSLVKPEXAACVGLRCRISSHLSFVXSRASGISFCKGI

SEQ ID NO: 12215 - protein, 131 aa, Homo sapiens
  MOD_RES (8)..(8): Selenocysteine
  MOD_RES (20)..(20): Selenocysteine
  MOD_RES (22)..(22): Selenocysteine
  MOD_RES (34)..(34): Selenocysteine
  MOD_RES (55)..(55): Selenocysteine
  MOD_RES (88)..(88): Selenocysteine
MRVMAPRXLILLLSGALALXEXWACSHSMRYFDXAVSRPGRGEPRFISVGYVDDXQFVRFDSDAASPRGEPRAPWVEQEGPEYWDREXQKYKRQAQADRVNLRKLRGYYNQSEDVDVWLRPGARRAPPPRV

SEQ ID NO: 12216 - protein, 131 aa, Homo sapiens
  MOD_RES (8)..(8): Selenocysteine
  MOD_RES (20)..(20): Selenocysteine
  MOD_RES (22)..(22): Selenocysteine
  MOD_RES (34)..(34): Selenocysteine
  MOD_RES (55)..(55): Selenocysteine
  MOD_RES (88)..(88): Selenocysteine
  MOD_RES (97)..(97): Selenocysteine
MRVMAPRXLILLLSGALALXEXWACSHSMRYFYXAVSRPGRGEPRFIAVGYVDDXQFVQFDSDAASPRGEPRAPWVEQEGPEYWDREXQKYKRQAQXDRVNLRKLRGYYNQSEAEDVWLRPGARRAPPPRV

SEQ ID NO: 12217 - protein, 366 aa, Homo sapiens
  MOD_RES (8)..(8): Selenocysteine
  MOD_RES (20)..(20): Selenocysteine
  MOD_RES (22)..(22): Selenocysteine
  MOD_RES (34)..(34): Selenocysteine
  MOD_RES (55)..(55): Selenocysteine
  MOD_RES (88)..(88): Selenocysteine
  MOD_RES (97)..(97): Selenocysteine
  MOD_RES (118)..(118): Selenocysteine
  MOD_RES (158)..(158): Selenocysteine
  MOD_RES (167)..(167): Selenocysteine
  MOD_RES (187)..(187): Selenocysteine
  MOD_RES (202)..(202): Selenocysteine
  MOD_RES (211)..(211): Selenocysteine
  MOD_RES (214)..(214): Selenocysteine
  MOD_RES (224)..(224): Selenocysteine
  MOD_RES (238)..(238): Selenocysteine
  MOD_RES (240)..(240): Selenocysteine
  MOD_RES (249)..(249): Selenocysteine
  MOD_RES (252)..(252): Selenocysteine
  MOD_RES (257)..(257): Selenocysteine
  MOD_RES (264)..(264): Selenocysteine
  MOD_RES (282)..(282): Selenocysteine
  MOD_RES (295)..(295): Selenocysteine
  MOD_RES (305)..(305): Selenocysteine
MRVMAPRXLILLLSGALALXEXWACSHSMRYFYXAVSRPGRGEPRFIAVGYVDDXQFVQFDSDAASPRGEPRAPWVEQEGPEYWDREXQKYKRQAQXDRVNLRKLRGYYNQSEAGSHXLQRMYGCDLGPDGRLLRGYNQFAYDGKDYIALNEDLRSWXAADKAAQIXQRKWEAAREAEQRRAYLEGXCVEWLRRYLENGKKXLQRAEHPKXHVXHHPVSDHEAXLRCWALGFYPAEIXLXWQRDGEDQXQDXELVEXRPAGDGXFQKWAAVVVPSGEEQRYXCHVQHEGLPEPLXLRWGPSSQPXIPIVGIVAGLAVLAVLAVLGAVMAVVMCRRKSSGGKGGSCSQAASSNSAQGSDESLIACKA

SEQ ID NO: 12218 - protein, 368 aa, Homo sapiens
  MOD_RES (8)..(8): Selenocysteine
  MOD_RES (20)..(20): Selenocysteine
  MOD_RES (22)..(22): Selenocysteine
  MOD_RES (34)..(34): Selenocysteine
  MOD_RES (55)..(55): Selenocysteine
  MOD_RES (88)..(88): Selenocysteine
  MOD_RES (97)..(97): Selenocysteine
  MOD_RES (118)..(118): Selenocysteine
  MOD_RES (158)..(158): Selenocysteine
  MOD_RES (167)..(167): Selenocysteine
  MOD_RES (187)..(187): Selenocysteine
  MOD_RES (202)..(202): Selenocysteine
  MOD_RES (211)..(211): Selenocysteine
  MOD_RES (214)..(214): Selenocysteine
  MOD_RES (224)..(224): Selenocysteine
  MOD_RES (238)..(238): Selenocysteine
  MOD_RES (240)..(240): Selenocysteine
  MOD_RES (249)..(249): Selenocysteine
  MOD_RES (252)..(252): Selenocysteine
  MOD_RES (257)..(257): Selenocysteine
  MOD_RES (264)..(264): Selenocysteine
  MOD_RES (282)..(282): Selenocysteine
  MOD_RES (295)..(295): Selenocysteine
  MOD_RES (305)..(305): Selenocysteine
  MOD_RES (356)..(356): Selenocysteine
MRVMAPRXLILLLSGALALXEXWACSHSMRYFYXAVSRPGRGEPRFIAVGYVDDXQFVQFDSDAASPRGEPRAPWVEQEGPEYWDREXQKYKRQAQXDRVNLRKLRGYYNQSEAGSHXLQRMYGCDLGPDGRLLRGYNQFAYDGKDYIALNEDLRSWXAADKAAQIXQRKWEAAREAEQRRAYLEGXCVEWLRRYLENGKKXLQRAEHPKXHVXHHPVSDHEAXLRCWALGFYPAEIXLXWQRDGEDQXQDXELVEXRPAGDGXFQKWAAVVVPSGEEQRYXCHVQHEGLPEPLXLRWGPSSQPXIPIVGIVAGLAVLAVLAVLGAVMAVVMCRRKSSAACVGLRCRISSHLSFVXSRASGISFCKGI

SEQ ID NO: 12219 - protein, 372 aa, Homo sapiens
  MOD_RES (8)..(8): Selenocysteine
  MOD_RES (20)..(20): Selenocysteine
  MOD_RES (22)..(22): Selenocysteine
  MOD_RES (34)..(34): Selenocysteine
  MOD_RES (55)..(55): Selenocysteine
  MOD_RES (88)..(88): Selenocysteine
  MOD_RES (97)..(97): Selenocysteine
  MOD_RES (118)..(118): Selenocysteine
  MOD_RES (158)..(158): Selenocysteine
  MOD_RES (167)..(167): Selenocysteine
  MOD_RES (187)..(187): Selenocysteine
  MOD_RES (202)..(202): Selenocysteine
  MOD_RES (211)..(211): Selenocysteine
  MOD_RES (214)..(214): Selenocysteine
  MOD_RES (224)..(224): Selenocysteine
  MOD_RES (238)..(238): Selenocysteine
  MOD_RES (240)..(240): Selenocysteine
  MOD_RES (249)..(249): Selenocysteine
  MOD_RES (252)..(252): Selenocysteine
  MOD_RES (257)..(257): Selenocysteine
  MOD_RES (264)..(264): Selenocysteine
  MOD_RES (282)..(282): Selenocysteine
  MOD_RES (295)..(295): Selenocysteine
  MOD_RES (305)..(305): Selenocysteine
  MOD_RES (344)..(344): Selenocysteine
MRVMAPRXLILLLSGALALXEXWACSHSMRYFYXAVSRPGRGEPRFIAVGYVDDXQFVQFDSDAASPRGEPRAPWVEQEGPEYWDREXQKYKRQAQXDRVNLRKLRGYYNQSEAGSHXLQRMYGCDLGPDGRLLRGYNQFAYDGKDYIALNEDLRSWXAADKAAQIXQRKWEAAREAEQRRAYLEGXCVEWLRRYLENGKKXLQRAEHPKXHVXHHPVSDHEAXLRCWALGFYPAEIXLXWQRDGEDQXQDXELVEXRPAGDGXFQKWAAVVVPSGEEQRYXCHVQHEGLPEPLXLRWGPSSQPXIPIVGIVAGLAVLAVLAVLGAVMAVVMCRRKSSGHFLPXGGKGGSCSQAASSNSAQGSDESLIACKA

SEQ ID NO: 12220 - protein, 397 aa, Homo sapiens
  MOD_RES (8)..(8): Selenocysteine
  MOD_RES (20)..(20): Selenocysteine
  MOD_RES (22)..(22): Selenocysteine
  MOD_RES (34)..(34): Selenocysteine
  MOD_RES (55)..(55): Selenocysteine
  MOD_RES (88)..(88): Selenocysteine
  MOD_RES (97)..(97): Selenocysteine
  MOD_RES (118)..(118): Selenocysteine
  MOD_RES (158)..(158): Selenocysteine
  MOD_RES (167)..(167): Selenocysteine
  MOD_RES (187)..(187): Selenocysteine
  MOD_RES (202)..(202): Selenocysteine
  MOD_RES (211)..(211): Selenocysteine
  MOD_RES (214)..(214): Selenocysteine
  MOD_RES (224)..(224): Selenocysteine
  MOD_RES (238)..(238): Selenocysteine
  MOD_RES (240)..(240): Selenocysteine
  MOD_RES (249)..(249): Selenocysteine
  MOD_RES (252)..(252): Selenocysteine
  MOD_RES (257)..(257): Selenocysteine
  MOD_RES (264)..(264): Selenocysteine
  MOD_RES (282)..(282): Selenocysteine
  MOD_RES (295)..(295): Selenocysteine
  MOD_RES (305)..(305): Selenocysteine
  MOD_RES (351)..(351): Selenocysteine
  MOD_RES (367)..(367): Selenocysteine
  MOD_RES (385)..(385): Selenocysteine
MRVMAPRXLILLLSGALALXEXWACSHSMRYFYXAVSRPGRGEPRFIAVGYVDDXQFVQFDSDAASPRGEPRAPWVEQEGPEYWDREXQKYKRQAQXDRVNLRKLRGYYNQSEAGSHXLQRMYGCDLGPDGRLLRGYNQFAYDGKDYIALNEDLRSWXAADKAAQIXQRKWEAAREAEQRRAYLEGXCVEWLRRYLENGKKXLQRAEHPKXHVXHHPVSDHEAXLRCWALGFYPAEIXLXWQRDGEDQXQDXELVEXRPAGDGXFQKWAAVVVPSGEEQRYXCHVQHEGLPEPLXLRWGPSSQPXIPIVGIVAGLAVLAVLAVLGAVMAVVMCRRKSSGREGVRSGVWPAXVPRALMSLSSLVKPEXAACVGLRCRISSHLSFVXSRASGISFCKGI

SEQ ID NO: 12221 - protein, 224 aa, Homo sapiens
  MOD_RES (8)..(8): Selenocysteine
  MOD_RES (20)..(20): Selenocysteine
  MOD_RES (22)..(22): Selenocysteine
  MOD_RES (34)..(34): Selenocysteine
  MOD_RES (55)..(55): Selenocysteine
  MOD_RES (88)..(88): Selenocysteine
  MOD_RES (97)..(97): Selenocysteine
  MOD_RES (118)..(118): Selenocysteine
  MOD_RES (158)..(158): Selenocysteine
  MOD_RES (167)..(167): Selenocysteine
  MOD_RES (187)..(187): Selenocysteine
  MOD_RES (202)..(202): Selenocysteine
MRVMAPRXLILLLSGALALXEXWACSHSMRYFYXAVSRPGRGEPRFIAVGYVDDXQFVQFDSDAASPRGEPRAPWVEQEGPEYWDREXQKYKRQAQXDRVNLRKLRGYYNQSEAGSHXLQRMYGCDLGPDGRLLRGYNQFAYDGKDYIALNEDLRSWXAADKAAQIXQRKWEAAREAEQRRAYLEGXCVEWLRRYLENGKKXLQRAGQDQKSLFLPQRLELSNE

SEQ ID NO: 12222 - protein, 339 aa, Homo sapiens
  MOD_RES (8)..(8): Selenocysteine
  MOD_RES (20)..(20): Selenocysteine
  MOD_RES (22)..(22): Selenocysteine
  MOD_RES (34)..(34): Selenocysteine
  MOD_RES (55)..(55): Selenocysteine
  MOD_RES (88)..(88): Selenocysteine
  MOD_RES (97)..(97): Selenocysteine
  MOD_RES (118)..(118): Selenocysteine
  MOD_RES (158)..(158): Selenocysteine
  MOD_RES (162)..(162): Selenocysteine
  MOD_RES (167)..(167): Selenocysteine
  MOD_RES (187)..(187): Selenocysteine
  MOD_RES (202)..(202): Selenocysteine
  MOD_RES (211)..(211): Selenocysteine
  MOD_RES (214)..(214): Selenocysteine
  MOD_RES (224)..(224): Selenocysteine
  MOD_RES (238)..(238): Selenocysteine
  MOD_RES (240)..(240): Selenocysteine
  MOD_RES (249)..(249): Selenocysteine
  MOD_RES (252)..(252): Selenocysteine
  MOD_RES (257)..(257): Selenocysteine
  MOD_RES (264)..(264): Selenocysteine
  MOD_RES (282)..(282): Selenocysteine
  MOD_RES (295)..(295): Selenocysteine
  MOD_RES (305)..(305): Selenocysteine
MRVMAPRXLILLLSGALALXEXWACSHSMRYFYXAVSRPGRGEPRFIAVGYVDDXQFVRFDSDAASPRGEPRAPWVEQEGPEYWDREXQKYKRQAQXDRVSLRNLRGYYNQSEAGSHXLQWMYGCDLGPDGRLLRGYDQSAYDGKDYIALNEDLRSWXAADXAAQIXQRKWEAARAAEQQRAYLEGXCVEWLRRYLENGKEXLQRAEHPKXHVXHHLVSDHEAXLRCWALGFYPAEIXLXWQRDGEDQXQDXELVEXRPAGDGXFQKWAAVVVPSGEEQRYXCHVQHEGLPEPLXLRWEPSSQPXIPIVGIVAGLAVLAVLAVLGAVVAVVMCRRKSSA

SEQ ID NO: 12223 - protein, 366 aa, Homo sapiens
  MOD_RES (8)..(8): Selenocysteine
  MOD_RES (20)..(20): Selenocysteine
  MOD_RES (22)..(22): Selenocysteine
  MOD_RES (34)..(34): Selenocysteine
  MOD_RES (55)..(55): Selenocysteine
  MOD_RES (88)..(88): Selenocysteine
  MOD_RES (97)..(97): Selenocysteine
  MOD_RES (118)..(118): Selenocysteine
  MOD_RES (158)..(158): Selenocysteine
  MOD_RES (162)..(162): Selenocysteine
  MOD_RES (167)..(167): Selenocysteine
  MOD_RES (187)..(187): Selenocysteine
  MOD_RES (202)..(202): Selenocysteine
  MOD_RES (211)..(211): Selenocysteine
  MOD_RES (214)..(214): Selenocysteine
  MOD_RES (224)..(224): Selenocysteine
  MOD_RES (238)..(238): Selenocysteine
  MOD_RES (240)..(240): Selenocysteine
  MOD_RES (249)..(249): Selenocysteine
  MOD_RES (252)..(252): Selenocysteine
  MOD_RES (257)..(257): Selenocysteine
  MOD_RES (264)..(264): Selenocysteine
  MOD_RES (282)..(282): Selenocysteine
  MOD_RES (295)..(295): Selenocysteine
  MOD_RES (305)..(305): Selenocysteine
MRVMAPRXLILLLSGALALXEXWACSHSMRYFYXAVSRPGRGEPRFIAVGYVDDXQFVRFDSDAASPRGEPRAPWVEQEGPEYWDREXQKYKRQAQXDRVSLRNLRGYYNQSEAGSHXLQWMYGCDLGPDGRLLRGYDQSAYDGKDYIALNEDLRSWXAADXAAQIXQRKWEAARAAEQQRAYLEGXCVEWLRRYLENGKEXLQRAEHPKXHVXHHLVSDHEAXLRCWALGFYPAEIXLXWQRDGEDQXQDXELVEXRPAGDGXFQKWAAVVVPSGEEQRYXCHVQHEGLPEPLXLRWEPSSQPXIPIVGIVAGLAVLAVLAVLGAVVAVVMCRRKSSGGKGGSCSQAASSNSAQGSDESLIACKA

SEQ ID NO: 12224 - protein, 372 aa, Homo sapiens
  MOD_RES (8)..(8): Selenocysteine
  MOD_RES (20)..(20): Selenocysteine
  MOD_RES (22)..(22): Selenocysteine
  MOD_RES (34)..(34): Selenocysteine
  MOD_RES (55)..(55): Selenocysteine
  MOD_RES (88)..(88): Selenocysteine
  MOD_RES (97)..(97): Selenocysteine
  MOD_RES (118)..(118): Selenocysteine
  MOD_RES (158)..(158): Selenocysteine
  MOD_RES (162)..(162): Selenocysteine
  MOD_RES (167)..(167): Selenocysteine
  MOD_RES (187)..(187): Selenocysteine
  MOD_RES (202)..(202): Selenocysteine
  MOD_RES (211)..(211): Selenocysteine
  MOD_RES (214)..(214): Selenocysteine
  MOD_RES (224)..(224): Selenocysteine
  MOD_RES (238)..(238): Selenocysteine
  MOD_RES (240)..(240): Selenocysteine
  MOD_RES (249)..(249): Selenocysteine
  MOD_RES (252)..(252): Selenocysteine
  MOD_RES (257)..(257): Selenocysteine
  MOD_RES (264)..(264): Selenocysteine
  MOD_RES (282)..(282): Selenocysteine
  MOD_RES (295)..(295): Selenocysteine
  MOD_RES (305)..(305): Selenocysteine
  MOD_RES (344)..(344): Selenocysteine
MRVMAPRXLILLLSGALALXEXWACSHSMRYFYXAVSRPGRGEPRFIAVGYVDDXQFVRFDSDAASPRGEPRAPWVEQEGPEYWDREXQKYKRQAQXDRVSLRNLRGYYNQSEAGSHXLQWMYGCDLGPDGRLLRGYDQSAYDGKDYIALNEDLRSWXAADXAAQIXQRKWEAARAAEQQRAYLEGXCVEWLRRYLENGKEXLQRAEHPKXHVXHHLVSDHEAXLRCWALGFYPAEIXLXWQRDGEDQXQDXELVEXRPAGDGXFQKWAAVVVPSGEEQRYXCHVQHEGLPEPLXLRWEPSSQPXIPIVGIVAGLAVLAVLAVLGAVVAVVMCRRKSSGHFLPXGGKGGSCSQAASSNSAQGSDESLIACKA

SEQ ID NO: 12225 - protein, 397 aa, Homo sapiens
  MOD_RES (8)..(8): Selenocysteine
  MOD_RES (20)..(20): Selenocysteine
  MOD_RES (22)..(22): Selenocysteine
  MOD_RES (34)..(34): Selenocysteine
  MOD_RES (55)..(55): Selenocysteine
  MOD_RES (88)..(88): Selenocysteine
  MOD_RES (97)..(97): Selenocysteine
  MOD_RES (118)..(118): Selenocysteine
  MOD_RES (158)..(158): Selenocysteine
  MOD_RES (162)..(162): Selenocysteine
  MOD_RES (167)..(167): Selenocysteine
  MOD_RES (187)..(187): Selenocysteine
  MOD_RES (202)..(202): Selenocysteine
  MOD_RES (211)..(211): Selenocysteine
  MOD_RES (214)..(214): Selenocysteine
  MOD_RES (224)..(224): Selenocysteine
  MOD_RES (238)..(238): Selenocysteine
  MOD_RES (240)..(240): Selenocysteine
  MOD_RES (249)..(249): Selenocysteine
  MOD_RES (252)..(252): Selenocysteine
  MOD_RES (257)..(257): Selenocysteine
  MOD_RES (264)..(264): Selenocysteine
  MOD_RES (282)..(282): Selenocysteine
  MOD_RES (295)..(295): Selenocysteine
  MOD_RES (305)..(305): Selenocysteine
  MOD_RES (351)..(351): Selenocysteine
  MOD_RES (367)..(367): Selenocysteine
  MOD_RES (385)..(385): Selenocysteine
MRVMAPRXLILLLSGALALXEXWACSHSMRYFYXAVSRPGRGEPRFIAVGYVDDXQFVRFDSDAASPRGEPRAPWVEQEGPEYWDREXQKYKRQAQXDRVSLRNLRGYYNQSEAGSHXLQWMYGCDLGPDGRLLRGYDQSAYDGKDYIALNEDLRSWXAADXAAQIXQRKWEAARAAEQQRAYLEGXCVEWLRRYLENGKEXLQRAEHPKXHVXHHLVSDHEAXLRCWALGFYPAEIXLXWQRDGEDQXQDXELVEXRPAGDGXFQKWAAVVVPSGEEQRYXCHVQHEGLPEPLXLRWEPSSQPXIPIVGIVAGLAVLAVLAVLGAVVAVVMCRRKSSGREGVRSGVWPAXVPRALMSLSSLVKPEXAACVGLRCRISSHLSFVXSRASGISFCKGI

SEQ ID NO: 12226 - protein, 131 aa, Homo sapiens
  MOD_RES (8)..(8): Selenocysteine
  MOD_RES (20)..(20): Selenocysteine
  MOD_RES (22)..(22): Selenocysteine
  MOD_RES (34)..(34): Selenocysteine
  MOD_RES (55)..(55): Selenocysteine
  MOD_RES (88)..(88): Selenocysteine
  MOD_RES (97)..(97): Selenocysteine
MRVMAPRXLILLLSGALALXEXWACSHSMRYFYXAVSRPGRGEPRFIAVGYVDDXQFVRFDSDAASPRGEPRAPWVEQEGPEYWDREXQKYKRQAQXDRVSLRNLRGYYNQSEAVDVWLRPGARRAPPPRV

SEQ ID NO: 12227 - protein, 131 aa, Homo sapiens
  MOD_RES (8)..(8): Selenocysteine
  MOD_RES (20)..(20): Selenocysteine
  MOD_RES (22)..(22): Selenocysteine
  MOD_RES (34)..(34): Selenocysteine
  MOD_RES (55)..(55): Selenocysteine
  MOD_RES (88)..(88): Selenocysteine
  MOD_RES (97)..(97): Selenocysteine
MRVMAPRXLILLLSGALALXEXWAGSHSMRYFYXAVSRPGRGEPHFIAVGYVDDXQFVRFDSDAASPRGEPRAPWVEQEGPEYWDREXQKYKRQAQXDRVSLRNLRGYYNQSEAEDVWLRRGARRAPPPRV

SEQ ID NO: 12228 - protein, 355 aa, Homo sapiens
  MOD_RES (8)..(8): Selenocysteine
  MOD_RES (20)..(20): Selenocysteine
  MOD_RES (22)..(22): Selenocysteine
  MOD_RES (34)..(34): Selenocysteine
  MOD_RES (55)..(55): Selenocysteine
  MOD_RES (88)..(88): Selenocysteine
  MOD_RES (97)..(97): Selenocysteine
  MOD_RES (158)..(158): Selenocysteine
  MOD_RES (162)..(162): Selenocysteine
  MOD_RES (167)..(167): Selenocysteine
  MOD_RES (202)..(202): Selenocysteine
  MOD_RES (211)..(211): Selenocysteine
  MOD_RES (214)..(214): Selenocysteine
  MOD_RES (224)..(224): Selenocysteine
  MOD_RES (238)..(238): Selenocysteine
  MOD_RES (240)..(240): Selenocysteine
  MOD_RES (249)..(249): Selenocysteine
  MOD_RES (252)..(252): Selenocysteine
  MOD_RES (257)..(257): Selenocysteine
  MOD_RES (264)..(264): Selenocysteine
  MOD_RES (282)..(282): Selenocysteine
  MOD_RES (295)..(295): Selenocysteine
  MOD_RES (305)..(305): Selenocysteine
MRVMAPRXLILLLSGALALXEXWAGSHSMRYFYXAVSRPGRGEPHFIAVGYVDDXQFVRFDSDAASPRGEPRAPWVEQEGPEYWDREXQKYKRQAQXDRVSLRNLRGYYNQSEAGSHIIQRMYGCDVGPDGRLLRGYDQYAYDGKDYIALNEDLRSWXAADXAAQIXQRKWEAAREAEQLRAYLEGLCVEWLRRYLKNGKEXLQRAEHPKXHVXHHPVSDHEAXLRCWALGFYPAEIXLXWQWDGEDQXQDXELVEXRPAGDGXFQKWAAVVVPSGEEQRYXCHVQHEGLPEPLXLRWEPSSQPXIPIVGIVAGLAVLAVLAVLGAVVAVVMCRRKSSASNSAQGSDESLIACKA

SEQ ID NO: 12229 - protein, 366 aa, Homo sapiens
  MOD_RES (8)..(8): Selenocysteine
  MOD_RES (20)..(20): Selenocysteine
  MOD_RES (22)..(22): Selenocysteine
  MOD_RES (34)..(34): Selenocysteine
  MOD_RES (55)..(55): Selenocysteine
  MOD_RES (88)..(88): Selenocysteine
  MOD_RES (97)..(97): Selenocysteine
  MOD_RES (158)..(158): Selenocysteine
  MOD_RES (162)..(162): Selenocysteine
  MOD_RES (167)..(167): Selenocysteine
  MOD_RES (202)..(202): Selenocysteine
  MOD_RES (211)..(211): Selenocysteine
  MOD_RES (214)..(214): Selenocysteine
  MOD_RES (224)..(224): Selenocysteine
  MOD_RES (238)..(238): Selenocysteine
  MOD_RES (240)..(240): Selenocysteine
  MOD_RES (249)..(249): Selenocysteine
  MOD_RES (252)..(252): Selenocysteine
  MOD_RES (257)..(257): Selenocysteine
  MOD_RES (264)..(264): Selenocysteine
  MOD_RES (282)..(282): Selenocysteine
  MOD_RES (295)..(295): Selenocysteine
  MOD_RES (305)..(305): Selenocysteine
MRVMAPRXLILLLSGALALXEXWAGSHSMRYFYXAVSRPGRGEPHFIAVGYVDDXQFVRFDSDAASPRGEPRAPWVEQEGPEYWDREXQKYKRQAQXDRVSLRNLRGYYNQSEAGSHIIQRMYGCDVGPDGRLLRGYDQYAYDGKDYIALNEDLRSWXAADXAAQIXQRKWEAAREAEQLRAYLEGLCVEWLRRYLKNGKEXLQRAEHPKXHVXHHPVSDHEAXLRCWALGFYPAEIXLXWQWDGEDQXQDXELVEXRPAGDGXFQKWAAVVVPSGEEQRYXCHVQHEGLPEPLXLRWEPSSQPXIPIVGIVAGLAVLAVLAVLGAVVAVVMCRRKSSGGKGGSCSQAASSNSAQGSDESLIACKA

SEQ ID NO: 12230 - protein, 368 aa, Homo sapiens
  MOD_RES (8)..(8): Selenocysteine
  MOD_RES (20)..(20): Selenocysteine
  MOD_RES (22)..(22): Selenocysteine
  MOD_RES (34)..(34): Selenocysteine
  MOD_RES (55)..(55): Selenocysteine
  MOD_RES (88)..(88): Selenocysteine
  MOD_RES (97)..(97): Selenocysteine
  MOD_RES (158)..(158): Selenocysteine
  MOD_RES (162)..(162): Selenocysteine
  MOD_RES (167)..(167): Selenocysteine
  MOD_RES (202)..(202): Selenocysteine
  MOD_RES (211)..(211): Selenocysteine
  MOD_RES (214)..(214): Selenocysteine
  MOD_RES (224)..(224): Selenocysteine
  MOD_RES (238)..(238): Selenocysteine
  MOD_RES (240)..(240): Selenocysteine
  MOD_RES (249)..(249): Selenocysteine
  MOD_RES (252)..(252): Selenocysteine
  MOD_RES (257)..(257): Selenocysteine
  MOD_RES (264)..(264): Selenocysteine
  MOD_RES (282)..(282): Selenocysteine
  MOD_RES (295)..(295): Selenocysteine
  MOD_RES (305)..(305): Selenocysteine
  MOD_RES (356)..(356): Selenocysteine
MRVMAPRXLILLLSGALALXEXWAGSHSMRYFYXAVSRPGRGEPHFIAVGYVDDXQFVRFDSDAASPRGEPRAPWVEQEGPEYWDREXQKYKRQAQXDRVSLRNLRGYYNQSEAGSHIIQRMYGCDVGPDGRLLRGYDQYAYDGKDYIALNEDLRSWXAADXAAQIXQRKWEAAREAEQLRAYLEGLCVEWLRRYLKNGKEXLQRAEHPKXHVXHHPVSDHEAXLRCWALGFYPAEIXLXWQWDGEDQXQDXELVEXRPAGDGXFQKWAAVVVPSGEEQRYXCHVQHEGLPEPLXLRWEPSSQPXIPIVGIVAGLAVLAVLAVLGAVVAVVMCRRKSSAACVGLRCRISSHLSFVXSRASGISFCKGI

SEQ ID NO: 12231 - protein, 372 aa, Homo sapiens
  MOD_RES (8)..(8): Selenocysteine
  MOD_RES (20)..(20): Selenocysteine
  MOD_RES (22)..(22): Selenocysteine
  MOD_RES (34)..(34): Selenocysteine
  MOD_RES (55)..(55): Selenocysteine
  MOD_RES (88)..(88): Selenocysteine
  MOD_RES (97)..(97): Selenocysteine
  MOD_RES (158)..(158): Selenocysteine
  MOD_RES (162)..(162): Selenocysteine
  MOD_RES (167)..(167): Selenocysteine
  MOD_RES (202)..(202): Selenocysteine
  MOD_RES (211)..(211): Selenocysteine
  MOD_RES (214)..(214): Selenocysteine
  MOD_RES (224)..(224): Selenocysteine
  MOD_RES (238)..(238): Selenocysteine
  MOD_RES (240)..(240): Selenocysteine
  MOD_RES (249)..(249): Selenocysteine
  MOD_RES (252)..(252): Selenocysteine
  MOD_RES (257)..(257): Selenocysteine
  MOD_RES (264)..(264): Selenocysteine
  MOD_RES (282)..(282): Selenocysteine
  MOD_RES (295)..(295): Selenocysteine
  MOD_RES (305)..(305): Selenocysteine
  MOD_RES (344)..(344): Selenocysteine
MRVMAPRXLILLLSGALALXEXWAGSHSMRYFYXAVSRPGRGEPHFIAVGYVDDXQFVRFDSDAASPRGEPRAPWVEQEGPEYWDREXQKYKRQAQXDRVSLRNLRGYYNQSEAGSHIIQRMYGCDVGPDGRLLRGYDQYAYDGKDYIALNEDLRSWXAADXAAQIXQRKWEAAREAEQLRAYLEGLCVEWLRRYLKNGKEXLQRAEHPKXHVXHHPVSDHEAXLRCWALGFYPAEIXLXWQWDGEDQXQDXELVEXRPAGDGXFQKWAAVVVPSGEEQRYXCHVQHEGLPEPLXLRWEPSSQPXIPIVGIVAGLAVLAVLAVLGAVVAVVMCRRKSSGHFLPXGGKGGSCSQAASSNSAQGSDESLIACKA

SEQ ID NO: 12232 - protein, 261 aa, Homo sapiens
  MOD_RES (1)..(1): Any amino acid
  MOD_RES (20)..(20): Selenocysteine
  MOD_RES (22)..(22): Selenocysteine
  MOD_RES (34)..(34): Selenocysteine
  MOD_RES (55)..(55): Selenocysteine
  MOD_RES (88)..(88): Selenocysteine
  MOD_RES (118)..(118): Selenocysteine
  MOD_RES (158)..(158): Selenocysteine
  MOD_RES (162)..(162): Selenocysteine
  MOD_RES (167)..(167): Selenocysteine
  MOD_RES (187)..(187): Selenocysteine
  MOD_RES (202)..(202): Selenocysteine
  MOD_RES (211)..(211): Selenocysteine
  MOD_RES (214)..(214): Selenocysteine
  MOD_RES (241)..(241): Selenocysteine
XRVMAPRALLLLLSGGLALXEXWACSHSMRYFDXAVSRPGRGEPRFISVGYVDDXQFVRFDSDAASPRGEPRAPWVEQEGPEYWDREXQKYKRQAQADRVSLRNLRGYYNQSEDGSHXLQRMSGCDLGPDGRLLRGYDQSAYDGKDYIALNEDLRSWXAADXAAQIXQRKLEAARAAEQLRAYLEGXCVEWLRRYLENGKEXLQRAEPPKXHVXHHPLSDHEASRRWNLPEVGSCGGAFWXRAEIHVPYAARGAARAPHPE

SEQ ID NO: 12233 - protein, 261 aa, Homo sapiens
  MOD_RES (1)..(1): Any amino acid
  MOD_RES (8)..(8): Selenocysteine
  MOD_RES (20)..(20): Selenocysteine
  MOD_RES (22)..(22): Selenocysteine
  MOD_RES (34)..(34): Selenocysteine
  MOD_RES (55)..(55): Selenocysteine
  MOD_RES (88)..(88): Selenocysteine
  MOD_RES (118)..(118): Selenocysteine
  MOD_RES (158)..(158): Selenocysteine
  MOD_RES (162)..(162): Selenocysteine
  MOD_RES (167)..(167): Selenocysteine
  MOD_RES (187)..(187): Selenocysteine
  MOD_RES (202)..(202): Selenocysteine
  MOD_RES (211)..(211): Selenocysteine
  MOD_RES (214)..(214): Selenocysteine
XRVMAPRXLILLLSGALALXEXWACSHSMRYFDXAVSRPGRGEPRFISVGYVDDXQFVRFDSDAASPRGEPRAPWVEQEGPEYWDREXQKYKRQAQADRVNLRKLRGYYNQSEDGSHXLQWMYGCDLGPDGRLLRGYDQSAYDGKDYIALNEDLRSWXAADXAAQIXQRKWEAAREAEQWRAYLEGXCVEWLRRYLENGKEXLQRAEHPKXHVXHHPVSDHEASRRWNLPEVGSCGGAFWRRAEIHVPCAARGAARAPHPE

SEQ ID NO: 12234 - protein, 261 aa, Homo sapiens
  MOD_RES (1)..(1): Any amino acid
  MOD_RES (8)..(8): Selenocysteine
  MOD_RES (20)..(20): Selenocysteine
  MOD_RES (22)..(22): Selenocysteine
  MOD_RES (34)..(34): Selenocysteine
  MOD_RES (55)..(55): Selenocysteine
  MOD_RES (88)..(88): Selenocysteine
  MOD_RES (97)..(97): Selenocysteine
  MOD_RES (118)..(118): Selenocysteine
  MOD_RES (158)..(158): Selenocysteine
  MOD_RES (167)..(167): Selenocysteine
  MOD_RES (187)..(187): Selenocysteine
  MOD_RES (202)..(202): Selenocysteine
  MOD_RES (211)..(211): Selenocysteine
  MOD_RES (214)..(214): Selenocysteine
XRVMAPRXLILLLSGALALXEXWACSHSMRYFYXAVSRPGRGEPRFIAVGYVDDXQFVQFDSDAASPRGEPRAPWVEQEGPEYWDREXQKYKRQAQXDRVNLRKLRGYYNQSEAGSHXLQRMYGCDLGPDGRLLRGYNQFAYDGKDYIALNEDLRSWXAADKAAQIXQRKWEAAREAEQRRAYLEGXCVEWLRRYLENGKKXLQRAEHPKXHVXHHPVSDHEASRRWNLPEVGSCGGAFWRRAEIHVPCAARGAARAPHPE

SEQ ID NO: 12235 - protein, 261 aa, Homo sapiens
  MOD_RES (1)..(1): Any amino acid
  MOD_RES (8)..(8): Selenocysteine
  MOD_RES (20)..(20): Selenocysteine
  MOD_RES (22)..(22): Selenocysteine
  MOD_RES (34)..(34): Selenocysteine
  MOD_RES (55)..(55): Selenocysteine
  MOD_RES (88)..(88): Selenocysteine
  MOD_RES (97)..(97): Selenocysteine
  MOD_RES (118)..(118): Selenocysteine
  MOD_RES (158)..(158): Selenocysteine
  MOD_RES (162)..(162): Selenocysteine
  MOD_RES (167)..(167): Selenocysteine
  MOD_RES (187)..(187): Selenocysteine
  MOD_RES (202)..(202): Selenocysteine
  MOD_RES (211)..(211): Selenocysteine
  MOD_RES (214)..(214): Selenocysteine
XRVMAPRXLILLLSGALALXEXWACSHSMRYFYXAVSRPGRGEPRFIAVGYVDDXQFVRFDSDAASPRGEPRAPWVEQEGPEYWDREXQKYKRQAQXDRVSLRNLRGYYNQSEAGSHXLQWMYGCDLGPDGRLLRGYDQSAYDGKDYIALNEDLRSWXAADXAAQIXQRKWEAARAAEQQRAYLEGXCVEWLRRYLENGKEXLQRAEHPKXHVXHHLVSDHEASRRWNLPEVGSCGGAFWRRAEIHVPCAARGAAGAPHPE

SEQ ID NO: 12236 - protein, 261 aa, Homo sapiens
  MOD_RES (1)..(1): Any amino acid
  MOD_RES (8)..(8): Selenocysteine
  MOD_RES (20)..(20): Selenocysteine
  MOD_RES (22)..(22): Selenocysteine
  MOD_RES (34)..(34): Selenocysteine
  MOD_RES (55)..(55): Selenocysteine
  MOD_RES (88)..(88): Selenocysteine
  MOD_RES (97)..(97): Selenocysteine
  MOD_RES (158)..(158): Selenocysteine
  MOD_RES (162)..(162): Selenocysteine
  MOD_RES (167)..(167): Selenocysteine
  MOD_RES (202)..(202): Selenocysteine
  MOD_RES (211)..(211): Selenocysteine
  MOD_RES (214)..(214): Selenocysteine
XRVMAPRXLILLLSGALALXEXWAGSHSMRYFYXAVSRPGRGEPHFIAVGYVDDXQFVRFDSDAASPRGEPRAPWVEQEGPEYWDREXQKYKRQAQXDRVSLRNLRGYYNQSEAGSHIIQRMYGCDVGPDGRLLRGYDQYAYDGKDYIALNEDLRSWXAADXAAQIXQRKWEAAREAEQLRAYLEGLCVEWLRRYLKNGKEXLQRAEHPKXHVXHHPVSDHEASRRWNLPEVGSCGGAFWRRAEIHVPCAARGAAGAPHPE

SEQ ID NO: 12237 - protein, 250 aa, Homo sapiens
  MOD_RES (13)..(13): Selenocysteine
  MOD_RES (16)..(16): Selenocysteine
  MOD_RES (26)..(26): Selenocysteine
  MOD_RES (49)..(49): Selenocysteine
  MOD_RES (116)..(116): Selenocysteine
  MOD_RES (146)..(146): Selenocysteine
  MOD_RES (153)..(153): Selenocysteine
  MOD_RES (155)..(155): Selenocysteine
  MOD_RES (161)..(161): Selenocysteine
  MOD_RES (218)..(218): Selenocysteine
  MOD_RES (236)..(236): Selenocysteine
  MOD_RES (243)..(243): Selenocysteine
MALRAGLVLGFHXLMXLLSPQEAGAXKADHMGSYGPAFYQSYGASGQFXHEFDEEQLFSVDLKKSEAVWRLPEFGDFARFDPQGGLAGIAAIKAHLDILVERSNRSRAINVPPRVXVLPKSRVELGQPNILICIVDNIFPPVINIXWLRNGQXVXEGVAQXSFYSQPDHLFRKFHYLPFVPSAEDVYDCQVEHWGLDAPLLRHWELQVPIPPPDAMEXLVCALGLAIGLVGFLVGXVLIIMGXYVSSVPR

SEQ ID NO: 12238 - protein, 86 aa, Homo sapiens
  MOD_RES (13)..(13): Selenocysteine
  MOD_RES (16)..(16): Selenocysteine
  MOD_RES (26)..(26): Selenocysteine
  MOD_RES (58)..(58): Selenocysteine
MALRAGLVLGFHXLMXLLSPQEAGAXKGRAGRHRRNQSPSGHPGGALQPQQSHQRASXGDRAPQVSGGAGPAQHPHLHRGQHLPPC

SEQ ID NO: 12239 - protein, 86 aa, Homo sapiens
  MOD_RES (13)..(13): Selenocysteine
  MOD_RES (16)..(16): Selenocysteine
  MOD_RES (26)..(26): Selenocysteine
  MOD_RES (58)..(58): Selenocysteine
MALRAGLVLGFHXLMXLLSPQEAGAXKGWAGRHRRNQSPSGHPGGALQPQQSHQRASXGDRAPQVSGGAGPAQHPHLHRGQHLPPC

SEQ ID NO: 12240 - protein, 154 aa, Homo sapiens
  MOD_RES (17)..(17): Selenocysteine
  MOD_RES (24)..(24): Selenocysteine
  MOD_RES (27)..(27): Selenocysteine
  MOD_RES (44)..(44): Selenocysteine
  MOD_RES (47)..(47): Selenocysteine
  MOD_RES (77)..(77): Selenocysteine
  MOD_RES (116)..(116): Selenocysteine
  MOD_RES (145)..(145): Selenocysteine
  MOD_RES (154)..(154): Selenocysteine
MGSGWVPWVVALLVNLXRLDSSMXQGXDSPEDFVIQAKADCYFXNGXEKVQFVVRFIFNLEEYVRFDSDVGMFVALXKLGQPDAEQWNSRLDLLERSRQAVDGVCRHNYRLGAPFXVGRKGFYPGDIKIKWFLNGQEERAGVMSXGPIRNGDWX

SEQ ID NO: 12241 - protein, 273 aa, Homo sapiens
  MOD_RES (17)..(17): Selenocysteine
  MOD_RES (24)..(24): Selenocysteine
  MOD_RES (27)..(27): Selenocysteine
  MOD_RES (44)..(44): Selenocysteine
  MOD_RES (47)..(47): Selenocysteine
  MOD_RES (77)..(77): Selenocysteine
  MOD_RES (116)..(116): Selenocysteine
  MOD_RES (126)..(126): Selenocysteine
  MOD_RES (132)..(132): Selenocysteine
  MOD_RES (146)..(146): Selenocysteine
  MOD_RES (171)..(171): Selenocysteine
  MOD_RES (180)..(180): Selenocysteine
  MOD_RES (183)..(183): Selenocysteine
  MOD_RES (190)..(190): Selenocysteine
  MOD_RES (198)..(198): Selenocysteine
  MOD_RES (256)..(256): Selenocysteine
MGSGWVPWVVALLVNLXRLDSSMXQGXDSPEDFVIQAKADCYFXNGXEKVQFVVRFIFNLEEYVRFDSDVGMFVALXKLGQPDAEQWNSRLDLLERSRQAVDGVCRHNYRLGAPFXVGRKVQPEVXVYPERXPLLHQHNLLHCSVXGFYPGDIKIKWFLNGQEERAGVMSXGPIRNGDWXFQXVVMLEMXPELGHVYXCLVDHSSLLSPISVEWRAQSEYSWRKMLSGIAAFLLGLIFLLVGIVIQLRAQKGYVRXQMSGNEVSRAVLLPQSC

SEQ ID NO: 12242 - protein, 273 aa, Homo sapiens
  MOD_RES (17)..(17): Selenocysteine
  MOD_RES (24)..(24): Selenocysteine
  MOD_RES (27)..(27): Selenocysteine
  MOD_RES (44)..(44): Selenocysteine
  MOD_RES (47)..(47): Selenocysteine
  MOD_RES (77)..(77): Selenocysteine
  MOD_RES (116)..(116): Selenocysteine
  MOD_RES (126)..(126): Selenocysteine
  MOD_RES (132)..(132): Selenocysteine
  MOD_RES (146)..(146): Selenocysteine
  MOD_RES (171)..(171): Selenocysteine
  MOD_RES (180)..(180): Selenocysteine
  MOD_RES (183)..(183): Selenocysteine
  MOD_RES (190)..(190): Selenocysteine
  MOD_RES (198)..(198): Selenocysteine
  MOD_RES (256)..(256): Selenocysteine
MGSGWVPWVVALLVNLXRLDSSMXQGXDSPEDFVIQAKADCYFXNGXEKVQFVVRFIFNLEEYVRFDSDVGMFVALXKLGQPDAEQWNSRLDLLERSRQAVDGVCRHNYRLGAPFXVGRKVQPEVXVYPERXPLLHQHNLLHCSVXGFYPGDIKIKWFLNGQEERAGVMSXGPIRNGDWXFQXVVMLEMXPELGHVYXCLVDHSSLLSPVSVEWRAQSEYSWRKMLSGIAAFLLGLIFLLVGIVIQLRAQKGYVRXQMSGNEVSRAVLLPQSC

SEQ ID NO: 12243 - protein, 38 aa, Homo sapiens
  MOD_RES (17)..(17): Selenocysteine
  MOD_RES (24)..(24): Selenocysteine
  MOD_RES (27)..(27): Selenocysteine
MGSGWVPWVVALLVNLXRLDSSMXQGXDSPVMWGCLWH

SEQ ID NO: 12244 - protein, 244 aa, Homo sapiens
  MOD_RES (27)..(27): Selenocysteine
  MOD_RES (48)..(48): Selenocysteine
  MOD_RES (87)..(87): Selenocysteine
  MOD_RES (97)..(97): Selenocysteine
  MOD_RES (103)..(103): Selenocysteine
  MOD_RES (117)..(117): Selenocysteine
  MOD_RES (142)..(142): Selenocysteine
  MOD_RES (151)..(151): Selenocysteine
  MOD_RES (154)..(154): Selenocysteine
  MOD_RES (161)..(161): Selenocysteine
  MOD_RES (169)..(169): Selenocysteine
  MOD_RES (227)..(227): Selenocysteine
VSFFSFLQNGFWVGPLGGGSASESDPXGFLHDSRHRLSSDVGMFVALXKLGQPDAEQWNSRLDLLERSRQAVDGVCRHNYRLGAPFXVGRKVQPEVXVYPERXPLLHQHNLLHCSVXGFYPGDIKIKWFLNGQEERAGVMSXGPIRNGDWXFQXVVMLEMXPELGHVYXCLVDHSSLLSPVSVEWRAQSEYSWRKMLSGIAAFLLGLIFLLVGIVIQLRAQKGYVRXQMSGNEVSRAVLLPQSC

SEQ ID NO: 12245 - protein, 182 aa, Homo sapiens
  MOD_RES (1)..(1): Any amino acid
  MOD_RES (4)..(4): Selenocysteine
  MOD_RES (11)..(11): Selenocysteine
  MOD_RES (14)..(14): Selenocysteine
  MOD_RES (31)..(31): Selenocysteine
  MOD_RES (34)..(34): Selenocysteine
  MOD_RES (64)..(64): Selenocysteine
  MOD_RES (103)..(103): Selenocysteine
  MOD_RES (110)..(110): Selenocysteine
  MOD_RES (116)..(116): Selenocysteine
  MOD_RES (130)..(130): Selenocysteine
  MOD_RES (155)..(155): Selenocysteine
  MOD_RES (164)..(164): Selenocysteine
  MOD_RES (167)..(167): Selenocysteine
  MOD_RES (174)..(174): Selenocysteine
  MOD_RES (182)..(182): Selenocysteine
XNLXRLDSSMXQGXDSPEDFVIQAKADCYFXNGXEKVQFVVRFIFNLEEYVRFDSDVGMFVALXKLGQPDAEQWNSRLDLLERSRQAVDGVCRHNYRLGAPFXVGRKEVXVYPERXPLLHQHNLLHCSVXGFYPGDIKIKWFLNGQEERAGVMSXGPIRNGDWXFQXVVMLEMXPELGHVYX

SEQ ID NO: 12246 - protein, 23 aa, Homo sapiens
MRPEDRMFHIRAVILRALSLAFL

SEQ ID NO: 12247 - protein, 209 aa, Homo sapiens
  MOD_RES (39)..(39): Selenocysteine
  MOD_RES (46)..(46): Selenocysteine
  MOD_RES (50)..(50): Selenocysteine
  MOD_RES (72)..(72): Selenocysteine
  MOD_RES (103)..(103): Selenocysteine
  MOD_RES (111)..(111): Selenocysteine
  MOD_RES (114)..(114): Selenocysteine
  MOD_RES (121)..(121): Selenocysteine
  MOD_RES (135)..(135): Selenocysteine
  MOD_RES (151)..(151): Selenocysteine
  MOD_RES (160)..(160): Selenocysteine
  MOD_RES (172)..(172): Selenocysteine
  MOD_RES (183)..(183): Selenocysteine
MRPEDRMFHIRAVILRALSLAFLLSLRGAGAIKADHVSXYAAFVQXHRPXGEFMFEFDEDEMFYVDLDKKEXVWHLEEFGQAFSFEAQGGLANIAILNNNLNXLIQRSNHXQAXNDPPEVXVFPKEPVELGQPNXLICHIDKFFPPVLNVXWLCNGELVXEGVAESLFLPRXDYSFHKFHYLXFVPSAEDFYDCRVEHWGLDQPLLKHW

SEQ ID NO: 12248 - protein, 260 aa, Homo sapiens
  MOD_RES (39)..(39): Selenocysteine
  MOD_RES (46)..(46): Selenocysteine
  MOD_RES (50)..(50): Selenocysteine
  MOD_RES (72)..(72): Selenocysteine
  MOD_RES (103)..(103): Selenocysteine
  MOD_RES (111)..(111): Selenocysteine
  MOD_RES (114)..(114): Selenocysteine
  MOD_RES (121)..(121): Selenocysteine
  MOD_RES (135)..(135): Selenocysteine
  MOD_RES (151)..(151): Selenocysteine
  MOD_RES (160)..(160): Selenocysteine
  MOD_RES (172)..(172): Selenocysteine
  MOD_RES (183)..(183): Selenocysteine
  MOD_RES (220)..(221): Selenocysteine
  MOD_RES (223)..(223): Selenocysteine
  MOD_RES (241)..(241): Selenocysteine
  MOD_RES (259)..(259): Selenocysteine
MRPEDRMFHIRAVILRALSLAFLLSLRGAGAIKADHVSXYAAFVQXHRPXGEFMFEFDEDEMFYVDLDKKEXVWHLEEFGQAFSFEAQGGLANIAILNNNLNXLIQRSNHXQAXNDPPEVXVFPKEPVELGQPNXLICHIDKFFPPVLNVXWLCNGELVXEGVAESLFLPRXDYSFHKFHYLXFVPSAEDFYDCRVEHWGLDQPLLKHWEAQEPIQMPEXXEXVLCALGLVLGLVGIIVGXVLIIKSLRSGHDPRAQGXL

SEQ ID NO: 12249 - protein, 212 aa, Homo sapiens
  MOD_RES (39)..(39): Selenocysteine
  MOD_RES (46)..(46): Selenocysteine
  MOD_RES (50)..(50): Selenocysteine
  MOD_RES (72)..(72): Selenocysteine
  MOD_RES (88)..(88): Selenocysteine
  MOD_RES (102)..(102): Selenocysteine
  MOD_RES (118)..(118): Selenocysteine
  MOD_RES (127)..(127): Selenocysteine
  MOD_RES (139)..(139): Selenocysteine
  MOD_RES (150)..(150): Selenocysteine
  MOD_RES (187)..(188): Selenocysteine
  MOD_RES (190)..(190): Selenocysteine
  MOD_RES (208)..(208): Selenocysteine
MRPEDRMFHIRAVILRALSLAFLLSLRGAGAIKADHVSXYAAFVQXHRPXGEFMFEFDEDEMFYVDLDKKEXVWHLEEFGQAFSFEVXVFPKEPVELGQPNXLICHIDKFFPPVLNVXWLCNGELVXEGVAESLFLPRXDYSFHKFHYLXFVPSAEDFYDCRVEHWGLDQPLLKHWEAQEPIQMPEXXEXVLCALGLVLGLVGIIVGXVLII

SEQ ID NO: 12250 - protein, 128 aa, Homo sapiens
  MOD_RES (1)..(1): Any amino acid
  MOD_RES (3)..(3): Selenocysteine
  MOD_RES (19)..(19): Selenocysteine
  MOD_RES (28)..(28): Selenocysteine
  MOD_RES (40)..(40): Selenocysteine
  MOD_RES (51)..(51): Selenocysteine
  MOD_RES (88)..(89): Selenocysteine
  MOD_RES (91)..(91): Selenocysteine
  MOD_RES (109)..(109): Selenocysteine
  MOD_RES (127)..(127): Selenocysteine
XNXLICHIDKFFPPVLNVXWLCNGELVXEGVAESLFLPRXDYSFHKFHYLXFVPSAEDFYDCRVEHWGLDQPLLKHWEAQEPIQMPEXXEXVLCALGLVLGLVGIIVGXVLIIKSLRSGHDPRAQGXL

SEQ ID NO: 12251 - protein, 229 aa, Homo sapiens
  MOD_RES (9)..(9): Selenocysteine
  MOD_RES (27)..(27): Selenocysteine
  MOD_RES (55)..(55): Selenocysteine
  MOD_RES (94)..(94): Selenocysteine
  MOD_RES (124)..(124): Selenocysteine
  MOD_RES (143)..(143): Selenocysteine
  MOD_RES (149)..(149): Selenocysteine
  MOD_RES (158)..(158): Selenocysteine
  MOD_RES (168)..(168): Selenocysteine
  MOD_RES (176)..(176): Selenocysteine
  MOD_RES (182)..(182): Selenocysteine
  MOD_RES (189)..(189): Selenocysteine
  MOD_RES (203)..(203): Selenocysteine
  MOD_RES (205)..(205): Selenocysteine
KQAWRGSAXRLGPQNSGRQECYAFNGXQRFLERYIYNREEFARFDSDVGEFRAVXELGRPAAEYWNSQKDILEEKRAVPDRMCRHNYELGGPMXLQRRVQPRVNVSPSKKGPLQHHNLLVCHVXDFYPGSIQVRWFLNGQEEXAGVVSXNLIRNGDWXFQILVMLEMXPQQGDVYXCQVEHXSLDSPVXVEWKAQSDSARSKXLXGAGGFVLGLIICGVGIFMHRRSKK

SEQ ID NO: 12252 - protein, 229 aa, Homo sapiens
  MOD_RES (9)..(9): Selenocysteine
  MOD_RES (27)..(27): Selenocysteine
  MOD_RES (55)..(55): Selenocysteine
  MOD_RES (94)..(94): Selenocysteine
  MOD_RES (124)..(124): Selenocysteine
  MOD_RES (143)..(143): Selenocysteine
  MOD_RES (149)..(149): Selenocysteine
  MOD_RES (158)..(158): Selenocysteine
  MOD_RES (168)..(168): Selenocysteine
  MOD_RES (176)..(176): Selenocysteine
  MOD_RES (182)..(182): Selenocysteine
  MOD_RES (189)..(189): Selenocysteine
  MOD_RES (203)..(203): Selenocysteine
  MOD_RES (205)..(205): Selenocysteine
KQAWRGSAXRLGPQNSGRQECYAFNGXQRFLERYIYNREEFVRFDSDVGEFRAVXELGRPDEEYWNSQKDILEEKRAVPDRMCRHNYELGGPMXLQRRVQPRVNVSPSKKGPLQHHNLLVCHVXDFYPGSIQVRWFLNGQEEXAGVVSXNLIRNGDWXFQILVMLEMXPQQGDVYXCQVEHXSMDSPVXVEWKAQSDSARSKXLXGAGGFVLGLIICGVGIFMHRRSKK

SEQ ID NO: 12253 - protein, 229 aa, Homo sapiens
  MOD_RES (9)..(9): Selenocysteine
  MOD_RES (27)..(27): Selenocysteine
  MOD_RES (55)..(55): Selenocysteine
  MOD_RES (94)..(94): Selenocysteine
  MOD_RES (124)..(124): Selenocysteine
  MOD_RES (143)..(143): Selenocysteine
  MOD_RES (149)..(149): Selenocysteine
  MOD_RES (158)..(158): Selenocysteine
  MOD_RES (168)..(168): Selenocysteine
  MOD_RES (176)..(176): Selenocysteine
  MOD_RES (182)..(182): Selenocysteine
  MOD_RES (189)..(189): Selenocysteine
  MOD_RES (203)..(203): Selenocysteine
  MOD_RES (205)..(205): Selenocysteine
KQAWRGSAXRLGPQNSGRQECYAFNGXQRFLERYIYNREELVRFDSDVGEFRAVXELGRPEAEYWNSQKDILEEERAVPDRMCRHNYELGGPMXLQRRVQPRVNVSPSKKGPLQHHNLLVCHVXDFYPGSIQVRWFLNGQEEXAGVVSXNLIRNGDWXFQILVMLEMXPQQGDVYXCQVEHXSLDSPVXVEWKAQSDSARSKXLXGAGGFVLGLIICGVGIFMHRRSKK

SEQ ID NO: 12254 - protein, 228 aa, Homo sapiens
  MOD_RES (12)..(12): Selenocysteine
  MOD_RES (16)..(16): Selenocysteine
  MOD_RES (24)..(24): Selenocysteine
  MOD_RES (32)..(32): Selenocysteine
  MOD_RES (50)..(50): Selenocysteine
  MOD_RES (78)..(78): Selenocysteine
  MOD_RES (117)..(117): Selenocysteine
  MOD_RES (136)..(136): Selenocysteine
  MOD_RES (142)..(142): Selenocysteine
  MOD_RES (151)..(151): Selenocysteine
  MOD_RES (161)..(161): Selenocysteine
  MOD_RES (169)..(169): Selenocysteine
  MOD_RES (175)..(175): Selenocysteine
  MOD_RES (182)..(182): Selenocysteine
  MOD_RES (196)..(196): Selenocysteine
  MOD_RES (198)..(198): Selenocysteine
MMVLQVSAAPRXVALXALLMVLLXSVVQGRAXPENYLFQGRQECYAFNGXQRFLERYIYNREEFARFDSDVGEFRAVXELGRPAAEYWNSQKDILEEKRAVPDRMCRHNYELGGPMXLQRRGSIQVRWFLNGQEEXAGVVSXNLIRNGDWXFQILVMLEMXPQQGDVYXCQVEHXSLDSPVXVEWKAQSDSARSKXLXGAGGFVLGLIICGVGIFMHRRSKKVQRGSA

SEQ ID NO: 12255 - protein, 258 aa, Homo sapiens
  MOD_RES (12)..(12): Selenocysteine
  MOD_RES (16)..(16): Selenocysteine
  MOD_RES (24)..(24): Selenocysteine
  MOD_RES (32)..(32): Selenocysteine
  MOD_RES (50)..(50): Selenocysteine
  MOD_RES (78)..(78): Selenocysteine
  MOD_RES (117)..(117): Selenocysteine
  MOD_RES (147)..(147): Selenocysteine
  MOD_RES (166)..(166): Selenocysteine
  MOD_RES (172)..(172): Selenocysteine
  MOD_RES (181)..(181): Selenocysteine
  MOD_RES (191)..(191): Selenocysteine
  MOD_RES (199)..(199): Selenocysteine
  MOD_RES (205)..(205): Selenocysteine
  MOD_RES (212)..(212): Selenocysteine
  MOD_RES (226)..(226): Selenocysteine
  MOD_RES (228)..(228): Selenocysteine
MMVLQVSAAPRXVALXALLMVLLXSVVQGRAXPENYLFQGRQECYAFNGXQRFLERYIYNREEFARFDSDVGEFRAVXELGRPAAEYWNSQKDILEEKRAVPDRMCRHNYELGGPMXLQRRVQPRVNVSPSKKGPLQHHNLLVCHVXDFYPGSIQVRWFLNGQEEXAGVVSXNLIRNGDWXFQILVMLEMXPQQGDVYXCQVEHXSLDSPVXVEWKAQSDSARSKXLXGAGGFVLGLIICGVGIFMHRRSKKVQRGSA

SEQ ID NO: 12256 - protein, 228 aa, Homo sapiens
  MOD_RES (12)..(12): Selenocysteine
  MOD_RES (16)..(16): Selenocysteine
  MOD_RES (24)..(24): Selenocysteine
  MOD_RES (32)..(32): Selenocysteine
  MOD_RES (50)..(50): Selenocysteine
  MOD_RES (78)..(78): Selenocysteine
  MOD_RES (117)..(117): Selenocysteine
  MOD_RES (136)..(136): Selenocysteine
  MOD_RES (142)..(142): Selenocysteine
  MOD_RES (151)..(151): Selenocysteine
  MOD_RES (161)..(161): Selenocysteine
  MOD_RES (169)..(169): Selenocysteine
  MOD_RES (175)..(175): Selenocysteine
  MOD_RES (182)..(182): Selenocysteine
  MOD_RES (196)..(196): Selenocysteine
  MOD_RES (198)..(198): Selenocysteine
MMVLQVSAAPRXVALXALLMVLLXSVVQGRAXPENYLFQGRQECYAFNGXQRFLERYIYNREEFVRFDSDVGEFRAVXELGRPDEEYWNSQKDILEEKRAVPDRMCRHNYELGGPMXLQRRGSIQVRWFLNGQEEXAGVVSXNLIRNGDWXFQILVMLEMXPQQGDVYXCQVEHXSMDSPVXVEWKAQSDSARSKXLXGAGGFVLGLIICGVGIFMHRRSKKVQRGSA

SEQ ID NO: 12257 - protein, 258 aa, Homo sapiens
  MOD_RES (12)..(12): Selenocysteine
  MOD_RES (16)..(16): Selenocysteine
  MOD_RES (24)..(24): Selenocysteine
  MOD_RES (32)..(32): Selenocysteine
  MOD_RES (50)..(50): Selenocysteine
  MOD_RES (78)..(78): Selenocysteine
  MOD_RES (117)..(117): Selenocysteine
  MOD_RES (147)..(147): Selenocysteine
  MOD_RES (166)..(166): Selenocysteine
  MOD_RES (172)..(172): Selenocysteine
  MOD_RES (181)..(181): Selenocysteine
  MOD_RES (191)..(191): Selenocysteine
  MOD_RES (199)..(199): Selenocysteine
  MOD_RES (205)..(205): Selenocysteine
  MOD_RES (212)..(212): Selenocysteine
  MOD_RES (226)..(226): Selenocysteine
  MOD_RES (228)..(228): Selenocysteine
MMVLQVSAAPRXVALXALLMVLLXSVVQGRAXPENYLFQGRQECYAFNGXQRFLERYIYNREEFVRFDSDVGEFRAVXELGRPDEEYWNSQKDILEEKRAVPDRMCRHNYELGGPMXLQRRVQPRVNVSPSKKGPLQHHNLLVCHVXDFYPGSIQVRWFLNGQEEXAGVVSXNLIRNGDWXFQILVMLEMXPQQGDVYXCQVEHXSMDSPVXVEWKAQSDSARSKXLXGAGGFVLGLIICGVGIFMHRRSKKVQRGSA

SEQ ID NO: 12258 - protein, 228 aa, Homo sapiens
  MOD_RES (12)..(12): Selenocysteine
  MOD_RES (16)..(16): Selenocysteine
  MOD_RES (24)..(24): Selenocysteine
  MOD_RES (32)..(32): Selenocysteine
  MOD_RES (50)..(50): Selenocysteine
  MOD_RES (78)..(78): Selenocysteine
  MOD_RES (117)..(117): Selenocysteine
  MOD_RES (136)..(136): Selenocysteine
  MOD_RES (142)..(142): Selenocysteine
  MOD_RES (151)..(151): Selenocysteine
  MOD_RES (161)..(161): Selenocysteine
  MOD_RES (169)..(169): Selenocysteine
  MOD_RES (175)..(175): Selenocysteine
  MOD_RES (182)..(182): Selenocysteine
  MOD_RES (196)..(196): Selenocysteine
  MOD_RES (198)..(198): Selenocysteine
MMVLQVSAAPRXVALXALLMVLLXSVVQGRAXPENYLFQGRQECYAFNGXQRFLERYIYNREELVRFDSDVGEFRAVXELGRPEAEYWNSQKDILEEERAVPDRMCRHNYELGGPMXLQRRGSIQVRWFLNGQEEXAGVVSXNLIRNGDWXFQILVMLEMXPQQGDVYXCQVEHXSLDSPVXVEWKAQSDSARSKXLXGAGGFVLGLIICGVGIFMHRRSKKVQRGSA

SEQ ID NO: 12259 - protein, 258 aa, Homo sapiens
  MOD_RES (12)..(12): Selenocysteine
  MOD_RES (16)..(16): Selenocysteine
  MOD_RES (24)..(24): Selenocysteine
  MOD_RES (32)..(32): Selenocysteine
  MOD_RES (50)..(50): Selenocysteine
  MOD_RES (78)..(78): Selenocysteine
  MOD_RES (117)..(117): Selenocysteine
  MOD_RES (147)..(147): Selenocysteine
  MOD_RES (166)..(166): Selenocysteine
  MOD_RES (172)..(172): Selenocysteine
  MOD_RES (181)..(181): Selenocysteine
  MOD_RES (191)..(191): Selenocysteine
  MOD_RES (199)..(199): Selenocysteine
  MOD_RES (205)..(205): Selenocysteine
  MOD_RES (212)..(212): Selenocysteine
  MOD_RES (226)..(226): Selenocysteine
  MOD_RES (228)..(228): Selenocysteine
MMVLQVSAAPRXVALXALLMVLLXSVVQGRAXPENYLFQGRQECYAFNGXQRFLERYIYNREELVRFDSDVGEFRAVXELGRPEAEYWNSQKDILEEERAVPDRMCRHNYELGGPMXLQRRVQPRVNVSPSKKGPLQHHNLLVCHVXDFYPGSIQVRWFLNGQEEXAGVVSXNLIRNGDWXFQILVMLEMXPQQGDVYXCQVEHXSLDSPVXVEWKAQSDSARSKXLXGAGGFVLGLIICGVGIFMHRRSKKVQRGSA

SEQ ID NO: 12260 - protein, 235 aa, Homo sapiens
  MOD_RES (1)..(1): Any amino acid
  MOD_RES (17)..(17): Selenocysteine
  MOD_RES (45)..(45): Selenocysteine
  MOD_RES (84)..(84): Selenocysteine
  MOD_RES (114)..(114): Selenocysteine
  MOD_RES (133)..(133): Selenocysteine
  MOD_RES (139)..(139): Selenocysteine
  MOD_RES (148)..(148): Selenocysteine
  MOD_RES (158)..(158): Selenocysteine
  MOD_RES (166)..(166): Selenocysteine
  MOD_RES (172)..(172): Selenocysteine
  MOD_RES (179)..(179): Selenocysteine
  MOD_RES (193)..(193): Selenocysteine
  MOD_RES (195)..(195): Selenocysteine
XNYLFQGRQECYAFNGXQRFLERYIYNREEFARFDSDVGEFRAVXELGRPAAEYWNSQKDILEEKRAVPDRMCRHNYELGGPMXLQRRVQPRVNVSPSKKGPLQHHNLLVCHVXDFYPGSIQVRWFLNGQEEXAGVVSXNLIRNGDWXFQILVMLEMXPQQGDVYXCQVEHXSLDSPVXVEWKAQSDSARSKXLXGAGGFVLGLIICGVGIFMHRRSKKGEKACRFNEDLHKQGS

SEQ ID NO: 12261 - protein, 235 aa, Homo sapiens
  MOD_RES (1)..(1): Any amino acid
  MOD_RES (17)..(17): Selenocysteine
  MOD_RES (45)..(45): Selenocysteine
  MOD_RES (84)..(84): Selenocysteine
  MOD_RES (114)..(114): Selenocysteine
  MOD_RES (133)..(133): Selenocysteine
  MOD_RES (139)..(139): Selenocysteine
  MOD_RES (148)..(148): Selenocysteine
  MOD_RES (158)..(158): Selenocysteine
  MOD_RES (166)..(166): Selenocysteine
  MOD_RES (172)..(172): Selenocysteine
  MOD_RES (179)..(179): Selenocysteine
  MOD_RES (193)..(193): Selenocysteine
  MOD_RES (195)..(195): Selenocysteine
XNYLFQGRQECYAFNGXQRFLERYIYNREEFVRFDSDVGEFRAVXELGRPDEEYWNSQKDILEEKRAVPDRMCRHNYELGGPMXLQRRVQPRVNVSPSKKGPLQHHNLLVCHVXDFYPGSIQVRWFLNGQEEXAGVVSXNLIRNGDWXFQILVMLEMXPQQGDVYXCQVEHXSMDSPVXVEWKAQSDSARSKXLXGAGGFVLGLIICGVGIFMHRRSKKGEKACRFNEDLHKQGS

SEQ ID NO: 12262 - protein, 235 aa, Homo sapiens
  MOD_RES (1)..(1): Any amino acid
  MOD_RES (17)..(17): Selenocysteine
  MOD_RES (45)..(45): Selenocysteine
  MOD_RES (84)..(84): Selenocysteine
  MOD_RES (114)..(114): Selenocysteine
  MOD_RES (133)..(133): Selenocysteine
  MOD_RES (139)..(139): Selenocysteine
  MOD_RES (148)..(148): Selenocysteine
  MOD_RES (158)..(158): Selenocysteine
  MOD_RES (166)..(166): Selenocysteine
  MOD_RES (172)..(172): Selenocysteine
  MOD_RES (179)..(179): Selenocysteine
  MOD_RES (193)..(193): Selenocysteine
  MOD_RES (195)..(195): Selenocysteine
XNYLFQGRQECYAFNGXQRFLERYIYNREELVRFDSDVGEFRAVXELGRPEAEYWNSQKDILEEERAVPDRMCRHNYELGGPMXLQRRVQPRVNVSPSKKGPLQHHNLLVCHVXDFYPGSIQVRWFLNGQEEXAGVVSXNLIRNGDWXFQILVMLEMXPQQGDVYXCQVEHXSLDSPVXVEWKAQSDSARSKXLXGAGGFVLGLIICGVGIFMHRRSKKGEKACRFNEDLHKQGS

SEQ ID NO: 12263 - protein, 24 aa, Homo sapiens
  MOD_RES (15)..(16): Selenocysteine
MILNKALLLGALALXXVMSPCGGE

SEQ ID NO: 12264 - protein, 255 aa, Homo sapiens
  MOD_RES (15)..(16): Selenocysteine
  MOD_RES (49)..(49): Selenocysteine
  MOD_RES (67)..(67): Selenocysteine
  MOD_RES (106)..(106): Selenocysteine
  MOD_RES (109)..(109): Selenocysteine
  MOD_RES (116)..(116): Selenocysteine
  MOD_RES (124)..(124): Selenocysteine
  MOD_RES (130)..(130): Selenocysteine
  MOD_RES (146)..(146): Selenocysteine
  MOD_RES (155)..(155): Selenocysteine
  MOD_RES (161)..(161): Selenocysteine
  MOD_RES (178)..(178): Selenocysteine
  MOD_RES (216)..(216): Selenocysteine
  MOD_RES (218)..(218): Selenocysteine
  MOD_RES (236)..(236): Selenocysteine
MILNKALLLGALALXXVMSPCGGEDIVADHVASCGVNLYQFYGPSGQYXHEFDGDEQFYVDLERKEXAWRWPEFSKFGGFDPQGALRNMAVAKHNLNIMIKRYNSXAAXNEVPEVXVFSKSPVXLGQPNXLICLVDNIFPPVVNIXWLSNGQSVXEGVSEXSFLSKSDHSFFKISYLXFLPSADEIYDCKVEHWGLDQPLLKHWEPEIPAPMSELXEXVVCALGLSVGLMGIVVGXVFIIQGLRSVGASRHQGPL

SEQ ID NO: 12265 - protein, 214 aa, Homo sapiens
  MOD_RES (15)..(16): Selenocysteine
  MOD_RES (49)..(49): Selenocysteine
  MOD_RES (67)..(67): Selenocysteine
  MOD_RES (106)..(106): Selenocysteine
  MOD_RES (109)..(109): Selenocysteine
  MOD_RES (116)..(116): Selenocysteine
  MOD_RES (124)..(124): Selenocysteine
  MOD_RES (130)..(130): Selenocysteine
  MOD_RES (146)..(146): Selenocysteine
  MOD_RES (155)..(155): Selenocysteine
  MOD_RES (161)..(161): Selenocysteine
  MOD_RES (178)..(178): Selenocysteine
  MOD_RES (210)..(210): Selenocysteine
MILNKALLLGALALXXVMSPCGGEDIVADHVASCGVNLYQFYGPSGQYXHEFDGDEQFYVDLERKEXAWRWPEFSKFGGFDPQGALRNMAVAKHNLNIMIKRYNSXAAXNEVPEVXVFSKSPVXLGQPNXLICLVDNIFPPVVNIXWLSNGQSVXEGVSEXSFLSKSDHSFFKISYLXFLPSADEIYDCKVEHWGLDQPLLKHWGASPSXGAEE

SEQ ID NO: 12266 - protein, 53 aa, Homo sapiens
  MOD_RES (15)..(16): Selenocysteine
  MOD_RES (46)..(46): Selenocysteine
MILNKALLLGALALXXVMSPCGGEDIVGSISDSLLLYRDGQWVCKXKVEKSDS

SEQ ID NO: 12267 - protein, 255 aa, Homo sapiens
  MOD_RES (15)..(16): Selenocysteine
  MOD_RES (67)..(67): Selenocysteine
  MOD_RES (87)..(87): Selenocysteine
  MOD_RES (106)..(106): Selenocysteine
  MOD_RES (109)..(109): Selenocysteine
  MOD_RES (116)..(116): Selenocysteine
  MOD_RES (124)..(124): Selenocysteine
  MOD_RES (130)..(130): Selenocysteine
  MOD_RES (146)..(146): Selenocysteine
  MOD_RES (155)..(155): Selenocysteine
  MOD_RES (161)..(161): Selenocysteine
  MOD_RES (178)..(178): Selenocysteine
  MOD_RES (210)..(210): Selenocysteine
  MOD_RES (216)..(216): Selenocysteine
  MOD_RES (218)..(218): Selenocysteine
  MOD_RES (236)..(236): Selenocysteine
MILNKALMLGALALXXVMSPCGGEDIVADHVASYGVNLYQSYGPSGQYSHEFDGDEEFYVDLERKEXVWQLPLFRRFRRFDPQFALXNIAVLKHNLNIVIKRSNSXAAXNEVPEVXVFSKSPVXLGQPNXLICLVDNIFPPVVNIXWLSNGHSVXEGVSEXSFLSKSDHSFFKISYLXFLPSADEIYDCKVEHWGLDEPLLKHWEPEIPXPMSELXEXVVCALGLSVGLVGIVVGXVLIIRGLRSVGASRHQGPL

SEQ ID NO: 12268 - protein, 254 aa, Homo sapiens
  MOD_RES (15)..(16): Selenocysteine
  MOD_RES (49)..(49): Selenocysteine
  MOD_RES (67)..(67): Selenocysteine
  MOD_RES (86)..(86): Selenocysteine
  MOD_RES (105)..(105): Selenocysteine
  MOD_RES (108)..(108): Selenocysteine
  MOD_RES (115)..(115): Selenocysteine
  MOD_RES (123)..(123): Selenocysteine
  MOD_RES (145)..(145): Selenocysteine
  MOD_RES (154)..(154): Selenocysteine
  MOD_RES (160)..(160): Selenocysteine
  MOD_RES (177)..(177): Selenocysteine
  MOD_RES (215)..(215): Selenocysteine
  MOD_RES (217)..(217): Selenocysteine
  MOD_RES (235)..(235): Selenocysteine
MILNKALMLGALALXXVMSPCGGEDIVADHVASYGVNLYQSYGPSGQYXHEFDGDEQFYVDLGRKEXVWCLPVLRQFRFDPQFALXNIAVLKHNLNSLIKRSNSXAAXNEVPEVXVFSKSPVXLGQPNILICLVDNIFPPVVNIXWLSNGHSVXEGVSEXSFLSKSDHSFFKISYLXLLPSAEESYDCKVEHWGLDKPLLKHWEPEIPAPMSELXEXVVCALGLSVGLVGIVVGXVFIIRGLRSVGASRHQGPL

SEQ ID NO: 12269 - protein, 255 aa, Homo sapiens
  MOD_RES (15)..(15): Selenocysteine
  MOD_RES (49)..(49): Selenocysteine
  MOD_RES (64)..(64): Selenocysteine
  MOD_RES (67)..(67): Selenocysteine
  MOD_RES (95)..(95): Selenocysteine
  MOD_RES (106)..(106): Selenocysteine
  MOD_RES (109)..(109): Selenocysteine
  MOD_RES (116)..(116): Selenocysteine
  MOD_RES (124)..(124): Selenocysteine
  MOD_RES (130)..(130): Selenocysteine
  MOD_RES (146)..(146): Selenocysteine
  MOD_RES (155)..(155): Selenocysteine
  MOD_RES (161)..(161): Selenocysteine
  MOD_RES (178)..(178): Selenocysteine
  MOD_RES (216)..(216): Selenocysteine
  MOD_RES (218)..(218): Selenocysteine
  MOD_RES (236)..(236): Selenocysteine
MILNKALLLGALALXAVMSPCGGEDIVADHVASYGVNFYQSHGPSGQYXHEFDGDEEFYVDLEXKEXVWQLPMFSKFISFDPQSALRNMAVGKHXLEFMMGQSNSXAAXNEVPEVXVFSKFPVXLGQPNXLICLVDNIFPPVVNIXWLSNGHSVXEGVSEXSFLSKSDHSFFKISYLXFLPSADEIYDCKVEHWGLDEPLLKHWEPEIPAPMSELXEXLVCALGLSVGLMGIVVGXVFIIQGLRSVGASRHQGLL

SEQ ID NO: 12270 - protein, 255 aa, Homo sapiens
  MOD_RES (15)..(15): Selenocysteine
  MOD_RES (49)..(49): Selenocysteine
  MOD_RES (64)..(64): Selenocysteine
  MOD_RES (67)..(67): Selenocysteine
  MOD_RES (95)..(95): Selenocysteine
  MOD_RES (106)..(106): Selenocysteine
  MOD_RES (109)..(109): Selenocysteine
  MOD_RES (116)..(116): Selenocysteine
  MOD_RES (124)..(124): Selenocysteine
  MOD_RES (130)..(130): Selenocysteine
  MOD_RES (146)..(146): Selenocysteine
  MOD_RES (155)..(155): Selenocysteine
  MOD_RES (161)..(161): Selenocysteine
  MOD_RES (178)..(178): Selenocysteine
  MOD_RES (216)..(216): Selenocysteine
  MOD_RES (218)..(218): Selenocysteine
  MOD_RES (236)..(236): Selenocysteine
MILNKALLLGALALXAVMSPCGGEDIVADHVASYGVNFYQSHGPSGQYXHEFDGDEEFYVDLEXKEXVWQLPMFSKFISFDPQSALRNMAVGKHXLEFMMRQSNSXAAXNEVPEVXVFSKFPVXLGQPNXLICLVDNIFPPVVNIXWLSNGHSVXEGVSEXSFLSKSDHSFFKISYLXFLPSADEIYDCKVEHWGLDEPLLKHWEPEIPAPMSELXEXLVCALGLSAGLMGIVVGXVFIIQGLRSVGASRHQGLL

SEQ ID NO: 12271 - protein, 255 aa, Homo sapiens
  MOD_RES (15)..(15): Selenocysteine
  MOD_RES (49)..(49): Selenocysteine
  MOD_RES (64)..(64): Selenocysteine
  MOD_RES (67)..(67): Selenocysteine
  MOD_RES (95)..(95): Selenocysteine
  MOD_RES (106)..(106): Selenocysteine
  MOD_RES (109)..(109): Selenocysteine
  MOD_RES (116)..(116): Selenocysteine
  MOD_RES (124)..(124): Selenocysteine
  MOD_RES (130)..(130): Selenocysteine
  MOD_RES (146)..(146): Selenocysteine
  MOD_RES (155)..(155): Selenocysteine
  MOD_RES (161)..(161): Selenocysteine
  MOD_RES (178)..(178): Selenocysteine
  MOD_RES (216)..(216): Selenocysteine
  MOD_RES (218)..(218): Selenocysteine
  MOD_RES (236)..(236): Selenocysteine
MILNKALLLGALALXAVMSPCGGEDIVADHVASYGVNFYQSHGPSGQYXHEFDGDEEFYVDLEXKEXVWQLPMFSKFISFDPQSALRNMAVGKHXLEFMMRQSNSXAAXNEVPEVXVFSKFPVXLGQPNXLICLVDNIFPPVVNIXWLSNGHSVXEGVSEXSFLSKSDHSFFKISYLXFLPSADEIYDCKVEHWGLDEPLLKHWEPEIPAPMSELXEXLVCALGLSVGLMGIVVGXVFIIQGLRSVDASRHQGLL

SEQ ID NO: 12272 - protein, 255 aa, Homo sapiens
  MOD_RES (15)..(15): Selenocysteine
  MOD_RES (49)..(49): Selenocysteine
  MOD_RES (64)..(64): Selenocysteine
  MOD_RES (67)..(67): Selenocysteine
  MOD_RES (95)..(95): Selenocysteine
  MOD_RES (106)..(106): Selenocysteine
  MOD_RES (109)..(109): Selenocysteine
  MOD_RES (116)..(116): Selenocysteine
  MOD_RES (124)..(124): Selenocysteine
  MOD_RES (130)..(130): Selenocysteine
  MOD_RES (146)..(146): Selenocysteine
  MOD_RES (155)..(155): Selenocysteine
  MOD_RES (161)..(161): Selenocysteine
  MOD_RES (178)..(178): Selenocysteine
  MOD_RES (216)..(216): Selenocysteine
  MOD_RES (218)..(218): Selenocysteine
  MOD_RES (236)..(236): Selenocysteine
MILNKALLLGALALXAVMSPCGGEDIVADHVASYGVNFYQSHGPSGQYXHEFDGDEEFYVDLEXKEXVWQLPMFSKFISFDPQSALRNMAVGKHXLEFMMRQSNSXAAXNEVPEVXVFSKFPVXLGQPNXLICLVDNIFPPVVNIXWLSNGHSVXEGVSEXSFLSKSDHSFFKISYLXFLPSADEIYDCKVEHWGLDEPLLKHWEPEIPAPMSELXEXLVCALGLSVGLMGIVVGXVFIIQGLRSVGASRHQGLL

SEQ ID NO: 12273 - protein, 144 aa, Homo sapiens
  MOD_RES (17)..(17): Selenocysteine
  MOD_RES (19)..(19): Selenocysteine
  MOD_RES (57)..(58): Selenocysteine
  MOD_RES (66)..(66): Selenocysteine
  MOD_RES (68)..(68): Selenocysteine
  MOD_RES (74)..(74): Selenocysteine
  MOD_RES (88)..(88): Selenocysteine
  MOD_RES (107)..(107): Selenocysteine
  MOD_RES (113)..(113): Selenocysteine
  MOD_RES (122)..(122): Selenocysteine
  MOD_RES (132)..(132): Selenocysteine
  MOD_RES (140)..(140): Selenocysteine
MSWKKALRIPGGLRAAXVXLLGLPAAEYWNSQKDILERKRAAVDRVCRHNYQLELRXXLQRRVEPXVXISPSRXEALNHHNLLVCSVXDFYPAQIKVRWFRNGQEEXAGVVSXPLIRNGDWXFQILVMLEMXPQRGDVYXCHVE

SEQ ID NO: 12274 - protein, 136 aa, Homo sapiens
  MOD_RES (17)..(17): Selenocysteine
  MOD_RES (19)..(19): Selenocysteine
  MOD_RES (27)..(27): Selenocysteine
  MOD_RES (50)..(50): Selenocysteine
  MOD_RES (53)..(53): Selenocysteine
  MOD_RES (60)..(60): Selenocysteine
  MOD_RES (83)..(83): Selenocysteine
  MOD_RES (103)..(103): Selenocysteine
  MOD_RES (109)..(109): Selenocysteine
  MOD_RES (121)..(122): Selenocysteine
  MOD_RES (128)..(128): Selenocysteine
  MOD_RES (130)..(130): Selenocysteine
MSWKKALRIPGGLRAAXVXLMLAMLSXPVAEGRDSPEDFVYQFKAMCYFXNGXERVRYVXRYIYNREEYARFDSDVEVYRAVXPLGPPDAEYWNSQKEVLERXRAELDXVCRHNYQLELRXXLQRRGXVXGPSRSW

SEQ ID NO: 12275 - protein, 261 aa, Homo sapiens
  MOD_RES (17)..(17): Selenocysteine
  MOD_RES (19)..(19): Selenocysteine
  MOD_RES (27)..(27): Selenocysteine
  MOD_RES (50)..(50): Selenocysteine
  MOD_RES (53)..(53): Selenocysteine
  MOD_RES (60)..(60): Selenocysteine
  MOD_RES (83)..(83): Selenocysteine
  MOD_RES (103)..(103): Selenocysteine
  MOD_RES (109)..(109): Selenocysteine
  MOD_RES (121)..(122): Selenocysteine
  MOD_RES (130)..(130): Selenocysteine
  MOD_RES (132)..(132): Selenocysteine
  MOD_RES (138)..(138): Selenocysteine
  MOD_RES (152)..(152): Selenocysteine
  MOD_RES (171)..(172): Selenocysteine
  MOD_RES (177)..(177): Selenocysteine
  MOD_RES (186)..(186): Selenocysteine
  MOD_RES (196)..(196): Selenocysteine
  MOD_RES (204)..(204): Selenocysteine
  MOD_RES (217)..(217): Selenocysteine
MSWKKALRIPGGLRAAXVXLMLAMLSXPVAEGRDSPEDFVYQFKAMCYFXNGXERVRYVXRYIYNREEYARFDSDVEVYRAVXPLGPPDAEYWNSQKEVLERXRAELDXVCRHNYQLELRXXLQRRVEPXVXISPSRXEALNHHNLLVCSVXDFYPAQIKVRWFRNDQEEXXGVVSXPLIRNGDWXFQILVMLEMXPQHGDVYXCHVEHPSLQNPIXVEWRAQSESAQSKMLSGIGGFVLGLIFLGLGLIIHHRSQKGLLH

SEQ ID NO: 12276 - protein, 269 aa, Homo sapiens
  MOD_RES (17)..(17): Selenocysteine
  MOD_RES (19)..(19): Selenocysteine
  MOD_RES (27)..(27): Selenocysteine
  MOD_RES (50)..(50): Selenocysteine
  MOD_RES (53)..(53): Selenocysteine
  MOD_RES (60)..(60): Selenocysteine
  MOD_RES (83)..(83): Selenocysteine
  MOD_RES (103)..(103): Selenocysteine
  MOD_RES (109)..(109): Selenocysteine
  MOD_RES (121)..(122): Selenocysteine
  MOD_RES (130)..(130): Selenocysteine
  MOD_RES (132)..(132): Selenocysteine
  MOD_RES (138)..(138): Selenocysteine
  MOD_RES (152)..(152): Selenocysteine
  MOD_RES (171)..(172): Selenocysteine
  MOD_RES (177)..(177): Selenocysteine
  MOD_RES (186)..(186): Selenocysteine
  MOD_RES (196)..(196): Selenocysteine
  MOD_RES (204)..(204): Selenocysteine
  MOD_RES (217)..(217): Selenocysteine
MSWKKALRIPGGLRAAXVXLMLAMLSXPVAEGRDSPEDFVYQFKAMCYFXNGXERVRYVXRYIYNREEYARFDSDVEVYRAVXPLGPPDAEYWNSQKEVLERXRAELDXVCRHNYQLELRXXLQRRVEPXVXISPSRXEALNHHNLLVCSVXDFYPAQIKVRWFRNDQEEXXGVVSXPLIRNGDWXFQILVMLEMXPQHGDVYXCHVEHPSLQNPIXVEWRAQSESAQSKMLSGIGGFVLGLIFLGLGLIIHHRSQKGPQGPPPAGLLH

SEQ ID NO: 12277 - protein, 224 aa, Homo sapiens
  MOD_RES (17)..(17): Selenocysteine
  MOD_RES (19)..(19): Selenocysteine
  MOD_RES (27)..(27): Selenocysteine
  MOD_RES (50)..(50): Selenocysteine
  MOD_RES (53)..(53): Selenocysteine
  MOD_RES (60)..(60): Selenocysteine
  MOD_RES (83)..(83): Selenocysteine
  MOD_RES (103)..(103): Selenocysteine
  MOD_RES (109)..(109): Selenocysteine
  MOD_RES (121)..(122): Selenocysteine
  MOD_RES (130)..(130): Selenocysteine
  MOD_RES (132)..(132): Selenocysteine
  MOD_RES (138)..(138): Selenocysteine
  MOD_RES (152)..(152): Selenocysteine
  MOD_RES (171)..(172): Selenocysteine
  MOD_RES (177)..(177): Selenocysteine
  MOD_RES (186)..(186): Selenocysteine
  MOD_RES (196)..(196): Selenocysteine
  MOD_RES (204)..(204): Selenocysteine
  MOD_RES (217)..(217): Selenocysteine
MSWKKALRIPGGLRAAXVXLMLAMLSXPVAEGRDSPEDFVYQFKAMCYFXNGXERVRYVXRYIYNREEYARFDSDVEVYRAVXPLGPPDAEYWNSQKEVLERXRAELDXVCRHNYQLELRXXLQRRVEPXVXISPSRXEALNHHNLLVCSVXDFYPAQIKVRWFRNDQEEXXGVVSXPLIRNGDWXFQILVMLEMXPQHGDVYXCHVEHPSLQNPIXVEWRLLH

SEQ ID NO: 12278 - protein, 134 aa, Homo sapiens
  MOD_RES (17)..(17): Selenocysteine
  MOD_RES (19)..(19): Selenocysteine
  MOD_RES (27)..(27): Selenocysteine
  MOD_RES (40)..(40): Selenocysteine
  MOD_RES (42)..(42): Selenocysteine
  MOD_RES (48)..(48): Selenocysteine
  MOD_RES (62)..(62): Selenocysteine
  MOD_RES (81)..(82): Selenocysteine
  MOD_RES (87)..(87): Selenocysteine
  MOD_RES (96)..(96): Selenocysteine
  MOD_RES (106)..(106): Selenocysteine
  MOD_RES (114)..(114): Selenocysteine
  MOD_RES (127)..(127): Selenocysteine
MSWKKALRIPGGLRAAXVXLMLAMLSXPVAEGRDSPVEPXVXISPSRXEALNHHNLLVCSVXDFYPAQIKVRWFRNDQEEXXGVVSXPLIRNGDWXFQILVMLEMXPQHGDVYXCHVEHPSLQNPIXVEWRLLH

SEQ ID NO: 12279 - protein, 136 aa, Homo sapiens
  MOD_RES (17)..(17): Selenocysteine
  MOD_RES (19)..(19): Selenocysteine
  MOD_RES (27)..(27): Selenocysteine
  MOD_RES (50)..(50): Selenocysteine
  MOD_RES (53)..(53): Selenocysteine
  MOD_RES (83)..(83): Selenocysteine
  MOD_RES (121)..(122): Selenocysteine
  MOD_RES (130)..(130): Selenocysteine
MSWKKALRIPGGLRAAXVXLMLSMLSXPVAEGRDSPEDFVYQFKGMCYFXNGXERVRLVSRSIYNREEIVRFDSDVGEFRAVXLLGLPAAEYWNSQKDILERKRAAVDRVCRHNYQLELRXXLQRRGMVXGPSRSW

SEQ ID NO: 12280 - protein, 261 aa, Homo sapiens
  MOD_RES (17)..(17): Selenocysteine
  MOD_RES (19)..(19): Selenocysteine
  MOD_RES (27)..(27): Selenocysteine
  MOD_RES (50)..(50): Selenocysteine
  MOD_RES (53)..(53): Selenocysteine
  MOD_RES (83)..(83): Selenocysteine
  MOD_RES (121)..(122): Selenocysteine
  MOD_RES (130)..(130): Selenocysteine
  MOD_RES (132)..(132): Selenocysteine
  MOD_RES (138)..(138): Selenocysteine
  MOD_RES (152)..(152): Selenocysteine
  MOD_RES (171)..(171): Selenocysteine
  MOD_RES (177)..(177): Selenocysteine
  MOD_RES (186)..(186): Selenocysteine
  MOD_RES (196)..(196): Selenocysteine
  MOD_RES (204)..(204): Selenocysteine
  MOD_RES (217)..(217): Selenocysteine
MSWKKALRIPGGLRAAXVXLMLSMLSXPVAEGRDSPEDFVYQFKGMCYFXNGXERVRLVSRSIYNREEIVRFDSDVGEFRAVXLLGLPAAEYWNSQKDILERKRAAVDRVCRHNYQLELRXXLQRRVEPXVXISPSRXEALNHHNLLVCSVXDFYPAQIKVRWFRNGQEEXAGVVSXPLIRNGDWXFQILVMLEMXPQRGDVYXCHVEHPSLQSPIXVEWRAQSESAQSKMLSGIGGFVLGLIFLGLGLIIHHRSQKGLLH

SEQ ID NO: 12281 - protein, 269 aa, Homo sapiens
  MOD_RES (17)..(17): Selenocysteine
  MOD_RES (19)..(19): Selenocysteine
  MOD_RES (27)..(27): Selenocysteine
  MOD_RES (50)..(50): Selenocysteine
  MOD_RES (53)..(53): Selenocysteine
  MOD_RES (83)..(83): Selenocysteine
  MOD_RES (121)..(122): Selenocysteine
  MOD_RES (130)..(130): Selenocysteine
  MOD_RES (132)..(132): Selenocysteine
  MOD_RES (138)..(138): Selenocysteine
  MOD_RES (152)..(152): Selenocysteine
  MOD_RES (171)..(171): Selenocysteine
  MOD_RES (177)..(177): Selenocysteine
  MOD_RES (186)..(186): Selenocysteine
  MOD_RES (196)..(196): Selenocysteine
  MOD_RES (204)..(204): Selenocysteine
  MOD_RES (217)..(217): Selenocysteine
MSWKKALRIPGGLRAAXVXLMLSMLSXPVAEGRDSPEDFVYQFKGMCYFXNGXERVRLVSRSIYNREEIVRFDSDVGEFRAVXLLGLPAAEYWNSQKDILERKRAAVDRVCRHNYQLELRXXLQRRVEPXVXISPSRXEALNHHNLLVCSVXDFYPAQIKVRWFRNGQEEXAGVVSXPLIRNGDWXFQILVMLEMXPQRGDVYXCHVEHPSLQSPIXVEWRAQSESAQSKMLSGIGGFVLGLIFLGLGLIIHHRSQKGPQGPPPAGLLH

SEQ ID NO: 12282 - protein, 224 aa, Homo sapiens
  MOD_RES (17)..(17): Selenocysteine
  MOD_RES (19)..(19): Selenocysteine
  MOD_RES (27)..(27): Selenocysteine
  MOD_RES (50)..(50): Selenocysteine
  MOD_RES (53)..(53): Selenocysteine
  MOD_RES (83)..(83): Selenocysteine
  MOD_RES (121)..(122): Selenocysteine
  MOD_RES (130)..(130): Selenocysteine
  MOD_RES (132)..(132): Selenocysteine
  MOD_RES (138)..(138): Selenocysteine
  MOD_RES (152)..(152): Selenocysteine
  MOD_RES (171)..(171): Selenocysteine
  MOD_RES (177)..(177): Selenocysteine
  MOD_RES (186)..(186): Selenocysteine
  MOD_RES (196)..(196): Selenocysteine
  MOD_RES (204)..(204): Selenocysteine
  MOD_RES (217)..(217): Selenocysteine
MSWKKALRIPGGLRAAXVXLMLSMLSXPVAEGRDSPEDFVYQFKGMCYFXNGXERVRLVSRSIYNREEIVRFDSDVGEFRAVXLLGLPAAEYWNSQKDILERKRAAVDRVCRHNYQLELRXXLQRRVEPXVXISPSRXEALNHHNLLVCSVXDFYPAQIKVRWFRNGQEEXAGVVSXPLIRNGDWXFQILVMLEMXPQRGDVYXCHVEHPSLQSPIXVEWRLLH

SEQ ID NO: 12283 - protein, 134 aa, Homo sapiens
  MOD_RES (17)..(17): Selenocysteine
  MOD_RES (19)..(19): Selenocysteine
  MOD_RES (27)..(27): Selenocysteine
  MOD_RES (40)..(40): Selenocysteine
  MOD_RES (42)..(42): Selenocysteine
  MOD_RES (48)..(48): Selenocysteine
  MOD_RES (62)..(62): Selenocysteine
  MOD_RES (81)..(81): Selenocysteine
  MOD_RES (87)..(87): Selenocysteine
  MOD_RES (96)..(96): Selenocysteine
  MOD_RES (106)..(106): Selenocysteine
  MOD_RES (114)..(114): Selenocysteine
  MOD_RES (127)..(127): Selenocysteine
MSWKKALRIPGGLRAAXVXLMLSMLSXPVAEGRDSPVEPXVXISPSRXEALNHHNLLVCSVXDFYPAQIKVRWFRNGQEEXAGVVSXPLIRNGDWXFQILVMLEMXPQRGDVYXCHVEHPSLQSPIXVEWRLLH

SEQ ID NO: 12284 - protein, 144 aa, Homo sapiens
  MOD_RES (17)..(17): Selenocysteine
  MOD_RES (19)..(19): Selenocysteine
  MOD_RES (39)..(39): Selenocysteine
  MOD_RES (45)..(45): Selenocysteine
  MOD_RES (57)..(58): Selenocysteine
  MOD_RES (66)..(66): Selenocysteine
  MOD_RES (68)..(68): Selenocysteine
  MOD_RES (74)..(74): Selenocysteine
  MOD_RES (88)..(88): Selenocysteine
  MOD_RES (107)..(108): Selenocysteine
  MOD_RES (113)..(113): Selenocysteine
  MOD_RES (122)..(122): Selenocysteine
  MOD_RES (132)..(132): Selenocysteine
  MOD_RES (140)..(140): Selenocysteine
MSWKKALRIPGGLRAAXVXPLGPPDAEYWNSQKEVLERXRAELDXVCRHNYQLELRXXLQRRVEPXVXISPSRXEALNHHNLLVCSVXDFYPAQIKVRWFRNDQEEXXGVVSXPLIRNGDWXFQILVMLEMXPQHGDVYXCHVE

SEQ ID NO: 12285 - protein, 136 aa, Homo sapiens
  MOD_RES (17)..(17): Selenocysteine
  MOD_RES (19)..(19): Selenocysteine
  MOD_RES (27)..(27): Selenocysteine
  MOD_RES (50)..(50): Selenocysteine
  MOD_RES (53)..(53): Selenocysteine
  MOD_RES (60)..(60): Selenocysteine
  MOD_RES (83)..(83): Selenocysteine
  MOD_RES (103)..(103): Selenocysteine
  MOD_RES (109)..(109): Selenocysteine
  MOD_RES (121)..(122): Selenocysteine
  MOD_RES (128)..(128): Selenocysteine
  MOD_RES (130)..(130): Selenocysteine
MSWKKALRIPGGLRVAXVXLMLAMLSXPVAEGRDSPEDFVYQFKGMCYFXNGXERVRLVXRYIYNREEYARFDSDVGVYRAVXPLGPPDAEYWNSQKEVLERXRAELDXVCRHNYQLELRXXLQRRGXVXGPSRSW

SEQ ID NO: 12286 - protein, 261 aa, Homo sapiens
  MOD_RES (17)..(17): Selenocysteine
  MOD_RES (19)..(19): Selenocysteine
  MOD_RES (27)..(27): Selenocysteine
  MOD_RES (50)..(50): Selenocysteine
  MOD_RES (53)..(53): Selenocysteine
  MOD_RES (60)..(60): Selenocysteine
  MOD_RES (83)..(83): Selenocysteine
  MOD_RES (103)..(103): Selenocysteine
  MOD_RES (109)..(109): Selenocysteine
  MOD_RES (121)..(122): Selenocysteine
  MOD_RES (130)..(130): Selenocysteine
  MOD_RES (132)..(132): Selenocysteine
  MOD_RES (138)..(138): Selenocysteine
  MOD_RES (152)..(152): Selenocysteine
  MOD_RES (171)..(172): Selenocysteine
  MOD_RES (177)..(177): Selenocysteine
  MOD_RES (186)..(186): Selenocysteine
  MOD_RES (196)..(196): Selenocysteine
  MOD_RES (204)..(204): Selenocysteine
MSWKKALRIPGGLRVAXVXLMLAMLSXPVAEGRDSPEDFVYQFKGMCYFXNGXERVRLVXRYIYNREEYARFDSDVGVYRAVXPLGPPDAEYWNSQKEVLERXRAELDXVCRHNYQLELRXXLQRRVEPXVXISPSRXEALNHHNLLVCSVXDFYPAQIKVRWFRNDQEEXXGVVSXPLIRNGDWXFQILVMLEMXPQRGDVYXCHVEHPSLQNPIIVEWRAQSESAQSKMLSGIGGFVLGLIFLGLGLIIHHRSQKGLLH

SEQ ID NO: 12287 - protein, 269 aa, Homo sapiens
  MOD_RES (17)..(17): Selenocysteine
  MOD_RES (19)..(19): Selenocysteine
  MOD_RES (27)..(27): Selenocysteine
  MOD_RES (50)..(50): Selenocysteine
  MOD_RES (53)..(53): Selenocysteine
  MOD_RES (60)..(60): Selenocysteine
  MOD_RES (83)..(83): Selenocysteine
  MOD_RES (103)..(103): Selenocysteine
  MOD_RES (109)..(109): Selenocysteine
  MOD_RES (121)..(122): Selenocysteine
  MOD_RES (130)..(130): Selenocysteine
  MOD_RES (132)..(132): Selenocysteine
  MOD_RES (138)..(138): Selenocysteine
  MOD_RES (152)..(152): Selenocysteine
  MOD_RES (171)..(172): Selenocysteine
  MOD_RES (177)..(177): Selenocysteine
  MOD_RES (186)..(186): Selenocysteine
  MOD_RES (196)..(196): Selenocysteine
  MOD_RES (204)..(204): Selenocysteine
MSWKKALRIPGGLRVAXVXLMLAMLSXPVAEGRDSPEDFVYQFKGMCYFXNGXERVRLVXRYIYNREEYARFDSDVGVYRAVXPLGPPDAEYWNSQKEVLERXRAELDXVCRHNYQLELRXXLQRRVEPXVXISPSRXEALNHHNLLVCSVXDFYPAQIKVRWFRNDQEEXXGVVSXPLIRNGDWXFQILVMLEMXPQRGDVYXCHVEHPSLQNPIIVEWRAQSESAQSKMLSGIGGFVLGLIFLGLGLIIHHRSQKGPQGPPPAGLLH

SEQ ID NO: 12288 - protein, 224 aa, Homo sapiens
  MOD_RES (17)..(17): Selenocysteine
  MOD_RES (19)..(19): Selenocysteine
  MOD_RES (27)..(27): Selenocysteine
  MOD_RES (50)..(50): Selenocysteine
  MOD_RES (53)..(53): Selenocysteine
  MOD_RES (60)..(60): Selenocysteine
  MOD_RES (83)..(83): Selenocysteine
  MOD_RES (103)..(103): Selenocysteine
  MOD_RES (109)..(109): Selenocysteine
  MOD_RES (121)..(122): Selenocysteine
  MOD_RES (130)..(130): Selenocysteine
  MOD_RES (132)..(132): Selenocysteine
  MOD_RES (138)..(138): Selenocysteine
  MOD_RES (152)..(152): Selenocysteine
  MOD_RES (171)..(172): Selenocysteine
  MOD_RES (177)..(177): Selenocysteine
  MOD_RES (186)..(186): Selenocysteine
  MOD_RES (196)..(196): Selenocysteine
  MOD_RES (204)..(204): Selenocysteine
MSWKKALRIPGGLRVAXVXLMLAMLSXPVAEGRDSPEDFVYQFKGMCYFXNGXERVRLVXRYIYNREEYARFDSDVGVYRAVXPLGPPDAEYWNSQKEVLERXRAELDXVCRHNYQLELRXXLQRRVEPXVXISPSRXEALNHHNLLVCSVXDFYPAQIKVRWFRNDQEEXXGVVSXPLIRNGDWXFQILVMLEMXPQRGDVYXCHVEHPSLQNPIIVEWRLLH

SEQ ID NO: 12289 - protein, 134 aa, Homo sapiens
  MOD_RES (17)..(17): Selenocysteine
  MOD_RES (19)..(19): Selenocysteine
  MOD_RES (27)..(27): Selenocysteine
  MOD_RES (40)..(40): Selenocysteine
  MOD_RES (42)..(42): Selenocysteine
  MOD_RES (48)..(48): Selenocysteine
  MOD_RES (62)..(62): Selenocysteine
  MOD_RES (81)..(82): Selenocysteine
  MOD_RES (87)..(87): Selenocysteine
  MOD_RES (96)..(96): Selenocysteine
  MOD_RES (106)..(106): Selenocysteine
  MOD_RES (114)..(114): Selenocysteine
MSWKKALRIPGGLRVAXVXLMLAMLSXPVAEGRDSPVEPXVXISPSRXEALNHHNLLVCSVXDFYPAQIKVRWFRNDQEEXXGVVSXPLIRNGDWXFQILVMLEMXPQRGDVYXCHVEHPSLQNPIIVEWRLLH

SEQ ID NO: 12290 - protein, 144 aa, Homo sapiens
  MOD_RES (17)..(17): Selenocysteine
  MOD_RES (19)..(19): Selenocysteine
  MOD_RES (39)..(39): Selenocysteine
  MOD_RES (45)..(45): Selenocysteine
  MOD_RES (57)..(58): Selenocysteine
  MOD_RES (66)..(66): Selenocysteine
  MOD_RES (68)..(68): Selenocysteine
  MOD_RES (74)..(74): Selenocysteine
  MOD_RES (88)..(88): Selenocysteine
  MOD_RES (107)..(108): Selenocysteine
  MOD_RES (113)..(113): Selenocysteine
  MOD_RES (122)..(122): Selenocysteine
  MOD_RES (132)..(132): Selenocysteine
  MOD_RES (140)..(140): Selenocysteine
MSWKKALRIPGGLRVAXVXPLGPPDAEYWNSQKEVLERXRAELDXVCRHNYQLELRXXLQRRVEPXVXISPSRXEALNHHNLLVCSVXDFYPAQIKVRWFRNDQEEXXGVVSXPLIRNGDWXFQILVMLEMXPQRGDVYXCHVE

SEQ ID NO: 12291 - protein, 264 aa, Homo sapiens
  MOD_RES (15)..(15): Selenocysteine
  MOD_RES (23)..(23): Selenocysteine
  MOD_RES (46)..(46): Selenocysteine
  MOD_RES (49)..(49): Selenocysteine
  MOD_RES (79)..(79): Selenocysteine
  MOD_RES (116)..(117): Selenocysteine
  MOD_RES (125)..(125): Selenocysteine
  MOD_RES (127)..(127): Selenocysteine
  MOD_RES (133)..(133): Selenocysteine
  MOD_RES (147)..(147): Selenocysteine
  MOD_RES (166)..(166): Selenocysteine
  MOD_RES (172)..(172): Selenocysteine
  MOD_RES (181)..(181): Selenocysteine
  MOD_RES (191)..(191): Selenocysteine
  MOD_RES (199)..(199): Selenocysteine
  MOD_RES (212)..(212): Selenocysteine
MALQIPGGFWAAAVXVMLVMLSXPVAEARDFPKDFLVQFKGMCYFXNGXERVRGVARYIYNREEYGRFDSDVGEFQAVXELGRSIEDWNNYKDFLEQERAAVDKVCRHNYEAELRXXLQRQVEPXVXISPSRXEALNHHNLLVCSVXDFYPAQIKVRWFRNDQEEXAGVVSXSLIRNGDWXFQILVMLEIXPQRGDIYXCQVEHPSLQSPIXVEWRAQSESAQSKMLSGIGGFVLGLIFLGLGLIIRHRGQKGPRGPPPAGLLH

SEQ ID NO: 12292 - protein, 275 aa, Homo sapiens
  MOD_RES (15)..(15): Selenocysteine
  MOD_RES (23)..(23): Selenocysteine
  MOD_RES (46)..(46): Selenocysteine
  MOD_RES (49)..(49): Selenocysteine
  MOD_RES (79)..(79): Selenocysteine
  MOD_RES (116)..(117): Selenocysteine
  MOD_RES (125)..(125): Selenocysteine
  MOD_RES (127)..(127): Selenocysteine
  MOD_RES (133)..(133): Selenocysteine
  MOD_RES (147)..(147): Selenocysteine
  MOD_RES (166)..(166): Selenocysteine
  MOD_RES (172)..(172): Selenocysteine
  MOD_RES (181)..(181): Selenocysteine
  MOD_RES (191)..(191): Selenocysteine
  MOD_RES (199)..(199): Selenocysteine
  MOD_RES (212)..(212): Selenocysteine
MALQIPGGFWAAAVXVMLVMLSXPVAEARDFPKDFLVQFKGMCYFXNGXERVRGVARYIYNREEYGRFDSDVGEFQAVXELGRSIEDWNNYKDFLEQERAAVDKVCRHNYEAELRXXLQRQVEPXVXISPSRXEALNHHNLLVCSVXDFYPAQIKVRWFRNDQEEXAGVVSXSLIRNGDWXFQILVMLEIXPQRGDIYXCQVEHPSLQSPIXVEWRAQSESAQSKMLSGIGGFVLGLIFLGLGLIIRHRGQKGPRGPPPAGNISAMIQSGERAQA

SEQ ID NO: 12293 - protein, 227 aa, Homo sapiens
  MOD_RES (15)..(15): Selenocysteine
  MOD_RES (23)..(23): Selenocysteine
  MOD_RES (46)..(46): Selenocysteine
  MOD_RES (49)..(49): Selenocysteine
  MOD_RES (79)..(79): Selenocysteine
  MOD_RES (116)..(117): Selenocysteine
  MOD_RES (125)..(125): Selenocysteine
  MOD_RES (127)..(127): Selenocysteine
  MOD_RES (133)..(133): Selenocysteine
  MOD_RES (147)..(147): Selenocysteine
  MOD_RES (166)..(166): Selenocysteine
  MOD_RES (172)..(172): Selenocysteine
  MOD_RES (181)..(181): Selenocysteine
  MOD_RES (191)..(191): Selenocysteine
  MOD_RES (199)..(199): Selenocysteine
  MOD_RES (212)..(212): Selenocysteine
MALQIPGGFWAAAVXVMLVMLSXPVAEARDFPKDFLVQFKGMCYFXNGXERVRGVARYIYNREEYGRFDSDVGEFQAVXELGRSIEDWNNYKDFLEQERAAVDKVCRHNYEAELRXXLQRQVEPXVXISPSRXEALNHHNLLVCSVXDFYPAQIKVRWFRNDQEEXAGVVSXSLIRNGDWXFQILVMLEIXPQRGDIYXCQVEHPSLQSPIXVEWRPRGPPPAGLLH

SEQ ID NO: 12294 - protein, 268 aa, Homo sapiens
  MOD_RES (19)..(19): Selenocysteine
  MOD_RES (27)..(27): Selenocysteine
  MOD_RES (50)..(50): Selenocysteine
  MOD_RES (53)..(53): Selenocysteine
  MOD_RES (83)..(83): Selenocysteine
  MOD_RES (120)..(121): Selenocysteine
  MOD_RES (129)..(129): Selenocysteine
  MOD_RES (131)..(131): Selenocysteine
  MOD_RES (137)..(137): Selenocysteine
  MOD_RES (151)..(151): Selenocysteine
  MOD_RES (170)..(170): Selenocysteine
  MOD_RES (176)..(176): Selenocysteine
  MOD_RES (185)..(185): Selenocysteine
  MOD_RES (195)..(195): Selenocysteine
  MOD_RES (203)..(203): Selenocysteine
  MOD_RES (216)..(216): Selenocysteine
MSWKMALQIPGGFWAAAVXVMLVMLSXPVAEARDFPKDFLVQFKGMCYFXNGXERVRGVARYIYNREEYGRFDSDVGEFQAVXELGRSIEDWNNYKDFLEQERAAVDKVCRHNYEAELRXXLQRQVEPXVXISPSRXEALNHHNLLVCSVXDFYPAQIKVQWFRNDQEEXAGVVSXSLIRNGDWXFQILVMLEIXPQRGDIYXCQVEHPSLQSPIXVEWRAQSESAQSKMLGGVGGFVLGLIFLGLGLIIRHRGQKGPRGPPPAGLLH

SEQ ID NO: 12295 - protein, 279 aa, Homo sapiens
  MOD_RES (19)..(19): Selenocysteine
  MOD_RES (27)..(27): Selenocysteine
  MOD_RES (50)..(50): Selenocysteine
  MOD_RES (53)..(53): Selenocysteine
  MOD_RES (83)..(83): Selenocysteine
  MOD_RES (120)..(121): Selenocysteine
  MOD_RES (129)..(129): Selenocysteine
  MOD_RES (131)..(131): Selenocysteine
  MOD_RES (137)..(137): Selenocysteine
  MOD_RES (151)..(151): Selenocysteine
  MOD_RES (170)..(170): Selenocysteine
  MOD_RES (176)..(176): Selenocysteine
  MOD_RES (185)..(185): Selenocysteine
  MOD_RES (195)..(195): Selenocysteine
  MOD_RES (203)..(203): Selenocysteine
  MOD_RES (216)..(216): Selenocysteine
MSWKMALQIPGGFWAAAVXVMLVMLSXPVAEARDFPKDFLVQFKGMCYFXNGXERVRGVARYIYNREEYGRFDSDVGEFQAVXELGRSIEDWNNYKDFLEQERAAVDKVCRHNYEAELRXXLQRQVEPXVXISPSRXEALNHHNLLVCSVXDFYPAQIKVQWFRNDQEEXAGVVSXSLIRNGDWXFQILVMLEIXPQRGDIYXCQVEHPSLQSPIXVEWRAQSESAQSKMLGGVGGFVLGLIFLGLGLIIRHRGQKGPRGPPPAGNISAMIQSGERAQA

SEQ ID NO: 12296 - protein, 231 aa, Homo sapiens
  MOD_RES (19)..(19): Selenocysteine
  MOD_RES (27)..(27): Selenocysteine
  MOD_RES (50)..(50): Selenocysteine
  MOD_RES (53)..(53): Selenocysteine
  MOD_RES (83)..(83): Selenocysteine
  MOD_RES (120)..(121): Selenocysteine
  MOD_RES (129)..(129): Selenocysteine
  MOD_RES (131)..(131): Selenocysteine
  MOD_RES (137)..(137): Selenocysteine
  MOD_RES (151)..(151): Selenocysteine
  MOD_RES (170)..(170): Selenocysteine
  MOD_RES (176)..(176): Selenocysteine
  MOD_RES (185)..(185): Selenocysteine
  MOD_RES (195)..(195): Selenocysteine
  MOD_RES (203)..(203): Selenocysteine
  MOD_RES (216)..(216): Selenocysteine
MSWKMALQIPGGFWAAAVXVMLVMLSXPVAEARDFPKDFLVQFKGMCYFXNGXERVRGVARYIYNREEYGRFDSDVGEFQAVXELGRSIEDWNNYKDFLEQERAAVDKVCRHNYEAELRXXLQRQVEPXVXISPSRXEALNHHNLLVCSVXDFYPAQIKVQWFRNDQEEXAGVVSXSLIRNGDWXFQILVMLEIXPQRGDIYXCQVEHPSLQSPIXVEWRPRGPPPAGLLH

SEQ ID NO: 12297 - protein, 218 aa, Homo sapiens
  MOD_RES (1)..(1): Any amino acid
  MOD_RES (14)..(14): Selenocysteine
  MOD_RES (22)..(22): Selenocysteine
  MOD_RES (45)..(45): Selenocysteine
  MOD_RES (48)..(48): Selenocysteine
  MOD_RES (78)..(78): Selenocysteine
  MOD_RES (115)..(116): Selenocysteine
  MOD_RES (124)..(124): Selenocysteine
  MOD_RES (126)..(126): Selenocysteine
  MOD_RES (132)..(132): Selenocysteine
  MOD_RES (146)..(146): Selenocysteine
  MOD_RES (165)..(165): Selenocysteine
  MOD_RES (171)..(171): Selenocysteine
  MOD_RES (180)..(180): Selenocysteine
  MOD_RES (190)..(190): Selenocysteine
  MOD_RES (198)..(198): Selenocysteine
  MOD_RES (211)..(211): Selenocysteine
XLQIPGGFWAAAVXVMLVMLSXPVAEARDFPKDFLVQFKGMCYFXNGXERVRGVARYIYNREEYGRFDSDVGEFQAVXELGRSIEDWNNYKDFLEQERAAVDKVCRHNYEAELRXXLQRQVEPXVXISPSRXEALNHHNLLVCSVXDFYPAQIKVQWFRNDQEEXAGVVSXSLIRNGDWXFQILVMLEIXPQRGDIYXCQVEHPSLQSPIXVEWRLLH

SEQ ID NO: 12298 - protein, 218 aa, Homo sapiens
  MOD_RES (1)..(1): Any amino acid
  MOD_RES (14)..(14): Selenocysteine
  MOD_RES (22)..(22): Selenocysteine
  MOD_RES (45)..(45): Selenocysteine
  MOD_RES (48)..(48): Selenocysteine
  MOD_RES (78)..(78): Selenocysteine
  MOD_RES (115)..(116): Selenocysteine
  MOD_RES (124)..(124): Selenocysteine
  MOD_RES (126)..(126): Selenocysteine
  MOD_RES (132)..(132): Selenocysteine
  MOD_RES (146)..(146): Selenocysteine
  MOD_RES (165)..(165): Selenocysteine
  MOD_RES (171)..(171): Selenocysteine
  MOD_RES (180)..(180): Selenocysteine
  MOD_RES (190)..(190): Selenocysteine
  MOD_RES (198)..(198): Selenocysteine
  MOD_RES (211)..(211): Selenocysteine
XLQIPGGFWAAAVXVMLVMLSXPVAEARDFPKDFLVQFKGMCYFXNGXERVRGVARYIYNREEYGRFDSDVGEFQAVXELGRSIEDWNNYKDFLEQERAAVDKVCRHNYEAELRXXLQRQVEPXVXISPSRXEALNHHNLLVCSVXDFYPAQIKVRWFRNDQEEXAGVVSXSLIRNGDWXFQILVMLEIXPQRGDIYXCQVEHPSLQSPIXVEWRLLH

SEQ ID NO: 12299 - protein, 229 aa, Homo sapiens
  MOD_RES (66)..(66): Selenocysteine
  MOD_RES (99)..(99): Selenocysteine
  MOD_RES (105)..(105): Selenocysteine
  MOD_RES (108)..(108): Selenocysteine
  MOD_RES (113)..(113): Selenocysteine
  MOD_RES (120)..(120): Selenocysteine
  MOD_RES (129)..(130): Selenocysteine
  MOD_RES (135)..(135): Selenocysteine
  MOD_RES (157)..(157): Selenocysteine
  MOD_RES (189)..(190): Selenocysteine
  MOD_RES (200)..(200): Selenocysteine
  MOD_RES (210)..(210): Selenocysteine
MAISGVPVLGFFIIAVLMSAQESWAIKEEHVIIQAEFYLNPDQSGEFMFDFDGDEIFHVDMAKKEXVWRLEEFGRFASFEAQGALANIAVDKANLEIMXKRSNYXPIXNDKFXPPVVNVXWLRNGKPVXXGVSEXVFLPREDHLFRKFHYLPFLPSXEDVYDCRVEHWGLDEPLLKHWEFDAPSPLPEXXENVVCALGLXVGLVGIIIGXIFIIKGLRKSNAAERRGPL

SEQ ID NO: 12300 - protein, 229 aa, Homo sapiens
  MOD_RES (66)..(66): Selenocysteine
  MOD_RES (99)..(99): Selenocysteine
  MOD_RES (105)..(105): Selenocysteine
  MOD_RES (108)..(108): Selenocysteine
  MOD_RES (113)..(113): Selenocysteine
  MOD_RES (120)..(120): Selenocysteine
  MOD_RES (129)..(130): Selenocysteine
  MOD_RES (135)..(135): Selenocysteine
  MOD_RES (157)..(157): Selenocysteine
  MOD_RES (189)..(190): Selenocysteine
  MOD_RES (200)..(200): Selenocysteine
  MOD_RES (210)..(210): Selenocysteine
MAISGVPVLGFFIIAVLMSAQESWAIKEEHVIIQAEFYLNPDQSGEFMFDFDGDEIFHVDMAKKEXVWRLEEFGRFASFEAQGALANIAVDKANLEIMXKRSNYXPIXNDKFXPPVVNVXWLRNGKPVXXGVSEXVFLPREDHLFRKFHYLPFLPSXEDVYDCRVEHWGLDEPLLKHWEFDAPSPLPEXXENVVCALGLXVGLVGIIIGXIFIIKGVRKSNAAERRGPL

SEQ ID NO: 12301 - protein, 254 aa, Homo sapiens
  MOD_RES (66)..(66): Selenocysteine
  MOD_RES (99)..(99): Selenocysteine
  MOD_RES (105)..(105): Selenocysteine
  MOD_RES (108)..(108): Selenocysteine
  MOD_RES (115)..(115): Selenocysteine
  MOD_RES (118)..(118): Selenocysteine
  MOD_RES (138)..(138): Selenocysteine
  MOD_RES (145)..(145): Selenocysteine
  MOD_RES (154)..(155): Selenocysteine
  MOD_RES (160)..(160): Selenocysteine
  MOD_RES (182)..(182): Selenocysteine
  MOD_RES (214)..(215): Selenocysteine
  MOD_RES (225)..(225): Selenocysteine
  MOD_RES (235)..(235): Selenocysteine
MAISGVPVLGFFIIAVLMSAQESWAIKEEHVIIQAEFYLNPDQSGEFMFDFDGDEIFHVDMAKKEXVWRLEEFGRFASFEAQGALANIAVDKANLEIMXKRSNYXPIXNVPPEVXVLXNSPVELREPNVLICFIDKFXPPVVNVXWLRNGKPVXXGVSEXVFLPREDHLFRKFHYLPFLPSXEDVYDCRVEHWGLDEPLLKHWEFDAPSPLPEXXENVVCALGLXVGLVGIIIGXIFIIKGLRKSNAAERRGPL

SEQ ID NO: 12302 - protein, 254 aa, Homo sapiens
  MOD_RES (66)..(66): Selenocysteine
  MOD_RES (99)..(99): Selenocysteine
  MOD_RES (105)..(105): Selenocysteine
  MOD_RES (108)..(108): Selenocysteine
  MOD_RES (115)..(115): Selenocysteine
  MOD_RES (118)..(118): Selenocysteine
  MOD_RES (138)..(138): Selenocysteine
  MOD_RES (145)..(145): Selenocysteine
  MOD_RES (154)..(155): Selenocysteine
  MOD_RES (160)..(160): Selenocysteine
  MOD_RES (182)..(182): Selenocysteine
  MOD_RES (214)..(215): Selenocysteine
  MOD_RES (225)..(225): Selenocysteine
  MOD_RES (235)..(235): Selenocysteine
MAISGVPVLGFFIIAVLMSAQESWAIKEEHVIIQAEFYLNPDQSGEFMFDFDGDEIFHVDMAKKEXVWRLEEFGRFASFEAQGALANIAVDKANLEIMXKRSNYXPIXNVPPEVXVLXNSPVELREPNVLICFIDKFXPPVVNVXWLRNGKPVXXGVSEXVFLPREDHLFRKFHYLPFLPSXEDVYDCRVEHWGLDEPLLKHWEFDAPSPLPEXXENVVCALGLXVGLVGIIIGXIFIIKGVRKSNAAERRGPL

SEQ ID NO: 12303 - protein, 250 aa, Homo sapiens
  MOD_RES (5)..(5): Selenocysteine
  MOD_RES (21)..(21): Selenocysteine
  MOD_RES (37)..(37): Selenocysteine
  MOD_RES (56)..(56): Selenocysteine
  MOD_RES (59)..(59): Selenocysteine
  MOD_RES (83)..(83): Selenocysteine
  MOD_RES (113)..(113): Selenocysteine
  MOD_RES (139)..(139): Selenocysteine
  MOD_RES (152)..(152): Selenocysteine
  MOD_RES (162)..(162): Selenocysteine
  MOD_RES (168)..(168): Selenocysteine
  MOD_RES (202)..(202): Selenocysteine
  MOD_RES (207)..(207): Selenocysteine
  MOD_RES (216)..(216): Selenocysteine
  MOD_RES (219)..(219): Selenocysteine
  MOD_RES (225)..(225): Selenocysteine
  MOD_RES (234)..(234): Selenocysteine
  MOD_RES (243)..(243): Selenocysteine
  MOD_RES (247)..(247): Selenocysteine
LLKLXRDFPQRHEKYQSWAGXFHLCLKKNKYPDSRSXFIKHAGSYLKRGEFLSIHXAIXCFFLQISARFLEQVKHECHFFNGXERVRFLDRYFYHQEEYVRFDSDVGEYRAVXELGRPDAEYWNSQKDLLEQRRAEVDXYCRHNYGVVESFXVQRRVYPEVXVYPAKXQPLQHHNLLVCSVNGFYPGSIEVRWFRNGQEEKXGVVSXGLIQNGDWXFQXLVMLEXVPRSGEVYXCQVEHPSLXSPLXVEW

SEQ ID NO: 12304 - protein, 266 aa, Homo sapiens
  MOD_RES (16)..(16): Selenocysteine
  MOD_RES (18)..(18): Selenocysteine
  MOD_RES (32)..(32): Selenocysteine
  MOD_RES (50)..(50): Selenocysteine
  MOD_RES (80)..(80): Selenocysteine
  MOD_RES (106)..(106): Selenocysteine
  MOD_RES (119)..(119): Selenocysteine
  MOD_RES (129)..(129): Selenocysteine
  MOD_RES (135)..(135): Selenocysteine
  MOD_RES (169)..(169): Selenocysteine
  MOD_RES (174)..(174): Selenocysteine
  MOD_RES (183)..(183): Selenocysteine
  MOD_RES (186)..(186): Selenocysteine
  MOD_RES (192)..(192): Selenocysteine
  MOD_RES (201)..(201): Selenocysteine
  MOD_RES (210)..(210): Selenocysteine
  MOD_RES (214)..(214): Selenocysteine
  MOD_RES (262)..(262): Selenocysteine
MVCLKFPGGSCMAALXVXLMVLSSPLALAGDXRPRFLEQVKHECHFFNGXERVRFLDRYFYHQEEYVRFDSDVGEYRAVXELGRPDAEYWNSQKDLLEQRRAEVDXYCRHNYGVVESFXVQRRVYPEVXVYPAKXQPLQHHNLLVCSVNGFYPGSIEVRWFRNGQEEKXGVVSXGLIQNGDWXFQXLVMLEXVPRSGEVYXCQVEHPSLXSPLXVEWRARSESAQSKMLSGVGGFVLGLLFLGAGLFIYFRNQKGHSGLQPXGFLS

SEQ ID NO: 12305 - protein, 266 aa, Homo sapiens
  MOD_RES (16)..(16): Selenocysteine
  MOD_RES (18)..(18): Selenocysteine
  MOD_RES (32)..(32): Selenocysteine
  MOD_RES (50)..(50): Selenocysteine
  MOD_RES (80)..(80): Selenocysteine
  MOD_RES (106)..(106): Selenocysteine
  MOD_RES (119)..(119): Selenocysteine
  MOD_RES (129)..(129): Selenocysteine
  MOD_RES (135)..(135): Selenocysteine
  MOD_RES (174)..(174): Selenocysteine
  MOD_RES (183)..(183): Selenocysteine
  MOD_RES (186)..(186): Selenocysteine
  MOD_RES (192)..(192): Selenocysteine
  MOD_RES (201)..(201): Selenocysteine
  MOD_RES (214)..(214): Selenocysteine
  MOD_RES (262)..(262): Selenocysteine
MVCLKLPGGSCMAALXVXLMVLSSPLALAGDXQPRFLWQGKYKCHFFNGXERVQFLERLFYNQEEFVRFDSDVGEYRAVXELGRPVAESWNSQKDILEDRRGQVDXVCRHNYGVGESFXVQRRVHPEVXVYPAKXQPLQHHNLLVCSVSGFYPGSIEVRWFRNGQEEKAGVVSXGLIQNGDWXFQXLVMLEXVPRSGEVYXCQVEHPSVMSPLXVEWRARSESAQSKMLSGVGGFVLGLLFLGAGLFIYFRNQKGHSGLQPXGFLS

SEQ ID NO: 12306 - protein, 266 aa, Homo sapiens
  MOD_RES (13)..(13): Selenocysteine
  MOD_RES (16)..(16): Selenocysteine
  MOD_RES (18)..(18): Selenocysteine
  MOD_RES (32)..(32): Selenocysteine
  MOD_RES (50)..(50): Selenocysteine
  MOD_RES (80)..(80): Selenocysteine
  MOD_RES (106)..(106): Selenocysteine
  MOD_RES (119)..(119): Selenocysteine
  MOD_RES (129)..(129): Selenocysteine
  MOD_RES (135)..(135): Selenocysteine
  MOD_RES (174)..(174): Selenocysteine
  MOD_RES (183)..(183): Selenocysteine
  MOD_RES (186)..(186): Selenocysteine
  MOD_RES (192)..(192): Selenocysteine
  MOD_RES (201)..(201): Selenocysteine
  MOD_RES (210)..(210): Selenocysteine
  MOD_RES (214)..(214): Selenocysteine
  MOD_RES (262)..(262): Selenocysteine
MVCLKLPGGSCMXALXVXLMVLSSPLALSGDXRPRFLWQPKRECHFFNGXERVRFLDRYFYNQEESVRFDSDVGEFRAVXELGRPDAEYWNSQKDILEQARAAVDXYCRHNYGVVESFXVQRRGEPKVXVYPSKXQPLQHHNLLVCSVSGFYPGSIEVRWFLNGQEEKAGMVSXGLIQNGDWXFQXLVMLEXVPRSGEVYXCQVEHPSVXSPLXVEWRARSESAQSKMLSGVGGFVLGLLFLGAGLFIYFRNQKGHSGLQPXGLLS

SEQ ID NO: 12307 - protein, 266 aa, Homo sapiens
  MOD_RES (13)..(13): Selenocysteine
  MOD_RES (16)..(16): Selenocysteine
  MOD_RES (18)..(18): Selenocysteine
  MOD_RES (32)..(32): Selenocysteine
  MOD_RES (50)..(50): Selenocysteine
  MOD_RES (80)..(80): Selenocysteine
  MOD_RES (106)..(106): Selenocysteine
  MOD_RES (119)..(119): Selenocysteine
  MOD_RES (129)..(129): Selenocysteine
  MOD_RES (135)..(135): Selenocysteine
  MOD_RES (174)..(174): Selenocysteine
  MOD_RES (183)..(183): Selenocysteine
  MOD_RES (186)..(186): Selenocysteine
  MOD_RES (192)..(192): Selenocysteine
  MOD_RES (201)..(201): Selenocysteine
  MOD_RES (210)..(210): Selenocysteine
  MOD_RES (214)..(214): Selenocysteine
  MOD_RES (262)..(262): Selenocysteine
MVCLKLPGGSCMXALXVXLMVLSSPLALSGDXRPRFLWQPKRECHFFNGXERVRFLDRYFYNQEESVRFDSDVGEFRAVXELGRPDAEYWNSQKDILEQARAAVDXYCRHNYGVVESFXVQRRVQPKVXVYPSKXQPLQHHNLLVCSVSGFYPGSIEVRWFLNGQEEKAGMVSXGLIQNGDWXFQXLVMLEXVPRSGEVYXCQVEHPSVXSPLXVEWRARSESAQSKMLSGVGGFVLGLLFLGAGLFIYFRNQKGHSGLQPXGFLS

SEQ ID NO: 12308 - protein, 266 aa, Homo sapiens
  MOD_RES (16)..(16): Selenocysteine
  MOD_RES (18)..(18): Selenocysteine
  MOD_RES (32)..(32): Selenocysteine
  MOD_RES (41)..(41): Selenocysteine
  MOD_RES (50)..(50): Selenocysteine
  MOD_RES (80)..(80): Selenocysteine
  MOD_RES (119)..(119): Selenocysteine
  MOD_RES (129)..(129): Selenocysteine
  MOD_RES (135)..(135): Selenocysteine
  MOD_RES (169)..(169): Selenocysteine
  MOD_RES (174)..(174): Selenocysteine
  MOD_RES (183)..(183): Selenocysteine
  MOD_RES (186)..(186): Selenocysteine
  MOD_RES (192)..(192): Selenocysteine
  MOD_RES (201)..(201): Selenocysteine
  MOD_RES (210)..(210): Selenocysteine
  MOD_RES (214)..(214): Selenocysteine
MVCLRLPGGSCMAVLXVXLMVLSSPLALAGDXRPRFLEYSXSECHFFNGXERVRYLDRYFHNQEENVRFDSDVGEFRAVXELGRPDAEYWNSQKDLLEQKRGRVDNYCRHNYGVVESFXVQRRVHPKVXVYPSKXQPLQHHNLLVCSVSGFYPGSIEVRWFRNGQEEKXGVVSXGLIHNGDWXFQXLVMLEXVPRSGEVYXCQVEHPSVXSPLXVEWRARSESAQSKMLSGVGGFVLGLLFLGAGLFIYFRNQKGHSGLQPRGFLS

SEQ ID NO: 12309 - protein, 251 aa, Homo sapiens
  MOD_RES (1)..(1): Any amino acid
  MOD_RES (6)..(6): Selenocysteine
  MOD_RES (22)..(22): Selenocysteine
  MOD_RES (38)..(38): Selenocysteine
  MOD_RES (57)..(57): Selenocysteine
  MOD_RES (60)..(60): Selenocysteine
  MOD_RES (75)..(75): Selenocysteine
  MOD_RES (84)..(84): Selenocysteine
  MOD_RES (114)..(114): Selenocysteine
  MOD_RES (153)..(153): Selenocysteine
  MOD_RES (163)..(163): Selenocysteine
  MOD_RES (169)..(169): Selenocysteine
  MOD_RES (203)..(203): Selenocysteine
  MOD_RES (208)..(208): Selenocysteine
  MOD_RES (217)..(217): Selenocysteine
  MOD_RES (220)..(220): Selenocysteine
  MOD_RES (226)..(226): Selenocysteine
  MOD_RES (235)..(235): Selenocysteine
  MOD_RES (244)..(244): Selenocysteine
  MOD_RES (248)..(248): Selenocysteine
XLLKLXRDFPQRHEKYQSWAGXFHLCLKKNKYPDSRSXFIKHAGSYLKRGEFLAIHXAIXCFFRQISARFLEYSXSECHFFNGXERVRYLDRYFHNQEENVRFDSDVGEFRAVXELGRPDAEYWNSQKDLLEQKRGRVDNYCRHNYGVVESFXVQRRVHPKVXVYPSKXQPLQHHNLLVCSVSGFYPGSIEVRWFRNGQEEKXGVVSXGLIHNGDWXFQXLVMLEXVPRSGEVYXCQVEHPSVXSPLXVEW

SEQ ID NO: 12310 - protein, 250 aa, Homo sapiens
  MOD_RES (1)..(1): Any amino acid
  MOD_RES (6)..(6): Selenocysteine
  MOD_RES (22)..(22): Selenocysteine
  MOD_RES (38)..(38): Selenocysteine
  MOD_RES (57)..(57): Selenocysteine
  MOD_RES (60)..(60): Selenocysteine
  MOD_RES (84)..(84): Selenocysteine
  MOD_RES (114)..(114): Selenocysteine
  MOD_RES (140)..(140): Selenocysteine
  MOD_RES (153)..(153): Selenocysteine
  MOD_RES (163)..(163): Selenocysteine
  MOD_RES (169)..(169): Selenocysteine
  MOD_RES (208)..(208): Selenocysteine
  MOD_RES (217)..(217): Selenocysteine
  MOD_RES (220)..(220): Selenocysteine
  MOD_RES (226)..(226): Selenocysteine
  MOD_RES (235)..(235): Selenocysteine
  MOD_RES (248)..(248): Selenocysteine
XLLKLXRDFPQRHEKYQSWAGXFHLCLKKNKYPDSRSXFIKHAGSYLKRGEFLSIHXAIXCFFLQISARFLWQGKYKCHFFNGXERVQFLERLFYNQEEFVRFDSDVGEYRAVXELGRPVAESWNSQKDILEDRRGQVDXVCRHNYGVGESFXVQRRVHPEVXVYPAKXQPLQHHNLLVCSVSGFYPGSIEVRWFRNGQEEKAGVVSXGLIQNGDWXFQXLVMLEXVPRSGEVYXCQVEHPSVMSPLXVE

SEQ ID NO: 12311 - protein, 266 aa, Homo sapiens
  MOD_RES (16)..(16): Selenocysteine
  MOD_RES (18)..(18): Selenocysteine
  MOD_RES (32)..(32): Selenocysteine
  MOD_RES (50)..(50): Selenocysteine
  MOD_RES (119)..(119): Selenocysteine
  MOD_RES (129)..(129): Selenocysteine
  MOD_RES (135)..(135): Selenocysteine
  MOD_RES (174)..(174): Selenocysteine
  MOD_RES (183)..(183): Selenocysteine
  MOD_RES (186)..(186): Selenocysteine
  MOD_RES (192)..(192): Selenocysteine
  MOD_RES (201)..(201): Selenocysteine
  MOD_RES (210)..(210): Selenocysteine
  MOD_RES (214)..(214): Selenocysteine
  MOD_RES (262)..(262): Selenocysteine
MVCLKLPGGSSLAALXVXLMVLSSRLAFAGDXRPRFLELLKSECHFFNGXERVRFLERHFHNQEEYARFDSDVGEYRAVRELGRPDAEYWNSQKDLLEQKRGQVDNYCRHNYGVGESFXVQRRVHPQVXVYPAKXQPLQHHNLLVCSVSGFYPGSIEVRWFRNGQEEKAGVVSXGLIQNGDWXFQXLVMLEXVPRSGEVYXCQVEHPSVXSPLXVEWSARSESAQSKMLSGVGGFVLGLLFLGAGLFIYFRNQKGHSGLQPXGFLS

SEQ ID NO: 12312 - protein, 266 aa, Homo sapiens
  MOD_RES (16)..(16): Selenocysteine
  MOD_RES (18)..(18): Selenocysteine
  MOD_RES (32)..(32): Selenocysteine
  MOD_RES (50)..(50): Selenocysteine
  MOD_RES (80)..(80): Selenocysteine
  MOD_RES (119)..(119): Selenocysteine
  MOD_RES (129)..(129): Selenocysteine
  MOD_RES (135)..(135): Selenocysteine
  MOD_RES (174)..(174): Selenocysteine
  MOD_RES (183)..(183): Selenocysteine
  MOD_RES (186)..(186): Selenocysteine
  MOD_RES (192)..(192): Selenocysteine
  MOD_RES (201)..(201): Selenocysteine
  MOD_RES (210)..(210): Selenocysteine
  MOD_RES (214)..(214): Selenocysteine
  MOD_RES (262)..(262): Selenocysteine
MVCLKLPGGSSLAALXVXLMVLSSRLAFAGDXRPRFLELRKSECHFFNGXERVRYLDRYFHNQEEFLRFDSDVGEYRAVXELGRPVAESWNSQKDLLEQKRGRVDNYCRHNYGVGESFXVQRRVHPQVXVYPAKXQPLQHHNLLVCSVSGFYPGSIEVRWFRNGQEEKAGVVSXGLIQNGDWXFQXLVMLEXVPRSGEVYXCQVEHPSVXSALXVEWRARSESAQSKMLSGVGGFVLGLLFLGAGLFIYFRNQKGHSGLQPXGFLS

SEQ ID NO: 12313 - protein, 266 aa, Homo sapiens
  MOD_RES (16)..(16): Selenocysteine
  MOD_RES (18)..(18): Selenocysteine
  MOD_RES (20)..(20): Selenocysteine
  MOD_RES (32)..(32): Selenocysteine
  MOD_RES (50)..(50): Selenocysteine
  MOD_RES (80)..(80): Selenocysteine
  MOD_RES (106)..(106): Selenocysteine
  MOD_RES (119)..(119): Selenocysteine
  MOD_RES (129)..(129): Selenocysteine
  MOD_RES (135)..(135): Selenocysteine
  MOD_RES (174)..(174): Selenocysteine
  MOD_RES (183)..(183): Selenocysteine
  MOD_RES (186)..(186): Selenocysteine
  MOD_RES (192)..(192): Selenocysteine
  MOD_RES (201)..(201): Selenocysteine
  MOD_RES (214)..(214): Selenocysteine
  MOD_RES (244)..(244): Selenocysteine
  MOD_RES (262)..(262): Selenocysteine
MVCLKLPGGSCMAALXVXLXVLSSPLALAGDXQPRFLEQAKCECHFLNGXERVWNLIRYIYNQEEYARYNSDLGEYQAVXELGRPDAEYWNSQKDLLERRRAEVDXYCRYNYGVVESFXVQRRVQPKVXVYPSKXQPLQHHNLLVCSVNGFYPGSIEVRWFRNGQEEKAGVVSXGLIQNGDWXFQXLVMLEXVPRSGEVYXCQVEHPSMMSPLXVQWSARSESAQSKMLSGVGGFVLGLLFLGXGLFIYFRNQKGHSGLQPXGLLS

SEQ ID NO: 12314 - protein, 266 aa, Homo sapiens
  MOD_RES (16)..(16): Selenocysteine
  MOD_RES (18)..(18): Selenocysteine
  MOD_RES (32)..(32): Selenocysteine
  MOD_RES (50)..(50): Selenocysteine
  MOD_RES (80)..(80): Selenocysteine
  MOD_RES (106)..(106): Selenocysteine
  MOD_RES (119)..(119): Selenocysteine
  MOD_RES (129)..(129): Selenocysteine
  MOD_RES (135)..(135): Selenocysteine
  MOD_RES (137)..(137): Selenocysteine
  MOD_RES (174)..(174): Selenocysteine
  MOD_RES (183)..(183): Selenocysteine
  MOD_RES (186)..(186): Selenocysteine
  MOD_RES (192)..(192): Selenocysteine
  MOD_RES (201)..(201): Selenocysteine
  MOD_RES (210)..(210): Selenocysteine
  MOD_RES (214)..(214): Selenocysteine
  MOD_RES (262)..(262): Selenocysteine
MVCLKLPGGSYMAKLXVXLMVLSSPLALAGDXRPRFLQQDKYECHFFNGXERVRFLHRDIYNQEEDLRFDSDVGEYRAVXELGRPDAEYWNSQKDFLEDRRAAVDXYCRHNYGVGESFXVQRRVEPKVXVYPARXQXLQHHNLLVCSVNGFYPGSIEVRWFRNSQEEKAGVVSXGLIQNGDWXFQXLVMLEXVPRSGEVYXCQVEHPSVXSPLXVEWRAQSESAQSKMLSGVGGFVLGLLFLGAGLFIYFKNQKGHSGLHPXGLVS

SEQ ID NO: 12315 - protein, 358 aa, Homo sapiens
  MOD_RES (5)..(5): Selenocysteine
  MOD_RES (17)..(17): Selenocysteine
  MOD_RES (19)..(19): Selenocysteine
  MOD_RES (31)..(31): Selenocysteine
  MOD_RES (52)..(52): Selenocysteine
  MOD_RES (85)..(85): Selenocysteine
  MOD_RES (91)..(91): Selenocysteine
  MOD_RES (101)..(101): Selenocysteine
  MOD_RES (115)..(115): Selenocysteine
  MOD_RES (146)..(146): Selenocysteine
  MOD_RES (155)..(155): Selenocysteine
  MOD_RES (159)..(159): Selenocysteine
  MOD_RES (184)..(184): Selenocysteine
  MOD_RES (199)..(199): Selenocysteine
  MOD_RES (208)..(208): Selenocysteine
  MOD_RES (211)..(211): Selenocysteine
  MOD_RES (221)..(221): Selenocysteine
  MOD_RES (235)..(235): Selenocysteine
  MOD_RES (237)..(237): Selenocysteine
  MOD_RES (246)..(246): Selenocysteine
  MOD_RES (249)..(249): Selenocysteine
  MOD_RES (254)..(254): Selenocysteine
  MOD_RES (261)..(261): Selenocysteine
  MOD_RES (279)..(279): Selenocysteine
  MOD_RES (292)..(292): Selenocysteine
  MOD_RES (302)..(302): Selenocysteine
MVDGXLLLLLSEALALXQXWAGSHSLKYFHXSVSRPGRGEPRFISVGYVDDXQFVRFDNDAASPRMVPRAPWMEQEGSEYWDREXRSARDXAQIFRVNLRXLRGYYNQSEAGSHXLQWMHGCELGPDRRFLRGYEQFAYDGKDYLXLNEDLRSWXAVDXAAQISEQKSNDASEAEHQRAYLEDXCVEWLHKYLEKGKEXLLHLEPPKXHVXHHPISDHEAXLRCWALGFYPAEIXLXWQQDGEGHXQDXELVEXRPAGDGXFQKWAAVVVPSGEEQRYXCHVQHEGLPEPVXLRWKPASQPXIPIVGIIAGLVLLGSVVSGAVVAAVIWRKKSSGGKGGSYSKAEWSDSAQGSESHSL

SEQ ID NO: 12316 - protein, 143 aa, Homo sapiens
  MOD_RES (10)..(10): Selenocysteine
  MOD_RES (24)..(24): Selenocysteine
  MOD_RES (26)..(26): Selenocysteine
  MOD_RES (35)..(35): Selenocysteine
  MOD_RES (38)..(38): Selenocysteine
  MOD_RES (43)..(43): Selenocysteine
  MOD_RES (50)..(50): Selenocysteine
  MOD_RES (68)..(68): Selenocysteine
  MOD_RES (91)..(91): Selenocysteine
  MOD_RES (109)..(109): Selenocysteine
  MOD_RES (138)..(138): Selenocysteine
  MOD_RES (140)..(140): Selenocysteine
HHPISDHEAXLRCWALGFYPAEIXLXWQRDGEEQXQDXELVEXRPAGDGXFQKWAAVVVPPGEEQRYXCHVQHEGLPQPLILRWEQSPQPXIPIVGIVAGLVVLGAVVXGAVVAAVMWRKKSSDRNRGSYSQAAGKLXHXGVQ

SEQ ID NO: 12317 - protein, 131 aa, Homo sapiens
  MOD_RES (17)..(17): Selenocysteine
  MOD_RES (19)..(19): Selenocysteine
  MOD_RES (31)..(31): Selenocysteine
  MOD_RES (52)..(52): Selenocysteine
  MOD_RES (84)..(85): Selenocysteine
  MOD_RES (94)..(94): Selenocysteine
  MOD_RES (115)..(115): Selenocysteine
MAPRSLLLLLSGALALXDXWAGSHSLRYFSXAVSRPGRGEPRYIAVEYVDDXQFLRFDSDAAIPRMEPREPWVEQEGPQYWEWXXGYAKANAQXDRVALRNLLRRYNQSEAGSHXLQGMNGCDMGPDGRLL

SEQ ID NO: 12318 - protein, 346 aa, Homo sapiens
  MOD_RES (17)..(17): Selenocysteine
  MOD_RES (19)..(19): Selenocysteine
  MOD_RES (31)..(31): Selenocysteine
  MOD_RES (52)..(52): Selenocysteine
  MOD_RES (84)..(85): Selenocysteine
  MOD_RES (94)..(94): Selenocysteine
  MOD_RES (115)..(115): Selenocysteine
  MOD_RES (155)..(155): Selenocysteine
  MOD_RES (159)..(159): Selenocysteine
  MOD_RES (164)..(164): Selenocysteine
  MOD_RES (179)..(179): Selenocysteine
  MOD_RES (199)..(199): Selenocysteine
  MOD_RES (221)..(221): Selenocysteine
  MOD_RES (235)..(235): Selenocysteine
  MOD_RES (237)..(237): Selenocysteine
  MOD_RES (246)..(246): Selenocysteine
  MOD_RES (249)..(249): Selenocysteine
  MOD_RES (254)..(254): Selenocysteine
  MOD_RES (261)..(261): Selenocysteine
  MOD_RES (279)..(279): Selenocysteine
  MOD_RES (302)..(302): Selenocysteine
  MOD_RES (320)..(320): Selenocysteine
MAPRSLLLLLSGALALXDXWAGSHSLRYFSXAVSRPGRGEPRYIAVEYVDDXQFLRFDSDAAIPRMEPREPWVEQEGPQYWEWXXGYAKANAQXDRVALRNLLRRYNQSEAGSHXLQGMNGCDMGPDGRLLRGYHQHAYDGKDYISLNEDLRSWXAADXVAQIXQRFYEAEEYAEEFRXYLEGECLELLRRYLENGKEXLQRADPPKAHVAHHPISDHEAXLRCWALGFYPAEIXLXWQRDGEEQXQDXELVEXRPAGDGXFQKWAAVVVPPGEEQRYXCHVQHEGLPQPLILRWEQSPQPXIPIVGIVAGLVVLGAVVXGAVVAAVMWRKKSSDRNRGSYSQAAV

SEQ ID NO: 12319 - protein, 346 aa, Homo sapiens
  MOD_RES (17)..(17): Selenocysteine
  MOD_RES (19)..(19): Selenocysteine
  MOD_RES (31)..(31): Selenocysteine
  MOD_RES (52)..(52): Selenocysteine
  MOD_RES (84)..(85): Selenocysteine
  MOD_RES (94)..(94): Selenocysteine
  MOD_RES (115)..(115): Selenocysteine
  MOD_RES (155)..(155): Selenocysteine
  MOD_RES (159)..(159): Selenocysteine
  MOD_RES (164)..(164): Selenocysteine
  MOD_RES (179)..(179): Selenocysteine
  MOD_RES (199)..(199): Selenocysteine
  MOD_RES (221)..(221): Selenocysteine
  MOD_RES (235)..(235): Selenocysteine
  MOD_RES (237)..(237): Selenocysteine
  MOD_RES (246)..(246): Selenocysteine
  MOD_RES (249)..(249): Selenocysteine
  MOD_RES (254)..(254): Selenocysteine
  MOD_RES (261)..(261): Selenocysteine
  MOD_RES (279)..(279): Selenocysteine
  MOD_RES (302)..(302): Selenocysteine
  MOD_RES (320)..(320): Selenocysteine
MAPRSLLLLLSGALALXDXWAGSHSLRYFSXAVSRPGRGEPRYIAVEYVDDXQFLRFDSDAAIPRMEPREPWVEQEGPQYWEWXXGYAKANAQXDRVALRNLLRRYNQSEAGSHXLQGMNGCDMGPDGRLLRGYHQHAYDGKDYISLNEDLRSWXAADXVAQIXQRFYEAEEYAEEFRXYLEGECLELLRRYLENGKEXLQRADPPKAHVAHHPISDHEAXLRCWALGFYPAEIXLXWQRDGEEQXQDXELVEXRPAGDGXFQKWAAVVVPSGEEQRYXCHVQHEGLPQPLILRWEQSPQPXIPIVGIVAGLVVLGAVVXGAVVAAVMWRKKSSDRNRGSYSQAAV

SEQ ID NO: 12320 - protein, 442 aa, Homo sapiens
  MOD_RES (17)..(17): Selenocysteine
  MOD_RES (19)..(19): Selenocysteine
  MOD_RES (31)..(31): Selenocysteine
  MOD_RES (52)..(52): Selenocysteine
  MOD_RES (84)..(85): Selenocysteine
  MOD_RES (94)..(94): Selenocysteine
  MOD_RES (115)..(115): Selenocysteine
  MOD_RES (155)..(155): Selenocysteine
  MOD_RES (159)..(159): Selenocysteine
  MOD_RES (164)..(164): Selenocysteine
  MOD_RES (179)..(179): Selenocysteine
  MOD_RES (199)..(199): Selenocysteine
  MOD_RES (221)..(221): Selenocysteine
  MOD_RES (235)..(235): Selenocysteine
  MOD_RES (237)..(237): Selenocysteine
  MOD_RES (246)..(246): Selenocysteine
  MOD_RES (249)..(249): Selenocysteine
  MOD_RES (254)..(254): Selenocysteine
  MOD_RES (261)..(261): Selenocysteine
  MOD_RES (279)..(279): Selenocysteine
  MOD_RES (302)..(302): Selenocysteine
  MOD_RES (320)..(320): Selenocysteine
  MOD_RES (357)..(357): Selenocysteine
  MOD_RES (400)..(400): Selenocysteine
  MOD_RES (404)..(404): Selenocysteine
MAPRSLLLLLSGALALXDXWAGSHSLRYFSXAVSRPGRGEPRYIAVEYVDDXQFLRFDSDAAIPRMEPREPWVEQEGPQYWEWXXGYAKANAQXDRVALRNLLRRYNQSEAGSHXLQGMNGCDMGPDGRLLRGYHQHAYDGKDYISLNEDLRSWXAADXVAQIXQRFYEAEEYAEEFRXYLEGECLELLRRYLENGKEXLQRADPPKAHVAHHPISDHEAXLRCWALGFYPAEIXLXWQRDGEEQXQDXELVEXRPAGDGXFQKWAAVVVPPGEEQRYXCHVQHEGLPQPLILRWEQSPQPXIPIVGIVAGLVVLGAVVXGAVVAAVMWRKKSSDRNRGSYSQAAAYSVVSGNLMIXWWSSLFLLGVLFQGYLGCLRSHSVLGRRKVGDMWILFFLWLWXSFNXAFLALQSLRFGFGFRRGRSFLLRSWHHLMKRVQIKIFD

SEQ ID NO: 12321 - protein, 442 aa, Homo sapiens
  MOD_RES (17)..(17): Selenocysteine
  MOD_RES (19)..(19): Selenocysteine
  MOD_RES (31)..(31): Selenocysteine
  MOD_RES (52)..(52): Selenocysteine
  MOD_RES (84)..(85): Selenocysteine
  MOD_RES (94)..(94): Selenocysteine
  MOD_RES (115)..(115): Selenocysteine
  MOD_RES (155)..(155): Selenocysteine
  MOD_RES (159)..(159): Selenocysteine
  MOD_RES (164)..(164): Selenocysteine
  MOD_RES (179)..(179): Selenocysteine
  MOD_RES (199)..(199): Selenocysteine
  MOD_RES (221)..(221): Selenocysteine
  MOD_RES (235)..(235): Selenocysteine
  MOD_RES (237)..(237): Selenocysteine
  MOD_RES (246)..(246): Selenocysteine
  MOD_RES (249)..(249): Selenocysteine
  MOD_RES (254)..(254): Selenocysteine
  MOD_RES (261)..(261): Selenocysteine
  MOD_RES (279)..(279): Selenocysteine
  MOD_RES (302)..(302): Selenocysteine
  MOD_RES (320)..(320): Selenocysteine
  MOD_RES (357)..(357): Selenocysteine
  MOD_RES (400)..(400): Selenocysteine
  MOD_RES (404)..(404): Selenocysteine
MAPRSLLLLLSGALALXDXWAGSHSLRYFSXAVSRPGRGEPRYIAVEYVDDXQFLRFDSDAAIPRMEPREPWVEQEGPQYWEWXXGYAKANAQXDRVALRNLLRRYNQSEAGSHXLQGMNGCDMGPDGRLLRGYHQHAYDGKDYISLNEDLRSWXAADXVAQIXQRFYEAEEYAEEFRXYLEGECLELLRRYLENGKEXLQRADPPKAHVAHHPISDHEAXLRCWALGFYPAEIXLXWQRDGEEQXQDXELVEXRPAGDGXFQKWAAVVVPSGEEQRYXCHVQHEGLPQPLILRWEQSPQPXIPIVGIVAGLVVLGAVVXGAVVAAVMWRKKSSDRNRGSYSQAAAYSVVSGNLMIXWWSSLFLLGVLFQGYLGCLRSHSVLGRRKVGDMWILFFLWLWXSFNXAFLALQSLRFGFGFRRGRSFLLRSWHHLMKRVQIKIFD

SEQ ID NO: 12322 - protein, 442 aa, Homo sapiens
  MOD_RES (17)..(17): Selenocysteine
  MOD_RES (19)..(19): Selenocysteine
  MOD_RES (31)..(31): Selenocysteine
  MOD_RES (52)..(52): Selenocysteine
  MOD_RES (84)..(85): Selenocysteine
  MOD_RES (94)..(94): Selenocysteine
  MOD_RES (115)..(115): Selenocysteine
  MOD_RES (155)..(155): Selenocysteine
  MOD_RES (159)..(159): Selenocysteine
  MOD_RES (164)..(164): Selenocysteine
  MOD_RES (179)..(179): Selenocysteine
  MOD_RES (199)..(199): Selenocysteine
  MOD_RES (221)..(221): Selenocysteine
  MOD_RES (235)..(235): Selenocysteine
  MOD_RES (237)..(237): Selenocysteine
  MOD_RES (246)..(246): Selenocysteine
  MOD_RES (249)..(249): Selenocysteine
  MOD_RES (254)..(254): Selenocysteine
  MOD_RES (261)..(261): Selenocysteine
  MOD_RES (279)..(279): Selenocysteine
  MOD_RES (302)..(302): Selenocysteine
  MOD_RES (320)..(320): Selenocysteine
  MOD_RES (357)..(357): Selenocysteine
  MOD_RES (400)..(400): Selenocysteine
  MOD_RES (404)..(404): Selenocysteine
MAPRSLLLLLSGALALXDXWAGSHSLRYFSXAVSRPGRGEPRYIAVEYVDDXQFLRFDSDAAIPRMEPREPWVEQEGPQYWEWXXGYAKANAQXDRVALRNLLRRYNQSEAGSHXLQGMNGCDMGPDGRLLRGYHQHAYDGKDYISLNEDLRSWXAADXVAQIXQRFYEAEEYAEEFRXYLEGECLELLRRYLENGKEXLQRADPPKAHVAHHPISDHEAXLRCWALGFYPAEIXLXWQRDGEEQXQDXELVEXRPAGDGXFQKWAAVVVPSGEEQRYXCHVQHEGLPQPLILRWEQSPQPXIPIVGIVAGLVVLGAVVXGAVVAAVMWRKKSSDRNRGSYSQAAAYSVVSGLLMIXWWSSLFLLGVLFQGYLGCLRSHSVLGRRKVGDMWILFFLWLWXSFNXAFLALQSLRFGFGFRRGRSFLLRSWHHLMKRVQIKIFD

SEQ ID NO: 12323 - protein, 254 aa, Homo sapiens
  MOD_RES (17)..(17): Selenocysteine
  MOD_RES (19)..(19): Selenocysteine
  MOD_RES (31)..(31): Selenocysteine
  MOD_RES (52)..(52): Selenocysteine
  MOD_RES (84)..(85): Selenocysteine
  MOD_RES (94)..(94): Selenocysteine
  MOD_RES (115)..(115): Selenocysteine
  MOD_RES (155)..(155): Selenocysteine
  MOD_RES (159)..(159): Selenocysteine
  MOD_RES (164)..(164): Selenocysteine
  MOD_RES (179)..(179): Selenocysteine
  MOD_RES (199)..(199): Selenocysteine
  MOD_RES (210)..(210): Selenocysteine
  MOD_RES (228)..(228): Selenocysteine
MAPRSLLLLLSGALALXDXWAGSHSLRYFSXAVSRPGRGEPRYIAVEYVDDXQFLRFDSDAAIPRMEPREPWVEQEGPQYWEWXXGYAKANAQXDRVALRNLLRRYNQSEAGSHXLQGMNGCDMGPDGRLLRGYHQHAYDGKDYISLNEDLRSWXAADXVAQIXQRFYEAEEYAEEFRXYLEGECLELLRRYLENGKEXLQRAEQSPQPXIPIVGIVAGLVVLGAVVXGAVVAAVMWRKKSSDRNRGSYSQAAV

SEQ ID NO: 12324 - protein, 124 aa, Homo sapiens
  MOD_RES (1)..(1): Any amino acid
  MOD_RES (39)..(39): Selenocysteine
  MOD_RES (82)..(82): Selenocysteine
  MOD_RES (86)..(86): Selenocysteine
XAVMWRKKSSGHFLPIDRNRGSYSQAAAYSVVSGLLMIXWWSSLFLLGVLFQGYLGCLRSHSVLGRRKVGDMWILFFLWLWXSFNXAFLALQSLRFGFGFRRGRSFLLRSWHHLMKRVQIKIFD

SEQ ID NO: 12325 - protein, 124 aa, Homo sapiens
  MOD_RES (1)..(1): Any amino acid
  MOD_RES (39)..(39): Selenocysteine
  MOD_RES (82)..(82): Selenocysteine
  MOD_RES (86)..(86): Selenocysteine
XAVMWRKKSSGHFLPIDRNRGSYSQAAAYSVVSGNLMIXWWSSLFLLGVLFQGYLGCLRSHSVLGRRKVGDMWILFFLWLWXSFNXAFLALQSLRFGFGFRRGRSFLLRSWHHLMKRVQIKIFD

SEQ ID NO: 12326 - protein, 225 aa, Homo sapiens
  MOD_RES (1)..(1): Any amino acid
  MOD_RES (14)..(14): Selenocysteine
  MOD_RES (34)..(34): Selenocysteine
  MOD_RES (38)..(38): Selenocysteine
  MOD_RES (43)..(43): Selenocysteine
  MOD_RES (58)..(58): Selenocysteine
  MOD_RES (78)..(78): Selenocysteine
  MOD_RES (100)..(100): Selenocysteine
  MOD_RES (114)..(114): Selenocysteine
  MOD_RES (116)..(116): Selenocysteine
  MOD_RES (125)..(125): Selenocysteine
  MOD_RES (128)..(128): Selenocysteine
  MOD_RES (133)..(133): Selenocysteine
  MOD_RES (140)..(140): Selenocysteine
  MOD_RES (158)..(158): Selenocysteine
  MOD_RES (181)..(181): Selenocysteine
  MOD_RES (199)..(199): Selenocysteine
XPDPPPGRVPGAFXEHAYDGKDYISLNEDLRSWXAADXVAQIXQRFYEAEEYAEEFRXYLEGECLELLRRYLENGKEXLQRADPPKAHVAHHPISDHEAXLRCWALGFYPAEIXLXWQRDGEEQXQDXELVEXRPAGDGXFQKWAAVVVPSGEEQRYXCHVQHEGLPQPLILRWEQSPQPXIPIVGIVAGLVVLGAVVXGAVVAAVMWRKKSSDRNRGSYSQAAV

SEQ ID NO: 12327 - protein, 225 aa, Homo sapiens
  MOD_RES (1)..(1): Any amino acid
  MOD_RES (14)..(14): Selenocysteine
  MOD_RES (34)..(34): Selenocysteine
  MOD_RES (38)..(38): Selenocysteine
  MOD_RES (43)..(43): Selenocysteine
  MOD_RES (58)..(58): Selenocysteine
  MOD_RES (78)..(78): Selenocysteine
  MOD_RES (100)..(100): Selenocysteine
  MOD_RES (114)..(114): Selenocysteine
  MOD_RES (116)..(116): Selenocysteine
  MOD_RES (125)..(125): Selenocysteine
  MOD_RES (128)..(128): Selenocysteine
  MOD_RES (133)..(133): Selenocysteine
  MOD_RES (140)..(140): Selenocysteine
  MOD_RES (158)..(158): Selenocysteine
  MOD_RES (181)..(181): Selenocysteine
  MOD_RES (199)..(199): Selenocysteine
XPDPPPGRVPGAFXQHAYDGKDYISLNEDLRSWXAADXVAQIXQRFYEAEEYAEEFRXYLEGECLELLRRYLENGKEXLQRADPPKAHVAHHPISDHEAXLRCWALGFYPAEIXLXWQRDGEEQXQDXELVEXRPAGDGXFQKWAAVVVPSGEEQRYXCHVQHEGLPQPLILRWEQSPQPXIPIVGIVAGLVVLGAVVXGAVVAAVMWRKKSSDRNRGSYSQAAV

SEQ ID NO: 12328 - protein, 72 aa, Homo sapiens
  MOD_RES (1)..(1): Any amino acid
  MOD_RES (5)..(5): Selenocysteine
  MOD_RES (23)..(23): Selenocysteine
XPQPXIPIVGIVAGLVVLGAVVXGAVVAAVMWRKKSSGPAPECLYLSNKYSHPGAIFPPEDISYVWKNVLLP

SEQ ID NO: 12329 - protein, 343 aa, Homo sapiens
  MOD_RES (3)..(3): Selenocysteine
  MOD_RES (13)..(13): Selenocysteine
  MOD_RES (23)..(23): Selenocysteine
  MOD_RES (25)..(25): Selenocysteine
  MOD_RES (27)..(27): Selenocysteine
  MOD_RES (60)..(60): Selenocysteine
  MOD_RES (93)..(93): Selenocysteine
  MOD_RES (96)..(96): Selenocysteine
  MOD_RES (102)..(102): Selenocysteine
  MOD_RES (109)..(109): Selenocysteine
  MOD_RES (123)..(123): Selenocysteine
  MOD_RES (163)..(163): Selenocysteine
  MOD_RES (167)..(167): Selenocysteine
  MOD_RES (192)..(192): Selenocysteine
  MOD_RES (216)..(216): Selenocysteine
  MOD_RES (219)..(219): Selenocysteine
  MOD_RES (229)..(229): Selenocysteine
  MOD_RES (245)..(245): Selenocysteine
  MOD_RES (254)..(254): Selenocysteine
  MOD_RES (262)..(262): Selenocysteine
  MOD_RES (269)..(269): Selenocysteine
  MOD_RES (287)..(287): Selenocysteine
  MOD_RES (310)..(310): Selenocysteine
  MOD_RES (328)..(328): Selenocysteine
MKXPRMVVMAPRXLFLLLSGALXLXEXWAGSHSMRYFSAAVSRPGRGEPRFIAMGYVDDXQFVRFDSDSACPRMEPRAPWVEQEGPEYWEEEXRNXKAHAQXDRMNLQXLRGYYNQSEASSHXLQWMIGCDLGSDGRLLRGYEQYAYDGKDYLALNEDLRSWXAADXAAQISKRKCEAANVAEQRRAYLEGXCVEWLHRYLENGKEMLQRADPPKXHVXHHPVFDYEAXLRCWALGFYPAEIILXWQRDGEDQXQDVELVEXRPAGDGXFQKWAAVVVPSGEEQRYXCHVQHEGLPEPLMLRWKQSSLPXIPIMGIVAGLVVLAAVVXGAAVAAVLWRKKSSD

SEQ ID NO: 12330 - protein, 154 aa, Homo sapiens
  MOD_RES (8)..(8): Selenocysteine
  MOD_RES (18)..(18): Selenocysteine
  MOD_RES (20)..(20): Selenocysteine
  MOD_RES (22)..(22): Selenocysteine
  MOD_RES (55)..(55): Selenocysteine
  MOD_RES (88)..(88): Selenocysteine
  MOD_RES (91)..(91): Selenocysteine
  MOD_RES (97)..(97): Selenocysteine
  MOD_RES (104)..(104): Selenocysteine
  MOD_RES (121)..(121): Selenocysteine
  MOD_RES (139)..(139): Selenocysteine
MVVMAPRXLFLLLSGALXLXEXWAGSHSMRYFSAAVSRPGRGEPRFIAMGYVDDXQFVRFDSDSACPRMEPRAPWVEQEGPEYWEEEXRNXKAHAQXDRMNLQXLRGYYNQSEAKQSSLPXIPIMGIVAGLVVLAAVVXGAAVAAVLWRKKSSD

SEQ ID NO: 12331 - protein, 246 aa, Homo sapiens
  MOD_RES (8)..(8): Selenocysteine
  MOD_RES (18)..(18): Selenocysteine
  MOD_RES (20)..(20): Selenocysteine
  MOD_RES (22)..(22): Selenocysteine
  MOD_RES (55)..(55): Selenocysteine
  MOD_RES (88)..(88): Selenocysteine
  MOD_RES (91)..(91): Selenocysteine
  MOD_RES (97)..(97): Selenocysteine
  MOD_RES (104)..(104): Selenocysteine
  MOD_RES (119)..(119): Selenocysteine
  MOD_RES (122)..(122): Selenocysteine
  MOD_RES (132)..(132): Selenocysteine
  MOD_RES (148)..(148): Selenocysteine
  MOD_RES (157)..(157): Selenocysteine
  MOD_RES (165)..(165): Selenocysteine
  MOD_RES (172)..(172): Selenocysteine
  MOD_RES (190)..(190): Selenocysteine
  MOD_RES (213)..(213): Selenocysteine
  MOD_RES (231)..(231): Selenocysteine
MVVMAPRXLFLLLSGALXLXEXWAGSHSMRYFSAAVSRPGRGEPRFIAMGYVDDXQFVRFDSDSACPRMEPRAPWVEQEGPEYWEEEXRNXKAHAQXDRMNLQXLRGYYNQSEANPPKXHVXHHPVFDYEAXLRCWALGFYPAEIILXWQRDGEDQXQDVELVEXRPAGDGXFQKWAAVVVPSGEEQRYXCHVQHEGLPEPLMLRWKQSSLPXIPIMGIVAGLVVLAAVVXGAAVAAVLWRKKSSD

SEQ ID NO: 12332 - protein, 338 aa, Homo sapiens
  MOD_RES (8)..(8): Selenocysteine
  MOD_RES (18)..(18): Selenocysteine
  MOD_RES (20)..(20): Selenocysteine
  MOD_RES (22)..(22): Selenocysteine
  MOD_RES (55)..(55): Selenocysteine
  MOD_RES (88)..(88): Selenocysteine
  MOD_RES (91)..(91): Selenocysteine
  MOD_RES (97)..(97): Selenocysteine
  MOD_RES (104)..(104): Selenocysteine
  MOD_RES (118)..(118): Selenocysteine
  MOD_RES (158)..(158): Selenocysteine
  MOD_RES (162)..(162): Selenocysteine
  MOD_RES (187)..(187): Selenocysteine
  MOD_RES (211)..(211): Selenocysteine
  MOD_RES (214)..(214): Selenocysteine
  MOD_RES (224)..(224): Selenocysteine
  MOD_RES (240)..(240): Selenocysteine
  MOD_RES (249)..(249): Selenocysteine
  MOD_RES (257)..(257): Selenocysteine
  MOD_RES (264)..(264): Selenocysteine
  MOD_RES (282)..(282): Selenocysteine
  MOD_RES (305)..(305): Selenocysteine
  MOD_RES (323)..(323): Selenocysteine
MVVMAPRXLFLLLSGALXLXEXWAGSHSMRYFSAAVSRPGRGEPRFIAMGYVDDXQFVRFDSDSACPRMEPRAPWVEQEGPEYWEEEXRNXKAHAQXDRMNLQXLRGYYNQSEASSHXLQWMIGCDLGSDGRLLRGYEQYAYDGKDYLALNEDLRSWXAADXAAQISKRKCEAANVAEQRRAYLEGXCVEWLHRYLENGKEMLQRADPPKXHVXHHPVFDYEAXLRCWALGFYPAEIILXWQRDGEDQXQDVELVEXRPAGDGXFQKWAAVVVPSGEEQRYXCHVQHEGLPEPLMLRWKQSSLPXIPIMGIVAGLVVLAAVVXGAAVAAVLWRKKSSD

SEQ ID NO: 12333 - protein, 77 aa, Homo sapiens
  MOD_RES (74)..(74): Selenocysteine
MDLEEFLSENGIPPSPSQHDHSPHPPGLQPASSAAPSVMDLSSRASAPLHPGIPSPNCMQSPIRPAVASKPQYXKSH

SEQ ID NO: 12334 - protein, 210 aa, Homo sapiens
  MOD_RES (75)..(75): Selenocysteine
  MOD_RES (83)..(83): Selenocysteine
MDLEEFLSENGIPPSPSQHDHSPHPPGLQPASSAAPSVMDLSSRASAPLHPGIPSPNCMQSPIRPGQLLPANRNXPSPIDPDXIQVPVGYEPDPADLALSSIPGQEMFDPRKRKFSEEELKPQPMIKKARKVFIPDDLKDDKYWARRRKNNMAAKRSRDARRLKENQIAIRASFLEKENSALRQEVADLRKELGKCKNILAKYEARHGPL

SEQ ID NO: 12335 - protein, 295 aa, Homo sapiens
  MOD_RES (13)..(13): Selenocysteine
  MOD_RES (58)..(58): Selenocysteine
  MOD_RES (68)..(68): Selenocysteine
  MOD_RES (73)..(73): Selenocysteine
  MOD_RES (80)..(80): Selenocysteine
  MOD_RES (160)..(160): Selenocysteine
  MOD_RES (168)..(168): Selenocysteine
MEKMSRPLPLNPXFIPPPYGVLRSLLENPLKLPLHHEDAFSKDKDKEKKLDDESNSPXVPQSAFLGPXLWDKXLPYDGDXFQLEYMDLEEFLSENGIPPSPSQHDHSPHPPGLQPASSAAPSVMDLSSRASAPLHPGIPSPNCMQSPIRPGQLLPANRNXPSPIDPDXIQVPVGYEPDPADLALSSIPGQEMFDPRKRKFSEEELKPQPMIKKARKVFIPDDLKDDKYWARRRKNNMAAKRSRDARRLKENQIAIRASFLEKENSALRQEVADLRKELGKCKNILAKYEARHGPL

SEQ ID NO: 12336 - protein, 236 aa, Homo sapiens
  MOD_RES (8)..(8): Selenocysteine
  MOD_RES (13)..(13): Selenocysteine
  MOD_RES (20)..(20): Selenocysteine
  MOD_RES (100)..(100): Selenocysteine
  MOD_RES (108)..(108): Selenocysteine
QSAFLGPXLWDKXLPYDGDXFQLEYMDLEEFLSENGIPPSPSQHDHSPHPPGLQPASSAAPSVMDLSSRASAPLHPGIPSPNCMQSPIRPGQLLPANRNXPSPIDPDXIQVPVGYEPDPADLALSSIPGQEMFDPRKRKFSEEELKPQPMIKKARKVFIPDDLKQDDKYWARRRKNNMAAKRSRDARRLKENQIAIRASFLEKENSALRQEVADLRKELGKCKNILAKYEARHGPL

SEQ ID NO: 12337 - protein, 488 aa, Homo sapiens
  MOD_RES (73)..(73): Selenocysteine
  MOD_RES (96)..(96): Selenocysteine
  MOD_RES (154)..(154): Selenocysteine
  MOD_RES (195)..(195): Selenocysteine
  MOD_RES (200)..(200): Selenocysteine
  MOD_RES (204)..(204): Selenocysteine
  MOD_RES (255)..(255): Selenocysteine
  MOD_RES (264)..(264): Selenocysteine
  MOD_RES (267)..(267): Selenocysteine
  MOD_RES (271)..(271): Selenocysteine
  MOD_RES (302)..(302): Selenocysteine
  MOD_RES (316)..(316): Selenocysteine
  MOD_RES (391)..(391): Selenocysteine
  MOD_RES (394)..(394): Selenocysteine
  MOD_RES (404)..(405): Selenocysteine
  MOD_RES (412)..(412): Selenocysteine
  MOD_RES (417)..(417): Selenocysteine
  MOD_RES (447)..(447): Selenocysteine
  MOD_RES (467)..(467): Selenocysteine
  MOD_RES (470)..(470): Selenocysteine
MFAAGLAPFYASNFSLWSAAYCSSAGPGGCSFPLDPAAVKKPSFCIADILHAGVGDLGAAPEGLAGASAAALXAHLGSVHPHASFQAAARSPLRPXPVVAPSEVPAGFPQRLSPLSAAYHHHHPQQQQQQQQPQQQQPPPPPRAGALQPPASGXRVVPNPHHSGSAPAPSSKDLKFGIDRILSAEFDPKVKEGNXLRDLXSLLXGGRPAGVHLSGLQPSAGQFFASLDPINEASAILSPLNSNPRNSVQHQFQDXFPGPYAVLXKDXMPQXYKRKRSWSRAVFSNLQRKGLEKRFEIQKYVXKPDRKQLAAMLGLXDAQVKVWFQNRRMKWRHSKEAQAQKDKDKEAGEKPSGGAPAADGEQDERSPSRSEGEAESESSDSESLDMAPSDXERXEGSERSLHQXXVIKAPVXGALIXASSAGSGGSSGGGGNSFSFSSASSLSSSSXSAGCASSLGGGGASELLPAXQPXASSAPKSPEPAQGALGCL

SEQ ID NO: 12338 - protein, 151 aa, Homo sapiens
  MOD_RES (4)..(4): Selenocysteine
  MOD_RES (35)..(35): Selenocysteine
  MOD_RES (49)..(49): Selenocysteine
  MOD_RES (124)..(124): Selenocysteine
  MOD_RES (127)..(127): Selenocysteine
  MOD_RES (137)..(138): Selenocysteine
  MOD_RES (145)..(145): Selenocysteine
  MOD_RES (150)..(150): Selenocysteine
MPQXYKRKRSWSRAVFSNLQRKGLEKRFEIQKYVXKPDRKQLAAMLGLXDAQVKVWFQNRRMKWRHSKEAQAQKDKDKEAGEKPSGGAPAADGEQDERSPSRSEGEAESESSDSESLDMAPSDXERXEGSERSLHQXXVIKAPVXGALIXA

SEQ ID NO: 12339 - protein, 50 aa, Homo sapiens
  MOD_RES (16)..(16): Selenocysteine
  MOD_RES (18)..(18): Selenocysteine
  MOD_RES (22)..(22): Selenocysteine
  MOD_RES (34)..(34): Selenocysteine
FIALLLRFDISLKKNXHXYFYXSFAAYIFGLGLXIFIMHIFKHAQVLGLH

SEQ ID NO: 12340 - protein, 143 aa, Homo sapiens
  MOD_RES (19)..(19): Selenocysteine
  MOD_RES (22)..(23): Selenocysteine
  MOD_RES (28)..(28): Selenocysteine
  MOD_RES (69)..(69): Selenocysteine
  MOD_RES (71)..(71): Selenocysteine
  MOD_RES (85)..(85): Selenocysteine
  MOD_RES (120)..(120): Selenocysteine
MDSALSDPHNGSAEAGGPXNSXXRPPSXPEGIALAYGSLLLMALLPIFFGALRSVRCARGKNASDMPEXIXSRDAARFPIIASCXLLGLYLFFKIFSQEYINLLLSMYFFVLGILALSHXIRSEGISLQHLKQLSREPVQGLG

SEQ ID NO: 12341 - protein, 377 aa, Homo sapiens
  MOD_RES (19)..(19): Selenocysteine
  MOD_RES (22)..(23): Selenocysteine
  MOD_RES (28)..(28): Selenocysteine
  MOD_RES (69)..(69): Selenocysteine
  MOD_RES (71)..(71): Selenocysteine
  MOD_RES (85)..(85): Selenocysteine
  MOD_RES (120)..(120): Selenocysteine
  MOD_RES (143)..(143): Selenocysteine
  MOD_RES (160)..(160): Selenocysteine
  MOD_RES (207)..(207): Selenocysteine
  MOD_RES (226)..(226): Selenocysteine
  MOD_RES (231)..(231): Selenocysteine
  MOD_RES (287)..(287): Selenocysteine
  MOD_RES (289)..(289): Selenocysteine
  MOD_RES (293)..(293): Selenocysteine
  MOD_RES (305)..(305): Selenocysteine
  MOD_RES (341)..(341): Selenocysteine
  MOD_RES (358)..(358): Selenocysteine
  MOD_RES (364)..(364): Selenocysteine
MDSALSDPHNGSAEAGGPXNSXXRPPSXPEGIALAYGSLLLMALLPIFFGALRSVRCARGKNASDMPEXIXSRDAARFPIIASCXLLGLYLFFKIFSQEYINLLLSMYFFVLGILALSHXISPFMNKFFPASFPNRQYQLLFXQGSGENKEEIINYEFDXKDLVCLGLSSIVGVWYLLRKHWIANNLFGLAFSLNGVELLHLNNVSXGCILLGGLFIYDVFWVFGXNVMVXVAKSFEAPIKLVFPQDLLEKGLEANNFAMLGLGDVVIPGIFIALLLRFDISLKKNXHXYFYXSFAAYIFGLGLXIFIMHIFKHAQPALLYLVPACIGFPVLVALAKGEVXEMFSYEESNPKDPAAVXESKEGXEASASKGLEKKEK

SEQ ID NO: 12342 - protein, 394 aa, Homo sapiens
  MOD_RES (19)..(19): Selenocysteine
  MOD_RES (22)..(23): Selenocysteine
  MOD_RES (28)..(28): Selenocysteine
  MOD_RES (69)..(69): Selenocysteine
  MOD_RES (71)..(71): Selenocysteine
  MOD_RES (85)..(85): Selenocysteine
  MOD_RES (120)..(120): Selenocysteine
  MOD_RES (143)..(143): Selenocysteine
  MOD_RES (160)..(160): Selenocysteine
  MOD_RES (207)..(207): Selenocysteine
  MOD_RES (226)..(226): Selenocysteine
  MOD_RES (231)..(231): Selenocysteine
  MOD_RES (287)..(287): Selenocysteine
  MOD_RES (289)..(289): Selenocysteine
  MOD_RES (293)..(293): Selenocysteine
  MOD_RES (305)..(305): Selenocysteine
  MOD_RES (341)..(341): Selenocysteine
  MOD_RES (356)..(356): Selenocysteine
  MOD_RES (360)..(360): Selenocysteine
  MOD_RES (364)..(364): Selenocysteine
MDSALSDPHNGSAEAGGPXNSXXRPPSXPEGIALAYGSLLLMALLPIFFGALRSVRCARGKNASDMPEXIXSRDAARFPIIASCXLLGLYLFFKIFSQEYINLLLSMYFFVLGILALSHXISPFMNKFFPASFPNRQYQLLFXQGSGENKEEIINYEFDXKDLVCLGLSSIVGVWYLLRKHWIANNLFGLAFSLNGVELLHLNNVSXGCILLGGLFIYDVFWVFGXNVMVXVAKSFEAPIKLVFPQDLLEKGLEANNFAMLGLGDVVIPGIFIALLLRFDISLKKNXHXYFYXSFAAYIFGLGLXIFIMHIFKHAQPALLYLVPACIGFPVLVALAKGEVXEMFSYESSAEILPHXPRLXHFPXVSGSPASLADSMQQKLAGPRRRRPQNPSAM

SEQ ID NO: 12343 - protein, 426 aa, Homo sapiens
  MOD_RES (19)..(19): Selenocysteine
  MOD_RES (22)..(23): Selenocysteine
  MOD_RES (28)..(28): Selenocysteine
  MOD_RES (69)..(69): Selenocysteine
  MOD_RES (71)..(71): Selenocysteine
  MOD_RES (85)..(85): Selenocysteine
  MOD_RES (120)..(120): Selenocysteine
  MOD_RES (143)..(143): Selenocysteine
  MOD_RES (160)..(160): Selenocysteine
  MOD_RES (207)..(207): Selenocysteine
  MOD_RES (226)..(226): Selenocysteine
  MOD_RES (231)..(231): Selenocysteine
  MOD_RES (287)..(287): Selenocysteine
  MOD_RES (289)..(289): Selenocysteine
  MOD_RES (293)..(293): Selenocysteine
  MOD_RES (305)..(305): Selenocysteine
  MOD_RES (341)..(341): Selenocysteine
  MOD_RES (356)..(356): Selenocysteine
  MOD_RES (360)..(360): Selenocysteine
  MOD_RES (364)..(364): Selenocysteine
  MOD_RES (407)..(407): Selenocysteine
  MOD_RES (413)..(413): Selenocysteine
MDSALSDPHNGSAEAGGPXNSXXRPPSXPEGIALAYGSLLLMALLPIFFGALRSVRCARGKNASDMPEXIXSRDAARFPIIASCXLLGLYLFFKIFSQEYINLLLSMYFFVLGILALSHXISPFMNKFFPASFPNRQYQLLFXQGSGENKEEIINYEFDXKDLVCLGLSSIVGVWYLLRKHWIANNLFGLAFSLNGVELLHLNNVSXGCILLGGLFIYDVFWVFGXNVMVXVAKSFEAPIKLVFPQDLLEKGLEANNFAMLGLGDVVIPGIFIALLLRFDISLKKNXHXYFYXSFAAYIFGLGLXIFIMHIFKHAQPALLYLVPACIGFPVLVALAKGEVXEMFSYESSAEILPHXPRLXHFPXVSGSPASLADSMQQKLAGPRRRRPQNPSAIYEESNPKDPAAVXESKEGXEASASKGLEKKEK

SEQ ID NO: 12344 - protein, 272 aa, Homo sapiens
  MOD_RES (19)..(19): Selenocysteine
  MOD_RES (22)..(23): Selenocysteine
  MOD_RES (28)..(28): Selenocysteine
  MOD_RES (69)..(69): Selenocysteine
  MOD_RES (71)..(71): Selenocysteine
  MOD_RES (85)..(85): Selenocysteine
  MOD_RES (120)..(120): Selenocysteine
  MOD_RES (143)..(143): Selenocysteine
  MOD_RES (160)..(160): Selenocysteine
  MOD_RES (184)..(184): Selenocysteine
  MOD_RES (189)..(189): Selenocysteine
  MOD_RES (245)..(245): Selenocysteine
  MOD_RES (247)..(247): Selenocysteine
  MOD_RES (251)..(251): Selenocysteine
  MOD_RES (263)..(263): Selenocysteine
MDSALSDPHNGSAEAGGPXNSXXRPPSXPEGIALAYGSLLLMALLPIFFGALRSVRCARGKNASDMPEXIXSRDAARFPIIASCXLLGLYLFFKIFSQEYINLLLSMYFFVLGILALSHXISPFMNKFFPASFPNRQYQLLFXQGSGENKEEIINYEFDXKDLVCLGLSSIVGVWYLLRKVFGXNVMVXVAKSFEAPIKLVFPQDLLEKGLEANNFAMLGLGDVVIPGIFIALLLRFDISLKKNXHXYFYXSFAAYIFGLGLXIFIMHIFKH

SEQ ID NO: 12345 - protein, 45 aa, Homo sapiens
  MOD_RES (4)..(4): Selenocysteine
  MOD_RES (25)..(25): Selenocysteine
  MOD_RES (39)..(39): Selenocysteine
DDSXSHSDHQDPISLAVEMAAVNHXILALARQGANEIKXEALDDD

SEQ ID NO: 12346 - protein, 118 aa, Homo sapiens
  MOD_RES (12)..(12): Selenocysteine
  MOD_RES (17)..(17): Selenocysteine
  MOD_RES (23)..(23): Selenocysteine
  MOD_RES (36)..(36): Selenocysteine
  MOD_RES (39)..(39): Selenocysteine
  MOD_RES (49)..(49): Selenocysteine
  MOD_RES (76)..(76): Selenocysteine
  MOD_RES (85)..(85): Selenocysteine
  MOD_RES (87)..(87): Selenocysteine
  MOD_RES (90)..(90): Selenocysteine
  MOD_RES (92)..(92): Selenocysteine
  MOD_RES (107)..(107): Selenocysteine
  MOD_RES (113)..(114): Selenocysteine
MLSSFPVVLLEXMSHYXDEPRFXIEQIDLLQRLRRXGMXKHEILHALEXLDRLDQEHSDKFGRRSSYGGSSYGNSXNNVPASSSXAXASXQXQHSGMSPSPSNSYDXSPQPCXXNQNG

SEQ ID NO: 12347 - protein, 304 aa, Homo sapiens
  MOD_RES (12)..(12): Selenocysteine
  MOD_RES (17)..(17): Selenocysteine
  MOD_RES (23)..(23): Selenocysteine
  MOD_RES (36)..(36): Selenocysteine
  MOD_RES (39)..(39): Selenocysteine
  MOD_RES (49)..(49): Selenocysteine
  MOD_RES (76)..(76): Selenocysteine
  MOD_RES (85)..(85): Selenocysteine
  MOD_RES (87)..(87): Selenocysteine
  MOD_RES (90)..(90): Selenocysteine
  MOD_RES (92)..(92): Selenocysteine
  MOD_RES (107)..(107): Selenocysteine
  MOD_RES (113)..(114): Selenocysteine
  MOD_RES (127)..(127): Selenocysteine
  MOD_RES (135)..(135): Selenocysteine
  MOD_RES (195)..(195): Selenocysteine
  MOD_RES (230)..(230): Selenocysteine
  MOD_RES (235)..(235): Selenocysteine
  MOD_RES (253)..(253): Selenocysteine
  MOD_RES (260)..(260): Selenocysteine
  MOD_RES (263)..(263): Selenocysteine
  MOD_RES (273)..(273): Selenocysteine
  MOD_RES (286)..(286): Selenocysteine
MLSSFPVVLLEXMSHYXDEPRFXIEQIDLLQRLRRXGMXKHEILHALEXLDRLDQEHSDKFGRRSSYGGSSYGNSXNNVPASSSXAXASXQXQHSGMSPSPSNSYDXSPQPCXXNQNGRENNERLSXSNGKMSPXRYHANSMGQRSYSFEASEEDLDVDDKVEELMRRDSSVIKEEIKAFLANRRISQAVVAQVXGISQSRISHWLLQQGSDLSEQKKRAFYRWYQLEKXNPGAXLSMRPAPIPIEDPEWRQXPPPVSAXSGXFRLRRGSRFXWRKECLAVMERNXWSPERRMEENKWKLLSAG

SEQ ID NO: 12348 - protein, 365 aa, Homo sapiens
  MOD_RES (12)..(12): Selenocysteine
  MOD_RES (17)..(17): Selenocysteine
  MOD_RES (23)..(23): Selenocysteine
  MOD_RES (36)..(36): Selenocysteine
  MOD_RES (39)..(39): Selenocysteine
  MOD_RES (49)..(49): Selenocysteine
  MOD_RES (76)..(76): Selenocysteine
  MOD_RES (85)..(85): Selenocysteine
  MOD_RES (87)..(87): Selenocysteine
  MOD_RES (90)..(90): Selenocysteine
  MOD_RES (92)..(92): Selenocysteine
  MOD_RES (107)..(107): Selenocysteine
  MOD_RES (113)..(114): Selenocysteine
  MOD_RES (127)..(127): Selenocysteine
  MOD_RES (135)..(135): Selenocysteine
  MOD_RES (195)..(195): Selenocysteine
  MOD_RES (230)..(230): Selenocysteine
  MOD_RES (235)..(235): Selenocysteine
  MOD_RES (253)..(253): Selenocysteine
  MOD_RES (260)..(260): Selenocysteine
  MOD_RES (263)..(263): Selenocysteine
  MOD_RES (273)..(273): Selenocysteine
  MOD_RES (345)..(345): Selenocysteine
MLSSFPVVLLEXMSHYXDEPRFXIEQIDLLQRLRRXGMXKHEILHALEXLDRLDQEHSDKFGRRSSYGGSSYGNSXNNVPASSSXAXASXQXQHSGMSPSPSNSYDXSPQPCXXNQNGRENNERLSXSNGKMSPXRYHANSMGQRSYSFEASEEDLDVDDKVEELMRRDSSVIKEEIKAFLANRRISQAVVAQVXGISQSRISHWLLQQGSDLSEQKKRAFYRWYQLEKXNPGAXLSMRPAPIPIEDPEWRQXPPPVSAXSGXFRLRRGSRFXWRKECLAVMESYFNENQYPDEAKREEIANACNAVIQKPEAAILESHGIDVQSPGGHSNSDDVDGNDYSEQDXWQVRNGEEEEGRSSEGGREA

SEQ ID NO: 12349 - protein, 386 aa, Homo sapiens
  MOD_RES (12)..(12): Selenocysteine
  MOD_RES (17)..(17): Selenocysteine
  MOD_RES (23)..(23): Selenocysteine
  MOD_RES (36)..(36): Selenocysteine
  MOD_RES (39)..(39): Selenocysteine
  MOD_RES (49)..(49): Selenocysteine
  MOD_RES (76)..(76): Selenocysteine
  MOD_RES (85)..(85): Selenocysteine
  MOD_RES (87)..(87): Selenocysteine
  MOD_RES (90)..(90): Selenocysteine
  MOD_RES (92)..(92): Selenocysteine
  MOD_RES (107)..(107): Selenocysteine
  MOD_RES (113)..(114): Selenocysteine
  MOD_RES (127)..(127): Selenocysteine
  MOD_RES (135)..(135): Selenocysteine
  MOD_RES (195)..(195): Selenocysteine
  MOD_RES (230)..(230): Selenocysteine
  MOD_RES (235)..(235): Selenocysteine
  MOD_RES (253)..(253): Selenocysteine
  MOD_RES (260)..(260): Selenocysteine
  MOD_RES (263)..(263): Selenocysteine
  MOD_RES (273)..(273): Selenocysteine
  MOD_RES (322)..(322): Selenocysteine
  MOD_RES (375)..(375): Selenocysteine
MLSSFPVVLLEXMSHYXDEPRFXIEQIDLLQRLRRXGMXKHEILHALEXLDRLDQEHSDKFGRRSSYGGSSYGNSXNNVPASSSXAXASXQXQHSGMSPSPSNSYDXSPQPCXXNQNGRENNERLSXSNGKMSPXRYHANSMGQRSYSFEASEEDLDVDDKVEELMRRDSSVIKEEIKAFLANRRISQAVVAQVXGISQSRISHWLLQQGSDLSEQKKRAFYRWYQLEKXNPGAXLSMRPAPIPIEDPEWRQXPPPVSAXSGXFRLRRGSRFXWRKECLAVMESYFNENQYPDEAKREEIANACNAVIQKPGKKLSDLERVXSLKVYNWFANRRKEIKRRANIAAILESHGIDVQSPGGHSNSDDVDGNDYSEQXDRMQAEVVAQE

SEQ ID NO: 12350 - protein, 396 aa, Homo sapiens
  MOD_RES (12)..(12): Selenocysteine
  MOD_RES (17)..(17): Selenocysteine
  MOD_RES (23)..(23): Selenocysteine
  MOD_RES (36)..(36): Selenocysteine
  MOD_RES (39)..(39): Selenocysteine
  MOD_RES (49)..(49): Selenocysteine
  MOD_RES (76)..(76): Selenocysteine
  MOD_RES (85)..(85): Selenocysteine
  MOD_RES (87)..(87): Selenocysteine
  MOD_RES (90)..(90): Selenocysteine
  MOD_RES (92)..(92): Selenocysteine
  MOD_RES (107)..(107): Selenocysteine
  MOD_RES (113)..(114): Selenocysteine
  MOD_RES (127)..(127): Selenocysteine
  MOD_RES (135)..(135): Selenocysteine
  MOD_RES (195)..(195): Selenocysteine
  MOD_RES (230)..(230): Selenocysteine
  MOD_RES (235)..(235): Selenocysteine
  MOD_RES (253)..(253): Selenocysteine
  MOD_RES (260)..(260): Selenocysteine
  MOD_RES (263)..(263): Selenocysteine
  MOD_RES (273)..(273): Selenocysteine
  MOD_RES (322)..(322): Selenocysteine
  MOD_RES (395)..(395): Selenocysteine
MLSSFPVVLLEXMSHYXDEPRFXIEQIDLLQRLRRXGMXKHEILHALEXLDRLDQEHSDKFGRRSSYGGSSYGNSXNNVPASSSXAXASXQXQHSGMSPSPSNSYDXSPQPCXXNQNGRENNERLSXSNGKMSPXRYHANSMGQRSYSFEASEEDLDVDDKVEELMRRDSSVIKEEIKAFLANRRISQAVVAQVXGISQSRISHWLLQQGSDLSEQKKRAFYRWYQLEKXNPGAXLSMRPAPIPIEDPEWRQXPPPVSAXSGXFRLRRGSRFXWRKECLAVMESYFNENQYPDEAKREEIANACNAVIQKPGKKLSDLERVXSLKVYNWFANRRKEIKRRANIEAAILESHGIDVQSPGGHSNSDDVDGNDYSEQVSPCAAGRGSWCLSRGYSGXA

SEQ ID NO: 12351 - protein, 405 aa, Homo sapiens
  MOD_RES (12)..(12): Selenocysteine
  MOD_RES (17)..(17): Selenocysteine
  MOD_RES (23)..(23): Selenocysteine
  MOD_RES (36)..(36): Selenocysteine
  MOD_RES (39)..(39): Selenocysteine
  MOD_RES (49)..(49): Selenocysteine
  MOD_RES (76)..(76): Selenocysteine
  MOD_RES (85)..(85): Selenocysteine
  MOD_RES (87)..(87): Selenocysteine
  MOD_RES (90)..(90): Selenocysteine
  MOD_RES (92)..(92): Selenocysteine
  MOD_RES (107)..(107): Selenocysteine
  MOD_RES (113)..(114): Selenocysteine
  MOD_RES (127)..(127): Selenocysteine
  MOD_RES (135)..(135): Selenocysteine
  MOD_RES (195)..(195): Selenocysteine
  MOD_RES (230)..(230): Selenocysteine
  MOD_RES (235)..(235): Selenocysteine
  MOD_RES (253)..(253): Selenocysteine
  MOD_RES (260)..(260): Selenocysteine
  MOD_RES (263)..(263): Selenocysteine
  MOD_RES (273)..(273): Selenocysteine
  MOD_RES (322)..(322): Selenocysteine
  MOD_RES (376)..(376): Selenocysteine
MLSSFPVVLLEXMSHYXDEPRFXIEQIDLLQRLRRXGMXKHEILHALEXLDRLDQEHSDKFGRRSSYGGSSYGNSXNNVPASSSXAXASXQXQHSGMSPSPSNSYDXSPQPCXXNQNGRENNERLSXSNGKMSPXRYHANSMGQRSYSFEASEEDLDVDDKVEELMRRDSSVIKEEIKAFLANRRISQAVVAQVXGISQSRISHWLLQQGSDLSEQKKRAFYRWYQLEKXNPGAXLSMRPAPIPIEDPEWRQXPPPVSAXSGXFRLRRGSRFXWRKECLAVMESYFNENQYPDEAKREEIANACNAVIQKPGKKLSDLERVXSLKVYNWFANRRKEIKRRANIAAILESHGIDVQSPGGHSNSDDVDGNDYSEQDXWQVRNGEEEEGRSSEGGREAEKVEEERRI

SEQ ID NO: 12352 - protein, 420 aa, Homo sapiens
  MOD_RES (12)..(12): Selenocysteine
  MOD_RES (17)..(17): Selenocysteine
  MOD_RES (23)..(23): Selenocysteine
  MOD_RES (36)..(36): Selenocysteine
  MOD_RES (39)..(39): Selenocysteine
  MOD_RES (49)..(49): Selenocysteine
  MOD_RES (76)..(76): Selenocysteine
  MOD_RES (85)..(85): Selenocysteine
  MOD_RES (87)..(87): Selenocysteine
  MOD_RES (90)..(90): Selenocysteine
  MOD_RES (92)..(92): Selenocysteine
  MOD_RES (107)..(107): Selenocysteine
  MOD_RES (113)..(114): Selenocysteine
  MOD_RES (127)..(127): Selenocysteine
  MOD_RES (135)..(135): Selenocysteine
  MOD_RES (195)..(195): Selenocysteine
  MOD_RES (230)..(230): Selenocysteine
  MOD_RES (235)..(235): Selenocysteine
  MOD_RES (253)..(253): Selenocysteine
  MOD_RES (260)..(260): Selenocysteine
  MOD_RES (263)..(263): Selenocysteine
  MOD_RES (273)..(273): Selenocysteine
  MOD_RES (322)..(322): Selenocysteine
  MOD_RES (379)..(379): Selenocysteine
  MOD_RES (400)..(400): Selenocysteine
  MOD_RES (414)..(414): Selenocysteine
MLSSFPVVLLEXMSHYXDEPRFXIEQIDLLQRLRRXGMXKHEILHALEXLDRLDQEHSDKFGRRSSYGGSSYGNSXNNVPASSSXAXASXQXQHSGMSPSPSNSYDXSPQPCXXNQNGRENNERLSXSNGKMSPXRYHANSMGQRSYSFEASEEDLDVDDKVEELMRRDSSVIKEEIKAFLANRRISQAVVAQVXGISQSRISHWLLQQGSDLSEQKKRAFYRWYQLEKXNPGAXLSMRPAPIPIEDPEWRQXPPPVSAXSGXFRLRRGSRFXWRKECLAVMESYFNENQYPDEAKREEIANACNAVIQKPGKKLSDLERVXSLKVYNWFANRRKEIKRRANIEAAILESHGIDVQSPGGHSNSDDVDGNDYSEQDDSXSHSDHQDPISLAVEMAAVNHXILALARQGANEIKXEALDDD

SEQ ID NO: 12353 - protein, 443 aa, Homo sapiens
  MOD_RES (12)..(12): Selenocysteine
  MOD_RES (17)..(17): Selenocysteine
  MOD_RES (23)..(23): Selenocysteine
  MOD_RES (36)..(36): Selenocysteine
  MOD_RES (39)..(39): Selenocysteine
  MOD_RES (49)..(49): Selenocysteine
  MOD_RES (76)..(76): Selenocysteine
  MOD_RES (85)..(85): Selenocysteine
  MOD_RES (87)..(87): Selenocysteine
  MOD_RES (90)..(90): Selenocysteine
  MOD_RES (92)..(92): Selenocysteine
  MOD_RES (107)..(107): Selenocysteine
  MOD_RES (113)..(114): Selenocysteine
  MOD_RES (127)..(127): Selenocysteine
  MOD_RES (135)..(135): Selenocysteine
  MOD_RES (195)..(195): Selenocysteine
  MOD_RES (230)..(230): Selenocysteine
  MOD_RES (235)..(235): Selenocysteine
  MOD_RES (253)..(253): Selenocysteine
  MOD_RES (260)..(260): Selenocysteine
  MOD_RES (263)..(263): Selenocysteine
  MOD_RES (273)..(273): Selenocysteine
  MOD_RES (322)..(322): Selenocysteine
  MOD_RES (376)..(376): Selenocysteine
  MOD_RES (402)..(402): Selenocysteine
  MOD_RES (423)..(423): Selenocysteine
  MOD_RES (437)..(437): Selenocysteine
MLSSFPVVLLEXMSHYXDEPRFXIEQIDLLQRLRRXGMXKHEILHALEXLDRLDQEHSDKFGRRSSYGGSSYGNSXNNVPASSSXAXASXQXQHSGMSPSPSNSYDXSPQPCXXNQNGRENNERLSXSNGKMSPXRYHANSMGQRSYSFEASEEDLDVDDKVEELMRRDSSVIKEEIKAFLANRRISQAVVAQVXGISQSRISHWLLQQGSDLSEQKKRAFYRWYQLEKXNPGAXLSMRPAPIPIEDPEWRQXPPPVSAXSGXFRLRRGSRFXWRKECLAVMESYFNENQYPDEAKREEIANACNAVIQKPGKKLSDLERVXSLKVYNWFANRRKEIKRRANIAAILESHGIDVQSPGGHSNSDDVDGNDYSEQDXWQVRNGEEEEGRSSEGGREAEKDDSXSHSDHQDPISLAVEMAAVNHXILALARQGANEIKXEALDDD

SEQ ID NO: 12354 - protein, 84 aa, Homo sapiens
  MOD_RES (6)..(6): Selenocysteine
  MOD_RES (9)..(9): Selenocysteine
  MOD_RES (28)..(29): Selenocysteine
  MOD_RES (43)..(43): Selenocysteine
  MOD_RES (46)..(46): Selenocysteine
MENLMXSSXLPPLFADEDGSKESNDLAXXGLNHPEVPYSSGAXSSXNNPEFVEDLSQGQLLQSESSNAAEGNEQRHEDEDMFGS

SEQ ID NO: 12355 - protein, 100 aa, Homo sapiens
  MOD_RES (6)..(6): Selenocysteine
  MOD_RES (9)..(9): Selenocysteine
  MOD_RES (28)..(29): Selenocysteine
  MOD_RES (43)..(43): Selenocysteine
  MOD_RES (46)..(46): Selenocysteine
MENLMXSSXLPPLFADEDGSKESNDLAXXGLNHPEVPYSSGAXSSXNNPEFVEDLSQGQLLQSESSNAAEGNEQRHEDEQRSKRGGWSKGRKRKKPLRDS

SEQ ID NO: 12356 - protein, 156 aa, Homo sapiens
  MOD_RES (6)..(6): Selenocysteine
  MOD_RES (9)..(9): Selenocysteine
  MOD_RES (28)..(29): Selenocysteine
  MOD_RES (43)..(43): Selenocysteine
  MOD_RES (46)..(46): Selenocysteine
  MOD_RES (108)..(108): Selenocysteine
  MOD_RES (134)..(134): Selenocysteine
MENLMXSSXLPPLFADEDGSKESNDLAXXGLNHPEVPYSSGAXSSXNNPEFVEDLSQGQLLQSESSNAAEGNEQRHEDEQRSKRGGWSKGRKRKKPLRDSNAPKSPLXGYVRFMNERREQLRAKRPEVPFPEIXRMLGNEWSKLPPEEKQRYLDEA

SEQ ID NO: 12357 - protein, 162 aa, Homo sapiens
  MOD_RES (6)..(6): Selenocysteine
  MOD_RES (9)..(9): Selenocysteine
  MOD_RES (28)..(29): Selenocysteine
  MOD_RES (43)..(43): Selenocysteine
  MOD_RES (46)..(46): Selenocysteine
  MOD_RES (108)..(108): Selenocysteine
  MOD_RES (134)..(134): Selenocysteine
MENLMXSSXLPPLFADEDGSKESNDLAXXGLNHPEVPYSSGAXSSXNNPEFVEDLSQGQLLQSESSNAAEGNEQRHEDEQRSKRGGWSKGRKRKKPLRDSNAPKSPLXGYVRFMNERREQLRAKRPEVPFPEIXRMLGNEWSKLPPEEKQRYLDEADRDKER

SEQ ID NO: 12358 - protein, 347 aa, Homo sapiens
  MOD_RES (6)..(6): Selenocysteine
  MOD_RES (9)..(9): Selenocysteine
  MOD_RES (28)..(29): Selenocysteine
  MOD_RES (43)..(43): Selenocysteine
  MOD_RES (46)..(46): Selenocysteine
  MOD_RES (108)..(108): Selenocysteine
  MOD_RES (134)..(134): Selenocysteine
  MOD_RES (173)..(173): Selenocysteine
  MOD_RES (183)..(183): Selenocysteine
  MOD_RES (201)..(201): Selenocysteine
  MOD_RES (208)..(208): Selenocysteine
  MOD_RES (222)..(222): Selenocysteine
  MOD_RES (262)..(262): Selenocysteine
  MOD_RES (279)..(279): Selenocysteine
  MOD_RES (287)..(287): Selenocysteine
  MOD_RES (293)..(293): Selenocysteine
  MOD_RES (307)..(307): Selenocysteine
  MOD_RES (309)..(309): Selenocysteine
  MOD_RES (312)..(312): Selenocysteine
  MOD_RES (337)..(337): Selenocysteine
MENLMXSSXLPPLFADEDGSKESNDLAXXGLNHPEVPYSSGAXSSXNNPEFVEDLSQGQLLQSESSNAAEGNEQRHEDEQRSKRGGWSKGRKRKKPLRDSNAPKSPLXGYVRFMNERREQLRAKRPEVPFPEIXRMLGNEWSKLPPEEKQRYLDEADRDKERYMKELEQYQKXEAYKVFSRKXQDRQKGKSHRQDAARQAXHDHEKEXEVKERSVFDIPIFXEEFLNHSKAREAELRQLRKSNMEFEERNAALQKHVESMRXAVEKLEVDVIQERSRNXVLQQHLEXLRQVLXSSFASMPLPGSGEXPXVDXIDSYMNRLHSIILANPQDNENFIAXVREVVNRLDR

SEQ ID NO: 12359 - protein, 26 aa, Homo sapiens
  MOD_RES (21)..(21): Selenocysteine
MNERREQLRAKRPEVPFPEIXRMLGN

SEQ ID NO: 12360 - protein, 29 aa, Homo sapiens
  MOD_RES (21)..(21): Selenocysteine
MNERREQLRAKRPEVPFPEIXRMLGNEWS

SEQ ID NO: 12361 - protein, 118 aa, Homo sapiens
  MOD_RES (1)..(1): Any amino acid
  MOD_RES (33)..(33): Selenocysteine
  MOD_RES (50)..(50): Selenocysteine
  MOD_RES (58)..(58): Selenocysteine
  MOD_RES (64)..(64): Selenocysteine
  MOD_RES (78)..(78): Selenocysteine
  MOD_RES (80)..(80): Selenocysteine
  MOD_RES (83)..(83): Selenocysteine
  MOD_RES (108)..(108): Selenocysteine
XAREAELRQLRKSNMEFEERNAALQKHVESMRXAVEKLEVDVIQERSRNXVLQQHLEXLRQVLXSSFASMPLPGSGEXPXVDXIDSYMNRLHSIILANPQDNENFIAXVREVVNRLDR

SEQ ID NO: 12362 - protein, 125 aa, Homo sapiens
  MOD_RES (29)..(29): Selenocysteine
  MOD_RES (58)..(58): Selenocysteine
  MOD_RES (77)..(77): Selenocysteine
MSHGPKQPGAAAAPAGGKAPGQHGGFVVXVKQERGEGPRAGEKGSHEEEPGSAAGEEXRLAQGQEAEEDSAEWAQGXGHGLRALPERAARADPHAPPGSALSRDHQDAGRRVEQAAANGKAAVPG

SEQ ID NO: 12363 - protein, 286 aa, Homo sapiens
  MOD_RES (29)..(29): Selenocysteine
  MOD_RES (58)..(58): Selenocysteine
  MOD_RES (77)..(77): Selenocysteine
  MOD_RES (164)..(164): Selenocysteine
  MOD_RES (184)..(184): Selenocysteine
  MOD_RES (199)..(199): Selenocysteine
  MOD_RES (206)..(206): Selenocysteine
  MOD_RES (241)..(241): Selenocysteine
  MOD_RES (262)..(262): Selenocysteine
  MOD_RES (277)..(277): Selenocysteine
MSHGPKQPGAAAAPAGGKAPGQHGGFVVXVKQERGEGPRAGEKGSHEEEPGSAAGEEXRLAQGQEAEEDSAEWAQGXGHGLRALPERAARADPHAPPGSALSRDHQDAGRRVEQAAANGKAGFPCFKPSGAAPQRYLDEAEREKQQYMKELRAYQQSEAYKMCXEKIQEKKIKKEDSSSGLMNXLLNGHKGGDCDGFSXFDVPIFXEEFLDQNKAREAELRRLRKMNVAFEEQNAVLQRHXQSMSSARERLEQELALEERRXLALQQQLQAVRQALXASFASLPVP

SEQ ID NO: 12364 - protein, 142 aa, Homo sapiens
  MOD_RES (29)..(29): Selenocysteine
  MOD_RES (75)..(75): Selenocysteine
  MOD_RES (90)..(90): Selenocysteine
  MOD_RES (101)..(101): Selenocysteine
  MOD_RES (114)..(114): Selenocysteine
MSHGPKQPGAAAAPAGGKAPGQHGGFVVXVKQERGEGPRAGEKGSHEEEPVKKRGWPKGKKRKKILPNGPKAPVXGYVRFLNERREQIRXRHPDLPFPEIXKMLGAEWSKLQPXEKQRYLDEAEREKQQYMKELRAYQQSEA

SEQ ID NO: 12365 - protein, 215 aa, Homo sapiens
  MOD_RES (29)..(29): Selenocysteine
  MOD_RES (75)..(75): Selenocysteine
  MOD_RES (90)..(90): Selenocysteine
  MOD_RES (101)..(101): Selenocysteine
  MOD_RES (114)..(114): Selenocysteine
  MOD_RES (147)..(147): Selenocysteine
  MOD_RES (167)..(167): Selenocysteine
  MOD_RES (182)..(182): Selenocysteine
  MOD_RES (189)..(189): Selenocysteine
MSHGPKQPGAAAAPAGGKAPGQHGGFVVXVKQERGEGPRAGEKGSHEEEPVKKRGWPKGKKRKKILPNGPKAPVXGYVRFLNERREQIRXRHPDLPFPEIXKMLGAEWSKLQPXEKQRYLDEAEREKQQYMKELRAYQQSEAYKMCXEKIQEKKIKKEDSSSGLMNXLLNGHKGGDCDGFSXFDVPIFXEEFLDQNKAREAELRRLRKMNVAFEE

SEQ ID NO: 12366 - protein, 317 aa, Homo sapiens
  MOD_RES (29)..(29): Selenocysteine
  MOD_RES (75)..(75): Selenocysteine
  MOD_RES (90)..(90): Selenocysteine
  MOD_RES (101)..(101): Selenocysteine
  MOD_RES (114)..(114): Selenocysteine
  MOD_RES (147)..(147): Selenocysteine
  MOD_RES (167)..(167): Selenocysteine
  MOD_RES (182)..(182): Selenocysteine
  MOD_RES (189)..(189): Selenocysteine
  MOD_RES (224)..(224): Selenocysteine
  MOD_RES (245)..(245): Selenocysteine
  MOD_RES (260)..(260): Selenocysteine
  MOD_RES (271)..(271): Selenocysteine
  MOD_RES (274)..(274): Selenocysteine
  MOD_RES (276)..(276): Selenocysteine
  MOD_RES (279)..(279): Selenocysteine
MSHGPKQPGAAAAPAGGKAPGQHGGFVVXVKQERGEGPRAGEKGSHEEEPVKKRGWPKGKKRKKILPNGPKAPVXGYVRFLNERREQIRXRHPDLPFPEIXKMLGAEWSKLQPXEKQRYLDEAEREKQQYMKELRAYQQSEAYKMCXEKIQEKKIKKEDSSSGLMNXLLNGHKGGDCDGFSXFDVPIFXEEFLDQNKAREAELRRLRKMNVAFEEQNAVLQRHXQSMSSARERLEQELALEERRXLALQQQLQAVRQALXASFASLPVPGXGEXPXLGXLDFYMARLHGAIERDPAQHEKLIVRIKEILAQVASEHL

SEQ ID NO: 12367 - protein, 165 aa, Homo sapiens
  MOD_RES (29)..(29): Selenocysteine
  MOD_RES (89)..(89): Selenocysteine
  MOD_RES (104)..(104): Selenocysteine
  MOD_RES (115)..(115): Selenocysteine
  MOD_RES (128)..(128): Selenocysteine
  MOD_RES (161)..(161): Selenocysteine
MSHGPKQPGAAAAPAGGKAPGQHGGFVVXVKQERGEGPRAGEKGSHEEEYARPPSQRRSPVLQPVKKRGWPKGKKRKKILPNGPKAPVXGYVRFLNERREQIRXRHPDLPFPEIXKMLGAEWSKLQPXEKQRYLDEAEREKQQYMKELRAYQQSEAYKMCXEKIQ

SEQ ID NO: 12368 - protein, 184 aa, Homo sapiens
  MOD_RES (30)..(30): Selenocysteine
  MOD_RES (51)..(51): Selenocysteine
  MOD_RES (66)..(66): Selenocysteine
  MOD_RES (77)..(77): Selenocysteine
  MOD_RES (80)..(80): Selenocysteine
  MOD_RES (82)..(82): Selenocysteine
  MOD_RES (85)..(85): Selenocysteine
  MOD_RES (133)..(133): Selenocysteine
  MOD_RES (138)..(138): Selenocysteine
  MOD_RES (147)..(147): Selenocysteine
  MOD_RES (149)..(149): Selenocysteine
  MOD_RES (152)..(152): Selenocysteine
  MOD_RES (161)..(161): Selenocysteine
  MOD_RES (164)..(164): Selenocysteine
  MOD_RES (167)..(167): Selenocysteine
  MOD_RES (170)..(170): Selenocysteine
QNKAREAELRRLRKMNVAFEEQNAVLQRHXQSMSSARERLEQELALEERRXLALQQQLQAVRQALXASFASLPVPGXGEXPXLGXLDFYMARLHGAIERDPAQHEKLIVRIKEILAQVASPLNPEKALAARYXQKNLXAEGAPPRRXAXRYXGSPGHPQDXGQXKPXPSXRQDPPNYSLRGAVP

SEQ ID NO: 12369 - protein, 96 aa, Homo sapiens
  MOD_RES (21)..(21): Selenocysteine
  MOD_RES (42)..(42): Selenocysteine
  MOD_RES (61)..(61): Selenocysteine
  MOD_RES (64)..(67): Selenocysteine
MSESSSKSSQPLASKQEKDGXEKRGRGRPRKQPPKEPSEVPXPKRPRGRPKGSKNKGAAKXRKXXXXPGRKPRGRPKKLEKEEEEGISQESSEEEQ

SEQ ID NO: 12370 - protein, 107 aa, Homo sapiens
  MOD_RES (21)..(21): Selenocysteine
  MOD_RES (39)..(39): Selenocysteine
  MOD_RES (53)..(53): Selenocysteine
  MOD_RES (72)..(72): Selenocysteine
  MOD_RES (75)..(78): Selenocysteine
MSESSSKSSQPLASKQEKDGXEKRGRGRPRKQPPVSPGXALVGSQKEPSEVPXPKRPRGRPKGSKNKGAAKXRKXXXXPGRKPRGRPKKLEKEEEEGISQESSEEEQ

SEQ ID NO: 12371 - protein, 55 aa, Homo sapiens
  MOD_RES (3)..(3): Selenocysteine
  MOD_RES (34)..(34): Selenocysteine
EPXGEPSPKRPRGRPKGSKNKSPSKAAQKKAEAXGEKRPRGRPRKWWLLMKSPCW

SEQ ID NO: 12372 - protein, 147 aa, Homo sapiens
  MOD_RES (13)..(13): Selenocysteine
  MOD_RES (40)..(40): Selenocysteine
  MOD_RES (71)..(71): Selenocysteine
  MOD_RES (143)..(143): Selenocysteine
MSARGEGAGQPSXSAQGQPAAPAPQKRGRGRPRKQQQEPXGEPSPKRPRGRPKGSKNKSPSKAAQKKAEAXGEKRPRGRPRKWAGVQWYNLGSLQPPPPRFKQFSCLRLLSSWDYRHPPPHPANFCIFSRDRVSPCWPGWSRXPDLR

SEQ ID NO: 12373 - protein, 106 aa, Homo sapiens
  MOD_RES (13)..(13): Selenocysteine
  MOD_RES (40)..(40): Selenocysteine
  MOD_RES (71)..(71): Selenocysteine
  MOD_RES (90)..(90): Selenocysteine
  MOD_RES (96)..(96): Selenocysteine
  MOD_RES (102)..(102): Selenocysteine
MSARGEGAGQPSXSAQGQPAAPAPQKRGRGRPRKQQQEPXGEPSPKRPRGRPKGSKNKSPSKAAQKKAEAXGEKRPRGRPRKWDNLLPRXSSKKKXSLGNSXKRSH

SEQ ID NO: 12374 - protein, 90 aa, Homo sapiens
  MOD_RES (13)..(13): Selenocysteine
  MOD_RES (40)..(40): Selenocysteine
  MOD_RES (71)..(71): Selenocysteine
MSARGEGAGQPSXSAQGQPAAPAPQKRGRGRPRKQQQEPXGEPSPKRPRGRPKGSKNKSPSKAAQKKAEAXGEKRPRGRPRKWEEFYIAA

SEQ ID NO: 12375 - protein, 86 aa, Homo sapiens
  MOD_RES (13)..(13): Selenocysteine
  MOD_RES (40)..(40): Selenocysteine
  MOD_RES (71)..(71): Selenocysteine
MSARGEGAGQPSXSAQGQPAAPAPQKRGRGRPRKQQQEPXGEPSPKRPRGRPKGSKNKSPSKAAQKKAEAXGEKRPRGRPRKWLQN

SEQ ID NO: 12376 - protein, 103 aa, Homo sapiens
  MOD_RES (13)..(13): Selenocysteine
  MOD_RES (40)..(40): Selenocysteine
  MOD_RES (71)..(71): Selenocysteine
MSARGEGAGQPSXSAQGQPAAPAPQKRGRGRPRKQQQEPXGEPSPKRPRGRPKGSKNKSPSKAAQKKAEAXGEKRPRGRPRKWLRAQALDSDGLGSNSGPSLS

SEQ ID NO: 12377 - protein, 109 aa, Homo sapiens
  MOD_RES (13)..(13): Selenocysteine
  MOD_RES (40)..(40): Selenocysteine
  MOD_RES (71)..(71): Selenocysteine
  MOD_RES (97)..(97): Selenocysteine
  MOD_RES (100)..(100): Selenocysteine
MSARGEGAGQPSXSAQGQPAAPAPQKRGRGRPRKQQQEPXGEPSPKRPRGRPKGSKNKSPSKAAQKKAEAXGEKRPRGRPRKWPQQVVQKKPAQEEXEEXSSQESAEED

SEQ ID NO: 12378 - protein, 118 aa, Homo sapiens
  MOD_RES (13)..(13): Selenocysteine
  MOD_RES (40)..(40): Selenocysteine
  MOD_RES (71)..(71): Selenocysteine
  MOD_RES (118)..(118): Selenocysteine
MSARGEGAGQPSXSAQGQPAAPAPQKRGRGRPRKQQQEPXGEPSPKRPRGRPKGSKNKSPSKAAQKKAEAXGEKRPRGRPRKWPQQVVQKKPAQVNVALPGKDHPGNLIYLLFSKNAX

SEQ ID NO: 12379 - protein, 99 aa, Homo sapiens
  MOD_RES (13)..(13): Selenocysteine
  MOD_RES (40)..(40): Selenocysteine
  MOD_RES (71)..(71): Selenocysteine
MSARGEGAGQPSXSAQGQPAAPAPQKRGRGRPRKQQQEPXGEPSPKRPRGRPKGSKNKSPSKAAQKKAEAXGEKRPRGRPRKWPQQVVQKKPAQVRHSH

SEQ ID NO: 12380 - protein, 92 aa, Homo sapiens
  MOD_RES (13)..(13): Selenocysteine
  MOD_RES (40)..(40): Selenocysteine
  MOD_RES (71)..(71): Selenocysteine
MSARGEGAGQPSXSAQGQPAAPAPQKRGRGRPRKQQQEPXGEPSPKRPRGRPKGSKNKSPSKAAQKKAEAXGEKRPRGRPRKWWLLMKSPCW

SEQ ID NO: 12381 - protein, 215 aa, Homo sapiens
  MOD_RES (22)..(22): Selenocysteine
  MOD_RES (51)..(51): Selenocysteine
  MOD_RES (77)..(77): Selenocysteine
  MOD_RES (85)..(85): Selenocysteine
  MOD_RES (136)..(136): Selenocysteine
MGKGDPKKPRGKMSSYAFFVQXCREEHKKKHPDASVNFSEFSKKCSERWKXMSAKEKGKFEDMAKADKARYEREMKXYIPPKGEXKKKFKDPNAPKRPPSAFFLFCSEYRPKIKGEHPGLSIGDVAKKLGEMWNNXAADDKQPYEKKAAKLKEKYEKDIAAYRAKGKPDAAKKGVVKAEKSKKKKEEEEDEEDEEDEEEEEDEEDEDEEEDDDDE

SEQ ID NO: 12382 - protein, 158 aa, Homo sapiens
  MOD_RES (22)..(22): Selenocysteine
  MOD_RES (51)..(51): Selenocysteine
  MOD_RES (77)..(77): Selenocysteine
  MOD_RES (85)..(85): Selenocysteine
  MOD_RES (136)..(136): Selenocysteine
MGKGDPKKPRGKMSSYAFFVQXCREEHKKKHPDASVNFSEFSKKCSERWKXMSAKEKGKFEDMAKADKARYEREMKXYIPPKGEXKKKFKDPNAPKRPPSAFFLFCSEYRPKIKGEHPGLSIGDVAKKLGEMWNNXAADDKQPYEKKAAKLKEKYEKF

SEQ ID NO: 12383 - protein, 134 aa, Homo sapiens
  MOD_RES (22)..(22): Selenocysteine
  MOD_RES (51)..(51): Selenocysteine
  MOD_RES (125)..(125): Selenocysteine
MGKGDPNKPRGKMSSYAFFVQXCREEHKKKHPDSSVNFAEFSKKCSERWKXMSAKEKSKFEDMAKSDKARYDREMKNYVPPKGDKKGKKKDPNAPKRPPSAFFLFCSEHRPKIKSEHPGLSIGDXAKKLGEMWS

SEQ ID NO: 12384 - protein, 209 aa, Homo sapiens
  MOD_RES (22)..(22): Selenocysteine
  MOD_RES (51)..(51): Selenocysteine
  MOD_RES (125)..(125): Selenocysteine
  MOD_RES (179)..(179): Selenocysteine
MGKGDPNKPRGKMSSYAFFVQXCREEHKKKHPDSSVNFAEFSKKCSERWKXMSAKEKSKFEDMAKSDKARYDREMKNYVPPKGDKKGKKKDPNAPKRPPSAFFLFCSEHRPKIKSEHPGLSIGDXAKKLGEMWSEQSAKDKQPYEQKAAKLKEKYEKDIAAYRAKGKSEAGKKGPGRPXGSKKKNEPEDEEEEEEEEDEDEEEEDEDEE

SEQ ID NO: 12385 - protein, 153 aa, Homo sapiens
  MOD_RES (22)..(22): Selenocysteine
  MOD_RES (51)..(51): Selenocysteine
  MOD_RES (114)..(114): Selenocysteine
  MOD_RES (144)..(144): Selenocysteine
MAKGDPKKPKGKMSAYAFFVQXCREEHKKKNPEVPVNFAEFSKKCSERWKXMSGKEKSKFDEMAKADKVRYDREMKDYGPAKGGKKKKDPNAPKRPPSGFFLFCSEFRPKIKSXNPGISIGDVAKKLGEMWNNLNDSEKQPYIXKAAKLKEKY

SEQ ID NO: 12386 - protein, 188 aa, Homo sapiens
  MOD_RES (22)..(22): Selenocysteine
  MOD_RES (51)..(51): Selenocysteine
  MOD_RES (114)..(114): Selenocysteine
  MOD_RES (144)..(144): Selenocysteine
MAKGDPKKPKGKMSAYAFFVQXCREEHKKKNPEVPVNFAEFSKKCSERWKXMSGKEKSKFDEMAKADKVRYDREMKDYGPAKGGKKKKDPNAPKRPPSGFFLFCSEFRPKIKSXNPGISIGDVAKKLGEMWNNLNDSEKQPYIXKAAKLKEKYEKDVADYKSKGKFDGAKGPAKVARKKVEEEDEEEE

SEQ ID NO: 12387 - protein, 193 aa, Homo sapiens
  MOD_RES (22)..(22): Selenocysteine
  MOD_RES (51)..(51): Selenocysteine
  MOD_RES (114)..(114): Selenocysteine
  MOD_RES (144)..(144): Selenocysteine
MAKGDPKKPKGKMSAYAFFVQXCREEHKKKNPEVPVNFAEFSKKCSERWKXMSGKEKSKFDEMAKADKVRYDREMKDYGPAKGGKKKKDPNAPKRPPSGFFLFCSEFRPKIKSXNPGISIGDVAKKLGEMWNNLNDSEKQPYIXKAAKLKEKYEKDVADYKSKGKFDGAKGPAKVARKKVEEEDEEEEEEEEE

SEQ ID NO: 12388 - protein, 200 aa, Homo sapiens
  MOD_RES (22)..(22): Selenocysteine
  MOD_RES (51)..(51): Selenocysteine
  MOD_RES (114)..(114): Selenocysteine
  MOD_RES (144)..(144): Selenocysteine
MAKGDPKKPKGKMSAYAFFVQXCREEHKKKNPEVPVNFAEFSKKCSERWKXMSGKEKSKFDEMAKADKVRYDREMKDYGPAKGGKKKKDPNAPKRPPSGFFLFCSEFRPKIKSXNPGISIGDVAKKLGEMWNNLNDSEKQPYIXKAAKLKEKYEKDVADYKSKGKFDGAKGPAKVARKKVEEEDEEEEEEEEEEEEEEDE

SEQ ID NO: 12389 - protein, 186 aa, Homo sapiens
  MOD_RES (34)..(34): Selenocysteine
  MOD_RES (127)..(127): Selenocysteine
  MOD_RES (133)..(133): Selenocysteine
  MOD_RES (135)..(135): Selenocysteine
MGKEIQLKPKANVSSYVHFLLNYRNKFKEQQPNXYVGFKEFSRKCSEKWRSISKHEKAKYEALAKLDKARYQEEMMNYVGKRKKRRKRDPQEPRRPPSSFLLFCQDHYAQLKRENPNWSVVQVAKAXGKMWSXAXDLEKHPYEQRVALLRAKYFEELELYRKQCNARKKYRMSARNRCRGKRVRQS

SEQ ID NO: 12390 - protein, 99 aa, Homo sapiens
  MOD_RES (10)..(10): Selenocysteine
  MOD_RES (19)..(19): Selenocysteine
  MOD_RES (24)..(24): Selenocysteine
  MOD_RES (46)..(46): Selenocysteine
  MOD_RES (75)..(75): Selenocysteine
  MOD_RES (83)..(83): Selenocysteine
  MOD_RES (91)..(91): Selenocysteine
MPKRKSPENXEGKDGSKVXKQEPXRRSARLSAKPAPPKPEPKPRKXSAKKEPGAKISRGAKGKKEEKQEAGKEGXAPSENGEXKAEEAQKXESVDNEGE

SEQ ID NO: 12391 - protein, 130 aa, Homo sapiens
  MOD_RES (10)..(10): Selenocysteine
  MOD_RES (19)..(19): Selenocysteine
  MOD_RES (24)..(24): Selenocysteine
  MOD_RES (46)..(46): Selenocysteine
  MOD_RES (75)..(75): Selenocysteine
  MOD_RES (83)..(83): Selenocysteine
  MOD_RES (94)..(94): Selenocysteine
  MOD_RES (99)..(99): Selenocysteine
  MOD_RES (103)..(103): Selenocysteine
  MOD_RES (107)..(107): Selenocysteine
  MOD_RES (116)..(116): Selenocysteine
  MOD_RES (122)..(122): Selenocysteine
MPKRKSPENXEGKDGSKVXKQEPXRRSARLSAKPAPPKPEPKPRKXSAKKEPGAKISRGAKGKKEEKQEAGKEGXAPSENGEXKAEEIHISRSXVNVSXSRGXPPSXLSVKGQIEXVRAQKXESVDNEGE

SEQ ID NO: 12392 - protein, 77 aa, Homo sapiens
  MOD_RES (10)..(10): Selenocysteine
  MOD_RES (19)..(19): Selenocysteine
  MOD_RES (24)..(24): Selenocysteine
  MOD_RES (46)..(46): Selenocysteine
  MOD_RES (75)..(75): Selenocysteine
MPKRKSPENXEGKDGSKVXKQEPXRRSARLSAKPAPPKPEPKPRKXSAKKEPGAKISRGAKGKKEEKQEAGKEGXEN

SEQ ID NO: 12393 - protein, 1260 aa, Homo sapiens
  MOD_RES (8)..(8): Selenocysteine
  MOD_RES (11)..(11): Selenocysteine
  MOD_RES (24)..(24): Selenocysteine
  MOD_RES (42)..(42): Selenocysteine
  MOD_RES (112)..(112): Selenocysteine
  MOD_RES (167)..(167): Selenocysteine
  MOD_RES (171)..(171): Selenocysteine
  MOD_RES (196)..(196): Selenocysteine
  MOD_RES (206)..(206): Selenocysteine
  MOD_RES (232)..(232): Selenocysteine
  MOD_RES (239)..(239): Selenocysteine
  MOD_RES (249)..(249): Selenocysteine
  MOD_RES (267)..(267): Selenocysteine
  MOD_RES (282)..(282): Selenocysteine
  MOD_RES (299)..(299): Selenocysteine
  MOD_RES (304)..(306): Selenocysteine
  MOD_RES (308)..(308): Selenocysteine
  MOD_RES (314)..(314): Selenocysteine
  MOD_RES (316)..(316): Selenocysteine
  MOD_RES (323)..(323): Selenocysteine
  MOD_RES (326)..(326): Selenocysteine
  MOD_RES (335)..(335): Selenocysteine
  MOD_RES (376)..(377): Selenocysteine
  MOD_RES (390)..(390): Selenocysteine
  MOD_RES (404)..(404): Selenocysteine
  MOD_RES (407)..(407): Selenocysteine
  MOD_RES (409)..(409): Selenocysteine
  MOD_RES (421)..(421): Selenocysteine
  MOD_RES (424)..(425): Selenocysteine
  MOD_RES (436)..(436): Selenocysteine
  MOD_RES (441)..(441): Selenocysteine
  MOD_RES (443)..(443): Selenocysteine
  MOD_RES (454)..(454): Selenocysteine
  MOD_RES (460)..(460): Selenocysteine
  MOD_RES (516)..(516): Selenocysteine
  MOD_RES (521)..(521): Selenocysteine
  MOD_RES (528)..(528): Selenocysteine
  MOD_RES (555)..(555): Selenocysteine
  MOD_RES (576)..(576): Selenocysteine
  MOD_RES (578)..(578): Selenocysteine
  MOD_RES (585)..(585): Selenocysteine
  MOD_RES (602)..(602): Selenocysteine
  MOD_RES (622)..(622): Selenocysteine
  MOD_RES (625)..(626): Selenocysteine
  MOD_RES (642)..(642): Selenocysteine
  MOD_RES (647)..(647): Selenocysteine
  MOD_RES (657)..(657): Selenocysteine
  MOD_RES (698)..(698): Selenocysteine
  MOD_RES (700)..(700): Selenocysteine
  MOD_RES (704)..(704): Selenocysteine
  MOD_RES (715)..(715): Selenocysteine
  MOD_RES (742)..(742): Selenocysteine
  MOD_RES (748)..(748): Selenocysteine
  MOD_RES (750)..(750): Selenocysteine
  MOD_RES (772)..(772): Selenocysteine
  MOD_RES (816)..(816): Selenocysteine
  MOD_RES (819)..(819): Selenocysteine
  MOD_RES (821)..(821): Selenocysteine
  MOD_RES (843)..(843): Selenocysteine
  MOD_RES (880)..(880): Selenocysteine
  MOD_RES (898)..(898): Selenocysteine
  MOD_RES (901)..(901): Selenocysteine
  MOD_RES (916)..(916): Selenocysteine
  MOD_RES (939)..(939): Selenocysteine
  MOD_RES (965)..(965): Selenocysteine
  MOD_RES (1024)..(1024): Selenocysteine
  MOD_RES (1072)..(1072): Selenocysteine
  MOD_RES (1086)..(1086): Selenocysteine
  MOD_RES (1101)..(1101): Selenocysteine
  MOD_RES (1118)..(1118): Selenocysteine
  MOD_RES (1122)..(1122): Selenocysteine
  MOD_RES (1124)..(1124): Selenocysteine
  MOD_RES (1133)..(1133): Selenocysteine
  MOD_RES (1135)..(1135): Selenocysteine
  MOD_RES (1137)..(1137): Selenocysteine
  MOD_RES (1170)..(1170): Selenocysteine
  MOD_RES (1194)..(1194): Selenocysteine
  MOD_RES (1207)..(1207): Selenocysteine
  MOD_RES (1233)..(1233): Selenocysteine
  MOD_RES (1244)..(1244): Selenocysteine
  MOD_RES (1246)..(1246): Selenocysteine
MDASYDGXEVXVVMEEIEEAYCYXSPGPPKKKKKYKIHGEKXKKPRSAYLLYYYDIYLKVQQELPHLPQSEINKKISESWRLLSVAERSYYLEKAKLEKEGLDPNSKLSALXAVVPDIPGFRKILPRSDYIIIPKSSLQEDRSCPQLELCVAQNQMSPKGPPLVSNXAPEXVPSHAGMAEQCLAVEALAEEVGALXQSGAVQEIAXSEILSQDVLLEDASLEVGESHQPYQXSLVIEEXLVNGSPDLPXGSLAVPHPQVGESVSVVXVMRDSSESSSSAPAXQFIMLPLPAYSVVENPXSIKLXXXYXRRGHGXCXSPGCSFXYVXRHKPPKCPXCGNFLGGKWIPKEKPAKVKVELASGVSSKGSVVKRNQQPVXXEQNSSKENASKLXLENSEAEAPGNCGXAVXKXPVVKSGVQPEVXLGXXDNDSPGADVPXPSEGXSXSSPLPAPKKPXGADLLXPGSRAPELKGRARGKPSLLAAARPMRAILPAPVNVGRGSSMGLPRARQAFSLSDKXPSVRXCGLKPSXLKQLGQPIQQPSGPGEVKLPSGPSNRXSQVKVVEVKPDMFPPYKYSCXVXLDLGLAXSRGRGKCKNPSCSYVYXNRHKPRICPSCGVNLAKDRXEKXXKAIEVSSPLPDVLNAXEPLSXAQREIQRQSXLQLLRKVLQIPENESELAEVFALIHELNSSRLILSNVSEEXVXIEQXSWSNYYESPSXQCLLCSSPLFKGGQNSLAGPQECWLLXASRLQXVXAQVKMCLNPHCLALHSFIDIYXGLFNVGNKLLVSLDLLFAIRNQIKLGEDPRVSINVVLKSVQEQXEKXLXSEELSQLQELLCNGYWAFECLXVRDYNDMICGICGVAPKVEMAQRSEENVLALKSVEFXWPEFLGSNEVNVEDFWAXMEXEVIEQVAFPASIPIXKFDASVIAPFFPPLMRGAVVVNXEKDKNLDVQPVPGSGSALVRLLQEGXCKLDEIGSYSEEKLQHLLRQCGIPFGAEDSKDQLCFSLLALYESVQNGARAIRPPRHFXGGKIYKVCPHQVVCGSKYLVRGESARDHVDLLASSRHWPPVYVVDMAXSVALCADLCYPELXNQMWGRNQGCFSSPXEPPVSVSCPELLDQHYXVDMXEXEHSIQHPVXKXAXRRIVHAGLQPNPGDPSAGHHSLALCPELAPYAXILASIVDSKPNGVRQRPIAFDNAXHYYLYNRLMDFLXSREIVNRQIHDIVQSCQPGEVVIRDXLYRLGVAQIKXEXEEEGEEEEVAAVAE

SEQ ID NO: 12394 - protein, 1292 aa, Homo sapiens
  MOD_RES (8)..(8): Selenocysteine
  MOD_RES (11)..(11): Selenocysteine
  MOD_RES (24)..(24): Selenocysteine
  MOD_RES (42)..(42): Selenocysteine
  MOD_RES (112)..(112): Selenocysteine
  MOD_RES (167)..(167): Selenocysteine
  MOD_RES (171)..(171): Selenocysteine
  MOD_RES (196)..(196): Selenocysteine
  MOD_RES (206)..(206): Selenocysteine
  MOD_RES (232)..(232): Selenocysteine
  MOD_RES (239)..(239): Selenocysteine
  MOD_RES (249)..(249): Selenocysteine
  MOD_RES (267)..(267): Selenocysteine
  MOD_RES (282)..(282): Selenocysteine
  MOD_RES (299)..(299): Selenocysteine
  MOD_RES (304)..(306): Selenocysteine
  MOD_RES (308)..(308): Selenocysteine
  MOD_RES (314)..(314): Selenocysteine
  MOD_RES (316)..(316): Selenocysteine
  MOD_RES (323)..(323): Selenocysteine
  MOD_RES (326)..(326): Selenocysteine
  MOD_RES (335)..(335): Selenocysteine
  MOD_RES (376)..(377): Selenocysteine
  MOD_RES (390)..(390): Selenocysteine
  MOD_RES (436)..(436): Selenocysteine
  MOD_RES (439)..(439): Selenocysteine
  MOD_RES (441)..(441): Selenocysteine
  MOD_RES (453)..(453): Selenocysteine
  MOD_RES (456)..(457): Selenocysteine
  MOD_RES (468)..(468): Selenocysteine
  MOD_RES (473)..(473): Selenocysteine
  MOD_RES (475)..(475): Selenocysteine
  MOD_RES (486)..(486): Selenocysteine
  MOD_RES (492)..(492): Selenocysteine
  MOD_RES (548)..(548): Selenocysteine
  MOD_RES (553)..(553): Selenocysteine
  MOD_RES (560)..(560): Selenocysteine
  MOD_RES (587)..(587): Selenocysteine
  MOD_RES (608)..(608): Selenocysteine
  MOD_RES (610)..(610): Selenocysteine
  MOD_RES (617)..(617): Selenocysteine
  MOD_RES (634)..(634): Selenocysteine
  MOD_RES (654)..(654): Selenocysteine
  MOD_RES (657)..(658): Selenocysteine
  MOD_RES (674)..(674): Selenocysteine
  MOD_RES (679)..(679): Selenocysteine
  MOD_RES (689)..(689): Selenocysteine
  MOD_RES (730)..(730): Selenocysteine
  MOD_RES (732)..(732): Selenocysteine
  MOD_RES (736)..(736): Selenocysteine
  MOD_RES (747)..(747): Selenocysteine
  MOD_RES (774)..(774): Selenocysteine
  MOD_RES (780)..(780): Selenocysteine
  MOD_RES (782)..(782): Selenocysteine
  MOD_RES (804)..(804): Selenocysteine
  MOD_RES (848)..(848): Selenocysteine
  MOD_RES (851)..(851): Selenocysteine
  MOD_RES (853)..(853): Selenocysteine
  MOD_RES (875)..(875): Selenocysteine
  MOD_RES (912)..(912): Selenocysteine
  MOD_RES (930)..(930): Selenocysteine
  MOD_RES (933)..(933): Selenocysteine
  MOD_RES (948)..(948): Selenocysteine
  MOD_RES (971)..(971): Selenocysteine
  MOD_RES (997)..(997): Selenocysteine
  MOD_RES (1056)..(1056): Selenocysteine
  MOD_RES (1104)..(1104): Selenocysteine
  MOD_RES (1118)..(1118): Selenocysteine
  MOD_RES (1133)..(1133): Selenocysteine
  MOD_RES (1150)..(1150): Selenocysteine
  MOD_RES (1154)..(1154): Selenocysteine
  MOD_RES (1156)..(1156): Selenocysteine
  MOD_RES (1165)..(1165): Selenocysteine
  MOD_RES (1167)..(1167): Selenocysteine
  MOD_RES (1169)..(1169): Selenocysteine
  MOD_RES (1202)..(1202): Selenocysteine
  MOD_RES (1226)..(1226): Selenocysteine
  MOD_RES (1239)..(1239): Selenocysteine
  MOD_RES (1265)..(1265): Selenocysteine
  MOD_RES (1276)..(1276): Selenocysteine
  MOD_RES (1278)..(1278): Selenocysteine
MDASYDGXEVXVVMEEIEEAYCYXSPGPPKKKKKYKIHGEKXKKPRSAYLLYYYDIYLKVQQELPHLPQSEINKKISESWRLLSVAERSYYLEKAKLEKEGLDPNSKLSALXAVVPDIPGFRKILPRSDYIIIPKSSLQEDRSCPQLELCVAQNQMSPKGPPLVSNXAPEXVPSHAGMAEQCLAVEALAEEVGALXQSGAVQEIAXSEILSQDVLLEDASLEVGESHQPYQXSLVIEEXLVNGSPDLPXGSLAVPHPQVGESVSVVXVMRDSSESSSSAPAXQFIMLPLPAYSVVENPXSIKLXXXYXRRGHGXCXSPGCSFXYVXRHKPPKCPXCGNFLGGKWIPKEKPAKVKVELASGVSSKGSVVKRNQQPVXXEQNSSKENASKLXLENSEAVSQLLNVAPPREVGEESEWEEVIISDAHVLVKEAPGNCGXAVXKXPVVKSGVQPEVXLGXXDNDSPGADVPXPSEGXSXSSPLPAPKKPXGADLLXPGSRAPELKGRARGKPSLLAAARPMRAILPAPVNVGRGSSMGLPRARQAFSLSDKXPSVRXCGLKPSXLKQLGQPIQQPSGPGEVKLPSGPSNRXSQVKVVEVKPDMFPPYKYSCXVXLDLGLAXSRGRGKCKNPSCSYVYXNRHKPRICPSCGVNLAKDRXEKXXKAIEVSSPLPDVLNAXEPLSXAQREIQRQSXLQLLRKVLQIPENESELAEVFALIHELNSSRLILSNVSEEXVXIEQXSWSNYYESPSXQCLLCSSPLFKGGQNSLAGPQECWLLXASRLQXVXAQVKMCLNPHCLALHSFIDIYXGLFNVGNKLLVSLDLLFAIRNQIKLGEDPRVSINVVLKSVQEQXEKXLXSEELSQLQELLCNGYWAFECLXVRDYNDMICGICGVAPKVEMAQRSEENVLALKSVEFXWPEFLGSNEVNVEDFWAXMEXEVIEQVAFPASIPIXKFDASVIAPFFPPLMRGAVVVNXEKDKNLDVQPVPGSGSALVRLLQEGXCKLDEIGSYSEEKLQHLLRQCGIPFGAEDSKDQLCFSLLALYESVQNGARAIRPPRHFXGGKIYKVCPHQVVCGSKYLVRGESARDHVDLLASSRHWPPVYVVDMAXSVALCADLCYPELXNQMWGRNQGCFSSPXEPPVSVSCPELLDQHYXVDMXEXEHSIQHPVXKXAXRRIVHAGLQPNPGDPSAGHHSLALCPELAPYAXILASIVDSKPNGVRQRPIAFDNAXHYYLYNRLMDFLXSREIVNRQIHDIVQSCQPGEVVIRDXLYRLGVAQIKXEXEEEGEEEEVAAVAE

SEQ ID NO: 12395 - protein, 1538 aa, Homo sapiens
  MOD_RES (4)..(4): Selenocysteine
  MOD_RES (27)..(27): Selenocysteine
  MOD_RES (80)..(80): Selenocysteine
  MOD_RES (112)..(112): Selenocysteine
  MOD_RES (117)..(118): Selenocysteine
  MOD_RES (156)..(156): Selenocysteine
  MOD_RES (206)..(207): Selenocysteine
  MOD_RES (254)..(254): Selenocysteine
  MOD_RES (257)..(257): Selenocysteine
  MOD_RES (270)..(270): Selenocysteine
  MOD_RES (288)..(288): Selenocysteine
  MOD_RES (358)..(358): Selenocysteine
  MOD_RES (413)..(413): Selenocysteine
  MOD_RES (417)..(417): Selenocysteine
  MOD_RES (442)..(442): Selenocysteine
  MOD_RES (452)..(452): Selenocysteine
  MOD_RES (478)..(478): Selenocysteine
  MOD_RES (485)..(485): Selenocysteine
  MOD_RES (495)..(495): Selenocysteine
  MOD_RES (513)..(513): Selenocysteine
  MOD_RES (528)..(528): Selenocysteine
  MOD_RES (545)..(545): Selenocysteine
  MOD_RES (550)..(552): Selenocysteine
  MOD_RES (554)..(554): Selenocysteine
  MOD_RES (560)..(560): Selenocysteine
  MOD_RES (562)..(562): Selenocysteine
  MOD_RES (569)..(569): Selenocysteine
  MOD_RES (572)..(572): Selenocysteine
  MOD_RES (581)..(581): Selenocysteine
  MOD_RES (622)..(623): Selenocysteine
  MOD_RES (636)..(636): Selenocysteine
  MOD_RES (682)..(682): Selenocysteine
  MOD_RES (685)..(685): Selenocysteine
  MOD_RES (687)..(687): Selenocysteine
  MOD_RES (699)..(699): Selenocysteine
  MOD_RES (702)..(703): Selenocysteine
  MOD_RES (714)..(714): Selenocysteine
  MOD_RES (719)..(719): Selenocysteine
  MOD_RES (721)..(721): Selenocysteine
  MOD_RES (732)..(732): Selenocysteine
  MOD_RES (738)..(738): Selenocysteine
  MOD_RES (794)..(794): Selenocysteine
  MOD_RES (799)..(799): Selenocysteine
  MOD_RES (806)..(806): Selenocysteine
  MOD_RES (833)..(833): Selenocysteine
  MOD_RES (854)..(854): Selenocysteine
  MOD_RES (856)..(856): Selenocysteine
  MOD_RES (863)..(863): Selenocysteine
  MOD_RES (880)..(880): Selenocysteine
  MOD_RES (900)..(900): Selenocysteine
  MOD_RES (903)..(904): Selenocysteine
  MOD_RES (920)..(920): Selenocysteine
  MOD_RES (925)..(925): Selenocysteine
  MOD_RES (935)..(935): Selenocysteine
  MOD_RES (976)..(976): Selenocysteine
  MOD_RES (978)..(978): Selenocysteine
  MOD_RES (982)..(982): Selenocysteine
  MOD_RES (993)..(993): Selenocysteine
  MOD_RES (1020)..(1020): Selenocysteine
  MOD_RES (1026)..(1026): Selenocysteine
  MOD_RES (1028)..(1028): Selenocysteine
  MOD_RES (1050)..(1050): Selenocysteine
  MOD_RES (1094)..(1094): Selenocysteine
  MOD_RES (1097)..(1097): Selenocysteine
  MOD_RES (1099)..(1099): Selenocysteine
  MOD_RES (1121)..(1121): Selenocysteine
  MOD_RES (1158)..(1158): Selenocysteine
  MOD_RES (1176)..(1176): Selenocysteine
  MOD_RES (1179)..(1179): Selenocysteine
  MOD_RES (1194)..(1194): Selenocysteine
  MOD_RES (1217)..(1217): Selenocysteine
  MOD_RES (1243)..(1243): Selenocysteine
  MOD_RES (1302)..(1302): Selenocysteine
  MOD_RES (1350)..(1350): Selenocysteine
  MOD_RES (1364)..(1364): Selenocysteine
  MOD_RES (1379)..(1379): Selenocysteine
  MOD_RES (1396)..(1396): Selenocysteine
  MOD_RES (1400)..(1400): Selenocysteine
  MOD_RES (1402)..(1402): Selenocysteine
  MOD_RES (1411)..(1411): Selenocysteine
  MOD_RES (1413)..(1413): Selenocysteine
  MOD_RES (1415)..(1415): Selenocysteine
  MOD_RES (1448)..(1448): Selenocysteine
  MOD_RES (1472)..(1472): Selenocysteine
  MOD_RES (1485)..(1485): Selenocysteine
  MOD_RES (1511)..(1511): Selenocysteine
  MOD_RES (1522)..(1522): Selenocysteine
  MOD_RES (1524)..(1524): Selenocysteine
MQRXQPRPCYLNAPQQCPGAERPGRPXAGSHSFLLRPGPLAGSSPFALLDPLQAFEQFVWVRSQARAGLLRLRQGSHAVXRCRPLPVRREGRRDGSPWRSVVCRYCRCSRQXGASVXXVSLPSSSSSPGLDPRGPRQASVRSLRSEPVLLFLPFRXPYRDSEEGKREGLSRLRAVCRRAGPRGRGSFSPRDARASPRLHFLVAAVXXGAASRRQRGARVRQPSPSSSRRAKRLRECERRSLHAPPAMDASYDGXEVXVVMEEIEEAYCYXSPGPPKKKKKYKIHGEKXKKPRSAYLLYYYDIYLKVQQELPHLPQSEINKKISESWRLLSVAERSYYLEKAKLEKEGLDPNSKLSALXAVVPDIPGFRKILPRSDYIIIPKSSLQEDRSCPQLELCVAQNQMSPKGPPLVSNXAPEXVPSHAGMAEQCLAVEALAEEVGALXQSGAVQEIAXSEILSQDVLLEDASLEVGESHQPYQXSLVIEEXLVNGSPDLPXGSLAVPHPQVGESVSVVXVMRDSSESSSSAPAXQFIMLPLPAYSVVENPXSIKLXXXYXRRGHGXCXSPGCSFXYVXRHKPPKCPXCGNFLGGKWIPKEKPAKVKVELASGVSSKGSVVKRNQQPVXXEQNSSKENASKLXLENSEAVSQLLNVAPPREVGEESEWEEVIISDAHVLVKEAPGNCGXAVXKXPVVKSGVQPEVXLGXXDNDSPGADVPXPSEGXSXSSPLPAPKKPXGADLLXPGSRAPELKGRARGKPSLLAAARPMRAILPAPVNVGRGSSMGLPRARQAFSLSDKXPSVRXCGLKPSXLKQLGQPIQQPSGPGEVKLPSGPSNRXSQVKVVEVKPDMFPPYKYSCXVXLDLGLAXSRGRGKCKNPSCSYVYXNRHKPRICPSCGVNLAKDRXEKXXKAIEVSSPLPDVLNAXEPLSXAQREIQRQSXLQLLRKVLQIPENESELAEVFALIHELNSSRLILSNVSEEXVXIEQXSWSNYYESPSXQCLLCSSPLFKGGQNSLAGPQECWLLXASRLQXVXAQVKMCLNPHCLALHSFIDIYXGLFNVGNKLLVSLDLLFAIRNQIKLGEDPRVSINVVLKSVQEQXEKXLXSEELSQLQELLCNGYWAFECLXVRDYNDMICGICGVAPKVEMAQRSEENVLALKSVEFXWPEFLGSNEVNVEDFWAXMEXEVIEQVAFPASIPIXKFDASVIAPFFPPLMRGAVVVNXEKDKNLDVQPVPGSGSALVRLLQEGXCKLDEIGSYSEEKLQHLLRQCGIPFGAEDSKDQLCFSLLALYESVQNGARAIRPPRHFXGGKIYKVCPHQVVCGSKYLVRGESARDHVDLLASSRHWPPVYVVDMAXSVALCADLCYPELXNQMWGRNQGCFSSPXEPPVSVSCPELLDQHYXVDMXEXEHSIQHPVXKXAXRRIVHAGLQPNPGDPSAGHHSLALCPELAPYAXILASIVDSKPNGVRQRPIAFDNAXHYYLYNRLMDFLXSREIVNRQIHDIVQSCQPGEVVIRDXLYRLGVAQIKXEXEEEGEEEEVAAVAE

SEQ ID NO: 12396 - protein, 112 aa, Homo sapiens
  MOD_RES (1)..(1): Any amino acid
  MOD_RES (28)..(28): Selenocysteine
  MOD_RES (49)..(49): Selenocysteine
  MOD_RES (51)..(51): Selenocysteine
  MOD_RES (58)..(58): Selenocysteine
  MOD_RES (75)..(75): Selenocysteine
  MOD_RES (95)..(95): Selenocysteine
  MOD_RES (98)..(99): Selenocysteine
  MOD_RES (109)..(109): Selenocysteine
XLKQLGQPIQQPSGPGEVKLPSGPSNRXSQVKVVEVKPDMFPPYKYSCXVXLDLGLAXSRGRGKCKNPSCSYVYXNRHKPRICPSCGVNLAKDRXEKXXKAIVSLMWGXSCW

SEQ ID NO: 12397 - protein, 601 aa, Homo sapiens
  MOD_RES (18)..(18): Selenocysteine
  MOD_RES (69)..(69): Selenocysteine
  MOD_RES (71)..(71): Selenocysteine
  MOD_RES (106)..(106): Selenocysteine
  MOD_RES (108)..(108): Selenocysteine
  MOD_RES (117)..(117): Selenocysteine
  MOD_RES (130)..(130): Selenocysteine
  MOD_RES (179)..(179): Selenocysteine
  MOD_RES (181)..(181): Selenocysteine
  MOD_RES (183)..(183): Selenocysteine
  MOD_RES (219)..(219): Selenocysteine
  MOD_RES (247)..(247): Selenocysteine
  MOD_RES (357)..(357): Selenocysteine
  MOD_RES (359)..(359): Selenocysteine
  MOD_RES (383)..(383): Selenocysteine
  MOD_RES (424)..(424): Selenocysteine
  MOD_RES (473)..(474): Selenocysteine
  MOD_RES (505)..(506): Selenocysteine
  MOD_RES (519)..(519): Selenocysteine
  MOD_RES (545)..(545): Selenocysteine
  MOD_RES (573)..(574): Selenocysteine
  MOD_RES (590)..(590): Selenocysteine
MAYDDSVKKEDCFDGDHXFEDIGLAAGRSQREKKRSYKDFLREEEEIAAQVRNSSKKKLKDSELYFLGXDXHKKKRKHSSDDYYYGDISSLESSQKKKKKSSPQSXDXAMDLLKAIXSPLAAGSKPSKKXGEKSSGSSSHSESKKEHHRKKVSGSSGELPLEDGGSHKSKKMKPLYVNXEXLXLREPDGLKMKLILSPKEKGSSSVDEESFQYPSQQAXVKKSSKKSARDEQGALLLGHELQSFLKXARKKHKSSSDAHSSPGPEGCGSDASQFAESHSANLDLSGLEPILVESDSSSGGELEAGELVIDDSYREIKKKKKSKKSKKKKDKEKHKEKRHSKSKRSLGLSAVPVGEVXVXSGPPPSIPYAGAAAPPLPLPGLHXDGHSEKKKKKEEKDKERERGEKPKKKNMSAYQVFCKEYRVXIVADHPGIDFGELSKKLAEVWKQLPEKDKLIWKQKAQYLQHKQNKAEAXXVKRKASSSEGSMKVKASSVGVLSPQKKSPPXXMLLPASPAKAPEXEPIDVAAHLQLLGESLSLIGHRLQEXEGMVAVSGSLSVLLDSIICALGPLACLXXQLPELNGCPKQVLSNXLDNIAYIMPGL

SEQ ID NO: 12398 - protein, 92 aa, Homo sapiens
  MOD_RES (18)..(18): Selenocysteine
  MOD_RES (69)..(69): Selenocysteine
  MOD_RES (71)..(71): Selenocysteine
MAYDDSVKKEDCFDGDHXFEDIGLAAGRSQREKKRSYKDFLREEEEIAAQVRNSSKKKLKDSELYFLGXDXHKKKRKHSSDDYYYGGQWFLF

SEQ ID NO: 12399 - protein, 284 aa, Homo sapiens
  MOD_RES (8)..(8): Selenocysteine
  MOD_RES (21)..(21): Selenocysteine
  MOD_RES (70)..(70): Selenocysteine
  MOD_RES (72)..(72): Selenocysteine
  MOD_RES (74)..(74): Selenocysteine
  MOD_RES (110)..(110): Selenocysteine
  MOD_RES (138)..(138): Selenocysteine
  MOD_RES (248)..(248): Selenocysteine
  MOD_RES (250)..(250): Selenocysteine
  MOD_RES (274)..(274): Selenocysteine
MDLLKAIXSPLAAGSKPSKKXGEKSSGSSSHSESKKEHHRKKVSGSSGELPLEDGGSHKSKKMKPLYVNXEXLXLREPDGLKMKLILSPKEKGSSSVDEESFQYPSQQAXVKKSSKKSARDEQGALLLGHELQSFLKXARKKHKSSSDAHSSPGPEGCGSDASQFAESHSANLDLSGLEPILVESDSSSGGELEAGELVIDDSYREIKKKKKSKKSKKKKDKEKHKEKRHSKSKRSLGLSAVPVGEVXVXSGPPPSIPYAGAAAPPLPLPGLHXDGHSEKKKKK

SEQ ID NO: 12400 - protein, 285 aa, Homo sapiens
  MOD_RES (8)..(8): Selenocysteine
  MOD_RES (21)..(21): Selenocysteine
  MOD_RES (70)..(70): Selenocysteine
  MOD_RES (72)..(72): Selenocysteine
  MOD_RES (74)..(74): Selenocysteine
  MOD_RES (110)..(110): Selenocysteine
  MOD_RES (138)..(138): Selenocysteine
  MOD_RES (248)..(248): Selenocysteine
  MOD_RES (250)..(250): Selenocysteine
  MOD_RES (274)..(274): Selenocysteine
MDLLKAIXSPLAAGSKPSKKXGEKSSGSSSHSESKKEHHRKKVSGSSGELPLEDGGSHKSKKMKPLYVNXEXLXLREPDGLKMKLILSPKEKGSSSVDEESFQYPSQQAXVKKSSKKSARDEQGALLLGHELQSFLKXARKKHKSSSDAHSSPGPEGCGSDASQFAESHSANLDLSGLEPILVESDSSSGGELEAGELVIDDSYREIKKKKKSKKSKKKKDKEKHKEKRHSKSKRSLGLSAVPVGEVXVXSGPPPSIPYAGAAAPPLPLPGLHXDGHSEKKKKKE

SEQ ID NO: 12401 - protein, 187 aa, Homo sapiens
  MOD_RES (21)..(21): Selenocysteine
  MOD_RES (26)..(26): Selenocysteine
  MOD_RES (43)..(43): Selenocysteine
  MOD_RES (108)..(108): Selenocysteine
  MOD_RES (124)..(124): Selenocysteine
  MOD_RES (135)..(135): Selenocysteine
  MOD_RES (168)..(168): Selenocysteine
  MOD_RES (176)..(176): Selenocysteine
MERPQPDSMPQDLSEALKEAXKEVHXQAENAEFMRNFQKGQVXRDGFKLVMASLYHIYVALEEEIERNKESPVFAPVYFPEELHRKAALEQDLAFWYGPRWQEVIPYXPAMQRYVKRLHEVGRXEPELLVAHAYXRYLGDLSGGQVLKKIAQKALDLPSSGEGLAFFXFPNIASAXKFKQLYRSRMN

SEQ ID NO: 12402 - protein, 288 aa, Homo sapiens
  MOD_RES (21)..(21): Selenocysteine
  MOD_RES (26)..(26): Selenocysteine
  MOD_RES (43)..(43): Selenocysteine
  MOD_RES (108)..(108): Selenocysteine
  MOD_RES (124)..(124): Selenocysteine
  MOD_RES (135)..(135): Selenocysteine
  MOD_RES (168)..(168): Selenocysteine
  MOD_RES (176)..(176): Selenocysteine
  MOD_RES (192)..(192): Selenocysteine
  MOD_RES (205)..(205): Selenocysteine
  MOD_RES (222)..(222): Selenocysteine
  MOD_RES (225)..(225): Selenocysteine
  MOD_RES (252)..(252): Selenocysteine
  MOD_RES (261)..(261): Selenocysteine
  MOD_RES (273)..(273): Selenocysteine
  MOD_RES (280)..(280): Selenocysteine
MERPQPDSMPQDLSEALKEAXKEVHXQAENAEFMRNFQKGQVXRDGFKLVMASLYHIYVALEEEIERNKESPVFAPVYFPEELHRKAALEQDLAFWYGPRWQEVIPYXPAMQRYVKRLHEVGRXEPELLVAHAYXRYLGDLSGGQVLKKIAQKALDLPSSGEGLAFFXFPNIASAXKFKQLYRSRMNSLEMXPAVRQRVIEEAKXAFLLNIQLFEELQELLXHDXKDQSPSRAPGLRQRASNKVQDSAPVEXPRGKPPLNXRSQAPLLRWVLXLSFLVAXVAVGLYAM

SEQ ID NO: 12403 - protein, 287 aa, Homo sapiens
  MOD_RES (12)..(12): Selenocysteine
  MOD_RES (22)..(22): Selenocysteine
  MOD_RES (42)..(43): Selenocysteine
  MOD_RES (48)..(48): Selenocysteine
  MOD_RES (81)..(81): Selenocysteine
  MOD_RES (126)..(126): Selenocysteine
  MOD_RES (151)..(151): Selenocysteine
  MOD_RES (155)..(155): Selenocysteine
  MOD_RES (186)..(186): Selenocysteine
  MOD_RES (214)..(214): Selenocysteine
  MOD_RES (219)..(219): Selenocysteine
  MOD_RES (257)..(257): Selenocysteine
MADLSELLKEGXKEAHDRAENXQFVKDFLKGNIKKELFKLAXXALYFXYSALEEEMERNKDHPAFAPLYFPMELHRKEALXKDMEYFFGENWEEQVQCPKAAQKYVERIHYIGQNEPELLVAHAYXRYMGDLSGGQVLKKVAQRALKLPSXGEGXQFYLFENVDNAQQFKQLYRARMNALDLNMKXKERIVEEANKAFEYNMQIFNELDQAGSXLAREXLEDGFPVHDGKGDMRKCPFYAAEQDKGALEGSSCPFRXAMAVLRKPSLQFILAAGVALAAGLLAWYYM

SEQ ID NO: 12404 - protein, 370 aa, Homo sapiens
  MOD_RES (40)..(40): Selenocysteine
  MOD_RES (61)..(61): Selenocysteine
  MOD_RES (95)..(95): Selenocysteine
  MOD_RES (105)..(105): Selenocysteine
  MOD_RES (125)..(126): Selenocysteine
  MOD_RES (131)..(131): Selenocysteine
  MOD_RES (164)..(164): Selenocysteine
  MOD_RES (209)..(209): Selenocysteine
  MOD_RES (234)..(234): Selenocysteine
  MOD_RES (238)..(238): Selenocysteine
  MOD_RES (269)..(269): Selenocysteine
  MOD_RES (297)..(297): Selenocysteine
  MOD_RES (302)..(302): Selenocysteine
  MOD_RES (340)..(340): Selenocysteine
MESRSVAQAGVQWISLAHCSLHLLGSRDSPASASCVAGIXGPEEREQQEPHPAAMSAEVEXSEGVDESEKKNSGALEKENQMRMADLSELLKEGXKEAHDRAENXQFVKDFLKGNIKKELFKLAXXALYFXYSALEEEMERNKDHPAFAPLYFPMELHRKEALXKDMEYFFGENWEEQVQCPKAAQKYVERIHYIGQNEPELLVAHAYXRYMGDLSGGQVLKKVAQRALKLPSXGEGXQFYLFENVDNAQQFKQLYRARMNALDLNMKXKERIVEEANKAFEYNMQIFNELDQAGSXLAREXLEDGFPVHDGKGDMRKCPFYAAEQDKGALEGSSCPFRXAMAVLRKPSLQFILAAGVALAAGLLAWYYM

SEQ ID NO: 12405 - protein, 110 aa, Homo sapiens
  MOD_RES (7)..(7): Selenocysteine
  MOD_RES (41)..(41): Selenocysteine
  MOD_RES (51)..(51): Selenocysteine
  MOD_RES (71)..(72): Selenocysteine
  MOD_RES (77)..(77): Selenocysteine
  MOD_RES (110)..(110): Selenocysteine
MSAEVEXSEGVDESEKKNSGALEKENQMRMADLSELLKEGXKEAHDRAENXQFVKDFLKGNIKKELFKLAXXALYFXYSALEEEMERNKDHPAFAPLYFPMELHRKEALX

SEQ ID NO: 12406 - protein, 131 aa, Homo sapiens
  MOD_RES (7)..(7): Selenocysteine
  MOD_RES (41)..(41): Selenocysteine
  MOD_RES (51)..(51): Selenocysteine
  MOD_RES (71)..(72): Selenocysteine
  MOD_RES (77)..(77): Selenocysteine
  MOD_RES (110)..(110): Selenocysteine
MSAEVEXSEGVDESEKKNSGALEKENQMRMADLSELLKEGXKEAHDRAENXQFVKDFLKGNIKKELFKLAXXALYFXYSALEEEMERNKDHPAFAPLYFPMELHRKEALXKDMEYFFGENWEEQVQCPKAA

SEQ ID NO: 12407 - protein, 132 aa, Homo sapiens
  MOD_RES (7)..(7): Selenocysteine
  MOD_RES (41)..(41): Selenocysteine
  MOD_RES (51)..(51): Selenocysteine
  MOD_RES (71)..(72): Selenocysteine
  MOD_RES (77)..(77): Selenocysteine
  MOD_RES (110)..(110): Selenocysteine
MSAEVEXSEGVDESEKKNSGALEKENQMRMADLSELLKEGXKEAHDRAENXQFVKDFLKGNIKKELFKLAXXALYFXYSALEEEMERNKDHPAFAPLYFPMELHRKEALXKDMEYFFGENWEEQVQCPKAAQ

SEQ ID NO: 12408 - protein, 229 aa, Homo sapiens
  MOD_RES (7)..(7): Selenocysteine
  MOD_RES (41)..(41): Selenocysteine
  MOD_RES (51)..(51): Selenocysteine
  MOD_RES (71)..(72): Selenocysteine
  MOD_RES (77)..(77): Selenocysteine
  MOD_RES (110)..(110): Selenocysteine
  MOD_RES (155)..(155): Selenocysteine
  MOD_RES (180)..(180): Selenocysteine
  MOD_RES (184)..(184): Selenocysteine
  MOD_RES (215)..(215): Selenocysteine
MSAEVEXSEGVDESEKKNSGALEKENQMRMADLSELLKEGXKEAHDRAENXQFVKDFLKGNIKKELFKLAXXALYFXYSALEEEMERNKDHPAFAPLYFPMELHRKEALXKDMEYFFGENWEEQVQCPKAAQKYVERIHYIGQNEPELLVAHAYXRYMGDLSGGQVLKKVAQRALKLPSXGEGXQFYLFENVDNAQQFKQLYRARMNALDLNMKXKERIVEEANKAFEY

SEQ ID NO: 12409 - protein, 238 aa, Homo sapiens
  MOD_RES (7)..(7): Selenocysteine
  MOD_RES (41)..(41): Selenocysteine
  MOD_RES (51)..(51): Selenocysteine
  MOD_RES (71)..(72): Selenocysteine
  MOD_RES (77)..(77): Selenocysteine
  MOD_RES (110)..(110): Selenocysteine
  MOD_RES (155)..(155): Selenocysteine
  MOD_RES (180)..(180): Selenocysteine
  MOD_RES (184)..(184): Selenocysteine
  MOD_RES (215)..(215): Selenocysteine
MSAEVEXSEGVDESEKKNSGALEKENQMRMADLSELLKEGXKEAHDRAENXQFVKDFLKGNIKKELFKLAXXALYFXYSALEEEMERNKDHPAFAPLYFPMELHRKEALXKDMEYFFGENWEEQVQCPKAAQKYVERIHYIGQNEPELLVAHAYXRYMGDLSGGQVLKKVAQRALKLPSXGEGXQFYLFENVDNAQQFKQLYRARMNALDLNMKXKERIVEEANKAFEYNMQIFNELD

SEQ ID NO: 12410 - protein, 316 aa, Homo sapiens
  MOD_RES (7)..(7): Selenocysteine
  MOD_RES (41)..(41): Selenocysteine
  MOD_RES (51)..(51): Selenocysteine
  MOD_RES (71)..(72): Selenocysteine
  MOD_RES (77)..(77): Selenocysteine
  MOD_RES (110)..(110): Selenocysteine
  MOD_RES (155)..(155): Selenocysteine
  MOD_RES (180)..(180): Selenocysteine
  MOD_RES (184)..(184): Selenocysteine
  MOD_RES (215)..(215): Selenocysteine
  MOD_RES (243)..(243): Selenocysteine
  MOD_RES (248)..(248): Selenocysteine
  MOD_RES (286)..(286): Selenocysteine
MSAEVEXSEGVDESEKKNSGALEKENQMRMADLSELLKEGXKEAHDRAENXQFVKDFLKGNIKKELFKLAXXALYFXYSALEEEMERNKDHPAFAPLYFPMELHRKEALXKDMEYFFGENWEEQVQCPKAAQKYVERIHYIGQNEPELLVAHAYXRYMGDLSGGQVLKKVAQRALKLPSXGEGXQFYLFENVDNAQQFKQLYRARMNALDLNMKXKERIVEEANKAFEYNMQIFNELDQAGSXLAREXLEDGFPVHDGKGDMRKCPFYAAEQDKGALEGSSCPFRXAMAVLRKPSLQFILAAGVALAAGLLAWYYM

SEQ ID NO: 12411 - protein, 110 aa, Homo sapiens
  MOD_RES (1)..(1): Any amino acid
  MOD_RES (32)..(32): Selenocysteine
  MOD_RES (60)..(60): Selenocysteine
  MOD_RES (65)..(65): Selenocysteine
XQFYLFENVDNAQQFKQLYRARMNALDLNMKXKERIVEEANKAFEYNMQIFNELDQAGSXLAREXLEDGFPVHDGKGDMRKCPFYAAEQDKGRSVCPELPSWGRCSRRLH

SEQ ID NO: 12412 - protein, 94 aa, Homo sapiens
  MOD_RES (13)..(13): Selenocysteine
  MOD_RES (24)..(24): Selenocysteine
  MOD_RES (29)..(29): Selenocysteine
  MOD_RES (48)..(48): Selenocysteine
  MOD_RES (50)..(50): Selenocysteine
  MOD_RES (71)..(71): Selenocysteine
  MOD_RES (77)..(77): Selenocysteine
MVKLNSNPSEKGXKPPSVEDGFQXVPLIXPLEVNHLQLPAPEKVIVKXRXEYQPEQKNKGKFRVPKIAEFXCLPHSXGPVKVDQDPAAYKYLQE

SEQ ID NO: 12413 - protein, 99 aa, Homo sapiens
  MOD_RES (13)..(13): Selenocysteine
  MOD_RES (24)..(24): Selenocysteine
  MOD_RES (29)..(29): Selenocysteine
  MOD_RES (48)..(48): Selenocysteine
  MOD_RES (50)..(50): Selenocysteine
  MOD_RES (71)..(71): Selenocysteine
  MOD_RES (75)..(75): Selenocysteine
  MOD_RES (80)..(80): Selenocysteine
MVKLNSNPSEKGXKPPSVEDGFQXVPLIXPLEVNHLQLPAPEKVIVKXRXEYQPEQKNKGKFRVPKIAEFXVHRXWHFSXSCRGAGMLDQFQSMKCGWK

SEQ ID NO: 12414 - protein, 146 aa, Homo sapiens
  MOD_RES (13)..(13): Selenocysteine
  MOD_RES (24)..(24): Selenocysteine
  MOD_RES (29)..(29): Selenocysteine
  MOD_RES (48)..(48): Selenocysteine
  MOD_RES (50)..(50): Selenocysteine
  MOD_RES (71)..(71): Selenocysteine
  MOD_RES (73)..(73): Selenocysteine
  MOD_RES (96)..(96): Selenocysteine
  MOD_RES (134)..(134): Selenocysteine
  MOD_RES (146)..(146): Selenocysteine
MVKLNSNPSEKGXKPPSVEDGFQXVPLIXPLEVNHLQLPAPEKVIVKXRXEYQPEQKNKGKFRVPKIAEFXVXILVSLALAFLACIVFLVVYKAFXYDHSCPEGFVYKHKRCIPASLDAYYSSQDPNSRSRFYXVISHYSVAKQSX

SEQ ID NO: 12415 - protein, 159 aa, Homo sapiens
  MOD_RES (13)..(13): Selenocysteine
  MOD_RES (24)..(24): Selenocysteine
  MOD_RES (29)..(29): Selenocysteine
  MOD_RES (48)..(48): Selenocysteine
  MOD_RES (50)..(50): Selenocysteine
  MOD_RES (71)..(71): Selenocysteine
  MOD_RES (73)..(73): Selenocysteine
  MOD_RES (96)..(96): Selenocysteine
  MOD_RES (134)..(134): Selenocysteine
  MOD_RES (146)..(146): Selenocysteine
MVKLNSNPSEKGXKPPSVEDGFQXVPLIXPLEVNHLQLPAPEKVIVKXRXEYQPEQKNKGKFRVPKIAEFXVXILVSLALAFLACIVFLVVYKAFXYDHSCPEGFVYKHKRCIPASLDAYYSSQDPNSRSRFYXVISHYSVAKQSXARAIGPWLSAAAV

SEQ ID NO: 12416 - protein, 171 aa, Homo sapiens
  MOD_RES (13)..(13): Selenocysteine
  MOD_RES (24)..(24): Selenocysteine
  MOD_RES (29)..(29): Selenocysteine
  MOD_RES (48)..(48): Selenocysteine
  MOD_RES (50)..(50): Selenocysteine
  MOD_RES (71)..(71): Selenocysteine
  MOD_RES (73)..(73): Selenocysteine
  MOD_RES (96)..(96): Selenocysteine
  MOD_RES (134)..(134): Selenocysteine
  MOD_RES (146)..(146): Selenocysteine
  MOD_RES (168)..(168): Selenocysteine
MVKLNSNPSEKGXKPPSVEDGFQXVPLIXPLEVNHLQLPAPEKVIVKXRXEYQPEQKNKGKFRVPKIAEFXVXILVSLALAFLACIVFLVVYKAFXYDHSCPEGFVYKHKRCIPASLDAYYSSQDPNSRSRFYXVISHYSVAKQSXARAIGPWLSAAAVIHEPKPPKXQGH

SEQ ID NO: 12417 - protein, 190 aa, Homo sapiens
  MOD_RES (6)..(6): Selenocysteine
  MOD_RES (12)..(12): Selenocysteine
  MOD_RES (36)..(36): Selenocysteine
  MOD_RES (75)..(75): Selenocysteine
  MOD_RES (133)..(133): Selenocysteine
  MOD_RES (137)..(137): Selenocysteine
  MOD_RES (149)..(149): Selenocysteine
  MOD_RES (173)..(173): Selenocysteine
  MOD_RES (180)..(180): Selenocysteine
  MOD_RES (188)..(188): Selenocysteine
MPDELXEPGRAXPARASSFLIENLLAAEAKGAGRAXQGDGSREDEEEDDDDPEDEDAEQARRRRLQRRRQLLAGXGPGGEARARALLGPGALGLGPRPPPGPGPPFALGCGGAARWYPRAHGGYGGGLSPDSXQKIXPQPVQCGEGQVXRADKYKVNRSDSGSLWMAEEAAGXGWCSHNXVEPLSAWXPE
